United States Patent Application Publication US 2021/0368750 A1 - sequence listing, part 2

SEQ ID NO: 11965 - DNA, 201 bp, Bos taurus
tgccgagggttcaccagtaccaaggcaggagactgccagctctaggctggcccaggtgagttaaggcaggacacggtggggaaggcccctacctgcctccggagtctgggcaaagactaaggaggcttccccaagtgtgagacagaggggaggcacagccttcgagaatgccaccagaatacagaggggcagggccctgtc

SEQ ID NO: 11966 - DNA, 201 bp, Bos taurus
ccccttcccatgagagacaccttttcatgtttctcctggcccagggtgtccgctcccggaagctgaagtgggacccccagtgttcagggcagccctgtgtgtcctgtgggctctgggccctcatgtgacttgctgggcctctggcaggtggcctcctaagtgaccagggttgcctgtatcttttaaatggccttcctcaca

SEQ ID NO: 11967 - DNA, 201 bp, Bos taurus
tggcctcattaaaggatgagctccaaagattagaaactataaggtctgcagccattgaagttgggatcctaagtgaaactgtgaaacttagcagaaccctggggccctcctggacactagaccttttttcccgtcccccctttttgttttcaggaaaaaagctttcagtctcctagattttacctaaatccccaagggcag

SEQ ID NO: 11968 - DNA, 201 bp, Bos taurus
atggacctggttacagtccatgggacctcaaagagtcagacacagctgagcgtgcacacatgcatgcatgcgcacacacacactttttagttcacagctcggcattggtagcgctatgttgtattttaaattatctgcacacacgtgtgacatgactgcctttctgtaggtatgagcttattgcaagcagtagttaacttg

SEQ ID NO: 11969 - DNA, 201 bp, Bos taurus
aaggcatactctctcaacacacgtagttccccccccgcccgcccccagaggtccctcctcttaaaatcacactgcccagtaagcaggccaatttgccaaataatcctttggctgagtgaccggtttgccagactgctgaggatgtttttgatgttttcctttcatctcacagccagaacccatgaacctgtgggcccagct

SEQ ID NO: 11970 - DNA, 201 bp, Bos taurus
atcctctttcataaacaataactggaacatgtcctcaggggtttgaataagatattgatggaaatgtttcatttgtctacactggaaaaaagggatttttgtttttgcttggtgataaagcatgaatcttatttttggacataatccatagtgttctaggagtcactagttatgccaatttttaaaatttatcagtgtaag

SEQ ID NO: 11971 - DNA, 201 bp, Bos taurus
gtgctgatgtgattgccagctttaattcttcaagggctgttgctgtctctcagtccaatttagtgaatctccttttgatccagttaggagttcatataacgtctgggccatcttggaatagcccagaatccaagtcctacaaaacccagtggctcccaagaactctcggacctgtcctctggttcttggttgtgggattct

SEQ ID NO: 11972 - DNA, 201 bp, Bos taurus
gggaggaagggagagagcctctgtttgagggttcagctgtgtgtcaggccctgaagcaagtcttctcgatcaataacaaacgatcataaatgaagcttgccaggtgatgaatatatgctaggccctgggttaagtactctgtgcccattgaattcatgccctattttacagaagaagaaaaaggtaagtaacctattcagt

SEQ ID NO: 11973 - DNA, 201 bp, Bos taurus
agcatgtgctgagctcgttacttgcagtatgacctttagttcttcaataaccccctgaggatgtgctgttttttcctgtacagaccagaagcagaggccacgctaatcagtactatctctctagagcctgcattctcaatggggtgaagtcacccccaggggggtaaaaattggcccttgggaggacaggggtaaaaaaaa

SEQ ID NO: 11974 - DNA, 201 bp, Bos taurus
gggggtggggagtgatcagtattttaactaattggcctcctaacagttacaagaaccaaaatgaaagctagagaaagtaagaaaacaagattctctagtctgaacagaggccataacgcattcttttgcttatcttcaaacaagagctaaagcagacacgtaagagtttttaatttgccagatattcttttaatgagaatt

SEQ ID NO: 11975 - DNA, 201 bp, Bos taurus
gatttatttatttgtgtgtctatggccgtgctgagttttcagtgctgcaccggcttttctctggttgcagtgagaggcctactcaggctgctcactagttgtggtgtgcgggcttctcgtttgttgcggagcacgggctctagggtgcatgggcctcagtggctgcagctcctggggctctagagctcaggctcagtagtt

SEQ ID NO: 11976 - DNA, 201 bp, Bos taurus
gcatggtttttgctgccagaaactgagacgccaaaggcactgcctccagagatgccctcctggcttgtccttggtgacaagtggagagcctgatcctgacaatgggaggtgaggcccctttagctccccaaggaaggagcggctgcactgctggccttgctgggaacatgccgccactggagggaaacgtgttgatttcca

SEQ ID NO: 11977 - DNA, 201 bp, Bos taurus
acaggatcttgtggcctctcctccagtgtctggcagctttgggtgacagggaccgactgagccttctcccctaaacatcccctggatgcttcccctaaacggattcagctgggtggcccttgattcagatgacttcagcatatttgcggggcttataccaaccccctgggttttcctggtgacttagctggtaaagaatcc

SEQ ID NO: 11978 - DNA, 201 bp, Bos taurus
attgattacagcttcctctctgtacccaccctatgacaactctggatggagttctggatttttgacgcatccattcattcactcattgatttcgttgaacaaagtttgagggacttttatggatcaagccttgttccatatcttggagattctgcatcaactaagctggaaaagattcttgtcttttcaagttcagatttg

SEQ ID NO: 11979 - DNA, 201 bp, Bos taurus
tgggcaggttctcctcatgagataccaaagtagtatcaaagtggactatgggcccagctctgtgaaaagagaacttctacggccaatagtttcaaagttttagagtttacccttattggaagagttgagatcatctcctcacccttgagcagctcgctgtggccaaggcgagggaatgtgatgattggctaagcctacctt

SEQ ID NO: 11980 - DNA, 201 bp, Bos taurus
tcccctctttgcatggcctcagtgacacaatcgctctaagggtctgaaggcaagggcagtgcttgctctctgggggaggcagggctggaagggggcacacgggagctactggagggccagtacaggtcctccttcttggtctggttgtgttccatttccagaaattcctcaagctgtacatttgcagtttgtgcattttcc

SEQ ID NO: 11981 - DNA, 201 bp, Bos taurus
ccctgggaatatcttgtccaagcagttaatccctgcccctcctcccacccactgccctacctccggcatcagcaaaaagcctgtctaccttccagaggtgcacacgtgctccctgagtgggcccccaccgggacccctattgggccactggaccagactggggtccgcaggttgccttaattatcagtcactccacctcct

SEQ ID NO: 11982 - DNA, 201 bp, Bos taurus
taggaaaaactcccttcaggttatatttagaaaggggtggagggggaaaggcttcctctagtaattttcattcagttgcacacgactgcctgtccccacctacccgcaggccagcgccacgggggcaggcaaccgcctctccccgagcatgggttaaaatcaagcccagcctctgcccaaccctgattatgcccacgttta

SEQ ID NO: 11983 - DNA, 201 bp, Bos taurus
gctgtcatgttttgtctccgacggccgctggggaggagaagatggagaagcgaaccagaggtaggcagtggagggcagccatggggtggcatggggagctcgataaatccagctaatctgtggccagcactgaggcctggcgctcctaattgcccctggtccaggagcagcactcagggtgaggatgctggggcgcaaatc

SEQ ID NO: 11984 - DNA, 201 bp, Bos taurus
ggctgagctgctacacacgcccggcttggccagccagggccgggcgccccgcagcatccattgtcgcactctcaaccaggcccaaaggctcagagagctttcaggtgacccatggtgcagctcctggggaggggaaccaaaattcacagccaggcccctccctgcccccaggccctgaggaaggtgagaaaaagatggagg

SEQ ID NO: 11985 - DNA, 201 bp, Bos taurus
ggggcctacagagcgtttcagtaaaacacaggagcctcaagcttgcaggacactgagaggacagacccactgcaatcaggatccctaatccccgagggccggcaggcacgtaaatggatgacgtgagcagaggggctgtgatgaatataccccacctgttggagcagcctccacccccacaccaccgggactgtcaccaag

SEQ ID NO: 11986 - DNA, 201 bp, Bos taurus
agccctgttcctagcgcagcgcactgcctgtaaaatacattcttaaaacgcctgtcgtattttatctgatgctcaaaattgattttctttttggatgacatgcaatatgaaccggccgctcgatgatctctttatcagccatagactgcggggtgacactcatcctacacgagtgaacactgcgagcaggcccagatgcgg

SEQ ID NO: 11987 - DNA, 201 bp, Bos taurus
tagaaggttcctgaggcccagccccctccccagcttgcgtccaccgcctgtctgacctgtcctccccaggctccgccagcggcagccagcatgcctcctacgtgttctctcgtgccagggccttgccccttgctgtttccccggtcctgaacacacacccccgaaacccatgcgggcagctcccttgctcccatccagagc

SEQ ID NO: 11988 - DNA, 201 bp, Bos taurus
tcctcttctagccaggtgagaggagcactctatttaattttattgagacaggtcttttttttaaatattgattttttattttttgacagtgccatgggacgtgtggaatcttagttccctgaccagggattgaacctgcacccccagcattagaagcatggagccttagccactagactgtcagggaagtcccaagaggaa

SEQ ID NO: 11989 - DNA, 201 bp, Bos taurus
aaggccacagacagagtgggctgtgggggcaccactatggttatcctgagacatagcatggcggggctggggtgtgggcaccacttagttgtaagggaaaccaaggccaaggttaaataactgatcaaagggcatagagttgggatccaaagccaggttcgcttgagtccagcgtctatgctgttcaacctgttgcctccc

SEQ ID NO: 11990 - DNA, 201 bp, Bos taurus
agctctcctagaccttggcagtcaggttcactgcctatggagaccagacaggtaatgaaagaagtgttgaggtgataaacgggatgggagaagcaggcccggaggagtccggtttttctcgaagttaggaatttccaagagaagtgagatttcccaaatttgttaaaaatctggccaactttgttaaaaatctggccacca

SEQ ID NO: 11991 - DNA, 201 bp, Bos taurus
ggcctgtgttagaagtggagaggcttgggatcatttccttatgcgacatcaggttcctctaggaatgctcagcccagaacgggcaggtggcagtctggagtaccctggaaactggctgcagggaaataaggaggatgtggatgctgatggtctgattcccctccacagcagggaccctttcccagcccctcccacaaaggc

SEQ ID NO: 11992 - DNA, 201 bp, Bos taurus
ttgtctctaaaatagcctattgtctgttgaccatgatttgttctttctctcacacacaccactactttgtccagttggtgaccaggctttagacctggcccctcttggacccagcactctgtcaggaagtgaacatttgttacctgtgtgagtaagtcaccccatgactctcctcttcaaagtctttctgaagagttggcc

SEQ ID NO: 11993 - DNA, 201 bp, Bos taurus
atcccactggagagagtagatttgttattttctgtgttacgttgttaattgatttgataattgcctgggagacacacacagacatacacatacacaaaacaaatgtcaggccacacacttttctctagacagtaagatgaagatgttttagttattggaacgcagatgtcacctagaagaataagaggaggtaccgggaaa

SEQ ID NO: 11994 - DNA, 201 bp, Bos taurus
ctggttggacatactcaggccactctccagaaccactgaagcagaatctgcatttgaaggagattccaaggtggaccgagactaaataaaaatgctctccacatctgtatcatggccatgcttaccccagcatccccagctctgaagagggaatatagaggaggaagaatgagctgtgcagatcagaaagggccttcaaaa

SEQ ID NO: 11995 - DNA, 201 bp, Bos taurus
tttgataagaagaaaaaatcataactaactaaaagaaaaaaaaaaaaaaaaaaacctgtcttgagaactagagaagatcagacaaagtaggaatgagttaatggaggtaattagagagaagccagccatgctgacagaaggcagcctaacacccagagccttaaaatcctgggctggcctgcttgcttgctcccctgcctg

SEQ ID NO: 11996 - DNA, 201 bp, Bos taurus
aaaagaaataattcaatggcacttgttaagtcacagtaaggaagacttcagtcaaagggtggggaggctatctcagtagttataaccacaggcatgggatctcgcaaagggcagagagattacactcaactctgaatatagcataggcaagaggaaatttatgggcaagttcttgcggtcagtggatggaaaattactaag

SEQ ID NO: 11997 - DNA, 201 bp, Bos taurus
tgggcatcttttatataatgatagcaacttgtacattagatgtgcttggtctcttttggtttcttgaaaaggactgaaatgagagagaagagtagccattaatgtgaatggaaaaaacagctactttctttgatgtcactgtaaaaaccagaaagatctctgcctgtcccccaaagatctgacattcacatgcaaatttct

SEQ ID NO: 11998 - DNA, 201 bp, Bos taurus
gaacttctatagcttctatctatctccatccgagacatgcctcccacagcctttagtgtcagcctgggaaagcaaacaagtccatgaggctttgttgccatacatctgtggacggattcaagttccttctccatcttccctccatctcctgcattccactaactgagtacattgagtaaatttctcagacttctgaaggag

SEQ ID NO: 11999 - DNA, 201 bp, Bos taurus
attgttaacgacacgccattgttgtaatttgaacttggtaaatgcaattttttggctgtttgctctctcttggttttctctcctgggttcctggacccctatgttccttggcaggggtgtgtgtggggggtgtatttccttttcaacaccacaaataccatctctgctattgggacacaacagttaaataatgtgaaattg

SEQ ID NO: 12000 - DNA, 201 bp, Bos taurus
ctctacttattttttcaattattataactagagctttcaagttaaagaaaacaatgctgttttcttcccaaagccagcctttccctgacacaaagtaacagtgagatactaaacattgccagcaattgttatgaaaatgcatttctcttgtatcctgttgtcatggcagctaaagatcaagacatgcctgctacatacagc

SEQ ID NO: 12001 - DNA, 201 bp, Bos taurus
gtgtgttggcaagtttcatgcctgacacacaggaggaggtcaaagaagatttattgaaagatttattcattcaaatcttttctgcagaagaggagtacctgtggttctaaaataattaaaatgcattttcaactctaaaaggtgtgtggaaatgatcattattttggtaatgcatttagtaggctttaagctgtagaattt

SEQ ID NO: 12002 - DNA, 201 bp, Bos taurus
aatgtgacctcgaaaaatcaccatattgagtgaaatctgggaggtgcccaggatgtttagttcgcaattctgcatctggttaaagtacttagaagcttagtcatatactctcagtatctttagcatcaccttcatgtatgctatgtcactcttgatccattatcatactcttggggaatttcaggattcccatagtctata

SEQ ID NO: 12003 - DNA, 201 bp, Bos taurus
ctgggatttactgtgctccggccaatcaaggagatgctgtttgcggggaaaaagcaccaaatctaatgggcaccctgcctcctgccatgcaggggtcacgaggcctctcgggggagcctgagagaatcaatcacccaggacccatcacaccagaacctggttcctgggaggcaggtctttacaactgagtcttccatgtgg

SEQ ID NO: 12004 - DNA, 201 bp, Bos taurus
tctgctctgcgatgttcctcgcaaacctgatacctgtctcccatttggtggatttgagtcacggtgtttttgtttaagacttcaactgcagctccttctcaatctttgtttcatgtatgtaatatacttaaaatgcactaaatgacagtttataatatcattatctacagttaaagatattataacttcaaaaatgaaaag

SEQ ID NO: 12005 - DNA, 201 bp, Bos taurus
aggccagagtctgtgtccctgttagaggttggggtcagagggcgacaccgtggacaggcgaggtggagggacaaacgtggcccagggagccctcgtcgaacgcagggcatcttggcggctaatgactcggggtggagtcggggggtcttggctttggaatcggggcgggtgggaactccagcggcctggctgccaagcaac

SEQ ID NO: 12006 - DNA, 201 bp, Bos taurus
ctccgtgagccagaatgcaagcataaaataaaataaatacctttggataaaggagatggcacagcctctctctctaaccgaggtctttgccaatgacaccctggcaaccggacatggcaaaatggagtttttaaagattaatttttaaagtgcaagacaaattccattatatgaagtcctcccatcattttgatttcacaa

SEQ ID NO: 12007 - DNA, 201 bp, Bos taurus
ctaattagagggatgggcagattttcatctagattgattttttaataaatattgacttaaaatgccataatctcatcatattctttcattttctttgtaccaaaaatcaaacaaatggaagaattagcaagcagaaggaatcgtgggacttcaaaagcttctgctggttcagacacacaaaactatgctgtacagaagccc

SEQ ID NO: 12008 - DNA, 201 bp, Bos taurus
agaagtcggtggtagaaggaacattggagatcacttaggcaatcctcctaatttctcagatggacagctgagtcccgcaaggactaagtattttgcttgcgatagagctggtatgaaaactggggtggggtggagggcacgtggggtcctgcctcccatttctttcaacaaggaacaactctgtttttttttttttttttc

SEQ ID NO: 12009 - DNA, 201 bp, Bos taurus
gtgggcagttgtggacgggaagagcttttcataaggggagcacggggagcttgtggcaggggggcacttataactgtggcaaatgggcctcagctaggaacagcaccagctatttacatatacatctaaaatagcacctcccttccccaatttcctccttccttgattcaccatagacaacagggttttcatcttccaggc

SEQ ID NO: 12010 - DNA, 201 bp, Bos taurus
cacagactgggcccaacctgcctttcacaattcctggggcacacactgctcttcttcacactgaagaagaccagaccctgccaaaatggctcatcttgaccgtaggaggcccccctcaccctgcaaccttactttgattcaatgatacccaagtatctctcaccctagggcagaatgctaacacaggagtccatgtgcctc

SEQ ID NO: 12011 - DNA, 201 bp, Bos taurus
aggtttaatccctggtgggataactaagacctaagactccacaagccctgcagctttaaaaaaaaaaaggaaatcgaaacaggaaacagagtggagagccctggtggccttggaccaggctcactggacattgttgaagacagcaagaccagtttccgaaaccacccacaggtaagagggggatcctaagttctttccagg

SEQ ID NO: 12012 - DNA, 201 bp, Bos taurus
tcatttgtgttgttctaaaaccacttgcaaaaagtcaatcaaacaccaatatgacattcctccacatacatgttgctttcctggccacaaagcagtccaccgttagagcctttgttttgctttgtttcatctattcattaacaatcatatgtggggcacctactagtgcccaggcaaagttctgagtatgtgggaaaatgg

SEQ ID NO: 12013 - DNA, 201 bp, Bos taurus
caagtgagatgatatatacaaaacgcctggcacacagcaggcactcagtagacatgagtttctccccgaccccatcttcatctcccaggcctccacaaggacagtgactaaatctgattccatcacacaagtgcccgatctgcagtgggtccccaggaaatattttccaggtgagttattcactgaatgaatatagtgatg

SEQ ID NO: 12014 - DNA, 201 bp, Bos taurus
cccggaaactctgaggctccccactctgggaaggatggtccccagtggcacttagaaacagcagagatctgcctccttcttgccgccccaatcaggccacgtcagctttgccatctcctcgttctggctccaccaccacgaaatgacccacatttctctcgggaagttatctctcatgcctgtggtagagccagagagaga

SEQ ID NO: 12015 - DNA, 201 bp, Bos taurus
ttgcctagagaatcctatggacagaggagcctggcaggctacagtccacagggttgcaaagagtcggacacgactcacatgaaacgacagagcacacacgtgctaggcacctcacagaaaggcagtgggctgtagaattcgaccctgggtttgtcttttttcaaagcacgtgctcttaacttcccactaagcttcagaatg

SEQ ID NO: 12016 - DNA, 201 bp, Bos taurus
aaaccccttcctcagatgaggaaactgaggccaaatgacagggactgactcagggtcatagagaacccgtggtgaagataaatctaactctccactcagcgtccaaggccccctttcgctctgactcctctccttcttcctctgggaaaccccctccctgccttctttttgctcctgggtgacagctgctcctacccacag

SEQ ID NO: 12017 - DNA, 201 bp, Bos taurus
agaacaaaatccctgttgtaatggaggtctgtgtgataataaagcccacgttatttgccatttttctaagggcagaggaactgggaagcagaagggcccaattcttgccttaaagtggtcaggagtccaccttgggaagatgccacagcttagaatagacatcaccaggattcagactcaggttgtcccatctgggggcct

SEQ ID NO: 12018 - DNA, 201 bp, Bos taurus
gtctggggatattggagcattactctaaggcctttggacagccctttcctttccaaataacaccagtgtctgagcctcacttggctccccagagccacgccgcaaggcaggtggggcagaaatgggctctccattttctaggtgagtcagctgagaaaggtaactttctggcctcaaggtcaatgaggtttacgcatccaa

SEQ ID NO: 12019 - DNA, 201 bp, Bos taurus
tctgtccccggccagtgtaaaacggctacctggtctcactgcaaggaaagcagtgcagtggaggattagtatgtgcatttctgtatcctctggaataagcagggaaggcctaatgacctctcttagactgtcatcatccagaatgctgcctagcctggacctccctccatcaggaccagactcctcatctcagcttccctg

SEQ ID NO: 12020 - DNA, 201 bp, Bos taurus
ttctggccaggaaagcccctctcaggagttccaaggctttgttcagaaccttcttgaacatggaggcagtgccagtgaggctttttccaaggtcctccacgcctgtggtcttgcacctggccctgctggtccccagggagaagtggacagatcaattgggtcctcatgtctgcctccctgccagagaagagaccactgtga

SEQ ID NO: 12021 - DNA, 201 bp, Bos taurus
gccaccccactaaacattagaaggggcccaggactagcctcctctggtcttgccccctcctcctcatcctgaaaggccaaaaagccattctggccacaaccagggaaggtagttcttcctacttgtaggttagtggggtctccattcctcaaccacaaggatcgctggggccacagtctgagccatggagccatgtttgag

SEQ ID NO: 12022 - DNA, 201 bp, Bos taurus
tgacttgtatgtcagcttcaggagaccagaggtttgttttacgtttactgccatatctctactactagaatagggcctgacacatagttcagttcagttccgtctctcagtcttgtccagctttttgtgaccccgtggattgcagcacaccaggcctccctgtccatcaccaagtcccagagtttactcaaactcatgtcc

SEQ ID NO: 12023 - DNA, 201 bp, Bos taurus
agggagcaaacctgggtctcccgtgttgcaggcagattctttactgtctgagccaccagagaaccctctggtacatcaaggctcagttcaaatgctctctcaggagacctttcctctcccatgtctgttctttaactcttattatattctatgtttatataaatcctctattaagtgagagcaaaggctgcatcttaacca

SEQ ID NO: 12024 - DNA, 201 bp, Bos taurus
tgtgctttttttatttggagttgatgccgtcaccaacttttctgtttggccttctggaggagtcctaagtgtgagggtgatctgcagcacggcagtggcccccgtccttgtgttttcacggcaggtcaccgggttcattgcccagagcctgcctcaccccgtgacctcagggagtaactgttgggagtgaccgcttctgtg

SEQ ID NO: 12025 - DNA, 201 bp, Bos taurus
ccacccgcctctcgagctcctcaggtttaccagggggctgtcacatcttcccatctgatgctcctgggaagcatcacagaagcaccagaagccacacagacaggcaggggcagggcctcactgggaccttaggcatcatggctcctgccatgccatcacttgccctggagacagacccggcctgtgcatttggtcctccaa

SEQ ID NO: 12026 - DNA, 201 bp, Bos taurus
aacaacaatatgctctaaatgagccgaggggaaatggggtgtgggcagaggctgtgagagcgggggctgctcactcaggccgccctccaggtgccctagctctctctacatccttgtggtctctgtgggcatcagcttcctcatctgtaaacgggccaggctgcatgctcttctaagctccatcttgtctaagagtaagtc

SEQ ID NO: 12027 - DNA, 201 bp, Bos taurus
gatctctagagtagaggaattttataatcctctagcctgtaattgatatctccagggagatacttctcccacatggaaatgtgcacctctggcctcaactctgtccacagtgctcacgggctcttcccacagattggcagggttctgggaatttctccatctggacctgtctattgtgggggcacagcagtctcagaatgg

SEQ ID NO: 12028 - DNA, 201 bp, Bos taurus
acagcaaggggatgacttcatggaggatctggggaccctgatggcccaatccctctcctctgtctaattcctgcatgccgccagcgaggcccaagggaatctgcatccctcttctgggagaggacagggagccagtttaaggcttgtgagctgagcacagaggatgctgttcatgtcacaagggacactgggccatcactg

SEQ ID NO: 12029 - DNA, 201 bp, Bos taurus
gcccagggtaactgtagggagttgcttttccccaggcttgtcccctgcgtgttcagcatcagagggggagagaacactgggccggcacaccctatcccctcgcagtgacattagtgagggctcaggttcctgccctgtggtgtaactggggccaccggggcccacagtgatgatgttcacaccactgtggccaggctgagg

SEQ ID NO: 12030 - DNA, 201 bp, Bos taurus
tctgggctctggtttccttatctgttaaaatgggtagttttgaggagaatgaaagctcttggcagtgtgcctggaagctgctaacaataatagaggccaaggttataatcaccattgaacagataaggaaacagaatccttcccagacttcagacttccaggaggggtcaagccaagccggcttcacctgtgggtgttagg

SEQ ID NO: 12031 - DNA, 201 bp, Bos taurus
cctcaggctgtgaggtctaagctcttcatacatttatgaggaaagggaggccctgagagacatgggacagccccacgcacaggggcagtcagcgccctacgtggtcgcctctgcagcctgggcccgaaccctgagcccctcctaggcacccctcatccccagggttacgtggatgcagatggtctgaggtggggagcaaag

SEQ ID NO: 12032 - DNA, 201 bp, Bos taurus
ccagtgcccacctctcccaggcaggggcacagcttggtcagcgggctgactggagagcacagcactgctttccagaagctcaggcctggggacttccttgtaccccgctatgtagctttattggccttcctcttccctgcagcttgatttatacgagcaggtaagggatggacttcaccggcagcagcccctggcctcctg

SEQ ID NO: 12033 - DNA, 201 bp, Bos taurus
ctggccctcccagttccctctgtgtggtcagaaggttgcctggggtaggggtaggggtggtctagtccaccctactggggctggagtttctgggagctccgtatgacagaggcccgtctggctggctacatctctgagtgacctggggaagtctaccccactacctggagcctcagtttcctgttctgtaaaatggggaca

SEQ ID NO: 12034 - DNA, 201 bp, Bos taurus
actttcctgccccttggggagatgagatagaagaggaaattggggcggggccagaaagaccatgcaggcacctcccatatccactcataaacctgtgcccacccccaccccaacagagagggcaggcccttgaccgctaagggctgggtaggggaagacctccacccactgggtcctcagctgctctgagaacaccatgac

SEQ ID NO: 12035 - DNA, 201 bp, Bos taurus
ggctgttacttgttgaactgagtgcccccgcaaattcatatgtcgcagtcctagcacccagctcctcagaatgtggccttatttggaaaaagggtcatcagaggtgtaaagaattaagtgaagatgaggtcgtgctggagttgggggagcccctaacccaataggactggtgtcctcataaaggggcctttggatacaaag

SEQ ID NO: 12036 - DNA, 201 bp, Bos taurus
aggggctctgtgtggaggagagtgcgttactgtgtttctccggacttccaggagcgctccgccgatgtcccggcaccggagagagatgagaagttgaccgagttttctcgcctccacaaaagcagctttcatcccacaatagactccagattggaggggagatttcaccacacagcggccagagacaagaaactctgttga

SEQ ID NO: 12037 - DNA, 201 bp, Bos taurus
acggccaggcagattggtctgagggtcatgaagaaaggaagtaaaaatcaccagctgtagtttctttttgaggccctctaggaaaaccatgaccacagtaaacaagtgactacagttagggtcagctgtctactttccctgtgcgctacgcttatgtgaagtagaaaccaacactggagactggagaaataacagtatcat

SEQ ID NO: 12038 - DNA, 201 bp, Bos taurus
atgtaaatgaagagataagaaattcctctgtcattcatcatccaaccattctcatatgttggaaagcactggatggaaacattcaccaaagcagcaggccgttcctgtcctcaaggaacgtactctgtctcggtcaccgtgtgcacatcaacacagaagttccttcctgcggctgaaatccagtaggccaagatgaagagc

SEQ ID NO: 12039 - DNA, 201 bp, Bos taurus
ttggcttcttttagtttagttttgttttttttttcccctattataaacggcactggggtgagctttcttagagataaatcattagatgctagtttccctaaggaaagcatatggtttccttaggaaatttctcccagggagaggactactgagtccaagagtaagaaccttttaaatgattctaattcagttctgtaaagc

SEQ ID NO: 12040 - DNA, 201 bp, Bos taurus
tctccatcttctgactcttatcttcagaagacagtggctagttggcttccctcttctgactgagcacctcttctggccatttcctgttttttttttttttccaccctcttacctcccactcccaaccctactattaatggcctggactcctgaatcctgcatttcagattttggtcctcatctgctaattagctgggaaag

SEQ ID NO: 12041 - DNA, 201 bp, Bos taurus
ctcattggcaggtggattcttcaccactagcgccacctgggaagcccctaatggtggacacatgtcattatattatgtgtgatgtatacatatttaggttgcatgtattataaggttgcagatagaataggtggcagagatcagacttaaacccatgactttctgactacaaagtctacgatcttttttctgaaccaggct

SEQ ID NO: 12042 - DNA, 201 bp, Bos taurus
ttagaggttgagtcaggctggaggggttggtgccacatcactgagatggccacacccgttcccaagtgtgtacagggccaggggctccagcccaggttgtatctgccctggagctaacttcaggttgtgtgcagggacatgagagctggccatgctcgcctctgtcctggtcagaggcaagactggggtttgggtggcttt

SEQ ID NO: 12043 - DNA, 201 bp, Bos taurus
gactccttttacctagacaagttatatctatgtcctactgcagtgagaacacgtgccttagctcctatcattcagatatgagcatggccacctgaagaaaggaggaaagcagttcagacctgaagatagcatggtggtggctctggctgcatgccctgggtgggtcccaatgtttccaaggcccatgtccattagccacat

SEQ ID NO: 12044 - DNA, 201 bp, Bos taurus
tctccggccaagagggatgggaactcatgcagccaagagaaacaacatgtggtgaacgaaacatatcctttagtcttcatgtgggattctagttgacctcttttggccttagttctcaaatatcttagaggatttacagtagaggaagcttaagaggtaagatatgggcctcttgttaataaggctcatgaaagttagaac

SEQ ID NO: 12045 - DNA, 201 bp, Bos taurus
attttggtgttaatctgttccttcttttcctagcacttataatttcttagcatctttagtgtgcctatatctagtaactaacatttaaatttgatgctgagagcatttagaaactaagaaaccaaatgatacagtgaatatccaagagactcccctttaagaaagtgtgagataatcgaaaatattcatactggtctctgc

SEQ ID NO: 12046 - DNA, 201 bp, Bos taurus
tatgagtatggcttatgtatttattgagtcgccatggggaaaggaggctctcttgtttgtgtgtgtgtatgtttgtgtagttatttaagatgtactcaaacactgtataggagtcctctgataaatccagttaggtattcaccatctctctagaattagaggttgtgcaaaacacatatcattaaatattcattcatttga

SEQ ID NO: 12047 - DNA, 201 bp, Bos taurus
agagttattaataatagtatctacctcttgggcttatatttagcatgaaaagggagatatgaagcccttagcattaaacttggcccatataaaaggctacgcattaaatattatcattaatattagaatattatatttggcactgttttttctggccttgttagtcatgtctctgagttttcctggatttaaagcagtata

SEQ ID NO: 12048 - DNA, 201 bp, Bos taurus
ctgaagaaaataactattggttttcttatttagaaagtgctacactgttccgatgtgttcgaaaatgacaaagtacctgggcccttcatcttcttccttcactgaagctaaaagggagagaataaataacagctgggagaaaagatcaatgaaggcctcgcctgcaataacagatagaaagtacctggcaaagggaaacca

SEQ ID NO: 12049 - DNA, 201 bp, Bos taurus
tctggcccccaacagaggagcctggcgggctatggtccatggggtcccaaagagtcagacatgactgagcacgcatgcacaaatagagttcatgatcttcagtggccctggcctgcatcatcttcaaggagggttttggttcctgggattgaggttgggtcatggcagtgagagcatgaaatcctagccacggatcagtgg

SEQ ID NO: 12050 - DNA, 201 bp, Bos taurus
taatatatctctggtcactaatatgttaataatacataagaaggcaagaaaagagaaatgagaaacaagaaacagtggaaataaacagaaaaaaaataaagtggccaatcgaagcagtaacatatcaataacttcaatgtaaatggtataaatatatcaaataaaaagcagaaattcacagtggttgaaaaagtgactcat

SEQ ID NO: 12051 - DNA, 201 bp, Bos taurus
ttgggattgtaaagagttggacatggatgtgcgactgagcacacacacattaaatcacattctttgtaattgtttgatatagagactggccctcgtttattccacctattcacacatgttgaaaatctggtgcatgaaatgtactatataaagatctgggtagcaggagaggaggacggtaggcatgagttaagaggccct

SEQ ID NO: 12052 - DNA, 201 bp, Bos taurus
actgtggctccactggccaatatgatcaatttattttatcagtaaataaagataaaatatttatcatgacctgtaactagagttaagtgaaatgaataacgggcctctcactttttgtggggccatagctagtacattgtaaataaactgatttaagtattatttatgtcccatctacctaaaaggaatatcttcagacac

SEQ ID NO: 12053 - DNA, 201 bp, Bos taurus
tgcagaactggtttgagatttataatttagatatacatgtagtaaaatgcattattccatttaattcatttcaatccaaatgtcaaaatatgacagtgttaaaaaaaaaacttgaccatctagcaaatttaaatttatttcttcttaattcttttcagttcagtcatcagcagtatcaaaatttatcatttaaatgaatga

SEQ ID NO: 12054 - DNA, 201 bp, Bos taurus
agaggaagcaagattcttaacaattcaattaatgattggctcagaagtactcatcctttacaacaatgatagtttcttcaggtattgagtatgtttgacaattagtcaaggggccatgacttagtgtcagctcttgactaataataatatttctacttattgtgaatatatttagtcagtggacaactatgagaagagtaa

SEQ ID NO: 12055 - DNA, 201 bp, Bos taurus
tgtttttgctgactgtatagagcttctccaccttaaactgcaaagaatataatcaatctaattttggtattgaccatctagtgatgtccatgtatagcatcgtcacttgtgttgatggaagttgatgtttgctatgattagtgcattcttttgataaaactctgttaacccttgtcctactttatcttgtactccaagacc

SEQ ID NO: 12056 - DNA, 201 bp, Bos taurus
cacagagtgtctcaccagctgacagttccagagtgaagattccagcatacaggcccacgagatgcacaccaggcagtggcctccacaggctagcctgtgacggctgcggcaggcagggacaccccagcagccagttcccaaatagcgtagtggctttgcctctggccataagcacattcataacagaggccctctttttgt

SEQ ID NO: 12057 - DNA, 201 bp, Bos taurus
gaatatatctccctacttagacactaattacactggcagaacctatctaatataactagtttggaagtctggagtctgttggaggcttgcaacttccagggaaaaccttggctggtaaattgcactgattttggtcaattttatctcatagccaagtagcagctgcccattctcctccctcagccacatggtaggcaggca

SEQ ID NO: 12058 - DNA, 201 bp, Bos taurus
gagatcccacatgctgcaactaagacctggcacagacaaatacataaataaatacatttttaaaaggttacttatattcttagttttgccaaggtgttatcccagaacacttgttataattttactggaaattgctagaagctgtaacaaaggcggccatcttaaaattaagttcttagaagtttttgcaatagttttgac

SEQ ID NO: 12059 - DNA, 201 bp, Bos taurus
agttggggaactaagattcctcatgccagactgtatggtcaaaaaaaaaaagaaggaaagaaacgaagaaggaccaaagtgctaacttcacaatgtagacgagccaagtttcttggcaaaactacactgaataaaataaacacactaccttatatgactgttatttatttttatggtttttatcccaagtagactatcagc

SEQ ID NO: 12060 - DNA, 201 bp, Bos taurus
aaaacccttatgatgagaagaacacagaccccatttgcaaagacttatttgcaatacattttcagagaataagcatttcaatagcaggtgaaaaataaaatagctgaaccttccacactagctgaaactcagaaaggtgtgcataactggccctcccaggaacatctcccaaatctgacttgccctttcagctatcctggg

SEQ ID NO: 12061 - DNA, 201 bp, Bos taurus
agaatacctaatggtacactgaaaccaatgggctcttacaaggcataatataaaaaagccagaactgttaacaaagaacacaaagtcatggaatttgggcgacatttttttttaaggtgaactttcactgctgtggagttaagtcacttaaattcttttcatagattttactatcttctccactcacacagcagtcaaccc

SEQ ID NO: 12062 - DNA, 201 bp, Bos taurus
cgcagaggatgttggactccagctactgtggtgggccacagatccatgcttgggctccctgccttagaagtttggagttgaattccaggaagtgggagctgcaggctcactccatgtggcctatgccctgttttgggtacaagatggtggagtagaaggatgtgtactcaccttctcctgtgagaactccaaaactgcaac

SEQ ID NO: 12063 - DNA, 201 bp, Bos taurus
acatatcagcaaactaaatgacacattcaccagagacctgccagttctgaggccgatcatcaaagatgaaaagtcaagatgtggcccagttcctggtaatcctagccccttactgaaatagttagaataatcctcccactcattagctaatgaaattacccagcccataaaaaccaatcacactatattttggggccactc

SEQ ID NO: 12064 - DNA, 201 bp, Bos taurus
ggggcaattattttaaaatataatgctcacctttccaataactttccatgtggttccctaaaattaagacacatttcatgttgactcatcaaagggccccatgacccctcctttgagacaatcctatctcaaaaagtacagttttaactcgccaacccagaacgaagagggaaaatgtcaggcctcctacatattcagaac

SEQ ID NO: 12065 - DNA, 201 bp, Bos taurus
ttcctgaaccagggactgaatccaggtctcctgcattgcaggcagatttttactgtctgagccaccaaggaaacccataggccataattaaatccaccctactcccagaaaaatttcttgttggaaatacatccttctttgactaattcatatacaaaatggccatgaaaatgtggcccataaaaggatttgatctaatct

SEQ ID NO: 12066 - DNA, 201 bp, Bos taurus
ggttcttattttgaactagctctacagccctgcccactggaggccatgagatttgttttatctacaccactgggatgctgtaaggtttatggagataatggatgtgagactgcttggtataatgcaattcagatacaaggagttgttctgcatatatatattaatttcatatttatacctcccttcaaaatgattttatat

SEQ ID NO: 12067 - DNA, 201 bp, Bos taurus
aatgatgtcagctctgagaaagtaaggccttccgttcagtgttaaggcacgactattaatgtggacagtatgggtcattgagcaagtatatatctgcaggttccagtaacttggtttctattgttaatacctcttcccgtaatttgtctcttgctccagtaattaataataagagcaaatgtcattcaattaatatttgga

SEQ ID NO: 12068 - DNA, 201 bp, Bos taurus
tctatttctttattctgtgattgggccatactttgctgtctttgcatacttcataactagttgttgaaaacaaactttcaaatattataatgtgttaactgtgcaaaacatatacttctccttcctcagggtttgtctttttgtggcttactgttttattttgtgtgtgtgtgtgtgtatgatttttttaaaaatattttt

SEQ ID NO: 12069 - DNA, 201 bp, Bos taurus
agacctgacagtttcttttgactactttctcatgtgtccttaaaatttagctgggtctgttaactggaacagagacagtttctgatgcagcctgggattccttacaacatgatcaactgataccaagggctgagcaagggaagagagagagagaagtaaggtgtggtgcctcttatgacctagctgtgaataccatacagt

SEQ ID NO: 12070 - DNA, 201 bp, Bos taurus
gactttagaagaatcaattgcagtagtgagctagttctactgaatgttgaagaaaggaggggacagctggaaagcagggataatttcaaagagatccaaggaacatctgagatcatggatgctgaaaaccaaaagtaaaaacagtgcacctcagactgggacttgaacccacagtctttttacctggtctcagaacttaat

SEQ ID NO: 12071 - DNA, 201 bp, Bos taurus
aagttcctaaaacgtccattatgtttttcttaaaataaaaatgcatattactttttctttcttactggtgagagaaactaaggtacaaaaacatgttctatttgttcaaggtcatgaagtaagcaaaaggcagtagagatagtaagcttaatctacctaccaaagggctttttttcttttacatttactctctttcttcgt

SEQ ID NO: 12072 - DNA, 201 bp, Bos taurus
gacatgaagatgtgggatttataaaaattcattctgaggctgtaaaaaggaatatcagacaaaaacctgaagtagagagaaagcagcaggtacgaagagaggactaggagaaaagggacaagaggctagggagatggaatatatatacaggaaaaaaatgtaaggataaactgatgaactttggttactaatcagacatag

SEQ ID NO: 12073 - DNA, 201 bp, Bos taurus
gcaattaaggtgttggtcaggctgcattctgactagaggcttgactgaaaacaggatcctgttttttgtttgtttgtttgaaatctcccttaagttttcagcaggattaatttctttgtgatgtgggaaatggcacttaacttctttagggcaagcaagaggctctctctgacttctctgacccaatcttagccactttga

SEQ ID NO: 12074 - DNA, 201 bp, Bos taurus
tgaataaaagccagattcagattttttttttaatttttattttatttttaaactttacaatattgtattagttttgccaaatatcgaaatgaatccttcttattcatggcacagggagagcagatccttggctcacccccttcactttccatctctagccccaccccacttctctgctaatcttcttcacgtctatacaca

SEQ ID NO: 12075 - DNA, 201 bp, Bos taurus
cctgtgctaagtgctaggacaaagtgacagaaaggcatggccatggccctcatagagtttacaggttagtagaggaagcactcattagaaactaaggtacgggggatttggtttcgttttggccagtgtgaggaaagcagttaattgtgaggttcaaattcaaatagttaaattatttttctgattgtggaaaaatgcgtg

SEQ ID NO: 12076 - DNA, 201 bp, Bos taurus
ttgcccactgacccctgacccgaaagggactttttcaaccaactgtggcaggcttgtggggacctgaaggaaatatatgaacaggatacagagtaagacaggaatttgatggtgattttcaagaaactgggtttggggcctcctttgggcaggattgctgtcataccctggtcagtagtaatggcaagaggagtctcagac

SEQ ID NO: 12077 - DNA, 201 bp, Bos taurus
caaagggtcagtatatgtttaagctcaagaaacactttgccaaatgccctccagtattaactgatactcccatcagcaaattattagagtgctcatcttattctaccctggtcagcatgagcagtagtagtattatttaaggtcctgtcacttttaatgaaaaagtcaggatgtcatcatatagttcaaaaatggaaaatg

SEQ ID NO: 12078 - DNA, 201 bp, Bos taurus
tgtcatgctatgtgagagaatttggctgagtctctagtttctgtccactttctgctcatttatttttttgtccttttgtttttatttttccccttatggtatatctttaaatgtttttggagctattgtgatgtgccaaaacctttgaaacacacggataaatagactactcgtttttaaaaggttaattaccaaaaatca

SEQ ID NO: 12079 - DNA, 201 bp, Bos taurus
caaaggacaggagccatccgaagcaccctctggcagtggttttgcagtgaatgaacagtggaagaatggacaaggcacttggcgagggccgtggagctgacttactgcatcacatcctcacgataaaggtgggagcagacttttgtccccacatgcatacacatgagaaaatgaggccaagagcgttggttggaatgactg

SEQ ID NO: 12080 - DNA, 201 bp, Bos taurus
atatggacacctggataattcacttaaaatgcaggtccccaggcccaactcacataaactgtgctacatgagatttggggtcaggctcagagttgcatctattaacaacaccccaggccatctggataatggtagtcaaaagactgtgctccaagaaacaataccacatgttcaatgctgctcttttttctcttatataat

SEQ ID NO: 12081 - DNA, 201 bp, Bos taurus
ggaatggtcaaaacttcaattgcctccttggtacctgaccccacttatcttgctgctgaacacctccaagagtaagtctcaagacccaatgagttgggagaaaaatatcctttaatatagaccaggataacatgggcttttcaccctcagtgtccttacagagagccacttccattattgctctggatttttcttaaagaa

SEQ ID NO: 12082 - DNA, 201 bp, Bos taurus
ttcagaggacaccatggtatggaatgaacatgatcatcagtaacattttagagtcagtcctctgaaaattctcaccaggcccttccttctttacgcaacatattcagcaatatttattcaacagttaacagatatctattgagtgcctactatgagccagacactgtttgaaggatcagaagctcattgaagaacaagaga

SEQ ID NO: 12083 - DNA, 201 bp, Bos taurus
agtgcagtcaaaataaaaaaagaaagaagaggaatgttgcctgagtgattgctcctctctctaccccagacgcacatgtatggcctcttgaatccttggggaggaggaaggggatctctgtatccaagtttatacccagttctcacacctgtgtgggcccaggcaccctcaacacatcatgtcaagcctgcactaagtctg

SEQ ID NO: 12084 - DNA, 201 bp, Bos taurus
tcaaggactctgcctgtagatcccacattctgtcccctcacagtctcttcccctacctgctcagaactgcagggctgctgcagatggcctgtgacctcctggactaagctaaagattccaccaggatgcccgcggcccccagcctcagctgcagacctgggcttctaccgagccccagggccctgcccaccttctctcggt

SEQ ID NO: 12085 - DNA, 201 bp, Bos taurus
taaaaaaattaagctgaggtgttttgggttttttttacattacaattaactaccagaaaaaaacctacactccttaaaggaaaatcacagaatacaatgtgccatccataatttccaatataccaaaaattactagtcatgtgaagaataagtaacatgtgacccataatcaagagaaaaatacgtctaaggaaacagacc

SEQ ID NO: 12086 - DNA, 201 bp, Bos taurus
gcagcgggcgtcttgaggataggaggagagaagtcaggaacttcttctccactgctctctgctctggttcctatttcctcctgtggctgcatctctccatcctgcgggcctctttactctcatcagtccctcactgggttctggaaacaccctcccctcttcttagtccccttggtcctgggatagcctgcttcctgtctc

SEQ ID NO: 12087 - DNA, 201 bp, Bos taurus
gtgggaattcaaggacagcaataaagagttctggagtgtggggcacgctgaggtcaagctcattagcttggtaagttgggcctgtatccctgggtgggagcgggatgtccaaagatgggaggaaggagaaggagttggctccctggggctcctgtggcctgagccctttgccatggctcaaagggcatgtctcccggcagg

SEQ ID NO: 12088 - DNA, 201 bp, Bos taurus
tcccaatgcaaggcgtctgcgtttgatccctggtcagggaactagagcccacatgccacaaccaagacccagctcagctaaataagtaaatattattttaaaagcataagataaatacgaatgtgctcataatccaatggaaaagggtggaccttcctaaacttctctgtgtagtcactcctctcaacccctggcagtggc

SEQ ID NO: 12089 - DNA, 201 bp, Bos taurus
ctgatcaggaaaaaaaagagcaaagataaaaattaccaatatcagactgagacagatgcatcaacatagcttctaaagatattcaaaagataataatgatcatgtacaacttcatacctacagattcaatgacttaggtgaatggacaagttgcttcaaagaaacaaattaccaaaactcgcccaagaagaaataaatatt

SEQ ID NO: 12090 - DNA, 201 bp, Bos taurus
tccctgtgccccatgtgggcattggatgggacccacttgagtcctaggtgctccagtcagaagcctggcctggcattactcccacttatatggcccaggtaaaaggttgtttcttccccagggagaggtggcacgaatggagccagctgttggcaggaccggtccttaaggcccacacagagcgggccaagttgctgcaca

SEQ ID NO: 12091 - DNA, 201 bp, Bos taurus
ccagtggttgggagggggagctgggcctctgaccccacagccctaactcctcaggaagccgaaggcttagggcaaaggtggagataggcagccacccccaataggctctccacctttccctgggccaggaggagaaagattccaaacctaccctcagccctgtcaggtggaagccatggagagcctcaccctcagaccagc

SEQ ID NO: 12092 - DNA, 201 bp, Bos taurus
agcagaatttgaacttaccggttttcagtgaaaagtaagtacagaagactagatgtgtgaggtctttggctggttggtagtgttcatgcagtgggatctcccaggaaaattggtatcatctgggactatgaaccaggcagtcagcaacttggattgactgaggctgtcagggcatttgctctctatcccatgcatgggcta

SEQ ID NO: 12093 - DNA, 201 bp, Bos taurus
gaggccggcagtgctggagctgaaaacacgtcttgagacaaagctgagggaagaactgagtcatggcagcaaagcccaggcttctctcctcccttcttcctccagcacctctttgctgggcctccctcctctgccagggaaccttccccagagtcgtcatgggctggaaaagaacccgtggaggtcagaacatcaacacag

SEQ ID NO: 12094 - DNA, 201 bp, Bos taurus
aatcctccactcccccacctctcaaggcccaagaagattcagaaggttcttgagtcagactgcctagactggaatcaggaattccttgccagctgagagatgttggcccaggactttctaaaccttggattccctttctgttaaatgggcgtaatagttcgcgtgtcatcttgtgtatcaggtgcccaatgaaggtgacac

SEQ ID NO: 12095 - DNA, 201 bp, Bos taurus
gagggagaagagaaaaatcttcccatccataccccgtgagaagtcagaatggctactgcacacagtagaactgggccaaacaagtcaggttgttgataagaattctctccaagtagaagacaagaaaacagtaccacttcctctttgttacctgggtagacttccccatcaaaagggcagggccctttctgactgggcgta

SEQ ID NO: 12096 - DNA, 201 bp, Bos taurus
ctcagctcactgttcctggcctgtccttatctcagccttgccagtggtcttgcctgtcctgtgaggtggtgtcaggcaagatcactgggcctggtgtggtaggcgtgcacttacaaagagcttctcacaggagttaagagataacaggaacttaagactccctcaacgggaagtaggctgtctagaaatgttatgggttgc

SEQ ID NO: 12097 - DNA, 201 bp, Bos taurus
ggcgtgattggctgttgacaggttggccccggttacggaagctggtgaggacagagcgggaggtcgacttccaggaagttggtagtggaaaccggaatagcggtggaaaagaggttatctcaggcccaatggccactgtggtagcaagcggcggcgatggaaaagagcaaggagtcgagacttccgtcacctattaccgac

SEQ ID NO: 12098 - DNA, 201 bp, Bos taurus
atacaacccagagaccctgacaactatccaaacacaggacatttcacagcctggtacttttccagcggtttctgcgtctagtcagctgcccagcaatgacgcactactacagcaggctacacagtttcaaacaagagaaactcagtctagagaggtgttacagtcagatggtacagtggttaacttgtcacacctgactga

SEQ ID NO: 12099 - DNA, 201 bp, Bos taurus
ctttataaagctatagaactggaaccgtgtaagagctgtatcttaaggattcatttccccaagttcatccaacaacatttccaggtgcttgctgaacaggacctcgtagctctgtctcctagtgggatctttcccactcgttatgagtcatcaggtagaacatctctagttgttttgccatttgggctgctgcatggaagc

SEQ ID NO: 12100 - DNA, 201 bp, Bos taurus
taatttctatccatcttcaagtctcagattaatcagcacttgctctgggaatccttcctccatccccagtagacaaggtcagactgctctgtgtattgcaattcttctcacacgcataattgcgtgttctacgtccctctacccagctgggctgtaaatgccaagatggcaaggagcctggcacaaagtcagctcccaaga

SEQ ID NO: 12101 - DNA, 201 bp, Bos taurus
aagaccctcgcacgcaggggtgaggacttaggccgggagggctctgggtgggccctgtgcacgtccgttggcctggtggcctcgcactgtatttggcctccgtggctgatgttctgggacctttaagcacacacaagtgcccccagaccctcacgatatagtgagagcttgaaagtggcaccttacgttggccttcctcat

SEQ ID NO: 12102 - DNA, 201 bp, Bos taurus
gatcatagatgctggtattagattggcagggtttgggtcctatctctgctacttactactatgtgactttgggctagttacttactctttctcggggccttagtttccttatatgcagggtggacacagtactaagacctacatcatagcattattgaggaatcaaattaatgtgtgtaaagcattttacttgaaagagta

SEQ ID NO: 12103 - DNA, 201 bp, Bos taurus
atccaggcctaaatgacaagagtcagacacgactgagcaactgatctgatctgatctgaaatgacaaggtgttgttggatcaagatctaggggaaaactatacaaggctggtgaaaaggccctgtggcaggaagaataatgtgagaaagaaatatgcttctatcttgcttaagccactgttcttttaaatatctttttatc

SEQ ID NO: 12104 - DNA, 201 bp, Bos taurus
ctccctaatctatttccccacgatctgtcgtcacttctgctgaaaacctgcaaatttttttctttacactcaaaattcttacctggcctgtaagtcttttgtaacctgaccctgcttccctgaatctgcaatttcatcttgttcaccatgataaaactgtcttggccttctctatgttccttgaaactgctctattttctt

SEQ ID NO: 12105 - DNA, 201 bp, Bos taurus
gaagtgggtgaaatgctagggcttctgaaattacatcagtggtgaaaattggcatgaagtattgcttctgtccttaggtaaatatttgtggaaacccagacctgacccttaggtacaccattctattttgaaatagagtagacaataatttcccaaagaaagctgtaaaaaaatactgattagattgtccatttgaatgat

SEQ ID NO: 12106 - DNA, 201 bp, Bos taurus
aaaagtagatcaatagctggcttacagcccttagattataaactgataatgcagagtactgaaataaaaatatggagcctgggtgcgtgatggaacaagaggggaaagccatctctttaaaaaaacaaaacaaaactgtacagaaacccttcagagtgcattgagtaacgtctgcggtggggcatcctctgcatcctctga

SEQ ID NO: 12107 - DNA, 201 bp, Bos taurus
atgcacccttctgagttttacaattaggcaacttgttccataatctattgtttcactttttgaatagggaggaaacaacccaaatcatcaccaggtacctcagcatgaacaatggatgttctctttaggtgtaaagtatgtctgccaaggactgacagcaaaatggggatagatggtcacattcttgtattattttagggg

SEQ ID NO: 12108 - DNA, 201 bp, Bos taurus
gccttcactagtcatgtctcctttgtttcttccagcctgtgccagtccctcagtcctcccttgtctttcatgactttgaccctttggtaaagtactggccagttacttcacagaatgtccctctattactgggagtctgatgctttctcatgatcagaatggggctctatgttttgcctaaggtaccccatggctgacacc

SEQ ID NO: 12109 - DNA, 201 bp, Bos taurus
atatgttaaataaaccaccctctaccctccaaaataaaattccctctgtcatatgtgaaattctaatggatcctaggctcttttcctgcatttttccatttggttccactggtctctttctctgtctttctgccagtaccacttagatatgattactgtgaccttctatctggcaaagctgtcccctcctcacaatcttat

SEQ ID NO: 12110 - DNA, 201 bp, Bos taurus
caccaagttggggatcaataagaaatcagcaaaaactaatttcaaagcagctacttgcagtatgaaacgttaagtgaagatatgacccaaagaggccaagatttagtttgaaagaatagttttataagaccatcatgtaaagtcctcttcctaaaggcaaagatgtctaacatgagtccattggcattttgctgaggccac

SEQ ID NO: 12111 - DNA, 201 bp, Bos taurus
catcttaggcttttttattagttattcctggtaacaaccctgtgagatcacaaggtgggtcagatattcccttcctcaagaggcctctgaaatttcattcgatgctactacatttcaggactcagtcctcaagtcaggagtttggtccagaccactgatcaggatcatctcaagtcctaggactcagaagctctatcaggc

SEQ ID NO: 12112 - DNA, 201 bp, Bos taurus
tagaggttttaattacttcaagttcccaaagcagggcctctgtgataaatgatggagacgaggaaatgaagtcacatcttcaaaggccaaatcagcctccggttttttccaacttgcacagaattgcaacagcttctctcgttaattgttgtgcaagattttgcatcttgcataaaactagctgcaaatgtcacatcggcc

SEQ ID NO: 12113 - DNA, 201 bp, Bos taurus
tcccacccttatcacttggacatcacagcaaagcaaatccactgaagcaagtacccagaatcatgaggtgcctggcacacttacagaacttaaaacagttctaaatttttcttagaatgttctgttctttcagactactgtaagtgaattatcatgtgctttttaaaccctcagaaaaacttttctggatgacaataggca

SEQ ID NO: 12114 - DNA, 201 bp, Bos taurus
cccgcggactctcgccttccggcggtaagtcaccgcagcaccggaagccgtcgtcaagacaacgctcttctgcccaccccgacccttcgtcccgcccaccgtcttgtacgtctgtggccagcggggcttccattggtccatttgtccttcactctgggagaagttcggagcgctaggctctggaactctgatttgaatttg

SEQ ID NO: 12115 - DNA, 201 bp, Bos taurus
taatatgaagtttgccattgaccctggaccaccctcctttcttctttacctcacactcaagcttcttgactcttctcactgtttccacttctgatctctcatttgctcttcctcaacagtgggatggctttttaccggcctttctccactgaaactgcttctgccagaatcaccagtttttaaattttcttctttggtatc

SEQ ID NO: 12116 - DNA, 201 bp, Bos taurus
atattgtattatctcacttatatatggaatctttttttttttttttttgagtcctactcagagtagaaagttgattaccaaagactaagggtgggaaaaaaggggagacattaatcaaaggtgcaaaaattcagctatgacatgaattagttctggagactgaatgtacagcatggtgactgtagttaacaataatatact

SEQ ID NO: 12117 - DNA, 201 bp, Bos taurus
catggggaaggcagctcttccaactccattgccaggaaagcgctatatattttcctacaagtgttccctagtaatattgaatgctatttaaaagaaatcaaagttccaaatgtttatgaaaatgaagatttttcctttcactcctttcaaccaaattctttgcctaaaagtttacaagaaattactggattctaaatcatt

SEQ ID NO: 12118 - DNA, 201 bp, Bos taurus
ctggcgcgagcgggctctgcggctctgccatcctcagtgctgcttggagaggacctacgcatgcgcagtgagattgcggcgctttagacacggggaaggacgtgtgggggccaagggggtgtgagggccaagggggtaggggggccacaggaatggggggcggggtggaattctgagctcttccttgaaatttctcgtggc

SEQ ID NO: 12119 - DNA, 201 bp, Bos taurus
ggaagttgatcaattctgcaagtactaaatatgcggtgagtaaatgaggctgactttcttttgcaaaaaagagcttttgtcacttctctgtcttttggctaagatcaagtgtagcatcagttatagtttagtagctgatatgccctcatcatgccaaatgccaggctgtatgaagtacaagctggaatcaggattgccagg

SEQ ID NO: 12120 - DNA, 201 bp, Bos taurus
agggataaggaggctcactggaacctgatgagaggaacattttatgtgtattaccatgtagtctcaacatacatattgcaaaacttaacaaaattactccaaagttgacaaattaacttctagtgggagatttacaaacctttctcagaatttgacattatgtgactatttttctgtgtcaaacatcccataaaaaatatt

SEQ ID NO: 12121 - DNA, 201 bp, Bos taurus
catttttagtgacccatctgagttttggcccctgccagaatatgagtgatggagaattaatgatagttttgcttattattttcctaacagatgtttctctatttaagaacatgctgaggcctatacttaatgttagagcaaatatcttttgagatggaggtgccttttaaccacttaatttttattggttttaactcagtc

SEQ ID NO: 12122 - DNA, 201 bp, Bos taurus
tctatacctcaccccaaatttagttctcatgtcaagactgatgatgccaaaaatgcagcaggtgggtgtatttgttgcttacataatgaggctttctggtgagagcagaacagattcccaagtagatttgagaatgacttgagaaagcaggaaggggtgactggccttggggttttattgtgattagggaatagatctggg

SEQ ID NO: 12123 - DNA, 201 bp, Bos taurus
gacaagaaaatcaagagcttaggattcgagaagcaaaagattgagggaacacgtgcccccaaccatttcctcttattctaagtaagaacacactctctctcttcaggtttgaagcccaactcttctggctcacttcaggtatacctcactgtatgtaatagtgctagaaggaaagaagttggggacacatgtatttagtta

SEQ ID NO: 12124 - DNA, 201 bp, Bos taurus
acttgtaccatttattcagaagttgacttggctaatcaaggcaggggcctatgacaggaaaaatctgcactaggacaaaacacctgaagttagggatcctgtaaagcctctgtgacattgtggccttgagccagtcacttagcttctttgcaccttgacttcatctgtaaagtgaacattaaatacatatataggataagg

SEQ ID NO: 12125 - DNA, 201 bp, Bos taurus
gcacctggcctcctgctgtgaatttattgggcagatcccagtcttatcccaggactcttatcccagccttatcggtaaaggcagcccagctctgtggtggacggtggccgaggtcacgcccggtaactgatgagccatccagggccctacacctgacccaggttctgacccagggcttaatcatcaattagtctaaactag

SEQ ID NO: 12126 - DNA, 201 bp, Bos taurus
ctgcgccgagagccgccctccgcggtgtgggggtgcaggagggccgggtcgggcctctctgaggcttttacctatccgtaaggggagggcggccactgccgaggtgcgagctgggtggaagccaggctggggtcggcgcgccccccagccccgccgtgggctgggatccttccgcgagttcccacgtggcttcggaaccct

SEQ ID NO: 12127 - DNA, 201 bp, Bos taurus
ggaagaatgtgaagagaaagtctatattagctgagggatcatttaaatagtccactagataagtgtgactactaaaaagcatagaacttcacaagttctgttaggccatcgtcacctaacttaaatttaagcccttcttgaagttctcagagcttctcttggtttggggtgctgctgattgatcatttccattaacaagct

SEQ ID NO: 12128 - DNA, 201 bp, Bos taurus
ggaggagcccccatttcctcttagctccaaggcacaggtggaaccttagtgactacttaccaataagggtggtgaactggtcccaggcttatttccagctgatcggaaggccattagaaatgaggctcaggtcagggctcggggtggggataacctgcacagatgctagacctttgagcagaattttaaacccgtcaagtg

SEQ ID NO: 12129 - DNA, 201 bp, Bos taurus
ttccacttattccacaggaagcttttcagaacggaaaactgaattctctacacctttgtgaagctcctggagcttttatagctagtctcaatcactatttgaaatcccatcgattcccctgtgattggaattgggtagctaatactctgaatccttaccatgaggcaaatgacaatcttacgatgattatggatgaccgac

SEQ ID NO: 12130 - DNA, 201 bp, Bos taurus
gttactaatgagctaaccttaaggtatggaaaatgtcctgagtgactcaatcaataataatcacaagggtccttacatgttcaagaggaaggccgaaatatcaggctcagtgtcagaatgctgccttgtatgaaagattataccagccgtttctggctttgaagctaaaaaggccgaagaattcaagcagcctctaggaaa

SEQ ID NO: 12131 - DNA, 201 bp, Bos taurus
gaggtgtgaaattagaagggagacgtggttgtgtttcctccaacagtcctaatgtgtagacaaaggctcagagagggagaagtagatcagttcaaaatattcccagcagtactgcagcagttactccaggagaccagttgtacttcatcacagtaggtttcaacatagagagagaagtgtttacatccaatagaaatatgc

SEQ ID NO: 12132 - DNA, 201 bp, Bos taurus
aaagagcttggtcaacataaaaaagctggaagtccaccttagacagagattatgccaagaatgacaatgaagtccatctggagaagtgggcaggggccagatgtgtgtggcatgactgggacgtgtgttgtgaactttgggatttgctccgggtgaccattggagggctttggggaagggagcgacatggtcagatgtatt

SEQ ID NO: 12133 - DNA, 201 bp, Bos taurus
tcagtcaatcatgccgtccaaacccaagccatgggcccaagtttcacaataatctgggcatctggttaaaagtgcagaattcccagcctttctctgccaaatcaaggtccctaggcatgggcctgtgaatatgcattttaatagatttctcagtgaaaccagattagggtaactggtggcactgtcacctgatattggatt

SEQ ID NO: 12134 - DNA, 201 bp, Bos taurus
accgggactaatgaggcatcattgtgcaaacaccacttttaacctccacttagcccagttgagccggcacaaggttcaagtccagagtatgactagtgggtcagcaggtgtcatggtgtgtgggaggggaggagaagtggccacttctccaactccatctgggttcaatggatccacaccatgaataaccagtggcattgt

SEQ ID NO: 12135 - DNA, 201 bp, Bos taurus
ccctctcttgggccccttctgtggcaccgctaaaccttcactgtggctggggtcgggcacggaatgtgacaactggcccccgggcaaggtctgggagtggaaagaaggcttccttccccaggaaagctggtgcactcttatcagaaagaacagcagaggccaggtagcaaacctgctccatgaggggaggagaaggaagag

SEQ ID NO: 12136 - DNA, 201 bp, Bos taurus
ttctcctctgccttatcctggattggaatctcccaccttggggtaaagattaggaacatgtgcagaatgatgccaaggcttgtgtgtgctcctaaggacgtgtggggccatgggatgtttccgactagcggacaccaggcaagcttggctgctttggagatggggctctccaaggccacggggtggggagagagatgttgt

SEQ ID NO: 12137 - DNA, 201 bp, Bos taurus
cacagggaggctcggatcatgacgggcagtggcagagggctacttggtaaagcccattcctcattatctgatgcgtgcctccagagccaccagtggcccccggctccttccttgcccacgggttgttggaaagatggaccaaggagacatgtgtcctgagctcggtctagccaccagatccatagagaagccctcacttcc

SEQ ID NO: 12138 - DNA, 201 bp, Bos taurus
cggaagcagagccccatctgagcggccccgtcctcaacggccagtatgccatgagtcagaagttgcaccagatcacctcccagctcagccatgctttccccgagctacatccgcggcccaaccccgaggagaagacccccgcgcctcttgacgagaaggcccacgtgcccatgagtggccagcccatgggcagtcagatgg

SEQ ID NO: 12139 - DNA, 201 bp, Bos taurus
taaccctcagtttgtgggtgatcctcacgttgtaggctctacttctggattcttaattctgcatgcctgctttctaacttttagagctctggtcctacatcccttcatgtcataggcctggggtcttggcctgtgtgtgctgtccactcctaggcaatgcagaggtgagagacaaccaggagaaaggccatcccagccagc

SEQ ID NO: 12140 - DNA, 201 bp, Bos taurus
agatccttagtggagatatttctggaaagaatgaatgtcctgagaagttatatacatataaagaagttttctttttttacttaggccaaatggagggctacgcaattatctctattttatagctgaaaaagttgaagcttagaggggtcccatggcctgcaggttagttcagatctgggatgagaaacacagactctgctt

SEQ ID NO: 12141 - DNA, 201 bp, Bos taurus
ctctgacagatgcaggagttgccctgcagcattgggtaagcagatagtgcagagagggggcatactgtgacacggctgcctgtgtgaacgaagatgaaaatttcacatggacattatggagcctagtgtgttactgagccattggaaacactagtgcaaaacacaatttagtggtgaaaacccgcagagcataaggagaag

SEQ ID NO: 12142 - DNA, 201 bp, Bos taurus
agactcaggggccagaagctgcagaatagtcagtggcaagccctaggggttgactgtggaggtgagtgtacagtgatagcagattacaccccagcacaaagagaaacattaaaatggccagcactaacgtccatggctaccaataaaatgtgtgtctattctaagctgcttttactacagattttaaatgcaccatttaat

SEQ ID NO: 12143 - DNA, 201 bp, Bos taurus
tgctgtcccagaattatcttatgttttatgccagggcagtgacttcacacatcacagtagcagaggatttctacagggagaaattggctgatggaagctttgtcctgaaccacatactgctggtgtcgtgatatgatgtccagagcaagtagttcaccatttgggaccggtgaaggacaagcaagcagggagagaggtgct

SEQ ID NO: 12144 - DNA, 201 bp, Bos taurus
gaatattttatagcatttaaatatagctacagaagtcaagacagtgctattaacatatgaatagcctaatagatcaatggaacaggagcgagttcagaaacagacccaccatatatatagtcaattaatctttgaaaaaggtgccaatgccaagttaaatcaattctggaaaagatcgtcttttcaacacggtgctggaac

SEQ ID NO: 12145 - DNA, 201 bp, Bos taurus
atctgctctgtctgggattgggagcccggagttatcccctgatgttctgagggcccctaaaatgagctgtcaggagctctggagggtgtgaggggcagtgaggcaggaaggatgctcagacctgggccagggatgaccaatacattcaccctccagacagctccccactccctgtcgcttcagggtcctgcagaaggtgga

SEQ ID NO: 12146 - DNA, 201 bp, Bos taurus
tccattattattatttcatatgcagcagtggtccgacagggcagccccaatgtgcagtctcatgcttgattcatatttgctgatgagctgttagccaaagaaagtgacgtggccaagcccagagtcaatgtgggagggcctggaactgggaggtctgactcatccgggccactgatcgaatcatttaccacaaatgtcttt

SEQ ID NO: 12147 - DNA, 201 bp, Bos taurus
gcctcagtcaaatcagaggaaaaaaacaccctgtcagtctggccatcgaccatcatttaagcatctcaaacacctcctcccctcaatgtgcacctcacattggctccatccaaggacaaaggcccccagagcctctttagagcctggtgtttaatgactgtggctctcaacctggaggagcatgcaccaacattccctgga

SEQ ID NO: 12148 - DNA, 201 bp, Bos taurus
ttccctattaaattaaaatgccatctcccctcccccagctacctttgggcttttatcaaaggtgaaggtctggcgatggggagctggggaaggccgcctggagatcagggtagagctggcgtttgagaaggtcgttcccatcccctgtgcttggagctgggagccaggaacactgcccgcaaccccagtgagccctggttg

SEQ ID NO: 12149 - DNA, 201 bp, Bos taurus
ttctgaacgcctgaaactagcacagcattgtgaatcaactattctcccattaaaaataaaacatttttttaaatcaacaaaaacagtttcatgaattggtaatttctgttcaagctcatttaagtgggtccagaaaaatctgaatagaacattaagaatctaaaagtgaaaatcatttaggctcaagaaacctaaggccaa

SEQ ID NO: 12150 - DNA, 201 bp, Bos taurus
gcagagtacccaagggccacagctcctcatcgtgtctccatgaccaatgttttcagcatcttttcggggcctgagcctttaagacgattcagctgatgtcgcacgcagacccaccttgaccttacttctctcccccacctccctggaccactggtcttcagaaattttaacaaaatataaagtctatgtaaataggaaaag

SEQ ID NO: 12151 - DNA, 201 bp, Bos taurus
atagtggtaaattatcttgtcctggtttcttgccctgtgattgcaacatgtcccagggccttcgctccttgtagaatccatgcctaatatcattgcctcaaaagcttggaaagtctaaagttaccaaagcaaagcttacctctcagggaacctgggtggccatcagaaggtggagcagcatggctttggaaatccagaaaa

SEQ ID NO: 12152 - DNA, 201 bp, Bos taurus
aacaaactagagaatttagcaaaagtgctggagaccagaaaacagacaaaaattagaacacatagaaaacaaaaatttaaaaatcattaacatttacattagcatcaaagagcaacagatatctagaaataaatctaacagaaaatgtacaagacctcaccattgaaaactacaaaatgttactgagagaaactaaagaaa

SEQ ID NO: 12153 - DNA, 201 bp, Bos taurus
tccacattgatgaaatggcttggcttcttctttgggccgtctttcaatgccagccttctcacacctctaattgtttctctttgtgtttccaaaatgttcacgtgggagatggtcaggccggaccctacagaagacctgagacacagtctgtcaatagctcctttaaaaagcagctagctcttcaaaagagtgtggggagaa

SEQ ID NO: 12154 - DNA, 201 bp, Bos taurus
attcagggaacattacaaagacatcctttccatcaggtttaagggacacaggcccagcacctgggagaagcccctgcacggctggagggtctgggaggacttaagactctgtcacttctaccttcggggaatagcctgggagctaagcagggtgagagagcacagagctgggacctgggggctttcacggaggaggggccg

SEQ ID NO: 12155 - DNA, 201 bp, Bos taurus
agggcctccaggacggagtggagccaccttgccctgccagcctccactctttcctgctggccgggcagtgatatcccccagcagggccgagtgtgctctgcggagctttttgggttcacagtgtttctcagccttcctcaggagccctttcttgctggagatttcctcaacctgtcagacacctcactacccaggtggcct

SEQ ID NO: 12156 - DNA, 201 bp, Bos taurus
ggatgttcttcctggtcatccaatagccatgcatctggttgtaggccaacccccctccattgggggcatcttctccaccaaccccagacctggtctagtcgccctgattcacaggaacagggccaaacactcaacaactgggataagtgcaatatttttaaacatctaaattaatggggaaaatctgtatgagcaaaatct

SEQ ID NO: 12157 - DNA, 201 bp, Bos taurus
agcagggcccagtgggggagggggaggggcaacacgagcctggcagacccgccacagccctcatgtagcaatggacagcgtggaacagagcaagtggtaatgtcgtggccaggcctgtagttcattttacctctgtcaaggaaaatttagaatagtagctgaactgaagagcacttctttttccttcaaatgatccttttg

SEQ ID NO: 12158 - DNA, 201 bp, Bos taurus
cttagttgttaggatgtgggatcttcccagaccagggatcaaacccatgtctccttcattgggaagtggattctttaccactgagccaccagggaaggcccgtgactttcaaactgtgctttctccagttgtaacgatgcttgcaatctgaagatgataacaccatctgcatcttatcatcttatatttggtctgtatttg

SEQ ID NO: 12159 - DNA, 201 bp, Bos taurus
cttgccacacaatttcaatgacttcagcctgagttggctccctaaacagtaattttctaaacagtttccacttttccactgtttcctagttgactagttttagttagtcaaagagtggacaccccacagaattgatgtttgaattaaactcaccttttatctttttatttgctgttttttttaataatctttttattttat

SEQ ID NO: 12160 - DNA, 201 bp, Bos taurus
caggagtgtgtcggcaggagtgaactccccgacacccgagcgaaagttacaggcgagacagggcgagtcctatcaactgaggccgccactagaacagaaaattaatgttctaaacagtaaacagctgggcttctcgaaaggaaaaccacttcctgttgggccgctatcttgcctccatcccaaatcccaaaccctctgcac

SEQ ID NO: 12161 - DNA, 201 bp, Bos taurus
gagtggggagcctggcacaggggccctcacgtatccgggctgcagaaaaagagccctttcttctctgtggcggcccctgccagaggccgctccgcaatcttggagctattccaagggctcccagtgttgtcaatgtcagagttaacagggagcctgggccaccatcattatgctggtctttaggctcagctgcagatggaa

SEQ ID NO: 12162 - DNA, 201 bp, Bos taurus
aatttccagggagggagcctcaaatgggactccctgtgccaagtttagagccagcttctccgaggtgccttctgtgaggctgaatcctaaggcccggagccgcacaagtagatgattgtgggttctgaccccgagcaattgcatcggagtctctggaggggtcaatgaggccttggaaagaaaagaacaagttacccagga

SEQ ID NO: 12163 - DNA, 201 bp, Bos taurus
ttgtgattaaggccaatggaaaaccacaatgacccagtccagataggactgttaatggtccagacccttcaggaataaagctttgggccaccctaccagctaaagaaccacaaccagctgaggtgattcctgaaggcagaaggaatatcaaaagagcagtagcagaaggtaattataaataccagctatacccacttggcc

SEQ ID NO: 12164 - DNA, 201 bp, Bos taurus
tctgccctggcctctcctgtggctcccaggatgggggcagaacgttgaggctgcctggtcagctgtgtcttttgctgtttgaccctggcccattttttccattgatgtctcagtttctccatctgtaatgtgtgtggggtgggggtggtgcggaggggttggctggatcagggcctgggcctctccaacagggctgccttt

SEQ ID NO: 12165 - DNA, 201 bp, Bos taurus
aattggctggtgggcagcattctttatgttacaatccctttttggtcttaattacaaccaaagtttgggaggtcttgtgtggccaatttgtcctatggagcgtgtaggaatgctcattcttaggtcaggtgaggattttcttgatggaacactcagtgtgctattactggatcaggccctgttaacagtaactgaaggcct

SEQ ID NO: 12166 - DNA, 201 bp, Bos taurus
ctggtggctctagggaagaatgtgtttctttgacttttccagtttctagaggctgcccacattctttgtctcatggccccctccatcttcaaagccagtactgtaatatctttaaatatctctgactctgactcttctggactcatgattacattgggcccaaccagatatatgggcttcctttgtggctaagatggtaaa

SEQ ID NO: 12167 - DNA, 201 bp, Bos taurus
tcatttagcagcagttccccaaaaatccactgtgctgctagactcggcaccactggggcaccgggcagtgggcaagactcttctctcctgagacatgtcatgaacttaagaagctagagcaccaacgtgtggcactcagcccagaggccggaggacagtggagtggatggccaggagaatgaggtccatggtgggaagtct

SEQ ID NO: 12168 - DNA, 201 bp, Bos taurus
ttaaattcctccaaccttacaaaattcttaaatgcaattagtaatcagtggctggaaagaatatttcttaacttacagtatcttctgcattttggtgaagataaaaattcttaatttggtaatatggggatggattagtgtgttttcatgctatatagttgggtcaaaattaattaaggatacattataccattcagttat

SEQ ID NO: 12169 - DNA, 201 bp, Bos taurus
aaaaggaagggctcccacttagatgtggatgtaggcacaacaggtggaaggggcttcacgatcaaagcaaggtcactacgggaagactgaaaggcagcagaccgtcaggactcaggaacacccagtgggctccccttcaggcagtataaacacacatggaggaggatagcagaagcacagcaagttgatcagagcagggca

SEQ ID NO: 12170 - DNA, 201 bp, Bos taurus
atttgggatttttttttcttttacataaaagtgagcattattttttaaagcaaaacctattttgctacaatatcatgggatgtgagagcacgttgagcagggatttacagcaaacataggggacaaaagcatgatgggagcacccagtgttacactcttctgttcatactgtgaccaggctctgacttcataaaaggaaaa

SEQ ID NO: 12171 - DNA, 201 bp, Bos taurus
aggggtgtgacctttaccggatttacaaaagcaggatcatagccctgatggtgcgtggagatgagcctgctggctgctgtccgtgtgcgggataaagctacaccttctgccctcatatctttccactcacggccagaggcttcaataaggtttccgagcgtggggttgtggtcaggggggctgcaaagagacacttgaaat

SEQ ID NO: 12172 - DNA, 201 bp, Bos taurus
cagaatgtaaggatttttttttgtgctcctctaaaacttaggatgctataaaggtacgaaagagtacaggcaaagatcttatgtattaaaatccttgcatatattaaaatgtagcttgtgtcttaaaatccttaggttggcaagcataagagactacatgacatgttgatgtatgctaaaccagcttctaaaaagttagtt

SEQ ID NO: 12173 - DNA, 201 bp, Bos taurus
gcatttcaggatccagtccacaacctactctcattgcattcattgtcctgtgtccccagtgtcctctgctctgtggattactcattctctcctggtctgtcatggctttggcagtcttgaggaagactggccagggattgtcgaaggcccccaggctgagtttgtctgctgctattctcataatgtcgagtgaccttcagg

SEQ ID NO: 12174 - DNA, 201 bp, Bos taurus
caatatgtgaccttgaagacaggatcgtgtggactttagcagtgtacagttagatcagtgattagtgaattgtctcacaggcgttagtgccaggcaggcctgagcacaagccctgagcccctggtcagactctggtggctcctgtcctgctgttgtcactgtgtccttcatcttttcagtggcctttgttgggccacttcc

SEQ ID NO: 12175 - DNA, 201 bp, Bos taurus
gtctctgccttcagtggaagcctgccctgtgttttatgaaaccgtttttgctgtgagccttggactcccacgtaaagcattgaatgaaaccttggattcggtcgatgctaatgaagctgaaaaagcagcctttggaaaactctgggattgcttcattgaagcagaacctgaagacaggtttaatcatctgaaatataaggt

SEQ ID NO: 12176 - DNA, 201 bp, Bos taurus
ctcttgagtcttcctctcaacccctctaaaactttttattcttgaaaatagatcatgaagaagggtttcataactatagacaggcctattgcctaacagatgattctgacgagccaaatgattgaacacctgagaacatcacgtcaaactgcccttaggccaaagctgaagggaacagacatgatttcaagaaggtgatgg

SEQ ID NO: 12177 - DNA, 201 bp, Bos taurus
aggccattggggatggaatatggtctgtgctcccggctaagcactgctccgtgattgctcctgaatctcacctggagattcttctgtgctctctcttctatatcagtgcttctcaaagggggcccaaaccagcagcagcagcatctggaaacttgtttgaatattcttgggtggatatccttgggtgacaccccagactac

SEQ ID NO: 12178 - DNA, 201 bp, Bos taurus
caagtagcctggaggaggacctcagatctcccacaatggccaccaatccctcctccaaggacaacgcccagtctaagtaagaaagattacattattacaaccaaagcatggccttctcccatcaccccgccaggcagcagctctgcttaaagactggaatatctcccccttccctgtcctttcctgaggggcaggagatcg

SEQ ID NO: 12179 - DNA, 201 bp, Bos taurus
gcatcaatctgtctgtctcccatctggacaacattgtacaggcaggctctgtctgacacagctattttggaactctggaatctattgaaggctcatccaggggaaagcttggatggtaaactgtagttaattttagctaaaagcgtgactttcttattactctatttggagattaaatatggtttaaagagatgcctaagt

SEQ ID NO: 12180 - DNA, 201 bp, Bos taurus
ttcaggctaaagcagcgcatgtcatagtctattctcagtgaccccctatgaaattgggaatatttttaagtctagtttccagatttaaaaaatggggccccgaagggttaagacatgggtccacacacagctgggaaggagtacagccgggactcagacacaagcaccgtgtctgcagaatctctgtaaacgagacagcca

SEQ ID NO: 12181 - DNA, 201 bp, Bos taurus
cctcctgggagctgcaaaaggggcaggctgggagtcagcaggggtgccacccaggccctcaggaggggacccatagaggcctctgctcaccccaccccccgcttcggccccttcttccagatcctccagaaccttcctgggttcagctctccccctcgtcaattaaagaaggagttacagtagagctgacttgtatgtcag

SEQ ID NO: 12182 - DNA, 201 bp, Bos taurus
cataactactgaagcctgaatgccctagaacgcatgctccacaacaagagaaggcctcgctcgccacaactagagaaaagccctcaatggattatccaaagcagagctaacatgcaggaaaggagatgagacaaggtggagcgaagaaagagaaaccagtgtcccaccctcctctgcaggctgtgagcccaaggcaaggaa

SEQ ID NO: 12183 - DNA, 201 bp, Bos taurus
agcttccttccttcattcttctggtgacaacatcccactttttcttagtcaaccactccttctctactctcagtccatgtggcagaggatagggggttggaggaaaaagactggccccaacgggctgcagggaagggcatgtcacccagactcgggttcatgcccaagccagtccatccagagtcaatcatttctagattc

SEQ ID NO: 12184 - DNA, 201 bp, Bos taurus
tttccatctgaagatacctgtgtatatgtaaaaacaaattaaatgtttatgcctttctcctgttaacctgtctcacgtccatttaatttttaggccagccacagaacttaagagtgtagagggaagtttttcctcccccctacacaagtttaatttcccttcgtagtctacttcttcaagtaaactacaggccacagtttg

SEQ ID NO: 12185 - DNA, 201 bp, Bos taurus
ggcagcagtaacggtggaggcagcaatgcaggcagcagcggcagctctgggtccagctcggtatgttctactcttttgttgaaggcagagatggggcccctggtggtccctgctgaggacactcactccagggtcttcctgaaagctgcccgccccagggtagctggcgtcaatggagttgtcatcccaggccccccagct

SEQ ID NO: 12186 - DNA, 201 bp, Bos taurus
cccacccccaccaccaagttgtgcctttccactgcctgcgtgagtcacaggctgaggggttggagaacggaaggtggggggttgggtggtagtctccaaggggtgagagtctggccctggtctcaggctcacattagggagctaggtgcctgagtccacagtgggacagaagcctctgaagataaaagatctggattatgg

SEQ ID NO: 12187 - DNA, 201 bp, Bos taurus
ccgtgttctcatctgtaaagtagggctgataacagcgccttcttccctgggttgctgtgggctctcgagtctttcacataagacacttactcttttcactgaggccttctccccttcctctgtcctctcagtttccttccatgcttagtttttctctaatgctcccatcatcacctgatatctattttacatattcattct

SEQ ID NO: 12188 - DNA, 201 bp, Bos taurus
agaggccaagccatcaaatgggtccccgggaacccaggacctccttctcacccacagggctgactttgcttgcctcggccagtcgggaccgactgatccacgtgctgaacgtggagaagaactacaatctggagcagaccttggatgaccactcctcatccatcacggccatcaagttcactggtaagtccctgtcttcta

SEQ ID NO: 12189 - DNA, 201 bp, Bos taurus
tggagtgcgagccctctgacactgcctccccgatcatgtcctgcagcgtgaatgggaaacgctactttgaatgccaggccaagtacggcgccttcgtcaaaccatcggtcgtgacagtgggggacttcccggaagaggactacggtttggatgagatgtgatggccgaggaagggcagtcccctgctgcagccagctcgcc

SEQ ID NO: 12190 - DNA, 201 bp, Bos taurus
ttgggcagagtgacaaagggtttggttaggtaacaggccaaatcatagactttggcctttattctgagtgatttgagaggccatcaaagctttttgaggtgaggagtgaaaagatcagaattaaatttgagctgctataaagaaaatatggtatagggggccaaggctaggagattaatgtgagtgatcactactgcagtg

SEQ ID NO: 12191 - DNA, 201 bp, Bos taurus
catttcacgtggaagtaaaatttgatcttttaactcaaggatatgtagtattgtgtgggaaagaatataattcttattcaaagagaagtcttgacatttgtcttcgtcttctgggaggtaatctctaaatccttggaatgtcatgtcttagaggagtatttatttgcctgggaacctttggccagctagaaagtaaaaatg

SEQ ID NO: 12192 - DNA, 201 bp, Bos taurus
gctgtgtgaggccctgctcctagcgatggaactccctcggggtcaaaacagacaaaaatctcccttcgcaaaactcgctccaggtcacacaagattgtcaccttcagggtcacgcccacaggccacgcccgaggccgtgctctcacagaattgagtgtctggtttaccaagggcccggttccggttccgtcctcataatta

SEQ ID NO: 12193 - DNA, 201 bp, Bos taurus
gggcttctcagaggagatcccaggcttccatttcaactataaagccatacagaagcgtcaggctcttaactggcaaagcgcagagctatcctgtgtctcacacatgactatatgagacggtcaccgacagtctctccagattcaccaatcagaagacacaaaggtgtaacagtctcagtcacagactccccttcccttccg

SEQ ID NO: 12194 - DNA, 201 bp, Bos taurus
gaaattctaccaagatacatctagttaaaactctttcctcctatatcctgctcagcgtagaaaggaaccatctgattactaagttttcttcaactctggccatctgtcttaactgttgtttttgcatcatcaccatattctccttctagaactcatatcttacatttattttattttctatataattttcttaccccatga

SEQ ID NO: 12195 - DNA, 201 bp, Bos taurus
aggccttgtgtgccgcgattcatggggtcgcaaagagtcggacacgactgagtgactgaactgaactgaaccgaaggatgaaaggcagggacaacatagtagtctgtggcctgaagtggctaaggaggacttctaggagtagggctgtctgaacaacccctgagaatctgttaaattgaagagttggtgaagacataccag

SEQ ID NO: 12196 - DNA, 201 bp, Bos taurus
tatattcacacaaccatgcagaataaaaggctttagtatgaagcacagatgtactcctatacatcaagagttggcaaactttttcttaaataaggtcagattgcaaatattttaggcttcatgggtcatatgggcttccctggtggctcagatggtaaagagcctgcctgcagtgtgggagactggggtttgacccctggg

SEQ ID NO: 12197 - DNA, 201 bp, Bos taurus
agtatcaaaataaatggtaatgcatcatataacacactgaataaatgaaaatctacaaatacatactgatataacaaatgaacaaataagtgagtgataagggaatgctctccttcacagtcgaataccaactaattaatacagacaaaatcatggagattttaaaattctaccatcttgaaaacatcatagtaataaagg

SEQ ID NO: 12198 - DNA, 201 bp, Bos taurus
ccagatcttccactcatggccctcagggtcatattactgatttaattgtgcagatctctcacaagcaggcttgaaagcctgggaaaagaagagcccctaagtccactcctcccagttctctgatcaggtcccattcggatacgcctcctcctggcccagggacccgttggacacgccccctgcctcacgtcccgccttccg

SEQ ID NO: 12199 - DNA, 201 bp, Bos taurus
gggtgcagcgtttcctttccacgttgtttaacatgccgagctctgcggactatatttagtacctcattcacgtggccccgggagtggtctggggatgtggcgtcgtctccacagtaagacacgacaaggtcagtttctgtggggatgtttagttggttggttggtggttacttcaaaactaaaggcccttcagcaaagcat

SEQ ID NO: 12200 - DNA, 201 bp, Bos taurus
tcttggcccccgggccgccggggaaggccctgtgtgttgtgtttgagtggggctatcgcactcatgctctgccacgtcacacggcccagcgctctgtctttgggagactttgcagtgtcctccgttgtggtcaaaacaaactccacttgttggacaaccctagaggccccctggggaggatatcgaacccacacgaggaga

SEQ ID NO: 12201 - DNA, 201 bp, Bos taurus
gaggaaatggcaacccacttccgtattcttgcctgggaaatcccacagagatgcctagtgagctacaagccatggggacccaaagagtggaacatgactgggtgactgagcatgcacaaacgcaccctaagaaccagtgaagagtcatgagacaaaaggcctgtgttggaatcccagcctcctacccgtgtgagtgtggcc

SEQ ID NO: 12202 - DNA, 201 bp, Bos taurus
ggcagccctgccctaagcccctggcaggatacaggaactgccagcagccaggggctccctggcccagtgggttccctttggctcccaaacatgactttttgacagccttagttttgttagggttagaggtttggattctttttctttctttattgaaaaaagtaacagtcactcattaagaatttaaatgaatacacagta

SEQ ID NO: 12203 - DNA, 201 bp, Bos taurus
tggctcgtcactggtccttcacactctggtacctgctgtgggagctccagccccccacctctgcccctcaaatgcactccacgggcacactctttgttagggttattcctccaaacactcacttcctcctgctcactccttgccattcgcaccttctggtggtcccaggagtccatgtctgtctgcatggccctccagtgc

SEQ ID NO: 12204 - DNA, 201 bp, Bos taurus
cgcagcacgggcctgtccggttcagtggggccacgcacggcagtgctcagcggggcacagctaccccggtaacaagcagtcataaagcacttgtcacgtggcaggtattggcctaagcctcacacagttactcatcctcacaacagcccgatgaagtataggcactgtattatccctatttggcagatgtagaaactgagg

SEQ ID NO: 12205 - DNA, 201 bp, Bos taurus
tcatctctataccctctcacttgctccccccgagcaatttgaagcaaatcttagaaaccacctcagtccccagggtcgcaaagagttggacacggccaaacaactcactctttcacactttagaagcaacacccttctgtccatcagttcagttcagtcgctcagtcgtgtccaactctttgtgaccccatggattgcagc

SEQ ID NO: 12206 - DNA, 201 bp, Bos taurus
aggcatcttccaatccaagtccctttagggggttatcagagggctcagggagtggacttttgctctatgaaggtggcccagtcatttcccttcctactttatcctaaggggttgtttagctgctaagtcatgccccactcttttgcatctccatggactgtggcccaccaagctcctctgtctatgggatttcccaggcaa

SEQ ID NO: 12207 - DNA, 201 bp, Bos taurus
agtaattatatggctgtcctgagagtaggcaagaggcctgcgtatgattaggacagaggaaaggggtcataagtgagctatgacccctttatcagctacagcagggaccaaaaagtacaattccagtagggcttttttcttttttggctgctcagcttgtgggatcttacttcccccaccaggatggaacctgaggccccc

SEQ ID NO: 12208 - DNA, 201 bp, Bos taurus
acaaaagggtgattgtactttgtggggtgtccttgggattaaatgaggttgaaagccttggtgttgtccctgactcctctttttctctcatcccaggtttgattaggtagtaaacactgttggcttttttttctgactgatcaacatgtgggatcttagttccccgagcagggattgaacccgcacacccccacgttggaa

SEQ ID NO: 12209 - DNA, 201 bp, Bos taurus
gccaacctggccgcttttcagggtctgcgcaggcgcgctgtgctcagcgttgcgacggcagagagctttacggcttgtgggcgggactttggattggcggtaggaaggtgggccgggggagcggagaggacgggacctgggagtggaagggactgacttccctgaacggtgtcgggggccggcccgagagggcgagttgtt

SEQ ID NO: 12210 - DNA, 201 bp, Bos taurus
gaaaattgcagaacaggaattctgggctataaggagaagttttgaaggagactacagaggaggtaagctacaattttggatcttccctgtacaacatgtctgtcccgtcttccccttcagaaaccagctgttaattgagttagactcaccctacctaaagtttgagaggcatgctgaatttgaccagaacaagagtgagca

SEQ ID NO: 12211 - DNA, 201 bp, Bos taurus
ctgtgtaggctgccaggctgcggcagaggtaggtgacgttgcccttctgggcacagaggtcatacacgcactggcggaagtactcagaggggctcagcgccgcgtggcaggctgagaaggggccgttggcatcccggagctgcccacaggcctcgaggctctcgtatggtgccgtctgctctgctgagcacacagggcagc

SEQ ID NO: 12212 - DNA, 201 bp, Bos taurus
ttcagcatctttgctcctgcctttcccttggcccaaaaggttcttttcctagaaatacacatggctcactcccttgcctcttacaaagactttgctcaaatgtcaccatctcagggaggccatccccgagcaccctattttatatggcaactcctccttagtccctgttccctttctctgctctattttttccctctagtg

SEQ ID NO: 12213 - DNA, 201 bp, Bos taurus
caaggcctggaaccatcccctgcttctccactgtctgctcacagaagctgcagcaagagctggagttcctggaggtgcaggaggagtatatcaaggatgagcaaaagaacctgaagaaggaattcctccatgcccaggaggaggtgaaacgaatccagagcatcccattggttatcgggcagtttctggaggctgtggatc

SEQ ID NO: 12214 - DNA, 201 bp, Bos taurus
gtggggtatgataaaggcctaatgaggatctggggctgctgagctgacatgaaggatgggtggctttggaaaggaagagagggatctccaggcactggggcggccaagcaggtaaggggagatggtgtaggaggctgaaaccaagacatatgtgcaaacgtctgtcattctctttgcactcaccccaggctctgtccatca

SEQ ID NO: 12215 - DNA, 201 bp, Bos taurus
gtgccttgaaaggatgaactcattcaatcctcaccaccacccaatgaagttgaaactatctttatccccattttacagatgtggtaactgaggcccagcactggcaagtgacttgcctaagccacactgtgaaggaaggggcaggcttattccacaatctgagctccaaaggactgtgctaacctgcctcttcctctggcc

SEQ ID NO: 12216 - DNA, 201 bp, Bos taurus
accaaagaaattaagcattgattagccatttggatatcctcttttgaaaactgcccattttactatttcattttgctcattttttgactgggctctcttactgttataaagatttgtattttggatacacgtcctttgctggagatacaaacacatacacacacacacacacacacacaaaccattctctctctctccagg

SEQ ID NO: 12217 - DNA, 201 bp, Bos taurus
ctattacctaatagagtgtaaatgctgtggaaataattgaaatacagagtagatgctatgtgaatggttgctttttggaattttctggaattttggggggcgatattttctgtccctgattgactgaatccatggctgtaaaagccataaatgtgaagggctgactatatagacattttgcaagtgatataaatagatatt

SEQ ID NO: 12218 - DNA, 201 bp, Bos taurus
ttttctttgctgtgccacaaggcatatgggatcttagttctttgaccagggattgaacccacactccctactttggaagggcagaatcttaaacactggacggccaaggaagtcccatctctgcaactttcctggtgcatgtgatcttgaacaagacacctcatttctttgtatctctgttttcatttctgaaaaatgaga

SEQ ID NO: 12219 - DNA, 201 bp, Bos taurus
ggcagaggacgggggccaggcgggaggcggccatgggcctttgggcggcctctggccaggaggaccaagagtccagtgagcagagcaaagagaaggagcacgctgagctccatggccgaagtccgacggtcttccaacctgctgggcttctggctgagccttttatactaagcctgcgccaacacccagttatgtaacacc

SEQ ID NO: 12220 - DNA, 201 bp, Bos taurus
aaatacaatcagagaggaaaaaaaatcacaaggatatagtcggttagtcacctcacagcaaccttccacagaaagtttataccttgaaggaacaagtagacactatttcatattgagttatttcccagagcctctcccactgtaaaataatgtcgccttcatttgttcattcttctcttttctttccacaacagataaatt

SEQ ID NO: 12221 - DNA, 201 bp, Bos taurus
actccaccatggaggaaggaatcttcaactgggcatagcttcctacatcaggatccccactgctccccatcaccctgcactcaggagcttcatttactcttttatgtgacctgtctggcccctgaattcattcgacagcccctaggacggtagccagtgtggtttgtaagagcatcaaggcctgtttgtaagagcacgcct

SEQ ID NO: 12222 - DNA, 201 bp, Bos taurus
tggactctgcaaccgtgctgtcttcaaggggggtcaggacaatgtccccgtgctcaaggtgggtcccccctctcactggcctcagcctggctcttgcccatcccgtgcttctctgctctgccagccctctctcccgccctacagagggatgtggccggggatgcctccgaatctgctctgctcaagtgcatcgaattgtcc

SEQ ID NO: 12223 - DNA, 201 bp, Bos taurus
cgctccatttagagtggcgtgacagtcggtggggggacctagtttcttatgacagagattaaagttcagggtctagtttggaacattagaccaggagtccggactgtgtactgggtgttagggggaagccagctgcctagcttggggcacagagactgggggtgtggttgtgcagttggtcagactgaggaccatcagttt

SEQ ID NO: 12224 - DNA, 201 bp, Bos taurus
gcaggcacgggctccaacccgccttcccggcggatggacgggatgggcactcacctcgcacgcggaggtacgtcccgcaggagcgctgaatcttcttgccatcactgacttggcacctatacatgcccctgtgagtcttgttcactggtttgatgatcagctcgcccccggcacccacgtccccgcgatacatcacagggg

SEQ ID NO: 12225 - DNA, 201 bp, Bos taurus
gagtcaggcggggagcctgagatgaatctttcagtcccacaagagcctcagctgcctcccgctgcagctgccactctgaggaggcagaggtccaggtcaggcgagagggtccgggggcctgcaaaggagagatgcagactgggaatccctacttctgcccacccaccagaggctccctgtccccggttacttcattattcc

SEQ ID NO: 12226 - DNA, 201 bp, Bos taurus
gatgtctaaggtaccatcagggccactccccaaccccacctgttcacccttggctttgccttttagccaccacggtggtggctatggctcttggaccccttttgggccctttttcaggctggggccccagtggccaaggcagctccattctcttaacttacttcctgagatcatactccatgtggccacgggcctggaagg

SEQ ID NO: 12227 - DNA, 201 bp, Bos taurus
ggtaacttggggagaacatgtagagagaggcccttctgaggctccctttccttctgcccctgggtggttagttaatgtcctaccagcacttcccacttgtcgggggccaggaccatgttccagccccacatcactgctcagggcagagggcactttgtccagacagcttagattccagagagacctgcctctgagcttcac

SEQ ID NO: 12228 - DNA, 201 bp, Bos taurus
acttaggcagcacttgggctgaaagtttgaattcttgatctcatcttttttatttcaccattttgtgtgctgatgtcaggagcaacaaaccaaggtcatcgtattccttgagtgagtgagtgagtgagtgagtgaagtcgcttagtcgtgtccaactctttgcaaccccatggactgtagcctaccaggctcctccctcca

SEQ ID NO: 12229 - DNA, 201 bp, Bos taurus
cttatgtctcctgcgttggaaggcgggttctttactattgagccacttgggaagtcccagcatgaagattagatggtagtaattcatcactgctaatatgtttttatttctgaggttatactttggttatgtaagagatgatcctgtgtgtaggaaatacattaaatatctataagtgttggagcataagtttggcaactc

SEQ ID NO: 12230 - DNA, 201 bp, Bos taurus
cagcccttgagcctcagagcaactggcaaaggctgcagggtgtctaggcaaatccaccctgcctgccaatttcctgcccaaggaatgggaaggagggccgtgtgccacttccgtgagtcagaaatgctcccggctctttcctcctctgctggatggatgcagaaccgtgagatggaaggatcctggatcccaggatggcca

SEQ ID NO: 12231 - DNA, 201 bp, Bos taurus
cctgtttccatttttaacagctgaggaaacaggcctggagaagataagttgacatgcccaaggcagcccctggatcagggtgacccgagaacgtagtgggtgctcacttagatctttgtggccttgatggccgcctgactttaaaacccacagagcgctttctctgccttctcaaactaggattcacagcttcgtccttca

SEQ ID NO: 12232 - DNA, 201 bp, Bos taurus
ataaataaacaaataaatatattttttaaaagaaacctagcccagctccctgtgaggcctagagccacttgcttcccattcctggcccagcaatgctcaaggaaagatttagacaagatgatttctcatacttgtcaaatataacatcctcagattgtattcctttgcaacttctttaataaaatcaagcaaggccaacct

SEQ ID NO: 12233 - DNA, 201 bp, Bos taurus
tataacttgtgatccaagatggttgctggagctccggccatcatatccacattccagtcagtagtataaaggacaaaggacttagaaaaattctttaagaccaaccccgagaaggcccacacaatgcttctactggcacctattggccaaaatgtcatcacctggccacacttagggaaacatagacaatctagtttttgc

SEQ ID NO: 12234 - DNA, 201 bp, Bos taurus
gaagccacagatgcagtgttggcagtcatatgtgctgaggacagctcagctccatccagtgtctggatcaacagggggcacagaccaggccctccaaacacgttgaggaatgaatgaatgaatgagtgagtgaatgaacgaatgcctctgtggtgaacagaggaagtgctcggcctctctgagtggtctccacccatgtga

SEQ ID NO: 12235 - DNA, 201 bp, Bos taurus
gggaatagcatgtgcaaaggccctgaggttagactagtttgctgtgtttaaagtatagacagatggactccatagctagaagacagtgagcaagttgggtgtgaggtctgagaggtagacaggggccaggttcataggccatggcaagactgacaagaagccatgagagggtttaaacaggagagtgatcggattcacagc

SEQ ID NO: 12236 - DNA, 201 bp, Bos taurus
cagagggtcagagagacctctctgagaaagggatcatgtgtaggaaaccaaagaatggaaccagagatacgatgagtcagaagaaaagcattccaggctgcggaaacagcatgtgcaagggccctgaggcccacactggcatattggagaacaacagggaaagaacagggtagccggagctcaggaagcaagaggggaagg

SEQ ID NO: 12237 - DNA, 201 bp, Bos taurus
tgtcatcaccccctctgcttgtttcctccggaacacatccccgtttaccattgttaattatcctgtttacttttctgccggcctgcttccctctagaccccgagctccaggagggcaggtcccagagctgtatgggcagcaccgaccccaccgcccagcactgggcctggtgtttgggaggtaacttcttttgacacgcga

SEQ ID NO: 12238 - DNA, 201 bp, Bos taurus
agagcccgtctccagtggtgttccaataactatgacgggaccacaagggcagggcctgggcctatgttggttacagttgaggccctagcagcggacgggggacgctgtcagcgctcagggctgagtaactgccgcttattaagggttcgggcgtgccggaccccgcgcctgctacttcagtgcattgtttctggtcctttc

SEQ ID NO: 12239 - DNA, 201 bp, Bos taurus
tcctgtgggaaccgggcctggggaaggacacagcttcctgcccgtgacaccggcgtgtgctatctggtgtcctcggcacgacagggctggccgcgggggcgggggcaggctgactcgatgactaaggtggtcgaggtctgagctcgggtgtgaggggcagagaggggaacacatgcctggtggctgggtccagggtccgga

SEQ ID NO: 12240 - DNA, 201 bp, Bos taurus
aaggggtactgccaggcctggaataaagactgtacctaattcccccactgcactcacttactttcattcccatacttgtccatttagtcattcaacaaacattctctgaacctttcctgcatggcccagccctgtgttgatcactgggaacacatcagagaactcttggggacacagcgcaaaatgagataaacaaaactc

SEQ ID NO: 12241 - DNA, 201 bp, Bos taurus
agtaagggtagcactggacatggtgataacagcatgtgcaaaggccctgcggttccaatccccatccactaagaatggcccgggtagagcgctgtttctggaaggggacaaaggaaggacataccagggtgtctggatgaggggccctttcccagcttgaggacctgtggtaccttgacctttccccctttcttccatctc

SEQ ID NO: 12242 - DNA, 201 bp, Bos taurus
ggcccatataagtgtttaattgcttttctttggttggccaaaaagttcattcggggttttccgtaacatctcctggaaaaacccaaacaaactttttggcaaacccaataaaatccaagaagaactgaacttctaggttaagtgaagtgttttaatattcagtatttgtctttatatcaatgcagtcatgaaaaaatactt

SEQ ID NO: 12243 - DNA, 201 bp, Bos taurus
gaatgagagcccctcatacagaaaaaataaatacaaagtgctcagtaacaaattcgattttcttcctagaatcatgcacaggccacagatacccgcactaattttgcccttttacaaacctcatgttaaaaactccagctccaaaagcaatcatcaaaaatacagcgaccaaagaaaccccgcctccaagttctaaggggt

SEQ ID NO: 12244 - DNA, 201 bp, Bos taurus
agtgcctggagtagtgcctggcacacagtaggtggtcagttgaatatttgagagatgagatagttacttacaaagacatagcaacgtctaccttatttcattgagctaagatgcgcattttccccccatttgaacctttctgaaaatggaatgggttttacagtcagtggtgtctggagattataactgacaatgtttttt

SEQ ID NO: 12245 - DNA, 201 bp, Bos taurus
atcttcctaagcacccccccaacaaatgacttccttccctgagctcacagaggtggccccttgcctgccctgcccctcaacctgacacagagatggggccggttctccatctttggcaggtttagaaagcacggggagggtttctcacaagaactccatcctctttccttctttgatttcattccccatcttttctccagc

SEQ ID NO: 12246 - DNA, 201 bp, Bos taurus
ccttaacttctctgtgcctcacttttctcgtctctaaaatggggcctcccttgagggttaagtgcactcttatttgtagagctgggctgggatctggtgtcgatagctgtgtgaagcccaggcccctcccgtttccttttttctagtctcttcccttcagtgagttgttcagtcagttcttttatgagcatctgctgatcg

SEQ ID NO: 12247 - DNA, 201 bp, Bos taurus
ggaagggatgctggaggaccaccgcccagcctggcctgcagagaccctgggctggagggcggtctgcccagacctgtgggggtttctcccaccagcattgcggaaggccttcaagggaaacactcagatccttgcaaacttctgtttcctcgtctataaagtgaagaccttgtcaggcaactcataaggaattgctccatg

SEQ ID NO: 12248 - DNA, 201 bp, Bos taurus
agggagctgtgtactgggctcttcacagactgcacttagatcgcttaaagagagtttcagagttttcaaagaccgtttggatatctgagttctgctttcagtgctggcttaggacacagcccgccctcagcactgggactccaggaccagtggactcaaatgctacctcttccaggaagccttccccttcctcagtgtccc

SEQ ID NO: 12249 - DNA, 201 bp, Bos taurus
ttggggaagtcccgagggtgcttgatcttttgataaaggctttggcacggagactctccagcctataaaggtgagaggatggccctggctgcagacagaactccttccatctcggaacttcttggctgtgtggctccagctaagtgatttcatgtctctgaacctggggcccctcacctgccaaggagacaatcctgactt

SEQ ID NO: 12250 - DNA, 201 bp, Bos taurus
atctccctcccaggggctccctaacagcattggctgattgatgctggctgttggcaggaggcctcagttcctcgccaggtggccctctccactaggacacgtgagtgtcctcacgtgacagtggttttcccccagagtgaatgagccaagaaggggcaggtcaatagctgccctattttttatgacctggcctcaaagtca

SEQ ID NO: 12251 - DNA, 201 bp, Bos taurus
gggagaaacagccccgtcgcacagcacagatgctccccaagggagcttccaggggtcacccctccccgtcccggaagggctagtgcactgcagactgagaaccgcgtgcctgctcatccgtgctctgcggcacggactccccaggccctcagcctcatgtgtcggccgtttcactaaaaatagcattctctaggaatgagt

SEQ ID NO: 12252 - DNA, 201 bp, Bos taurus
ggttttcagacgcgctgtcctggttccctgggattctaaggatgtgcttctgtgtggaaaccagagggcaggccattaggacttctgggtccttcacccagaaggtgcagtttaaaattttattgggaaaaaaatattttgatgcccctgagaaggtttattagcccttgttctcatcagtgggaaggcagggttcagagg

SEQ ID NO: 12253 - DNA, 201 bp, Bos taurus
ggcgccaacggtgtctgggattgggcccctgacaccagtcgtgcgaccttggacctactgtgcttatttcttggagcctgggtttatctgtacaccgtgaaggggtggcccctggctctgccctccttcctcctgagttattggggcctgagttccgcattgcctggtctctgtccagactttgtcttgattcaactgacc

SEQ ID NO: 12254 - DNA, 201 bp, Bos taurus
gacgaccaaaaatgcctccagacttggccaactgtccctgaagggacaaaaccaccccagcggaggaccatggaacgtggccccattctacagatgggaaggctgagggctggggatgagtaggacagcacccttccaaattttcctcttgcagagccagagcctccagtggaaggaaagcaggccgcccccccggaggag

SEQ ID NO: 12255 - DNA, 201 bp, Bos taurus
aaataaaaaatttatttaataaaaatataaaatgggagtgagaatgctcacctctttgactggctgggtggggcaaagggatcaagaccatgtggggcctgaacccgtggctttgcttcaggcagcgacccaggcactggaagctttgtggacctttgagttcttcttactgggcctctgtgctctcctctgtaaagtgga

SEQ ID NO: 12256 - DNA, 201 bp, Bos taurus
cacctgaaatccctcgtttaagccactgtggctggcccagttcgatgaagaaattatcctttttctcatattcctcgtcatcaactatcttcacctgaagagttttcctgaagggagaggcagaatccccagcataaggccccctgcccatgactcaccaataactcgcccattagccaatcagtttcttgggcactcgct

SEQ ID NO: 12257 - DNA, 201 bp, Bos taurus
gttactatggccaaaaccacatccacaatcggtatctaaactggtctctttgctgactcatcactgctaccttccgctcctaaagtgtgagctctgtgaggagaggggccctgtccctccgtgtcaccatgtccccattgtatggactgggcactgtctggcctaacaacagcaggtgcttaataaatgctggcagggact

SEQ ID NO: 12258 - DNA, 201 bp, Bos taurus
ttaatgtaatatatagtccatattcagatttcccaatcatccttcaaattctcaccttaatatgaataatattccaagtaacagttagagctgtcttaaggcttggagaaggcaatggcaacccactccagtactcttgcctggaaaatcccatggacggaggagcctggtaggctgcagtccatggggttgtgaagaatc

SEQ ID NO: 12259 - DNA, 201 bp, Bos taurus
cacccagctccccgcctcttcctggcgtgggcctctggctcacacttctcaggactctcccgtatttctgcctcagtcatcatgtgggagaaatcaggccatgattaggaaggctccctccaagttcagggagaaaagagtttctgctggggaaaggaagggaggtcatgccagcagatggccagattcccagcgttttca

SEQ ID NO: 12260 - DNA, 201 bp, Bos taurus
gacccagtaatccatcctggggagggagtctgaaggaagctaaactgctggaagaagggagattgttaatgtccataaatggcccgcggagcatctgtctggtactaggacacctggggggtggggtggtcccggctaccagagggcaagtgttgaggtctcaggaagtgctgtttaatggccccgggggaatgtgtgtgt

SEQ ID NO: 12261 - DNA, 201 bp, Bos taurus
gggagggtgtaaactaaatcctatattgaatcctgggccacagaagatgctgtcattttattattgagacagctggccacatttgaaggcacaatgtcgattagatagtaacattgcatcaatactaaattcctcgatttctatcatttttctaagattataaaggaaatatctgtggccttagaaaatattctctgaagt

SEQ ID NO: 12262 - DNA, 201 bp, Bos taurus
tttcctctacatccggtttctcttgagtctgaaaattcaagttctctgtgacggaggaatgtatctgaaacgacatccatccacagtggccaccaggctctatttaaatgcttgagccatagtcacgccatttttatttttttttaatcattttgcttatttatttttggatgggctgggtctttgttgctgcacgcaggc

SEQ ID NO: 12263 - DNA, 201 bp, Bos taurus
tgaagcatcaccccggaagcacagacatgggccccagaatcccctccccgctgctctccagccactcagctgggattctttcggaggatctcctcagggtacccccgttactcaccaggcctcgggccgcagggtagatgggggacagggagaggtccgcgcacttcacctcccacacgtcgctggggtccagccagtggt

SEQ ID NO: 12264 - DNA, 201 bp, Bos taurus
gcagaatagtttgtggagagatctatgcttaacttatattccaaccctgattcttcagctgtgggtcagctctgcagggcctggctgaaacagcctagctgcctgcctggtagaggggacctaagctcattgccactaatctccctaccccattaagtgactttcgtgcaaaaataatgaggccagagtggctgaggccaa

SEQ ID NO: 12265 - DNA, 201 bp, Bos taurus
caccgaggtctcagcagggcaccctgagaggcaccacgtggggcccctgccttcagcaagggagtgacaaggtcatgttcatgccccaccacgtggcctggtggaggtgacaggcagatccccagatactgcggtggcagtccaggctggtgaccctgctgtgatgggggcagtcctggctgctggcacttggcccaggga

SEQ ID NO: 12266 - DNA, 201 bp, Bos taurus
ggtacctggaccagtgcccctgaggactctgccctcgaagacaggaatgcctgtatcaggagtcacgcagcccgcaggaaggcagtcctgagttccaatccggcccgggtcacccaccagatggaacacactgggcacacaggatcctcctagggggctccgcatccgcgaaatgggtgatgccccgggactggctagact

SEQ ID NO: 12267 - DNA, 201 bp, Bos taurus
atccatggatcaggatccaagaccggagaggcggtgaaggaccccgagagggctgcgggcagcaagccaggcagggagaaacaaggctgtgtgggaaggagggccctggaggccccagcccccaagtgcagaaggatacgtggggagtgaaaaccaagtggtgggagctaagtgccgggattcctggatctaagggcagaa

SEQ ID NO: 12268 - DNA, 201 bp, Bos taurus
ggcccggatgaatgatggatctgccaggagggagacaggtttcaaggcatctccagggaagtaggcgcccacagggctgagaatgacgaacaggagggctcgagtagggtggccgacacctagcgagggctgtgatgggcggaaggggacatcagggacccaggaatccaggcccccaaccccttccctgacccaagccta

SEQ ID NO: 12269 - DNA, 201 bp, Bos taurus
atcgaaccgtggtctcctgaattgcaggtggattctgtcccagctgagctaccagggaagccccatatataggtgtagatgccacataagcaaggatgatcgggaagggcctttctgaagatgtggtatttgaactgagacagtaaataggaggcggttatagcaagcttcagaggaaaggcataggggtagaggggggat

SEQ ID NO: 12270 - DNA, 201 bp, Bos taurus
gtagtttgtaattaacccatggatcaaagaaggaaaaaaaagaagctaggtaatattttgaactgagtgatggttatgtcatgacataccaacatgtttggggggggcagctaatgctcgggcttccctggtagctcagctggtaaatgcaggagacccagattcgattcctgggtcgggaagatcccctggagaagggat

SEQ ID NO: 12271 - DNA, 201 bp, Bos taurus
taggatgaacattttttgaatgtcttctcatcagaaatgacagagttcagatgtacattctaccctacttttatctgatgcaactgaaagtcctgtacacgaaaggactctgaaaagtaagtggtagcgacaggcagctcagagaaggaaagccaaattcaaagtaccactgtattagcagtgaatttacaatgatttttc

SEQ ID NO: 12272 - DNA, 201 bp, Bos taurus
tttaactcctcacaccaccacctctattttcttactcacatatgtttctggttcacagactgagctaggaaacaacctccagatgatatcccagaggttccgtggttcaactatatccatcctcctctccagccctctaaccggttgcttggggctggcctggaggcatttgcactctgtttttctcttccttgactctcc

SEQ ID NO: 12273 - DNA, 201 bp, Bos taurus
ggttccttcgggcagagagccccgcagtccgtggaaaaaggtctgagagagtgatggctgcgacgcggacagcatcgcgggcctgcgagatcttcacgacactggaatacggaccggcaccggagagccacgcatgcgcactggtgagggcttgcctggatccgcgctgcctatcccccttcgcggtcttcagggcccagt

SEQ ID NO: 12274 - DNA, 201 bp, Bos taurus
aaaacctgtgcttgctaagccagccttccaggtccctttgaatgtctgccaccaacttgtccgaggacacgctctgtaataacctcggcccctcgcactctacttcggcttaccaccaccggtgtatcccagtttggtggtaagaaaccttagcttcagggccaagtcttgcctctaatatccaagaccggccctcagaaa

SEQ ID NO: 12275 - DNA, 201 bp, Bos taurus
ggcctctttgactctttggtgaccgctttgaactctctcccggcagctggtttgacaaatccttctccctaatcgtcttctccaatgggaagctgggcctcagcgtggagcactcatgggctgactgccccatctcaggacacatgtgggaggtacggcaagccagctggccctccaccctggcgaccgccaccctccccc

SEQ ID NO: 12276 - DNA, 201 bp, Bos taurus
gaaggtggccctggtgcgcctgtcccctgggcacccctctggtccccctcgctctccctgagagaccacctagcccggcagttaagaacgcaggattggagcggagttcatccctgctcggccactccctggctgtgtggccctaggcaagtggcgtcacctctctgggcctcactggccttatctgttcaacgggatgat

SEQ ID NO: 12277 - DNA, 201 bp, Bos taurus
atcgaaaggcaaagtctttcaatctttccatcactgacagccaggaaactctgattaaaaaaaaaaacaaacaacctaaaaaactaagaaagcaattaagtttcacttatgtttaacatgccaagtaacaggtatatgctatgcattggaaatgcaggctcaaagaaatttgtttttcttatcatgactatgtggcccctg

SEQ ID NO: 12278 - DNA, 201 bp, Bos taurus
cagccaaataaataaataaacatctttttaaaaagccgtattactgggatgtggctgacttcacctctcatgcacctgtcccatgccttcccctactccaggagcttactgaaacagtacttttctctgatgcatttgggactgatcatctgacaatgtaaacaatccaggacttcttctttcagcaagcctgagcaagag

SEQ ID NO: 12279 - DNA, 201 bp, Bos taurus
ggccatcggcttgcccaagatcacacagccagagaacacctccactcgttaaccctttgtcgtgtattcattcattcttcattcattggacacctgatgggatctgcgggccggatctctgcaggcactgggggaaaggaagcgtggccaaaacagaacaagcctctgccccctggagcgctgagacccagggagcatcaa

SEQ ID NO: 12280 - DNA, 201 bp, Bos taurus
gcggagccacgggggagagacagatgtgactgggtgagaggaggtgatggaggaaaggggcggggccgaagggagggagaagctgaattgattggccttggaagggatgggggcggggcttaaactgagaaaaggacccagactccaacactgtcttgccggacggggcggggccgcacatgcgacacaccgattgggtct

SEQ ID NO: 12281 - DNA, 201 bp, Bos taurus
aggttttttttttttttttcaattgtttcttttttcctgtatccactgcttttatgacgacttctctgaggtcagggactcatgcttcccattttcagtgcggatttgtctgactgcgaggatgtggccagagctgggcaagcgtgtgggctgctgagggctctcatcttgctcactgagctcccccaggcctaagactcg

SEQ ID NO: 12282 - DNA, 201 bp, Bos taurus
ccccctatactctccgtgactctggatgttggggtggggaggagctaacaccactgttgaattgaatctacccaggagagaactaggacctagcctggtactgatggctttcaaaacagtggccactgccaaggcttcgtaggggtgcatgggggtgagtttgcaggtggggagggccctggtgtgagccagcctgcgtgt

SEQ ID NO: 12283 - DNA, 201 bp, Bos taurus
gacccagctcctggtgacacatgacctcatcttcagaaactcaggccccagggagacagactacaagacagatgtaactacacaacccaactgacactctgaccctggcacgctcttcaaggcccacttaaaccatgtctcctgtgggaagacacccccctcctccacccccagactcagcttcccccagggcctagggtc

SEQ ID NO: 12284 - DNA, 201 bp, Bos taurus
gctgctgctcatgctgctgagcgcctttttcgccttctggttcccgtttaacacggtgctggtggcccgactgtggcaagccagagataagttgcggcccatcctctgggctaccttctccctgggttgtttcaacagctgcctcaaccctttcctgtatgtcttcattggcagagatttccaagagaagtttttccagtc

SEQ ID NO: 12285 - DNA, 201 bp, Bos taurus
ggctagacacagcggtggcagcgctgggtcacgggccacatctgaggtcaattcttgcagtttctggagggcctgagatctgaatctctaattccttccccctgcctgttcccacccttccccttaccccagggccttctacaaatcaatttcatccctttattctcaatttctacgtgtcgtcttgctctctttacttct

SEQ ID NO: 12286 - DNA, 201 bp, Bos taurus
cttgaaacaccctttcctctccatccctgcctctctgagtcctcagcaaccttcaggctcagtcttcaacatcactgtgtgtgtgtgtgtgtatgtgtgcacttcattgtctggttttggttggaagagcgacatacatttaattatagattattcataaagtattactgcatatctactctaagccatctagttgtaggt

SEQ ID NO: 12287 - DNA, 201 bp, Bos taurus
ggcaagaggctgggtccccaacagtgttggggagagggaggcagggcctgggctgctggaactggggaggatggatgaggataccccactccacttgcttcccacttctgatgtttctgggaggcctatgttcctgcccctgaaaagggacagttatatctgtctgtccagatgcaccccaggagctgaccatcagagtgt

SEQ ID NO: 12288 - DNA, 201 bp, Bos taurus
cagacctagacttctaagtcctaggagcagagggtctggagaccccaactcctggatctaagacaggaagagaatgggggcctggactcttgggtctgagtgagcaagggtctgagggttccctggaaaaagtgactgaggtccaggattccctgagggatcagggatctgggggtgggagtcctagggtctggggttgga

SEQ ID NO: 12289 - DNA, 201 bp, Bos taurus
gaagttgcagggcacgaggacgcccaggcctgcctgcacggtcagggattcctgcactcggagcctgtaccctggattctcctgcagggattctgcggacgcggaggctgagctgcagctgcaggcccctccccacctgagccgcccctcctccaccggtgacccccctcctcccacgccgctcacccccccacagcaggg

SEQ ID NO: 12290 - DNA, 201 bp, Bos taurus
gcacgagggagtatgctgggaggcatggaaccaccttaagacctcaaggtcttggatgaaacaaacaacagtaagatccagaaaactgtaaaaaagaagatatcatcctttaatagcaggtaaagaagaacagccctaataacaacatgcggaaaggtgttaggttattgggtcatcaactggtgtcagggaagttcccta

SEQ ID NO: 12291 - DNA, 201 bp, Bos taurus
tgacagtcatcccacttaaagtttgtggaacaaaggaacactacctccgtcacagtcagaagcttaggcttttttggccagaagcataaaatattctggggctaccagtaaagggacactcggcaatgctgtgggcattgggttaagatgagaacccaggattagcaatatcctctgggcccagaggaaatgtaccctcag

SEQ ID NO: 12292 - DNA, 201 bp, Bos taurus
aactgagaaagtttccacgattgtgaagattttggaaaaagtattttgtctaaacattcagcttgtttctttaaaggaaaggccccagacatttgactcacagtggaaggtttctagaggatggtgtacagagggaatgggaattgggttgaggtgagtgggatagaggaaaatatagacccatgaggaagagggaggccc

SEQ ID NO: 12293 - DNA, 201 bp, Bos taurus
atgtgactaatgtcagctactcataccccagccctccagagcagaaatagctcttcaccataaatagcattgttaggattaacttctctggtcccactggtcttatatggcccagtgcctcaagtatatcaaaacactcttaccaggaaaatattccagagttcagaggctatgtcccaggagtgaggcaatgctgaagac

SEQ ID NO: 12294 - DNA, 201 bp, Bos taurus
tgctaaataaacactggaccaccagggaattcccattggtcttgaattgagtgagtagcactggcttatctgacagttacaagaatagtagaatctccctcttgaactatttgctcctggttcttttgtttttgagggactttttagaaccttctcttttctatgaatgttggtctgcttctgcttcctatcatcctgtgc

SEQ ID NO: 12295 - DNA, 201 bp, Bos taurus
cgtggagagggaggagagaaagtcctgggaggagaacatcctcaagagtgaggcccaccagctctcagtggtagggcttatttgtcatagattaattgacaaatagcacgtgggtttatttctggcctctctattctattccaattatttatgtgtctatttttgtgccagtttgatactgttttggtgactgtagctctg

SEQ ID NO: 12296 - DNA, 201 bp, Bos taurus
aatacaatggatactaagtggaagaacttctcagggaatcctgggagacacatacattttgctgcgtgttgctcccaagtcaacactctgatttctactgttccttccatctgagatcctgtctccattgtgaatcatgaaaaagttaagggcctctccaagcacatcaacagtctctttggagacacttataagaaaatt

SEQ ID NO: 12297 - DNA, 201 bp, Bos taurus
accacatataagtcgtatcatgcactgtttgtctttctgtgtctggcttacttcccttagtgtgatcatcactaggtgggactctcgttggaaagacacagcctaccttccttgctgccaggggagtggggattactgtctactggtcacatggtccctacccgcaccgacactttctttttttagagtcacaggcctctt

SEQ ID NO: 12298 - DNA, 201 bp, Bos taurus
tgctaagagagccaacaaaagcaaaaaaaaaaaaaaaaaaagagccaacaaaagccagggcgtggagtggatgctggggccatctgctagaaccaacccctcaagcccaaggctcccatcctcctgcacccacagatgtctgcgggctcagcccaggccacagttctaacagtggaaaaggcttctcctggctgaattcca

SEQ ID NO: 12299 - DNA, 201 bp, Bos taurus
tagcaggtactgtgcatgttaataccttacgtctagcgtgcagcttccttatcctggttgacagaaggcagacaaggaatcgagatggaccctaagcaatcgctgctgcccaacagcactgaaactccatctccaacccgtgggtgagaagccctgcccaggacagcgcccaggggagcctcctcacaagggccaggtcac

SEQ ID NO: 12300 - DNA, 201 bp, Bos taurus
aggagagttgtgagaggaggcaggtttcggcctctggatgagccctatgaatggtgtatgcgtgtgttgcaagcacagtggtgtgacccagttcaagctcgttctgtgagagaggccagtgcttgggggagacgacttcttgaggcaaacaatgggacttcattttgaaaaccagccgaccaaaaagatggctaactaata

SEQ ID NO: 12301 - DNA, 201 bp, Bos taurus
caaagagtcggacatgcctaagcgacttcactttcactttcaagcatgcgtttagaagttctttactaaaaggtgaacgagggccgtacacagttacagcgtttttcatctgttgcatgtgagaaaaatcaatgcattcgtattctggtattagttgcccttcagcataaacatttcctaacacaagaaaggcaagaacat

SEQ ID NO: 12302 - DNA, 201 bp, Bos taurus
gctttaagataaaagcttgtatttgcatgggccgcttacatctgaaactgatatttcctcctaacaagctgaaaacaatttcaataaaagcaatagaactattcttttctattaatgtgctgtgcttagttactcagttctgtcccactctttgagaccccatggactatagcctgccaggctcctctgtccatggggatt

SEQ ID NO: 12303 - DNA, 201 bp, Bos taurus
tattcttgggaaattcatagtggattgaaatttgcacatcataagagtggcaaaaccttgccattacataatctgtactaggccgaaactctagaaatatgttgaatgtctcaaagtctccagtccacaaagtctccaaccttaacatgaactgaagtttcatgttggagagaaacctgacaaatattatgatgagtttca

SEQ ID NO: 12304 - DNA, 201 bp, Bos taurus
gcaatctgaaaatgatgccctctagctacacttggcatttatccttccaagaaaacattacttccctctcggagcattcttcattccaaaaagaatgtcatgggacgatgacctcagagaccaccagaacctgttcttgaatcgcctcatgccagctgtgatgatctcaattcacccaggaaggggagaagaatgcaagac

SEQ ID NO: 12305 - DNA, 201 bp, Bos taurus
caagctaagagaaaagttatgtctttatctctgggcctatgccctctgcccttaagtttttcataattgttggaggactgcagcacttttcaaattctcactgtaactggccactcatcccagaaaaccaccagatgcaaaaacaagaccaactttgtaaattatttctctcagaggatctcatttgctcagactcagaaa

SEQ ID NO: 12306 - DNA, 201 bp, Bos taurus
gagcagacccggctagagcgagaaccctggcggaattttctcggatggctccagtacagctgctggtgacccatgttgctttctcggctgcaacgaggtaaaaggccaaagaagatttcaaaggtaagcatagaacagatcactttagaggtaaagaaacttaaagtccatcatgaaaggcagttcaacatatcaagaaaa

SEQ ID NO: 12307 - DNA, 201 bp, Bos taurus
ataattgtaacttttgaatcatcaaccttcatctcatgatacacgctaatatatccattttctatgtgttttaactatggattgctctctacagtaattcttcttcatagaaacttcagaaaagaggattgatgagaagctttctagtatgtagtctctgatatttatttaattttgattttttattaaatacctttctac

SEQ ID NO: 12308 - DNA, 201 bp, Bos taurus
gtcgatttggtttatacatggttcagcctgaactttatgtgaactaagacagcctgtcagactctcacaacacatcagctttaactgttggagtaaagaatgtctgtcctgcatgtaaagatggaccccctcttctcatggtgtccatgttgacactctctggaagataaggtttccttcccagaccccagggtcctgctg

SEQ ID NO: 12309 - DNA, 201 bp, Bos taurus
tccttgaggttagggtctctgactgggcctaagaattaaattgacataagacagcattatgggggaaacacccaaactttattaaaagaatgaagaccgaagagcaggtgatgctgctggcctggggaccacacttgggaaccacaagtacagatgaaaggctttaaagacctccctggggctttccctggtggtctagtg

SEQ ID NO: 12310 - DNA, 201 bp, Bos taurus
tcagaggccagtagtggaagaaacaacaattttgcgaaacaggagaaacacaaataacaaagctggtagaattcgtaagatcataagtgagaattaagccaagaacttccattagatgtggcccaggtagatttcaggtcgtctgactcaatccattctgtatcagtccttatctctcagagaaattatttattggcaccg

SEQ ID NO: 12311 - DNA, 201 bp, Bos taurus
acaacacgcatcccaattttagaaatgctgaagttgaaaaaaattatgcttgcagaaaaactttccatccagttagtgttaggaaaaatttaacgattcaaagtgagtacttaagactcaggatcagtgctagccctcctgataactctgtaatgtctcacacctgaaggtactcaagagatttgatgaaacacgaggcaa

SEQ ID NO: 12312 - DNA, 201 bp, Bos taurus
tgccgcagctaagacctagtgaacctaaataagttcattttttaagtaattaaatagaccaagtgagatgggaggccactaaaggtggcccgagatggttttgatttggacaagaggactgcctctgtgtcgagagctgacggtaggaggaggaagaaggcatcggggaggctggcccagggaggcaattatggtaagcgt

SEQ ID NO: 12313 - DNA, 201 bp, Bos taurus
atcaatgccaagctcctcagactggcacttgaggctcatcatggcaatgcccctgcccaaccttctctggcttcctttctggtggctgtgggccatgtttttgagctgcatggatggatcagttcagcattccccctctaattctggttggaacaatgccagtccctctgccgtgcatggcgtggtattcctgcattcttc

SEQ ID NO: 12314 - DNA, 201 bp, Bos taurus
tcgccgttaagatgcatttctcacactgcacttctttttccgcttagataaaaatgcaaatttcttagcgtggcttgccctggccctcttctcgggctaagctccttttttttaaaaatatttttgttgtagttgatttaccatgttgtgtcagtttctatgttgtagccacgcgttccgggaaacaaactcgctcagaag

SEQ ID NO: 12315 - DNA, 201 bp, Bos taurus
cacgaggctcccctgtccctgggattctccaggcaagaacactggagtgggttgccatttccttctccaatgcatgaaagtgaaaagtgaaagacactggtgattggcttatgccccaaacagccatcccaccagggtgcccttctggaccccaaagcttcccagggaccaccagttcaggaccacccccaccccggagct

SEQ ID NO: 12316 - DNA, 201 bp, Bos taurus
ggcccccgccctcctcactctccaggctgtggccacctggacccaccctttggaaacacagatccccaccttgtcaccaacccccagctccttgtggccccgaggagggatcccaaatgtgagtgcctataggcacttcatgatgatgtgagtgaggaaggtggaggggtttcgaggagaaacaccaggaccagcgaggtg

SEQ ID NO: 12317 - DNA, 201 bp, Bos taurus
ggggtgagtgtggccaccgaagggcagaccccaggatggccccctcttagggaactcatgcccaccgcaacagggagcatcccttcagggagctgaccaggactcctcccgatggggccctcagaacgtcaagagctctgtgatcgcccaaggaaccggagctctagcccagagagtgggagaggcttgcctgaggttaca

SEQ ID NO: 12318 - DNA, 201 bp, Bos taurus
ccaaaggcctgtagaccccacgcctgtcaccctagcagtggtgctgagagctgggctagaggtttgggggcatttctgttaggtgtttgtgcgtgagagcggggccagctctgggcagtatggagtccatctccaacccccagtcggtgtctaaaggggacaggccagagagggtgccacacccctagcctgcatgaccca

SEQ ID NO: 12319 - DNA, 201 bp, Bos taurus
ggagtgctaaggagctggccccaaagaacttggatttattacatttagaaaatgggctgtcgacataactgtcaccagggcagtaaacggctcagaagtttagacttttggaggctaaaggggcctgttcctcctttcacgtggtgacagtccttgaggtctgggcgccttccgagttagaagtggggctgacgctccgct

SEQ ID NO: 12320 - DNA, 201 bp, Bos taurus
acaggaatgagctctttctctgtggccaggattcgggacatttccttaagggctgatggaaccagatgacgccctgacaggcagccctttggttactgcccgtcttcccattggccttccagaatgttctcgcatgttgctccctccatctagcaggccagctctcctcgaggcccccctcatctgggctctgtgccccta

SEQ ID NO: 12321 - DNA, 201 bp, Bos taurus
gccaggaaggctccctctgaccccaacgattccagacgtgaggccgagacccagcccgacctcagaccttagagttcatgtccagttgcagccctgggccgcagaacccagacttgcgacccaggctcagtcctaggatgccaggcttcatctcagccctggggctcacccgctcacctctccaactcctgaaagaagcca

SEQ ID NO: 12322 - DNA, 201 bp, Bos taurus
attcgagaaggttggtcaagggtcacagccaggccccaggcggtcttatcaataaagggaataaaaacacgggaatacaaacccaaggttcactcctgcctgcctcggccatctgccaactgaaccccggctgaagctggaagacacagacctgtgggtgtcgggccagcctggggtctgtgtgcagaagggtagagagca

SEQ ID NO: 12323 - DNA, 201 bp, Bos taurus
atgcttgcccggaatttccaatatactcaatggtgaagtgccttcaccccttcaggaatccttcaggctcatgcctaagacatctggagggctacctatttgaagcctgaaatctgcctgagacaggtgatgatttcctgtaagccaagttcttgtgcaagaaacatgttgcaattggcatccgcaacacgtttccggaaa

SEQ ID NO: 12324 - DNA, 201 bp, Bos taurus
cctacgtcttccttctccgcgccagagacctccaggggtccagggagaccagctttgcggagctcatctccaaggagtggccggacgccccggtcccggtggagaaggtcctgtcccagcccgaaaggctcttgattgtggtagatggactcgaagagctggagctcaccttcagagaccaggactccagcctcctggccg

SEQ ID NO: 12325 - DNA, 201 bp, Bos taurus
tgtaaggcatgtggaaaggcctttagcggtaccacacaacttaatgaacaccaaagaatccacagtggtgggaagtcatataaatgtaatgaatatggaaaggcctttggccatcgttcacatcttcctcaacatcagaggatccaaactggtgagaaaccctaaaaatgtaatgaatgtgggaaggcctttaggcagggc

SEQ ID NO: 12326 - DNA, 201 bp, Bos taurus
ctcctggaccgggaatcgaacccctgtctcctgcactgacaggtggattctttatcactgagccaccaggagagaccaagagatatcttgttactcgtgtcggtctgacttcaaagtccttgctccggaccaccatgtcctgccatccccagaggtcttgcatgtggtgtctgctagtatatataatttattagtgatgag

SEQ ID NO: 12327 - DNA, 201 bp, Bos taurus
ctcagaaatggcactgaagagaacagatttgaactccaaaccacaatgaactgaactaactgatgaaccacgtaagaatatcattttaaaaatgagttaatacaaaatgaggaaagatcgttacattcatcctacaaaggactggattcctatgcaaaacatataaagaaatcatacaaatctgtaagaaaaaggcagcaa

SEQ ID NO: 12328 - DNA, 201 bp, Bos taurus
tctgtgtcgcagctgctcctcttttgcatgaaagcatcccagacggtacctaaggatgactgtggctgtatcaacacacccttatttacacaaacaggcttggggctggatggccatagtctgcccacctctgacctggagaattttctgtaccagctcctgcagtacataaagtcaagctgctctctcacaaaagggcag

SEQ ID NO: 12329 - DNA, 201 bp, Bos taurus
tctgtgagcgagtgatgaggacgttcataccgccggggcttgtggtagctcagcagctcctttaaaaaggtctgcagagccagcgcggccatcccttcccgtctcccccaccgccgttctgctacactctttcccaatttaacacgcagtgctgtccagccagcagcctggagagtttaccatgattcctccggccctaga

SEQ ID NO: 12330 - DNA, 201 bp, Bos taurus
tatccccccacaaacgcgtcctccatgtcttgctcttcatttcctaagttgttctgcctttcagacgcgtctcctcccaccaaacaatgcattgatgcctccacacatctacgtgcctgatagctgaggcacctactgtgtgcaggcactggggtgggccagggtgcaggaggagaccgagacagggggtctccacctcac

SEQ ID NO: 12331 - DNA, 201 bp, Bos taurus
agtcagtagcttccatgtgattttggtccactcaggctaaaggacttagtgatttttctaagaggtcgggtggggtggggggaattccctggccatcctgcggttaggaatcggtgcagagagaacgggttcaatccctgatcggggaactaagatcctacaaggggcgcactgcggccgaaataaaaaggacgacttcca

SEQ ID NO: 12332 - DNA, 201 bp, Bos taurus
gttccttagtaagatcacactcaatctcccctggtgtttgtattttaggaagatggtttcagatgcccgcacagccccacacatcagacgatgacgaagcaccactaactgggggccacaaactcattaatgacaacctagtctccatgtatcatttctcccaagtctctgggatgtgaaggaagaaacgcctctcgtgtg

SEQ ID NO: 12333 - DNA, 201 bp, Bos taurus
cattgtggtgttggggaggccagggtcagagccagactctggtgtttagtccctgctttgcaccttaaaaactgtgtggtcctgggcagttacagactgcgtctgggcctcggggtgcgtctgggcctcggggtgctccttggtaaaccggagtaaggtggagtttacttcccggggctgcaacagggctaagtgggtaac

SEQ ID NO: 12334 - DNA, 201 bp, Bos taurus
tgactgacgtttttgccgtgtctggccctctgctgcccacggcataggcggtgtgttgctcgtcttcacagcggtcgtacaagttctcgctttagctttaattttcaaaagagggaaatgaaggcctatgacatttgagtaccttgccagatgccataaagctaacgttgagttcttttggaattcgggcctaggtttttg

SEQ ID NO: 12335 - DNA, 201 bp, Bos taurus
ttgtgtctttacccgtcattgaagtcctccataccttccaaggcccaggagtgacaatgggccgtccttcactgatcctggcccctcatcctgcaaaagcgcaagggctcactcactggtgtgtcacacactcagagcaagcatgtccttcactagcgtttctttgctttcaggttgttggtgtgaagcagacaatgagga

SEQ ID NO: 12336 - DNA, 201 bp, Bos taurus
acgcccttttagaaaaggtgtatcccttcctgttgctagattctcagttcctactaatcccccatttctgaaccaagtatggtcccccccaatgtctgtagcctaacactcagcaacaccagcctgccacattatgcacattatggcacatggctgtgttccagctggacctagagaacttccattgaacagtactagggg

SEQ ID NO: 12337 - DNA, 201 bp, Bos taurus
ttgaagtcttccctgtttgcagtactctttagtgtgaacttcttggtgtcgaaggaggtgggagttttggctaaagcctctcccacagctgacgcattcagaaggcctttccccagtgtgaactcgccgatgtttaatgaggctggagttgtacctgaagaccttcccacattctctgcactcataaggcttttctccagt

SEQ ID NO: 12338 - DNA, 201 bp, Bos taurus
tcccacattccccacactcataaggcctttcagtagtgtgaactcgctggtgtcgaatgagagtggctctttggctaaaggatttcccacactggacacagacataaggccttgctgtggtgtgaattctccgatgttgaaccaaggtgaagctttgtctaaagaatttcccacattcgctgcattcataaggcttttctc

SEQ ID NO: 12339 - DNA, 201 bp, Bos taurus
gaaaataagaaataagaaaacttataaaatattatttatacatgtcctgatgttgttttaaagcagatctccagaaacaaaagatgtcatgaactaaatcttggcagctgaatctataagaaacattgccaagaatggatttaggtttcagagcatcatttcagcatgaaccatccaatgaggacccaaagtcagcaaata

SEQ ID NO: 12340 - DNA, 201 bp, Bos taurus
ccctcctgggacaccaccaactccagatgtctctgggagtctgtggtggccccattccagactctgtaccccacctggctcacctcctttctcatcatccgctctgagaggggaggggggccagggaggaaaagtcctcatcaagctccatgtggaagaggggagcaggaagagtttcagtggactaacccttgtagggtt

SEQ ID NO: 12341 - DNA, 201 bp, Bos taurus
ggcaggtagaaactggtttgaggggtatacacaaagtatcagaatattgacatttacttattaaatacgtaaaatttaagtctactgcacaaccataaaacgagttttaaaatatgcaaaacctgtcgccatatgatcattcaactatggtagcattcttaaaagttatttttggctactgaacctgtaagaggggaaagt

SEQ ID NO: 12342 - DNA, 201 bp, Bos taurus
ctacaaagttgttttagggcaaaatgtcatggcctggaagccactcagaagacagggagtgctgagagaaacccctctggccactctgtgaaaatagaagaaaagtttacatccatcatcatcaagtaattatttccatccaaaagctgtcatcatctgggggacctctctgaaaaagagatccaagttgttgcctaaggc

SEQ ID NO: 12343 - DNA, 201 bp, Bos taurus
ataaccaacgtttttcctatttttaaaaagcatatattcttggtcttgtggctttttctctcctcaacttctggcttactttttcctcttaatttcatttctttatacttttcttccagttcttcattccgtatagcatatgttacttactatgacttttgtgaggcttccattcttcttccgtgtctagttatttccccc

SEQ ID NO: 12344 - DNA, 201 bp, Bos taurus
gcaggcaggttcctccgcctgtcaccctgccatgctccatcacactgtcagacacagggccccacccacgaccgcctcagccgcctggaccccggggccgcgcttcaggcacgtgagcaggcgccacgcacttcgggctttagtgtctggtgggatgagaatggtaagggcccaggggaccagcgtttacctgaggcggat

SEQ ID NO: 12345 - DNA, 201 bp, Bos taurus
gccagaaaggctcaacatttacactggctgccttttaatgagggcattgactttatcctccatgaccatgcagaatgagggcagagtagatgcaggtgagctctgagattgaggccatggtgagggcaaatgctaggtgggggctgccaggcatggtgctagtcaccggatgaagtgagggcctcatcccaaaatggcctt

SEQ ID NO: 12346 - DNA, 201 bp, Bos taurus
tgcagctcttggctgttttgactcatccacaacctcgaagggaccttgaaggactgagaaagctgggcagacccccaagatgccacttgggccttaaccaatgtgcttctgtcagaaagggggacactgaaagggggatgtcttgagagccctcctgggggacacccaaggggtaaccccggccaaccccagttctttgtg

SEQ ID NO: 12347 - DNA, 201 bp, Bos taurus
tcgtggccccaaaagctgagtccccccagaacacataaaacagggccgttgtctggggaaacgtctctgtagatgtagttaaggatctcaaggtgaggtcgtctccggttaaggtggccctcaatccaactgaccagttccttatgagacaaatgaggaaagacagaggagaagccacgtgaagacagaggcagagacggg

SEQ ID NO: 12348 - DNA, 201 bp, Bos taurus
acactttcgttgcagtggcccaacttaaatccatatatctgagtcactttgctgtgcagcagaaattagtgtaatattgtaaatccaatataactcttgcgtcttgagtattggcctttgcagcagtgagcagctgaacttgggtttggtaccagccttgtccagttacactaaattcttttagtaaaaattttcattgcc

SEQ ID NO: 12349 - DNA, 201 bp, Bos taurus
agccaccatgataggaagcccatgcactgcaactagaggaaagctcgcacagcaatgaaaacccagcacagccagaaacaatttttttaagcaaagatgttgtcatgagtgagtttatgctaagttgcttcagtcgtgactgactctgtgaccccatagactgtagcttgccaggctcctttctccatgggattttccaga

SEQ ID NO: 12350 - DNA, 201 bp, Bos taurus
agacagaaccaaagtgctttctccttgcagttggcaggaagttcaaaccatccaagcctcaatcaatgcaaggccaccatcatcccaattccattctctaatcactataaaagcccaaagaaagacttcaatcatggtccagtgagtaggactctgcactttcaatgccgaggacctggagttcaatccttaattgatccc

SEQ ID NO: 12351 - DNA, 201 bp, Bos taurus
ccatgaacactggctgctctctcagtcatctttacacgggggcagccatcctctccacagagcttgctgtcttcagcatcgctggcctagctgaagccctcggcagagcgtgacttgaagaccgtgaccccctccctgcagtgctcctgtctctgtctcctcgtccctgttgcagtttccctgttctggggtcaggcagag

SEQ ID NO: 12352 - DNA, 201 bp, Bos taurus
gaagaaccccatattccccacctcaactcgagatgaggctggattctcctgtttagagaagaatcctgaattccgcattgaaactcaagaggaggcctggattactagttgcaactcagccgggtctctatgttccccattacaacttgaaagaaactccaagcttcccaccacaacttgagaagaacccgagttccccac

SEQ ID NO: 12353 - DNA, 201 bp, Bos taurus
ccggcccctgggtctctctcttcctctggttggtaaagtgatttaaaacctcctggctattctcattttgtcaaatagctcctataggattcagtttcaaggctcaatccagaaatttctggctcagcaaatagatccaaagcaagaaattgtattcattcaagctgcttgtgagtaaggaatatggtttctcgtgttttg

SEQ ID NO: 12354 - DNA, 201 bp, Bos taurus
aactgggtttatgtataacacttatggaatggaaacttgtaagtccttacttagttgggaactttagggaaatctacccgtgaaaatgtccaagatggggctcttttgatgttccaaaactggaattttccatgtgcaattagaaaaagacagcttgatcaatatctttagaattctgacccaaagagaacaatcatttta

SEQ ID NO: 12355 - DNA, 201 bp, Bos taurus
tccatcttaacatgggttcttccagtgtgtgtatatatatccaagatttcccttttaataagtaatattggattaaggccccaccttatatcattatgatcgcatttcaattaactctatgtatctgcaataactctattctcaaataaggcctcattctgagctacctcaagttatacactcaacacataaattttggtg

SEQ ID NO: 12356 - DNA, 201 bp, Bos taurus
tccttgttagtttattggttggagtcaatccagtcctgggctctataggcctatggtagggttagtcatgacctccaagagggcctatgccaagagggccgtctagaacttctactctcattgccctctttcctgtagtgagccctgctaacccatgcctccacaggagacctcgaacattagcaggtagttttgatttag

SEQ ID NO: 12357 - DNA, 201 bp, Bos taurus
gggaggaggctgaagagagagggcaaaaggggctgccttatagatgtctcctgctacctacagatacccaggtgttacaagactttaccctgggcctccacagaagggaggactggaactcagccctaccagaaaccagaccagaacagaaccagaattcgccttctctgccaagaggaggttatcagtctccaaccctca

SEQ ID NO: 12358 - DNA, 201 bp, Bos taurus
ttgtttggcctcactgtacttcagacacacaaacttgtgttcagtaacagtgacaggctagggtctgctctaaagaaaacatcccctcactaatgactgaactaagttgtggtacaagggccttgacattttctctcagtgtgagactcttctaccaggtgtgaatgaaaatattgcctgtgtcaacttgaaaaaaaaaaa

SEQ ID NO: 12359 - DNA, 201 bp, Bos taurus
caactcagcaaattctaatatattttcatcaagtatttgacactttgtctgccaattaatagttggacattggtaacaagaaatgtacttaacaaaaataagctgtaagagccaagtcaaggaaaagaatgcttttgtctcaagtaaattgccctgagaatagattaactatacataaaaagaaattgacattagttgtaa

SEQ ID NO: 12360 - DNA, 201 bp, Bos taurus
ggttctttgggacactaatccatcatctatttctgctggccttctgaatagtctctattctttgctccatcacttcatctctctgtatattggcctgcatgcagtgagcaatgcaagcttgggcttggtaacacatatattaacctttagactgcatgccaacaagcagattatggtttaagtcaaggggccaaataactt

SEQ ID NO: 12361 - DNA, 201 bp, Bos taurus
aggaagatactctaaagaaaggtaattatgtctttgtaggccctccttcaccaaatagtccagaccttgcatggaatctcccatattataacactaacttgtcctcatcaggaacagcaccatggccaatttatttgttctgatttatgcctacatgaactgcatgtgtcaatttaaaaaaatagtcacaatctagaagtt

SEQ ID NO: 12362 - DNA, 201 bp, Bos taurus
aaggaaaacgagtagcttgtgtccaaaacactcaaactctgaaggatttcagagagagtttttaaaggcaaatttgtagggagtgctacagagtgtgtcactctcttctagtttgtcggtgccggggtaacagggtggtgctccaggaatctcagtcatctgcctctggttccaaccagtctcagggactacacgctcaag

SEQ ID NO: 12363 - DNA, 201 bp, Bos taurus
ccttgaaaaaacagactcccaagagtccctggaaaatggacacttacataaatctgtccctgttcagactttcttcttcgttcttcttctggtacagtctctttcctctctcacacactttcgactgcagaacagaatgtccatttcacactgttcaaaatctctgtctcatttttcagtgctaaaacgatacagggccct

SEQ ID NO: 12364 - DNA, 201 bp, Bos taurus
gctttctctaggcataaataggcaagagggaactttttccagaaccagtgggaagagttgcacacggcaggcagccgtgagggcagtggtgtctgtggccgaaggagcaacgatgacaaggagcctgaccacatccccctgcactctcccgcctcctccccgtgggtcccatccactgagccagtcagaagcgagatggca

SEQ ID NO: 12365 - DNA, 201 bp, Bos taurus
aagccctaggaaacgatcccccttgatgcaaacatagtgcaaatgacttaacaagtaaacaacaacaacagattactaaatgaaaactcagcagcaggcccaggaatctacattctaatgaacccctctaaatgttagtatataaggctcgacaactgcagataaagaacaacagagtgtggcttctgtcttttgggatcg

SEQ ID NO: 12366 - DNA, 201 bp, Bos taurus
ctgagccatgatacctatactgtcagaaaatgcttcaaagaagcaaacaacttctgtggtccttcaaatcatatgaggtggaatgaagaaaaagaccacttcttttatagaaagttgaaatgctgaaaacaggcaagaccagataaacagacctattagaaagataagctaaggcatctaccagaattgcatttgtaacat

SEQ ID NO: 12367 - DNA, 201 bp, Bos taurus
tgattttgtcataaagggacaggggcgagaagtatttcttcattgaaaagaaataaagctgaaaagctccagaggctttgctgagtcagggagcccagcctgttgagctgggctggagggcctcagctactatcctcagactttaaaaatgtggttataagggacacagccaccctccaggaggagtgctgttgcttggta

SEQ ID NO: 12368 - DNA, 201 bp, Bos taurus
acccgggagagaggctcacgtcccttgcaggcaagtgggtgggcctaagcaagaatccgcagacccacgttttcactctgccatcaacttgtaacacttgccctgtctggtccccccaccccaggcccccgggagcacctcccactcccaccctcaccccccagaagcaccccccaccctgccccccgcagacggccgccc

SEQ ID NO: 12369 - DNA, 201 bp, Bos taurus
gttggcgatggacagggaggcctggtgtgctgcagtgcatggggttgcaaagagtcggacatgactgagcaactgaactgaactgaataaagtttaagataggaacctggggaaagcaatggccattaattaacacatttttgactggatattttttttttttttcagaaatgaacacctgtggcattaataagtcttttg

SEQ ID NO: 12370 - DNA, 201 bp, Bos taurus
tcagatgggccagtgggcatccctgattttgaccagcgactatgcacttggctcacgagtctttcaagatcaaacgaatgttccctaacaactcacatcttgattatccacatcgggccctcttgagaaggcaaagctgtttcagcctcctccttcctgtcaatcctgcctctagatcctcgcctcctcctcttccacagg

SEQ ID NO: 12371 - DNA, 201 bp, Bos taurus
cgatccttactaccagttgctgaagactggaatttgagtcatggtgtgagattttattgggattcttttcttgttactcctaataattctacagtgggccgctagatctttcctggggatgaggggctggggaagaggagagagaagccacagcccacccctggcgcgttgaggcgggcggcctctcggcgcttgcttgcc

SEQ ID NO: 12372 - DNA, 201 bp, Bos taurus
agtcccatgaaggatgaaaaaactgccttttcaagtctcttctccatggttcaatgtcttgccaacttgctacactggccccccattctataatggtgaggtgacatcaaatattccctgtagctttgcaatgataggtagtgagtgaacatacacagctggatatctccagagtgtaagtgggatccactgtggcctgct

SEQ ID NO: 12373 - DNA, 201 bp, Bos taurus
attgttattgtttctagagattggtctgcttggcacttactccatcacactgaaagtagaacttcagaagatattcaacagctcctatcaataacttctacgtttatcattatttcatgatcagtcttctctttctgagtcacagaatcacagatatcctgtacaggcattgtgaaacagacagacaaaaggaacctagat

SEQ ID NO: 12374 - DNA, 201 bp, Bos taurus
acgtctatggtgaattaatgaaggccaagaataaaatttggatccactgacactcggtttgaactctttccttcaagccatgctgcaggcaacaaaataccggccccagtagattcctgggggaaggaaaggggaaagaagtgccagcctaaagtgccattcctcacctgctacaaggacgcttctagcaggggtatgtcc

SEQ ID NO: 12375 - DNA, 201 bp, Bos taurus
ataaacaatttagaaaagcccaaatctcataactaaatgggcacatgggaacagtcttctcttgtctccaaacaccttgaaatgagaaaaattgtgaaacaatgacatttaccctgaaaaatggtcaacatgaagtttgaagatgaaagatccacttagcatgcattgctttaaacctttgaaatgagcagtgcctgactg

SEQ ID NO: 12376 - DNA, 201 bp, Bos taurus
tggtccgcccctgatgaggtcaccttgttatgttaaatatttctacctcctggtggaggaaccgaagctgattgctctcaaggccacctctgcccagaacggagaacacagcacccaaggcaggatatacactttccaaaggcttaggtaggctcctctgtgaactagaaagattcctttcaggccccaggaccagagcat

SEQ ID NO: 12377 - DNA, 201 bp, Bos taurus
gagaagccagcgtcccgaggccggctcgggactcgcgcgcgtccctgcgcctcagcccgcggtggcgcccatccgcgccgctccacgtgggccggcttcctgacaccgctcagcactccttttatttatcttggactccgcagtcgctctcctgtgctccctccccaccccctggccacctccccgcgcctccctcccggc

SEQ ID NO: 12378 - DNA, 201 bp, Bos taurus
cagaggagacttctgtgtcttttagtgaacagtggcctctgctctgctctgcatctctgagagtcctaatgcccaggtcacatcacccagaggaggtgcgaaaggcaaacagcagcgcctcgggccctgcagggagagtggagcccccaccgcagggccaccaaacactctgcatcagacaaggaggacgggcggcagtac

SEQ ID NO: 12379 - DNA, 201 bp, Bos taurus
tgggccactctccactccccacgctcaccctgcacgtttcgactcccatgactccactcacgtgaccttctcaatcccacatactctccccacttcccgatcctttgatgtctccctcggcctccagggctccgctcagaagtgaacccccgtgagaagtctgccctaaccccctgctcagatttcagcacctcttcactc

SEQ ID NO: 12380 - DNA, 201 bp, Bos taurus
gctgagagagaagtgaggaatatttttttccgaagcagagtcacagtcagaatgctatatccccccgggagcttcctggtcttctgaagcgaggcccccgtggaatcctctcttttgcaggagccaccaccaccaccagaggcaatgctgctgccttgaggctctccaacctggaagtctctgctctcacccggcctgcac

SEQ ID NO: 12381 - DNA, 201 bp, Bos taurus
cgtctggggacagcctgcatctgaattctggccctcacaccctctggcattgttggatcctggagattcaaaccatagccagtgtcaccctgcaggagccgggtcctgtctaccctggccttacctgcccttcccccctcacaccctcaatgagagctggaccacaggccgatcctggagctgctgctgcagaaattcctc

SEQ ID NO: 12382 - DNA, 201 bp, Bos taurus
agtttctcccacagaagtagatcttgtccggatggccttctgaagactcaaagagcagaggagatgactacagccacactccttactgctgctttggccatgtccagtactgtgtgatggtaaaaagcaaagactttcgaataagtggacccaaacttggtccagactaacgggtgactttgtgggcctgagctacccact

SEQ ID NO: 12383 - DNA, 201 bp, Bos taurus
ctctgctgtttagtttaatgagagggtggagtgaatcttcggtgctgtgatttttcatcctgttaactcttttcaaaagggccccttatcttgtgagcagagaggagtgatgtcctatacgtgggatcactgtgtatcttctctgtgaaacttcaatcagtcaggagtggaccttcagtccctgcctgttcgctgtaagaa

SEQ ID NO: 12384 - DNA, 201 bp, Bos taurus
aagccgtgaacccttgttctgaagtgagggtagaaaagatgcaagatggggtttctgtccacgaggtgctcctggttggggagagaggtttctattcagattccctttcccctcgaccatgactctgacctctgcattcccccagggtttgtttcgaggccaggttgttgcctgctgggtcctgctgcttcctgggcgttt

SEQ ID NO: 12385 - DNA, 201 bp, Bos taurus
ctttcctcacttgcgggcagggccggtggggaaggtccaggtgacatgcgtcatcccacagcccagctttagaagcctgtaagatgaatgactgtcttctcggaggtctggacttcctcagcggttttcagccctgggggcacattagaatctcccagggagtttttaaaacatcctgatgtctagggcttactccagatc

SEQ ID NO: 12386 - DNA, 201 bp, Bos taurus
ttagcgacttttaatggttccactcctaacagttaacacctagctgcagcctctaatctcccttcttccctgtggattcttgctcctgtgaaaggccctcgaactgaatctggtttgctggaaatgagtgatattaaactcctggagggtccttttcagcacattccttggtattaaacttgacgtcaactctcaaccaaa

SEQ ID NO: 12387 - DNA, 201 bp, Bos taurus
aaggctcctgcatcttctgccgtgccacctctccctcccttggggaccttctgaaggcatggcaccttggtcccttcttctaggatctgggttccagaagcgtggccaggaaggggattagcctgaacgtcgccagcctccctgtgcgtgctgcagcagctcctgcctggatgagaatgttgttgttcagtcgctcagttg

SEQ ID NO: 12388 - DNA, 201 bp, Bos taurus
cgtgctggttggttcatccactagacggaatttctccagaagcatgaactacatttttttcccccttctcttcgggaagctctagacaatgctccatgcagcacctatttcatgctaatcagaagagtttggaaagttcttgagccctctccaccccaactagatgaagacgccactgcaggtagcaccctctctcccaga

SEQ ID NO: 12389 - DNA, 201 bp, Bos taurus
gacagctctgtgtccttggtggcttctctctcaggtcctttcttggggacagtgagaatatatttctgcccttcaataacatggggcagaaaagtgctcgttttatatacatgatctctagtgatgctcatttctacaggatgtcccatggagagggactctttccatatcttgggacgtgtaaacctggatcagcaagag

SEQ ID NO: 12390 - DNA, 201 bp, Bos taurus
tccagagtggccacaccattttacattcccaccaagaatatatgagagtattatttgctttcaccttgttgacactagctattgtcagttgttctttattaattttaacttttcaaatactttggccatctgatgtgaagaaccaactcattggaaaagaccctgattctgggaaaggtggagggcaggaggaggaggggc

SEQ ID NO: 12391 - DNA, 201 bp, Bos taurus
acttctccgactatgtatggctggcctgggtgggcaggagggaaaaggaagctgtttcctggagtcattgagacagaggcctcaggggaccaccagccagcgctccttttggtggatttgtggctcttccttgagttacactctgaaggggagtgctttttatccacagccttggtttccagtttggcctaaattctgcct

SEQ ID NO: 12392 - DNA, 201 bp, Bos taurus
atgacctcatttttataaccttccttattataaattatccctccatcacagcagggaccagcatggctttttacaaccatttagcggcagcgtactcctctgaggcccaagtcaccatggaaacttccccagtatacagttctagagacatccgtgtacaccaaatgggcaaccaacattttcaagaatgactgccctcag

SEQ ID NO: 12393 - DNA, 201 bp, Bos taurus
caaaaacaggctccttctcttcattccagttgaagttcaaaggtcacttcttcagagcagccttcccttgaatatcctttctaatgttgtgtccccctgcgccaccagtatcacttatacttattttcttcatagcacttatcactattaaaagcatctatttattcacttaatgactgtaggctcaaagagagcgggatt

SEQ ID NO: 12394 - DNA, 201 bp, Bos taurus
ctcgctccagcccagggtcttcaaaacaaagccatggagaaagaaaaaccagtctgtcaggaccttttggaagtcacatttcaggccaaagcaagctcccaaggagtctgtgtgccccataccctccactaggaaagctgaaaagtaggaagggacagacaaggccttgcatatcaaggtcccagaggggagcggtcccca

SEQ ID NO: 12395 - DNA, 201 bp, Bos taurus
attgtaccacatttttatccattcctctgttgatggatatttagttttcttctatgtcttggctattgtaaacaatattgcagtgaatccagtgttcattgtggttttgattagcatttccctaacaactaatgaaggtgagcatcttttcatgtgtttattggccatttgtatatcttctttggagaagtactattcagg

SEQ ID NO: 12396 - DNA, 201 bp, Bos taurus
agaagagtccagtcacgggagggagaatgctacagaggctagctttgcaatcctccagcactctgctgcagcagcaggccaggagagcagagaagctgctcggagcctgtgtaaactcagctctgtgggtcagtttatcttggctattgtgttgtctgaagagattttttgttgggagcctgggccttggggcctggcaga

SEQ ID NO: 12397 - DNA, 201 bp, Bos taurus
atgggaggaatgcagtcattttgttttaaccaggattagcctctctgagcatggccaagcacaaaagaaggactgacactgaaggtgccaggccctggggactgcaagtgggtcgatctggtttctttgaaacgtggagcagaggcaaggtcaacggaccctttccttcttggcctgaaccaagtctgacactgcgttttc

SEQ ID NO: 12398 - DNA, 201 bp, Bos taurus
acaaattaccccaatattgttgacttaaaatacaagtatgatctcagtttcagaggatcaggaatcctggagtgggtggtattgctagatcacatagtgattctatgttttaccttttgaggaactgccagactgttttaaagtggatgatccatgttgtattcccaacaacagtgtataaggattttaggttctctacaa

SEQ ID NO: 12399 - DNA, 201 bp, Bos taurus
gggtaggcatgcgagattaaagaggtattgaagatgagcattcttagttatgctgttcttttactttggattgtggccctcagatgactgctatagtggagaaggtgttgcactgggatttagtagaggagggttcaactttagattttgccgccgactagtaatactcctctgggcctgtaacttaatctctctggcttt

SEQ ID NO: 12400 - DNA, 201 bp, Bos taurus
taaaattaacatccatttggtgaatgttgttgttaactagaattgtacagatcaagactgttttacaatagaggagtcatttgtggtcagtggggcataacatgtggttttagatgccaacgtgtaatgaaatgaaatttatgtcactcttttttgctttcttttctgtggactaatcatgaatctactatgtcactgaag

SEQ ID NO: 12401 - DNA, 201 bp, Bos taurus
cagagctgttgttgattattcttagagaataactaagagaataacttagagaactttgagagcacctgtatattgtcaccagcaaaacaaaataaaaacactcagtgggcaatttattttacatttatagtgagaggacagcctttcctgtggatgagacttgagtagttgaggaaagacaatgctaacagagtgggggca

SEQ ID NO: 12402 - DNA, 201 bp, Bos taurus
catctggggccttccctggtagtccaatggttaagactccacacttccattggaggaaacatgagtttgatccctactcagggaattaaagtctcaaatgttgcatggtgtggccaaaaataataaataaatgaaaattataaagtaaagtcttatatataaggacagagatctggtccaaagaattggaaaagacaatta

SEQ ID NO: 12403 - DNA, 201 bp, Bos taurus
aggtatgttaatagttacactttttctttcaacctaaattgacttgctgacctataatttgtttatggtgtataaactactctcaaaaaataactttttcagagccccttctcatatatggcacaccattattttactaaataataacagaagtaaaacttaacttctttaggaattaaagaagtaaaacttcttaagact

SEQ ID NO: 12404 - DNA, 201 bp, Bos taurus
ataaaaagaatctaaagcttccactgtgctattgctatgctgtgacttggagtttcgttcagttagttactttctaagtggtgccttcaagccctccatccggatattcatcagtttcatctactaaaatttatgttgctgtttactgaataccactttacttcctctagccatgctgtctgtctcctcagatgcctctgg

SEQ ID NO: 12405 - DNA, 201 bp, Bos taurus
atcgagcctgaccgtttacatccaggtatttgcacccacaagcctgggcttctaaaccgaacaccacatgtccatctggccactgccgtgggccaatcgcgcagcaggcagactctgcaggtgccttccattcaattctgactgccaagtcccagcgcggcagcccattgtctttctctccagggtttatgggcccaactt

SEQ ID NO: 12406 - DNA, 201 bp, Bos taurus
tttgcccgtcagctgccagttgcttgtcaccgtatccttgcacctgactcgacttgctcaagggtcggctccggccacgggcctttcctttggcccggaatgctccttccagctggcagcacctccccctcgtctcccaccctcttgggtgactgggatccgactctccttacctcggccatctccctgtcctttgtgagg

SEQ ID NO: 12407 - DNA, 201 bp, Bos taurus
agcccccttctgatctcctgccccttcacctttcaggggacttacatactcctcaggcagtgttggggccctgtctgaggaggccagtgtgggaaccagcgcctggagtttcactgtccccagcgactgtcttcgggctgggaacccacacagcttgaggcctatgtgcagtggttaaaaaagggcttataaggtttcctt

SEQ ID NO: 12408 - DNA, 201 bp, Bos taurus
ggattacttagcgcttgacacggcgtgtctctgtgtcactgttcccgggcggaattaaatcaggacaggaaaatattaattccgagttggggatggaggccgctcctttccaattactctccaccccgtcaggcttatcctggcacaaacaaggaaggaggctggattaattgctttggactctgccccactccagtccca

SEQ ID NO: 12409 - DNA, 201 bp, Bos taurus
gtgctacgggccgtggaggcaactgagcccgcggctcgccggcaggagggcagtctggcggcttctggcagcacaagcacggggtcatggtcagggtcaaagtcacgatcaggtggcagaggccggtggggtgcgagcggaatcagagggtggcctgggccgggcacacgcggtcgggggatggccaggctgggcggcgct

SEQ ID NO: 12410 - DNA, 201 bp, Bos taurus
cagtgagcatttgtttggaggaagtgtagggaatgagagaacattcacaggttccagcatttattgaactcttactatatcccaggccacgctgggctctgacatcatctgtctccagttcacaacgacctcaaaaggtaggtactcttattacctccttcttcagaaaaaggtgcccctcacaggtggccacaaagggag

SEQ ID NO: 12411 - DNA, 201 bp, Bos taurus
ctggaggtattagccatgggtcaagttcggaggtcagaggtcaaacaggttgtcatcagtttctcacagctatcagagcaagggcaggggaggggccaaacaaaacccaccaacaacacagctggttcttattagccaaatcctgcctccctgtaaagagagatgggtcagtcaggtccacacccaccccagggacacccc

SEQ ID NO: 12412 - DNA, 201 bp, Bos taurus
aagccctgtctccccctgccctgggcccccaagttctgagcagctcacacagaccttgggattgctggagcctgacagcgttgcagtcggtcgtgggcacaggggacggagggagggcagaggcccctcccaacccgcactgctggaggtgcccgccaaccacagccagggagggtgggggtggggaagcttgtctccgtc

SEQ ID NO: 12413 - DNA, 201 bp, Bos taurus
gaccatgaaagttctggggggaaaggggatggcgagtgcaaaggctccaaggccctgccgaggctagtgtgttctagggaatagggaggcctgtacccccggggtggggtaggtaagaaagagtgggataggagagccataagtcagagccgtaatgggaggccaggtcctgaaggagcttgtaggccatcctaaggcttt

SEQ ID NO: 12414 - DNA, 201 bp, Bos taurus
aaatggtggacaaatgctcctccctgaagtgtttttttttttttacactgggtgttcatgttttattttgagagagagggaggggaggggaggaagacactgggaatgctcacattgctactaacatttttaaaactaacattttggaatagtgtttatgaaaatcttgaactggcttttaaacagtttcaagtttcaaca

SEQ ID NO: 12415 - DNA, 201 bp, Bos taurus
tttagttggaggaggcagaaggccatggaatagtgccaagacataccgtgggacgtggtcatcattaaaaaaaacattaaatgcgcacagaagatggcaattacaactggagccttcgggccacacaagggagagggcagcacccaggagaacctcctatgcatatcaccccatatacagtgaccctatacagccaacatt

SEQ ID NO: 12416 - DNA, 201 bp, Bos taurus
actagcgccacctgggaagcccttgataaggctgctcctgggattaaacaatgtagtgattcctccttaaatcaaatttccttagtttatattcagggcccgctccagttggaccagaattttttcagttttctctcacaactcttctctcccactcagtgccacagtccaccatccagcctacctgctgtcccctactgt

SEQ ID NO: 12417 - DNA, 201 bp, Bos taurus
aagtaatattgaccataatcccttccctcatgtgcatttttgttgacttcctttgaatcgctagcctgtcttagagattcttcagcccacgtgtatgatatgattgtccctggttcatgctggaaatggttctagaaacagactcacagatttagagaatgagcttatggttgtcaggaggggaggaggctgggaagggac

SEQ ID NO: 12418 - DNA, 201 bp, Bos taurus
ctccagccttgccccatctagcctgtgatgtccagccctgactatccatccacatctcttagggaattgttgaaacttcccctgcctgtccacttattccatattctgactctaaaaggagttgatgggggtctgcgcgtgttttcagttgcttagatgtgtccgactctttgcgaccccatggcctgcagcccaccagac

SEQ ID NO: 12419 - DNA, 201 bp, Bos taurus
gattcccagggagcctagcagaccttctatctctgactctccacccacagccaacaataggtcctctgcaaacatttgcagaatgactcactctccactcaggccatacacactatgcgtttatcattcattcgttcactcactcatcacacaattattgagtacctactgtatgccaggcacagtgctcagatcgtgggg

SEQ ID NO: 12420 - DNA, 201 bp, Bos taurus
acttggtgactgtttgatgaatgggcaaatgacagaaacatgacctcaggcttcctggtcctctggcgggaattccttaattcagttccttccatccaaaagaggcttgggccactgtcccgggcaacatcgcgcctgccctattcgtgtggttagagcaactgaagaagcacagcactctcagttctgtggaaaagtctg

SEQ ID NO: 12421 - DNA, 201 bp, Bos taurus
ctcttgtccttttcctcttgctttctgctttgctttctattcaagacatgcagagcataaactcagtctgctcactgccttatgggtcccctcaaattgaatgacaagggccaccctcaacttaaggatcccccaggtcatgcaggttcaaataatgcttgagtgacagctgacgctgtccactgggcctggtggaaacac

SEQ ID NO: 12422 - DNA, 201 bp, Bos taurus
agaggaatgagtcacagatacttgaaaaaaatttttttcttagaacgagtggagtgtaggcatatatccagaatgactgtctgcgggaataaattcatgatattatccaaattctgcctccagtgtctgggccgtagcctgggagctcaactccggctcccaggcttgggtgggggtgggggtgggggctgtaaatagcac

SEQ ID NO: 12423 - DNA, 201 bp, Bos taurus
gtatggaggaatctagagtctttgttctttccacgcccagtacatttggtcacatcaagtacatcattttgatcccagacaggatccctgtctggaggctgtggctttccccagggcacaggaggctacaaaccccctccactggtccctccctctgtgtatgtttttcagctcagttaccaggtagtcagtcccagtatc

SEQ ID NO: 12424 - DNA, 201 bp, Bos taurus
gttgctttgtgcagaagaggtgaccccagtctcagctgctggcattgtggccggggcgctgtgccgcctcccttggactggccactcctcacaccagctcccagtctttgttctggaaagcgtgtggcacacagtgggggttacagaaactggatctagtgggccctgtcctgggggagcctccagtccatgagggagaac

SEQ ID NO: 12425 - DNA, 201 bp, Bos taurus
tctgaaaggtacttctgattccatcacttcctcgtttagaatccttcagcgtctccctgtgtttcccaggatcacgtccaaacccattcactgagacttacgtacaactcagtatgttctggcccctgcctacctctccagcctcggctttcagcatcttcacccactgaagactcctgaccccactgctctgaatgaact

SEQ ID NO: 12426 - DNA, 201 bp, Bos taurus
cctcaccaactctgacctggatgggggaggaggtgggggctccaagagatggggagggtgttagggtccccgtcctgggcactttggaccctggccgcgccactcactcaccctgagatctgggcttcagggtcgaacaggacagtgatgctctcatttaacacaggtgtgcgtgagacggcctgtggaatgcttggcccc

SEQ ID NO: 12427 - DNA, 201 bp, Bos taurus
ccccctgattgaaatgtgtccctgtcgcactgaggccagctctggtggggagagggtgggagacttctggtcccccgtgcctggcctgtaggctccttccgtctgcggaagatagatgacgttattccaagccaagatgatgcaaccaaggtcagagtgaagtgtttaattggaatgtcaggggccggggcctggctctgc

SEQ ID NO: 12428 - DNA, 201 bp, Bos taurus
tgcaggccacaactgagacctgaagcagccatttaatattttaatatgcatattgaaaataagagaaaagagccaaggtaagggaagaggtgactgagacaggacaatggcccaagccacctgcctacaaacgtttcctgaagtcctagtgagtgccagagccccagagagacagtaatgagccgtgggaagctggagtgc

SEQ ID NO: 12429 - DNA, 201 bp, Bos taurus
atgtcccttaccagactctgcctacttcctacctgtggtacagtatcatctgcactgaatggagagggaagcggaggcccagaaagagaagctgatgtgcctaagtgcacaggcagtcaatgctgctcttgtgatcagcaccaccacctcctgcctcccaggcctggacatttgcagctccgcgtgctcccgagtagactg

SEQ ID NO: 12430 - DNA, 201 bp, Bos taurus
cttgcgagataaatgcctaattgataacaatctgggagcccatagcttgaggatctatgggcatatagagtctgtaggcctcacaaagtctcttgtaaaacttggaaggtgactcgtttcccttctgaactattccagccagtttagacatggccgttggcctccgctccccttttaagtccttgtataatcgctgtcccg

SEQ ID NO: 12431 - DNA, 201 bp, Bos taurus
cctcatttccagtctcctctcatgatggcctgacccctgctatttctctcccgcatatacactcccatctcttcctgcagcggttccatgcacattgcagcgtttggccagcctcacaggatgcttgctgcctgccagctcttataccacaggctgttgttgctccttcagacaggattctgcctgcttctgatgaaatcc

SEQ ID NO: 12432 - DNA, 201 bp, Bos taurus
tgaaaggggcctggtccccgaagcccccggcttcaccggtccaatgccattgtgcctttgtgtttcattttcacgctgaacttgccattccagccgcaggatgtggggcctgcccatccacgttccccaccctgtgctgttttctcgctgcctctcgtcagtctgtgtttgccattttctttctccttccaagtcacacct

SEQ ID NO: 12433 - DNA, 201 bp, Bos taurus
agtcataaaaaagctggatctgctttgggcagagattgctgccagtggtccaccctagtatctgttctagttctctctagggcctgtgggttttagctggacacgcgatctcttgcataccctaagaccacatttctcagcaccctgttgtagacaggtatgaccatatgcctaggtctggccaatggaatgtaagcagaa

SEQ ID NO: 12434 - DNA, 201 bp, Bos taurus
ggggagcaagtggaagatgattctgaaagcacttagcgccacggtagcatatggtataagcacatgatgaatgttggttaacagcattatctcacatcccgggtattggatagacttcagctgcaatagaagacactggcaaggcttgtgaggaaatgcagatgacatgcacagtttgagtgtttaccccagcatcatttg

SEQ ID NO: 12435 - DNA, 201 bp, Bos taurus
agcccggctcctcatctacgtagctgctctctgttcccacacccctgtgcttccctgtgtaatgacatccaccatgctggactataatggccaacctacctgtccattctccccatagactgtgagcctagccctggctgtggcacttcacgagcactcaatatggtttctgtgcagtcgcttattcaatgaactgatgtc

SEQ ID NO: 12436 - DNA, 201 bp, Bos taurus
gaactgttttatttccttccacgtctagcatccaacactcaccatccggtgaaatgtggtcatggggacggtgcagagttaatacaaaaaaagtgctcaggactgactgtggtgctctgtacacactcaatgttagtcttcattactatacttaatatttttctgattttcccacagggtgataaatggtgtgctgcgtgt

SEQ ID NO: 12437 - DNA, 201 bp, Bos taurus
ttttcatttttctgaaggatgaatttaagtgccagtgtagagtgaaatataccctctgaataaccacatcgtgtaagaggttggccttcagggagctgcctgctctcagcaggtgataacctgattctcccaggtatcggtctcttcatccagcaatacttccaggggccctgtagataagcagggcaccacgctgagtga

SEQ ID NO: 12438 - DNA, 201 bp, Bos taurus
tggggtggggaggcaggatgactcagatgcctaaactctcattactacatgaccaggaggcatttctaagaaggaaggaagtggtcagtggccacttcctattgcccttatgaaaagccctggttttaaaaggcatgacctgcacccaacctcccacaacaaacacatcctttgctttcttacttccctgttgctatgctc

SEQ ID NO: 12439 - DNA, 201 bp, Bos taurus
ctagatctggttcattcttgcccaaggcaccacccaaatccttgatgcaacctcaggggaccagggtccagcttgaacccaccttctctcaagagaccatcgggccaaacctatgaagcccaccccctattcagcttgttgttgttcagtcactgagttgtgtctgactctctgtgaccccatggactgcagcactccagg

SEQ ID NO: 12440 - DNA, 201 bp, Bos taurus
ggtttggtggggcagaggtttttctgggaagaccaatccagcctctattctgccctgaccagcctatgtgactttggcctctgcagcttcctctgtgaaatgagagcaggagccaaatgactaatgggacttagctgcaaagttctccatccaagtgagcagtcaggggaaaataggacttaactactgcagatggcccat

SEQ ID NO: 12441 - DNA, 201 bp, Bos taurus
ctctcttcaggctgagaaatcattgtgtcatgagtatttcttggagactctggtcacctcaaaactgcttgtttcctggcctggtggagggtgagcctcacatgggtggaattgacgtccacacacctgctgaaggacaagagagggctctggtgagtgagggatgtttgtccttaaggccacctgaggaggtgtggccac

SEQ ID NO: 12442 - DNA, 201 bp, Bos taurus
ttcacagatggcaaaatgaatgaatgagcagaaagagaggatgaaagagaaccttggaaatgggatttcatcagattatcctgtacgtgtggagatcgcaagggccaaggagacctgcacatgcagaaagcaactgcagcgtcgctttgcaaacatccccgtgacctgcttcttcaggaaggtgaccatcgcatccaccgc

SEQ ID NO: 12443 - DNA, 201 bp, Bos taurus
ggaggggtaaaggtggccactgccaaagcaagaggggctgcgatggatgccctgtgggcttgtccctcgtgtgacctgagaagggcagaggaggctggacctcgtttcttggccttggtctgcaggggacttaaaaccatatacagcaatctagccagcctgtgatggggtatgacctggctcgtcacttgggcattcttc

SEQ ID NO: 12444 - DNA, 201 bp, Bos taurus
tctattttactgatgagaaaaccatggcagagaaagtaatttgctccaggtcaaacagccagtaagtggcagagcctaggtagaaacccaggccatctggctttggagcacctcctctcagccacaaagtcacggctgtgaaatgcaacaggtgagcacctctccaacagaacttccattgtgttcagctgagctcctgca

SEQ ID NO: 12445 - DNA, 201 bp, Bos taurus
tgaatatctgtgtgtgtgtgagtgtcttttttccttagtatagattcctagaagtaaaataagaggtcaaagtgtatgtaccgcaggcatttttatatttattgctagattgctttataattaaagtgttaattcaacagagcatgagagtgtcttcaaaatggatatggccatcttcatttggagcaaaataaaagctgt

SEQ ID NO: 12446 - DNA, 201 bp, Bos taurus
gccatgctctctctgaaacctgaagaggagaagtccttccccacctcctcctagcttccagtgatgaccctcagaccgtggccttccttggcttgtagctacttctgcctctgtcatcacggggcatcctccctgtccatctgtcttcacaggcattttcctctacttggaaggacagcagtcacactggcttaaggccca

SEQ ID NO: 12447 - DNA, 201 bp, Bos taurus
tattgacatctcacagtccacctagaattgatttttgtgtatgtgcaaggcaacagctcagggtttatttttttcccatataaacaattggcccaacatcgcatattgaaaagaccatctttccccacttgctcttcagcactacatttgttataaatcagagtggccatatgtctctttctagtttctctactccgttct

SEQ ID NO: 12448 - DNA, 201 bp, Bos taurus
cctaggaaactactgtttcgtgggtccgattgtgtaggtcacatgacgctgaggtgaggtttctttgtctctggtgtttgtaccagtggtttcccaggccagtttgctttgcagaggtgatgaaagtggctgacctgacttttggtttgtatctcatgctcagcagtgactacctgctggtagtaagcttttctgcccact

SEQ ID NO: 12449 - DNA, 201 bp, Bos taurus
gctggttccatgaagatttcccatgtggtgaagctccagcagaagatgtcacttgacacctgcagagaatccactcccttatctgccttttggacccgcccgcactggtctgtcttcaagataagcacaagaaacccctcgctggccttaaaaccctattaaaatgctgaggaaaaaaaacacagtttgagggcaagttct

SEQ ID NO: 12450 - DNA, 201 bp, Bos taurus
caaacagattcaagcaaccaccgtacaccctgcttcaatctaccactttttaccgaatgagttttaactttggtagcatctccttctccggaattgcaaatgataattctttgaaaagaactggaagaggctcagtgattccaaagaggcactcttcagtacagctcagggtctagtctgaactcgtagaggacatggaca

SEQ ID NO: 12451 - DNA, 201 bp, Bos taurus
ctgtctgcttatttttaaaatctctcccttttcttttcttatcccactctaactattcctgaaggctcctccagagtctccaatcaagaactaggtcttaatgttttgagcctactttgatagtcttaaatcacagatccagttactgagccaagaagctacttagctgtttttggttttaaaaatccccaaagccatgtt

SEQ ID NO: 12452 - DNA, 201 bp, Bos taurus
agtagaactggtcagattgcctacaaaatttaaatctctgatctttgttttcttgcccaagtattgaggaaatattttgtgatttcagcctgtcacatatttaacctaggatgaagatatcaataacttaaaggtaaatactaataaaaattctttaaacatagaaaatcaatagtttatcttctccatggctaaacaacc

SEQ ID NO: 12453 - DNA, 201 bp, Bos taurus
ctctgacaggcttgtggcggccccattcctgcaggaacacagccctctgggttgtcagtgtagggagttcccagggcagcataaagagacacagttcatcaaaggccatcctccccacaccctccccacggggtgggcaccagctcctgcaggggattgttgcctcagccctgttctgccacttgttttggggtgggggcg

SEQ ID NO: 12454 - DNA, 201 bp, Bos taurus
cttgttgctcatctacatgggaacaggggaggggagggggtcagaaccggggtctcaggggagccccatcccatttcccagccagccagttccttagaccacccaggcctgaggccaccttcctctttcttctgtaatagtttgcaaggagttaaatgtaagttgacaagcaatattcaccaagctcttctgtgtcagggg

SEQ ID NO: 12455 - DNA, 201 bp, Bos taurus
gccttagattgcaggctattaagcagaggaaagaaaagctcaatagtacatactctcttcaaaagcagtgaagttaagagactgtgggaagagtagcttccgcccagtgacttttatcagtcctcccatacaacttctcagaaataaatttgaatttcctattttttattcttctatctcaccacttcacccttcccaaac

SEQ ID NO: 12456 - DNA, 201 bp, Bos taurus
ggaagcaagtccttccccaggggagcctccatgtcaccggccccagttcatactctgactgcagctttcaagactccagaagagaagcctcagctaagccgtaccctgactctggcccagagaagcgttgagattataaatgcgtgttgtttgaagccactgaatgtgtgcttgatagcatgcctcttgtgggtggggagg

SEQ ID NO: 12457 - DNA, 201 bp, Bos taurus
tgtgatcccaagttttaaaaaaggcatacgtatttaaggaagcacagaaaaatcaacggccaaacagaaatctgttaaatgtggcttatctgtaagaccctaatcagtgaggcttcctcgtcttattttgtttgaatggtgcaatgagcatacattaaaaaagaggggcaaaatgagaaaaacaagcaaacaaaaaacgtc

SEQ ID NO: 12458 - DNA, 201 bp, Bos taurus
gggttgcaaaaagttggtcacaacttcatgactgaacaacaacaaaaacatgtgaaatcttctcagaccaggggttgaacccgtgtcccctgcactggcaggtgtattcttaaccattggatctccaaggaagtcccctaaaccagttttaaactccttaagttgttattttggaagggaaaagagagacccatgtggggc

SEQ ID NO: 12459 - DNA, 201 bp, Bos taurus
ttcactttttgagaacttctgtaaaactttaaaagttgctttggaattaaaatcaactgcagtgaaaagtttgtaaattttaatggtctgttatactagaagttttagtagaaaattggttctgaatattgttaatcaatataaataatgtatattacatttcctttctgagaccttgagttatgtatcatttgtatcctt

SEQ ID NO: 12460 - DNA, 201 bp, Bos taurus
gacagaggagccttaatttctgggctacagtccatggggtcacaaagagatgtgacggaagcaacttggcatgcacaaaaacacttcaagcaggcgtcccgcatctctgggatctaacaactgacgatctgaggtaggactgatgtaataataatagaaatgaaacgcacgataaatgtcacatgctcgaatcatccccaa

SEQ ID NO: 12461 - DNA, 201 bp, Bos taurus
atggtgagcatagtttcataggcttgttggccattcgtttatcttctttggagaaatgttcaaattctttgctaacttttaaatcaggttactgggtttatgggggtttttgctttctcagttgtagttctttatatatcctggatgttaacctcttatcacatacatggtttgcacatattttctcccattccttaggtt

SEQ ID NO: 12462 - DNA, 201 bp, Bos taurus
tggccaggaaagagcgggggcccccagtcactgaccaggagagagaggggacccccgccccgatgcttcttccccgggtctgcccccaccccgacccctacgctggtctctggggcctcacctattggccttcaggtttttcagccgggcttccaggtcattaagcaggttgattttcttgcagcactgagagcagtaaac

SEQ ID NO: 12463 - DNA, 201 bp, Bos taurus
gacagagaatttgatatgaacagatcattttcctagaaaatcaatgacagtgaataagactgtggtgaccatggagctctactcttttctcctttggccaggaaaactcagcaaacatttatcatgggttaggaaagaaataacaaaaatggaaaaactacaggatttatagcaagacaggaaaaagccctaagcagtgca

SEQ ID NO: 12464 - DNA, 201 bp, Bos taurus
gggctctagatgccaagatttgcaggaaaggcagctccaagcccactgatttaactgtacagcagggtacagttctagaagcagttcaacggccaagagtgacaccctcctccttccctcttccccattccactcttcatcagaagattgactcactctcccctctcctcaagtaaacacttccctttgggccttttctgc

SEQ ID NO: 12465 - DNA, 201 bp, Bos taurus
cttcaagtgactttaaaacctgtaacttgatctgaggttggcaaatcttaagttgatgatccttgaaatcacctgcctgcttgcgattgaggtcaagttgtatttaactggtttgtactgcctttagggcagcaagaccaaaaaaggccgaactgcaaatgtagcatgcttctgggctgaggcagcgtctgatgggtgcag

SEQ ID NO: 12466 - DNA, 201 bp, Bos taurus
tcttcgttccccaccccaaccccatggtgtttccagtgcaaagtttgcagacagttagtagttccaagattctaatcatttgcgggccctgaaacagggtcacccccggaagcagcaggaactgagggcagctggggcttcacctgggaagcatgttgatcagtgattttgtgacagtgtggtggcctcgtatctcctatg

SEQ ID NO: 12467 - DNA, 201 bp, Bos taurus
cagggaagtccccacaagtgaggccatcttgaaggttcttctcattgtagaaaattcttggatttttgtgacttaaaaggatgcgagaaatctcaagaagtgtcgggttttgccaattgagccccctgccgacccccgcctcagtcctcggtgggggctggctgaaaagactgctgggcaggaggtccagagccctctagg

SEQ ID NO: 12468 - DNA, 201 bp, Bos taurus
agtcaggattctagcaacttccggagactgatgcttatgcagctgtgtggctggtgagggcccatgacatggaccacgcagaggcctcagcctcaatgcttatgaggctggtgtgtgctgccaacagcaggtctgagcagcatcttgtctccccactgacggccagcagtacagtcctttgggatccccgccctctggcca

SEQ ID NO: 12469 - DNA, 201 bp, Bos taurus
cccgcctggcaccgtgatatgtgcaggagtccaggggcggtgttttcagtgttagccatgcgctcatgagtcaggtgggcctggagcagacagatgccagtggggtgttgataaggagctccagggggttcctgggcagcacggcagtggaggcctctggggggaccacctggtgctcgtccaggtaaagtgccacctagg

SEQ ID NO: 12470 - DNA, 201 bp, Bos taurus
ctatggtctacagggcagagaacggatagcctcagataagtgtctgcaactttgaataacagagctctgaggggtgcctctcacctccttaagacaagaaccaggccctgggaaaggatctcagtgactgcacggtgatgccaggctgctgaggtcaactgtgccaggccctgggtcttggagatggcctccctactgtct

SEQ ID NO: 12471 - DNA, 201 bp, Bos taurus
tttttaatctttgttttaaaaaatatttatttggccacctggggtcttagttctggcacgtgggatgtctgtcgtggcacataggagtctagttgtgaagtgagggctcagtagttgtggcccttgagtgaaagtcgttcagttgtgtccaactctttgtgaccccatggactatacagtccctggaattttggagtgtgt

SEQ ID NO: 12472 - DNA, 201 bp, Bos taurus
agatactggagggtacagatggaatctatggggtacttgctttgtgtcgggcatcagctaagtgccttagaagctttagctcattcagtgctcccagcaggcatataaaataaggcccgtgattagctgcttctcacagaaaagcaaataccgaggcttagagagtgttgttgttgttcaatcactaagcggtgttcaact

SEQ ID NO: 12473 - DNA, 201 bp, Bos taurus
tgctctggctgacacttctgaggaatttcctgggcctatttccctgctgtgtaccacgtgatccctcccggtccattggacaagggtgggcacctcaccctggggcagccagtggcctcgaatgtggaccctctgcctttgagtatttgaactggagacagaggagcagcagttgacagcagtgtagacctccaaaagacc

SEQ ID NO: 12474 - DNA, 201 bp, Bos taurus
gatatactaatttggaatatatttttgtaatgtaagattttttttcactaaacaagttttttaatagcttttaaaagtcactatagtttttttaaattaacatgttttgttttttttcccaagatatttatggtttaagattcaaaagctacaaaagggcttacaagattttttcttttatctgtttccctagtcactcag

SEQ ID NO: 12475 - DNA, 201 bp, Bos taurus
tgagttctgtgagcacagtgctctttatctgtagtaatcctaccaagtattgtacagttagagctcaacttgagagagtgtttagtccagcctcctcattctagggaactgagattcagacatgttgatctagttagcgaagtagaactcccatctccttttatctgctgttaactcgtgatcctaaagaaaacatctgta

SEQ ID NO: 12476 - DNA, 201 bp, Bos taurus
gagcaaaattgtttgaaattatacctaatattcattaaaaattgtttccttgcccctacccctaggtaggggtgaaatattctgtaagaggttataaattcagttttaagattcaaccttggcatgactttcagttggaaatgggtcagactggaaggtatattgtttctgtcctaaaacaggtcatcccaggagaagaga

SEQ ID NO: 12477 - DNA, 201 bp, Bos taurus
tcaacctgagaaacggaagcggggcctgccccagctccctgccacccctcacttaaacagaccagtgcctgaactgaaggggcttagcagaagctgagccaatgctcagcacgccctggccaacgctccccaagcaggagcaagcaatagggtgtggtgaagagtcatcgtttatcttcctctctggatgcctctttaaaa

SEQ ID NO: 12478 - DNA, 201 bp, Bos taurus
gagagcaggagcctgggtgggctgtcaggggtccgggctccactcttcctgtgcagcttggataatcttcttcccttctctgtgtctcagtttccctctcttgagaggggttgggccaggtggtatctgagggtcactccatcctgagaccccagggagtgcctgtccttccagacctgggggcagcctcggccctccccc

SEQ ID NO: 12479 - DNA, 201 bp, Bos taurus
acgggattttctaggcaaaagtactggagtagggtgccactgccttctccggatataagtgttagctattttttatttatataagatcaggccacactgaacctacattcccatattgcaataattagttgggagaagcattggctgtgcacgttacatagagcatggcctccgcagtttacacagaacacacccagcagg

SEQ ID NO: 12480 - DNA, 201 bp, Bos taurus
aggaggtgataaaaactaacacctaaatagagatgtgggctctcagtggacttcctttaacgaccctagggcacctctctgttggcctgaatagatgtaagtggatgtcgtctaggcagaaaacttcattatcgttattaattacgttccagccctggccctctgttcctctgagctctcggcctcggcaaagagcccagt

SEQ ID NO: 12481 - DNA, 201 bp, Bos taurus
aaagtgctgaatcccaggcactggagccccagggaattcccatgactggttttttataaagtctggagatgatcagttgggaggtttagcatgccttctggccctcaagtccgcatcccatttgtcttccgcctcccttccctccaagaaagcaccatccaccaggccattgcttttttttttttttccaaaaacaccatt

SEQ ID NO: 12482 - DNA, 201 bp, Bos taurus
tccatgagagtgacatccctcaagatcatgtggcgcatggagcaccttccaattcctacttcctctaaatgtcacagtcagtcttctctttgattctaggcgctcgttgctgcccaggtcttgtggatcttacctgcagcctttgctccctaagattctctggcaagttgacctatcccatctggaaggcttccagaggaa

SEQ ID NO: 12483 - DNA, 201 bp, Bos taurus
gatccatctcctagaagggagagggggcagtccataggagggctggcgtcttatccagctgccccagaaaaggctggcttcacatctttccaggccagcagcagctctgtgggtgctgcagagaacctgcagaactttctctgccctggtgtggctgggctgtgggggccgggcctcacctgaggcagagctggtgccacc

SEQ ID NO: 12484 - DNA, 201 bp, Bos taurus
gatgcccgcccagcaggctgagccaccaaagctccgggatcagggggaacaaaagccaagggaaagcagagtgctgacagggccagaggccgctggccgcagggctataaaaagcaggagccaccgaggaagcggcaccagatggagacccagactgtgcagcaggagctgggtgagtaaggccccaaggggtgctctggc

SEQ ID NO: 12485 - DNA, 201 bp, Bos taurus
ccttagaaaatgatttcaaatgtgaaaacatctattacaaggtgtaacagcacagcatttgtcaaagggaatataaactgagatttaaatcctagttatattttcctgagatgagaaaactaacatcacccaaggaacattaactaggcatttacaaaaagaataacattaattcaagaaagaacaaagatgtgcagaggc

SEQ ID NO: 12486 - DNA, 201 bp, Bos taurus
gtaaaggcctagaaatggaatctctctcatgggacagttgtatgtgtgactgttagaaaatgccaaagttttcctaagtgttttattttgttttaagtttaccattttaccccttggccctcagcaatgtctgagagtcccagtttttccacattttcaccatttggtattgccaaataaaattatttgaacagagaacag

SEQ ID NO: 12487 - DNA, 201 bp, Bos taurus
tgcctggacaagcccatgcacagaggggcctggagggctacagtccatggagtcgtgaaaaagtaggacacatctgagcgtgcacacaccatctgccagctctctcctgggcctcggtcattaactgtgtgccaggcagacttaagacagactctttcttgggcttctgtacaactcaacttgtgtacactctctagacac

SEQ ID NO: 12488 - DNA, 201 bp, Bos taurus
gctcacagcagacagcagttctgaccacatcgtcagcctcccagtcttgctcctcatctccagataacttcctctcccacagggcccctcacagtgctcagtcacacctgggctcttgcaggaaccaatgtctcctagtacctacctgtgggcttcaggccaggggcccatcattccagggtgaggccccaagcctctcgg

SEQ ID NO: 12489 - DNA, 201 bp, Bos taurus
agcctctgggcagggacatcctaaatagcattaaaaatgagccaaggcatcactggattcgtgaaataagcactctgccctgctcacttctctggcatccgtttttactcatcctgaacagtgggtgagtggctgttgtcaaggctgcttcctccgctcaaaacatttcaaaacgctcctacaaggacttccctggtgatc

SEQ ID NO: 12490 - DNA, 201 bp, Bos taurus
ttatccattactgagagaggggaattagcatctctgttatttgttttatgagatcacccccgtgccaagctgctgtttccaaagcaacctccacttcccagggaatggcccaggcaggccaggcgtcgggccccgcagactcgggtgctccatgcagatggcggtgcctggatggccggtgacccctgcgcacaggccttc

SEQ ID NO: 12491 - DNA, 201 bp, Bos taurus
acaggcgggggtgggtcaaggtcgcggcccagggccccctcgcctcctaggtgcgtggtcttctgagcagtggaccccgctgcagcccaagccctcagcctcccaaggggcccttggccccgcctcacctcccacgcaggccaatgcagccttgaaggcacagctttccatcgccctctcgatcatcttctgctcctcact

SEQ ID NO: 12492 - DNA, 201 bp, Bos taurus
gcagagcacgtgatgctccaggccaccgtgtgtgctgcctcccctccccgctcaccccctttcagtcccactgaaccacttatattaaccaaggtagatcgccggcctccgcccaagggctgctttccgttctcccctccccacttactccgctcatcctgcaaaactcagaagctttcttgggtttttcacaacagtttg

SEQ ID NO: 12493 - DNA, 201 bp, Bos taurus
gagtcaccgcatctcaaggtctgaggtcacagtagggacccctgtgcccccagctccgaggagcggcttcacgcggccttgtgtctcccgcccaggtacacgtcctcagtcaagtacgactcagagaggcacttcattgacgacatccagctgcccctgggcctggcagtggcctcctgcagccagaccatcacctgcatt

SEQ ID NO: 12494 - DNA, 201 bp, Bos taurus
tggatggcatcaccgactcaatgggcatgagtttgagcagactcagggataaagtaaaggacagggaagcctggcttgctgcagttcatggggttacaaacagtctgagatgaatgagcgagtaaacaacaagatgagtactcagtatcagtatgatcaggccatcttagcctggtgactggcccttcaccaagataccta

SEQ ID NO: 12495 - DNA, 201 bp, Bos taurus
tgttgttgtggggtagggtgttctgctgtgcattgtaaggtgtttagcagcatcctgacctcttcccactatccatctggcccccgggtacctcctgggggaacaaaatcaccctgattcagaaccactgatctaatttactcttccccacaggccaggaggcagctactcattttaccaatgagtcaactaaggcctaga

SEQ ID NO: 12496 - DNA, 201 bp, Bos taurus
caagggactctcaagggtcttctccaacaccagagttcaaaagcatcaattcttcggcactcagctttctttagttgagtagtgggggagttgctgaaagccaagctgggcacttggtgacaaggcccagagtgtcctggagagagaccaaccgggaaccctgctcacttagcgcaccttctagccaggccctcaggagct

SEQ ID NO: 12497 - DNA, 201 bp, Bos taurus
tacagccctatttctttattatctctattatggttcttaaccactgtactgtaatctttcatttacaagtctgtatgccatggtagatctcaaaggccaggcatctactgtaggaggcactccataatcatttcgtaataacagctaacatttattcaggaaatactacctgccaggcatagtgctaacggcccttagatg

SEQ ID NO: 12498 - DNA, 201 bp, Bos taurus
ggctggttgattggtttggctggttggattaaatgaataaaaagtcactgttctctttgctaatggctcccccatgagacatcaggccctctctcactcatcatcccatcccccacacccacctggagcggcaggttgggaatgaggcaggtcaccccgaaacccacgagcagcaggttggtgaaggcgaaggcccgcgtg

SEQ ID NO: 12499 - DNA, 201 bp, Bos taurus
gacccccaccctgcagggccaggccgtcatctcgttcctgctggggttggcttcctgatccttcccttccagcttggctgatcacaggcctctggggagagctgggtgcctggggcagctcggctggttcttccggctgccagctgtacccagagcatattggatgagagaactaaccctcccggccactctggggtgggc

SEQ ID NO: 12500 - DNA, 201 bp, Bos taurus
gagcagagatggccttaccttctggggtaggtacccagagcgccagggaatcccttctctcctaacaaggactgccagctatgcagtgtgaaggaaggggtaggggcctgctcttccagcccggcggggtgagaggagaggcctttgagagctcatgcagctagcacaccctccatgcagtttctggatagtttccatcac

SEQ ID NO: 12501 - DNA, 201 bp, Bos taurus
tactccttgactgcatggtctgatgctcaaggccaaaaacgatccttggctccatctgtgtgggattctgagataaaagaaggaacaccgaagtactgctccagtggtctgcttccaggttaggcccctagaaaagagagttgactctcagttctaaaaggctcaaacttgccttataccaaaatgcaagtcagtggcaaa

SEQ ID NO: 12502 - DNA, 201 bp, Bos taurus
ttctgcacaaaggagcaggagcccttaagtaggctcacgtagaaagacaaactgggcagtcacagctacaggctcccaccctagagtgctcactagtagcggtgagacagaatcccactgaatccactactccatgtccacttcaggcagtgttgaagaaatcgcacttttaacccaggggactggttctggtacatatgg

SEQ ID NO: 12503 - DNA, 201 bp, Bos taurus
taaaatattttttaaagacttatgatagagcaacgtatgggttttctcaaaaacacatgaagtacttagatctaatggcagatctaataatttcatacttttgaggtagtgatagatataaacaatatttcaacatattgcaataatcaccaaaagatctgaaaatagctcatttctctggtaatgaaggcaatttgttgc

SEQ ID NO: 12504 - DNA, 201 bp, Bos taurus
cttatatcattttattcttcacttcaacctgagattaaaaaattcctatgcttattttacagatgaacatactgagttatgcaacatccacctgctcccccacgtttcccagtcccttgcagttgggtgggacacagaggtgctggtagaatagagcccgtgcatggttctccagcttccctctccccttacgtagtgccc

SEQ ID NO: 12505 - DNA, 201 bp, Bos taurus
gagagaaaacaaaagtactatttctactttcttcagatttataatctaaagcagtggagcatctatttacaacacttgcctttaatactaagagttactagacttgatattggtatgagtaattctcagtggaaaaggtggtatcttaatcattggcccaaagctaattgaaaaaatacaaaatattttgaatataaattt

SEQ ID NO: 12506 - DNA, 201 bp, Bos taurus
gagggccgccctcagccccgcccttgaccccgccctgcgccctgccctggcccacctgcgtcttgtagatggtgtagccttccttctcatgctgcagggcggagcggaactcggctttgctctcatagacccgggcgaccaggtggtggctgtagggaggcagggcgcagggtggggggcgagggagggcgtgaacgggcc

SEQ ID NO: 12507 - DNA, 201 bp, Bos taurus
tttgtgcagtttgattcctttcctccccctccatggaggaggaaacaggcagagtcttaaagggggcagagcttggattcctgctctgactctctctgccttgatgtgtggctgggttggatcttgggtccaaccaaagtgatcatcaggttcacctgatgaagcacagatcattattagtaccctaattaagttttggat

SEQ ID NO: 12508 - DNA, 201 bp, Bos taurus
ggagggtgagatccatggagccttaggtgggggagggttctgtcctgtcaggcgtcagataagctgaaaggtctcttggctgttgtcgtcactaattagaatagaaattcctgctcctttatgagaatgggaaggtctgggctgcagcctgggttccccatgccatctgtattttaatagaacgtttattttaataagata

SEQ ID NO: 12509 - DNA, 201 bp, Bos taurus
caccaggcctagtctgggaggtgaccctcgcttagcctcctctgtccctctctttgctagtctgagggcagcctcctccaccccaaaccttcccctttcccgaagacaacaaggaggcctgagtgcccgctgttgggggagcagaaagtcacgctcctgctttgtcccctggctctttgctttgcatccctcaaaacccca

SEQ ID NO: 12510 - DNA, 201 bp, Bos taurus
cacaagtgctggtggggctcagtctcagcctctgttcttttcaggagggatgttctttgggatttttttcaatgagggccctggggtttggctccagctcgggcaaagaaaacaaggagggaaagagatttcagggactgttcctcagtgacattagttcttcagtccctatctgtaatgagggtgtaggcctgggcaaag

SEQ ID NO: 12511 - DNA, 201 bp, Bos taurus
gctggcatggcccatctccaaggacctctgagaggcttgagacccttgagccaaacagctgttttagtggggacacaatgggcccagcctggacacagacattcagcaacaacatccactcgttcacttcacatctggttccctaagcagttcagggatggcaggcaggccccgccctcagggcattcccagaatggcagg

SEQ ID NO: 12512 - DNA, 201 bp, Bos taurus
tttgaactgcaccttggaccaatggaaggccccctgcattgccacgcagcctttttcagacatggttcctcatctggaccactggatatggaaaatgaccgagtggccactgttttcttaattctcccaaggatggtgggtctagttccattctaggtgcttaggagatcgtggcatgtaacgggtgctgtcctagctcaa

SEQ ID NO: 12513 - DNA, 201 bp, Bos taurus
tgttgacactcagcaagggccagtatatttaaatcattcactctcctcaccacgcctcctggtctctctaccatgagactgaatagcgtgaccttgttcccgtgggtctgcagtgaaacagtggccttgggcccagcaatggggctggccaagcagaaagccgtcggtcccatcatcgggcccagcacagagcaagtctca

SEQ ID NO: 12514 - DNA, 201 bp, Bos taurus
agggaaaactataacattcagctttctggtcctgtgtgttgctacagagtaaaccccctccgggggttggcaaactgaggattgagggccaaatgtggttcacctattgtctgtggttgcctttgccctgggttgttggaacggaaaccatgtgacctgtggctcatgtttattctctggccccttaaagaaagtttgttg

SEQ ID NO: 12515 - DNA, 201 bp, Bos taurus
cccagcacccacagtcctctgaaggacacattcctcataaattgtggggaagtcatgagcatcagtcctctgcaaaacttccctaaaaggccaccaggctggcttgggaacataacagggtctcttgtctcacccctgcccgggctgcctttaggagacccaagggactgcggccgcatggggcagatccgtctaggctgc

SEQ ID NO: 12516 - DNA, 201 bp, Bos taurus
caggcatcagctgggtggggatgaaggtgatgcgcatgcgggataaaagcaataggaagttctatgggagaccacaaaagaatcaagccaggggcttgtgaacctggaaataattccgaatgtagagcacactatggagcagggctaaccggatacagttagaaaggttaaactgcaagaggctgggatggaagagtagca

SEQ ID NO: 12517 - DNA, 201 bp, Bos taurus
aagttcagcgactccagaaagaattgagcagttgtatccgtaaaattgaagaagtagctaaaagaggtgagacaaattggactcttgactttgaaaaaaatgctccaagagggtagaggccaaatacgttcttcaggacccctgcccctcatcagttccctttctgtccttctgtcactagaatgagcattcatggcaaga

SEQ ID NO: 12518 - DNA, 201 bp, Bos taurus
gagatttatatgtttgaaagtgtcttatcttcatacttgactgatgatttggttgagttttaaattcctgattaatttttcccaaagaatatgcctccctccctttgtgggggtgaaggagggattgtcacgtagctgccacgagcaggggtggagacccatcaatctaccagctcatcctgcagtctcaatctgcattct

SEQ ID NO: 12519 - DNA, 201 bp, Bos taurus
agtagcagagacggggcagaacgcaagctccggtcccctttctcttagttcggggcttttttccccaggggaggctgcagtcccagcctgacttgcacacgtgtgcagcagacatcacttctgcccatcaggatgtcagcttctcctctcctgcaccctcttgaagctggccatggccacgtgacttgctttggccaatga

SEQ ID NO: 12520 - DNA, 201 bp, Bos taurus
tcacgggacggccagacatgcagaagcagcgggtggtgtcgtggctgtcccagcacaacttcccacagggcatgatcttcttctccgacgggctggtgcacgacccgctacggcagaaggccatcttcctgcgcaacctgatgcaggaggtgagcgtccggtgggggaggggctttggccagggaggggtgagtccttggc

SEQ ID NO: 12521 - DNA, 201 bp, Bos taurus
tcctttcttaagggtttcagatataggcacgccctttccccacacctcaccataaagtcttgtcaaagtcaccaaaggacagggggtgcctttggccccccgcagtagctgggtttttccccttcccagctccaatccgatctgacagccacgccactcctcaggggtgatggatgctgttctcaggtaccaggtaccaac

SEQ ID NO: 12522 - DNA, 201 bp, Bos taurus
cttgtggttttgggtaaagcagctcagctccctgatgcccaggactcatctgtaaaatgggaatgatgtcaccggccccatctcagcatacctccagctctctgtttcagacctgtgggtttaattcccacctttctctcagtgtctcctggaaaaaagaaggccctctggggttcccctccccagccttcctggtcccag

SEQ ID NO: 12523 - DNA, 201 bp, Bos taurus
ccaggaatccatgttctaacccaggccttcaggtgatttttaacactgatttagagccatgggggcagggaaactggcacaggtggggctggggatgggaagcagtacctaatatcttctgggccacattaagaatttcgatcttactccccaaatcaatagacatttcagggcttcagcatcaaagttctgtgccaggtt

SEQ ID NO: 12524 - DNA, 201 bp, Bos taurus
tgtgaatgcaaggaatgcacaaaagccttcatctggtgcacagcttttctcaagcatcagagacttcatactggagagaaacttaaggaagttgggaaaacattcagcaaggaaaaattgcttagagaagagcaaagaattcaccaagaagagaaagcttatcagtgcattcagtgtggtagaactttttggggcagctca

SEQ ID NO: 12525 - DNA, 201 bp, Bos taurus
cctactctacttgagccttagttttggatttctgagccacaaagcctgggattggaaaagactcccatgcatagataatggctgtgggaaaagacaagccatgctgtccctttgattgtggccagtgtgtcacctgttgactgtttgccctaaaaccctgcttagcccctgtctgcattatctcaggtgggtgacccttct

SEQ ID NO: 12526 - DNA, 201 bp, Bos taurus
gatggatgcctacaccctaggggagaaggagcagtgttcttggctgaggggtccatgcgctgagcctttttgttctcccctgtcaggtggccttggggcagcacaaagaaaactatttctctgaccctggacctcaagctgtgctgaagcaattccaggaggagttggctgccctggacaaggagattgaggtccgaaatg

SEQ ID NO: 12527 - DNA, 201 bp, Bos taurus
agaaatatccccctcctcaaagtaagcttgcacaacattcaaatataaagccttgctccccagcaaggacccacaatcacagaaggccttcaaacttgcataacattcaaatataaagcctggctccctggcaaagacccacaatcacagaaggccttcaaacttgcttccaggttcctattatgttccacctcaagctaa

SEQ ID NO: 12528 - DNA, 201 bp, Bos taurus
gtggtttttgagatagcttcccaggatccatgcatacctcctaagaggaagtggctttctcttaagagatatggctctttctgaggccttaagagggaggcgtggcgtgctgcaattcacggggtcacaaagagtcagacacgactgagcaactgaactgaactgaggccttaagccccctggcttgggagggcagcagca

SEQ ID NO: 12529 - DNA, 201 bp, Bos taurus
gagagccacccccatccctccccgactcagactcctgttccagcttcgccgtacccccctatcgctccattccctgtagcatggaggccaagagtacccattcctgccctgtcctcctagctgtaggacccctgagcatcactcacttcgggggagagtgaagtaggcctggggagagggatcccagcacttggccaccgt

SEQ ID NO: 12530 - DNA, 201 bp, Bos taurus
cactgccgaggaccctgggttcaatccctggtagggaactaaaattccacaagccatgtagtgaggcaaaaaaaaaaaaaaagtctatataagggtaactggagagtttttcaagaatatttgaattctaaactcggttagtgggtgtaatcataagacagtgggaaaggaatgtgaatgtcattaagacaagatagaatc

SEQ ID NO: 12531 - DNA, 201 bp, Bos taurus
tgacactgacgacgatgatgacgagaagcccccacatcagcacacagcggcctgctcccacaactgggactaccctgaggattgggagggtttacagactgcccagaggttctggactccctgggcccaggacaccttggagcctcctacccagaccatccgcttccagcagactatagagggaaggcccctcaagagaga

SEQ ID NO: 12532 - DNA, 201 bp, Bos taurus
taacggaggccccattacagacaaaccagtgtgcctagtgcggaggttttggccactggaagaataaattccctagggcaagaaaagaagaggaagctcccgcagctgtggggcttgctggcttggaaattaaatagggctgccagggctcagagatatcaggtccccgagagcccatggtaaccttaaaagtgggggacc

SEQ ID NO: 12533 - DNA, 201 bp, Bos taurus
cggtaacccttcccccgactccactttccctgttggtactcctgcacacagacagatgcttccttcagaatcctatacagtgtggaaaacgcccacacacgctcctcagtgtggagtccccctgcctctgccataccccccagtagctctggatttctcccctacagcttctccctctcaggctgtggcccctctaacttg

SEQ ID NO: 12534 - DNA, 201 bp, Bos taurus
ggaaccatctttgtgtatgtgccagattttgttgcctctgtatatagataactctaggggaggggaccagtctggcatactctcagtgctaagcaggtttatttaaaaattccgaaagattcaacaatacttaggggtaggacctttatccttcttgatccccagcgataatcttaaaccattacagctttatccctgttc

SEQ ID NO: 12535 - DNA, 201 bp, Bos taurus
ctgggccattgctgttttggctgctgtgagcagggcatacagtacttgggtgcattttgtagttatctgggtacatctcaggtcctccgatggtccaggtggaggtgggggtggggccttacctcttccagggccctggaagagggctagtgggtgctcaatatttcaaacagactggaaatcagattcttcccaacagga

SEQ ID NO: 12536 - DNA, 201 bp, Bos taurus
ccaccgtctgtgcttcctctgacagtggcccgtccttcatgcacactgttctaacccagctcctggtgcaagatggggtggagtctcccgggacagttgggtaagtgtgcaagacacccaaggccccaccccaattatgtaaccctgaggctgtgaccctacaaaacaccggagacacccgggatattcctcaggcctgga

SEQ ID NO: 12537 - DNA, 201 bp, Bos taurus
ccgcccagccggactctcgcgccacctggtggctgggcggcgtcggcctggcgccagcctgaccccaagcatcctcggagtccggcccgagcccaccgcgcgtatgaggacgcccagctctgagctcctctgccctcggaaggaacaggtcctggctgagggctggccaaggccggagggacgccagcgaccctcccccac

SEQ ID NO: 12538 - DNA, 201 bp, Bos taurus
tgagaaacctctcccggagtagggaaggcctgacatgaccttggaggtggcggtagggtcagagcggctgggtacacaggccagtatgtcgaaactggctcgcttaagggtgcttgtgccagcccgagtgaaactcctctctggctggcactcctggccagcgttggccctgtagtgccagggtctggccgagttctgacc

SEQ ID NO: 12539 - DNA, 201 bp, Bos taurus
agcgagaagcaagactcctaggctccggacctctcttttgaaattaatacccttgagggcaggggagttggcatcttgtagtcagtgggtggccgaggaatgttccagaacagggtagtgacaaggtgagaggagggttagaagagggaatcggggtggggggcccgactggagttgggaagaacacaagtggcccgggct

SEQ ID NO: 12540 - DNA, 201 bp, Bos taurus
gtgtgcaacttggccatgttttgtgtcctaattaatgagggtgtgataaagcaaagggctttagagttcacaaagaaatactgactctagaatccattttctccccatccacacagcttggccttttcttcttgggctgaagaaacttatgtctttcatctggaaagaattctgaaagagggacctctgctttactttttt

SEQ ID NO: 12541 - DNA, 201 bp, Bos taurus
agggggcttaaaaaaaaaaaaaaaggagcaccagatcttcagcacaagccgaaaaccagatctggaggatatataactgggaccaagagggccaaacacatgaggtgacaggtgggcaccactgctgcagcagccagtcacgtgacacacaggacaagaactggccctccgatcttagctgggctcctcgtcaacagccga

SEQ ID NO: 12542 - DNA, 201 bp, Bos taurus
gagagcagccgtatcacaggtgtgccagctcacctgcagaaactgaactttcaagaacgcgagttcaaacatttcttcgggccgcacgcctgtcatcaccgaggatgaaaaactgagcggtgctcagagctatctgagggctgttggggcaacaaggccgcccttgactgagggcttccagggctgagcctggggccttcg

SEQ ID NO: 12543 - DNA, 201 bp, Bos taurus
agaaaataaggcaggataaaaggatggagagtgagaggccaggagagcagctatttagggaagagccctacagaacaacaggtaacataatgctctgagggcaaaggacacacacccacctgacacaggaattctctcgaaacacatcctgagcttctgtttgttattcaacaggggtgagggctttgaaaggctcacagt

SEQ ID NO: 12544 - DNA, 201 bp, Bos taurus
cggcgacgcggcgcggcccccaggagcgcagggcttgaagaaccacggcaacacctgtttcatgaatgccgtggtgcagtgtctgagcaacaccgacctgctggccgagttcctggcgctgaggcgctaccgggcggagcccggccgcgccgaggtcaccgagcagctggcggcgctggtgcgcgcgctctggactcgcga

SEQ ID NO: 12545 - DNA, 201 bp, Bos taurus
acagtggaactagagagagtccagagaagttggggagcaaaagggctgtactccatcacaagggagaaagaacttcaggaggaaaaggggagccttgtcaatagtgttgagttgtcctggagggagagacttgactgctctacttttccgacgtcagagtttctttttgctttagattatctacttagcaaatagaatctt

SEQ ID NO: 12546 - DNA, 201 bp, Bos taurus
gatctggttgctaatccaccttctccctggactgcagattagtaggggccttctttaacatcctccatgggtgtgtgacctggaacgctggtaagagactcgcccagagatcacaaatgggccgataccagctcctcagatgtgtgtggaccatgtagtgtttcatcagtggaggcacttcagattttaaaaatctcgatt

SEQ ID NO: 12547 - DNA, 201 bp, Bos taurus
ccgcctccctcgctttctctccatccagagagtctttagtccctcctctccccaggaggatgtggacggtcagcctgcagcttccggccaggagatctctcgagaaagcagatctaaccatgtcaaaaccacgtcacactcttagcttcaaaagttcagcaatgccaactgtgtgtaccgggcacgaggcctgtcctctcc

SEQ ID NO: 12548 - DNA, 201 bp, Bos taurus
acatggtggggtccaaggcccctcataagggagatgtgtccccatcataaaggagtccccagatcacgtggacataatcagaaatggcacctgatttgtctaaaaggcctcctaacagatccagttctagaactatgggatcccccactcagcatctcccgaacctcagtcactcacattctgctatcaaatcttttccat

SEQ ID NO: 12549 - DNA, 201 bp, Bos taurus
ctgtaaacagtgagctgcattgatttagaacatcagaccttcaaggaatagttcaagtcttggccatttccaccaataggaaacacctgggaagggcccgacttggttaatgacattctctcacacaaacttgctcttctacaagtactgaaagctactccctggagcaggctgaaaaacgggcccccaaatggagcgaca

SEQ ID NO: 12550 - DNA, 201 bp, Bos taurus
cattgtccctgatcgtcatttagccagaatacaagtctcatcatttcgcttctctgtggtttttgcattgcctttggaatcaagttcacgttccttaacacggttcacaaagttcttaggttgtaatcagataatcctgtgtcctcttctacaaacaccctgcacttctactctttttcttccctaggatgttcttgtcct

SEQ ID NO: 12551 - DNA, 201 bp, Bos taurus
gttttgcagtaaaaatgggtggcctttttcatcggctgacatccagtctcttttttcttttaatcaggatgtgagatcattttgtcaggcaaagagggaaatggaaatttgaggagagtgggaagatttgaagtagagagaagtaagagtgagcaagctgactacgtaactcctgcactgaaggctcactggggttagtga

SEQ ID NO: 12552 - DNA, 201 bp, Bos taurus
gcatttcctgtaagatctagaggcagacctgtggctgttgtaatttcacagaggtaatgtctataaacaatatttgaaatagctatagttaactgaaatatgatgtgaaaatacctgtagtttcttttggtgacaaagtcacaggtgctgctcccagtcctggtgtttgtcaccaaatggactcagttaatttcactgtgg

SEQ ID NO: 12553 - DNA, 201 bp, Bos taurus
gacacccgctcgccaggcacacagcgcaggcaggggagggtgagggtgggggcgggggcggtgaccccacagcctctgcacagatcagagtggaagggggtggtcatcgggccacactgacaaaccgaggtccgtggagcatccagagggatcctgcccaagggggccctcgaagacaaagtcaaggggagcttggggagg

SEQ ID NO: 12554 - DNA, 201 bp, Bos taurus
aaaaaggagaaaaacatatattagagattgtgatttggccttttaggtttcaaagtagaatttccccaaataggatcaatttgtgtagcgatgtgtgtaaatgaaaaattccagtccggccccggcccacgtctcagcctcaggggtcctgctggtgggtgcagtggcctctgctgcccactgagagcaaagctggggtcc

SEQ ID NO: 12555 - DNA, 201 bp, Bos taurus
tttagctgaaacacaaaaccaaggaccttaatatccttgaattattttgtagctactaaaacacacaccaggtagaagaagttaactgcatgctgaccaccggcatgttgaccccaggatggttggaaccaggttggtcatgttgactcctgaaatacaccgtggtgacctcaccaccagtcagttaggagaatgtccaga

SEQ ID NO: 12556 - DNA, 201 bp, Bos taurus
cgtgtacatttttgaggccctgtgtacttgcttgctctctcctagattaacagtttctccaggacttggagaaaatttagctcttcctgcagctccagagtgcgcaccacgcaggtaggcaggcctttccagccggctgtgctccgagccaacctggcagcctcacaggcccctccgaggcagagaggagagcctgtgagc

SEQ ID NO: 12557 - DNA, 201 bp, Bos taurus
gtctggacttctgcctctgcccaggatcttaggacagggccttggcaaagaggtgctggtggtcgcatggaataaacaaccaagagaacattcacaaggcaccttacaatttatagaggccgtttgccatactatatatattgtatatgaatacataattcacataattatgtccgtgtcacttggtcctcaaagcagccc

SEQ ID NO: 12558 - DNA, 201 bp, Bos taurus
ttgtttcatgatgggacagacagttcctctttccctggattcaatgctcacgacttcgtcagacatgaagtcctcctgatgccaccctgcccccgctcccccatagctgtctgctcttgggttcactctgatgagttcgtggaagtcctgggtccttggggccagtggtgctgtagacactaatccaggggtttacaatgg

SEQ ID NO: 12559 - DNA, 201 bp, Bos taurus
cttatcaagtccttcagaacaggggccttctgcttctattttccaactttctacactgggagttgcagcctcttatcggcaggaccaggacataacatggtcacagtgagacagatgacactagacttcttttttttccccagaaaagcccaaaccctagagttttaggtgaaatcagatttttgagtattgacaactaat

SEQ ID NO: 12560 - DNA, 201 bp, Bos taurus
gaaggccgcccaagcaggagctgagttttctctcacaatctgaggaccttggggtcaggaagtaatttctctgccttcctaattcaccatggccacctccagaccatgtgctcctctcccttctgcaaaaatcctttcttatttcaagctcaggctgcgcagatgtcttactctttctcccttctcatccctgccatctgc

SEQ ID NO: 12561 - DNA, 201 bp, Bos taurus
ggccaggaatcgcagctctccctgaaacgctcgctggtggtttcagaacttggggcatgggggaaggaggaggaagccatggggagaaggtggctccaccctccccggccatctgcccttgcttcgagaacatactgtaattgctgagccctgcctgaggaggaaagggagaatcacaacatgttcacccagaagagaaaa

SEQ ID NO: 12562 - DNA, 201 bp, Bos taurus
tggggagtacaataggaaataaatttagaaactggagtaggaattctctggggaaacgaagactggtgaaggtgggaacggagacagagaaaatgtatgagccagaaggccagaccctagatcttatgaaagatgcaccttaaatccttctctgggatcatggagaatataaataattgatgcctagctttttcctaaatg

SEQ ID NO: 12563 - DNA, 201 bp, Bos taurus
agcgggcagcgggcagccggggagccccgtcaaggaagggggccgttgtagacaatggcaaacagtactaccacgtttgtgggccagagactaagatgtcggaacgtgtccagcctcgggtctgaccacgccaggtctccttggcaggagctgcccgagaagtggaacaacattaaaaagacggcggttaccgtgaggcag

SEQ ID NO: 12564 - DNA, 201 bp, Bos taurus
cttagggatggagttattggcttagccatcaggacactttgaggtgttctgtaggtatcaccctctagaaactgggccagttaacattcattcacagcagcgcatcgtttgttcttttgtttgtccgtgttcgtctgctgactgaagaagtgttgaggatttatgtgtctggtgtaattcttgggccactgaggcacatga

SEQ ID NO: 12565 - DNA, 201 bp, Bos taurus
ctgggaaacccccagttgcaatagcttatgttctaccatccacaggtctcctgcaaagacactgaagtttgctggctaagaggccataaataagtgtcttagagtcagaggaagcccaggaggtctaaacgagacccgctgtgctgttccttgagcctgttgagagcggtatcaggcatgagtgtgggtcttggccgttcc

SEQ ID NO: 12566 - DNA, 201 bp, Bos taurus
ctcccctgtcctacactgctggaggttgctcagattcatgtccattgagttggtaatgctatctaactgtcttatcctctgtggcccgctttttttcctgctctcagtctttcccagcatcatggtcgtttctaataagtcggctctttgcatcgggtggccgaagtatttagaacttcagcttcagtatcagtccttcca

SEQ ID NO: 12567 - DNA, 201 bp, Bos taurus
atgtatgagtcttctaatcagcaagagatgtttccagctggtgttaggggatcatggctggtatcaagccctcataaaacctggcctttctcacttcctttcagatacttgatcaagtttttatccaagctctcagaataccaagatgtcaacaagatgacacccagtaacatggccattgttttaggacccaacctgctg

SEQ ID NO: 12568 - DNA, 201 bp, Bos taurus
gccccctcaatcacaaacgtctccttcgcagttccagatcaaagactttcttgatagttctggaagaaaagcaccagggaagactctaattgtcctgactcgcctagaggagaacttatggccagagatggggtttactttacccagacctctgatggtactgtggtggacttttcacatcctagccatgtgaaaagtgtt

SEQ ID NO: 12569 - DNA, 201 bp, Bos taurus
ttggaggttacagctctaatgaacactcctcccggtgtccacagagcctgattcagcacgcggggcgattagcagggtcaggttggaactaatgagctccgagtgccagttgtggccattggagcttagtggggctttgagacccaaaagccctcgacttcattctgactggcttggacttctattacttgaaaacccagg

SEQ ID NO: 12570 - DNA, 201 bp, Bos taurus
agtgctctggcctgcctcactccacaccaggaggtctgtatcagccgcttccgttcattatcctgaatcagcgtcttgcctgctgagttgcaggattccgtgtcatctcatttgagtaaggcctgagccctctctctcacacacaccaacacggctttgcctggatttcatgtaacatctctgcttcacactttccgtcag

SEQ ID NO: 12571 - DNA, 201 bp, Bos taurus
catcgctcctgcccagatgggcatggggaggttgggacaacccctggccagggaggggtagggcagggcctcccttcaaacccagggttcagaggcctccgccctcctcgctctgtgaaccccggttggcaaatacaggaggagcagctgcgctctggcaggcaagtccctcctcgtgttaaatgacatccagaggatgtc

SEQ ID NO: 12572 - DNA, 201 bp, Bos taurus
tattggttcctgtagttgaaagatccagaaacagctgacttcaggcacagcttgatccaggcgacagaatgttctctctgcttgtcgttggccccactcatagcagtctctctccccttaaaaacagacaccccctggacactcattcattcctttattcacaaatatctgtctactacgtgccttgggccaggtgctggg

SEQ ID NO: 12573 - DNA, 201 bp, Bos taurus
tcacttttacttggaggccgaggcctgcacagcagcattagacctcctcaggctccctgccccctccaaggtttgctcattttcaccaaaaagcaggaaccactgagggtccccttgcaggcccagggcaccaggctgagcctcccaggcatctctgctggagccagggccgcctccaggctgcatgctttgaagggaggc

SEQ ID NO: 12574 - DNA, 201 bp, Bos taurus
aagggagtcagacacgactgagcgactgaactgaactgaactgagaccaagggaagaaaaccacttttttctctaaactgtatcctttagctgcaagatatcaatgcaaaaccagaggaaaggaacagctggtttacccagataaaactttagtcaaaaggacatctcttcctgattccgaaaataaagaatcactttttt

SEQ ID NO: 12575 - DNA, 201 bp, Bos taurus
taatctccacaatcttgtaagcttggaatcagcatcttcatctcacagataaggaaatagaaccttaagagtttaaggaaactgtccggcctcacatagccggcaaggggcagagggcaggttcaaagccaaggtctctaatttatgtgtaccctgaatattcattgggaagactgatgctgaagctgaagctccaatact

SEQ ID NO: 12576 - DNA, 201 bp, Bos taurus
agcattctggcggcgggttctgctcagcggagtttccgtctggcctgacaggagacacagccgaattggacgtgaggtcgggctaactggcccgagcaggcgagcgagggagggaggggaggagggaggggaggagggaggatcctgcgctcggaatgcccggtcctggcccgccgcccgcccaccccgccccgcggccgc

SEQ ID NO: 12577 - DNA, 201 bp, Bos taurus
gtgagtgcttgtccagcccccgccttgtctgcattctgaagacctgggtaaggaatccgggagaacaaggaccaaggttggggcaccgcacaggtaacagatgtaagatattatacttagggcctgggattctgacgcccccttcctggttctgcatttagaaataacttctcaatccttgaaaagcatcagaaatatgca

SEQ ID NO: 12578 - DNA, 201 bp, Bos taurus
gcagggggcagttttgactggggcctgtggggaggcctgccagcagtgcccgtgggtatctcctgggctccagctcctcccctgcacccggcaggagtggtctcgccagcaagcaggccagcactggcacgtttccttcaaggagaggccagggcagagattgctttcgtgacttttgctttgctgtttggtgtttccaaa

SEQ ID NO: 12579 - DNA, 201 bp, Bos taurus
agcttacggcatatggatttttccaaagtacatggcctactatagaaggttttaaacaaggctgccctgagatcttattggcgttttatgaagatggcttcggcagcagggaggcctggaaagaggtgaggacactgttacgattaaaactaagggcctgaatcagggtgacagtggtagaaatgtgttaagaggggcctt

SEQ ID NO: 12580 - DNA, 201 bp, Bos taurus
agcctgcatctctcctctggaggatggaaaaaaggcgaaccccccgccgccccgacccaggaacaatcacgggaagtcacctcttctgaacagacatgcagcctgacaagcaaatagggcctttgtgcgaaaaatattttaagtatcaacgtggataaaagctcagcaatatgatgagtgaagaaataaactgcagaaaca

SEQ ID NO: 12581 - DNA, 201 bp, Bos taurus
ccatttgggtgtgctggtctataggaggtaaggtctaaaaccccggcctccaggactgcaagttcagactgaaaacatccctggccctgtacacatctgaccttgttggctctgccctgggaagccgtgcgcttagtggcaggaggaacagaagaactggcgaaggtgcccacagctggccgagaccccgcggccagagtc

SEQ ID NO: 12582 - DNA, 201 bp, Bos taurus
gagatgaattctctggcagataaaacaaaggggattttcaagggctctggaggtggctggcactggtttcttgctgaatggagtttcaggtcaaaacttaaaactttactttccaggttgatcgtaacccctaatcttaacgctcatctgtaattaggtttaatttggaacaagcagctggagatgagggaggacaaagag

SEQ ID NO: 12583 - DNA, 201 bp, Bos taurus
agtcacagaagagaagtaagggataaaatgccccatgggtggagccatggccagagtttggggagcagagcctgtggtggaagaggtgacctgaatgatccaggaaaagatacacatgacactggggatggtcacgtgccttgcaccagtgctctgccactggtgaccgaagaccagcaagagaaccgatcacttaacagc

SEQ ID NO: 12584 - DNA, 201 bp, Bos taurus
cgttgctgggacggcattccatagagaacgtgggcactgaccgggctggacaaaggacatgaccacaagggacacgtaaggggccctgctctcagggagcgtacaggctccctggggctgccagaggaggggcagcccccgtcctgctggggtaactttgggaggagtgtccgctctggggttaggccactgtgtgccgcc

SEQ ID NO: 12585 - DNA, 201 bp, Bos taurus
cattcccccacccctccttgtcatgctgaacacctctgcatgaggggcctctgccaggaggtgacatctgagcagggcttagagccaagggtggggccattgtggcagagcccagagaagattgcaggcacagggagtaggtaatggacttggcagcacagccagcgggggctggacacagggcctgggtgagaccagccg

SEQ ID NO: 12586 - DNA, 201 bp, Bos taurus
ggcccgaggttccactcatggggggccctaggagcctgtgcaggggtgggggtgaggggccagggaggagaggggcaggaaggaggcagacctgagggccccgccattggagcaggagatgggagagctggacaccagccaagcagagctgggacagggcagagcaggagtcaagtgtggggcccaggcatccccaggcct

SEQ ID NO: 12587 - DNA, 201 bp, Bos taurus
tttctgcccccaggctctgatgggaaggttcagggtgggaccaggcagggctgcctcacctgcagccaaggtccagagcacgatctccatcaggcccctgaccttgccctctccagctgcggggtgggtacaggggctgccccagtccctgaggacttcacattagccctgtctggtccttcctggcttgtctggtcctgt

SEQ ID NO: 12588 - DNA, 201 bp, Bos taurus
cagccttgctccccatggttgctgagggggcttggccatcctttgtatcctgcacctgtgcttccgtggccctggcatgggccagtgtgcccagcattcccgcaaccatgcacctctgattcttggctcagcttttcttctgtcttgggcggtcaactgagtctggctttttccctgggccctgccaactgacaggcagag

SEQ ID NO: 12589 - DNA, 201 bp, Bos taurus
ccagacggtgtgaggttctggggagtgggagtgggcaggcagagggtccctggtcgggggtagccatctgccttgagccacccagcctgggcctcatgcttccctccagctcctgggctccaggacttcctcttgtctcctcctcaactctctggatgtgggggcccagcctcggcagcagtcaccagcagagagcccgtg

SEQ ID NO: 12590 - DNA, 201 bp, Bos taurus
ttgctctcttttggatatcttttatttcttgcgtttttgctctgggtaaaagttgttctttaagcttatttttcttagtctctatttgtgtttatgttctttgtcttgattatgcaaagaaccaggccagcagaatctcatatattctggttcttaatttttaaaagtgtcatgactcctttaatttcacagaacattgga

SEQ ID NO: 12591 - DNA, 201 bp, Bos taurus
gggctgttgctcaggtagggagggtcagggctggggggcaggtgagtgaggctctcaacctgctcgcctctctggacggggcctgctctctgctctgttcggtagcagtagagtgctgtgcttcacaggacccaggggtttcatcagggcagtggctcccaagcctggtgtctgggccaccttcctcaggtctgtggtcag

SEQ ID NO: 12592 - DNA, 201 bp, Bos taurus
gacaagttggtctccatgtgctctgccttctctgtgtccagggcctcaaacttctctattacctgggacctcctgcaagagagggcacgaggccactgagtggggagacagggttccctggagcctaaagggacgtggtccggagtctgaggggctcctgcagccagcaccccaagccagctcaccccagctcctgggcca

SEQ ID NO: 12593 - DNA, 201 bp, Bos taurus
ggactgggattactctggaattgcttttggggaagtggactaggattttttttcactgggatgccctttgaggccagaccggcaggtcctgtgtgtgtccatcccccagtaacatcactgatctctgtctcccagagtcactcagttgccgccaagagcaaggcaggtattatgacctgctcctgagggactgcgtcagct

SEQ ID NO: 12594 - DNA, 201 bp, Bos taurus
tgaggaggtgctgctgtggtgccctcctcccctgatgctgcagagctgccaacagcaaggtcatcatgcagttggtgccctggttgtcacaaagcagcccaagggtgccagctccagtacccctcccacaacctctgggctcgccccaagcatagtagcctccagacccaggttggtgggagtctttgcttaggagggctt

SEQ ID NO: 12595 - DNA, 201 bp, Bos taurus
cccagacatcgtgtaatttcatccacaagagtttcaaaatgtatttctgaaggttatgacttaaaagacaattacagcgtcattgtttagatcttcatgcatcacagccattccttaatatcagcaaatatccagtctcagtctacagttgtctcctcaatgtcagaatgaacaaaatatggtttgaatcagcatctgaat

SEQ ID NO: 12596 - DNA, 201 bp, Bos taurus
acagaccctttctccttgaccatgctaagtggaaaggagggcctcctgggaaggacaggccagcgtttatctctgtctgggccaccaccagcttcacactctccatgcctctccgcaccacccgcccttgccctcctgataaggtcccaactccctggcctgagtggtccttatcatcttgtctcatggtctccctccggc

SEQ ID NO: 12597 - DNA, 201 bp, Bos taurus
tattgtttgactatatcaaaatatacgtatctgttcgactactgatgtgaactttctaattctctgattcttttagctttttcctactggcacatcttcttatggacataagccataatccctgtcaggctgtgtcatacggggtgtgtgtgtatgctcagctgtatagatattgccaagcagttttctttccaaagttgt

SEQ ID NO: 12598 - DNA, 201 bp, Bos taurus
gcagcccccaccagcttttccatcccagattggaatgtacactgtacgagccctgtcaggctctccgtttgtgaggaaattgctagggcctgttcccctatggtggctcagcctgtgctccggctcctgttctgccaggctctgctcaacgtccacccaaatgcctgtgctggggctatcctctgatccatgagacctcta

SEQ ID NO: 12599 - DNA, 201 bp, Bos taurus
ccatcccgctctctctgccctcatctccccatctctgtctctccctttctctttctgtctccctctgtgtctctgtcttttggcctccatgtctccttgcgcttttccctgcccccaacccccaagcctgctcaggctccaggacccagatggcgggacattcacgccacagtgcctataagcacagggccgtggctgctt

SEQ ID NO: 12600 - DNA, 201 bp, Bos taurus
gtccccagaagtctaagtatcataagcttaggcctgcttatgcccatttgccagacctgggtgacaggtgctgggctcccatccaggcccagagaagtatgtgacagctctcagaccctgttctcatccgagagggcttgctccagatccaggctttccagaccaccaccccagggtggtgtgggccctgggggcccttcc

SEQ ID NO: 12601 - DNA, 201 bp, Bos taurus
cattttctgggcactggggaatggagtggcagcttggtcagtggcctgtgtgtgcactgcactcttgcaagtgtggtggtaagtgggcctggatggaaggcgggtcagagggaaccacatctggggagaataccaggtgggacaaagcttggcacacaggaggagctgggagagggatggtggggctagaccacagacagc

SEQ ID NO: 12602 - DNA, 201 bp, Bos taurus
ggacagggtggtcctgtgcctggagccaggctgtcagcctgccaggactgcaggtttcctctcctgaagggccccttcctggccagctttgatgtgtctgcgaggttagtgaaggatgtttggcttcagggcagggtgccaggataaactccctctgcctgctgggccaaaccactgcctgctcagcgcccagctcagtgc

SEQ ID NO: 12603 - DNA, 201 bp, Bos taurus
tgtgaacacctcacatcagccaaatggaccacactcacattttgccccttctgttcccaccactgtgtacactcagcctggcctttgatgcccaatggtatgtccactgttccaggaggtctactgagctcacccctgggggctccctctgcactgctgtgagctccccagacctgggcccgagtctgtctcctttttggg

SEQ ID NO: 12604 - DNA, 201 bp, Bos taurus
aaacaaataaacaaccacgatcattcctaacaagaaagataggccctgctcacaggcactgctgggcttattatgtgctaaatccatgtgggaaattgtccgtcctccaaaaggccctcttgactttacacttttttcagcaaaagaaccccaaaatccctagtgctgagctctccttactatatctgatgggacacagtg

SEQ ID NO: 12605 - DNA, 201 bp, Bos taurus
agtattttatattttccttcttaatttactatccctcttaattgatcatctcgtcggctttctgtattaattacaactttctgtcttccccagagaatcccagagcagagccaggagggtcagggataccctccaaatctaagcccagatggccaattgcactacagaaccttccaaaaccgagattccccattctctacc

SEQ ID NO: 12606 - DNA, 201 bp, Bos taurus
tacgggacacgtccagcacacccaccacagtgtggcctcgccagccccgagcgggccacgagggaggcagcatctttatccaggcgggccctgggctgatgggcgaggctggctgtggaagggtcacttgctggataaggtcactcccagaggagccagcaggggcaggacgggggaggaacacgtggctcacgggtggct

SEQ ID NO: 12607 - DNA, 201 bp, Bos taurus
gagaggagcctgcggggaggcctatagcaggacggggtagcactgccttccctgggcatctctgaggctctgggaaagaggagtacaggagggcctgggagcacacgtcagcatgagaatttaagggtctgggatgaaaccagcctggagtgggaggatagctcagccaacgcccaggccaagcacctgtcaggatgggct

SEQ ID NO: 12608 - DNA, 201 bp, Bos taurus
ctaagagtggcttgcaatccaagtttactggatgtcctataatgtggagccttcaggactagaaaagctgaaatctcccacccaagagaaagcaccagcagagacagaagacttagcaggagaccaactggagcaaaagcctagcctattacactgcaatgctttaaacattttctacccacgaagaagaaaaacctgggg

SEQ ID NO: 12609 - DNA, 201 bp, Bos taurus
ttcaagccatggagggccaatgattgctattaactaccagaagctacaagagagacatgagacagatgttcccaagggcctctggaagaaggagacctggcgacagcctgagctgacttcttgttctaagccatcagttctggggtaaattgttacagttatccaaggaaactaatatggcctcatttacagcaagatgaa

SEQ ID NO: 12610 - DNA, 201 bp, Bos taurus
aactccaataccgactgttcagaaaagcaagaggactccccaaggttcaggagccaccacctgtcctggagctgataaacttgtgaagtgaaagagtgacgcctccagcccctggcaatgaaggcaatgggtgcacgagtcaaattatttccctggatgccaacaccctgaggcctctgaccccctctgcctgccctaacc

SEQ ID NO: 12611 - DNA, 201 bp, Bos taurus
tccatcatcatcagctgtgagtgaaattgcagcttgtcctctgaatcctattgctgatgatctttcagctctagcatgtcccccatcctctccttcctccggtaggtaactcttcttgcctggttactcaatgctagcccctgtatgccagctattgtactgaaccactgtacttttcaaggtactgtactataagattaa

SEQ ID NO: 12612 - DNA, 201 bp, Bos taurus
atctccagaaacttgtggcgttaggccctcctggttgtggttatctctaatttgctggttttctcttatttctgatgtagatccatcctgtatccacttcctgtgttacactgaaattagagcaaaggggagagaaatgcaagagcactgggtcagctctcagaattcaaagtctttgttctgatgttttttctgtaacat

SEQ ID NO: 12613 - DNA, 201 bp, Bos taurus
agaaataccttttgcaatcaaattgtgttctttattttgatctgaatggtgttaaaaattcagtttgtgcttaagacttgttctttcctgtaggtaagtcatacttcatgacaaaagaaaaattaatcaaatggctgccatactgtaccctgtcatcaacatttgtatggtcctcatctgtttcctaatctcttcctcatc

SEQ ID NO: 12614 - DNA, 201 bp, Bos taurus
gtcagtgccccctgagagtcctggcacctgccacgtttcaatgcaacaccatctccctgccccaagaaagaaatggggacctctttgtccacccaagtcttctccaactagcccagacctacatttgcccgctgctgatgcccaacaaacagggctgatggcatccctgtactaagctgacagatgttatctgctgatttg

SEQ ID NO: 12615 - DNA, 201 bp, Bos taurus
accatctgagccaccagggaagccctatgtgtatatgttaatcccaacctcctcctattttatcccttcccttactttcttttcttgatcatgaccggcagtttgaataacattatcatgaagggttgatgtaataaaatacagagcagtatgcccagtatattgtaattgttgaataattgttactagtctcttccaggc

SEQ ID NO: 12616 - DNA, 201 bp, Bos taurus
aatcttgttaacatagcttacaagaaatttcttccagggtgcgggaaaactccgcaaatgaggcaataaaaaaaaagagggcttataagaaactaagaacactaacatttgtgctcccattatgtgtcaagtactgtgctgggtgactaggtagttccatgctatcccatctaatcagcaaacaaagtatgctaaatgctt

SEQ ID NO: 12617 - DNA, 201 bp, Bos taurus
attccaaaatcaacctatgtaacgcatcatattaacaaaataaagtagaaaaactacctgaccattttcaatagactcagaaaagcacttgacaaaatttcatacccattcatgaactttaaaactcttagataactgaaataaaaggaaatttcctcaatttgataaccattgtcccagaaaaacccctatagttgatat

SEQ ID NO: 12618 - DNA, 201 bp, Bos taurus
agcttagagacacagtacttcacacccacagactgcatgtctaggaactaggctggacggcagcagaggaagggaccgcaggggtgggagaaggtgtttctgattccaagtgacccattccacaagtgatgagcacagaccccacataccttctccttgtcactcgcttctctggcaacagtagaaccctgaaaggataag

SEQ ID NO: 12619 - DNA, 201 bp, Bos taurus
tataaaaccctgactcccgtgaacctttccagtttaggtcccaggttctagctgaaatctccacaccctctcccagccccacagacaaggccttacctccggttgctatggtgatctgccgcagaggatgcccgtagaaagggaaatcaaaggacaagaccactctctgcaggggacgggagagggtcagcagggccaaca

SEQ ID NO: 12620 - DNA, 201 bp, Bos taurus
tggggactcaaagtttctttggcccccattggcaggaatgttcccatccccttttctcctttggtctggcttcataggagaagaatgtaggtacaggactggggggccaggtacctggaggaacccagcccattgtgtgtggggggggggagtgggggttggcggggagagaggcatactctttggttttccttctccctt

SEQ ID NO: 12621 - DNA, 201 bp, Bos taurus
cctgtgccccaggtacccagtggttgccccctgaaacagccagcctggcctagcccactgcgccacccttcctcagactgtcctgggacccagtccttttttcccactgactctgcccctggcccacaagttcccctgtgtctcctgtcaatgtggggagggggcgtgtggacccaggaggggactgtggacaggatccag

SEQ ID NO: 12622 - DNA, 201 bp, Bos taurus
ctcccccttctgagtgcaggttctctaagcagagctccatcctctgtgcgcccagactggtgctctactagttgactgttcagagttgttatttgaggccttgacctcatttctctcctttttgcagcttcttgcacgctcggctccggaccgccaccctgcggcacgacacagacgggcaggccacgctgctgaacctcc

SEQ ID NO: 12623 - DNA, 201 bp, Bos taurus
gaaagactggtgttagctgaaagcaatatcagtgtttttgaaatctggttcctggaccgcctatagtacttgttaagtgcaggtccccaggcctcatcccagccctactctaccagaacattttgtggtggctgccaggcatctgccttgcaacaggctccccagttgcttccgctgcccccgaaaggttgagaaccattg

SEQ ID NO: 12624 - DNA, 201 bp, Bos taurus
gaatgtccaagatggctggcttacacatctcatacgcagtgggtacagctggaaggctaggatggctagtcctctctctccatgtggaggcctccccctccgggtggtctctacaacagaataactgatttctcacatgggagtgttagggtggacacacaagactggaggctgccaggtcttcctaaaagcttaattatg

SEQ ID NO: 12625 - DNA, 201 bp, Bos taurus
tttgtgcttccagtgaagagagcacagtgtcagtccctggtcagggagtgacgattctacatgctgtgcagtgtggccaaaaaatattttttcttgttaacatcttaaattcctatccatatgactgagtcttgtaaggtgaaactaaggcccttgagtctttcctgagggagatagcctacttaaaaaatattcagggtc

SEQ ID NO: 12626 - DNA, 201 bp, Bos taurus
gtcctcttggattttccttcatacaaggtagacagtagattctacttagagaactcacagacatctataacccagatggtgatatgagcggcaggacccaagctcccatgtctcttgccattactaactcaatttgctggggagtctcgtctctgtctcttggaggttgacccctcagtttcttctgactttttttttttt

SEQ ID NO: 12627 - DNA, 201 bp, Bos taurus
gcagtccatggggtcgcaaagagtgagacacgactcagcaactgaataacaacaacaaatgctgtaaaagtagttagcgggcctgtgcttgtccttggggcggggggggcttatttcttccttccggttcctgtgattgggggagggacatctgctattagaaggtagcccactgtggcctccctcagaacctgatcctgg

SEQ ID NO: 12628 - DNA, 201 bp, Bos taurus
tagctcctctaggccctcctgcacctgcgcagccactgctccttggacgtggggtagctcctcccagtcgctgcccctggcctcgggccggggttgcgggcgtcgtgtatctcctcccagatgccacccctgacctcagacatggggtagctcctctcagctgccacccctgaccttggacatggggtagctcctctcggc

SEQ ID NO: 12629 - DNA, 201 bp, Bos taurus
tctaaggtggtgataaattatgggattttttagttggattgaagaagcatgtagtgatgatgactctttctgatggccagaaaaagccatgcccttaccttaatagtttcatgagttgtgttttgttatgagtgtcatgagttatgtttttttagaaactagtttgggcgccctggatggtaggacattttgcaagttctg

SEQ ID NO: 12630 - DNA, 201 bp, Bos taurus
gctgggcacagctgcttaccggacaggcaggctcacagatggtggtctcatagcacacaggctgggcacagccgattacgggacagacaggctcacagatggtggcctcacagctcacaggctgggcacagctgactacgggacaggcaggctcacagatggtggcttcacagctcacaggctgggcacagctgctcgcag

SEQ ID NO: 12631 - DNA, 201 bp, Bos taurus
tatataatagatagatcacctaaacaaaatattaataaggaaatattggcattgaatgatatattagattatatagacttgatagatgtatacaggccactccaaaacatcagattcatattcttttcacatcaacatggagcattttccaaaatagattatatgttaggccacaaaaccagtctcaataaattaaagaaa

SEQ ID NO: 12632 - DNA, 201 bp, Bos taurus
cacgctgtgcacccatgaaatcattgtcctgcggtagaccttcaaagaagccacatggtctagcccgaggatctgcccttgttaattgggagttagtccgcccaatgacattcttttgtgttacgtgacctggtaaaaccatgatcaaattcacctcctggcccacctggcatttccagggagggactaggattgaatcaa

SEQ ID NO: 12633 - DNA, 201 bp, Bos taurus
gctgggactgcagttcgatctccagggcctgcaaggtgcgccggagctccgagatctcgctcttgccgctctgcaccagctcgctgttggtggccacctcgcggttcagttcctccgtctgcagacaggacacaggacagggcagcgtgagcctggcttcccttctccaaggcgacccccatggtctccatatgctcagcc

SEQ ID NO: 12634 - DNA, 201 bp, Bos taurus
ccctcaccactaccctccatgtaagtaagccccccgcccccccgctagcgtcccctcaagtctgtgtctcgccttagatggcatccaggaagggccacagctgggactcgagctcagggtcagagccgccttaccccatcctttctttcaacaaatgccagtcctccacacaggctcccgcctgggcctcacccaagcttc

SEQ ID NO: 12635 - DNA, 201 bp, Bos taurus
gacttgaggagttgggatggctcagccagccgctgcaggttggtggtctgcccctccacctgggtggtgagcagcagcgagctgtcctctcctgtcacaccgggacacatggcctcccgcacccgcttggctctggcggttgtggacatctggtactccaggtcacctgggggccagcaaagagggactgagttgcaggaa

SEQ ID NO: 12636 - DNA, 201 bp, Bos taurus
atgctctttctggctccttccattataccatacagttcccctcctcttttttctttctagctcctttttcatgacctcgttccctgttttttcagatatgtagctctgttgaagctcagattcccttggcttatgctgccttcccctgggttacaagtgccttagttttcaagtctgggtaagagatgaaaaaatttgagg

SEQ ID NO: 12637 - DNA, 201 bp, Bos taurus
atccccgcccttgggcccactcacctccaattgtgctctcctggtactcgtggaactgacccttgacgaagcggaggacgaggctggatttgcccactgcggactcccccagcaggaccagcttaaactgacagatcttgttcccagcagctggtccgttgggtcgcgctgcgcctccccgacccgccatggcccgtcccg

SEQ ID NO: 12638 - DNA, 201 bp, Bos taurus
aatgcagatgggaagaagacatgccagagttatcctccgtcattcactcaacaccagctctgacttgggctgtgctggcctcagagttccttgaactacaaggagatccaaccagtcaatcctaaaggaaatcaatcctgaatattcattgcaaggactgatgctgaagctgaagctccaacactctggccatctgatgcg

SEQ ID NO: 12639 - DNA, 201 bp, Bos taurus
tgcagaactcacctccaggtcaatcttgaggccttggtgatacacctcagtctcaaaggtgatcaggtgcagctcctcggtcacaatcagggaggcctacgagaatgagaaggatgctcttcctcagagaggatggcactgagtcctgacagccatcactacaccatcctgaagcgcaacgcaccaggtggccatggatac

SEQ ID NO: 12640 - DNA, 201 bp, Bos taurus
aactttatctctaactgattgaatcgctcccccctttccttgagatctgggtccaacagctactactgttgcttggaatacttttccttgtgatttttccggaagcataatgcctctcaggtggcactagttgtaaagaacccacctgccaacacaggaaacacaagagatgcaggtttaatccctgggttgggaagagct

SEQ ID NO: 12641 - DNA, 201 bp, Bos taurus
cgggcgcgcgcgtgcgttgctgactcagcggcgattcccgcgagctccggtggagggttccaggttgacccccagtggcttggaccttttgaggatcggcgccatctccgggccttccctggatcctggtaccgggaggccgtgcttcttagtctcaacccccggaggctccgagaaggaaaactagcccgagctgggcgg

SEQ ID NO: 12642 - DNA, 201 bp, Bos taurus
aagttatgagcttcctctacaggaagcacagactccctggtggtccacagccacaaaaaagaaaaaacctgaggaggattctgccacttagggctctcacctgaaagggctcaaggtttccaagctccaagttgttacaggttttctttggggaattccaataataatcaatccttgaggaagattaactgggggaagaga

SEQ ID NO: 12643 - DNA, 201 bp, Bos taurus
aaaaaaaaaaaaaaaaccaaagacctaatttccactaatttgctaaattgctggctaagacactgtgaaaaaaatacccacccgccatccctccttccttacctaattctgtgttggtaattgataatcaaaaccactgagagcaccatgcttggtggtaattactgtaaatgtcaagagacgggaagataattcattcag

SEQ ID NO: 12644 - DNA, 201 bp, Bos taurus
aggctgtttccagctcccttagtagttttgtttgtctttactactggattatttcttttatccagtgacaaggcactgctctcaacacctaacagaactttgaaacgattcagggttgctggagtccccaggggaagactctcagctctgggaattttttaaattcaagattccacccaagtgtgcttttcctaaaagaag

SEQ ID NO: 12645 - DNA, 201 bp, Bos taurus
taatcctttctaagagaaatggaaagaatttaggatcccaacctcaagtgccctgcccctcaaacaactatttttaatttccagagtacaggaagctgccgttggctgctgaatgacctctaccacctgagccaccctcaacttgacactggtagtggctgtgagcttgtggggcaagatgctttaaaacggaggttctct

SEQ ID NO: 12646 - DNA, 201 bp, Bos taurus
catagtgttagatgtttggatgaatgagagtttagagctggagagctgaggagagggctgagctccaggacagaaaaggtgactcaggtcagtgttggcccagatgatccgaagcccagcagggtcacccacctaggacttggtccggatgctccagccagggcagctacagatgaaacaggaagatgagcttgatgccag

SEQ ID NO: 12647 - DNA, 201 bp, Bos taurus
cccagtgcttctgccttgccctgggaggccaaacatttactttctctctaggttcctgaatgtgctcaggagctctacccagcaaactttaagagaataacggccatatggaagaaatggttaccaagagccaagcttcattagaggcttcatttaatcctcaactgagacactcatttcatagatgagggaactgatgct

SEQ ID NO: 12648 - DNA, 201 bp, Bos taurus
taggttaggagaagggaatggcaacccattccagtgttcttgccaagagaatcccagacagaggagcctggcaggctacagtccatggggccgcagagtcggaaacgactaacaaacacacactacatactccctttaagtcacttacaaatacacagttttgggccctccttgtgcatgaacaatgactagttctcccca

SEQ ID NO: 12649 - DNA, 201 bp, Bos taurus
gaaacagcagtctggaggcacctgtgagatcggaggatagcacctgcttgccttccagccccagcctcatcagtgtgcggctcaaattcctcaatgacacagaggagctcgctgtggccaggccagaggatactgtgggtgctctgaagaggtacgtgggcttggaagtgtcaagtgcagcccctatggggccttagaaac

SEQ ID NO: 12650 - DNA, 201 bp, Bos taurus
ggctgcttcctttctcttggcctgaagaaacaggctgagactctgtgagggggtggggtggggtcgtggtggtgaggtgacctgcctcgtacaatgggcgcggcagcgaggtgttaggtgggccagcgaccactaaaagtagacccacctagtaatctcacacctgctgttcagtccccagctggtgatcctctgatgctc

SEQ ID NO: 12651 - DNA, 201 bp, Bos taurus
gcaagattctaaaggaaccccacaaaggctgcaggaaagagttaaattacaaacaaattgtgagcgcctctcccggaaagaatggccaaagcttgcgaaacgggggatggggggagggtggtttccagtggctgagctggagcccagtgggaagaggagtgctggtctttgctgaagatttgggaaaagcctcctctgcct

SEQ ID NO: 12652 - DNA, 201 bp, Bos taurus
ccacagaatagaaatgatgattctcttctgaggctcccaacacagagggaatcctatgtgagtcacagaagccacacctgctagagcacccactccatcctgccaagctccaaaggagaggattctcaccaactcagggcagacctcctcttggagcaaaaacttgttgagtcaaaatgctcctctatgaaaatcttcctt

SEQ ID NO: 12653 - DNA, 201 bp, Bos taurus
ataaagatggtgtttgtactggccttgaaaagttggtaggacttctgacttcctttgttaggaggatagcatgctgtcaaggtcatggggccagttcccatcaggctgagaacaaggactatatgcaatccttgtcagggactctgcagatctgtggctgggaaagtctggctgagagaatggagacggcttggggccaca

SEQ ID NO: 12654 - DNA, 201 bp, Bos taurus
cactgggcttggctttaggctttgtgccccatccctcaaggaccctgcttgtctgatgcaaactctgacctgaggaatcaagtctaaatccctgtgactgcctctccctgactctgggagcctttgtaggatccttctccatcttttcttcatatcagagtccttcaaggaccagctcagataccactcctctaggaagct

SEQ ID NO: 12655 - DNA, 201 bp, Bos taurus
cagagcaggtcacccccagaccccagggcaggctgcagtgggaggagaaaagcagggggcagagggcctttgccccctcaggccacatgtatttatcctccaaatgatcccaatggcaaccctgccacagtctcatgtggggtgagccccccggccctaccagttcttcccccccactccacaaggagaactctagtctgc

SEQ ID NO: 12656 - DNA, 201 bp, Bos taurus
ttcacagttgagcaaattgaagcccagaaggtcagagaggacagggaggccttgtggaggtctatgaggaggtccacaggggtgtcaggaagagagggccccctctgggtcccagagcccagcgtgcctgcctgcctgcccctcctccctcggctgccaagcccatccgcgtggctgggatctgctggcccataacgggtc

SEQ ID NO: 12657 - DNA, 201 bp, Bos taurus
gagcttttacaaatctagaaaaaaggaatacttccccagtaaaataaaaaactgccaaaaataaataaaataaaaaatgacatggccaaaattaactagcgaaccagtggaaaacctaaaaagactaattaccattgatgagcaaaattaataaataaaatctgccacggacagagcaccaggtccagaaggtttctcagg

SEQ ID NO: 12658 - DNA, 201 bp, Bos taurus
tttaggccaccatcaaagtactctttatagaactcaagcttggtcgtgtctctcttctctgcttaaaacattatagtctgtgctctgtttggtcaggtccacgtgcctttgccaggcccttcaggactggttccctgctcacctgcacagcctcatctgctgccctttccccgctgagctccacgcttgggaacaccagac

SEQ ID NO: 12659 - DNA, 201 bp, Bos taurus
aaacagagctcacctttcatccccccagaaccgatccatgagatgtttctcccagttcaagttatctgctgtttcctggaccctggtggccctcggtgtgggtggaacatatacatcaatctggcaaccaggatgcagcccctttctggaatatgctggccttataaccacgggaaaagatcaaaggtggaagcagtgctg

SEQ ID NO: 12660 - DNA, 201 bp, Bos taurus
tggaaatgaggaattccaggctggctatctccctctgatcaccctcagggctgcactggaaatggactcgacccaacaggaagtggggcaggtgatgcctgggggctccaagggaaggcacctgtgcccaggccaagcccaaggcatgaggcatggctgctcaggagagctggtcccagggaggactcaacaaaactggta

SEQ ID NO: 12661 - DNA, 201 bp, Bos taurus
ggctcttgtgaactgcagtcagatctcaaacatctttttctaccattctgcggtttccaccattaacgcagtactttttttttttcctttctgtagtgaatgttgtaaataggttatgtgtagggggcaagacttctccagcttagatggcttcctgaagaaagtggtgtctttaaagggaccattctgcccctcccagcc

SEQ ID NO: 12662 - DNA, 201 bp, Bos taurus
aatattaataaaagaaatgcaatgaatttatcaaacacaggaaagaaatcgaggaaaaacaaaattactcagaagtgaataatatattacaaagtgtccatggaagaatagattcaagttaatatttaataagaggcagtgaatgaagacaagaaaacaactaagacaataaaaataaagcatttacaaagaatagagaga

SEQ ID NO: 12663 - DNA, 201 bp, Bos taurus
cgaagttaatatatgaggtgttgcaacagggcctggggtttaccacgtgcctataggtgtgatctgggaccactgtgtgtgcctggggtcctccgggccccaacatctcatctcccatttgaaaatcaatctccctgtctctctttctctgttacttttcttggcatagttttcattaaatgaatatgttatgaagggcct

SEQ ID NO: 12664 - DNA, 201 bp, Bos taurus
ctccatttcagactgtttcccaggtaacctaacgtaagacaatacagttcaaaacaaaattaaggatcagtagatttgatgagcaccagggccatccatatattcattcagcaaaccagtgtctggcacccaggataactttagtcctagaagtcttcctgaatgaggaagggttccaagtgggcctgaagggcagacaga

SEQ ID NO: 12665 - DNA, 201 bp, Bos taurus
cgagaggggaaggggttggccaaagcccaggctctcctggagtcacccactcagtctggactgctgcacgcatttggctgactaggaaggtggagccccccctttgggtttgaacctgcctgggcccagcacgactgccaaggatgcaggtggaagcactggctgagtctgtgccaggaatggggggtgagaatgggctga

SEQ ID NO: 12666 - DNA, 201 bp, Bos taurus
gtatttctttagttctccctaaagcattctatgcttgcatcccaagatatatgtattgggaagcttgagaagatttcagaagatttgctttcccctcatggtccagttggacactgccgtggctgtcaccccctacccccatatttaggctgtgtgttaatattagttcatccaggctctgaattccctgtgtagtggcta

SEQ ID NO: 12667 - DNA, 201 bp, Bos taurus
acacgactgagtgactatttcctttccttttaaagtaattctgttattttatttttggctttgccgggtcttcattcctgtgcggctctctctctagtgctggcaggcaggggccattctctagttgtggcgcgcaggcttattgtgatggcttcgcttgtggagcccggggtctagggtgcaggggcttcagtagttgtg

SEQ ID NO: 12668 - DNA, 201 bp, Bos taurus
tgggttctttctcctctgatgaccttttctattcagttagtttcatttctagagagtatgtttctgtactgttcagtgcacagtattttgagaattcatacattttattccagagttaatatatttttgaaggacaagtatagcagaacgtaatgcttaaagaatgagatgagaaaggcagatttaatttcttgagccatg

SEQ ID NO: 12669 - DNA, 201 bp, Bos taurus
ctcatggatgcatcaaatagccaaagtgtttggacctcacttttatttctttggaaaacaggaagcctaaagccctctcaggttgtactggaccattatgaaatgggttacatcatactacagtacttcctgcctctcttgctgctccaacagggaacgctcttccaatccccaggcccagctcacaccccatctgcacct

SEQ ID NO: 12670 - DNA, 201 bp, Bos taurus
tagggtatagttaattattgatgagattttagtgccttctgttgcagttcttgtagagaaatggagttatttgcctgaatgttgttcttagaagaacattcgccacataatctgaaaattcatactgattggcttcctcctgaatccagattcagctattgagggattgtttgcttcaaagacaaacctgattttgctcca

SEQ ID NO: 12671 - DNA, 201 bp, Bos taurus
cctttattcattctgcaagtacggactcttgttagctcagagaacatatgtgagaaagcatggcttctgtcctgagtagagtctagcaggaagactcacgcgcagacacgcacagtgcgtggtgtaccccgtgcggcggtggagctgcgtgccagatacagcagagcctaaaggaaagaaccgctggccccatctgggggc

SEQ ID NO: 12672 - DNA, 201 bp, Bos taurus
gcgactatctccgcgtgtggagggtgagcgggcgctcgactggcctcgagtggcagctgtggactcacagagagcaggccggggctggaggccgggtcgccgcagccaggagaagcaagtggtagcgggtggactgagcttgttgggctcagcagatgtcctggtcagtctggcccagatttccttgaagtcgggctgcag

SEQ ID NO: 12673 - DNA, 201 bp, Bos taurus
agtgctttctatcagtgaaactgtaaaatgacattgagcaaatagcgatgggccaaatctgattgaggagtgaggtttgggggaaagctgagaagctcatacactgaaagcatgaaggtggctgagagcatggtgagttccagggaggggcgaggggacgtttctcagcctgcctccttagtaagctgcctttttcctctt

SEQ ID NO: 12674 - DNA, 201 bp, Bos taurus
acgatgaggccaaatgatattcaaacagttttacagccttgaaactgagcaaaagggattcgatggatgatcttaatgactccagtcatcaactagcatcctcctagcccacaccggccctgaccagcaacaaggcgaaggactaaccatgtttcctggaaaccaagagggagacagatgccacctgcaaccaaagacttt

SEQ ID NO: 12675 - DNA, 201 bp, Bos taurus
tgggtggacacctacagcagggttgaggagccacgttttctcctaggcttaaggggacatgacctccaagaggggctccttctcattcactcataaaatagggcccctggaataaacatctgcagagctgcacgcatgtcacagcaagcagatgtggaacaatgaccttgttctgcatatttttcttcttaaagaatcatt

SEQ ID NO: 12676 - DNA, 201 bp, Bos taurus
aggttcagggtggggaaaagaaacaccacagaaatggactcatattatgtgggaggagttggtgactctcaagtacatgtccttgccatagactctcgaatcaaccatctcctaatctgaaaggtagatctctattcttctccaaaccacaaatccgataagtgattgaacttcaccccagtaccaaaagccccagagact

SEQ ID NO: 12677 - DNA, 201 bp, Bos taurus
tgctggcccccacttctgtatctcttttccccttaagtaggggaagtgggaggactcagctggctttttgggggtgggggatgctcagcttgtagtatgtgggatatcagttccctgacccaggccatgtcagtgaaagcccagaatccaaccactagacccccagtgaacttccccagctggccttttaataacaatgtg

SEQ ID NO: 12678 - DNA, 201 bp, Bos taurus
tgatgacgcctctgaaaaacaactgtgcttggaaactgagttctagctgagcagcttttggggaccttctccttaagactctcaaagattgcgtcaggccgatgggatgcctggcagaaattctcaggggacatggtgtgtttttgaagaggactgattgggtcacagggctgacaggccgtttcccgggtattccttggg

SEQ ID NO: 12679 - DNA, 201 bp, Bos taurus
aaacccaggtcctcccacattgcaggcggattctttaccgtctgagctaccagggaagcccttaaagagattgagtccccccagtatatatttggaaaacaagttcatcactggaatttaaattttctctattttaaaatcagacttgtacatttacctcaaaaatctcttctctggaaacctcaatgcggcaatggccag

SEQ ID NO: 12680 - DNA, 201 bp, Bos taurus
aattacggtttttgattctgtggccactgtggacgtcatggtggtgacttctgtgatgaccgtttttcttttaggttctccattgacattttcatctttgttggtgggcaggccattttcatcaataaaatcattactgaggttagattcctctccagaagtaacaggggacgaagtaactttcttaactttggagatgtc

SEQ ID NO: 12681 - DNA, 201 bp, Bos taurus
ctgtctgtaaaagcaaaaagggcctaaaattccaaagggctagcttttcaaggcaaataaactttaacaccaattgcaattatgcactattagtaaagggaaaaaaaaaggccacttcacatctttaattcacttggactctgcagcattcaagtttgtgacccctgccatacacaatctcccacggttaggtttctccta

SEQ ID NO: 12682 - DNA, 201 bp, Bos taurus
gataagggccctccacagtggagaaggagccagtcccgtggtggagctggcgacagagcaccggtggaggagcagcccgagcagagggtggaggcaggcacggcaaggctgcgcggagcaggcctgcaggcaaggctcacaatgtgagcacgggcagtcaggggtcaccatgcagggctttgtggactatggtaaggagtt

SEQ ID NO: 12683 - DNA, 201 bp, Bos taurus
gttgctactttggttaaattagaagctcataagtcattaacactcagggttgaacaattatctttcagctcctggcttttgaaatctctccaaggaaagcaaaatcaagcaagtggcaacagattcgttgtgatttttgttttaaaaaaccattaaatcggagaatccggaggaatgtcctggctgcactgttttagatag

SEQ ID NO: 12684 - DNA, 201 bp, Bos taurus
cgtgcgatcattcattaacaccttctttgctgtctcctctcaaacctctcgctgcacaactgctgccctcacatccagacccagggagttctaaggaaggaccgcctgtcatgagccaagagccccaacacagagttctcaatagccttgtgaacttgagaacatgaacctgcagagacttttcaaaatatcaagcttcag

SEQ ID NO: 12685 - DNA, 201 bp, Bos taurus
tgtatcttactttggtcacaggtgactgttagttttgtcaattccctttggggacacttccaccaacaggaagtggagatcttactgagttaagaccccattggtacacgactatcttcagcacttacttctctacaacttacaggcaaagctgcctctttccttctgctaatcccagatccaagggagaagacaatcctt

SEQ ID NO: 12686 - DNA, 201 bp, Bos taurus
tttggaccctgatacatgaatactgatttttttaggtggtcagtgcattgtggttttaatgacatagagaaaataatatagcccttgtgcctggatctgcggtgaaaatgtttacacagaaataatcatataaatgttacttactggtgttcaagttttagaagcaacctaaagctactttaattgagacagaattcacag

SEQ ID NO: 12687 - DNA, 201 bp, Bos taurus
agagacctggggtccagctccccgccaagccccaacgccgaatggccgctgctcccggtcagagtggaggcgggacagcagggccttgggccgcaccgacctttcgtgaaaccaagctccaggcagccttccggcgtctgtggctactcgcgcgacgctcccagaccgcttggcctgagggcacaagagccccagacaact

SEQ ID NO: 12688 - DNA, 201 bp, Bos taurus
agtgggactgtcacagatttcaaagaaccacaggtataacaagcaagcaaaggaaaagcacagaaggggaggcaggggcctgcctcctgacccctggggacggattagtagctagagctgaatctccatcgtcactgcaaagcaaggcaggcccagagagagagcacatggaatcaaaacgaaaaaaaacgggaagagact

SEQ ID NO: 12689 - DNA, 201 bp, Bos taurus
atgcaggtcagcctggggggcctgccctgtggtgccaaacggagatagttgggctttaagactatgtttacattgtaatcaagccaaaacagtactgaactcctgtgtcgaagggcccttcccagcttcatcatgtgtggattacctccttccagccacgggcaaggggctccatctacttcactctctttgcacctgctc

SEQ ID NO: 12690 - DNA, 201 bp, Bos taurus
ctgaggttccctgaaccctgccggggccttggcccaggctcctcccacccagccatacccaggacagtccaggggagattgcggtccctgggatgcaggtcccaggcctagctcggtctcacaggctctgtagaaggctgggggtctccaccatgtcatgccaggccccaggcatgcctggtgacaccagttcctggcact

SEQ ID NO: 12691 - DNA, 201 bp, Bos taurus
actgcttaagttccccagagggatgcattccagtcaacttaacattcttttctggcctcctgctttcccactcccacgaaggcttcccagggtcaccctcatgtaagctatttgcacttgtaccttatctgttcctgagggagcccacctctgagacagtggttgcagtcatgcaggagggagggtgttgtactggggagg

SEQ ID NO: 12692 - DNA, 201 bp, Bos taurus
ccagttctgtcctaaaagcaggacagccaaggccacgtcctcacattctccgtgggctctaactcctgattctgtccagggagcagagtacagaggcaccgctcccctcagcatggccatcacgctccttcctgcctccttgggaaaccagaagctcagggccccacctttgtggggtccttcagccccacccctgaaaac

SEQ ID NO: 12693 - DNA, 201 bp, Bos taurus
agagaggagactccctggcccctccagtgcccaggagaggttgacagaggaccctgtcagtgtgtctgccctctggaggcccccggtgagcttctcaggcgccaggtgcagtctccacagcttttaaggtggtgctgaataggaacaggtgacttgggatatggccttcatggtgggaggagcttggtaatggggattgga

SEQ ID NO: 12694 - DNA, 201 bp, Bos taurus
tcccagttcccgggccccgttatcccatcatagcctctcctacgtgtggggtctacctctgccttcccctgtgagtgcccctggcttccccctacctggagctgatgtcttcagagggggccttggcagagaggtgacagatttcgcccctcttgtctgtaccaccagccagctgcacaggcgtgagaccaccctctaccc

SEQ ID NO: 12695 - DNA, 201 bp, Bos taurus
tataaaagcaaatggttttgaatttccccagggactcctgtgactggcacagactaagatgttttctggtccaccctgcactgatgtttaccacagaacacgtggcacctgtatctattagaaagtcaatcaatttgttttgcactgtcaaagttacccgagactcctctggagaaattagaatccaacacaagtccaagg

SEQ ID NO: 12696 - DNA, 201 bp, Bos taurus
acagggtttcctcgaggcagagtaccgcctgggcccacctaccctccaaccaaaaggcagctggtgaaaactcggatgtttgctgtcagtcaccagagaccctcaaggccggcagcccgctgcgcccacatcccctcctgtccgctgcagtagccagaccatccccacctggtagcagttataaggggtgacccagccaca

SEQ ID NO: 12697 - DNA, 201 bp, Bos taurus
gagggccctgtcccacgagaagagtggatttccatggctggttggtaggacgcatcaccctgtcctaccaagtgaccaagggagaagccagggggcctcaaacacctccacacagcctgtgcagtggagttatttccactgcaaagaggagagataccagcaaagggaagagggcctgacagctccacgtgggaggaagtg

SEQ ID NO: 12698 - DNA, 201 bp, Bos taurus
tggcgccagctcggggtccccttgctgctggcttggggcccctcgtccctggcaaggtggctgccaccagcgtcatcacaatagtaaagtccaagacggacgcccggtcgtagggacacacttggccaggcgggtctgcaaggggccagtaggcgcatggcaaattcggcagccctgtccccttcttcctccctcctcttc

SEQ ID NO: 12699 - DNA, 201 bp, Bos taurus
acagccatggcagtctccagacccgtcctggtctccctagcccttgaggggctttgatactcaccagcccaggagccagccaggccaggttcagatccacgcccagagactggtctgaagggcattcagcccaagtagcccaaagccagcctggcagctgatcaccaggctccaccccgattgtggccaaagcacccagca

SEQ ID NO: 12700 - DNA, 201 bp, Bos taurus
aaaaaaatgcaaacatggcaggccatccacctttgactgtacaggaggactggagagttgtgtgatggaaggacttgggctcggtgtcatgagacaataccgcagcaggcccagatggcccagagggactgtcacagacaaccctggatcctaatatatccaatatgaaggatcattaagcaaaaggggcccatactatgg

SEQ ID NO: 12701 - DNA, 201 bp, Bos taurus
tgtaagcttcagctcctgccaaactccccactagtgtcgggtctcaccctcaatctctgtcctcagtccacctggcatgacctctgggtcttcagacacatggcccttctgtctggagggctccttgcctggtctcaccagcttgggctctctcaggttcaaacttccattccttgcagaggccttcccagatctcgtcag

SEQ ID NO: 12702 - DNA, 201 bp, Bos taurus
atacaaatgttagttttatccttaggtcatagaacatggattgcatttatacattaagaggataaaccagttgcatctaaactctttgggtacttgtgatagctttaattagtttacaactttctggtttatttcctctaatttttctatctccctaatctgtacacatgcatatattggggagagaatattttgagatgc

SEQ ID NO: 12703 - DNA, 201 bp, Bos taurus
taggcacgaaaactctgacaagtgtgggggctgtcattactggttccccagtactggtttacctgtggtagaacttggccatcactcaagatctcccccaaaggatggttttattaatggagactcaggtcagcaccacaggctctggaccctcaaagagcaggtttgacaggcccacacatatcaggacacggcctcagt

SEQ ID NO: 12704 - DNA, 201 bp, Bos taurus
caaacgagctaagacttttgaatacatgcacaatagctttcaattttgccagcatatggggtctggaaagaacaggaaggaggggtgtgagaaggggtggtgaggacgagtcactaggtttcatctcacccagaccttagctacacctcagtggaaccacctgtcagaaatcccacagtctggaagccacaggccaaggcc

SEQ ID NO: 12705 - DNA, 201 bp, Bos taurus
caacttctgctccctgtcccagatatcccctgtctgccaccaggccacaggggtactgagcagtgggagaagtgcctcctttcaagagctggatttgctgttggctattgttgcaacaaatgctggcccaggactctttatcgccctcatgtggacacgaatagtagtacacctactgcccacaaagcgctccaacaaatg

SEQ ID NO: 12706 - DNA, 201 bp, Bos taurus
cagttcacggtggtttgttacagcagccctgggaaaccaatagtgtgggatcacatgacagcccctattttagtccctgggaggcccagcgtgggtgctggtgtctgaagccagagaaatccagggacccccggagactggcagagagcgggggtgggtcagggccttcgtgttctgttaccgttcccgtgctgactctgc

SEQ ID NO: 12707 - DNA, 201 bp, Bos taurus
ccctgtgctttataaaacgtgttcttaggtctatctgagtcccccacaggggacatagccagggtttctagggatgggaatcagaggggctcttgaagccgccctgaggcccactgtatagtcatcacaaccccaccttgagggcagcaggcctgttgtgcccaggcagctctcctcccaccatgacccctgctaacctac

SEQ ID NO: 12708 - DNA, 201 bp, Bos taurus
attttagctgctgttgccgcgggcgtcagatgttaggatggtgtgggacaggacagtgggagagtggaagggcaaagccaggaacaggagatgtgttttctactgggcaaggctcgtgtgtgtcccctgggcaggtcccagacctgtttccagtctgcatctacttctgtgatattgggccttagttttcccatctggaat

SEQ ID NO: 12709 - DNA, 201 bp, Bos taurus
cgcctgcttgaaggcctgtttcccaacccttcaccccctgacctcaacacaaatgaatgggggtccaggacagtaggcccatagccaccaagtcccacaccaggaagtcaaggtgcctccagctcagcctggctactcacacctcacagtagggcccaccgtcactctgtggccatgggaggaggcaggatctggcagaaa

SEQ ID NO: 12710 - DNA, 201 bp, Bos taurus
ggaagctcggggggcgccatctcggggggcgccatctcggatggcccctgcttccccggatggtgggcactgttgggatcatcccctctccagcgggccctgatccttctcatggattctgaatcttaagatggctcggatgggaagtagggctgactggtcttgtggtggctgccctgtgcaaggcccgccctcctgaat

SEQ ID NO: 12711 - DNA, 201 bp, Bos taurus
aggcaggcaggcagaggccagaaaagccccagacacagagccaggagatgagggcttgattctggctcgactgctggttggcctcagggaagccccttaactgcttcaccttgaaaatgaggattaaaaatatctgttttatctaatacaaaggctgtggccagattaggcaagtgtcaaaatgctctgtgaattctgaag

SEQ ID NO: 12712 - DNA, 201 bp, Bos taurus
cttctgaccaaggaatcatccactgggtggacgcaccctgttttgcttatccactcatctgtgggtgggcacgtgggctctccccaactttggccattgggaataagctgctatgagcatggatgcaggagtgctcccctttaagacatcctcaacacgcgtgtgcattgtgggggggaaaaaatgtgaggcctctcttgt

SEQ ID NO: 12713 - DNA, 201 bp, Bos taurus
ggcccaacaggcactttgctatcggatccaaaagactgagcgtgtttagcctcaatgaacagacagacagaacacaaggaaagagacctggaggggctcacacagacctccaagtgcccggggccctgctctattccaacacctgcagttcactaggacacagacagcttgcaggtatggttggggttgacaaccacatga

SEQ ID NO: 12714 - DNA, 201 bp, Bos taurus
tcttttccctttggcttttttggtttcctcccacccatacttcagtctgctggccccgttcacatgtgaggtcagccttgggtgctttctgtcacctgtccgtgagtgggaaccaggcactttgggcagtctgtgcaggaaagcttagagcacattcctatttaattaggaataaagaggtttatctgaatgtcttaatgt

SEQ ID NO: 12715 - DNA, 201 bp, Bos taurus
cttctcatcttcatggactagaaatttttctggtttgttaagtccagaaaaagcagaataaactccctttaggcttgctttctctagaatggggtgtgaaccagtagaatttgtgttgtttctcagagtggtttttgctcagactagatctaagctgtttttagttaactttctcctgaagtagctgttggaatgttcacc

SEQ ID NO: 12716 - DNA, 201 bp, Bos taurus
ggtcagatactgctttccctaggcaggctccttccaggcctgatggggcgaaatgcccaggggtctctctgtggtcccgcaaggcccctgttagttttgagtcacatcattgaagactgtctaacagtgcttggtggtccctcagcctctgtgaggcccacctcagggcagggacacttactcctaaaggtgtattgggaa

SEQ ID NO: 12717 - DNA, 201 bp, Bos taurus
acttcactagatgggcacaatgaaagaatgggtgagagaagagaatttgtgaacttaatttgagcacaagaaatgatctatctgaagaacagacagaaaagagataagaaagtggagtctcaggaagctgtgggataataccaaaagacccaacactcacgtcattagggttcagaagtagaggagaaaaagactggcgaa

SEQ ID NO: 12718 - DNA, 201 bp, Bos taurus
gtgacccctgtcctgcactcactttggttcttcagcccagctctgcctctgtcatggtaggggggtacctggagtggagcggccaggccccccctggaagtttgggcttcccattctccatactcctgtcctgtccgtggtgatggaggaggggtaccagcctggcagggagaggaggacccattcagggcctggctgggt

SEQ ID NO: 12719 - DNA, 201 bp, Bos taurus
gggtggcggccctgttggtctgctccatacccactgtccccttctccttgctaccagaacctggttctgtacagtgctagacacgcatatgctccaggagggggggcctccactcgagagggagcttgcttatgtgcatgatacggagcttccctcgtgtcctactctttgcaaccccatgggctgcagcacgccaggctt

SEQ ID NO: 12720 - DNA, 201 bp, Bos taurus
atgctcagtgaagaagccaaatgtaaaaggccacacgtggtacgagtccattgaaatgaaatgtccagaagaggcaaatccattaggacagagagcagacggggcagccggggctgggccatcacacctatgggattccttttgggggacaaataagaccctgatgctgggaaagactgacggcaaaaggagaagggggtg

SEQ ID NO: 12721 - DNA, 201 bp, Bos taurus
cagaggggaaccaagcacctcagccaaggtcatgctgccgcaggaagggccgtggcccagggtcggggtcagggcactgtgaccgtgctctcattcacactgtctcagagataaccccacggaataacatgagaaagcgtccaagggccccctccctgcccaccacccctggccgggatctaccctttgctgaagctctcc

SEQ ID NO: 12722 - DNA, 201 bp, Bos taurus
accacccctctccctgctacttgggccagcagggcccactcctctctcatttgacagatcaagaaattgagactgggaagtagtggggtaggggtgacgcgaagcggtggctcagaaccagtaggccggtggactcgagccaggacacgcccaagtactcagcagggcgccagtctggggacactccactcgtcactctgt

SEQ ID NO: 12723 - DNA, 201 bp, Bos taurus
agacacagccttgggtctttctcctgcagcatcaggtagcctgcatcgccatatattcttgcattcgttctccaaattcctttctggttctaaagttctggttccagatcactctcagctctagctgacaatcagaatcatttccagagcttcttagtagacagattactggtcctcgcttcctagagctcctgtcaggag

SEQ ID NO: 12724 - DNA, 201 bp, Bos taurus
tgctcaagcctggccgctccctggccgcctgcacaagccgggtgtcacggctctgtgcctgtcctgctctattccctccacccggcaagcccttcccaccttccttggcctaggtcactctcaatccttctgcaggtgcctccctgagcccctgggtggggcaactctcttctgggcacccccatgggttttcccagtggc

SEQ ID NO: 12725 - DNA, 201 bp, Bos taurus
ctactctctgagagcaacctatgctccaggaggacaaagactgcatcctccaagtgttgagaaggtcaccacaccgccccacccccaccccaggccacccttccccacgcacacaccaccagaggctctgtggttcacacctttgctgagaggggatcgaggctttcttagccaaggccgatggttggatgcatctctgtc

SEQ ID NO: 12726 - DNA, 201 bp, Bos taurus
cccctgtggtcagagctgagcctcgccaagtcatttttaccagcactggcaatggagagaaccctccgtctaggaccttgacgtctccaggctgagcaccgtcctgtggttgcattcatgagggtctggcttagttggcctgggggtgaagtctcacctgcccatccttcaggcagagctcccatctagaaacctacaacg

SEQ ID NO: 12727 - DNA, 201 bp, Bos taurus
cctggcagtcttttgacgcataaaactgttttcattttcctgaagcccgaactgtctgttttgtttgcttctgttgcctgtgcctttggtgccaggccccgactcgtctgtcttcagatctttgttggaaacgccccttgcttgccctgcatgtcctcgctcctgcactggttccggctctgactgccccagcccggactg

SEQ ID NO: 12728 - DNA, 201 bp, Bos taurus
tccagcctctgcccctgtgggggcgagcagctggggactcttgggggaagcttgctgcacagttactaggtccgacccacatggagccttcctgccgtctgtggggccaagaggaacgagggttctggacaccagagtcctccgtcgtctctcaccgcctgtctgtctggtctgcagcccttcatgtacggggactacatc

SEQ ID NO: 12729 - DNA, 201 bp, Bos taurus
tgggggagcaagtcggcacatgctggaccctctttggctggggggccgtgtgggacaggctgggagagatggctcaaaggttctcagaccagaggttggatgactttccccaaccccagggggttagggcttcctcctctccactgaaaggagtttcttgctgcactggagggaatgaatagatggagccagtttgtgggc

SEQ ID NO: 12730 - DNA, 201 bp, Bos taurus
ggggtttcccaccagccgccaggggtgggtggtctgagggcagccatggctgggggcagagccgtctgctgcctcactgttttttctggaatttgtttccgttcacctctcctttccctctagagggggcctctcggactggaactggagaatgcatatccacttgggggctgccgggtgggctgggaacaagacccctgg

SEQ ID NO: 12731 - DNA, 201 bp, Bos taurus
ttggcttgttccctcaacaccctcctggggggctggagaaggagatgtgtggcctgaagattgtaggccccttcgcccctaaaaccctgaagtagggaagagggaagcaagtttagcgcccagcttgttcaatgagttttttgactaatgagtccaggtggtgaggggctccagggcctgaccccccctacgccctctgga

SEQ ID NO: 12732 - DNA, 201 bp, Bos taurus
gagccagagtcttaaacataagagtaatgtcatgctggtaggggccttgggcatcaagtttttggaggaggagagaggtccaggttggggctggacttgcgggaggcgctcagggaatctggcctgcacatgcggattctgactcctggtgtggctctcccaacttgggctctgatgggagaaccagcggggcagggtgtg

SEQ ID NO: 12733 - DNA, 201 bp, Bos taurus
cctacaggttgtggccgtcaggcgcctggggctgtggagcctgcctgcgagtgaacaagcagccgagactccaaaacgtgagcatcagcggaaactgcccatttgaccagggaagtctgggccttgtcttccctgcagcagagcccccaggctttgaaaggggcggtaccggtgccaggaacaccgggctgagagcggcat

SEQ ID NO: 12734 - DNA, 201 bp, Bos taurus
tccaactctcccactctggtccaggccactctcaacacctgctgtactactgcaacaactcctaattaggaccctgttttcttctccagcaaccccccagcccaccaatccaatctgcacagtggcctgagggatcttttcatagcatgacacacatcacatcactttcctgcttgaaatccttgcacggcttcccatcat

SEQ ID NO: 12735 - DNA, 201 bp, Bos taurus
gcgtttctctgaattcagcaaaaccataattattgtgttttcttctcagaactctgttttacataaatatcttgggcaaagtcttactcttactgtagtcgttttgtttcattgtgttaaattacactgatattttgcacaattaaatatccttaccctaaaagctctacagtgtttcattagtgaacataacttgccaga

SEQ ID NO: 12736 - DNA, 201 bp, Bos taurus
cacctgctgggttggttttaagaagtatttttgctttaacacccatgatgggagggcgaggctcccgtttcttcatttagcagatgttcatagagcatctttggatgccagtggggaccttgaggactcagcagagagcagatgggtggggccttgcttgagctaatgttgaaggcagagagcatgatggtggtgggccat

SEQ ID NO: 12737 - DNA, 201 bp, Bos taurus
taactgagcgaccaacacttcacctagttcatttgaacagtgatgaagcgtcagtcgaacactacgttagacactgatgtataaagatgaggcataaacacggctcctcaccatcagaaacttacaccttggacacaggatgctggacagaaggggcaatgggggaggtactgtgggccttctaaagaggtcacgtagata

SEQ ID NO: 12738 - DNA, 201 bp, Bos taurus
gaaagtctgcggagctgggaaggctggttccctcggaggctggggaagagcctgcacacacctctcccgagcttctaaaactctgtaaagctccaccagtccatgttataaatatgcaccactcctttcgcacgctagtttaatatctgttacttcatagtttttaggggtcacctgcctacaacttaaggttttcagagg

SEQ ID NO: 12739 - DNA, 201 bp, Bos taurus
cctctgtcacccccacacccccaggcctctactgcagcggctgggtgaagcggggacccacaggtgtcatcaccaccaccatgaccgacagcttcctcaccggccagattctgctacaggacctgaaggccgggcacctgccgtctggccccaggccgggctctgcattcatcaaggccctgctggacagccgaggtctgg

SEQ ID NO: 12740 - DNA, 201 bp, Bos taurus
tggagggtgtggcttgctgtctttagctagagttaggtgtctttaatttgacttggcttttcaggctcttaaatcacttgaagacacttgaacgtaagcctctggggccttcttgtatcttaaaggtctacacgtgtctggcacatagtaggccctcagcaaacacttgggtgtgagcacctcccccagcccacacggttc

SEQ ID NO: 12741 - DNA, 201 bp, Bos taurus
ttttggcggggtttaaaactgtggatcccggcaggagcgccacctccgcggcggggaagggcgcaggaaagcccctgggtgggggaggggcgggccaagggaaaggttctagaagccacgatgccaaaagccgcgagtttaacgacggaccgaaatcccgaacttggcgcaggaagactccgagcgctcccctccccgtct

SEQ ID NO: 12742 - DNA, 201 bp, Bos taurus
ccatgtcaggtggcttgtgggatctcagtttactgacaaggtactgaacctgggccactgcagtgaaagcccagaatcgtaaccactgggccaccagggagctacccacccccactggacacacacactttcattttgcatttctacctggttccctcaaactttactacgccttaactttaataaatatttattgagagc

SEQ ID NO: 12743 - DNA, 201 bp, Bos taurus
ccctcctccagagccgtttctggtcactccctcctaccggaagagcaggtgctcaggtagctttaccgggaggggaagtgggtcaggtagatacacccctcggatgcacaaggccctccatctgggggtgggtgggcagcatgacgcaggatgctgaggctggaagatgggtaccaccacgggacagcctggcttcgggcg

SEQ ID NO: 12744 - DNA, 201 bp, Bos taurus
gtgcatctttgaacccagtggggagagaagatgctgggggcagaagcctagtgttctccccctgcagggcctggagtccgtattgagagtcctgggcccatgccgcttagaccaccctctgtatgtctaagccgagaaaggagcaggcccatcggcactgcccagcccaggaccttctcggaggctcagtccagcctccct

SEQ ID NO: 12745 - DNA, 201 bp, Bos taurus
aagagcctgggctggtctgggctggcaaagaaaaccactgaagggggttaggagtgatgagcaaggcagggctcctgaataaaccatggccaagtgactctgtttctgtctttcagagcgccagcacccagataaagctgcagggagattgatgggcttccctggtggcactagaggtaaagaatccacctgccagtgcag

SEQ ID NO: 12746 - DNA, 201 bp, Bos taurus
tctgttctttctggaaactaccaaacctccctccttgtgttctaggagagttgatttccctctgggttttcaactagtctgtgagtgtttctgttacttgcggccaagagtcctcggtcatgtgagctttgtattgttattccattttcctaaatgaggggtctgagttttagagatgccgagtaacttgcctgtggtcac

SEQ ID NO: 12747 - DNA, 201 bp, Bos taurus
ctgagggcccttttcttacaggctgcattattcaaccagcaaatgaagaaaggaaaatgctgattgcaacggattaaaaaaacagtcccgggcgtgctcccgggtttggctaggactgactgtggccaggtccagggacaaccgtctttgttgcagggtttctgtccctttaccccaggcagagacagctggaggatggtt

SEQ ID NO: 12748 - DNA, 201 bp, Bos taurus
caggccctcacttcgtttaggacttgaaatcctaagcgatcagatccagtgattaataccatccttggtagatctttcctggtcaggctctgctacaaccagcaggatggggaggggccacctggggttcccctctgccttcagatcagaactctaagacgtcatagttgttcagtcgctcagtcgtgtccagttctttgc

SEQ ID NO: 12749 - DNA, 201 bp, Bos taurus
catcgtgactcgtgggtcagaaatctggagaacgctcagccaggtagctcgcacttgggtctcttaggcggcagcaatcccttgtcggccagggagcgtggtcatgtgaaagcttaactaggttggacgtccgaggttcggatgcgttcatgtgcctcccacttgactgctgctggaagctcagatgggctgttgaccaga

SEQ ID NO: 12750 - DNA, 201 bp, Bos taurus
tccacccctgtcaccccctaactctgagacattgggcgtatgacttaaccactctcaacctcagtttgctcagtctgtaaaatgggccaataaaactcagcggatctaagcgagacgaaaaatgtgatcagcagacagcaccaccccagcatcttgaaacacgtttcttcttcgctctctgccttctgaccaggagcctga

SEQ ID NO: 12751 - DNA, 201 bp, Bos taurus
cagcatctgctcatctcctggtaccctgacctccggccccttaaaagccactccctgttgcccaagcgcaccacacaccttcccgtcctttgccggccttccccttctcctttaagatcacgctgggtaacttcctccatggggtgctccttgcatccccccgacactcttcccacctgcagtttgaggtgctcgtgtgtg

SEQ ID NO: 12752 - DNA, 201 bp, Bos taurus
tttcggtcacatatggagaataatcctacccttcttatatcacagaggtctttaggaaaaaagacggttcaaagcccagaaacgtgtaaaacgtatttcctagtggtttgaatgaaactcctgacccctcccgagtcccgtgatctttgtaacagagtgtgtgctcctctctgtacacccatttatccgtctcatcgtcct

SEQ ID NO: 12753 - DNA, 201 bp, Bos taurus
acgggcaggctcccggagggcagggggcatgttttattctagagcagtggttcgcaaaggggatgaggttgccctcagggacctttggccgtgtccagagacaattttggttgtcacaactttggggaaagttgctactagcaactagtgggtaaaagctaaggatggagctaaccatcctctaacgcacgagctaggcgc

SEQ ID NO: 12754 - DNA, 201 bp, Bos taurus
acagatgggcccctgagcttctcgttggcctggaaaaatgaaaggcggagaaaatcgtcataaaaaacggaaacagctgtggcaggactgcagcagcttggggggcgggtcctggcccgaggggctcgcagtctgtcaagactctgctcccaggaggaggggcatcaccccaaatcgctgcccacccagcgtcatcagatg

SEQ ID NO: 12755 - DNA, 201 bp, Bos taurus
cacttggtccggccttgcagatgagtccagagtctggatgaaaacaggatgtgggcccctgagaattgtcctaaagactgaaagcatttgcctgggccccgggcctcctgggtgaggttctgcctctgtcgcccagcgtcccttccccatgacgtagacagagaggactcttacccccgctggcagacattcactgacact

SEQ ID NO: 12756 - DNA, 201 bp, Bos taurus
gtttagattctaacatgagggccatttccttcgtaggtgggactggtcagaggttagcatgagaagactgctgagacctgcccgccaggacatccagggcacctcacttgagagccctgccttgggaagtgcttctccatctgtattagcatcatagcatctttccatctgcatttatgatgtgattcacttctgagcagc

SEQ ID NO: 12757 - DNA, 201 bp, Bos taurus
tcctcaaggcctggaggcctctccagccagcccttgtatcaactaacacttgttcagtgttcagtctttgggtaaaaatcaacatcttaaaaaatttcccgcaggccccacgatagtccattaattgtctgccatttttaatatgcacttttaggtttaaattctcggcaggttggttttctgctgttttatatagcactg

SEQ ID NO: 12758 - DNA, 201 bp, Bos taurus
ggctgcttcacagacatgggtgatgcgtaggccgcttgttgaagggtgctgtattaacattatccaggggcatgcagtgtggtaaccaatggtgcaaatgtgcaaggccaacctattagaggcttatttgtcgttcctgccaagtctagcatgatggtcttgattgggtggtcctcctggataggtttttctccaggtggt

SEQ ID NO: 12759 - DNA, 201 bp, Bos taurus
aagcagtaggttgcccttaaaagtatacattcactttccaaaggcaggtctattgatttttcaaacactattttagctaatgcaggagtggcagtagacatgggttcagtccctgggtcgggaaattctctggaggagggcatggcaacccactccagtcttcttgcctgggaaatcccatggatagaggagcctggcagg

SEQ ID NO: 12760 - DNA, 201 bp, Bos taurus
ctcttcaactgaaatgaactttgagagagaaagaagggaaagggaaagattttctgcaaacgcaaagaatactttctcactgccctagactgatggctttagccaccggcataatcctctctgggtatgctgccttttttccaagataattagttctattgacccacagaatttaatattccagaatgatctcctaataga

SEQ ID NO: 12761 - DNA, 201 bp, Bos taurus
gtgggaggattattccaactgttttgggaaatgggtagacattcccaggagttgggctactgtccactttttgatttttatggttggcctcagaactgcctcgatgcctgtgggtgtgttgtttaaccgacgtgttacaatgagcatacactgaggctcaaggcccagtggaattcacccaccgtcttggacctatttggt

SEQ ID NO: 12762 - DNA, 201 bp, Bos taurus
tcaaccgtcttctgcaggtgagacagtccaggccacgaaaaaaaaatcatttctgaaattattcctcctttagggaaagccttctctgtgagttgacttataggccatgacgtcaaatcacaaacagaaagaaaacaagaaagaaccctaggccctgatggatgctctgtcctttctcgggtctcttgagcccgcttcccc

SEQ ID NO: 12763 - DNA, 201 bp, Bos taurus
catttataatagaacagggacttcattttggattctcaaataaaacatcatccgcaccgtccctttttttaaccctcggctctcgtctggtgtatcttaacgtaactctcttgttcagcatctctgtctgtctcttggccacttgctacaagacctcagccagcatttcctgcagcgctcagtcatgccacggtaatagtt

SEQ ID NO: 12764 - DNA, 201 bp, Bos taurus
ctgcactagtggaatcaaatatacgatctgccctttgagactgcgggtgcagtcctaatcctgactcttacccccggggccctcctatacggcctggccctgccagccccctggcgtgagacagaagtcctcacgtaacgtccaatggcaacacctgccccttccgagaccgcccagtgctgtgctctggtggccggggca

SEQ ID NO: 12765 - DNA, 201 bp, Bos taurus
ccagactggcgagaaagcccctgggggcaagggtggtagagtccgctcaccccaggccgcgcgagacaggcttgaggctgccctcggccccagctcagagggacaggtcgtttcaggttccagcaagcccagtccggtcacaggcagcaaacagcacagtcagaaggagtgagtgactctgccgtctgtgtgagtgtgtgt

SEQ ID NO: 12766 - DNA, 201 bp, Bos taurus
aagaagtcagttttttaatcctttgtagctactgtaccagtcgcactatatttcgatatcaaacaatctgaaccgaatgttaggaaattgcatggaacatgtggggcatcagctccctgggccacaacggaggcttcaaacgaaagcgagaactgtcctattccctgtcttccttatttcccactctgtcaaatcatccat

SEQ ID NO: 12767 - DNA, 201 bp, Bos taurus
ttggcagcgggttcttatccattgcacccatccctgaactgttgtttaagccgccattccttttactccctgaccgcttttccttatttctgcgttccctcgccttcctaattactaactgctcgagtctgctccttggagctcagaatgcctaggagatcaacggctctttctgcaaacaagaagtgggggtacctgggg

SEQ ID NO: 12768 - DNA, 201 bp, Bos taurus
gttcccttttctcgacaccctgcccagcaattgttatttctggactttttaatgatggccattctgaccagtgtcaggtggtagctcactggactcgcagttgcatcaaagctcagccctctcattcccgccccacgtccccacctcctccacaagtgagcccctaacagcacacaccaagggacctggtcacacgcatct

SEQ ID NO: 12769 - DNA, 201 bp, Bos taurus
ggtgggccagtggttaagactccacacttctcacactggtgcaggtgtgatctctgttcgaggaattaagatctcatatgccacatgttacagccaaaaaatacaaaacaaaaagctgccacgggcccttcgtgcaggggctgaaaggccacattcgtcatttcccaaaaggctccacggggtgctgcgtgagacggacat

SEQ ID NO: 12770 - DNA, 201 bp, Bos taurus
cccgatgaggagactgagtcttcatgaagctggattcctggtccgaagttcctcgtttagagactgacagagctggatgctgaactcaggcctgctgaatgtagcacacagatccttcacgggcttccctggtggctcaggcggtaaaaaatccgcctgcaatgcagtgacccaggttcgatccctgggttgggaagatcc

SEQ ID NO: 12771 - DNA, 201 bp, Bos taurus
ggacactttgaagatgaaaagtgccaggtgggtatcatcacatccgcttcttaagatggtatgcggaataataacacagctctcccccaccgggcctttcgtccgtggatttcaaagcccttagccttaattaagtcgcccagcacctctcagaagtaggcactaacagcctcttgcctgagatggagacgcagaggagag

SEQ ID NO: 12772 - DNA, 201 bp, Bos taurus
ccagctcatggacctggcaagtgcctggttctgacccagttctctccgtgaccctgtgcaagctccctgcatctgggcggctctgttctcccacctgtaatctggggccagtaaggatctacctctaggcttgctgggaggattcacgggttcagagtcggtaaacacccctcaacgagcagaaacattcttcagaccgcc

SEQ ID NO: 12773 - DNA, 201 bp, Bos taurus
tcgataatgctgctgttgtgggccacagcctcatctgtccccacatggagcaaagacacgcgcctgcatcgtcttccctcggtatccgtggtaacctccgcggatatggggggccaaccgtgtaattctcgggaagggatccatgtctaagaggacctgtgcagttgaaacccatgtcgctcagggtcagctgtacataga

SEQ ID NO: 12774 - DNA, 201 bp, Bos taurus
cttgaccgttcaagagagagaaggacgcgtccagggccggagacggggcccaggcgcgcccgccaacgagcccggactcggccgggctggccaagcaccatagcttagagcgtggggaccccggaaggagaggaacgcccttaacggtgactcaggagtttggactacgagccacaggcactccggcgccgaagacctttt

SEQ ID NO: 12775 - DNA, 201 bp, Bos taurus
ccttctggggctctgtctttagtataagaggatgcagctagccaagaactggccttctctgaagttcttgcactcttagaacttggtcccttgcctgcaccgtgtgccctccctgccaagcagactctggagcttcctatgtgtcacagaggtaaagcatccttaaatgcaggagactcgggttcaatccctgggtcgaga

SEQ ID NO: 12776 - DNA, 201 bp, Bos taurus
cctgcttaaaacctttgctggattcctaacatgctctggttagaaaccgaacggcccacggctgtcctgcagcctggccctggccccccctccagccttgcccgctgtgtatgaccacgttaggcactgctcgtcctgcatctctgccctgctttaacccagggcctttgcacatgctcttcccagtgaaggaatgcactt

SEQ ID NO: 12777 - DNA, 201 bp, Bos taurus
catccacgagcctccattaatccagttaatccttatcttctaatcaaaaacaaacatctttgagtgtacttgggatccttttaacactttctgcacacctggatggtgtcctcagccttataatccagagctttttgaagccacttcagctcctggaaaggagggaacaaccaccattgtggcggggtcctgccagcccct

SEQ ID NO: 12778 - DNA, 201 bp, Bos taurus
agaatgaaggatgatgccaaggttttggcctgtgcatctgaaggtttgatctgttgttacccgagagagaggggaagactgtgggtagggcaggtgtggcaaggggccagatttggacatgttaaatttgataggcttataaatatccatgtggagaaacccaatagacaattggatatgtaaatctgggcttcggggata

SEQ ID NO: 12779 - DNA, 201 bp, Bos taurus
cattcaccatgttttacttcacagtccatcaaaactgcagccctgcctcatctacaaagatcctcaaagatcctgcctgatcttggccaagatccacttcctcctgaaggacctgttgcattgacacgactgccctccacggtcacacgtgtcagaaaacggccacctgagttgttcaggtcactgtccgtaagccctact

SEQ ID NO: 12780 - DNA, 201 bp, Bos taurus
cacctctggcctgaaggaacaaagaaataaaaattaccagatcccactgaaagatgggcctggggaaggacctttggcaggagccgtggccctaaatgaatatcagccttgccagaacttcagtgaggaagggagggaggagagaagaataaccaccccatagtctctcctcaattaccttgcctctcattggccaaaaca

SEQ ID NO: 12781 - DNA, 201 bp, Bos taurus
gagggaggtgtgtatgaagggggaagcgccggggcggcgtagagaagggctcctggggagaggagggcagggcctaggaatacttggggcctgggtctccgcccaggcttttagctggagcagcttcttcggcagaactcagctcttacagaccaggttccgagccgaccctaatattccgctgggccgctacgactgccc

SEQ ID NO: 12782 - DNA, 201 bp, Bos taurus
cctcagctaaaatcttgctgactctcagaaccaagggccctcatcttgtggggatgctgggtttgataacctgtaaagtaggtgactttctgattgaaaaaccactgattctgttgtggcctggtctggagctcccacaacttcagtggttcgtaaacaaggcaaacatccactgtctttccacctagcaaatataccttc

SEQ ID NO: 12783 - DNA, 201 bp, Bos taurus
accaaggctccatggccacctcaggagcacagggtggggctctccaggaggggaagcgccctcagctctgaacacagagctacctgcagtgcatggccatccctggtgtgtgtccactcagtcctctgtgaatatggttccttaggtgtgtagcatgcgtgcaagcttagtcgctcagtcatgtccaactctttgcggccc

SEQ ID NO: 12784 - DNA, 201 bp, Bos taurus
tgaagaaaggctgtaaggagggcccctgtctgggaggttgggagaggctgaggtctgcagcctgcagaaggcgggtagagcacaactgttccgggcagaaggcactgcaggcgcacgggcccagggagtgcaggccaggggcagtgtgaagccctgtggcctagaggagagcatgccaagggtgcccgcatgacaaagcag

SEQ ID NO: 12785 - DNA, 201 bp, Bos taurus
cagacaaccaaacagacataattaaccaaacagaaccaaacagacgtaagtagtggtttactactcctcattctttctttgtatttttatgcctggcatcagagtgatggtttctgaagccatacttagcatatcttctcctgtcatgaatagcaaagctggagcctcactgcacaagggttgaatttctgctctgcaaat

SEQ ID NO: 12786 - DNA, 201 bp, Bos taurus
ttccgatctggtttgggagcctgagggctgtggaatcttcgaggctgccacaggcgccatcttcagaccctagactgtggccccagacctgaggctcctccggggcgtcagactagaaggagggcgtggcttttagaacgggaagaggataatgatcccccttttcggggacggcctggcctcctgcctttggtcccggga

SEQ ID NO: 12787 - DNA, 201 bp, Bos taurus
agttcccagagtaataccctatgtcttcaatgtaataaaagcattagttaactggattcagccaggtttacatgcaaatcttgtatgattttgagcaagtcacttaaattttttgagtctcaatttcttcacctgtaaaatgggcattatgtgttaaactgcgtagatttgctctaaggatcaggtgacaatttatacaca

SEQ ID NO: 12788 - DNA, 201 bp, Bos taurus
ctacactgaaaaccatgaatccccatctctgtgtttactttccctctgtccaggattcttaaacttgtgtgttctcacaagtccgtgtcttaggtgtacccgtggccgattcatggtgctgtatggcagaaaccaacgcaacactgtaaagcgattatccgccgattaaaaataaatattaaaaaaaaaaagcctgtgtct

SEQ ID NO: 12789 - DNA, 201 bp, Bos taurus
gagtcacctctcacagcgggagagtccttctgtctgggtggcaaagatgcttgggtcactctgctctcagtcaaagctggccttgaacttgcttggaccttcccttccttagtcatctacgtgtgtgtgtgtgtgagaaagagagagatgtgtgtgtgtgcatgctctgtcagttgggcccgcccatttgcagtcccacgc

SEQ ID NO: 12790 - DNA, 201 bp, Bos taurus
tgactctggaatcagacagacttgagttaaagcaccaaccttctctttctagtttggtccctcagatcagttcctaaatgtctctgagcttcactttcctcatttgcaaaatgactgtgaaaataacagcttcagcatcactagacaccgaaacgtcacatttttgttcacagagtgttagttagcttccctggtagtcca

SEQ ID NO: 12791 - DNA, 201 bp, Bos taurus
gaaagatgcttctcaggtcaaagaaagcagacataagcacgcttcacttttctaaggataattgataccagtaaaataccacttaaagagagtcttcttaaaacaagggtcaaaatatccattataaatggtgaaggaaaaaggtttgaatgggggccatactttaaaaaactgaaactggaagcttgaaaacaagccttt

SEQ ID NO: 12792 - DNA, 201 bp, Bos taurus
tgataataaatttggtgaagttctcttctgtttcttagattatttataatgaatggggcatacatttctttgaatgctttttttgtacctactcaaatgaactttgtttttctttttcattttactaatgtaataaattacattaattgattttcctgttaaacagactttatattcctaggataaatcctacttggttat

SEQ ID NO: 12793 - DNA, 201 bp, Bos taurus
cttaggtcccagtaatgcagtaattgtccacctgcaccctctgtggtaactatgtaggcagcttgaactctggtctggccctacccctacttgtacatccgcacagagcccacagctactaaaaccagacttgtgatagggtgtttgtctggtattgtagtgaccagagcctgccctggagagtcaccagggcctctgctt

SEQ ID NO: 12794 - DNA, 201 bp, Bos taurus
actgacaaaccaagtttgggcccaagttaaatctagctatgcacatttctcaagcctttttctaataactttagaagtgctatcgtcataaagtactggggaacagcagaaaatgtgggcctagatctgtagaagtcactggctcttttatgatattactcttggtgcttggggttttgaatttttttattttttggctgc

SEQ ID NO: 12795 - DNA, 201 bp, Bos taurus
agggttggccctaactgaagccacgtagcactcacgcacacacagaacacaaggcttttttgtctctaggttttacggtttccgccgtacgagaacctcccggggccttaacctcctctcatccctggcatttcttgttactccttcagccttattcaagggtaacagagcttcccctgccttcattcctcttagtggcac

SEQ ID NO: 12796 - DNA, 201 bp, Bos taurus
cccccgcatcatggccagattcaaaccccaccctttcttccttttctgaactaaaactcctatgagtcccgaacttttcagatactagatcttctagaaaggggtcttatcaggggtgccctggcctgaagcttgttggtgctcccaatcacaagctaaaacccagagtccagctttgcagataggcatctgggcagcacc

SEQ ID NO: 12797 - DNA, 201 bp, Bos taurus
ccattaggatggtgttttgtaagaacactttgatgtccaagggccgtcgagctgttcggagggcttttttcttcttcacaaacaggaagttttcccttctcgaggcatacacacagtgagaggccagttcccctagaatgagcgacagtgagcaggaagtggttccggcctgtcaggatctgtttgttcccgtggccacgg

SEQ ID NO: 12798 - DNA, 201 bp, Bos taurus
ggaatgtcttggggcactgtggtttaaaggacagtgggtgacagggccgtgggctctgcaactgcagctgcattggcttcgtgttggctcttctactcttagaacagacacctgctgaggtggtatgttgtgcctccctgggctgggaccgggccactgagagggcagggcacacttcctgctgcccaaggctgccgggtc

SEQ ID NO: 12799 - DNA, 201 bp, Bos taurus
aggaaactgaatttaaaaggaaaagacaaacattaagaatgaagtggggggaagggtggtggctgggagaaaaggccagtgcgtacactggtgcgtggcaaggttccactctggtgacaaaggacaccaccacattcgtggcttagacagtggccccaaagactgaatatctctgggctgcagccaacttcagaaccttgg

SEQ ID NO: 12800 - DNA, 201 bp, Bos taurus
gaacctggccctaaagttacccatgttatagccaccaaagggaattcctcctgcggtgtctgccctctacccttaaagctaaacatcgtgcttactggcagaggcacaatatttaaagggcccacatccattttcacaaagtaggcaatgaagagtgattttagatttgagatgcagtaatttgataattggcataatttt

SEQ ID NO: 12801 - DNA, 201 bp, Bos taurus
agaagtaagcagaggtcagagcaagagagacgcgccaagtcccatgacattgtttgaatccctggatccagtatcctggacattacctagacacaggcccaaatttttccttacttatttaagtcagtttgagtgagtttctgttactttcaaccaaagcaatcctaatacatctgatcttggcttttagattatatctcc

SEQ ID NO: 12802 - DNA, 201 bp, Bos taurus
tgtatttaaaagccaactagaacaggaaggagctggcataaatgaagagctgaaagatggatggctgagagttacaagatcataagtaatgagaaaggcccggctgctgggcacacctcggtttttgctctgacagaagacatacaacgggagaacacatctgttaatgtccttcacgagttcgtctgaacttgaagcgga

SEQ ID NO: 12803 - DNA, 201 bp, Bos taurus
ctgaggccagggcgagcctgtgcagccacctgcaatctgaggcttccttgcccgctccttacggagtgcaggcaatgtccccagggagagggcagagagggcagagcaagtggggagaggtccggcccctcctcctcgccccagtctgtcctatctcgcgccagggtgccagcactggggacctccttgggctgtccttta

SEQ ID NO: 12804 - DNA, 201 bp, Bos taurus
gagggaggcactgactgtgatgggggttttgtgtgggaggtgttggggttgctaatctaactaggatgctgcagggaggcctcaccgaaagtatggtatttgcacagcgatctgaaggcgaggagacagcaagcctatctgtctgaaagagcatccttagcagagagaacagcgaacgccaaggccctgaggtgcaagtgt

SEQ ID NO: 12805 - DNA, 201 bp, Bos taurus
ttgcttctgtgactagatattggaaagccctgcccctctgttcttggcaggctggagcagcctttggttaatactgaggggtgggccaggacggtgccctccctcctacccataggaagggactgaggcagagatctcctcttggttcccattgcagagaagtctcctccccctgccttgttcttggagtcccaggaccca

SEQ ID NO: 12806 - DNA, 201 bp, Bos taurus
cgcccacgcggcagcgacaagcttagcccccgctccgccccctcttcctggtttttcccggcaacccgcccctcccgcgtcatgtgataggggtactctgccggcccgagctcctgattggccgagctgcagggcgcctcgcgattggcccgaggccggcgggcccccgcctctctcctcctcctcgccgcggcccacgtg

SEQ ID NO: 12807 - DNA, 201 bp, Bos taurus
aagaaaaatacatgctttaatttaatgagcatgaaggagtctctgctctgtttatatacagcacattataaataaaagggaaaaagaaaatgaaatctgtagggaactggttcacttcagcatgtacatggctgggctcttgtcacggttggctcatgcagtttttatttatgaaaatggtatttccaagtggcatagagt

SEQ ID NO: 12808 - DNA, 201 bp, Bos taurus
taattcaaatggcagtctgcttgcagcattcaagaggccatgcatactctcctgtaagcgaccaggccaagtcacaggcagtatttggatggttttctatgtaggagggagaccgtgggcttaggatttgaaaaccagaaagaattaaagccaaaacctagtagatgtagtagccaaaagctagtctcaggattaggtaaa

SEQ ID NO: 12809 - DNA, 201 bp, Bos taurus
acacggccctgcccccgctccacccttctcccgattcccagggagattgcacacccactcctgcgccggaatccagctgcgctccgctaggactgtctgcacagaagctgggggcggggcccagcaccaagcgcacagtctggcccccgcgggtcacccctcccctctcgtcacctcccaaggaaaagggagccgcaagcc

SEQ ID NO: 12810 - DNA, 201 bp, Bos taurus
aaatccaaagcttcattactatgattgctattttatttggtctatattcatgttgttaaatacaccagcaaattgcttttaacttcctcaacacaagctgctatgtatgtagtcatacattttaactggaaacacatctctttaacaaaatagactattaattttcttagaatttctctgaaactctctctaaaactaccc

SEQ ID NO: 12811 - DNA, 201 bp, Bos taurus
acaggggcctgagatgtgtgtctccctacatcgcagagttggggcagccccttggggacgtgctctctggtcccagcccttgggtctccagctctcagagcaaacctgatcaggcctgctgactagttcctgcatctgaggacccctttgatgtgtgggtccgcgtgggagggagactggagtggaaatatgtgttttcct

SEQ ID NO: 12812 - DNA, 201 bp, Bos taurus
aagaggccagaaggatgtgggtctggttttcccaggtcagagaggagcccccaaggagggagtggtggatgtacctcactcaggtaggagcagggatcctgagaacagggcagggccagatggctcacttccctgggtatggggggcagggggacactgcacagagtcacgtccagctgcacagggacaacagcctgtgca

SEQ ID NO: 12813 - DNA, 201 bp, Bos taurus
tggaaaattaagtcatggaaggacacagatcctggtggagctccctcttcatcctgaacttagatttttctctgccaactggggggtaagactactgacccgatagacttgtgagcagttagcctggtaatgaattataagggaggcagtgtgatgcttggcacagaaccgtgtcctgcataaacatatcacagatacaca

SEQ ID NO: 12814 - DNA, 201 bp, Bos taurus
cttatcatcttctccatgtacagaggtttacctctttgagaggaaaaggtcctccctctgccttatctctaggtcctttcactgatcagctggcatgtctatatgttatttttacccatgaaattatgtattgccttctccataactaacaccagtgacaatctgtaacagttcttccctggagaccgatttcattttcct

SEQ ID NO: 12815 - DNA, 201 bp, Bos taurus
ggccctgaggagtgcaaattctcgggagctagccctgaaagcttgcagggacacctctgactagagagccttgcttgctgtgctcattttaattttcttgcaatagagctgaggaggttcctgcctgcacatcacataggctggaggctttttcccttctgctaaagattatggttctcctactaggctggcccaccttgc

SEQ ID NO: 12816 - DNA, 201 bp, Bos taurus
aggtgacagagacggtgaccgtgagctctgtgactgcttcatgtggttagcttcacaaggcacggtgacttcagacttccctgtagttgtcccacccctggtctggccagggggaaatgatttgtgttagatttgttgtctcttccaccaagaaaaagatcaaaacactgaatgaaaaaaggaaacaaatctgttcaaaag

SEQ ID NO: 12817 - DNA, 201 bp, Bos taurus
gctgtagaaacctatgagctgagttttgaaagcaggtagatatttgcctcactggtgtgtgtgtgtgtgtgagagagagagagcatgcctagggcaaggtgtggttttctggtatttgtttactctgttgctaacccttctggggctcacctttcaagttggaaagggaaggagatctaggcaccattagatagtttaccc

SEQ ID NO: 12818 - DNA, 201 bp, Bos taurus
cgcctggggccatcctagaaagagagcatcacagcctccagtgctccctccctccccagtgctggagaagctgtgcctaccttaggagaggaggcctcatacctgtttccccacctcttctatcactctgatcagtcctccacaccacacctgtggtagtgcccccagagctgtgatcagtccttctcccttggaaagcat

SEQ ID NO: 12819 - DNA, 201 bp, Bos taurus
tagagcagctgccaagtgtgagttcttggccctgaattcaagagtaagccatagtagagtgaaaggtttattcagggaggaaatacacaccatagacagaatatgggccatctcagaaggcaagagagttacctgggtatggggttgccagtttttataagggtgggtaatttcataatctaataagtgggaggaattgta

SEQ ID NO: 12820 - DNA, 201 bp, Bos taurus
agccccgctgtttacttcatttgcctgtgattagtgttattattctcaccacctcactagcaagaggaacagggcatgaccagggccgtatgcacggtgcctggactttgcagcctcagcccagccctgggctccatttcctcaaatcccagctgtgcagctggctcacctcacctacagtcctggatctacaacccagac

SEQ ID NO: 12821 - DNA, 201 bp, Bos taurus
ggtggtgtacggactggccaccaactccaccaaatatgagattatggccatgtctggacttcaaaacaagagtccagcacagggttcagtggcctgtgttctgagtcagaagactgaatttggcttctcctggagaacatggacaaattccttccttagtccttgagcacgttaactgctctctagcgtaaggagacggtg

SEQ ID NO: 12822 - DNA, 201 bp, Bos taurus
actggacttccaggtaagtcccccaaccctttcattttatagggactggcaacggtggcccacagagaatgtcctggcctcagggcacccagggagtcaggggtgaaggcagagcatccctggtcaggggcagccctcaggggctaagagtgagacccagggagagatgtgacatgtctgggccatcacagccacagccca

SEQ ID NO: 12823 - DNA, 201 bp, Bos taurus
gctaaaatctccatcagtttcccaattgtctccgaggaacattccaacagcactgcaccatgctcaggcttctcctggcctggcccagtctcctcggcccacttgtcttactcctgccttcttgccctgaaaactcatcccgctcctctctgctccatccacctacccagctcccccagcctccaggcccttcctccctgg

SEQ ID NO: 12824 - DNA, 201 bp, Bos taurus
gggggtctctccaaaacaccagagccatcaggacacagcctcgcctataatcctgtccccactactcccggctcgctgggcccactgctgcaatcaggacgcttcctgacttccactgccttccgtgacctccgccccagaaagagttttctttccttcctcttgggtcccgtatggcctcctactttcttttactgtttc

SEQ ID NO: 12825 - DNA, 201 bp, Bos taurus
acaatttgatctgacagctttatagttatataacataggacagaagcttaaaaacaacaaaaaaagagagagaagtcactgatgtttttcatagcaagctatatctctccaaaaccttactaaccttctctgtctctttaaacctaggagaaccagcttaagactagtaatttacacagtcttaagttaactgctattttt

SEQ ID NO: 12826 - DNA, 201 bp, Bos taurus
aatgctataaacactatggattatcttcatataaatttcaaatccaagtaaaataaatacattatttatggatacatacttatgttttaagtttgtattatatagtgttattctcattaggttttttgctatcttgataacttcagaaaatgtaactttataactgattatgtaaaaagtgaagatatttttccaatgaag

SEQ ID NO: 12827 - DNA, 201 bp, Bos taurus
ttctctaaagtcaaagctcaattaaaaaaaagtccccattgctatttaaaaaaaatgctttactttattgtacccatacccgtgtttgtgtttgaatgataaacacaaaaaatagtgatttaagaaaataaaattataggtccttaataaatttatattggaggagaaggaaatggcattataagaaagagtttttataat

SEQ ID NO: 12828 - DNA, 201 bp, Bos taurus
acagacaaatgagctgtgctgacacaaaggcctttaaaactgtctagtcacccattgagtcaattgaatcatcaagttggatgctgcctgcatcaaatgatctgggcccagatgatgcagctgcagaactagcctctcaaaccgaagtgatggacgatgaaaagagaaaaagtaaaggcaaaattctgcacgtcaggctta

SEQ ID NO: 12829 - DNA, 201 bp, Bos taurus
gcccagcggtgggtaatcaagaggtggacaagccacagggcaggcccttgacctacaaggactccactcagcatcgcctttccttcttgtttcaggcaccatccatccagtgcagagaggcctcctagaagctgggggagtgctcagggggctaactttcagtctgactgtggcctggcgggctcaggggttgtcttctcc

SEQ ID NO: 12830 - DNA, 201 bp, Bos taurus
gaaagcattccgaacacctagatccctcagcagtacaagtggaatctccaataggaaaaccaaagagaccacctgccttctagcctactatcttgaagaaatgtcatgcagttaccaaacttttaggcttatgttcagcattaggacaataagaattatatgagcagatggagggtgtaagtctcagacatgcattattgt

SEQ ID NO: 12831 - DNA, 201 bp, Bos taurus
cgtctcccaacagtgtcttcaaggaaggacagactccttcttgaataatagatcagtctcctatttctgatttttacttctcttaccatctgcctctctcgtgcttgctccaaccacactggccttcttcctcttctccccagttcaggtcttgggccaataaactttatttcctgtgcttgactgctctgctcctgacca

SEQ ID NO: 12832 - DNA, 201 bp, Bos taurus
caactaaccatgtgattctttttccattttcattccatagcaccagtccctctatagcccacagaaagagattgggaagagagttgttggaaatctaaatgtgggggcagagaggaatgggtatttgacagggagggtatttaaggaagggtatatttcctttccttaattcaaatggggagtagggaaactcccaaagga

SEQ ID NO: 12833 - DNA, 201 bp, Bos taurus
gcaattgtcctgcaataattgtgttttttctattaaaaaaaaaagaatcccacccatctaaatgactggtctaaactgaacccttacagactcctaaaccaacaccccaaaccgtctttgagagacagcaatcaaaattcagaacctacaagggagtactgaggcttctgaggacatgttagaaaacagagcattaaaatc

SEQ ID NO: 12834 - DNA, 201 bp, Bos taurus
atgtccctaagatttcacacttggattatatttcaattcagaaaaaataaataaataaaaactccttaattataccttcaacttgagcttatttcaaccatagcagactcctcagttaatatgcttagtaaatgcttgtccttccccgactcctgctaatctgacctagctagagcagaatgaggcaaaattggctgtact

SEQ ID NO: 12835 - DNA, 201 bp, Bos taurus
gaccgaacccatgactcctgcattagcagctgaattctttaccactgagccagctgggatacaagctactacacataaaatagatgaataacaaggtcccactgtatagcacggggaactatattcagtgtcctataataaaccataacagaaaagagtataaaaaagaaaaaactatatatatagttatgtgtgtgtgtg

SEQ ID NO: 12836 - DNA, 201 bp, Bos taurus
acggactccaggtacataaaccaccatcaccgagtatttgtgttcttctaagtgacctgccctgagacacagttccgacaccaccttggaatttccagtttaaccactttcctcatgccactcatgaacctacaaagactctttattgctcgctaggtctctcaaattctgtttgatttctgactctccttaacgtggccc

SEQ ID NO: 12837 - DNA, 201 bp, Bos taurus
atggatgaatgaatgaacaaacaaaagcaaggggcccttcttgcctttccccctcccctggctacagcgcagacatggcagcaagagctggggcagctgttgcagactgtgtgatgaagctgagtatcaaggatggcaatgggaccacacggagtgactcgaattcctggtctcaggtccctggacagcctcttggggcag

SEQ ID NO: 12838 - DNA, 201 bp, Bos taurus
gttgcctctgtagttccctctgttgtcctcttggcagtgtttcccagattgagatgatttgggccaggacgaaatgggactcaggaattttaacatgttcgacaattatcttggttcttatcatcatggatccttgcagatccaaccagactaccatatctcttttaatttgcaatgttgtgttaattactgctgtatagc

SEQ ID NO: 12839 - DNA, 201 bp, Bos taurus
ctttgatgttagtatcatttgaagctatcaagatacagaagtatatagaactcgctaagaattttgtatttccaaagaaaatcttggaacaaaaggctataggtaatttttactttgttatgtcttttaactatcatataataagctataaacaaaaaggaaaacacacacaccccccccaaaaaaaggaaaaacatcttc

SEQ ID NO: 12840 - DNA, 201 bp, Bos taurus
catcattttcctattgccagttaaaataaactatatttttacttcattaagtattttttaaaaacattatttctaatggcagtataatgatccatgttttgtattcacttacttacgattttgatggataccacctattcctaattatttatttgcacctattttgtacacttacaatctggtgaagtatttctctcccct

SEQ ID NO: 12841 - DNA, 201 bp, Bos taurus
ccttctgcatttttagttcagttttcaacttcatctctcagccattacttttgttttgtcccttccttagtgttccctgtcgttcttcctttaagagtcactagattggccgtttgtcaaaagaccaatgtgtgattccgtgtgttatgcttttcctagcacttctgttggggcagagttaaagaattctaaaaatgaggg

SEQ ID NO: 12842 - DNA, 201 bp, Bos taurus
tcagtcatgatgggattatttaaaccaggaaagtcaacaaatcttacaaatcgggctttggcttttttttctagagagccagtttaccagcacatctctggatacacttgtcaaacttcatcaacacaagattcagaaagtttcctatagttctagcagtgataaaggtggaggataaaatagtgtcttcaattactgatc

SEQ ID NO: 12843 - DNA, 201 bp, Bos taurus
agaggtgagatggaatttcaacaaggtggtcaaggaaggcctccccaaggagatgacatgtgatcagacagctgaatgcagtgaaagagcaaacgagaggggacagccagtgccaaggccccgaggcaggaccatgcccggggtcttctgagaatgggaagagggcatatgtggcaagaataatgcaagttagggaagagt

SEQ ID NO: 12844 - DNA, 201 bp, Bos taurus
tgaagtgatgacgatgaaatgatatattcactgagattaaagaaagcatgaaatctgttgtctcccttcgctttttaaacctctttcaaaaaaacaagaaaacatggtaggcttctatatatcacacagtaaacattggagctttttagaacagcaggtccactctcttagatacatgggctttccttgcattttctctgg

SEQ ID NO: 12845 - DNA, 201 bp, Bos taurus
ggcaacaataaggatcagagctctaaaaagctgctaaccattggcctagtcccatggtttccaatccactttggctatggcatccttcctccaaagtccaaaatgcaaaaaaagataaaggcccaggtgctttggttggaacaaggggaagaaagtaaatttaacccaatgtattcccctttccctgtcttcccgcagcac

SEQ ID NO: 12846 - DNA, 201 bp, Bos taurus
caggccatgggacacaagggcttgtttactggcaaatatttattgagcacatctatttatcaggtgaaaataaattgggatatgaaagcaaagaagagaaatgtaaatacaggccctaagctcatggcaccccattccagtactcttgcctggaaaatcccatggacggaggagcctggtaggctgcagtccatggggtcg

SEQ ID NO: 12847 - DNA, 201 bp, Bos taurus
tcctcataaacaggaaaaagataaaaggacaaaatttaaaaggtctttcgaagaccttctttctctaactgaaaagtcaccccgtgcctacacagagggcttcccaagtggcactagtggtaaagaccccgcctgccaatgcaggagacgtaagagacccgggttcaatccctgagttgggaagataccttggaggagagc

SEQ ID NO: 12848 - DNA, 201 bp, Bos taurus
cctttatctattaatacaaaacacatattattataaaaatgatagcaaaaacatttcaaaaagcacaaaggaattcacatacaaccctataaagtaaggattatgaaactggcccaaagtgcaatttcttgatagttgagctcttctccttcatatgtaatatctttaaccgtaagccacaaaagagcataatattatgat

SEQ ID NO: 12849 - DNA, 201 bp, Bos taurus
cttcagatagactctgaagatgaggtaaaaggaactacttggttttggtcttttgtttattggctgttgtacatgacaataccgatatatattaccctaagtggaaacttgttcactaatcatttgagtaacctacttgatcatggcaagttccaagattcaccaaatgtaggtttttggtgtgtaaatgccatatgcaca

SEQ ID NO: 12850 - DNA, 201 bp, Bos taurus
cttgtccatggtgctcaaataccctgttaaaattatgcaaaggttttaaggaaataacatatactacctgaaagatcattacaacttttcaactaaagtgcagttttctagggaagtaaattattaacttacgggatgcatataattatgtgtatttgagataaaacgctgaagatgaatttccctgatgaggctctaggt

SEQ ID NO: 12851 - DNA, 201 bp, Bos taurus
ccagcgggtgacacctttgggtgcttttttaactgcctttggagaaactgcgtgaaaagtgttcacacttctcatgcttggtgtagtgaggagaggagaacggccctgcaaacatgggcagtctgtttatatgagagtagtaaaatgtccttttcctatttgaaaaggattggaaactcacagagctcagtcacagggact

SEQ ID NO: 12852 - DNA, 201 bp, Bos taurus
ggggtcatgcccagcacttggcaggcagctctaaatggccatggtgccatcataaaatgttacatgttacattacatcgtaacatcagtttaactttttacagtgtggctaattccagagaatggatggcattttgatatatggactttaagtcttctatgatctttgtgagtgattttgcaaagattttcctctgtgtcc

SEQ ID NO: 12853 - DNA, 201 bp, Bos taurus
tctcttactgtccttggaccccagccaccattttctgaggaagatagcccacatggagaggccatctcggtgtattccaactgacaacgataaggaggcctcctgctgacagccagcatcactgccagacatgtggttgaaggagccttcagatgattccagccctcagtacatcttccagctgaggccccagatctggtg

SEQ ID NO: 12854 - DNA, 201 bp, Bos taurus
gctttcatttcagcctgtaaaatactttctgggcattacttgaatgtaatttattaaagaaactgaaaatcagggtcctaaaatacattgctggactttccgtgacttctgtttaaaaaaaagcaaaccaaacactattaaaatgccatacctatgcaagactgttactgtatcatgaaaagcaacccagaagccactgtg

SEQ ID NO: 12855 - DNA, 201 bp, Bos taurus
actgtgctatgaccagctgagcatctttcacttctaagctactaaactgagtgggacactggaggcactgacttaacaagcttcctgaaccggggccagggtggacaggagatcagcatggactggtgggagaagctggataaactgcagcctggaactgtgggagagataggggccacattgtgaccactggaggtaagg

SEQ ID NO: 12856 - DNA, 201 bp, Bos taurus
ccaacagacccttctgatctcacagtttctgtgggccaggaatctgtgtgtagtttctatgtgcacgtcctacggcccagcgtctcccaggttgcagtcacggtactggctagggctacagcgtctcaagccttgaatggggatggtctgctccaagcttactgcaggggctgtaggcagacctcgggtcctctctggcgg

SEQ ID NO: 12857 - DNA, 201 bp, Bos taurus
gtctggatggggagaagctgcaaacatttgcctgcaacagcagcccttctctttttatgtgtgaaattaaacgggtgagaaaagttatggagaatgtcctgtagcaactcagctgtgctacaaaccagtccccctgtcctgacaatcagctaggaagaaacacaaaggtaaggtgattttggaatagggatttgttgttcc

SEQ ID NO: 12858 - DNA, 201 bp, Bos taurus
gattgtttaatatatacattataaaaatgcatgaaatagaatcaaaagggtaaaatgaaaataaaatatacatatttgcatacatgaggttccttttacccatctgtgactttttttcatatgtttcaatgttcccatgataagaaaggaaatgagaagaaaaatatttaaaaagaagaattttctgtttctactccttac

SEQ ID NO: 12859 - DNA, 201 bp, Bos taurus
atttgcatataagtctctcagcacggggcctgatgcatagtaagtgaaagtgaagtgaaagtcgctcagttgtgtatgactctttgctagttacagtccagtggaattctccaggccagaatactggtgtgggtagcctttcccttctccagggaatcttcccgacccaggaattgaaccagggtctcctgcattgcaggc

SEQ ID NO: 12860 - DNA, 201 bp, Bos taurus
atgtatttgtctgtttcccaatagtctcaccaatacatgcaattttggggtattttccactaaagtgcaaaatgtgatcactgtactaattcaactttgttttatgatgaatgagttagcaccttttcagttgtttagagccattcatatctcttcttttgtgtatgtgaactgatcatgcccatttattttactatcact

SEQ ID NO: 12861 - DNA, 201 bp, Bos taurus
acatccatctgcctacatgaaatgctctcttgaattcctagagacatttcaacttcattatgtataaacctggtcttatgaactccacttccaacattcccgattaaagccagtcttctttcacagctccataatgacatcatcgcctatttggtaatgcaagcaacaacttagggaggaacctacacacatcactttcac

SEQ ID NO: 12862 - DNA, 201 bp, Bos taurus
aacacatgaaagtggaaacgaggcacttgggtgtggtcttcatgtagttcttctaggacacaggaaaagaagtcacgcagaattaagccaatactgtacaatgtggggaagtaaagtctgttacaggaactggtattatctaagtgatggaaatgccctagatttctcctcttcatctaggagatgaaggccttcatcaac

SEQ ID NO: 12863 - DNA, 201 bp, Bos taurus
cagattttggttgaaagtctataatcaaaggataaagggggatgctgaagtttcaaagagtacttttgtctggaaatcaagcctttgaactctgcttccagctgggccatagagatagagttcagaagcctgtagagagtagggagacttgtaaaagaacttctctccatggagatggatcataagaacctatttcctcag

SEQ ID NO: 12864 - DNA, 201 bp, Bos taurus
tctttcaggcaagttggcttcactccctgcaggcctggcctctgataagagtatctagaattttaaaagttcaaggagctaaggatatgctccagtgaaagtcccttgggaacagaaacggggcccttcaaatcttggccttttctgcctttcctctcccctccaacctaagaatcaccagaggaagtctaaacatcacaa

SEQ ID NO: 12865 - DNA, 201 bp, Bos taurus
taaaaaattatatttgatgtcataaaaacttaaactttacatagagaaaaatactctgaacaattgaaatggcaagccacactagttttaaacattgtaatgtatctttaatatataataactttcctacaaatagacataaagatgaacataataatagaaaaaatagacattaacaatgtctagataattcagaaaatt

SEQ ID NO: 12866 - DNA, 201 bp, Bos taurus
agtggctcagttagaataaagtagttaccaccctaggcctcactaaacagaaatgtctagtttgagacatttttaataatcatctcagcctcagttatccatgataaagttttcgagcacagctccaatatcagcaattgatgaccttctggtttcaagggcttcaaagaagagattcaagctttgtcactctagtacaac

SEQ ID NO: 12867 - DNA, 201 bp, Bos taurus
gctttagaagccaaaagcttcagaagagaaaagtgaagccaaggggggctgagtaatgtctctcatctccaaaaagagaaaagaagaaaatgctggtatgtgacattcaagttttctttaactttacaaatgtccaggttatgcactataagattctatttttataacatctttgaaaggataaattttagaaatgaaggg

SEQ ID NO: 12868 - DNA, 201 bp, Bos taurus
cactcagggccagaatctctctggagccactgaagctgcgggcagctctgcttggccttggactctgcttcagtgtctgaacttgccagggtgacagatacggccttggtggcttgctaaagttctatatgtggctggcaaagcttttgaccatttcagaggccatgtgccatttgagtgtagaatgacactgtgattttc

SEQ ID NO: 12869 - DNA, 201 bp, Bos taurus
aaggggactattcacggggcctttgcagtcagtccatatccttagcagtagaaagacaccacagctcacggcggtcactggaggtgaacaggagcgcccaaggtggccgagagcatcaggcactcagtggcgccagcagcagctcagagctctgcgttctgcacaattaagaaaacgcatctgtgcaacacgaggactgga

SEQ ID NO: 12870 - DNA, 201 bp, Bos taurus
tggccagcccttcccagcggctgctgccggcttctctgtgcccttaggcccagcctcgctgtgcaccgaggacaagccggcccccagcttctcaccatccgcaggggtgtaaagtgcttcagtgcatttcttgccttcagacttgccagcgttggtgctggtggccagaggactcgggctcctgtctgtctgtttgcacgg

SEQ ID NO: 12871 - DNA, 201 bp, Bos taurus
tttagaaattgaatattttgttagaagaaatattgacaccaatgaaaatgtaagttgccatttactaccctataccacatgcaggttaattaataggacatatggcctgaaagaagccagcaattttccatttagcttttccagatattagaactagatagcatcatcaaataatgcacatatattcaggcaatttataac

SEQ ID NO: 12872 - DNA, 201 bp, Bos taurus
gcagctccactgtaactgctgtggttctgagccactggaactggcgttaaaaaaaaaaaaaaatgctgttcatttcccaagtcagctgtaaaccagagtatagtacacaggggagggatcttcaaaggctggtatgccagaacgaaagcatcacagactactacaaacgcgcaccaacagattgttacaagggggccacgc

SEQ ID NO: 12873 - DNA, 201 bp, Bos taurus
ctttcagttctatcatccttctggtaatctaccttcgtgttctacctcagggacccatgtggctgcctgatttctggccaacaaaaatgcattacatataaaaagacaaaaacagaggaaaagaaaaagaatcctcaccagctgtctattctccaagaaacttctgcttagatctcactggccagaacacaataccgtaac

SEQ ID NO: 12874 - DNA, 201 bp, Bos taurus
tagaaacaatctcattttactcaaattacttttcctaacagctcgtcaaggcagtatgttctggatgaaatacaattggcctgaatataagtcttctttttaaaaaatacagagacctacatatgccaatgacatcaacctgagtctatccaattatatagaaggccacttcctttcttgtatcaaaataaggaatttcaa

SEQ ID NO: 12875 - DNA, 201 bp, Bos taurus
gccacactaatgcacatttccattttatattcattgcccaagtaaccaatccacatggcaaatgtgtttcccctcatcagttcctaaggttagaaaaaaattttaggcctttcttaaatttctagtactgcagtatttggcggaagaaaggatttgacctttaaagcctatttgtgaatattggctgaacctattcacaca

SEQ ID NO: 12876 - DNA, 201 bp, Bos taurus
atgacttctttgataaactacccatgtgtgtggggagggacagaaagatggaggaagcaaatggggaaatgagttttcccctcttcagattaatgtatacaaggtatacatctgacacttcatcagcactcccggctggtgccccagcaggcggacactggctgagcatgtattctgccagctaccacgttgcttaggatg

SEQ ID NO: 12877 - DNA, 201 bp, Bos taurus
gagcataagctatgactctgtattattaaaaatattttgtcctttgcccagatcattatttaaagagaaaatgtttaaaagaccataggacaaaatcatggggggaggaggtgaagagcaggaatgttggccttctttctatcttaatagcagtgtttttactagaagtaaatccttcctttccatcttcctcacctgatg

SEQ ID NO: 12878 - DNA, 201 bp, Bos taurus
caggaaagagggggtggggctaaaagctgcttcatctgggagcttcaagttaattataaaagcagaactaatctcaacctcccacctttgcctggccatacgtaagtaacaccacctctaagttctccccactaatgccataaactcatttttccagctccccagccgtgcaactttgcagcttttgccagcagcctccat

SEQ ID NO: 12879 - DNA, 201 bp, Bos taurus
gatcttctagtcagtaagatcatatgggagcttcagtgacaagcttctactttgctagtgatttcatgatcctgttacccactgtaattgcttaaatggcattttaattaactgccttaaatgactttccttttttcctaaaagcagtatgtgttttagtttaaaatatgggccactggtgtttccgtttccaagatggtt

SEQ ID NO: 12880 - DNA, 201 bp, Bos taurus
ggaaggcttctgtttggagggccctctggaaggtggagaggagtcagggtgaagcctgggggaagagagcaaaaagtggctgttccagtcccacactggccgagtctttgggaaacgaggggaattgcttaactcccacattatcagcccacgtccctgccggagaagagataaggtgtaggcagatgacccaggagaaag

SEQ ID NO: 12881 - DNA, 201 bp, Bos taurus
ttttgttcaatttgcaaggaacttctttaacattttggaactttgcatggtgtcctttatacctgctctgaatgtcatgaagatgtatttagaagtgtatgcaagttacagtttttgttgagttatgaatggaccaaatttgatctgcggacctatgttgtgcttcagaacttggaaacttttgaataatttcaagtgaga

SEQ ID NO: 12882 - DNA, 201 bp, Bos taurus
ggggcatatctggagcccaaaagcaaagggttatctacagagacaagactaggtacttatagagactaaagagacttggccacaaaaagctagaccagagttctttcttgcctggaagttgccagaacaaaaaaggatcagaaacagcaatgatttttgtggaataccatgaagctaattggccaggttctgtgattcccc

SEQ ID NO: 12883 - DNA, 201 bp, Bos taurus
tttcattcttttttatgcataacaaaatcattattgatactaccagtttgcccttgaacaataatttatagtttacaaagcacattcacgtcctcatcttaatctccaaaaccactgcgtgaagtaggagggcagggcaggcattaatatccctgctcacagttgaggaagctgaatcatatatgtgtgcttcattcagga

SEQ ID NO: 12884 - DNA, 201 bp, Bos taurus
aaaattaaaattgattaaaaaaaactgataaaaactaaaatccagagagtaaagttgttcttttattcaataaggggagaatcagtactcataattaaataagctccttttataaaccagagaggcctttttggaaacagaatggttttagttagcctgggaaaataagcataaattatactataaagtcatctatgctag

SEQ ID NO: 12885 - DNA, 201 bp, Bos taurus
tttacagtcagatttaggcacatagattaagtttcatttttcatctttgacttgtagatgatcttaaccttatgtgctcatttaacagcacaacactctgggtggccattcatagccatcactctgtatgcctcccaagtaatcccaggtgtcctggtgttttcagttttctgtttgggcaaattagaaagcaggtgaacc

SEQ ID NO: 12886 - DNA, 201 bp, Bos taurus
aagtctatgtaaaatcaatgtaaaatggaagttttgattctgttttcaaatttaaagtagtttaagtccagttatcatgacctaaattctttactgttcactctagtagataacatgacctagttgattccatcatcatatccagctgttccacattcttaatggatggaggaacatgaaactccttgaaggcaggccttt

SEQ ID NO: 12887 - DNA, 201 bp, Bos taurus
agcaactgcagcagcacatgatgtaatccttgtaaaggtggatggcaagtgcccatgggaaatgccaatttgtagttgacactgtctataggaaatagtcggtcagtcatgaacaactctttgggaccagtgggaataaagacaataaaatgactttcaaatcatgatttttgaacttctgaagtacactttttatattac

SEQ ID NO: 12888 - DNA, 201 bp, Bos taurus
taccatagggactggaaagcccaggccatggggctgctgccagaaagcacattctttgaccttctgtggtgggtccacagagtggaaccaggtgttcttttagcccatgccagaatgcattggctgtccgactggccacctgcctccaccccactgacagggcttttggctggccctctaccaaacagctgtgctgggagc

SEQ ID NO: 12889 - DNA, 201 bp, Bos taurus
ctaataatagtgtgcttaaagtaaaagccatttcttataccttcgtattatagctaatacattgagactctaactactgcttttaaaattaaataactgcgttaataatctatgtgatccaaatgacaggaaatgattctcaccttatatgatgatattagtaagagaaaatttgtagcaatagacttttaaatcaggcca

SEQ ID NO: 12890 - DNA, 201 bp, Bos taurus
tggcagaggatgagatgtttagacagcatcactgactcaatggacatgaatttgagtggagaacagaggaacctggcctgctgtgatccacagagttgcaaagagttaggctcaacttagcaactgacaaacaacagcaacacgtgtaagcggagaaaagacaggacagtaggataaatcatggccaaattttccaaaggc

SEQ ID NO: 12891 - DNA, 201 bp, Bos taurus
gcagcagtcactacctaaatgataaagcacctgtattgaatgtctgctcaaggttggtttgaaaataggaggtctatggatacatacgccaatgagagcacgtttactgctgatgggattcctctttaatgtgcaaccaaactatagacgcaagcacttataaaggaatgatgccatggagaaaaatacagtctgtcagcc

SEQ ID NO: 12892 - DNA, 201 bp, Bos taurus
catttctgggccctggttatatttgactgtttatcctttcctctactcccagtagcataaaacaccctctctaagtagaaattaatgattgctttaaagtttcaagcagcaatatttaaacacaaagaatattttgacaatcacatgtatgactttaacatatctgtgaatttatgtgatggaaaatgtttcagataccta

SEQ ID NO: 12893 - DNA, 201 bp, Bos taurus
gctctctctttgtttttccactgagaggccaaactggtcaacctctatgccattgtgttctctaagtgataaactggtatcaacctttatgttcatacaccatcccaggctccagagacacctcaagctcttataataacgcccttcattgagaaatctagccttctgcagttcaacatagataaacaaggccactcaagg

SEQ ID NO: 12894 - DNA, 201 bp, Bos taurus
ctgtaggaatgccttcatttcatcacaatggccttggaagtattgacccttgaagaggaggggaggagcttgaaaactgaaatgaatcaaaagcaatcaaggaactatatggccctaaagagtgtgtggatttgcaggaaaattgttttgtaaacgataattacattatttggagttaaaagaacacagctgcatttcata

SEQ ID NO: 12895 - DNA, 201 bp, Bos taurus
cagtgaagactcctggaggtttaaagtccaaatactttccagtgttttcagtcaaaacgatctagtgagttctaagagcaagaaacttcgagaaaaacaacgatgaaggagcattttcaaaaaactcaagaagtgaattatgatccaaagattttatattctgccaagatgtccttcaaatatcaagactgaaaaattcca

SEQ ID NO: 12896 - DNA, 201 bp, Bos taurus
aggagagtgtacttcacagagaagaaacctgaatcaggtgggtgtgtaggacgaagaaagacctggcctgctgcttccaagaacagcccccattgggccttctctgctgctctgaaagaagtaaattgctcagttttggagttactctttgtgccttgcaaagtccacttaggccatcgaaacagtggttttggttttgct

SEQ ID NO: 12897 - DNA, 201 bp, Bos taurus
acctctagagacagtagccatcagcaacaccagaactaaatgtactgaaactttgtgatgggtggttctccagaaaaatacccaagtggtgtattctaagtgaaagaaagataggctggttaccataacctggaagatgagccctgatattctgtactgctccataggacagaagtggagtcaattagaacaaataattgt

SEQ ID NO: 12898 - DNA, 201 bp, Bos taurus
gagctgtgcctgagacagactttttgctttcctagtcaagaggtcctccaagttggcaaataccttaatgaatctgactaaatgttgatgatattcattcgtttataggcacacatacatacttgatgttgataacatcttttgacctgttgctacatcatatacaaaggctaaggacattttttgatccttctaaattag

SEQ ID NO: 12899 - DNA, 201 bp, Bos taurus
caagaattcattctttttacggcttagtaatattctattatgtgtgtatacacacacacatgtatatgtatgtgtgtgtattttacattttctttatccactcatctaatgatgaacacaggtttttccgtaacttggctgttgtaaacaatgctgtaatgaacatagggctgcatatatttttttcaattagtgcttttg

SEQ ID NO: 12900 - DNA, 201 bp, Bos taurus
agagccagactcagatatgccaggcttgttggaatttacagatggaggatataaagctgtgattagcatgctaagggctctaatgggtaaagtagacagcgtgtcagaacagatggccaatgtaagcaaagagatgcaaaatcaaacaaaaaaattaaaagaaatgcttgagatcaaaaacagtgtaatagacatgtggaa

SEQ ID NO: 12901 - DNA, 201 bp, Bos taurus
tatgtgggtatatagcaggctcactgtgtcatcatgctaaccaggaaaaagaagcccttagtctataaaaatccaaaaatagtgagttgagcaatttcttaaagctgagaagaggttacggagagaaatcagtaatctaatagtgtcctttgctggcggcaataaagacattttgctgatatattcattcaaaatttccta

SEQ ID NO: 12902 - DNA, 201 bp, Bos taurus
acttagaaataagagaaggccacttggaattacacaatatgtgaccttattcaaactttccacagtacctgcttcccacattataacttgatggaaataaaaatgtggtgaaaatttaaagtgaaagtctgttcaaggttatgagaaagctaaagaattctggactatataatgattgctttttattctccactgtctttt

SEQ ID NO: 12903 - DNA, 201 bp, Bos taurus
cctatcacatttcctctccaggactgtgtattcagcatcactcagatttaaccatctctttgagtttgtcttcctttaaagtggctcctatgttacaaaaaactaatattaatcaaatgtttatgtttttctcctcaatctattaatctttatttctcagtattactttcagatctagccagagactgtaagagaattaga

SEQ ID NO: 12904 - DNA, 201 bp, Bos taurus
aataaaactgaaaaaataataagtctagcaaattggtagcaaaacacagccaattcctcttagctcttttctttcccacaacctcagatatagcacagtaataccggtaagggaattaggattataactacctagaatgtagtttgagtcctggctctataacttacagatattatactgctgggcatatatttaacattt

SEQ ID NO: 12905 - DNA, 201 bp, Bos taurus
cactgagctacagtccatggggtctcaaggagtaggacatgactgagcaactaacactaaagcctttcaatctaggccagtcatgctcctggaagcttctgtgctccatctttttttcttaagttgtgtttttttttttttttccaatgtgggccatttttaaagtctttattgaatttgtcacaatattgtttgttttat

SEQ ID NO: 12906 - DNA, 201 bp, Bos taurus
attcaccaccctacttttccaccaggacttagaaagataaggcaactagaatcaagaagtcagtggcctcagccagggccatgaaagtgtctcaccatccgttaaaccttttctctcccaagataattccagttttcacactctgtggccaagagagatggaaaacaacccactgtgttttgtttttttttttcttcttta

SEQ ID NO: 12907 - DNA, 201 bp, Bos taurus
atgaacccaaaggaaatttgcaaaatatcaaatcactagatgtaagaatttcatgcgtgcttcaaaccaggagagaaatttattttgagaataacaacaagataaaaagaaccagaaatgctagaaaatttttctgtgctttcacttagaagacaagaataaagattgtgttcatcccttctggaatgagaaagacacact

SEQ ID NO: 12908 - DNA, 201 bp, Bos taurus
gatagaggagtctggcgggctatggttcaggggatcacaaagaatcggacacaactgagcaactaacactgtcaactttctctgtaaaataaagaggctggaccagttgaccacaacactttttatgattattatccaattgtgtacctgctccttttatgttagttctattttaaaagctttttttccttctcactctcc

SEQ ID NO: 12909 - DNA, 201 bp, Bos taurus
ctcctggcacaccggcctctgcagaacctctagcccctgtactggctcaggaagctgcagaaacaggaacgttgcagtccaggtctcattgctgacaatccatagcctaattaattggcctccccaggcatcaatgacactatccagcaaatcctttactctcttccttcacagaggcatagccgaggggtgcagcaagag

SEQ ID NO: 12910 - DNA, 201 bp, Bos taurus
catgcctggattgtaagtccaaaaagcagttgggttttttgtttttggggggggggggtttgcatttaaccatcatactgctatccaactgaaagagatatatcctattagaagaaatggcatgccagtatcaatcatcttcacaaattcaaagattcaaagtacccagtcagctaccaaaggacaagaatttttgtcttt

SEQ ID NO: 12911 - DNA, 201 bp, Bos taurus
gaaggcctgggtgttttacatcatttgtattagttattttcctttccacttaagacattccattgcattcgtttaccttacctgactggctcctccttgactagcagtctatggccaaagttggccttccgacttgagaatctttgatagtgtagagcaataggtcagtaggtctgccagtaggtcagaacgttttgagct

SEQ ID NO: 12912 - DNA, 201 bp, Bos taurus
aatggaacagacagtaatggccccagtacttggaccctcaggtaaacagagatgcaaaacgtgaaatagaagttttagttgaagcaccagaactaaagaacgccgcattctaaagtggacgtgaggccatcgtgcgtgggatttacattcaaggttaccagagtgcattcttgtgactggccccgaactcttctcatatct

SEQ ID NO: 12913 - DNA, 201 bp, Bos taurus
agagagaaagccagctacaggagaccctccagacgttttctgccccatgatcttcaccatggcctgttcatcctcaccagtggagtggtcttgttgctgtcccctgaccacaccacaagttctcccgactccacatgccggctcctcttcctccacctcctcttccacctactgtgcccagagtccaccacctggctcaaa

SEQ ID NO: 12914 - DNA, 201 bp, Bos taurus
aggaggaataaggaaggaagactcatcacatcagttttggtaccctgggggactgctgctagcccctcacgggcacccctgcaccgaggaacccaagatgggtaagtgctgaacagcctgtcacagccacgtcacggcagagggggggtctgtgggctgttagttcctctcggtgttcacagggctcctggcctccaggag

SEQ ID NO: 12915 - DNA, 201 bp, Bos taurus
ctgttctacatttcatcactaagataatattttgcatcattaaaataatttcctatcaccttggagccatctatgccacttctctcaacagtaaaaatatttaatttaagcattctgttttactggccaagaaactgcattcaaaaggtaaaagagataaattgtgaatccagtatggccacaggcaaattagtgacatgt

SEQ ID NO: 12916 - DNA, 201 bp, Bos taurus
ctgggggatgtgcatttaggggtcggccattgacagcatgggttcagtgtctcatctgacagtgtcacctccattgcttcttagaggtggcctgtgcgagatgtcccaagatttcccatccagtggtagaagaaacacctttgagttgtcacccacacttagtcggaatgaagatccgcttttcatggccttgacttacgg

SEQ ID NO: 12917 - DNA, 201 bp, Bos taurus
tattttccccaggaatgggctgtaggcctccattctaactgcctttgggcctagtactctgcatagggtgaggagtccacagggccagtgggacacgcccgcttggaagctgttctcccacgttttgaccacattctgggtatcaaggaaccccttaatttcctactcagacatgcctgaccctgtttcctgggcctcttt

SEQ ID NO: 12918 - DNA, 201 bp, Bos taurus
ccgttgtttctggtggtgtccagtaatggtgccccgtgtatttggtgttggcattgtaaaccaaggaaagtgtctagctgctgaggcccttctaaataaatccaccaagagttggttaatgtgtattgcaatgaaaaactccaatgtatacacatgtttcctgaattttttaggtcatctccctcaaagcctcatcgtttg

SEQ ID NO: 12919 - DNA, 201 bp, Bos taurus
tttgctggtctgtgtgaatgaggccccaacaggatttctggcttagactgctctctaaagctctgcatcttgttggaaatctctcctcagaagactcaccagttccactcagagtctgatttcagcaatttgaccatctcaaaagcccttctatcttgacttccctgccaataattgaggatctactatatccctagtact

SEQ ID NO: 12920 - DNA, 201 bp, Bos taurus
ataagttcccccagagaactcataggagaggtgactctgtttcagatcttttatttaattctcattatattccactgtccagtttctcagtgtcatggccaggtttcatgagccaggcactgaaagtactttgcatgtactattttaattaattcttacaatagcctatgaggtgggcatattattatcctcactttatgg

SEQ ID NO: 12921 - DNA, 201 bp, Bos taurus
agctgggggtttgagcctgaccgggtggttattagcctgtcctgcctccatgcttgtgtttgcttttcgaccttattggcagcttcctagattcagttccttcttcagggcctgaacacttccttctcttgtttccttcataatcatgaagtgcccagttgtgttaaatgtgttttgatgctggcagacaccatttttcct

SEQ ID NO: 12922 - DNA, 201 bp, Bos taurus
cattttccaaactgagggaaaggaggagaaagagagagatggaactgtaatctggggaggtgccttatctttaacaacctggtcaggtggcttagggttgtagtcctcagtgtgttgcttcatttgccctttccgtacggccatctgacagccatccaagcccgaggtccactctggagctggaggagcctcctgagctca

SEQ ID NO: 12923 - DNA, 201 bp, Bos taurus
ctcccaatggatctttgcaacccagggatcgatctcacgtctcctgtatctctcgcattggcaggtggattctttactgctgagccatctgggaggcctctgtgtgtcctttatacatgccctaatacagtctcagtaagattttctgttagttgcctcttaggctagcaccttactggatataagaacccaagccaaggg

SEQ ID NO: 12924 - DNA, 201 bp, Bos taurus
aggagggcagatctggccacctggggcagagaagactcctattttaaccaccagctccctggatgtgatgagttaaccacccaattcaaagcagaggacgtgtggcccagccacatgatcctggcgcacccagcacacagcataaccagtacgcagggaagatggtctggcacctgccgctgaaacctgcagagcagagca

SEQ ID NO: 12925 - DNA, 201 bp, Bos taurus
ctaggagacggctccagagatctgctggctggactgtggtcctccccagccaggtgacctttagcaagacccaagattctttgaacgagaccttctttacgtgtgaaagagtctgaagagctgacttctaggtctaaagctccctgttttgagaacttgattgaaaagccacattaatcacttctgtgttcaggtacaccc

SEQ ID NO: 12926 - DNA, 201 bp, Bos taurus
ggataaacctggctactgttttcaagctcatggaggattttacagatgggatcaaacagttattccctgtgacttctgaaggcctaattcaaagaggaaattgaattaaagcagaaaacactctggctacatttaagggagaatttgcctgaggaatgataaaaccctgacaaagactaaaaggccactaaaggatgagag

SEQ ID NO: 12927 - DNA, 201 bp, Bos taurus
gaccattttcttatactttgtatatcagtctcacaacattttgggaaatccatgaagtactacatgttctggaatacactcacacctgtaaatccatagcggtaaaccaaggttgaaaagcaaaagtactgtataatataactgaattatgtatcattgtcaaaaggagaataaaagtaggaagaaaagaagcatgaataa

SEQ ID NO: 12928 - DNA, 201 bp, Bos taurus
ctgccatttataacacaattactattgaaaaatgtgttcaatttaagcaagctgcttatgtggaccttttggaattcaagtaggttgggaacttgctttaaaacaaaaatataaaagcattaagacctcactgtggtttccaaggcaaatgcaggaatagaattctgatacaaaactatattgtatataccttcctccttt

SEQ ID NO: 12929 - DNA, 201 bp, Bos taurus
tgggcagacagggagagagaagaagaaagagggccaagtctaattgaatgactgaccgacgagtgtatatgcctgagtaatgctagcaagaaaatgcacacatgagaaaagtattgttccgtacacctgcaaaatctatgctggacacagtggtacttctctcataaaatagtattgctttggttcgtaaagtaataatgc

SEQ ID NO: 12930 - DNA, 201 bp, Bos taurus
aagcattggttgtgcgacgtgtggtcaggaattgacacggagaaggattgggccctttctggtgaccagtgccggctgcaggcctggtagttttcagtgcatctcatcgatttgctgaacgtattctcagacataatggtttcgccagaattcagaaagttgtcttggatcagaccagcagcagaccaccaaacagtggcc

SEQ ID NO: 12931 - DNA, 201 bp, Bos taurus
tgtcactttcagttgtttagggcatatttgtgttgctacataagtatcatcatttctagtgcatctaagatttagttaaaaatctgtttacagttttggcgaattctatcttggagaattgttatgtgaattgtttgcttcaagaatctaaaatgtattttttataaactgtgcctatttcaaaatagaaaagaatatatg

SEQ ID NO: 12932 - DNA, 201 bp, Bos taurus
tttgctctcaaggaggggcctgtccttggtcttggtggtcggtgctgggaagggcacacagatggagagacgcctcctgggaagcacagcagtgagagagtatggggtccctgaggccctgtgagcggtgagatgtgtctggtgggggtttgtgtgggcggggaaggagatgaagggtgagaccactgatgaatgaggaat

SEQ ID NO: 12933 - DNA, 201 bp, Bos taurus
gctgctcggctcctcagcttgggccgcttggcagaggctcggctgcccagctgtggcgagcgtcatcccttagaaacacagctgttcgaagggaagcaccaaactgaaactgggctaggcccaccgaggccgagctataatcaggactgacacttgagtcccctagaaggacaagcgctgtaatcgaattctaatctaatt

SEQ ID NO: 12934 - DNA, 201 bp, Bos taurus
gaacttctgttgtgtcctgagtctatgacatactactggttgttgaggatgtgggattcactgagccaaatagagcttcaagtccattattctcatagattaatcattccttgtatcatagcttcagatgttgaattcatcccagtagatgtttatcaaacatcttccatgtgtgaggcactgttgttgatattaaagaag

SEQ ID NO: 12935 - DNA, 201 bp, Bos taurus
ttatgggttacttgcccaacactaaagaactgggttgaaaatgcaatgtgtggtttataattggtcagttcatccctacctttgaatctgcacagaagccacttgcaaataaatctagatctccatttggcacactccacaaagcattctaaacaattcagtgtgttcacatgatgagattcccattatttatgcatgaag

SEQ ID NO: 12936 - DNA, 201 bp, Bos taurus
gtcagtggaagttatttctataatctgtactaactcaattgtctgagtataaaaatattccctattgacaacatggccttctttttctcctaactttgttccctagctgctagtagatgttaactctattgttctcagatgtgtccactcccaagatccaactcactcagcaagctttcattcattattaatggatggaat

SEQ ID NO: 12937 - DNA, 201 bp, Bos taurus
ctgtacagaataccatctaataatttcaaatgagcatctctgttcttcctctttcttgtctccaatactcagaatatttttttcaggactcttgaagtcagcctttaatttggccaacctgtctttgagctccccctactgttttccacttaaattatatacctgtttattatgcataattatctttaaaatgatggattc

SEQ ID NO: 12938 - DNA, 201 bp, Bos taurus
aaatcctggcaggaaccatttcattacaattacaaaatatataaatatatgattacaattgtgagaaccgctcaaaaggagacaagggcccaataaaagtgtataaataggtacctaacatagtctgagcatttggaaaatgtttccctggggatgatgaggcctgaagatgagtaacatgttctgtggagaactaagtga

SEQ ID NO: 12939 - DNA, 201 bp, Bos taurus
gccctaatcaaccacagaggattacatgcttctacttgtgtctggtaggaggaaatgttagccaacagatttactgaccactacaatttctatcttcaaagttaattaaaagtaaaatgatttacttctagctaaaaaatgaattatatgttccatattcataaatgtgatatacaaatattcatgtgtataatatacaaa

SEQ ID NO: 12940 - DNA, 201 bp, Bos taurus
caagaaaaagatcaaaattcaaaatttcaggtacagttgttactgaatgtgtatttctttagcaccactgtaaagctgaaaaattgtaagtcatatcttataagaccttgtagcagctgcccctcagggaaagcacagatttttctttcaaatatcaaggaaaatgcagagaattttatgattttaatcgatcactgcttg

SEQ ID NO: 12941 - DNA, 201 bp, Bos taurus
ggggtggagtctgggccttcagaagaaaaatgacagtctccacaggagttgcagttccttatattctttgcttgttggaaggtctcagagaatgccagaaggggagggtttggttagctggggccttgaagctgatgatgaataaaggacatgttcagggtgggtaaccatggtggttcgatcaccaggacaaattatgaa

SEQ ID NO: 12942 - DNA, 201 bp, Bos taurus
tctaaatctatttggggcttgtttttctaataaatcattcatttatttcttaaatcaaagcccactgaaagattcaaagcacagaatactctttcccaaagagaagtaacctatatttcctcaaaattatggagctaaattgctgctcttgactttaaactccacacagctatctccttaacaaacagcaggttggaacaa

SEQ ID NO: 12943 - DNA, 201 bp, Bos taurus
ctcgacttggctgcaaagcacagctttctgattgggacctaaccaatgaaacagacagtgatagggtaccgagggcctccaattcaattctgcagggtgtacgatcttttgaacatttatattagcaatatgttatctacaaaatctatgacacggaaggccaaacttctcttttgatttatagctctcgccgtctggttc

SEQ ID NO: 12944 - DNA, 201 bp, Bos taurus
gaaggggcagaagactcagagggccagacttctttgataatttgcatgtggaagagtccctttagaaccttcccacccctttgcataaatatgcacagaaaccctgtctagttataagtgtccagcctccccttattgggtgtgaagactgaagtcagcattgcagaatctggtatttcaaattggcagagatgggcaggg

SEQ ID NO: 12945 - DNA, 201 bp, Bos taurus
ctgacttttttatctttccacatccgttacttagactattgcaaaagcctcccgacatgtccactcatttcattcctgggccactttaacccacctcttcactatatgtagtgtaatttcataaacatgcaagccaaacagaaacgtgttcctctgctttaaaccacactgtccatactatgaagtccaaactccctagca

SEQ ID NO: 12946 - DNA, 201 bp, Bos taurus
aaaaaaaaaaaaaaagttttgacattagaaagaaaaaaacaagaacatacagttgacccttaaacatagtcattagaactgtgcaggccaccttacatgtggatttttatcaatattaaatattagactactacactatccaaaactggttcaatttgtgcatgcaaaactgcagatatcaagaaacatcagatatagacg

SEQ ID NO: 12947 - DNA, 201 bp, Bos taurus
aaaaattgattgtaggaaggaaagagaaatgaatagcaagagtccactgtatcattgtgttgatgttctcctaatcccaggagggtgcttaggccattctgaaaccaaccaagaaggaagcttggaggacaggacacttgactcagacctgagggtctcagtgttgtggtgagctgcttttctgacaacagagttaagcaa

SEQ ID NO: 12948 - DNA, 201 bp, Bos taurus
agggatgcacaaaataaatggagaaaaagcaaggatgctcacagacacagttcaaagctagggcggcttgatgctgagatatgaatgtaagctcctgggactgagtttggcggtgtcactctagctgctgagggcgccctgcttgccacaaagcaaacgctgaatgctatttttgcctttttttttttttttcacgtaaaa

SEQ ID NO: 12949 - DNA, 201 bp, Bos taurus
tgacagactgcattttcagaaatacacgcttggtgtgtcttaagaacttaacagttcttggctctctataacatctcaatctatttaaccaaactaaccagactggttatttcgaaggattctatcgctaacagtgtagaactcctttacataccaaacatacctaaaccaacccacaggccagagcaaatgaagcaagga

SEQ ID NO: 12950 - DNA, 201 bp, Bos taurus
tataagtaagacctctgacctccactcctgtcagaggtgttaggtcctttcttaaattcccagagttccaaccatccagtccttggttcattgtttatgcagtttggacaccttttccactgctgcatggaataagtatctgagtattttactgttcggctttgtataagcttatatttgaaatcctccactggattagac

SEQ ID NO: 12951 - DNA, 201 bp, Bos taurus
aaatagcacagaggtgctttacctcctcttcctccagggtacttctgcggtggatgctaacggaccagggtggggcggaggaccctggcatcctgtctccattctctttctgcagccgggagggcacatgtaagccagtcgtgccccttgtacacttggacttggaggctggtgccatatctctctgcttccgtgcaagtg

SEQ ID NO: 12952 - DNA, 201 bp, Bos taurus
ggtaccgggcagagagaccttggccataggaagagaaaaccaagagaatatgccttgcagttctgtccctcagctacaggggcagaaatgatcatttattggctccagaaacttaaatggccgttagtgcaagggacccagggaacagatcattgcacagatctttgctttttacaaagtggctttcagtgtgctccatgt

SEQ ID NO: 12953 - DNA, 201 bp, Bos taurus
gtgagaagaacctggccttgaaagaggagtggggtgggttcttggaagagggaagagcatggcaaagatgctgaggtaggaaaagcgtggcagggtggagatgaaggcagatggccagggtaacaggatcctggagaatgaggaagaagggggcatgagataaaaaggaagggtaggcaggggctagatgtagacctggga

SEQ ID NO: 12954 - DNA, 201 bp, Bos taurus
ccaacccagcagtgttggaggcagtgaaagtattttcaggagcagtggcctttttgtttagtctcaaaaatgtctccccagcatccaccaccgtgatcctgcagtctgccgtggattcgcctatatttaagcctaattattataggcatggcttccctgatagctcagttggtaaagaatctgcctgtaatgcagaagacc

SEQ ID NO: 12955 - DNA, 201 bp, Bos taurus
acagtccatggggttgcaaagagtcggacacgattggactaattgagcacattattaaaacgaagttccttttatgaaaatgctttctagatattcatcattactgaagttcaacacagacatgcttcttagaacagcaaattccatttcccagcactactgcccaccccatgtccaatagagatgctaactgtggaatgg

SEQ ID NO: 12956 - DNA, 201 bp, Bos taurus
gctccagagaggcagaagcaaagagttaaattgctcctctcccccgaaaaagggcacacaatttagctgacagaaggcccaagaggctatgtaattgagacaacgagtcatgaaagtggaaagtggcatggagtgtatatcaagaatccagttgggccaaagacatctccatagatgcttaatgtgggggtgatgacacct

SEQ ID NO: 12957 - DNA, 201 bp, Bos taurus
ctgctagcccccaagtctagtttgtgaacctaatgatagctaatctgggagagaagggcacaagcttttcttgatttgctggacagactttgcactaagtgggcctattaatcaagccaatggtgatctttacagtgtacattgtgctgaagttcccttgataaattctcatttaacacaatagagcgcagatctccttgg

SEQ ID NO: 12958 - DNA, 201 bp, Bos taurus
ctaaactcttcagcttggcttctaagccatcatttacagagtgcctaatgtgccctgcactgctgtgtacacggtggagctgtgatcaagatcaacaaaggctcctggcctcagagtcttaccttctgtttggagtggtgtggtgttgggaccaaataataacccagaaaacaaatagagaagataatcagagattcaagt

SEQ ID NO: 12959 - DNA, 201 bp, Bos taurus
aagttaaacctggctcttttacaaagagtgtagaggcgggtgttgaccttgagagttttgtcaaactggtttggaatataagcttgcacagacctagagttaagtaactgagcagtgaaggatattcatagcaaactgtgtgacctcagtccccttggggtttggttatgctatggagggaatcatgtctcaccaatggac

SEQ ID NO: 12960 - DNA, 201 bp, Bos taurus
ggggacgacacagtggtgaagagcccactctggatgtcatggcttctcccaccagagtcacttggtcaccagatgccaccagagccagccctggggcccccacccagaccagggagagcagtcaccctctgatggtcatcatgccactgtcagtggtgctcttcctgctaatagtaaccgtggtggcctcatgtgtctggc

SEQ ID NO: 12961 - DNA, 201 bp, Bos taurus
cttttatcactgagccacctgagaagcccccaaaatgtcctggaagctctaaaataaagtacttgtaagcctctggattgcttcaggagctccagaacacatgatatgcagggtggaattcttgtcttctcacttctgtatcctagcagaaaataaaccccctgtctggcatttgatgacagtaagagtgaaacttgagta

SEQ ID NO: 12962 - DNA, 201 bp, Bos taurus
gccaaaaggcatcagcaaactattctgttcttggtgctcactgataccatcagggtaaaggctgatgaccccagggggctgaggtctactgtgatcgaacccaactatctagttcagatggggaatcatgaaactctcaaagggcttcattcccactggccactctgctgaaaggggtcccaaggactccaagcctcagga

SEQ ID NO: 12963 - DNA, 201 bp, Bos taurus
ggctgggccaccgtggtgggcacggagagggtcttctgtgcccagagcgcctgtggcttggtggtctagcctacttctgtgccacccttaggagcgttcattccccctcggccccaaggtcccctgctctggaggtggggacaggcccagactgtggcgttgaggcaggtggtgggcacacctggggcccggtcgccagat

SEQ ID NO: 12964 - DNA, 201 bp, Bos taurus
attaattaaaattcatagcaactcaccacccacagcaattggtcagcaatagtcaaagggcagaacaaaccccagtggtttctttacctctctgtgtgtccgcaggaatgctcacagtggacgctgttctgaagacgtcttttctaagccccagagcaagatgcactatctcatggccagttcatgggcttcaaagcttga

SEQ ID NO: 12965 - DNA, 201 bp, Bos taurus
cagcctttctgtctggattctgcactctgcctcttctacctgctcgttttggctcctggaccctaaagtctgttcacatctgggcctcacttctgcgtatgagctaactgctctggatgaccgagcactgcctggctcatccttactagtggacatcccagatctcctggaggctttagctccagcggaggccctgctgtt

SEQ ID NO: 12966 - DNA, 201 bp, Bos taurus
cctgagccttggccacatctttgtaaactgtcccttcattaacctctcctcagttaccctgtttgattgtgccatctgtttcctgtggtggttctgattgatacagtatgctgtatcagccaaatgtgaagggtgtctctagacagaataaaatgagtgcattcaagaaataattcattaaatgagtgtaaatcaactttc

SEQ ID NO: 12967 - DNA, 201 bp, Bos taurus
ctataggtgttatttggaataactgttcacaaaactgagagagaaaactcattgtgggagacagtagggtatatgaatttaagattgcagacatagagtagtttttggagagaaggctccaatgtgtgactggttggccttgggaaagatggggagcttaggaagcagaagaggaaatgtacccagggtgctgggtagcac

SEQ ID NO: 12968 - DNA, 201 bp, Bos taurus
tttagatgtgtgatttggaggtaccatgttggaagtacattcttagagcctaaaggcagtgtcggaattggagatttgtgaaggagacagaggcctctgtctctcttggttcactgcactatctatccctgttgctcagaatactgcctgacccagagtaagcttttagaaattgtcagatgaatgaatgtatggatggat

SEQ ID NO: 12969 - DNA, 201 bp, Bos taurus
tttctgttgaccactgccagctgcaggccctgcagttttcggtgcatctcgtcaatttgctgaacttctctgatatattggttttgccagggattcagaaggctgtagtgggccacacgggcagcagaccaccagtgaccattacttttttttggtgcaggtttggctttaggaagtgcttttggagcttcttctcgatcc

SEQ ID NO: 12970 - DNA, 201 bp, Bos taurus
gaattaaactcatctcagccttcctctggatataaaagttattgggtttcttttaaccatgcttttctcatctccatgttgttcatttgatattctctgagcaccttatttttgccagacattttgctaggccctcagtatatcttgggcaaactctgggagatagcgagggacaggaaggcctggcatactgtggtccat

SEQ ID NO: 12971 - DNA, 201 bp, Bos taurus
tgggcttagctgccccatggcatgtgggatcttccccagccaggggtcaaatctgtgtcccttgcactggcaggcaggtccttaaccactgggccaccagggaagtcccctattttattctttgtctatgtagtgccaagtgctcagactggtcatttgactaaactcaccacattgactagttgctttggcatcatgtga

SEQ ID NO: 12972 - DNA, 201 bp, Bos taurus
tttcatttggcccctatatagtgctgtttaaaattgtttgaataattgccagtacttaacgattatgagatttatataataacctgaatttttcatttctcttgcaaaattgttagtcttggccaaactgggtacacatgctcacatggcaatagcacagtgctgttcagcagcagctacgtcatgggatgagccatgtgc

SEQ ID NO: 12973 - DNA, 201 bp, Bos taurus
acaaagaaagaagatttggccaagcctgaaaaatcacctttgctttactaaaccaaagacttagcctgagaagagaagacttgagaaatcaaagagtaaacagagattactgctgcatcacttggccaggagcttaattctcctctactaatgagtaagggaaccaaccacacctgctgagtgttggcagtagaaagaggt

SEQ ID NO: 12974 - DNA, 201 bp, Bos taurus
aactactttatcatgtgcctactatgtatgtggccttgtgcaatgtttgaggaattattcaaagaatagtgaagagaaggttctgacagtttagtgggcaagtggcccaggaaataaatgaacacattgcaacttgataagtgctatatgatgggccttgaataaagtttgaaggaagtgcaaagaaaaggacttcatgtg

SEQ ID NO: 12975 - DNA, 201 bp, Bos taurus
agcaatcagacctatcataaatagtatttatgggaaaagtccataaaaagtggagaggagaatcatcagcctgtacatgatatatcaagccacaacactgcgggttattgtggtttagttgctaagtcatgtcttttgtgaccccatgaactgtagccctccaggctcctcggtccatggactttcccaggcaagaatact

SEQ ID NO: 12976 - DNA, 201 bp, Bos taurus
agtagccacatatggattaaacattaaactctttagaaaataaaaattgcatgtcataaagctataactgaaaaatctctatagcagtcaacacgaacaggcaatggagcacagtacacaaatctgaagggaagcattatgaaccagatttgggaagcagggaatagggaatccacaatctggggaaattgtactgtgtaa

SEQ ID NO: 12977 - DNA, 201 bp, Bos taurus
taccttagtaactcaaatggcaatgacatcatttatcctatgggtggcatctgctccccatgtcattgatatgcacaatgatgtgtatgtatgtgtcaatataagaatatatatatatatatacattcttagctaccatttttgtaacaaacagcaactggagttcagggtggggaaatcagaatctgagaaatggtaatt

SEQ ID NO: 12978 - DNA, 201 bp, Bos taurus
ctttcctttccaccaacctcacctgtttattgacttttgaatgacaagcagccaggtaccatactctttcagtaacaaaaagagtttagaggaccaggcccgcttcatttttggacccaacacaatgctgttggtatgttcctgaaatatagccccaagttgggtgtaggccccaaagacttaagggtctgctttctacca

SEQ ID NO: 12979 - DNA, 201 bp, Bos taurus
attttggactgagtgatattatctagggttcatatagggtgaaaaaaaggtagagaactaaaaatgaaaccccaaggaaagcttaaaatgcaaagagaaacgatgaacttcctaagaagtaaacagaatataggaaatcagaattcaacatacttggtatatggtgtcaaataccaaagaaaaattaactgaggtaagaaa

SEQ ID NO: 12980 - DNA, 201 bp, Bos taurus
ttctgccatacaacagcacaaattatgacatgctttctgtgctaaaaaacatgtgaaatattgaaaataggatatactctctgctctcagtgaactgagagaaacacatacttatacatacatactagcaaagcaagagaagtgtatatgacaaatgcatttggagttattagcctaaagtaaaagactctggagaggatt

SEQ ID NO: 12981 - DNA, 201 bp, Bos taurus
tataatgcatactcaggtaaacttgatttactacctcaaggttcatgcctgaaagcttttaaaggagactcatatatttataaaaaatgaaaatactcaggacaaggacatctaagtgatattctcctgaacacagagccaagttacacaattagaaatatatgactctatgaccacacaattttccaggctgaaaagata

SEQ ID NO: 12982 - DNA, 201 bp, Bos taurus
tacgtaaacagaccttaagggcaaccgagaactataccatcttcccacttaaagacgttaatgggatccaataaattattttacaatgtatttccttctaaatagtaactgagatgtcattacacagtgaatctatacatctttgggaaacttttttcaaataactaaatttggtcaacctttatctgattgcagatgacc

SEQ ID NO: 12983 - DNA, 201 bp, Bos taurus
aagctgtgggctgtaggggcccaagggccaaagctgcagcaagtaggcaggggaggggtaaggactctaacttctctctgccagccttccagcccaaccccgccaggccaatgcctcctcccattcactgatctcaggtagaagccaaaggttagcctcctgtggcacagacccaaacaggaaggggtggaaaatggatct

SEQ ID NO: 12984 - DNA, 201 bp, Bos taurus
gtttgagtcttaataatgctgaatttgaacacctttttcctaagtttattatccatctctccttttgtgtgtgtgtgtgtgtgtgtgattctcatgattacatcctttgcccttgataatctaaacacacaagaacaagagaaggaagaagtaatgagagccctacctctgaggtcaggaaagaatctcctcctcaagact

SEQ ID NO: 12985 - DNA, 201 bp, Bos taurus
gagctgtatataggagtaagataattaaatcactgcttttgagatgctaagtggctgttcatgctctcacttgttccttcaacaaacatcctcagaacttatatgtgtaaaagactttctaagcagcaaatcagaccctagaaaagagaactgagttaacttaatctaaataactattgttaaaagtgatcaaactatatt

SEQ ID NO: 12986 - DNA, 201 bp, Bos taurus
agatgaattgataaatgaattcagttcattgactcctctaccattctcaaaactaaagctaaaaggatcctgtgctaatttcttcttggcctctcttagacatcagtactggtacatctggtcagtgtagactagcagcattcactctacaagactttgcagccatgcaagggtgtctggtggcctcaattgttttaatta

SEQ ID NO: 12987 - DNA, 201 bp, Bos taurus
atgtgtatctatattgggcaccatgcaactttacaaatctggaaacgtattggacactgtcacctctatttcctgttccacattgattttgatgtggtacttgctttttgtcacagcaaactccaaagtaccagtttcacaaaaatatggtattatctaaaggaatgtagcatgatcttatgttgaaaatgggatctgata

SEQ ID NO: 12988 - DNA, 201 bp, Bos taurus
agctggctataatgctaatcactctagaggcaaactttgtgtaaatctgattcccagtaaataccacccaaagtacttaagttttaaaacaatctcccgccagccccatcttcaccacaaaacagcttcaggataaagcaatttcagttttataaagcagacactgagagcagcttgaagtaacgctctgggatacagcgg

SEQ ID NO: 12989 - DNA, 201 bp, Bos taurus
aatttaatgtccttccattgcttcctaaaacagcaaagacagagctttacttcaggcaaaatgagtttttaaaacaaatctaactctaaaacaagcttctgagaaccgaatgataacattttttaaaagcatcatccatcgaaggcatttgaaagttgattcttgagggaaaggaatttttagtttataacaattatttgc

SEQ ID NO: 12990 - DNA, 201 bp, Bos taurus
gataagttgcagattttgatttgatggctctgggagggttctgaaatgttaccttcttaacaagtccccaagttaagctgatcccacggcccctttgtgagcagtaagttctaagaattagaaaccggacaagtattcagtttagttcagtcgctcagttgtcgctgactctttgagaccccatggaatgcagcaacccag

SEQ ID NO: 12991 - DNA, 201 bp, Bos taurus
agtgtttctcaatggtttgcaaaagctccagtagccagcccttacttatttttgttcctcctgcttttagaacctgctgcaagaggcatttatatggccactactgttccaagctttctgaatttcccatgcttaactccagtttcaatacctgagagagcattacttaccgcaaagggggattttctgaggcctcatccc

SEQ ID NO: 12992 - DNA, 201 bp, Bos taurus
gccagtgacatctactactatagcaatgactctacgatttcatcatgttctttgttagatatagagattccaatctgaagcggggaacggtctcagtctttttcatggcctgcgtcttttctgtcctcatctgtgctttatttggctgtttactctaaatctttcctttgtctttttcctttctctaatacccctttcccc

SEQ ID NO: 12993 - DNA, 201 bp, Bos taurus
tttccacaggcatcaaaatagaaaatgttccaagctgcctgaatgttctcaattggtttttagggcaaaatggaattcccacttgtctcaagaacagaacccaatgtctcaatgtacagaaataaattatttactttgtgtggctttccaaggatgcaaactggaataagaaaaacagtcaaataagtttaaaaaaatctg

SEQ ID NO: 12994 - DNA, 201 bp, Bos taurus
actggaacaaaaccagggtttccctagcctactttagccctttcagctcaaggtccctatgcaaattaggtaggattggtcttcatccagtttcagattcagtgtggtagagtcttacatgagctgtgctgtaattgttggagcaagacattctggacaaggttcaaaatctttaggagaatagcttggagtagaagtata

SEQ ID NO: 12995 - DNA, 201 bp, Bos taurus
gaagaattatgaaaatgccaagtcatagaaactgaaagtttggggaaggagtgaacagaattttaaaatgccacaaatgagagtatatggaccaatataaagctattattgaagagtttactctggcttagagggtaaaacatctgcctgcaatgcaggaggcctgggttcgatccctgggttgggaagatcccctggaga

SEQ ID NO: 12996 - DNA, 201 bp, Bos taurus
caaacctcatttgtaaatcaacacgtatttaacttctttcttttggagtgtgtactccttttgtcttaattgagtattcttcacagctaaattctcctcttgatgaatttattctttgttaattttttttttcaggatttctgagggaccctggcaggtacttgtaggagatagaagcatgattaaaaggaggaagggaag

SEQ ID NO: 12997 - DNA, 201 bp, Bos taurus
taaaacacagtggaattgatgttgttggacccgatatcacaagtgaacaatatttttggttgattcaaaacagtctcaaaaactcaaaatagtctgtaccatcaaaaagagaatattgacaattctgcaatattttaaaaattattctagcatatcatgtaatcagaacatagaaacaaagttcttctgcttaatagcaat

SEQ ID NO: 12998 - DNA, 201 bp, Bos taurus
tgatcaaatttttcccttgaattaatactgaacctaccataacatcttatttatctcacttcatgggcccaaaagagcttcatccattactaattgtcaattcaggtttgtagaaaacaactataaatcgattgccccagtggaagaccttggaatacatatgaaaaatatttaagaaactcattgcattttgtgtctctt

SEQ ID NO: 12999 - DNA, 201 bp, Bos taurus
atttaggtatgaaattcatggcctctgccacagatactagagtaaaaatgaggagtcagaaaaatgcttgggattttctaggaagcatacattttgtatgagttatgaagtacttgaaaaatagtagtagatccaaggcttaaagccatttgtactgatttgataagtaatggagagccattgagattttgagtatgtcct

SEQ ID NO: 13000 - DNA, 201 bp, Bos taurus
tgttgagtgaaaaggagaggaagacagagaaccaggggaaaatttggggaataagcaattttttgctttagtagactcacctcataattatctagtgaatatattttctatttagactattatttctgctgtacttttttttccattttgtgttaaaccacataggaaaacaaagctgtcaagatattacttcaaaaaata

SEQ ID NO: 13001 - DNA, 201 bp, Bos taurus
gaccccattagaaaagagtttattaatctgcctacaaaagcaagtgctttaaaaaattacagccagctcattaaaataacgatggccaatttgcagtgcattgaagagttcttggtagctttgcagtgattctgtgtgtccctgcccttgaggggacatcctttttttccttctgggtatttgggcagagatgcttctgtt

SEQ ID NO: 13002 - DNA, 201 bp, Bos taurus
caaaaccagctgaaaagtctagtggagacacagattaaaagctctctttagacacaaaaattctgaaaagtatctcatgggagctttcttgtgtatagctggggaggaaatgattgattctataaaagtaaaagtgaagagtaggttcagatgttgaggtcaaagacaaggccaaccctgacctaaacaattatattttat

SEQ ID NO: 13003 - DNA, 201 bp, Bos taurus
ctggcctgccaaaaagcagactcatggttttggattacccccaggctttacccaggttccaaagttggtatcagccctgatatatattacagagcctcataggtactttagcattcatacagggccacaggcccatagggtatgtgcttcatccaaacacttcatgtgtgattgaaagacaatacagcatggcaatggaat

SEQ ID NO: 13004 - DNA, 201 bp, Bos taurus
atttgttcttgtcatcctacttgtatgcaactacaagattgatgggtataaagggtcccatttccaacgattttagtaaatccctctctagaaccaatgacgtatgaaacaatggactacttgtgttgtgcaccaaaaaacaacaaggatgttttgtaactacagtctcatttgccaacccttctttcatttgtttatcct

SEQ ID NO: 13005 - DNA, 201 bp, Bos taurus
tgcatgaaaattcagtgctcaaaataatcctcttcaaaatgaaacaaactggcactccctcctttttacttcagccatatattttcactttttattttgcttctatgtattagaacacccttaataggctttatgtaatgctcaaaatcttttccaatacattttgaggatttggtattaagaaaaacttactcttcataa

SEQ ID NO: 13006 - DNA, 201 bp, Bos taurus
attatttaaaatgctggaaactaataaaggtgatagtggttttaaaaaaaaaaaaaaaactttattgggagtatagttgatttacagtgttgttagtttcaacaaagtggaacctgttgtacctatatctacttttttagattgttttctcatatagctctttacagagtgttgagtagagttgcttttgcaatacaggag

SEQ ID NO: 13007 - DNA, 201 bp, Bos taurus
aaatattccatcctattatggatttatttatatatatttacctggtgcctctgcatgtttgagatagtgattcataattagaaatatatttttgatcttcatcctgtttctggcacagagttcttaaaacccttggaatttcctatgtcataagagtgataaaggtatcttgctattcaatcacaaacctctttcaaccca

SEQ ID NO: 13008 - DNA, 201 bp, Bos taurus
gattttacccccagatcacagcagttgagagattctcagaatgactgtgttaacatttattaagctcttacacttggcctgccattgttctcttagcgccccatttcaaccccaggtttgggggaaatagagttctgctgtgattggtaatgagaagttaggagccttggcaagtcgtggagttggagttaggatgtgaag

SEQ ID NO: 13009 - DNA, 201 bp, Bos taurus
gtgactggttatacagattggaatttgagcaatagtgagggaaggagagaagccaaagttgtacataacacataaaatattcaggccttggtgatgaactgatgtaatttgatataatcaggtttatatctatcgttttgctgtttgtctatttggcccataagttttatgttccatttctctccatttcttatcttcccc

SEQ ID NO: 13010 - DNA, 201 bp, Bos taurus
aatggccaatgtgtgtcctccaagggcttaggaatgccagagaaattgattgcaaggctctttgctggagctttcttcaggggaaaaaaaggaacatattattttctttccctataggcctctaactgctaggcataaatttcttctcagactttccagaaaacctcacccttggactaagatcaagaaaagaaaactcca

SEQ ID NO: 13011 - DNA, 201 bp, Bos taurus
acaccactctgctacctcaccatcagccagagagttgtgcagaagctgacaatagacccagaaaccctcccccttcttcacctggcctttaaaagtgttacgccaaaacccttcggggagctcagggcttatcagggcacgagccccccgtctcttcacagggcccggcagtaaaatttgtttgctccaaactctgaagtt

SEQ ID NO: 13012 - DNA, 201 bp, Bos taurus
catagcttcagagctgttgtcagttatttctcttagcccttgattccaggaacaaaccattttgtctttatttccaacattatttcttggggtgggggatgctgtttaagaaaccagagttagagatgaggacttgggcacaagtaggagaaggcaatggcaccccactccggtactcttgcctggaaaatcccatggacg

SEQ ID NO: 13013 - DNA, 201 bp, Bos taurus
ggcctccttaggaagtagttctaccaaggtcaagtccaagatccaattagggcagaaagactgaagtaacagtgcctcagacgtcttcagctgcccagtgtgcggcaccttgaatataggcgaggccccatatacatatccatacagatatagaatgttcaccaaatcagttgaacgcatttgtttatgcaaaaatagtta

SEQ ID NO: 13014 - DNA, 201 bp, Bos taurus
ttactagaggggccatacagcatgagatgcaatgcaggcagccttgaggagcaaaaatggtctcctagctgacaatcagcaaggaaagggggacgacagtcgtgcaacggccacgaactgaatttggtcaataacgtgaatgaacttggaagcaaattcatgcctaggacatcccaaaggtaatacagccctaatgacagc

SEQ ID NO: 13015 - DNA, 201 bp, Bos taurus
atatagttagtttttgttgaggttatactggagtagcccctaatccaacatgactggtgtacacacgaggagaacgtcatgtgaacatgaaggcagaaattgggttgatgcagcgtaagtcaaggaatgtcagagatagccagcaaaccaccagctgctaggagagaggctttgagtgggttttcctttgcactgtcgggg

SEQ ID NO: 13016 - DNA, 201 bp, Bos taurus
gaagtagagctggctggatttgctcataaattatgtaggtgtgagacaaagaggctaaatcccaacttttggttctgaacagcagggtaaatgtggaattgtttctggagatgagaaatatacaaagaacaggtttgtgggaatgaaattcagatgatttgattttgtaagtgttaaagctaagtaacctcacattcatta

SEQ ID NO: 13017 - DNA, 201 bp, Bos taurus
gggacagggaggcctggtgtgctgtgattcatggggtcacaaagattcggacacgactgagtgactgaactgaactgaggtgagaaaagctcttggatacaaaggtaacagcatggcagaaggccacagggtggtgagagacatagctcaccatctatcactaaggacctgggtgtctgaagggtaggaaatggggtatgt

SEQ ID NO: 13018 - DNA, 201 bp, Bos taurus
atttaatagtgaggaataatgagtaatatcttttgggaaattataccaacaattgccatgtgtgaagaatttaagttttgtaactacacagagtatatgacaatgctgggttataatttccttgctataaattcttttaagtagaaagtaacttacttccctattgctagcccatgcacactgggacattctttcttaaca

SEQ ID NO: 13019 - DNA, 201 bp, Bos taurus
aggccaggaggggagcagttcttgtattgatggagtcagagcctgaattctaaggtcaggatatagatattaaaactgcacactcatgggcacatcaaaccttagccatatgggcctttttgttctgaaggttcacaggtgaaattgacttgatacattttctttgatgtttattaaaccataattttgtagaatttgaaa

SEQ ID NO: 13020 - DNA, 201 bp, Bos taurus
gaggctgaagagaggtgtgtgtgtggttagtgtgtgaaggaggctgcagggactcaccctgactgattcaaaactgagtgtatcttctcgatgagaggagactgcagttgtttatgtaggagaataatgccctcagttctaagaaaggttattgtgactgcagtgtagaaaagtcgcagaagaagagtgtgggggcagggc

SEQ ID NO: 13021 - DNA, 201 bp, Bos taurus
gtttatgtaagcatctacaaagaaatttcctgaggttctcactatccattctcctcatctccacaggatatgaacttttctcaaatgtggctgacattttgtacaggattatgcaccgtggtgtattagaaagaacttgagctttgaccacatattagctaaatgactgatggaaattaccttacaacagcagaagatggc

SEQ ID NO: 13022 - DNA, 201 bp, Bos taurus
tcatcaaatttttccaaattaagaaattgttgacattatatataatggtaaatatttttacaaactaggtctttctttaacttttgccaagactagtgtggacaaaggataaaccagagcagaaactctggaaatagccaggccttgcaatgtgcgcatttgtgcccattggtggcgtaccagtctctgttattcctcttc

SEQ ID NO: 13023 - DNA, 201 bp, Bos taurus
acactaagcaatgggaaagaaaatatatctgcaagtataatttttgcagagtacaatctgcaaaaaattttttacttttaaaaagaactcatgaatttggatggaatttgatgtcttttccacgtaaggttaaagtggagtctacttttgttctctccataaaattgaagcattttaaagaaattcaattaagaatctgtg

SEQ ID NO: 13024 - DNA, 201 bp, Bos taurus
agagcctgagcaaaactgacgtcatggtaatctatggagccgtggccctccatgcacctaagagtcaactcctaaccaggcttgatcaggacattgtatctcaagtcctatttctctacggccagtgctctcgggtaatagccaacacggggctacttcaatttccaagactggggttcccaaacattacaggggctcagc

SEQ ID NO: 13025 - DNA, 201 bp, Bos taurus
aaaaggcctcatactgcataaagaccaaacagaaacgagtgggaaggaaagctgtgtgggcgctgaaggggtgatgctggaatacaccggccaggcatcccctgaaggagggtaaccagatcagccagcagactgtgatgactgccaaaccgaaagtgtcgcagacacggatggccatagagttttatgtgtcactgcctc

SEQ ID NO: 13026 - DNA, 201 bp, Bos taurus
ttcatcatggatcccttcacatggatactttcttcacatgatcttctccaaaagacaaagctcttcattaatgtaaaacaacagtgattctcactaagaccaggcctatatgactgtaaagaatagagttcattataataattacttagtcccttattataacaattagtgcattattagaattactccttgtcaaccagg

SEQ ID NO: 13027 - DNA, 201 bp, Bos taurus
atgaatctctatgtgtagtacatagcagtgacttatagaaaccatattctgactaataattctttataaaatatctgtatttaaaatgtatgattaattaattgactcttaagttactaatgattgtttaacccagttggtatttcctgttgcagattgtatgctggtccagaggtagatatatggagcagtggggttatt

SEQ ID NO: 13028 - DNA, 201 bp, Bos taurus
ggggctcagtcatactacagcggtttcctctctacatccgacggagagcgcgcccgtgttctcggaaggctcaaggccactgtcaggcagcctgatgtaggggctgtcccgggagggagaggaaactaggctttcggggaaagaaactcggcgatgtaggggaaaagcacctgctgcacctagttagcgacggggcctaaa

SEQ ID NO: 13029 - DNA, 201 bp, Bos taurus
ttttgctcaaactcaggctggcttagccgtgttggggaaagggagcaattttgcctgaaagctacttctgggactacaggctgaggagggccgaggacaaagggctcctgacctggaacagcttgttagcttctggctggtggtttgtagaggaaggtgggggtggtgaggaggtacgtgattaatcatgtagtcagtggg

SEQ ID NO: 13030 - DNA, 201 bp, Bos taurus
ttttgttctccaagttttcacctgagcagtctctggcaatcaatagattatagaagttttgggatttattatgttttggaggcaaagatgtgaaatgcagcatgccagaacttatttaaactagttaatataaggaaaattagatttccccaaatagttactgggcagaccttaccagtaatttaagtggaagtgatcaaa

SEQ ID NO: 13031 - DNA, 201 bp, Bos taurus
atctcaatattaagattgtcttaatgttaaccacatctcctgctaaaccttgtgctcctgctaaactttgtcttcacgtggggtcgccccctgctgaccagccacagtgggcacaaattccattgaaatcagctctaattccaagggaattacctgctggagatgatggctgttggcataattgaagtctcgagtcaggca

SEQ ID NO: 13032 - DNA, 201 bp, Bos taurus
atcaatggagttatcattatcatcctcattaaatatttgtgaaacatctccatatgcatagtggcaggtatttaagcatgatgagaaaatgaaaagaaatatataattatgatgtgtgtcctcaggggccttgaacctgagttgtgcagacagatacattatttatgaaactgtgaatagctgtccacataggatactgtg

SEQ ID NO: 13033 - DNA, 201 bp, Bos taurus
aagcttgagaggatgaaggtggggagaagggagcagatgttagagacctcacttagaataggatggttctacaaccaacatgacaaagatctactgagaatgaatgaatgctccttgcccagtctgcttcaactccaatcttctgaagttgatcctagcaaggcccactgcattagtcatagtgggcactgtccacagaaa

SEQ ID NO: 13034 - DNA, 201 bp, Bos taurus
gcagatgcacagaattattctttctgtgactattgataccttcagtgtaatcgctttcacttataatgtactgtttttgatgatgtctctttctcaataccggtgtagactcttatcttggatttgtatccagaacttgtgttttttcattgagtagttcccattatgatgaatattttgaaatattttgaaattatgatg

SEQ ID NO: 13035 - DNA, 201 bp, Bos taurus
atactgcttgggggagtcagacagttgttggtaccctatgatacacttacaatttgacattttctaagagggagaaacattttaccattgggccaactttttctgagtggaaccactctaagagattttggaagcaattgagatttacctcataactgtggctcttcatcttgtttctactttgatacatacgttgatatt

SEQ ID NO: 13036 - DNA, 201 bp, Bos taurus
ccgaaggcagttgcagtcaaggactcaggccccctggccagtcatgtgtttcacatattttcattccttgatttggtgggcacctgcctttggggtctctttatctgaggccttaggcagaggtcagctccaggtgcctttgcttgaggcctccttatttgggggagaaggaggaactcttgaatttacttaggagggtgt

SEQ ID NO: 13037 - DNA, 201 bp, Bos taurus
gattaatgttttctataggtaaatagcctggagaaatagtctaatcaatattaaatgtaattgattccaagctttaatggatgccttcaagcagctctgatagcggccttgcatcacctctgccaccatgccgtgtttgaccagtactccagctggttgttaaagaatatctatcacttcatttcactgtttttcattttc

SEQ ID NO: 13038 - DNA, 201 bp, Bos taurus
tttaggggcagtacatgcacaaggtaagataacattgtaggtattaagtacttgaaaatgtacttaataaaggtgaagagagataaaggtaaagaaggaattctggaaagagggaatatcatggtcaaaggcaaaaggatatagaaagcatgaaggtgagcagacattacaggcattttcatgttgaaagcactaatcgtg

SEQ ID NO: 13039 - DNA, 201 bp, Bos taurus
gtgcttctgattacctggtccatctctgtagctcagaaccctcctcttagatccatcatctgatgcacacagatgtcttcccttgtatgtggtatgcacacccatattaaatcccaatgtgctcctcctctgagtttttctattttagtaaatggtagaatataaatgcccacttgcccaaaacaacaacctgaaagctgt

SEQ ID NO: 13040 - DNA, 201 bp, Bos taurus
actcacatatctcccaggttagataattaaactctaaacccaaagatgtatgtgcttattgaacatccacatttgaatgacccatagaaatccaaatacagcatgtccaaactactccctcattcttattgatttctaaatcggtttttctctcggtagataatacaaccaatacacttctccaagccagagagctagctg

SEQ ID NO: 13041 - DNA, 201 bp, Bos taurus
taagaaacttttgagaatgagtatatgctctgatgaaaaaagaatgatgggttaggatgtgtccggggaagggtgactactttaagatgggtgatataactgtctctcatctgattccattcagattaatttctcccctctggtctactttgctcagtacccgggtagaactgaccttgcaggttacattctataggcccc

SEQ ID NO: 13042 - DNA, 201 bp, Bos taurus
tcattctttaattaagaggtaatattgaacctgaacattagatgagaatagcaaatagtattcccctttggttcacaagtggttgctccagtttagaactaaggttactaagccaacccaggaaccccagcacaacatgtggccagagttggagcagagtggaaatttttttgtattgaattgtctacagatctccaaagt

SEQ ID NO: 13043 - DNA, 201 bp, Bos taurus
agaagtccccaaaggctttaagcagggagtcccagggtttggtaggcaagatgaattacctgaagaaaagctagtctactgaactcaatatttaaaaccttgtctgtgtagacaccttcttggttgcctgcttgccctttctcaggagcctcttaagagcggggactatatttcatgttcatgtcaccagttcttgtctct

SEQ ID NO: 13044 - DNA, 201 bp, Bos taurus
gttggtccccagtactgactgcactctaggcttgccaaacaaacgactgtaggtcactctacagtatttgcagtgagttttaccttccattcataatccccaagtctgtaccacactctctgaactagttattcactgaagctggtctcaatggcaggtgagaaagattaaggtgtcatgttgttcagtctcccagttgtg

SEQ ID NO: 13045 - DNA, 201 bp, Bos taurus
aagaagggaagtcctcacttttcctgccagactgagcacagtataaccggccctctgagaggccaccccacaaattcaaagagacagatgtgtggggggagtagtcctctgacactcaggctttacactcagttcattttactgagctccagccattaccaaaggacctggggaagttggatgggaattcatgtttccttg

SEQ ID NO: 13046 - DNA, 201 bp, Bos taurus
tatagtcagcattactgtattacatacttgaaaattcctaagagagtacatcttaagtgttctcactacaaagaagaaatggtaattatgtaaagtgatcgaaccaatagaattgaagttttgatcgtaatcattttgcagaaaatgagtgtgacaagtcaacgcatgtacatcttaaattttttaattttaaaaataatt

SEQ ID NO: 13047 - DNA, 201 bp, Bos taurus
gacggactggtttgatcttgcagtccaagagacttgcctgtgagtgtcctggagtctctggtggaagcatgggttgacagtggcctgctgcagggtcagggacacatactataacagtcctggagcctgctggcataagtccttttgaaggaggtcaccattacccctaccatagtttggcctcagaccaaacaataggga

SEQ ID NO: 13048 - DNA, 201 bp, Bos taurus
ccatgggaaaagaagagccatagtttcttttaaaaaaatccttggtgaaacattattacgattaaaaattgtagtgaaaagccttaagtaccaaattttaaagcagcagtaatttaatttttatatcagtgttcttgttttgcacagactaaatgcagtgataggtgagtttatgagtacagtagttgcctttatcacatt

SEQ ID NO: 13049 - DNA, 201 bp, Bos taurus
ttgaatgcatcaattcagtgacttttaaaaatgtgatgacttgtgtttgggctgttttcattcattgaagtggcaagtttaatttggccctggcagacatcagtaagtcatgaaaagctggcatttacatgatgcccaagtgaagtcactgatccattcccaagaagcgagcttattcctccctgattcaagctccaggcc

SEQ ID NO: 13050 - DNA, 201 bp, Bos taurus
actgagaacaattgagtaaacagtggtgccatttgctgtatccacaaggatgtgcaggagaaggagcaggccttgagaagcacatggcctgggaataacacgagacaacagtgggttggtacacatcgggagtatgattaaggtttttatcagtttgattggttctgttttattttagcaagctagcacatacctgagtgc

SEQ ID NO: 13051 - DNA, 201 bp, Bos taurus
ctgtatctagagaactgagttattaaaactgttttcttcatgacccattatcaacctcagtccttatgagtcccctcttgctattttggtactttttcctcttcattttctgtaccacctctttcctcctatgtggactcactctattatactttatgtctttgcaatttgtttttcctttgtttatttagataagtatat

SEQ ID NO: 13052 - DNA, 201 bp, Bos taurus
aattaattatataactgactcattatttttcggctacctgatgtgttagagaccttgagttagctccgctggcaaatgtgtaaccattaaaaattctccacagtcagaaactggaaacaaaaactcactctttcggttttagatttttttggtcttgtacagaacattgaaggctgtggattaagtgcattagttagaata

SEQ ID NO: 13053 - DNA, 201 bp, Bos taurus
ccccctctctgccctcctgtctccccttcaccccctgaaaagaaaacaaaaaaagctgtcacaactaaacagagtttaccaggactgcagttcctggtgcccttttgcctttatctttgcttttctccatttttttctcttaactgtcctcagcagaaagatctgggacctcacacatcctggaggcagagctctcagagc

SEQ ID NO: 13054 - DNA, 201 bp, Bos taurus
ataacaactgaagtattttctgccttaatgaaaatttggaaattatgttgctgttaaaaggaaaaatttggacattttatatcattgtataatttcagaatgtagtgtccgtatcttttgggaaacatggtcatagcaagaacatagaattataagtaacctattactaagacacttaaatataaaactagtatgcttggc

SEQ ID NO: 13055 - DNA, 201 bp, Bos taurus
taggaggctgtatgtgacacatgtgtgaaagtcacaacatttgccctccctgtctatctctagaagctggtaattgccccctcttggtttccttgcatctgctcaaacttttgcaaacagtcccttcactaagctcacttcaaattacccaattacatagcctctgttgggcttcccaggtggctcagtggtaaagaatct

SEQ ID NO: 13056 - DNA, 201 bp, Bos taurus
agtggtttataaatgggatggactgcagaatctgagagataaaagcaaactatgaggttgcctgctcctgcgggagattcacaactaagaagctgaatttctcaaggtttttctggtagactttttgtttaagccatggagacagtcacatgaaacatgacaaacccactcttcaaacaaactctttgccctgtaagaaca

SEQ ID NO: 13057 - DNA, 201 bp, Bos taurus
cttttctaatgtctatgaccagccctggagccttattatactgtgccagtttcagacttctaagtccaaggtggtccttcaaagacttctttgacactgtagagtctcattttatgtagttgatgaaacagatccattttcacgcatttaccttcattcctttgattccctgggaaatttctccccacttcaagtaaccat

SEQ ID NO: 13058 - DNA, 201 bp, Bos taurus
acttggagcaatttttcaaaatgaaaaggtttttatacaagtaatgtaacttttacaaagatcttctttggatcatggcttgctgcctgggccagatttaactaacggatcaaaggcagaacactctaagctctgcacaggactgctgaaattcagctctcgagtgtgtgtgcttgaactgcagtggttcttaccctctgg

SEQ ID NO: 13059 - DNA, 201 bp, Bos taurus
ggataagggcaagatatctaaagaggttacaagcagccttcaagaaaatctgcaattaaagatgggtcttaattcttaaggagggccagaggagtattccggtttctttgcatgcaccgctgtgtaagtaagaacagagctagaaggaatgactgttttgtgcagtcttcctgagcaatagacaaatggtcatttaaccca

SEQ ID NO: 13060 - DNA, 201 bp, Bos taurus
cctccaaattctcattacacaggcttcatccaatttgaagaaaaattaacatacctggtagcaaacttctgactgcaaagacatgcttcccaggtcccatctgaaccaccaacatctgttggccttatctgcttcagggcctggttatgtctatctgtaacaacagatactgtccttgtccttctatgcttattctctgaa

SEQ ID NO: 13061 - DNA, 201 bp, Bos taurus
accacatagtaaaaagaggtttctgtaaaagccttttcccaagcacgccaatgactccttgccccatcacataaagtcatttcttcccagctgccaggctccttctgaaagagctagagccctgccagttacagtagctggtataaaagctaatcttataaaacacacatcacttctccaaccccataattaagaccagaa

SEQ ID NO: 13062 - DNA, 201 bp, Bos taurus
atactaccaaaatctcaaaggcatctttctcactccactacacccccatcatctgtagccaggtatgtggcaggggaaaggtctgcttggcctcacaccagcaatgacacacttgggctggtggtgacacacatcacctccgtgtgcatcttacagcccagagctagtcatgtgacccaagcacagccactcaactacaag

SEQ ID NO: 13063 - DNA, 201 bp, Bos taurus
gagctatcattacttcatgaaaaactcagtgaaggtctgatttcatgtgtgctgaattccaaccacactctggtgaaggccatatgatgagaagggacccgagtgagtgagtgacatcatgacccaaatagagtcgctattcaaacgcgcaccgtggcctccttacaccatcacctaattatagctcccgaggaagcgttg

SEQ ID NO: 13064 - DNA, 201 bp, Bos taurus
agaggcgtgggagcgctttgtgtgaaggagacgttgtataatcttgactgaagtggtgattacaggtgtatacgtttgtcaaaatttgaaaagggtgcatcctgtattttattgtgaataaactatacctcaataaaactgaattaaaaagaaaatccaaacaaaacaaataagtagaaggtcaagaacaaaaagacaaaa

SEQ ID NO: 13065 - DNA, 201 bp, Bos taurus
gggaaactgatagactaagcacttctcagtgcaagaaatacagcactgaacaaaacagacaaacatcattgtctttgtgaagctattagtctagttatatacattgattcattttttaattttctcatttcaatatctctttattgtgtgccctcaaggaacataggtttgaagaaacacaccaggaattagagaaacaaa

SEQ ID NO: 13066 - DNA, 201 bp, Bos taurus
tgaagacagagcaaaaagaatataaagacagggtccttgggacttccctggtggtccagcggctaagactccatgctccccttgcagggggccagggttccgaccctggtccagaaaccggatccaacaaaccacagtaaaagatcttgcatgctgcaaataaaaattctacatgccacaactcaaaaaaaaaaagatgct

SEQ ID NO: 13067 - DNA, 201 bp, Bos taurus
tttgtatataacacaacaaaaagctctatgaagaaagatgtttagatcacttttatctattttaacattaaaatgtccaacaataggggaccacagtaaatcacattagatataattatgaatgatgctagtacagagagatagtgaatgtaaagaaaagagaatgcaaaatgacaattatacacactgtacgtttgtaaa

SEQ ID NO: 13068 - DNA, 201 bp, Bos taurus
tgtccattcagttggtgaacccttttttcttttttctgagcagtaggtctcaacagtgggcttaaagtattcaataaaccatgttataaacaaatatgcttattatcctggtttcttgttccatttatacagcacaggcagagttgatttagcataactcttaagggccctagaattttcagaatggtcaacgagcactgg

SEQ ID NO: 13069 - DNA, 201 bp, Bos taurus
cattattagtcattgagaatatgctaactgaaaacacaatgagatattacaacacattcactaaactggtcatgatcaaaaagagatcgtatcaaatgctatgtaaaatatggagaaattagaacccttaacattggtggtaggaaggtatagccactttgcaacacagtttggcagtttcttaaaaagttaatttatcat

SEQ ID NO: 13070 - DNA, 201 bp, Bos taurus
tctttttagctcctaaatcttctgaacattcagggggtgtagaacaatggagataagctggtgaagtccttcaggtgtctaagtctcagatgcagctcagccaatttccttgattgcctggagttttagaggacattttggctaatgatctgagaaaattccttttgcttgctagatccttggaaataataggtcattttg

SEQ ID NO: 13071 - DNA, 201 bp, Bos taurus
tcttctactggccatttacctctgagagtcactatggaaggagaataataaagtcatgtgatatggcagtattagtaacacacagctgtattgggttactatctttttactgatcattttaggccagttcttgctccctgggtaactctgggaattctctgcaggcgtgcagaagacgtgaatctagctctttgtgtctgt

SEQ ID NO: 13072 - DNA, 201 bp, Bos taurus
aattcattgtattatcaaagtatggtttgtaagtgagtgcatatgctgccattatgtaggtatatcataatttacttaactgtttccctattttggacatttgtgttgggtaaaatttttgctctttgtgatgaaaggtacttgaaggtaaaaatttgtccacctttcacatagaggtgaattcctggaaggggaaggaat

SEQ ID NO: 13073 - DNA, 201 bp, Bos taurus
gtccatcttcacctgcacaactcctactcatccttcagacctcagctgaactatctctcccttggaggggcattcccaggtgaccagcacagcccccatacctagacaggcacatggagacccagcacaatgcctggcacaccacagacattatcaaaaccattgctcaatgcagtataccttttactgccccttcacaca

SEQ ID NO: 13074 - DNA, 201 bp, Bos taurus
agcatcaaacatcagaaacgaactcagacttttgattacacctgggtaattgggagagaaaccaagttagtaagtagaagtacagaagactactgaatcataaaactatttgtatatatcactttaaatcatgaagatgaatttttctaaaacagaatgagcagagactctggaaccaatcttgacacattatcttaaact

SEQ ID NO: 13075 - DNA, 201 bp, Bos taurus
attgtatgagtgtgaattattagtgataggaaccttggttaaattcatgtgtgtgttaaaaagcagttgttagaaggaaactaatgtaaatctatgactcaaaatgtcaagttacagcagccaacagcctcagaaaagaaacaaagaacaaaaaagcaggtggcatttactatttgttttaaaaaataaagagtatacgtg

SEQ ID NO: 13076 - DNA, 201 bp, Bos taurus
tataaggtgcctctggttgtgaccaacagtacacctcttattatagtcaatattattatttattctaacaggagaggccaggttatgaaaaatcttgtgattactcccatgttggaagagtctgactcaatagctttgtcctaggctcaggaatcttaatttcctaaaaatccctccagtagcttcatttatatgatgctt

SEQ ID NO: 13077 - DNA, 201 bp, Bos taurus
gtttcatacatatgataaacataaaatttctgtaataggaaaaaatttttggtggaaaaataggcaaataggaatttgagaatagaaaaatacaaatggtaaataaatataataaacatccaacctcattagtagttaaatttaaacatatttcataataatgtgaacaatgtctttgcttttcaactaggtgaatatttt

SEQ ID NO: 13078 - DNA, 201 bp, Bos taurus
ctaaatgaatcagtcactcccattgtgttttcaggcaacttcatggactaaggctagttcctgggtaatatgagaagacagcatctgtctcctgtgcttggcctcattccagcttgtctctcctttttggccccctatatcctcatttccagctttccccatctctgccctgtctttcctctgcagctcctatggctgctg

SEQ ID NO: 13079 - DNA, 201 bp, Bos taurus
acaaggccacttgggatgaagataacatatcccatcttccagtgtagctaggtatagctctcctacaaaaatctggccagaagaatgtgagaagcaattatggaagcaacttccaacttgtgtctttgaaggataagccattcttatttcctctccctgttttcgtgatgctcttgaaaataatcctggtgctaagccatg

SEQ ID NO: 13080 - DNA, 201 bp, Bos taurus
gaatataggtgccttcggccagagctgtaagcagaaaccctgctcctgggtgccaagcttaaagcactcttggaatcagctgagggacagcggcagctaccaggaggaagcctagcagtctgtggccagaccaccggataaaccagtatatatgtcctcctgccacagcagaacactgctcactactaatactgtggatac

SEQ ID NO: 13081 - DNA, 201 bp, Bos taurus
ttttgtgtggggggaggggcggtgggaaaggcatacagaatccagtccataacagttggctaaacttcactctttgcaactgagcagtttcaaataaaaataaaaagaaaaccaaggctcagagaggtgatctgacttccctgaaaaggaatacatcttctgaacttcagcctgcatttggctaactacctccactcctca

SEQ ID NO: 13082 - DNA, 201 bp, Bos taurus
tatttggttttgcattatttgtaacagtgaactattagaagcagcacaagtgtccaaaaaggggaaattgccagtatgagtgtcactcatcaaatactgggtggggagagctttaaacttccccttgcccatccctgcattctgataaaaattgaggacatatttctggaccaagtaagagggaacaaaacttggaacaaa

SEQ ID NO: 13083 - DNA, 201 bp, Bos taurus
aggagagatgggagctggatcgggcctctgtacccaaccctgtattaattctcagagacagagttttggatgaagtagaggataacagctttattgcttcactaggaaaagagggccaccataggctaatgcctcaagaccgtgtcctgattggaggaggtagtgagaagttttatagtaatgcttaaaaaaggggagggt

SEQ ID NO: 13084 - DNA, 201 bp, Bos taurus
cagtcccaaatgctcctacccaaccttccttccttccctcactcctcctgaaaatagagaaaccctctgtctgacttccagggcaaaccgcatggaagcacacaccagaaaagattctgtggcagaaaatagaaatggctgctggataatactggagctgagcctgagagaatcccctgagtggctgccctgggcccagag

SEQ ID NO: 13085 - DNA, 201 bp, Bos taurus
agtagagggcctgcacatgatgagagagaagacagttctaattaatgctaatacagctccttctttctttgcaggtttgggaggtgctctcggttaccttttgggtgccattgactgggcccacttggaactgggaagactgctgggcacggaattccaggtcatgttcttcttctcctcgctggtgctcactttgtgttt

SEQ ID NO: 13086 - DNA, 201 bp, Bos taurus
gaggtgagctaggtttgtggacattccttggtgctctcgtcccttcctgacaccacttttcatgacaaaatttctaatctggtcagatttcaaggacatcaattgggctgcatttattattagatggagttattgtttgttaactgaacaaacacaatctttggtctctttcttttactttttcttccatgcaggtgagtt

SEQ ID NO: 13087 - DNA, 201 bp, Bos taurus
ctccagcggatcttcccaacccaggaaatgaaccatggtctcctgcattaaaggtggattaatgatcagcaaatcttcacctcatatcaaatgtaaatacctctgacagcaccagaaattgtcaaaaggattaggtttccccagcatccttattggtattattgctcaatgcagtatttctaacagttagattcccaggtc

SEQ ID NO: 13088 - DNA, 201 bp, Bos taurus
taaaaagaaatgataagtgctagttctgagctaggccatgagaaaaatcgtttgtctctttttaccccctcgtgcttccaccaattgccatgagaagagcgttccccagttcactgaaggccctgaacagcttacaatctctgctacatcatcactggtttaaaacttttaatctagagctgttagtcctaaaaatccact

SEQ ID NO: 13089 - DNA, 201 bp, Bos taurus
aaacaatctaaagactttggaaggacaatctaaattttgaccattgccagcatctttcctctaggtctcctcactgaaagcttcatctaaaaatgacacatggtcacccagccctggagtttggcaaccgagcaccttcgatctctggccttcagtacccagaggacagttcttaaatctacaaactgtctcgtgcagcag

SEQ ID NO: 13090 - DNA, 201 bp, Bos taurus
aggttggttgcttctcttctttggaagtggccgttaactttggagattgctaaggggcaatgtttgtgatgcagttgccaatcccatcaccttgtggctccggcatcaagatgcactggccagtctctggttttctttatccattatctcattataatcattagtattgctttctcttttcccaattatagcctcctcttc

SEQ ID NO: 13091 - DNA, 201 bp, Bos taurus
ggtttcccagcaaactgagctggccctggtcaagaaaggagatgcagtgaaaaacctgagccataagagaagggatgtggaatcccgccatggctgccacgggcctatatttgctctgcttctcaaacccactgcccacagggaggccccatcctccaagcctctgggctctgcctccatttcccactccttgtctagacc

SEQ ID NO: 13092 - DNA, 201 bp, Bos taurus
gtctgaggtacacaaaagaagaggaagtcaaaagggtaactagtcgcatgtgtttttaggttttatttcccatcaggttttccccacttactcagttcttgcttccactgcgcgaaggttgaggggagcctttcactctgtaaagttgaaattggttataacctcatgtgctttgattagaattgagagataacttggtag

SEQ ID NO: 13093 - DNA, 201 bp, Bos taurus
tgactttggaaagcacggcaaaggtgatgtgtgaattccctgaccaggatcctgttaagtaaagctcttctgcctgaaacccagataccactacatgagtaaacactggctgtgtctgggttccgtttatttactacacctactaattaataaagggaaatgaaaggaagacagagccaggagactctagtttgatccaat

SEQ ID NO: 13094 - DNA, 201 bp, Bos taurus
ctgcattaacaggtgcattctttaccactgagtcaccagggaagccccaggacagcattcctttttgtttaatgagcacacaaatattagttgatgatgataatgataataatagctatgaattaaactcttcctacaattatattgggcattgtgctagctactttatgtaggttgcctatttcattaattttttcagta

SEQ ID NO: 13095 - DNA, 201 bp, Bos taurus
gctgccttcgtgaagatcgattctgatgggaatagaagagcaagcggggccagggagggaggtgtgttcagagactcctcaggtgtgaaagctctgcagttagagggtcagaggaaacttggtgggaggagagctgagttcaaaaccaggaaaggctggactgcctctgggcagagagggcaggcaagggcagagaggtag

SEQ ID NO: 13096 - DNA, 201 bp, Bos taurus
agttgtcaaagaagttcaatttccaatttaacgactgcaccatcgcagtgtacatgtgtaattataaacagtggggcaccgggacacagtgaaggccagcggaaagctaattctcggtggaagttgttgttcaaaataattgtgcattgttacttgatgttctgcagtcatcaagtcaagcacttttcaatttctttcatc

SEQ ID NO: 13097 - DNA, 201 bp, Bos taurus
tctttatttacattttagagcactattctccaaaaatttcattgcagagagtaagaactgaaacaaggatgcccaagtgtgaaatctgcaaaacaggtgctctgggtgtcctgagctgttttctaatcctcacccccttgctctgtgagctgtcttctgtgaactacctttcagatgcccattgtttatccaaagaattaa

SEQ ID NO: 13098 - DNA, 201 bp, Bos taurus
tcgttgaaatgatctgcattggtctgttgttagcttgtgtaccactgcattacgcatcattctggctgctccttatttgaaaaagctgtacagtgttccagtggtgattgtccatttgtactcagtcttcaatctgccaacagtatttattcaagtatcatttttcctatattattaatacccaactttcatgacatcaga

SEQ ID NO: 13099 - DNA, 201 bp, Bos taurus
aggccagaaaatccagcagattactgtgttccacagaagaaaccagaggtcacattattctctaaggcaatcatcaaaatgctggtgagagggacactagcatcagaaattctgtagggcctcttttgtaggccagagctggtggtagaaaaagcagatacagtctttagaagccaggtatcagaattacacatcaaatgc

SEQ ID NO: 13100 - DNA, 201 bp, Bos taurus
ttaaatgccttggtttctcttttaaactcaatgacattcatatcccatgctgatcatcaataaaatagtcagaacctttcatcaggagatagaacacaaattgcagtgcaattttccattcctttttctacaattacctaaagatcactttgaatttagtgtgtttaacaagggctttttaaaaagaaatgtgcttttctt

SEQ ID NO: 13101 - DNA, 201 bp, Bos taurus
tttctaaattaagtccttgtaaaaatatcctcttctgtttatcttaaactgagctttgtacataataaatgttcaataattcaagggtaattgaatgaatcccatgtcacactgtagaatgccaatttaattttgtaacctgtccttatgagacagatactgatcacattaatagaaccgcttgtgtggcaattaacataa

SEQ ID NO: 13102 - DNA, 201 bp, Bos taurus
gcaaataatttttttgagatatagttttcctttgaggctgtttcttgaagtattctttgttctctgaaagaagacaaattcttgcttatagctctttgacattcatgatatatcccattggggccctaaactatgagactgttttgataagaatgtattacaccatactagaaaggctgcatcaaattaagaatgtcttac

SEQ ID NO: 13103 - DNA, 201 bp, Bos taurus
ggtggatgtgtattttcctatgcatatataatctctactctagagaaaaaatataacccagatttttatgaataaaaaggcttatgcattcctgcttttggcagtgtagtaataacatacttctattacacacagtatattctttactaatcctgttgaaggtactgcagttgatgatttcaattcggaaagatactgagg

SEQ ID NO: 13104 - DNA, 201 bp, Bos taurus
ccagtacattctagcttgctgattcctaaaatgccgacattcactcttgccatctcctgtttgaccacttctctgtatctataagctcttttcatcataggttgttagtgggaggtataaatgcctgcataaaagactaaagtaatctgcctgtgatttatttttgctactctaccatctagtctgatgcaatgcttctcc

SEQ ID NO: 13105 - DNA, 201 bp, Bos taurus
tactaattgctttcttaaaaaggcctttcttaaccattcacatttctaattttttgtttcttcattacaatttaagttctgggagagcagaaactttcacatccatatgataccttcagtgaatgtccagaaaaatgtttgttacaaaatgtgtgctcagcattgatttggtgaatggaagaatcatctgaactacatttt

SEQ ID NO: 13106 - DNA, 201 bp, Bos taurus
tttttctttctttgttcagattttgatttctgctctaaatatacagtttgctcttacaaagatgtaaagtttggaaagaagaatggacatataataaaatgttattcttatcacagataaagaagatcaaaaaatataaaataaggagaaactaatcaaagttagtcgctcagttgtgttcgactctttgtgatcccatgg

SEQ ID NO: 13107 - DNA, 201 bp, Bos taurus
gcagttcttaggagtttgtttggttgagagtctgtcaagcagcgtgattagtaatgaagataaaaatgcaagaggtcctttgatagttacctgagctttagcatccaaaggcccagctggaactgctgagacctagaagaatggaccccaaaatggcagagaagcccagcaagtagagagagggcagatatcaagataatt

SEQ ID NO: 13108 - DNA, 201 bp, Bos taurus
cttggggagctcccttgaccttcatagtgactggggaatccactttactggtccgatgttttgatgagtctgtgtggtctggccatttctgcagcaccttgattgtacttatcatgtttggtcttcagcattgctcaaacatacaaatctaattattaagactcagctgaatgagttgaaaccctctgaacaccatggcca

SEQ ID NO: 13109 - DNA, 201 bp, Bos taurus
gcagataaaataaatacaaactgttacagccacagaactaatctaaaaaagtttgattctgcaaatttattaatctcagtgtcagttcagtttaataagtatctgttgcaatcagtaatgttctactactcacagttatcccttactgtgttaactgatcaccaatgccctccaagccaatacaagcaaacaggaaatcac

SEQ ID NO: 13110 - DNA, 201 bp, Bos taurus
tgactcatatctcttatggtcactaaccactttttgtacctttccacaaaacaacatctcttaggagattcctccacctgctctgtcccctgcaatgcactgagtcacaggtcaaccgatgacaatgcgatctaggccgctcacacacacaatttcaaccagagtcacaaagacctccatagcatgaggtttgtttgttgt

SEQ ID NO: 13111 - DNA, 201 bp, Bos taurus
tcatggggtcacagagtcaaactcaactaggtgactttcatactttacattgtttactggtagggcatagagaggaaacatttcatttcacaatggtgatatgaaaatgtctttagcttcaaagtcaggagtactcaaagtttggtggagggaatgaatttgtatcaactatgtgatatcctttcaatcaatttgccacct

SEQ ID NO: 13112 - DNA, 201 bp, Bos taurus
aacctggatgaaaactagaagtctagccacccagcaggccaaaggctagtggctaggagaaaagtgaccctggctcttggatctgtttgaaagaaagaatgtttcaaggaggcaaaacctgtaaaaacaggtgtaaagataattcttagaaatacagcacaacgaatgggacagaacacaggaaagcagtttgtttatcca

SEQ ID NO: 13113 - DNA, 201 bp, Bos taurus
ttatctatcatttatgtaacacatgaaatgaataagtaaaggagaccacatttatacagtaggccgttctgttctgagtcccctcgtctccatgtttctctacatgtattttccttccccctcttttggtctcctcatctctactctccaactctgctgtcagaataatctctgcaggaggagtgccttgaaattacactt

SEQ ID NO: 13114 - DNA, 201 bp, Bos taurus
aaaaaaaattcaagacagtatgtcacttgtagagtcctttagaaacttcaaaagttcgtaaatctttgaaattcactgggtttgtcctcttagctatggggttgaatggttcttcctgcagacctgaaataaacggccctgggctggaaagtcttacaccatcaagcacattccagtcaaatcatcaaactgtcaaattgc

SEQ ID NO: 13115 - DNA, 201 bp, Bos taurus
tttaatattttttaactttacatgggctaggagcatctgttcttctgatttgctaaagaacacaacagagtataatgtgattattgttgttttacccccacgtaattctatcttaatttttcctgagttaaactcattttcttttgcccttcagttatacaatgttaattgcccacaactattgattgtggtttctcccaa

SEQ ID NO: 13116 - DNA, 201 bp, Bos taurus
tgcaggtggattctttaccagttgagccaccagggaaaataattcaattctgattttggacagaaatgattgcttttgaaccctgactccaattaggccagtaacaattcatttcctattccttgtgcacaatcttttattgagaagtgttgcatgttaaagaagggctgctgctgctgctaagttgcgtcagtcgtgtcc

SEQ ID NO: 13117 - DNA, 201 bp, Bos taurus
tcatgagattatgggggctaggaaacccaaaatcagaagagcaggttggcatgctggaaattcaagggtattttgaataacaggccatttgcagtctcaagtcccaaatgtaaaggctggaaaataaggcaacgtttgtacagtctagtggcaaaattgcttctttttcatcaaatcctgtctttggtcttaaggccttca

SEQ ID NO: 13118 - DNA, 201 bp, Bos taurus
ccacaaaacaccacaagacaactccttgctggcagtggtagaacttctacaattagcgattaactgtctgaaagcttttcaggttaaaaaatgtatccttccagtttaaacaatacttttcatataaatggtagacattttcaattccttcagatcttgcaaggatttggtctaagttatatactgctccctcttacagta

SEQ ID NO: 13119 - DNA, 201 bp, Bos taurus
agcagtccctcgtaccaaaaagttggggaccactgttatatagaatttgtacagatttcaataattctttgtcatacaagcacctctcatctgaaataaacaataaaagactgagacataatcctcatgaaatatcaatgaccctactataagcaacaagaaaatactgtatagcacagggaattatagccattataatat

SEQ ID NO: 13120 - DNA, 201 bp, Bos taurus
atatgaacaggttagctgataagtcagtgggttggcagtaacaacagatgtgtgtatttgtgtttcttccatgtaacatctatttttgtctcaaggcaaaatggagagttggctgctgaagggaactatggggcaagggaggcttaggatgacaggagaagatgtacaataaactctgtagacacaggctaaataagtaaa

SEQ ID NO: 13121 - DNA, 201 bp, Bos taurus
ttttttaaattgttgttgctgtttttgttactaagtgtaagacctacagttgttcctcaatgtgtcattcaacaaacctaaggcctcattgaatctgaatactgtaaacctgagataccaaaactctagaatcagaatcctgtcaaaagcttctagattattgtacctgcccccagagtttcaaattcattacaggcccaa

SEQ ID NO: 13122 - DNA, 201 bp, Bos taurus
tggaactaatttgctttcatgcctcaatattagaattgcaaaatattacattatgcatagtacttgaactatgcatatgatattctaagatttttaaatcaaagtgtagtcatttaacatttgtggaagtggtttcattctttgatacgtagtaatgcatgatgctatatatggacaataccatgtctcaaatgaaacaaa

SEQ ID NO: 13123 - DNA, 201 bp, Bos taurus
tctgtccttccctagtgctcaccattttttattaatattactagtcaccatcttatattcttattttttaacattaatattgtttcctattaggttgtattgtccaagagaacacaacattctctagtttaattgggaattcttagcaaaattatttgagtatatattagagtatataatagagaaaaagagacaaagaga

SEQ ID NO: 13124 - DNA, 201 bp, Bos taurus
gaaacaaacatttctatattattgtaaagatgattctattactgcagtgcttggattgtatcaatattctactatcgtttgatattactctctgatgtatgtatttataaactatatgtgttgttgacatgtgattattattattattttatgtgcatctatgtgtttgttttatatgacacagtcacttaaagagcaaag

SEQ ID NO: 13125 - DNA, 201 bp, Bos taurus
tttctttattaaaaaaggaacaaaaaaacataccaaaaagaaacaaaaattaaaatctaagagtactcattatggtaagaattaattaaacaaggaggccattagactggtatggctctaaggtattcagtcagttcagtacagttggtcactcatgtctgactctttgtgaccccatgaaccgcagcacaccaggcctcc

SEQ ID NO: 13126 - DNA, 201 bp, Bos taurus
cttggtcagtacaatcagtggtcatggaatgtaaatgaacctcagagcacgttgtattttgcttccctgttgaattcagaataaaaactatacacttttacttatggaaaaataaggaatgatatatttcttgcacacttaaatttgtaactgaaataagtatctgctactcttgtatacattagatttaaataagcaaaa

SEQ ID NO: 13127 - DNA, 201 bp, Bos taurus
tcattcatctcattcatgagggttccattctcattacctaattactttccaaagttcccacctccagagactagactggggttaggatttcaacataagaatctttgaggggcatcaacaagcagtacataacaataagcaagactaaagatatggaaaataatgcaggaagtatattagacaagcagcatgatggaactg

SEQ ID NO: 13128 - DNA, 201 bp, Bos taurus
catttaacttataatgtgagccctctataattaacatgcaaaattctaataccatatgtattttcaattcattccctctttcaattccttttacttgatagtatcagagcagaatttgagcagtccattaggctaaaaaataaagtgttcagagaaaatgaatatatcattctgttcactttcagtaagtttcttcactcc

SEQ ID NO: 13129 - DNA, 201 bp, Bos taurus
accctgggtgcagcagacctgggtatggcataagccctcttggaggaggtcaccattaaccacaccgtagagctgctggaactacccaagactgtggaaatagactcctggtgggcataaacaaaaccttgtgcacaccaggacccaggtgaaaggaacagtgaccccacaagaaactgacccagacttgcccatgtgtgt

SEQ ID NO: 13130 - DNA, 201 bp, Bos taurus
taatcccaaagacaagatgaaatgtgtgtactcaggaaatctgcaggtgaagtatgccaacgaggggggaccaaataactttcctgaatcgaaggacagcagcaacttaacttttttctcttttgaaaacaaaaatgaaaataccctgtggcctgaccagactgtcctgcagtggggatacaggtctacacagacgacaat

SEQ ID NO: 13131 - DNA, 201 bp, Bos taurus
tcctttgcctttcttacataaaaacacaagttattggagtaaaagcccaccttaattgtatgtccttacagcagcttaaaaatatcttcaaagacctcacgctaaataaaggcgcattctgagtttcaatgtgaccttgaatttgaagggatgctgttcaatctcctgcaaagtatcatttagttaatggttaattgatgt

SEQ ID NO: 13132 - DNA, 201 bp, Bos taurus
atcagggcactcagcacctcacttatctaccgtacccaacctctgatgcatggtgtgaagccagtcccagattccccatcttcaacctgtattattggaacacttctgttttagtgttgagcctctgaagcagatacctaaactaaagaaggcttttgtgtaatttattaagggcaatgcctaataaggaaaaacaaatgt

SEQ ID NO: 13133 - DNA, 201 bp, Bos taurus
aactaaacaacttagttgcaaggcttcaatcattatctagaactactagagggatattcataaaaagagcaataacaaactcaagagtaaataatactcatgtggccagaaggagttaacttccaagggaaatgaacttcacaggagacatacttaaagctttaagaacttctgactttactttccatcatgctaagttgc

SEQ ID NO: 13134 - DNA, 201 bp, Bos taurus
acttccaggttgctgtaatgggatttgggaggcaagtagaagccagtgtaaatataaaagcaggctgcctattgttcagggaataataaactcccttattcgtggcccaggaattacctgttctctgctagaatctgtgaaactgtggcagattcacttcacagttctttacatctgtaatgacaaattctttttgtgatt

SEQ ID NO: 13135 - DNA, 201 bp, Bos taurus
taaggtgagatattgcatcaaaagaaagttgctctaacttaaaaattaaagattcactgctcagtaaatgaagttgtaaacaataaccttgctgaaaacaacattatatttaaattaaagggtaatcatccatgaaagcagataagacatgcttttcttagtagtacagataatagtctgagaactgccaagattacttta

SEQ ID NO: 13136 - DNA, 201 bp, Bos taurus
actacacagaaaggaagtgagagagacattttagtattagggtcagcggtgtgagagaatgtgcagacttttcaaatgaaaagtcattgaaagggaaaattcaaatttaatgtaatttgatataataatgcctacttcaaaggaggtaaaattactttctgtctagactgagctacctgtagagtgctgtattaattttag

SEQ ID NO: 13137 - DNA, 201 bp, Bos taurus
ttattaaaaataaaaataaagacagtatgtaatgaaacatgttttaacaatagatgatctacttctcaggctaaaacaaatttcaaataaaaattaatagtataagttagagaaaatctccttatcatctggtatctgatatacccacttggacgtaagcaattctaaacagagcaaatatctaaaaatttacaaaagaaa

SEQ ID NO: 13138 - DNA, 201 bp, Bos taurus
ggcctgttattctgtgaacagtaagagtttgggttcattaatagtttcagttctacaaacaaggcaaaagtacagccattttggaaaaggactgagggaacggccttgagccaggagacttgacacacccagtaaaacaaagtgctaaaggcttggatttcacagacgataatcaaagacccacaggagtaaaagattagc

SEQ ID NO: 13139 - DNA, 201 bp, Bos taurus
ttgttttatgaaactaattttttttggcctgtccaattcatttatttctgaaagatcacatattttaaaagacttcttgcagttctagataaatggagcacctggccacctatgactgtccccatcgttctcaacttatatgaataattagaaagcagttgtactctttgaatcttacaataattaataatttgcctgaat

SEQ ID NO: 13140 - DNA, 201 bp, Bos taurus
gatgtggcaccatgcatgaagattctacccggcctcttgggggtaagtcaatcatcatggggtcctggtacattagaagaggatgccattcttatttcagatataattcctgtctgccaggccttaatcagcacagttatatgagtattgatggactgatacatgactagcattgcctcagaacctactttggagcaagta

SEQ ID NO: 13141 - DNA, 201 bp, Bos taurus
ttctctgaagtatattaattttttaggctattttggggtaggacctacattctcccatgaggtagatgttctctttagcaaaccgtggcccacagcttccctatttgttactttatggcaaagactgccgccacctaattgaacaaggataatatcagatggcctttgtactgatttcagtgtttgttgctgtcttgaacc

SEQ ID NO: 13142 - DNA, 201 bp, Bos taurus
acacatattttgatgaatcatgagaaagatgattgctaatattctgtcattttattcgtattattttcccagttttttcctgatcaaaactgaaagtaggtgcccttgagattttaagcaaccctcacattcctttttattaataaattcactccaggtagttaattttttaacttaagtttgttctctgtctctatgcag

SEQ ID NO: 13143 - DNA, 201 bp, Bos taurus
tcatatctagaatttcttttctgttttactgttttacttcatggaaacaatcagaagtcttaatatatagctgagaactatcttaaagagcacaaaatcttaacagactaaaattaagctgataatggtttatattactgagaatatactgagttgagtattataagcttctgataaaaatggtaaagttctattggaaag

SEQ ID NO: 13144 - DNA, 201 bp, Bos taurus
tgaacaaaagactttcattttatcttttgcttaactcctgacacaaacattattgttggccagcatactaaaagtccaagaaatggcttaattaatagtgcatagaatgtatggaagaattggaaaggtgatacaagcaaatatataatgtatattctcctccactacttgataattcagacttctttccatgccataaaa

SEQ ID NO: 13145 - DNA, 201 bp, Bos taurus
aaatatatatgtctatcaaatcatcattttgtacacttatacaattacatttccgttaccccttaataaagttaatttttttttaaactaagacctgcctactgagaaaaacattgctactgtcttccagaaattctcacatagatgctcagaaataatgtttagccagatatctgggcttaatctaaacaagttcacgta

SEQ ID NO: 13146 - DNA, 201 bp, Bos taurus
atgatgtacctacatgtaggaagagtttactaggccaaagcaagaaatagtgtaaacgtccccagaggaacacttggcaaatgtgagggacaaaagaaaatgccagtgtggccagattgagtaaacattgtgactgagtgagaggataaagtccaggaaattgtcaggagcaagatattgcaggtcttgttggccatgatg

SEQ ID NO: 13147 - DNA, 201 bp, Bos taurus
ttgatcttggcagggcccagcctcctcccttgcttatccaaccattcttgtcttgggattttggtccacaggtgaaagatttccacttgctttgccctacgggaccaactgaggagggcccgacaacccactccaatattcttgtctggagaatcccatggacagaggagcctggagggctatatattccacagagttgca

SEQ ID NO: 13148 - DNA, 201 bp, Bos taurus
attgtcttttgacataaattatacttaagattgtagactaaaagtattatgctggaatgatttttatacagtcttatgtgatgctttatatgcaagtaagttttgcccttgtgttcttggccatgattctgtctttcccgctgttaaaattgcaactgtcaaaccagcttctctcttaaacctagaggatgccatttttta

SEQ ID NO: 13149 - DNA, 201 bp, Bos taurus
tgaaacattgagttcataattaataaggatgttctgtgagcagacaacttcaaaatctttacagtctcttttgatatgtcagatttaaaatagttgtcaattatccacctagatagaaacacaggtatcagtaaataccagaaatcagaaataattgacagtagctacaagagaaaatgttaataatgcactcatctctca

SEQ ID NO: 13150 - DNA, 201 bp, Bos taurus
aaattttactgaatgctgtgggatatgctaaagtcccaacttcatgcaggattggagagagatgatgtattaattcataatgttactcaagtctctaatgtacattgtggagtttctgagtgttctatagaagttctgataggtttacaatataatactaagtagaacagttctcctcttttctctccccaactcctgctc

SEQ ID NO: 13151 - DNA, 201 bp, Bos taurus
aaaaggcctctcttcttgcagccttcttttaaaaagagcaagggaaccttatacaaaaatctccatctgtcttttggacattctttggttagagctgtcagtgggggccttttagactgactgaattggaatttcccctggagcttgatacaaggacattctaccctgaatcctttgatggaccttccagaactatgtact

SEQ ID NO: 13152 - DNA, 201 bp, Bos taurus
ccgagaggcctttctatattacctcaatttccctagttctgatttagttatgttaaattatacaatgtgtcatataacagaaataatgtgggatatgaatgcacatggcctgagacatcatcttaaaagctggaaatactcatcttactctttattctacatatgttatattgagttaacacttatcaaaatgtgggggaa

SEQ ID NO: 13153 - DNA, 201 bp, Bos taurus
acctcttggttccatattgactcctgtttttttattcatttgatggtaatttattccttctatgagataagaaaacataggataacctcacttagaatagacagtttcaaaattttaaaaacaacaacaacaaaatctgttaagactttataaaacttgtcttatgatttataacctgctcctcggtaggtgatattttca

SEQ ID NO: 13154 - DNA, 201 bp, Bos taurus
aagagcagagagttttctctggttgggagcagagggagaatcagagagatctgaggtgtggtagaggctccacatgaaggaggttctttattgctgagatgtatgggatggacgtgagtctgagtgaactccaggagttggtgatggacagggaggcctggcgtgctgcgattcatggggtcgcaaagagtccgacacgac

SEQ ID NO: 13155 - DNA, 201 bp, Bos taurus
caattatcaggtaagaacgtacaagggagcttaggtttcaatggaaatgaagagctttggagcagtaagacttgtaaggtgctacttcagatatttctagacaaatcagagggctacttcagatattctccttcaattatctgggatgattttttctttatgaaagtctcagtgtccttaagtgaaaacctgtaaaacata

SEQ ID NO: 13156 - DNA, 201 bp, Bos taurus
agaccaagaacattcaaaagcagcaagacctggataggtttttgtttaaaagtcactaaatgtattttctattgtccaaataaatgcaagcaacagttttgctaaatttctgccactgcataacaatgatccttcttcctctagttcccagtaaaaagttcttactttcttgcgagccctcatttacagcttcctcactta

SEQ ID NO: 13157 - DNA, 201 bp, Bos taurus
cttaatgtattatatttcaacaaaacagtctaagctaaaacatcaatctatttttatatttacccaatccatttgcttttattttccttcctgtgagacacaaatatattaaaaataacttagagctaagttcaagaagttataataaaaatactgaatacaattctattaaatactatttcaatgtccaatttctttgtt

SEQ ID NO: 13158 - DNA, 201 bp, Bos taurus
tgattgcttcttctagctaaaatagcttttttatttcattttttattggttgagttcaattatattcaatttgggggccaaatcaactcaagattatgaactttctattctctttatcaagggttatggatggtgactttggataaatatatatttatgcttctactaggggaaaggagagggctgccaaacttgaaaccc

SEQ ID NO: 13159 - DNA, 201 bp, Bos taurus
agaatttgactttggaggccagtgggatttgattacagatcctctacaggactggggaaacatactctttgagggcacagacaacacattgtgtgcaccacggcccaggagaaatgagaagtcaccccacaagagacttgcccgagtggccaggagtctctggaggaggcgtgggtcgacagtggcctatcatggaatcag

SEQ ID NO: 13160 - DNA, 201 bp, Bos taurus
caactgtactcaatactctgtaatgacctgtatagaaatagaatctaaaaaagactggatgtatctatatgtgtaacagattcaactttatgtacagcagaaactaacacatcattgtaaatcaactatactccagtaaaaattaacttgaaaaataaaaggacatatttacttgctgagtaaactaaaattaatgaacca

SEQ ID NO: 13161 - DNA, 201 bp, Bos taurus
ttcattctcagcttttacaagtgattttgaaacattttcagatgaaagccacttcaattattttatttttcctaacttttaaaaacttaaaatctattatatctcagatccttagtttaacttctttgatgatccaatgtaaatacatggttctatttttcttgctatattaaattctctctgtataggcacacacatgta

SEQ ID NO: 13162 - DNA, 201 bp, Bos taurus
aatttctacttatccttcaccatctaagttaaatgtcatatgcaccaaaattccttttctaaaacttagtaagacttggcaccaattgccaacattgctagttgtctttctgattttttttttttttgtttgcatctcttagtcttacaaactactgcacaattgcactcatctcacacgctagtaaagtaatgctcaaaa

SEQ ID NO: 13163 - DNA, 201 bp, Bos taurus
gttaatatggaagcaaggcagagatgcatatccgaagataaaggatgtgcacatccccattaatgttgaggagtataggaaagaggtggttaaatcattttatagggcagttcttccaggcctttgtttacctttggccaattatctggcttctttttccaatctgacctgtgctaggatcctctctgatatgtgtgcaca

SEQ ID NO: 13164 - DNA, 201 bp, Bos taurus
atgcctggctgcaccaatggaagaatattttgctgtggatttgttaaaagagaaaaaggtaggcgagatttatttgaataacagatgcttctgggagaaacatgaggatttgacttcatgcttctatgataaaaaacaccaaaatatcaaatctgtaagtggatgttaggaaaaaaggtgcctcaatcagataaaaaaaga

SEQ ID NO: 13165 - DNA, 201 bp, Bos taurus
tgaatcacaagcttcctctacagaccagctgcaggccattatatgtgttcccaggaggtcaaggtaatttagaggcgagatatgtgctcaattccccaggtgcccctggcccattcactcctataattatggttagagtccaggaatcttggtacactgaagtttagagttgtttccttgaaacacagtatttgttaggag

SEQ ID NO: 13166 - DNA, 201 bp, Bos taurus
atcaatttaatgactttgtatgaatgcacttttaataaactagaaatgacaagtgaggttaaaacaacagtgcattgcacattatgaaattttgttttgaatatgtctgtgttgtacacctcattctgagcaagcaagtcagaagacctggttcagggggtctccaaaatcattttacaatcaggagcctacaataaccag

SEQ ID NO: 13167 - DNA, 201 bp, Bos taurus
atgcactgtcttatttaaaaatcttgccatttggcacctaagctctcagacagaattcccacccaattgtaagcaggaaggatgccaacttaacagatgaacagaaagtgccaaggccaagagtccaggttcacatatcaaatgtgcttacttagggcaggattcccaggtataagtcttcaaccatgttcagaaaaactg

SEQ ID NO: 13168 - DNA, 201 bp, Bos taurus
ttggagtcaacagcaatttttaaagattttatgtatatttcatccctaaaatatattgtgaagatgcacttctagatcattcatcaacatctatttatcatatttgctttcatttactaacataagcatgtatgttagagttgacccaggaatcaaatggattcaataactgtatgtatcatacatcgaacctggactggc

SEQ ID NO: 13169 - DNA, 201 bp, Bos taurus
cacatgtgtaattccatgaacaatagccatactttttgtattacgttaggtgtttgctctgctttatccccatctatgccaatgcctggcctagtagtagttatgaaagaaatgttcaatgaaagaatgaatgtgcacttaaaaggtatgctttgacttactgtaaattaacctttgtttctgttaatattgttggcccta

SEQ ID NO: 13170 - DNA, 201 bp, Bos taurus
agaaagtgattttacatgaggtgatatgttctcaatacaaatgataggattacccaggcatccactaaatctcagagtaaataccatttcagtggacacatgggccaaatttgggagatggtgagggatagggaggcctggtgtgctacagcccatgaagtcacacagttggatgcaacttgacagctgaacaaaaacaac

SEQ ID NO: 13171 - DNA, 201 bp, Bos taurus
cttcctgatccagagatcgaacctgggtcctctgcactgcaagtgaactctttgccatctgagccacaaagaaaaatcaaattaagaaatgtaaactggtcaggtttggccaaggactaaaataaatgctgtttgccttgctagttaaccagatgattaaactgtggtcatttttgcacccactagtttgaaaattcatga

SEQ ID NO: 13172 - DNA, 201 bp, Bos taurus
tgatttctctgctctatctaaatactcaactcagagcctgaccttcagatgtttatcagagtacacattctcctggaaaatccacagtttgcttttctgcatattaagttttcatctaataccaagccaggcttcccaggtagtcctagtggtaaagaatccgtctgccagtgcaggagacacaagagatgtgggttctat

SEQ ID NO: 13173 - DNA, 201 bp, Bos taurus
tattgattgttttccatttaccccccctcacaccctacccaactgcacttaccatagagacaaaaatcaaagagtcaagcatttccatattttgactataatctaatgctccaattctgctttggtggcaagacataaagccatgtcagtatgacatgaagcaatatactgattttccatgctattttcaagtctgcaaaa

SEQ ID NO: 13174 - DNA, 201 bp, Bos taurus
gtgctgctctgtgaagattagaccagactggacacagtgaaagcaggagaatagttaggaagctaatggaagatatgagagagagattattcaaggccccctccctccagtacattagcctgagcaacttgaaggattaaatatggagtgagtggaagtcgctcagtcgtgtctgactctttgctaccccatggaattctc

SEQ ID NO: 13175 - DNA, 201 bp, Bos taurus
ctggagctttgccttttctgaagctgatatttctagtctgaaaacaaagcatttgagctttgggagaaattcaaaggttatatgaagctcacacaagtctgatgctagaatcttctctatcatccttctgccaaatataagccagccagtgttagagggaacataatacagggaatttcattttccatgagggaaacttga

SEQ ID NO: 13176 - DNA, 201 bp, Bos taurus
ctctgtgatccctatacaaggggcccaagttgattcctggtcagggaactagatcccacatgactcaactaaagcccccacaggctgcaacaaagattgaagatctgtgtgcctcaattaaggcccagcacatctaaatacatagaaaataagaaatgaacaagcaaataaattaatgcataaacaataaataaatattag

SEQ ID NO: 13177 - DNA, 201 bp, Bos taurus
actgatttaatatctgaagggtacaatattgtgtctaacatatatgatatggtgaaaaaatgctagcttatttcaatacagcttgtgatggcatcatgctgtttcatgaacacataatagatgagactcattttaaacatatatttaaataagcattcttaatattttttcacatatattggggctgattttaaaatatgc

SEQ ID NO: 13178 - DNA, 201 bp, Bos taurus
caggtgatgtctttattattaggtttatttgaaagaaaaaaataagttaaaatacaattactggatccatggatacgtgatagaaaagccaaacaaaaaaacaaaatatcagttattatttggcctatacaaatatattttatcctagtcttgtataggagtttaggcttcatagtttcgaaaaatgtttattataattga

SEQ ID NO: 13179 - DNA, 201 bp, Bos taurus
tggtataggtttatttaagttgttataagcactcagataaaagagggccaattctttaaaggtggagaacagtagggaaatattttcatgcgagatttgtgttaagcatgcgtgaatacttcccatatactcaggaaagtaaacgtgagtcccaggctctatacccaattgaagtgcccttcatatatggagatcacagac

SEQ ID NO: 13180 - DNA, 201 bp, Bos taurus
tagacaaggatatatttgaaacaaacatagggctttttcctgcaccttacctttcttgttaaatacttccaataattgacactaaaacgctttaaaaaaatatatagtagttcatagcagcaaatcttctaaatagactatcaacaaacatcacaaaaagtcaccccaaatttgaaaatatgacttacagtaatatgagta

SEQ ID NO: 13181 - DNA, 201 bp, Bos taurus
aaaagaatgaaacttcttttctcctttccactgtccacatatttattcatatatatgttagatgatttgattctttctttccactttcttagtcagcacagcttatctcctgtccattacatcaaatactcagctctacgatgtcactgttaaacttattttggaaaaatgcctaaaccctttagttgaaatattccacat

SEQ ID NO: 13182 - DNA, 201 bp, Bos taurus
gtgcattcatattcttgtctgaataaatattttgttccttttattgcaaagtagtattttactgactaagcttatcacaggttatccatttgcatgtacaaataaatctttaattttttctgatcattagtaaataactatatataagattttgtataaataatgtgcttagcataatttacataatgccattgatatttt

SEQ ID NO: 13183 - DNA, 201 bp, Bos taurus
atggtgttgccaggagctgtggggaggggataatggggagatgttggctcaagttacacgtatttggttatggaaaattaatacattctagagatgtagcggagaaggcaatggcaccccactccagtactgttgcttggaaaatcccatggagggaggagcctggtaggctgccatctatggggtcacacagagttggac

SEQ ID NO: 13184 - DNA, 201 bp, Bos taurus
acccaggataatctcccctttggttaactttaaaatctactgattagagaccttaattgcactttaaaagtactgtcaccttggccatattatgttactggtatggaagtgacttccaccatcttcacagtaccagtctatactaaaatgagaggagaggggttataggccatgtacaccaggacatgggagtcctagaga

SEQ ID NO: 13185 - DNA, 201 bp, Bos taurus
ctaccaggctcctccgtccgtgggagtttccaggcatgagtactggagtggggtgccattgccttctctgaaggccctcctagaaagggccaaaatagtagatattttaggttttgcaagccaggagaggtctgtctgccactgggactctgccatatcaaaagaaagcagccacacagaccataaagacaaatggacaca

SEQ ID NO: 13186 - DNA, 201 bp, Bos taurus
taccatcattcttcagtgtaataataaatatcctgaaaagttcaggtcccacttagctactaaagtccagaagatgaccagtcctctagggattgtcatgtggtggattgtgtccccactatttcaccccaccccccaaattcatatgtacttattcccagtactgcagaataagacagtttgggacataaagtcatgaaa

SEQ ID NO: 13187 - DNA, 201 bp, Bos taurus
catatctttgctattgggaatagtgctgttatgaatataagggtgtgtatatcattttgaattacagctttgtccagatatatgtccaggaatgagattaccggataatatggtaactctaatttcagtttttggagacatcttcatactgttctccatagtgggtgccctttttttctttttccctattggacacaggta

SEQ ID NO: 13188 - DNA, 201 bp, Bos taurus
cttgtgggcaagaaccatttttgccctgccatttatttatctttgtatccttcgtgggattagccatacacacttactaaaaatgaatgcacgcatgcacccataacgtatatatacaagtatttatagttgaaggcaatggcaccccactccagtactcttgtctggaaaatcccatggacggaagagcctggtaggctg

SEQ ID NO: 13189 - DNA, 201 bp, Bos taurus
taccgtaaactcctgcgcggagggcgttgtggtgttccagacggactatggtcaggtgagcagagagcctgcagcttcgtatcagctgtgttcgcttcctcggggggccctgagtgagggcacgtgtgttcattccccgctccccacccatcatgccctaggcatcttttctcagtgatgaaacagaatcctaaaaggaat

SEQ ID NO: 13190 - DNA, 201 bp, Bos taurus
tgacatccttctgcttaaaaagtattcttgaaactttccattctgcctacaaaaagttctcagaacttctaatatggtctcccaggccccatatcagtgccgtagttatttttcgttccctttttcaaattttcattatttataaggcttttttttttctttaacagcatcaactcattttgacttatctggccgtgcgtt

SEQ ID NO: 13191 - DNA, 201 bp, Bos taurus
tcctctaattctgatgtcttgggggaaatgattctctgtacatttacttgacactgaggaaatttaatagtcctcttgattaaagatatgataaccccaagaataacaccaaccagaacataatttaattaactcaatttagtgagtatttactacattcttgctgtttggataaaaaagcaaaacaccatctcagcgggg

SEQ ID NO: 13192 - DNA, 201 bp, Bos taurus
ccagcctagtggtctaaatcctttaacagttgcacagggcccggaagggccgatggttcccaaggatgccgcttcctcgtgttggaaaggaaccttgcagccggaggaggggcacagaccttcctaaacaggttgctggccgcacgcactctagggaaagcccgacgcaggctgtccactgcctcgtttgttgggagaaat

SEQ ID NO: 13193 - DNA, 201 bp, Bos taurus
acacctcatttgccctgactctgaaggagtgaggttgatcagcttatgttccttcttgttctaaattataattcatggcctcttccaagatgtcattgaacggattcttcccttgaagagggcacatgttttaaagggaagagaactataggaaatcaggctctgccctgaactagctgagaaaatagggatctccctttc

SEQ ID NO: 13194 - DNA, 201 bp, Bos taurus
ggcttttttcgaagagtagactggttccaggacagaatgaggggagaggaattaacttaacagtagagaagtctggcaaatgctgcctaagccttgtggctaagtttaacattatcagtgataagccatgttgctaatatgtgcccttgatatgatgtgatgagactaccttccttacctttgtagtcttccttctaaaat

SEQ ID NO: 13195 - DNA, 201 bp, Bos taurus
tcagagacttttctgacacctcagtctggaattacacaggggctgacagcaagagcattaaattctggttctctggttcttgcctctcctttctagggagaaaccctgaacagcttcagaccatttccaaatacacctgggcttacccaggggccattgcagtgggcttgaatacaccttggcagttagtagttgttccgc

SEQ ID NO: 13196 - DNA, 201 bp, Bos taurus
cagcctgattgcaagaagtttgtggtcttggggaggatgaagtcaaatatattggcaattcaattacagtaagttacctatacatgaatgagttccattccggagcatgttcgtaagtccaattttgtttgtaagtccaacaaagttaacctagttacccagctaacacaatcagctatatagcactgtgctgtagtatgt

SEQ ID NO: 13197 - DNA, 201 bp, Bos taurus
agagtctggctccttgtggctgccttgatcttgtgagggctggccagatgatctttgcctttctctaacctcaaaataattgtaaaacctttagaaatattgcccacagtttcttagatccttgactatacacatggctcttgaaagagcctgagtagaaaatttggccttttgtgtttgaagtacacactgtatgtcact

SEQ ID NO: 13198 - DNA, 201 bp, Bos taurus
cctcgtcagtgaggcggacgcagcgccgcaggtacaggtgggtcagctgcgtgcagtgggccgcgatggtgtgcaggccttcgtcttccagcacgaagcaatctgtcatgtccaggtagcggatggagatctgtttgccgtgcaagggggacagtttaatggaggcctcgcgggtcaagctgatgcaggtcaccttggagc

SEQ ID NO: 13199 - DNA, 201 bp, Bos taurus
tcatgatctgttttcaaggagagtggggttaactggtaggactttttcttctgggaaaagccaaaaaaaaaaagaaaacaaaacaatgaaacgaaaacaactgaaaccttaaaattgccctgtcagggataaaagtgcttgggaatgtgtattcctctgaatttcctgccctatcacaacgttctcagtttgcatctatac

SEQ ID NO: 13200 - DNA, 201 bp, Bos taurus
aatttaagctgcagagactttaatctttctctacttaaagatttgcatggatccagaacattccaaggcaagttagcaaactagtgttttatcacaacatgtccttaaaagttgaccacagccatgtcataggcgagacccaggcagactttggagccactatcaggaaaaagatttagcaactgatgaaggtcaagtttg

SEQ ID NO: 13201 - DNA, 201 bp, Bos taurus
gcccaaaagctagcctttgttaacttttctttgcttgacattcttcaacgatattttagtttcccaaactctctaagatccttctcacagcagggccttctggcagtttcccactatttttctctggctgagtcttgcccttcaagtgtcactcacatggtcctctctatggccctaagactaagttagggtcttctgtaa

SEQ ID NO: 13202 - DNA, 201 bp, Bos taurus
gtctcccttgcctgagcacgaagtctaacgttctttgcaagttctgaggtgcacctcttccccttcaacccccactttccacacaaggccaaaagcattcgtgtttccctcagcaagccctgtcctgcctccacacccttacctgtgctgtggcattcacctggagccctaacacgtacctgtccagctctgctgaattca

SEQ ID NO: 13203 - DNA, 201 bp, Bos taurus
ccaatccattttctgaatgccctaaagaaatcttcatagtacagtcaacaagttgtgtgctgtttgttcctggcccattgacaccacgtcaaggcttgagaaaaaaagaattaaactcttcaacccaaatctcctcttcattctgtcagggccacccaaagcaccgcactagcccagaaatggaaatgagcatcttgatca

SEQ ID NO: 13204 - DNA, 201 bp, Bos taurus
gaatcgaaggacgcagttggggagctgaatggcccaggagatgggctcctaccacctcagggcaggcagttaccatcctcaaggtgttctaatcacccagcgctctggccactgctcagtagccccttaccatgaagctccctaagactctgctgtcctgcagcggaaccacatgagaacggaggaggtggtgggaaggac

SEQ ID NO: 13205 - DNA, 201 bp, Bos taurus
ctaacaagctctcagtctttccagttgccaatcacatccctgacctcacccgacctctcatccctccatcccccaggcccagcctcttctctgtgagccccgagcagactctgctccatcactccaaagccccacccagagccctccccgcttctccttgccaccgtagaacccttcccgtcttctccagcacacatgggc

SEQ ID NO: 13206 - DNA, 201 bp, Bos taurus
gactcatggctaatcccctcagagtcatattctgaatgtataaaggctgccaaagttgggtttgtattcataatttctatccactgaatgaattacaatgactctgcacgatgtccccaaacatctgcatcttatggtgtttcgtattggcaggtgcaagcactttactcaatttctgtgcagatcaaacttaactctctg

SEQ ID NO: 13207 - DNA, 201 bp, Bos taurus
tgaggtcctgcacggcctccacggactcggcgtacacgtcgtccagcagctccttctgcagctcctccagccatgtccacagctgcggggacagcgccatgaggggccctgtcctgcggcccgggggaggggaccgcgggcagctgctcccagggagccggaagggaggcgggtggcgggggaggcaccccacacggctgg

SEQ ID NO: 13208 - DNA, 201 bp, Bos taurus
ggtgatactagctagctcgtggaacagcaagtggaagttcagacaaggcctctactttttttttttttttttttaagaaatatcttctatttgaggaattcggagggtctaggctactagcaggcctaaactgaaaactaatcatacaagacaaaaactaatgaagaacgtacaccattaagggggaaaaaacctcccagc

SEQ ID NO: 13209 - DNA, 201 bp, Bos taurus
ggaattctcagttactgcctggcctctgcagggctacgggaatgtctctggctggccactgtggtgggcacagtgtgggtggctgtctcaggccattctcgctccagccctgccctctcaccgttccttgaccacagcccattcccttcccacctccttcttcctactctgaggctgcctcttgccgggactccaggagag

SEQ ID NO: 13210 - DNA, 201 bp, Bos taurus
gtagtagaattatgattcggttcccgtgggccaacatttccaccccaggagagttactgtgaatagtcagaattctttctttcttgacgcagcctcctggttgggccaatagcatgtgggatgtgggcaacccaccctcacccacctcatacccatcacgaagggagtgggcaacccaccctcacccacctcatacccatc

SEQ ID NO: 13211 - DNA, 201 bp, Bos taurus
aaatgacttcacttacgtcttgttccacttaccttggaagtcgactaagatggctttggcaaaagacagcaatttcatggggtcgatggtacctgaatgaggcagagattgcctcaataaatatcttgagtattattatttgtttatgacctgctctgttcaaaaacagattgtagccaaatgggttggttatatcctttt

SEQ ID NO: 13212 - DNA, 201 bp, Bos taurus
tggtcctattacaaactgtgaaacccaaattctgtagatctttctctaaggtggttttcagaagtcaaacaaatgacctacttttccctatgattgtacatgtaagaaaaatcttatgagaaaaagaaaaataataaaggtagtattaatcatatattttcatatagaatttagtggaaatttgaagatatttaaaaatta

SEQ ID NO: 13213 - DNA, 201 bp, Bos taurus
ccttctgcctctcatcctcttactatgttttcccatttttcatttgttttattaaggctttaagttttaaagtatgtttttccctagtttataacagtgtattttgtgggaattaaatccatgtccagtgtatctaaacacatttgttttaaatgtttaaatgcttaaggattgctcctgcatagtccagtgttaatgaat

SEQ ID NO: 13214 - DNA, 201 bp, Bos taurus
acctagagtccatggggtcgccaagagtcagacagaactgagctactaaacaacaaaaaacgacttggtacaaaatctgggttttcagactcttgtaaactaggcctgtgcagtgagtctcagaggtaaaatgttcttatttacccagggcatctaaaatataccttgcatcaggagaaagatacttgtctgctgttgtgt

SEQ ID NO: 13215 - DNA, 201 bp, Bos taurus
tttctcctagttctggaggccgcaaatccaagatcaaggcgccaccatggtcattcggggaccatcttccctgtctggtgcagacttcttattgtggccttgctctgtgtcagaggacccttttctacttttataaaggcatcaatctgtttacgatggctccacactcatgacctaattcccttccagaggccccatctc

SEQ ID NO: 13216 - DNA, 201 bp, Bos taurus
cactgtggagaagatggccaaaagtaacaaaatctgtctctagactaagtgattgtcttgtattctgtgcactgaatgcttaagaaatagaattgaggatctgcctccatcattggcctgtcttgagtatgtgacaactggagtgagtcattttttaacctgccctcctctagacaaaaagttattttccatgatgattat

SEQ ID NO: 13217 - DNA, 201 bp, Bos taurus
atcagggccccattaccagtaaagatttattttgtagctctgagttatataccagccatttaaaaagttcagaaattatcatgatgtaggtaagggtcacccatgtagtattatcactaaacttggtatccaacttaatggattcttacatcatcttaaactcccaagaaatatccccttctttattttatggaatactga

SEQ ID NO: 13218 - DNA, 201 bp, Bos taurus
gaagttttcacatatttattagacatttgttttgttttgttttgttttttcctgtgctgggtcatcattgctactcaagctttctctagttgcaaagagtagggctacccttcactgaggtgcttggtcttcccattgcagcggcttcccttgttgaggagcacaggctctgggtgtgagggccgcagtacttgcagcacg

SEQ ID NO: 13219 - DNA, 201 bp, Bos taurus
acttccctggtggcccagtggttaagacttggccttgcaatacagggaattcaggtttgttctctaattggggagctaagatcctaagatcccacatgcttatggccaaaaaactagaacataaacaacagaagctatactgtaacaaattcaataaagactttaaaaaaaaatgggtagcggaattacaaagtcacttac

SEQ ID NO: 13220 - DNA, 201 bp, Bos taurus
atccttgggttgggaagatcccctggaagagggaatggcaacccattccagtattcttgcctgagaaatctcaacaacagaggaggctggcagtcatctacgactgagtgtgcatacacaaggttttccacaaacaacaaggcttttatgtgtcattggcatgcacagttgtgggacaagaattttgctgtccttgatata

SEQ ID NO: 13221 - DNA, 201 bp, Bos taurus
ctgaactacaacaaaataacctataaactatagtgaccattttagcaatatagtaaaataggaaacagttgcatacttactcaagacatgtcaggccctgatcacttgatatagaaatcacctgatatgagctgatttctttaagcctcaagatgtctccatgtaggccctgagagtttaagtcacttgcccgaagtgtcc

SEQ ID NO: 13222 - DNA, 201 bp, Bos taurus
taggaaaatttagggttttatgaaagagatgaaatgggggggcattcttagctttccagaacagacttatcatagaatcaatttatatcatcaggtggcctattacactaaaattattaatcttcaatgcagtttcatcattgaatacaaatgaattaataatttcccttccaataaatatggttcatggcctatatgtag

SEQ ID NO: 13223 - DNA, 201 bp, Bos taurus
ggagcagaggccagtgagggggcaaggagggagggcacgttgagacctgggccttcctggccaggacacacaatcagaagatggaagagaagatgtccctgcagaaaggattttgtttgttttgcgaaagcctgcttttcaggattccttttatcagttaaaaggaaaagtacagtttacacacaatacttgtctgtgcac

SEQ ID NO: 13224 - DNA, 201 bp, Bos taurus
gaagacagcctggcctggtggggtccccccttcccctcagctgcaggacttcctgacgtatccgcaggatccctgcagaaggtccagagtatcaggctcctgaaggaggatgtcagcacaggaaggccacgaggggtgcggtccgtgggtccttgtcattggagcctatgctgcccttggacccagacacggtggacaccc

SEQ ID NO: 13225 - DNA, 201 bp, Bos taurus
ggaaggccagagaagtgtcagagtcaggagagagacaagggtagttcacgggctgacattggtcgaagaaaagctcatccgtgttgcagaaaggttgaattgaatggccaggccacagtagatctgggtttgcacatccctggagaacgaccactggtagtgatgtccaggtgtaatggcaccaggaagactgagctggtg

SEQ ID NO: 13226 - DNA, 201 bp, Bos taurus
acggccccaccatccacacaggctcgccaggaaatcaaggcgaaccttcattttttcagtgatcacctcgagaaccgctttggagttcttggagtgatccctgaccaggtggaggaatagacacatggctaatcctggaacgctagagcaaaagcattgaccacagggaaagatggaagggatgaaaacctgcctttcctc

SEQ ID NO: 13227 - DNA, 201 bp, Bos taurus
ctgaggcctccctcctttgtggtatgatgttgctgctcttccctaaatcaagagaggagacctctttctccacccctttggctctgactctgactctgatctcctggtttactctggccagtagaatacagcagaagtgactttgtgcagtgttggagctaggccttcagaggtgttgtaaattttgtgttcagtgtggtg

SEQ ID NO: 13228 - DNA, 201 bp, Bos taurus
ttgattacctctgtaaagaccctgtctctgaataaggtcacattctgagatactggttgctgggacctaacatatgacttggaaggggtgggccccactccacccataacaacaggggtctgtgtgctcttgagcagttcttaagttcttccaggcttaccttgcatctgccttgagccctgtgtctggactccatctatt

SEQ ID NO: 13229 - DNA, 201 bp, Bos taurus
ggaccttgttataactgatactgcaattaagggattctattaaccctcagcttcaagacaaagccttgactcttctgagatgagatgtctgcttggggccgccagggacgataacagcagtaaatctgtcagtggctgccaagtgtctgcaggggacacggttacccgaggtgcagctctgatgcacgacgggtctgccaa

SEQ ID NO: 13230 - DNA, 201 bp, Bos taurus
atggactatttcatggaattctccaggccagagtactggagtgggtagcctttcccttctccaggggatatagttgggtagacttagatacaaatatataagtacgttatgagatagcatagtattataatgctggtgctgctggtgctgctgctaaaccgctttagttgtgtctgactctgtgcgaccccatagacggca

SEQ ID NO: 13231 - DNA, 201 bp, Bos taurus
agggggtgaaacgttccctgtactttctgttcaattttgctgtgagtccaaaactgctctaaaaaagaaaatctatcaaaaactggccaacgtgcctcatttcccttctctggaaaacgtgactcttctcactgataggtacagtccgaccttgtgcctctctttattgagataagcagcccaggaaaggccaccacagcc

SEQ ID NO: 13232 - DNA, 201 bp, Bos taurus
agctgcacaggtctccctcctgctgtaggagacataagtgaccaatggcctgctttgttcactccccttattattcactcatcattataccaaggccatcatttctgcaggttgcagccagcagatgactgggcatggctggacaccaaagcacaaggcagactcctccaatgggcaactttggctcagggttgcccatgg

SEQ ID NO: 13233 - DNA, 201 bp, Bos taurus
aagccagttgagggaggagaggggaaggcagtggggctgcagcgatctgatggaggcgggaggcaagtccccttgccacaggagctgaaggcaaaccatgcaagcaccggctgtttgtcagctccagccacacccacccaagagccatgattctctcctcttgttcagaagtgtctctccttcccaggtgtcctcactcag

SEQ ID NO: 13234 - DNA, 201 bp, Bos taurus
gaaaatatacttaatctcactaatgatttttaaaatgtatattataatgagatgcagttttgcctttcaaaatggcatcatttaaaaacatttaaaaagactaacagcatcaagtgttagaccaaaggtaggaaagagatttcttcatgcatctgtagtgggagtacaaattagcatagtctttgaaaatataattcatat

SEQ ID NO: 13235 - DNA, 201 bp, Bos taurus
tgtagagtgatgtgggaagtaaggcaaagcatctatttgctcctcagtctcccacccagcacccattctctggtttccttccttgttttcctcgacaaacttgagcaccaagccagcttcccgtctgtgatcctctctgccctctggtcctgcttcccagtcttagcagagctgctttcagcttccaggccttgactcgtt

SEQ ID NO: 13236 - DNA, 201 bp, Bos taurus
agatggtgcaatgatcacatttcaagcttaggggcggggacgctcttgaggttgcctcctgagtttttctgagacaactcgagtggcctttgatggcttcattattctctgggataacaaggtgcctttcactcctcttatccatttccttccattgacctgagaagcagtcatttttatgtgattggagcataggagtgg

SEQ ID NO: 13237 - DNA, 201 bp, Bos taurus
ggcaaggatacaatgagcagcagtctctaaaccacagagttaatccttagggcaaagggactctcaccctcagccaaggggaagaggttcctggctggggaagcaggtgcaaatatgaccccaaccggtgttgcagggtcctgcacctctcattccaccccaactgactttggaaatagtgttcctgtgaacttggctgaa

SEQ ID NO: 13238 - DNA, 201 bp, Bos taurus
catacataatacttataacagttcataatcaatgaatgatcactggagatgtttcagatacatattccttaatgaactcaggataacatatatccacttcatacatcctccatctgtaaagactctcctaggaatggaaaactggaaaagtaatttctgtccaaatcttctgaaattagcagatcgatcagaggccttgaa

SEQ ID NO: 13239 - DNA, 201 bp, Bos taurus
cagtacatttcattgattcccaggcctccttgctcccatagccttcgtagcccgcggtcagtggtccccgtggggggaacccccgtgcgagcttgggggcgggtgcagatagaagttgggcctcaggcaagttgaccccagtgaccctgttgcttcttcccccaggaacggaggctggaccccctggacctcgtggtctcc

SEQ ID NO: 13240 - DNA, 201 bp, Bos taurus
gggacacttggcaatctgtggaggggatggtcgtgctcttggttcagggcagaggactctgtaagagaaagacaccagcagagagtgtaggctgtagggacggacttcatggggaccccatcttgaaggaggctgcttttctccacgaggcatttgctgagtgttgggatggcaaggaaaggtaagcagcaggactgcctc

SEQ ID NO: 13241 - DNA, 201 bp, Bos taurus
agaggctgcgccttaagcagccttggatacacctgctcaccaagccctctgcaggccagtctatcttctctggtccctgtgggccaatgcttttgcctttgtagtttgatgtcgtgacaactcacatctctaccactgcttatgaccaccatcaagacatattcatttgctgatacccaagtgtcattttggtcttatcaa

SEQ ID NO: 13242 - DNA, 201 bp, Bos taurus
gttttttttaggtcttggcacaagtaaatcacaagtcaagccctgcctctatcagttttctgtaacagagttggatcgacaggtcagagatgataaatagcagagcttgaggctaaatttgctagttggcttctcaatgttgcaatgtttctgttctcaaaggtaaaacactcctttactttttctatcttgcttaagatg

SEQ ID NO: 13243 - DNA, 201 bp, Bos taurus
cccaggggatgagaggttcctttctcacaagggaggtgggggtaggatgggggtaccaaggtcacctccatttgagtcctccacagggttattttgggcaggacaggcctcctgtcctgataaaaataaatttatattaaatttataaaaaataaatttttatttatttttagtctgatcttaactatgaaaccattcatt

SEQ ID NO: 13244 - DNA, 201 bp, Bos taurus
ggtttatatgtctgttcttatgctaataccccattgtcttgatggctatagctttatagtaagttttttaattggaaagtgtgagttctccaattttgttctttttcaagattgtttgtctattcagattcctttgcatttccaaataaattttagatatgcttgtcaatttctgcaaaaatgccagctggattgggtagg

SEQ ID NO: 13245 - DNA, 201 bp, Bos taurus
gcccatggacacagagctttctgatcaccactcccagcaatttcctcagcatccccgagctgtgaagggctcacactgggccattcttcctccctgtgccgtctttgtctacttttggtccctgtataacaatggtcacagttgaagccacattccttgaaaagcttcatcctggggcagcttggcctttctagaaagatt

SEQ ID NO: 13246 - DNA, 201 bp, Bos taurus
tctaatgatttgtaaacttcccccagcctgctgtgtgctgtgctgtttctccttgaaactgtcaccgttttatttacttgtgctggtgaatatactccctcgcaaagaatgaagctatcaattcagggttctgggcaagagatgaacttaatttctcatgtaaatataaacttggcagaaagatggcagctgttcccctag

SEQ ID NO: 13247 - DNA, 201 bp, Bos taurus
tcttactatctctttatagaaattggagacatttatttctcatcatgttctctccagggttattgcaaattttgacagtatcattaaagctactctgatctttctatttttatgtaattacttatttcatagactttagtgttctcagaactaaattttttcactattttttcaaccttttattatccatataaaggattt

SEQ ID NO: 13248 - DNA, 201 bp, Bos taurus
ccacgaatccagaacctatttttcacataatttctctaacacagtagcttcgtctccctgggagctggacaatggacatgaaggccaaaagttgggcaaacgattggtgctgattcatgtgaaaaagcagcaatggagagacgccttgtgaccacgaagaggagcgtcaccctctgtgtggcccccacaagcattaaaaat

SEQ ID NO: 13249 - DNA, 201 bp, Bos taurus
ataaaatagttttgggtcaatctagggccaaatctgtgggtccactaactttgactttcagatttgtcatgtctgaaagcatccagattagtcatgtgtggaaacattgcccgtttgttgaatgttaactcccaggatggaaaccgtgggctgcagagttagagaatcctgggtttagcaactgacttggcaatttcccag

SEQ ID NO: 13250 - DNA, 201 bp, Bos taurus
gaagtgctccgtatctggtataagtgtttccatcatcactcaaagttttgctggacggcactgcctagagagtcagaggccttctcttttcacactgttgcgtcaaggacaatcagcccaaagaggacagtgttcctgggcttcacacggtcaggtctcactcccctccttcatgagctccttttacagggaaggccgggg

SEQ ID NO: 13251 - DNA, 201 bp, Bos taurus
acgtgactcgttatagctacatcctttggattggagtgtgttgtgaatttttctctttagagtaatacaggctcatagttctttatgcacagacatgattaaaatgtcttgtaagtacagtttcaaggtgttgccataatttccccaacacacagagaaaccttcaagttcagcggggatttcataaagaaagggtcacta

SEQ ID NO: 13252 - DNA, 201 bp, Bos taurus
tgcctggaaaataccatggacagaggagtctggcgggccacagtccatggggttgctaagaatcagacacaaataagcacgcatgctcgcactatgagctacagaagacaatgggccgtccaaggaagaatcaacagaaataacagaaaatagaataagtatcataagattcgcaaatcaatctgaaatagtttataaaat

SEQ ID NO: 13253 - DNA, 201 bp, Bos taurus
agtcagcgtgcttgttacacagtgtagggaggccgaaatgctttgagcagatgaaaatcaatatgccctttgacaagtcactgttcccttttacaaaaccatcaaggcctttcgttgcattcctatattgttgtctcattttataaaccctggctatattaaattctatttaaatttaaacacttttgaccaaaaaggggc

SEQ ID NO: 13254 - DNA, 201 bp, Bos taurus
cacctacagaatcccatggagagaggagctcgcaggcttctctgtccatgggatagcaagggtagggtacaacttagcaactaaaccaagccagttacattgatgtcagaaacacatacatgtgtattaagtgcgaatctgatgaaggtaaaattgttttatggttggatagtatcaccaactcaatggagatgagtttca

SEQ ID NO: 13255 - DNA, 201 bp, Bos taurus
ggaccagaccaccacgtccccagggtcctgggccagcgttcactcctctgtccccatcttcctgttctcactgtccctgctgggaagggtgatcctgtacacagaggcctgatttacagatacaatgggccatcaacagtggggctagttcacccttaggctttgaaaagacctgttcttctcatgatgctttcactgtcc

SEQ ID NO: 13256 - DNA, 201 bp, Bos taurus
agccacggaggccacactctcaggctggggtcagatggcaagagacgtgacgctgaagaagcaggcagcccacagcctgcctccctgacttccaggtgaggaaggcagtctgagacaggagggccattctctgctctgtcctggggtggctggttgatcattcccgactgatgaggatgcccagagcggggaaactctgcc

SEQ ID NO: 13257 - DNA, 201 bp, Bos taurus
tcagagagaaattataaagctttctgcaggaatgaactacagaacggagggacggaattccttagccaataagtagctatcatggaacctgggcccctgcattggtgatggactatctgcccattgtcatcccttgcctgatcttctctccttgagggtttgactttgcatcccttcccgtgaagaactgaagtccttccc

SEQ ID NO: 13258 - DNA, 201 bp, Bos taurus
attatgactatgaaacatgctgattaccaatccatattcatttgaaaacctagaagcagaagcaaaaactaccatgtgtgatgggaagatggacttgcctgctcttcggtttttagttttcaatctctcgtctattaatatgataattgcctttaatgactttgttctcctcagtgtaatcagacaggaaactttagatgg

SEQ ID NO: 13259 - DNA, 201 bp, Bos taurus
tcatggggtcgcaaagagtcggacacgactgagccactgaactgaactgaacatgtatcaattcaatagtcataaaaatatgacatatttgcgttgccatagtaagtaggccctttagtcttaaaaagaaaaaaactttatttcagactcacagacactctgaaggtggcagggtctccacaggttgtcaggaggctgact

SEQ ID NO: 13260 - DNA, 201 bp, Bos taurus
ttttctagcatttagtataaagcaaagaagagaatactgtgataattacagctgaaccagttcacattgacttgattttatcagaaaacaaacaaacaaataaagagcctatcaaattgactttgtttacagagaagattaaattcagtttttttctttttaaaatttttaattggaggataattgctttacagtgttgtg

SEQ ID NO: 13261 - DNA, 201 bp, Bos taurus
cagtctcagtctctggctgggaacccaagccctgcttcaggctgctgcaggccagggccaccagagatcagacttcctatagaattctctttatcctgctctggatgaaccagctgagccaatacatcctccttgctctgatatgatgctggtgatttgacccacttcttgccaaatccagggcagatttgcttttccacc

SEQ ID NO: 13262 - DNA, 201 bp, Bos taurus
gaccttggggccaggccaggagtggtctgcatcactgccatcctcaagcccttggcgggactcaggactgggctccaaccactggaaaggaaacagaaacagtctcctgcgtggccaagaagaagaaaggaagcaggttttccttttcagcaagcatgctctctctgttaggggtcttaactcttctgtgtctgcgcacca

SEQ ID NO: 13263 - DNA, 201 bp, Bos taurus
ttacgttttggtttttggccgtgaggtatgtgggatcctagcaccccaaccagggaccaaattcacactccctgcactggaatgggaagtgttagccactgggccaccagggaagcccatccatatgcatttttaaaggaattgttggactttccgatcacagaggtggagaggaggtgatggaagatcaactttccacac

SEQ ID NO: 13264 - DNA, 201 bp, Bos taurus
taaatatacccatgtctattaatgacattaactgtaaattcatagaaactggctgatattgcatttatatcatacagaatcagtagttgaagtatttataaaagaaaattgattagctccggtgactatttactcccaagttttgtcacatgcaggggcttccctggtagctcagttggtaaagaatccactgcaatgcag

SEQ ID NO: 13265 - DNA, 201 bp, Bos taurus
agtgcccttataagaagagacacaacagaggtgagctctctctctctatcaccctctgccatttgaaggcacaagaggagaaggccatctgcaacagggacgtggagctccacccaagaggatgtggggcgggcagcactgcagaagaaaaggctcctctcctttggggcaactctgaattcaaggcaagcccacactagg

SEQ ID NO: 13266 - DNA, 201 bp, Bos taurus
tggggtcacaagagtcggacacgactgagcgacgaaaccaccaccagtccttccaactggggcagtgcagctggcgaggggccggaataggaagagggcacctaaacataccatttcaggtcgtcctgggtttcccattcaggctgggaacacactgctgagggccccagcgagcaggtataattattccagctcacagca

SEQ ID NO: 13267 - DNA, 201 bp, Bos taurus
cattttccaggtcagatgggcttcactcggtacctcgactaacggaaatttaactggaaattgtctcaggtgaaaaaatgtaattatgagaggataaaatcaacagtccccatggccgaccccccggtgactgcttggccacctccacattacgtttaaggatgtattttcctctgtgtgtgcaagtaaacacacatatgc

SEQ ID NO: 13268 - DNA, 201 bp, Bos taurus
aaagtcagaatgagggcttctacctacctacctcagttgcagggaaggtcctgcccccatgagcaaaaggtcaaggcttggaagcaggtgctaaaagttcggggcagaaagtctgcataggaccaaccgtgggccatgaaccatgagccagctcagagcgcagtgaccttggtgacatccccgtctcctgccccggggccg

SEQ ID NO: 13269 - DNA, 201 bp, Bos taurus
cggttgatataccagccctaaatgattttctcctttaccctcaatcagtcccttctaggatacctaccggactttttgggcctttgcccccacaaactttcggtcttttacttggccgatctagtttgatttctaaaggaattactgttcaccctggaataattgattcagactataaaggaacaattcaaattatgatgt

SEQ ID NO: 13270 - DNA, 201 bp, Bos taurus
ccagtgttcttgcctggagaatttcagggatggcggagcctgctgggccgccgtctatggggtcacacagagtcagacacgactgaagcgacttagcagcggcagcaaaagatggctgaaggggccttccctggaagtccaattgttaagacttcaccttccactgcagggggcatgggttcaatccctgggtaggggact

SEQ ID NO: 13271 - DNA, 201 bp, Bos taurus
tgtcccgagtcaaggctcctctcattctccaggccaccactacctcttccaggctcaggatcacaggagagggcaggaagtccctgaagctccaggcctcctttcccccaattcttgactgtcccatcaggggctcagaccctttcccatgatagcctccctgcctgcagtgggagatgttactgttggaaaagtactgta

SEQ ID NO: 13272 - DNA, 201 bp, Bos taurus
ctgctgaggatgaaggactgagatctgaggctgttgagaaccaagaggaacactgaaggaggaagaggctgcccgagttcggggccgtaaagctggagccacctttgtctactctgaggtgttgccttcgacctgggcagaactgggtgcaggggacaggccctttggaagctgaggagtctgcagctttgagtctctggg

SEQ ID NO: 13273 - DNA, 201 bp, Bos taurus
tgcagccacttacgacaacacacacaggtaggtgcaaggtcagggccctgcgtcatcagagctcgcctcccaagagctcagggaatgaaagcctggccagcactcacagcccccgtgtttcagtgattccaaagcgcatggaacccggacaggctgggatggtccctagggtcctcaggtaccgaaggggccgcaccccat

SEQ ID NO: 13274 - DNA, 201 bp, Bos taurus
cagggaggacacaggaaggatccgtgacactgcaggagcagcccttgggagcccaaagagtggaaaggtggccgggtacgtggccctgcgggtggcctccgtccccaagacagaaagtataccccactgggcacatcctgagaccactcctgccttaaccctacatctgcccccgggcccatctgaatgtcagctcttcac

SEQ ID NO: 13275 - DNA, 201 bp, Bos taurus
agtattgacctttaggcagtgagcagcaaggcctgagttcagtaatgtaaacctgcaccatttatttagccaggggtgatactcagaacatgtgggagagctgtggccacatgagtgaggggtgggcggctgatagctcagctcggagaggtaaggagccagcttctgttctgagtgcagcgttccctggggttctgagca

SEQ ID NO: 13276 - DNA, 201 bp, Bos taurus
ctggtttactggccccttggttcatgggatctcagctcccagaccagggatcaaacccacgccccctgcatcagacagattcttaaccactggacgaccaaagaaatgcctgcatggccctcattcttcatgtgtaaggcttagtttgtttttcattcagcctttaactctagttctccaaattgtagtcctcaggaagct

SEQ ID NO: 13277 - DNA, 201 bp, Bos taurus
tgtgagttactaaagggaggcctgggaagcctggcatgtccgtgtccatgctcacagttaagtcggagcaccataggatcaccctgagcagctgagtctccataggcctgtccccacaccacacatacaagcacgtgcacacacactgcaatgcacacacgctccaaagcacacatacacaccatggcatacacgtgtgag

SEQ ID NO: 13278 - DNA, 201 bp, Bos taurus
attcagttctcttcatctctgggtatagatatagctatatagaaacagggatttattttaagcaattgtctcatgtgattatgtggccaggaagtctgaaacccatggagcaggctgggagttcagggaagagctaacactgcaacctccaggctgagtcccgcagggccaccagctggaacgtaaggaagagtttctaag

SEQ ID NO: 13279 - DNA, 201 bp, Bos taurus
actttcccgttgagaaggggacacaagactaaaacaaaaggcctaacagaggagtcacacagggtgtgaaagccactgtgatgagcaggagtgcgtgcacggctgtggctctggcctcaggcctggctgtgagctggcagcactatccagctcgaggtttctcctggggcgtcagcttcctgagcataatgcagtcagcgc

SEQ ID NO: 13280 - DNA, 201 bp, Bos taurus
tgtcccctgggaccccctttgccctggtaaagcaataaagctgtattttctatttcacccaaatctctgtctccaagatttatttccgtgtcggggtgcaaaggtgagatttgacctcaacatccctgtggagttatgtggtcttcccttcctacccaaacatccacatgcagctggatgttcaaaatgctggaataggct

SEQ ID NO: 13281 - DNA, 201 bp, Bos taurus
agaatgcgatctgtctccaagctcccttcctttcaagcagcctttttcctacttttaaaaaatatttatttatttggccccacctggttttacttgtggcgctctggttcttttttttattttactttttaaattttggcacgtgggatatttagctttggcacgtggaacctagttccccaaccagggactgaccccagg

SEQ ID NO: 13282 - DNA, 201 bp, Bos taurus
acactctcaggatatcccacctggactttaatccaggacgtatgggatttgaagttgtctcaaacatgcttttagggccaccgtcgtttgcagtctcatgtggtgatgtgaggaaagagcagcggctgtcaatgcagttggagctttgtcgcttgccggccactcacctccagctgcgtggtctgatggctagcaggttgg

SEQ ID NO: 13283 - DNA, 201 bp, Bos taurus
ctcacagctgctctgtgtccctccctggtcattcctgaagccgagagggctcagcgcaccagctctcccacgaggcgggaagcagccgccccttggcttcatggccatttccaggtgcagctccttctgtcctttatggcgagattcaccagggacgggcccgtcctcacctgctctgctctcttgcctctctggaaatcc

SEQ ID NO: 13284 - DNA, 201 bp, Bos taurus
gctcaatctctggtcagggagctaaatcccacaggccacaactaaagaaccctgcacgctgcaatgaaggtcggggatcctgagcatctcaactaagaccagtgcggccaaataaacaaatatattttaaagttacttttcctttccattttcttattagccaagcaaatgagtatgctttacttctctgcacaaaaatca

SEQ ID NO: 13285 - DNA, 201 bp, Bos taurus
gtttctctgtaggctttattgggtcagatgcaagatttgatcagagggggaaaaattaatcctggagagaagcctcgctggattcaaggccctggggccctgcagggctctgccaggtgcatttggaaaggaagcccaaccttgaccatgaattagcaaagaagcagcatgaaggacaccaagcaagctcaaagacccagg

SEQ ID NO: 13286 - DNA, 201 bp, Bos taurus
cccaccaggctcctttgtccttgtaagggacaagaataccagagtgggttgccattttcttctccaggggatcttcctgacccagggatcaaaccctatgccttacatctcttgtactggtagggcctttctttaccactgcgtcacctaggaagcctaggatgtaagtgctacccacatttgggctaactgacttgggtg

SEQ ID NO: 13287 - DNA, 201 bp, Bos taurus
tcttctccaacaccacagttcaaaagcatcagttcatctaacaagggcaggatctaaatgctattgtcccaatacagctgctgggtacaggcagaagaggactcagggtgagaactgccatcaattctgctcatgctgcaacaggacagaattgttttatacatctccatgccttttattatttattgtttcctgtaagtg

SEQ ID NO: 13288 - DNA, 201 bp, Bos taurus
tgaggtatcttcccaagagcaggtgaggacaggtggtaactgtctctctgttgatgccaactcggcgttttccctctctgtcctggccgttcttcatacttcagcgaagacctcatgacacacacgttccaaccagccctggtggtaaatctcagctgccttgcccatcggccttccctcacacctgtggtggaaacagct

SEQ ID NO: 13289 - DNA, 201 bp, Bos taurus
tcatactcagtgaatcactttaacttccacaaagtctgccttactttatggacaggatctcagggtacagattatagaattagaaaaaagtcagatttgtggcttccatgctcactacagagtttctctttcatctttaaacttacatctggacaataatccctatactcaatgatctaggtgttctctagtgaagatttt

SEQ ID NO: 13290 - DNA, 201 bp, Bos taurus
ggctacaatccatagggtcacaaagagtcagacacgactgaagcaactgggcatgcacaccggcacagtgtcaggagactgggccaccacgtttgaagttcagttcagttcagtcactcagtcatgtccaactctttgcaaccccatggactgcagcacgccaggcctccctgtccctcaccaactcctggagttcactca

SEQ ID NO: 13291 - DNA, 201 bp, Bos taurus
tgaaattcaaagacataaaatgtatttctggaatgaagacttttgagtgtatgcgtgaaaaccaaccccctgagcgtctgccctcagaatgacaacatctcgccttcatttcaggagcctctgcttggggcaaacaggtctgttctgccgtcggcttgtattttcctcagcgacacaggaatgagcagtgggccactctga

SEQ ID NO: 13292 - DNA, 201 bp, Bos taurus
tattaccctcctattttatttctttcccatagtcttgatctccctttatatctgccgtgcgcttcactttactgtttttgcaatctatcatttcagctttaaaaaaaaaaagggggatatttcttattatctgatcttccctagatgtacttaactttgtgacactcgtatttctctgagtgacctttgtgatataactct

SEQ ID NO: 13293 - DNA, 201 bp, Bos taurus
ctgtacgctattcagataactttaattaaaccagcctccaagctcccatataaagtgatggcggctccaaagagaacggccagcatgttcgtgaacgactcagcctgagaggctgtcaacttcaagttagtgcctgttctgaaaaggagcagggccctatggtctacgcccctcatgtcctctgcccacttttgtctgtgg

SEQ ID NO: 13294 - DNA, 201 bp, Bos taurus
ttggccatgtttggagacattcttgtttggcccaatcagtgacagtcagtgagcaccactagtatctgtggggtaggagctagagatgctattaaacatcatacaataaacaggccacactacaatagggaactttcctgccccggatatcactagcaccaaaattgaggacacctggatttgggcctttagtgcctctgg

SEQ ID NO: 13295 - DNA, 201 bp, Bos taurus
gcccttgcagggctgtatgtggcacttcattcagggaagatctcactccagtagacaggagggcccacgccaaggccagtgtccgctttagctttaggagttctttgtagaccagaaactaggctaccaccaccttcagcttctgggacagaccaggaaaggcctcaggccctgggcgtcgctggtgaccactgcctggcc

SEQ ID NO: 13296 - DNA, 201 bp, Bos taurus
cggaagaccacagaacagccctgcaggacatgaagctggacaggaatatctgtgtaatctttgttggaaatacagttacgggccctcagtaaccgctgatacagtttggagcgatggggaaggaagggagaaaatgctagctgctgaattttacaacaggccagacatatcggaaggaggccatggtcctgaagccatgcg

SEQ ID NO: 13297 - DNA, 201 bp, Bos taurus
agactctgaggccctcagcgtctctgatcaccctcctcttcacctacgtgtggcctgggtccaagcccgagggcaccgcctgcccttgtgtctgacctgcatcttcttcccaacagtctccacggcccctgccgtctctcaggcttccttatctggacgactgcactgctcctcaaactcaacccactccactcgatctgg

SEQ ID NO: 13298 - DNA, 201 bp, Bos taurus
cgaataaactccatgtgttactgaagcctttctgtggccccaacgtgaagccaaggggaaacagtctctgagtgtctctggggcatctggtcacaacatggggaccgaggaggccgcaggaagcaaggatgaaagactgagagcaatttcaaattccaagagaaatcctttggctaagaataatgtaccttccgtgtcttt

SEQ ID NO: 13299 - DNA, 201 bp, Bos taurus
gaagcagccaacccaccctggaggttgtggggaggccctgtataaatttcctgctttgtctgcctgtaccccttttggggggcacaagtctccataccagagcctagcatcctcttctccagcacccctacagtctcctccatggatctagaggccaaaatgatcacacaaccgagactgggttttctgtcccttatttgt

SEQ ID NO: 13300 - DNA, 201 bp, Bos taurus
agcatctcgccctcacagtaagcaggcctggctccctggaccccctcttagaacccttgccaactcattcatcactgcttgtgttctggtgcagaaaaccaagctccagccttcgggagaggccgtgtcccgtgcagagaggacattgcgcttatgtgattcaacctgcctttctctgcaagccgacacctgaacttgtta

SEQ ID NO: 13301 - DNA, 201 bp, Bos taurus
cagcctcgaacggctcccagtctctgccaagacagctgggatgtcggcaggtcaatcaggaagcgagggagcccgccgcgacccccaggcccacatccccgagctctgtgcttactgccctcctgatggcaggcttctggcacactcagagctcacccagggcgtggggtgggctggggtgtggctggccagcccctgctt

SEQ ID NO: 13302 - DNA, 201 bp, Bos taurus
acaaaaccactgcagctgcctgtgagtcatggctggcccaacagagcatccagagctggtctatctcatagcaagtggtcagctgtcctgcacggggctgtctgccttagtccccgggcccacggatgtatactgggatcccatccatcccgctgcaagccagttctttgtttcagtcaaattcaatgtattaggttgttc

SEQ ID NO: 13303 - DNA, 201 bp, Bos taurus
tgacactgcccgccccatgcccacccaccagggccagctttggagcacagactgttttcccacctggatgaactgtcccagggcctccaaaggggtttccgatccctttactaagtacagataaaagttaaaccaagtcagaggttgttctttaatcattcatcccacttaaaacccaaagtgctttgctgagaccttcac

SEQ ID NO: 13304 - DNA, 201 bp, Bos taurus
aaaatctagggtctcatgatggcttgaatcctaaaatatttccattctaatatttgaaagtgtcaagaaaaaaataaccagtgtgcttcagtgaaatgaaagtcagtgtagatcttttccccatggtcttacagtacaattcagtggtgaatccacatgtgaagcctctttcccaccctgactccagggccagcagatcac

SEQ ID NO: 13305 - DNA, 201 bp, Bos taurus
actgcagaactcagggcctcctcctgcctgccccaccttgggtgttttccgtcccaggggaaacgtccatgcatccctgtttccatctgggagctcaggatgcagcccctcgggccctctggctttctgtatttccggtcccagatcacaggtagctgtttccagtacttacctcaccacgcctggactgaccagactatc

SEQ ID NO: 13306 - DNA, 201 bp, Bos taurus
ccatctgtgggtcttaacttcagaccttgtctgttggacaaagatgggtcccgaatctcactggcctctttgagagcctttgtttcctatctttaaatattaatacttgataataatctacaagttcatttattgttatgggaattaaatgagatgatgtatgtaaaaaacagcatttaagaaatgacagttatggataat

SEQ ID NO: 13307 - DNA, 201 bp, Bos taurus
gaatgggggaaggcggccagagaacaacttttgtctcctggcaaggatgcaaaattatctcacgggtgttagtgacggaaggacacagtgaaggaatcgcgttcctgaaattctgccacgtgggccaggacgggtggatgctctgggtgggtgcaagctggtcacctccacctgggggggtccctgtgcaggtgccctctt

SEQ ID NO: 13308 - DNA, 201 bp, Bos taurus
tgggcctttacagagcaagactgcctgcttctcattcggcagatcgggggtcatgacttaaaagatgtacaaaggtggacgaaagggcggggtcatccagcgaggcatgctaggggccgcgggtgacctgccaaccagcatcccagctcagtgtcctccagatgacggtcaccacctgggaaaggcagcctagctcagctg

SEQ ID NO: 13309 - DNA, 201 bp, Bos taurus
cgtggaccctcttttgctaaagcaccagctttgccacgtgcttttcaaagcctttaagacttctcagagtgctaccctgcccccttcctcaagattccgcggaggccgcaggaccccccgtgccggcccctcatcacacctgggccggcaggtgacccgccctgtctgggctctgacgaccccggggcgtccaccgccctt

SEQ ID NO: 13310 - DNA, 201 bp, Bos taurus
gtgaatatagaggttatttatgcaaaatggtcagtggtgagggtgggagaagtcacgtgaccttgcccttccagctgccacactgctgaatctacccgatatgaggcctcatatcgcatcgtatttttcagcccatttgccaatcacaatttcctcagctttccaaatactgcaggcagttcctaggcacccaaatgctgt

SEQ ID NO: 13311 - DNA, 201 bp, Bos taurus
cccaagacgtcttcctccagaaggcccggctggctcacccacgccgtctctgccgggtggagttaagcctgccccctgagcccccagtgtctctgggctccgctgtgtctaccaagggactagggctgtcccgggaatgcttgttgcgtgaccgtctgtgggccctgcaggggttgctgagagactgctggccgggtaccc

SEQ ID NO: 13312 - DNA, 201 bp, Bos taurus
agtccatggggctgcaaagagtcggatacaactgagcagctgaactgaactgaactgaggatgcttgggacagcgacgtctgaggtcccactcactggacccagagttgagggcctccaaagagaggctcacagggcaggggcgccaccccagacacctgaaggaatgcaggaggcaggagaggtgggggagtcaggaacg

SEQ ID NO: 13313 - DNA, 201 bp, Bos taurus
gtgtccttagaagaaccactgcaaccctctgaaatgcgagtcatgctgtcttccttttaccgaaggggaagcgaggcccagaggtgccaggcaccgtgtcataactgtgagagccgggaagtcaccctggaaccgggtctggcaggtgtgcagctcagcaggaacggagctggccccgttaagggagggtctgagcacctc

SEQ ID NO: 13314 - DNA, 201 bp, Bos taurus
ccaagacagaaagctgtttgcctcctgcagcaccagcctgccctttctgcacatatcctggtcactgtgtgcttgtggccccctccctgcagccccacagcgccagccatgcttcctaccatcctgggagtgtgtactgggagcgtgttcacaggccagggctatgagctccctcaaactactggaggactgggaaggtgg

SEQ ID NO: 13315 - DNA, 201 bp, Bos taurus
gagagagctccctgggggggcccgggccttgacttccaggccaataacctgcagccctccaaagtccagtgcgtctgagaggccttccctgaatctttaacgtgactggagaccccgcccttccctgtgtgtctaagcatgtatctgagccaagaccctggtgcgcgtgtcccactgggcctggcagcttgctgcgctcgg

SEQ ID NO: 13316 - DNA, 201 bp, Bos taurus
gctgccgtgacctccccctctgtccaccctggaggcaaggggatcatgagtggggtcatcctgatggaaggaccatctggaagctgagtggggccacagcagacacggggagaggcgtccaggagaggatggcaccggggtctctgttctaatctcgaggcaagaggcccctttctctgtctcatcccctgaggattcctg

SEQ ID NO: 13317 - DNA, 201 bp, Bos taurus
actggagtgggtagcctttcctttctccagtggatcttcccgaccaaggaatcgaactgaggtctcatgcattgcaggcggattctttaacaactgagctatgagggaagggccatcttcctgtgtgactgccctattctgcatccccgccaacaggcagtgatgccgtagaaataatttctcacggaaccagtggcagcc

SEQ ID NO: 13318 - DNA, 201 bp, Bos taurus
ctttggatgctgcttctcttgaagccaggaatagccctttgaacgttctgccaatttagacaaattctaacagctaaagaggccatagtcaaggtcattcagtcgtgtccaactctttgcgaccccatggactgtatagtccatggaattctccaggccagaatactgcagtgggtagcctttcccttctccaggggctct

SEQ ID NO: 13319 - DNA, 201 bp, Bos taurus
agcgcctgccccaccgcggccttcccttggacacccagggtcctcgccggatgtgggcgaggaagagatggcccgcacagaaggggagctgctggccagcagtcctctgggggcgcttgtcttctttttccttcctgtgtgtccgtctcacgtgtcaaagcaatggactctgtgatagaaaccggagggcaccatttctgg

SEQ ID NO: 13320 - DNA, 201 bp, Bos taurus
agctgagtcctgtcagaagctgcacaaataagagaataatagttacagtcgctcattgcctcatggctgaaaggctgcgcccctgctaaacacggcccctcgatctcatccggattgcagggttcagccgccttgtggtcgcacctgaagtgcagagagagggcagtgcagaggcaggggcctgcggctcttgacctcttg

SEQ ID NO: 13321 - DNA, 201 bp, Bos taurus
tttgaaggggctgagaagggacatcaggccaggcagccagcggtctctgtgccacggagctgaccgttcagtgatcatatggtggtcaagcagagcactgcgcaggccagggagctggccctgcacctgtaacgtgaggcagcagcattgatcaaagcacggggtggcttcacctgcaaaggaggagctgctggcaccccg

SEQ ID NO: 13322 - DNA, 201 bp, Bos taurus
tcagggactcttccccttgccctggaacacacctcgtcaccagtttgaggaatggttcttcctataatgaatatgtttatcaacccaggcctcagagtgcagggcggtgattgagtgcagaccggagcgtgacacgctatgagagcaggaataaccttcacgacacgagtaccacaggctcacaaagccccggtgctgcct

SEQ ID NO: 13323 - DNA, 201 bp, Bos taurus
tccctttctaggaagcacccaagcttctgaagctgtgggcatccgggagcatgaagtttcctctcccagggaggctgagcatccactcagccctcttaaccggccaagcctcttcacccaagtgcaccctaggcgagcaagcccatgctaaagatggtgatacagtctcagctcggtggaaggcttgccctggtcacgtgc

SEQ ID NO: 13324 - DNA, 201 bp, Bos taurus
tttaatttattgattcaatttctcatttattacagatttataaacatttgctctttcttttgagtcaattttggtgctgtgtgtgtttctagagatacgtccattttatttaggttatctaatttgtcagcataaaatcgttcatagtattcttacatttttgtctaagccaggtcttagttgcagcatgtggctcttaat

SEQ ID NO: 13325 - DNA, 201 bp, Bos taurus
cccagctgacgaagcccccagatccgaagtgacccgccgctgagccccagtccctcaccccgagtgaggagtgagtctggcctctagagctgagttgttgagcagaggctgatgccgagctggaggcggagggcccgagagcagccccccagcactcatgtgcggcggccttctagccacttcctgagcgtggagagcgtc

SEQ ID NO: 13326 - DNA, 201 bp, Bos taurus
agcagcagtgatggtcaggacgcagtgtccatctcctcattggagcagagaaggccggttccctgctgcactcctacagggatttcaaggccggaaaacctgatcatttcattaaactgacacaagagagttcacgaattcaaacaggctcatctgctccacagagcgactcactgatggtccttaaattataaggagctc

SEQ ID NO: 13327 - DNA, 201 bp, Bos taurus
atgtgtgggttggagaaagtagaaacaccgcagtgagctgggcgcccgggcatttcacggtcggatgcgtatggaaaactcttccaaagggatcaccgagtgaagcaaagaaggagagggtgtttgggggtggggtgaagccgcggtgaccccaggccccagagcaggaggggcccccaggcccacggcagagctcgtcca

SEQ ID NO: 13328 - DNA, 201 bp, Bos taurus
actcggaggggaggacccctctgaggccctccgctggcctctgctgttgtggtgtgagcagcgtttgtggggcctggggcctgcgttcctggcaggcatttccctgcaggggacattcccacagccatggtggctcctgagtctccgctgggaagacaggcccagctccggcgcagggtccccatcaggaaccgtgtcccc

SEQ ID NO: 13329 - DNA, 201 bp, Bos taurus
tgtgagtccagggtgtgtgatgcagggagcttggggggatcttgggcgtctgacacgggtcaggcagcacccgcaggacgccctccaggccccctcctccgacaggcagcaggctcacctgtctaaccttgtgatacatgcaagcaagctctccctcccgtccggtttcgggtgtctggggccgttgtggcggcctctgat

SEQ ID NO: 13330 - DNA, 201 bp, Bos taurus
ctatcaccatccgaagtgtggatgcagagtcagaaccctgagggcagccaggccatggagctcttgggccgtgtcggcctgacgggccgccggggccagcgtgtgggcagacgatgcgtctcagtgtctcccatgcagcagcaaaaaggcaaagtacattagagacttaagttccaggtggagccccagaggccctgggat

SEQ ID NO: 13331 - DNA, 201 bp, Bos taurus
accagccagtcggggtcacagtcacggccacggctccggccacgaccctacggtcccaggggaggcctgtgggcctggggagggattcttcttttgcctggaggttcacaaagtggaggaaacacccctcagatgcaagtgccctttgctttcgccctcccgccggcccctatgccagggtggggtgggggctctgctgct

SEQ ID NO: 13332 - DNA, 201 bp, Bos taurus
accccccatcccggccccgcttggacagtccttggcaccaaccgcctccgactctgctgagggacatggctctgtccccaaggcacctggggctcctctatctgccagcaggggcctgcgggtggcccagcccaccacccagcctgctcagacccaggcctggcctcctgccgaccccgggggcccccagcaggggaagat

SEQ ID NO: 13333 - DNA, 201 bp, Bos taurus
acagtgaccgccaaaacgcctacaagcaacacaccctggaaaggctgtggagagaaggggaccctccactactggtgggaacgcaactgacacagccgctgcggagggcagcacggaggccccttaacaacctaagacagggcccatatgacccagcaccccgcttctgggcaagtatcgagaaaaccaaaattcaagaga

SEQ ID NO: 13334 - DNA, 201 bp, Bos taurus
cgcgggcacgtttccgaggaaagcctctgcggaggacgttacaaagtgtccctgtggtggtggcggtgccgtttctaagagagtttcttctggcctgtttcgtctgttctgaaatgttaagtgggtaggatgagaatatgaacaaggattacggtctcacacgcgaagacacaccggcaggcatcttctcatggtttcctt

SEQ ID NO: 13335 - DNA, 201 bp, Bos taurus
ggagaatcacagcacacacagctgggaccgcgttcacgacagccctgggggagcaccaaccacgggacgagaggcagtgtggctggaaggcccgagcggacacctcaaggcgccccacaccagaagacagctggaagtgcattttctaatggcagcggtgaccacactacggagacgtgcacgtgagggccgtgtccaccc

SEQ ID NO: 13336 - DNA, 201 bp, Bos taurus
aatctaagtataaagaaaataaatgacaccatcgcccttttattttttcctggcttgggaaagaagcgttaatccaccttccttgcaggaatctgactttcatcattatggccgcccagaaaggtctagccttatcctcatatgatgaggaaacctagtctacaagggataaaacagtaacgtgctagtgacctcagaaca

SEQ ID NO: 13337 - DNA, 201 bp, Bos taurus
ttcttttcttttttttttcctaatcagctttaagtttagtggcttcaataaacaacattggtttcgttcaaaatctacacttaggaaaaggtggccaggaatgctgtcgctttgcagttcacacagcatcattttcatcttctgttcaataggagcaagtcacttatacttggcctatattctaccattttttacagaata

SEQ ID NO: 13338 - DNA, 201 bp, Bos taurus
gtggccactatagactcagcccctctgtgctcacattccctgtcctcaaagaaacatgcatggttcactacagagaaccttctgaaggcacttctgtatactggaaactggcaaaggccaaatgcgaagagaagacacagaaaaggaaactggcttctggggtgctccacaaattgccaaagctctgaaatccttgctatt

SEQ ID NO: 13339 - DNA, 201 bp, Bos taurus
ccggccgcctgccggcccgagaggtcgtgggagtatcggcacttctccccctccttgcacagcccatgaagataatacctgcagacgacttgctttgtccagctgccagtgctccggctctgcagccagctgggcccggcccctccccatgaggcttgggcaggcctcagacgtgacgggcggaacggggaggggcctgga

SEQ ID NO: 13340 - DNA, 201 bp, Bos taurus
aatattgtgaagcaatcaataaaaataaatattaaaacaaaacttgcaactttcatattgtgcatcactgatctgatctgatctgatctgataaaaggccaaaaagtggattagttcagttcagtcactcagtcgtgtccgactctttgcgaccccatgaatcacagcatgccaggcctccctgtccatcaccaactccag

SEQ ID NO: 13341 - DNA, 201 bp, Bos taurus
cccacaggttaatgtgggccaaaaactaggttttgtatggatgagcttcttctttcttgatataagccatgaaggaaaatattgggaataattctgctttccatcctcaagggccaatgggaattctaatatcagtaagcattttaatttttaatcagacatttgtattatggatccaaatagatggtgtattaaacattt

SEQ ID NO: 13342 - DNA, 201 bp, Bos taurus
ctcatgtcatttaagatgctattagctgaagacttctggaatgatttgatgaaacagctcagccatgtgacttacaatctgggtgttttccctccatgcaactatccacgggtcagcagcatctcaaggctgcatgtgcatggtggtagggaggctgatgacaggacctggaatcaacagcacctgggaaaacatgcttcc

SEQ ID NO: 13343 - DNA, 201 bp, Bos taurus
cgaccgcctctgtctctcaagccacagcatttctgaggttctgcctctctcatgtccagtccaagacaagctgcttccacctgccagggctcgagtgcaaagggaggccacgcttccctgaagagcaaataaaggagccagctgggaaggtgggggaaaggctcttgggatccctccgctggttctggaaactaccccagc

SEQ ID NO: 13344 - DNA, 201 bp, Bos taurus
ctgtgtggcccagggcagcaagggcatttgttgacctgtggcaagcaaggcagtgtctccaaatggctgtctgtttgacctgggtgagaggcatgagctcatgttggcccactggggtgtgttgctgggttatctgtgtgacttcctacatgatcagggggttgttggggctggtgcagcctgctggttgacagctaagcc

SEQ ID NO: 13345 - DNA, 201 bp, Bos taurus
agggcttatggatggtgcagcatctgtgtgaacagaagctcctctgtgtgactccagctattatccacgtggtaagcaatggagtgaaaattaaaacagtggaagaaggccatgttggtgtttgtgatctagtcttgcctcaggaggaaagccctctcatgctgatgtggcttctgtttgtagtcctccttctcagccacc

SEQ ID NO: 13346 - DNA, 201 bp, Bos taurus
ggagggactagctgtaggggaatctgggatttactctgatggcttgggccatgatcagcaaattttaattcaacttcctgttgatgggtggggctgtgtctcctgcctgtacttggtctgaggccaagctatggtaggggtaattgtggtaatggcaaagtcaagaagaaacaattagaaccagacatggaacaatgaaca

SEQ ID NO: 13347 - DNA, 201 bp, Bos taurus
tctcctgcattgcaggcagattcttaaccatcttagccaccagagggttatcctagtgctggggtcccagggctgagggcaggtgctggccccagctagcatgtgtctgcctgtctgcctgtgagactggagaggctctgtcccagctggagtcctgacattggctccagtgacgttggccactataagatcttctgtccc

SEQ ID NO: 13348 - DNA, 201 bp, Bos taurus
gtacttagaacaatgtggtatatagcaagtcttcaatgaatatttgtcaagaagaagaacaatatttctatttatagttgtaggagtgagcttagcaataactgtgtgatcgatgaagatgtgtcacatttaaaaaatagcagccagtcttataaagcagcttctgtttattatggcaggaagactagggtgccaggaaga

SEQ ID NO: 13349 - DNA, 201 bp, Bos taurus
gaaaagaaaaaaggaattggcaatggcagcagaagcagggtcataagaacagaaatggtagaaactctgattgatggactgagccacaaactcagtagggccacagaggggagtatgctgagcagttaccagtgtgatccagttcctccctcagattactaaaattgctattgagacaagcgttgtcaatgttctggatca

SEQ ID NO: 13350 - DNA, 201 bp, Bos taurus
tcaattttctatgtagagctaagccctttgtgctatcacccaggcatttttgtgccacgggcatctgagaagccagagactgcattactgagtattaaggtacttgcctaaggctagatgttcccataaatctagaaacaacctgaaactcccaatcccattaggctctttgcagcacaacagctggattcctgggactca

SEQ ID NO: 13351 - DNA, 201 bp, Bos taurus
ctttctgagctttgggattcacagttcccagctggctcacatcttccaggggtcatgggggcctgcatacttctttgggccaggggacagactcacagcccgtggtgtgtggattgggaatggaatgaggggtgctggtgggacatgagcagccctcctccctgtgaacatggccggagtggggccagcctcacagagcag

SEQ ID NO: 13352 - DNA, 201 bp, Bos taurus
gtcgttgtttacaagacgtaaggtatgaggccgtgagagagtggggcaggaagcctgactgaggcagtgttgttagttaatttctccacgtgtagaatacgaattgcctccctgtccataatctgtcagtctgtgcaaaatgggaaaaatagaattgcctttggaaggtgaatgaacacgatgaagacatgcacaatgcat

SEQ ID NO: 13353 - DNA, 201 bp, Bos taurus
tagttaacaaattgtatacacatgggcaaaaaagctttggttttatggaacagacactaaactagttacagctgaactaagtaagcagctctgtccatcaatggtgaagtcacaaagcctgagccatttcaaggagagggccttactctgaagagctcattcctttgcttcctgagcaaacagggttaccacagaatacga

SEQ ID NO: 13354 - DNA, 201 bp, Bos taurus
ctcacgtggccttttgagactgtgcacttggggacaggtgtagggaaagagagagagagaagcaagcatgttcctgtatctcttcctctccttatggtaacaccagtcctaaaggattagggccccatcctagtgacctcatataaccttaattacactcttgaaagacctatctctaaatatggtcacattggagattag

SEQ ID NO: 13355 - DNA, 201 bp, Bos taurus
ccttatcagtcatctgagaaacacaagttttgaacactgaactctagtgttttgtttttccattagatttgcagagattgaactctccacagcagggatgggggagcaggcatggggcacagcattattgtggacaggcataatctatgctaattgcttgattcatctcgagctgtccttgatgcatttcatgatgacttt

SEQ ID NO: 13356 - DNA, 201 bp, Bos taurus
cacagtttcattgagttacacaaggttgtgatccatattatcaacttggttaattttcattcattgtggctttctctgcctgtgagagattaaaactttccctccctaaggttggccatttcaggagatatttgcaagataaggtctttacttcctcaactcctctccctctctgttctataaaagaacttagtatccaga

SEQ ID NO: 13357 - DNA, 201 bp, Bos taurus
gggagttaattgcccagagtcctcccagggctcgggtgccgtccaggtggacggaggtgaggagcagctgtgctccgagggacttgggaaggccctcattgaccctttgtcctgcccctgagaggtttgccaagattttctgtagagctaagcctgggttcctgttggacgtgccaccaggagagtggggccttttcgtcc

SEQ ID NO: 13358 - DNA, 201 bp, Bos taurus
aaggctgctgcatagcccttggcatcagagttcccttcatcatcattccacaaatactctttaccttcctcttcattggatctcatttcctggagtacacgttgttctatttttgctttactctctctttttttatgaaacacatcctcccatagcttcctgaaataaaaaggaaatggaatttttctgttagatcgtctg

SEQ ID NO: 13359 - DNA, 201 bp, Bos taurus
aaagctgctaactctcacagtaacccaccattgagaaaccgaggcgctgggaacccagccagcatcagccagctggaaggtgttgggccagagtagggacgtggacctgccttaggattccctgggcaaaagtggacacttcttcagtgaggaaggggcagaagaaaagaagatgcacttctgaggccatttttttcctat

SEQ ID NO: 13360 - DNA, 201 bp, Bos taurus
gagggtcagctcgcaggcctgtctgccttctctccgtctctgcccccagctcattgctgggaacgcccccttggcaggcctcctcgctttctgccccttccggaaggtagtgaggtccacgcagaaaggtcagccttgtgtgtccagcacttctccgcctggaggcagagggctcaggagcaatctcttttcacccctgca

SEQ ID NO: 13361 - DNA, 201 bp, Bos taurus
tctttacatataataagtccattcagggtgtttttttttttccccttgggtaagtttttataattgtgtctctttaggagcttgttcattttatctatgttatctaattggttggcatgtgttgttcatagtattcctttataatcttttgtatttctataaggtgagtggtaatattccatcattcatacgtgagtcttt

SEQ ID NO: 13362 - DNA, 201 bp, Bos taurus
tggtgcgcttggaggcagaaggctgctcctcccgctcaggtcctacagcagtcaaggccatgcacagagtcctttcctgctgagttttccgtggcctttcttgtccctgtgttttaagttcagatgacactgaggagcctgttcacacccaaagcagtgcaggcaggagagtcagagctgtggggtgaggcctgggttcta

SEQ ID NO: 13363 - DNA, 201 bp, Bos taurus
agccaggtgtctccctaaagaccatgaggccgccacctccacggctctcccgagcgtgcatttccacacaggcgaggaagacaggcagcctttgctacacgtctctgaggcctggtgctttgtgttctggggtgctgtcgggttttcagctggccagcctggcttggccccggccccggcgggagaacgcgtgtctgcccg

SEQ ID NO: 13364 - DNA, 201 bp, Bos taurus
tgtggaactgttggcccttctcaagttagtagacttggaatcgatgggacttgactgtgatgtccaggcgtgtgatgtcatctcctgtcccacatgggcttcatgcagccgaggcccttcagcggaagtggtttctttctgtcaccgagagcaaagtcttagggaggccacttttcatccgcattcctcaccgaggtgttt

SEQ ID NO: 13365 - DNA, 201 bp, Bos taurus
caagtgaccagacactgtaaagggacagacatcttgggatggctgtctcccagtcatgctccattcccttaaagataaccattgaatgtatatatggattgtatatatgccctttgattattttgcctgcttgtgacacttatgtaaacagatgcacttggaatgcattcttgtgtcttgcttgttttactaaacatttat

SEQ ID NO: 13366 - DNA, 201 bp, Bos taurus
tctaggcattcttggcccctgtcctctaaatgccaggtcaattgttatggtgaccacaaactttctcccttcccctgaccatgtttccaaaatttcccacagtgaacaactgacgtgctaggccctatacataattccctatagatgtcaataataatttattatttttcccattcaataaacaatacatatccttttatc

SEQ ID NO: 13367 - DNA, 201 bp, Bos taurus
cgcccggctcctccttatcctgctctttccgtgctgtctggcccctcccccatcttggtctctgggctcaaagcttgatcgtcctttctgaatagttctcagactactgcccggcggggcctcaggaccgtcccctgctggctcccttggcaggcctggcctttccagagctgccggccttggtctgccccaccctgctct

SEQ ID NO: 13368 - DNA, 201 bp, Bos taurus
atccttttgctgagaaaaccacttgttcctgctttacccagctcactcttactcatattttcccagggctctgctcaaatatgggctcttctctgaggctctcccaggcccccagcacccgtgattgcaggatcttgatgcaccctggaaacccgactaccatcggtctcctgcttggatggtgaagatccgggaaaacag

SEQ ID NO: 13369 - DNA, 201 bp, Bos taurus
tgactccagaccctggggaaccttccctgtagaaagtcctcccaaccagaggggacagaaacatgcggactatatgagaaccaggctgcagccagttgctgtcctgcaccatccagcgtggggcagacccagtgtcccccgagcagagaggcacagagaacgggagacagagccaggggttggcgggggcggggggcacat

SEQ ID NO: 13370 - DNA, 201 bp, Bos taurus
caatattcctttattactggtgcctatatttgtaatccattccatgacaagtacaattatgtccccgtcatacactaactgaccacggctgaaggtgggcaggaggggagctctttacaaggtatatctatccttttcagggaaaaccaccaggaagcattcagagcaaaggaagtcctgctaaccattctctctctacgg

SEQ ID NO: 13371 - DNA, 201 bp, Bos taurus
tatccctacaataaaatataaatcagctctatgaaaagaaatgaactaccaagcatgcaactacatgaattaacctcaaaaacattaaactaagtgaaagcacccagacacaaaattctatattgtatgattccattcatatgaaattgctataaaaagcaaaacaagagaggcagaaagaaggtcagaaactgtgtcaga

SEQ ID NO: 13372 - DNA, 201 bp, Bos taurus
agaagtcacaattcggaagagaaactggtattttcataccagtatactaatattctccaagaaaaatcagttatgaaaggaaagactggaggtatacaacgagattgtcacccattcttgtggtttaaagaatatttaactcctagatacacatacttatttagatcttttaaagttactttccataatgcagaatatagt

SEQ ID NO: 13373 - DNA, 201 bp, Bos taurus
tccttgcatctactttcctgcagggattcccagctccatgtcttttttttagccaaagccctccagcggcctccatacataccctgtggtgtgtgtggccatggaagacctccctactgggcagagacgggagaggaaaggaagtggcacccttggactgcgacatgaccctgtcttgcacaaggatacggatgaagcagg

SEQ ID NO: 13374 - DNA, 201 bp, Bos taurus
tttttttttaatcacttaaggaatatgtgattagcacacacaattttctgttcacacttcctaataataatgaaagcttgtaaagcatttctacaccttaaacatcagtcagcataagtaagtaaacacactgacactggcgaagtaagatgctattcaaaataagccaagactagaaagcaaggattttactatatttaa

SEQ ID NO: 13375 - DNA, 201 bp, Bos taurus
agttctcgggcccctgcaccatcttcttttcccaagccctccagggggtttggatgcacgctcagggtcttgaattctgtccttcagcctgcaaaatgacgctggcctactgagcgcttgtctcagtctgctttccagcatccggtctgctgttccccttgttctcttccctgtctcccaggcggtacccctggggttccc

SEQ ID NO: 13376 - DNA, 201 bp, Bos taurus
aaacctcttgtcagcatcttctcatctctgaagccaggctggagaggcaggtggtgggtggtcaaaagacaggaaggagtagggggcccccctgcctcataagctgatggaatttgcatggagactgtgaacacataagcatccctgtttaccgcaaaaaacattggccagacgccgctgctgctgcttagctgagcagcc

SEQ ID NO: 13377 - DNA, 201 bp, Bos taurus
gtgcgtgcacagaccgtgtcggcccttgtgtgtcgccggggcggcagggggcctggggggcggcgtgcagaagtgcacttgattcctgatcacggcctgcgtttgaatttcgcacttgccccagatggagacattccttggagctgctcagtggggtttgtttgaaatgggccatagctcagtgtcacatgaccctggagc

SEQ ID NO: 13378 - DNA, 201 bp, Bos taurus
ggccagaggtcacgtccaaggtctgacccctgcagaaaggcagctctggatgtcttcagcatcctctgggttcctgtggcctgccttcagtcctgggtctcagtcctcactgagaagaccagaagccttgggtggacggctggacaccccttctgacagctcccagacgttttgttccccagcagaatccccatcacccaa

SEQ ID NO: 13379 - DNA, 201 bp, Bos taurus
gtttgtcctccagcaaatggtcccctttctctctctctctccccatcacaccctgtttttattcccccaaagtatttgatatgtgtttgtgcacagtggcgtgatgtaccgtggaagatctatggtcgcaatttgtgatccctttaagaggaattgttctgtctaggaacaggattttacctaatttaagctttaccgaaa

SEQ ID NO: 13380 - DNA, 201 bp, Bos taurus
aatcgcacagcatatatggcagctaaacaagctgtagagggtgcggacagacttcaaacgcccctgctatcgctgcccccagatcctagctcttacccccgagaagaaagagaaggctttgtgatgggcctgttttaaaagcccagaatacctggaaaggatggttaacaatcatgggcagctgctcttcaagctactgca

SEQ ID NO: 13381 - DNA, 201 bp, Bos taurus
gttctcaataaattcactctcttctgagatactgtgtgtctggagactctttttcaacccacacatggaccacaaaatttttgtggccggtatggggactcgtgggggtccaccccaactctctcatttccttttccttgaaccctctgcaaacaggcaagtggctgtggaagcaactgaggcactctggccagggctact

SEQ ID NO: 13382 - DNA, 201 bp, Bos taurus
aatgctgaccacgttgggtggaagggctcaagttcaggggcaaggcgggcctgagcttcctgcagctatatcaggtgaggccccctcttctgttatcattcgtgagacatttgagatgctatttcctcctgtctgcccccgtagggctccacatttgtcccccaaagtgacacctctttgaatgcaaagggaacagtctgt

SEQ ID NO: 13383 - DNA, 201 bp, Bos taurus
gaagccacaggtggggtgggatgtggacaggccctctggaacatgcctcctgcagcctggagctggatagtattttcctggacgtccagttcctggcgtccggcccatcactttgcttggaataggtacatagtttaccagtgagaagaatgtacatcgttgttgaaaaagatgtgcttgcttgtttccaatgcccccaca

SEQ ID NO: 13384 - DNA, 201 bp, Bos taurus
tataattgaaagccatattggtgattaaaaggattttatatatcagttttctgggtcaccaactaattattttcaatggccggtaataaaacacagcaccgtagctggctagactctgcaaactgtcagatgttaaattgtgtagaaaggactacagcagattacgtgaagttggctggcctttcccttgggaggtgatgt

SEQ ID NO: 13385 - DNA, 201 bp, Bos taurus
ggggtgagagcaggcacgtgagagacaaggaggccagaaaacacttcaaaaagctgcgccacaaatactgagcctgcgtgcagcaaccgctgaaggccacgtgcctagaacccgctccgcagcaagagaagccaaagcgatgaaggcgtgtgctgcaatgaagagtcactcctgcttatggcaactggagaaagtctgtgg

SEQ ID NO: 13386 - DNA, 201 bp, Bos taurus
atgccacctgggaagcccacaggtggcccctacagaagatttgtttctgcgctttggcattgtgcccttgaccttcttcatgtcttcacttggactaatccaggtcatcactgacggccaggtcatttttttagatttatgtggcaaaattgtccacttcaaataaatggaaaattttaaaaagtgggtaaagcaaataaa

SEQ ID NO: 13387 - DNA, 201 bp, Bos taurus
atgttgtgtttcatcttttaaaactgatgctaaacaatgctatagtgaacatccttttgcatacattttgcacaggcctctcatcactgttagcaatacagttgcttaatcaaaggatatgtatttttctaagactgggacctaatgacaagctggtccttagaaaacttgaaccggctttgtgacaggccacaaaactga

SEQ ID NO: 13388 - DNA, 201 bp, Bos taurus
cttgaaaacattatgctaagtgaaggaagccagacacaaaaggccacatcccgtgttacccatttccacgaaatgtccagaagaggcaaatccatagagatggaaagcaggttagtgatggccaagggagagggggaaaggaaagtgaggagtgactgtctgtctaatgggctcagggttgactttggaataatggaaata

SEQ ID NO: 13389 - DNA, 201 bp, Bos taurus
gtgtgtgcattcaaaacaaagagagggacagagactgagagagagagtgctctgatgacagagtgctcttcttataaggacactagccctagcagataagaggcccgccctttatgacctcattttaccatattagcttctgtagaggcttcataggcacatgcagccactctgggtattagggtttcagcatacagattt

SEQ ID NO: 13390 - DNA, 201 bp, Bos taurus
cgggacttatttagaatctgcttctataatctctctgaagagatcacacacacacacacacacaaaacccacaaaaacacctcttcttgctctaatctgcacactgttcatactctctcccttcctgacacagtttatttagccaccccaactgcagtgatttaatttcacatatatgtgaaccaaaattgctttgtttct

SEQ ID NO: 13391 - DNA, 201 bp, Bos taurus
catgcataacttcagctgatccgcacagataccatcctgtcaacagggggtgggacaaatatactggttgtcctaggcctgttttccctgtgtaattactggtaacactcctttcactctaaaagagagctccagtttgaatgacaaattatatgatctagttaactctaggtaactgcaacctaggtgggcctttcttta

SEQ ID NO: 13392 - DNA, 201 bp, Bos taurus
gtaaacattgtctgtagaatataaagccctgtataaatataatgtcatatcttatattttctgtcttctttccatccagttgcatagtgagaagttagggatggtcctaaaaaattcctatgatcaatgaaaggtgagccaaagcaggacacatgcagaagatttaaaatccagttagtgattctttaccccttttaatct

SEQ ID NO: 13393 - DNA, 201 bp, Bos taurus
gacagggagaaatgaagaagtccactatctcgtgaggaaagaaagatgagggcacagtcctaatggaagaaagacagaggaatccatctgaaaactacaggttttcaagcagacttcttcttcttcaaaagctgcagtaatggaataaccaatatatgcaagtgacagaaatctgagatgctaatgcctgggtagctgaaa

SEQ ID NO: 13394 - DNA, 201 bp, Bos taurus
tagaaaagacattattttgttgtaatagattttttgtccccctctttcttgctttcagccccctgcagtgagttttttaatgcctgtctattctgctatatcttttgtagtttcaacttcaataccttgaatttcactttttttcatcattctgggtgcacagatatcttcagggacagcagtttctccactctttgagct

SEQ ID NO: 13395 - DNA, 201 bp, Bos taurus
acaatataaagacatttcaggcagcagatttactgtagatgataattttcaacatttcccagaaaactgtgaccacaggccactctgattgatggggtcaagctctgacagagaatctgattggagttcctcttggctttgacaaggatgcctgcactcttccaaattagacgaggcctctgctccctgttggacacagtc

SEQ ID NO: 13396 - DNA, 201 bp, Bos taurus
ttatgagggtcagagtgcctatgccaaaagcgagcttggagagagggaaggctgatgaataagaaagagaattccagagaacaggatagatggggtagagggggaatgtagcatcatagcaaagaaattggaagctcccagagaaatctatagctatataatctgcacccaaggggggtgggggggtctatggaacactcc

SEQ ID NO: 13397 - DNA, 201 bp, Bos taurus
ttccatattatgactaaaaatttaatttacatctgttcctcagtagaagaaaagttcagtacatggacttaatcatgtacaaattaaaaaccacctctgattgaaaggattatgggtcattaaaggcagaaaggataccaaaattaaaagtgtttacggagaggaaaaaatggttacggtggcagagttcagcctatgcct

SEQ ID NO: 13398 - DNA, 201 bp, Bos taurus
ggtgctcagtcacgcaggctgctcatgtcattagaggagctaagttcctaggtgttaaagattagtacactcatttcaaattgcttagtccaagggagtcgaagggagacctgcattcacagtctaatcatgtataaacatccaaatgtgaattagcactcgattaagtacttcctttaatttttctagagttaaggaggc

SEQ ID NO: 13399 - DNA, 201 bp, Bos taurus
tatttttttttccactctgtctcacaaggaaacaaggggtgtgaccttcctcctttcctatttctatctactggaggccttgctaactttctttctccagtgcattttcaccatcttccatgtatttccaagggatgacaatcctggaaatgacctgccaaggagaggaagcagtttggaccagacctgtcaggcccagga

SEQ ID NO: 13400 - DNA, 201 bp, Bos taurus
tgatggatggagaagcctggtgtgctgcagtccatggagtcgcaaagagtcggacacaactgagtgactgaactaaactgaactgatacatgttttgatactgatacatgatactgaagacttgggaatagacatgtgcatctaaggagagagaatctggtcacagaggacgtatgaattactagaacttagagatccaca

SEQ ID NO: 13401 - DNA, 201 bp, Bos taurus
gtgggggtgatgaagataatgatgacctccttcaaagggtccacgcaggcagtactacactcgtgccctcttccctgagcaggccaccactaactcacgcttccaccagagactcccggacactcacacccaagtctgggtcagtctcttgtggggtcaattctcctttctccttggtcctggtgtgcacaagattctttt

SEQ ID NO: 13402 - DNA, 201 bp, Bos taurus
taaaatataattgctgtagatttgccaaagaagttccacaagctttattcaacagcttttgcatcatgttatatgcaggatactgagttaattttaaatcattattacctactctcactgtaacaaaatgggaaatgttgcaaattatgtaaatattttttttcttgaatttacaataactttttttttcacttcagactc

SEQ ID NO: 13403 - DNA, 201 bp, Bos taurus
tgctaattagcatctagagatatcatattatagatgcttctttaaaagctatcagccctccaactctgcgtagtgacatggtatctatcaatgtctcaaggtgcctgcaattctgacaaaaggcactttgaagaactggcacgcacctccatatttgcatttttgcatctcattatggacataattgcataccaacacagc

SEQ ID NO: 13404 - DNA, 201 bp, Bos taurus
acttcaggatttcttagtgtcaattattcattcttttattaaaaacaaaacatctgtttgtgttacatgccatgctgtatactggagtttaccggccaacgcccattgggggcatgaagtttattggcagagaatttaaattatgcagctactaagaaactttatttaactctgctggtttttttctgcacatgacaagga

SEQ ID NO: 13405 - DNA, 201 bp, Bos taurus
taaaatgcactagagcaacctgggaatgaatccgttctggttcacctgcagaggcctcatgtctggagaaagtgccgagtttacaggagatgtcatagatcaagactaggcaggtctctcgagtggccaccaccttcctgcatttctcagaaaaaacctgaaaccgtctcagttgttttctgttcatgtccttcaaggggg

SEQ ID NO: 13406 - DNA, 201 bp, Bos taurus
ccatctccctcagggctgctaggtaccaatgcagccatcaccttgtccatgggtcctatggtccaaagactgacaagttcctgagatagtctcctgcatggcagcatctatttaattgaagttgactgttgataagaagtaaaaggcattgtttaaaactttttttttttttgccttttgaggaaacagccttgacattag

SEQ ID NO: 13407 - DNA, 201 bp, Bos taurus
tcctccctttgatgtcttccctccctccttcaccttctctgctccctggaggcttatcttcctagacctgggtagcttcccttggcctgtctctttcagcagcatttggctccctctccactgtgtcccacttccagtgggctgcgtacctcaaccaaaggccacagctcctgttgggtggccctttcgcccaatgagagc

SEQ ID NO: 13408 - DNA, 201 bp, Bos taurus
tatgtatatagccatgcaacttgtgcccgttaggagaggaacgtgtgcatgattcaagggtggtaaatggcaaggaggaggccttcttgcagtgagcttggagatttctcttattttgctggagagtcttaccggaggggcattccagaacttgttaaactttcaaacgaggtggcccagtctgctagatatgcagtaggt

SEQ ID NO: 13409 - DNA, 201 bp, Bos taurus
atgactaagagaaacccatctgttggatgaggagtcagggaaggccttcctaggggattgacatttgagtcaagacaagaatgatacaaaagagctgtctccagatttctgtcgggccatcaggatgaggttcatcccctcctagagagggtccaaacaggaatttgtgttttgagaatatgaataaacacttacggaata

SEQ ID NO: 13410 - DNA, 201 bp, Bos taurus
cctccaagtctcttttacataactaaagattagataggatgtgaaacaaatatttcaatacattggatgaaagagtattgagtaaacaggaggaaggcccctcttgaatgtgagagattttcctctgctttcctcctctgggttttccttgtgtttcaatcagtttgagaatagagggggaggcaccagccagggcacgtt

SEQ ID NO: 13411 - DNA, 201 bp, Bos taurus
taggtatggggccccctcacaccttgctgaggctggggacccctgacattccatactagatcagggacccctgacatacgtttgaagagcctcacaaatccgccttctcaggcctcttcagttgtaagtatcttaatcctttatctaattgggtgatgatagattaagattggtctttccaccagcctgtcatctccatcc

SEQ ID NO: 13412 - DNA, 201 bp, Bos taurus
attagagcagggattgcaagagggaataatggcagagaactgggctgtcaggaatacaagaggtaatttctagctacttctttggaaaaatagatttctgttaccttcagaaatctgctctcagaatatgaagcaaatagcttcacaataaaatatatttttttcttagactattcaccactgagacccccattcttcact

SEQ ID NO: 13413 - DNA, 201 bp, Bos taurus
caatctggtttatgttttggcatgtggcaatcattggcttgatagccgagaaaccttcatttccagaactttatggcctgtgtttcaactgcagacccagccagagcccctcacctctcctgcgtgtttgatcttctaattgcctcaagacacagccacgggcttgctgtgcgatgctgcaggcctcagcctgagctgagg

SEQ ID NO: 13414 - DNA, 201 bp, Bos taurus
gggcaaaatattgggagttgatctgagatcttattccaatacagtttggtccaattttattttctaaagaggtttggaggaatttccaatgagtatccacggaagggtgagcaaaaaatcttctactgtgagtccatcattcattccaacaatacttaaatgcatgacttagttaaggtcatgttttgtaaagtgatgttt

SEQ ID NO: 13415 - DNA, 201 bp, Bos taurus
gggggaaggcagaccttgtgtgattgcattgggactcaagggcaaacctcactccctggctgtggccatgtgccaggcctctgtgcttgcaaagacagaacagccttttgaagtgctgcagatttaaaatagggaatcagttaacatctccctaagcagtcagtagtgggaacaaggagggtgtttgatcatggggagaat

SEQ ID NO: 13416 - DNA, 201 bp, Bos taurus
cttgtcttccatcccaaggtggaacttgcccttcacttcatggtagtgggaggcaggtgaggaatgaggattcgtagcctcggaagacttgtgacccacaaaagtgtgcaacacttagtgaaggcataaaatcaggtctttccattctcagagtcaacatccctcagccttagcttttttaaattttaaatgaatttatgg

SEQ ID NO: 13417 - DNA, 201 bp, Bos taurus
tctctttcaagtgattaaggcctccttcaccttcatcactcttacctttgaggagttccactataaaagttaaactcccatgtaaaaattaatttgcatcacattatccacactgtattcaggccaggctgtcctgagctgaacatgttaggaagaagctggaagatttattcattttatctgcaaaattctgaaaagagg

SEQ ID NO: 13418 - DNA, 201 bp, Bos taurus
gaccctcctggtcccccttcctcagttatacaatcagccttataacacctgttatctgcttggagcagccggggtctggcttaatgaccacctcttcctcttcccaccactctccaccttcaaaataaaaaggaatactaacactgatagaaatagtaaaaatgctgtcaatatagagcgccactaacagtgataatacat

SEQ ID NO: 13419 - DNA, 201 bp, Bos taurus
caaaatatctctcccagtggcccattagctgccttctttcttaaaatagcatacccttcagatacataccttcagggaatttatgcacctggccaaccacgttaagatatttttacactggtatagtctctgccaacagatattatttgttttccaaggatgccctcagatggactcttttaccaaatccaggccatgaat

SEQ ID NO: 13420 - DNA, 201 bp, Bos taurus
ttattatgaggattgcaacataacttcgtgaaatggacatcgctttcctctatgggtgaaatgccatatggttgaaaaaatattaagaactaatgtcatgctttgcccatcaactatgataaccatctcaaaatagtggtaactttttcattgtcgattgtgaatttggcaaggtaacttgatcttttgttcttccactgg

SEQ ID NO: 13421 - DNA, 201 bp, Bos taurus
tccacacccaatgcaagaccttcatgaagccctactgtgccttactgctttgacaggctccagtcaaatactcctgggcctttctagaggtctaaactttgtagaggtgtgtttcttccccagatcagcatctggtactctgtcagaatgccaggctctggccaattctgctttgactggtgtctctcctaacttttgaaa

SEQ ID NO: 13422 - DNA, 201 bp, Bos taurus
aatgtttataaaaatatttttattaataaaagagaatgaagatagagtatttgcattaatgtaaatacatttgaaaataaagacaaaaatgagccaaagattaagataaagaaaaaaaataatttttaaaaagataagctgattataaaagcagaattaatatcgatcctccccaccaaagctatagtttttttcttggag

SEQ ID NO: 13423 - DNA, 201 bp, Bos taurus
tttggcctcccctgcaatctggctcctctccagtgaaagataacccatcttcgtcaagggcattcccagagcccagctagtctcatccggtgcaccttgcaggccgttgttatgtagaacaggctcccactgtattgagccaaagagctgcctgctcaggctcctggcagagtattcacctgggaggtggtaagtcttcag

SEQ ID NO: 13424 - DNA, 201 bp, Bos taurus
cctttgctgcttgttcattcattcattaggggaaccagtccattgatttcaaggttcaggggtccattgtagtgaaggtcccttagagaattctgaaataaatgctggtttggattggataagcccaacctatgttttttatggataatttttaattattaaattaataattagtacctgcacacaggcttggagaaggaa

SEQ ID NO: 13425 - DNA, 201 bp, Bos taurus
tcaaaatgcacagatgtaagtgttaatctcatccaaaaacattcttacagaaacatccagaataatatttgaccacataggtgggcacgatggcccagtcagattgacacacgaaattaaccatcataggtggtattctccaaacccacctcctttccagaacatcagaatgtggccaaggttgggaacagggcccactga

SEQ ID NO: 13426 - DNA, 201 bp, Bos taurus
tatgttagactacatggcaagtgatttcagattgcagatgtcattaagtcactaatcagctggcctgaaatatggacattatcctagattatccaagaggggccaaaaaatttacaagagtgagtccctaagaataggagaaggacttggaaaacacatcaagaaaagatggcagagtgagaaaaacccttcccaatatcg

SEQ ID NO: 13427 - DNA, 201 bp, Bos taurus
agagcaattgggccatacacatacatgcatctattctcgccaaactcccttcccatccaggctgccacctaacattgagcagagctctctgtgctagacattgtgaccagcactattttaataggccgatctgaaaacaaacgtccattgtagtcatttgtaccaaagcaaattcaatctgaatcctgtgggcgacagaag

SEQ ID NO: 13428 - DNA, 201 bp, Bos taurus
tgcctgcacctaccattgcaagatttttctaacatgtgcctatctgaaattgtgaaaggggattgatccattattctcttagcatgatagcttcagagttgttttcttatttattggaaatggtactttaaacaatctaataataatgctttctttgtatttttgttgtaaatctcttcacccagtatctagccttaaaaa

SEQ ID NO: 13429 - DNA, 201 bp, Bos taurus
tgactttcaacataaatttcccacccctgttaacctcctaaagtcaccaactcagataatgattctcttcccttgattttcgccagatgggaaacaagaggtttccaagaaggtagaatattttcttcccaactccattgtcttttggatgtagaacaggtctgctcatgttccgagtctcaaagggaccctcaggaaaag

SEQ ID NO: 13430 - DNA, 201 bp, Bos taurus
atcttcccagcccagggatcaaacccacatatcttatgtctcctttattggcagatgggctctttaccactagtgctatctgggaggccatagaaatgatgttattgtgtctcaaaacagtaacttttttttactgggctatgtcctagaattgatcattcttggccaatttcccgtatatgataaatcctttccgtatgt

SEQ ID NO: 13431 - DNA, 201 bp, Bos taurus
actgcaaagtggaaaaagaggtcttgtcttcagatgtcccttcatttctctgacggttgaatccttgatgctgggacaaagtgagcaaaggaagagagccgcgaggccggaaaacctctccccagctgtgcttctccgaggcctcttcccttctgtaaacagcgccagatggagaataaggagactcttaaaaaggaacaa

SEQ ID NO: 13432 - DNA, 201 bp, Bos taurus
ctccatcttcagcagacctgaacccaacctgaaatctagggtcctagcagggctcagccaagctcaagttcatctaatgatccagcaatatactaagcaatgcagaaaagactagaattatgatatgcataatttctattatctttccttatatttactagtcgctcagttgtgtgtgactctttgcgaccccatggactt

SEQ ID NO: 13433 - DNA, 201 bp, Bos taurus
taaatgtcagctccaagagcctgaacaggggacatctaactgtcctctttagaatagggagaccaggaaccaggattcaagctcatctctctcatccaaataccatgctattaggctcacagactaagcttctctgactcctctaagcaggttgcagctctcctgggtcactcaagatgccatccaacaccacaggataag

SEQ ID NO: 13434 - DNA, 201 bp, Bos taurus
ttcatcagcaaggattacactgttacttctgcagaaagaaaaagataaaaacaaaaagatcatcagttcacaacaaaaaacaaaacagtacatgcacaaacagcagaggcatcaaggcctcacgatattcctcagcaagtcagggattttgagcctcaaatgtctctcctctcctctgcaatcgtctcctgcgtcagaaga

SEQ ID NO: 13435 - DNA, 201 bp, Bos taurus
agcagggcgttaggggtatttgttatggggaagaaggggcaactagtaagactaaaacgtagtgatgctgagacctccagggccctgatcctgttggaacgtgcccacaacttgccaacacagcagccaagacagtctaggacagaagacaaccgagattccctctttgatttccggtagtgctgagttaaggggtcaatt

SEQ ID NO: 13436 - DNA, 201 bp, Bos taurus
tgtccaaggtcagagtcggaatggaacatggagcttttgacttcagtccaaaaggcggccgttggcctgccaccttccatgctatgttggccccaggctaagaagggcagggctcagtgtccttcagagccggcgtccctgcccatcagaatgtgtcagggccctcccctccagcttctgaaacatcatttatcattcttg

SEQ ID NO: 13437 - DNA, 201 bp, Bos taurus
cagcaatacaaatgtgcccgagtggtccagacgcagcagagtctaagcctgaccagctggcagagggattaatgactaggaatgtagtctgggtctggccgtgtaagtcaacgctcctagcctgcgatgctggatggttttgtcagttgcttgttactgtcagtactcctgagaatgcacggggccatctgcccagaataa

SEQ ID NO: 13438 - DNA, 201 bp, Bos taurus
ctttgggccgtggtgatgggattgaactctctggagggatttccgagcacctgtttcatggccgggagggacgggaagcagacccacgccagcacggcctctccagggcagaaaggcaccagggtctgccaccaagtgctttttgagtttccctttctggagccaggttcaaaatcatttgggcctttttggaaataagtg

SEQ ID NO: 13439 - DNA, 201 bp, Bos taurus
ttgatccctggttgcgatcccccatgcaactaaagatccccaggacacagctaaaaaatcccacggctggggatcccacacgctgcaatgaagatcgaggatcctgaatgcaacagctggggcccaggacagccaaatatataaataaataagtgcttgtttttagaaaaagtcaagtcatcttgacttgagaggcacatg

SEQ ID NO: 13440 - DNA, 201 bp, Bos taurus
agtcctcaaaacgtcctcagactcgctcacaccttctcacggatttatccctcaatggaccacttctgctttcctctgcatcccaggctgcaccatttcccgtaccttggccttcatcccctttgcctcctccactttcttgctctatccccactgtggcccacaccttcaacgtcttctctcctgcctctgcccctttag

SEQ ID NO: 13441 - DNA, 201 bp, Bos taurus
ccccagcctctggcaagcagggctgtttctgggctcacttataatggaagctttcccaggacacagcctgcttcaggctcacgtccatatggctgggaaggggccacttcagcgacccggccgcagcactgcttatccacacagtgagcagaaggcttcaagcatcatcacagcctttcctgaactcacttcaccctagcc

SEQ ID NO: 13442 - DNA, 201 bp, Bos taurus
ccgcaaagagtcggacacgactgagcgacttcactttcactttcagagccaggaaggaaaagttatttgatggcacagttgagaggcaaaaatgtgtcttggatatgtaggctcccacctgggggagtgctagagttttaggagcccaagcatttgttcaccagctgcctgctttgtgaactggttatgtgacagtcacca

SEQ ID NO: 13443 - DNA, 201 bp, Bos taurus
ccacattttaaatcatacactaaagtgcagctcagaatagaccctacctctctcctgcatgtgcagccaggacattccttatgaagtgttctgagcagcccgggccaaggtgctatatttcaatgccaatgcctttttttttttaatggccccaagattttttttttttttcctgattggagttaaatgtttttccatgtg

SEQ ID NO: 13444 - DNA, 201 bp, Bos taurus
gctaccctgagttcaaaccctggcacttggcagagcagccctgaggctgcctttgttatcacaccctcaccagcagttcaaacctaatgaatcttctacagatgcttttcggaattctgctggggtcgtgggtaatgcaattaggagataaagaagttgactggaatgagacgaactcaaagatcacgtttcagacaaatc

SEQ ID NO: 13445 - DNA, 201 bp, Bos taurus
ctgtcttgtttgtactggcaccaagcagcaaatcacctctgcagcgcagcccagcaactccagacccagctgggctctgaacggctgaagctgccaggcccgcccgggatgcccagatgagaacaggcattgtttggtaccagctgctgtggggccccccgtccacacaggctgtaccatggcactcaatggggtgggtcc

SEQ ID NO: 13446 - DNA, 201 bp, Bos taurus
aaaagaaaatttacctatttttaaaaatatatatatactatatttctcaacccaaattgcatcgtttaatgggaaacctcgagcaaactggtgtttcttacgcactctgttctagatcaaaagcatacaatgaaacccaggctgcggctgaaaccaggctccatcctgccgaagttcttttgaataagagatcatatataa

SEQ ID NO: 13447 - DNA, 201 bp, Bos taurus
tagctaaaaatggggtcttcagacccagtgaaaagtgatccccttgtccttttcaattgcccagtggctttcagagatagaggttaaatgtggccagagcctaaaacatttcttttgaataacttgtgcagtggtaaattttgtcctttaagtctggcttttttgggaaacagcctgaagtcatttagaacaaatctggta

SEQ ID NO: 13448 - DNA, 201 bp, Bos taurus
tagagtatcactatattgcttttgttctcattgttgtggtaaccagggctcccctctttcctcttcatctctaattttagttgtcacggaatttgaggttgttctgtatcttaaagaaagacagcttcttgagtggaagaatcatagaacatgttatgggttcaggcctgacagagagagcttccacaaaaatttataaat

SEQ ID NO: 13449 - DNA, 201 bp, Bos taurus
gtgctcaaggttgtgatgctatttgatgtccattcaccagtgccattcttcaagttggctttattcatatctcaaataagggatggtaggaagctaatgagccagtggccccagagaagtagctcttcattatacatgattaagatgggaaaatgtacatcataaacaagatgcgttctgttttttcatttgcttttaccc

SEQ ID NO: 13450 - DNA, 201 bp, Bos taurus
aaggaaatgtactaaaaaatgtaaagtctacaaggagtcagagcccaagataatattagtaatgactgataatcattcaagatgatattgataaaaccccgacagcatatgaaagagagactgaatgagcagctcagaatttttcaggacattaaatcaagggaattttccagtctctgcttctgacaaagagatttagaa

SEQ ID NO: 13451 - DNA, 201 bp, Bos taurus
acactaaaaacaaatacacaagcaacagctgtcctgggtgaaatattccccaagtacttggactgggagaagaggaaaaattattgttgatacaaactgagtgatctgagttaggaagaagtcccctgcagaaggaaatggcatcccactccaatattcgtgccaggaaaatcccatggacagagaagtctggtgggctac

SEQ ID NO: 13452 - DNA, 201 bp, Bos taurus
ctcttggacactactccaggaggagactcctgaagtacttctgcgtggttttctttatacttatgcatgtctcggtccatcagctgacaggaacagcgttatgcatgcctttttgtaacggttttccaaggccacactaaaagaagggaagaaaagggggcgtttaaaaaaaagtgagattgtatctacaagtaaaataaa

SEQ ID NO: 13453 - DNA, 201 bp, Bos taurus
tactttggccacctgatgtgaagagtcaacttattggataagaccctgatgctgggaaagactgaaggcagggggataaggggatgacagaggataaagtagttggattgcatcaaactcaagggccattagtttgagcaaaccccaggagacagtgaaggacagggaagcctggtgtgctgcagtccatgggactgcaaa

SEQ ID NO: 13454 - DNA, 201 bp, Bos taurus
cataatatctaatttcatttgcatgattacttgtaaaattgaacttcttctcacacatttattgaccatttggtttccatcttccactgactgtggatccgtatgcttcatcctttctacttcttgggcaaccatcataaaagtctgtttccaataatccctgtatctgtttactttagaagaggataatccattgaaagc

SEQ ID NO: 13455 - DNA, 201 bp, Bos taurus
cgctgattctgtcggtcccacagcatgactcagccatgactcagtggcagacaccgagctgggcacagacatcacagaagttgataagccaccatcttcctgcatcaggtttcgggtctaaccagaacactgtggctgaagaggacacagctcaatctgctatgcctgagacatcaccatcatctcgacgagattaaaaag

SEQ ID NO: 13456 - DNA, 201 bp, Bos taurus
ctttttaacaactgagtaatattccattgtgcataggtaccacagctttcttatccattcgtctgtcactggacatctaggtagcttccatggcctagcccctggtctttgccacagcacacagactttctccagttgcagcgcacacagcctcctcttgtcgggatccacgggccctggagcatgagggctcagtggttg

SEQ ID NO: 13457 - DNA, 201 bp, Bos taurus
atggcaacctactccagtattcttgcctggagaatcccatggacagaggagcctagtggctacagtccacagggtcacaaagagtcagacacgactgagcatgcttgcacacacacgtacctgtggtaggtaatcgggtaaccaggaaagatgcgtgatcctcctctagagtgcagagtctgagggggaaatggctgccca

SEQ ID NO: 13458 - DNA, 201 bp, Bos taurus
ataggaaatcacattcttcaagtagaaacatctctaaccaaaataaggaaaggcaagagctctagtaatcagccttttttgtcttttatcaccactggggagctgtgccaggcagcacgtggaatcttccccagccagtgagtgaacccacgcaccctgctctgggagcacagtcaaacactggaccaccagggaagtcca

SEQ ID NO: 13459 - DNA, 201 bp, Bos taurus
ctgaagactcaggctattcaggtacttagctctgggttatctgctttcagagaaacatcgacagatgagttgtctgactgtccagttgatactcctgagcgctgcctgaaaccaggcgccccaggcagctccccaggcgattgacttcgggtggggttctggccacccgaacaaggctggcttctttcttgttttacttaa

SEQ ID NO: 13460 - DNA, 201 bp, Bos taurus
gctcagtcgcttcagtcgtgtctgactctttgccatcttatagaccgtgccctgccaggctctgtcagtggggtactggggcctcagtccagttcctgccaggtgacctgtggaagtgactttttccctgctgggtttccagatccagggctgctcaggagccttcccactggacgctaggcctcatcgcaaggtccttga

SEQ ID NO: 13461 - DNA, 201 bp, Bos taurus
cttttaaccagaagaccagggtgaagtgaagaattcccccttttccacccatctccctcgtgacgccagcttaggggccgagtagtgaatccgccactgatggcgttggcaaggcagtacaagcagatacaaacatctcgcaccagtctccttatttcaccaaccgaggcacagagaagtacgcttcaggtcacaggccag

SEQ ID NO: 13462 - DNA, 201 bp, Bos taurus
ttatgatagaatgttttgcccatgttttcttggagtcttaggatgtcatcttctattttggtctttaagccattttgtttctttttgcatatgaggtgttttgatttcgtgtgttagtacacgtagccgtccagctttcccaacaccaccgccattgcccatgttttcttggagtcttaggatgtcatgtcttttattttg

SEQ ID NO: 13463 - DNA, 201 bp, Bos taurus
gcaaggaaaccagaggtcggaaaactgatagcgtttgcctgatgttgttcagtacaaggtaggtcagacgcccaggatggatgacggaatgaaaagccccagagtttccctctaatgtgtactgagtgcctaggtcacatcttcagcgggctttctcttattctgtctgtctccttctctctcctgtgacgggctgaagaa

SEQ ID NO: 13464 - DNA, 201 bp, Bos taurus
tttttttttttaaattttggccattctgtgagggatcttggttccctaaccaaggtttgaacccctgccccctgcactggaagcatggagtctaaacaaccggaccaccagggagtccagcaatggactttttttatcttagcgattagacgaaacattaacagataggattttgctagcagaaaatgatatcttggctca

SEQ ID NO: 13465 - DNA, 201 bp, Bos taurus
gttcttttccttctcagccagagctccagtccctcagcctgggacctcagggggccctgggcttctgtgccctgcaaggccacggttgtgcaagcgctcttgggtctcttgttacccaggagccggcaacagaccaaaataaagttgagagggggaccggcggggagggccgagcgagcctctgtagggagtctgaccagg

SEQ ID NO: 13466 - DNA, 201 bp, Bos taurus
tgggaaacattttgggtccaaaatcattcaggaagcaaaggtatgttcgccaagatctggctgtgccaaaaatgaagatggccaggctgccctatgatttgtgcgtgtgcatgttaagtaacttcatttgtgttcatctgtttgcaaccctatggactgtagtccaccaggcccctcttccatgggatactccaggtagaa

SEQ ID NO: 13467 - DNA, 201 bp, Bos taurus
cagtgggctacaggccatagggtcacagagagtcaaacataactaagtgacttagcatgcacgcagatactgaaagcccctccaggtcgaagaagttaatgattggtgatgacaggtggcccacaagcatgtagaccccagactggttggacccgaaggctgctgatgctgactcctgcttacctcactgtcagcccatca

SEQ ID NO: 13468 - DNA, 201 bp, Bos taurus
ctacctgggacctcagaatgtgaccttatttggaaatggtctttgcagatataatgaactaattaagaatatttagattaactcatcctggacttaggacgggccctgactccaatgatgctgtccttatctatagaggagagggcaccaagagacacaaaccaaaaaccctcgtgaagacagagctggattttggggtta

SEQ ID NO: 13469 - DNA, 201 bp, Bos taurus
cagattaaaattatttccataaataaggataaagcaaacccacttccttgagtccattatttcaggtgattgtgatttccgtgaacattagtgttcctgaatattatttgaatatttgcttatgtacttgtgggaagcctccctggtggttcagatggtaaagaatttgcctgcaatgcaggagactcaggtttaatccct

SEQ ID NO: 13470 - DNA, 201 bp, Bos taurus
aacccaggccccctgcattgggagcacagagtcttaacaactggaccactgggaagtcccaataaagcaattattatcataatttctctacactaggttatgtgaagggggaaggcctgtgtcctcagcctgagaacaatgtaatggcgtctggcacttggaaggaatttactatatatttttgaatgaatgattattaaa

SEQ ID NO: 13471 - DNA, 201 bp, Bos taurus
ttctgtccagtctgatttacagttgagctaaatacatcattgaaaaaccactgtttatattttctgtagcttggaagatactagacaaagattaaaaatacataaacagctcatcaaggcttggaaaagtttcagttatgcaggatgaataatttcttgaaatctgttgtacggcatagggcttacagttaacaatattat

SEQ ID NO: 13472 - DNA, 201 bp, Bos taurus
gtaggcatcgggagttggtgatggacagggaggcctggcatgccacagtccacggtgtcgcagagtcagacacgactgagctgaactgactgacatctatcgaagggccttgagtcatttcaaagtcattatcatttttttttataacttgtggactatctgacagtagcacttatatatcttttggatgtcacatctgac

SEQ ID NO: 13473 - DNA, 201 bp, Bos taurus
aggaaaatattaaattggtttctactcacccttggagttcagagacaagtttcattctgtgacatcacctggtttggtttgtatctgagtttctatccaacagaactactaaagagtaggacctgtgagtcattagtagatatgagtgggtgatacaaattcatggtctggaaacacaccatggtgatgggaaacagatat

SEQ ID NO: 13474 - DNA, 201 bp, Bos taurus
attttcatcattcaaaccacagtaaatctcagtttctttattgcactatctttgacatatgatgttgtgcaaatttaaggtgtagaacatgttaatttgatacatttatatattgtcatgtgattcaaacacctccttcagcactttcctacctaatcatttaaagccactatttccctcgagcgttccattctgctgttt

SEQ ID NO: 13475 - DNA, 201 bp, Bos taurus
atagttaccatgattatatatgatatcagtcaatgtcatgggaaaatattaattgaaatgaactaatccactcagtactgagtgcagaacaaacttgggcgtcaagctggagaaggaagttccactccctgtttgcctctcagatccaggtaaccaagtcttctagaagcctggtgaagggctacttcttcccaactaacg

SEQ ID NO: 13476 - DNA, 201 bp, Bos taurus
tcagatacccagcagtggtagctcatgttatgactaaatgaaacttgtatcctttcaaatgtcaaacattattcatgatgaatctttggtcctgttgtttcccttccagatctagcaactatttaaaacttattttaaatagttatttaaaatacttattttaaaactgtattttaaacttagaatttaaaaatatggtca

SEQ ID NO: 13477 - DNA, 201 bp, Bos taurus
tattttgcaactaaaagtaacaagtatacatttgaacccaggcaggatttttggtttctgttcaaattgtccataagacatttggtgcataccaaacggttcttgaaatttggccccatctaaaacactcatgagtatacttggtctatgccaagtggttttggatggaacgaaatatcaaggacctttctggtgtggacc

SEQ ID NO: 13478 - DNA, 201 bp, Bos taurus
acggcataatgtccaacacacatgctaaaggaatttgtagatgtgatagccatctgtgggacagagtgggggccacgacacgtggagaaggcaggcatcaattgaatcctaatttttccaaagcagcaaaacatagattctggaaacttctagctcataaacttggaaatctcagcagccaggaattagagtgagttgaga

SEQ ID NO: 13479 - DNA, 201 bp, Bos taurus
gctttgagcctcttgtgactatcagcccacgactattctggttagaatatgggcttccaccaaaatgtcttcctagagaaatgcaaactggacccagttacggccttgggttctttgtatctccaaagatggtttgaatttttccctgggctcagaatggcttcttggtttcacacaaaacttgatttgtttatcagtctc

SEQ ID NO: 13480 - DNA, 201 bp, Bos taurus
tgtgtgtgtgtttacacatttgaagtgtttcagttaattataatttctctttttgatgctcactgttcaatctttggccagtagcagcctcttcaagctgacacatctcaccaaaccccagtggtctttgatagcattcttgctttctgacatgaaaaaaaaaaaaatcctaggctcattttgtccacttgctgtcctggc

SEQ ID NO: 13481 - DNA, 201 bp, Bos taurus
tggcactcactctggggcagagttgtttgtttttctctccctaaatgtataacaggaaattaggcagttcacctttgtgtatcactttcatacgtgtacacgagccagatggcacctctttgtgttaagaaatttaaaaggaaagactagaaggagaagtttatctccacttcctctgccctcctaaacacatcctggaat

SEQ ID NO: 13482 - DNA, 201 bp, Bos taurus
gtctgatggctttgcaaagggcctttgaagggtgctaatggatgttcaaggcaaaagggcaacatcccaaactattgtctttgtaaattgggtctagcacagggcccaatacacagtaggtactcactcaatatggaataaataaacgaatgaaccaaaaagcacctccaagccactgctagagactttagcaagaaaaac

SEQ ID NO: 13483 - DNA, 201 bp, Bos taurus
tctcactatagtcaatgaattcaatgccttaggggccctgtttcctcttctaatgagaatgagactatcttgcttgtttagaggagcacagagaaaggtgtaattggccgaattgtttaacatagcaacatggtaaagggaaaaagcaaagtttaagtttcagctctcattctgccatcaaccacatgtgggtcacacgca

SEQ ID NO: 13484 - DNA, 201 bp, Bos taurus
caagggacccagcaagcccacggaagatgtgtggccctttatcccacccatatcctagatcgcaggcttgttacagctctcctggaaaaagataaaatattccagcagtgatgggtcaggggggcaggagaggggcccacaccactgcaagaatttgatgagcctctgataccagcagcataaataaggcctttaataaat

SEQ ID NO: 13485 - DNA, 201 bp, Bos taurus
tacgtctcttttattataaaaattctagggccttacctatttgaggccaaggtttaggaagagagtcaagatcaattggcagtattttcaaatacatggatgtgagaggagtggaggcccctatgccaaatgtttgctttccttgcatctaaacagaaaacaaattttcatacattcctcatgctattgtattagtaggac

SEQ ID NO: 13486 - DNA, 201 bp, Bos taurus
gaccaggaaggcaggagctaggcagccagtgcacagccaagggagctggtccaggcaccatggccattggaagcacacactggatgctattgcaggccccgcagaaggaaatgatctgatctgtgtctgtttgtcacctgctccttaggtgtgtgtccaagcccaggtgtgtcaggttaattattatttacctgccctttt

SEQ ID NO: 13487 - DNA, 201 bp, Bos taurus
tgtccgtggatcctgcagcaccactggcatcttcataagagaaaggacagagagtttacacacacagggttgagagaagatgagcatgtggagggggaggtggagatgcccccaaagcaaaggggcctccagaagctaaaggagccaaggatggaccctcccctggaagatcagagacagcaaagctctgctggccttgat

SEQ ID NO: 13488 - DNA, 201 bp, Bos taurus
catgacatccgcgtcattgtcctcaggcttggactctgtgaccaacaagagctacttcctccacttcctgcagctgctctccacctgcatggccttcttcctggtgaccagggagagcacttggagtgtgctcataagtaactggtccatgtttgtctggtactcctgcttcgccatgaccctccttaccctcatagctga

SEQ ID NO: 13489 - DNA, 201 bp, Bos taurus
ccgtcgctgccactgcattctcctgcatcgcgtcagtgctttatgccatagaaatggcgggcgtgtggaacttctacaagctcaaagagatcccctgctacgtgcacactgtgccaggcctgctgaacgtgctggagaccttcgttgctggtgtcatctttgccttcctcagcaacacctccctatacctgcaccagccgg

SEQ ID NO: 13490 - DNA, 201 bp, Bos taurus
cttcctgctcataaacttttagtatgccctgggtcctcttggccctctccccatctgactcaagactacccagggtggcctctctaggcattctactctgtctcctttcttttgctcatgttgggccatgtgtcagtcatgccaatcccttatttattgttcaacaatgaagcctcaacaacaaaacatgaccttcaataa

SEQ ID NO: 13491 - DNA, 201 bp, Bos taurus
tcaggcaactgcagtggctggacactggccactagtctggactactccttagtcaccgtaagaagcctgtgtcggtgtaggaacctacccatagatgcaggcaccaggcagtcaggccctcctctgccctctggggattgccgaggctcttagaagaccttagcggtgtggtcctttcacacttagaataaagcccaaggc

SEQ ID NO: 13492 - DNA, 201 bp, Bos taurus
ctactaaggctgtgactatccgtttcacgcctcttgcctagcttctcgtcgattgctgacaatctttgagattcctggccttgcatcacccacccgtggtttctgccttcatcttcacatagcgttcttgctttgtatgtgtttctgtcccaagtttcccattcttctaaggacattagtcatattggattagggcctacc

SEQ ID NO: 13493 - DNA, 201 bp, Bos taurus
tcctctctccagccagagcaatagtcatacaccatgtgctcactgagtcactacctgtagtttcatgggacatctgtgtaggaatagcattctaaatctggattcccaggtggctcagtgataaagaatctgcctgccaatgcaggaaacgtacgagatgcaggttcaatccctgggttggaaagtatcccccagggtagg

SEQ ID NO: 13494 - DNA, 201 bp, Bos taurus
tagctgctgccacatggcaggcgggatccttaattcccagacccgtgacccttgctgtggaagcagagagtcttaactgctggatggccaaggaagtcccgaaaaggtgtgtttttacactgtgtaacatacactggaaaatggcagaacctaaaccatagaatatgagggccactgggggcaataagaggattctggagt

SEQ ID NO: 13495 - DNA, 201 bp, Bos taurus
agggtcctctgccccttcagaggaggaggcctgttggcagggatcttggaaaggaccccaggcaagagcagtgtaccccaagatttccctgccggtggaagggtagtctgcagggcctctgcctgttgtcttcagaagggaggtgctggcagggggagaggcccgtattgtattggaatttgagggtccctagcctgcatc

SEQ ID NO: 13496 - DNA, 201 bp, Bos taurus
acggccccttgcgctgatcccagccctccaggccttcctcccttggcctggagatggtctgcccacgaggtaaattcaggcagggaccaagtgcccaggccgtgagctgtgtgccagctgggatggccctggcccttgagatctaaacagaatctcctctcactcctgtcacaggaagtgggacccctggcatcttcctca

SEQ ID NO: 13497 - DNA, 201 bp, Bos taurus
acttgattgcgcttccactgccagctccaggagcaaggaggaggtcccagaggcccaacaaaacctgggaaagagcaggagcctgccaaagggccatcatgagccaccagctgagtctagcaccgatagggctcataggtcttcagctctatttttcaaagtgaaggtacccctagtgctcccagcaattgcccatcacaa

SEQ ID NO: 13498 - DNA, 201 bp, Bos taurus
cttggggagggtgagggttgagggtggcgggcgctgaaggggccccgtgccctcacttaacagaggatgtagagccctaggggcagggccttacagaaacaagttctcgtctcccctttctgacacaagagctgcctcttgggttcagatgtcaagcaaggccacctcctgaccacagtgctatgagccatactggaatcc

SEQ ID NO: 13499 - DNA, 201 bp, Bos taurus
aaaaaagaatatacttcattaggctctagctgccatagatagtggttcctctaatgagtctgtacaaaagtcaattgaaaaccttctggaaaagattcaataggccattaagaacatgcatggctcacaggaaaaggtcaaaatatcaacattaaagaagtgggttccaaccctcacgcgtgactttgagagattcaaggc

SEQ ID NO: 13500 - DNA, 201 bp, Bos taurus
aatttttaaagaggccatgatggttgtttttttttttaagtgagaaatgatatttagaggctacattctgggcaccagatgtgcttattttgctgaatatgtttctaggccttttcagtggccagagctaagaaatacaaagttttaaaataaggaaagagagatcttgagtttatactgctactgaaatgtaagattata

SEQ ID NO: 13501 - DNA, 201 bp, Bos taurus
ctgtccttctcgaggtgcccacctctgtctagcttggtgatccccttcccctactctccttacctctgttgtcaattctctgttagcttgtgcgtgtgtgtggccagctggacagagggagttagcctttagacttagacagaagcaagttcctgaagatattctttttagagaaataaatctaagatgatgactgctggg

SEQ ID NO: 13502 - DNA, 201 bp, Bos taurus
ccacatctgtgctgctctgtcatctactggcactcaggcctgttagtgagagcttggctcctggaggaaggcagctggacagagtgcaaacagggaaaggcggtcacaggcctgatgcgtgatgttaaggtgctggggtagcctggccaggtgggatgtgtttcctccatcactgtttgcccgactctgtccttcaaggct

SEQ ID NO: 13503 - DNA, 201 bp, Bos taurus
gtctcctgcattgcaggcagatactttactgagtcaccagggaagtctcttccttaaacgtcagagtacatgatcacaggacatcctgaagaaaggccccgcaggatggtggggctcaagtaggacctgagcctacagagaggtgagtctcggtcgaaggtaagaggagggccacaaaagtgagtagtttgtctgactggg

SEQ ID NO: 13504 - DNA, 201 bp, Bos taurus
cgtcagtagctgtaagcatacataatggcctgcctcagggaaccctgccctccgcctgatattaaactgaagtgcctttgttcagctcacagggagacaccgtggccttgcccacctgtgagtgcctgcaggaggaagaaatgaacacatccccttccagtggttggctaaattaggcgatacttagcaagactcatggcc

SEQ ID NO: 13505 - DNA, 201 bp, Bos taurus
cgaggatcagttcaggacctcatagacactaaggccagagagcggagaggctgaagaatgtgggttctctggacagctgctgagccaactgggcctccagctgtctcctagcgtggtctacagagatggctgcaggtgtgtggcttgagagacagggtcaatgtcccaccacacataaaactagaaagaaaagaaaaatga

SEQ ID NO: 13506 - DNA, 201 bp, Bos taurus
aggaaaaaacaccttcatatcacaatcacacactttagaactggaaaagactttaagtccaacctactaagaccaatttatagttctgtcatccccaagattgcttctctctccttcttgtgtgatttatttaacaatatcaactggcttctagggtaattagaaatactcagatagctagcaaacttgcaacaaacactg

SEQ ID NO: 13507 - DNA, 201 bp, Bos taurus
tgtttttgttagtctgttgaacaagtggattttgggggcagatggtaccttgctgaaagctgagtgctcttctggcaaggccattcaggtcaaaagaatcatatgcacttctttagaagtgactcacatgcttctcagttgaattcaggatctttccttctgtgggatagtgttcacataaattccctttcctggacagtg

SEQ ID NO: 13508 - DNA, 201 bp, Bos taurus
cagccagacccggggcccacagcagaggcacttatttgaaaataggaagaacttctcccccaacagactggtactggtacaatttaacggtttaaaatgatttggtcataattaagttaggaggccggaacaacacagagctgggtttaagtcacagcccgttcctaaactccccatcactagaaatggcttaacatgtta

SEQ ID NO: 13509 - DNA, 201 bp, Bos taurus
ctgtaaacattttgaggcctgaggggcaggcatctaatttaagacacacttgtaggagcctgctggaacactccagggacaaggcccggtgggtgacaccgtcatactctccctttgccgtgctccggaggtccagaatctcccaggagaaagcttatactcaagttggccctgactttgcgggtgtcatctagaggacac

SEQ ID NO: 13510 - DNA, 201 bp, Bos taurus
gctctcaggtccccagcactgtaggtgcaggcatctttggatcacgaagcaagtttcccttataaaagagtgcctgacctgggaatcactgaaggcagcttccttcagaggagtgggcgacatgccccatccccatggacaggggagccactgactattgaactagtgtggcctatttcagtgaggacattggaagcactg

SEQ ID NO: 13511 - DNA, 201 bp, Bos taurus
ggctgcctgactagtcctgcctgcaccaaaatgcatggctaccagttggctttaggatggcatacttcactagaagctgccccaggccccttataacccatagtgcgctttttatgtgactcattaaacacaccctacatcacagctgggctttactggcctcggggctcttagttttccagacatctaatccagggaaca

SEQ ID NO: 13512 - DNA, 201 bp, Bos taurus
caccccaggtcagggtggtcacaggaggaattcacagctgtacgactgcatttcggaatcgattcaacattaagaatgaccaaggccttttgccaacacaatgcgtcatgtttattgggtgattcacaggtcaggaaaacacacgaaggggaaagaccggaggccatcagtcatgtcaggaaacaaactatttagcaattc

SEQ ID NO: 13513 - DNA, 201 bp, Bos taurus
atctcggccacccccatgcagtgcattgtaaggctaaaaacttcaaaaaccggcccgtctcctctgttttccattctgcttttcctctctccccactgatgcgtgggggaacgacctcacctgatttttatgtagaaaattgagtccatctggcaatagctccctcccgccccctccccccaacttgaatgtggtcctggg

SEQ ID NO: 13514 - DNA, 201 bp, Bos taurus
aagttctgaggcagcagtccttagactgagtggccatagctgtccactccgccgacaagctgccctgacttagaaatacctgttgctgcaagcacctgacgtcaacaggtagagtggcctcagcaacatggacgcccctttcctggacacaccttttctggaggcctagactctttgcctctctgcctttaggtttgaaaa

SEQ ID NO: 13515 - DNA, 201 bp, Bos taurus
cccacttcagcgactccagctcatacagcatcgtcacgaagctcgaaaggacacagctgtccccagaggccaaagtgaagcccgagaggaacagcctgggtgcaaagaagggccgggtgttctgtacagcatgtgagaagaccttctacgacaagggcacgctgaagatccactacaacgccgtccatctgaagatcaagc

SEQ ID NO: 13516 - DNA, 201 bp, Bos taurus
ccttgtgaatggaggtaccagtaagcacaggtgtacaagttgtagttacaggaaatgtccacaaggcggcagcacttcttcatgcccaactccaaccagagccttaaggagcgccggcctcttaggctgtgaattagagtggaacgtgcctgagcaaatactcaagggcttgtgtctcactacttctaagcttctcccctc

SEQ ID NO: 13517 - DNA, 201 bp, Bos taurus
agaaacagaaaacataggcccctgactttttgctcctctcttgaaactgagctagaatgcaattgatattcatatgaacaagtaagtttttgaggtttgacatgcaataccagggaaacaggaccttgagaaaagggagggctcctatgctgctggagggaaaccacaccctaaaactaaggctaaaattcaaattggatt

SEQ ID NO: 13518 - DNA, 201 bp, Bos taurus
ggagtgacttttttcccccagatattttggttttcttaacatttgaaatggatgagaaaaaaattaaaactgatgacttttaattaatgaagcagttgttgtgaaatacattttctccatttaagtttgctaggtgtgtcaggattttatacagataatctaaatacttgattcatgagtagaacaattgtttcacctaaa

SEQ ID NO: 13519 - DNA, 201 bp, Bos taurus
tcattttcaaaacaaaaacaaaaatctattcttctgatgacatgtatgattacaggtctatgcaagatacattgctctacattcccaatgactaggaaaaaaaaacctcaagtcagtttttagtttgcagatggtcaaaggattttgtattccatcaggagttcaaatcttctggatcttttcaccaacaactactggatt

SEQ ID NO: 13520 - DNA, 201 bp, Bos taurus
aaataattaatatatataacacaagaggtgttatattaacatatgatcttcttagggtgtcaaaatctgcctggtatctacttctcctccagcaaacatgaggaggagcccaataatgtcaaaagtgaatactgtcattatgttgtaggatgtctgccaagctgaacattggataaaaacacctcggtgttttttttttta

SEQ ID NO: 13521 - DNA, 201 bp, Bos taurus
aaacccagttgcattcagtccggaccatccaaaagaaacatcccagggaaacagtgtgaatggttagtgttggaagctgctgaaggggaggcctctttgtcgcctgcttgcctgttttcttattacgtcgaggcaagaaaagggaaagtccagaaagcacaggctcccgttttagatgctggaggcccagctttgaaaagt

SEQ ID NO: 13522 - DNA, 201 bp, Bos taurus
cttcagctcaacttcctttcctattggagatggacgaaaagctggattgggaaggggaacaacactaggactttggctccaggactgtcttcctcattcacacctcatcttgcatctcccaggccttccagtggcttcctttggctgagcaagcagaaggctctcccctcaaaaaagccatgtggtggctgcctgaaccat

SEQ ID NO: 13523 - DNA, 201 bp, Bos taurus
tttaaggctagacttttttaaaaaattttttgttgaaatatagatagttgacttaaaatgggttggtttcaggtataaggcaatatatattgctccaatacgttggccacctaatgcaaagagttgactcattggaaaagaccctgatgctgggaaatatggcaggaggagaagggggcaacagaggatgagatggttgga

SEQ ID NO: 13524 - DNA, 201 bp, Bos taurus
actcatctggatgatcctgaatatacttacattgcagagcccctgagactatgtccacaggggtctctgatctccccagtggtggggcatggcccaggaggacagttttctgccagaagccaggaaggagcacatgacagtgcatctacagtgatcatctttcactgtatactttacggaactccatcttttttaaaagat

SEQ ID NO: 13525 - DNA, 201 bp, Bos taurus
ggatcttgtgaagagcttatgagatgggccatgctgctcatgctcacagatagagtttggaaaccacacttctgtccacttgaaatgctcctgtttcttttccccaggtatacccacctgaaaggcccaccctggggtactgcactgcaggtgcaggggtttctgcaggttgaccaaacacctcaatttgtgttgggtttt

SEQ ID NO: 13526 - DNA, 201 bp, Bos taurus
gtacagtcctttgtagctggcaaagctctcatttgagaatatatatggcttgtccaacatcacacagctcttctgccataaagcctggcacaggcctctcggggaggaagccaaccaggacaaaaatgtcagcatttcatcaccatcatcagtgtgatgagagagtccttggggaggctgagagaggaggccaagcaacct

SEQ ID NO: 13527 - DNA, 201 bp, Bos taurus
agtcagacgcgacagcaaccttcactcacctcaagacaatcctgtaggatgcacactgaactgagctgtggatgaagcccagagaaggtgaataattgacgcaaggtcacaggcttgacagggtgacactgaagtacaaactttcttgtccggctctgctcctatctccccacctaccccttccccggcacctgctggcac

SEQ ID NO: 13528 - DNA, 201 bp, Bos taurus
tctccagaggccggaacagggcaggatgagcagctggcaagagccagagggtgagcgccacccgcccaccagagctgctcagctggcctgtttggcagtccgctggaggcttgttcagagccaacagggcagaaggaatgacagacatctgtagatcccattgatcagaccccacccaggaggttgtcaggcctccaagtc

SEQ ID NO: 13529 - DNA, 201 bp, Bos taurus
ggttctctgagccatatggcctgatttgcagttgaaaaagacccctgtggtccctgggagggctagctgggggggccagggcagaaggggagcccagtcacttagaaggcaggagcagggtggtgagtggtggtctaacccagaagatacagtgagagcagagctgaggggctgtgtgaagggccaggcctggggatgaca

SEQ ID NO: 13530 - DNA, 201 bp, Bos taurus
agcaggttcaaagaggttcactggccagcctagtgtcacacagcagagccagggacccagtccctcagtggatggtcctctcagctgcccccaaggctccgggcccctcctcctcctttcctgtcctgacctctcaaccttttctctccctcgctcacccctccctccctagggaggcagctgcctgggccagcctgtgga

SEQ ID NO: 13531 - DNA, 201 bp, Bos taurus
gcggggatgggttggtgcctcccgtcatggacaccactgacctggggcattgtgacaggcaccgtgctcagtaggtatgataacttggaggctgagaaaccggccagggaggcatggagctggggtttggtgtcccccttccccagcatcccaggcaccccctggagctccactggtggctccaaggctcctgaggagaag

SEQ ID NO: 13532 - DNA, 201 bp, Bos taurus
ttacaattcaacatttgcaattattaacttaattcaagtctttggtattaaatttttattataaagcattcggcgttcaaaaaggtaaaaagaataatgtgataaacacctgtatacccacaacctacttaacttaagatggaaagtattactgtatcaattatctgtttccatgccagcatgtagtggtataaaagaata

SEQ ID NO: 13533 - DNA, 201 bp, Bos taurus
cctatggaggacagacggggaggctcagaactccctttcagccctcctctcttccctcctgctgggtctttggtgtctgatcggggctctgggatggggcgtcagctcccgagagtggactggccagaagtcgccatttcctttgcctgctcgctcaaggtcaggccttaatccacgtgggctctccatcctggtggccac

SEQ ID NO: 13534 - DNA, 201 bp, Bos taurus
aggcggagggtttgctctgttcatacagtggggactggtcagaagggctgggtaggctgtccctgtgtccctgaaggggacccacagcacggccccctgacccagtgtctgccgccacctccctttgcacaaaagcattagcatcttgatatacaagctgagactgatttgaaaataatccagcaacaggcctggataaaa

SEQ ID NO: 13535 - DNA, 201 bp, Bos taurus
acacgacatgactttgacactaacaagcactttgagatgccctgcgtctgagcaccaagaagtcagtgtgatgccaggagtaaaggccacgcctgggacatagaagcagagaagagcttgaggttgggaccaaccccagtgctccgactcatgctgcctttagagcgagctgggcagggaggccgaagaaacctgtggaca

SEQ ID NO: 13536 - DNA, 201 bp, Bos taurus
gggcacatttgtgtaatcaacacatactcgtcaagtgccggattggtggccagcgctgttccagaccatcagtggacaaaaccactggcaatctcacctgcggggctgacatgctggacgggaggcctgctggggttgccagggtgcaccatatgcattgaaatacaagatgacagcgaaatactgcaggaagcaggggca

SEQ ID NO: 13537 - DNA, 201 bp, Bos taurus
ctgcatgcacttctgtgtctgaaggtgtattcctgatgtatccgtggagagagatgtattccacgtccacttactcttccaacatcttctgaaattttctcgataatttttgcttccttgttcttgccataaattaacttttaaaaaaatagctaaaatctaaagaattttcaatactctgcagccactagaatgtaagtg

SEQ ID NO: 13538 - DNA, 201 bp, Bos taurus
gttgtcaaaaccccgagaggtaaggacaggggaaggagggagagctggtctgtgctacggttgcagtgccagctcccagcttgcctgaacttggaacttacgtgagtggacgtcattacaatgggatttgagcctggtggtctggagccccaggacggtggagggaggagccaggggctgcaggtgctggccctggaaggg

SEQ ID NO: 13539 - DNA, 201 bp, Bos taurus
gagctgtgtgagcctgaagccaggcctgggcccttaacccgctgacttgacattcacagttgcagctaagcagccctggcagtggactcggcatgaagacgacttgggatggcctcttgtctcctgtgtccatggtagtgttggtgttaatcactcaagttgtgtccaactctttgtgaccccacggactgtagcccactg

SEQ ID NO: 13540 - DNA, 201 bp, Bos taurus
cctcagttgccagtatctaaataaagtaaactttcttttccaccaacctgggctgtttattggcttttgagtggcgagggcccagaccccacacaacttttggaaacggaaatacacctaatcttcgtcaactccacctcacagatgaggcccaggtaggctaaggtcacttgtcacagtcagacagctggagacttgctg

SEQ ID NO: 13541 - DNA, 201 bp, Bos taurus
tgaagtccttccgtgtggctactgggtggtctggtacagtgttgccttgtctgtgtggtccaaaggttgtagctcacttgtgttccatccacagagggccgggagggggtggattggtgccctgcatagtctaaaggcagagatgtggcagtgtttctgcccatctcctccaccttagccacacagccccctcctgctgca

SEQ ID NO: 13542 - DNA, 201 bp, Bos taurus
gcagctcccacggctggcccgccctcacccactcctctgtcctctgggccttcaccctccgtgttccctgtgctcaagagggttcccgccctggccgcatcggaggactctcacctctcctctgggtgcagcttggccatcacgtcctccggccagctgcttttcctcctgggtgtcatgtgcacggagaggcaccctcac

SEQ ID NO: 13543 - DNA, 201 bp, Bos taurus
gggaggagacacacaactggaaagccctggggacacccgaggctggtgggaaccctgggggtggtgatggggattctggggggcggggaggggatggcctccagggcagaggagagctgggtggttctgtttctgtctctgccccattcatctgagacagagaccagcagctcaggcagcagcctcaaatcaggcagggtt

SEQ ID NO: 13544 - DNA, 201 bp, Bos taurus
gccaccttcctcccccctcccttgcctggctctcagctgcacgtggtatgctctttctgggtctaggatgtggagcatctgtcttcaaggagtggcacctcggggccggccggcctggagcacgtttgtgttcacacagtacacatacacttctacagcgtctgtgttcacaggtagcggtcagatgcctcccagcctgtg

SEQ ID NO: 13545 - DNA, 201 bp, Bos taurus
cagggcagctccatgacctctggggcccatctcatggatgggtgtggagcgggggtgtgggctgggtccagaggaggaaaggccctactgtgagggacacggggacacaccttttgctcacactggtgggagggctgcttcagtagataaatgaagtcaggtctaattgtgaccagtgtgtctgacgggcccacttcttcc

SEQ ID NO: 13546 - DNA, 201 bp, Bos taurus
tcagtgtgtttgaaagcaataagaagattgcttatcttcactttacagataagtagtcagaacctcagaaaatttgtaagattttcctttccaaaggccatagtgctacctttaggtctcagatcagtccagcttaaacccacacctacccaaagtctaccctacatacctgggccatagttattagcctttctagaggaa

SEQ ID NO: 13547 - DNA, 201 bp, Bos taurus
aggaagatcccctggaggaggaaatggcaacccactccagtattcttgattggaaaatcccacggactggggagcctggccagctacagtcaatggtgtcaaaaagagacatgcctgaagtgactaatactagtaagtgttagtgtcatgggaaggttttagaaaaacgactggccagaacattttaggaggaaaacagaa

SEQ ID NO: 13548 - DNA, 201 bp, Bos taurus
cttccccagacttctataccccctgggcactaagctctgggccagtgactacctcataacagtccttccacagaagactgagttgatccaaatctccttataggtgaggagactgaggcctataaagtttaaggatctttttcatgattgcatagcacctgatccttgatcacaggtggtgggcatccaggctgacaaagg

SEQ ID NO: 13549 - DNA, 201 bp, Bos taurus
ggttttcttcatagactgtcttcaaggtgtgcaatttttacagcaaatatttgataatgttaagcttgagttgtagcatttcatatagtggccagtaaacgtaaaatcttaagtctgacaaagcagagcagagccaccaagggatttcaggtaacacacaagccctcagacgctggactccacacccaggcctgccttctg

SEQ ID NO: 13550 - DNA, 201 bp, Bos taurus
taggcttggtagggactccagggaacagactacagcgaaaacttggggcacccaaccctgaagagtccccagggcctttccgctcccagcgggccactccgctcacagcactcagggaagcaggctttcctctggaccatgtttattccctactcaatctcaacctgcacagaagagcttggaagcaatttgccaaagcga

SEQ ID NO: 13551 - DNA, 201 bp, Bos taurus
ggagtgagtggaaacatcaagagggtaggtagacgcagacgtccagagttgcagggagatgtctgaacagaggcaggactgtggccttctctgcatcacacagatgctgcatttaggggagtgtgtggatggagatggagacaaggggcagccccagttgagccctgcaccccaggaccttcgtccctgagagctggagaa

SEQ ID NO: 13552 - DNA, 201 bp, Bos taurus
tggcctggagtctgagaccccagcagaggctgtggttgggcatgtgggctctggattgactggtttgtatatgtttgtacgcttgagaacaggttctttactgtctctaggaattgggcctctgttgtttagtcaccaagtcatgtcctactcttttgcaaccccatacactgtgtagctccaccaggctcctctgtccat

SEQ ID NO: 13553 - DNA, 201 bp, Bos taurus
ctcgaggccgccccctaactgttgtcagcccacgcaggggaccggcaccggcttcgctccctcccttctgcacatcacatcacttaccctacggctaccacggcgcacccggggcctccctacagtagggtactttctccgagccctcttcctcagaaaagcaacaaacaccgaaccaagactatgccatgcggcaacggc

SEQ ID NO: 13554 - DNA, 201 bp, Bos taurus
gctgcctgggctggtgcccctgagggtgggagagtgggccgcgatgggcaaggggctgagagctagcatgacttgatttcagcctgtgcgaccctggacatggccgtcgcgtctcagaacgtctctttcctcacctgacagtgactataacttatacacagctgtttctgaggctcctcccctgggcaggagccaagggtg

SEQ ID NO: 13555 - DNA, 201 bp, Bos taurus
tccctatgttccttagtggccctaaggtcgaggaaaggcccaccatcttcttctccccgccctcccccgcccccatttgtaagagatgaggatgggggccagtgtctcatcgcttgggtctcacgcagctagttgtttattccgctgtccagactcaagcccctccctctctctttgcctctagtagcagggtcgggggtg

SEQ ID NO: 13556 - DNA, 201 bp, Bos taurus
ttgggctctcatttttaactgtacttgtcttctatcttccttcaaatgaaggtgaaaagatctgtctctgcacttcagtacttgtgtctctgactgtcttccttctcgttattgaagagatcataccctcatcttccaaagtcatacctctgattggagagtacctggtgttcacgatgatttttgtgacactgtctatca

SEQ ID NO: 13557 - DNA, 201 bp, Bos taurus
tgttttaatagcaaaatttcttgattttgttggctatatagtgtgtacatttacaacagagcaatagttataagatcaagtgcaacagttacaagtaaagagtaactaacatgccctatatcattacagggatttattcagtggaactcataaatgacagtttatatgactggcatgttaaactgcagaagtaagtgcttt

SEQ ID NO: 13558 - DNA, 201 bp, Bos taurus
caaacgggcatctgtacaagtctgttagaatgagtaacaccatctgctccatcacatagatccagacatccagtggcctgaggaggagcgtacttgtcccaccgcccaccccactgcagcccagtgcagtgacattgaggagggtaggggtacagggacactgtgtcacagtcactctggcctccaggctcttccatgtca

SEQ ID NO: 13559 - DNA, 201 bp, Bos taurus
gaaccctcgctcgcctgccacgcgggccctgccaccgagccacgaggctagcccgcgggccccggggtagaaaaggggggccttgacggctcatcctcggcgttgtccccagagtggatgcgcgacgtgatcaatctcgctgcatttattaattcccccgtctagacagaagagaaggccgggcggcggctccttatctga

SEQ ID NO: 13560 - DNA, 201 bp, Bos taurus
cttgtagccagggaaaatgagaaacattagacaagtctcagtatgggaagccaataaggacagaggtagcacaaatatgaaaagaggccaagatgaccacgtacatccctatgaaatgactccagaatgagcaaagtccaagagatgtttcaaaagtggagtccagactgacatcgagtagaggccttaccttccggtgac

SEQ ID NO: 13561 - DNA, 201 bp, Bos taurus
aggacatcattttactcaaacggtcacagaagctttccccatccttctacatagatttttcttctgctagtttaaaatcattttactgcaatgtttaataggaaactgatgtttcatctaagaatttcaaaactgcctgaattaaggtatgaaagggcttatcttcagttagacaaaaggttctttctagtcttcaagaat

SEQ ID NO: 13562 - DNA, 201 bp, Bos taurus
cagtatctttcaagaatttagtgtttatactcattttagtctagtaatatagacaaactgggttccaatcttgattcagtccttactggttctgtgactttgggtaatgtactctgatgtactttcttcatctgaaaaatggagataataattcccaaggttgttgtgaggattaaatgagttaatatatgtaaggcactt

SEQ ID NO: 13563 - DNA, 201 bp, Bos taurus
gtctgtggcaggaggacagccaagccagttctggagtttgtgtctgccttctgccaaatactttgtctcctttcttcctcctcatatttctctctgtctcgcctttgtgttagttttgcacagcattattagcagtgctgtgcaccagggaacgctgtaatagggccagagctcatccttctccttcgtctggatagatac

SEQ ID NO: 13564 - DNA, 201 bp, Bos taurus
aggggccaagagcccccactccggcctgcaggcccctctgcctcagctcttggcggcttcaggcgtgctgggccacagagaatccactggccaatttcccgctgttggcatctgttcacaagcctcagggacatctggttcaccagtcttggagaagattgagacatcgtgggagccggcctgcaaggcctcaccctccgc

SEQ ID NO: 13565 - DNA, 201 bp, Bos taurus
acccttgtccacccccaacacatacacacacacgcgtgcgtgcactccagccaagggcacagagcagggggaggcggcaggactccaaaggccctggggttgggtatctaaggacagattcagggagcacccactcccactcagacagccttctggggttggaaggtcatcagtgaaggtctagagacctagaggtaaggc

SEQ ID NO: 13566 - DNA, 201 bp, Bos taurus
tgtggaggtgaggaaaggaggagcccccatggcctctcaacacagtttcctgtgagctgacccctgccaggcttcgcgactttgttcccgggaacccacatacccacctccctgagggtctgcactgtgtagggggcaccacggtgcacggcttgaacccccttcaggctgaagcactcctcggtgtcgctgggagtgttg

SEQ ID NO: 13567 - DNA, 201 bp, Bos taurus
cctccccaacccccatctccccaggacagcttggacccagggagagcctgcccctggccaggagaaaccctgccacaggcctcccatccacagcccacagtcggctcccaagggcagcaaacaacttttcagctcctgaactgtgtaattgttgggaatagcaggccccacccctcccgtcctggctgccttgcgcttgga

SEQ ID NO: 13568 - DNA, 201 bp, Bos taurus
caggtgtgcctccagtgaggtggcaatatcactcccagttttcagaggcgagcccagagggtcagagggggcatggtcaatgggaattggcaggaaatcaactggcttggccacagcccctgctctgtccctcccctgctccatccccacccccagccctgaaaatgctgagaaagcccaggaccctggggagctctgact

SEQ ID NO: 13569 - DNA, 201 bp, Bos taurus
accagcatgcattagccacggcagccacctccacccaaggtctgggaaaaccctccaggtcaccgtcatactcaggtcaggccctgaggagcggaacatggcaagatggaggctgcagaagatgcgggaaggggaacagagctggcttcctcgtacctggcctgacacggtagtggggctagaggtattactggcctcaag

SEQ ID NO: 13570 - DNA, 201 bp, Bos taurus
gcggcctcccggtacttgcctacattgcggatgatcttcagggcaacctgagacttccctctggaccgggacagaagcagcagtcctcatgaaaagctatacggcccttcccccaccctccaccccaacccagcagctcctggcaaatgctacgtaggactccaggaacagggctgccctgaagacagcagattcctgacg

SEQ ID NO: 13571 - DNA, 201 bp, Bos taurus
ctgtcagtcactgctatcaaagcaggagcttggattgagggtaattaatcatggtccctctgacagcaatccagggccttatctgtaccccaagaaatgccgctggtctccagttccctcctcaataaaggagactgacagttccaacaaagaggccccttatcagatttcagccagggagcctgaagcagcccgagggag

SEQ ID NO: 13572 - DNA, 201 bp, Bos taurus
aatacagtcacactgtgaggtgctgggggttatgacttcaacatatgaatttgggagggacacgattcagcccaggacaaggaggcagcatgggcccagacgaccacctcttcaccttaaagggctggatgacgaggtactgggtactgacaatgctaagaagaggggagagaccaatgtggccttacaggacagggagag

SEQ ID NO: 13573 - DNA, 201 bp, Bos taurus
gccttgaatggcttttagactcaatttaaagaccagtttgctagagtgttgctaagagaaaatgcgtctaatttgccaaaaccaaattaactcctaatacccaaggggaaatgtttaagcagcaaacagttgataaaaatataaacactttcattctccttattccatgtggacttgaacttaattattgaacttacactc

SEQ ID NO: 13574 - DNA, 201 bp, Bos taurus
tgagggctggcaggggcctcaggggccacccagtccagccttccactctaattccgatccttttcacccctgggcaggtgacagcccggcctctatgaactgctatgaacaaacctccagggacaggagggtcacaacccatgcagccacttgtcccactgtgggatggctttaaagaaagttcttgtttacatggagtca

SEQ ID NO: 13575 - DNA, 201 bp, Bos taurus
aaatgacttgaatgatatgaggatcccgaatgcagagtaccagggacagagcctcactccattaaggtgttccagggagggccaagttctcagtaaggaatgattcatggtttccaggaaagtacagccccagaaatgggacccaaaggtataaagattcctgagcctgtctatagtacagtcacagcagggcctctcatt

SEQ ID NO: 13576 - DNA, 201 bp, Bos taurus
gttgcttttttcccaaatccacgctgagcagcagcaccaacattttatttgctgtggcagatcaccactgctgttcacaggggtgccaaggaaacacgtaacactccctacacagcccaccgagcactgtgcttttactcctcccacagtgggcttgttggcgcaggtgtccagggcgggtggtgctctatggtattcctt

SEQ ID NO: 13577 - DNA, 201 bp, Bos taurus
ccagagagcttcatcctcgtcccactaagccaatataaatggtatggtcccagggacagtcaccaaccttttctaggcctgtttccttctatataatattatggaggctgaaaactatttcctgccagctgtaaaaccctgtgattctaaagtctctgtttatggtttggcctcagtagacagaattaccatgacatgaaa

SEQ ID NO: 13578 - DNA, 201 bp, Bos taurus
gcttttgaacacctgctgaccagcctgcttggtccagatctggcctttcctccaaacttgctggctgaagtgtttgtaactttctgtagaaggccagacatgctctccttgttctagaggagggtattacagatcattagctacctaatcactaaagttcttaactgaggaattctcccaggtagacgtgctttccctgta

SEQ ID NO: 13579 - DNA, 201 bp, Bos taurus
gactttggctgcttattcatgagagcgaggtctgtaggacagacggcagagccggcatgataaagatgtgatccgggggatagagctggaggccagaagagtcccatgtcaaaggtcaaaacggagtagcgacagcaaagaaagtctgttgtaaaaatccgtggccggctgtgaaagcgcagtacctgggtccacatttga

SEQ ID NO: 13580 - DNA, 201 bp, Bos taurus
atctgccaacagggctctggagctccttttgcaatcagcattcgctcagaaaatgggtagacagagcctgtaggtgaatctgtcactaacaacaaggcctggttaaggtaggggcaggcaaggaagacagctagccagatatcaagcctggacctagcatgatcatgatctttgggggccaaaaatgaaaaagagtatgct

SEQ ID NO: 13581 - DNA, 201 bp, Bos taurus
aaatctttgctctcttcgaaacctgtcagaaaattaggtcaacatgattttgtattttaatgaaataacttaagggtaagcctgagacttggaggccgctgagacttttatgctagagtggcttgtcatgcttgacgtaatgtctggctccgtatgagaggggtatcgaagctaatgttctccatggctaatcggccttta

SEQ ID NO: 13582 - DNA, 201 bp, Bos taurus
cattgtttaaataactcactcaagcctagatggaaaggcccttactatgtactcttaactagtcctgtgcagcaaaactaagaggaattgactcttggatgtatatttgccacttaaaaagggcccccataccagaccagtctacagagtggactgctgacctcaaagtcaccttaaactacacccacatcaagatgagat

SEQ ID NO: 13583 - DNA, 201 bp, Bos taurus
tttatattcctacagagtataaagttgggtcttttttaaaaaaataaaatctgataatctcttctttttgattagaatatacagaccatttatatttaatgtggttattgataaagctagatttaaatctgccattttgctctcttatttctatttactccctctgttctttttctctgtttctatctaattttggaataa

SEQ ID NO: 13584 - DNA, 201 bp, Bos taurus
tcttttttttttttttaattctatattatagcaggaaataacaaatgaataaacaaactacttcacccaaacaggccaaagggcccttattgggaacaacgtcaatgccatattctctactatcctcaactctttgtcagctgagacctgtcagacatggcctcaaacatagtctgagttgatgggcctaattaaaaaagc

SEQ ID NO: 13585 - DNA, 201 bp, Bos taurus
caccctttatgcaaaatgtaatagctattaaatacagtgttcaccatgaccttcaaaaatgaagacctactatttgaaagttttggacagtagctactttatttttaaaatcaaaactcaaccagtgtcctgataatcaaagaagacttgtcttagggtagaaataactaaatgaaaaacacacttactcattttcatccc

SEQ ID NO: 13586 - DNA, 201 bp, Bos taurus
ttccagttgaggacactaaagcacaaagaggctttgcacaaagtcacagaacaactccacagcaaaggcaagaccagagacccatggccatggtctcccacttcactgttgtgtgccctggaccactgagtcatcctggtggcacagatggtaaacaccctgcctgcaatgtaagagacccaggttcaatctctgggtcag

SEQ ID NO: 13587 - DNA, 201 bp, Bos taurus
acatatacaatgtgataccagcaagaataatccaagagatttgttttgatttacttttcatttcagggcttttaggattggcttgtaaaaaagacgctgaactataaagactacaaacactgatttccacaaaaccaaagactttggagttattttctaaactttttctgccatcctccatccacctaaatcttcactaag

SEQ ID NO: 13588 - DNA, 201 bp, Bos taurus
gaggacacctacacaaacctgagcccttgtgtcagtgaggtacacgtggagtgtgttccttcctgtcctttgcgtgggggaagcccaaaatagcaatctccccttgtgctttcgtctgacaggtaaaagcctattaaacagtgcctccaattgtctcatggaaattagactcatttttctaaaatggaaaagatccaccca

SEQ ID NO: 13589 - DNA, 201 bp, Bos taurus
ccaggtttcatttctctagctgaaagaggaatgcgtttaggaagcagtgtatttaagctccaggagattaggatgtgggaatgagccaagacgtgttggtggctacttgatgaggtgacttatttgtggagtgggacgggcagctgtattggaatctaggtgatctcagcccgaggcactgtgctataatggtagacatgt

SEQ ID NO: 13590 - DNA, 201 bp, Bos taurus
tgtagaacttcctagaattattaatacttgagagaaagaaattgaaaatttggtgtaattttaaaaaacaattcaaacttcattaacttcaaaagacatccatcctaacacactttgatcaagtaagtgttggatgatttgggggagaaagggagcaaaatatactctagtggtaagcctcatcttaacttaaacaaaatt

SEQ ID NO: 13591 - DNA, 201 bp, Bos taurus
ctttcggaactgaccacttatatgtacctttatatatataccacactctcttgatcactctacctttgtagtaagttttaaagtcagatagaatgactcttccagttttgtttttccaaatgatttgggctattctgggtctcttgaatttccatataaatattaggatcactttgccaattcttgcagaaatgcaactga

SEQ ID NO: 13592 - DNA, 201 bp, Bos taurus
gaaattctaaaagctacagataatgaaaatttgaaaacagaatatatggtaaaagatcgtacttgaagaaataaggaaataagaaactttgaaaacgtacgtagcgttgttcattgaagaagagttgcatccacacttcagaaaaatattccaactggaccaaagatttccacataaaatatgaaatgatgaaagtacaag

SEQ ID NO: 13593 - DNA, 201 bp, Bos taurus
ctcaccatattttttccactcgtcatcaacattgagcccctggacagtgtctcctttgagctttttgaatacagagttccaaagacaggagaaattttttatgcttttagcactgggagtgaaggttataaagattcctgctttcacagaagtattctgggctttatatgctaggctgaatacttcctattccataatgac

SEQ ID NO: 13594 - DNA, 201 bp, Bos taurus
actcatcaatattttctattctaaaagtttttagtgtatgaataaggtttgccattagtccctttgtttttttttccaagagaaattcagcaaaataaattctttgcatctccaattttcttttaagtatctctaagtatttataattaacgaatcatgattcattttaagactattgggagattaagctactggaactta

SEQ ID NO: 13595 - DNA, 201 bp, Bos taurus
ggatggccaactcattctcagccacagcaggtttcttaaaagctattaaggtttgtactgaccaagggatcacttaaatttccaagaaagagctctttaaatgtgccacttctctagttatgtgtaacaccatttcaactccaactcaattattcagcactttttttcactatcaaattggaaagctctgacttttctatt

SEQ ID NO: 13596 - DNA, 201 bp, Bos taurus
aggtacctagagtaatcaaattcaaagaaacagaaagtagaatggtgattcacagggactgagagaagagaatggggaattactgggtacagaatttcagtctgggaagatgaaatagttctgaagatggataggatggtggtggtgattgaacaacagcatgaatgaatttatgtcactaagctctacatttaaaatagt

SEQ ID NO: 13597 - DNA, 201 bp, Bos taurus
atattatgcaacagtagcaagttggtccagctgcagttttcacaaaaacactcttcatcactgcagtcccaggcaaacctgtacaactagagcttaagcatagttaaatgatatgtgtaaagcatttttttccccttttcctgcgttagaggtggggtggaggggacaaatttacttccttggttgcttatttattatcta

SEQ ID NO: 13598 - DNA, 201 bp, Bos taurus
ggatatgcttgttgcatgttgtactttggggaaagtgtaaggccaggatgttttttcatactagttcttttggcttagtaaatgtaatttttggttaaatactaatttatcaatggggcctttatgcagaggactacatctattttgttttagtggagattacagctgatcctgattctcttggctcctcagtgtatgtct

SEQ ID NO: 13599 - DNA, 201 bp, Bos taurus
ggaagttgaacctgcctatattattcattataaattatggatagatggattgattttatagataatatgcacaataaacaagttcatttataatatgcaagaatataatttatttagactatagcttggacttaatgtaggtcactgaattgaaataaattaatctcaaatagggcttccctggtggctcaggtaaaaatc

SEQ ID NO: 13600 - DNA, 201 bp, Bos taurus
taaattatctgaacacactgataaatgagtaatgtttcctcccaatgttttccttcctctcattcagtccatatgcaattgtcttctctaaaggctaccatggtagatttttttccgaatgctttcttatagttaagaaacatcagtccttggtattactcactctattaatctgtcaatactatttaaaaagaatgtaat

SEQ ID NO: 13601 - DNA, 201 bp, Bos taurus
ggatcatctccaatattaagcatactgtcctaaataagtttactaggccatccgtacacacttagtagaaatttaatgtagacaagatgaaatacgttcatggagtgcatctgactgcactgatgaagcacattaatcagtgcttttggagctgctgccgtgctctcggaggctgctctcgtttgctataaaagctcttac

SEQ ID NO: 13602 - DNA, 201 bp, Bos taurus
tgctgtgaggccaggcgcagtgagccaatgtccaaagagtcaaagaaaaggaaaagggaggacacaagcaagtgattccccctcaaatttaaaaaagggaaaacctttccttttttggtttgtttagcaactggcaaaactataagcaacaggaaaattattatttttatctagtgaaaccagctgttttacaggctctat

SEQ ID NO: 13603 - DNA, 201 bp, Bos taurus
tagctgggactatgcaagtgcacacggaattcatcggaaagaacacgtgaatcacttggtgtgtgaaaagtacagggccctggaaaggacgctaattacaaaacaggtcacattgctaaaatgtgttaagcattgtcacactttaggtaactttaaactctggcctaacacaaacttaaaaatataaacattccagaagcc

SEQ ID NO: 13604 - DNA, 201 bp, Bos taurus
tctgaagaatgtgtttgtgttgtgttgtgatggtcccctgggaggttagagccccagtctcatctacatattgtggccaactcttgagcttcagtcttcctggggaactgacagcttggagaaggggaagtcctggctgacttccttgggttccattgagaaccacttctcagtatgcctttggagagatggctggccctg

SEQ ID NO: 13605 - DNA, 201 bp, Bos taurus
acatctcactagaataataatagacaccgtatagaaaggctgtatactttggcagatgttaaaaaggaaaaactgtgtatgggaggtagtcttgccagggcctccagaatttctgaaacagtgtagtatataaaagtttatatttaaagtaaaactgtagcaaaatggccaaactgggttagaaaaagaggagactgtata

SEQ ID NO: 13606 - DNA, 201 bp, Bos taurus
ggcatttagttgtcctgcacttagataataatctccttgttctatatttctacttcatggaatgacacacactccataaggggtctttgctgaccccaagagtgagctacatgctcaaggggctatcatagtgccctgtgtttacttctatgtggcactgcccattctgctgtgtaatcagcacctcaaggcaagaaccaa

SEQ ID NO: 13607 - DNA, 201 bp, Bos taurus
cctggggtaaacagggcagacttcagagaggagtggatgccaaagcctatacataaatgatgagcatctcaccaaggtgacaatggagaaaatacagttacataaagaataataagcatcaaaaataagagtagtaaggaaatgtagcatattcacaaaatgtccagtgatctagtttggctaaaataaagggttgcttga

SEQ ID NO: 13608 - DNA, 201 bp, Bos taurus
taaaatgtttgtctaggctcctttttgtttactcccattttccatactggaaaaaaaaaaaaaaattcccaaccagcttcttgccagaaccctagtacagggcaagaattaagacatgagcagggcccagacaactttccgggcccacgtttgcaatttgtcagcattatttctgcaacaagccagtattattgcaaaagg

SEQ ID NO: 13609 - DNA, 201 bp, Bos taurus
ggaatacagtctccattaaaggaccacagtgagagaatacaagctcactccatactactgacttcattttgagaaatgcctttgaatattttcagtgataaccaagtttttgtacttagaggatgaactttaaaaacaattttaatacacaaattatcaattttaatgaataaggtaatgaattgattgtcttagagaata

SEQ ID NO: 13610 - DNA, 201 bp, Bos taurus
acccatgaagtatgcgcatgcacacacacaaaccaacacaaacacctcctcctcctcctcttccacctctgaggacacattttgatcatggcctagcactttctcaagtcctggctagacttatcttgttcttttctccttcccagtccatcacatctcaacctctatttgtcctccatggcccagcttatatgtctctac

SEQ ID NO: 13611 - DNA, 201 bp, Bos taurus
aaaagtggctcattgatacagttaactgttctcctgttgtattcctattttcaggtcaacttacttattattggattacttatgtactcaaaagcctttcatttccctttactttaattctaatgcctttgatctcctagtgttactcctcatcaccgaaaagtatttttacctgctgctagtaggtttctaccattcaag

SEQ ID NO: 13612 - DNA, 201 bp, Bos taurus
tatattaagaagctaataaaatatagactaaataaagccaaaggatccaaaaagccctcacttgttatgtaaggggccagaaccttacgtaatatacattttcttactaattcttcaaattttgaatgctttgtatgataccaaggaatactggataatgggtttaaaatgtttttaaaagctgtttaaatatatgcagag

SEQ ID NO: 13613 - DNA, 201 bp, Bos taurus
ttgacgaatgacaagtgcagagtgcatggagaaggtgaaaacgtttgcttaaaataactcaactaactgtactatgaatagtccacagcctgagagcgcttgctcaagaaagcatatattctctgaccctgttgtaaataggctctgctcaagatttcctagagcccagaggactacagtgtctctgagtatactaataca

SEQ ID NO: 13614 - DNA, 201 bp, Bos taurus
atcttctttgttcatgaaatgctatagcattacttgaatagtgtttgtattcaaattcacctaattcactctggggagaaaaagggaataacagtttaaacatgcaaataacttgatattccattcagtaaacgctagccctaggtaattatacattaagccttactagtcttatgaaaaaaatgtcagtgactttaacgg

SEQ ID NO: 13615 - DNA, 201 bp, Bos taurus
acaaggaccaagaatttgttagtagagtagcagggtataaattcagatatgcatctaagaaagaagggatgctgactgaagttgctgacctaaggaaaagaaattcaactctgaaataaagctggaaaggcagaatgggggcaagtgtctggacctgctgtctggacatgatgacagatttagaaattcaaatgaaaagtg

SEQ ID NO: 13616 - DNA, 201 bp, Bos taurus
tccctaagatccgaaagataaccagtccgtggacggggctcctcacgaatacggggcacgcgtgatcacacccaggttggcctgactttagaagtacaccgtaggaacaaagtaggaactttgctgccaccgggagcacgaagttgggaagtttgtttccgaggccgcgtgtgtacctggctctcctggggcccaaggcct

SEQ ID NO: 13617 - DNA, 201 bp, Bos taurus
tttggagtataacccataaaatctattctggccattttctttgcccccactgaaaaataataactgtggtaaaatgagatttaaaataattcctgtatatctaggggccacaagtgaaattcttcatcacagatatttaaggattgaattttagcaggagcaccaatcacacctagaacaataaggtagttattggcgatt

SEQ ID NO: 13618 - DNA, 201 bp, Bos taurus
ttttgttgttgtttgttaggcaaattgtagccaaggattaaagaccaggaattgtattccagtattttatctttaaggactctcctggtattcagtctgaaacttcagtctttgttagtttgggaatcaaattataaagcaaatataatgctattggttaatgaacaataatgtttccaattaaatttaagaagcagggcc

SEQ ID NO: 13619 - DNA, 201 bp, Bos taurus
gccaggatagagctcactgagaagtgacgtttgaggagatttgaaggcaggaaaggagtactccatggggctgtcagaaggaagagcattcagacagaagttacagatgggaggatggccctcaggcaggaactgattggtgcctttgggacagcaaattgccttgcgactggaacagagtgggcaaaaggggagaagagg

SEQ ID NO: 13620 - DNA, 201 bp, Bos taurus
atatgttgaagctgtagcccatattgtgatggtcctgggaggtggaatcttcggaaggtgattaagattagatgaggtcctaaggatggagccttcatgaatgagattaacatgcttagaagaatcacaggagagattgctttgtctgctctctgccatgcaggataccatgagaaagcagctgtctgcaacaagggagag

SEQ ID NO: 13621 - DNA, 201 bp, Bos taurus
agcaaacataggtcccaaatgcagtgaggctctgcctgtctccggtgatggaaggaaatctgtggtgggcaggcacgaggccttctccctggtagggagtcgctgtttcctccaagcctctatttaaaccaggagttcgttctccctgaggcagggtcaggcaagggcttcttggctttaagttgccttttgtggttcctt

SEQ ID NO: 13622 - DNA, 201 bp, Bos taurus
ataataatgaaatggagatgctagtaaagagtgctattaatagagattttggcctggggatctcaagatacagggaatcttgccctctgacggcctcttcgctcttccaggttcccaagggaaatacacgctcaggtcaatggtgggcaaaaaagcaaggcagatttataaccaattagggcattggcccggaaaatccca

SEQ ID NO: 13623 - DNA, 201 bp, Bos taurus
caaggaatgctccttctaaaatacagatctgacctaagctttgctgcagtgcttacaatctagtgatagctctctataacccataaaataaaattgtaacattatacctatcccctcacacccctccaccgccctgcagcaaataatgaaggcaggcgctgtgtgctgtgggattctcacagacctctgccctcaaataag

SEQ ID NO: 13624 - DNA, 201 bp, Bos taurus
gaataatgtctccataaaggagtaacagggcgacgagataaatgtaggaaagtcaagagctcaacatgcactgtaaccttggccctaaatttctacgttatcccaggacccctgtgaatcccacatatcaatacatcataaggataacaggttgttgctggttggggatcagtaatcagaattggcaagaaaaagatccct

SEQ ID NO: 13625 - DNA, 201 bp, Bos taurus
aaaagcaattgcccctggagaagctctaacattagaagcattcaggctgctttggaggagacagaactgtgtttctttggagatttacttgaaatcatattatcagggatgcaggagtggacctctgcagactagctgtggacatttttatcctacttctgttgtataggtaagctttagctttgaaatattggctacttc

SEQ ID NO: 13626 - DNA, 201 bp, Bos taurus
catgggagagtaactttttcctacagtagatgcttaatgaatagtgatttatatagtaattaatttgttttaaaaaataacttgatgcaaggcatttgtcggttgctacctagctttaaaacaccaacgctgaggttactacacctaagagttatgtcaacattttgacagtatctaagtttctttaacttactggcacaa

SEQ ID NO: 13627 - DNA, 201 bp, Bos taurus
gataaaaaattataatttataggcttgactcattatttacttctcagaatgctttcttgtcattagccatctaattgccttcatatgtgacttctctaaccgaaatgcctatggtggttatattagaatatataagatactaatttggtttcttttaaagattatgtctgagtatctcagctctctattgcgcagatacaa

SEQ ID NO: 13628 - DNA, 201 bp, Bos taurus
acaggatatccgtgttgtttggacagtgccagtcttctcacacgattgacaagtctacagtcccattggcagcaactgagagctgttctacagagctgcttgcttggtcttttctgtgctttacattttaatattccagagaatatgtagtaacatcatgctgttttaatttatattttcctgatcaccactgtgataaat

SEQ ID NO: 13629 - DNA, 201 bp, Bos taurus
aggcaaaaagggtgagggcttacggagggatagccacttacatactttttatcagaaaggcaaagaaaggcttttccagagctccaagcttccatctcacgtgatcagatcagtgccacatggccactcctccaggggatcttccctgacccaggggtcaacccatgtctcttacatctcctgcattggcaggcgggttct

SEQ ID NO: 13630 - DNA, 201 bp, Bos taurus
aagcttttgctacttttctggttattaatggttagaatttttttgctcatttttactaatcctgttgtagaatgaatttttttcatgccagcatatcttcatttatgctattttttcatatttatcttatgaatcttttaagttgctgcttttcccaagccaaagaaaagaacacaactagaattttgaagacagtagaga

SEQ ID NO: 13631 - DNA, 201 bp, Bos taurus
ttcatcagcaaatctttcttgtagccacggttcacttatgcctgcacagaaggtcctcctgccatacatgggctacctctgtgcagagccctagagttgggcttaaaggatttcagccttcctccatataatcccatcaagtttatctctaatctttatctctaaatagaagctttctcattctctgttaactgcgttgag

SEQ ID NO: 13632 - DNA, 201 bp, Bos taurus
tggatgcttcctaaggccctggttgttgttgttgtttagccaataaatcatgtctgactctatgccaccccatggacaatggccctcctgtctcctctgtccatggcatttcccaggcaagaatactggagtaggctgcatttctttctctgggggatcctcccggcccagggatcacacccatgacttccgcattggcag

SEQ ID NO: 13633 - DNA, 201 bp, Bos taurus
ccctgatgtgttcagtgtagcattactaagtgactgaaatctaaataacatttggcattataataaaaaggaaataagtgactaaaccagcctaagaggcagtgatcctgtgccataataggaattctatttctttgaactgccagtcctgtgattgtcttgtcttgaagtagtctcaagataatgaggggaaaaaaaaat

SEQ ID NO: 13634 - DNA, 201 bp, Bos taurus
aacaaaaagcaaacaacccaactgaaaaataggcagaagaccttaatcgacatttcttcaaagaagacagacacatggccagtgggcacaggaaaacatgctcaacatcactaattgttagagaaatgcaaatcaaaactacgagtaggttccacctcacaccagtcagaatggccattattaaaatgtctgcaaataaca

SEQ ID NO: 13635 - DNA, 201 bp, Bos taurus
taaaccctgcctaaccaggatacctggggccctccagtgagctccttcaggggcattatggataacaagtgatcaagagtggtctgaggctgtccgaacatgggccctggtaagcagtggctggaagttttttgcagctttggggattgttgtagcctcagaagtaggtatatctgaatttgaagaatgggggtggggggg

SEQ ID NO: 13636 - DNA, 201 bp, Bos taurus
cagatccctactaacccagttggctggcctcagctccaagccctctcttgcagttgccttcagctccctcactcaagtgtgtgttccctccctcggcatctggcctccagtgacaggaatatgctcacgtatgaagccccagcccccagcaccaactcagcacagctctgcagggccatcccagtttcagagctcccatgg

SEQ ID NO: 13637 - DNA, 201 bp, Bos taurus
aagtcccagagggaggggatgttatgtatacacacagctgactcacttcattgtacagcagaagccaactcaatgtcgtaaagcaattataggcccccccaaaaaaagaatcaaacaatgttaagttcaatgggaaaaataaatgtgatgcattcaagcaaaagtacgcctatccacccattgttttaccagcacaaacag

SEQ ID NO: 13638 - DNA, 201 bp, Bos taurus
gtggggcctccattaaaagagtgcatggtctactggggaaaacagtgtgtaagaggctgtgactctcctgcgtggggtgtgagggtgtcaggaaggcagaagaggtgacattccaccttggcctcgaagggtgtgtctgactccccagttagaaatggggagaagggtgacacatggagacattccaggcagaacactgcc

SEQ ID NO: 13639 - DNA, 201 bp, Bos taurus
ctgcatatagcaccctcataaacaaggccctagagagaccccacaccccttctcccatgtaaggttacagtaggtagatgactatcttcctatagtaagaagcaggccctcaccagacaccaaatctgctggtgccttgatcttggacttcccagcctccaaaactgtgagaaataaatttctgttgtttataagccactg

SEQ ID NO: 13640 - DNA, 201 bp, Bos taurus
ctatcctcacagggcatgagagcttccccttctggtcttccaactttatttaactgtagtttttgttgattcattttgatggagaaatttgtcttattcaagctgctgttacttggcctggactgttttttgttttatggaaccaaatctatcctaatagtcctcatgtatgattactcgaactaagtttccagtctttga

SEQ ID NO: 13641 - DNA, 201 bp, Bos taurus
ttaatatacaataaatgtgatgaaaagtacaattatttttacttatttaacagaaaaattttgtttaagaggtatgcatttgcccagtgtatctttttaacttctggaaaaaacaacctatttacctcgtatacttgataactttcacaaattcataatctgttaataaagattggaaaacatgtaagttatgtggctact

SEQ ID NO: 13642 - DNA, 201 bp, Bos taurus
gaataggtaacacattctacatagttccaaatacaaaagaaacaaaaaaagtattcattgaaaagtttccttcccacctatttcttctccgcagaggtaacctacattattagtttttgatacatctctccaaagataatctatgcacatataagataatacatatatatgtatattttttttcccttttttacacaggat

SEQ ID NO: 13643 - DNA, 201 bp, Bos taurus
cattctccatcaggcctcttctccgggccttccccaagcattccattccatctggctttaccatatcccagctgggcggatcttgggctacccaccccctcagtaggaccctgggccctggacggggctggacctgccccatggcccaggattcgaagtgaggttcctagttggaaccagggactggtcagactgccccac

SEQ ID NO: 13644 - DNA, 201 bp, Bos taurus
cactctgcaaggggcgaaccactggggagggttcttaccaaactcctcttgtccactcctatctgaccccccagggccatctttcagaaaactctggagtggggggaactggctccctgcccccagaagctggaggagaagggtgaccagagagcaggaggaaagaagtaatgggcggcaccaggccctgtgtctggagtt

SEQ ID NO: 13645 - DNA, 201 bp, Bos taurus
tgaggtcctgacttgcccaaggtcataaaataactggccagcagagctgagacttgaacttcagccctctggtttccaatctggggccctttctaccagatagtagttaaagcattaaagacagcttctatagtcccttaaaaaccccagtatgattcttttacaaatttaaagactgtgacgtcatatttacattttatt

SEQ ID NO: 13646 - DNA, 201 bp, Bos taurus
accagtgtcaggaacattagggttgtttcctggtcctaggatcctggaccttcgccagagtctgtggctctgcctggtggcctgccccatgctcacactgtgtctctgaacctacctcatgtccccccaatcccttgcttaaccatacgctccatagcgtgctgtctccaggacagatcatttgtttgaggaagacggaag

SEQ ID NO: 13647 - DNA, 201 bp, Bos taurus
ttcaataaaaataaagtaaaaatttacttccctttccctttgcaatagaagcacattcttagatttagacttactgatggccctccttattcacaatcctattctcttcccatctgctaaatctggagagtatagtcatgaggtcctctgggcaacaggctgaagaagtacctgtaggcctgaggagctcagctgcgtttc

SEQ ID NO: 13648 - DNA, 201 bp, Bos taurus
cagaagacacaacctgatttttctttccaacatgcaccagatttgggatcagagagacagaccaaacctgggtttgaggtctggctctcccagtaatacctgagtgacctaggtcaagcttcatgatttctcggagcttcactttcctcacctgtaaaatggaagtgaccatttctttaggtgttgagatgactgagatat

SEQ ID NO: 13649 - DNA, 201 bp, Bos taurus
ccacatttgtgggaaagtgctataggttaaatatataatcttgatgctgctctgtacctatagaacccaacaaaggaggctgggattgggatgggggtggaggtagcggggatggagtttcagctattgtaatagatgtggtacccaaagatcatatagtcttctgcatcaactggaaccatgtcaatataaaggccccac

SEQ ID NO: 13650 - DNA, 201 bp, Bos taurus
ggtcatattttgaccataggtggattcctatgcaaattcatcttgaaagaactggtttcctattgcaacccaggaagaactgggaagatcactttgaaacgttgggcaatgtttttttttgttttgtttatcaagcagcacagctttctaccactccaactttttgacttaccattcccctcttctctatttcccctttgt

SEQ ID NO: 13651 - DNA, 201 bp, Bos taurus
agaatttgttagatcatgaaaatgatccacagaaacaatatgaaagtcactaggaagatacagggtcttcacaccatatcatacagccggccaacacacaggcattaagagttttaaaaagttgttactaaattcacccagtttgcccagatgaataaactggctctaacaatagcagtaggtggcatttgaagcagactg

SEQ ID NO: 13652 - DNA, 201 bp, Bos taurus
tcttttggcatgttacgaatcttgtttcactttcctgcggtctcagaggtgtttcgtgggaagttcatggtcatttgaattatttcccttaattaatgtgttgtttttctgtttccttcagtattttatgtttgtgtttggtttccagcagcttacatgtaattttctttatctagtttggaataatgaaagcctctttgt

SEQ ID NO: 13653 - DNA, 201 bp, Bos taurus
gcccaggaaaacaagtcttagtgcaaaaaccaaagtgggtatgtggttttgaaaagaggtttctctaaactcacactaagcactaccctggccacactggcgctgattacattgggctgaagccaagactctgattttgcagttttagtgtgctaccagtatttcaaaggaagctgtaaaatcctcaatcctggccaactg

SEQ ID NO: 13654 - DNA, 201 bp, Bos taurus
aaaaaaataataattgtggtcctagatgaaagcaatttttttttcttttttggaaaagatggttttctgaacagagctttcctttttgtgatgtaggccattagtgttgcccaaataggacagaaaaatgcagaagttaggaagtaaatgctgacagactcacaacctcaggggccaaatagcactacaatgatttctcac

SEQ ID NO: 13655 - DNA, 201 bp, Bos taurus
cctgctgcatggtagccagtttggtaaaggaaccctgatttctgtggtgagggaaagagagcagaggaaaggaaagctaaatgtcttgatttggggagagcggcaccttcttaatctcagagctacattgtaatttgccattgctttccacatacctgccaggaaatagctgaagatcatccagctatctaggagcttgga

SEQ ID NO: 13656 - DNA, 201 bp, Bos taurus
atatgttttccactcttctcaaaaacttctttggaaattaggacatgatggagattatgtgtgtttttcattcctaataagttcaaatgtgattggattggttttttgggaaagaggaaattgaataccttgaacctatttcttttgaaacagaaactttttttcctatcagttggaaacactcagtagagtgcaaaccat

SEQ ID NO: 13657 - DNA, 201 bp, Bos taurus
aaagcatatttcctttaccaagtaaagaaaattcttccaaataaccataacctatatatgaattatggatttaaataggaccttgtgtatggctcataaatcattaatatccttagggatgtttgctattatgttcttttctgctttcttttcttcaagagttacatcttccatgagtctcaatttcctttatgaagaaac

SEQ ID NO: 13658 - DNA, 201 bp, Bos taurus
acagggacatcccttttccttattgccactatagccactgcccttttgattcaagccacaaaaaatcattgtgggatcccctttcaccatttttgtactatagaaagtacatgctatagaagccctcctgaattatcaccacactcaacacttctcagtcagctgcttttgttaactgatcctcacatttatgttgtaata

SEQ ID NO: 13659 - DNA, 201 bp, Bos taurus
aattttcaggtcttcattataaggggtggctactccaactgcctttgtgacataaatctattttgaccattagctctcctcttccttaaggagcccccaggttttcccagtactgctccttttgcccacaggaccctttgatcagtattcaaaacccaagaggtattaagccaagtggccatttgcctttaaggttataca

SEQ ID NO: 13660 - DNA, 201 bp, Bos taurus
acacagaacggtagtctgttggtgtaaagactgctcagactgttgagtttatttttctaattgcatgaatatccacgtctgtctaatccataatggttgtctagtgtgttaactgctcagtcatgtctgactctttgcgaccccacagactatagcctgccaggttgtctgtccatgggatttcccaggcaagaatactgg

SEQ ID NO: 13661 - DNA, 201 bp, Bos taurus
cctctagcttcaagaagaatgggaaaacgaaattgtaagcttttccaatctttctaatgggaaatggaaaaggaaaagaggattgggaataaacgtggatcgggccaccaatagttttgccactagttataaatggagcagatataattttatattttaatcttttctaccacgttgtcttccaaaggttggttttggcag

SEQ ID NO: 13662 - DNA, 201 bp, Bos taurus
gtacagaatcaggtgccaagcagacaaaatcttgagttcagtagtcaccaaaaaagggagcgcttttaagcctcccatgccccaggctttgaattggaactccaagttactatatactctaggaataggttgaaccagaagtattaattgccagttttcaaagggactgaatgaaccttactggattgttatctgagattc

SEQ ID NO: 13663 - DNA, 201 bp, Bos taurus
actgatcctcaagaagaaagctcatttctaagtagacaaatagcagtggaagatgagaatgacccagaggaattaaacagtggtgagccccaaacagaacgtaagcaagaacttgaattagagtttgattcagtgccaaaggaacagtctgaactgttagtatctgagttagagcatagtctcaatcctcaagacactggt

SEQ ID NO: 13664 - DNA, 201 bp, Bos taurus
cggaggccgaatccttctctttcagcctagagcacctcgatttccaaggatgggtggcctctctaggtagagggccggcccctttaagagagaaagacagagacacgtctacgaacctcgcgcgaagaaggaagggaaattaactgagtccccgcgaccccgcctccccgccgcggcccggccgaaaccaaacctcggggt

SEQ ID NO: 13665 - DNA, 201 bp, Bos taurus
tttgaaacattttttctttaatgataaaaatataaatgataatgatgaactcttaaagcttctgtattagtagtactttattggataaggtgctttacaagttgagtctacagtattaaattccacactcaggtacatttgtttttttcttacatgtgatgtttttattgatatttgcaggttgctttatgggaaacagta

SEQ ID NO: 13666 - DNA, 201 bp, Bos taurus
agtaattgaattactgaagcaatgtaggtaaactgaatgaagataacaaagaaaacgtggaagaactctaaaggacacaagttaaaaaagcatgtgtgagtaatgtaactaatagcatcagtcaacaacaatcccaccagttttctaaaaacaatttctagttatttataaatatttataaataatctaagtgcaatgtat

SEQ ID NO: 13667 - DNA, 201 bp, Bos taurus
atctcagaatctgcttcccaagaccctggcctgtggcagcagggagttgatcagcaatccgctggcttccccataaaagggatgggactttcaagaggatgtgtattttgtttcctagtgttgatgggttcctccagtcactcacagtctcttagaagggtcctctgagagcaatgacttgaaggataaaattcaaaagta

SEQ ID NO: 13668 - DNA, 201 bp, Bos taurus
attggttcattaagcaattcaatcccaaactgtaaaaagtttaagtttaatcctgcctgaagcctgactgatcctgtcataaacacttttgataaaccttacacttaaacctggtcttgcagttttattaatctaacaataattcaaagtgacatcccatgtagcaatataaatctataagatggatgtcataaaacttac

SEQ ID NO: 13669 - DNA, 201 bp, Bos taurus
agttgtggttaggcaggtattctgtgggttgttttttcctcctggttatgttgccctctgagattccaaaactcccaaaagcgtttcctgctgtgagagggtttcttgctgtttggaatcttctccttcacaactccctctgcagaatgggactccatccctaactcttttgtctctctttttgtgttttatattttgtgc

SEQ ID NO: 13670 - DNA, 201 bp, Bos taurus
ttagatctcatcatttaaggtatttcatttgtaagggcatttgtgcagaagttttttctttatcagtagtgaatatagggaaagtcattcttccattattgaaaacataatgaaatcatctattacttctttgctattaactctaatttgaaatattccattccagtgtgtctaaattcatttgtggtgaggatggaaata

SEQ ID NO: 13671 - DNA, 201 bp, Bos taurus
gggagaatcacttgaaatgttcaagtgtcctattcacttgtggattacactctggagcagcatctcccaaagtgtataaagaaaattaccttcatgatatgttgatttgatgaaataggttaaatgaaaagaatcaggaaggacctaataggtgaaagaaagtgaaaatgatttttttactgcaggatttcgcccaacttt

SEQ ID NO: 13672 - DNA, 201 bp, Bos taurus
ttgccatcgcaaaacatgtctctgtggtgtatggattattttaagctgaaaacaatcaaagcccaaaagactcaggaagaatctttgactttcccccaaccgtctaaacaaatttagatagaagacctattccaggaagggagctatcaccatagataagtattaataaaatatgaacgaggtgtgacagacaggaaggag

SEQ ID NO: 13673 - DNA, 201 bp, Bos taurus
attttaattaaaagactgtgaaatgaaaagatttccttacatattaataaacaaaaaatatcacagccatcagtgaatttcggcctccaaatatgaatcagttcagttcatttcagttgctcagttgtgtccgactctttgcgaccccatgaattgcagcacatcaggcctccctgtccatcaccaacttccagagttcac

SEQ ID NO: 13674 - DNA, 201 bp, Bos taurus
ttatgtactaatcaaactctgatttgttgaaggtaccaacaacttctaacttcacattatgaaggtaaagcaaagataatctcagtccagggccctgaccattaagttcagttcagtcgctcagtcgtgtccaactctttgtgaccacatgaatcgcagcacgccaggcctccctgtccatcaccaactcctggagttcac

SEQ ID NO: 13675 - DNA, 201 bp, Bos taurus
taatacattttgaaattttaacagtttttgtctttaatttaggggtgagtcttaaagttcagaagcctaacttggtatcctgctgacagtctttctgtctgtcccagttcctactgtcatcttgggatgacctgtatgatgccttgccaatatccttgagctattttgactggcttcatcacattccaggaacttaactat

SEQ ID NO: 13676 - DNA, 201 bp, Bos taurus
accataaatgccagtaaagaaggggaacctatatagtggtaggagaagtcatgaaaacaggaactttgtttttttagtaactgagtcttattttaactgggaagggttaattttgactgcgtactagatctgcttctgtgacttcaactcttattttgacgcttttgttattataggtatacataatggtctgcttcaggg

SEQ ID NO: 13677 - DNA, 201 bp, Bos taurus
cctatttagagagtattcaaagaaaagcttttaaactgtgagttttcttaggtgctgaaataaaaataatatatattaattatagtttgtgatcacaacatatttcaatgactttgttgctgtgctgtctccactttatgtaaataaaattttcatttaaaatacattcttaaaacctagaagttagttgacaaaacaaca

SEQ ID NO: 13678 - DNA, 201 bp, Bos taurus
aggaaagtttctacaaacttgcttttatgtacagtaggcggaggtgaaatgaacaattttgatagatggaaacagttgtacttttatgtctgtctggaagaaaacaattgttacttaaaagaagaaaaaaagatacctaatataaatgagatgtccaatgctatgctatgtccaatgcattagattttaaagcaatttcta

SEQ ID NO: 13679 - DNA, 201 bp, Bos taurus
gaaccgcaggagttggtgatgaacagggaggcctggtgtgttgctattcatggggtcgcaaagagtcggacacgactgagcgactgatctgatctgatctttgatctgatttcagatctctggcccagtcgaaaagtttatttatgcatagatggcatcttaggaggaacttagaagaattggggtggtgcaggtcagaag

SEQ ID NO: 13680 - DNA, 201 bp, Bos taurus
ctttggcgatatccttttgaatacaagatggcctgagctcactgggtgtcagttcaaaccaatttgaatcttttgaagatcgagatattgtagcaacattatgtgaattaggatcaagttccccaattctaacatttaatcttgcactctgttccagtgcacaactggacagattccaatagcaaagaatatcattttcag

SEQ ID NO: 13681 - DNA, 201 bp, Bos taurus
atgttgctgaatctcagtattgatccctactctctgcttaaagactattttagaaaggtgatgcccttgcaactctttgtgtatatatctgacatagaatttaagaaagggatgaaatcacttctgatatccctttatatttgtcctggaattaatccttgtatatggtgtaacttatatagaaaagaaagtcacttttct

SEQ ID NO: 13682 - DNA, 201 bp, Bos taurus
gtaaagtttccattttgtggcttaggaattgtccaactgagggaaacaacaagaccaggaaagaattcttgcttctgttgaaacctttccaaggggtagggggttctttggaagggcttgttagccatttctcatggactgtgtaggcagttaggaagaagggaagcaaaacagaatggactcttagtttagaggatggtg

SEQ ID NO: 13683 - DNA, 201 bp, Bos taurus
ttcctttgctctttttctctgtgcaatagtaatacataacaagacgacatgagaacatttgtagaaatttcttttgagaaaatgttgtgttatttgagttattttcatttacaacgtatagaggaacacgggcttcccttgtggctcagctggtagagaatctgcctgcagtgcaggagacctgagtttgatccctgggtt

SEQ ID NO: 13684 - DNA, 201 bp, Bos taurus
aaatcctctttatagaatcctatttttaaataaatataggcccacaagtactgtaaacagaccttattgttttagagaaaaaattgcaaactacctataactgtagagaagccaggccaaacaatcagtagctaaactgtgtacagtttttattttatattttaagagttgactcaagtattttttaaaaagaaaaaatat

SEQ ID NO: 13685 - DNA, 201 bp, Bos taurus
atggacaggaaggcctggcgtgctgcgattcatggggtcgcaaagattcggacatgactgagcaactgaactgaactgaaggactgatgaacctactctgcaacaaggtaattatattcataggccttacaattacttatacataattcagagtattcaattaaaaaaacactcacaatttagattacagaccacacttaa

SEQ ID NO: 13686 - DNA, 201 bp, Bos taurus
tttggatgtaaagcactatgaagaaaataaatgacagtgaagagatacagagaactaaagcacttggttttcctcttattgggacataatctcaccatgtgtctctgctcatagaatgattcatgtagaacaaaaaaataaagcaatagagagagtgttaaataccgtatcaacatccttgtgttgatgatagggaatgga

SEQ ID NO: 13687 - DNA, 201 bp, Bos taurus
gtatccagtctagcagatagagggagctccaaggaacatacagatttttgtaggcagaagagagcaggaaccaaagtaatataatgttaagtagaggatttgttattataagtttacttttcttttggggatagcattgatctatcagacagattatgtaatgtgtgctcactagatgattcctgattgacttgtagaaga

SEQ ID NO: 13688 - DNA, 201 bp, Bos taurus
gccacatgggaagcccagataagccttaggaagggactaagactgaaactgtgacatacatcagatatttaggcaacttctcttatagagaagttgttgctgtttctgatgtttagtcagtaactcacgtccaactctttttcgacctcatggactatagcccaccaggctcctctgtctatgggacttcccagacaagaa

SEQ ID NO: 13689 - DNA, 201 bp, Bos taurus
ctctggaaaatgattttgtgacacatagttaatgccatttcccttacattttaatttgttggaggaaatatctttcttaacatattcaaatcaacatttactcaagtaatattcatttcagtggcctcatctctgcctaaaacttcgtgaagctaagaattgcatttttttttcaaacaatgtctatgtgtatatactctt

SEQ ID NO: 13690 - DNA, 201 bp, Bos taurus
caggatatccgcttggccattggccttaatgacttgtacgtgtgatacagaattaatgcagaatcagggtaagcagcaggaggattgaggagaaatgctgcggccaggacaagaataggtaaggaaaacccttaagtgtacatttcccaaaaggtacagaaaatggactttagccttgcctgtaagaacaggcccaggaac

SEQ ID NO: 13691 - DNA, 201 bp, Bos taurus
tacactgagtcagtgatgccatccaaccatcccattctctgtcgcctccttctcctcctgccttcaatctttcccagcatcagagccttttcaaatgagttggctcttcacatctatggtatacatagtccttatttataggaaatttgaagattattacaatcttgacaatattaatcttctgactcatgcccctaccca

SEQ ID NO: 13692 - DNA, 201 bp, Bos taurus
aatccttgcatgtcatgtggttctcattgcagtcatctgtgttcatctctcagaaggaaaaataatccattttatatttcaataaatatcaaagtaatcattagcaaaaaaatagcttccatggagcagagattcaagaaagagcagttctgatgaatgatttgtagaatcgagtgagtccttctttagtccagtgagatg

SEQ ID NO: 13693 - DNA, 201 bp, Bos taurus
agagagaagtgatgagaaactaaattcaaaaggcagaatagaaagggcggggaaataaggaagtaaagtaaaaagggccatcggtcttgaaaaacatctccaggaatggtcagcctttggaagggatgtattaatctcttctttcttgcagctattcactggtaggcagggtcagattatctctttgtgagctgaataaag

SEQ ID NO: 13694 - DNA, 201 bp, Bos taurus
acactcagtttagttcagtttagtcgctcagtcactcagtcgggtccgactctttgcgaccccatgaatcgcagaacgcctggcctccctgtccatcacatatgcaccctaacactcttacattcttcagatcagtcagatgagtcattcagtcatgtctgactctttgccaccccatgaatcgcagcacgccaggccaga

SEQ ID NO: 13695 - DNA, 201 bp, Bos taurus
tataataattttcttctaaattttgagaaacacaatggactgtaaatctgggttacacctaaagagcagggtaagcaggagtgaatatccagctaaattactctataatagcagaacagcctggagtgttaagagactgcatacaaatggatggtgggtcagaatatatgccaaagagcagataatgaaccaaaaagtgat

SEQ ID NO: 13696 - DNA, 201 bp, Bos taurus
ccggccccgccgcccctccaggagtgcccggggactcaggcgcgcgcacagggcgcccaggcggcgtgggaacgcatccagggatccatctgttcttgtgctggaaaggcctgaggacttcacttatgcagcttttgaagaatttttttttccccccgcccggtcggtgataccagaagggccataacctggttcaaactt

SEQ ID NO: 13697 - DNA, 201 bp, Bos taurus
agcccaggggtacataccaggcctctgcaaggatttttaaaagaacctgataattaattgcaaaactgtaccccatctagtgagaagctaacagagcaaatggcctagtaaagagtggaacatcagatcagatcagatcagtcactcagtcgtgtccgactctttgcgacctcatgaattgcggcacgccaggcctccgtg

SEQ ID NO: 13698 - DNA, 201 bp, Bos taurus
gcctgaacagaatgaaaaggcaaaggaagggtgaattctctctctcccttaacctggagtgtctatttcctagtgcctttgagtgtatgagcttcttgttctctggcctttctgtttctgggacttataacatacccctggttctcaggcctttgtcctcaaactgcaggttacaccatcagcttctctgattttcaggtc

SEQ ID NO: 13699 - DNA, 201 bp, Bos taurus
gtgggaagattagctgaaggaatgtccttgaaaagagatgggatctagaaaacaagcagaagggagtgagcaatgacctggaggcctggacttcttgtggagactgacaacactgaccagcatcaacatgagtgaagtgcacagtgagagcagtggggatggttgaaggcagaaaacgctgggaggtgtgtggaggccagc

SEQ ID NO: 13700 - DNA, 201 bp, Bos taurus
ctttgataagcaccattagcaaacacagatggcctaacacactgaacaacctcctctgaagtcctccaatacttttccatcagctcagcaaagcgcttaaaaatcctctggcctctatttcccaggtttgggttaactctttctaccctgttgcaacagccttgaataacacctttctttcctgtttaactctgtccagca

SEQ ID NO: 13701 - DNA, 201 bp, Bos taurus
taagtatgaatggtattaaaagactttgtagacattgtttgatttggaaatcgtggccacttgatcactatacaatctgtcagtttccccaaagggttatgttaacagttttttccttcttttgttcatcagtgattgcagccatgaaattaaaagatgcttgctccttggaaggaaagttatgaccaacctagacagcat

SEQ ID NO: 13702 - DNA, 201 bp, Bos taurus
atatgaaatatatgatataagattgatgaacttcaaaaacatagcgctaaggaaagaagccagactcaagagaccatattttagattatttaatttatatacaccaaccaggataagcaaatctttggtgacaggaagtagatttgtgattgccttgggctggaggttggaatagcgagtcactgaaaatggacagaaggt

SEQ ID NO: 13703 - DNA, 201 bp, Bos taurus
gaactaagaggaaatcaacatggccagaatgcaggcagtgaagggacgcatgctatgaagtgaagctggagagggaagcagagaccagattatgcagacacgtgcaggccagcagttaaagatgttggtctttatcctgtgaaaattgaaaatcattaatgtgctttaagcagagaataacataattttgaattttaagat

SEQ ID NO: 13704 - DNA, 201 bp, Bos taurus
cacaagatcttaggccactaacaatttaccttctggcttgagcaggcattttcttgggttcacagcaacagtttctaaggcccctctctcaactttcctcctagcatttacaaagtcagagtcagcaagcatcagttcagttcagttgctcagtcgtgtctgactctttgtgaccccatgaattgtagcacgccaggcctc

SEQ ID NO: 13705 - DNA, 201 bp, Bos taurus
gctactctttctctgtgtgagaacggtaatagcttttggttatttgttgctttcaagcgtgaggaattagctttctgtatatgtttaagagagcttttaagttttctctggccgtcagatatttgaggccgagaaggaacgttttgttcttgaggggatagtgaactaaatgcaaagttatagttgcaatagttaaacttt

SEQ ID NO: 13706 - DNA, 201 bp, Bos taurus
catcaaggttaaacaacaatcatcagcatcctattctattataaaccatctaataaaacaggaaggcaatacaatgcaatcaataagtttcctaattgctgggccaagaccacactacttttgaaaacatacaaggtggtactttagtttcctgatacaacaaaggatgtgatcacaacaaaggatgtgatctggactatc

SEQ ID NO: 13707 - DNA, 201 bp, Bos taurus
taaaatacatatttccaggttctatcttcagaaatcctaattctatagatttacagtaaaggtgtgggatgttaaaacactcccagttaaatctgacatatatctttcgttaagaattatttctttaaagcttatttctggggcagatgtaatcattgtttactacccaaggaacaagtaagcaggaaaatgtagaaaaac

SEQ ID NO: 13708 - DNA, 201 bp, Bos taurus
aattatttctgagcactgtacttaaattgttctatgctttgtacattcagggctctttctcccagatcgtctctagttaaagggtgctagattatgaggtagaactctgaggggaaagcaaagctgcagaacaatcctgttttccacgaggctctatgatggggactgcagtagctttgatgtatgcggctcccagagcat

SEQ ID NO: 13709 - DNA, 201 bp, Bos taurus
gtccacagggtcacaagagtagggcatgacttaagtgactaaaccaccaccatccaaggggagaaaaggactagctgttctcacctggccaggaactacaagcttaatgacaaattctaaggtgtcaatctcctctgcaactgtgctatctggaggacactggggaggcagtctgggccataagacttacttgagcccaga

SEQ ID NO: 13710 - DNA, 201 bp, Bos taurus
aacattgtggttcctttgactttccctctggattccgtttctaaactcaacaatcctagttgctctcctggagggcacgctgtactcacactgcattctctttgtaatttggaaactgtagggatggagtatcactttcccagtcctgttactagactgctggtaacacagcctacctaagaccacactagctttacttgg

SEQ ID NO: 13711 - DNA, 201 bp, Bos taurus
agagcttgggttttctggtaagatcaccagctttctggtcaaagacattcttgaagtcattgggaacagaggattggagatttggtgtctgagcccatgtgttctgggttccatatctggggctcaagagccaacaggatcctgtgggactcatgtaaggttttccaaggtgacgagattctaaagttcctaaagctcagt

SEQ ID NO: 13712 - DNA, 201 bp, Bos taurus
agtatgagagcatcactgcctcttctatttggaagtagtcttagaggtcaaccagtctgatccccagcaggatcagatctgcagcagcctgagaaaggcccgcccacaaacacacggaggactcaagtgcctgccaagtttgctgaggacaaatatctccactcctcactaggcttttagggcagacccagggcattaatg

SEQ ID NO: 13713 - DNA, 201 bp, Bos taurus
tttagttatttctcatctgtctccccttgagggctacctagctcactgctgtatgtccagaagagtgattctaaaccctggccgcacgttcagatcactgagcacttcatttatttctggttgtgctgagtcttcactggtgggcgtgggctttctttagttgtggagagcagagactactccgtgttgtggtgcccgggc

SEQ ID NO: 13714 - DNA, 201 bp, Bos taurus
attcagaccctagtgactcttcatcggaaatgtttttgacagaatctaaggatgagaggaagcatagaacttagaattaggcagacttttttgatcttctgagatcttaggaaagagacattgtgtgtctaaattacagctgtctttcagggactgtttagttaagcatctacgatgtgcagcaccctgggaatccatcag

SEQ ID NO: 13715 - DNA, 201 bp, Bos taurus
agaggccttctaaggaccatagccaggcaccttcaagttggcattcagggggacccagaatttccatggttttcccaagcacccaaagcccccagccccagattccagatcagaggatgggcctctgtgtccagaacatggtctcaccaagcagagtgggcttagatagttctagccctgtccgagggcttggcagaaaaa

SEQ ID NO: 13716 - DNA, 201 bp, Bos taurus
ccactggaccgctagggaagtcctctgttttgtttttaattatctttttgtgtgtgtgtctgtaagcttgtttcagttattgatactttttgacaattacgcatttggaattttctagaactgtctcagagaaggcaatggcaccccattccagtacttttgcctggaaaatcccatggacggaggagcctggctgcagtc

SEQ ID NO: 13717 - DNA, 201 bp, Bos taurus
cccccggtactgcgcggaagggggcggccctggtgcctcttcaggacccaagacttggcgaaacttttaaacccagatgttgctcgccggaaaaccggccggcacgtccggggctaggttggtgggtatctgagggtcgtctctgtcagagccgaagcggaggggctgtgtgatcgcggccccctccccgtgttctggtct

SEQ ID NO: 13718 - DNA, 201 bp, Bos taurus
gtcttgaatgttcccgttggcatcttcatcttcacctgtagtcagaactccaagctgtcactcactctggcatcagctgctgctccttggcccaagtcttgtggctgccacagtgtggagacacagtcccagtgaccttctctggcttctgctctgctgatgcagctgtcagaagattttccttaaagtcccccagggcct

SEQ ID NO: 13719 - DNA, 201 bp, Bos taurus
ctctgagaatgaggggtaaatgggggcctaggaagtttcatcaggagtgccatggcagagggactcatctccaggagcatcttagcactccagatgacactgaattcgccagaaatggcctgtcaagctggaggaactcccaaacaggtacaggaatatgaaattcctgggtgtcatctagggcagatttatggaaatatt

SEQ ID NO: 13720 - DNA, 201 bp, Bos taurus
gtcagtttacatgcccttttctctattaagtcagagtttctcccttcccctccccagaaaaaaaatacaccaggctgggtgtctctagcaggcagaataacggccccctgtaaagcacgtccatgtcttaattcccgaaacgtataaatatgttatggcaaaagggacattgcagatgtgattaaggatcataacaaaaga

SEQ ID NO: 13721 - DNA, 201 bp, Bos taurus
tcccagccttgacctgagcatctgatgactagttcatggttctctgggtcccaaggaccctcctaagagagaatggagatgggtggcagggggtgttcaccgaggccaccccttcccccaagcctcgatcatgaaatcagtgagatctgccccctccccaaggagctcaccatcagcaacctggcaggccgcagggagcca

SEQ ID NO: 13722 - DNA, 201 bp, Bos taurus
agcctaagtcaggatcagaggtgggaactgaatgttctcagccttcctgaggggaggtcagtgactcacccaatagagtaagataaaggccaccatgactgaggaagaggtggacctgtgagaccatggctggattcactagagacattggcagaggcttggatgaggaggaagtctagcagggaccacattcagcaggga

SEQ ID NO: 13723 - DNA, 201 bp, Bos taurus
gaaaagctgggcacacacggctgcctacatggcctggttcctaaaaccaagaaaaaggaaagtgagattttccttggctccacgtctgattcccaaatgccgtggggcggggcctcccacctcgagaaaactcccaccctgggggtcccatgttctctgcttggagggtggccctaatggctcgccaccagcagaatgccc

SEQ ID NO: 13724 - DNA, 201 bp, Bos taurus
tctgtgccctgccctggggaccctccccagatgtgtgagtctcaggtccttcccagggctacagaggcactgccaccccaaagggccacagttgccagtttagaacagcagagtgctgtccagaagtgacgagacagtgccatgggcgaaacctctgggggaccaccttagcccaccctcatggccccgactcatcattcg

SEQ ID NO: 13725 - DNA, 201 bp, Bos taurus
ccggtccttgtgggaaaactggagcagcctcctaatcaggcttgtgtgtctgtttctgcctttttaaatactccctacctcttcagtgaataggaaagagcgttatggattggaaggcaggccatcagcagaattttgtctttttattttatgtttatttttaatcagtctttattggagtgcagttgttttataatgttg

SEQ ID NO: 13726 - DNA, 201 bp, Bos taurus
gtttcctgctcttctccatcattttatcttctctatttctccatttctcatctgcctatatctggctatatctggccaccccttcctttcttttcaccccgccaggaaagagaaagtaataagataccattttctagttgaagaaacaagcctctaaaagctttcccaaggccactaaggcaggcagtgggagaactgaac

SEQ ID NO: 13727 - DNA, 201 bp, Bos taurus
tgaccgttagttttccttgcaattgggggactgccatttcccacagtagggcgcagagcccgagctgccagaatggctttgttatttgcccttgtgggcctctttgcctggaatattcttcccctgagtgtcctccatggttctgcattgcactgagatcttgtcttaaatgggccttcacagagagtgcttttttggcca

SEQ ID NO: 13728 - DNA, 201 bp, Bos taurus
gggccttgtcactgaccactggtctagtgattaggagctggtctctccctgcagcaacctaacctcagtctctgacaaggaactgaaaacctgcttcaagccactgcaggttggggccactaaagtcaggaccaggccctcaacatcctctacaatcaccttccctctctgcctctgccatgcatctgcttggatatgatc

SEQ ID NO: 13729 - DNA, 201 bp, Bos taurus
cagcccttactgatctggccaccttcatttacagagggggaaactgaggccatagaaggaaagaaacctgctaaatgccacccagagaccactgaccatcgaagaaccggcacccaggtctccagtatccattcccagctacatagctctcctctcggcctctagctgggggagcctattacttccacacctccctgctcc

SEQ ID NO: 13730 - DNA, 201 bp, Bos taurus
cgcccgagggtccctgagagtgtcaaaagcacaagtgtctgagacctctgatatctggtgccatctgtctttgggggcctgctgtgctttggtttgtcccgttgccgttcactattggttcacttcaagagccggctgtccctcattcttgcccctggggtctcctaggacactctctgaactaatctcaggcctttcttg

SEQ ID NO: 13731 - DNA, 201 bp, Bos taurus
agaaagagctttcatgacatcccgttcacaccatcatattggacatcaggtcactctggggccaggccaggctgacgaagggggccgtgggtgctgtcaagtcttccaaggaccagtcagcatcccacccacacagtggactagctgagtgccagttacaccgcagacccttcctcacctgtgaaggcctcgaccttccct

SEQ ID NO: 13732 - DNA, 201 bp, Bos taurus
ggagaacctaccagactcagggatcagctcagaaactgtcccgtcagccagagagcaaatggagacaagctgactgcctggtgtggggtgtgggatggggctacggcccaggcttctgtcattctgggactccgtctttgcctttgcaaacttctcgtctgtgttttctccgaggcccggctcagtggccggggaatacaa

SEQ ID NO: 13733 - DNA, 201 bp, Bos taurus
cagaaggtttggggcaatcagtccagataccaggctggcaagggccaagatgagagtttgtcccaaacctgctggttctcaaaacagttctccttccatttcttgaacaaatgataggccatctaaatgttaatataagacaccaaattggaaaagaatcagatgtcataatgttgtcatggtagttattatataaatggt

SEQ ID NO: 13734 - DNA, 201 bp, Bos taurus
caccactgtccaccccaggtaacaccaccagcgttggcaccctgctctgtgcccacagccagcttcccattctgggccacatcataacttttgtggaccctttcatccctcccccaaatattaactttatattttacacctgcattagtataaagatgacctgggccaggtgtattattatctgtgtagtgtctgatgcac

SEQ ID NO: 13735 - DNA, 201 bp, Bos taurus
ggagctgttagccccaatctgcagatgggcctgctgaacctcgtggggtaggtggagggtggctttctccagcccacacaatgacttttgtgacagagccaggacccgggccagctctgcaccctcctccaggatgtgtcctgttatacagcagtgccctgaatgcagagttcaaggctgtcagctcttttttatgctccc

SEQ ID NO: 13736 - DNA, 201 bp, Bos taurus
ttcctgccatcacttctgagaagcacagaaatctggctttggccaaggacaggtctggcctttgccctcggcttctgggaggtgacctgtgccattcagcgggaatgtctttgtttaggctggggctgaccacgccagagagaccactagtgtgacctgggatgggggctgtgggtcagacagtaccagtgggcctggaga

SEQ ID NO: 13737 - DNA, 201 bp, Bos taurus
ctacaccagcagagttcagaagctgcaacagagatcacaggccttgcagaccctaaaatgtatgctaaatgtctgctccgttgaataagtcagaccatgggtgtggggcttttcgcaggtgcctggcctctggtcagtgtcctagagatatcgctttgtcactatcatcattctcagatgcttagcaaataattgttacct

SEQ ID NO: 13738 - DNA, 201 bp, Bos taurus
agtttcggatgacaaggcacagggaagctctaagcaccacagggcactgtggttttggagactgcttcttccagttggaaatgcctggggcctgggaggcatggtggtttggagacctggaaacacgtcgcatagtacactaggggtccagcagggtcgggcagggagcagaggggccccagacccacgaatcagtctcag

SEQ ID NO: 13739 - DNA, 201 bp, Bos taurus
gatgtgacccatcatttacttaagatcaacagtgtgaaatgtgttacaagggatgtgggaagtgaaatatggcagcagccttcaagtcgatttctgaatttgaggcaaaagcgagtcttgggaccatggctcataaatcattccactgatggctggagaggtggctcctgtgaggtcacctgtgcaagaaggttggaggtg

SEQ ID NO: 13740 - DNA, 201 bp, Bos taurus
ctgaagcaggtgtgaggccatcagcaataagagttcagttttcctgacatttaccaggcaccaaatacatgccaggcctactgcccaaaccaggatgtagcgcatagcttagcttatccctccatcactgagactgttttcaggcagtggggcccaaggcaaagccctgggccagaggtgaaggatgaatatgtgtgtgtg

SEQ ID NO: 13741 - DNA, 201 bp, Bos taurus
ggttgaaatgacctggagacaggtgtgggtctagaggaaggttggggctgaattcataggttggaaagtcatcatcagaggtcattgccggccagaggagaagagagaactatctggggcagaggtcagcaaactccctgcaaagggacatacagtaaatagttttgattctacaggccatgtggtcagctcctcagctct

SEQ ID NO: 13742 - DNA, 201 bp, Bos taurus
ccattcagacaggaaatgtggtgaacacttctagtcccctgaactaaccagggatgcagaccagggtccaatcagatgcttgcaggagatgtcacaaggtcgctggctttgaggaatcaatcctctgtagggagcatgttaacatcgctgctatgacctgtttacactgtgcagcaagacatgaaacaaacagcgcttctc

SEQ ID NO: 13743 - DNA, 201 bp, Bos taurus
acagattcctggtagcttcacttctgggccagatgttcagtatatggttattcagtgacagagaatgcgaaactggcagtacagaggctttaggggtgacgcaggaaggcagtacagtccctggcctctgattggtgattcctatcaacagttattggggcccagtaagtagaaatgatttaacgtccatttccagcattg

SEQ ID NO: 13744 - DNA, 201 bp, Bos taurus
ttagattacacagctggaggttgagtcttgaggggctgggcaatattggagaggtcaggaggatgccgaagaaatggaagatgggcacagacgggcagctcggaccacaatggccagagcagggctcagccaacaaggtccagagcctcggagttcagggaggtaaacgctgagaatcatgtgacactgtgtgctccttgt

SEQ ID NO: 13745 - DNA, 201 bp, Bos taurus
cagtgtcgcttccaccacattccatcagccctgagacctgaccaatccatgttcaagtggcgggaaatagactccacttcacctctctaataataggaaccgctgctgtgtgccaggccctgcactaagcattctaggtatattttcttgtctgcttatagcaaccctgcaaggaaggtgtataatctcactttatagatg

SEQ ID NO: 13746 - DNA, 201 bp, Bos taurus
ttggctccagaaattctagtgtttcattttcgggagtttctcaagtttgcctaaaggtattacataatgtatgtcatatgcacagtgtctcttttctaaacatctggaaagtcctgaattctggaataatctgatccctggatgagctgtatcaatttataacacctctgaggacttctctggtgctccagttgttaagac

SEQ ID NO: 13747 - DNA, 201 bp, Bos taurus
gcctggtcctggccctggccctggccctgggatgagtaaaggcaggataaatactgacttggtgtgtaagttacataaaaggggcggttggcttgcatacgtgaagtgtgcactgaggggtggatgaaatgctcactgtcattaataatgatccatgtgtcaaatattcgataagcactgactgtgttatactgaacatag

SEQ ID NO: 13748 - DNA, 201 bp, Bos taurus
atgctttgatttgaccttgcaaaaatttgctttgtggtggattctgggaatttaaaaacataagttactaaaagctgcctcactttattttaagaatcttttataggtcaatttccagtttgattgttgcagttttattaagcatatgaaattctgctttgcctataaccactttatttggtgggcgagggaagttttaat

SEQ ID NO: 13749 - DNA, 201 bp, Bos taurus
aaggcacctggtggtaggtagtcttccttacaagggccaatgggattggagggaaggaaaaaagaaagcctgccccttacaggtgaactttgccagcctcggcagctagtaccaaggacaggggccactcaaattctctctccatctccctctctttctttttgaaacaattttatttatttttcacttttggctgcaatg

SEQ ID NO: 13750 - DNA, 201 bp, Bos taurus
atggtggccatgctggccttttccagggagacagagcaattacctcataccaatttagctctccttccaagagctggcctgagagtcgctttgccactctgtttttttaagcctggggttaattggggactgctgtatatttaataaggagcctctgagacaaagctgtgcgggttctctgtcgttcaatagtccattagg

SEQ ID NO: 13751 - DNA, 201 bp, Bos taurus
gggcttgagggaccttgttttactgtcaccagtggtttctctcaagctttgtagctgtgtgaacttggatcttcaattcagggagtgtaccttgtacgtcgcaggcacaaaatcgagaggagcaaggagaggtgcccaaagagagagacggactgtgaaagaacagctattaatttgcaaagtattaagtatgattatggg

SEQ ID NO: 13752 - DNA, 201 bp, Bos taurus
ctccaccatgtgggtgggcctcattcaagctgtgggaaagccttaagagcccaaactgaggcttccagaagaagaagaaattctgcttcaagattgcagccttaactggcatcagcctgccggcctgccctatagatttcaaacttagtctctcaaggtcagcttctgatacgtttccagctgcctggtggattttggact

SEQ ID NO: 13753 - DNA, 201 bp, Bos taurus
gactccagggcgggtctgagagcaaagcctatcttcacctcctttttgttctgctcaagcccccagcgggttggacgaggcccactcacattggcagagggtcctctgctttacctgaccactcattcaattctcatcttttttagaaataccctcacaaatacatctgcgttctgggtgtcctgtggcccagtcaagctg

SEQ ID NO: 13754 - DNA, 201 bp, Bos taurus
cagccaaagaaatgaataaatattaaaacgaacaagcaaaatgccttcaaattccagccacttctagctgtttgcatctggaatcccagcgtgtaggccacgctcacaagagacagcgtcttagactaacagaatgaattaactccacgtggggaggagttaccttgagctcctggtctccaaagagtaacaggctgagct

SEQ ID NO: 13755 - DNA, 201 bp, Bos taurus
ctatatatagcagtgtgtatgctgatattttttaggactagatttcacagcatcggttgaatctctggcaactgcaaaggccacaaggccaggtagcagtagtcctgctgggatgagcatgcctcctccagtgtgagtttttgttatactcagaagcttacccacctggccctggcaggcccttgaatttgagacccgtaa

SEQ ID NO: 13756 - DNA, 201 bp, Bos taurus
aaaaagcattttacaacaagtgtggccatcatcagcgtcaaggagagggctcatcacaccggggatatgaaagtgctttcttatttaaaacactctaccagggtttctcggcctgcattgtgagatactgatatattaaactgaaactgacaaaatatatcaagttgtgctaaattgcatttcaactgctaagtgatccta

SEQ ID NO: 13757 - DNA, 201 bp, Bos taurus
gctggcctgatttgctcagccaaagtattctgttatttagaaagtttctctgcggctggagtggcagaagaaccaggcggacggctgtctatttttgctgtcttctggttgggtggccttggacaagcctcctaaatgccccaaggttcagtctcctctgttgtaaaatgggaagatggagatcagttaataagctgatat

SEQ ID NO: 13758 - DNA, 201 bp, Bos taurus
agctttaggggacaagtctgtgacttgcttattttggaggccccatgtcgttggcacaccgctagggctcagcaaactgacttcagttggatacaatggttgcattaccctgagcagttttagggccccacagaaatattttaatattcatttattttaaaatgaaaacaaagactaatgacaatacagttaataacataa

SEQ ID NO: 13759 - DNA, 201 bp, Bos taurus
atggccctctgcaagttgctgtcattgttttcaaatgctttgtagttgggctgcccagatctggtcttcgcgatgggatggtgacaaaaagggttgcggatgctacagggtggcctgcctgtcacacaagtgcagccccagtgaaactgatgggagattaataggaaataatgggaccctgagtagagcactcgtgtggct

SEQ ID NO: 13760 - DNA, 201 bp, Bos taurus
aaaatatgtcagaatcattaaccattaggaaaatgcaaattaaaaacctaatgaaatatcactacacacctatcagagtggctaaagtaaaagatagtgtgtatctgttaatcccacactcctgacttattcctccactctgttatagataaaaataaggtcctacggtatagcaccaggaattatattcaatatatttta

SEQ ID NO: 13761 - DNA, 201 bp, Bos taurus
gtcaaaattgaatacaatgaccaactgccatgtacttacaaaaatcaaaattcaggaaatctgtaacatgataaattacaaaagtttagcattaagaggccgctagcttttaggaatgctcattctgtttgtcacactaagtcctaactctgttctgttataaacatgcatgcattttcttaactgtattgctatcagcag

SEQ ID NO: 13762 - DNA, 201 bp, Bos taurus
aggggcccaggaataatgaaaagaagagtgagattacctttcattgacaaagacgactatacttactctaagtgacaacagaaggaggccaagaagataactgaaggatcctgaagatcaaagggctagaggatttgctctctctttggcacaagggtctagaattgcaaaaaccagaacaaatgtaggatgctaaaatgc

SEQ ID NO: 13763 - DNA, 201 bp, Bos taurus
agttacacacctcccagcaggtcttcctccctgcttggccccagacggttcataatcacttctcttgacatccttggactactgatgttgagaaagcctaggaaccacggccctgtctcaagatgggtcccaagagaacagtgtaccagccaggatttttcttttatattgacctgggttcaagtcccagtatcccacttg

SEQ ID NO: 13764 - DNA, 201 bp, Bos taurus
caattacttgtgatttaaatagtggccatataggaagcttttcagcctgaattaatgtagtgaattccaaaccaaggaccctgtggagtcacatgaagactaactgtgggccacggtgctgtgctggaggactgactcaggtctcttcctccttctgggaatgtcacccttggaggtgacattccagagacaggcatgagt

SEQ ID NO: 13765 - DNA, 201 bp, Bos taurus
tcagtactcatggcaaactcatggggtaagaacggccgtcactctttctacagctgggaaagagttgggttggagacgttggccacatgacatggtcatgtagtggatttcatcctgactcttgagcatgggtaactgcaagtttcacaaagtttgtttattcctgcagagcaccacaaggccttggactatcttacactg

SEQ ID NO: 13766 - DNA, 201 bp, Bos taurus
ctgctgtgtgccaataagagggtgtgaccaagggggttcagtgtgtgcaggtgggggctggctcttcaccaggagctcagggaccatcagctggcctgtccccttctgtcaccatcaggactcacatctgtaaactgatggggatgagtccctaccctatggaggtcacttcaacattaagtaagcccatgcacatgaaac

SEQ ID NO: 13767 - DNA, 201 bp, Bos taurus
gcttgttttgcattggcctgaataggtcacatggtcacccaaaccacaaggagggctggtgagtggaagatgagggggagtccagcaagaagtgggagtgagtctggatgaacacaggagggcctctgtacttacctgcaaacacacacacagaagtatgtgcacttccagccctggacctggacacaggggtttcacaca

SEQ ID NO: 13768 - DNA, 201 bp, Bos taurus
ctggggcctgaggcttggcaacagggtatgatgggcctcggctgccccctcctagatgcttttatagtgaagcttccattgtaccagtttctgggggtgttgagggcccttcaggaatttcctgggctgcaaagagccatgttggcccaaattccagcttcactgaactagctcacacccataagtggtccatgggacagt

SEQ ID NO: 13769 - DNA, 201 bp, Bos taurus
tttctataagccaaggaacaccagagtgccagtgggccacaaagctaggagacagacacgggatagcgcttctcacttgcagccctaagcagagaccagtactgctcaaaccttcatcttggacttcgagactccagagctctgagacaacaaattcctgctgtttaagccattctcatgatgataatgtgttactgcagc

SEQ ID NO: 13770 - DNA, 201 bp, Bos taurus
tggatggacttattttatggactaaaataagtcaccactgattccaggaatcctctgaatcctcagctgcccctcatattttgcagcaacatgttggaaaatagataccaggcatgcaaaagctgacacaacactcactgtgtagggaacaatgccctcagcttgatcctggactaaccttggctcaggggggctgcatct

SEQ ID NO: 13771 - DNA, 201 bp, Bos taurus
ctcctgcattacaggcaaagtctttaccactgagccgccaaagatgctcttgtctagttctcagaatctgtgaccttcagtggccagaacaagaagggggctcaagaatacccaccttcagtcctgcagacgagttctctgaagaagggaacggccaaggggacaaggatttcatgagcagctacttgctcctgtgcaaac

SEQ ID NO: 13772 - DNA, 201 bp, Bos taurus
ggaatagagtgtggccaaataaacaaataaaaagtttttaaaaagaaaagaaaaataggtactcaggtctccatggttcactaaagagtattgtgcctacctccatggccgcctcttcggggggtgactgtgaaggggtcttggcctctagagaggaatgggtagagaccgatgccctggacttcatgccaggctggaatc

SEQ ID NO: 13773 - DNA, 201 bp, Bos taurus
aagggatttccaaagtcacccaaggagtaccaacagatccgagtctggaaacaaaggtctgtccaatcatgatgataataataccagctaacgatgggagttgtctgctcagcccttggtgggtgttactcctttaaccctcatgggccccaggggagtcacacccaggccctgcatgtctccagcatactcgcctgcctg

SEQ ID NO: 13774 - DNA, 201 bp, Bos taurus
taaaagatgtggtccaccttgtctaacccaccagggctagaatgacgcactgaattctcacatcagactgtctgccagcatcagtcccaggcagagtcagcgcgcagagcaaaagcaggaagcacgcaaccccaacggcaccaacagcaaaaccccacccacaccccggctctcagatccaaggaggccaggcagcctgga

SEQ ID NO: 13775 - DNA, 201 bp, Bos taurus
tcttatttgatcctcagagccctgcaaggagggccttaggcttcgctgttgacaggagagaacactgaagctcagaaagggaggtggccacccaccgagggggggcaaggcagcgggactcctctgcaacccaccccccaccagccgcccctccagcaggagggtccccactggcccccacgctgtgcctgagctgctggc

SEQ ID NO: 13776 - DNA, 201 bp, Bos taurus
ctgtctctgcctagggggacggggtcccagagtccccacctttgccaccttgtgcccattttccgctgggagtggagggccagtcttatgtattagggggcatccacagctgttcagcagagcggcagggggaggtctctttgctgtgcaacccaggcctgcagccccagggcagaggtgatactagccaagtgtgtgaat

SEQ ID NO: 13777 - DNA, 201 bp, Bos taurus
gagagcttgtgacatgtggtagctcaggtcccaggttgatgagagccagtccatgcaacaaacctccacgtgactgcgatggcctctaagtgccccaagttatcaaagcctggtttctgatagaagtctgtgcacaacatgctctgcaggtgcagccactgggcagacagtgcttcggagcctgtcaggagttggccctgt

SEQ ID NO: 13778 - DNA, 201 bp, Bos taurus
ccgagccgtgttgacccctgctccccttccgcacagactcggggacacaggtgtacattggaattggaaagtgtgtgaggttggagccgcccttgtgtctccctggcctgtcagctgggtggcctcgagaggaagagtgggaaggcttgagacgggctcaggctgagggtgtcagactctcaacagttggtctgagtgttt

SEQ ID NO: 13779 - DNA, 201 bp, Bos taurus
ccctcgccacacgtgtccctccctaacccccgtggtcttatggccccactgcagacccagtggaggttgtgggaagggagccatgaggcgtgggggagggtggtgacatccacagggccgtgtgccacagtccacacgttttgtgcagggccatcccgccaagggacacactccgggcaggctgcctgtcgccacgtctcc

SEQ ID NO: 13780 - DNA, 201 bp, Bos taurus
gcgtgtcctaatgcaagtgaaggaagccgtttgccggctaagagttaagtactttagggatacaggttaatgttgaggccaacatggcgaaagttaataaattgcctctcccgtgtatttgtctgtgaagacgccgaagagtaatttgcttcccgcagagccgcgccagattctccacttactttattaggtttgtggccc

SEQ ID NO: 13781 - DNA, 201 bp, Bos taurus
caccctaatgaattgggccatttccatgcattctcaggaagtgtacagaacaagggttttcattctcctggaaaagtttgtcttggggaggcaaggtggcgtgttggtgggcacgcaggtagttctgcaagggtcggctgagcactccggcacttcgctcctccgggcttcgacgccgccctccggggtgaagcttcctcc

SEQ ID NO: 13782 - DNA, 201 bp, Bos taurus
atctccacacgcctccacgcctgcgcctgctgtccgccacccattcctccacgtatctatcctcgcatccacacgtccatgaggaggaagggttggggccgagttcagagttcagagttcaggggcacgcacttgagccatccagaccttccaggaagtctcccgggacatggaactccctgcaggagtccctgattgctt

SEQ ID NO: 13783 - DNA, 201 bp, Bos taurus
atcctaaacatgtcccatgccattaagtaatttcctatcttatgattttttttttacctagtatcctggcaaatgactatatcataattgatttaattgacgcacgcttgtcagatatttacatgatttttaaaagttggatgatagaagttggagtgagcagctttgtttttccatcttcacgtatgtctcttatttgta

SEQ ID NO: 13784 - DNA, 201 bp, Bos taurus
cccagagccctgtgggcgggcagcagagacctcaggtcaccccggggaggcggggggtgctcacggctcccatctggcccagtgcccccctcggtgcctgcggttggcaggaccacaaagagggttttgttgaccccctgcaagggcaggcccatggggggctgacccctttcatttccaaggcccctcatcaccccattt

SEQ ID NO: 13785 - DNA, 201 bp, Bos taurus
ggttctgtccaaggcctccagctcagcacatttttcaagagctgctatttcaggctagagtgcccaacggagaaaagcgcttgtgaatgggaggcaaagtagtcctctcatggccaaggtgacagggcgggcagccagcaggcaggggggctgcaggcaggggaggctgttctctcaccactcaagtttctcccgatggcc

SEQ ID NO: 13786 - DNA, 201 bp, Bos taurus
cccccaaaggccagagctggcagattggaaggcgtggaattactggagatggtgaataggggatggagcagtctagaccggcagctgagacgaagcgttgcagatggggccgctccaaccacagacacgtgcgtgcgtgtgtgctgagttgcttcagtcgtgtccaactctttgcagccctacagactgtagcccatcagg

SEQ ID NO: 13787 - DNA, 201 bp, Bos taurus
ggactcttgctttaaatttttattggagtccagttgctttgcgatcctgtgtcagggtctactgtacggcaaaatgaatcagctacacatataaatacatgcacatatccctccctcttggacttccttctcctccaggtcaccgtagtgcagtaggtcatgttcccggtgccatacaggaggttctcactagttgcctat

SEQ ID NO: 13788 - DNA, 201 bp, Bos taurus
gtcatcccagccccagggcactaaggggttggcaggcacccgacctcaggggtctgagtgttcagtctggcgtctcctgcagtgggcctggtgtggccagattcttcttcccaaaagcacctcatctgctgagaaaatttgggaggaagcacagggcgagtcttggtgggactaactacacgagggggtctggggggggcc

SEQ ID NO: 13789 - DNA, 201 bp, Bos taurus
tggggacgccgaggccccgcctccaggccttccagccccgcccctccccgagcacacgtggctggaggaggggctccagacccgcttcttctttcctctgagggtgggggtgccgtccagggccggcgtccccctcctgtttagaaacccggaagcggaggcccagagaggccgaggtcacctgtgttgggcctgcctccc

SEQ ID NO: 13790 - DNA, 201 bp, Bos taurus
tttagaaagactggaaatcccaggaccagcgaatggaaacaatgaacaagcaggggttcgattctgatgttagacaaggtaggattcaggccaaaaagcattaaatgggacaaagggggtatgttattaggcctgaggggacttaataggaatgcctatgcaacaaataacacagcaaccaccttcctagagagaaggcta

SEQ ID NO: 13791 - DNA, 201 bp, Bos taurus
gtttcctaaaatgaggtttctacaggcctgagcctttctcactaacagtggactgacttctgtcatcttagcaactaacccttttctcccgtcccggcgcgccctggccagtgggcccagcgggcgtgtcttctggaagaagtgtcttctgaagcagtgtcccctgtagaggtgagccagctgacacccccccagacagcc

SEQ ID NO: 13792 - DNA, 201 bp, Bos taurus
tggtagggccataaagcacaggtctggatcggcccctgatgtctgtgcctttttgtaagcactcgactccctctgcaaaatccctctctacttaaaatacctggagtgggttgtttcctggcctgaacactgaatgagtccacaatggcttttaaatgaagcctggagcctttagtttggggaagatgccaatcaaatgcc

SEQ ID NO: 13793 - DNA, 201 bp, Bos taurus
agttcttcattcagcccgcagatgaatacccggccactgggttggcagtggacaagccggacacacacttaaccttcacggccaacaggccctggagaggcgggaagatggaccgcacactttccgctgcaggacggttgtgagaaatgcgtcaaagaaagggggaggatgcagggtaaactgaggccagacagggggcga

SEQ ID NO: 13794 - DNA, 201 bp, Bos taurus
gttcctttttcagaaacatagataccatccaaaaatttcctgatatccttgtggcttgctgaatctgacacaagttccgtgtggtttccttcaagactcagctcatcttcctgagcttgagggactgaataagccatgtctaggctcatctgacccctgtggatgtattttccatccccgaaattttcagatttcagcaag

SEQ ID NO: 13795 - DNA, 201 bp, Bos taurus
ctctgccacaaagtgggcctttgtgttggcgtccactgcccccagcaaggaaggtgggttggggtgccactgaacggttaaatccatggtctgatgtggtcgagttggggtgggagcctggccgtggtggtgtcacgggcgagggcccccgaagctggacaggagagaagagcctggtgtggggtgctgagggagtcgagt

SEQ ID NO: 13796 - DNA, 201 bp, Bos taurus
gcgactgatctgatctgatctgaaggaatccagctcatgtcacagaatgaatgaatgttgggctcttttctgagagtggccctttgttcctcctgccacccgccaccatcatggtggaatcatagcacacctgtgataggagggggatggaaatcctccaggcctcttggtcaacaggagaaactgaggtagaggtggagc

SEQ ID NO: 13797 - DNA, 201 bp, Bos taurus
cctcgtgctcctggcggagagtcaccgtgtcctcgagctgccgttccagccgactggagtctgagcgaaacaggaaacaagccgggatcccttacacgcgcgtggccgccagcacatctgacagaccccccagacttggctctgacgtgtgtccacaccctctccctggggacgtgagccccggggcgcctgcggcccgtc

SEQ ID NO: 13798 - DNA, 201 bp, Bos taurus
ccgcgcggtgccatcacctccattcaagctttggagggtgcgtgtaggggaggggaccggtaggagaactgcagcctcgctgaggccagggagcctcaggaatgtttggtccttactcttcatttggcacaacactctcttactgcattggcaggaacaccacagcccagagcaggcagggcctcccaagggcacacagcg

SEQ ID NO: 13799 - DNA, 201 bp, Bos taurus
aggacatgggtcctgctgaggcgatcatgcagtctgctggaggcacagtttgggaagctgctggaggttacttgagaggtggccttgcacagttgtggttcgtgtctgtgagtgaccatcagtgacggtttcctgagaggatgcagagtggaggagtccatgagtttagtaacattctctgggccatttgggagacccgaa

SEQ ID NO: 13800 - DNA, 201 bp, Bos taurus
actgcccctgcaatgctgagaggtctactccctgaagtttctctacaaaagaggaaaacgaggctcagagaggaaggatctcagggtcccagtgttggtccgaggccaggttggctttaaatcccagtctgttttcaccaccagggccagaggggcccaaagaaggccactgcggccagaaaggatggcccatcctgtgcc

SEQ ID NO: 13801 - DNA, 201 bp, Bos taurus
gcttcagccatgtgctccatagtcggcttggaaaaaccagcctttagccttcgttgtttggggtgggcacaggcaggttttgttctccttctaaactgagcgtgttcaaaagattgctggtaggtatgtgtgtgtaaatttgccatgcccagatgcatccttagagcaactgtctgagttactcatgaaagccattgtgta

SEQ ID NO: 13802 - DNA, 201 bp, Bos taurus
tcactgagggccggggggaggcttccgcctgctgggaggctgcccaccgctctgcactcccggtcctgtgggacgagggggttgccctgagggtcacctgcctgggggcactggcccaccttccctatttacagcaagaaagcaaggcccaggcctgtgctcagggtcccaggctggcacgtggcagagctgggctatgag

SEQ ID NO: 13803 - DNA, 201 bp, Bos taurus
acccccagagccctcagaaacgaggcgcagccttggagggccctgttgctgctgtgggttgagggaatgattgattaacgggtgagtgaagctcacttggacagggagggtcccaagaggcgggggcccaggttttctagtctctacgtttcgcctggggctgaccttgagctcgtgggcaaggagaaccctggactctga

SEQ ID NO: 13804 - DNA, 201 bp, Bos taurus
gaaccccatgccactgtgtccttgacccctgatggcggcctcagggcatggaatctggagtgaatcccgggagagcaggacaaggacttgtcaaggggggacggggtacccaggcccccagggaggagaggattccccatgcacggtcctagggcttccaggcccccaccgatcgccccttctgctgcttgatcgcccctt

SEQ ID NO: 13805 - DNA, 201 bp, Bos taurus
gaacattcggcacagggtagacaggaattctgtgctgtttctgcaccttttctgtaactcttaaaactattctaaaataaacaggccatttttttttaattgcatttactacggcatcattgagacccatcgcctacaagatccggaacaagaaaggagtggggagccagccccctccctcctgttccccacccccagctc

SEQ ID NO: 13806 - DNA, 201 bp, Bos taurus
agaaggcccactcccagggggtgctgctggagcagagacaggactggggaggagccaggaagggctcttggggagacttgtgtggaacctgaggactcacgaaaggccccagggtcttgccgtgtgctgggccctccagttaatctcccccgtttgcagatgagaatattaaggtctggagaggttaagggtcatgcccaa

SEQ ID NO: 13807 - DNA, 201 bp, Bos taurus
aggaggccgaaggcccatcgagaagggccggacggctggccctgaggcggtggaggtgacggcccgcagggtgaccccaaagtccaactgcgccctcatctgtttccccctgtttttaaaatcctagtaaaacatactaaggtgtatgtatatggagaaggccctggcgcccactccagtgctctctcctggagacaccca

SEQ ID NO: 13808 - DNA, 201 bp, Bos taurus
ggaaagaaagaacactgacgacaggtaccatgactccttacgcggatcctgcctttccagctcaaccgtccatgggcctgtggatagccttccgtgcacccttcgtaaagcttgccgcatgctgtctcctgggctgcctgagcgtaggtgaccttccccgacagatggcacagttttgggtctggttactggccactactg

SEQ ID NO: 13809 - DNA, 201 bp, Bos taurus
ttgtgtccagcagcagtgaatgggggctgggtgcagaagcgcaggctgtgtgggtcggtcctaaggaaaaggactgaggttgaatgccatgaagacatgctgaggaggctaatgtgacacagcatagccaggacagagaaaaccctggaaccaccagaaaaataaaagatcattcccacaggaaggctctaatgccgcact

SEQ ID NO: 13810 - DNA, 201 bp, Bos taurus
ggtgggaaggactccactcggaactgcgggaactggctcctggtgtaagaagaggacctggggctctgggcgcagactctggggccctaattaaccttgctttctttgacttgtgcaaacctgtgaagaccagctggatggcagtgactctagaagtacatagattaagctagtggccactggattatttagccatgggct

SEQ ID NO: 13811 - DNA, 201 bp, Bos taurus
ggagggagagggtaggtaccactcaaggcctagttaattgttgataggcctttgggctttttcacaaaaggctaaaaaaccttgctttttctgtaaagtttccttgtcataaaactactgtgggccaaacaaaacacatacatgggcgctagttggagataactgttctcagctcagcttctagtaagggcttgaatgatt

SEQ ID NO: 13812 - DNA, 201 bp, Bos taurus
ccaacagccacatgtgggagtgtctgagagttgtgctgtctcacaattcaagttgttatttaacctgtggtagctctgaagctcatgctcccaggggttctgctagacatgggtgtgcatcttcctaccacccgcgctgctgctaagttcagaggaggcccaaactgggaacctgccttcccaagcctctcacctgctgat

SEQ ID NO: 13813 - DNA, 201 bp, Bos taurus
cttaggaaattactcttacctagaggcagagtccaactactactatagctctatgctagcagacaggctgcctgatggaaaggagaggactccccagcccgcggccccacagtacctctttgatagctgactcacacacagcgcctggacctatctccgtgttcacgtagagtaaggcgtacagataacctgcccgtccat

SEQ ID NO: 13814 - DNA, 201 bp, Bos taurus
tgtgagatttagtccagtgaccaaaggatgaaagacgataaaggaaaagaagacagagatggcataatacacccataatacattccttgggattttccaagttcctctcctatgcctaggattctagaagactggctgtgccttctgggtggcatgctccaggtcctggcaggacacatgaggttctgttccatttctttg

SEQ ID NO: 13815 - DNA, 201 bp, Bos taurus
gagctgaggctctggtggagagcagggccttgccagcttttctaccatcacatccccagtgtccagaacagttcttggcccttggtggccaagaagtgttaggtactgtgaagaaagctggtgttctgcagcaagtgcctaacacttctcttggcacagggtgagtttgtaaatgtttgctgtagtaggccggtgtccttc

SEQ ID NO: 13816 - DNA, 201 bp, Bos taurus
gtggccagggcagaggcctgacacagactcacgactacggatttcattttaactcttctgctatccttgggtggaggaagctgacttcatttaaaccaagtgcatagctgggcctcgtttttgtctaagaattagggaatcctaaatttctaccaataaactcaatctctttccctttagagtacaaggatgctgaccttt

SEQ ID NO: 13817 - DNA, 201 bp, Bos taurus
aggaaggcattgctataggacctgtctagtcttgctttctgcttggtctctggtaactggattgcctgaaatcaagcactgtgttttgtgctttggttttctgaagacagtcatgaggccacgccttaaggcagaaatcagcctgaagttactgttatctgggaacacagtccaatgctggaagatatttactccagatat

SEQ ID NO: 13818 - DNA, 201 bp, Bos taurus
ctgcacagtggccaagggcaggtgcactcagtactgcagctcaagttcacctgcaccacagcttcctgggacctggcctttgttgggagtctgcaacacagagcaaagaagaaagcagatccagggtaaacacatctgcttcataccagcagcaggaatggccaagaggaggatgcatgtcctctgtgagtgccacattct

SEQ ID NO: 13819 - DNA, 201 bp, Bos taurus
ttactgttttcccctcactctttctagagaagcacagttatctgcgacttcctccagcaaaggcaatcaacaaaaagcaggctcacatttccagggcagcgtttcagcctgccttccctgaaaacattgttcatgtgaacggacccttttcattaagagaatgtttttgaagctatctcaggcgggcagtgggatgtgtct

SEQ ID NO: 13820 - DNA, 201 bp, Bos taurus
actaaataaatatttatatgtttatgtaaaactcacaggattatgtctggcacatagagtgttcttaccagatgctaattatttttataattctgttccagtaatttgtgttgtatactcatttggaagttatcacaaaatagtttttatcataatatacatattggtgtgctgctgagaaaataactcaacctgattttg

SEQ ID NO: 13821 - DNA, 201 bp, Bos taurus
tgtaacagcttttgtcacaacatcaattcaccatcccttggttttaatccagctgtactaggcagtgaaggagaaactaaaaacatggacagatggtgctctgaagttgggatttggcaacacagctttggtgaaaagacaagaaggtgagaaaagtgcagtgttgatgtactgttgtaaaatgatctgtcattctgctca

SEQ ID NO: 13822 - DNA, 201 bp, Bos taurus
aacttacaaccttttttattatacctcctcacctctcccctctttgttctataaaggaaactagcatccaaaccttgacaagatgggcctttcagacactagtccactattttcttgatcttctgggtttctgaataaagtcattatttcttatcctaacaagtcatctcttaatttattggcctgttatgtagtgagcag

SEQ ID NO: 13823 - DNA, 201 bp, Bos taurus
aaacaatgtggcccatgagggacctggaggggctgcctgtgaggtggctcagcccctcccacagcagggagtcaggccaacccaactgccctgcaggacactggatcctcagagaggtgacatgcagacagagcaaataagctggaggctcattcaggcctgcattagagccttggcaatcttccaggagtgcctactcca

SEQ ID NO: 13824 - DNA, 201 bp, Bos taurus
tcaccagataaaaataaacactggaaattctgcagtgctgagaaaagagagcaagagagccctgggcctgcagctatacctgtacccgaggccaccacaagggtgactagcgtctgctgaattcaagtctggaatcatctcataaaatcagtgacctaaatatagaagggtcgcaaacaaaacggcctgggaaagtcaggc

SEQ ID NO: 13825 - DNA, 201 bp, Bos taurus
atattcaaccttcagaaggatgtgaatgccatgaaggctgaggccttctgcttggttggctgctgcatctcaggtgtccggaccacacccggcacacagcggctcccgcagacaacagtggccacgtgcgagaaaggactactgaaaatctcacgctcagatttccttccttcttgcccttcctccctccctttcatcttc

SEQ ID NO: 13826 - DNA, 201 bp, Bos taurus
cagttttcaaaccttgtttttgctggccctgaagtcacttcctcaagctgtcattcagaggctgccccagagattctaatgtaactggtctgtagggaggcttggccttttggatttttgaaagatcctgatgatttaatagaatcagtgctagagtaccacgaagataactacctataaagaaactagtgactaaatcac

SEQ ID NO: 13827 - DNA, 201 bp, Bos taurus
ctggctcctgccccacccctaccccattgcagttcctgggcaggaaggcctgcccaggatacctgggtttcagcgtgcccagctggcaaccactgtgccccgctggtcctcctttaatctggaggcctgcagaaaatggtacaaaaccgccgaagtgtgatgacaccaattaactacctcttggcattttccttggaaatg

SEQ ID NO: 13828 - DNA, 201 bp, Bos taurus
accagccctactgaatcagagtctgaatgtcacatgatctctcaagtgactactaagtaaactaaactttgagaaacacaggtgtaggtcacacatcaaaattgtcccagttaggtgcaaagatgcagaaatacctgtgttccctgaggtattaacccctgagtaagggctggtcttggtttctttaatcctcttaataaa

SEQ ID NO: 13829 - DNA, 201 bp, Bos taurus
ttattagatgaatggaggctaaatgcagtgcgttttccccatttggaagcttgagcatggctagtcccatattcatcccacactccccaatcccaggcccctccagcctccccgccaaatttggtttaatccttcccatgttaaagttgcaccccaccaaattatctgctccctaaagagcccctctcctgttgccttcac

SEQ ID NO: 13830 - DNA, 201 bp, Bos taurus
attttctcccaaatattgctgttggaaggttgccaaatcaccggtgatgctgccagagctgaagttagatgttgcctggttaactcaggcctccaagaagatcaaaatcagcttgagaacaagagtgtcctgtatctaagggggacatggtgataaatgatggccattctgattttcacaatggcaagtgcattggtgtgg

SEQ ID NO: 13831 - DNA, 201 bp, Bos taurus
aaaatttcacaagggagactttatgcttctggcctggcctaatagctgtatcacacacatccttctgtagaaaacaatataaactatgaacaaaatttaaggagaaccacctgaaggccttggaggataaacaagaacagatggaattcaaaggaagtcaaacactgatgtttgactgagaggaagctgctgctgctcctg

SEQ ID NO: 13832 - DNA, 201 bp, Bos taurus
ctctcctgggcagctgcaggccgctcatcttccatcctgtgtgagctgtcttctccagagggcgcttctggatgagaacgttgctctgttccctaggactcggcccttgggtggttgaggtctgaactctcccactctgcccctcaggttttcagggagtcacatccctgctctgcttacaaattaggttcctttctagca

SEQ ID NO: 13833 - DNA, 201 bp, Bos taurus
tatcaagtttaaccaagatgagcacaaacatatggattttagagcctgaactatttagagcctgaaatattttccctccccaatgaaccatttatacattgaattcatcaagaactacaaaactagtatcttaaatggaagggagtgtaacgacttaacaatgtcacattcgataaagtatgataactggtcattttaaag

SEQ ID NO: 13834 - DNA, 201 bp, Bos taurus
tccacctcgcaaccccccccccccccaacctctgttgtctaaatcccctcactaactcattattttaacagttggttgcttgtgggcagggcccactgctgcactcttcagtggctgagcaggacccctaacagtcgctcactgacagttgttgaatgggcggggcccactgaggcactgactaataggtgaacgggacac

SEQ ID NO: 13835 - DNA, 201 bp, Bos taurus
ggtgatttttcattatctataaattatttttaaaatcttttaaattaatttatttttggctggactgggtcttcgctgctttgcacaggctttctatagttgtggtgagcaaaggctactcttcgctgagttgtggggccttctcattgaggtggcttttctttctgcgcagcacaggctctagacgcagccttcagcggt

SEQ ID NO: 13836 - DNA, 201 bp, Bos taurus
gaaaacttagaagggtggtggaaaaagacatgttttctccccgcactcactgttggttatcccaacaccatttatactaataaataatctttccctacttcgctgctcttcttttgttttcttctctataatagatagtatggggtttcccaggtgcatcagtaaaggacccacctaccaatgcaggagacaagagtttga

SEQ ID NO: 13837 - DNA, 201 bp, Bos taurus
gcctttgctattagttacactcttttttttttgtctgcatgggtctttgttgcagcatgcaggctttctctagctgtggtgcctgggctctctagatgccgtgcgtgggccctctaagttggcctgagtagttacagcacctgggtttctctagttgcagtgtggaggcttagttgctctgaaccatgcaggatcttagtt

SEQ ID NO: 13838 - DNA, 201 bp, Bos taurus
tttcatcattttcatcaactgttgcttgtaagaagattctaaaacttgtagttgttttattgcatattcgtttttctccaatgagaaagggttagtgtaatagttaatttgatcttacaaagagtttctaaaactaggcacagacacagatttgagtggatgaacaggatttgttctctgtcccagaccactgtagacttt

SEQ ID NO: 13839 - DNA, 201 bp, Bos taurus
aaggcactctttggctctcccaagaaatggggaccaagttaacgctggacgatcattagggcgctgctgctggtattcagtggagcagtgcggtagggttgagggtgacacagggggccctgggaggtgcaggatggcagactctttaagacccgtgtgtatgcacgtgtacgcacacaggtgtgtgcacgtgtgtgagag

SEQ ID NO: 13840 - DNA, 201 bp, Bos taurus
ttctccctgagccatcatttgagcctgcctttgtccttatgctagaagctgacttaaacgtaattggctgtgcacaactggcttccttttagtattagctatggtaagatttgctatttccttccccagatctctgtgagatagaaagaaaacaagtttcagacagcattcttccatacatctaaaatctaaggcaagcaa

SEQ ID NO: 13841 - DNA, 201 bp, Bos taurus
ggagagggggagcggagcatgggacggtgacagcctgggcagcttttccttccaaccccagttttaggagtgattgtttatgaagcccgatcagatctgctgtgtaccaagtgcactccatacccgttggttcatatgcatattgtgtttgtggggacaagtgtctgatggcagcttgtcccctttgaccccacctgttaa

SEQ ID NO: 13842 - DNA, 201 bp, Bos taurus
tggaatgtttactctagaagaagctgtctgtcacgcagaggccccattaccctaagattacagactatgtggagcctggatcaccttgtgaagaggctgcatgaaaagagagagatggccaggcaatcgccacctggtcccagtgtcttgcagaagtagtgaacctgggagaaaagatgccttcagatgatgctaactctt

SEQ ID NO: 13843 - DNA, 201 bp, Bos taurus
caacacatggtgcctcctgcaggctgagggtgggggtgtgcaaggctgctcagggatgcatgggtatggattgagagcaggcctgaaccccacctcggctcctgctctggctcccaccacccttgggtagccctgggcaccactgcaagcccagggcccagactctggttttcattttgattaaactagcctcttaaatgt

SEQ ID NO: 13844 - DNA, 201 bp, Bos taurus
tacctactatgagccctgctaaaagtcatcacaaacccctgggctggtttctctttgattggctccatcattgtagaggagggattttaagaaaatggcattgaaatctgcttctgaaactttgtccccttatggtcccaagcatgagggaggggcctggggtggggaacttctttccttcacgtagaacgaagaacggga

SEQ ID NO: 13845 - DNA, 201 bp, Bos taurus
caataatgagtatgaagatactgtaaagaagggcagtggccttatgttgatatgcattcagttgtacaactagggcacaagaaacattaccaggaaattttaagagatattatttagggcccaactcctgaagtatagtggccaagttcatattctagaacctttttatgtaaatgaatccagccccagtcctgaaacttc

SEQ ID NO: 13846 - DNA, 201 bp, Bos taurus
aattgaacccaggccccctgcctcgggagtgtggagtcttagctacttgaccaccagagaagtcccccgttgttttaaatttggagctactttcctgaaaagatatctagaggttaacaaaaatcatagttatcatcttattaaagaaatgtaacatattttaaatcctgtgtttcctgacttgttgggtaccctgtagtg

SEQ ID NO: 13847 - DNA, 201 bp, Bos taurus
agctaggagatgggttgggtactaggcccatcttttggtctatttttttgtcttattcaagacagatgaggacatccctggtggtccagtggttaatactccatactctcatctcaaggggcctgggttcgattcctcgtcaggaaactaagatcctgcatgccacccagtgtggccaaaacaaaacaaaatgagagagat

SEQ ID NO: 13848 - DNA, 201 bp, Bos taurus
acagaaggaagttttgctgtcgaggacagtcttttgatgccttttaaccatgttaacatacaagtgtgattctgtgcctgtgtctggagtctaagtgggaaagtttggaaggagatgggcatttcagaggttagtaaaggctaactgtagttagccagtggggagtctccatccctggctgctcagcatcaccatcctgct

SEQ ID NO: 13849 - DNA, 201 bp, Bos taurus
ggcttctgtggtgcccggccccccagtatgcttgtggcttgataaaacttcagcttgttttagataaccacacacaagacccgtgggttatgatcagaaagccttggctttttatatggccattgcgcttggaaaacgtcatgcagcattaacctgatctggaataacttaaatggctgatcctgagtgcttggtgaaata

SEQ ID NO: 13850 - DNA, 201 bp, Bos taurus
ccttgaccacaagaatgaggaaaatgtggtgtccttagcttttacacaagcagggctctgctcctactgtatctttatcttaagagttaacaggaccctacggctgctccacctgggagccggtatctccagcctcacaactcctctccagccccactttctgtattttaggatggacatcgccttctgtaatgttgtgtc

SEQ ID NO: 13851 - DNA, 201 bp, Bos taurus
catttctctcaagccacagttcatgggctagctcttcaggaaatcttaatgacactcgagtctttgtatatgttcacatagaaccatgttcagcctcataaacactatattcacaatttataatttaaatcttatataggagataattggatacagtccttctgccccccagactataaaaatcatgggggaaaagaccat

SEQ ID NO: 13852 - DNA, 201 bp, Bos taurus
tttgttgggtcgcaaagagtcagaggagactgagcatgcacacacatcgttagtaaaataataggcacagaggatagagggtatatctataaagagcctacagtgttttgtattaaactctttagtaaatttgactagcattttatctccatttattgagaaagacaaagtgtaacctatcagaaaagtcttctggcaact

SEQ ID NO: 13853 - DNA, 201 bp, Bos taurus
tggactgtctctggtccatggttaaccctctccaccatcttccctctgatcgagtcacactgggttctcggcggttttggttgctccataaatacaggctggtatcaggccctgagtgcatggcatttcttcttcctgaacccatattctcccacatatccatttgccttcctcatctctttcaagtgtttgttcaaatgt

SEQ ID NO: 13854 - DNA, 201 bp, Bos taurus
tagttaaatatgcatatcttattgacatttttcttaaaacaaaaaaattaggatatatgcactgaattgtaggcattataccatcactaaataacagaatcgctgtgttcctttttttttttttttactagtgaagtgtagttgatctacagtgttgtgttagtttctggtgtacagttaaattattcaatcatacatata

SEQ ID NO: 13855 - DNA, 201 bp, Bos taurus
aggcccatagtttcctcccaatggaggaaactttttgcctttataaatatgtattttttttaatactatgcaactcatctttctcaacactaccaaaagcttcttggtgatccatctttggcctgtctttttgaatctctgctgctaattccttaaagtgaattagaaggaaaatagcaaagaatagtttgaaatgcactt

SEQ ID NO: 13856 - DNA, 201 bp, Bos taurus
ttaaacataagaaatgtttaatatagatacgctgaattgagtttcaatacattgaaactgtggtttctcaaccacactgtgtcttaatacattcaatcagcaaatagttattaagtgaaagtagaaaccaactgcaatgattccatacagaaatattttacatagtgtgttcctctttgtaaattttaaaatgtttaaatt

SEQ ID NO: 13857 - DNA, 201 bp, Bos taurus
tgtttggacctgtcctttggatctcagggaaggtcaaggagctggaatgaaacctatgtcctacaaacaagaagtaggggacaggaaaaggatttgtatccagtagggccccacagggtcccacgcagtttcaaaatgtcattcaatctgtgaaaaaatttgccaagtaagccctaggtagttacactgtgaagtgacatg

SEQ ID NO: 13858 - DNA, 201 bp, Bos taurus
gtaaccataccagttactacaagagagaaaaatcacagacttagttaacttgggtttaacccaaagcattcccccaaagttctggttgatctctaattcagtcctcaactttcaccacttggatttatttccaagatgggatcacttgagaatttgaggttagaaccaatgacagaaaaaaggaagtcttagcaatcatgc

SEQ ID NO: 13859 - DNA, 201 bp, Bos taurus
ccagctgatgggtcttgctgattcaagctgtcacctaccctaatccattctctctccagccaccagagccatgtttctgccacacacatggcctgccttcgacccttccacagccttctaagcatcaccctcggtccttactgcttgtccacagcccttcctgaccctgggcctgctgctccagactcaccttctactcct

SEQ ID NO: 13860 - DNA, 201 bp, Bos taurus
atcaaataaaacttttcttgtggcttccttcccctctcctataatattaagttttcctttttctaatctttctgagttctatttcatgtcacctataaaccttaaatcatccccctacagaatttaataaggagaatgcatgacagccacaagtttgaacagttttctgggaaacatggactttcaaactaggggccccag

SEQ ID NO: 13861 - DNA, 201 bp, Bos taurus
ttaacttttttaaattttttgctggttgggcctacaaaggcatttctgcaacagctaattatcttgtgccagccactttgaacagttagctagaggatgtttcactaatgatctccatcaggccagttggccctacctgtgaggaacatattgaaccagggaactttccactccacaattagtagaatggaaacattcccg

SEQ ID NO: 13862 - DNA, 201 bp, Bos taurus
gctcagatctcacatgccttgtggccaacaaagcagaaggggataaaaagcccttattctccattatgtgtgggtgctatagctaagtgagcactgacctatggccaacatggggttttccttgtgattctcagatcatcttacaagaaataacctctggtgccacaggcaactgactgcatggtggtggctttgttgaaa

SEQ ID NO: 13863 - DNA, 201 bp, Bos taurus
ttcatctgctttgtctatcctaggctaatatattgctggttgctaaacaccttcttaagaaaaataaagacaaagaggtaaacgtggctgtttgtagactgaaccaggacaagctgaggtcttggtccaggctgatgagattgatcttcctacctcccaggctcttccaggcattccagtcttatggtgataaatgccaag

SEQ ID NO: 13864 - DNA, 201 bp, Bos taurus
atggcctgtgcctgcctcaccctcccaagccccacactttgtgcttcaggcaccaggggtcatgcagattctgtactgtatccacccttggcctttgtcctctaaatacacacacacacacacacacacacacactgcaagctcaagtctttgattttgttcatgcttcctcgttatatggaatgctcctcccactcccaa

SEQ ID NO: 13865 - DNA, 201 bp, Bos taurus
agcatccctattgcccaggcccctctgagcaccagagctcgagatgcggacttttcttctgccagcctccaaccagataaagagatgccaaggggtgggggtgaggccctggccctcaggggagcctgggatgggggtggaaagaagagcagcgaggtctagaagcttcctagagcggcagctatttgaagccttcaagga

SEQ ID NO: 13866 - DNA, 201 bp, Bos taurus
ttggtcccttgggaaaccaaagcagttgtatacgatggcacgcttctctttgttgctcagataattttcatcgccattggcccagactaagccttgcagatgaagcacatcctcaggacagtccagcagaattgggctctgctctgtctacggtgacagcagagtcatctcaagtggaaccgggccattgttccctcccag

SEQ ID NO: 13867 - DNA, 201 bp, Bos taurus
actccagatggggaaaaaaaaaatctatttgtaactcactcaaggttccacattagaaaaatacccaacataccatatatactttatacaatttcacaggcgaaaaaactaggccttggggactttgctggtggtctagtggctaggactccagactcccaacgcagggggcctgggtctgatccctggtcagggaactag

SEQ ID NO: 13868 - DNA, 201 bp, Bos taurus
acgggggcactcactggagccaggtgtggagaggatgtaggaaacacgggccccaccctcgtgaagcttcccgaccagtggaagagagagagatgcaagcgggcaagcaccgtttcctggggccagagctctgacatctggtaaagcggatgctgttgcaacaaagcaggggactctgtcttcagttttggaagaagtcct

SEQ ID NO: 13869 - DNA, 201 bp, Bos taurus
gtttcaggacctccatggttgtggttcaagaaaggaactgatggagagtctgttttatctcaaaagcatctctatactgttttgctttgagttcgtaggcacgagtgtatgatggaacactttggcttcaaattataatatgactgaaagtcatttgactgccattgcttttctgtctttaaaaagtggaaaacttaaata

SEQ ID NO: 13870 - DNA, 201 bp, Bos taurus
attccacgtaaaataatcaggatttatagttcttgaaaaaaatttagcacacacgtctgtcctggactaatattcacaggggccaataatcgaatgatacaaggggcagccacctgcagcagagagggaaggaaggtccagagggcacagttcctttggccacagttcccacacctccaattactccccattctgaggttc

SEQ ID NO: 13871 - DNA, 201 bp, Bos taurus
ggtcctcgaaatgcctgcacaaaggaaacactctttaaaaggtgaggaagtgaaatcaaactcaaggccatttccctgagaaacagaagaaccctgttcagtctgaccccggcctgagctcttcaccactgggtcttctaatgaaagcaaagtacactctagactatgggcttccctggtgactcaggctgtaaagaatct

SEQ ID NO: 13872 - DNA, 201 bp, Bos taurus
aaacagcccccacccccacagacccccacccacagcagaggctggcaaacaccctctgtaaagggctggttagtgcatattttaggcctggtggctgtaccgtacctgtcacaactactctttcactgttcagttcagttcagtcgctcagtcatgtctgactctttgcgaccccatgaattgcagcacgccaggcctccc

SEQ ID NO: 13873 - DNA, 201 bp, Bos taurus
cctgtaccccaacccagagcatccaggaaccagcgctgtgttcagagctggttctagagctgtcacggcccatggagcaggccgtctgccctgcagagaccgagggaaagcaggcgtgccgagctgggagctccggagctgcacaccccaggcgctcttatctgaagccttctggaggccacgctgcagacagtgctgtgg

SEQ ID NO: 13874 - DNA, 201 bp, Bos taurus
tgatgtttgggtcaaaaaaataaccctactgccaagaaccctaagatttagaactcaaaagtttcattgtacagtgttcttctatgtaagggtatttgccgatgttttcttgtgcgacattgaactgttgtggtatgcgcgcatgctaagtcacttcagtcaggtctgactctttgtgaccttatggactgtagccagcca

SEQ ID NO: 13875 - DNA, 201 bp, Bos taurus
actcagctctttcagctacagtcacggtatctcatactcagtagctaacactaagagtaccaatgaaaaacaacagccagcacgaggccatttgctgaatcaagtgggaaagaacttatctgtctgtccgtgtccgatccaacccatcacgaatgacctgacgaaagggctgaatgaaagcggcagcggccctgccagaga

SEQ ID NO: 13876 - DNA, 201 bp, Bos taurus
ttcaattctgtgagcaaatgtggttggaaaaaaacttattagcttaatgtataagaaaaagcatcctttttggtgcccaaattctgcctgtgtagaacaaacaaccaaaggatacataaaactccagatgatgctgggaaacacaattttggagaaaattcaggcaagtcttcagatctcagtgtttgaaaagaagcccat

SEQ ID NO: 13877 - DNA, 201 bp, Bos taurus
caggacatttccctctttattgttgtttttctgatcttcatgtggaccagtgtcatatcccagtcttagcttcacaacaagctttgtttccttatggcccaatcgttggcttgacaactgggctctgtgtacctgtgtttacggctccacttcctctttccttcccctctgtttgcaggcaaggccctgtgacttacactg

SEQ ID NO: 13878 - DNA, 201 bp, Bos taurus
ggtatctaccttccccactcttctgaggtctggttgaggctctatccagacatggtcaattaaaacagcacagtgattggtctggggataacatggatctcgggcctgtccattcagagcacagagtagtccccttaggaccactgggaaagtttcctgcactttcatgctggtctagagcctgggagaagatgagaccag

SEQ ID NO: 13879 - DNA, 201 bp, Bos taurus
ccctccccgggcatcagcagggcatttggccgcccagctggggactgtgttgccagcctcacttgcacaaaaggcgtgaccatgaggtcaggttcatgcatgtggttcctgagcagaggccagaggtctacattctccatctcaccacaaagtcagctcagagcccgggcctctctttcccttcttcccaacagctgggga

SEQ ID NO: 13880 - DNA, 201 bp, Bos taurus
tctggtagcactgacattttatgacctgtggtgtcggtggcttgagagtccttcaggaagcaggtttttccaacacaatctacttttaccatttggtctttggccacagcctacataccacctgagttccagccgtaccaaaccatctccctcactccacacttcccaacctttgtacccacagagcttctaccagggaag

SEQ ID NO: 13881 - DNA, 201 bp, Bos taurus
cacccagtcatctctttagctagtatctttcaacccacctctcagcctagagctcacatggtcctgctcaggaagggagaaatacagacggcctctcacacgcacacatgctcacacaggtagatgtggggggtcagcttggtcttgacttcaaatatctgtctaactgtgggtcacggccaaaacgtgtgagtgctgcta

SEQ ID NO: 13882 - DNA, 201 bp, Bos taurus
ttattgttgggtgaggtttttatgcgtttttaatagaccttcattaaactaatgggtggtctcactgctcagcacggcccatgtgctccaaaactgtcatgaagtgactgggttttattttgggtggtggatggagaagctctgaaaacccacccagaacaaaggtgcagaggaagagggtgggagagaagaaagagtcta

SEQ ID NO: 13883 - DNA, 201 bp, Bos taurus
attggtaccaagatccaccccaaactgggccagaggcaagagtgtacccctctcagatgatggagctgaagatgagagcctgagcatcgcggatggccacaccctccatgcctgggagaaattgactgcacagtgaagacagtgccgggtgtggcaaatcgtgtttccagaaggtggccatggtcatatgggtcatgcgac

SEQ ID NO: 13884 - DNA, 201 bp, Bos taurus
aaggtgccaaactccgagacccctctcagaagagggccccttctcaccttgggctcttctaggggagagggtcatgagcttcgggatgttggggagaaactcgacctgctgggccctctctgcggtcgtggcgtgtgcccggagcgggatacttggtgaacattgagtttgtgttcatgagtgtcagagatacctggtgcc

SEQ ID NO: 13885 - DNA, 201 bp, Bos taurus
cttaacctgttcatatcattgtcttgctcaaaaccctcccttagctcgtaggataaagtccaaagtccttaggtgtcctggcccacagaatctgaccatcgccaagccttctaacatcttgtacccatgtcctaacatcctccacttttctacaggttctagaaggcccttcccctgcagctctctgctcgcatcatgccc

SEQ ID NO: 13886 - DNA, 201 bp, Bos taurus
accatcagaatgaacggcaatactgaagaaatattcttctcaatctacgttatagaaaatgtaatacgctccctgtaaaccaggggattccctggccgtccagggattagacctccaggctttcactgccaaggacaagggttcaatccccagtcaggaaactaagatcctgaaggccatgaggcgaggccaaaccaagtg

SEQ ID NO: 13887 - DNA, 201 bp, Bos taurus
gtactcccccaaactggagagacaggtgggcggacacagagaatcacaacttactgaagcagaaacttccaggcagaaaccttctaagggagacagcgctggggtgagagggcctggacgctgactaacagattgcggcagctcagcatggacaggtctcattaaacactatggggatcataaggggatccccacagttct

SEQ ID NO: 13888 - DNA, 201 bp, Bos taurus
aaattacaagtgcaaaataacaagtggtaaagtctaacatacagtaaaagtaggaaataacccgcatacaaatatgatatcaaaactagcaatagtgggctgtccctgagtccagtggttaagacgcggcacttccaatgcagggggcacgggatccatccctggtcagggacctaagataccacatgctgcacggcacag

SEQ ID NO: 13889 - DNA, 201 bp, Bos taurus
tggtgaatgagccctgagactaggaggcactgagccttgtcctgcatccacagctctgagttcagggatgtcatggaccaggctgtgtttactgaggttcggcggggtgatgaccagtcacgcggagggtgccccacagtgaaaccccataggatttggctgctgtgttggtgagagtcacctggtctagcacgtcccagg

SEQ ID NO: 13890 - DNA, 201 bp, Bos taurus
tcacccagccggggagtccaggtgcgttccaggtaagacagcgctccagagcgaacacaggacttgggtgtggtgtgctggggcccacctgtaccagcactcaggagctgattgttaaatcttgagaaattttgtggggcagttggtgatttgaccttggccatggtgggagtgtttgggcttccccagtggcccgatggt

SEQ ID NO: 13891 - DNA, 201 bp, Bos taurus
ggaagccatttttctccagttttcaatgcacaaatacctagagcaatgcctgacatttcaataggtgcccaagctcttgttacacaagtgactcagggttttcattaatacatttgtacatagatgtcctataagaacatgtaatgtaaaaacacacaaacatgctgctaactgggaagacttaaagtggcgcccataaac

SEQ ID NO: 13892 - DNA, 201 bp, Bos taurus
ggtccaagtgttataatactaccaatcccatgtcaacatccccgccttcccacacttcgttagcactggataccattaaacatcaattttgccaatccaaaaggtgttaaatagcttccattgtttagatttgcatttctttaactgtggctgaacttaagcctttttttatgagtttattgatcattagtatttcttttt

SEQ ID NO: 13893 - DNA, 201 bp, Bos taurus
gcacagtagagggatggccatttccctcacaaaccatgtgatttctatgggagaggaatggattctgtagcggaggtgctagttttttcataacatctgcccctcctttcttagttctaggcccttagttttcagttggacatatgacttccttaaataaagattacattttctggcctctatcacagatatctgtatgac

SEQ ID NO: 13894 - DNA, 201 bp, Bos taurus
tggcacctccttcggttgcgggtggtgtgtgctgtgcccagggccttctctgcaccttctttcagaggctcaaatccacaaggaacaagcagagggaggcggaggctgccacgtgtctgcccttggcctcatgctgttggatttgcggtgcctcatgaaagaataatcacctacatcaatttttaaagctgcctaatgctt

SEQ ID NO: 13895 - DNA, 201 bp, Bos taurus
caaaactaggtgtggcacagggggtttctttccttgtcctccccgtgttttcttttacttctgtactcctggaagtccaggcaaagaggccaagactcacaagttatactgaagaagggatcagcattatcctgagaaagatcttgtagatctttgagcctataagctttaggattcctcttataaatggcagtaggctct

SEQ ID NO: 13896 - DNA, 201 bp, Bos taurus
tggacatggtggggaaaagtgtctaccataagggtgcagggagacactacagcagggatggattcagacatggcagagactctgaggggcctaggagaggcgtcagtgagagccccaagggagcaccaatcagccggaaagcactgctgggtcttgaagtagctgagaggccagttggcaagtcacagcagccagaggtat

SEQ ID NO: 13897 - DNA, 201 bp, Bos taurus
atgtccacttaggtgggaaacagactctggtggttaaatgacttgcttgcggatgtagaaaagtgaatacggagagaggaggcccgtaacaggtgctgtcgactacacctgggctcatgaataatcacgactttgtttgaggggggaatgcacaagagacctataaaaacaccaagaggagagaaaatgttggctggccaa

SEQ ID NO: 13898 - DNA, 201 bp, Bos taurus
tttactttcctcctgccttcattcctgatccccaggctaactatgagcatcaactctgatgtgtctgacatgtgtttgtaaatatgcatgcatgtcttgagtaagaagaatattagtttgcatttgtttcaaaagtttgttttggtattatgctataaatcaccactgcttgtttagaaaaacttcaactgtatttaacat

SEQ ID NO: 13899 - DNA, 201 bp, Bos taurus
catcagtatgtgggcgataataacatcctcattttaggattgtgaagcacattaaaggagatgcagatgaagcttaagctgcagggcctctcacttgcatgggcttgcaactcatttcatagttaaaatgcgtgtgtgtgtgtgtgtgtatgttgaaatgtataaatttgaggcccaataaaatctagattcatgcttgat

SEQ ID NO: 13900 - DNA, 201 bp, Bos taurus
acaccaggcattactgtagggatgaggcatagaaaggctgctgtgtgattctccatgctctgtttcatgaccttgatcactgctgccattccaaatagtatacctctgtcagcctagtcctagagagtgaatgaactcaaccctactcctaccccaggcaagaacaaagagcccataagggaataaaggaagacgtgcctt

SEQ ID NO: 13901 - DNA, 201 bp, Bos taurus
agagggaaatggcaacccaccccagtattcttgcctggaaaattccatgaatggaggagcctcgtgggctacagtccatgggatcgcaaagaaacacaacttcgaggctaaacaacaacaacaagggtaccgttctaagtacatacatatcaagttcctgagttgccatagcaaccaacaaggcaggagatatttttgtgt

SEQ ID NO: 13902 - DNA, 201 bp, Bos taurus
agtacagttgatttacaatgttgtattagtttcagatgtacagcaaagtgatccagttatacttgtacatatattcattcattgtcagactttttccccacatgagttatcacagaatattgagtagagttccctggtgctatgcaataggtccttgttggttatctaccttacatatagtagtgtgtatatgttaattgc

SEQ ID NO: 13903 - DNA, 201 bp, Bos taurus
tctacctgagtcataaactgtgaggtagaagccgagcaggacagggaactctggcaagaaacaacgagaaggaaatctcagatcccatgtggaaattcctatactctttttaaaattttacttattttcatttttttccgagggtctcttccttcttttaagggcacctatcccatcaggcggagaaggcaatggcacccc

SEQ ID NO: 13904 - DNA, 201 bp, Bos taurus
aattgtccagagctaaggataccactatgagaaggttgaagttgtcacatgtggtcatcacacagtgcagaggacctgatggggcctgtttctcctagccctccacctgctttctgtccagctcttcttcccaatgctggtcctgcaaaccaacagtggcccagagccccacacaggatcctgggcttcaggcccacagag

SEQ ID NO: 13905 - DNA, 201 bp, Bos taurus
tgatgactatgaaaactccatccgcaacacaatagcaaattattttaccagcttccttcaaaacacaaacaggaaactctacaatatgaactttcctggaaatttcaagaagtatgcttcccattttcaaacttaagccagccctgaaagagctgaaaagagatgtctgtgtagccagcagacagctcctgcagaggctgg

SEQ ID NO: 13906 - DNA, 201 bp, Bos taurus
gttgtggcatgtgggatctattaatagttccccaaccatggatctgaaccccagaccccctgcattgggagcacggagtcttaaccaccggaccaccacggaagtcccttccaatcctaatatcattccaaacagtctttccattaattatgcagtcacataaactaatacttaataaacattattggattattggtatta

SEQ ID NO: 13907 - DNA, 201 bp, Bos taurus
aatcttttcatcaccccagacagaagttctgtaaccattaagcaataactcctttgccccctttcagctcctagtaacctctaatttactttatgtccctatgaatttgtctaattctagatatttcatataattggaattatacaatatttgtcctcttgtttctggcttaatgccttagcgtaatgtcttcaagattca

SEQ ID NO: 13908 - DNA, 201 bp, Bos taurus
ttttatatacttcaggagtaatgggcatagaaggaggatcgctggaccagaaattaggatggctgcctggctctggcactgtctgctgtgcggctgcaggaaagtggttaattctggcctttatctgcaaaatgataacgcaaatgagttcccattcagctgtcgaattccatttctgattttatgatgtctgctcatttt

SEQ ID NO: 13909 - DNA, 201 bp, Bos taurus
agaggctaccatcgtccagaaggtgagctcgggctcctatggctgcagcaagggttcaagagaatggatagaaattccaaggcctcttgagatgagagtcggaacaggcatggtatctcttctgcagcatttagtgggccaaagcaagtcatctgggagatcatgggagatcttgtcatctccacgcttcaccttactctg

SEQ ID NO: 13910 - DNA, 201 bp, Bos taurus
cataaaccataaagcttatcgtgcaaatgagcatccagaggtcataaactgcagaagactgtagcatttaagtttggaatgctggctagcgccaaatgtccctttcttttcccatagtatgaattcagcgtgatctttgatacaagccacctgtctggggaagaggaagttcttagcttcatcgttacagctcagaggtaa

SEQ ID NO: 13911 - DNA, 201 bp, Bos taurus
aagtgtgagggggcactttggcttcatgccagcgctctggccctcgccccaggtttgacagtggctgcctgctcttcagaagtacagtccctgctcagctcggcagccacaggccccttactctcctcagccttccactcgctacccaggctgggccccttattgcagagcacccggaaatgcccattttccaggtcccgc

SEQ ID NO: 13912 - DNA, 201 bp, Bos taurus
gattcagtgaccttatatcccaactcaactgtgaactgcattggaagcttttcctcccctgtgggcaggatgctcaggactttctcacgtccctgaggagcaaaggcctttagggcaagggtcagttgtcatcacagcatagccagcttccttgcaagcagctctgggagcatgggcatcaccaggcagactgcccaaggt

SEQ ID NO: 13913 - DNA, 201 bp, Bos taurus
aataattaagaaaatgcaaattaaaactaaaatgagatgatcatttcactctcaccagacaggtaaaattttaaagccaaatttgaatttgagggtgacataaacattcagtctataacttacatgcatcttccagaccttattccatatatttatatacatgtaaattacagactgaatgtttgtctgccccaaattcat

SEQ ID NO: 13914 - DNA, 201 bp, Bos taurus
acaaatgtaaattttttagattctattgacacattattgcatgagaaaaacatgttgtagatttgaatggatagtacaatatcatttatgttggaagaaaggctcagatatgtcgcaggaacatattctattaactagactgataatggttggaaactttgtagagaatattagacctgagaacagtggtcaaaagggatt

SEQ ID NO: 13915 - DNA, 201 bp, Bos taurus
taacaggggcagtcttaactagcatctgtacgacaagaatgaaggaaactgacttgagtttgcactttgcatttaagaagggcctacagaaaagcttgctaaccccaaatgacacccgcaccaaggtgaaaagacgacagcagtggaagaacagccgacctgaacagctgaaccaggcctgtaagaaccgcccagctcact

SEQ ID NO: 13916 - DNA, 201 bp, Bos taurus
caacatgttgtcaaggagaatttcttcccgaggctaccatgcacggtttgctaaacgtctaccgcacgtgcagcgagggctgttagacgccaaggcccggcggcgcctgtccacagagtacgctctgatcacagaatggggcgcgagtgccagctgtgcgtgtatcacccagggggctcagggcagggacggggcgctcag

SEQ ID NO: 13917 - DNA, 201 bp, Bos taurus
ccagggccccttctcagggacacaccaacatccaagctcccttctccctcctccagcacaggacattttaaaattttccagaggggataaataactggatatgactaaggccatgctttccacaccctgaggcaaaacaaaggctggataagaagacaggtcttatactcagggtaagaaagatacagccatgctctttgg

SEQ ID NO: 13918 - DNA, 201 bp, Bos taurus
aacacactcacagttttggccgtgaaggttcatgcacttgttacatgtaattctagaacaatctgtctggatctgtggccaaaaaaacagcagagctgcagctaaactaaagaagaatggctggcagatgggtgggaactgtgttgagagacagctgttagtgcaaaggaaaagggtgcgtcctggcccacaactactctc

SEQ ID NO: 13919 - DNA, 201 bp, Bos taurus
gtgctctcacctgaggccttggaatgggcctttgaggttttttggatcctaattttttcattgcattatagtatttcttctgttcttctgtcagaaagacatcttggccacctaagtatgtggagaagatgagagctaattatcattaacagatttttggaaatgaattctgaattttcagaaatagttttaaagttatat

SEQ ID NO: 13920 - DNA, 201 bp, Bos taurus
cacaactccagaccacctcctccaggctgtttctggattacgccagactggctgggacctgcccctcggtaggcctccggcctgtggcagccactctgagtgctaccatggggctcacggtaactctctggcaacttccttgtaggatctttatatcagagccctccactcacccgctccaggtgtgtggccccaccttcc

SEQ ID NO: 13921 - DNA, 201 bp, Bos taurus
agtaggctcaaatgagtattggttgctcactctgctttgaaagatgatgggtacatgagggcctcttcctgagtctaggagtaaaaccaggccaatttgagctgcacaaatcaataggggaaggaaagtgagcagacgtcctgtgtgagtgtgtgtgtaagtgtgtgcgtgtgagtgtgaggttcgctaccatgtagaggc

SEQ ID NO: 13922 - DNA, 201 bp, Bos taurus
ttgaatccatccccagggctaaggttgtaaatatgttgtgggggaggtaagagtcttgtgtgtagagtggagagtttggatatataggtttaagtagaaagggggggacccatgtcaagaaattcccccagaacatgaaaatagagataatttgaggtattatataaataaaagttgtgtgcagagatatagaaaacaact

SEQ ID NO: 13923 - DNA, 201 bp, Bos taurus
ctccaggatccctgagcgcacacgagaaagatctcagtagccagactcggaaaaggagaggaagagagggcacagcaggcacactagactctgcgttcagcggcagaggctgggctgctcctcttcctatcacattattctgcagatattccatggagtgtttgttctaaacgtcctctgatttggcagaggcaccttggc

SEQ ID NO: 13924 - DNA, 201 bp, Bos taurus
tcttagtcaccctgccgcatcccgcatataataggtgctgcaataagctctggtaagtcatcagatgaacctttgtggaatgtcttttgccttgcctttggttgatttaccatgttctttacaacaaatatcctgccttaaagattccatgctcattctgtttgactctgtacctacccccaaacccaggtctgttacaga

SEQ ID NO: 13925 - DNA, 201 bp, Bos taurus
gtgaagagcagcgggggcacttaccctttgtggggccactgttgttttagtgctcttttcattaactcaggggtggcgttttatggagagatgcgctgttactgaagctggtgtggcccgcctctgggaggcccagcactccggtccagttagccctatggctccttacagcaggcgcttgttactctcaacctaaggact

SEQ ID NO: 13926 - DNA, 201 bp, Bos taurus
cctctcatatacattgtctatcctatacattacagaatggaaggaagagctgtagaatgacatttcagagaggacaggcgctaggacactccaggggcctggggagcaggaagtaatatctccatttttgcattactctgttcagaagttgaattccaaggagcagtatctcatttatgccaagtgtctatctatctcttg

SEQ ID NO: 13927 - DNA, 201 bp, Bos taurus
tgtggtctgtgtgtgtgtgtgtgctgttttattgttgttgtatttaaaaaaaaaataaccgtgttgaagatttgagggccatgactcagtactaactgcaaatatataaggaagggagaaatagtcttgcagacaaatgcgtgtaattgatgagactggttgtgcttccgtgaaaatgtgtcctgtcgggcctcaaggggg

SEQ ID NO: 13928 - DNA, 201 bp, Bos taurus
gcccttggggtcgtcatcagttgaagggaaaacaaaggggactgacccagagatgcctcaatgcactaggcacagaagctaagaccttggtggcccgcccacagagggagaggtctgcaatgaacgcctgcagtgatcctagggactgcagtctcttcatgggagtgggccactagaagcggagatgaccatgaggcacaa

SEQ ID NO: 13929 - DNA, 201 bp, Bos taurus
gccctctgagagaataagcccaggtgagcctcctggagaagaggctgcatggggcagaacaggccccgctgtcccagccaaggccccagatgtatgagtccattcagcggtcctgcagtgccaccatcctgacgggcagcagagcagaggtgcacgagacacccaagcaaggccagcgaagaaatcacccgcacctcccag

SEQ ID NO: 13930 - DNA, 201 bp, Bos taurus
taaaaagtgaaaaaaaaaatttttttttaaagtgccctctgctgagtcatctcagtgtctgttctggaaaatctgtttgtcctatatcagggcctgtcacgagtgaacacatcttcacttcacagcaaacagtaacacttgcctcatttaagagagaaaagaaggaaataaatttacacttatgcagaggccctagaagca

SEQ ID NO: 13931 - DNA, 201 bp, Bos taurus
ctgaataatggactgctcctcctctgacttggtattccggggagcagccccagggctcgggcctctgtagaccagggaggatgaggcttacctctgaacagtacggatgtggctgattctcagggaattattcaggcagaaagtcttaaatcattatactagactttggaaaatcatgatgcaaaaggcgactttatttgg

SEQ ID NO: 13932 - DNA, 201 bp, Bos taurus
atgaaaatatatcatcaataaattaaaaattcaagtaaaaattttttttaactttgttgaagtactaaaatgagttaacattcacatattcatgagtgagaaggcctccacagcatgacaacaaatgagaaatgaacgccaaaatctcacagctttcaagttttaaagtagtaagtatttcccaatgacaaaatcaccata

SEQ ID NO: 13933 - DNA, 201 bp, Bos taurus
aggcaaatttcatagcacagtttcccccatggctttctaccgggcataaagccttccttgatatgctacctaaataaaataagctctccctccattccccgcgtcaactgaggtgaaaaaagcataaactaaaacttgagacaccttttatttggcagacttgctgggggcttaaacctgagaggcaacctctcagatagc

SEQ ID NO: 13934 - DNA, 201 bp, Bos taurus
attattaatatttaggatggcaaatatatacacgtcatttcttcacaaccattgcttcataaataaagacgtgacaccaagaccatcacctgcccctggacgcatcgggtgtttctggaggtgtggccattttctcaggcttctatagaaccattacatttggttgatcgttaaacatagtttaacataattctccatata

SEQ ID NO: 13935 - DNA, 201 bp, Bos taurus
tccagtcccccactcaagcaatgctaggttgccctagaggggtcgccagtgtcttaagtcactgtgacatccccagtacttatcatagggccaggtcagtggaggtggtgatacaaaagggatgaaggaatgctattccctgcaagctgttacagacaagatgaagggattattgcttctttaagcaacgggcctctcctg

SEQ ID NO: 13936 - DNA, 201 bp, Bos taurus
tgaattcagatcttgctgatgggaaagtgaaagcacagacttttatgctgccttttatatattgtaaccagcaggatcctcttgcttatttgtatcaccattggtatcattattagcaccatccccaaaccccattcccattctccccggagtgtggctgaggagtcctctggcccgtgtatcctctggacaagagcctgg

SEQ ID NO: 13937 - DNA, 201 bp, Bos taurus
catgtgattctggcctgggatccccctccccaataacttgtcccaccttggactctccagaaagcctgccttgaccaaccctgagaggaagatcctgtggcacggaccttttcaaggccaagggaacagaacaattctgcctatctccatccggctactcctacaggacaagaatctggattctgctacatcaaatcacct

SEQ ID NO: 13938 - DNA, 201 bp, Bos taurus
gtgggcctggagttagaaggcccttagagactcctcttcaggatggatggtctctgggagaatagctccccgtgggccccagtgtcctggcagtgacaggaccagaggtagcgggctggtcaccatgagctgggagctcagggaacaggcctgggaggcggtgtgtgagtgtgtctgtgtatttcactttaccttgcatca

SEQ ID NO: 13939 - DNA, 201 bp, Bos taurus
agtgttggagctgggatcagatccgccgcagtttggccacagagggcatgcttttgccctctttgctgactcagctgactctggaaaagacatttcttccaggtctcttctggatgaggctggcccatttccttcccggggggccgggttcagtcatttgtgatcctgtgtttgttccttgttttgagtgcaaatctatag

SEQ ID NO: 13940 - DNA, 201 bp, Bos taurus
actccgggagcccgtggagagtatggctcagggccgtctcatctgggcaggacgggactgggggctttacgcgactgaccccatcaggtgttggtgcaagccccctggcctgtgattggaaaaatggtaaaacttaggcagtctgatgctcagggctccatgctttatccaccgcactacttatcagaaaatgtcctgtcc

SEQ ID NO: 13941 - DNA, 201 bp, Bos taurus
tggacttttgctgttgttcaccagcagttggtgggcctagcagggaggttgccgaagaagttacaacaaggaaactgaaacgtgagaacaagattagaaacggagttgggatgcttggacccgggccggaagggacacattccgccagaaacacctgtgttctccctggcctttgagtcacctcctggggggacaggcccc

SEQ ID NO: 13942 - DNA, 201 bp, Bos taurus
ccttaacacacagctggcttcttccaagggccgtgacttctttcagtccgatcctcacggtagcgttgactttggtagagaaaggtggttcagtcgtggggcagggcatctggagccaggccaggtcatcagtgggactcctgtggagctgatgctttgatacagccacgatgccaagtcgtgtccttcaccgagtttcat

SEQ ID NO: 13943 - DNA, 201 bp, Bos taurus
atcagcgccttccatgcagtctccttttacccagctggggattagggagtggaggtgctgtggggcctgtcctcctcctgggccctggcctgctggcatgtggtagatgtctgctgacttgccttgcttcattgtcaaaaccccggaccctaactcagttccattgctgggtgcgcctcaggctcagggtgacctgtgcag

SEQ ID NO: 13944 - DNA, 201 bp, Bos taurus
tctcaatcaaatgctcatctttacagggaggcgctctagtaccacttctcagtcagagagagagagtactcctttttgatcaaatgaaagaaaccatacatgaggcaaacaatggcctttattccctgctttgtttgaacaatgaaaatgatgtgcactatgatctcaaacaaaatcttggctatgatagagccataaaaa

SEQ ID NO: 13945 - DNA, 201 bp, Bos taurus
gactattacaaagcaactgcgccttgtcaacatacaacagaagtcaccaattcattatgagcagggagctgacacactccagtttcatgttgcagtatgcggtctatgtccccagcaccagctgcccctcccagtgtccttaactttctcagaggtatcatctttatctctgttaccaagcctgaaaattgtcacagtcaa

SEQ ID NO: 13946 - DNA, 201 bp, Bos taurus
ctgaaacattcattaactcacgtttcccaacttgaggatgtttaatgatacattgataaagactttctagcatgcactttcagtgttatttactgagttttggttttgttttcagaacagttttaatctattaataataattgcaaagaagcaagatcatgcatagatgaccaaaataccactgtaacataatttaagtca

SEQ ID NO: 13947 - DNA, 201 bp, Bos taurus
gccaagcctctgagccctttcctccatcactggtctcagtgctgggcttctcagcctctgcagagcaggcgtaaaccaagggctcaaggtgccacatcccgccccagacaggcctgctgaactgagggaggtttgactggctgataacagagctgaccctagagccctgggaggaaacgcagagaaggcagagaatcctta

SEQ ID NO: 13948 - DNA, 201 bp, Bos taurus
ggccttggcctgcggtgctcaggtgtgtgtgtgtgtctataggtgggcactggtgtggtggtgaaaaagagacagccaagggagagctgcgcctcccatgttgtcggggagggtggccagctgatgaaggtgctgtgctgaaagccagggaagggtttctgaaaggtgctggcgcctcaggaacgccctcctgctgctctc

SEQ ID NO: 13949 - DNA, 201 bp, Bos taurus
tcttggtttaagtgggagagtctcccaggagactttgtgctcctggaagtcggggcctgccgacccccagtgcacagccagctcctggccctagagcaaatgctagcacatgttttccaagtccatcattttccttacagagaagctggagaaagaggtcgcttgtggccaagggacgtcctcgggtaatccgcagagacg

SEQ ID NO: 13950 - DNA, 201 bp, Bos taurus
ggtggctcagtggtaaataatctgcctgccaatgcaggagacatgggttcgatctctattccgggaagatcccacagccacaggacagctaagctggagcacgatggctactgcacccgtgtactgcagagcccgtgctcctcagcaagagaagccgctgcaatgagaagcccgcacactgcagttagagaaaagcccagg

SEQ ID NO: 13951 - DNA, 201 bp, Bos taurus
ccagagaagaaggccttccctggggcactgtgaccagaggccatcagaaacaagcccaggcatttgggaggcattcatccttgtggagctgaaggacacacaaaacagcttctaggccgccttctctgagctctggactaggtcaggatccccgttacttgcacggcaccctgtacttcaaaacaattcagcaaataatta

SEQ ID NO: 13952 - DNA, 201 bp, Bos taurus
ttatctagctccacagccaaagctgtcctcgaccacagtgggacacttgtgcaaggagagctaccatggccagtggtggaagcgggggcaaggcccagtgggtcaggagtagtgcatgaactgagtcccgaacaaacgctggacaaggattgcaaattctgtcaaaagtgggtttgaattagctcctctatttacaagtct

SEQ ID NO: 13953 - DNA, 201 bp, Bos taurus
ccctgctagctattccctctttctcactctctaccattcatctccacttcttccaaacccaaatcaactcacaaatcctttttctttcacagactattctattctcacccaggcccctcagggtctcacctgtttcccaatgactttaaaaagcagttctttcaaacacatccagggctttctgcagaagaacatttggca

SEQ ID NO: 13954 - DNA, 201 bp, Bos taurus
gctatgcttttcatgaaatacaaggccattacctagagtcttacataccatggggagaaactactgctcaacagcacttgtaagcaggggttaagtaggcggttctcaggccacatccttcatgggtcacacctggagcttactacacaaggttatctttgggtagcctgtgactctagaatccagtttgagattctaagc

SEQ ID NO: 13955 - DNA, 201 bp, Bos taurus
gttttggggtcagggaatgacataatgaagttggtattttagcaaagttcctctggtataaggtaggaagataaatttcctgataaggcctggaccactgaaaaacccaaaagtaataaagactgtgaaagtgaaagtcactcagtcatgtccaactctttgcaaccccatgcactataacagtccatggaattctctagg

SEQ ID NO: 13956 - DNA, 201 bp, Bos taurus
ttagtttctcaatggtccaacttctgcaacaagactatttcttgagaaactcgcaaatgtgcccacgttgtgttcctataccaggctttgagtaggaaaaaactgttactgtaaatcactgacttttaatttttgctgctcaatataatctcctggcttggaaaagatcagtttgctttccaatccaaagaaaggcaatgc

SEQ ID NO: 13957 - DNA, 201 bp, Bos taurus
ccacctggagcctcctcgtgatcctggggcacaccaccacctctccagtgagcactctggtactcacctccctggctctggccttcagttattcttccttgctctcctttggagtcttcctttccctcatctcccatctcccaccccattggccccttatcaccctgccctgtgtctttcttccctggtgacttcgttcct

SEQ ID NO: 13958 - DNA, 201 bp, Bos taurus
ctcacgaagacattcagacgttcgagaaattactctattaagctcagctgcacttcaaattaaaacagaaaggtccaattctttctggaggcaacacaagtcctgggggcctgggccacgtgattcacctctgcatccttgggttctggaatacagccacacctgttctttggctgagaggaatgaaaacctaagagcccg

SEQ ID NO: 13959 - DNA, 201 bp, Bos taurus
ctgatataaattattggaagacccattgtaaaggtgaattaaatgtttccccagagggtatgcaatgggttcctggctttgtttggaacaagagctagagcaatcacaaccattgttattggccatcagaaggcaatgtggagcctgggtatctgttaaacttagtaagaatagttctaggtgaactggatttttaggtaa

SEQ ID NO: 13960 - DNA, 201 bp, Bos taurus
aataatctgccaaagtctctgattaaatggataattatatgttatgtgagagtataaactactctacaaatgtatgacattacttattacctgaaatactgcattttatcttatctattagaaaaaggcaggtggaattagaatcagagattcagtctttgcaaaaagcgaaccttaatcttgaaaaccttttggaagcaa

SEQ ID NO: 13961 - DNA, 201 bp, Bos taurus
ccttaggccagctcaggacggagttagaattgagttttgcaaaaagccaaaactggaggaatgccaggaccttaagtcatcctggcatctctgctgcctggaataggcctggcccagagtatatatttggagaaggcaatggcaccccactccagtaactcttgcctggaaaatcccatggatggaggagcctggtgggct

SEQ ID NO: 13962 - DNA, 201 bp, Bos taurus
gggctatagaaaagacaggactaacagaggcggcctgccgttttgtgtcgtgatctgttatattgttataaaaggagctaggactatgtcgctgatgtctccggccatgtattagagcagcttgttttgggagctgagccacatggaggagttcagaaataaaagaagcattgagaacaggtgtgtctttttgagtgagga

SEQ ID NO: 13963 - DNA, 201 bp, Bos taurus
gaaagcactggcattcagcccctgttggagatggtccctgccctgctctcctgcagtttcttcatctgaaaaatggccttcccttggagaggcctgaaaatgagctggagtcctataggcttgaggctatgagagcccgagcagaatcccttatggaaagcagcaaaggccagggcaggacacgctcctgagatcgagtga

SEQ ID NO: 13964 - DNA, 201 bp, Bos taurus
caatagagaggcgtgagtgagggactggacatcagggctggggggaaaaggaggatgacactcttcatccagtcagctggcaggtggacaggtgaataactgtattaatgcatgaatgagggagaaaaggaataaatgataggctgagttaagggacataaatgaccatgtataagcactgagacaccacacttaccatcc

SEQ ID NO: 13965 - DNA, 201 bp, Bos taurus
tgctcatctcccccgagtttaggtcaggcgttttttcctcctgtgttttcctgtatgtgtaacctattgaattcagatgacagctctggggggaaaggcctgttgctatctctaggtaatacttcagtaaagtgaaacctgacatagttctcttacttatattttgtttatggaggccccacttcctttggtcgaaaggct

SEQ ID NO: 13966 - DNA, 201 bp, Bos taurus
actcactcactcatctgctatccattcatccatcccacccaccagtcctcttgtacacccatccacatacccatctattcattcaccagtttatccattcgtctgattgtctatccatgtatctgctcattcacttattcacttgccctttcatccattcatccatccacccatccatccgtccatctacctattcatcca

SEQ ID NO: 13967 - DNA, 201 bp, Bos taurus
actgttgttctcacactgccttgttgaacttccaagtgagtgttcatttggagtctgagacctagccgacatgccactgcttcctctggaagagaacatggtaacatcaaagtcctgtgctttcttcgttttgcgctgatggggatatgtaggcttcttataatataaacttgtccaaggttctgttttgctatcatgact

SEQ ID NO: 13968 - DNA, 201 bp, Bos taurus
cacccctgctggtgacccggagcttatcacctcacctctgtgtctcagtcacatcttacagtgactgactacaacactttgtaggtgtgctgtaaactgtgagctctgtggagggagtactgctaattcttatcccctcacttcattctttcagttacttcatgaggtaggtacagcagcagttcttatacccattttaca

SEQ ID NO: 13969 - DNA, 201 bp, Bos taurus
tttaactttactgtttacggaactctttcatgtatgtgtatattttctaacttgacttttaccacaattcataggtaagtctcataaatcccagtttatatataaggttaataccttgagacagagctggaattaactcagaatctattttttttaagtccatgtttgagtaagaaatagtcttaccagaccacagcatgt

SEQ ID NO: 13970 - DNA, 201 bp, Bos taurus
ctccttcagagttatctggtcctaagggaagtttaactgtcctttgccatgggcaaaaaaagaggcagggctggggccacctgccacctgattttatagactttggggtcaaagagacagggctctgtccttcccactgcaaggaaccagggctgctgtggttgaacctgcgttggcccaatatattttacagtctgcata

SEQ ID NO: 13971 - DNA, 201 bp, Bos taurus
ctgcgagtgctgccggggctttccggagggcgcccatggcccccatctgaccatctgtcactgctgtcctaggttcaggtgggcttggccaacataggaaaaccctagcagctgagacgccagggctggacgggtgacagcggggaggaggctcacatcctcctgactctcagtcagcggggtggcctcccccaggagctg

SEQ ID NO: 13972 - DNA, 201 bp, Bos taurus
gaggaaagggtatcaaagaagaaaatagtcattgtgtcctttacactggaggaagtgttttgggctctcccatgtagacattttctaggccatcggtagcgtgtttgtaaggaaagcaacaactttaggcaagtaagtttataatcagataggaaaaaaatgagatttttgtttatttcattattacccgtgtgctaacta

SEQ ID NO: 13973 - DNA, 201 bp, Bos taurus
ccccaggatggggctaggatgacataaaacctgaagacacccctcacccacaattccagacagatttgaggatactgcagagcataaaggccccctgtctggcttcaccagccatgattcagaagcttgcagggcttgtagagaagcttcatcatccagcagtatgtgagtgatggggtcatgagtggctgaggaaggtgg

SEQ ID NO: 13974 - DNA, 201 bp, Bos taurus
tttggtctttgtccccattcctgtaacactcccatacccctgacctccctagaggggaggcggctagatattgaactgtcatccatggccagtgatgatcagtcatgcctgtcatgaagcctctgcagaaattcttagaaaggatgcatttgggacagcatccgggttagtgaacaagtggaggtcctgggagagaggtgt

SEQ ID NO: 13975 - DNA, 201 bp, Bos taurus
ctgggggcagtgaaccggccagagcaaggggctgagacacaacaggtgccggcagccagattagggagcatctgtacactgggggttgcaaactctggccttcaccctgctttatataaataaagttttattggagcacagctcatttgtttgtgtactgtctgtggctgcttttatacttcaagggcagagttaagcagt

SEQ ID NO: 13976 - DNA, 201 bp, Bos taurus
agttgcagttgaagcttgaagaccactggttgacagaatttcctcttagaagtcagtctttttcttaaagccttcagctgagtgtgtaaggcccatccacattagagagagaagtgtaacttgctcaagttcactgattgaaatgttaatcccatccaaaaaatactttcacagaaatgtctagaatagtgtttgaccaaa

SEQ ID NO: 13977 - DNA, 201 bp, Bos taurus
ttacttacatcttgttttactccgacccagctttcagagcagtaaccatggtggagtcttgagcctgtcccctagtcaagctaagtggccacctctccccataatgtgcccttcacctgccttggctcctgtaatctgcccaaatatcttgacccagctctatatgtcactcaagcactggcccagttatcttctgggagg

SEQ ID NO: 13978 - DNA, 201 bp, Bos taurus
gcaagctggtcccaagatacatcctgtgcagaggcctggtggaggaggaagcatgtcaggaaggaggaattgacagggcaagtatggagcatcacaggaagtgaggggaagccgaggccagaagggtagagtacccgcagcatcagcatcacttataacaaattgtagaatctaaatttaacaagagccccaggtgatccg

SEQ ID NO: 13979 - DNA, 201 bp, Bos taurus
tttagtctggatattaaatagtctgatacagatggtagaaggattctggctttaaatttaaattttagatactttaataagcatggcccaggtatatagcgctgtgattaatggagcatctgaaattatgcattatgttcatgaaatttagattggcctgtttgcttggatctatgctcagttatacccaagggagagaat

SEQ ID NO: 13980 - DNA, 201 bp, Bos taurus
tgctgacagccctgctacagagcacatccagatctttagcttagattcccttacccaggaatatggaggtctggaggataagtagctgtgggactgggcctgagattgtgtacgtctgacaagtttccaggtgatgccattaacaccactcatgaatcactttcaggggccaaatgcaacattgtgctttacgttattttg

SEQ ID NO: 13981 - DNA, 201 bp, Bos taurus
ctctgactctgcagataaatggagttgtgtgagacacaggcccttcctttaaaactggtttggaatccatgtcagggaaagccaagccgatggggcagcactttaatgtttagtggaggccctacatatttgcagtatacatttgcacctaatccaagttcactttcagataatactgtagcacttcacaggtagaatgaa

SEQ ID NO: 13982 - DNA, 201 bp, Bos taurus
ctttctatgtgttctcaagacaaagaatttggtgtctattttgtaagaaaccacatgacccttgcatatctcagaacctccctgaaatgcatctcgtacaagggtcaaattcagattacagcattcatcatgggagaccatggccaagtgtaaacgagtcatctttgtaaatacgttaagtagagagtgtgtacctagtga

SEQ ID NO: 13983 - DNA, 201 bp, Bos taurus
ctggatatcagaatgaagagaaaagtaacaggccacatgcctccaccagcatataacagtcatttcaggaccaaagtcacatacatacagggatggggagtatttataatactggtgctgggcccacatgacagtatgctgcctgctctgatacagacatcaatcttgaggaagccctccgcacactcagtgctgcctacg

SEQ ID NO: 13984 - DNA, 201 bp, Bos taurus
aagccaagcattcaactggaacatacagctgaatggaatgcacagacacattagagacacaattttcaattttaggtatctgaggacccgttacagataccgatgcttccgtatcaggcaaaccgattgccaacatcaccattaaaaaatcattttcttacattttctttttgtagtgtgaaactggatttctatgacaaa

SEQ ID NO: 13985 - DNA, 201 bp, Bos taurus
ctctgtgcaaagtccttacgtgggttttcattgctctttgtgaaagtacataattcacatggtggcctccagcagcacctgcccttctggcctcacccatatgccacagtcccctggtgttcagtcactcagtcgggtctgactctttgtgaccccgtgaactgcagcacgccaggcctccctgtacatcaccaattcctg

SEQ ID NO: 13986 - DNA, 201 bp, Bos taurus
aaaaaaaacaactaactttctatttttccaagggcataaaaacaaataagacagcctattatcaccatcattaccatcatcatttcttaagaaacaagaaaatgtcacaaataaaacaggaaaaaaaactaataaagttaaccagatactctaaaatcaatgaaaatcttatgtattacttgtatttcattagagcagagt

SEQ ID NO: 13987 - DNA, 201 bp, Bos taurus
ggaagtctcctgcctgtccacgtggcagaaagaatttcctcagagaaaggagattgtgttgacatcagagcatgattacaatgacaacagagaaagggaacgaattggccctgcctgtgctctcccacagagtccgtgttccatgatggaatagcaggaataagccatttctctcaaacacttaattaaagtcaagaaagc

SEQ ID NO: 13988 - DNA, 201 bp, Bos taurus
tatcaaggcacagagaccatcagtgatagaaaatgcattatgagaatgttcctccctcaactacggtcgccgtcgtttaattcaaatagaacataatgaaggtctttgctgcatattgctatgtgtatgaatggctagattagtggctaaccgataattagtagctttcgcgaaatgtggtcaatctacttgtgggagagg

SEQ ID NO: 13989 - DNA, 201 bp, Bos taurus
tggccaacaatgcaagtcatgagctaaaagggaaagtcaaggttgtactcagatttttgacgtcaaagagcatcaaggtaaagagacagaagaaaaagtgtactggagaatgcagacacatgaccagcttggttttgaacatacaaagtccaaagcagaagcaatacttccagaaatataaggcattttttcttatacatt

SEQ ID NO: 13990 - DNA, 201 bp, Bos taurus
gaggggcaaagagcaaggacacatgaagaggcatattcagccacatttgcttattttccttagagataatctaatccacactaccagctattgcacagaaatcagacagcaattttagtacctattattttctctctacttcttccacttttaaggcatttcagtttcacatctttgaaaatattatcttccaaatcacaa

SEQ ID NO: 13991 - DNA, 201 bp, Bos taurus
ctaccaacccacaaagattcctaaccacagaaaccctcaaagttttccttggtgggtttatgtcagatcctgttctactccagtatggtaatgccagattaaatgtgccatgaaaatgaaactattatcctgaaaatgaactattcataacttatcatttcccctttttattaattaacttggcaacttttcttcccaaat

SEQ ID NO: 13992 - DNA, 201 bp, Bos taurus
atttgtgtttcctcttaaatgttccccaggtgtctttttttttttttattattgcttctcttatttatataatatcatggaaaatgaccatggaaagatcagttcttttgaaatctatgcttaaaggtttcagaattcttaagcaagttacaaagaaagtcttgaattatgtatagaaaaacataaatttaaaaaatcagg

SEQ ID NO: 13993 - DNA, 201 bp, Bos taurus
tttacaaaacatagttctgtgtgtgctaaacaattcacaatacatctggaaaaaacagggaaatgtctaggagaacagtggttgggaaaatgtgttagactcaaatgcattacacttacctatcaagaagtagtcttcttcttttatttagaaactgagattcttaagggattgatttttattattcctattggttcttac

SEQ ID NO: 13994 - DNA, 201 bp, Bos taurus
aactctagctatagataatacttccaggcttaagaaatagcaactgcaaatggacctttgtcagaaaagactatctatgcctgcagtcttttgacctccacgagagcgagagctgaaacatttccttagcaagagaaagcatcctgacaacctacgctaggcttgtcaccttgtgtgggaatttctccctgattcagacgc

SEQ ID NO: 13995 - DNA, 201 bp, Bos taurus
aaagtctgtgacattatgattagactagatggggaaaattagtaggtgctctgatgaacttgtaatacaaagggtacacttaagatgaatttcaaatttgcttgacatgtatctttaaaaaattttctaactctttccactatcaaggcttagaatcaatggtcaactgagaaaactcttgacacctggaatatggtctct

SEQ ID NO: 13996 - DNA, 201 bp, Bos taurus
acaaagtgtgatctgagcaatgggatacttggaagttaacttcaatcaaatattattaaaaggaaagataagaataaagcaaaacttaaaaattaatcgatttctatttcaacattgggcaaatgaaaactgaacctcggatttgctaatgcttgtacagttaaataatagtgaaagtatttaagaaaaataaaataagaa

SEQ ID NO: 13997 - DNA, 201 bp, Bos taurus
atggctcccaatgatggccgcccctcagtgttcatgcttttgtgtcattccttccctcagaattggtctgtgtgaccaacaaagtacagaagtgatagtgtgtgatttttcaaggctaggtcataaaagaaattaaagcgtatgccttgctttttctatagaactggttttttctggggtaagccagtggccatattgtga

SEQ ID NO: 13998 - DNA, 201 bp, Bos taurus
aacagatagaactcccacaaagaataaaaatttgccactgagagagctttcaggccatggtagaatcagaaaatcttttaagttacagaacagaaaactagggattcccttgagcttctgtgaagcattttacaagaaaaatttaataagagaatatctataatctgacccaaggaagatattcctggtgcattttttccc

SEQ ID NO: 13999 - DNA, 201 bp, Bos taurus
attgtgagtgagtcagtgcctgggagaaagaggccaaggtaaagagggtaggaacagaacaaaggtcatcaagagtggctctgacccgtatgtgaaggacggttaaatcatggcgtggcagacaaactggagtggtattagtcagggctgagctgtaaaaaaacaaaataaagtttttattcatccagttttgtttccctt

SEQ ID NO: 14000 - DNA, 201 bp, Bos taurus
cttctctaccccatatgggctacttgttcaccatacaatcacatttcccaccattcacttaaatccttaaaaaggtctttgactacgtatgaatttcccttggcttgacccatctgattcaactgctcaactgtactcactccactttcataataatgctcactactttccctgactccctatccccatttcattctctct

SEQ ID NO: 14001 - DNA, 201 bp, Bos taurus
cagatggcagggaccgagagaagccctgcttatgagaacaggaaggcgagctgcagccacagggaagcatggagtgtggagtacccacaagacatccataagacagggccccagctgtggaagaatcacagtctaaggacacttccaaaaattcagaaaaaggagtggaagacgctggttaaaaacctgggccttgggatc

SEQ ID NO: 14002 - DNA, 201 bp, Bos taurus
tgatgacagaaagaaacttctaaacgaaagccatcactcagtcacagtattttattctgcatcatttattaaatatttttatatatgcatttacaaactttactcatttcagaactctgctttcaatacatttttaaactttttttggtagagtctctcgtaaaatgagatccatgtacaaaactaggcaacagatataaa

SEQ ID NO: 14003 - DNA, 201 bp, Bos taurus
ctgctaccccaaactttatttcttaaaaccaaccagcaactgcaccactaatccatggtgctgcagatgtttcccaggagaacagagcagaggcccagagcagactctctcccagagcagagagtcaaggacagggacgtgggggaaggcagcagcccctcccactgtgagccagagcaccccatcccaaccccccagcaa

SEQ ID NO: 14004 - DNA, 201 bp, Bos taurus
gcagtgaacaaagtgctggacgacccgctcgttgatctcgctgcacagttggaagttgttcatgaagatgtgctgcatcgtgacggcttccaggatctgacgcgagagcaagggcacagagacaggatcaaaggaagggcgaggcgagaaagagtctatcccaacacaggcaggggcattcagccccgcgagagcatcttt

SEQ ID NO: 14005 - DNA, 201 bp, Bos taurus
aacagcaagacatagacaattaccagttgccaacagtaccaattcagaaattcaaagtatctaaacacttataatgatcaaagctgccagtattatttcaagccaagtttttcacttacacccccatccttcccactgtatccccatcacgcccacttcactttccggtccctccgtggtggatgcaggggatttggacag

SEQ ID NO: 14006 - DNA, 201 bp, Bos taurus
tgtgacaggtaagccataaaaccaattggtctcaatcaaaaattctatattttacatgacggattgcagcatttggcctcagttcttcacttatccctgagccatgccctctgccttgtaacctttcagtgcacatcttccatgggtggcctggcccctgggttgcctcttgactttggggtcagcccggagtgatgtgct

SEQ ID NO: 14007 - DNA, 201 bp, Bos taurus
tgttcaggcagaaggaaacacctggtataaaacttgggtccggcagggcctggggctgaggcaccaaaggaacagaattaatatgaggaagcctagcaataaataccacaaagctctagaggccttttaagaattcaacaacctatacacttcacgcaaatgctattccattgtctttccttctcttccttcaccacgaaa

SEQ ID NO: 14008 - DNA, 201 bp, Bos taurus
catttattacttatgtcatagatgaaagcagctccattttcattgggaaatacatgcacaaaattgaaagcaaccaccagtaaagagagtggaaatagagcgtaggaaaccatgattactgatcattactttctgttacttctgatcttgtttttcgaacttttctgctcttattgctaagccacgttttctgtttttgtt

SEQ ID NO: 14009 - DNA, 201 bp, Bos taurus
tgggagtttgtgtctttcaaggaatttatccatttcatctgagttaatgaatttattcacataatctttgcattttcacttgctgtttagaccatttacatttaacatgattattgttatggttgggtttaaatttgccatcttgagatttatttttctctttgtctcatctgttcttttccatttgctctctctcttgtt

SEQ ID NO: 14010 - DNA, 201 bp, Bos taurus
ggcctcggaggagctatgcagttaggtgcagaatcctatattttaaaaaacgctgagctggggtgaaggattgacatcctcctgtgaaagaatggtgagtaggtgtacctgcgggggaaggccaatactgcttaaaaagtgatttgtgggtggagagcggaaatagcttctcttgtttgtgtgggttcttacagctttagc

SEQ ID NO: 14011 - DNA, 201 bp, Bos taurus
tggttagcacagtagatgggtatctagtacatattggatgatgatgatgatgaaatcaccacatctataccttaaaactttggatgggccctgctggaaggtacttccctggaaatagtggtccctcaggggaagttcttcctatggctccagtgacctgtgtattggcctaatttttagtggagatactttaacactgct

SEQ ID NO: 14012 - DNA, 201 bp, Bos taurus
ttggacttctggcctctagacctgtgagagacaaatatttgttgtcgtaagccactcatcttgtaataatgagttgttttcatgacaaaaaaaattaatgcatggcctgtgtcatttttaaactatagactggctcatactatatctttaaaaacttaaaatgctcactacctcatcttattattatggtcattggtcatt

SEQ ID NO: 14013 - DNA, 201 bp, Bos taurus
tttcattctctgaggattttttttaggtcattctaatattaacaccagaagtatttgtggctgaaaagcatgagtagtcatattatttcagtttctttagtatttttctcttgcttaattatctaatgttgctcttcatatccttggggaacgcagcatacttcattaatatggacagtttaacgagagagaaaactggat

SEQ ID NO: 14014 - DNA, 201 bp, Bos taurus
gtgaaaaggcaaagcatatatttaagtgctagtcatctttgaggagaactcccacttgatcctttgtcagatcaggtgttttctctaaggccttcctaaccccacttacagagctgccacctttcctctgtgtcctcacaatattgtgctgaattatagcactggccacattgttgtaattatctctttccatggaaactg

SEQ ID NO: 14015 - DNA, 201 bp, Bos taurus
agccagattcctgtctacttctggggccccttggtgtggacttagtgtagctgggaaagctgagtatcatagcccttctcctaacagggagtctggtaaggtttactctgctgtggcctcttccaggccagtatgggcagagcccttgaggttcctcagtcatctgtttcttatgcactaaactattcttatgtatctagc

SEQ ID NO: 14016 - DNA, 201 bp, Bos taurus
tggaggccgaatgtcactgggggcaggagggcactccagggttctcctccccaaaggccagctattcggagctcagggccaggctggccagcttcagagacgtgttcatgacgtgtggtgtcaagggcttcgaaagggaccttgctcccaaattctcccacgtcggcctctgttatttcaaggaccgtgaacatagcatac

SEQ ID NO: 14017 - DNA, 201 bp, Bos taurus
ttacctggaaggagagagtttaatacaaagaattattagctagatacccaactgtcgtctctgtaagtaaatatcaggccaaaagaaaccactaaggtcttctggagtagcagctgcaggaaatagttacccggacccgcctccagggactggagggaagaagggaaatgtaaactcagaagcccagagaaggggcctgcg

SEQ ID NO: 14018 - DNA, 201 bp, Bos taurus
taagtaaaaacatctttgtcaaatatagtcatctcttatgggattctctgcaaactttttcatcttttttgaaattagaatgtctttgtgggccaagatcggtttttaaatgtggttccttctaccctaagatcttgattctatgctgtttaagtgacttttgttttcttttcagagaaagtttcattgtgcaaatttgac

SEQ ID NO: 14019 - DNA, 201 bp, Bos taurus
ttgttacccgctgttgcagatacttccgagcttaaaattagaacacagactctgccaagttttctggggaaatatatgagtttaaaaaatagggtacagggtaaaataacttgatgaggaagtctgaattaataagaaagttacaaatgcagaaacaaaaagaggagatggctgccctggctctaactgaaggcattctgc

SEQ ID NO: 14020 - DNA, 201 bp, Bos taurus
aatgggccacagggaaggagaggaaactacttaaattgctggtgggctttcttgctctcgctgtgtctggcttgaacagttaattcatgccccttcctcactcctgtggcctttggagaatactttaaaccgtgtccctgttctgagccaatgggacagggcttggggcggcctttaggcttaaaatcacacttctctgcc

SEQ ID NO: 14021 - DNA, 201 bp, Bos taurus
ttttcctatggcctctcaccacttcgggagtaacactcccaaactaaattcaaatatactaaatccatgtgtgacaccctcagatacaaaaccattcctccctttgtggccagtctattgagtccttttgcctttcctagagcatgtgccacacagctggaccataaagagacagtgcttactaacacctgcattcacaca

SEQ ID NO: 14022 - DNA, 201 bp, Bos taurus
ttgctcaaaacagaaatcacacaccactcagagcaaataaccctgtcctcccaccaacagcagagagctatgtgcgtttgatgtatttctctttgtgtgtgtacacacatttgcaattattttaattccatgtatttgggatgataaaatatagcgtgggtaatcagtaattggctggtgttgagaccggcatgactcata

SEQ ID NO: 14023 - DNA, 201 bp, Bos taurus
cagtaaagttattggatctacaaggaaaaattttagaataactccaagttccctcctagctttaagctgcaagtgatgagtgattggtggcaatatatagtatgccaaagtagcatttcttgatgcaaacttcttccattaactcttatcagcttatcagaaggaaaaaaaatccacattattttatctcaaagattctac

SEQ ID NO: 14024 - DNA, 201 bp, Bos taurus
agtgagaagtgggaagcataaagctagccacttgccatcttccctttctcatgatagactgatgtacatttttctccaaatgctatctggctaattaacacattcatgttctgcatgccctcctacctcaatttaggactggctttcatttcttcctgaatacatctagtctgatagtttctaggaacaagtcctggttct

SEQ ID NO: 14025 - DNA, 201 bp, Bos taurus
atattcatgcctattaaatatgattttcccaagtaacttctagatttcaattaggtttataaatatattttcatataatttttttgcctagtcaaatcatcctaatgattttgcatattaaccaaactacaactcacctttgttatagttttggctattttgcaatactaaccttcaagtcacacatacttatctatttct

SEQ ID NO: 14026 - DNA, 201 bp, Bos taurus
ggccctatctgtgcagtcctggttgtaaaaccacaatctttcatcattcaacttttcatttttcataacacttctttacctcctgcacaaaactgttcatcgatgcctccaaatagtgctgtgacagcagctacctgtatcttggctattgaaggccctctgcaaatttttaaggtattttatttaaaacagcatatgatt

SEQ ID NO: 14027 - DNA, 201 bp, Bos taurus
gccagacaacgatggctgttcccccaaaccttttatgtcttcctgaaaacacagctaaactacatttcccagacttccttagagtaagatatacacatatgtaactgagttctggccaacggaatggaagcaaaagtgatatgtatgacttccacgtctgggcagttaacatcctgcaagtctttctccttcctacagatg

SEQ ID NO: 14028 - DNA, 201 bp, Bos taurus
cttccttgtttgaagggaaagaacttcttgtgcaagaaatgtttagggggcaaatagtgaagtttcttcttaactcattaatttttgaccctagaagtaagcatattaagtggttaatagcttctccaacttgattgacaacaaagcttttatggaaatactattggatagtatgttagtgactttgtatgtaatgtggag

SEQ ID NO: 14029 - DNA, 201 bp, Bos taurus
gtatatgaacatgctgagttaccagcatatcacgattgactgtgaatcattcatgtgtttaaccagaggttctttaattccctgtaagcacactgatggcgctaaggcctggcatgacattgtttccacaagtaaggatcaaatggcatttatgctcaatgataaatgtataggagatgagttttttttttttttttgtgg

SEQ ID NO: 14030 - DNA, 201 bp, Bos taurus
gaacagcagaaagaataagcaaaatattaaacagagctagttctaaagaactacttcctagcctctctactaggaggtgaacagaagctttgcccatacaattatgagcaaaccctatttataccacgagttcttcctcaaagcatcctttttttttttttttcctgttgaaatcacaccaaataacttagttttccttga

SEQ ID NO: 14031 - DNA, 201 bp, Bos taurus
caattaaaaaaaaaaaaaaaaatatatatatatatacatatacttgttccaagtatttcctctccatacactaacacaacagatgttacttttcttatttccaccaacagatatgaattaagagacttatcagggtaagtctattatatgctcttctattattttcatcattctattctattattattaccattccattat

SEQ ID NO: 14032 - DNA, 201 bp, Bos taurus
ctgaatgaggcccacatagattatataggataatctcccttacatgaagtcaaatgattttgcactttagtcatacctacaaaataccttcttgagagtcccttggactgcaaggagatccaaccagtccatcctaaaggagatcagtcctaggtgttcattggaaggactgatgctgaagctgaaactccagtactttgg

SEQ ID NO: 14033 - DNA, 201 bp, Bos taurus
tttggcaatttctatgacatttttctgggcctgaaaatgtttctcttgcaagttgctggtgagcatcacaccagaccccatgcattcacctttgctaacaccttcaaaagaccacattttagatcaatcatacatatctctttagctgagagtggtgggtttcttggcaccattaaaattctcacaataattgaactgaca

SEQ ID NO: 14034 - DNA, 201 bp, Bos taurus
agctaatgattggcttaatttggccatattctattttaccctaatccattgtggctagacagtgggaaagacatatgacactcaacacagatagagccaggaggaaccatgaagagggaaagtgattacaaactgggtgatcatcccaaaaggtgtctaccctgaatccgaactgtggttttagttccctgagattaatgt

SEQ ID NO: 14035 - DNA, 201 bp, Bos taurus
acaaaagtaatagatgccttaacttgttgccttctacttttacatcctttgctgtctacttttgagctattgtgaataaaacatcaggaacatagactatgatgtcacgtgaacgcgtaggagtcttttatctggaacacatgtcaaatgttttgttattctgaggaattagtctaaagactagtgttgaatgtttttcct

SEQ ID NO: 14036 - DNA, 201 bp, Bos taurus
ttatgtgaatatttgtaaaatcttctatgtaagctagcagtcgctttattaatgtgagagaaagtactttattattgatttccagtttatagagacctcagttttatggttaagttttttatctatatatttgtccgtttagtagaaaaatgacatacctattagccaaagctggtgtaatattgtgctgctcctaaaaaa

SEQ ID NO: 14037 - DNA, 201 bp, Bos taurus
ccactactaaaaatctatttttacattgtcgagaaacgtaaatcttgataggttatgcgacctacccaaggttccaaggctaaaaatggtaaagttaaatcttgaggctctatttctgatgtcaaaagtctgtattcttgacaaccaaggcttattacttccattcagtcattgttttgattaagttaggctagtttaatt

SEQ ID NO: 14038 - DNA, 201 bp, Bos taurus
tgtgcttaattaagaaaaactggactgtggggaaagttttcttttttcctgctttactaaactaaacttgtcaaattaaagaaaaacaagcaaaacagatgggtatagttcaaaactatatctaatctaataagatggtatttaagaaaatatatattaagtcttaggttttaaaactgatatacttattcagaataggaa

SEQ ID NO: 14039 - DNA, 201 bp, Bos taurus
aaagaaattcacttctaacatcttcaagtatatggattctgggaaaacaaaatccacaaatcgaatatgggtatctttcagactcagtttgcctttatccgataagccagaaggtttctgtgactgcatgttatgactacattctatggatttctgtgatcacattcttctgtaaaaaatgtcagtcatatacctcatttc

SEQ ID NO: 14040 - DNA, 201 bp, Bos taurus
tactggagtggggtgccattgccttctccatacgtatcctctattacccactaattgcattctttcaatattcaatcaatagaaatatttgtgatgagcatcaaaagacaaggaaaaaacatttacagtagcatgaaatctaacagccccaaattgataaagtccaaaggttcatcattgattgaatagataaatagagca

SEQ ID NO: 14041 - DNA, 201 bp, Bos taurus
ttaacaagttttagggattaggaattgagtttgattctaaaatttaggagcacggatgtcagctttgaatattttccaaacatcccatgaccatagatttatagaatggaagtgctattcctcatgcactattccccactgtcagtcagtcccagtcatgcttgtctttaagaaaaaaagcatcccagtcatttagaactc

SEQ ID NO: 14042 - DNA, 201 bp, Bos taurus
accaggagtgtggggttgggggtgagggaagatcaccagcattccttcccctcatgcagctgctcataagaaaggcatctctataaaagaggctcttaatttgatgtctaggcatctctagatggggtccgtggatgcccttcaaaggatctgaaaatcaacggaactgctagtaaaactttctatgtctgatttcgtaga

SEQ ID NO: 14043 - DNA, 201 bp, Bos taurus
aagggaaaagagaatcccctcttatcaccaacaatgagcatggcacaaagccaaaacatttcaaagagccactctcaccttcctggccccaattctttctgtgtagaagaaactgggcagctaaggtaatggttggggtaatctggcttctttgaactcttgagaaacccctgagtggtatcctagtgtgaccaagcagga

SEQ ID NO: 14044 - DNA, 201 bp, Bos taurus
ggaccaatttcagaatagccaattccactttggaccttcatcttcttttggtttgagaaatgtaatatttacaggttatttcttgcatgattactcactgggtatacctggagcggatgccactgaattgcttctgtgttctagggcaagatttcaatggacacaaggggaaaggacctggtcagtgaacattttgggaat

SEQ ID NO: 14045 - DNA, 201 bp, Bos taurus
gcaagtttgttttgaagtttgaagcttcaactgaaacccacttctggccatgaacatgcccacctggggcaatgaaggaggatcagaggaaggaataacagaggggaagggaaaatgatggcctcgaatgcaaatttcaggattctcccttttgtccagctttcggcagtttgggttttcttcttcccccttatacaagtt

SEQ ID NO: 14046 - DNA, 201 bp, Bos taurus
ttaagccgaggaggtaaactggggttaaataacttgcccaaggtcacacaactagtaatggtgagagccagaatgggaaaacagaggcctcactgcagcatctatgttcttaagcatctcgaaggacaggttttgttgttgattgtattgtgtttgtttttctttctaattaggtagataagctccaggaaatggtgaagg

SEQ ID NO: 14047 - DNA, 201 bp, Bos taurus
atcagctgtttcctctgctaatatctttatcctcctctcccttcagaagttccaggagggtaagaggttatgcttatgtactaatgtagcttcatgtggagggcacagggcttcccaggtggccctagaagtgaaggacctgcttgccaatgcaggaaacataagagacccagggtcgatccctgggtcagggagagccct

SEQ ID NO: 14048 - DNA, 201 bp, Bos taurus
gaatctgcctgcaatgcaggagacctgggtttgatccctgggttgggaagatcccctggagaagggaaaagctactcactccagtattatggcctggagaattagatggactgtatagtaaaagaggtctgaaagagtcagacacaactgagcgactttcatttcacttcacaactgatataatccccagtgcccagaatg

SEQ ID NO: 14049 - DNA, 201 bp, Bos taurus
tcacgcaaatgaaaagttcgtgggtggtatggcttcaagaaaatatctttgccagcatctctaggtttacatattctcatcatctctttctaagaaaaatcccagaatcaaatctcatcaaccagaaaggataatgtgccacatttcagtcctatagccagtaggctctatacctatgctttgaaccagggatgaagacag

SEQ ID NO: 14050 - DNA, 201 bp, Bos taurus
tggagctatgagccaagctgtacaggcccaccaagatggacaggttttattgaggagttctgacaaaatgtgatccagtggggaaggaaatggcaacccactctggcataattgcctggagaacctcatggacagtaggaaaaggcaaaaagatatggcacccgaagatgagtccaaagatcgggagatgtccaatatgtt

SEQ ID NO: 14051 - DNA, 201 bp, Bos taurus
caggaataacaacaggctggtgttttctgctgagaaaacgagtccatcaatcatctctaatcattgatcttcagataaggggcccgatgccggcccatgcctacagtaaccatactgtgttttgaagactactgccaaaacatattgtattccacaaatctcttgagaaggcctattctgtttccacttgtgatttgaaat

SEQ ID NO: 14052 - DNA, 201 bp, Bos taurus
acttctttatagactcatgcctggctagactgtctctactatatctgcagtctggttccacaatgtgatgagtaactgggctccagcatttttttttaaaggctttgatttacttcccctgtttcctgctcacccgctgctcccatcccacaaatatttgccctgttttactgataagactgtctcatgtgtgtgtattac

SEQ ID NO: 14053 - DNA, 201 bp, Bos taurus
tagaagaaacaaatggcttcctcctcccctccagttgagctgacccagctaattccaaaggccagtgttcagaactttacctaaggccttctttagccccttgaactcactaggtctgtgtacaagtcaggcagagagtcaggaactctaatataccctaggaacaaccctcagtgaaaggccaaaagaaattggtagttt

SEQ ID NO: 14054 - DNA, 201 bp, Bos taurus
cagcatggacatgagtgtgtgtgaaaaagagggagaactctgagagactccacctagagaaagcgagtgtgtagtcagagttccacaattatttttaaacgaatgaagaaaaatacatgcactgcataattctcagtaattctttttagctgacaactcaataaatggatgaggaagtgaacagatgaatagatcctcgag

SEQ ID NO: 14055 - DNA, 201 bp, Bos taurus
cttattgaaaaatagaaaccactcatggctgtaaaaccagtgaacctctttcctttatttaaccttttgcccttgaaaatgtacttttttatggtccgcatgtgatccaaccaagcttgctctcagtgagcctttcacatgagttatacagagaagcacttcaaagagaaaagagaaacgctacataaatgcaaggtagta

SEQ ID NO: 14056 - DNA, 201 bp, Bos taurus
cctttaaatttcaggccttcttgcttcccgtgactgctcaggtccagaggatgcactgagtccagctgcacactctacctggccgctggaactgtgtgtccgtggcaaggcaggggtgaacagcttgtcttgagtggggtggaaagcctttaatatttgctgtgatttttttttttaaattgtcacatcatgggttacttt

SEQ ID NO: 14057 - DNA, 201 bp, Bos taurus
tctttggtccatgcttagaagttcatattctcgtgacctacttttccacttaactcttgataactccgggcttctttgttttctttttgactttggagaactaggttagtggggaaagtcagggttccctggcagacaggctgggttgagagcccttggctggcatctcctcagagccccatctcagcgcccctctgcttc

SEQ ID NO: 14058 - DNA, 201 bp, Bos taurus
tccgactctttgcgaccccatgatcgcagcacaccaggcctccctgtccgtcaccaactcccagagttcgctcagactcacgtccatccgcaattagacatgcgctgtaaacacatgcatacaggcctcctatggccctgggacacaggacaagagggagtgaagtgaggggctgtgggcacatgagtcttgtacgtaagc

SEQ ID NO: 14059 - DNA, 201 bp, Bos taurus
aggctgttttacctcatcaggtcgcacatagacaggtagtcggcagctcggccccttgctgaaaccaattctgctttggtatttttctcctgttcatttgctctctttagggaccctgtttggcccatctctgcaccatggccaaagtgacagactttggtctctgttggattaatcagtgtgctctttgatccatggcac

SEQ ID NO: 14060 - DNA, 201 bp, Bos taurus
ggtccattagcagatgcaaagacctttacatagctgtattatatctaactagaacattaaaagaactcatttccaaatctttttgcgaaaatgtcacatcctttaaggcagatccactgatttacaggatgctgttagaaacaggaaagaaaaaaaagtcctgagtacagtttcaccttgagtccaatgtcaccctacaaa

SEQ ID NO: 14061 - DNA, 201 bp, Bos taurus
tccctccaggctccctttgtgctgcatcagtgacagaccagcttgatgtacggtctccgtgacgtgcttcatctcattagaggacaatcctttgctcaatccttaatggactttacaaattggccgtcctccctctggtgcaagattattataattttattattcatttcaggaattagttgccaggaatgacaacatgat

SEQ ID NO: 14062 - DNA, 201 bp, Bos taurus
caaagagatttgatcttgatgtagaccactgactttctctttataccagggtcatggggcatttcaactatggtgatacacctggccagtagtgtcccctgtggactggggtgaccgtgccaacaaccgaggaacactcagccctctgtggagcatcctacgctcctcttttcacaacggtggggcagtgggctcatatga

SEQ ID NO: 14063 - DNA, 201 bp, Bos taurus
tatatataacaccatgtagagtcacaattcttgaacaaaaagtacaaatacagaatatatcacaacactaatactaacaaaattaagatcaggaaaagtaattgtgagaatgactttgttcagcagcctgcaccacacctgatcatctaactcacaacctcctacatgcttccatccaattctcccaaactcctgatccaa

SEQ ID NO: 14064 - DNA, 201 bp, Bos taurus
aaagcttttgaagtagacagggtgtcttctcaccagtctcctgtgcttcctaattgggcaagccattagaaggtgaggtcatctccccagagaaggaggcggggccttagcactcagtagcaggggggccctggggtgaggacaaaaccagcctgaacatctgcagtgtctgttgttactggagcagcggctgaaggggat

SEQ ID NO: 14065 - DNA, 201 bp, Bos taurus
tgttattttcagttactaagtttggggtaatttgggtagcagtggaaagttagtgtatttacattctgatattacactatgaaaatgatatttattggctttgagtactttcctatcaggtatcatagctatgcagatgtttcacaatataatttatcattttccacttaagccactgaagcactcattcactatctcagt

SEQ ID NO: 14066 - DNA, 201 bp, Bos taurus
caactccacctcagatcatcaggcattagattccagggatcagggaccccctgttctggaatatgtgagtgggcccaatgacatgacattcctgtgtgtaagctcagtcgcttcagttgtgtccagctctttaagaccctgtggactatagccctccaggctcctctgtccatggaattctccaggcaagagtactggagt

SEQ ID NO: 14067 - DNA, 201 bp, Bos taurus
cctcatgcgtttctgggttggctaccaaaggccagccatggcgtatctgtctatgtcgtcagctcaaggttcatggtgggtgaaataaacccatgacataacatttctggcctttttgggttttttttgactcaatatctcaagtcagtttctggtccctatattaaatcaaattaaatatttacttgagttactggcaca

SEQ ID NO: 14068 - DNA, 201 bp, Bos taurus
cctaactcctcataattgctttccctttatttaagttagctcaagtgggtttgtttttgccgagtaaatgatccctgattaagacagcccttccgggagaggtgaagcctggcctgactcttgtaagttaagaaacagtggttgagcccaggtacacggcaggcactgggataggatggagcccctgctctcctgaagcct

SEQ ID NO: 14069 - DNA, 201 bp, Bos taurus
ctgtacccatgggtgtgtggctttccattagtcttcatctgtattgggttctaatttgtatttagtgagaatggaggagactctgcagggccgaggagccaagcaagttcctttctgcaggtactacatctgccaaaccaaggaaaccatggccatgaagcagttggctccacattcagaagtaaactagaactgagccct

SEQ ID NO: 14070 - DNA, 201 bp, Bos taurus
atagaaatgtaatccatgtagatgggccaccagcttgctttttttccttccatttgtttctgttgtattgatacatcttctaataaggaaaaacagaccagtggccttggaagaaggatggctgtagtgattggaataataaatactaccaggaaaattagaggaaatgtgaaaaataatggagagatttactccaaactg

SEQ ID NO: 14071 - DNA, 201 bp, Bos taurus
ttttgctggggggtggggggaactggatctcagacaggtgaagtaatccgcaaaaggacacagctagaaatgagcaaaccctggccatttgaatccagagtattttgggatagactattgatatctgtttattttacttattaacaaagcccccattattattgggggccacaatggatctagtgaaaagaccacatcttc

SEQ ID NO: 14072 - DNA, 201 bp, Bos taurus
agaatatacttgatgtgaggaaacactaggagctgagcactgaacatgcccaaagtgcatctggaactcacatgtttcttttcggcctacaagtgcttgcgactgaccaggcaacattggcatcaaggcatctccgaaatgaaagcaactgtttcagccaaatctcagaaactctataaaagtaaattggatgataaaggc

SEQ ID NO: 14073 - DNA, 201 bp, Bos taurus
aatgtactctgtgtgtccaaaaagaagtagattgggctcagcggacatccagtcagtctctgtcaacaacataaatctgtataagctaaaatcagtataattgagagtgttttctttagccatatttgaagcactggggataccaatttatgcaataaggagctttcagaatatacaatgtccctattacatgcactggtg

SEQ ID NO: 14074 - DNA, 201 bp, Bos taurus
tgaaagctactcaaagggaggctgattaaaataatatggatttctaattaaaaatcagtctcctagccatgcaaatttaggaaaagattcagtggttccctttctcattttgaaaaattcccccataaacacaggtaacttcattactaggtcaaaataacactttaaaagctaaggaagagcaagcacaccttctgttaa

SEQ ID NO: 14075 - DNA, 201 bp, Bos taurus
tacactgtagacctcttgataagtcacaattaaagcagaagtcctcaagctggtggcccataggcacagtccacaggtatggcttaatggcctacagagtatttaattaaaaattaggagttctcatactaaaatttggatgtctggtttctctgaatacaaagacctagcaacaatgaacaaccacccagtgggccagta

SEQ ID NO: 14076 - DNA, 201 bp, Bos taurus
caagagttctggaaccaatcccccagagatactgagggaggcctctattttgttcttactcctcctatcttatggcactattgcccatgtgagcataaatcaccttatatttatatttaactttcaatctacatgttactgattcttgatcaggccaaagctgtaattcagtatattgagtccaagtctgaagattttgtg

SEQ ID NO: 14077 - DNA, 201 bp, Bos taurus
ggtcgcacagagttggacatgactgaagcgacttagcagcagccctccagtctaagctggtctgccctgaggaaactcagaaaggaaaagaataccggccatgtagtagccatcagactgtagccactccctatggtgagccctgtggaaactcaggatatgaaaacacaagatattggccctagataggtgagatgcata

SEQ ID NO: 14078 - DNA, 201 bp, Bos taurus
ggccacatggctaagaaatggtgcggccaggaggcaagtatacacagtctagctcaagagttattaaccatcgtgttttattctcccctaaaagggacacgggcctaagaaagagctgtttaagctcatgtgatgtcttttgtgatgcctggagcatacataaagaatgtatgaatggatcaattaatgaaggtatacata

SEQ ID NO: 14079 - DNA, 201 bp, Bos taurus
cccatctccatacatctggaaccacgctgtccagtacagaagccagtagccacacatggctgctgataatctgcagtgtggccaggctcaactgacatgtcgtgtaaacacaaatgcacacaggattctaaggcttagagcataaaaagatagaatgtaaagggccgcattagtaaactcaaattgctttcaggttaaaat

SEQ ID NO: 14080 - DNA, 201 bp, Bos taurus
ttttgttttgctttccaccatcagttttaagaaaaggagatgcttgattcctccaccagtctgggctgtggctggatcttattcatttcaataccatcctttctgggccagcgttgattggaatgatggtggaataaatgatgagtgactccgtctgccccaaatgtgatttcccttagcaccactctctggaatagggga

SEQ ID NO: 14081 - DNA, 201 bp, Bos taurus
ctaaccctttcccctcccatccctcaaatccaggatccctcttgccatagagcccttgttcttaacagctcattccaccttggccggatatttgtgtcccctccctcgtcaccaagctctcccctcctcagcctccagttctcagctgcagcaacatgtcctcagggaggcattccctggccctccctctgtccccgacat

SEQ ID NO: 14082 - DNA, 201 bp, Bos taurus
atattttctaaacatatatgactcacatactacagtaatgtaaaattttacagaggtgagatcattctatacatcttagtttgaaatgtatttacttacatattttagatactgatctatctcattatttttttataaccattgtgtattcaatggtatgaatgtacctcaattaatttcaccaatcccctattaataaac

SEQ ID NO: 14083 - DNA, 201 bp, Bos taurus
ggcagaggaaacagggctccagggaggagacattttgagggtcaatacatggacatggtcaaggcccagtggggaagaaactggcctgagcgtggattaaggtataagaagggctaactcaaaggtgagccctgagagtcacatagatggagaaagcacgctggggccattgaagattgttctgcacgaaactgacatgat

SEQ ID NO: 14084 - DNA, 201 bp, Bos taurus
cttggctgcgattatgtgggccctctttttggacggtaatgcacattttaaccatgaggtggcagtcaagcccttccaaatggcctctctgcactctgaaaccctgggtataataatctcattgtagattccagacacctgagtgccaggagtaaggccatgcttctgtgtgtgatgtattttttccatccctgatttgag

SEQ ID NO: 14085 - DNA, 201 bp, Bos taurus
tgtgggtataaagaagaactccacaatggttctgcattttaaatcaaaggggaaatcagattttaaaatgatatttacaagcaactttcaagacacttatacatctgtatacttttggatgctagctctctgttcttacaatgtaggaaactgctccttggagggatatttttatttctcaatttgaaaaggtaactttaa

SEQ ID NO: 14086 - DNA, 201 bp, Bos taurus
ttgttctcctgggtcactctgcaggaagccagccactacggtgtgaagacacctagcttcctttggaagggtgcatgtggaagggaacagagaccacctgccaacagctctgtgaagggccgtcttaaaaccagcctccagcatcagtcgagtcctcagatcttggctgcaacagaagggaccccaagccagaaccaccca

SEQ ID NO: 14087 - DNA, 201 bp, Bos taurus
tgccagaagtgaccaggttacatcatcaatcttatttatcatttagaagatatttactgcaattctactctgcatagggcttcatggcagatgtacttcccttggcctttatacaaccctgtaagagcatttcaggactcacaaatgggcaattaaacctacagcctcttcctgagagttctgccctctatttgatatgca

SEQ ID NO: 14088 - DNA, 201 bp, Bos taurus
cagtgtccaagagttcgagggtccatagggatcttgggaggtcacttagtccattcctctgtctctaggaaggactcacctttccccattaaattggaccaccataggacaaattcattctcttttagaaaatactgggaagcagatttttctgtggatcaacacatgaaaacttctccactcttatgcatttacctttgg

SEQ ID NO: 14089 - DNA, 201 bp, Bos taurus
tggcatgctgcattccatggggttgcaaagagtcagatgcaactgagtgactgaacaacaaccaaagtgcacccttttgagatgctccacaggatataattggccacatgacatagtcaaaaggtaactccttcaggctgatccaccttcccagaacccagcatggtatataatggattgtctatgatatgggaaagattt

SEQ ID NO: 14090 - DNA, 201 bp, Bos taurus
ttttggaaaattttaaacacaatcaggactcccatctgcaaaccttttcagaactttcatacactcacacacactgcaaatctccaagagaaagacacattgtacagtgagtgtttcctcagcagttaatagtttttctccaaagagcatcttgaggggacagtgtttttgaattgggaaatgctaatctgaatattttat

SEQ ID NO: 14091 - DNA, 201 bp, Bos taurus
cctagtttcagattttttttaatgtttcctatgacacttcactctctccacataaaggaattaggagagaggagattggaaggagcatctctgggagtgcagtgatcaggagttcaggtgaacacataggaattggtccattatgttctaagggtcagcatagtgtagtggggcagtgcacaggtcaggttaaaagctcag

SEQ ID NO: 14092 - DNA, 201 bp, Bos taurus
tctgtgtggggaagatctttaagtgatagctcatcccaagttggttttgtttattcagaaggaagcatttctttcatggatgagagatagagtacacagaactacagtcatgagaatcttgctgcccttgtatcctggtccaattctataggcacaatgcccagaaactcactgacatatcttgtattttggggaggaaaa

SEQ ID NO: 14093 - DNA, 201 bp, Bos taurus
acatccagaagatggctgaacctgcaggaataccagagtaagaaattaatgtctgacaacggagtgaaagttcaaagattctttgttgccgacactgccaatgaagctctggaggctgctaagagactaagtaagctaactcataatgggtggaatatgcttgccaaattagtgaattcacaggtagtggtttcccactag

SEQ ID NO: 14094 - DNA, 201 bp, Bos taurus
tgaggccatgaagtatattagctacagactatattaactgatcatttgacatttattaagtaacttcttatgtattggtggtggtcacagagagctatagttgctgtgttctaaccataccatcctacactcagctccagaatatgccctgtaactttgtttatatcctctgtcccttgcacatctgtgtttctcttgggc

SEQ ID NO: 14095 - DNA, 201 bp, Bos taurus
cttgtgtggatttgggtaataagcgtgcatgtctggactttccaagtgctgttcacttcctataaagctacatggatcttgtgtgatttgggaactactactccttccctatatattttttcttttttgtaaagctatcctatacctactcccttggggtgcattttattgttgactattaattgctcaatggcgcagttt

SEQ ID NO: 14096 - DNA, 201 bp, Bos taurus
aatttcagtttaaaacccaagtctttttcaagtgctcatatacacatgctagattgaaaacttgatgcttacttgttaatctaaatatttcttatacatggcaagtgcacagaataccttattttacacaaatgtgttgaacattttcatgtcttaaacatttctttacctgggctagctgcagtattaaaagctagtcac

SEQ ID NO: 14097 - DNA, 201 bp, Bos taurus
ctgtccggccggaccgcccacctccctccacgccattcatcctccctctcctcgtctctgtccacctctccatccttctctcccagtcctcatcgccgccgcctaagctcgcagcccgaacttggcctccggcccacctcccctccacacctccctagccaccacacgacccacctgccgacgcggccatttctagacgcg

SEQ ID NO: 14098 - DNA, 201 bp, Bos taurus
ccctttgcattctgccatgcttgaggagactctttccctgaaaatgcagcctccattccaactatggtatgtatttataggccccttctgcccagggagattttagggaaagccaaagccttctgggaaggattttctttgaagagtaagatcatcttaaacaggcgtctgattccctttgtgctcttggttgttttgtga

SEQ ID NO: 14099 - DNA, 201 bp, Bos taurus
ggcaaggggagaaaaggagggaaaaaaataaggggcttgatcaactcacctagaggggaagataaagccaagaggggccatgtcagctttgaccagaagagagaagctctctgggcatttctgatccggaatgcctctctgtgggtgggagttcaggtggagtggctctctgttcctgactttttaatgtcctggcccagc

SEQ ID NO: 14100 - DNA, 201 bp, Bos taurus
gacagcagaaaatcactaactggtctgggaattaagttaggactccatagttcttgccacatacatctcagtctgggcatctgatggagattttaaatatctaagtatttaaaactagtctacttctgaaatgtgtgattaagtgcttgatttgtattcacttaatacttttgagtgtgctgcatgtcaaggactcttcta

SEQ ID NO: 14101 - DNA, 201 bp, Bos taurus
taggatctgggtcagggtataagttgaggtcaggatcagtgagggagttactgtcagggtgacagaagagaaggtctggtacaagttcagagtgagggtgggtgtacatttcagagtcagtgtcagggtgagggtcaggttgaggatcagtgatcaccatcaaggtcaggctaagggtcctgataagagttagggtaaata

SEQ ID NO: 14102 - DNA, 201 bp, Bos taurus
tggtaatgcacttccctcaaatcttgcagatttgtcaaatgctgtaaatgaaccacagttttctctcttttcgtctctggggcccagctctagtttttcaatcagcacaggcaactttaagcagacaggacagctgggaagggaaacaacccttccaaagaaggctgagctccacgtgctggccccagctgtgtgtgaagg

SEQ ID NO: 14103 - DNA, 201 bp, Bos taurus
acccggctgagaagcctcctcccgcccccctttcgatttcccgcttttctcctgcgaacgcgctataggggcgatgttgaggccgtgtgcccagtgatggtgaaatacaccaagttgttgagaggctgtggattgtttgcccacctgcgttgggaagaggggcttgggttagctcggggaagcgcagagatttttccctgg

SEQ ID NO: 14104 - DNA, 201 bp, Bos taurus
cctggagtatcccatggacaaaggaacctggtgggctacagtccatagggttgcaaagagttgggcatgatgtaatcctagtaggcctcttggaggaagtgatgtttgagttgcaatattgagccaagctaggcacatggatattggggaaagagagttccctgcagagagaatggcaagtgtcaagggcctcaggcagga

SEQ ID NO: 14105 - DNA, 201 bp, Bos taurus
cagtctacagggttgcaaagagttgaacacgacttagcgactgagcacatatatttttagactgtaacttgtgtctaagcttttatattcctcaagtgttgttagctacaatattcacgatattagataaatgtatttatattttctacactattactaatcaatccatggaatatgtgtgtgtgtgtgtgtatatatata

SEQ ID NO: 14106 - DNA, 201 bp, Bos taurus
aagtggaatctgatggcctcaatttttgaagcctttcattgattctaatttgacaggacttacttggcttttggtgacctggccctggccacctgctcattgaaagtctttatttcctgcttgcagcagagttggaggggctgatagtaggtggtggcggttggtcgtcagtgagaagtggctgaagcccttagaccaagc

SEQ ID NO: 14107 - DNA, 201 bp, Bos taurus
tttagtattgttctcggcaggctataaagcacagactcagtctatcacatggagagacccaaccaaactctgggaacctgttctcttcaccatccactcattcggaaattctagggatgagaaaggtagcacttgaggccaacatcactgtgacacagggagtgatttggtgctgaatttttccggaagcagaattggcag

SEQ ID NO: 14108 - DNA, 201 bp, Bos taurus
tgtattcagaaaggaactgctcctagaatatcgcacttggaaaagtagtgtgtttgggggtttatttttttggctgtgtcacatggcatatgggacctgagaacctgaaccccatgcagtggaagcacggagtcctaactgctaaacttccaggcaattcccagcagtggaatttttttttaaattttacaaaactaactt

SEQ ID NO: 14109 - DNA, 201 bp, Bos taurus
acagtggttcagtgtttgagattcttttttcctatcacaaacagtgttaaggttaatacctctgtaaccaaacctttgaacacgtgcctccctggttttgtacagttttggtgtcatttcttgtgagagataatcaacatacagaaaagcacagaaaacatttttacagttagttgagtccacgcaaaaaggaacagcagt

SEQ ID NO: 14110 - DNA, 201 bp, Bos taurus
taaacaatttcaacttcactgagccttccctctacttgcacatgagtatataaagtaacctaaatgtggatttttattgactactttctttccaaggccaaatattaacagtaacccttcagggactgatctagtggtaatgagccaacatttcttacagcctggcaatgcatcactctgtggccatcgtgctttaaagat

SEQ ID NO: 14111 - DNA, 201 bp, Bos taurus
catttccaatggccttgctgcatcacagtgcatagcaaggaaagtcactttgagaaaaaaaggacaatgagattccttgtattaggcccagttcttctgttactattaaattaaactgtttatccaattaccgccactcacatttctgtctggaggctgagggggttgcacaagccaactgggaatatggcctcttaagcc

SEQ ID NO: 14112 - DNA, 201 bp, Bos taurus
aaagttctttgaagaccttctttgtagcaggcttccacataagctcacagggaattcaaatcctgaaccactttataactagaaggcaggccttctggccatatgctattttaatagcaaggaccatagtacagcctgaataacataaaggtactgagctgaactgagggccgtgagagtttataaggatgattgttgcta

SEQ ID NO: 14113 - DNA, 201 bp, Bos taurus
tcttttgaaatactgagaattgactactgtgggaaagccattaactaatgaatgtatagagatccaatcccatagactattccatttgacaaagttgttgatgatcgctagtatggctccttggtccatcccatctaacccttgaatagcctttcagcattcctcataattggtcattagagcccttcttaaaaccctcca

SEQ ID NO: 14114 - DNA, 201 bp, Bos taurus
aggatggaaaataacctttccacaaggaagtgatgatgaaggcaaagagaaggtaaccaggaatcaaagggcagatggaagttccagatgcctctgttgaactggtccatgtttcttggctcacttccttagggaagtgagagtttgcccagattaaactttgacaggatgagataaagcactgttgtacaatccccatat

SEQ ID NO: 14115 - DNA, 201 bp, Bos taurus
agttggggagaagatagagatactaagagccttgcttttgtttgactgtctcttgacagttcccgatatagtgttacgttttatcctcatggcaacccgatggttgatagggccgcaaggatcgtcatcacctccattccacaggctaggaaattgagactctgcaggcttttgacttgattgttgtaactagtattcaga

SEQ ID NO: 14116 - DNA, 201 bp, Bos taurus
gtggtggaggaggagaggtcacacatggcctcctgagacattcactccatacccttcgccatgccacagcctctgcttgcctttcctctgcctggagaacgctccctggtcttccccagagctggctcctcctccatcttgtgatcacaactcatgtgtcattttagtggggaggcctgtcctgatccatccttggcccct

SEQ ID NO: 14117 - DNA, 201 bp, Bos taurus
tctccgatgctttcacagctgtgtgctcctttgtcttggaggacaaagagcagatatgtttacccccatgtttcagatgaaaaaaatgaggccttggtgattaagcatgttgcctaatgtcatacaaaggtgcaattagcacagagtgatgactgcctggcttccagcccagtttgtactgttctcaaaagatttatatgc

SEQ ID NO: 14118 - DNA, 201 bp, Bos taurus
tttaaaaactagggttaaatgctaaaatgagattccaaagccacgaagagtcttgtgatttatcagtttacaagatccggccaaacaaaaaccaccatatcgccattatgatcatgttaatggttcagatgacaatgaaactttaatgctgaggggaaagggcctaacatacagccggactgttaacagaacacagtctgg

SEQ ID NO: 14119 - DNA, 201 bp, Bos taurus
attggcccccttgcgaggcatatgggatcttagttccccaaccaggaatcaaacccatgccccctgcaatggtagcatggaatcttaaccactggactgccgggaagtccctgcatattattacacttaacaactgttttatatttagccagtctcttcctggtgaatgtttaggtttgccgtcttcctactacaagcagc

SEQ ID NO: 14120 - DNA, 201 bp, Bos taurus
tcgagctgtttaaccaccaggtccctgctggccgtcggtggagggctgcttccaggagcatgaactctctggccctctgtgtcaccctgaatttgggccacgctgacaacctggcagaactagaaatgctctcagtaagtagccctgtgcatggagaagtgggtatggaccgaacggaggcagggcccttagcatctgtga

SEQ ID NO: 14121 - DNA, 201 bp, Bos taurus
agtggttaggcacataaatgtaggtgtattttaaaaaatcatatatttttaaaatatataaccagtgcttttgagcaccctcaagtaatgtaaccaccagccgtccttcgtcctcccaccatgaaatgggcatcattattcctgtgtttgccctaaaagtagataggtgatggattcttctgcagttcctgaatgctaatt

SEQ ID NO: 14122 - DNA, 201 bp, Bos taurus
tgcaaatcaaaatcatgtaaccaaacactaacatgctgcaaggatacattcttgcttaaggacatgtatccattatagggcagaaggaagaaaatagagggttcaaagaaagcctttctttcatgactttcttctattaaaatagttccatcaactattcactatctcctttttttttagaagtcaattaaataaatcaag

SEQ ID NO: 14123 - DNA, 201 bp, Bos taurus
agccaaacaaggtaattaattaatcacacaggatgtcctgctcctaggcagccgtatttctatcttccttgtgccaatggcctccaaccaggcaggcctacagtgttccttttttcagctacaaagttttcattccttttgcctgcctttcagtttctaccacatgcaaatgatggtggccaactcctttgcagagcaagc

SEQ ID NO: 14124 - DNA, 201 bp, Bos taurus
tacagcaagagaatggggtccatcaaagagacctgaggcattatttcaatttaaaggcttctgaaattttcgaaaaacttctctctttggcctgagcatatattctgccagaagtgtctctggattactatgatatggaatttggtcacttgacttaaaacaaatggtctttttggccaattcatttggtcaatctcttaa

SEQ ID NO: 14125 - DNA, 201 bp, Bos taurus
atttcaaaattaatatgttaggataaaaatcttttataaaacatatggatttgtccctccatatccacttcccacctctctctcccaggaggtaacctggatagaccacaagcatgtgttcccttgggctctggtttgggctggattcagccaatgggagcccagcacgagatcaaaggatggggaagatggggagagtga

SEQ ID NO: 14126 - DNA, 201 bp, Bos taurus
tgtaaagataatgagaataatgttaaggccaatggtgctaaaaaaaagaaaaagagaaaagaaatcacaaacgcttgaattcatttatatgataaattctcctcttttccaggccacatcccacctgggagaacactggctcatgtttggcttgctaagtggtagccatgtttccctttcatgttgataatgaaaatagaa

SEQ ID NO: 14127 - DNA, 201 bp, Bos taurus
tttcactttagcatgaaaggatggcttcagggatctcatgatatcatgaactgtgggccacctcaagaagggctttaagtatcataaagggataaaattttggaggtttagaagtatgatctgggttcagcccactgccttttccctcagcatgcctccccagtcccctgctgtggcagacagcagatggctttattgaac

SEQ ID NO: 14128 - DNA, 201 bp, Bos taurus
atagtgcccacctgctgtatagaaataaatgataaaagaggattgaaagctacagaatcaatccactccctagtttggggcctagacatggggatggaaggtacaaggtcaaggcagggggaaaggacatagaaaggggcaagggaattactttggttcctaacctaccaccacttaccataggtcatggcctcagatatg

SEQ ID NO: 14129 - DNA, 201 bp, Bos taurus
gctggggagaggatatgactaatagtcatttgatgagtttatttattggggtcttcagccatcaggatgccgtctttgtctctggggcctcagagaattcctggcagtttttaaacttgaaagtgaaagttgctcagtcttgtctgactctttgcgaccccatggactatataatccatgggattcttcaggccagagtac

SEQ ID NO: 14130 - DNA, 201 bp, Bos taurus
gtcgtacgtttgcatctacagaaagagggaacggagtatggggtggggagggtgggcagagaaagaaaagaaattaagtctgttcctcgggccaccagctggggtgttgtcaaggagacaaagcgtccaacgggagggtctgtgtcccccttttgcccagcggtcacttcctgcccaggcttggaggtgggaaatctgtag

SEQ ID NO: 14131 - DNA, 201 bp, Bos taurus
tacctccgattcagaaataggaacgtgtacattagaattccatttcctgaaaggagagcgtcctcgttttttttttgtattcctctccccctcccaagtccgggaagacgcagccaggggaggggggcgaggaagcgaggaggaatttaaatgttagctcgttctggctgcatttcgctgaggggagattgggacccagag

SEQ ID NO: 14132 - DNA, 201 bp, Bos taurus
aacttgctggctaaggaagctacctaccttggaacttggggcagaggcttgtgagatttgaaaccatctgccaccatctggcaggtcaagtcccatctataaagtctgactccagatattcatacaccattaggtatatctaggaccctgtcccctcattaaagtgagagtacgctgggtctgaactccattcagacactt

SEQ ID NO: 14133 - DNA, 201 bp, Bos taurus
aactaaagagttcacactaagactagtgcagccaaataaatagatacgtttttttttctttttaagcgagagaaaaaaatgattccagaggcctcatcgtgggctcccgccctgtgcctttacatacagtctcaggcgctggggcgtgacagcactgcttaagccctgaaaaagccaagggttcgggccacgttccttgta

SEQ ID NO: 14134 - DNA, 201 bp, Bos taurus
tagaatatatttgactgtggatacatctatcagatgaacaaaagcaaaaagaaaaaaaggaatgaaaaatatctatctgtaatgccctcacagcctgggagttataagatacgagtattagcagttacagtattagactatgttgacaagactttgacttctgttttatttgaagaggcactgcatcgggaagcctttaaa

SEQ ID NO: 14135 - DNA, 201 bp, Bos taurus
actgaaagagatcagctggaaaggcccagacagttaacacgcttcttccactgaggactcaggatagtacatgatccactgtactagcgtaatgttccaacattgccttaaaaaacatttttctggccttgctgggtcttagttgcagcacacaggcccttggggcatgctggcttctctagtcgcagctcatgggcttag

SEQ ID NO: 14136 - DNA, 201 bp, Bos taurus
ttctgtaacttcattcctttctgagtttctttgagctctgagctttatcctcttcattcgtctctttctgataaggttctcccctggagaatgcgggccttattacaacccagctcaaactcttgcgacccacagaaaaacatccatgaaactgacagacagcacaactgggtaatataaagtgaagaccaaccaacacgg

SEQ ID NO: 14137 - DNA, 201 bp, Bos taurus
cagggcggggctggttgcgctactggcctctggggagtggcagccacggatgagctgcacactctgcagggtaagagcagcccccacaaaccaagaataatgggggccaaatgttattggtgctgaggttaaactccttgacatagagggatacttgaactgggtctaaccagaggaatactcacatacaatgtaaaatat

SEQ ID NO: 14138 - DNA, 201 bp, Bos taurus
tttcatggaaaaaagagttaaagagaatgtttcaaacacatctgagatctgaatgcaaattcctgaattcattggtggcaagggccaagatttgagagaaacatggcatgtgcccaaaggaggtcagtaaggggaggctcaaggctgagcgaagccacaaagtctcaagagctgaggacggggttagggctcagcacccct

SEQ ID NO: 14139 - DNA, 201 bp, Bos taurus
actaatggcaccctgctcaaaggaagagtgctgtcctaacacatggaactagggggaagggggggacagagacactggttccaggagggaaagaggccaacaataatggggacagagcaactaaatgataccttgggagcagcagattttcatgcagtttcaagaagcagctcgttttcctcccagggaatggccatcaga

SEQ ID NO: 14140 - DNA, 201 bp, Bos taurus
tctaacagacacatcaatggcattacaaaggcagaagacatctgatactccagtttctctatttcagggtacagatgctcatatttaagggaaaaaattttggccataccctgtggcatgggagattttagttttccaaggatccaacccatattccctgcaatggaagtgcaggataaccactgggctgccagggagtcc

SEQ ID NO: 14141 - DNA, 201 bp, Bos taurus
aaccaactgttctcattggttgagggttccctttggaggcattaaatttctggcatctctgaatgtctcactcagggctacgtaagcacccctgttgtgggagagaagcctcagatagagaaggagagaggccgggcacctgaggtggggagttgtcagcacgtctgaaccctgtgcactgtagttggggtggaccaagag

SEQ ID NO: 14142 - DNA, 201 bp, Bos taurus
tccggcggcccagtggggcggagtctaactgggtcctcgcagctagttgggacgtggtgggggtctgtccagaggaccttcccacgtcaccgagcctttatatggcttgttcctgagcattggccctaatcctaacctgctcctcttctgctgtattttataaatgggtaaactgaggcatggggtcacgccagcggttcc

SEQ ID NO: 14143 - DNA, 201 bp, Bos taurus
tttagcattcctagcagtctctcaggttgcaggggcagagcacactttgagaaacaaaacttgtagaactctattgccattctgtataaataaagtgtgtggtgttgtttgatttcatagatacagtgttgtttgtgtttcacaaatatccacaaccaccctgttcttcaggcaggggtggtgaatttggtggccaatagt

SEQ ID NO: 14144 - DNA, 201 bp, Bos taurus
ttcactctgtatgacatactctagatctactgttcctaaaagccaagcccagtggcaggtactggaaattcagaagatagacatggtcctagggccgaccatcttgtggagcctactgtctccttagaaacagataaagtaacactgtgatctcagtgctatgatggagacaggacaaacagctacccatgtacgttcagt

SEQ ID NO: 14145 - DNA, 201 bp, Bos taurus
ctctgtttattatctatgtgattggcaaagtgaaaataatgggaggatggtacttagagttaagaaggcagcaggcaggccatgtgggtactagaagaaatgcactgcatttgacattacagaagcgagttctaatgtctttagttatgtctgactctttgcgaccccatgaactgtagcctaccaggctcctctgtccat

SEQ ID NO: 14146 - DNA, 201 bp, Bos taurus
tgatttgaatttaccatcattccaggctctgtgtgattcgggaaaaggtagtttccgggtatcccaattatcaatcttgatggtaatatttaaaataaaaggtatctccaattggcctgaaatttaagtccttcctagctttattcccatgcaacccaagtattaggagtttttcataactgtgaggaaaaggggagaaac

SEQ ID NO: 14147 - DNA, 201 bp, Bos taurus
ggcagtcagttagctgaacaggaaatgtatatctttgggtggaggtgatttgggagttacacagggtttcaatctcagctaatcatgaggccaagaatgcgaagttagctagatatagaagaagaagggtctgtgtctggccttgacacaggtaaacatatgccatcttatggaagttatgagagcaagtcttatctaagt

SEQ ID NO: 14148 - DNA, 201 bp, Bos taurus
agctctgatgactctcatgtcccatctgttgcatcagcattcttgagatactttacgttctgctaaaacgttgaaaaggtgccagtacagattcatccaattgtatacctgacaaaatacaatattgccatattatcctattatgacttattgaaagtctttaagtctactgtgaagtaaatataagttcatgctgacttt

SEQ ID NO: 14149 - DNA, 201 bp, Bos taurus
cgagggttgaaacactgagctgaaacagccctggcccatggcctagttcactttctgtttcctcataagagacaccccgatacacacttcagttgtggtggtgcagttcagaaattataggcaggccaccctgttattttttttaagtgagggtccttttcagtagagaaacacattggctttcagtcgaagactgcagga

SEQ ID NO: 14150 - DNA, 201 bp, Bos taurus
cgttgggctctgacctaactagacttgttgatcccgatacagggatggggacctggcaggagccagtttagtgtgaaattagactgaatccaggaccaagcggcccttcctccctgggcatttcacaatttcttggccgtccttgcaggcgcctgatgcatttaactggatgtttacatagcagagtttactcttgcagag

SEQ ID NO: 14151 - DNA, 201 bp, Bos taurus
caagaccctgagtctcagggagccaacagtgggtaagaccaagaaccaacaaagcttctatagagagccggagagtaaatatctgaggttgtacaggccatgtgaagactcgataacatatttccctttgccaaatttttgtccggtctttaaaactgtacaaatcattcttatctcaaggaactttcaaatttggccatg

SEQ ID NO: 14152 - DNA, 201 bp, Bos taurus
ggattaatgagaaaagtaaggccttccaaagagagtagtaaaccaagccccagagaggcagagtctgttgcccactgtattcagactctctgatttcctcttgagtagaggccctgttgtctttatggtggcactgccctttctgtgcccagcatgggtggcatgccgtgggttcctggtgagtgttgctgcacctacatg

SEQ ID NO: 14153 - DNA, 201 bp, Bos taurus
cagccttacagctagaaccgaggccctgggcacatgaccccagctgagtattccagatgagacttcaattatcaagatgcagagataagcctttctcactatacccaggccaaatttctgacccacaaaatcatgagcataataaaatggttgttgtcttctgccactaagttttggggtggtttcttagacaaaagtgaa

SEQ ID NO: 14154 - DNA, 201 bp, Bos taurus
cctccaaaaatttttcatccacgcctatagtctctctgcactctctgtccttgtgaaagaaaaacttaattttattctttttttgccattttctaagaagtgttgaagagagagagcatttttactcttcaagtggtggcacgcgccactgaggcctcccccactgctctggtccattgtccctttctttctcaggtccca

SEQ ID NO: 14155 - DNA, 201 bp, Bos taurus
aaatgtagcccagttcttcctgggaccccccgaacgggtgcggggctcgctggctctaccatccagctcagtcagctgcttgctgaggcccatctccgaatcccaaacactgctgctcccaaggttttagttacccttgtcaccatctgcaggacaaacaatgagatttggggggagtctccaggcctgagaaagtcccct

SEQ ID NO: 14156 - DNA, 201 bp, Bos taurus
tgacacagaaatcttttgacatgtactctggaggtaggcccctctgttggccccaaagttgagggtgggctgagctgctgcctgtggcatggaggccacctgtgtgccagagagcttagctcctattttcagagatacaaacagacagaggcagaaggggctggggggtggagggccgtcctgctgcctttgaaacccctt

SEQ ID NO: 14157 - DNA, 201 bp, Bos taurus
gtagagttactagctggtgctgattccggccccactgggagcagcaccaaagaagggctttaaagttcagaggaatttaatttccatcatgaaagaactcggaggtggggcaggaggggccaaatcaaagccggcttttgagaaggcagaaacccaaaagcagctcccttgcggggcccgggggatctgctttcggaacat

SEQ ID NO: 14158 - DNA, 201 bp, Bos taurus
cccctgcattggcctgaggacccctaaccactggaccaccagggaagcccaacaatgtatgtttaataagccacaaagcaggccactctggtcagtacagttaaaccatatataaagccagaatgacattcccatgcctcaatatgtgaagatttttccccatcttttcccctttggatagaccaaagtatttggcccccg

SEQ ID NO: 14159 - DNA, 201 bp, Bos taurus
gaactgtaaaatgaacttaccagtaatagattcttatcagggctgaaggccacaggagaaaagaggctacgaatgccaggatcggaagggccagtgttccacccgcaatcacaaacatgttaaccacgtcaagatccatcctgctctttaggtctggcttatacctagaggggctgaaaagacagacagcactgaaactct

SEQ ID NO: 14160 - DNA, 201 bp, Bos taurus
tagtcagaaatggtttgtttgctaatgaattataaactaccagtttgtatgtctgagtggcaactgtttaagaatccatttaacaggaataatgtattctatagtgttcttaagtattatagtttgtaatccataatataaaatttcaaaacattaattcctatagcaaaacaagttcttgctagtacattgtactttgct

SEQ ID NO: 14161 - DNA, 201 bp, Bos taurus
tgttttgagttaggttttcattaggtgcctcattaggacctttcttggtgggggaggtatctgcatccccaatcctgtgaacctgaagtactctgcggccatgtcttctcattgcagttccagaaaatgtccacaaggcggcagcacttcctcatgccccacttgttcactgggccatccttcctgggttttcaaggagag

SEQ ID NO: 14162 - DNA, 201 bp, Bos taurus
agaatgcgaaatcgatatcttgccaattgaggcctgcttcgggttgcttcagctgcagttggacctctccagtctccatgggatacgaagccctagtaccggctctcgtggccgtcagagcttaatccttttgaaagcagctagttggacgtgcagtgggggaagctcaggtggcaggaggctgggccagtccctttcagt

SEQ ID NO: 14163 - DNA, 201 bp, Bos taurus
tgatgacggggagaggtgcgtgctgctgctccagtttttctggtccatgttgcatcctgagcctttcatccatcaccatccatcccagtgagctgcctctgtttctctgccatctccaaggttcctgagcccctgaccagaactcagtgtgctcccgagtcaagagtcattggagggagcctgaggcaaagaggcatcaaa

SEQ ID NO: 14164 - DNA, 201 bp, Bos taurus
gactaacactttcacttttccctattgactaaaactccaagacaagaatagcaggtctattaagggagaagattgggccctgcccagaccacatatttcacgttcccaaagttaagagacctccctgaccacacatgcatagaaaagaatccttggtggccaaaggggagtgatgccaagggatgttccctatccagatgt

SEQ ID NO: 14165 - DNA, 201 bp, Bos taurus
ctacatggattgactgagtggtccttcgtgttgcacagtgttcgctgtcactcacgcactgatttcagatggcagctgggctgggctggaaggtgcgaggcggctgtcttaccaggccggcatcttagtgctggctgttggctgggttacttgtgctttccttcttatgatctctctccatgtcgtatctcatcttccagg

SEQ ID NO: 14166 - DNA, 201 bp, Bos taurus
aggccaagttgtccctcccaggttcactactagagatacagctgctcttacaacttgtaatgccatggcacaagacaggtccctgttcataagtgttctcaaagtcaggctcctgggccacacttgcctaggtaaaggtaaaacagcatggaccatggctttcttgttattttaaaatgtagattttattttattcagctc

SEQ ID NO: 14167 - DNA, 201 bp, Bos taurus
tccacactaatcaagtccccttagtaatacagaaaaagataaatatatggatcaaatctctttacaacaagagccagagaatctttttattacaaagtctgtttcctaatccactcatcatctcactttttaaaagtaaagtctatttaagcagaaatctcaagcaataaatagagtttaaattgcccctttgaaggtgtt

SEQ ID NO: 14168 - DNA, 201 bp, Bos taurus
ccagagttcacccaaactcacgtccatcgagtcggtgatgccatccagccatctcatcatctgtcgtccccttttcctcctgcccccaatccctcccatacattgctcaaaaccccaaatggaagaattgtttccacagcaaatccattagctgcagtggtgtgaaaaaagggggggcttttataatgtttaacactagca

SEQ ID NO: 14169 - DNA, 201 bp, Bos taurus
ctgtcatgcctgttattcgtgtgtctctgggaggctccatggagaccttgtatccagagaggaagatgcaactcagattctccttccctgtggacctaaattggtcctagttagggtcagttcagagtaccccctataaagctagtaagcatcctgaaatccaaacacaagggagacagcacagcaagcaacgcaaatgag

SEQ ID NO: 14170 - DNA, 201 bp, Bos taurus
taataatttctgaatgaggcacaccacaattcattttgctccaggccccccaaattatgtagtctgggctggttagacccactgcgtattcctatatgctgcctctagctcctctccaggccccctccctattggctcattccccactcctgttttcttatggctggaatttaccttccgcctgccttatttttctggttt

SEQ ID NO: 14171 - DNA, 201 bp, Bos taurus
ctcctaggagcaagatggccaccagatgcgggtgtggtggcatagagaaggtggtagtccagtaaaactctccgttcacctcattgggtctgactgagtccttgtaggccagcgagtgcaagtgactggtgaagctgagtcctagactctgggcgggagcgggtgtggagcatgtgggcagagttggaggaggtgggaatt

SEQ ID NO: 14172 - DNA, 201 bp, Bos taurus
atctaccctattgactatcatgtaaaacaaaagaacatattctggacgcaataatacccccaggactaaaaataaaatattgccagaaagtacagagtcttctcttgcagcacagtgaaacactatatttttgtaataggtgttctctttccctgcacagaggtgtctgctgcactgcctatcacactatgtcacgtcatc

SEQ ID NO: 14173 - DNA, 201 bp, Bos taurus
atcttccttttctttctgataacggaagggagatgaactctgctattatttctgagtctatttctttgtgcctttccagtatgcatctctgaatggggccgtgtgtaaccccttgtggtactgaattgtgttatccccaccttcaatgggtaacctttaatcaggcacaggaggtgggggtgatggtgtgtgacttggctg

SEQ ID NO: 14174 - DNA, 201 bp, Bos taurus
gagaaaaagactgttttcaaaaagaaaagtataatatttagggttaagctgttaaatcgtatattcttacatagccatagttttagctagagaacttgttcctaggtcatgtgctggaaaaaatggtatcagtgtttcctggggttatccagagagaacataacttccagatgttctttcaaggtgcatgttggggagcat

SEQ ID NO: 14175 - DNA, 201 bp, Bos taurus
gttacatagtgagaaggggtgcacagtgacattctagaactgatttgatcatatcccaatgttccagaatgtctttttgttcacttgtgttttttggtttgacaagaacagtgggataaccttactatttctactgggtatttcagaaagcagtcaaaaaacatttggcaagtgaagatcagtctcagctcattgaactga

SEQ ID NO: 14176 - DNA, 201 bp, Bos taurus
ctgtccagttcttagaatgattgttaggttcacaggtgtttgttgtattatgacccactggtgactgactgccccacacaggccactgacagtcctgtatcgtacaggaatattattaaatcctgtgcgcctgaaagtagacagaggaaaaggagaaagaaaggaaccctttagtccttatgaagatttaaaggcctcttt

SEQ ID NO: 14177 - DNA, 201 bp, Bos taurus
gtgaaagggcagtacatttgatgagtttctaaaatctaggacagaactattgcaagtgatcactgtgagggaggtgggtgtgccaggcacctgcccagcagcaggccttacctctttgtttgtcctgtcagcttgcaccaatgtcccattcaggcaaggttccacgtagtgaagctcctcattatactgcgaagggaagaa

SEQ ID NO: 14178 - DNA, 201 bp, Bos taurus
gcatattttgtttggcccaagtagtgaggtatgcacaatgttttgaattttaattcatcaccaacatttctttttaatgggatgtttacggcaaaacaccaatttccagctctgacaacagtgggcctacctttccacatggcagtagcaactggataagagcagtggagacctaatgaggggctatgtgttgtacttctc

SEQ ID NO: 14179 - DNA, 201 bp, Bos taurus
tatgctgaaacatattttaacaaattcaaattgtaccatatatgccattttatggaagtgtttttatgcattacgtgatgaaaagctttctatatcaatacgcacttttgttgtaaatattattattgttaatcatactctgatttgctgagaccacctaaggaatcaaccctttttaatattataaatgttgagagagtg

SEQ ID NO: 14180 - DNA, 201 bp, Bos taurus
tgctgcaactaggacccagtgcagccaaataaataaatatgtttttaagaagatataaattccagaactgtatggttaaggccctagagatcatctaacccaaccccatctattttcttacgggtagagaaacagaaaccccacgagggcagtagattggatctccaggaatgaaggcctcattgacacgcagccaggctg

SEQ ID NO: 14181 - DNA, 201 bp, Bos taurus
aagcctggaggtaaacgggaatctaaaggagctcaaacactgcacgtggcccaacaagactgaaacccacagcggacaaatgtcgcagaataaacaagtcatatttgtgggactaacatacacaatcctaggtgcggccagcaggggtgctgtttctacggtttagtagctaagtcatgtccgagtcttgcgaccccatgg

SEQ ID NO: 14182 - DNA, 201 bp, Bos taurus
cagccacacagagtggggccaccagaaaagcccacacaggctgttacagctaagcaatgggttcttctggggttgatgagggttcagtactcagaaggatgcaaactgagtagggccatccccatcttccatgagggatggaggcggctcacaaacccagggagctggcgaagggtataaacggaccctgagcaagacacc

SEQ ID NO: 14183 - DNA, 201 bp, Bos taurus
aggccaactcggtcaggcacgggctccaccctgggtctcagcctctgctcacccattctccctgcacatgcctgggctccagccataggaatagcccttcatggcctccctgagctttcgtttgcccactttcatgtcctcctcacaccactgcctcaactcggaatgttctgcctgacacatctcaggtccatccatcct

SEQ ID NO: 14184 - DNA, 201 bp, Bos taurus
tgctgttccttctggctcgatatcgtttctctggatgtgcacaagcctttctccctcacttgattcaggtccctgctgacatatcgcctcagcaaagaagcctttcctggcccctcaaaacgtgtaacagcgtcaccctgccgtcttctcctcccttcactctgcccatatgccacacccttgccagaatgtctcagggac

SEQ ID NO: 14185 - DNA, 201 bp, Bos taurus
tttattttgtttggaactttaccaagaaatgctcaccattttggaaaatcacatcgctgacagcgatgccacgagttgtatttgatggccaataaaaatgctaaatgaacgccaacaccacatactcctggttgtagcatttgtagctgtcacatttatagtgatgctatgtatagctgcaaatatctgatgactttacat

SEQ ID NO: 14186 - DNA, 201 bp, Bos taurus
acataaactcttggctttgcctctgaaacctctttggcattacccatctccagtctgaaggacaaaaatcccaagactgctctttttatttaacgtcaatgatacattttcaaaagacctttccagctcacaccaggaaagatctctgctattccaaacactttaaaaattagtcagcttcttttgggggaagaaaagact

SEQ ID NO: 14187 - DNA, 201 bp, Bos taurus
agagaagagaggttagttcagggggaggaggaaccctgagatgttgctcctggagttatttacttttctgtccctatattttatcccttttctccctggtggaagctgtggcccaggggctgagcagggctccaggcctcatgcctcctaaggtgctcagcctacccactctttcctccccacagatagctacccgcaagg

SEQ ID NO: 14188 - DNA, 201 bp, Bos taurus
agacatggagcttagagcggtggggccaccttctgatggtctcatagcagtaaagggtagtcggctgggccagtggggaggggccaggaggcctcacccacgtgagattccccaagtgagggagcaaaggcaaccttagcgggtcctggtttccagggtctgggtgagttgggccctcccttcccacccctcccaccccca

SEQ ID NO: 14189 - DNA, 201 bp, Bos taurus
gctcaggctcaggctccagatttgcccttgaggcaccatcattcccagccaccgctgcaacggccagcaactgtcctcgtaaaaccaaggcctgggtgtctgaagggaggagggaaaggggatagtgactaggaggacaaggatggagaatgtactttgggtccttagcatccttcacattctggcttaacactgtgtcca

SEQ ID NO: 14190 - DNA, 201 bp, Bos taurus
ttatccaatttccgctgtctttttttatgcctgcctgatttttatagcaagatcagagttggatctgagcgtcctcacttcaacactaagaccactcttgctatcttcatttcttgcacaagtaatgaaagggcaggaaaagattattaattcaagtaatcagagctcttagaagctaacattacctatagtgttgagttg

SEQ ID NO: 14191 - DNA, 201 bp, Bos taurus
cccctagagccttctgatgaagattgacgccttccattatgtgcagctggggacggcctacaggtcagtgctgccccggccttgccccgtacccccggctcacactagagcgccactttggactggtggtctctgtgcatccatccaggggcctccagcctgtgccagacgaagaggtgattgagctctacgggggcaccc

SEQ ID NO: 14192 - DNA, 201 bp, Bos taurus
caatggcagagcagggggcattgctgccctgttggatggagggggagactgagacccaaggggtcttgtgtgtcgctgatggcctggacaagccccagctgtgacacccgtgtctctcctttccctgagtttggaaggcaggtggaaggtgacaaggccttccaccagcaggcccccagctctgtgctcctgggggtggca

SEQ ID NO: 14193 - DNA, 201 bp, Bos taurus
gggtcacagatatgactacctcacaacctgccaagcacatggacctggagacgttttctgaaggccatctagctgctggtgtcaaaaggcctaaaaatatgcacagcctttaacccagcagatctgtacctgggaatgtttcctaaggaaatagccacttgaaggagaagcagtgagcctctagtttgctctctgggcctc

SEQ ID NO: 14194 - DNA, 201 bp, Bos taurus
atgcatgcactcagccagagtcctggtggcctctaggctccttcatgtctctataagtcatctatcctggttagtgacatgtgaccaacatctgacctgtccctagcctgtgtggccaggcctggaacagggaggatgggaggttgaacacacagcattcactcattagcactctgtggagtaggcagcatcacacccatt

SEQ ID NO: 14195 - DNA, 201 bp, Bos taurus
tctcacgcactcatttccccggctttcgtagctcattaagggagctaatggaaccgattttgcagctatggatgagttggccccacgccagatgagacctcgcttcattaagttctggctgtatcctgtcctcctcagcggctgagttccagggaggtcggctcacatgatgctcctgaccccagatgcctgggccccgtc

SEQ ID NO: 14196 - DNA, 201 bp, Bos taurus
tgctgcaagactgtccatgaggtcaaagcacgtctagagagttagggggttggcagaacctgggtgaggagattctagacatgtccagctgtctagaagagcagcaaggccaggattctgaggtcagccagaacgggcagcatcaccctggagtttctagcagaatcgctatggtgtgtgtatggggtggggggcagtgag

SEQ ID NO: 14197 - DNA, 201 bp, Bos taurus
ataaccttcaagtagccccaaccatctggggccagaaaagtttcactgctgaaaacatttcagatggctgcagacccccttttgagatgtggatagaaactcacagagcctcatccaggcctggggctgctgacttctcatggagcctccttccagggtatccagggacagtggacagatctgtccaaactgtggtatctt

SEQ ID NO: 14198 - DNA, 201 bp, Bos taurus
gcaatgggaagacagcagatggcttgggttttgccatatagaatccactcttgaagagatgaaaagggtgtttgtgcaggaggcccttccagccagcctgcatccaggcagtaattcattccccagacctgagggtggacccacagccctccccgggtggggagggcacagctggccaggtggggaacatgaggggcgtgc

SEQ ID NO: 14199 - DNA, 201 bp, Bos taurus
agtttccaactagagaagccagagtactgtggtccaaggtgctacgtgttagtgcacgtggcgtgccacagagcttgactgtgggccttactttgtgtctccgtggctaaccaatcctagagaccgagttctttattaatctttactggtggaggagatgcagccagaagggccgggcctagtggaaactgaactgtcctt

SEQ ID NO: 14200 - DNA, 201 bp, Bos taurus
tgtggggtggggaaaaggcctgatgagatcctttgtggaggccccttgacccctgagctccaccccatcccccaacaccaccagcaagggtaactgacccagtggttctgagccctcaaaatggattaagagaccctgaagaacaaatctcagatgggaggccaagctgtctgtgcacatggcaggcagccatctcttaaa

SEQ ID NO: 14201 - DNA, 201 bp, Bos taurus
ttatcttgccgggcagcctcctcccgccccttgcagccactgcagacctttccctgctccttttcccagcatcctctaggccttgctttgtctgcagttgtctttttttcctgcctctccctgtctgtcttctctctctagggcattgaggggggcatcccccaggcccaacacatcagctggagcatgtcatcctgtccc

SEQ ID NO: 14202 - DNA, 201 bp, Bos taurus
ttggagatggcccagtggccacatgccctttcatgggagttccaagttagtccatggtgcctgaggctgggtcagggcagtttctgatagtgattaccagttcagggctgcagagaggcctggagatgagggcagtacccacaacacttgcaccaaccaggcccaccccatgaccaccccacggccctaccagagctgcag

SEQ ID NO: 14203 - DNA, 201 bp, Bos taurus
taaatcatcacaaacttctctggttggttttaggggtatgcttccaaaggctggagcaaaaaagccagaagatggccttgcagactctgggaacccctgcactggaaagccacagtgactgtgtgaccaggcagtcaagcaatgaagaagaccaatgccgagaaggttatgccatgcgtgacctcagattcaggcctggag

SEQ ID NO: 14204 - DNA, 201 bp, Bos taurus
ctggggtagtacctgaaatttgaatgactcaagggagtaaagtgagaagggttttatctagcctccaggctagaggagaaccccccaactgcccattcttgctctgcctttctgtgggccccctagagctgacctattcttcctgacaccatgcccccttccttgtgtcctggtctcaggccttgattaggtgatcctctt

SEQ ID NO: 14205 - DNA, 201 bp, Bos taurus
ctagacaaagctggagtggtgggtggaaatatgggtcactgggggatgttttgccaaggagaggactctctcctggggctaaactgaatgtagggccatttgagatccaggacataaattcctcactgggaccctgatcttgttggcagggatgcaggggtcagggacctgggctggcccatgttcctgtgccctctggtg

SEQ ID NO: 14206 - DNA, 201 bp, Bos taurus
ctcgtagcctctcaaggcccagctcaggctgtgcaccttccctgggaacagggtcaggtccacagctgcagtcggagtgttgatgggtacaaccttgacgcgcccttccccgttggccagagcacacagtccgaagccctcgggaccaggggctgcctccaggaggcagtaggactgaaagcgcttgtcctccagcagctg

SEQ ID NO: 14207 - DNA, 201 bp, Bos taurus
aaggaacagaggttttggaggttggggtggggcaggtctgggtggaatgggagcagggggtttcttaggggtccaggtgggacattgggggtcagagtcaagatagtcctagggctacactcatcctcactcctaggcccagagaaatcccagttggtttctggggaggccacggtggccgagctggatggactggagcca

SEQ ID NO: 14208 - DNA, 201 bp, Bos taurus
agggcttctctgggaggtgatggttgggcacctcatgtaatagggagtgagcgtggaggagtgtgatgagcagtctgcagtttggcctggcaggaacgaaaagcatgtgtgggggagccctggcaaggatcccacaggagagcgtgtggatgggaggggcttgacctttatcctccaggccccggggggggggtgcctcca

SEQ ID NO: 14209 - DNA, 201 bp, Bos taurus
cactccccatccctggggtcctctaggggccggcagcaccccttagctctaaaacctcttgtctctcctcctcctagaactactccggagacctgggggcgcgagtggccctacatgagctctacaagtatatcaacaaatactatgaccaggtgagcagaacctgggcgtgggcagaatgacgtgagtgggtgactggct

SEQ ID NO: 14210 - DNA, 201 bp, Bos taurus
cctgcctcttccaggtgggaccacaatctccagacccatgcaggccctccaacagctaagtgaaggcaggtgcactcaaaatgtcatggatcttcttgggaaacagtcttctggcctcctggtgctgggtttcccacctccagccatttgtcttagagggaccacagctatggatgttagcaccctcagggcacctgtata

SEQ ID NO: 14211 - DNA, 201 bp, Bos taurus
cctccatttcttctatccctctctatgctccccaatgtgatcccattcagacagaaccaaaaacccactgaagtgactgtgctatgtctggcctggacaaagatcaagtggaacaaactcagtagtgcaagtagccacagcattcaggtcttgtgaccacagatgaaggttatccttaagctccctcaggccaaagaacaa

SEQ ID NO: 14212 - DNA, 201 bp, Bos taurus
gtcttctgggaaacaagcgccctccggtggcctccttgagtactacaccaatgctcaatggcggaaaaagtcaaccttttctgaagagaaaagggacctcgtcaccctgggccataagttcagtttactttttttgcggggagagaaagggagaggaataatggtgtctcagaggccctttctaaccctactgccttcagg

SEQ ID NO: 14213 - DNA, 201 bp, Bos taurus
tgcacagagaaagtggaagctgctcctgggagccaaggcctggagggacccccacccaccgaagggagtctactctcctctctgctgccacttctctgggcgtgccatatgccaggccactgctcagcttcctaactgcatctttaagaggccctggaaggccctgtctctctcccaccaattgactctcaggtgaagttt

SEQ ID NO: 14214 - DNA, 201 bp, Bos taurus
gattgaacttgcatctcctgagtctcctgcattggcaggtggattctttaccactgagccaccttgggaaacccccattcacttttgtacttaaggccaaaatgtatcttttctcataaatatgtcctctgttagtaaatcttatgagaatgttttaagcctaagtattaaatgcaattttcccttaaaaacgtatgaaag

SEQ ID NO: 14215 - DNA, 201 bp, Bos taurus
tggaagaatttgagaccgattggccttaactcctctttaaatgtttggtagaattcaccagtaaagccatctagtcctgggcttttgtttgttgggaggtttttgatttctcattcagtctcttctggctttcctggtggcttagatggtaaagaatctacctgcaatgcaggagacctggttttgatccctggatttggg

SEQ ID NO: 14216 - DNA, 201 bp, Bos taurus
accccatccccatcattctcttcacggggctctgcatcttagcctgctggtatgtttccaagttgccctgtatgtggtgggccagtcgacctcctaaccctgactgttgtgtagcccttggactgggtctttttacacagtggaacttgaggctcatcccggcccaccagcgggaagctctagtcctggggtggaagccac

SEQ ID NO: 14217 - DNA, 201 bp, Bos taurus
gcagtggaacactctcaggtgaagagatgccagtgctggcagctggaaattgagccagcatgtccagagatcagatgagggggatcaagggtagggcagcggcaggccctggagaggtgttgggtggccagccgtgggctctgcgggcacagcaacggagaggtgtgtgggctgggaggtggggagattcagagtgtactt

SEQ ID NO: 14218 - DNA, 201 bp, Bos taurus
tcgcgggcctggcaggcggactgtgtgcgctccaggagagcagccactttgctctccaggtctgcgtagaagtccttcccctcctgggacttcttcatcaaatcctcgtaggcctcgtaggaggccaccaggctctgcagtgtggagttccacctggggcagagggcgggaggtgagtcgctgcaggccggctccggggcg

SEQ ID NO: 14219 - DNA, 201 bp, Bos taurus
tccttctcaacagctctagcagagcctctaaagttcctccctggcatggctaggttcttgaatgtgcccctgaatgctggctgtggcctagattggccaggctgacctcagtatctactgctggggctggggtaatatcacctgcttccagctcttggactgagagtgggagagagatgatcctcaagggggaaactgagg

SEQ ID NO: 14220 - DNA, 201 bp, Bos taurus
ggggccccacagcctcctcgagggcctccaagacttgggctggctcttcttcgccatggtgccaagtgccgcccactgcatatccacccccaacagggccgcctcctgaggtgttgcccctctgctcctggaaaccctttgtgtactcagtagtctaagcaaagaatcaaggccagcttttcaggacagacagatttcaga

SEQ ID NO: 14221 - DNA, 201 bp, Bos taurus
caaatcaactcagcccggcaacagtgaccaaggacctgctttgtttaaacccagcactctgagccccaggagacacgggtgcagaagggccgtctgcccttcctgagctattagcacagtgcagtggacaggtgcatagacgttagcccagccccagcgggcagggggacctgcctccgagcccacggggccaggacagca

SEQ ID NO: 14222 - DNA, 201 bp, Bos taurus
agaaacctgttaaatgacagtgcaggacttatcgaccaaattcaacccacttaacaggcttgcttcactatctcaccctgggtccccttcctaataacatttcttcttaatggttccgaggcctctgagggctttcttggaggagaatgactcagacgttctcttgacagagactctccactcttctccagagaaaaagga

SEQ ID NO: 14223 - DNA, 201 bp, Bos taurus
aagccttttgcttattaagtacccagaaacataggttttaccttagggccacaaaaagtcagacatgactgagtgacttcactttcaacataggttttaaggttgttgatcctagaaacagccactgtcaaacctgggatccaagctacctcagggctccaagatatgaccccagcccagaccagttaggcctgaatggaa

SEQ ID NO: 14224 - DNA, 201 bp, Bos taurus
cccagggaaacaagccaatggcaggacctgaaagcaattggaactctttgattacatcactggcctcccgggactcaggagaacaacttcagtggactgggctgaaagcggttttcactcaagcgctgtaaccacggagaaacagagtcctgccaccacgtgcaatgacccaacaggactcaatgcccttccttataaaaa

SEQ ID NO: 14225 - DNA, 201 bp, Bos taurus
aattttggaggcctgttttgattcagggtaaggtttctgtccggtttgccagatggactctgagcgtagcttcgtccgacatttgggtttaaacatctagacacaggcctggggttgatactgaccctgagaccaagacaccctggctacctccaaagaaactgtgggctggcacacccccgtccttgcgcacaacatttg

SEQ ID NO: 14226 - DNA, 201 bp, Bos taurus
agcagcagtaaaggcaggcatgagggggtttttgccggcttttatgtttttcaggtcagggccgggattagaaagcctgggagactaggcctaacgtggagaagcctgtataatgttctcttggctttccttccagtgctaaattccaatgactccctaaactaaaagggttcactgggacacccactagccctccaggga

SEQ ID NO: 14227 - DNA, 201 bp, Bos taurus
ggaagcagccaccgagaggagaagggaggttctttctcagatgaaagcaagggcttcgggactgcacagtgatgaggagaacacccccaccccatgctctcgggttacagaaagggagatggaagatggaatactcgggggaaatttcccacagaatatattctgtgtggatacggcagtccacgttcaaactatgaaaac

SEQ ID NO: 14228 - DNA, 201 bp, Bos taurus
ccaccacacgagaagcttgcacacctcaagggagagtggcccctgcttgtcacaactagagaaagctcagtgcagcaaggaagacccaatgtggccaaaaataagaaaagagtatgtaaatgaagaggtgtggctgtacgtatgtatgtatttttcataaagaaagtgaaagtgaagtccctcagttgtgtccgactcttt

SEQ ID NO: 14229 - DNA, 201 bp, Bos taurus
tgggatggtcggtgtgaggtctggacccaggcgtcccgttggcccaaccaacagggcaggtctctctgtcagtgaggattctatgaagctgcgggagggcgctggctgaccatcacggccagagggacccatggccaggagtcgattcggcacgggtgcagtaatagcactgaccgttccgaatgggcatttgttgtgatg

SEQ ID NO: 14230 - DNA, 201 bp, Bos taurus
ggccggcctccgcagtgcctgtgcttgccgaaacagcgcctctgccaaaaacagtgggggtgatgggcgcttctctgtggccccggcttcctcctgggccgccgttcacttgaggcttccaatcctatcagcagcacgctggctccagtcctgttatctggaagtccttttgttctgaggactcccggtacgacaagctgg

SEQ ID NO: 14231 - DNA, 201 bp, Bos taurus
gaggctgcatgctgcaattactgaagaccatgcaccatacagcctgtgctacaccacaggagaagcctcgcaatgcaaagccggtgtaccacaacagagcgtggcccccactcgctgccactagagaaagcccgtgtgcagtaacgaagacccagcacagccaaaaataaaataagtgcattttttaaaaagggaatatcc

SEQ ID NO: 14232 - DNA, 201 bp, Bos taurus
tccagctgagccagatgttgtgtgtgaggcgagcaggctctgatctgctgtgatgacagatggagattgaggctggccccccagtgtgtattgtggccccgcagctggtggcacaaggggttcatgagtggctttaattcaggctcaggcagagagtcacacagaagggcctgctcccaaattttagtgcattatctcaat

SEQ ID NO: 14233 - DNA, 201 bp, Bos taurus
accactggcccaccagggaagccctgtacaacgactcttaaacagcctgcctcctctgcatgatgctaatggtaaagaagatgcttaagtggcactttgatctgggccttgttccaaggcccttgctacattaaccactgagcattccctggtgactcagacggtaaagaatctgcctgcaatgtgggagacctgggtttg

SEQ ID NO: 14234 - DNA, 201 bp, Bos taurus
gttggcaggacctgatgctactcctgggatgtggaggaagcagagggaagtgacaaggctgactccagcctgagcaccaggggacaacctggaggggcctacacgtcccgggggaccagatctgtgcttgcatccacatcatcagctggttccataccttccccacccgactggcctctcccgttctcccgaacctcagag

SEQ ID NO: 14235 - DNA, 201 bp, Bos taurus
tgatggatgtgagtttgagtgagctccgggagttggtgatggacagggaggcctggcgtgctggagtccatggggtcgcaaagagtcggacacgactgggtgactgaactggctgactgacttggtaccccgctgtgtactttgcatgcattgtgtctctcttttgtggacaaggaagttggggctcagaaaagtgaagca

SEQ ID NO: 14236 - DNA, 201 bp, Bos taurus
cgtttcccccagcatcccagtgctgggaacttgatttgccccagagtcctccgaatgaagtgatctgagccagtggagggccacatgatgctgaggtagcgtgcatgtgtgtgctaagtggcttcagtcctgtccgactcttgcaactccaaggactgtagcccaccaggcctctctgtccccgggactctccaggcaaga

SEQ ID NO: 14237 - DNA, 201 bp, Bos taurus
attgccccactgggggcagtatcttcatgacggagccctagcacacacagtgcaacggacgaagcccaggtgtcattttaggcttctggccttggagcaattgcagcttgatggacctttgtttacaatcccttcagagtactctgctacagccataagtccagtcagatcagtggcctcccattctattttctgcttttt

SEQ ID NO: 14238 - DNA, 201 bp, Bos taurus
ccctggcctcctgatgtgggccaggcagggttgaggcagttctctggaaccagaccacctgggttcaaatctcgctcttccactcattggctgtgtgtctttgggcaagttttaacttctctgggcctcagtttcctcctctgtgaagtgaaacgctgatagcatcagcttataaggctgctgtgaagatgaaatgagatc

SEQ ID NO: 14239 - DNA, 201 bp, Bos taurus
ggggaataatgtaagcatttgaaacagaactaaataaacaaagaccgtccatccattgccggctcacccgagcccacggccccagggacacacacacacagggactgcagtcggggttgagtgtttggagactcacaaaatactctatttgtggttctcgtttttcactacgggcctttaaaaatgacttcaagtcatcca

SEQ ID NO: 14240 - DNA, 201 bp, Bos taurus
caataataaatattcaagaacattatccactatcatatttttttgtttctatacacattgctatgatgaatcacttaataaatatatctttatatctttaggtgaataaaacatttggataaatcacagaaatccacttccttcaacatcatcaacttcttagacattgaagtttttcattgttactttaatgttatgata

SEQ ID NO: 14241 - DNA, 201 bp, Bos taurus
aggagatggggagggcccggtcacgggattgagtagggggctgggaggcagtgaggaatgagctatgtggatcccctggggaaaagcagtctaggcagagggaacaggccgtgcgaagtccccaaggcagagtgtgcctggaggctgggaaaaacagtgatgaggccgacacctgtgttcacagcaggattgtgcccagaa

SEQ ID NO: 14242 - DNA, 201 bp, Bos taurus
ttttagtcttctgttgaaacatggattgttttttctttgtctttgtggaaccaagctccctaaacagtgttaccctatttagaatattttttacctccttgagctgttctctggttgtaaatgagagtacaaatgtggatggtgaatgaacgtcctgtagctttaagcccagccctttggatgcttttgtcttttataaaa

SEQ ID NO: 14243 - DNA, 201 bp, Bos taurus
cctgggctgggtccaggtggggtgacgcattgagtgcgtgactgtggacaagtcactcaactccactctgccttgcttcccatctgcagaatgggtataacagaaggccctccctcatgggccgctattgtgaggaataaatgtgatcatccacgtgcagctcctgggcagcctcagtaaactgtagctgttttattttcc

SEQ ID NO: 14244 - DNA, 201 bp, Bos taurus
ccgcagccgcgggattgcagggggtgggccctggggaaaggagcgggcagccgccttccagggctgtcccccaactcaggccctgtcaggtagggtaggtccaaagctggaagatgagcaaaaagtgataaggcagtctgggtggcggcatctgaggcagagagactggcacgtgcaaaggccctggggcaggacccagct

SEQ ID NO: 14245 - DNA, 201 bp, Bos taurus
acatgcaaacctcagcccggggctcgaagtccaatcacccccaatatccacacctttgtttccctgccgccaagagaagtccccttgggaacgggcccaagcagcagatttccacacacttgtgtacacacgcgtgagagtcccaaagatgacggaccccaggctggtttccgggcttgctcaccccgtgagcagtggaca

SEQ ID NO: 14246 - DNA, 201 bp, Bos taurus
agaccacagtgaggggcgtgcagagagaggaagtcccatgaacttgctggtaccaggcagctgctctggctcgaagcgtcccatagctggtggtaaaaaaggaaatgtggccagttagctggttcagcagtgggtgcaaggcccaagcaaacctgagctatgaaaaggcagggctcagatttccctggtggcccagtggtt

SEQ ID NO: 14247 - DNA, 201 bp, Bos taurus
ttgggaggatatgggggttttgcagaacagagcacgcaagtgaggaagccgactgcagagaagatggtgcccaggagcagaaacgagagggccctgttgccaggcagagcagcgccggctggctgacagcttgtgtcactcacgctcatcacaagtcagatccctgggaggaagaggctgagagtctggcctgggtggagg

SEQ ID NO: 14248 - DNA, 201 bp, Bos taurus
gtgttgggagtgggttttagttctcctaacttgaccagtgaggaaactgaggctcagagaggtagagtgactaggccggaatcacacagctagagtggccaggcaggattagaggagatccgctttcttgaccagcagctctgtgcctaccattacatcacaaaactgacgggccaggggctgtgtgtctctaggtcagag

SEQ ID NO: 14249 - DNA, 201 bp, Bos taurus
agtggtttctggccagccccagtcaacgggatacacacctgagacagagggagagagagagtggggctggggcttactcccctggctcctaggctgccaggggcccgtgcgcgggccacctccctggaccactctcctcccaggctctcttctccccacagctgactctccctccaggttctggtgactgctgtctgaccc

SEQ ID NO: 14250 - DNA, 201 bp, Bos taurus
cataaataagctcaaccttataggagtgtggtaaggctcaaatgaaggttatccatctatctacatatacagaatattacacagtatagtggaaagaaaaagcattaggagattcaggagatctgcgttctgtttggggtcagcccatcactgtcatgccatgttaccttgagcaagcaatttctttttttgtaatctgca

SEQ ID NO: 14251 - DNA, 201 bp, Bos taurus
tgcatgaaggggacgctggaaaataagaatacagaggtagattatggccagactagagagctctgcctgcctgatgactcccagagaagaggcttaaatgcactccctcaggtagtggctagaggcctgtgacaaacagaagctaatcaggaaattgcggttataaacacctaccacctccaagggcttggaaggccctga

SEQ ID NO: 14252 - DNA, 201 bp, Bos taurus
acctagtgtgggatcagggagctggccggtttagatgggttgggtgcttatggcaacggtcactatgggctcagtcagttccggaggtgaccagggttgcgtctgtggccttgctatgggactccacagtgcatgctgctcgacagccccacctcctcccaacagtcatttaagaatttcgaataaattcactgttacttg

SEQ ID NO: 14253 - DNA, 201 bp, Bos taurus
gagctcacctcccttccccacacgcccactcctcccaagccaagagctcctcctggagggaggggaggaagcggagaggcaagaggaggccaccaggatcgcagcagagaaacagacagacaagcccgggtttggagtcagcgctgtttccagccccttcaatcgcgtgcagtgtggccttgggcaagtgacttaaccttt

SEQ ID NO: 14254 - DNA, 201 bp, Bos taurus
gtgctgtggagcggaggccacgggctcctgcgggcccttggaagatctgccccagtgcttcttacaggactcactggcgaggaaggaagctgtaacagcctggtgggcctggtggccaacttctacttgtctgcagctgtgaagaggacactgggagagcacacagatgtacccaggcacaggaggtccttctggagcact

SEQ ID NO: 14255 - DNA, 201 bp, Bos taurus
ccctttgccccctctcatgccctgagtcccacagcagagggctgggactgccgtctttttcttcccagcattgccccagggcctggcacttagcaggcgatcagcaattcaggagctactgtgggggtagcccactccctcccgtggtgacggggtagcaactgacacggattggcggcatccacgcagctctgtcttcca

SEQ ID NO: 14256 - DNA, 201 bp, Bos taurus
cttttggcctctcaagtccacgttctcaaccgctcagctgtttcggatccctcgctctagattggtcacaagggaaatcaggtctggtgcttttatggtcagcttcaagctactgggccaggctgacagattagggaagtaggtgaagacaaacggggaagtgagggccacagggcagagactgaaggggctgggcctggg

SEQ ID NO: 14257 - DNA, 201 bp, Bos taurus
cccagtgccttcagaatgacccactgagaggcgattcaaggcccaccccccgccactgccacctccgggacgatcgggtcacacagcctgggtctgatcttgctgctgccattcttggggccaacaatgctcgtttaataggtgggctgagactcctgcccaaatctccagatatgaatcatgtcatagctggaagaagct

SEQ ID NO: 14258 - DNA, 201 bp, Bos taurus
agaacacaacgggccaggcctggggagacatctcggcctgcgggcaggagagggccctgacaggcagtcctggacccctcctgccctgttcccctgggcccagagatgccgtcctcacccccagaaacgagtccatgctctctggggagagggtctggtgggcgtccgttaccacacgcattccacatacggttactgagg

SEQ ID NO: 14259 - DNA, 201 bp, Bos taurus
gtgggctcctgggtgccagcaacgaggcggagcctggctgtttcaggatgaagaagaatttatggagaggctgccaggtattcgtggaatcttcgggaaggctggagaacgaggcccagcgggagataagggccaggacggggaaggtggaaggggtgagaactaggtctttgccaccgctgcgccgtctcagcaccactg

SEQ ID NO: 14260 - DNA, 201 bp, Bos taurus
tacctagggtgtgtggctcccgagctcggttcacgccgaagcgccctgtccccggtcagtaagtggctgtgatgcttgtcactaacaatgacaatcgggcgctgccaggcgatggcctggctgctggccccgctccatcttccccctactccagtttgctttatgagaaataatctactgctggataagaggtaaagtagc

SEQ ID NO: 14261 - DNA, 201 bp, Bos taurus
atatttctgctgcttctccgggccctgcatctccctacccgcctcgtactgtctctgcagccagttcctctgaagttatcagcagagaaggtgacgttcctgggccttccagaggaaaggctgggtggtcagggaggagtgagaaattacctgagacttaaacagacctgctcctgagactgcttttaaaggcttcctccg

SEQ ID NO: 14262 - DNA, 201 bp, Bos taurus
tcggtgggcgcgacgctggcggtgggagtgccgccggagggcacgggccaggccctgcgccaggagccttgagtggcctgtctcgcagcgactttactaaatcaagccctgcccttaacccaaagtaaaccaagaccccagaggtgacttgcttgagccacgcggccggctactcgcggagctggggttggagccccgcgg

SEQ ID NO: 14263 - DNA, 201 bp, Bos taurus
tatttgttcttatgtcactcagcacaatgtcctcaaggctcatccacactgcagcaggaatcacaatttccttccgactctcagaggcccctcctcctgtttgctctttgtcaaaacaacacggtttctgagaaaagaaacgggaaactcaccctcatgcagtgtccatctccaaaatgctccttccataactggcccact

SEQ ID NO: 14264 - DNA, 201 bp, Bos taurus
gggaggggggcgggggacccctcccgggccccaagacgtcatccacgccccacccagacgccgccttctgccggagcggagcctgaaacaccagaccccgagggcctcaacagtaatagcaatatttaacaatttattctgatattaaataatattaatttatttaattaaacaagaacccttccacctcctcgggatccg

SEQ ID NO: 14265 - DNA, 201 bp, Bos taurus
aaagagggctttcaactccagctcatgtcagtgtagaccgagagcagaggtgacgtgatgacaagctttctctccagggccctcagtctttgacttcctcgccctgaccgccttttcaatcttatttacaggaagagttattttcccaagagtaacagtgagccaggccctgttctaagcactttatacagacgggtctca

SEQ ID NO: 14266 - DNA, 201 bp, Bos taurus
caccatgacttgttgagggacaggaatttccagtaattccttgaagcctccccttctgggaacgtgggacggaaaacacatctctatttaaatcatgaagtttggcctctgaggctccaaataacctccaggtacccaacagggctccacccgaccagtccgcgggtaccgaggagtttcgggtgctgatgctctcagtgg

SEQ ID NO: 14267 - DNA, 201 bp, Bos taurus
tcacgctgtcccttcagccggttactccaaggccccgagtctccgtgggaagtcacggattctgcggatccgtccgtctgaatgtttacctacccttctgcccaccttcacgtaaccttggccctgagtgtgctgggctgtcgtgcctgttgtcttggttcccgtgggcaggctctgggtttgcagagcttgttggggatg

SEQ ID NO: 14268 - DNA, 201 bp, Bos taurus
gcgagcagccatgtggaggtgggacgcagcctggcgtggttaagaaatggtcagggcctggcatcagcagggaggtcgggcgatgcggctagaaaggcagacaggctgggccacgatctgagactcatggcatgcctactgcacgggaggcatagttctaagcccagcaaccccgagaaggggaggatgccattgtcccat

SEQ ID NO: 14269 - DNA, 201 bp, Bos taurus
tggcagaggggggcacaggcctccccagcaggtgcggaaagccagaacacctactgtgcgctgggcccccagcagtgaggactcagatggccgggtctcacggggctggagctgaacaataaataaacagatgaagacgtcttcagacagggactcggggaagagggtgagacgggggggagtgatggagcagccgggcag

SEQ ID NO: 14270 - DNA, 201 bp, Bos taurus
gccctcagggggccttccctccacaggctgccctacttgtgggggagggaaccagatggtgtgacaccgcccaccctgctgtggacctgtctgctctttgggggccctgacactcccaggcagatgttgctgtcagggcttcgatgagagtgaggggcaccagcatcgtcctctcgtggggctctgggaggaagcagtgag

SEQ ID NO: 14271 - DNA, 201 bp, Bos taurus
gcagcccagggagaggaaggaggcagcctcgcaggagagagggctgtacacccagaggtggtggaaaacctgagaccctggccagagggtcagatatccctgctcagcagatgagtgagcaaaacaaatctctttcggctctgtttatagatgaggacactgaggcttggagagagcagtcttggcccagacatcagacca

SEQ ID NO: 14272 - DNA, 201 bp, Bos taurus
gaggagttgtcacagtgggtagggctcagtgttaacttgaaagttggaatataacaggatcaggaggagggtcagattcaaggtcatttcaaggggcccatgcttaggatgatttgtcagtgaggagatgaaactgagatgtgagtcaaggtcagttcaaagtcaaatttgacttaaaatcggccggctgtgcttgggttc

SEQ ID NO: 14273 - DNA, 201 bp, Bos taurus
gttttgagaagagcttgtgctcccagggtccagggaggtactgaagcagcacacaccaagaagctggggcccgaggcagccctgaggcctcccgggcagatgagtcagtccgcagttttcaggtgtaattgctcccttcaggttccagattctgggacagcgagtctggcctagactggggtctcgttcccttcgagcacc

SEQ ID NO: 14274 - DNA, 201 bp, Bos taurus
cgcagggtcagcgcgtaactgacaggatctgtttggaccgctgtggcccctcgctgggcaggatgtgtgtgtgtgtgtgtgtgtgtgtgcgcgcgcaggaaggagccccctttgcaggccaggttcaaacagtccagatctcctgcccaccggggcatacactgctcccagccacgggctggcactcaccaggggccctgt

SEQ ID NO: 14275 - DNA, 201 bp, Bos taurus
aacctctcccttttcttctggatcggaatgaggaaggccgtttagccctgggaaggttttggctgtcgccttggggccctggaggaaaatagtttgccttaggaaatagttggtaccatggaagacagagcagagagatgaaagagctctagagtagatgccagagtccaagtgagcgatacttaatggccagaggaaagc

SEQ ID NO: 14276 - DNA, 201 bp, Bos taurus
actcggggagaaccgacttttaaagcacgcccttttctggagactcttaagtgttttttgtgccccttcccatcaagtcttaagatgtttgtgggccgtcgcgtgttgtcaaggtgaatggatgggttgatttcattcaagtgtcttaaagccagatccacggttctcagtctccgtagagagagagatgtgggcttgaac

SEQ ID NO: 14277 - DNA, 201 bp, Bos taurus
ccacctgggggtgcccaatccccagaggccgccatgaactggctgtcacagaccacactgccccacccacgtgggtgcagacagggcagctgggggcctctgcactttatccactgcacacctgcccaaccaggctccgcaaactcagttcccacctgagggtgggtgtccacgtcccaggctgcccccagcctcctattc

SEQ ID NO: 14278 - DNA, 201 bp, Bos taurus
aggggacactgagcatccgagcagggagtcctttctgaggccgggaggggtgggaagtcaaggagcccggcgcaggtcagactccgccgccgtgagtgacccacaccctgtggcctagtcagacacacagaagggaatagagcatgcttccctggagcatcgagagccagggtgggcacagtgccatccccgcagatgcca

SEQ ID NO: 14279 - DNA, 201 bp, Bos taurus
ctgggcaagggtgtgcaggcacgcggggcatcagcgtgtccacagcctctcccctctctgggtgcgtgggtctctgccgcaggcctgcaggggctccccacagaccatcttcctgccgaatcatcccccgagtccccttggctcggggaacgtctgcccggcccgaggcgcctccaaggagcccctccatgcccgcttctt

SEQ ID NO: 14280 - DNA, 201 bp, Bos taurus
caggtcacttggcctggaatctaagtttcggagggagcactcagagtcacagtttcactgaaatagtctgaaagtgtcgtttccaaactggattcatggtttggactgggggcgagggccaggcgctgactgggctcctcgggggagaaagctggcttcccacctccggctcctgttacagactgacctcctcgggcttcc

SEQ ID NO: 14281 - DNA, 201 bp, Bos taurus
agcatgcacacgtgcaagaaacagcctcatcgaaggggatggagaaaaagagctgtgaaagtaactctggacatgagtagagtctgaacaactggcggccgaagaagcatcacacgagtgtagactctggtcggtgaagctgcttcctgtgcccacaggatgatagttctgaggccgtcctgtgcactagagcacacaggt

SEQ ID NO: 14282 - DNA, 201 bp, Bos taurus
gcgcccaccgccatgcggttctcagcccagggcctcgcccacgtgcctgctccccatggttcagagccgccctgtctgtctgtctgcgtgtctgtgtagcttccaggccactcccctgtcccgcttccgcaggaccgccgggcgcgtcctgagggggttcgggggtggtaagcggagtggtcggcatctctcctgctcgca

SEQ ID NO: 14283 - DNA, 201 bp, Bos taurus
tccaggccagaatactggagtgggtagccgttcccttctccaggggatcttcctaacccagggatcaaacccaggtctcctgtgttgcaaattctttaccagatgagctacatgggaacctggaagcaggtgtgcctgcctgctgttagcgctcacttctgggaagttagatgtcttatacatttctgcatttgaccattt

SEQ ID NO: 14284 - DNA, 201 bp, Bos taurus
gtcagcctcggagcctctgtactcgctgccccctctgcaaaatgctgttacctcaattccatgcagctggctcctcttcagcatttaggacttgccttgagtgtcatctccccacagaggcctctggtccccctgaccccctaccccagtctcaactgcacttgtttccttctcagcccgcagtagtcttggctctggtgc

SEQ ID NO: 14285 - DNA, 201 bp, Bos taurus
gggcccgggtctggtagggaggcggcgtgagctgggtgagtgctccacagggtgctggctgggggtctcatcgtctgcccggcagctgtgagtcaaaggcgggagtagctgggccctgggactggggtatgttctccctgagttatcgcaaggcagggcccttccaccactggtgaatcccctgaaggtgcccagtccagt

SEQ ID NO: 14286 - DNA, 201 bp, Bos taurus
ctacaaccagactctttgcttcacaacagcctcactttttacttcactgtgacctgactctatgaccttagctcactaggccccagatctgttcctcattaggctcggacgtgagtccacactacggactgactggtttttcacttctgcctgacactggtcctcaatagggcccgattctcatcctcacttgtgcctgaa

SEQ ID NO: 14287 - DNA, 201 bp, Bos taurus
tagcaggcaagcagagggtcctattcagagttggaccctgtccatggagacagtaggcaaagaatgtctgagctgagaatggataagttatacctgggccagacagataaaatgcagaagagccctgatctataatgataccagtaagagccttttgtggtggacaggggccccaatctggcattgggctcccccaaaagg

SEQ ID NO: 14288 - DNA, 201 bp, Bos taurus
cgtccccccacccaacaaacctccaggactcatataccttccttctctgtacatctgacctcaccagagaaaactatggccacaagcagaccaatcccatgtgagccatatctacagggactcccgctgtgagcctcactgtcattttgtcagctgagtggcccctcacttgccacaagacaccccgaccccctgagacca

SEQ ID NO: 14289 - DNA, 201 bp, Bos taurus
ggtcagtaaagacaaagagggaataaaaccacctcatgtgtgcagcaagctgctaggtgatggagcatttccctgacagctacagatctagatttgagtcgagtaatagctgaagtgtcagaaaatagaaaaagatatttaaaactcatttgttttaatagtgcctttttttttttttttagaaaaacccctctgtatcac

SEQ ID NO: 14290 - DNA, 201 bp, Bos taurus
gaggcctggcgtgctgcgattcatggggtcgcaaagagtcggacacgactcagcgactgatctgatctgatgttacactaagaatctttctgaagtttctgataaagacaggcccacagcaagaaaacaacaatgtacctttgaaagagcaattcacacagcacatcagcaactatgttactaaacaggacagaatctcac

SEQ ID NO: 14291 - DNA, 201 bp, Bos taurus
cgccctcctggcctcacgctcactctctctctctacccgtgtggtctcagctcttcatctctcagcttgttgacttaaattttctctttctttgaaaatcagtatgattcagaatggccaccccacaatagcagcttctgttcagaaatatgtgtcaccccaggcaagacaactgaagaaattaacagtgtttctgcagcc

SEQ ID NO: 14292 - DNA, 201 bp, Bos taurus
ggacacagcctttacacactatttggccaccacagccatcaaccaccaggaccaggaaactgctctgggtttccataaacaaagttgcattcagcaaccacgtcaacctgggccattactctgacatacaagttctacagggggcctccagtccctgtctgggctcttcaggaagacaccttggtctgagccttcttcaaa

SEQ ID NO: 14293 - DNA, 201 bp, Bos taurus
tgtcattgctgtgaaggctttaggccccacatcaggcttcccagcccagggatccggcaaaagactgggaatccccagtgagcctgactgtgaaggccaatgtgatttgattacatgacctccacaggactaggggaaacagaaactccactctaggagggcacaaacagacctgctgtgcaccaggacccaggggaaagg

SEQ ID NO: 14294 - DNA, 201 bp, Bos taurus
ttccaaattttttatgaaaagcccttctctcctaaaattattggacacctatgcgtgtgtgtgtgaaatctttgcttttgttgttgttttgattctgacacgcatcatacaggatgtcagttctccaaccagggactgatgccacaccaggccctgcagtggaagtgcaaaatcttaaccgctgaaccaccagcgaagtcc

SEQ ID NO: 14295 - DNA, 201 bp, Bos taurus
ataaagttagaaaaatgaataataatttaatatcctgtcattctaattagtatgttgatgtctcagtaactttgctaacatgatccatgtaaaaatcaatcatctggttatttcattaatgcccttttctttaatagcataggcacatctggaatacactaaaatttataccaaaaaggaaagattaatcacttacactta

SEQ ID NO: 14296 - DNA, 201 bp, Bos taurus
gacatcatacagtggcattgtataggggcccgacagcgtacttccctctggtcaccagagctatatgctctgtggctgcccctactgagccctgttgtagcagggccaactatgtgagagagctggtaaggggctggcctctggcccagtaagctgtgagatcatgtcttgtgctgtcctggaaggtggggtgctggtgcc

SEQ ID NO: 14297 - DNA, 201 bp, Bos taurus
tgctctgcctgttcacctgcttcagctggagaaggacccttgtcactctccgtgaaatcatggtggtggtgagcgtctcattttctgagaagatattgtttctttctgtaataatataataaaaagaactatacaataaatgacaaaagtcaacataaatattaataaatgatagtaagtgcctcatttggttattaatgt

SEQ ID NO: 14298 - DNA, 201 bp, Bos taurus
acaacagtcctgacttcctgctgagaaaatattctgaggaaggagaaaagtagcattttggatgtcatgacacctctgccagcactttggtaagtcctccggcatacactctgaggccacttgaccttgtctgtctggcgaaccttatgttccctttggaggatttttttcatcctgtttgtaaggtgccacttggactaa

SEQ ID NO: 14299 - DNA, 201 bp, Bos taurus
atcgctgtcactgtactgccctctagtggtgtattcttgggattgcagttacttcgctgccacgtgcagaaagcggccttttgctctcaagttagaaagggaactgtgcttttcttcaatttagagaatgcaccaggtgccataatatcacaatatctatgtaggtcttacctaggaaagtcacaagttaggcccatcaga

SEQ ID NO: 14300 - DNA, 201 bp, Bos taurus
atgactgaaggcagacaattccacctgcttcttggagtagtaatggcccaaggcagccgttcatagcaacatctctgtacccattgctgagcttttatttccttcttaaaatgtgagcagttgaggccctgtgtagtgaaagaatcaacttgtttccctctagtttgttcaaagacacaatttgctaccctacagatgtgt

SEQ ID NO: 14301 - DNA, 201 bp, Bos taurus
ttattttttcatatcacccacagtcagatgctttgttttctcatgggaaaattactccaaaaacatctctagcctgggaatggctttggcattcacacaccaaggttaacacagagtgtcttagacgatgttagagttgtttttaacacaggacagaagtcatgctgtgggaattctgaaatgtgagagtcattttctctg

SEQ ID NO: 14302 - DNA, 201 bp, Bos taurus
tatttctttaaagtctatgccggtggttctcaaatgtcagtatttgtaagaatcaccgggagggctcctgacacctcagattacagtcctccccaacctccgcagagtttttagtccaataggtccgtggtggaggagaagaattagcatttctaacaagttccaggtgatactaatgttgcctagtgtggggatcacatc

SEQ ID NO: 14303 - DNA, 201 bp, Bos taurus
cttaaaaaatataaattgacaaactgtttctgaaatgtatatggaagcagaaaagacctagcatggccaaaatgatcttgggaaaaggagaaacaaagacagaaagcttgtattattcaattcagagtttagtgtgaagttacaatgatcagggctatgtggtattggaagaagaactaagaaatagagtaaaggaacaac

SEQ ID NO: 14304 - DNA, 201 bp, Bos taurus
ttctcctgtgctcagtgttggcatgtaggtgcttactaaatgtagttagtgcatgaatgattgtatgcatgcatgaacaaagtgtcagagtttccttgcttgagttttctatgttttgtttgactgatgtgtttttatgataggaattttttaaaatttatttttaattgaaggataactgttttacaatattgtattggt

SEQ ID NO: 14305 - DNA, 201 bp, Bos taurus
agccagcctaaggcttagctctcgctctcgttatccttacagtgtttccctgggtgtgtttatcaaggggtactctgccctgccagattcgggggcccccatcttgcacaggttggttccatgctcacccagttctttgatggatttcacctactctttcaggcagtgagtgtcaatgaagtcacacaaatgggggtcatt

SEQ ID NO: 14306 - DNA, 201 bp, Bos taurus
ataaatcacgcttattaatcatgttaataaatcatgtcatcctgttcgtgacgccagttgtctcgctgtatctcactgtgcacactgttcgttgaacgcggggtagacgaggtgccagctcagaggcttgaagatgagcggagccataggaatgcagacaggtttattctctgctggccggcacagcagccatagcaatat

SEQ ID NO: 14307 - DNA, 201 bp, Bos taurus
tatgtctttctctgtcattggcttgaaaattcttcctgtggggtttttttttttctgtctttaaaatcttccttatgatttcttcaactaggtcatgaaagtattataaaaatacttatattctcacttcacatctttttctggccagtcttatcctcctgcatgcttgtatctgtttcttacaaaccactgactcacaaa

SEQ ID NO: 14308 - DNA, 201 bp, Bos taurus
aaacttgcaacatatgagaaatacagcctgcctatatatttgtatgtatatttcctgaaagtaacaagcatagtctatatatgtagagattcttattaatatatgtatctattataccatgcgtccccaacccgtgggtcacgggctgctaccagtctgaggtctgttaggaactgggctgtacagcagggggtgagtgaa

SEQ ID NO: 14309 - DNA, 201 bp, Bos taurus
ctttgagtacctgctgtgccaagcaacaaagaaggccagccagacaagcccttgaacgccagccgccagaaactcaaagaggactctacgggcaccgtatctgctgtgcctgtggccgccggcttccctgcacacctggtgctgctgggttccccacgacccaagcggctacaccacctccatgcctggtcctcactgggg

SEQ ID NO: 14310 - DNA, 201 bp, Bos taurus
cagtggtaaagaattggcctgcaatgcgggagactcagagacactggttggattcctgggtccggaactgaatgcacctgatcatgtctgatcttggaagctaagaagggttgggcctggataggaagttagtgcttggatgggagacacctgggaatactgggtactataggcttttggggcttcccaggtggttcagtg

SEQ ID NO: 14311 - DNA, 201 bp, Bos taurus
gtgataattttaaagagccatcctggttctagaacttgttatggggcagcctgaggtccctgctgtaactgcatcacagcccacttctctggcaacccagccccacctccttctttctccttgacagtgctgtcaactgaacacacttcccagtaactttctatagtgacacctcagtcttagactccatttctgggggaa

SEQ ID NO: 14312 - DNA, 201 bp, Bos taurus
caagggttcaccccagacctctcagcatcctgagaggaggtggtcccagagcaccccatgttgacagagcaagcagccaggaggctgtactgtcggtggtggagctgcagggcccagggtgtattcagctctctgaagtcagcctctgcaggaagccagggtttccacacgggatctggctgtgtaagcagacaggacaca

SEQ ID NO: 14313 - DNA, 201 bp, Bos taurus
tctgggggtcatgtcacctatcaacaccatgagacgaggcctcactgaagactggactggaatacaaggactaaacaccagccgtggacaggatgagtgcataaaaagagacgcttcgggccgcggtggaaccctgagggctgacttcgggctcgctccgtacatcaaactgcttcactgagggctgttcacccctcgcgt

SEQ ID NO: 14314 - DNA, 201 bp, Bos taurus
tgacctttgatttggggccccacagatggctgtgcagggcgaaacagttttaaggggtgacattcacctccagcatgaggagtgctttcccaggcagtgcgcgacctgggcaaacacacccagggcccccatcttccagcccctgcacctgggagctgtgttctcttcacacccaccagaacctggaaatcttcacacaca

SEQ ID NO: 14315 - DNA, 201 bp, Bos taurus
tggagaaaatggcagcagctgatacatcacttgtgaaggttagacaaaggcccttttcagactttagaggtaaccatggtgtgttggagttttatttcaacaactcataaaaaggaaccaaaaaagggggactattagacttcttgtaaatctggcagctggggttttggaactgtcttcaacttaatatgaatatctaaa

SEQ ID NO: 14316 - DNA, 201 bp, Bos taurus
agacagagcaggatgaggacacaaaggtgcaaggagcagccagggggagaggagaaacacaggagagccctcagtcctgaacaccaagggaagaccagactgtgcttcaataaagaaatggcccaaagtgttgaatactggtgagaggtcaagtagaagacaactgaaaaatggatttaatgacatgaggttcacagaaaa

SEQ ID NO: 14317 - DNA, 201 bp, Bos taurus
gtccccaaagtggctctctggcagtgacaggccaaaaggtggaggctgcatggacccgagaaaaccttagaaagcaaggaagtgatgcgctagaaggcccctttcgctagaaggaggaagggcaaggttggtgaccagatcctctggagaaagggacttgcctggtggcccagtggttaagaatcagctttgtaatgcaga

SEQ ID NO: 14318 - DNA, 201 bp, Bos taurus
tttctcctccataactctgtctgcatttgtttggccttggtccacaaagaaccaagattttggcaacaccaagactgctgccgccagtgcccctcccactatggcaggccactgctgacccagtcctctgcaggagaccctcacacgctcacaggtaggtctggctcagtcttctgcgggtcactgttcctttcccctcgg

SEQ ID NO: 14319 - DNA, 201 bp, Bos taurus
ttggaagagggtcaggccaggacctgaggatggggccttcggaaccaacagaaggatttcgatttgatggggaggaaattgggggccccttgttgtcttggagggcagatgacaagcgtgtggtggttgaggagcactcagtgttggggtgtaggcgctggagtggggagaggcaggactgggaggccaatggcgaggtgg

SEQ ID NO: 14320 - DNA, 201 bp, Bos taurus
ctcaggccctattccaaaccatatcctccgtctgcccttccgtgccccagcactcacctgctactctgcagtcacctttgctgcctgcaagaaatcactcgttcctctctggccctcatgggtcccgtgactccctgccaggtaactctcctcccgtcatttcctctctcccatttaagctctctgcaacatcagcccttg

SEQ ID NO: 14321 - DNA, 201 bp, Bos taurus
cccgaggctcatgtctaactcttctatcccttctccaagtcaggggttcagggaacatgaccacagcctctgccctcaaggtcttttaaaggcagctagcggtgggcttggggcctgaggggggacaccttttgccctggggctcctttctctctaaaggtgaggtcaagggcagcattgaaagttcagattttcacaggg

SEQ ID NO: 14322 - DNA, 201 bp, Bos taurus
ggtaaaatttaatttcctgcaaaattttcagtgcacattaagctatataatcttctgccttgggtactccacataagtgtttaactttcttgttttatgaactggaatttttgactcaccttgaagatgccactagggcaagagatcactgagatacctgagaaagaaaaacttaaggaatcagcatttaccaagcgaatt

SEQ ID NO: 14323 - DNA, 201 bp, Bos taurus
gccacctgattttgtggaaaagaaatactgaaacacagcggtattcgtttctttatggatcgtctacgtcttctctccacaacagcagagttgagtaactccaacaaagactgtatggcccacaaacctaaaataattacaatctggcatgtgaagaaaaagtctgcaatccactgatctaaaacacaatattatgtgttt

SEQ ID NO: 14324 - DNA, 201 bp, Bos taurus
tattctgaacagacatgtggtttgtttccacttttttttgctgtttcaaatagggttcttttgacatgcccatccttgtatatgtctcctgttacgtatgttggagagtttctccaggtttatgttcctgaggaaatagttgctaggtcattagggtaggtatagctgtcattttgctagataatgcccattttttcccca

SEQ ID NO: 14325 - DNA, 201 bp, Bos taurus
tcccaaacggctagggccatgtctgaatgtcccgttcagctgtctggggattggagtcccctcgggcagtctgacatgagccagagacaaagcctagaacccggcagggctgggccttcctgagcttctgaaggaaatccctgtgatttttaaaatctcaccgatgttttgttgctcaatgctcctcatttctgactgaaa

SEQ ID NO: 14326 - DNA, 201 bp, Bos taurus
ggggagagggtgtgctgcttggtgacatcaccccaggaagatggcgggcttcgctactgggtccaaggagccagggcccgagccagcgccatcagagagatgccacttctgtctccagcacctgagctggggggaggaggctctttaagatctccgtgtagtaggggccgaacacctgctgattgtggtgtgtgaggctga

SEQ ID NO: 14327 - DNA, 201 bp, Bos taurus
aaaaaaaaaatcacacttactatacaaggagggaacttatatttgctctggcactctatctatatatcatcttactctgccctcacgggccctctgcgtgatgggtattatcccattttactgacaatgaaactgaggcttagggagtgaagaagtttcttcaaggcctcacaactagaaagtgaaggtccctggccttcc

SEQ ID NO: 14328 - DNA, 201 bp, Bos taurus
ccaaggccacccaaccagtaagtggcaggttgttgttgggctgaagccctgcccttgccttcacaccagtctgcctcctctgaggtggctggtcatcgtcgaggtggtgccaggtgctagggcccggaagcaggcgagccccagtgcctggagaatgtggggagagcgggcagagggggcacctgtcctgcccaggtcccc

SEQ ID NO: 14329 - DNA, 201 bp, Bos taurus
gggacaggcccagggcacagagcttaggtctgagccttggactctgacctgagctgcccatagggctcttgagtccattctcacccccgacaccaggcctgctgcttctgagaacctggaaccaagttgggggtcgtccgaagccctgacctttgagcccagagaggggagcggtcacgttccctgaccccctcgcccagc

SEQ ID NO: 14330 - DNA, 201 bp, Bos taurus
tctccctggggacacagctttccccgccactagctcaaatggtgactgtcttctctctctcgctcctcttgccatggggccaagaagaggtggggtcggcgatcgactcgttccacttccagaatgtgacccttccttcttccctccgccccacagctttaaatctcatgctatttaaccgaactggtattacagagctac

SEQ ID NO: 14331 - DNA, 201 bp, Bos taurus
ttttcagtggccattccaacctgcctcactcttggtactttctgtccctcagaggatacacaagtagttacaaaactgcatgattcaattcttagtgaaagcatgtctttgggaaacttacctggcctactttcctaagtgggaaagagtctgaatgaacatttccaaatttattaagacaggtttctaaaacaaattctc

SEQ ID NO: 14332 - DNA, 201 bp, Bos taurus
caagtgacaggttccctcgctggctctgctagaagggcgggcttgttccttgaatagggtgagtgtaggggaggattaggggctgggccagggatggctcggggggtatgcccaccctcttggtggtaaccgtgtacagaaattatgctcaaggctcatcctgctttggctcctagcatctcagaaatggctagaaggttt

SEQ ID NO: 14333 - DNA, 201 bp, Bos taurus
ctctgagtcactattagaagccgtcctgggcccctgggagagcaggggtggaacagctctacccgagatggtttcctgaacctggcgttccagcatccacctcccttagccaggccacttctctcagtgacacacctatcttttgacacacctatctttcctgggccaaggactgtctgaaacccatgctgcaaacctgct

SEQ ID NO: 14334 - DNA, 201 bp, Bos taurus
ctgagtatccccgtcctgaggggccagagctctcggcatcaccaaaactcttggagacaggtttctgttctggatcaaacatcagaataggtccaagagccacaggccaggggaaggagaggtattcttcccaaacctaacaaggtgaagccttgggcaacttcacctcagaggttcttggggtgtgtttcctggacaagc

SEQ ID NO: 14335 - DNA, 201 bp, Bos taurus
tttcctcatccctaaaccagtgcagctagtcctgtcttcagagcatcagtataaagatacctgagaccaggtgtgtgaagggcccagagcagggcctcggtgtcccgttttccacgcatgctcagctgagtcctctctcacagtcagctgctgctcttcactgtggacggccctcccccagcctcaagagccatcctggaa

SEQ ID NO: 14336 - DNA, 201 bp, Bos taurus
gaggacaccacaacctttcacaggctgcacggcctgtcctgaggctggtcctccccgaggggcccacaagatgtgggcaggaaggtgctgtttgctggccggattaatagcctcagtgctttgctcttgccataaaaatagctcgcattctgtgatggacagcccgggctactctctctgagggcaagctgcgcccgcggc

SEQ ID NO: 14337 - DNA, 201 bp, Bos taurus
gagcctgggacagtcacccagttatggttttgcattttaagatctggaggaaatcttgaacatcatcaaatcccactgtgtcgtttcatcactgaggcccagagaaagattaatctgcccaaggacacggttcttagtcctgcccctgccactaacgagatgtgaagctgtgggccagttgctttccctctctgagcttag

SEQ ID NO: 14338 - DNA, 201 bp, Bos taurus
acaggagagagaggaggcatgaagggtcgttgtcgggagggaccatggtctcgggtctcatggtctaccttcttgcagagaagggcctccagggagtcgcaggaagctgacctctccttgtccccaaagtgaagctggaaagggaagctggttagtccctctcaagtgatgtccccgaccatggccttctggcctgggtca

SEQ ID NO: 14339 - DNA, 201 bp, Bos taurus
ttagagaagggtgggcaagacaagagagtgaggggtgggagaaggataagagaggacagggaggggtcatgggggagctctgtcctttgttccctggaggaggtcagcaggagtgagcagggactgaagacaaaactcaagggtgaccagggatgggccgacacctcctgggccaggtgtgtcctcaagcctctccccagc

SEQ ID NO: 14340 - DNA, 201 bp, Bos taurus
ctgactttcttcctctcttcccacagcttttccctctgtccccttcctcttcttcgatccctcgctccaaactcccaagcccagggcccatcaggaggctgaggagtggacaagatgacctcccaaagctctctgccattcccatctctcaaaagagccctccaaggccagtccttggagagatccatcatcacctgttag

SEQ ID NO: 14341 - DNA, 201 bp, Bos taurus
gggagtcccagatgcccaacaggccatgccctccacctgagcacctgcccagaccctggtgtgactgtgggggcagcattgaggagcagaaagagcaaaggtctaactaggaagccgggccctcagtttcctcatctgtaagacagagcagtcaccccttccatgcccctcctcccaggctatcttggggcaatggtaaag

SEQ ID NO: 14342 - DNA, 201 bp, Bos taurus
ttctatgaattttatcaatagcacgtagtccccatgtaaggtgccccctggaatctggggaacaagtctgaaactgtcaccccctgaaatggaaatgcatcagaagagatagccatctgtggccaaggtcctcaggaaatctcatcaggaaacaacccaccaatgtatgatgtgtgtgccagttgctggtaagaccagagg

SEQ ID NO: 14343 - DNA, 201 bp, Bos taurus
ggggccactggagttcctgccttggtgttccatgagaaatttcccaaccactttaataaactcaccatttaaggcttaagccatcttcatctggtttctgcagcttggaaacaaaagggcctaagataagctcctagcggagtgcacgaggcagaaacgaacagacgttctgatgatgaggatgacaatgacaacgtgatg

SEQ ID NO: 14344 - DNA, 201 bp, Bos taurus
gactaactcagtttggacaaaacagagagaccaacagcagcatccctcactacaaatgattctgagtttcattcctgcagtggcctttcatgccagataggtttgtttcttcgataattacagtgcctacaaacctgtccttcatccactaagaagggaaaggggccttatatacaacatgctcaaaatgcagtctaccag

SEQ ID NO: 14345 - DNA, 201 bp, Bos taurus
tctacatttcattgcaacaaatgtctctactctattaaacaagtactgaaatttgcccttaatatgccacagagttaagggtttttcctgagatgttctgcagacatgcaggtgtctgagactaagggcctggtgtggggcgttttttaaatcccctcacacccaaatttctacatggaatatgagactctcgtggatctg

SEQ ID NO: 14346 - DNA, 201 bp, Bos taurus
aattcaagtgatttccttatttgagttcaaaatgggtcctaaaacatggagacaactcacaacatcaacaacacatttggcccaggaactgctaatgaattcagagtgcagcagtggttcaaaaagttttgcaatgaaaacgagagccttgaagatgaagagcataatagtggctggccatcagaagttgacaacaaccaa

SEQ ID NO: 14347 - DNA, 201 bp, Bos taurus
agaaatgtctttaggaactagaaacgtttctcaggggactagaagcacatcctaacattttaatattgcctgtctgcataccctgtatttacagcataaacagactgtataaaatgataccaggatgcatctcactctctggaaatatgtttaatctgacaccattcactaaccatagcagcaaaattaaaatcttgactt

SEQ ID NO: 14348 - DNA, 201 bp, Bos taurus
actgggccagattgtcctttatgtctgagagaacaaaaatacattttcaggagtttgaaagattaacaaaatataccagccagacacataatatcctccacttcccggccccagcccatcccataaaactagaagagttggaagtggttgctctgtggaattgaaagtggtgagcaagtgggcagggggttagtgttttca

SEQ ID NO: 14349 - DNA, 201 bp, Bos taurus
gaagcccactcttgctgagtgacctgtgtccaccacatcatcttttcaaatgtattcaccagaaatatggaaagtcacataagccttgtaaaggccgatatagtgggacttccctggcagtgtagtggttaagacttcaccttccaatgcaggggctgctggttcaatccctgatcggggggatgtaaaatcccacatccc

SEQ ID NO: 14350 - DNA, 201 bp, Bos taurus
tgcaatgattctctgtcttggtttcctcctataagcggcagggctgggtcaggaccccactggatggagacccaggacactggacgcctaccagggcccccggtcatggtcagctgagctgaaactggaggagaagcagaggaagagagggcagggaggcagaggcaaggggcaggactcaccggccacgaagtcgccgaa

SEQ ID NO: 14351 - DNA, 201 bp, Bos taurus
gagtgtggcctgacatccggcagtgataagggaccttctgaggctgaactaataaggagattggaggaaaaaagaagaaaaacaaccctccccgccaccccgatcaatttcatgtacagtggccagaggatgcagggcaaacagagcagctggatgtgggcctctttccgtctgaatgagcccggagggcagggcaggcca

SEQ ID NO: 14352 - DNA, 201 bp, Bos taurus
ctcatgccaaggaacagccattcattgttctctgaggccaaagacaatgctgccagaggtagcacactgctgtagagaagccaacgccaggattctaatacgtgaaaaacggcctagattgtgcctctgctttggaagccgtctattccttttcctgtggtttaatggcatttttagagatatgatcagtggaggcagggt

SEQ ID NO: 14353 - DNA, 201 bp, Bos taurus
aaaaccactaccactgatgcaagagcagcctctaggccggtgccctctccctaggagggttgctgctgctagaacccagcaggattctacccagagatgaacctgtagggccatacctactgcttccctcaaggtgggggcaactcctcccccatgtttttccatgctgtatctgtgtcccagcctccgcagaggctgggg

SEQ ID NO: 14354 - DNA, 201 bp, Bos taurus
gaagaaatcatctaggaaaaagtacaaagaaaaagagaaaaggaggtcctaggacaatgcttgaggaatgtccacatgaaaggaggataatctggcccaaaaggccaaggagcagtcaggagataaggagaagacaagagaagagagtggtcaatcatgctgaatacagggacttccctggtagtccagtggttaagactc

SEQ ID NO: 14355 - DNA, 201 bp, Bos taurus
tggttttcttattaaggtgagttaaaaattctcaagaagtcttctaataaaatcctagtttataattattatttttatgtccatcagatatgttttttgatctttcttcttttacaacatcacttttccttccattgactccttaggtttggaattacattcacttattaaaactcctcaagagacattttggtgccaata

SEQ ID NO: 14356 - DNA, 201 bp, Bos taurus
agaaggagaagatgggaaaagaatcacggcctgcaaatccaaatctggaatcctggtcctggcaactctgagctgctaccaggtcaggcctctgttccactcccgctgaagtgaggaagttggataaggactgtgtgttctttaggttaaaattaatatgattctctggccctaaaatggcccaaactatccacataaaga

SEQ ID NO: 14357 - DNA, 201 bp, Bos taurus
ggcagatgcctgcactgttgttcagtcgctggcagctgttcttggcaagggccagtttgtagtcaacaaaccgaaatccgctgaaggggccgggtctgctcttgtccccggggcttttaaagggttacctggcacctgttgctgaagccgtggcttcttcaggtccctcactctcccaggcacccaccttcccctaggggg

SEQ ID NO: 14358 - DNA, 201 bp, Bos taurus
accacagtgggggactgtctggcctcaggcatccattcctccacttccctcctccagcgcccactgagggtcattgcttccttccaacctgcttctccccaagggcagaaggcctgctggaccaccatattacatcactccaggattatatcactccaggagctgccgttctcatcatgctctaggtggatagcatctcct

SEQ ID NO: 14359 - DNA, 201 bp, Bos taurus
atcttcagcagtgagagaagggaggagcctggctttgctctctcttttctctacaaatgccctccaggtgatcccactgtgcggctggggctgagaaccctaggaaggcccactgcaattttaaagttccgattcttactctaaaatccctcggttttttagaagtactgtgtgttcttatcctctcccacagcccccaag

SEQ ID NO: 14360 - DNA, 201 bp, Bos taurus
cagaaccaacctcatctcctgcccatgtggccatgtccaccccattttgttcctgactagatctggggagcctggatccctctttgagacagactgggacttggggcccttcgctgcagtgcttgcacctggacaaatgtctcctcgagcaacggcatacaaagaagattcccttctccaggggatcttcctgacccaggg

SEQ ID NO: 14361 - DNA, 201 bp, Bos taurus
tgcagccacagcacaagtgggaggccatctctggagcccacccccgctagaaatagctctcctttgtaaatagttaatgagcttattcatccgcgttgcatgtctccatggccccgctctcaccctgggctggcacatcacagtctgtggttctgtgtgatcctgctcgctcaccaccccccaccacctctgaggctctga

SEQ ID NO: 14362 - DNA, 201 bp, Bos taurus
ggacgtccaggcagggccagctcttctccaaggaggcagcatcctctgcttaggtccagccctgcagtgattgaattatccgccctttcacttaatgagcgtctctctggactggccatgagacctgtgttcaggagagcagacatttcattagcagaattcagtggtgccgtgttgatcctggtttcctgacagttaaga

SEQ ID NO: 14363 - DNA, 201 bp, Bos taurus
cacacttatttagtaaactttatgtccccaagcatcccacgtgctgatggcacagtttcagggacccaataacctgtctgaacgtatgctccaccccacaaagaggccttgatggtaagcctcccttatgtgtacacagaggttagagacaaggtggttataaaaaaaaagctggaccctcccccacctcccacttaccct

SEQ ID NO: 14364 - DNA, 201 bp, Bos taurus
cagattctgatctggcaagatctttgcttaaggggccgcattctagttccaaagttggtgaaaggtttgtgtcttctaatctgaacttagaaggacagagttcctcaggacagggcccaggcacagctgaatggatgcatcaaatcctcaagtgcagctgggcatcccttccgccagttggcatggccatagcctgcatat

SEQ ID NO: 14365 - DNA, 201 bp, Bos taurus
ctggagaattcccgaggattctggggggctacaatccatggggtcacgaagagttggacatgactgagcgactaagcacagcacacacatcagtagctgcgaggtcatatgtaagtcatttaacgtcccagagcttcaatttcttcatctataaaagggaggtaattttgcctacctgaatggcagggtttttatggaata

SEQ ID NO: 14366 - DNA, 201 bp, Bos taurus
tactaagatcccagtgcctctgttttctcatcacaagtggtcacaagatgtatctcaaagctttgaggggcagagtaatgagaacatgtatgcaaccccccggcccatgtccataagcggcaaagattcattcctctttctttttttttttttaattttatttatttacttagttggctgcaccatgtcttcattgcaaca

SEQ ID NO: 14367 - DNA, 201 bp, Bos taurus
ttaaggaaaatgaaactccatggaagccatatacatcataagactgaccccaaaggagtttcaaaccttcttctgaaaggccggggctacattacaattacagaagcctccctcagaggctctaggtcttcaccctgcttccagatagattcaggatccatggcccagagccatcagattaatctctcacagacacacctt

SEQ ID NO: 14368 - DNA, 201 bp, Bos taurus
acaggccctccaggccaagccccaagctgcaggttgaggtgctctgctgaaactcgcccatgggtcataagggtggggggacctcacccggggtgtgggcgagccatctgcaactgatctggcctttccagggcaagctgagagcaagtcacccctactcactcagctccccttactaaagaggaaaaagtgctacgtgct

SEQ ID NO: 14369 - DNA, 201 bp, Bos taurus
ctgatcttatcctttaggacgctggcttagcgggagtaagggatgtatttcccgagacgctcaagaatgaggtagcatgtccaccaccttctcaagtgcttgtgtctagctggttccccaaccctaggacagatgcagtaggaacggggatcctattcccaaagctggaacagatcctggattctcatctcatttcagccc

SEQ ID NO: 14370 - DNA, 201 bp, Bos taurus
acacctatttatttccttgtttgtgttgatgctgggcaggtcctcatttgtccctttcaggtaccttggaggggtgaggggctggggagggccagacccaggttccgagggcacaggcagtgcagcttttggctgtgtacatagggtgctttattctccacagagtgatacatgctacggtgggttgggcttgggccgatg

SEQ ID NO: 14371 - DNA, 201 bp, Bos taurus
gatgtgagtttatttctgctatgtctatcaggccatcaaaaacaggaaccgatcagtatagaaaagaaaacctgtgcaggaaggagacagaacccaggctcggggaagctgaacaccgtggcctggtggcgctgtgcctgggtgtttatctgagccttgacccacgccagcacggtaacaccggggccttgtgcctttccc

SEQ ID NO: 14372 - DNA, 201 bp, Bos taurus
ccaagcgagcctttgtaaagcctgattgaaccataggctaagacaccgggtctgccctgtagagttacttccgtgaggccaaatatcccttctggaattcaccctgctatctccactgcagttgcatggtggctgctggcagtgactgttggcagtattgtccttgtgccatccctgccctcctgcctgtggccattcctc

SEQ ID NO: 14373 - DNA, 201 bp, Bos taurus
tgagcacagggcctggcacgtaacaggtgcccagtgtatgtttggtgaatgggtgaaaatgacctacgtgtgatgacagatcactgaggctggggttggtggggggagcaggagagacgaggggccccagcgtttatggagaaatgggtacaagaggacttccctggtggcacagtgggtgagaattcgcctgccagtgca

SEQ ID NO: 14374 - DNA, 201 bp, Bos taurus
catctaatcccactctgcagcttccaagctctctctttctctttctcacctcttaaagcctcatttcctcacctgtgagatgatgctgatgctggcctcccaggaaggtcaaggatgagtctggtatcaagcagatgctcagccaaacatttattgaatgaaaagcgaatgaaagtggggcagaaggaagcctggtggcca

SEQ ID NO: 14375 - DNA, 201 bp, Bos taurus
actactccccttcttactcattccactccagcccctttgctcttccaatcaaccagctcggctacaacccgagggcctttgcacatgctgttccctcttaggcaacgctttcccgtcattttgcacatggctccctctttcaggtctttactcaaatgttatcttctctgtgtggcctgccccacctctctgttacaatcg

SEQ ID NO: 14376 - DNA, 201 bp, Bos taurus
ctccagggcactccacagagcacactttacaaacctctgaaccctgaaatcccctgaacaaacattctggggccctgccacatctgggagctccagaactggggatgaggctgggaatgggggccagcccggtgtagggagcagggctgagaggtcccaaggtgggggtcgggttgggggcagagccagtagggggagtcc

SEQ ID NO: 14377 - DNA, 201 bp, Bos taurus
gctgggactctaccccttcccagtgacacgtcctacactcggctggcctccacacctgctcctggcacccgctcccctcggcactcgctgccctcggtgaggcctctctggcctcttttcagcatccttgcttgggggttgacatcgctgtcaatggcccaccggctacagcccagggctgactccccccagggatgatga

SEQ ID NO: 14378 - DNA, 201 bp, Bos taurus
cctgggccagccgctccagtccagcagtgtccagcggcacccccttctcctccagcatcagctccaccaggtccagggggagccccaggttcccagacagtgacaaggaccaggccacttcggctttgaggaaggaagacgatgggcgtcagggctatcgagggagggagtgggaagaagtacgggccagggcttttctga

SEQ ID NO: 14379 - DNA, 201 bp, Bos taurus
ctcagcacatagctgctgggagctgggtctgccaacacctgaatgagcttggaagaacattcttcctcagaacctgcagagcagaactcagactggccaacgccttcatgtcagtcttgagactccctgagcagaggaccctgcctggatcctgatctacagagactgtgagataaggatgtctgtttgaggccactcttt

SEQ ID NO: 14380 - DNA, 201 bp, Bos taurus
aaagcaaaaacctcctgttctttctgctcggccagaacccaccggcagtgaggctcttggacaccaggtggcgcccaagtaaggccgaacgaggagcttcgggacaggctcgctctgaggggaaacagcgaccacaaactcagatggagaggattaaggtgatggacggccaaagagacgtgtcctggctctggtagggtg

SEQ ID NO: 14381 - DNA, 201 bp, Bos taurus
tggccaaagtactggtgcttcagcttcagcatcagtcctttcagtgaatattcagggtgagtctctcccaaacccacccgagtctgtgactactgccaccatatgccaccttcatcagaggagaagcctgctttccagtttgggatgtgatattttggaaaggatggcagaatggaaagtgcttggaggatcactcagaat

SEQ ID NO: 14382 - DNA, 201 bp, Bos taurus
tagttagacttctatgaggccataaactggaaaaaattaaacagtgtaattgctgtatgagggacacacgtaagactggatgggaacggaacagatacattccagaacctccagcaaaacgggccaagaactagatcttccaggatgtctgcagtatatggtgtcacagaggcagatggcttgaaggtgagcagagaattc

SEQ ID NO: 14383 - DNA, 201 bp, Bos taurus
cgagccacgccgcggcctttttaggacgagggctgctgggagaggggtggggatgaacagaactggaggatgttcagggccattcctttaagaatgagctgagagggctggcgttttcgagggacggaggaagtttattttcaacttcagggcagagattggcctctaacggtttccttcagaattgagatgaaccggagt

SEQ ID NO: 14384 - DNA, 201 bp, Bos taurus
gccaagaaggaaatgacacatcgagaggcattttgtgttgtgcaatattctgtggaactgatgcaaggctatatggcctgtttacacattccttcgctcgtagacagcatggcagtaattgaattcagcagcacatggcatgctgcagcaaggagccgggccttcacatcctttcatggcaaattatcgcagccgttaaaa

SEQ ID NO: 14385 - DNA, 201 bp, Bos taurus
tccctgtggttgttcggttgccaagccctgtcctattctccttaagtaggtctttatcatagaatcttaggatggtgaccttgaaagagagattggccagtctgcagcctgttctttgagagacagaaagcaaagagagagcttctcgcttgtttagggatagtgagaagttctttttgctaacactgggaatcttcagaa

SEQ ID NO: 14386 - DNA, 201 bp, Bos taurus
ttttccaggcaagagtactggagtggggtgccattgccttctccgaaattgcatattagtttggtgaattggaaaaatttggtgaagagtacctgggcccgctctgtacatttttttgcaacttcctatgacataccaaccagtccatcctaaaggagaccagtcctgggtgttcattggaaggactgatgctgaagctga

SEQ ID NO: 14387 - DNA, 201 bp, Bos taurus
ccgagaaagcttgctttgccatccccaccacggaaacaaaacatggataactggacgcaaacaccaatgggcatgtgaccatcagagtcagacctgggtgcgggggcctgagaaatcatgaagtgggatgctctcccatggaactttcaggagtggaaggggttctggacaggggcacaggtaaactcatgacttactatg

SEQ ID NO: 14388 - DNA, 201 bp, Bos taurus
ggagcctctgcccccactcaagcagaggggccgggagagaggacgtgtttagggggcatcagctcttgggggctgggctttgtggagcaggctggagacaggcagccctttgggggtgaggagggccatacaagactctctctttgcaaagagggtcctgagctctgagtgtttttggaaatctactcccagggtctagag

SEQ ID NO: 14389 - DNA, 201 bp, Bos taurus
aaatccagaatagaagtttcttaagaacaaaacccgtatatcgcttggggagacattcagtgaactattacaactggcctgtagtgttgatggagtggggagttaatctttttggaaaattggagagattactctttgggtccatctagaaggttctgcaactaaagtgctcagagagtccaactgtttgaattggtggcc

SEQ ID NO: 14390 - DNA, 201 bp, Bos taurus
agagagtagaatatgatccaggcaccagggaagcacaggccccataatccacacctctggcagggcttttggaggctctccaggccacggtgggagattacagaagctgggaacagcagtagctactctcaccctagggcatctgagaggtcaagttttggaagccaaggcagttcattattagttggccactgaacaaaa

SEQ ID NO: 14391 - DNA, 201 bp, Bos taurus
tgctatggcccttggcaatgatccagcatggagcaaggggttgctgcactgcatggaggttgtccagccccctccaactccacgacctaggtcagaacaatgagtccaagtttccaagttcaagacctttcctaactacatcaccctctataattcaaagccagcctcttgggatcactgaactatttttagagttgatgc

SEQ ID NO: 14392 - DNA, 201 bp, Bos taurus
acaccacaaccgggagtggcctctgctcacaactagagaaagcccatacagcaatgaaaacccaacgcagccaaaaataaagaaagaaagtggtgcccctatttgtacactggtacacagaaggcctggtgccaatccctggcctgccgccctagcagtgtaccctgcggcaagtcctcaatttctatcagtctcagttcc

SEQ ID NO: 14393 - DNA, 201 bp, Bos taurus
cacacagcctgtcagatacgcatcgtacatcaactttaactagtcaagaagagaacacattgaaaactcaaaacggactaactggttcaggcaaaatggagccgcatggccattgtgcatgtgatttcagacacattcctgcgtcgccaagaacttaaattttctgaactgtatcagactcaaggacaccaccagctgttc

SEQ ID NO: 14394 - DNA, 201 bp, Bos taurus
gtgattaaaagatttgaaaggtgttcttgggctggacacgaatagaggatggaggtgctggcttaaaccttggttattcaatacaatatacttttactaaagtgataagaaaaggggcctcctgctgagggcaggtttctgcaaagagctccttacaacactatctctattgagcctttttttggtacctttttaaggtag

SEQ ID NO: 14395 - DNA, 201 bp, Bos taurus
tgtaatttctgttagtggccattttaatgaagttcagcactacatgctgggttgatgattttcaatggcaaggtaaatgtagacagaattattattattgaggatagtgggccagaaagagcatgctgctgctgctaagtcgtttcagtcgtgtccaactctgtgcgaccccagagatggcagcccaccaggctcccctgt

SEQ ID NO: 14396 - DNA, 201 bp, Bos taurus
aagttgggcctctctgctctttgacaataaggcttttctttgtttctgaatccgactccagctcctcctactgagtcaagcaacaccaggcaggagaaccgtttgctggggcctgactcagaagggtaagtattattttcactgccctaaaaatcctctctgctctacatatttattcatcccacctcccacaacccctgg

SEQ ID NO: 14397 - DNA, 201 bp, Bos taurus
ttttaatgtggaaataaatccaaagaagtttgctaaaatatagtgattcctgtatctctactcaaagatttactcagcaagtatgcattggggtctaaatttctacattttaaaactcagaagtttctgatgcaggtgagcctggggacataccatgggaacactgtgactaatataggttaatcattaaaaaaattaaag

SEQ ID NO: 14398 - DNA, 201 bp, Bos taurus
gaatgaatgtgtcattcttgataaagatgaaaacacttagacaaggagggaggagcccctgttctagactcagttttatatgcaggaacaaagatgaacctcaagatttttacctatgatgtacactccttgtataatcctctccctttgagaagggtgggcctggcctaatcaggcaaaccttttaaaagagcatgtgga

SEQ ID NO: 14399 - DNA, 201 bp, Bos taurus
tcccgtgttctaggcagggttgctcatcctgccccttgcatacatacatctaacctgtaagttcccaccacgttttactttggcagaagaatggcatcctggagaccaggcctcttacagattgctgccctagggatagcaaagctgtctgttacagccagtggcccccaggcacaaacttgattatctcttcaccagtaa

SEQ ID NO: 14400 - DNA, 201 bp, Bos taurus
ctacatatgctacaggaagatcttccaagttttgaaatcttatgaaatactttcaaggtaaatgaacattttgatagtaataaataggcacttgaaaccctggatgaagaattaggggcaggtgtcatggtccaagactaaaattaaaaacctaaaacccaagtccctgagttaaaagctcaaaaccagcatgaaacatta

SEQ ID NO: 14401 - DNA, 201 bp, Bos taurus
tgttgtaagcactgtatagccggctaaaaaggtttcttccccttcagatattaacatcatatctcagatactgatcacccttaaaagttgacataaggagtggtcaggccttttccttataatttatagagtaaaggaccagaaggaagtacctcctagtcttaaagagagaactccacatttatcatgagacattggccc

SEQ ID NO: 14402 - DNA, 201 bp, Bos taurus
ccaaaacatatgagcaagaacattctgtagtggatcccgtagagaaaacaatggaacttaaatctacaaatatttcatttacaaatatggtttcagtagatggtttcacatcctcaagacccagaaaaaactattttgactcaagaagccgtaattactgtgaaaggagtcagtctcggcagttaccttgaagggctgatg

SEQ ID NO: 14403 - DNA, 201 bp, Bos taurus
aaaaataatgaccatgtactctgaggtttctaatgtgtaaagtcaaatgtataagagcagtagcataaataccgggaaggaagaaatgggcatacactgtggtaagttatagtttttatactataaagagtggtgtaatgtcactagacaatatagactgataaaggctcatgctggggatgggggtgggctaaagttcag

SEQ ID NO: 14404 - DNA, 201 bp, Bos taurus
gaaatcttggccatactccttacaagttatgagagcaaaggtctcaggtagaatcaggtgcacagtcagccagactagagcaaaaggaactgttactaaggtagaattattattcctgggcctcaccaccatcacacactgaagagagctatggaaaatatccctggacttgtatttcagcagattaattgatcactatgt

SEQ ID NO: 14405 - DNA, 201 bp, Bos taurus
ctgttgtgagttgggcatcttagtcacaaactagtactacttgcaagggatatgccatcacccctttggcctaggagccagccagacaatgcgcctcttggatgcccaatcctcattgtgattctgctggagcactgcctgttccctcgcctctctccaaaggtcagcccgaggtctgcactccaccgctaatgggtgcac

SEQ ID NO: 14406 - DNA, 201 bp, Bos taurus
ctttcagcaaccaggaagtggaaccaataggaatgaacacttacttggaaaaggaagctttaattaatatatatttctatctctaatatacacacagcagggctagatctttatcttcacaataaaatgtgtgcaaatgctctctgcagagatgagtccccacctcagtcggtatagaaaagcatgataaaggttggaaaa

SEQ ID NO: 14407 - DNA, 201 bp, Bos taurus
agggccaatcatattttaacctcttcttaggctgagtttagaagtgtggaagtgctatttgtcatctcttgatatgacagatatcgaaagctgcagggcacggggcccatacacagacccaaggatgcagggattctcacttccaaccccacctctattcacagtagccaacatgcttttatggttcaacatgttcaagga

SEQ ID NO: 14408 - DNA, 201 bp, Bos taurus
cactctgctttaatactcagaagggtgggtgaaacatgggagaatacaagctgtaagtctggagatgtaacatttgccttttgtgggcactcatctctattgtgtaaccttaaacaaggaactttacctcctaggatctatacccgaaaaggagattaatttcaatagctccaagctttaaattggtatagttttcctact

SEQ ID NO: 14409 - DNA, 201 bp, Bos taurus
ttatatcctcaccaacagtaaattgagagaaagaaaaaccattttaggattgcaatgaggaataaacacagttttacgtaagatggccagaggcaaagggcaagcaagggagccagtggggtgtctagggaaagagcccttggcagagggaactctgtgcagaggcctagagtgggaaccgacttggactcccggagagcg

SEQ ID NO: 14410 - DNA, 201 bp, Bos taurus
catcctcgtaaatgtgtttatgaaagagggaactgcccactatacagacgaaataggagttagtgacgacacaggccttgggaagtggcctcacctccctggggtcaacctcttcatttcaacagattaatgagccattttcctaaatggctaaacttactaaggaggaagggccttcccaggtggctcagtggtaaagaa

SEQ ID NO: 14411 - DNA, 201 bp, Bos taurus
ccggggttttgtggagaaatatgaaacaataataaaagaaaaaaaaaggcgaaggaaaacatcagctttgagcatgctgatgcaaataaagtaaaccttggctttaccccagctgagtctggcccagtcatatactgccttacagggtacagtaagttttgaaacaggtatgggaagtattggtctaggtatttatagcag

SEQ ID NO: 14412 - DNA, 201 bp, Bos taurus
tgattttatccttgtttaaaaaacatattcaggtacttggagaattaccaactcctccataaatttggcttactataaataccaaaactggtacctggtttgcaaaggaggaaagtggaacttgtttttatctttgatctttagcatactggtcctctctgccattattggaggcacgattccagtgttctctgcattggg

SEQ ID NO: 14413 - DNA, 201 bp, Bos taurus
tgataatttacagtaaaggataaagtgagaatctaattttatatttttccaaagcattgaccaattattccagcacaaattttcaactaaatgggaagcccttaaaattgaaatgctaatttattccaattctaaataatgatacatacctgggtctattgctatgtagtctctcctgttctggtgccaataacaataatt

SEQ ID NO: 14414 - DNA, 201 bp, Bos taurus
cccacgcccttgccatttaatcatcaaggcaaaggaaaagagagatctggagagtcaagccctagacataaaaatttctacccacaagctaagcaagtgaggtggcccatcacccttcaaaatggtgtgaagccctcctgggttcaaaacagatgaggactggatggtggaggaagctaccacgaagcgaactgactgcag

SEQ ID NO: 14415 - DNA, 201 bp, Bos taurus
tgattgataaaaagtctcactgctgtgactcctaaggccagttagcaattttaaggagggacaggtgaccaaagatggttccctaccttgcagtgatgagcgggagctccaggccacaccctgccaaccaggaggtcacactgtagacgggaggtgatcccactactgagagcaattctagcagattcccgccagggcgag

SEQ ID NO: 14416 - DNA, 201 bp, Bos taurus
actcctccaggagtcaccccagaatcatttcagctcgtcttatgcgtctcagattctgcctctggcaatctaagaccaccaaggctcctcacattgctgaatggccagttcttctgtacgacccctggacgagcaagtattttaattaatgagtgggtttccctatgggaccactgcacagtatgaagacaaggcctccac

SEQ ID NO: 14417 - DNA, 201 bp, Bos taurus
ctgtcgcccaccctcagaaattcagtctcaggcctcaaatgagaatccggaggaaagacttctgaagtgtgaacccagcagtctcccagagcttctctagcaggaaagaggcccaaatcctcacaaagaggacaaagggggctgtaacgctctctgtccaagtcacctccaccctccaaccctctgcagcgttggtctggg

SEQ ID NO: 14418 - DNA, 201 bp, Bos taurus
gggctgtggcctgagacaaaggtgtttactcctgtggaggtgggatttttattgttagtttcaacatcaaggaggtgtgagggttaggtacaaatcctgacaatcagtaccacctgaggaaggccagaaaggggctccatgggccggggcttctcagacttcaggtgcacagcatggaagcagctgggaatctcatgaaaa

SEQ ID NO: 14419 - DNA, 201 bp, Bos taurus
cgagtggccggatcccgagcgagtgaccaggtgtggccgccgcctgagatgctacagcgccggcactgcaggtggtacagccaagtaacaatctccgctgcaccgggagggcaccggccggataccagccgggtaagacaccggccggataggaccccggccggataggaccgagcttcggaggaagggatgctgagcatg

SEQ ID NO: 14420 - DNA, 201 bp, Bos taurus
agtgtgcttatagaagaagagaaaatacacagacacacacatatgggtgatgtgaagatggaggcagagaatgaagtgatgtggccatgagtcatggaaaagaaggatgcaaaaagccaccagaagccagaagaggcagggaagacttctcccaagagtgtccagaggcaatgcagcaccttaactttggacttcaggcct

SEQ ID NO: 14421 - DNA, 201 bp, Bos taurus
ccccacctcacctgagaccctcctttactgctagctctcccctaagggatcaaatctccagagtttctccatgattctgaggtaggcgattgatgggcctttgggctgggctgctggtgtttgttaagtggaataaagctgatgccttgttttcactcaaacatcaaggacagagcccttgtccttgaagctgagctctgc

SEQ ID NO: 14422 - DNA, 201 bp, Bos taurus
actccctcacttctcaggctgccttgatctcagctgcaagacaaaccactgcccccctacccccggaccacccacttcccatggccatcaggcatcacagccatctttcagaacagaaagactgaatccattctttatccttcttcttcctctagagtcaagaagaaataggtctcccttcaggccaatctcctaaggcca

SEQ ID NO: 14423 - DNA, 201 bp, Bos taurus
ttgctaagaaacattgtcatgggggtagaatgagtaaaataaccttttctaatttagaatttaacatttattaattattaaagtcttaaaaatattgttatttactgaaaaataggatatgctctttttataggtcagtgtttcttcagaggaggaaaatacataggacaggttgaagaacatgtacattttttctcaatt

SEQ ID NO: 14424 - DNA, 201 bp, Bos taurus
gtgcagtggtaaagaatttgcagctaatgccagagatgaaagagacctgggctcgatccctgatttgggaaattcccctgcagtaggagatggccaacttgctccatcattctttcctggaaaattccatggaagagaagcctgggtgggctacagtctagggggttgcagagagttggagagagagaaaagccagtgtcc

SEQ ID NO: 14425 - DNA, 201 bp, Bos taurus
ggagcatgtgctgtgccaagacaaaaggaacgggtacttcagggttcaggataactcagataagataagaaccggagtggccaactctgcagtgtggctccaattaggtctgtttagtatgcacgccggagaaggcaatggcaacccattccagtactcttgcctggaaaatcccttggacggaggggcctggtaggctgc

SEQ ID NO: 14426 - DNA, 201 bp, Bos taurus
ccagaaggacttcctggagcgggcgcgggccgcggtggacacgtactgcagacacaactacggggtcggtgagagtttcactgtgcagcggcgaggtgagcgcgggggtggacggccagtgtggagcagtgtgcgtgtgtgtgtgtgtgtgtgtgtgtgtgtgtgtgtgtgtgagagagagagagagagagagtgagtggg

SEQ ID NO: 14427 - DNA, 201 bp, Bos taurus
caggtgtttccactaaagcttctctctactaaacagaaggcctatgctctaaagtagcttttggctcagggagacttaatttgttttccttcttactacaatgctttaacatgaggcccttgaaagaggagcaaaaaactgcttgcagaattagatctggaaacaactctctcttctatcttttgcaggactcctgagctg

SEQ ID NO: 14428 - DNA, 201 bp, Bos taurus
aggaggtggaagcgatggggtaaatcctggcccagctcaggcttggaggtctccagccaagtgcagagctgactgcatcccacatggcttagaatcagagaggccttccccgaccaccatggtctggattgatcctgcagatgaaagatgaaccatgagtgctggtaattaggggtgccagtggagccaatgaaggagttc

SEQ ID NO: 14429 - DNA, 201 bp, Bos taurus
agagaagaccggggagcacaccatcttctccagagtagagaacagtataacattgacggggtcctgaaaatagctggagtaaagataaaaatgggacccacgaggtaaaaaagattacagctaagtggttcacaggacttctaagaaatggcctcctgaaaccctagtgtctctctcagggaccatcagggaagcctttga

SEQ ID NO: 14430 - DNA, 201 bp, Bos taurus
ttagaatttcagtgattctattcataaaatcccattattctgtagtatcaaatatgcctggttcatgcttagctcttgtcagcaatgacttaagcattcaggttcatcttatatcttcaccatctttaccttatggcttctaagttcatcttgcctaccttaagtgagaagaggggggaaagcttttagatcatgagtggg

SEQ ID NO: 14431 - DNA, 201 bp, Bos taurus
ttcaggcccacaggtgctgtgtttagtcccaccatatgcaggcgccttcgtgtgtggaatctcatggcttaactgactagcgcacactcggttgtgattggattggcctgttgactgtctgtgttttcttaatcctggttcacaccacccacatgcgtgccccttcgcatgatgtgctgatgtgacatgtccacaactcgt

SEQ ID NO: 14432 - DNA, 201 bp, Bos taurus
ggacccaggcccaggactggaagggagaaaacatgggatttctgggattgggcagcaacagccagctccttcttcttagttgacctcaggccttagatcgggtcttgccacaactatagctgaaaatttgactctcgtgcgtggctttatgccaccaccatgctgaccggatttcaggagacatctgatgggcaatgacca

SEQ ID NO: 14433 - DNA, 201 bp, Bos taurus
tggctcagcagaccggccctactacatgtccaagagccttctgaagattcttggcaagaagaacaaggggaccccgggagacaagaagaggaagaagtgaaagatgcagccctgatcctggactgtctcccgcctgtacagcctccccgccttccagatcacgcttttgtagtaaaaagattttattaaaaaattgctatt

SEQ ID NO: 14434 - DNA, 201 bp, Bos taurus
ttcaaacatttattgaacacttactatatacttggcattgttctaggttctgtgaatacagttatgaacaaaacagagcaaaaatccttgccttcatgggatagggaatggggagacagacaatatacataataaataactaaatgtattttttgtgttaagaggtaataaatacagtggaaaaaaaacaaaatagggcaa

SEQ ID NO: 14435 - DNA, 201 bp, Bos taurus
gagaagacagtggctgccctgaagatgggacagaagtagacaaatttgggacatactgagatacatttcaggggtagaattgacaggcccagatgatggattgatgatgaggggggtggaagatggggagactgagacagaagcaggattctgatgggatgggagaaccagaagttcaattttggatttaaatctattggc

SEQ ID NO: 14436 - DNA, 201 bp, Bos taurus
cacagcactgtctaccccaccccagcatcagatgaatccttgttcagggggaaatcccaggacttcctcctcagggccacgtgacctctgctttctgttactggaagtgtgctgcgtcccgcagaagaaaaagctcatccatgggagagaagagaggctcaaggggaccagtcactcacaaggaatgagggcgggacagac

SEQ ID NO: 14437 - DNA, 201 bp, Bos taurus
cttccaagctgtgcactctcgggcgagtcgtgtgacctatcaaagtcttcacccctaaaactggggtaaggcagtacctacttcagagggccataataaggatgaaaggaaataatgtttctaaggtgcccagcacacagcagcctcagctatgatgacatgaaaagatgagcgcccgctgggaaagacagaggcacgctc

SEQ ID NO: 14438 - DNA, 201 bp, Bos taurus
ctctgagtgctgggcttatgtcctgaatccattcatttccctcagggggactagtgtttgaaacataggagccagagaggatcagcaggccctaccttctgcctcctctctccatctcaatctctccctcctcctaccatctcttacctacaacatgggcaggactatgttggacagggttctttttctagaagagactgg

SEQ ID NO: 14439 - DNA, 201 bp, Bos taurus
tggagcaatcaagatccagcagaatcaagagaagccttgcacctctcatttcacggcctaaataactgaagtagggggcctggtccagcgatgacattgatcggaaaaacttaacctgcttggcaggacaaacatctcattaacaatcacctgctcttcccatcttcctgtgaattacccacctccccttcaagccccagg

SEQ ID NO: 14440 - DNA, 201 bp, Bos taurus
aggcctgaatcagaaagttttctgctcttattagtggactgagtaactcagacttcttccaggtgaagataactgaaaaagctggataaaatatttttcaggtatcttaaaaattcagagggccagtaaagaatggctgggccaaagtttgcgaaaggaatctgtggatctgagcccagaacttaaaagttgcttctgtct

SEQ ID NO: 14441 - DNA, 201 bp, Bos taurus
gtctagggttctgctttcaatgaggctgaaggtggtggccttgggtttctgggtttcctcttcattggtgaaaacataagagagggaattaaaagagcaggaagtgaaaaacaagtggcccaagttgtcagtcacccaaaatcaaccaagacctctgaaacaaaagagtctaagagtatgggattgggggaagcctggctc

SEQ ID NO: 14442 - DNA, 201 bp, Bos taurus
ttcatgtgttgtagatggaagggaggcctggcgtgctatagtccatgggcttgcaaagagtcagacataactgagcgaccaaactgagctgaactgaactgaaaaaagaaacaaaaggccccaagtggagtcagctgttctcagaccacttcagcaaaccaagaccaagtacctaagttaaatacaacctctccaagcaat

SEQ ID NO: 14443 - DNA, 201 bp, Bos taurus
tgaagatgttttcttctctgaaatgtataatggtaagggtcttcttgaatgggtacatgaactgcaaaagatgataggcagtggctgcctcctgccattatcacataggatctcaatggcaagtgggaggaatggtataatgaaataagtaatgaagaattacatatttagtcttatttagggaaagagagaaagaaacat

SEQ ID NO: 14444 - DNA, 201 bp, Bos taurus
gagatatccattagagacagaggtcagaagggatctcaaatacgggacaaggtataagctgacccttcccctccaatataggtgacaatttgccaaaagattgaagaatttcaaatgctccacgcttttaaaaaaagatgtaaatgcatcagcagaaaaattaaaaacacaacccctagcaaacactaaggcaaatgcaac

SEQ ID NO: 14445 - DNA, 201 bp, Bos taurus
ccctggccaactcccacagtccaggatatctcctctggtcttaggcttccaatcagtgaccacaaaccagggtctagagagcacttgttaactcatgatattgtagggccccagtaccaggttgactcctatttcaggcttttgatgcaccccagcaccaggtcaccaaaatactccagcagcagttgaccatggatgcca

SEQ ID NO: 14446 - DNA, 201 bp, Bos taurus
caggccactgcagatttttagcatgaggaaagcccttcaggggacatgtgccagcagctctttacaatgaacagggaattagaccaccatcatgcctaaaaattagggtttcacaatggcctttctagcccttcaaatttaaatgtttcaaaacagacccacctacattccaaggctccatggggtcttctgagtgcatgc

SEQ ID NO: 14447 - DNA, 201 bp, Bos taurus
agggtttctcccctgtgtgaattctcagatgctgaatgaggccagtgttcccattgaaagctttcccacattctttacatttatagggtctttctccagtgtggattctctgatgttcaataaggcctgacttttgactgaaggccctcccacactcattgcatttgtagggtttctccccagtgtggcttctctgatggc

SEQ ID NO: 14448 - DNA, 201 bp, Bos taurus
acctgggtggatttctccctcttctgatgagaagccggggccctatttctacaagcacccatttttttctcctcgttggaacccaggtccagcctgagggaagatcagggaggcctcgtgccccttgtacctgtgcgcagcagcgcatccttcctgttctccaggtgtctgtggagccactttatgcagtcgccctccagg

SEQ ID NO: 14449 - DNA, 201 bp, Bos taurus
ttgaagcatttcaattggatctggaaaacccaaggcctttgacctgtccttctgtttccttgccacaaggtggcagaagagggcaatacttatatcacccactgacggtaattatccctcagatctcttaacagtggaaggaaaaaaatctcagaaagagcaaataatagaggtgatgaataggaagtcgatgtgttcagg

SEQ ID NO: 14450 - DNA, 201 bp, Bos taurus
gtcagtcctatgagtgggatgatggaaagcaggggctgttcaagcaaggaatgtacagagagcaagagaacagccatcttgtgtggcctgatcatacacacgggttcactaaagtaaaatccaatatatccagctagcaagtattggcataacttcagtctcaaatggttttctggggcctatgctacttctacctgttta

SEQ ID NO: 14451 - DNA, 201 bp, Bos taurus
caccatggaaccccacagctagcaaggctgatagcactccttcctgataccatatagtttcagttctgccataacacgtcctctgaaaagccgaaatttgtatcctcatccttattttcgtatctgcctccatagcacacacaccttttcttgcgcgcaccagagctcctagtgcaaaactcaagagcaaatcggtttctc

SEQ ID NO: 14452 - DNA, 201 bp, Bos taurus
tcaatgagggtgggaattggccctaagacttctgggaaatagagtcttagcgctctgtcgactgcgagtctctgagctttctgggaattgtagttctcaggtgtaggacaagttctttggccgatctagcttcagagcgccccccaggaagctggaagatggcttggggcggttgagacggtcgctggcccccatccagtg

SEQ ID NO: 14453 - DNA, 201 bp, Bos taurus
cgacttcgcttcattgatccgcatgggcagttacctgggcaagctgggactttcgccatcatccccagcagaagggcgcacagacttgtcggagaggccaatgaaccgccggctaactcagtcccttcatcaagtctaccggattcagcaagtccatcgtacccaccccgcccctcgacacagacctgcgagaaggccgtc

SEQ ID NO: 14454 - DNA, 201 bp, Bos taurus
acccccaaactgctactttccttgactcgttcgacatccttgccctcttcctgtcggtttaatttctgcctcggattccttacaactctgaatagtctcttagtttgatggtgaggctgtagcgctcttctgtttgagatccggggctgggcggagagatacgagtctgaatagctttctcaggtgtcagggcgtatcttc

SEQ ID NO: 14455 - DNA, 201 bp, Bos taurus
ttgcataataaggtctcactgaactcattgaactgtgatgccgttgcttcttgtttttcaccctccacttaagtgtgaggcctggatatgtaaactacacgggtaacttactcagttcagttcagttcagtcgcttagtcatgtcagactctttgtgacctcatgaaccacagcacaccaggcctccctgtccatcaccaa

SEQ ID NO: 14456 - DNA, 201 bp, Bos taurus
tacccagaagacaggtggcccagactccctcggatggtttggtcttgtggcaaaatcatgcagcaggttgtctcgtaggtcagtcccagaaaagtaaactatggcccgtacggggatcgaacccgcgaccttggcgttattagcaccacgctctaaccaactgagctaaccggccacttgccgcctcacccgtattccaag

SEQ ID NO: 14457 - DNA, 201 bp, Bos taurus
aaaaaaaaaaaaaaaggtgaatggaaacaggcaaggcatctcaagaggtcttggaatagaaatattgtcaatttctacatgccactggttaaagcaaatcacgtggccaaatgcaaagttaagaggtggggaaatatactttgccatgatgagaccatatcaaagatgaggattctgggaggattgaaggactggggttag

SEQ ID NO: 14458 - DNA, 201 bp, Bos taurus
gctttaccatgtctggacgcggcaagggcgggaagggccttggaaaaggtggcgcaaagcgtcaccgcaaggttcttcgcgataacatccagggtattaccaagcccgccatccgtcgtctggcccggcgtggaggagttaagcgtatttctggcctcatctatgaggagacccgcggggtgttgaaggtgttcctggaaa

SEQ ID NO: 14459 - DNA, 201 bp, Bos taurus
ttaaatcagaattacatagggtgttggtatgactgtgtgtgtgtgtgttgtaaatgtgttttaaatatagattccagagtcttggcccagataatcctgaattctcctgagaagactcctgttaagaagtgcatccaggattccagcttacagctatctgacttcaaagcatttgctctcaacacacgtgtttttcaggcc

SEQ ID NO: 14460 - DNA, 201 bp, Bos taurus
cccagaagggcagagaaaaattttatgtctgaattttccttgtcttgccttaaactgtgaatttctatttcgttacttggcattgtactaagatgtatgtgtgtgtgtgctatggtagggtatggccagctttcggaagatatctaaaacaaggttttctgaacttgaaaggagcttatcacttcattggaaattacaaaa

SEQ ID NO: 14461 - DNA, 201 bp, Bos taurus
cccgaggcctctcgggtccctcctggatggtaagacagccatcagacccaggggcactaggggtgctcgtttccaaccctctgctgttctccttgggcctctgaggtccacagaacccacaaacccaggcacactgaacccctttcccacccactagcccagcaggaggaccagggatatggagaaggatgggaaaagacc

SEQ ID NO: 14462 - DNA, 201 bp, Bos taurus
tcatttttgcatgagaacacttaaagctgtactctggcctctgctcctgaccttgctacaaagtgctatgggtcaggatgaatgtccacacctgctccccttccacaaactcaagccctgggggcaccttctctttcccaccccaaatgtatgtgtttctacaacaagacactcagaagattgacctggtaggccacatgt

SEQ ID NO: 14463 - DNA, 201 bp, Bos taurus
aaaggtttacatttcaatcacagacaggctttcacccaaagaggtgaatttgtgcaatagggattttagtcttcagtgccaagctgagggggccagaatattttgaagtgaggttagtaagaagagacagcccagttctgccacaccagggactgtctcatctgcccagcattgagactggcccaaaggagtaccttggtt

SEQ ID NO: 14464 - DNA, 201 bp, Bos taurus
gcgatttgtggggttgcaaagagtcggacatgactgagcgactgaactgaactgagtgatgggaaactggttgaagagaaagaaaagcaatgagctgatgtaactggccacctgtagaagcaggcaggagtcaaaggcactgtctctgaaaggtgtaaccctattcagtattgttcaggcaattgataccttgatgtagtt

SEQ ID NO: 14465 - DNA, 201 bp, Bos taurus
gactccctaagttctttattctttcaaggtcacatcagcttctgaacgcaggattggaaaagaatttccagacacagagtatttcagaagggagtgagttgataaagaacgaagaacagagattaagtgggcactgggagcacagcgagctgacaactcctgacagaccaaggagagttggcagttttcatgggttaatag

SEQ ID NO: 14466 - DNA, 201 bp, Bos taurus
gaacatcgttaagttagttgcagctttgtggttgggggaccagagggggggatattcctccttttgactgtatcctccattttaccacttgaattttggtcaggtgcatacattatctgttaaagtttttaaaaaagtcaacatcactgtaaatgttagcttagggccaagaatctctgggtttaaaatgaaagaaaatta

SEQ ID NO: 14467 - DNA, 201 bp, Bos taurus
gaattagagaggggagggttgggtggaaaagatttcaggttgccgctaagggctggacattgtgaaccctggacaaagtgaccggtatctttgtttctcccgggcccggagctcttgtaatgggctgagtgtgggccttgatgtctgcgattcgctctttaaacctttgctgaaggaatttctcttctttggagtagcttt

SEQ ID NO: 14468 - DNA, 201 bp, Bos taurus
tccatcttggatggccccacatggcatggcttagtttcatcatattggctagttttctgtgattatggtttcagtgtgtctgccctctgatgccctcttgcaacacctaccgtcttactggccctgcctcctgaccttgaacatggagtagctgaccctgttctatagtctgccccattgacaatgcatcctactcaattc

SEQ ID NO: 14469 - DNA, 201 bp, Bos taurus
atgaagcaagctttctgttcactcacttgatacaggaccggaggtataatgacagtctgctttcgtccggtctgccagagaattttctgagcctagaatagagattacacagaagctgcatcttgctcaactttgaagcttccagaatgaatgtcatataggcagtagagagttaatgcacatactgtgatttgaattagt

SEQ ID NO: 14470 - DNA, 201 bp, Bos taurus
tctaggaaagcatctgttctggacctttcttatagcttctggtaatttcttgtttcgcagcagaatgattcccatcttcctgactgtgcgtctccatgtacagatctctccaggccaaaattttaatattaacaagtgctttagtgcttatttttttaaaaagaaattttccctcggttaacatttggctggtgtttgctt

SEQ ID NO: 14471 - DNA, 201 bp, Bos taurus
agtccagttctctcacagatatttttaatagtaatccaaagaataaatatttaaaactcaatgctgggcaatacttgataggaaagtgtattggtattgtggatattggtatgttgaaagacataaatttaaacattcaaggaattcagcaaagcccaagtaggataaatacaaagaaaacagtacctaggcaatctcagt

SEQ ID NO: 14472 - DNA, 201 bp, Bos taurus
tttcagagaagcatgcgtggagaaaaactaatttcctaaccaatgctgtatacatattttcaagtcctacctaattacagagacttcctttccaaagtgacggatttcattgaaatttgtattgcctgctccttgtcatatatcacacagcttttatcactcttcaaaaaaaaaaaaaaaaaggagtatatgagttttctg

SEQ ID NO: 14473 - DNA, 201 bp, Bos taurus
tgaggcgcaaggcccttgagggaagaattttcacacctaagttgttactggcaatgaatgcctaatacttcatcaccaccatcttttctattgctctctatacctctggccagatacagtgacaacaaacttgacccaagtctctgctagcttatacagtcataagaggcccctttcctcaaataaaacagttttaagtta

SEQ ID NO: 14474 - DNA, 201 bp, Bos taurus
tctaaattccatatatatgcgttagtatactgtatttatgtttttccttctggcttacttcactctgtataataggctcatactttaatttggccctactgtatatgttttgcctccaatgtccacaactgctaaatctagagcatttccttaatggaacattcatggcccttttatatattccatgggctaagagtcctc

SEQ ID NO: 14475 - DNA, 201 bp, Bos taurus
atacgtcaacgataccactctagtagcagaaagtgaaggggaactaaagagcctctgatggggatgaaaaaggagagtgaaaaagctggcctaaaactcaataccaaaaaagtaatatcatggtatctgatcctgtcatttacatggcaactagaagggaaaaaggtagaagcagtgacagatttcctcttcctggcctct

SEQ ID NO: 14476 - DNA, 201 bp, Bos taurus
agtctcgaactttgttcttctttcccaagatcactttcactctttggtattttgtgatttaatacagcagaatatgttggagatatgtctctgggacttggaaacggcgaacctgaaagaacaacacttggagagtcactgcaaggactgacaagtttatttctgcagtcaagcctttttataggagcaaggaacaaagag

SEQ ID NO: 14477 - DNA, 201 bp, Bos taurus
gcctgaattgtgttcttgtacagtgagatagttcaaaactcattcctcattacagaaatcacctctctcattcatgaaaatagcaaggaagctttcatgaagctgctcacctggccaaatatcatctccatgccttccagaagtcgtttgttttcttcctcaatctctatggccctcgataggatagcatctggggctcct

SEQ ID NO: 14478 - DNA, 201 bp, Bos taurus
cagtcatcttccctcccatgttctgtagggaacaagaagcaggtgatggcagcattttgatactgtgtgacaggaaaaggttcattttacaaagtcacataataataccaggagctttgtatctgcctctctcttttactctttcttataaagccaaacccaattaaacctgaaaaatctttgcaattcactttcctttat

SEQ ID NO: 14479 - DNA, 201 bp, Bos taurus
caaataagacatggcattgactattctccattgattcccgggcaagagactgtgctacagtcgagtctccttcctcaggcccaaagcatggagttgagaccaaattgtagcctagttttcccttgtcctgtggacaaggcatgtgttaacacttctatgggccaataatcagaaatttagagtttttctgtggagttcgga

SEQ ID NO: 14480 - DNA, 201 bp, Bos taurus
acccatacaagagcaatcattcttctttgagaatccatggttagaaacgacaaccctcaatgataaaaagaaatcacatacctccacccttccaatgaggctgtcaatatatataacaagtgttacaaagtcatgtcaaaacaccattagaaaacaacaggttaggaatataattggaggcatacacagattactaaatca

SEQ ID NO: 14481 - DNA, 201 bp, Bos taurus
agaactccagggactgtatagtctatggggtcgcaaagagttggacacgactgagctcctttcactttcactacccacactaccagatacagaagaaacacgagcagaagcaggggccataagtgcagcagaaggaggcgagtccacgttcaagggagttggcatggtcttgttccccatttctgttagtctcttaaggaa

SEQ ID NO: 14482 - DNA, 201 bp, Bos taurus
ccaatgaagaagcaattagcaggaaataacactagaatcaattattcactcaagttgtgattaagagccatgtgtataacccttaaaatttaataaagccaacactaagcaggaatccatctttttcatcaccaggaatatagataatccaatcataggaactaccttcgattagtatcaacaccgtttatgtactctgaa

SEQ ID NO: 14483 - DNA, 201 bp, Bos taurus
accaatgtctgataatctaaaagcccacgtctaaaacttgtgagcagtagttgaagcttccatcaatgcaaatctgagataacaaacacttcacggcagcgagtggttgcttcatctcaatgaggttaagatggtaggcaatggaagctctgattggttttgagaaacggacacagtgtttcttttttcaaattggggtat

SEQ ID NO: 14484 - DNA, 201 bp, Bos taurus
ctcctaaactatgagttatttggcctcccagtttcctcccaactcacagaatctgtttagctctgcttctagtagataatttctcacggctatctaaaaaagacagatgttcgatggcaggcctggaaggtacattggagatattattaagtggaataaatgctcctatttttgtttgtttggaatataaaagaatattga

SEQ ID NO: 14485 - DNA, 201 bp, Bos taurus
taatagtccaaggggtaccaacctgcctttggacacttaaaaggactttccttctttggggtttgccaaaggctgacttcagtattaaaagaaggtctcctattatctggtgttacaaccttggaacagccagcagactgaacagtcacacactaggaagcaaaatgctgaacagaaacacagccaattctgtcagccatc

SEQ ID NO: 14486 - DNA, 201 bp, Bos taurus
attcttatcatagtatcctgaacattgagggtgctcgataaacatttcttgactgaagaaatatttcactttgtaatacaaaatatggattgcacatagtataacatgaacagtgataggtttcttcttttcagcctaactgaaataatcaaagaaatccaaagacatactgttttactaaaatgttgatctctctctatt

SEQ ID NO: 14487 - DNA, 201 bp, Bos taurus
tcactcctcttaggatggttgttatcagaaaagtcaaaagattggcaagggaatactaagctagatggataggcagaaatgttgggaagaatggaatcattgatagaaaaagggcatgaggaaactctcttggaggataaaaatgcccaagactttgacctgggtgatagttacatgggtacatacctatgtaaaactttg

SEQ ID NO: 14488 - DNA, 201 bp, Bos taurus
taggactgggtgctttcacggctgtggcctgggttcagtgcctgatccgggaaactaagattccaaaagctggacaaactatcccaactagtgtggccaaaaaagaaagaaaatataaatttactatgcccactatttatttgaatgaatatagaaattaacaaaaatttgcaaaagaggcccatctgagtgaaagaccca

SEQ ID NO: 14489 - DNA, 201 bp, Bos taurus
ttttactactgcagaaaagtgactcttttggttaaccactaatttgaaagcccttttaatatggatatgtttactggcttatttactggcccactcggtagctcttaaagcagcaggtaccgggcaggaggctaatttcggactctgggtgtcgggaggtatgtatgtcagatgaattggctggactgcacgttctctggg

SEQ ID NO: 14490 - DNA, 201 bp, Bos taurus
actgtatttaggacagggcctggcaaagagtagatgcttaatattcaaagactggagtaagaagaaacaacagcaaagatattttaaacaaactcacagacaagtaaaacaggcctagtggttaccaatggggagaaggaatgggggaggggcagtaaagggtatgagattaagagatacaaacaactctgtgtaaaatag

SEQ ID NO: 14491 - DNA, 201 bp, Bos taurus
gtacggaagatgttaatacctggcctgcggagaccatgagcaagtataggaggctgttgtgactgtcagatgggagatgatgcactgaactatgacagtcgacagtggtaatgagaggccaaatcaaaagacattttgatgataaaatgatcaggattgagtctggttaaatttcttcgaggccgtgtaggcagcataaag

SEQ ID NO: 14492 - DNA, 201 bp, Bos taurus
gcaggaatggacgtggggagggagtccagaacacactgagactagtacccagcagagacatagtgaccacagaggcagaacggggagtgttttctcgtccataccccagatacagagagaagtccctccccaggcccttggttgagcatgtgtgcaagtgaccagctagaccagcagggagggcgcagccaggagggaagt

SEQ ID NO: 14493 - DNA, 201 bp, Bos taurus
ggcatgttgccacatgtgtccttgtcacagccatatgtgtgcctgtggctgtattgacagaggagcagattttgccggccacgctggctgggtgacgagatgctcactccctctctcgctgtcccaggatgcttccagcctgcagggcacaggccaggggctgggcgttccttaaggagacagtgaggggggctgagtgaa

SEQ ID NO: 14494 - DNA, 201 bp, Bos taurus
agactccagggtatgtagtgttttttatgtaggcatagtttttcaaaactattttgaagtgtattcgagtatctaaagtaatttaccagacttctgtatacagcattttattctttgaagagtctcataaataatataatttactgtgtcagtatgcaagcattcacataagtctttttacctttcctgaaatgaggtaga

SEQ ID NO: 14495 - DNA, 201 bp, Bos taurus
ccagaggtgcagccttgctaaggtagcaatgggcagttttggaattttaagatgccgttggtttgctgattttgtcttgccctctgttcaaccatttagctgttcatgcagtgatcttatgctaattaccaggagaattgttaaggtgtacgggcatggactttgaggagcttatatagtatgttttggcaactcaaggat

SEQ ID NO: 14496 - DNA, 201 bp, Bos taurus
gacacagcttagtgacgacccagggactagactgcactaggcggcctctgccctcctcctgtgagcttggacattaaggtcaagtaggtgactgcgtgtgggacaccagcatgtcgaaagggccccttgcccggtatctcacgtggcctgccggttcagaacttgtggtatctgggtaggttctggcccccagggcagatg

SEQ ID NO: 14497 - DNA, 201 bp, Bos taurus
ttagataagggagtcaaggaaagcatcttggtttttgagctaagacctagagaatgataataatcaggctttaaaagagctggggtaccttcttctaggtggaaagggcagcaggtacaaaggccctgaggcctgagaaggctcagtgtatgatctgaaggaggctggtgggactggagcccggtgagctggctgccctgg

SEQ ID NO: 14498 - DNA, 201 bp, Bos taurus
ggctcctcctgagcgtgatgtccagaggcttagcagaactctgttggcttgcaggaatgtctccctggaggaatgaaccccaggcctgaaaatttatgcatacagagctgttggtggttcctgcctctgatccatagccatcaagggagagggcgccctgcttactggttccacggaaactcattgcccctacatcaaggc

SEQ ID NO: 14499 - DNA, 201 bp, Bos taurus
tacatccatcacaccctagtaggggctcaaagaatatttttccaaatgaaggagagaaggagaaaggaaaaggaaaggccctagatttcaccttacacttcgtaagcatttaataaacgtttatgaatgaataccaaggtttgagagaggccctccaaactttcccctgaggcagtcgagtgatttgattggcaggactca

SEQ ID NO: 14500 - DNA, 201 bp, Bos taurus
ctgtctgagggccttcagcccggagtggaggggagcctgggggcagaggggtgaaggcagcctcaatgtgttaagctggaagccaggccggctcatcctagggagcaggaagtaccctgcttcctttgaggagctgaattaactctttcaggctcacagaattggttcagtaatgacaacccccggtggccttaggatttc

SEQ ID NO: 14501 - DNA, 201 bp, Bos taurus
cctcctttaacacgttctctgtttgctcagcaacggggtagaaatgcaggaaatatctgtgtgtggcaagtttaggaccaaagtgtgagcgttagcaccatttcctcctggcctaacacttctctgtctcaagtcatcctgcgtctattacactgtctgtgtgaccttggcagatgatttactcctcctggcctcagactg

SEQ ID NO: 14502 - DNA, 201 bp, Bos taurus
cctgccagcaagggcgggatgctccctgctcacaacagatcagccccacgcttcttaggtttagccaagataagcataagaatatgcagacctatgatttcgtggccaacccatccatttctgggacagtgatgctctcaaaatcaatgtttgtttgcctcccagaataaaacgctttccgtgaagacaacataaagcagc

SEQ ID NO: 14503 - DNA, 201 bp, Bos taurus
tggctacccaccctcctggctcacgtctccccactcctctctgtgtctgtgtcttggacagccttgagaaggagccctccggtggtcccttcccttgctccgaaagttcaggcctctcctctggtccctgctgcctcttgtttgtgtctctctgcacgcatcccatcgcactgtaacagaacacggctctcgtcctctcta

SEQ ID NO: 14504 - DNA, 201 bp, Bos taurus
ttaggggccaaattaaaaaaaacagcacgcttattcaaaatcagatgaatgtcagtgggatgtttgtcaaacaaacttgtcagtatttgtcacagtttgatgaagtatcgaccaggggccacacttgagcctggaacggagttatgtatagctgcccagttatgattttaactaatgcagggccaggggtctgagggtata

SEQ ID NO: 14505 - DNA, 201 bp, Bos taurus
tctgagaagaccacggaagctgtggatgggacgacatccaccaggcttcctcacgggacccctggaatcacactcagatctctggcctctgcggtccgcccggcagaatcctgatcatgggcacacgtcactgtggtcacaagggcagagaaggaggccctctctttcttctcctgcacactccctggactgagggatgct

SEQ ID NO: 14506 - DNA, 201 bp, Bos taurus
ccaggccatctccttcttggctcagcaggtaccgtgacacgtgaccacagccttagattcacagaggaaaacgtcccgctgcttttttctgagtccacaacccacgtgctctgtagcatggcctggttccaacttcactccatgcacactcctctcctccctccactccctgcaaattggaaatagtgatacacagccacc

SEQ ID NO: 14507 - DNA, 201 bp, Bos taurus
aaaatattttaatgtagtcaaatttattggttttattcattcatggtttatgcttctggtgttatggttatgaaatctttttccaccctgagatcacaagaacattcttttattttcttccaaaactttttaaagtcatgctttctcatatgtaggtctttaatccatttaactatggtttgatgtagggatttgaattat

SEQ ID NO: 14508 - DNA, 201 bp, Bos taurus
ggggccccaggaggggctgagcctggagagaaattgatcgagaggcgtggccggcggtttctcacagcagccactctgtgtgtctgcaggtgtaacggggcgggcagaggtgactgctggctggcaaagtgagctatttgaacagaaaatgcccaacctaaaaccaggttatctccagttcctggtgtcacttaatcgggt

SEQ ID NO: 14509 - DNA, 201 bp, Bos taurus
gttgaaggtctcagtaacttagcacctccataagctggaactctctactcattggtagcccttggcaggaggttgcaacttaggtttggccaactttgaacgttgagtgagtgatgaaaagattgggggtcagaaaggtggcagaggcagcatctgatgtggctgatggaaccagtggtggggctactctatgttgcctgg

SEQ ID NO: 14510 - DNA, 201 bp, Bos taurus
ataagtccagaaactgaaggagaaatggcacgtggtggccttgacaccgagactttgggaactgaaggagagggcgagcctcggggctcccgccatcccttcccgagctgaaccgagagggccggtgagcaaccgactagcactaagtgtgtgtaaaatcagggggaaataaccgtcccggcttcctgcaccaagagcttt

SEQ ID NO: 14511 - DNA, 201 bp, Bos taurus
ctccaaaccacaccacgtgaggtcgcagcaggcccccacatcctgcctcttcacacctgtaagagtgtcatccttaacccactcccaagacctactcttgagaaggcctgcctaggtggatcaggggaaatcataaagtctctattgtgtccagatgcactggggtgatttgttggcgaatgtgtctcagccaaccttgag

SEQ ID NO: 14512 - DNA, 201 bp, Bos taurus
gttacctgatagaggtttacaggaacatcgagacctgacctgcatggacaactgcaggaacaaaggatcctacaccaagaagttttccacaacgagccgcatccctccctcaccttccctctaaaagcgctttttaaggtatgagccacctgtctctttgcatggccctgcaataaacctttctctgcttcaaacactacg

SEQ ID NO: 14513 - DNA, 201 bp, Bos taurus
cttaatttcaaatacattttaacaacccagcggttttactcccctctcccacatttgctgttttttgcatcatattttacaacttttgtgtccccttaactacttattgcaaatatagatgattttactcctaaccctaacacttcttttaatcttcctgctagttttatatgtggttgattcactgactttactataagt

SEQ ID NO: 14514 - DNA, 201 bp, Bos taurus
cacgtggcctttttatatgtctcaaatggaggcagtagtcactataatcgtgattaacaatacggctatgacgtctcattcctaagagaagagcagactgtcaggccaaggctatttgggaaacactcagctgaactgagagtacccaggatgggaaaagccgcagttgtgagcgttaacgcagcgccatccagtaacgga

SEQ ID NO: 14515 - DNA, 201 bp, Bos taurus
taaatttgcatcgataggaaacacagtttcgaagtatgaatgctaatgacaatgcagaggctgttttttctatgcataataggacattagttcttccctacgcgtctaaaacgtacgctatcctgcctttatctgccatccctgctttttcctttggagcacaaatgcaagaaagggtcttttcactcatccagaggtcac

SEQ ID NO: 14516 - DNA, 201 bp, Bos taurus
gggggctctttattcaggtttagcgtgtagaggcctaaggggagcctcagagagctattcccttgtccagtggttccttttcctaaacagtctaccctgagtttgagcttctaactatgctggccaataatggtatcaactagctgcacatggctatttacacttgaataaatggaatgagattaattttggtgcctcggt

SEQ ID NO: 14517 - DNA, 201 bp, Bos taurus
tgtacaaacgagctatgaacatcttactgtgccagaaaagcaaggatgccatcagactaccggagccaattccaaaagcccaggagctaacctgaagggcgtcctaccggccaaacacgacacagtttgagcctcaaaaggaatgatgacagcagtgaactaaaacacgcttggtatgttagaacccatgtgatcacaatg

SEQ ID NO: 14518 - DNA, 201 bp, Bos taurus
tatttttctaaggtcacacagctagcccaaggctctcaacttcgaattgcaccctttccatcgtatatctctttgtacctccaggacttaggacagtacccagcattttgttggtggacagaaaatacttttgtccagtatttaaataagataagtttatttctagttcacatgaattcacacattttatccttaactcga

SEQ ID NO: 14519 - DNA, 201 bp, Bos taurus
tactattggttgcccacccccaaggtggcttggtcttttgctctaggaagctccattcacacaaactggagtgctacctttggggcccagcagtgcaagtctctgcctccgtatgcccatctgcaaattgaagagagagccgagtgttattcattgatatgctcacctcctggccaatgtgggaacctaggagacgtttgt

SEQ ID NO: 14520 - DNA, 201 bp, Bos taurus
ggttgagatgaagttggcctgactggcatttcccacttagagaggaaaagcaaaatggagatcccactgaaattagaagacattctaaagagaaaaatcaagggaaagaagacaaagaaaattcctttttacttattgtacaacaatttttaaatgttcctaatataagtttgtgtgagagcatcctgctatttcttcttc

SEQ ID NO: 14521 - DNA, 201 bp, Bos taurus
acatgggcctcaggattatttttaagttccccagaagattctgaaatgcaacaaaatttgagaatcaaatgagtcaatcaaatgtgctttagcacggtgcctggcccactgtaggtacttgataaatacttgggaatcagtgctcgattctttagttttctcagagattccctccagagcctgcaggcgagcacaaatgtt

SEQ ID NO: 14522 - DNA, 201 bp, Bos taurus
tggccaaaaaataaacaaataaataaaattattctttaaaaaagaactttcgctcttcatcgaaaagaagaacaatagatctcttagacgtgccaataactggccagcttcatgatcgatgcattgaggactctgatgtttttgtctcacaccctgcagcttgggatgaggaagtaatttcttagtgtgattcttcatata

SEQ ID NO: 14523 - DNA, 201 bp, Bos taurus
ttcccaggaaaaccagaagctgaccaagacattatcaaacagttatgatttttcaaataaatattatggtgggatactctgtagcaacactggcctttagagagcctttaattttgttgaataagtgaaagctcagagatgatatttcttcatgattatgtatgctacagaaaagatcaattaaatggccaagcgccccct

SEQ ID NO: 14524 - DNA, 201 bp, Bos taurus
cctcttcactgtctccactgtcttccacatccgaatggatgctaagtgctttgggggactcgtgtgacacgaacaagccgccggcatctggctgcaggacgaggcccagtttgatagtgtgtgcgtgggactttttgtgcttgtacaggttgcttttagtcttaaatgaaaacccgcaggtcacgcaggggtaggggcgct

SEQ ID NO: 14525 - DNA, 201 bp, Bos taurus
aaggggtacatgaaaagtaaaatgtaccatacataacatgtacaaaggtccatatagtcaaagctgtggtttttccagcagtcatgtacggatgtgaaagttggaccgaaagaataaagatgactgaaaactgaagaactgatgttttcaaactgtggtgctagagaagactattgttgctgctgctgctaagtcacttca

SEQ ID NO: 14526 - DNA, 201 bp, Bos taurus
catgtcccatgaaaacaagcagggctctgctactaacaatttccacttgagtacaagcagcttcctaacactgagttttctttaagtcccttaactccaaatttataatgaaaggcttgtccaatatataataatattaggataacaaaatggtgggtgcaaaagatttttttttccacaagctgggttgctttactattt

SEQ ID NO: 14527 - DNA, 201 bp, Bos taurus
agcttctctcaggccagcactgtaaaaaatgaaaggcactttagatgttactcaatgcaatgcttatactttggagacaaggaaatggaggctcagataggataaaatgttgtggccaagagcctgcagctggttggaagcatgccaagagccgatttcagattctctgattcccaggctctggggttctctgtccccatc

SEQ ID NO: 14528 - DNA, 201 bp, Bos taurus
aatgactacagttttcaatacaaaatgttttcggtattaaaaaaacagtttggcagaggacccatgggacagaggacccatcaaaggcccctttgggagtttgtcttcagcccatccttccatcacttaccaccagctcagcaacccaaacctccagaccctccatccatatgggactatttgcaatttctgatactgcag

SEQ ID NO: 14529 - DNA, 201 bp, Bos taurus
atatctgttctggagatgctgataatgatacccagcctgtaaatctcttaatgggtcagtccctccatgccccgtgatcagttgttggtgcatttggcctaaagaactgtgatgctctgaggttatttatgggtgactccagtcttcaggaatttcggttgatccagtaactggcctaagaattcgtttttgatgatttag

SEQ ID NO: 14530 - DNA, 201 bp, Bos taurus
ctcatttctaatgaaaccacagagtcaggccttaactaaaaatattctcagtctcaacgtccataaccatgttgggcacaaagcctgagggatgtgagaacggccttaatagccaaaggcaggctggttcaaaaccacacaaccacacattgcacacacaggtcaaagcccacaggtccggacaggctctcccagaggctg

SEQ ID NO: 14531 - DNA, 201 bp, Bos taurus
caagtttacagctaacatggacctcagatggagggaatagatgagagaaggacttccgtccgtgggcaaagtcaaaggatactcggaacagtagggtttacgaacagggttggttgttttggggataaaacttcccatagtccatattcgtctctgtgttatttgggcttcttttaacaaaaacttgacaagaaaaaagtg

SEQ ID NO: 14532 - DNA, 201 bp, Bos taurus
tagttcagctatgattcagatgtatataaatgtgatattaaagttgagattgaattgcaataataacaacttccatgagtgtaataccgatccaatgttaccgatgcattaggtagattgaagtcagcaagattacatctgggcttttatttgaaataaagcagttaatttacctagcagagaaataccattatcacaatt

SEQ ID NO: 14533 - DNA, 201 bp, Bos taurus
atagatgcctttggtgtgaagacactgatttttcttagaggaaaatgcatttatttaaagatgggaggcttttcattttattcccatctttcccttattgtttataaagtgctagccttgaagagccaagctttcctgtagaaaaatctaccgtatttatgaagtgatccttgagtaccaccagtttttcttcttaaattc

SEQ ID NO: 14534 - DNA, 201 bp, Bos taurus
agacacgacttacagactgaacaacgtgatagtaacaacaagcaagacttgtatttcctgagtctttttccttccgtctttccagtaatgtatttttaagtgtggcctgatggcttgagaatggaaaaggccgcgattttacagtagggagcatgtgcgtggggtacaccggcctggatgcagatgggtggagagggtgtc

SEQ ID NO: 14535 - DNA, 201 bp, Bos taurus
ccaagttgtatcagctgtgttctggctgggaggcaaaggttggtagcatgtgtacatatacgcattcatggatttagatataacttcataccttggggatagcatacattgatgcaggaagataagatagatgggcatgtgcaaataggaagatctttcccttctttcaaatatgctttattagatgttacaacttgtgtg

SEQ ID NO: 14536 - DNA, 201 bp, Bos taurus
gatattttacttctcaatatattaagcacaaccttcattctcattctttctcttagatcccacccatttctataattcaaaataaaatccaccatttccaatatacaaactgaaataatccacgctcatctcaacagactccacttgaagagaaatggaaacatcctctgagaggcctgcttctcagacaatagtctcctt

SEQ ID NO: 14537 - DNA, 201 bp, Bos taurus
cagctgcttccacggccaaacagtactatttgaaacagtcaagataccttccgggtaagtagagaccacaaagtgtttcctggtggcgaaagcatgctagtaggtcatgctccagggcctctgagtctttgacgaaagggcgcccgtgacccgccgctgcagccctccgctggcctgcctgtcaccaggtactgttctgga

SEQ ID NO: 14538 - DNA, 201 bp, Bos taurus
gggatccagccagttcagactcaccaataccaacccctggggcagcactacggaatcctaatcttaaaaccatgaatatcaatcaggccttgaagagatggaacatgtaaaagatctgtgcccaatgaacctttaagaaaatccacctcacttaactcaaagtcatactgacagtaagacctgcatttggtttatttatat

SEQ ID NO: 14539 - DNA, 201 bp, Bos taurus
gaacacagtagacgttctggggcatgtagacggccctgaagagtctttcaaaagtattaaagtccttatggatgaccatgacatatgccagagggaactcggcttcttctttcgacaaaggccttgtgatatagtgattctggatcaggtagtccttgcacgggacacttcccatgggggacatcaatgtcttttcccaca

SEQ ID NO: 14540 - DNA, 201 bp, Bos taurus
aaagatcttttagggtgtttaggacagacagaagggaactttgagggaggcaaggaaaagcaccatctgaacttggagaaggatgtttatgctgtttatcgaaggacttttccctttgaaactgacatggagaagggaagagctgatatggtcaaaggatgcctgataattaagaaccaggctcccgcactctatcctaaa

SEQ ID NO: 14541 - DNA, 201 bp, Bos taurus
tagtgactaacctgggtggactgtaagctgttggtgattttgacagcagaagactacctggttggcatgaaagcaatactttggcaggaaaaacatggggtgcaagaggatggtcacaccccaggtctcaggtgagtccctggagagggctgccatgtgagggtccctggttcctcacagaaaggacttcaagagccagcc

SEQ ID NO: 14542 - DNA, 201 bp, Bos taurus
agggaagcccaaggcccctattacccagctgtaactttgacctaatttgcaccagccttggtgcaaagcagagatacaaagcagaggctacacaagacaacgaaggaagaggccaggaatgcatctcttcttgcttcacgagtcttgaattcacctgggtgtaaaggtaaataggtggataaagttctatatggcggtttt

SEQ ID NO: 14543 - DNA, 201 bp, Bos taurus
ggatgtaaagaaaacattctccctctcttgttctgaaatgtacccaagatttgttgatgtcctctgcagaaacgaagagtgacccatatccggaggcctccggtaagtcaagtgacaccttctgagggagacccagggaaagaaagcctttgtcttttttctccctgtccttttcttgatgcctcactggtggttgtccag

SEQ ID NO: 14544 - DNA, 201 bp, Bos taurus
ttttgcagtgtttgaggcaagttatcatcagagtaggttaccttttgctgaatgtaaattactggcaaccggatgatacacatttcagtctgcagaaagtatgaaagtagattcggaaaattgatagcagaccttttactgtattacaaattcgtgtttccagtcgcagtttcattatctacctaaggacaaaagttaagt

SEQ ID NO: 14545 - DNA, 201 bp, Bos taurus
cctgaggctctacctgcattatctcagccagtggtttttcctccaggccatttcaactcctgttacaaagtgagtgcttccccgaaagtcaaaggcatgcgttttcgtcttgagaggccaatgagagtacaaaactcctctctcacccacttaccttaagacctacaatgcaggtataagttgaaaagacaaaaatgtctt

SEQ ID NO: 14546 - DNA, 201 bp, Bos taurus
tattacatttttatttctttgtgagcagactgaatttggctttttaaaatctaatattaattttactctttgataaaagaatttataatgttttgcactagtcccagaatttccatttactaactgattctctcatcttgttttataaactgttggatactttatcttcttttgaattttcttgatgccgtgttttttttt

SEQ ID NO: 14547 - DNA, 201 bp, Bos taurus
ttaccaactgagcttttaggaaagccctttctacgctaaaagtgttattaatcatgagatcatatactcccctcattgttccagggttttattttttagacttaacactttaattcatggagaatttatgttacagagggaagattgaacctcattttcttttcacttaaccaatcatccccagatcattaattccttacc

SEQ ID NO: 14548 - DNA, 201 bp, Bos taurus
caaagtaaagtatgaacatttttcataaatgggtattctaagaacatacatctcttttgtatgtagacagatatatctattgtaacctcttagaagcatggtaattcttttttgagtatgtcaaggtatgaccaaagcaatgacagctaaaataatctcaagtgcttttcagtatttacactgtttttgctgctgtttatt

SEQ ID NO: 14549 - DNA, 201 bp, Bos taurus
acaatgtttttctctacggattttaattttttaagatcacaaaacattttttcgtactctacaatttgttctgcaactgagaggccactcgggtttggctataaaaacatcctgccatgcgatgccagattgtgttaaccccggatagagcggtaacagatgtgccgagtggccatgtgtcctggaaatgccggcatcttt

SEQ ID NO: 14550 - DNA, 201 bp, Bos taurus
caatgggatattagatgagacgccaacttgaacccacgcttgccagacagactgccatgggtgtggaagtaaaggcgcagtgagctagcacagaggaaaacgaaatacgcatctgagtcgtccgcaaactgcctttaattgtgagctatcatccatccaagcttacgacttaccccattcactctactcgggcttgtgctc

SEQ ID NO: 14551 - DNA, 201 bp, Bos taurus
cacttacaaaagattatagagaatagacagaaaaataacgttctattcttctttgtcctgacatgccctggactttgcttttttttttttttaataagctgatgagctgtattcattttctgtgaggaacagagtcattattctcaccaccccaagaagattttgctttctctatcttcaagaagagaataggcatgtgtg

SEQ ID NO: 14552 - DNA, 201 bp, Bos taurus
agaaacagcagaggttcaggtcttaccccctagcctgttgaggattctttcctctagagcacagggcctcccctcaaaaggcattaggaaataggccaccggatcttgctgcaaattgctgagacagaagatgtgatgaaagcaagcagaataatcactacaatgcaggtagcaaataaagttttctttaaaaatagacca

SEQ ID NO: 14553 - DNA, 201 bp, Bos taurus
gcaggaagtgagaccaggaggaagcacagcacagccgatgcgtgtctgtcgtggtaactaaatccacgtctgggtttaatcagagggcagtggtgagtcatgacatggaaagcaggggtcttcatggcactaatcagcagcagaagcccacatcaaaatgcagcgtccatgcttgacttcctgctctctattgttccagac

SEQ ID NO: 14554 - DNA, 201 bp, Bos taurus
gaaaccccaggaatgccacaggaataaacgatcagaatagcatttgtaaagtctctaaacattccattatcatcagaactacagctcctaaaacaatccaagacttacatgctaaagttactcagagttactgacaactaaaaaaaaaaaaagattttaataggataaagagtatcctaatatatttaatgcatcaaggat

SEQ ID NO: 14555 - DNA, 201 bp, Bos taurus
ctgagctatgagggaagccccaattgtagcagcctctccattgcttgctagctgttattatcattcttccaaacacctagtctttcagagggactccccacgttttttatacatattcctaacacaaccacccagatcttagcatctcttaacagtttcccctccaccacatacttcctcttccagatgattcttcttaaa

SEQ ID NO: 14556 - DNA, 201 bp, Bos taurus
tgactcaaatatcataattataaaaaagatgaggggagaacagtcacgctctccatgtctgcactgattatatttggccattgcatgcaactcctagaagggaatacagtgtctagaatggaactcaaccatcagccccatctcatcaaaatgttagtattataactgaattcaaggattaacttcaacaacaaattttga

SEQ ID NO: 14557 - DNA, 201 bp, Bos taurus
taccctggtcaagggattggagggtttctttctggggaaatgtcccaatccaagagtaaatttccatagagactgggacttggaaaccctgaacccaaaggttgagtttacacccagtcaacaaatctgctcactcacccatccagaccttcctgggggtgcacactgcctcattttgaaaatgaacagagccagacacat

SEQ ID NO: 14558 - DNA, 201 bp, Bos taurus
ctaagtttccagtattctttgtgcttgcatacctccttacccctctcctgaagtacacttccccaatctcccttcatggacaactcttcattttttttcattgcagctcaaaacatttattagcttcaaagccttctttgaaccatctgaatttccccacagataatttgtagctcccttctctgtgtctataatatttta

SEQ ID NO: 14559 - DNA, 201 bp, Bos taurus
gatgtgggaacgctttcctctttcctccagccggagacaatttcccccttctctggtactctgtctacatccggtaatcacagcaatactttgctgtttacatacaggctttctttttttcagtagactgattatatgccctctgaaggtaggtaccaaggccacgtccatcactgtacaccttcatgcatcaaataaata

SEQ ID NO: 14560 - DNA, 201 bp, Bos taurus
aataaacgtcaccacttgccactccttggccctaggaaatgtcacatcccctagaacgggcacctcactgctctcccatccacggatgagcgccctcctctgggtctaggactgagggccgctccttgggggcggtattccccagctctgaggctgctgcacgcccaggcagggcaggctccactggccacaggaagcccg

SEQ ID NO: 14561 - DNA, 201 bp, Bos taurus
gtacaggctgggtgggagaataagagagggaaatgttacgaaagagcaaacctctacctgagtgtatgaagaagttattcttgcctggccaagaggcaagcataactttgaataacgtggaaccattaggtggcagttccactgaccctttccctctaaggccttcctgtttcagacatcaggtccaagtctcattttaca

SEQ ID NO: 14562 - DNA, 201 bp, Bos taurus
cttcatctgagacttcttacacaaaacttcctacttggtttcccccacaaagcatcacctaagactacttgtgtgtggccaggtcacttgggaaggtgattctagttagaaagaggataaggagaaacatacagaacatgatacaagcgtgtattactgaagttggtgctgtaagcaatcgaagctccatttccccaggac

SEQ ID NO: 14563 - DNA, 201 bp, Bos taurus
tgacactaacttacactcattgggcatcttctgttggatttccaactgatagatttgcaatgatatgtcttttctgaaacctaaccgcttctttttaaccaatggtatatgtttgttggaaattgtaccaaatttactacctgcgtttgtgtgtgtgtttgtgctcagtcgtgtctgactctgcgacctcatggactgtag

SEQ ID NO: 14564 - DNA, 201 bp, Bos taurus
aagacgagggacccctgggaagaagaggggctcggtgtctgggtgatggcgcccagccgcacacggtgagtctgggtccgagagctcagagggcatcaccgattagggtcatatcagtgcagtaggtaccagctgttgggtgaggtttcctgaggtaggcagagcaggcggtctctacatggctaaaattctgctagttca

SEQ ID NO: 14565 - DNA, 201 bp, Bos taurus
gaggcagcaaaccatctcacttggattcatagtgagtggactctgcagggaaagggacccgaagttgtcaacgcaacaccaagcacagccagagactcacgagcctccaggaaccctggccaagaccctgtgtcacctttcgaagtctgacttgacccagcagagccaaatcttcccccttctatgtccccacaccctgta

SEQ ID NO: 14566 - DNA, 201 bp, Bos taurus
acacaggctggaaaccctagaagccaaccgtagaaggaggaggaaaggagaagaatgccgagtgctgcttcttagaattcagtttcaagacagaaaatacatggggttatttgcactctcttttgggagtcatgacacaagtatgatcgtgggatgatcgtattgtgattttcgagggacagatcactattgataaatcac

SEQ ID NO: 14567 - DNA, 201 bp, Bos taurus
gattctggtgacagcgtcatccaaagcattgttttcaaagggcccacgagtcctagccaggtggccttgccttgtggccctgttgagttgctttgatcacatgacttgttcatacgtggctggtccataggttggagcagatttcacacacaaacccctgatgcctgtggaagagccacttgtccagcccctctggacctc

SEQ ID NO: 14568 - DNA, 201 bp, Bos taurus
ccacagtggacttctgaccgtgacaacggagctatttggttttgatgaaacattcaagtcttaaaagttaagagtaactgacaggccagtttctcgccccggttcccagggtgaccagggtttcagattcctggtcagttacactgcatcagatgacctgttattatccacggcccagcgtcgggcgtgccaagcacagga

SEQ ID NO: 14569 - DNA, 201 bp, Bos taurus
aaagctgctgctgctcctgccgccccaccccctatgtctccttcagagaccactcttaggagaggcccccccagggcccactcgggcggagaccctgtggtgatccagaaggtgtctgtgcccctgctatgctctgcaagccctgagctctcaccggccccaggttggcacacctctctccccagctcaggcggaaaagcc

SEQ ID NO: 14570 - DNA, 201 bp, Bos taurus
caaacctgtcctccacggcctttctcctgcgcttctcatcctcgatctcgtacgtcagccgggtgatcttctcgttgagttctttgatctgcccgtagcacttgtctaggttttgcttggccgacttgccgtccagctcggcctgtctcttcagctcctccaggctcacgagcttagctttgaactgggagcactccgcct

SEQ ID NO: 14571 - DNA, 201 bp, Bos taurus
gacttaatcatgtgtgggactataaaaactggcacagggagttcctaggcaggtgcagatgggaactctgggtaagggaagggcttggccaagatgttcgctgggggttgtccgtatcgtaaaaaattaaaacaataaacactaaaaaagtaaaaggaagcagagaggccaaacttgcgaatgaaagtctctaagtatata

SEQ ID NO: 14572 - DNA, 201 bp, Bos taurus
ggtgggactccaccgagtcagggaagccaagcaaaggatgttcacaccatgtggacgcagagcagaaaggggaacggccacctcgctcctcgggcactgtcgagcacactgctgcaggacagcaacactttctcaagtgcgccatggggacattaagactcatctcatttcccaagggaggaaacacggcctttcataaca

SEQ ID NO: 14573 - DNA, 201 bp, Bos taurus
ggccttgttacccacaggagtccttcccggaggaaccccttgaggctgcgagtcccgtcaagagtgggtctgcgtcttgttgctcttgtctttttgttgtcgttgttgagaacgagggccttgcagtgcctctgaactcaccccagctgagtgttcacttagcctccctgcaaggctggctctcgtcacccacgtctgggc

SEQ ID NO: 14574 - DNA, 201 bp, Bos taurus
gtaccatcatcaaagagctagtcaagaaacctgaaggaagggcatttctgctgcaagatataaagtgacagcctaactctgaggccaaagcatctgcccatggatggtgagagcagagggaactcccagaaagccccagtgtggtgtctgcggggcactgccgtggttgccgggaaagcaggtgacctcgtggttgtctgg

SEQ ID NO: 14575 - DNA, 201 bp, Bos taurus
agagcctggcccttcagagtcatttcgggggctcctttgataaaagggctgggaagtagcccagaggacagggagagctttggagtcagaatcccagttacgccacgtggagccgtgacggcctcacttgaccccctgggtggccatttcctcaaggcaaacagggattatagtacttgagacagttcctcatggattgaa

SEQ ID NO: 14576 - DNA, 201 bp, Bos taurus
tgaaagctgagtcttgaacgaagcacctctatcctaatgcaaactgccttgcaatgttactaatcataaaaggccgatgaagttctgattttgaagatctgtaacccacttacaagatacagaactaggcaggatctatttgggggtttggtttggttttctttctggagggggaggccttgggtgttaggggagaacacc

SEQ ID NO: 14577 - DNA, 201 bp, Bos taurus
gagaaggataagcagaaaaagaaaatgtgaagaatcatggcttcacctctacttctctttttagccgaacagcccgcacgcaccgacatggcagcacttttttctccacacatgacggtctgggagtcggaggaatgattcggtgatgggcgggactccactgggctcctctggacccatgaattcagaaggagagaaaag

SEQ ID NO: 14578 - DNA, 201 bp, Bos taurus
gatccagatccatcctgttgattttctctcctaaagtctcaagaatggatccatttctttccatcttgtctcacctgccaccttgagagctgcctgcaccaactccccactcctcctggcccctttcactctatgatgcacagaccaggtcctgtccagaccaggtcaccacctcaccctcctgggacactcccctccttt

SEQ ID NO: 14579 - DNA, 201 bp, Bos taurus
cagtggggccccccggtccgcagatcacccctggtgccccttctccccgtctccgaatatctaactggattggacatacttggaggctgtcacagcatccacactgggcccttggcctgtgggctaagagctatcacagtggatgaagccaagctgtgcccctgacatcactgcccctcccctcgccaagcgtgccagtct

SEQ ID NO: 14580 - DNA, 201 bp, Bos taurus
tggagtcgagtctttgcttctgggatttttgtccttagacctcagctgcttctcctcctagcaaacgcaaattggttgaatgtggaccccgctccccacattggccagaacactctatgcagtttccaggggtttccaccgcatctcacatgacaacatcccaagacacagacaccccttagcgaatgcaaatgcctaccg

SEQ ID NO: 14581 - DNA, 201 bp, Bos taurus
aaccacatttaaaaatgaacacgtgggcccagcccagcgtctggcatacagtgagagctcagtaaacattcactgcagaattaaaggacttcccaggtggcgctggtggtaaagaacccggcctgccaatgcaggagacataaacaatttgggtttgatccctgggtcgggaagatcccctggagaagggcatggcaaccc

SEQ ID NO: 14582 - DNA, 201 bp, Bos taurus
cgcccttcccaccaaggccggaggttcctctaagcgtgccagctacgccctgggtccggccaccactgcctcagtccaggtgccccacgaggcccaaaggcgtcaacaagcacagatcagaagcctctgtccacagcgtcccccactgtcctcttctttgctggacgtcagtgacagacaacaaaagggccgatgggtggc

SEQ ID NO: 14583 - DNA, 201 bp, Bos taurus
ggcatatgcacctgaaaattaaaatttattaatgttaacataatgaaatcaaaatgattttatgtaatttcatgatttatattttgggggaaagttatttgaatgtaatttataggcctttccccccagcatacctgcttttgccctcattttccttggcaagaaaaatcccaaggtttcttaagtctcttctcatgtaaa

SEQ ID NO: 14584 - DNA, 201 bp, Bos taurus
tctccgaagccaacgaaactactgttctttgattgtatggccccatttaattgccttcattttcctgcccttccttattcgtttttttcatatttacacacgcatttaatatcttcttaaagggccctgttcacatatgttatctcactttattctcatgggaaacagtactatttattaccttgggctttaaaaatacta

SEQ ID NO: 14585 - DNA, 201 bp, Bos taurus
ttccccgattctctgaaaactagtctcctcagaaatcaggcaaacaaattcacttcaaaataacagctccatttcaaaatccatactattgtgttaatgctaacataccgtggtgctttgggaaatgtgttttctggctgcttatgtcattcttcccttgaaagacgggggagaggcattccttcactgcaaattcttcat

SEQ ID NO: 14586 - DNA, 201 bp, Bos taurus
ggagcctgcccccaccaccggggatccctttccagtttatgctcatctgttcttatgctgctttcaatggcaaggccagtgcctgcgtctctgtcacacatacggtcatgggggctgcccgcagcctgccagtctgctccttctgctcacagagaagtgtctggaaatttgtgctctcccaagggcggcctgtggccaatg

SEQ ID NO: 14587 - DNA, 201 bp, Bos taurus
ccagcggtcccgaagcctttgacaatgacgggaaagagggcatcctaattagaagctgtgatatttaattttatgcgtcactttggctgggccacggtgctcatatacatgttagtcactcagttatgtctgactctttgtgacctcctggactgtagcccaccaggctcctctgtccatgaaattctccaggccagaata

SEQ ID NO: 14588 - DNA, 201 bp, Bos taurus
tagaagggcgtgttgacgctctggagacaccggccgtgcggggaccctgcaggtgtgggcacggtcccggggagcgatgatttcctcacgtccccacagcatctttgcacccctggccctggagtaggggctggtctcccctgtggcgggcagagcctggagattcgctgagcagggccctgatgaatggtttgcatgggg

SEQ ID NO: 14589 - DNA, 201 bp, Bos taurus
cacaggacaaccacagaaccagatggacaactttcaagaaagtccacctgggagattccacgacctctgccaaggcagcctccacgttgcctgccccgcatgcttacctcccatctcccgtacacatgaccggcgtgtcacagctttgtcgtccagcagtctgacttcatgtcacccttgtctagacactaaaactccttg

SEQ ID NO: 14590 - DNA, 201 bp, Bos taurus
gagcatccatgctcttaacttggcacgtagaggcggctcctccatccgcccatcaaggtctcgtgtgacctggtcctgtgtctgctgagacactacatagtcctccaggccaaagcctcctctgcctcaaaacctcccctctgtcgcgtctttccctggagccccgtgccctccgagcccgtcttgcggcccctgcagcac

SEQ ID NO: 14591 - DNA, 201 bp, Bos taurus
agacaggcctggcccaccccgaggcgaggtaggtggggctgttattcagagcaaaggctggggtgcagtcctagccgtgtccacaaggtgtcgcagtcatcctacagaacagggggccccaacctctaggatctaatgcctgacgatctgaggtgaagctgatgtagtaataataatagtagacgtgacaagcacaacacc

SEQ ID NO: 14592 - DNA, 201 bp, Bos taurus
agggaattccagccaagagatgggaggacggtgacagtacttggtgagtacacccccctggatttgtcaatcaggggcacaacggggcaagctccttctcagcatgctgactatactgtgcttctaaaaccttactacgtagctctgaagtgaaagcgaaggaacagaattttcaggaattatttcaggcaattcataagc

SEQ ID NO: 14593 - DNA, 201 bp, Bos taurus
agacgggcctccaggcccaggagagagagtccctctctgctgggggcaggggctggggtggctgtttacgaaactcctgagagaggccttaattcgtgagtctgcacttgggtttaaaacaaaatagcctctcttggcaacagagagcttcaaacggcgagccccgcgccagcgtagacgccacggagtcgacatggattc

SEQ ID NO: 14594 - DNA, 201 bp, Bos taurus
ctttcgcatgtcgtatctcgtctcaggatctgttttaatttccttgaaaccttacagatgaattgcccatccttgacttcttcccgcttctgatcgccctgacccactttatgctgaaatatggccaatttgacagaaatgaaggcgccttttaaactggtgcttccgagtcgtctgagtctttttttgggtcagagaccc

SEQ ID NO: 14595 - DNA, 201 bp, Bos taurus
ccaccggggcagtcccttttttgtatctttggccagacattgcaagttttatgttgctgacttcccattttgttacagtcctttaaatgtcgtaggaccttgttctggcccacagtgacattacttggaactagaaggacctttggaaacgtgcttctcggctttactagggtgagtccaaagttagtctttgacccaggg

SEQ ID NO: 14596 - DNA, 201 bp, Bos taurus
caaatgcttgccgagtacccactacgttccgtgtgtagataccggaggaagagcagtgaatggatgagatgcggtcccggccttcgtggagctcacagtctggtgggtgagacagacgttgaacaaacagtgataaacctccacgacctcactgcacgctgtcaccccactgacaactcccatcagcccccaggccccctc

SEQ ID NO: 14597 - DNA, 201 bp, Bos taurus
ccaggttggcctcctgaagcttcttctgctcctcaatgatgtcactgctcagagactgcttcttgtaggccttgtgggcctccacgccatagttgaagaagccagggttggagagggtgcctgggaagcaggacaaaggctcccactcagcgggacatccacggcccgccagccccacagtgacactgctgcctggacgcc

SEQ ID NO: 14598 - DNA, 201 bp, Bos taurus
gtgcctccagggacaaggacactcggggggacatcgctctcctctgtcgtgctttgagggctcggtcacaagcagccaagggtgccagctgctcctcgccagtgtctggcctcagtcacgcacacgtgcctcctcatacgcgtgtgtctgtgtgtttgcccgtgttctccgtcagggctgtgccccagcccccagggacgt

SEQ ID NO: 14599 - DNA, 201 bp, Bos taurus
tgttcagggacctcagcaaccagcacccagagaaaagtgtgccccgagtccggagacatgctttcacgactgaagcttcaatgatcaatgccctcaggcccctctgggctcctcagtgccagcgtgggtggctttcccaccccagctccaccctcaagccatgtaacctggcccaagtgggtccctgtccgtgtccaggct

SEQ ID NO: 14600 - DNA, 201 bp, Bos taurus
gaggaagcctgtgatacaagggggaggccatccaggtgggatcataaagcggagtacccagctgtctcctgatagcactgcctgtggggccctctcaacgtgtgtccttgcagacaaaaccaggaaccccttcatgactacactccctggaggcagcccatggaagagccatgtcgctgtgtcattaaaagtgaggttcta

SEQ ID NO: 14601 - DNA, 201 bp, Bos taurus
ctgcctctccataaacagtgcggggaggagcgggcgtttacacatgtggcctgtgaaacacgagcctccgactgataactgcaatcggccgtaaacaaacgctggctcacagtcccagagcttcttctaaatcgactttggaaaaaggagaggactcagcgggttatgtttcggagatcacagagccatcagcagagaggc

SEQ ID NO: 14602 - DNA, 201 bp, Bos taurus
atgctaaaatcatcccaaatgttaacatttcttttctcaagcaggtcacagcttggaactaacgacattcgtgtgtgacttctttggacggccctcgcgttgtccagataagaaccttgacgtgcatcgacggacacaccactgcctccgtaaaacactgcccaacacttctggtatcttcttcagctcatccggccccac

SEQ ID NO: 14603 - DNA, 201 bp, Bos taurus
caggtctgcactgaggccccctctccctcttggaagggtcctccgcctccctgggagctcaccccagcaaacaagaccatttacgtcaccactgtggctccgccggcctctccctgtctgccctctgccccccgtctcaacacgccagtgcccgtcatacagcagacgctcaacaaagaattgtcgattaaacgcacacac

SEQ ID NO: 14604 - DNA, 201 bp, Bos taurus
gaggggtcaaaggccagactccaggccagactcgtacaaaggccttgtgcacacccctcggggtcgcagcagcttcagctggaggggtcctggtgggtgtaggcttcattctggcctgtttggttttgtctccttagttgcaacatttcagatagtgtttcaatcaacactgaagtgagaaaacacccacatttgggtctt

SEQ ID NO: 14605 - DNA, 201 bp, Bos taurus
gtgatgagggtggtttcgttgccccttgagaagcagcggccctcattagttaatacgcctcttcccattaaagggacgggacggtcaggcacaaaaaggagtgtggaaacagctggccgttgacgttgcacagaaggggccgcaagacagcgtgtccccgcctcgccctgccgccccatcacataccccttacggttgcta

SEQ ID NO: 14606 - DNA, 201 bp, Bos taurus
ttgtgcctcttcctcttcctggccttcttggtctctcaggtcagtgatgtttgatgcagagagattcacgactgttacctcgtaatcattgttctacttaattcttctgcctgaggcctgctttgtcttgtattaacattgctgctccctctcttttgtttttatctgctggatatataccagatcgggttattttgagag

SEQ ID NO: 14607 - DNA, 201 bp, Bos taurus
cccagcagaacacccgaaggagccgtgaagcctggcttcatctgatattatcatggaaccctcgctcttcaagagccacaaggaccattcgtgatgatatcatttaatcacgtctcgtcttctcctgccgtgaatcacctgctggacacgtccgtccaccgtgactgcctggttctcagaatgtctgagacggagcatcac

SEQ ID NO: 14608 - DNA, 201 bp, Bos taurus
agtttgagtatagttttcagtataatttaagatgaaattcaaattggctatttgaaaaatgcctggaacgcctctgggaatacagtttgcctgccagtcatctagattccaggacttgcctcaatattaactgacatggtttgctaagtaggcccaggatctgcatatttaaggaaatcaattatacaagtcaactaatga

SEQ ID NO: 14609 - DNA, 201 bp, Bos taurus
gacacctgtgatcagaggcgggcctccccctgctcgcttttcagaggtgccacatggctcacgcttcaggtttgcttgtaagaaagcggaggcccttgagcatcattcacagcacattcacagcgagagatagttcactgtctatcagtgtgtgccgcaaaagggtggcagcgcatcaccgcgtgctcgcgtcgggccgtg

SEQ ID NO: 14610 - DNA, 201 bp, Bos taurus
ggtgagatggacaggccagcaacccatgagcagacttgggacgtgggtccgtttctgctgtttttgtgatccttcgtaagtgcccagtctaacaccctcacgtgtgattggtttccaggccttggtggccccactgaaccactccagtctctggtctggaccgacggggttgcttttccttcctttgtctccctgcctcca

SEQ ID NO: 14611 - DNA, 201 bp, Bos taurus
tccaggagtaactcacctaccatcagagttagggcatctttcggctggcctgtctcccgtggagcacaagtcctccaatgctaactgctgagaagcacttggggatccggtaggtctgggcagggcctgagcatctaacgggacccccaggatgccagatgtgggggctgctggcccctggaccccactctgagcagcaga

SEQ ID NO: 14612 - DNA, 201 bp, Bos taurus
agcgccccttccctggcgcccggcgtcgctgacccgcggtccccgggtccaggcagtgccaccacgatcagcccgcgaccgcctctccagccgttcagtttcctgggcccgccgcgggatgttccgctggcccgtcccgggcaccacggccgggccccatcgtctctgccgggggagcggccccgcagggaggccagcgac

SEQ ID NO: 14613 - DNA, 201 bp, Bos taurus
aagagggccttgtcaggcgcagtgtcacacccagggcagcatgaggcttttaaaaccctttctgtgagtcagcgacctcacctgtctatcagcgcctcgctgctcagcactgcgcccaggccgctccccgaacctctgcttcctccgagtcatctccccattgtttctccgtgccggtcgggcgagcagagctgaacagca

SEQ ID NO: 14614 - DNA, 201 bp, Bos taurus
attccttttcctgcctgctttaatcactactgctgtctgtctggagagctgtgacgtcactaacccagactctcggtaccgaggtagagaggcctcagtgcttccacctgagctctctgcagaggtgactagaatggaatagggcatatcgtggctttggataaaaagggggtttccacttccttgtgcagggctcagctc

SEQ ID NO: 14615 - DNA, 201 bp, Bos taurus
agctttgaaacacctacattcccttcttcttgggaactaggtttatgatttggctcttgtgtgcctattatcttttaaccagaaaaaaggaaacaaatgcactttttggtcctttaacagcttacactgtacgcagagacctgtgtgttgacttggctccaagtgtacactgacttggagctgtggtccaagaacacatca

SEQ ID NO: 14616 - DNA, 201 bp, Bos taurus
ggacatgactgagcacacacacccgtcttctccgggccaaggacgctgacgggcacttagtgggctctgactcagcatttacggaatgagcaggagagggtgggctagaggctcctcagtggcctaggcctgtccctcatttcggccccagcctccccagtgacttgatggtgagtccatctacaggggtccggtgtccca

SEQ ID NO: 14617 - DNA, 201 bp, Bos taurus
cgatcagagatactttctttgatcgtttctctaaagcttgtcggtggatggcttcccagaagatgacataaaccaggccagagagtgcagcacaaggactcccggtccagctatccccaaacagactccaaaggtcccgcgaacaaacatttcccgccggctgggcaccaggtctggggcttctgggcccaggactggccc

SEQ ID NO: 14618 - DNA, 201 bp, Bos taurus
tgtttatcactgcatttcctggcatcgagaatgaacagagaaagtttacctattccttctcaaaccctcagcaccttccattcaccctgacgcgtgggacatgccccgtgctggcctggcgacggtctgtcccggcttcctcaacccacattaggcatttgaactcagaacaagaggaggctcgtcaccagacgcatgttg

SEQ ID NO: 14619 - DNA, 201 bp, Bos taurus
aaatatcaagggcaatttcaagttggaaaatggcctttgttgcccacaaaaagcacgatgaatatgttaacctctgtgtggccacagtcgctcccgaggacgtgctttcacagccctttcacaatgactgcctctctgcttcatcaccagcacccggctcttgaggaatcagagacgcaccgagctgggccttgtctggtg

SEQ ID NO: 14620 - DNA, 201 bp, Bos taurus
gtctgcctgcctgctgctcctgccttttctggtttcctaacaatttttctctacactatgaaagtgcaattttcagaaaatcaaaagccacaggatataatcaacccctgtgaatccatcatgaattgtttatgcaaaaggggtaagaagctgacacctgctgctcctgtcactggtaggttcaaggtcaccaccccctgc

SEQ ID NO: 14621 - DNA, 201 bp, Bos taurus
ggcgctgtttccgcaccctacaggtgctgagccctgcggttactctgggaagcttgttctgttgtcttcattttattgatgaaaaagctgaggctcagaaggacgacatgcattccctgagtcacttgcgtagtgagtggcatttgggcctggagatctggctccaagtctgtgctgtaaactgcagacaggctctgctgg

SEQ ID NO: 14622 - DNA, 201 bp, Bos taurus
cctatggcctacatactttcgtcattgcatgtattatctgctgaagtatttattttattgtgtcttaaactgatagctctttggcaccagggtaaattaacgtgctgttgtgcaaaaggccattgtttgaacttactttggacattcctagaggttgatcacagcagaacagggaagcgcagagctgacttcgtggcggct

SEQ ID NO: 14623 - DNA, 201 bp, Bos taurus
ctctgggtcagaactcctggctctgcaggtcctgagccagatgcggcccttgaacttcagaaagagctgctatgtcccgtctccaacacaaagttcatcttaatcaaaaacaagtgaggccactgagccggcggctctcttcgcacacttggctcgtgccagtgactcaggccaaggacggggaaccacgcagcgtttcta

SEQ ID NO: 14624 - DNA, 201 bp, Bos taurus
ttctgcagacagtaacgtttctgtgtggtgtcattaacaactcgacgctcgggcacggaggcagcagccctggctccgactcccgaggccggaactgaccgaggttttcccttccgacttcagtggcgctcctggctttcctgtctcccagcgtcctgcgggaacccaggcctgacacaccctgtgtacaacccgtcaaga

SEQ ID NO: 14625 - DNA, 201 bp, Bos taurus
gccccaccttcatggggcagggcatggttcccagcagacgtcagatgactcctgaccccgctggccttccctcggagggggtcattcgtccaggtgggcctcgggaaagtacaggttggggtcccaccaggaggcacggacgcttcagggacagtttctaaagatgagggcggtgagtcacaggccggttcccagcaccac

SEQ ID NO: 14626 - DNA, 201 bp, Bos taurus
atacaaaacaatcttctaagatacaggaacctgccagagactaatcgacctaatgtcaaacagcaggaataggaccagatgcaggtatgacgtggtttacaaatgcatccacttacgctaaactaaaaacgggtacttaatggaaagtccagacaaagcagttcataagtcatctggctatgaaattatctgcatgtgaaa

SEQ ID NO: 14627 - DNA, 201 bp, Bos taurus
aacagctccgaatccaaggaaaggtaggccctttcaaggcccaccagcacttgcccaccagtgggggacacagtggaaagacgtcaggcaccagacaagtgggtaagagctatgctttctgtaacagaaggcaccaaagcacatgaggagcgcctgcgcccttctgcaggctcatcccacggactttcaccactttcccat

SEQ ID NO: 14628 - DNA, 201 bp, Bos taurus
ctcccattcacgtagttactaccaagttgttcccgctaatgtaatcagggcagaatgacgaagaatagaagattgagaaattctctacatccgatgacccttgcctctgatacatatttaacctatgccaaaagatagacgcataagtgaattttgtctaaaatagacattctggaataaactattaaaaatataatattt

SEQ ID NO: 14629 - DNA, 201 bp, Bos taurus
acgtcaggcagcaccaaagggctaagcacccacgatatgcactttctgccgctgcctccagagcctggccgcccgccaaggagggtcattaactcacagcacaggagtctaggcgaataccagggagagcctattcaagaagccttaacgtaacggacattcataaaaccgtgcctcatctctgaagacagatgcggcctc

SEQ ID NO: 14630 - DNA, 201 bp, Bos taurus
gccctcggcgactgacctcgtcagggctggaggcctggtaggtgcggttgtcatcactgaaatcctggtccgcctcggcgacctcggtctcgccagctgcaccgcgggcctcgtacacgggcgtcacattgtgacacagggcgacagccttcacggcctcatggacccggctgctcacgctcctcctcaccttgggcgctg

SEQ ID NO: 14631 - DNA, 201 bp, Bos taurus
aaactttagcaaagaatttgtattctagccttcagattcttgctctgaaaaatggacttttctaataatcttctagctttaaagtgatggatattgttcacatttaatctcctaacatgatgtgcataatatatttcttttaagttaattacctatagccattttcacatttagtataatattcttacatatatatctacc

SEQ ID NO: 14632 - DNA, 201 bp, Bos taurus
accagcaagacaagactgacaagtggccttaggaggtactgtcccaccccaccagcctgagactcccacatcccacccagggacacgggggcatccaagtagcactggttagggcccctgccacaaaaagaggttagaggcctcagatatcaaggccttccttgatgtctccatgtcccatgagcctgagactcccctctc

SEQ ID NO: 14633 - DNA, 201 bp, Bos taurus
caggaccctgtgcggccccaaggcttcccggaacacagagggggaggggtccgggatggtcagcaggactaatccaggatgcctggaaaagacaggcccacggaggggcgccgggatgccaccccagagcctcaggtctccctggacccgagctcttgcctttaattaacaaacaggccaaccctgatctctcacataaac

SEQ ID NO: 14634 - DNA, 201 bp, Bos taurus
gggcagtcgccaccttcccgagctcagggcaccggccagccttccactatcccacacagggctggtgtaagcagggaaaccaccaagaagaagcatgaacgttggaggaacatggccctggatggaccctgacaggacctgtgtttccaggctgagagctagaggctgctcgccgttggtgggatgggcacttggcacgtc

SEQ ID NO: 14635 - DNA, 201 bp, Bos taurus
tggggccgcaggaccttctgatgtggggggacatgggcatctctaccccaggctgtgtgcacactgtaacacctgttcacacaagaacaaactgagactcagagaggttaaaggaggagtgcagcagctagctcctggtgggactagggcttaggcttaggggcccttcctgcccactcacctgtcctgtgggaccagccc

SEQ ID NO: 14636 - DNA, 201 bp, Bos taurus
tctgacgagtgctagaacaaagcacaaggaggccagggtgccagtctgtgggtgtgtcctgcagccccaggctgcccctgggccatcccaggcagtctgctgtccttggggagaagctgggcactgaccatgctcttgcagactccaggaggtctgtcgtgcagagccctggggcaggactggtctgcgggctcgtctgac

SEQ ID NO: 14637 - DNA, 201 bp, Bos taurus
tatagcccccaggccgctgtgctaaattagtagtagttaagctcccattcatgggagcttgaaataaagcgataccaatgcccgcctcccgccccacccccctgggtccttgccttggcctggaaaaccaggagaccttcagagggtaggtacgcaccgcatacatttggaaccttgccagaaatatttgggggacctatt

SEQ ID NO: 14638 - DNA, 201 bp, Bos taurus
gtctaaggggactccttctacaaagcaagatttagtgacttacgaccgacacttctgagtgtgtggctgtgctgcagaccccactagattggccccacagggcaggtgccctttgcccgatgctacagatgaggaaaggtgaggctgggacaggtaagtgggtcatcaaggagcagactggtcatggcctccctgaaccaa

SEQ ID NO: 14639 - DNA, 201 bp, Bos taurus
gcgtaatagtctatagcctttagggtattttatacttataaaatcatatctgcagctaaaacaagctttatttttctctttccaatgttatgccttctcttcctttttcttgcctattgtcactggcgggtcatcctgcacgagactgcagagttgatgatgggtgttcttgtcttgttcccaaactcaaggaagatttta

SEQ ID NO: 14640 - DNA, 201 bp, Bos taurus
gcatggatcgccagttggcaccatcacaaggggccacctggaccctgtgggagcctcagagggttcccctggcatgagctaatagagggcaaagccacctgcaacactcgggcccatctcgggggccgcatcttctgtccaacaccagcaatactggagtaagttgtttaaaagagcagccacaagatgatcagactaaga

SEQ ID NO: 14641 - DNA, 201 bp, Bos taurus
gagctgcaatagagtggcaattagggattcacccccagggtttctttatggccagagtgaggagagagggacatttgccaaagacagtcacacaagaagagaaacatttacagtgtgtgaaggccttggccattccaggactcatcaaagaacatttgggaatgatttattgtaggcacactttaattttgtacaccgaaa

SEQ ID NO: 14642 - DNA, 201 bp, Bos taurus
ttgcctttgggactctaaaaggcagttacttttaactaacataatatgaaaagattgttaagtttcctatgaaagagaactgcacccctgtgtcagaggaaagtgcgcaagctctggtggacatctgactcccccgagccccagcctctgccccggggtctccacgctgcaattttggcttctctggttggcttggacatg

SEQ ID NO: 14643 - DNA, 201 bp, Bos taurus
tcctccacgggcagaaatccatcctccatggctccagagtccaaaagatgcttcaaggtgtccaggggctggttcccttcagagactctgagggccatccatcccacgtctcttcacctccacatgtcctcggcatgtggacgaacctgcagatcctgccccgcgtgccctggcctgcgtcctgctccctgcgtgtcctct

SEQ ID NO: 14644 - DNA, 201 bp, Bos taurus
agaaagagaactatggggagcaactccttctatcaaataaaccatggctgtggcagcaagctttctcaaaatgtgtggcgggacactgggaaaacacatgggaatttattgttgaaaagtctcttatagaaactgagacgtttacaacaagatctcactttgagagggagtaaatccaccctcctgtagtgccacccacaa

SEQ ID NO: 14645 - DNA, 201 bp, Bos taurus
aaaaaagcaaagggtggtcactgtctctactcagctggagccctacaaccactctaattttattttgccctaagggaagtgctggtcagaggagcaggccgtctggggcaattagaagtctttggctggtgaggaaacctgccagctcactcctgccttgagccagcctcaaacgctgtttctagctctgtgtcctcttgg

SEQ ID NO: 14646 - DNA, 201 bp, Bos taurus
tgtggacgcaccacgaacagccagtttgaactagacagacaacagtcacttcacgttggcaggtcgttaggacttggggcccagaaagccaggccaccacgcggggtgctgaaccagccacagcccactgtgggaatctctctgtggctgaaggtcccccctacagtctgacatctgcctgtagacgcaagctccagggcc

SEQ ID NO: 14647 - DNA, 201 bp, Bos taurus
ttgtctcgtttggacccggcccccagcttcgggtctgcgtgaccgacatggtgcagcagcttcgctcaaaccgtgtctggaaaggctcagttttcaaagctcccggggttaccggccagacgtgtggtgccaccccagcggaagtcagtgcaacccccgccccccaccccgccccctcgcttccccaggacagcagagcag

SEQ ID NO: 14648 - DNA, 201 bp, Bos taurus
tgcatttgtagacaggcacccactgaggcctccctgtggagtcacggggtggtgagcgctgcctaactgcggatgtctgagcactcctgaaggcgttcatactggcccaagaaacagagctccagcatcttcccttcatctttaacttcctcccacctgtgtttccatccactttagccttctgattaagaaggctgagta

SEQ ID NO: 14649 - DNA, 201 bp, Bos taurus
ggaggagggggaggccgtgggtccccttgcaggtgagtctgtggacagcagagcttgcccgcttcccttgttctggtgccagtcgctgtcactagccttacgagcagcggcccaaatacagagcaaaactgagcagttggagcttcagttttgtcactcttgggttttcttcccaggtatttgctgtaagtcagcatgagc

SEQ ID NO: 14650 - DNA, 201 bp, Bos taurus
caggggccttaacctcgtgcagggacccgcgtggacacagggacccgcgtggacgcacagccgtggagcagtgcttccaaagacgtgtgactgtgctgggtggccgtgtggttttccccagattctgtaaatagtagcatgtcactttttgcagctacgtgttttaggtttggtgtgtatgtttcctggaaaccctgaagt

SEQ ID NO: 14651 - DNA, 201 bp, Bos taurus
ctgtactcagtcagcccagtgagcctggtgcccagacacccccagtagagagcccagctcgccaggccatgtgacattccacagggaacaggattcgtctcgctcctcctgcctgggggccgagcatagagaaggcgacagtgctggagggactggagagttgcaggaaagaccgtgatcctcctcccgccccttgtgctc

SEQ ID NO: 14652 - DNA, 201 bp, Bos taurus
ccaggagctccctgccctctgctctgtgccctggtcttccccccgcctccgcctctcctgggggctcttactccacagaaacaccttccactttgctttccattgcctttgatttctcatccttcctctcagtgtttgacttttctcaaacttttttcttctgttgaagactcacttagtgccacgtcgctgccccgtttc

SEQ ID NO: 14653 - DNA, 201 bp, Bos taurus
gtggatgtgggatgctgagcagggaggaaagggccggtggggcttggcaccaactcatggaggacttcgaatccaggggggaggtcagggtgtgaaattataggtgaggggagaaactgtgtttttgaggagacagccatgaaacttaggtttaagggagatctatggtgtgccaacagtaccaacagattggaaaaagga

SEQ ID NO: 14654 - DNA, 201 bp, Bos taurus
cgacaccctccctttcttgcagagtcacagtctgcggccgtgacaggtcctctgaagaatctggcactgaagagtccatttccgtcagcgtttctccatcgatcccgccctgcggcccttggggtctctggggacgctgccctggggctgtggacgccagccctcgggcacagcacagggggtggctccacccggcgcccc

SEQ ID NO: 14655 - DNA, 201 bp, Bos taurus
gagaacggaaagatgaaaacaaaaatcagatgagtaccagatttctttgcattctctttgaaatagatgtcaatatttgttgaaatacaaattgggccacgaaaatgatgagacattgccttcaaggcattgagaatccaagaagctggggaatggtgattgcgaacagtggggacctccttctcctgtgaggtcgttaca

SEQ ID NO: 14656 - DNA, 201 bp, Bos taurus
gaattaatgtggagtgggtttgagggagaaaaaaaaaacaggacaaaggagctttgagagaggagataaatgttattgcacattttgatttggcctccttcgaattcagcctgaatgctgagtgaagttgttttttttttttttccccatggttgtccatttctgagaggatagagtgttgacctgtgggaagatactcaa

SEQ ID NO: 14657 - DNA, 201 bp, Bos taurus
agccagggagagagcagtgagccaaagagataaaggtctctggcctcatgggaagaaaaactgtaagttaaacctaatacaatggagccttgaatgacataggtctaaactgcattgggccactgacacgtgggtttttcagtagtagatataacagtcatacaaatgcgagtttggatgagtctgcagatactggactgt

SEQ ID NO: 14658 - DNA, 201 bp, Bos taurus
attgtaccactgctggttggaaaattttatccctgtcaattttgttcctttagttatattttgctaataaaaatatcaatacacaaaacacattctgttgccttttttttttcaaaccaagcttgcatctatctcatcataatttatgactatttctgctaaagatttgcaacttgctgagtatcctctcatgcttaaaag

SEQ ID NO: 14659 - DNA, 201 bp, Bos taurus
cctcctggagtcggggcccagggtaacctgacctttgtcctctgggcaccctgagaaatctattcctgggctcctggaatgcccagttccaggtgggggcgcaattgtcacctgttaccatggccactgccccctccccaggacttgccaagggggtactgctgacatcacgttgcggccaagacaccaaggttggctttc

SEQ ID NO: 14660 - DNA, 201 bp, Bos taurus
tttcacttttccacttcttgaaaatgtaattacaaattctttaatcagagaatggttgatcactgttttgggggtcacatgtcttatttgctgagcctctgttttctttctgaggaataagaaagccaacactccagggccctgttagtctgatcaccatctcccagactagcttaatttccattgatggaatgtttttgt

SEQ ID NO: 14661 - DNA, 201 bp, Bos taurus
cagggctacagtggcagtgtgaggggaacgtcaggttactgccagttcagatgaacttgtgtgtggagaacgcatcaaagtgagcatgtgcgctctgctgctactaaagaaagtgggggggggtatcccacagccgttccattggtctttggggtcttctcttttatgacaataatgctgatgtccacttaaaaacacaat

SEQ ID NO: 14662 - DNA, 201 bp, Bos taurus
tggcccacccggaccaggggacactgtttcatgatggaaaggagcgagctgtcaccgtgagaagacacagaggaactgagaggcacactgctgagtgaaagaggccaggctgaaaaggcgaggcactgcatggttcccactggaagacactcagaaaaaggcaaaacgatggggccagtaaaccgatcagcagctgccagg

SEQ ID NO: 14663 - DNA, 201 bp, Bos taurus
gctgacagagaaaaaatatagtaatctcaaaataaactacataaaataccaagcttcagacactaaaggaaggaaaactagagcatgtctgggctcttgacaggagaagaactctgtgtctatttacacagactacagtttgctcaatctataagtaacagttaatctgtaactcactgattctattacatgttcaatact

SEQ ID NO: 14664 - DNA, 201 bp, Bos taurus
aacaggcagacgtagatgttttttaattatacaaaaaaatttgaccaaaatagctaagaaaaaactgccaaaaacagatgagtgtccccacctattacataagaaaatatcaacaatctaagggtaatgattggaagatacagtaagctgcacacactcacaggcatttaatggatcaaactttctgaaaagcaatggact

SEQ ID NO: 14665 - DNA, 201 bp, Bos taurus
caaggcatacagctcagaagtaagtaacgaactacggccacacacgacagcgtgaaggattttcaaacgtgcggcaacaggacttcccagcctcaccactgtggacgtctggggccagacacgtcctagctgcggaggcacgctcagaatccagggccccgtaagatgttcagcagcaccgctcgcctctccctgccacat

SEQ ID NO: 14666 - DNA, 201 bp, Bos taurus
cgtgggtttgattcctgggtctggaagatcccctggaggaggaaatggcaatcactccagtattcttaggtcacctctccctgctctaggggaaggtagcatggtgtgttatttacaacccacctgagactcttattttttggcttccctggtggctcagctggtaaagaatctgcctgcaatttgggagacctggattcg

SEQ ID NO: 14667 - DNA, 201 bp, Bos taurus
cgccccgcccctccacctctctaggggaaaagaggtggctgggggctgggtctgtgaacggacgcccctcccctccaccaccgcagaccccagggcccctgagcacagcacacttggacccttttcagatctacccctccacgtcctgacaaaaacgcttttcttatctcatctcaaggtaagagcaagatgcagaaactg

SEQ ID NO: 14668 - DNA, 201 bp, Bos taurus
actttgcacgtctgggcccccacggaggtgcttccctgagctctccctcctcgtgtgctaagcagactgcagctcacctttcaacactgggctcaggtgcatcccccagaaagatgcatccccggcctcctgccttctaatgaccagggccagaaagggcaggggggagcctttcacgcgaactgccagggcctctgcacc

SEQ ID NO: 14669 - DNA, 201 bp, Bos taurus
aactaaaccctttaaaatgttatgtctggccaaaattttaagatgcataaagttcaaaaagaagtcaattgatactcatctacccacactcccagcgaaacggccttgcctatagtacctgatatcttgcctgtcatgtttttatagcatttatatgaggtgttgacccttaacccaaggacaccagacccccatgctggc

SEQ ID NO: 14670 - DNA, 201 bp, Bos taurus
gcaaacacctttttatttccatcaggtctcagtttctgaaatgttggttgacagtggatgggagcccagaacgaaaccctgtgactgtcatggatagtttcggcctcaggtgatttcgtcagggtctgctgttccttctcagttgaaaacctcttccctgcttggcagtgcccttccctgccttcccagtgcacatgactc

SEQ ID NO: 14671 - DNA, 201 bp, Bos taurus
gctgtcatcactgtgcagagtaagtgtgtgtgcctgtgtgtgtctggggatgtgcacacctgtgcagagcaagcttcacggtatagtactacatggcacacagcctttgcggcccgcagagcactcacattccaaggtttctcagtgatgctctcaacactcctctgccctgagctgggataatggccattgctttacacg

SEQ ID NO: 14672 - DNA, 201 bp, Bos taurus
gatcaggggttttctacacatcaggaagtcatgggtgtttgttttcttatccacagaggagtgatataacttggtttgaatgaggtaagtcaggaaggccgttcaggaggctttttgcctgaagctgtagctttcagagaattgcatgtggagtacggagtctatgagcttccctggtggcgctagtggtaaagaaccccc

SEQ ID NO: 14673 - DNA, 201 bp, Bos taurus
aaatacatgttctccctatgtcctcagtcctggtgtgtatatggtggggaggtgcgagagatggtttccctgttgctagtgcatcatggccttggttggttccctttattgtagcgattttaatttaaacctttgtgccattcattttttgctgagactcacctgacaagtcataagtctagggctgaaaggggcctttca

SEQ ID NO: 14674 - DNA, 201 bp, Bos taurus
actcagttaggttggctgagccttgaaagctgagttgaatgcatagttagtggcaatggctgtgaaggtcatctccacacagccttctaagctatttactgtttcattcattaaatgtgtaaattggcaaaatcacttaacctagtgggtatacaatctgccacttacaaatgggatacagtaggcagtaggtcagagaag

SEQ ID NO: 14675 - DNA, 201 bp, Bos taurus
aaatgtataatgacatggatctaccatattagaaacattaagaatagtttcattgttcctaaattactttgccatatacctattcatattttctccctccagcttctggaaaacacttatttttattgtcaccagagttttgctttttccaaaacttcatctagttagaatcatacagaatgtagccttttcagattgtct

SEQ ID NO: 14676 - DNA, 201 bp, Bos taurus
gctcagtttagtgccaagcactctggcccaaggacgtgcagtgttctcagtatttagtgtatttagacactacttctgtctctctccttttaaccagttttatttattttaatttgaatttctggccacctgctgcagcatgtagcccctttgttccccaaccaggggtcaaacctgcaccccttgcattggaaaccagag

SEQ ID NO: 14677 - DNA, 201 bp, Bos taurus
ttaaaaccttccaaaagagagtattttgctgaggccactaaataagctaaagcaaagttgtatgaaataaaaaatacagctccaccatatagactggctataataatttctttctagaaatacaaaaagtggccacattaaaatatgttcagtatgtattctttcttatatgtaaacagaaaaatgtcctagagttttcaa

SEQ ID NO: 14678 - DNA, 201 bp, Bos taurus
tctaataatacatcacaaaattagtgagccaaaaatttaaactaggctttaaaataactttctcaggagacttctgcttcattaccaactccagttctccatcctgaaaacggaaattataacatagacatacataggtatgtaatgtagacataccataatgggaggttgtgaatgattaaccatatgctttagcttatt

SEQ ID NO: 14679 - DNA, 201 bp, Bos taurus
gcgggcttctagaaatgtaaaatctgataattaatatatggtagcatcaacagctacgtgaagacaaaacatcaaagacttgaccatgaaagatacatattatatgctatcacttatatatggaatctaaaaaaaaaaatgacacaaatgaatttatttacaaaacagaaactcaaagacatagaaaacaaacttatgggt

SEQ ID NO: 14680 - DNA, 201 bp, Bos taurus
caaaatagctgaagactagatgcgtataaatctgatttctaaaagttttgcttgacatcataaggaaacatttaagaagctaagtcttaggtgtcagtgtgtgttaccaagctccaacccaacaatatctgctatgtttgccactgtttttagcatgattaatgaagaaatgctttattcataatttatttatttatcctt

SEQ ID NO: 14681 - DNA, 201 bp, Bos taurus
atgggtgggctctcctgacacttaggaatctcccagaagttccagacggaattttagagtgaatcgcaagctctttccaagggcctctactggatgctcaagagaagcctggttgaaggaggattcttgaaattatccacattggtggtgcctcagcaggaaatttcaccctcatctggcccatgtgtcactcagagcaga

SEQ ID NO: 14682 - DNA, 201 bp, Bos taurus
gcatttgagtggaaccctgggtcttcatagtcctcaggactatgtttcagattcatgctttttccagtgtttttatccaatttgtctctattcctctatacgtttcccagttctcaaattcacaaggaaataataccagatgggcaatcacaatggccctgtttaccaagcattgtgtgtatggttagtgactgaaaaaag

SEQ ID NO: 14683 - DNA, 201 bp, Bos taurus
actcctgaaagttagacattattgcaccatttaagctccaaaatgaaaagtttttgccttgaaggtgcaatgtattacaagtacatttcaatagaatccacgactgaatatcactttgcaatttgaaatatcactcaacaaatatcacccaaagggaaacattggccaacagcttatttggatatatcccatctatcaagt

SEQ ID NO: 14684 - DNA, 201 bp, Bos taurus
aataggcaactggaaaaacatttaaacataatacaggagctcaaatacttatgatatgccaagtgaattaattggatattacgaacacagtctcaatttgtatatcaaaattagaaacagtaataatcatacaaaatatatgactatttccattttgggggtcacaattttggttgtttctatctttgtcacatttgctct

SEQ ID NO: 14685 - DNA, 201 bp, Bos taurus
acaaccagttggcaaaatgtcccaatgcctctccgtgctcacaaatagtcctccatggtagacacacatcacaaccagttggcaaaatgcccaaatgatactgtgtgctcacaaaatgtcctcaccatcaaatacaagtcaaaacacttcgtgcccaaaagagaagttagccgggcgcacacccgcagacttactcggtct

SEQ ID NO: 14686 - DNA, 201 bp, Bos taurus
ctaatgtgccattctaacttatgtcatcatcatctgcttcatagactattggacttgacttttagctacactttctatctctgctcttgattcctgtggtggtggtttagtcatgtcctactcttcacaaacccctcgactgtaaaacccaccaggctcctctgttcatgggattcttcagacaaggatactgaagtcggt

SEQ ID NO: 14687 - DNA, 201 bp, Bos taurus
aatcttgaattttttacaaagacaattttatttgtgaatgtcctggttcaagcagcccaagttactagttttattaaatcctgaaactttgaatatgattgtgaatttttggtatggcaaaatatgaagtgtagagcagttgtgctgaattctgaagagcgacatttttagagggaaagcacaaggagactaagtttaaaa

SEQ ID NO: 14688 - DNA, 201 bp, Bos taurus
ctaaaccggtggacaaaggcccaattccagtattataaagctgtaaagctccatagcaaggaaaaaccaccatattttattttcaccatttacaatattgacctggccagaaaagaaagaaatctctatttatcgccaccatttcttttggtggagaagattttattgcatttttgacacttattcagatcaagactttat

SEQ ID NO: 14689 - DNA, 201 bp, Bos taurus
tgagattgactggtttgatcttcttgtagtctaagtcaggagtcttctcaagcatcacaatttcaaagcatcagtttttcggtgcttggccttctttatgttttttggaccagggaggaattggcagaagtcatccttctcctggacactgggctgcagacatcagaggcaaggactggaatgtgactcttggcccacagg

SEQ ID NO: 14690 - DNA, 201 bp, Bos taurus
tggattttactatgagttaataagctgctttctatgttcatgaagcttattcaattaagtcaaaataacctaattttgtaggcagtacctcccttgggcacttgggcaagaggacccccctgccttgagatccatgcactgaagaaccccacatattacaaacacatgaacacaaaaaggatgcaagatcacatgagcaca

SEQ ID NO: 14691 - DNA, 201 bp, Bos taurus
catttagggaaataaaagaaccttttatgatttgaatagagcattttattggtcagtaatgcccctctgctgtaagtcccctcctgccatacatgtttaaatcttcagagtaacctcagaaagatagtgggagaggaagtcagtcctgcgctctcttccctctacagaaacatggatgaaaagacaccggggccaaaatgc

SEQ ID NO: 14692 - DNA, 201 bp, Bos taurus
cttcacacatacttctgcacatctttctgtgaggtggggagtccagcctgacatttccacagtgtgtaagctcttcctctcactgtccaaatatccatcccgccgaagagttttgactgactatatgtgggtaacatgcctactaccacagccattcacttcaccaaatgaaaccctacattcaactaggacaagtcatac

SEQ ID NO: 14693 - DNA, 201 bp, Bos taurus
tcacagtatgggggctttgctgacacaagatattttgttatcatgtgttagaatgtatgataagtcaacaaatcactggggtgtgaacagcctccccaggagttgtgaattttatttgggttcttcaattctaccttccattttgatactttacagttctgttttctgaatgacttttattaaatcactgagtttttcaat

SEQ ID NO: 14694 - DNA, 201 bp, Bos taurus
caatggacatgagtttgaggaagctccaggagatggtgatggacagggaggtctggcttgctccagtccatggaattgcaaatagtcagacatgactgagtgactaaaaacccacaacaggcagtcaaatccttctttttctttgaacttttgacacccattctgtgcctagccaaagggagatctctgcttttaaagggc

SEQ ID NO: 14695 - DNA, 201 bp, Bos taurus
accaaattcaacccttcaccggaaaagccataggattttcaatacagtggccaaaaatgttagttctcactgcatattttatctttggtctgattcattatgaagttcttcctcacgttggcctcatatcactaaaatttcaatctgtgtgattcctagttctatcacttgggactgaatagtatctcttagttttttaag

SEQ ID NO: 14696 - DNA, 201 bp, Bos taurus
gtacatcaactctaagagccctattcatcacacgcaaggcttccgcagtcaggcggccttaattctctggttttgtattgcgagtcaggccacaagatacatattatttcacaaggaaatactggagatggttggaggcgcttgcagacacacacacgggatggaataatgacgtctggcccgtttactccatgcacagga

SEQ ID NO: 14697 - DNA, 201 bp, Bos taurus
gccgcccaaagaccttgacgtcaggagatggcagggacctcgcctccctccccagatctgccagatgccttcctggcagctactgcggcctgcctggcccgctgagtaacgcggaacatctcggtgtcactgtagccatctacactctcgctggcataaggagtgatcgcccctggtaactgactgaccatccacgtgacg

SEQ ID NO: 14698 - DNA, 201 bp, Bos taurus
ttatttcttcttatcttctttatttcttctctgtttctcatctgagcaatttaatttaattcaacaattccttactgactgcctgatatacccaagacactatctttggttcagggggatacaaagttttttaagatgcagtctcaacaccccatgaatcaaaatgttatcaaacaaacagtagcttagtggaaataaaaa

SEQ ID NO: 14699 - DNA, 201 bp, Bos taurus
agccaggtaggggagggccacaggtacctgcagtgatcagaacaccccacagcacagagttagtggtgcaaaatgtcagccatgctgagcgtgtataatacgtaggatgcatctgatggacaggcccaatgggggagggaggaatatatatatatacacacacacacacatatatggaaaatatattttctctctcacatc

SEQ ID NO: 14700 - DNA, 201 bp, Bos taurus
ccttctgctcgcccacctccaaatgcagatgccaaaaaagcgtgatccttccttttccagccacttttgtggttcagggagggaggccatgagaccccctttgcccagagagatgtaggcagagcgacctccgggaaagatatttctccgtggatacaggagatgggtgtgtgggaagggtggccttttccaccctgacag

SEQ ID NO: 14701 - DNA, 201 bp, Bos taurus
agttctggactggtttcatgtaaggactactcctgctgttaattgttaagatgcccagaagaccgttgatgttgacagttttcctgttgtcacaggtttagatgactcgttcaagttctggagggctccatctcgaatgtccagtcaagatcgagatccaagttctctctctacctcggaaacaatggtacttccaaagaa

SEQ ID NO: 14702 - DNA, 201 bp, Bos taurus
gacaagagtctacagggggttagaggtgagggggaagtacggaggtggcggtgggctgagtcacattccccccaaattcgtatattgaggccctgatccctggtacctcagaaggcgactatatacggaagttgtctgtaaagagagaaccaagctcagatgacatcgcgggagtgggccttaatccagtatgactgctct

SEQ ID NO: 14703 - DNA, 201 bp, Bos taurus
ataccacattgtaaagcaattatcttccaattaaaaataaaatattttaaaaatgcagtgttcttgcagaaagcttcaggccatctggctgttgaatttttagcctgttggaaatctcagtaggagaaggcgttgtctcaggctgtgcccggggagaggcctgaccaagcagaggttatggatgtggcctctctcgggagg

SEQ ID NO: 14704 - DNA, 201 bp, Bos taurus
ctgtcatccaatgtccagcatgtcagactggacaggggccgggcagtgcccagggtgttcactgctgcaatttgattcttcagcaacacaaagtaggagcaatgggattaccaagggcctcctaatgtattcaggaggttgttttatgttttaaaaattatcactggatggaggatatgaattaggatgtttgatctgtct

SEQ ID NO: 14705 - DNA, 201 bp, Bos taurus
agaaccccatggagggaggagccctacaggttgcagtccatagggctgcacagagtcagacatgactgaagtgacttagcatgcatgtaaggcctcattacagctagtgtgaaagggaaatgacttaaaaatatttccctgtgtaagcaaaagctgattctattacaagtagcaaacttgggttgacttgactcctatcat

SEQ ID NO: 14706 - DNA, 201 bp, Bos taurus
aggccacaaacatcttcaaataattaagcaaatattttttgtgtatcagctatgtcccaggaatatatatgcttgttggccaaaggaaaagtagggatatattttacaacacttactaaagtgatcttctgaaagaacattttaatctagacatttgtgtaatatcctaggtacgtggcgataggctcttcttatttatgg

SEQ ID NO: 14707 - DNA, 201 bp, Bos taurus
acaggcattgtttgcttaattctccaagcttgaatggaaacctcagaagtcagaccacctgggaacaaaatccagacacagccagataataaacaggcactgataacatctgtagcaacagagagaccaagcttactaacagtcttccacagcacattctcaccacgataagccatgcagttcataggtggatcttaatgc

SEQ ID NO: 14708 - DNA, 201 bp, Bos taurus
agatataatctaatctttagataaaaatggattcttaaaaaaaaacaataccataatttctatgagaaaaatgatgtgtaataaactaatacacttgtagctcaaatgacatcaattatgattttgaaagttaatgaactaatcccctttctgtttattaacatcaagggtatctatataggttatatggactctgttttc

SEQ ID NO: 14709 - DNA, 201 bp, Bos taurus
tcggactgagcaccgtgggggctgggggtggggtggtgatgggcaagagaggcaaggtccctgtcctacaggggcctatggggatgagttccctctatttcattatttgctaatagtataaacgggcttccctggtgggtcatggggaaagaaactgcctgcaatgcaggagttgcaggttcgatccatgaatcaggaaga

SEQ ID NO: 14710 - DNA, 201 bp, Bos taurus
tattaggaatgcgttgagctgcaagtaccagagtacctgactgtagtggttcaacatatgacggttacaggaaatctggcagcaagctttcgctggcaacggttccattctttactaattccatcaaagatccatgctatattccaggtcctaaatcctttactggaggaaattttactcatctatttcctgcctctctgt

SEQ ID NO: 14711 - DNA, 201 bp, Bos taurus
agtcaggaaagtgattattttctccagggtgacttgaattattcttttagtaatgaatgctagcggtgtgtggtcttttctgttaataccctgatttaatgtctttcttggtcaactactaatcttatacctatagtgcctaatgcctcacttagaaggaatgagaggacatttataggaaagaaccgtatcctctctgtg

SEQ ID NO: 14712 - DNA, 201 bp, Bos taurus
aaccaaacagtatggttagaattaagtatgaaagaaaaatgtattacatgaataaattaaaaaatgattactgaaatcttggccaatgagaaacatttcattgatgtagttctcatctttatttaatagttttaatttaagcctcatgaaataatcattaaacacattggccttctataaaaatggcacagttcagttcag

SEQ ID NO: 14713 - DNA, 201 bp, Bos taurus
acagtccatgggatcacaaagagtcagacacaactgagcaactaacacacagggactaagaactacttgatccctgatttacatctcttttaacacagaagaaccactgaatattttcaaagtcctcttactaatagaatctattattaaaaaatatatagaaaaatcaagagtaggtattgagctacaataagggaataa

SEQ ID NO: 14714 - DNA, 201 bp, Bos taurus
atgctcagtcagaactgcaatagtatgattgagatacaagctttttaacattttattttatttttatgaaaggagcattaataggaaatacagagtagaaaaagaggatagcatatataagacagagagaattacatatgcgtgacacttcttagttaaaaaaaaaaaagagagagagagaaatagtattcctggtggatc

SEQ ID NO: 14715 - DNA, 201 bp, Bos taurus
ggagcaccactgttctctgtagttatttggtgggttagaacatttctcgtccagacgtttcctgtcttgctaagctggccattccctggtccttcgattaaagcaaacggatttcagttgtgttttgttttcatctgattctattgtatttccaggtttctggcctcttcagctccaattctgggatatatgctgctgctg

SEQ ID NO: 14716 - DNA, 201 bp, Bos taurus
actctccctagcaaccaatatagaaaaaaggccttagccaagtcaactatggaaaaccgatcatctttagcttgtggaataatctgcatagcagctgaatattctggcccatatggggactgcagaagctgttggggtgctgtttactagcatcccctgtagtccagggtcaacagctacaatccatccttcttcctcatc

SEQ ID NO: 14717 - DNA, 201 bp, Bos taurus
cctttagtaagttggacttctgccttctctttcagttgcaataaagttctctttctaacttctgaaatccaggatcctagatgcttgctgttgcttaatctggtgctcacagtttttaaagatgtttcagcgagagtttttatcagcagcacacttcattatagctggcagtcctttttgcttcattgtatgcattaatag

SEQ ID NO: 14718 - DNA, 201 bp, Bos taurus
aatatttggtcatcaccacagacacatgactaatgtacctattctttctgtggaattctcctattttaaatctttacgttctcatcttttcctccatccacgtattttcctatgtgttgtatttcatagtaaaggaaagtgaaaacatttgatttcatcagaaaaataactatttaagtttagacagacttctccattagc

SEQ ID NO: 14719 - DNA, 201 bp, Bos taurus
atggcagaggatgaaatggttggatggcatcaccaactcaatggacatgaatttgggtagactctgggagttggtgatggacagggaggcctggcatgctctggttcaaggagttgcaaagcatcagactgagtaactgaactgaactgaacgtgaaaagagctgaaacacacagaccctttcctagaaccaaggcccacc

SEQ ID NO: 14720 - DNA, 201 bp, Bos taurus
tttggcctgctttgagtcttggttcaggtgagctgttctaaatggctcattaacatcagaaatccaggagtgactccagcgcatccctcagacagagtgtgattgggccgcagggtggtctttctcaagggtctcacgttttctaattttggaaggcagtgggggtatctcattcctctgtattgaatgtctatctatatt

SEQ ID NO: 14721 - DNA, 201 bp, Bos taurus
aagctatagtccatgggtcatggagaatcagacacaactgagtgactgatcatgcaagcatgcagagtacaataataaatattggagagtgaagcagacatagtttagtctataaaagtgggaaatggttaaactacttaacatatccaaagcatatgctctttccattatactaggcagtgtgtgtgtgagtgcatgcat

SEQ ID NO: 14722 - DNA, 201 bp, Bos taurus
tgcctggagaatcccaggggggagcctggtgggctgccatctatggggtcgcatagagtcggccacgactgaagtgacttagcagcagcagggagagtataatggaataagctacacattgtggattgctcctttgagacttacgtccattaatttaatgtgaagccagtcatcctatttgtctgtcttgcttgtctgaag

SEQ ID NO: 14723 - DNA, 201 bp, Bos taurus
agcgatatggagatatgtaaaaataattctaatgtcaggcagcagcacatgaaattttattgttcttggaaagataagcggacctgtattgtgcacagtgaaaaaggctatttagaatgtgtcagcttgcacttgtgagcaagacaattgcatttcttctggtacccagcctcacttccaaaggaatttttatcattccca

SEQ ID NO: 14724 - DNA, 201 bp, Bos taurus
agcccgctataggagcagagcaggcgtaagtcttatgttggtgaaccttggcagaagcagttcaagccagctcagctctgtggtctgatgccagcacttttctcagcgactgcagcttgcttgatcctcgtcatggtgtagactgcactgcatagcttatctaattattctgcattgggtgtatctctcagcatacatttt

SEQ ID NO: 14725 - DNA, 201 bp, Bos taurus
ctgaaccttttctcaggtggaaatagagtcccaggtggatccccagcttcctcatcacttctggacgcttcccgggaggcccgctagggcctcgccttccggggaccaccgccggatcgtgggcgcggagctggagaggcggaggagcggcggggcttcagctgccctcacggctggaagtgagcccaggagcgttctcag

SEQ ID NO: 14726 - DNA, 201 bp, Bos taurus
cctaagagcagaatgctgcccaatgtcccaattgatggcatttgtagcaagcctttttagtagacttgtcacggtttggaccctctttggcctcatatcccgcctgtctacagatttggcatttgcctcctgccttgtccatcaaagactcggggtttgccataggccttccctggagggcagccagcatctgggcatgcc

SEQ ID NO: 14727 - DNA, 201 bp, Bos taurus
tgtgtgctatctgtacatttatatatataaaactgttatgtataggtcctattaatatattgctatacccatcaagagtaaatatgttattggtattttttacataaaatatatggcaatgtatcataaaacaatgtctaggcaatgtctttacatatggtgaactagcccatctattgcccattgattttcattgtgctt

SEQ ID NO: 14728 - DNA, 201 bp, Bos taurus
gtgccctgcccaaagtcacttctcatttgaacccaggaggtctgctcctacagcctataagtagttcatcccacagtatgactcacaaagaaggggcctccccattctccaaaacaacagcatgtggagaaagagctgggcttcattggaaatggtatcggatgcttcaatatcattatccttcattaaactgcagtgtta

SEQ ID NO: 14729 - DNA, 201 bp, Bos taurus
ttaagttccatagaggtgtgatgcagaacatttcagaacttatgtgatgtcttccaaagccaagtgtaattaaacatgtagaaagctggagactgctctacgggtgagagtgaaatgcaacaatcgtgtgttcttattaaaatcatgaagttttcttctaacttgtatccttcaggtggcaaaactattatcaatttcatg

SEQ ID NO: 14730 - DNA, 201 bp, Bos taurus
cttgcctatacactggaattacctgggagttttagaaagcctagcttctctcccagagatattgaatgaattgctatgagatgtggtctggccatcagtattgtggaaaactccttggagttattttaatttgtagccacgttgaagaaccaatgttccaggccaaaatatcatctggacagacatcttcttttatgaaaa

SEQ ID NO: 14731 - DNA, 201 bp, Bos taurus
gagctgatgatagacaggaaggcctggcgtgttgcagtccatggggtcgcaaagagtcagacaggactgagctactgaactaaattgaatctgtccacccgtcctggcctctcttctcagtcccttccagagcacagagctgataatcagttatagttcccctcaggtctttcaattactttgttatttttattttactgt

SEQ ID NO: 14732 - DNA, 201 bp, Bos taurus
gactctgagtcatcttgacctcctaacagtgacagacagctaatctcagaaaccttacttcttccatctcatctgtaataggcctcttcatttatagtctattataaaatatcttgtagtatatttctgaaagttagggatgtgtgtgtgtgtgtttgtacatatggccatacacatgtaacaaatatcagaactatttaa

SEQ ID NO: 14733 - DNA, 201 bp, Bos taurus
agtttagacaatgtagttccagaataaagtaggaaattaccaaacttacttaaatagtagcacctatttaaagtacgcaaaaagtaagcaaaagctccccatcagaaaaatacaaattgaaacaacacagtatcattacacacctatcagaatgaccaatatccaaaaccccgacaacatcaaatgctggcgactctgtgg

SEQ ID NO: 14734 - DNA, 201 bp, Bos taurus
actctgatgatatttcttccaaaattccataacctcagtctaattgcaaaaaaaactaacaaccaaaaaagataaacctaaactgaggggacgatccacaaaatacctggtcattcctctttggatgtatcaaggtcatgtaaaacaagaaaaatccagagaaactctcacagtccaggggagatagaagaaacatgataa

SEQ ID NO: 14735 - DNA, 201 bp, Bos taurus
tactcatgactggacagatggatgacctaaactgagcactccaactcctttcccatcaatgatggacaaaaagaaaacacccattaaaaagaaactacatcaaagaatccacctgccaagcaggagacctgagttcgaaccctggatcagaaaaatcccctggagaaggaaatggcaacccactctggtattcttgcctgg

SEQ ID NO: 14736 - DNA, 201 bp, Bos taurus
ggacagaggagcctgccaggctacagtccatggagtcgcaagagtcagacgtgactaagcaactaaacagcaacagcaagcactgtgtgggaaactggccacaaaactgagcaaaccagtgaaggtcctgtctgctgtagctgacagcctagtgggtattttcgttaccaatcatctctggatgttcctgggactatggcc

SEQ ID NO: 14737 - DNA, 201 bp, Bos taurus
ggtctaggagctcagggaaattcagggacaggtaggcaaaggaacagaccccttcatcttggacaccaagcatggagggtatcaggcctgtggaaggggagtaatctcctctactccagagtttgagtgaagctgggaccccaagagttctaagcagtgagtaagtatcagtactaaggaaggaggcaaagaactaaaaga

SEQ ID NO: 14738 - DNA, 201 bp, Bos taurus
caggatgggagaatgtgggcctctgaccagcagctggttggaagaagagagaccagtcctgagggttccctgaattcttggaccctagtggggacatgggtaggcctggagcccctgtgatgaagccacagcaccactgggctcagaagtctcctgatggtgtctcaaactctgacaccgtgttttacaaaggaacaagag

SEQ ID NO: 14739 - DNA, 201 bp, Bos taurus
cccaaaagtctgaggaatgtcatctagttgtgtccccaggaagaaaaaactgctcataagtttggtgaacaggtagtctatttttgctctactggccaagcactctttctactattccaagttaccacccaggttaatttatacccgtcttctccaccaaggtcatgaaaacctgaagactgatgtttattctttgttaga

SEQ ID NO: 14740 - DNA, 201 bp, Bos taurus
ccttaggaagaattactatgatcaaagctggtcgaggtgatagaattctagatgagctatttaaaatcctaaaatgtgatgctgttaaagtactttactcaataggtcaacagtggccacagattggaaaaagtctgctttcattcccataccaaagaaggacaatgtcaaagagtattcaaactaccatacaattgtgct

SEQ ID NO: 14741 - DNA, 201 bp, Bos taurus
caagggatgaagaaatgtatcccaagcaaatataaatcaaaagaaagctgaggtagcaaaataaactttaaaactttaatcagacaaaataaactttaaagcaaagactgtgacaagagacaagaatatcatataaagggatcaatccaatgagaatatgtaacagttgtaaatataatgcaaccaacataagagaaccta

SEQ ID NO: 14742 - DNA, 201 bp, Bos taurus
gagctcttattccctatccaatgtcaattctcatggtctttccctctgaactgatactgtctgttatccactgaatcagatcaatcttgaagcttcctgttccttaccagcagattcagattcattgtgtattggctggtatgccacaatctgcatgacaagtactttaagatgattctaatgtaggtaagggatccacga

SEQ ID NO: 14743 - DNA, 201 bp, Bos taurus
gactctatatttaaaaaaaaaaaaaaaaccctcaatttaggaaagggtgaaagatctagacatttctccaaagaaatatacagatggccaagtggaacacgaaaatatgctcaatatctctaaatattagaaaaatgtaaatgaaaattacaatgagataacacctcacagcagccagaatggccatcatcagaaaaaaaa

SEQ ID NO: 14744 - DNA, 201 bp, Bos taurus
cctacataggtcccacagcagggccaagtgcacggttactgcattactgagacctaagctcagcagacctgaaccagtggctgtatgataatgcctgagagtcatcagggccaattgctagcatacctacatttaaggtgggactaagagcagttctaacaacagtatattttgtgacccttcataatggaggaagggaca

SEQ ID NO: 14745 - DNA, 201 bp, Bos taurus
tgtagaatctcagtcctctggccagagttcaagcatgaacttttggagtgggtgtactgagtccaggacctagaatgcaagataactcccttacctcagggattattaattagtgagaactatcactaaagcttccacctatatacaagacctggcttcacacaaatactggaagcacccagtgcaggacacttcatgcac

SEQ ID NO: 14746 - DNA, 201 bp, Bos taurus
cgtgtggggaaaggtgttagtaagtgtccactgggcacaggccacctcctgctcagaacactctcctcttggacagttacgccctgagtggtaatgcagcgctgtagtgatagaaggaggcccagatctgactttgggaatggatgtgagtaaaaaatttggttttaaacaacaaaggtttttagctggtcttggtaaaaa

SEQ ID NO: 14747 - DNA, 201 bp, Bos taurus
agaggcctttgggttatgtccagtgccatggtggccacacccatgataccttgcactagggccacatttttctctggcctttctccccagcatcacaaaaactcaattagggtggtagaaaaaacccaaaaaacccgaggagtctcaaggccacagggtcccttatcctggctacctggacttatgcccttgaacctcagc

SEQ ID NO: 14748 - DNA, 201 bp, Bos taurus
ctatccttcaagctccggctgatactgctgagaatgaccgcttgagtgactgataaaatgtcaagatgccattatttccaagagagtgtttgggagcaatcagatctgtttcaatttatctcatacacctgaatttaagtcttcagatttaacttcgttggctgctacaaccaaattgtctctgggttttgaaagaacagt

SEQ ID NO: 14749 - DNA, 201 bp, Bos taurus
aatgtactttcagagagtgataagttttctctttataggctgaatgagattcttttttaaatatactgaaaataacttgtagacacttccattcttctgtcatttatctaatgtggtctgtacttcaacagggtagatggcaatggcactccactccagtattcttgcctggaaaatcccatagacggaggagcctggtag

SEQ ID NO: 14750 - DNA, 201 bp, Bos taurus
tttctcatagttttggagactacaaggccaaaatcaaggtatcagcaggattggatccttttgtggcctgtgagggatgaatccattccaggcctttcttcctaggttacagatagctgttttatcctccggtgtccccgcattgtcttcccccatatctacctttgtcctcatttcctcttcatataaagacagcaatca

SEQ ID NO: 14751 - DNA, 201 bp, Bos taurus
taagtcctggaagccatgagagatgaaatgtacatgaaatgtgtgttcagccttcagaatctttcatttacatttgggaaaaataaaaattgtatataaataactactatattgagttatgagataggtgcttgtttaattgaattaaagagtcaccagggagagggtaaagagagaactgtcttttattcatgacatcat

SEQ ID NO: 14752 - DNA, 201 bp, Bos taurus
taattatatgtacagtgcaattgatatttaatcacatactgccttttgacaggtcgtcttttgctatcttgaattcatatttgcaatttgaactattattttcattcattttttacaaaatcagaatctaagtcttgatgccaatgtccatgactaatatttactttgtaattttcacaaaattcagtacagtattttgtg

SEQ ID NO: 14753 - DNA, 201 bp, Bos taurus
taagggcaggccgaccccaaaggagaggtcgcaatccgtcttggcttccttcttttatacatttatctcctccccgtcttgagcctgcactatacttatatgcaacttgggctggccaagaagggtgagtgtttgtttcatctgaagttctcactctggtctgtggattttcttttgttccattttcaggggcttttccct

SEQ ID NO: 14754 - DNA, 201 bp, Bos taurus
aaaatatctttaatctaatattaatccagaattaagtcttaatatattccagacactatatccaaggggtctcttcacttgggcctgatttagatgatgagttctggactatgagtagatgctataatgagatgagacccttggatgcttgaaagagtatcagtgtattttgcttatgaggaaatggatcactggaggcca

SEQ ID NO: 14755 - DNA, 201 bp, Bos taurus
tgtatacacttgtatctgtttcttccaaggctaagggccatatcttacacaaggctgttagttacatatatgttgtctaataatacataatgtgtgatccgtgacttctcttggccactcagagttgatatctctgtggcagcagcacaacagctccacacccctctatctgcaagtccatacaaataggtttccacacca

SEQ ID NO: 14756 - DNA, 201 bp, Bos taurus
tatggtccctttcacttggcatcagagtgacacagtatttctctggggatctcttgaaagtgtagattctgattcagtaactctatgttggggcccaagatcctgcatttccaacaaacttcagctgacgatgatgctgtccagagaatcagtttgagtcataaggccctagaagctcactgcttaatatcttaaaatttc

SEQ ID NO: 14757 - DNA, 201 bp, Bos taurus
cctggcctggacttggttttctcatttttgtaatgtttgtgtatgtgtgtgtggttcttttgtgagacaaccttgaaattctaatcatggcaaagaaagtatacaacaggaacactacaaaacaatggattgcagttcttgtaatcactgcattttgactcaagaagggggcctcagacctacttccacaattctcaaggg

SEQ ID NO: 14758 - DNA, 201 bp, Bos taurus
tgtgcacagactcatataggaaaggaaatgtcataactttagacatttgatatgaatgatatccatcttctttttgtacagacaaaactgtttctttcccctcttagcaaaattattttccattcctttggttcctttaagtttttggtattaaaatgtattaatggtaattataaaaatatattgcatgtactttcagat

SEQ ID NO: 14759 - DNA, 201 bp, Bos taurus
tttccagagtatggattccaacagatggaattataagaaggtccaagtctaattattaactccaagaacaggtggtgtatttcaaacatcccatttccaaacaaaccttgacttaccaaagaagtccagggagcataaatgaggacttaccagttagctgctagcttatgttaacatataatttactattaaaagaaaaaa

SEQ ID NO: 14760 - DNA, 201 bp, Bos taurus
gcacccagggttggctggccacatttggagttagatgggactctcccaggctcacctccagaagaggaccatctgagggtgctcacagcaacattgccttacttcccaggctcatcaacaggcctgagatagcttcttttcacttctattaatcttgttaacaatttaatgccttgcatgtattcttttctgaccagatct

SEQ ID NO: 14761 - DNA, 201 bp, Bos taurus
gaagagtaaaggaaatatggaattctgtgagtcatgtagaatttaggaaatggttataaataagtgtgcagtcttctccacttcttctcaccttctactttaatggcttgtctctccaaaagaaaatcaggatgttagagcttctgatcctcctggactgctgttttttatggtctatgtgactattcctccaatatgaaa

SEQ ID NO: 14762 - DNA, 201 bp, Bos taurus
aatacttataaatcttcatttgtgagaaaaatttccataccaattaatcccactttgggtattctaaatataccagaatatactcatattccaaaaggctatattttcaaatttcatagaactgtcagcagttattaatgtacttaacagtatttttaatctgtgttggtgtttctgcttccactgccttgtaagctactg

SEQ ID NO: 14763 - DNA, 201 bp, Bos taurus
aggtgggttaaggtggaggttctttgaaccaataagtgacctgtacactaatgtatcgatgtgtatgtagtgcctttctcagatctattccatccattgtctaaggaaacattttcggggaatttgaatgcagtatttttccccctcagtattcttcaagacagagactgtctaagaatgttccagttctctctcccaggc

SEQ ID NO: 14764 - DNA, 201 bp, Bos taurus
ccttgagatctgctctcaatttcattcacctgaggcttcagtgtgctttaggatagcatctgtctcatatgtatatggcttatctccatacagagttccagggttttgtggaataaatactagacatctgaaatctttcaagtttgcttcataattctgcagttataccagaggatcgttgtatttgttggtgaatattca

SEQ ID NO: 14765 - DNA, 201 bp, Bos taurus
aaaatggccaagttagctccctgcaaataaatgactggcaatggccagagaagtgaggcttggagagcataggtgaaaattaccgaatagcattcagtcaccctcttctcaactggcctcaaaaaaggggacacttgaggcagagagggatcaggatggctgacgtaaacagtgtataaacactgtttatataaagtgtta

SEQ ID NO: 14766 - DNA, 201 bp, Bos taurus
ttacaggctgtaatccaaagtgggctcaacttgtggaacatcagtccttcacaggacaaagggagagggcaggctgcacagtcctggggagcaagaaggctggcctctgagattttatgtgcagagctaggatgttaccagtgctagctctaggtaggaaaaagaaatgattctctatcaagagttgtgtgtggccaattg

SEQ ID NO: 14767 - DNA, 201 bp, Bos taurus
tacctactttcaaggaaaaaaaaaaaaagacctttctattgcctttcaaaatctctagaaaagcaacatggctcctctcttagctttcttgccatcatattattaccttttattttctttaataggctacagaaaccagtaatatgataggaagtcattaatacaatataatcacagcagaagatcaagctcatctctttc

SEQ ID NO: 14768 - DNA, 201 bp, Bos taurus
tctgtttaggtttgtcagatgggacatattagcaaaagcctagagtgaagttgcagaaagaagtaagagtgtttatcccccatttcttcccgctttgctatggttgtaatgttttcactcttctagggccacaacttctgaatagcttccccttaacatcactcatcattggtgacgagacacaccattttctcttaccga

SEQ ID NO: 14769 - DNA, 201 bp, Bos taurus
acaccctgcaagcttgagtgcttatcaagccagcactgataagatggttaagaagggtgtgtacagagggtatggaatcagagacagaattcccctgggtctcaacttttatataagtcaccatccttgtcaaccagagccaccactttttgggtgttcaccccaaatgaagcaaggcactgcaggaagtcttacttcacc

SEQ ID NO: 14770 - DNA, 201 bp, Bos taurus
ccttggagtactaggaaatgttgtaggtgaataatgtcaagcttaaaaacgagcccctgaactcagaaggctttagacctggcctcaagctgcttgcatcaccacccttctccacaaggggtacagatttcatgggaagacatgaagaggcagagcaaagcaatgatgccaacaatcaagtattttattaaagcaccaact

SEQ ID NO: 14771 - DNA, 201 bp, Bos taurus
gccatatatctatccatctgactacgaatgggcatttttgtagtttccagtttaggagtattaagaatagtgctacttctggcttctgcttgaaatgtacgaggctgaaagagtttgtaactctcactcttacaacaacaaaaaaatgctgtacaatctacaaatttataactttgcttgaacttgtcagctatctgagct

SEQ ID NO: 14772 - DNA, 201 bp, Bos taurus
acggttctgaggcctggatatcaaccttgggagctcattagaatcacctggggagattttgaaattcccagtagatagaccacatgcatgcatactcagtcgttcagtcgtggccaactcttaccaaccccaggaggcccaccagcctcctctgtccatgggatgtttcagtcaagaactggagtgggttgccatttcttt

SEQ ID NO: 14773 - DNA, 201 bp, Bos taurus
aggccactccaggactcagaggttcactggacgcctgtttccaaaagctttcccttcagtacctttctccctccttctatgagaaggacgtgacctcctcgcagtggtagaggccctggcatttcactgcgagccaaggtagttggccctcagccatggacacaggcagaaaaactgaacatccagccaaggaacttcaga

SEQ ID NO: 14774 - DNA, 201 bp, Bos taurus
gacccgcccggccacctctgtgcctctccccagggcagaggcactgttcccctgggctcccagcgaactgcgaagcagagagcatcccgtgcctctgcctccccatgggccctggcctggccagcctgctgaggcagccttcccgagagccagcacctccgctgcccatgtggcctcagccctcgacccaggaacacagag

SEQ ID NO: 14775 - DNA, 201 bp, Bos taurus
gctcacagggagagatctgagatttctgtccttagaaataactgtataaatgctccttatctaaggggggtggggtgaggtgaagaagaggcctcctccccacccagggctgtcattcagatgaggggaggtgtctcaaggaccttggctagggtccccgggagcagagtaggccaacaacgtgctccatgaggatccagg

SEQ ID NO: 14776 - DNA, 201 bp, Bos taurus
taagatggcccagctcacaccaaaaggtgcttttctgagatcttccctaataaatgcacagcccactctcttccatgatgctacacccaataggagccaggacaaggccttcccagttgcttgctgagcctccagacacagcgcccacacaaaatggttcaattttaaaggaaagaatggcctgatggcagaagggaaatt

SEQ ID NO: 14777 - DNA, 201 bp, Bos taurus
tggcagcaccagagagcacacgccccttgttcagactgcaccgccggccaagcctttagaatcttgctttgtgtccagactgttttcgctagtctgacttcatctggggaccactcctttggccacctggagctttccctgagcagtgaaagttcttcttgaaaatactttttctagacacaggctcagtctcagggtaaa

SEQ ID NO: 14778 - DNA, 201 bp, Bos taurus
caaggaactgaggttggcctccagccaagagttgggtaggaactgaggcctgcagttcaatagcccacaaggaacggattctttgcaactacatgtgagcatggaaagtggatcctcccccaggctgtcaacacctttattgtagtctacaagagacctgaagcaaaggaaccagccaagacttgactggaattctgaccc

SEQ ID NO: 14779 - DNA, 201 bp, Bos taurus
ttttttcaagcaggctaaattgtaactactgtaacaagtataaacatatctaaggaagtgtgatctgtttgtacagtacagaaacggcctcaaacttttttagtgtctagatttgcccaggaaaaaggtattcaatcaaacggtctgctaatcacaaatattctgtttctttttcttgctcagcctaggcctactctttcc

SEQ ID NO: 14780 - DNA, 201 bp, Bos taurus
acaggcggctgcggcacacctccttccccagtggccagtgctgacggtccaccacaaaatcctttcgttgaagaccacacgtgggccctccgggcaccacggacaattcactaaatcccacctctgagtcatagggtcatagagagccaggaggcagctcccaggaggccgagtctggcgacctaactccgaggcacttac

SEQ ID NO: 14781 - DNA, 201 bp, Bos taurus
ggttccactcagtgtgtgcaggtgtcacgtgggcttattcacatcaccttgtggaaactgcgacttgcagaaatggcacaaatgctgctatcttggctactactatcgctgtgagtaataaagtcctttgtttctgacccaggagtttcgtgtcttctgccaacatccatgagatcatggcgggctaacttactagctttt

SEQ ID NO: 14782 - DNA, 201 bp, Bos taurus
atcccagctcatttccgtcagcagagagtgaactctctcttgctcagccttttgttctattcaggccttcagtgggttgtatgaggcctgccaacagggaggagggcaatcttctttactcagtctaccaacgtgaatgttaacctcatccagaaggttaaggatacacactgcaccgacacacagtgatgtctgatcaaa

SEQ ID NO: 14783 - DNA, 201 bp, Bos taurus
tgtcacctacttaaacgcttccaggtgttgatcaaccagtcacctcccaaggcctttcctatgaccagtctgtctgtagaccccaggcctgtggccctccgatgggataccatcagaaccagattttcccaatgttgggggtgggggggaaatcacatcaactcagttaggagtgaggaacaagcccatttagtacaattt

SEQ ID NO: 14784 - DNA, 201 bp, Bos taurus
aatatttgcctcaatttttttcagttgtttatttttttcttgggcagccagttagatctcatatcctgcaacagctctgaaaatgcctctttcgataatatcaaataatttctcgatgctatattttagccctaggacactcctctcagaaacacccctctggccgtcctccaccctcctgctcctctcagccctttccta

SEQ ID NO: 14785 - DNA, 201 bp, Bos taurus
cacccagaaaagcaagtgggtggaagaggctgttttggccacagttgccctccattctactttctcatcacaacttcatcttttctcaccctgagacctttggaatcccacagaggcttggccagtgcccagccgggtgaaggagctggctgctggaacaggatgagagctatattcccagtacaatggggcacttgcttc

SEQ ID NO: 14786 - DNA, 201 bp, Bos taurus
agaggcccccaggacagtgaagaagatgggtttgcaaccagatcaccgctccatgctgcagagtgctggagaaggggcctgccttcagaaggttgagcctccctcacctgggactccagagggtccagagaagggggaggcggggagcgttccatgttcggtggcctagaggcacagaaggctcagaatattcccaaagca

SEQ ID NO: 14787 - DNA, 201 bp, Bos taurus
tctaatgaccacaatccaggcccctctttcgatcctgttctgtccattagcattagaactatgtaacaggatctttcctctttgcctaactaagacagcctgtggccagaggtgtccatgggacactctaggaagtgcagctggacatttcttttaaaacgattctgtttttctcccagactggtgctaatgtccctgcct

SEQ ID NO: 14788 - DNA, 201 bp, Bos taurus
aggcatggagcagcatcgctggtgcatatggcagcaacagcaggtactgcatcgggaaaaggggaggggggtggggggaggcctggggaagcctggtctcggtctgtgccaggcacaagttctttaccatcgcacctcatgcctgtcgtgaccttccagtgaatgcggccctatcatcctgactttaaagatggagaaact

SEQ ID NO: 14789 - DNA, 201 bp, Bos taurus
ctccacaatggagtgctgctgagaaggccgagtggagcacccaggctggtaacaaggcacccttccacaccatgtcccctgagaatcctggacctctaaccccacctggccataacagaacactctctctacttcttaggtcaagggacgtcaaggggggagcctgtacttctactatacctagcagtagcaaggctgcac

SEQ ID NO: 14790 - DNA, 201 bp, Bos taurus
tcctgaaaatccccacccctttcccaaaggaactggaatactcctcccactcattagcctgtgaaattacccactcctacaaaaactgacaaccccataccaaagggcctctcttacctcttttgccttccaagacggccctccctctgtctgtggagtgtgtttcttccctgaataaaccttctttcactttgctgtggc

SEQ ID NO: 14791 - DNA, 201 bp, Bos taurus
cagtgaggggctgtttccctgtgtgggggcctggccagaaggcccacagggtcacacctgtgttgagccctggttacaaggctgtggaaagtgcttcagcactgggggaagtgggggccagcgttcactgcccagctccctgcaacaagggaggcgataaagccacttgctgcctgccctctgaggagggggccttggctt

SEQ ID NO: 14792 - DNA, 201 bp, Bos taurus
ccattctgggctgaaacagcttagcgtgaagctcactaaaactgggtcctgtacttcagagtttctttgggtaatctcttctttcctgaaggatataaaatcactgttaacttacagcgatgaaaaaaaacctctaagaacttgtaataataaagatcagtcactggaataacatatggagtggggtcagggtggagaccg

SEQ ID NO: 14793 - DNA, 201 bp, Bos taurus
tcagccagggtccctcccggcccgctgcttggagccatcccacagtgtgctaaccagctctgccctgggagaacatgccaggggacaatgccgacagcccgggcccgagccccagtgcccgaggccttcccgaccagcggtcaccgagaggggcgagtggcctgactcagccgggcatgtccagccagtgtgagcattcac

SEQ ID NO: 14794 - DNA, 201 bp, Bos taurus
aacaccagtgacttcctttagggtaatgcactcatcaaattttatcaaaacaagctgtctgacataagcagcttcgtgccataagctctggcctctacatgggaatcaggaatgcaggaatgggagaggccctgggagcgcaggcaggatggtggcaggacaaaatgtcactggctcccagatactgaaactggcagcgcg

SEQ ID NO: 14795 - DNA, 201 bp, Bos taurus
atctaaaatttaaaaaaaaataagaagcttgcctgtggtcaagtgagtcatgtgtatgcaaagaaccagggtgtgtgtccagcacattaatacagaggcccgtgctcagaagggcagcacacttggggtttaatgctctcccattgctgtcttgattttcttaacaactcttttaacttacattttatgaatgacatctga

SEQ ID NO: 14796 - DNA, 201 bp, Bos taurus
tgaatttaaaatttgcatttatgatatatatatatatatatattatatatttaaacagaaaaattgcaagtattttttaaaatgtaattcaggccttgaaagaattttgaaaatttccaagacactataactaaaccaagaactccagacgaaagattttgaactcacaaatttattgggccatgttcacttgcttcccta

SEQ ID NO: 14797 - DNA, 201 bp, Bos taurus
acctgttttagccatgatagatatgtatatcaatccagtcttccaattaaaatgtaataaaaacataaaccctacagattatatattatgttcaagaagaatgtaaaggcaaaggaatgaaaagaatacttttaacaacatttagatttaatttaacaagtatttttggattctcatgttcagttcactgtattaagtgct

SEQ ID NO: 14798 - DNA, 201 bp, Bos taurus
tcctatactttcatttgcttttacagctcacactttagttcggctttacaccacacagctcacgatgttgtccgtaatggccccctccattgccttttctcctgttctgtcttcagtgtactctgcagctcactgaaagcacacagctcgaggactggtacagccccaggccactggctctcagtcctcacctcaccttga

SEQ ID NO: 14799 - DNA, 201 bp, Bos taurus
tctagattaatatattggtaatatctgtttttgccttttaaaactttgacttagcatagtctttataatatcaacatgattgacatgaaactgttattgctgttattcctattagggataattttagaaaacttaaatcacaaaaaatcaattgtagtctgaggattaatttgaggggttataaaacaactttctctgaag

SEQ ID NO: 14800 - DNA, 201 bp, Bos taurus
tttgaatatgctatctaggttggtcataactttccttccaaggagggcatttaaattattattattattgttattttggctgttctctgaaatcttagttcccccaccagggatcaaaagctgtattgggatcttggagtcttaaccactagacttccacagaagtctcaagcctttttgaataggatcagtctcgagaag

SEQ ID NO: 14801 - DNA, 201 bp, Bos taurus
aaggtcatttactgccactttatttggctttgcttaaaaaaatatctcagctatccgttaaatgttctggaatgtccctggcctcttttaggaactggaggcgagaagatatttaaaggtggttaacctgtcctccctaacccagcctttaaaaatgcattttaaacctaagcatcaaattggccatgtggccttaacagt

SEQ ID NO: 14802 - DNA, 201 bp, Bos taurus
gaatctgctgtggggttgagaacacaccaagttaagaaaacaggttctggtgtctctttccctgtttaaggcttccaaaccaagcctgctaataccaatcgcgtatgttatggaggacactgtattcctaattattttagggtaatgtatttagctacacactaaattaacactaattgaacttggaagaggttcagaaag

SEQ ID NO: 14803 - DNA, 201 bp, Bos taurus
ctgtgttgatgcgagacaggagagcgaatacgcagatcacgcactggccccttaaagcatccacccagcagcgctgcccctcatgtccctcttgtattttgtttttcatggcagatcccacggccacatctaacgtcgggagcatggaggtgtgcagtcttcagtgggccaggagtgtgactctcaagagtcttgtgctaa

SEQ ID NO: 14804 - DNA, 201 bp, Bos taurus
ctctggtgactcactgggtgctgctcttgggtgtaccttgttagtactcccttgcaagaggttgtctgacttcaagaggtagagcttccagggttctactactaagactgcatgtttaaccccctggaaatacttcaagtgggtaattgctctccaccttttaaaatcaatggattgggtgtgtctgtttcctcagctgac

SEQ ID NO: 14805 - DNA, 201 bp, Bos taurus
ccccatctctaaatacaaataccatagcactcagagttagggcttcactatatgaattttgtggggacaaaattcagtccatagtgtccttcttcatatttccctagccattctggcctaataatttgcatggagaatgagatctcatgattggcttggctgactcagttgaagtaaaaggaacttgggggagttgaccac

SEQ ID NO: 14806 - DNA, 201 bp, Bos taurus
cgtggacggtttaagccggctccagagaaacctccaagaatccggccggcagctagctctctacagcgagcaggtttccctagtcattccaccagaagtgtgggaagggcggggcgagccggccggaagctgcgagaacagccacacaaggtttgtccactgtttccagggaggaccaagtcggcgtggaaggcgaatggg

SEQ ID NO: 14807 - DNA, 201 bp, Bos taurus
ttcagaaggtggtgaactggagtgggggaatgggaagctgttcatggttctggtcactcccagctgggccgggcaagagggcatccttctcagggccctcattccctctgcccacattttcaatctacttgctggtctccttagtgaatgatgttatgagggacactttggctgaacccacctgcattggccagggcacaa

SEQ ID NO: 14808 - DNA, 201 bp, Bos taurus
tggcaggaaatgatccacctgggaatttacctgaaatttacctgaatccacctgaaatttataactgatctacctgggaagccccagggatagagtaggataaccaaaagctagctcagaagtcccattaggagactgttaatagacagggaacttagtgggctttgggagaccacagtaagtaaataatcactcaagcaa

SEQ ID NO: 14809 - DNA, 201 bp, Bos taurus
ttctgattattagtttaattctcatgcataaacagagtcacaagtcagctctgtgtgttctagaccccagagcaagcttctgttgagaataggccccggaagtaacagcaaggcgacttcctcaggacctgcaaggctgctccagagggtctagttcctctcacctcaaggtggcctctgcagaccttgttgctacagcag

SEQ ID NO: 14810 - DNA, 201 bp, Bos taurus
attagcctccaattaaaataaatttatattttaaaaaaaatccagtaaccaactatagaaggagaaatgatcatctctactggaataagagaggatgaaccgttttgacttgaaattttgtccaatatcaaggtcctaatgaaaataaaagactcaattataatacttttaaaatttaggactcattatgtatggatgtga

SEQ ID NO: 14811 - DNA, 201 bp, Bos taurus
attcattcttgataattctgccagcaaactttggacagtagagacaagggatggtgtgtaattatgctaaaccttctaatcaataggacttagaatgtttggtggcctagacttctaccttagttacttatactaaataaatcttaattttagtaaattattttattgatcccagataaaggataatacattgtttcttaa

SEQ ID NO: 14812 - DNA, 201 bp, Bos taurus
attagggtctatagtggggtagagtgtgtatgggtgagggtgaggttggatgttagtgatggtcattttcaataggtggttgggccagcctaagtgagaaggttatccttgatgatttttgaaagaggtgaaagaatcagccaagagctttgggtcagagggtaaagtcagttcagaggccctaaggtgagggaatgcttg

SEQ ID NO: 14813 - DNA, 201 bp, Bos taurus
tgaacaacagaaagacaagagaagaagctgagcaatcagtgtggagaataagacagtcatctaggaaaaatgacactgtggccttttcattaagctcagggcaaaacttaggctcacaggttggtttcaacactggatcagtgtattaaagtctgtcagaaatgtcgttttctaaagaactgttattggaatggggccaat

SEQ ID NO: 14814 - DNA, 201 bp, Bos taurus
tgcaaaatttaaggccatggcacatgataagtgctcagggaaaatagaaagagcattgcatttgtgggtggaagactggaacagaaaatgtgttccacctaatgcaggggaggccaaattctccaggtaagaacacaggagtgggtagccattcccttctccagggaccttcctgacccagtgatcgaaaccaggtctcct

SEQ ID NO: 14815 - DNA, 201 bp, Bos taurus
ttttaaaaagtcaaaatgtataccttccacagaccacttaagtttaagcatcccatctcattttaaaagctgacttagggagctatttcccaaagagaagtatgtaccttcagctggaaggatctctcctcttagtggttgtatcagtcagttcagtcactcagttatgtccgactctttgcaaccccatggaccacagca

SEQ ID NO: 14816 - DNA, 201 bp, Bos taurus
gctataacccaacaaaataaaaagtaaaatgttctctttagaatctttttgagatagggtagttacgtagcctgtaaggatgttctggcatcagcaaagagcagttttgtatggatttacttctagaaaatagaaaaatacaactagaaaaatatttcataaagtatttatgaaaggaggttaagacaagggagatattga

SEQ ID NO: 14817 - DNA, 201 bp, Bos taurus
ctgcaggcaaatcataccttcctctggacattctttgaaggcagaaaaatgtaatactgggaagaaagataacattatataattattcactttttgctcttaaaataatgctgttcatggaatcttctaagtattctacttatgatgcaggcatttagttcatatatatgcccagagcattgcatgtgacactgaaattac

SEQ ID NO: 14818 - DNA, 201 bp, Bos taurus
gaccagagctcttaccctttatcgtgtttgaagttctccaggctttactcggggcctattttaagttttagttctttctggagaaggcctttttctgtatgtgagtacttattaatactttggtctgattttgaagtcagattgattcaaccgcagttgtctttccactcctttggaagtggcctgcccactgaaactgtg

SEQ ID NO: 14819 - DNA, 201 bp, Bos taurus
agagtcaaattataaatagtatgaagagtttggagaacaactgtgcttgagggtgacttactttttcaatctatccccattcaatgtactcatctagatgttctatgtatttattgtctaagaaacctcatgagccattttcccaaagttgactatttaataaagggaatcagataacaacttccactgaaaatgtttaga

SEQ ID NO: 14820 - DNA, 201 bp, Bos taurus
aaatgtatgcaggccattttctaatggtcatcatatcccttggtgagagcttaattttattattcagttttagaagttacttgaaacagaaactttgaaactttttttttttttttaactcagtggccatgatactggaaagtcagggatatacaaaagttgtcagccacaatgaacattaagaatttgaaaaacaatgaa

SEQ ID NO: 14821 - DNA, 201 bp, Bos taurus
gtgggcaatcctgtttgcaaacagtgagtctgtcaaagacaatccctgggaatggagcttgcaactgtggttgacacaggttaaatagtgctagttctctggggatgaagatttggggtagctcccagcttgttttccctcctccgatggctgctatactacttgctttgacagcaactatagctgcttctctggtggctc

SEQ ID NO: 14822 - DNA, 201 bp, Bos taurus
gtgtccactggctccagtggccccgggagggttccccggcctcgagctgctcccaagtcaccgagttctgcggctgcagcaaaccgaggcctgcaggtccggacaccagcggcttcagacggcttccctagcaccaagttctcgcgaggaggttctccgtgaactgaggctcagctcacctgggcatcagcgagctcctgg

SEQ ID NO: 14823 - DNA, 201 bp, Bos taurus
gtaataaaataggaaggttgttgaagtagcaagttaacaaagaagtaacaaattttgttcctacaggcttcttggccttgaacttcctatttctggtgataagaatgtcttcaactctcttgatggatagtaccttcacaagcgagatttatttcttgctttcagaacaaagggtaggttaggagggttaaggtgtccttc

SEQ ID NO: 14824 - DNA, 201 bp, Bos taurus
ctgtttttcatagaatgaaattaaatacaacaacaatggaataccactaatcatctattaaaaatggcaacaatccagtacaccaaatgctggcctaggtatggagctataggaaatctcactcattgatggtggaatccaaaatagaacagccattttggaagacagtttggccttcctttcaaaactaaatatactctt

SEQ ID NO: 14825 - DNA, 201 bp, Bos taurus
tgtagaatttgccaaaccaaactaaagctccagaatttgaaggtaatggacactttccttagcccttctgaaggacaatcagggcaatttggaggcagctcattttacttaacaagagctaaagcatttatagagttggctgtccttaaggggaaaatactgaattatagaccataattttatgcataatttaactcccct

SEQ ID NO: 14826 - DNA, 201 bp, Bos taurus
aacttgaaaacaatgtttagtgatagggttatatgaaagctgttgagaaatggaaagattgctttctctaggctcaaataggtcagattcagtgcaaatggcctcatcttatttgtgtgtatccaaagcacaaatcttaagacaaatttatttgtgctaattttatagtcagttcagaatgttagaaccagttgcccctct

SEQ ID NO: 14827 - DNA, 201 bp, Bos taurus
gaattcagtaatttaggcctatgattatgtattgatttagagattaaagtagaatcaccactttctcttagaatttttcctatttgcaaaagaaagttcacgggctttggaaaagtactttagctttacttattgtttgaaaaattcaagaatattttgaaaatatttatttaccccaaggagaatagcacaagtattttt

SEQ ID NO: 14828 - DNA, 201 bp, Bos taurus
cccttccagaaccctgctccttcaactccatgtgtttgcagtgagttttttaattgatagacttgtatcttgcttaccccacccatccatgagcccaagaacatgtgacccaaggtagccccaacccctctcccttacagaccttacagaccttgtgaatgacactcatggggtgaaactggaagaatctgaagacctttc

SEQ ID NO: 14829 - DNA, 201 bp, Bos taurus
agatctgtgccacagtttcctttttcttcttggcagcaatgttattaaacattcttcatgacgataacccccaacagaaactttcttacttacatagtttttactacctttcaacttggtttggttctgttgatgaacctcactgactttgtatttttcacatcaaaagaccctgataagctattatgtgaaaattgtaaa

SEQ ID NO: 14830 - DNA, 201 bp, Bos taurus
ttgcagtagagaagtgaaataatccttataattgaaaaaactctctctgggctctcctgctgagagagactgcagggtgtcaaatgtaagcagggaggctggttaggaggttatggcagaaaccaggtaagaggggtggtgactagaaagagagtgtcactcccttcatgtgatgaaaacagtgtttaatatgtgtattat

SEQ ID NO: 14831 - DNA, 201 bp, Bos taurus
tgatgaataccaaaagatcaactcttttattgttagtgattttttttttttttggtattgctagtgacaattttatagaaatatgcctatctacaggacacatggattttctctcctgttttatttttttctccagagtgtatataacttgagcttatatgattagtgtcattattcttcatgaattttcatgtgtttggt

SEQ ID NO: 14832 - DNA, 201 bp, Bos taurus
gagtttaaataattaatctaaggttacataactagcagaaaggggacctggaattctcaaatgcgatcttactccagtgctctcatgcatggccagctacgtaatttgcagaacctagtgaaaaatgaaaacgtcaagccacttgttcaaaatgcaagaaacactgctgttaaaggtagtaaaatactaagtgttttactt

SEQ ID NO: 14833 - DNA, 201 bp, Bos taurus
ttagcatgtgtccttatttggcatatttgtgactgccggtcaccaatatcaaattttatttgaggtaaagcatctttgaaggttcaagtggtttaaactgcaacctacgtcctcatgctaaacataaaaaggtagactgatcatgatggatatagaaagggaagtaattgattccttggtctgaatttttctctcagttaa

SEQ ID NO: 14834 - DNA, 201 bp, Bos taurus
tataacacgtgaagtaatttactattccattgttggtaataccacaggaaattgtaagtgtcttaaccatatttcaaattagactgagtctatcttaaggattgcatatccagacacaaataaatacctatttcaggcttcattctgcgaggagggcatatatggagactagtcattccacaagttgaaacagaccaagaa

SEQ ID NO: 14835 - DNA, 201 bp, Bos taurus
ctgaattaacaacatatgaacaattcaggaaattttaatactaaccttattaattattaacaatgtggattcaatgaatgttagacccatatgtgcatcaaaggtaagagatatctttagagggacgatatatattaacaaggtctcatatatgactaggatttcaactaggtgagaagaaggaatgggaaagtttcaggc

SEQ ID NO: 14836 - DNA, 201 bp, Bos taurus
aatggactcccttccacacagaagagcacagtcctggccaagcagctaaaggctgcagggcattgtgatggggtttggacaacaaagcaagtgcaaagcagtatgggcaactcccagatcacatttctatcacaaagctattcttccctttcccctctctgctggatgacagagaaatggaaaccacataaccacatgcag

SEQ ID NO: 14837 - DNA, 201 bp, Bos taurus
gggctagtccaagactaacaaacagggcagagctattcacagggaaggactacatacagcagagcctgtagcatcacctagggattcatcagggcttcctcgagatggccctgaacaagtcttgaaagaagaaagcaacttaagaaaaaacggggaggacttttaaaccccaactgcatcataaatgaaggtcttaagggt

SEQ ID NO: 14838 - DNA, 201 bp, Bos taurus
aagcagctatgcacaacccgatgaaatgaaagtggacatgaattcaaagctatagaatcacaagttagatacagcatgagaaattgcttcttgacagtgatgctattaaacacaacaatgagttactagggaaaattatggaaaaccttccttttctgaaagtcatttaacatggcaaaatatatctatgtcagatggttt

SEQ ID NO: 14839 - DNA, 201 bp, Bos taurus
aaccaatcaaagagttcatgttcagaatgaatctagagcccgtggctataatgaaatgtcctggtacttcatttctcattcaaaaatcaagtaatatccagttctttatgggtcactgcaacttttctatcagattgagtaaaaactatttccaaatgttaaggacatataaacactcaaaatcctcccaggctgtgtaca

SEQ ID NO: 14840 - DNA, 201 bp, Bos taurus
aagagcaggaaaggggagcaagaaatgttgggggagttgtgagaagtcctagtttcaagaatgatggccaagcaaggtgtggctgaaaaggggaacatttgaggtctgaaaaattgtgaaattgagattgacgtatatacactactgatgctaggcataaaacagacaactgatgggaacctacggtatagctcaggcaac

SEQ ID NO: 14841 - DNA, 201 bp, Bos taurus
cagccataggagttaatttctgcaaaaatcctttggtcaataatgtgttaaaatgtgttcctaaaaagcttgcagttagaaatcctttctctgacctttgagatggaactcttctatcacttaaaattgactcctcaaagatcttggagaagtctttgtaatgaaaacatccagagaaagaactcccactcttaagtttcc

SEQ ID NO: 14842 - DNA, 201 bp, Bos taurus
aaaatatgtcttttcgttacacaaactttttgctttaaagcaccacatttgaattgcttttcatagagacataaagcccttccagggagctaggtgaggtaggtctatgggatgccccatctacacttccatcagagtgatcatgcttttatctgttttatatgttggagttctgaataagatttatttttttggaaagat

SEQ ID NO: 14843 - DNA, 201 bp, Bos taurus
agctgcagaataaaatcaaggtgacttgcctacctgagggttcttttgcacttgccaacttcattagctgtgttgtttgtgtctgtgaaatgactggcctaagatatactttactgctgtttatttatcctggagtcaccatatttataggataattgttttaccatttgttcaaagttgtaaggagctctctatctaatt

SEQ ID NO: 14844 - DNA, 201 bp, Bos taurus
tttgggttgtttatgatgtttttgacaaataaagcttttaaatttttaattagtcagatctctaaatcttctttatgtgtttgcctcttggcattacttttcatctctctccttggaatcttctttttttggctcccttcctaggttattttcttttgtctgggataagaaatctttctttgtctattcacttttctcaag

SEQ ID NO: 14845 - DNA, 201 bp, Bos taurus
ggccagtttaatttgctgaagtgacaggctacctaagataggtaatggtacctataaatatttactagttctttccatcaacagatatgttttctaaatattcacggagagtaggaaggaataacaaacactgggtttctcccttcctctctgcgtgatgctttttcatcgaatgtaagatcatttctgggctgctctttg

SEQ ID NO: 14846 - DNA, 201 bp, Bos taurus
ggtagaaaggagacataatttcaggaaagaaaagaccaagatccaattaggaaaaaaggaactatgatggtgttgcaggctctagaagagcagggaagcccaggagtggatagtggggctccaagatgctcgagagcagaagggcactgccaccaccaccagcactaggaggacagtaatgttgctggagcccagaagcca

SEQ ID NO: 14847 - DNA, 201 bp, Bos taurus
gccaaggttgtctactctcctaccagctaagctccagacatagttgtctgctcagagacccgccagacccttgcccgcctctcctaccctctcactgaccacccttggctcacagtccctaccccagcctctcttccacttgagttttcatttttccctagcacacgagacaatgagaaacatttctatctcccctggaat

SEQ ID NO: 14848 - DNA, 201 bp, Bos taurus
cacttgtccagttgatactgaggcaggatcatttccaacattgccaaggaaactaggaaactcatgagacagctgaggaaacgatgacatacagaaagatttgtggttaattcagtggaaatagtaatgagcagccatatgtgggtgtatgtgtgcatccacatacatgtgtgtatgagtgaacacatttggtgaaagagt

SEQ ID NO: 14849 - DNA, 201 bp, Bos taurus
ataccacaaagcactataccttgatctagttggtttttactgtataagtgtgtgcaaaatatttgaatgcatatagttccagttaggagtccaaaactagttcaaacactaaagaaaagaaaagggaaaaatgcactttagaaagaataaaacactaactggatttctaaaatgtatacctaatgtgtaagcaacgagaca

SEQ ID NO: 14850 - DNA, 201 bp, Bos taurus
gatcttcccgaccgagggactgaacccactccacttgtgtctcctgcattggcaggcagatccttaaccacaagcgccacctggggagcccagtttttaggatatgtgtaaatacaataatgaaattttctgcattccatttggttccatcacaaagttttgtcaagttcaagaaaacacgtcaaggtctccaacaggact

SEQ ID NO: 14851 - DNA, 201 bp, Bos taurus
ttttgttgttgctgttttggctgtactgcatggcttatgggatcttagttccccaaccaaggatcgaacccctgggcccccccgcagttcagagtcctaactactggaccatcaggcaattccgataaccagcttctaatcaactcatgttttcatagttgtggccaggcgttaacattttgttaattgtattatttcaaa

SEQ ID NO: 14852 - DNA, 201 bp, Bos taurus
aaaggccatcctttcatcactgtagacagatttcaagcaagaagagtttcttcaaatgggactgcatgttgtatatgagacctcttacattttcaccttgatttaggccaaagctccatttcagtgatttatgaaaagttcactttcgagttatcatttggtgtctgcatcgccatttcaaaagcaaagttgatacagaag

SEQ ID NO: 14853 - DNA, 201 bp, Bos taurus
tttatgacttgtaacatttgttgactcaaacgcagggactctttcttttccgaggggcctttcactgcagccaggaatgtgcatgcattgacgcggccatgagctcttccttccgagcctgccatccccctcctctgggctcccacgtcaaccatgctgcttccgcctttggtacaggaggcggggagggttttcccacca

SEQ ID NO: 14854 - DNA, 201 bp, Bos taurus
tctgataagtcaaacaaacaagttgtagtaaacatttcagtaacaacttatatttactgttttcaaaactgtctacaattcttagtaaaaattgcgtaaatagaaattcaagaacatattctaactaggtactgctgcaatacttaaggcagatacactgttttccatgaaaacctgggttttaactgacaacattaattg

SEQ ID NO: 14855 - DNA, 201 bp, Bos taurus
aacctataaatatatcttcatagcttctaggtaaagacgtctttttcaaaatgaaatctcatgatttttgattcattttataattatatcagtaaattcagtagtggttatttaacttttttcagggtaattgatatagtggctcttagtggaatctttgggaagtgaactgcctcacaattaataggttaataattaagg

SEQ ID NO: 14856 - DNA, 201 bp, Bos taurus
ctgctgcctcctatacccatatccattatgtcagatattaataatctttctatctcccctgttatctttctttctacttccttcagataagtataagtgtttctcatcctatgatgtctgtattctcttaaaccttcttttcatcagtaaattgctcaggcttcataatcctgtgccacggtcattgttttatgaatcttc

SEQ ID NO: 14857 - DNA, 201 bp, Bos taurus
ccttacatgaggggcttctgacgtggcattactgttactaataatttgtctttttctacgagaaatagatagcaagagctccttggaataccttggtaagcacgtgtgggatctgtacattcatatttggactgatgcatagagaagtttgccacgatagacaaaggaaagggtatgaaaattcagactaacaaagataag

SEQ ID NO: 14858 - DNA, 201 bp, Bos taurus
ggctctcttggatcctcagtagagtgagaaatatgctaacagtagtgttccttgacttgactccatcaccactctaggccagcaatgtttagattccacgggagttacaaatgatgcccatggcaggcagaattccaagaggacccttaatggccatgtccttgagtatgagcaggaactgcaacttgcttctaactaata

SEQ ID NO: 14859 - DNA, 201 bp, Bos taurus
cctttaattatttctgagcctctgttcctgtgttgagaccattgtggtacattcctgactcaactcatggggccacatgggcctggctcagcaggccagggtggagcagagcatagtgggtcagacacagacagggatggtgtagacccctccctgtactgccagctatggccccaagggcaatttattattcctctctgc

SEQ ID NO: 14860 - DNA, 201 bp, Bos taurus
gcagatcacgtttgtatgaaagttcttggtaaacgcgaagcgcctgacaaatgttgcatatggtacatcatttaaataatgtctgtgtataagtctgcacataatacccaagtatgtatgcacacattcatataacttatatgtaatatgtgcttcagttaatttattattataatctagaataatttcatctaatgctaa

SEQ ID NO: 14861 - DNA, 201 bp, Bos taurus
aacaactgtctcatgaaacagagtgagcaaattgcgagcggctggtggtagacaaccagcagcaagctcaccatcgaaggccagtcagcttgacaaagaactgatcaaaggggagaaataccattatccttggaattgattgctacggtcatagcctttggaggacaagtggccagggtatagcatagccatttccagccc

SEQ ID NO: 14862 - DNA, 201 bp, Bos taurus
ctttctatatccttcccagttttctgtagggctccctgactgtttttctttatatctaaaaacttcttatagctcctggcctcaaagaacacctgaagggacatttttataagtgacttagaggacaggtgtgagaatgaagcaatttttttgatttcctggaattgtttatttcttgtggcctgcttgggaggattagag

SEQ ID NO: 14863 - DNA, 201 bp, Bos taurus
aaggaacttttcgcctctgctgtggggccgctctgagtgggaggcatggctgccatcttgctgtgctgaaagcatcctcatcccatatctgaataaaggacagagaggcccccgcccaggcggcatgtgggggagtgcgcatctcacaataaccgtatattgtgtgaaagtacgagtgtggacagtctgcacttctcggaa

SEQ ID NO: 14864 - DNA, 201 bp, Bos taurus
agagctcctgacctaagggcttccacgtattgatgggcacaagggggcccaagaggtgacatcacatggctgagatcacgcagcttgggaatggcctatttgcaggtgggtgaggtttttctgagtggtgcacatttgaccttggagctcctttctcaccccagctcaacccgtgtgctcccgttcccaggagctggccca

SEQ ID NO: 14865 - DNA, 201 bp, Bos taurus
ggctgggccagtaactgcttgtgccccatggtaacacttcactctgctggcagcaagcttcatactgagtgctcaatccgtgtcaccccaacaagtgctcagcaggtagccacagaacacacccatcactgcctcactaacatgtattctcaaggagctcgacactgagttgaggggaccctcacaggaatgaaacaagct

SEQ ID NO: 14866 - DNA, 201 bp, Bos taurus
accaacacaacattgtaaagcaactatcttccaattaaaaaaaaaaaagcctaaaaaaaaaaaaaaaagatctcaagaggccctatctctaacctaaatgtgcactgaaaagaaaaaaagattttctgcaagcaaattcgtcaactgaacgctatgagttttcataaactgacttgggagcttaaaggccttgcaataagc

SEQ ID NO: 14867 - DNA, 201 bp, Bos taurus
tgcccaaacatgtttgtgcctgttgcctttattaactgcaattatcgaattcattgtttactgtgtaaacagatgaaacaagactccaaaaagtgttatatatgaaaaataattatgagctttgaaaagactgataaaggcatatgactctgaaagctcctttaggattagattaaaagctcctcagagtgctctgccaat

SEQ ID NO: 14868 - DNA, 201 bp, Bos taurus
ccaagatgtgttgctgatgctgggggcagagctgtgaaggactgagggactatgagaaaagtagtagactaggggctgaaggaaagataaagaaatcagaagagagtctaaggaacttcactgacagcagagcatcagtaaagcaaggagagaatagaagagagagaggagaaaaagcagacagacaaggagagatgatga

SEQ ID NO: 14869 - DNA, 201 bp, Bos taurus
tgcttaatttacagctaatttcctcaaaggtaaaaaaaggaaaattcatataatttcaattttttgcataaagggggattttattaatatttcttattgtcctattccaactctgcataattcacacttatttgcactaattactgcagtgatatacataaggggcttaaataactgagcagttatagctgctaccttggc

SEQ ID NO: 14870 - DNA, 201 bp, Bos taurus
tcaacatgaagcttgcattggcaatggccctttaaaagaaaattaatcatctgacatcttagaatgaagaggttcccaaacaagcattctgagaaaagcttgtcacagaaatatattttggccatgaaaagtaaattaagtatattcagggggagtgaaagtactgggttgattttaacaatgtgctaattgcttttgttt

SEQ ID NO: 14871 - DNA, 201 bp, Bos taurus
cagcctgccttcctccttataatcagggccaactacccttgcaagatggtgactccccttctcccctgctactcctggaaacaaagaaccttaagtgcccaggccatggccataggttatagctcaatggaactatcattacgcccactggtggaagtgttttcccttttggaaaccaggacatgtaaactggctgagcct

SEQ ID NO: 14872 - DNA, 201 bp, Bos taurus
caactgcgatggtctcctgggggagaggctgaagaggttcagacttgttgggagcggtcatcactacctaagccatgatgcttctccaaataatttaggttttttttttttggccatgctgtgttgcatgtgggatcttagtcctctcccaggagttgaatctgcgccctcctgtattggaagcatggaatcttaaccact

SEQ ID NO: 14873 - DNA, 201 bp, Bos taurus
ggctgacggcttatcactgtcatcgccaagccctgcaaggagccaccgctctgaggtctcccatgatcccacggggctggcttcaatctggggaaacccctaggtttcaaaggagtctgggagagcctctgcaggtcacacacggctttaaaccccctcatgtacttatctgaacattaggacatctgcccccatggtcct

SEQ ID NO: 14874 - DNA, 201 bp, Bos taurus
gggaattttatggggtaaaaggcagatgtgtcataagaaattgagggagagagtagagatttccagaaatagctgggccacgtgcagtccctcaggctcccttgcatatggcactaatgtgcaaggaagatatcatgcctatcaagatacaaggccttgggcagagatattagcagggtagtgaagcaaaggcaactcttg

SEQ ID NO: 14875 - DNA, 201 bp, Bos taurus
ctcaatttttctgtcaccctaaaatcaatcagagtaaagtctattaattaaaaagaaaagatataaatactcctggctaaagcaggttaagtggggtgtttatatatcttcatcattatcactactattttcaacattcacaagaataaatgacataattcatgtgaaagtacttagaaagcaccacattatgtgaagatt

SEQ ID NO: 14876 - DNA, 201 bp, Bos taurus
aatatttaaacttgagactctctccaaaatttcaaattacaaacttggtaccagaagctgaaaggaaaaacgagaaagctcttcaaggccttgcatacacaggaatcaaatgattacaaaaataaccacagcagaaggtgccctcagacaggtgccccaaaaaggcacaaactaagctgtgtggctgccctgcatgcagat

SEQ ID NO: 14877 - DNA, 201 bp, Bos taurus
ctaaggcagacacgtgagctcttgtgaatggcagtgattggtatttctatgtttcttcccgcaggatatacctgcacatgagctctttctccccaagagcatgactgccaagaatggtgtgctcttatagagcctgacactcctcaaacacaagctgttgagcctcagacccacaccagccatctcaaggtcgtgtcaggg

SEQ ID NO: 14878 - DNA, 201 bp, Bos taurus
acatggtattatgagggctagagaccttgtactttcaaatttaattgttacagcaggagaaatgaaataagaaccagagtcaaaggggaaaaaacccacaaaaaagatacttatccttaggagtcaacttatacacatatagtagatactactgtaaacaggtgatatttgtataatctagcagcaatgaaccccaaaaca

SEQ ID NO: 14879 - DNA, 201 bp, Bos taurus
tggcataaaacccatgtgccacaactactgagccagcggccccagagcctgtgctgtgaaaccagagaagccactgcaatgagaggttcacgttccacacgaagattagcccttgctcaccgaaactagagaaagcccacatggcaacaaagaccccacgcaaccaaaaacaaataaacaatacaaaaattaatgccttcc

SEQ ID NO: 14880 - DNA, 201 bp, Bos taurus
tggattttcaaccttagtcctcccctcttatcttcccattcctcttgccttttactctgttcttgaaatttgaggtaatttatgaatattatacagaattagaggtaatatcatctttgtataacccagcaactgcctaataaaattgtcaatagtgagcagagaaagttcaaattctggttttgttaccttctaactaac

SEQ ID NO: 14881 - DNA, 201 bp, Bos taurus
tcattggtttaattctaataacacccctcaccaagaacaaaaacagtccagctcacactttcccttaaaaaggtgcagccatcgtttcttcaggccctaacagggtcatgagcaaggctacacaaacacagaaggaaatactttacagctaatgggctgatgttacctgaggcagcggtccccaacctttttggcaccagg

SEQ ID NO: 14882 - DNA, 201 bp, Bos taurus
aatgacggattccttcttagtgatgattgggaaggtcctccatctgaacgatgggggacattccatgattacatcctggttctgctctcaagaatgaataaccttttgcattaatttctgtggcccttggcttacagtctcttccttgttcattatcctttatgcccacgtctgaagtggtccttgggaagtaagccctac

SEQ ID NO: 14883 - DNA, 201 bp, Bos taurus
cagagagaggaataagaacatggtcttgcctctgacttgtctcaccccctcaatctcatcctcctttatcctggtgagatacacccagagcaggccaagcgatctttgggattttaagctttcagatagggccctgagtcgcagcaattgccttagaggtcaccgggtagtgattgattgcctttatagaagtcagtcata

SEQ ID NO: 14884 - DNA, 201 bp, Bos taurus
gatggcggcctgcagggcagggctgcactggggttgatgctggaactctgacagaaagccaagggcccctggctcctaggaccagggccttgccaggctgtgcctctcgcaacacgagagcagagtaaacgactgcaaccgtcccaacattaatggcttccagatggccagggagcaaatagcacagggcacgcttggcac

SEQ ID NO: 14885 - DNA, 201 bp, Bos taurus
aaaagtgacatgaggcttcttaacataataatagtttagattttgctttgagctgatctgttttctagcagagttaagaggttttcaactaatattgagaattgccagatagttaagacagctaagggcttctcaagtgataaagaacctgcctgccagtgcaggagacttgggttcaattgcttggttaggaagatccct

SEQ ID NO: 14886 - DNA, 201 bp, Bos taurus
tctggtttggggctgttataaataaagtggctgtgaacagtcccgcacaagtctttgggagggtagatatgtgtccttctccccgaccttccccttcctcgtctccatcaattcctaggattggacctgcctgatcatataaagttaagcatgacgataagaagatactaaaccggtttccatagtgactgtaccattgtg

SEQ ID NO: 14887 - DNA, 201 bp, Bos taurus
aatacttaactcagttgctttctctggcagcacacacgctaagacgtgaaccagacagaaaagacggacacagcccccacgcaaggacaggcaggcttgtgaggggcttagggcttcagagatttcaagggaagaaaaaagtaagaaaatcctttcattaaacaaaacggctacacgtcagaacatttaagccagattttc

SEQ ID NO: 14888 - DNA, 201 bp, Bos taurus
gatgccgggagggattgggggcaggaggagaaggggacgacggaggatgagatggctggacggcaccaccgacccgatgaacatgagctggggtgaactccgggagttggtgctggacagggaggcccggcgtgctgcaattcatggggttgcaaagagtcggacatgactgagcgactgaaccgaattctcagggcttgt

SEQ ID NO: 14889 - DNA, 201 bp, Bos taurus
tagtgtcacatacttgcctgtggaagccagatgcttcatcctacagtgagctggggaaacaaatgatgcttttagcattaattagatggaagctatcttgggactgtggttttgcagggacccattttgctcacataactttcatcattatgtaaggagctgatgatcccatttgcagataccatcttctgatcatgagat

SEQ ID NO: 14890 - DNA, 201 bp, Bos taurus
cgtgttcattgactaacacccattttcaggctttgtctaatttttcctttgtgaagattagggaataattggatagatctggcctttgaggtgtaaggggtaggtgccaagtcactgtttctaggaccaccctttgggcagttgtatccaccttgtttccccttcttacctctgaaccccactttgggtggcccctacaat

SEQ ID NO: 14891 - DNA, 201 bp, Bos taurus
catgtactagagcgcaccaggctcctctgtcgatgggatttcccaggcaagaatactggagtgggttgctatttccttctctaacatatacatatatcccctccagtttggatttccctcccatttaggacatcacagtgcattaagtagagttctctgtgctatacagcatgttctcatcagttgtttattttatatata

SEQ ID NO: 14892 - DNA, 201 bp, Bos taurus
gttatgttggaaatttgattggcttgactttggtcaaattccagctctaaacaagtgtgtgaccaaagggtctgatacgatgactggtacattgagggagttatttctgtgtcagaaaaggggagcagaaaataataaatgtcttcacatttgttactatttgagaatttactgtattattaatatttacctgtcttacta

SEQ ID NO: 14893 - DNA, 201 bp, Bos taurus
gcagaatggtgaacaaactgggtctagaatgaaactaagaagaaacaaaaacaaaacccactcacgcttgtcttaactcttgacaagttatggtagtgcttggagcttctggttcttattggtagagttgggaggtaataatcgtgtctactttacaaggtcatatatagataaatgccatgatggggaagatattgtctc

SEQ ID NO: 14894 - DNA, 201 bp, Bos taurus
aatttagaaattcttaatggcaaccttttctacttagagtccaggctaaggcagatgtatttgttactttcccatgctagttttttctgaaccatccttttagtgaagatggccacacagtcagctggcctccactatgcactacaatgctgttctccttccattccaagttatcacctgatcgtatttctcaggacaaat

SEQ ID NO: 14895 - DNA, 201 bp, Bos taurus
atttagctcaagaaaacacatgattagagtgtaaacagagctgccctccagataggaaggggctttctttctgtggccagcagctcaaaagcaaggcagggcataaagggactgagcaaagctgattcccagccaccagctggagtttggggtgaattctccagggattggggaaggactctatgtagggttgggtttaac

SEQ ID NO: 14896 - DNA, 201 bp, Bos taurus
tggaagggccagactccggcccctagatataacaatagggcttaaacgagttacctgagtataaatttggtgaaagaggtcatggaaagtcagattcaggttgatccttaggctgcctacttggcccagctggacaaaccaaggtcaattgctccaaattttatgaaccccagccaactctatgattttatcaggacacta

SEQ ID NO: 14897 - DNA, 201 bp, Bos taurus
gaggcacccaggaagcacagatgctaaggagcaaagcagcaccaggctcacagacaggctccaacagtctgacctggctgacctctatcaatcatctctgctgccatgaacacaagtccctgcaccagtgagaactctctggttgaatatctgttccttcttctcccttcctgtccccctttccctgggacttccagcgaa

SEQ ID NO: 14898 - DNA, 201 bp, Bos taurus
aataactccatagatattgctgaggttttgagatttaatggctacacagattttatctaaatgaactatttgaatttgcttcgcccttctgttctcattcacaggttcataaaatactcttgaacatccactaaaagaaggaaatctttatgggtgaagaagatataaacctgtcttattcttatgtaattttgagttttt

SEQ ID NO: 14899 - DNA, 201 bp, Bos taurus
gcaaagatctgagtgtccagtaactggtttagtgaatgctgagaggcagaaagcagattatccattttgctcctgtatgtattgtaatctcagcctggctctggagggcctcattctgatgccagaatctaaaccccagatcatagccaagacagtgtggtcttggagcagcagttggcatgaaacttcatgactcccagt

SEQ ID NO: 14900 - DNA, 201 bp, Bos taurus
gtttccaccggtggtgctggccgcctgtctatgcaggaattaagatcccaggacttaaataaaccaggtctccatacccctcaaacgtgagtacctcatgtcttattgtctttggccgagaaatctgtaaacgtagttaatgcaaatatgtagtgtgagtaatattgtgatgaatcttgtctgttgtcagcgatacctgat

SEQ ID NO: 14901 - DNA, 201 bp, Bos taurus
agtgtattgtctatagcttcatttctcttgggtgtaattgggtagaatatgaatatttttaattttactaaagtataccagattgctcttcagtatggttttagccctgtccacaatgtgtaagtccattttccctctatggaaagctatacttaatttgtttttccttcaaaatatagctgtctttttaatagagctttt

SEQ ID NO: 14902 - DNA, 201 bp, Bos taurus
caatcagagtccatcagtgaatgatactgttcagttctttcttttccttgttgattttctgtgtagcagtgacttaggggtattgaagaactccacttatctgcaggtttgttgatcttctcttttcagttttctgagtttttgctctgtgtatctttaacttgtgttattttgtgtatgcacaattaggattgttagaac

SEQ ID NO: 14903 - DNA, 201 bp, Bos taurus
tgtaaatccacaggcttaatgcttttattattaaatgagaaaaacaaatttaaccattcaactcaaatgacaggaggaaaaaatacatctcaagaaacaagtacagccaaatgaattgggaaaaaagaaaacctttgtatcaaataatatataattcctgaaggtggtctttgggcaaaataaatacaaaaagtaatggct

SEQ ID NO: 14904 - DNA, 201 bp, Bos taurus
tggagaaacaataataattccagggttgaggcaaagagagtagattctcctggactatcttccagtgccagaaagtaacaaagaagtgctcaaaaaatgacaggagcgtttcaaaagcactcagctcggaggagctaacgacgactgaaaccgggaccatcttagcaactacagaaataaagatggtaatgattacaaccc

SEQ ID NO: 14905 - DNA, 201 bp, Bos taurus
aggctggtccacagctacacctatggtggtaaacctggctcagtgtcagaatgaaagagatgcagctacaacatcctcaaattttctttttagaatgtcccacggcctgagtttttgcaagccctgagctgctgtcaatccatggttgaactcatacatgactaaagggccacattcactaaagttgactaaaacatgatc

SEQ ID NO: 14906 - DNA, 201 bp, Bos taurus
gtggttacctcgtgcccttcacagggttgttgttgcaaggctcccacttgccagagccaacaatgcttgactctatgtagtacccgaccagctctttagcatctttgggttcctcccatgtaacgaccactgatgtgtctgtgtttctgcttgggatgatattgcttggaggcttggggatgtctgagaaaagaagaaaat

SEQ ID NO: 14907 - DNA, 201 bp, Bos taurus
ttctctcgctttctatctctctcacacacacacacacacattttctctccactgggactctatatgtcagtataaaaagcacctgttttaaagcagcacacgaggattaaatgaggaagctattcagatctgttctccaaggaattcaccttgcgaggcactcggattcagagccacttctgattgtcttcagtatcaaat

SEQ ID NO: 14908 - DNA, 201 bp, Bos taurus
tgagtgtcggaaatgtgatttctcaactttgctgctgctgaatgttgaacacaacctgtggcaaaacttctctgcttctagcaatatcgcagttggcaattcaagcaagacaccccagggcgactgcgaagctctttgtgaaactcaggtaagcaagggaaaggggaatccaagacataaatcccaggccttccaaacaga

SEQ ID NO: 14909 - DNA, 201 bp, Bos taurus
tgtatgaccaattcaactaagttttagctcagaaagctattacgtattgggcaagtatattgtaaccaaatgtaaacatggttcctagacatttagggctacttcttacctatgcagtactcctgtacagactaggaaaagatgcccctttctcaaataaaaaagtgcttagataattatattatgatgtaacatgactaa

SEQ ID NO: 14910 - DNA, 201 bp, Bos taurus
aaattcgctgaaataagagcaacataaaaggaatatgtgtgcaggtcctataggggatatggaaaacagcagccacaaatttcttgtaaataataaaaatgcactgggaaaatatgttgccacaaggaagattaaaagcataaccccaaatcaagacagtaattcttgaagcaattacagctgtaaaggaagaccacagag

SEQ ID NO: 14911 - DNA, 201 bp, Bos taurus
tcaactacagatctttgagttgccccaggcagggagcactgtggaaagacagtttctccgcgtagatctactaactgttacttttctttagtgactttgcctagtcactaaaaacaaaactgcatttactgagaaaatgtactgacaaagtacaggtactttcagtgtggtttcttcattcatcgtgattacggaccatac

SEQ ID NO: 14912 - DNA, 201 bp, Bos taurus
agtctgatgaaactcgcacttatttttattaaaacctttcaacagaccatgacttatatttagctccatcgtaaaatctccaggcagaaaacattctctatgtggaagatttcaaaaggatgatcagttttgatgtgattgagctcgtattttctgtctttcatctctgtagatggtcttggaaagacagacacattttga

SEQ ID NO: 14913 - DNA, 201 bp, Bos taurus
aacagggccagcattagatcagctgatttgactcataaaactctgaaggacacattttcaaagtttcacccacttacatgtgacagaagtcattgagtagctggcccattttaagataagtggtcataaaggacactcaggatctccggggagggacatagctccccatgacgactcctgtgcaatcagggctgagaatct

SEQ ID NO: 14914 - DNA, 201 bp, Bos taurus
atgttttccccttccatatgcactatctcttcaattagagctgaaatcacataaaaccaataaagtatgtttgggtaatttccagaacatcgagtagcagcgatcagaagggaaatatattataatgagaagggaaagatactaggttcaatgagaagtatacaaagtgtatttggttaggaagatcatttgtgattatga

SEQ ID NO: 14915 - DNA, 201 bp, Bos taurus
tttacagtcgaaaagcaaaggaagagtttgatcagcactgagaaactcagtttgtatgtaggggggaaaaaagataatgtttttgccaatgctgttgctatgcaaccactgtaatatgacaactagcactaaaatgaaatgtaacttcataagtggaggatggtttttaaaagaatgtggttagagactgttaatcaaagg

SEQ ID NO: 14916 - DNA, 201 bp, Bos taurus
gttccttcctgcctgcagccttattttttccatctttaacatatggaaaactggaatttgcccaatctacctaatgggagtgctgtgaggaaaaactaaaataaaatgaaataatgtggatcctatgtgaaaaaaaaaaaagtggaataccatccacatgtgacagggacatgtctatttttccagggctgtacaggggaa

SEQ ID NO: 14917 - DNA, 201 bp, Bos taurus
gcaaggttctggtcctcctttccctccctgccatctctgaatccctggacacatgacttaggtcatacatagacatgtgactagaccatacagtacctgaaaaatctcctacccaaccccagtatcagcagaaataataaatctgtgccaaaagggaaaaaaagccatttctatttgattttggaatatatttttaaatgt

SEQ ID NO: 14918 - DNA, 201 bp, Bos taurus
aaatgcactttaagacccgagtcattctttcagttcatctcaccaagccatcctctcaccacatcagagatgagctggcctctccttgtggttcagatcagatcagtcgctcagtcgcgtctgactctttgcgaccctgtgaatcacagcacgccaggcctccctgtccatcaccaactcccggagttcactgagactcac

SEQ ID NO: 14919 - DNA, 201 bp, Bos taurus
tattcggcctctgctctgtggatctcacttctgaggatacagatattctgactttagctgcaatgtcttagagcagaaaagcacaccagtgtgtaactctgcatggccacagaaaactgccccatgacgcagaaacttgctgaatactcccttttatgccttaaaaatgttacttaagtgattgagtgattctctccccat

SEQ ID NO: 14920 - DNA, 201 bp, Bos taurus
cactctaagttggaaactaagaggtaataaaaatagaagaaagatatttcaatgcaaaaatcctcattacaggaaagtgagtttcaaaggactgtgggcctgagaagcatctgaggggcttggtaaaaatgtcaatccctaggctccactctactctactccatagctctgatctccacaaggagatcaaaccagcccatc

SEQ ID NO: 14921 - DNA, 201 bp, Bos taurus
gacgtcagtttgagcaaactccaggagacagtgaaggatagggaagcctagcgtgctgtagtccatagggtggcaaagagtcagacatgacttagcgaccgagcaacaacaataacgctcaaccacaatcactgctgtaacgttcccacggggttgagcacatccagttcctaagcgaggggtacggcccgaagagactgg

SEQ ID NO: 14922 - DNA, 201 bp, Bos taurus
ctgggccccactcaaggtcattggcttccaagatgctcctgacgtgcatcctcctccttgcatctgagatgctcttccccaggtgtccctgtactttgcatcagcaccaggcctttgctcaaaggtcttcctcagtgaaggctcctgtgggtgccgaatttgaaattacactccctgcttccaacacacttctctgtctca

SEQ ID NO: 14923 - DNA, 201 bp, Bos taurus
gatttgtactggaaatgttgtgacgtcctatgattgttccaggatgtcttatttattacaactcactcatctgccatcatggttataatgctttaaacaaattttgcattttaggtaatggaagagtgtggatggaggtggggacaaatttaattttcatgattggatagagaagttaatggttaaccttatgccctacct

SEQ ID NO: 14924 - DNA, 201 bp, Bos taurus
ctgtgggcagattgctgacctccagcaggggcccctctgctctgcatcgctgccagtcaaggagcccctgccctgggacaagcctgggccagctgctgtagacacactaacggtgacccttgcaggtcctctcacatcagtgtgtttacagagcggggaggagagaagtgaggcaagctgccgtggtgactctgcaggtct

SEQ ID NO: 14925 - DNA, 201 bp, Bos taurus
atcacccagcagatcatcacacagagacccgaactcagatatcatatttcactcagccccttcggcagcagtgggaaggccagatgacaaccttgtctgggtgtttgacagattgagaattttccttgccacggacatttaagcatgtgctggttggtctccctcttagctggttgtgcaggaagtggcctccctccactt

SEQ ID NO: 14926 - DNA, 201 bp, Bos taurus
atttaccacccaagcccaagagctattggaaatgggcaataaaatcaagttttagtagaagtacagtataaaagcaacagtcatcctgtgacttcctgcccaatcattggcgcatagctgctaatagacaaagctggctgttcacggtttgcagcaaacaagaactgtttgctctcctggactcaaaacacacttcctcct

SEQ ID NO: 14927 - DNA, 201 bp, Bos taurus
ctaatagacgcatgcattcctgaaccacattaggtaaaagtcccttttggcccttaatcggttttatgtagtttcagcctatttaattccatttcttgtccgtccgaaaaatgtattccagatgttttcgtggtttgagctccaggaaagccagtgtggaagaacgctgggtcagtgaatagaaacaagggaatactgcag

SEQ ID NO: 14928 - DNA, 201 bp, Bos taurus
taaaatagtctccatctgcaaataatatgatcatttatatacaaaagcctaaggtaccttcagctaatagaactaataagatgatttagcaaggtcatggtgtacaagattattatataaaaatcaggttgggaaaaatataattgtaaagcatatatttaacaaaggactaatattcaggctatatcaagaactcattaa

SEQ ID NO: 14929 - DNA, 201 bp, Bos taurus
catgataaatgtgacaaaaaccagtaccaaggacaaactctgtgtttcactcaaatccatcaagtgaaaaaacagtgagaccaggatgtaaacatgttagcaaacaagtggactttccttgtgtataaaaagcatttaaaagacgcttgctccttggaagaaaagctatgacaaacctagtgtattaaaaagcagagacat

SEQ ID NO: 14930 - DNA, 201 bp, Bos taurus
tagaaggaattcctggggcatctaaagattcatcctagtggtttaagcctttatatgcaagtggctttgaactctgcttggaggagccttgcttttttccggtgacaggttctggcctcaggcaggatctgagcaacttcaaaagagggcacctgctccattctttcttctgtgcaggtgtgaactgggtttcactggcga

SEQ ID NO: 14931 - DNA, 201 bp, Bos taurus
ggccgaaatcaaggtgtttcctggccgaacattggtctggaggatctggggaagaagtcacttccaggctcatttgtgttgctggcaaattcagttgcctatggctctggcctgaggtacccatttcctggctggcattgggcaagcagtgctctcagcttttctaagcttctctgcattccttgtcatgcccctccagct

SEQ ID NO: 14932 - DNA, 201 bp, Bos taurus
ctttacacatcctgaaggatttgttacaatcagttgagtcatcatttggtatcacacttttcccttttcactgagatgtcttccttcattagaagaggggcgagttgtcactcactaggactcacgtttgtatgagctttgtattgggtcgtgaaagcatctacactgttgtgtgttcttggcacattgtcccaagactgt

SEQ ID NO: 14933 - DNA, 201 bp, Bos taurus
agcgtcctcgaagaacgaaaaagaccacagaaatcttaaaatgctacccggtgcccatccacttccagaacgcctccatactgaattcccagtactactttgctgcagaattcccagccaacagcctccaagcggctcagccctttactattggtgataataagacttacaacgggtactggaacacccctctccttcccc

SEQ ID NO: 14934 - DNA, 201 bp, Bos taurus
caattattgtcttaactaagatcctgtgggcttctgaaaggccagccatctctaaaaattagttactgaaggtaggcctggaacagaacctgtaaaatctattctctttgcaaccctatgcactctacagtccatggaattctccaggccagaatactggaatgggtaaccgttcccttctccaggggatattcccaacca

SEQ ID NO: 14935 - DNA, 201 bp, Bos taurus
ctaatgaaataagtccccacttctcagttgctggggaggaaagccatgtctaaggccctctcccagtctgccagcggccacagcagcctatcaggtcatctcatcacaacgtcaagaggtgaactctgaaaaagacctaaccaaggtccaaaggctgacttgtctcaatgtgaaactcttttctttgtgattaatacaggc

SEQ ID NO: 14936 - DNA, 201 bp, Bos taurus
ttgattatttgcatcttcaaccccgctgtcatcatcttggaaaatcaggttgagtcttttgaggatgagagccaaatagcatcagggaaaaaataccaacaaccccgagaaaaatgaatatatctggatttatctggaacagccattgagtttgaattttactttattttttggttagataatccctaggaggtgatactc

SEQ ID NO: 14937 - DNA, 201 bp, Bos taurus
acacgcacacaacaataatgtgtgcttgctcgcagtttgcacagcagatagccgggatgcggttctgtgaagcgagtgccaaggataacttcaacgtagatgagatcttcctgaagcttgtcgatgacatcctgaaaaaggtaaaaaaaaaaaaaaagaatccgtgtcctgacagcatgttacctggaaccgcttcgtcat

SEQ ID NO: 14938 - DNA, 201 bp, Bos taurus
gccttagagttgtcttattagcttgggccatacccagcatttagcttttttgaggaacctctctttttaggccaaagggccacagtgagcacttctctaccggactgtttggggtcccatagacccccccccccccggcagtgtttaatctgtgggaaatgtcagttgccatttcctgtggtggtcatggccgaacgtttc

SEQ ID NO: 14939 - DNA, 201 bp, Bos taurus
ttgaatctctgacttaggatgagcctctgagaaaggagtgggaggcctgagcccccagggcgcttccccttgggttggccagtttttgtgcagagaaaagactcgtgtgggaggcttggctctgagttttcccccagcatcacagatactctcctctatgacccacagcagaatggccgggatgagggaatgtccaaaacg

SEQ ID NO: 14940 - DNA, 201 bp, Bos taurus
gtagttgtggtacacaggcttagctgccccacggcctgtgcgatcttcttagaccaggaattgaacccatgtccctttcgttggcaggtgattcttaaccgctggaccaccaggtgaggccagcaattagttttgatattagcccaaacaaaacataattcagaggagaaatcaccctcagaacattacgtatgtgttttc

SEQ ID NO: 14941 - DNA, 201 bp, Bos taurus
ggccagaatgaaggcttcctgacaaatggctgctgcgctgacccagagcagccttgctgatagctccagggtttctgttgctgctgttattattagcatcaagccaccaggctggccacaggccgctcatcgagagctgggctgtaggacctgctgctgaggctcccacagggcctaccgccacactccaggatctaccgc

SEQ ID NO: 14942 - DNA, 201 bp, Bos taurus
tataaaactcgaccccagtattcctgaaactagacttcttggttgtgttcacagctggggttgctctccatcctaccccctcttcccttctggccttagcgccccaagggacaggtggaagcctgcccacatgccttcccctggagcccgggtgcttcttgctaggtgattaagtggcctactccatgttctgtggctaca

SEQ ID NO: 14943 - DNA, 201 bp, Bos taurus
tttctttatgtttaaaacaggaagagatgagaggcctttggaactcagtgttttcttttgagagcttcctggtaattcccatcacaaagcagggagggaagagcagggccaggatgggggaaggaggcttctccccaaaggggccttcccatccctagatcttacccccacagggcaactgagaggcttgtagactggctc

SEQ ID NO: 14944 - DNA, 201 bp, Bos taurus
tttcatgggctttactccaacatggggaaaccttggaaatgaaatacatacattctccttgccctacgggccttgtgaggccacacagcctcatgtgaacttccaagggttggtcggttggtcagcaggagcactgggaacgccgtgggtagaggcctacctatcggccccaccctgactcaacaggcagggctgctggag

SEQ ID NO: 14945 - DNA, 201 bp, Bos taurus
catcccaggagctccacgcggcacaagccctccaggaaagacacctctgccctccgaagcctctgtccactccgagcccagcatttatgtttcaaattccgtgacccgtggctactctgacacccaacacgtacccaccctagcacaagtaatatggcaccgtgtctagcgtcacctcctatggccacacaccagttcatc

SEQ ID NO: 14946 - DNA, 201 bp, Bos taurus
tcttggtccccctagaaggacacacggaagcctgaactgaccttccctccctggaggggagggttctccacagcttccacggtggccagagggctccccccacaaccacacctgtgaacagtctcctctgctccaccttagggcagggaggagccccatcctatgagctttggtttgataaagacggccaggaagaaaaag

SEQ ID NO: 14947 - DNA, 201 bp, Bos taurus
gctggccttcaggccgctgcaggctctgtggcccaggacccgctgcgctggcccgcaggctcagcattgctctctgtcctgtctgcatcagagtggccgccgtgtcggaagctgctctgcatcagttccgtgtcgaggaagcaagtcccacagctcagaggaacgagcacaggggccgggtctccacgtgtcagcctaggt

SEQ ID NO: 14948 - DNA, 201 bp, Bos taurus
gaactggactcacatcccctccaccctgctcagagaacagaggccatctcagatcatcgggagaaagcttggctcagttcatctcattaaagagttgccttaaacactcccaggcagaggcccaagggggcttggcctggaacagatttaattcttttatttagtgcccctgaggatgtgggagtggcgttcacctggcct

SEQ ID NO: 14949 - DNA, 201 bp, Bos taurus
cctgagttgcaggcaggttctttaccttctgagcctccacatgtgtatattcctaattttccctatgagaagtttcaggccaaacttcccagactaaagcgcatgatcctttatgagatacaacagaatcagtgcagctgggaaccatggtgacgagaggtgacagagtgaacatgctggccaagatcctaggactgtgag

SEQ ID NO: 14950 - DNA, 201 bp, Bos taurus
tctggtggcctctggagcccaggcactgatgcttggtcaccatcccatagcaggggagctgcacagggacagggatgccccaggcaccctccctgagtctcgtcggggccccacttcagcaccaatgcagactggttcaccttctctttcctccgggacccctcatttccccagcagtgtcaacgattgtgcacagtctag

SEQ ID NO: 14951 - DNA, 201 bp, Bos taurus
tgtattaattgtccacctgatattttatagccaaacagacaacacagcacaaccagctcatgcaggatttcagcctttttagagcagagaggcccacaccatccacacccactaaccagtactgacctgtctacagggactgtctccacagcaagaggtcatcaggaagtatccctgggcctgaatggaggtaagagaaag

SEQ ID NO: 14952 - DNA, 201 bp, Bos taurus
gtcccccaggatgaagacaacttccggctgcagcagccataccgctgtctggaaggctcgctccatctgccactccctggaggccaagaggaaaggaggggtggtgtgttccggttcttgtctacctcacacctcccggggtttaaagctctgagaggaaatacagtagccctgccttcatctgtctggcctccccaaccc

SEQ ID NO: 14953 - DNA, 201 bp, Bos taurus
ttaaagggaaacactcactggcataaaatcaacagggatatacacacctggcctctcctcactctccagctctggccagggaagctattctactgctttagcacctcgggaagcactttccattgctgttacctatagtgcagacagggacacagcagctagcaattcggaagtgggccctgtggccacggcccagcggca

SEQ ID NO: 14954 - DNA, 201 bp, Bos taurus
ccccacctcaggataactcggcctcagaggaagtgtgggctgtccaccctgagcacctggtcttggttgctccttcatgtgagtgtgtccccaacgccaggacaaaaatctgtctggggccctggctgtccctgctctgtgcacacagctcttgtagggaagaccagaatattgtcctaacatgaggccacggaccccagg

SEQ ID NO: 14955 - DNA, 201 bp, Bos taurus
cttcttgaaattctctcccacttgtgggccagataaaatgattagaaaacaagccagagctgtgtccctgtgtccatcctgacccataggacccacacctgttcctggaaacttggccggcacacagaggcccattttctgaaaccacgagcctggatgggcaatgattggcttacctggccagcccgccctttacacatg

SEQ ID NO: 14956 - DNA, 201 bp, Bos taurus
atgacaagaatactgaagtggcttgccattccctactccagtggaccacattttgtcaggcccttactagcagggacaggcctttcagctgctcaatattgctggatgatgtccctggtgccctggctgtcccactgttcgtccttgttgatcatgtaaaccttcactggcaatctggtgtcagtcaacgtgcagccagtg

SEQ ID NO: 14957 - DNA, 201 bp, Bos taurus
taagattaaaactatttgaattgtgaattttttatccaatgccataatgattattaacctgctgtccaaaccacggagaggaaaaaagtacagctttttgttataccttagttttttaatttgagaagtccttctcactgtcctcattaataccaaactttatagagattatcgtctagttcagagactctaaagataaga

SEQ ID NO: 14958 - DNA, 201 bp, Bos taurus
ggatccaggggccttcagaataggtaacttaaaattgcatggaactaattttcagatgaaattctttgccagcttcagactttcagtgttttaggatctggttcttagataaacagaaagtggcctattagggaaagtagataagaattcctgtcatatttagctagaatttgaatacagttcccactccatcaacaagca

SEQ ID NO: 14959 - DNA, 201 bp, Bos taurus
gtgggtattggacaaggtcagcattttacaatacgtggtctgtggaacacacttattcagaacattaggaggtattggaggccaaaaaagattccatgagcgaaacgattaagaaacacctggttaaacgaagctactttgggagatagtgaaggacagggaagcctggcctgctgcagtccgtggggttgcaaagagttg

SEQ ID NO: 14960 - DNA, 201 bp, Bos taurus
aatcgaaccaaggtctcctgcattgcaggcggattccttaccaatagggaagcccacctattgaataagggtccataattatccatttgtggcctacagcgattttttaaaaagttgtagactgtagaggaagcctgctcaccaagggctcctaggtttgcggcctacagaagagactcacccagctctccctgctggtgg

SEQ ID NO: 14961 - DNA, 201 bp, Bos taurus
gggcagcagaggtagctttatggagaagcagaagagatgccccctctaggctgaaacttgagggagattaagcaggcctcccctgcccctggcctccctcctactccactctaaaaatcagacaagtcagaagatctgggcttctttccctgtgactgaaggcgtgaggcccaggagaagggacctgctcagggtcagggt

SEQ ID NO: 14962 - DNA, 201 bp, Bos taurus
tgacattccaatttctgcttctgtcttcacatggccttcttctctctttgcttgtctctgtgtttcatctcctctccttgtaagaataccagtcaatggatgtagggccccgcatggtaaagaagctgcctgcaatgcaggagacccaggttcaatccctgggttgggaagatcccctgaagaaggaatggctactcactc

SEQ ID NO: 14963 - DNA, 201 bp, Bos taurus
gagaccatctttttattagctgccagtgttggatagagagggaaggtatttttggatacaaataaaaactcctaagccaagctcacacagtcaaggcctccacaaggtttacctggcttcagacagacctgagccccaaacctctaagcattattgtctgaatgctcctactccatcccagggttctagcgggctgaccag

SEQ ID NO: 14964 - DNA, 201 bp, Bos taurus
gatttaatacattgccttaaaggctcttattaaaagtgaattgaattgaactgaactgaaatactgataaagaggtctgatgacagtgtcctttattcctcatctccagagtaaaacgtcctgagaactacttcttgagaacactctgtgagctacagagcagttaaaatatttaaacttgaacttggatggccatcccct

SEQ ID NO: 14965 - DNA, 201 bp, Bos taurus
gggggtatttatacaccagatcccaagagtcgttgatttgagggctatttctagagggggataattctttgaaactctggcctgccatatatttatagagaaaactttcctccactgaggctgaaggaaggagagccttcaggcaaagaagtgcaaaaataagcagttgtaagctagctgctgctgcggccgctgctgcgc

SEQ ID NO: 14966 - DNA, 201 bp, Bos taurus
agccacacataggccagtgaagagaagtgctcaattcctctcctccatccttcacttgattcgtggaagtgggaggaggaaggaagccaggccaggggtgggacagtgtgaaggtcgttgccccttcagagcagagacaactggctccggggcgtctatcggcctcgcccggtcgatctgcctgcttcctcagcctttcct

SEQ ID NO: 14967 - DNA, 201 bp, Bos taurus
gtacaggattcgtgcataagtaataataatcgcactcaagcatgacacaattctccttaaactatgaccagtacaatccatttaacatttgtcctaaaaacgctatttccaaaaatccagaaacctctctaaacaaatgcagtggtgacacattccgattctaacgtgtttgtattagaattgaaacactaaaagtacaaa

SEQ ID NO: 14968 - DNA, 201 bp, Bos taurus
aatatacagccactttatatagtgttcgaaatgtaagggagcagctttactaggctgttggcagttgtgtctgttttgtctattttatctggaaagataaaatgaaaattactctattagaaataatgctgattctatgtaattttttttaaacttctcttttatttttaatttatttttggctgcgccatgcagaatgtg

SEQ ID NO: 14969 - DNA, 201 bp, Bos taurus
taactaagatagcagtgtcaagttctcagaacaatagtaaaggggagagattactacgatttgcccgttatccacatgcagtgccttaggcctcagtttgactagtctaatggtggaattgctgatgctcttccaacagggaacattttagggacaaggagttctcagggcctctctcaagcttgtacgtttgaaggtaga

SEQ ID NO: 14970 - DNA, 201 bp, Bos taurus
aaaaatgaagagagaagtggtggccctgtgtaagaaggcttgactggcactgttttgtcctcagccccgtgagctaggagccccgtgctcagccaccagcgggccaaagcagagctcgattcaaatctagtccagcacacttgcagaccattatacactgtgaagtatttccattgtgctcattgctttcaagagtttcaa

SEQ ID NO: 14971 - DNA, 201 bp, Bos taurus
aataggcattcagtaaatatctagtgagtggataagccaagtttaaagtcaaatgcaattggccaatcaaatgcatgtggccagacagcaaagagctgtcgctggctgtctccatcctcagaaccactggggcagagctgtgagggagataaagtcaggttttctttcccagccttgccacctcacttggcctctcaatga

SEQ ID NO: 14972 - DNA, 201 bp, Bos taurus
tttgtacgtagtggaagccaggggccattctgaagggcaaacccaacagagctctgagaatctggtttgcttccagaccaaaaaatttcctagttcatggggtttccactgggcctcaggatgatttcttataggcacttaatttcctctagagaaaaacatctctttgccttaaaggaatccctatctccattagaaaca

SEQ ID NO: 14973 - DNA, 201 bp, Bos taurus
gatcgactgccaaccacctcctcacacctgctgtgctcaggcttgtggccttggctgaccctctgccagttaaaactgccaccctctcaccccaccaggtacagctcccaatgctgggggccccgagaggaacgaataccaaagaggaccctccccacagactctgggcagggtatgcggccaggggtaagccccaggcct

SEQ ID NO: 14974 - DNA, 201 bp, Bos taurus
cttggctttgggacaaggaggtggccttgtttatcaagtgcttttgtccaagctccactccaaatagcccctaccctttttttttttttttaacctgagatcaaaggtaaaggaggccgtttagggtgcgtagctgctagggatttgcctggatcaacttaagctaacattttggcttcttgcaatttggtttctttcgat

SEQ ID NO: 14975 - DNA, 201 bp, Bos taurus
ggtggctttctgagaggcactgagagtgagtgggggtggcccgtggaagagcaggcactcaccctgggggcagctctgacccctgacctcttacgtggccgcaatgaatgcctgggatagatttccgtttccacccttctattcacacacgaggcttcccagtctgagggccctgagtgggctacggcttgctgagctgat

SEQ ID NO: 14976 - DNA, 201 bp, Bos taurus
agagctggttgatggcacagcagagactagagctcaagtcattcgacctggagtccagcatgcacatggccttcagttgtatcttatcactgaggccaacactttcttccttcttcagagtccaagcatgagtatgccaagctgaggtttggattaaagcataccatgagatttcacaaggctgacgattgtctaggaaaa

SEQ ID NO: 14977 - DNA, 201 bp, Bos taurus
taaggaggtgaaggaagcaggcacatggcttgtccttaaaacatgacagttccctttgggagaagagagaagtgtgacaagttagctaaccaagtgggcctagacatggcaagaggtacagagggtacactctgggccaggggtccaggatggattgagattccttggggaagcaggtgtatcagtcaggataggctgagt

SEQ ID NO: 14978 - DNA, 201 bp, Bos taurus
ggagaggaaggagcagctgcaggacatttgatgtcttgggattaagatccagctcctctctggcaagatgcatgacccggaaagggtggtcggccccatcgactcatagcttcccctgtcagtgaatgagctgaactaacttcaaggtctctacaaggtttgatgatccctgagtctatgacaaataaaacagcaatgaac

SEQ ID NO: 14979 - DNA, 201 bp, Bos taurus
gagaacgtcctcttttctcaatgtttctgtaaattcctgggcacgtccctcccaccctgtaccctactcagtgcccagaaagcatctccgggcccagccaatgccaaagcacttgcacgcagtcaccatttccgagtgtttggatccaccttaaaccacattttccacagccagaggaatgctgagaaccaggtttccaaa

SEQ ID NO: 14980 - DNA, 201 bp, Bos taurus
aaaagtgaggcaggagcggcaagtaagaggggcaacctgaatgagagctggcaggctttggctccttctcctttgcccccttctcctttgcccagaggcccttacagttgacaaaaggaccccttctctggcactcactcaccttcatgtggtacaaggtcagtgtgcgagggcaaacggcctggtcaagaaagtcagtaa

SEQ ID NO: 14981 - DNA, 201 bp, Bos taurus
aggcaaggaggccaggaggaggtctgaaagacctggggacaggaagtatctaaccagagccatccttagagcgatgtgagcaggtgcactgggacagggaaatgtgagatggccagcacagagggtcaggtgcccacaactaagatgtaaactagatcagaggtagtggggacagagagggggtgatgactgttagttacc

SEQ ID NO: 14982 - DNA, 201 bp, Bos taurus
tgattcaatcattgtatatactgttaagtggtcacccagacaagttattattgctatttaaaaaagtttatttacttatttggccgcaccgggtctcagttgcagcacacaggatcttcttagctggggcgtgctatttctgtgtatggtatgtggaatctaattccccggccaggaattgaacccgggccccctgcattg

SEQ ID NO: 14983 - DNA, 201 bp, Bos taurus
ccctttcttactgttcctgggcatctcacctctcctgtgaagggagcgctgggtgcaggtcccacagcagaggtgctcaggaaggctggccgctataaagttgagggtgacctctgtcgaagcagagacgtctcatccaggggctgaggcggcacgtggtgtgcagaagcctcggcctcccctctgtgcctgcctgtctgg

SEQ ID NO: 14984 - DNA, 201 bp, Bos taurus
catggggaggtgggtgctttgcccaagctgcccagctaattggtacagtgagccctggatttccaggggggttgagaggaggccctcagaaatgccctgactgtggagtgagactcagagacccatctaatagcccagagaaagtggttttcccatggccctctctgctgccctaggatagaggtgggtggaaggagccca

SEQ ID NO: 14985 - DNA, 201 bp, Bos taurus
taaatggcccacaggggaaagtcggccagtgagtttcagaactgttgagagctctgactttactgcgcgactccttgaaggagccagcctgtctattgcttatcgctgctgggccagccagccccgagcaaacagggcagctgccagactccattcacagctcgctcaagtgcgattacgagggcttcacaagcatgtggt

SEQ ID NO: 14986 - DNA, 201 bp, Bos taurus
gggaaaggagattcagacaacttattaagtcctcaaggcccactcctcctaataggcacacccggggctgccctaggcatggctccccttagatcctccaatttctctgctccagggctccttggccggatatgagagagtgagaacaattgccagtttgggctctcttcttgggccgagagcacagtccgagggtcaaca

SEQ ID NO: 14987 - DNA, 201 bp, Bos taurus
cttcagtcctggctgggcagatgtacggggtctgatttctctgagcttcctgtccctcatgaaaagaactgggtgggcccagcttcccccagcctgctgccgtgtgtcactgagcagccgtgaggggctcagcacaggggtggtctgactctggcctgcagtctgcgtgagagctggctcaggaaaggacacactggctcc

SEQ ID NO: 14988 - DNA, 201 bp, Bos taurus
tttacaacacagtgaaaaatgacaaggtatggacatgccaactttctttctgaggaattctgtacagagatgaatctctcaaggacacagcaacaaacattgctggtattaatttagtcccaaatcaacataagtgatttttatctgagtagcacctagaggcttatactgaaggatttctgagaaggcaggctgaaaata

SEQ ID NO: 14989 - DNA, 201 bp, Bos taurus
ctccaggagtgttgctagctcagcactcagctggctccaagctttgctgcatttattattacaaagccatcacgacagcatgagaaaatgtgcataaaatttaaaatggcaacaggctcttaaaattttttcatagcacttaagaccctttaaattctccaccttagtcagagttagcagtaggctctgcactttaaaagg

SEQ ID NO: 14990 - DNA, 201 bp, Bos taurus
ggtccgcacggcggccctcagtcctgccggctggaggggagtgcggtgggggacgctgagtcagctggtctgatctgaggcccctccagatcgccttctgtgtggggagcaacggttccactggaagcgtggggaaaccagggaagggagaggaagagtggaactatggccccggggaaagcaggagctagacccagggct

SEQ ID NO: 14991 - DNA, 201 bp, Bos taurus
actgtaccactttcccaggccattttttccctcctacagatacttaaaatccgtctacccaaatacacacaattacaaaacaataaaatgtcagagtaggaaagaacctccccaaatcaggaaggccacaggttttccagagtatggcttgtggagtcatagttacaaagaccagtaattggctgtacccaacacaagtgc

SEQ ID NO: 14992 - DNA, 201 bp, Bos taurus
aatgcaggaggcccagaaggtacataagaatattatgcctaaaaaaaaaaaaaaaaaaagcacatactttaatttaaaaacattttattttgaaaaaaaaggctaagcactctcttggcctttagccagttgcagtcttttggttattgggggttttactgctgactgatcagagtggtggttgcttatggtgggggtggc

SEQ ID NO: 14993 - DNA, 201 bp, Bos taurus
ggcatggcccaagcatcaaccaattcgaaaggaaactggcagagtcctggaggtgccctgcttgccagaagttgatccttcattgctccatcgtagggacgtctgggagtatctgggaatgaggccaaggtgatgagcgagggaacggagctcggagcagcggctacttcccagccagtctgcaggtatttccttactgac

SEQ ID NO: 14994 - DNA, 201 bp, Bos taurus
agccaaggtaggtacacgtgtattgctgactttatagaaaacggcagagatactccttgtctacttcggctgtcaaccgatgtatgactggcatttcgatattcatccagattttaaaaatatcagtcctccacagacaagctaaataagagtaacatacataatatttaaaatgatcaagacagttttactacagaaacc

SEQ ID NO: 14995 - DNA, 201 bp, Bos taurus
attttcagtttatctcagatgctttctcaaataggtctcagaaccagtgttcttgctcagcctgaaactggtggctctgggctggggccagaagctgcaccctctagtttgcgctctgccactgaaacttgatgtatatgaccttgggcaagtcatttcccttccttgggcctcagttgcctcatctgtaaaatgagggag

SEQ ID NO: 14996 - DNA, 201 bp, Bos taurus
gagaaagagcgttgtcaattctgttttacctgaagtgattaactcattaccgttggatataatttatgagtaactgcaggttaccttctatgactttcccgttatctgaaatgtttcatatttcaggctgctttggccagatctgtgctaaaagaaataaacagtaagagaaagagtgaatttctatcttatttgaaatat

SEQ ID NO: 14997 - DNA, 201 bp, Bos taurus
agtccctgcctctcgtgttcctcctcctttttctgggaagacactgagtgagagagaaatcgtgctgcttccagtggcctctggcacagaagtttcattgttgaaactagcacctgtgctgtacgggctgcctttcaagaaactgcacccaggccaaggctggaggagacttttctttacccaccaggcaaatgctggctc

SEQ ID NO: 14998 - DNA, 201 bp, Bos taurus
ggtgggggtgggtaggggggtgggcgggtccgtggggataatcagcttccaggccctgccctgaaccagactggatgtgtgtgaggccttgaccatgtgccgacttccttgggattctcaactcccaatggctacaactgcctctatagcaacctcttggtgggtaaaaggcttcctcccgtgtttgtcttggcccagcat

SEQ ID NO: 14999 - DNA, 201 bp, Bos taurus
caaaaataatagaattttagaatgtgaggacctcatagatcatcacacccagtgccctgattttaaagatgagattcagagtgaggaagcgacttggccagtgccatatacaacccattagttatctattgggaaacaaatgaactgaagtgagaagtgttctcacatacaggtcctcggccttactacagagtagcgtga

SEQ ID NO: 15000 - DNA, 201 bp, Bos taurus
agtttcagtctgtctgtctttagttcattttgtaggaaatgttgtcctgtggccctttagtgcctcacaggaagactgagagagtgctatattatctaatcagagtctctgagacctacatgtggcctctggccagtgttggcaaataacttctttccactgtttcggatgtggtggattgggttgctgaagaatatctaa

SEQ ID NO: 15001 - DNA, 201 bp, Bos taurus
aaaatgttggttttgacttttatatggaagtgagggtgaagacggagggtgctatagttttgccagttcttagggactcgtgttggctgatagtcatggagtcttaacccatgttctatgctctaaacatctcaaacgtacttgctaatcttaatcctcacaacaaaccttaggaatgaataaccccatttagcagttgaa

SEQ ID NO: 15002 - DNA, 201 bp, Bos taurus
tcatcccagcattcaaacaacaggatcttcctaaaacagagctaaacatttcatcccagcattcaaacaactgttggatttggccatgctctccgcaccctcaacatggcagcaagcttccacaaccacatcccagcctatgctcaagtctactcactcagcagcctcccctgcttgcttccagctaccctcgcactagtg

SEQ ID NO: 15003 - DNA, 201 bp, Bos taurus
atctcttctacccactttatatcgcagaggattaagattatttgtcccttgttttaatcagagatttaagatgtttccgtctaaatgcattagtgcagagctcccctacctcctcaacttgcacttcctgtttgaaaagctgattaaatggtttcattgctgattggctataagcctatgcaccttcctggctacaagcca

SEQ ID NO: 15004 - DNA, 201 bp, Bos taurus
ctaaattcatatcttttttttttttctggtttttctttattttattctttccactgcttccttccatttttcctacctttaagcatcattttcatgtccaatcaaggccttcatccctcccagccatgacggcagtactccagtagcatatggccctttcctcccagttttcttcttgcatccatctcatcttcctgtcct

SEQ ID NO: 15005 - DNA, 201 bp, Bos taurus
tgtgtgtgagatgtgcagggaaattctttgtcatcaccagtgttacaggcctggaaaaaacaacacacctggggttatagccagaagccagactcctctataggaagacatccaggcctagcaagaagaggaatttcctgaaactggccagctttttgttttcctcctctttacttgcagtaacattcttaaaacagaaaa

SEQ ID NO: 15006 - DNA, 201 bp, Bos taurus
gtggatacttgtggctggcctccagtgacaattgcttgtcaaaggacacccgaaaatgtgaaggagattatttatcaagggtgatggaaactacagttccgaatagtccagattatatgtaggccattgccaaaaagaaacgctaaagagaggcagagtgcgaaatcatgtcacttaagctctttgcactttaaaatatta

SEQ ID NO: 15007 - DNA, 201 bp, Bos taurus
tcctcactgactcagagcaggcagtgttggtgagtggcgaccgccaggcttgttgtcaaggaaaccttctgtaccacacctgcccagagtcagagaggaacggggggaagacatcacttgacacttctgacacatcaccctaaatctggtggatgctctttaaaaactgcatcttcattgtgagctagaaccttaaactcc

SEQ ID NO: 15008 - DNA, 201 bp, Bos taurus
cttatctgccagctttatgggccccctcctagcccttcatacaagtagcccgcaacgtgggatgtgaatggctgtgttctggcctctgtccatctgttacatggacatgcaccacatttctctggcagaacttctctacagagtcacatctaacgtctgcaaagggagaggccttagccaatgcaaggaagcagagcaggg

SEQ ID NO: 15009 - DNA, 201 bp, Bos taurus
gagtacagccacagtagcaaaaagaaaaaattagaaaagaaaaaaaaaaatcaatgagctacccctacatagctataagaatagccaaaatccaaacacattgacaataacaaatgctgtcaaaaaacagaaaccaacaggaactctcattcactgttagtgtaaacacaacatggaaacagcactttgaaagatagtctg

SEQ ID NO: 15010 - DNA, 201 bp, Bos taurus
aaccatttgtatggaaacaattattgatcttgcctgggccaccccatagcaacttttgtgcaatgtgggttgcatcattacccatggtgccacattatctgtgaacactggcctcatacaactctctctcaggtcattaatatactaagtgatgactgtgcaaattcacatcttatccaaaatatggaggaaatgtgtgta

SEQ ID NO: 15011 - DNA, 201 bp, Bos taurus
cacatacacatgtgtgcatacacagtatcacaaattttgtagttctataaattatttttattcagattgttttccagtttttgaacaactacatcagacatgaataaaatctcttctccttgtaaatagcctgagaatgcattcaatacagtcacgctggttaataattgttactgtcattttgaaaacacaaaagaaaga

SEQ ID NO: 15012 - DNA, 201 bp, Bos taurus
ctagctaactggggagcccagtgaaaagtgaaatgtgaggccctggccaggagcaggaaaaaaccctctccacaggcccagcctgactcagggtgagccccgaggcactgtaaccttcctgccaggctgagattggtacttaccagggaagggcaagaggcccactgagtgcctccagaacattctggaatatatcccccc

SEQ ID NO: 15013 - DNA, 201 bp, Bos taurus
tgatatgagtcactgacaagttttagatttgacaagatatggtaggaaagtcacaaagtcactccccatcatttgagcacaggttaaccttcagcctcgtcggagtcagagctgcctgacccagataggatctatatttttactacatcctctcttaataagctacttctcggcagccagacatataaaatagaatggaag

SEQ ID NO: 15014 - DNA, 201 bp, Bos taurus
gtgcaagcagttattatctctggagaactgagtcctagacagaggctgatgggagttgtaagtgaagaagacaggctagtccatatagggacccttgggcatctgaagaaatgggactttatcctgtccctgggggacactaaaagttaagagggcaatgaaacagccaggtttaattttacattctggcagttacctagc

SEQ ID NO: 15015 - DNA, 201 bp, Bos taurus
ccacccatctttcaaatttgtaaaattttgagtgtattttgaattttttttttttactatgttgaagtccacttgtttttaattcattttctacaggagcggagtaaaaatgcatgtgttcagttcatcttgttaaaccacaaaatattctagtttactttcaccagaaaataaacctcagtctcttggaggctgagttga

SEQ ID NO: 15016 - DNA, 201 bp, Bos taurus
tgcatattggaaccatttgaggagcatcaaaaaatactaacacttttgtctcaccatcaggattcagatttatgtggtttgggctctggcccaggcaaaagggaattttaaaagcagccaagtttgagaaccactaagttggaaaaacctattttccgatcttgctgatagatctcagggaaagcattggcctctttgggt

SEQ ID NO: 15017 - DNA, 201 bp, Bos taurus
aagtactgaccagggctagactagaaacaggctcattccagatcaagcactcactcaattcaggtacctagttcaagagcacaggctcagagatgccctttctgactcccatcactttgtaactgtcacactgttttgctcttcttggagcagttacccctccctaattaagctgtgcattgatttgttcatgtatttatt

SEQ ID NO: 15018 - DNA, 201 bp, Bos taurus
aaacgggacatgaatctgagataacattaaatgaagccggtttccatttttaagtccaaaaaatctgaaaagctgtagtcataactccacaagcgtgtttcggtttcctctgtggtttacttaatgtttaccagactaatgaactgagactgcctcagttagaccgagctcctcctaacacttccccaaaaagcaagtcgg

SEQ ID NO: 15019 - DNA, 201 bp, Bos taurus
accaaatgacgcttcctcactttttctttctcttctctagtttgaccacggacttgctgaagcctcggctggattatcatcatgctctgaaaatactcttgaattctacacttccaatcacaccctttgtttcacataaaacttaatcaagaggagtttcatgtaagtttccacttgtacataatgataaacagcttaagc

SEQ ID NO: 15020 - DNA, 201 bp, Bos taurus
aggttacattcacaataaccaccagtgggtatgtctctaagattcacatggcttaaatttcccatctgaaaagtggagatacaataactgctttctaatggggatgtagataaagataaaacttaggcgaattatgggaaatcacaaataccatacagttatatgaatattgtcatttctgtcccaccccaccctcttttc

SEQ ID NO: 15021 - DNA, 201 bp, Bos taurus
ctggggccactggtactgagtgactggatcgccttggggaatttgcctgaactgttcgatcttcgttttcctcacgtgtgtaaaggtaagcttagaccaataatttttaaggcctcttaatcccaacagacctattagtctaattgtaagcccctaggtaggaggatcatctaagcaattatgagtgaagataactttaat

SEQ ID NO: 15022 - DNA, 201 bp, Bos taurus
acccagaataaatcttcatatcacagtcctggagttttgccatggtctactctgtacttggggcttgtagtgcatttctattcgcttggccaaaaaactcattcagatttttctgtgccatcttatggtaaaacccaaacaaactttttggccgatcctactttgggaagctactctttcccccctgcagaatgtttactt

SEQ ID NO: 15023 - DNA, 201 bp, Bos taurus
atatgctgttggactgatacaggccgatccagctgtgttttgtgttccttaaacatctcacactattcctcaaatgtttggggtttgacaaaaccccaaatgcatttggccaagcacgttttcccttgatttttaaacacatgtgggttttatgggaaatttaatccatgtgtttttgattcctttacacttaactcatca

SEQ ID NO: 15024 - DNA, 201 bp, Bos taurus
aatggtttaaagcatggcttccttcaaatagctattagtccataaaaatccttagtgcttgcaagagaatgttcaaactgatattggtgtcatgtcaaataatatatttttctactgataagggtggcccaggcaaagatagcctgacttttaatctatctcctgatcaatctgttttctccaactcaatttgagaagaga

SEQ ID NO: 15025 - DNA, 201 bp, Bos taurus
cccatggccgaggcatctgccttgaaaacctagaccagacgagaggagcacggacacaggtcacttgcctaggtgaaaccttttatcttcagcctgtcacgttatttgtcatttccatatgggccattgacagctgtcagtcaagcaagacttaccctgccaccagcaaatctcaaggcatacagaaaaagagacgaacgc

SEQ ID NO: 15026 - DNA, 201 bp, Bos taurus
atctctttaataactgcctgcacttggacagcatggaacttgctgaggcctttagactgctcagttcacccaaatcccagtatgtggaacagcccccttcttcaaaagtctaggacacttgtaggcctcaaggaagtgagaccttgactccataggagagagagtaacttcacaccctgactcaaaggagactggggggag

SEQ ID NO: 15027 - DNA, 201 bp, Bos taurus
gagggcgcccggtgccttcgtgagcgacacaagccctgtgtcaagaactttattggttttctgcgtaaaccagggaatgtcggcctctctctctttcttactgctgactccggaccaccaggttccagtccattaaacaacctcaacaagtggtgcccgaacaggggcctggtacccatggcaggtttgaacggagtgacc

SEQ ID NO: 15028 - DNA, 201 bp, Bos taurus
atgtaactacatgtttattagtttgggtttttaaaaacacactttattctacttttactatcctaagtcatctatcagtgagttaaacctttctttatgttcctaaagaacgtatgtgccatgtaatatttctactactttttcctttttctctctgaaactgttttttgttttcttaaatattcctgtttgaaatcggac

SEQ ID NO: 15029 - DNA, 201 bp, Bos taurus
ctgacacccggggtggactcagttctttgtttttcttatcgcaccttccactgtcctttatttgtaacaccactcatactgcatagtcatgtcattatttgttagttagagccttgcaggaacatagatgaatgcggcataaatgaatgaaatactgggatggaattcaaaaaatcttcttttttttttccttcatatttt

SEQ ID NO: 15030 - DNA, 201 bp, Bos taurus
ggaggattcaggaggcaggtgtcagagcagaaaaccaaagatctccactccagccaccggagtgatttcaccagcacagtgatgccaggctggcctgaacggggttccagtgattcctgtaattgactcccaaatgactgggttctattgtctccatcgctaggcgttacaagaagtggtctgagtgctgaggggcttttc

SEQ ID NO: 15031 - DNA, 201 bp, Bos taurus
tggctccaccactcagatgatgatcaaagaggtttacagtcagcacagctgccggctgtgacactgcccctgcccggccagccttgcgccgagggctctttttccccttctcccttctcagggatcagccaccctctccacttcacagacctttctcccaaggccctggagctttcagaaaaggacctgacgctcaccctg

SEQ ID NO: 15032 - DNA, 201 bp, Bos taurus
cttccttgcctttctagcctgtgatacggaaaatgtgagctgttctcacacacatgtgcctgaagccccaaactgcacgatgtgtgctttgggttaagtacggccctgggtaggtaccaggctctgggacagatgtaccccaaacagggagtccccgacctctgggccggtgcctgcagccctgggatgagggtgttgctc

SEQ ID NO: 15033 - DNA, 201 bp, Bos taurus
ttgacagacaggataataattcccacagaccattagttctaagaagagcgactgttgattccatcccaccaaatgctccaccttcaggcatgggcccctacccatctttagttagtaacaattgaaggcaacacttcttagatcaacaaatgcctaggcagtgatcctcataattaaatccccctgtgcctctcactgggc

SEQ ID NO: 15034 - DNA, 201 bp, Bos taurus
cagccgccatactggttttgtagagaatcgctccagtaagccttcaacagattttcctctgggcccctgaagcagactggcctgtagcagcaaggcctcacgagactagaagcttctggtgagtagaagccatgtgtttcgactttgagtagcagcgtgaaccagggaagggcactggctgggccactgatgaatgcctgt

SEQ ID NO: 15035 - DNA, 201 bp, Bos taurus
ctctgtcattagtgatgctcaccaggggccacaactcagaaaccaacagaaagcactgatcctttaaaaagaacccaagtttggaacagagaagagttttcgttttttgtttaagcaagaatacagggctttctccataattcagcacttaggacttgaccttccaatgcaaggggtgcaggttcgatccccagataggaa

SEQ ID NO: 15036 - DNA, 201 bp, Bos taurus
cgcttctggccacatcagctgtggctgcaagactgagattctagcccagctccgtcgggtgtttgtccccttccactggagttccatcatctgtggaccgagtggcatggcacggccaccgccactggccgccgtctgtctagcgttcattcaaagagaaaccagcgacctgccagagttgacgtccgcacacagacctgg

SEQ ID NO: 15037 - DNA, 201 bp, Bos taurus
taatttacatccccactaacagtgcaggaaggttcccttttcttcacatcgtcttgtcaactctcgcttgttgttttttcatactggccgtactaaagacgtgaggggatatctcatcgtgattttggtttgcatttccctgatgattagtgatgttgagcgtcttttcatgtgcctgttggccatcttatgtcttctttg

SEQ ID NO: 15038 - DNA, 201 bp, Bos taurus
gggagacttcccatggggacatggggtgtgagtctgtgatcagagttggcctttaaaccacccatttttgaggttggagcagtttggatgttgacaaggtctaggagagaagaggaaaaggccattagaaatgaggaagtcaagtgcctgagaagccaggcagttggagggacatcactgcatctgtttagtgtgtcccag

SEQ ID NO: 15039 - DNA, 201 bp, Bos taurus
tccattgccaccatcagatggtcatgctgattttccaagcaataaatgcttttgttgtcttgttttcagggtgaacaaaactttctgttttgttggcttttgagtccctgacaaggaaggcaacacgtggggttgactctgctccgtgtcgagtgggtgctcagcgaaacactggtagttgtacttctctaaagttgtact

SEQ ID NO: 15040 - DNA, 201 bp, Bos taurus
tcagggattcctgttgcgagtgttgcttagatgggaggacagttccgtgaagcagagatggttgtaggtaggttccctcacaggctgtgagctctcggcagcgtgggttttgctgcagatagtgactgttattaaattccatgctgtctagcctggtgctttttcacgtaggaattttttaagaagtattcattccacagt

SEQ ID NO: 15041 - DNA, 201 bp, Bos taurus
atgggtagaggaaccctggtgggctacagtccttggggactcagagtcgaacaggacggagcaaataaacaatgaaagcggccttggttcagccttcactgtgctggaagagggtgagggcagacaggcagggacacaggagcttgtccagtcatcaaggtgagagatgctggtggcctgaacaaggctgcagcatctaaa

SEQ ID NO: 15042 - DNA, 201 bp, Bos taurus
cagaagtcgtgtcccggagcagggcttgctgcatctgttttccccggtttctgaggtcattgtttttgtcctctggttcatcgtgtgcttccttgacagacggaggccttgaaacacggtcacagcctcggtgcagggagaagatgtgagcccgggagagcattcttaagtcgctgctgaggaaattgatgctcctttgtc

SEQ ID NO: 15043 - DNA, 201 bp, Bos taurus
gccctggtcacttgggagcctcaggcagagggaaatccttggggctcagaccaacggccagacttgccctctgagctggccccaaacctctgacccaaggatccttcttccccagcaaagcatggaagggaatttatagccactggagtctatggtccgagatacaaagagagcaggagccacgaaggactaggcctgtgg

SEQ ID NO: 15044 - DNA, 201 bp, Bos taurus
gagagaggtcgaggaaggcttttccaggtgagtgacataaatttagatctaaagatgcttggaagcgagttacacaaaggggactgggggtggtggtgagcggtggtcctcagcctttgttggcgccaaggacgggttccatggaagatgatttttccatagaccggggtggcggggatggtttggggatgatccaagtgc

SEQ ID NO: 15045 - DNA, 201 bp, Bos taurus
ggcttcatagacatgagacctttgcagtcacacagggccgcgcatttaaaggggccccatgctttctttaatgtgattttctgtcaccatcttgaaatgcgtaattaattcttaaacaagaggccctgtattttcattttgtattagtcctgcaaattatgtcatcagtattggctagaacaaaggctgttcaagaataga

SEQ ID NO: 15046 - DNA, 201 bp, Bos taurus
gattatttgagttgatccctgtgcagctatagatatgtttgttcatgtgtatgtactttaaaggttcatttatttggctgcgctggctctgagccgccgcacccaggcccttcggtcttcgtttcagacctctttagatgcagtgcgcagggtctgtaggtgaggcatgtgaacttttagcctcagcatgtgggatctagt

SEQ ID NO: 15047 - DNA, 201 bp, Bos taurus
ttcctggctggcctcctgctgggtaattacctcctggctcccgccagttagacctctaagtgtccgcaggacgagtagagagtaaactcgctgggtctgggaggcagttggccggaaatcctggcttgacgttctacacagacatgtttgggaagaagtttgtaagaagagtctgcatttctcatgggttccaatcagtca

SEQ ID NO: 15048 - DNA, 201 bp, Bos taurus
agccgaataaataaattaaaaaacacaacattcaagctccctgcgagggcctatcgggtcctgtggggtcaagtccctgggttcccctccaaatgggagtcatccctggtgcccagctccaggggcctgtctctgcccctctcatctcataaccacgcccatcacgccttgtgttcttcctctgacacatgaatggctgaa

SEQ ID NO: 15049 - DNA, 201 bp, Bos taurus
aggacgggacgaatggagagcgcggcctggaaacaggtacccgccatacgtggaacagtcagtcagtaggagtctgctgaatgactcagggagctcagactgggccctgtgagaacccagggggtgggatggggtggcgggcccagagggaggggacacatgtacacctggggctgattcatgtatggcagaaaccaacag

SEQ ID NO: 15050 - DNA, 201 bp, Bos taurus
ttggtgaaagacatagttgagaagtttgaaattatactgtctactagaattggtgttgatttaccaagtaaaaactcttagctttatgaagaaactctcatgagatttttttttttttttttttgccatgggacatttatattgagctctcctttggtgagacattttggtctttcagaaattcagcctcttggatgcact

SEQ ID NO: 15051 - DNA, 201 bp, Bos taurus
caacaaatgatctctttgaaggttttcctcagttcttggctccgcagggcataaatcagagggtcaatgatggaattgcacatgatgaggatgaggtacaggttaaagtgagacatgaaacacacacagtatgggttctggggacaagagatgtagaatatcaggtgcaggaagaagggggcccagcagacaacaaagacc

SEQ ID NO: 15052 - DNA, 201 bp, Bos taurus
atgaaggtgaccggagtattgagacaatcattctcttgaaaggctattttgaaataaaaggagaatgaagtacaattgtcttggccatgtttagaggaaagggatttctttcgtggtttttagaaacaacgaaaatgcctccacagctttgctactttagcagaagaaattctgttctagggaagatttgggccaagactg

SEQ ID NO: 15053 - DNA, 201 bp, Bos taurus
aaggatacataatatgctactgtaggtatatactaaattttgtttctccactcacccgctgatggacatttggcttattttttaccttttggctatgagtagaggtgatggaattccagttgagctatttcaaatcctcaaagatgatgccgtgaaagtgctgcactcaatgtgccagcaaatttggaaaactcagcagtg

SEQ ID NO: 15054 - DNA, 201 bp, Bos taurus
tgaacataaggaaaggaaagaaactccataagggattccaatgaagggcacagtgaaaatgaatgagtttccccctcttacactctcctctaatataagagcagagagatactcaataaaattagcaggcagtaaatttagatctaataatagggaatacatcattagttccgtatatggagttctctgcagcaagaggtc

SEQ ID NO: 15055 - DNA, 201 bp, Bos taurus
ggcctgctccccgtgctcacagcagccgggacgtgggagccgcctgcgcatccgacaggcgcgcgggcagaggaggtgcacacacacggtggagtgtcacccggccactgaaacgacaagtgaaataccgctgttgccgcggcacagaaggacctggagactatgacacctagtgaactaagtcgggcagaaaagacaaat

SEQ ID NO: 15056 - DNA, 201 bp, Bos taurus
caggcagataatgtctgattcataagggagaagcgttttggtattaccgaaagaggaatgcggggcccaaagcctgcgctggccttacaagtcattaagaatttaagacacaaataactcccatccccactaaagaggtacttttgtgctaagcagttgtagaagcttgacctagaaacaggccctcccaaggaagcagac

SEQ ID NO: 15057 - DNA, 201 bp, Bos taurus
gacaagctctcaaaaagggtttctctcctaggcctcagggttttgcctagaagcaagcaaaaatcttggtttctgaacccaactgctgatcctgacaaatatgagcggccgcagcggaccccctccagggaatgctgtcccttctcctgccttccccaccgagttcctgccccttgctttccccaatccctgaaattaact

SEQ ID NO: 15058 - DNA, 201 bp, Bos taurus
ggccctgggccttctggtactcagagattggctgttcccagaaatcagggataaagaatggcaaaaatctgttgtctatatgtaacctaatcacatctccgctggcaggccatattcttgtttcttcttccctcttctgaaaagaagaaacattaagtgatgttctcttctgattcctcccatgcatagcctggctgtgaa

SEQ ID NO: 15059 - DNA, 201 bp, Bos taurus
ctgcgaaccgactggaatctcctgaaaagcttctaaactgtggctttagtggcaaggatgtagaagaaatataagcaaatggaatgctgcttttattttattattctttctggccttcacagtctttccctcaacaggtgctcgatgagcatccactagtaaccaaagtatttcattcacatatgacccgtgtttaagctt

SEQ ID NO: 15060 - DNA, 201 bp, Bos taurus
tttgaactgtggtgttggagaagactcttgagagtcccctggactgcaaggacatccaaccagtccatcttaaaggagatcagtcctgggtgttcattggaaggaatgtgcaagctgtgcattaaatcacaagtgcttgctgcgctcctaatagtttgttaccgaagtggagtgaagtgaagtgaagtcgctcagtcgtgt

SEQ ID NO: 15061 - DNA, 201 bp, Bos taurus
gcatttgctttctccaaagactctttcctattacagacttctggagaaatagtttagtggagaaatatgtatgatgatcaaataggctctaacctagtagtcctgtatgtctgactgaaaataccagaaagagaaagaaatacttagaaaactaacattagatacttaacatatagaaatatatatatctgaaatcaacaa

SEQ ID NO: 15062 - DNA, 201 bp, Bos taurus
aagggtcaactgtagtgtgaaaatcctaaattagagtcttgtggatagactagtacgtcagaggcttgaaaaaggtgaatttacaagcagtaagatacgcagcacagcagataacgtacttacagaattcattatttggagagtggtataaatggaagttgtggttaaatgaatgacagaggaagaggaaattaggatttt

SEQ ID NO: 15063 - DNA, 201 bp, Bos taurus
acaccaccccctttcaacaggccctggcacccaagatctgtgctgggtcccctgtcaagctttgcctttcccacagtgaatggaagcatgcggtgtgcagctactggagtctggcctccttcacttagcaaggtgctcctttctgcttgtatcaatggtttgttcctttttattgctgagtaatgttcttttgcctgaata

SEQ ID NO: 15064 - DNA, 201 bp, Bos taurus
gtaacatttgtggccaagggcacctgctgcccgtcccttccacaggcagcagcatgctggctgggagatgctgccccacttgacaaacgtttgctgagcgcggtctgctgccaggccctattctccggaacagcccctggaaacgaccccgtggtccccgttcccccggtgcagcctccgcagacatctttgcagcaccct

SEQ ID NO: 15065 - DNA, 201 bp, Bos taurus
gggatctccccgtagggacaacctggcacagttgggcggctgggacaccactggccgttcgtgtcacttgcccagaggatagaaattgtgggcctacaacaacatcccctcataacttgttcaatcttatttgggacacaggaccgcgttcctccccagtgtatttacagagacacacagggagaggaagcagaccgtttc

SEQ ID NO: 15066 - DNA, 201 bp, Bos taurus
atggattttggcctcataaagaaaaccgtatcgtagtacaatagcatttgcagtacctgaagataatgtcccaaccggatgacaagtctttaaaaagattgtggcctagaaaataggtgattttttttttttttataatgtgggagcaacaactaaattctcctctcttgcggctcatgtaatttataaaatactgttatt

SEQ ID NO: 15067 - DNA, 201 bp, Bos taurus
ctatgtttatagagtggtattttcttactagaaaagtcattcatttttaatctccttgatactcaatgtacattgaatagctataggaaaaagaatatcagggtaatcacattaaaaatgattagttttgttaaatgccagctcttgaatgttatctttctatatcagtctgtataatattttctccttagtatacttaaa

SEQ ID NO: 15068 - DNA, 201 bp, Bos taurus
tgctcgccaggtcttggcagccttctttggaccttggggctctttgagtacttacagtctttgttcaaataagcagcctcctgatggctggcccccatgcgaggcccacatctggaaaccatccctggtcttggcccaggcgttcaggcctagggggtgtgtgtgcgtcaggtagagcccgcccggggatccacacgccag

SEQ ID NO: 15069 - DNA, 201 bp, Bos taurus
gggaaggcctgggacggacgccccgggactcacgtgcaccagcctgctgtccccagagcccccagggcctccgctttgaccttccgagggccttgcctttactgcccgatgacagtttagtgcccccaggcacgcttgggcagaataactaggtgggcacccagttaatcctgccacgtgaaaggctggccggcactgagg

SEQ ID NO: 15070 - DNA, 201 bp, Bos taurus
tgtgggtgtgtgtttttggtggcgaggcccgtggctgattctcctttcactccttcaagcatcagcctgggctctggtttcctttcctggttcaggaggtgccggggctgtcgttaaccctggccagggctgggcgggccaccttaggatggaggccgcacacagaccccacttggggtgagcagatagccggcccaggag

SEQ ID NO: 15071 - DNA, 201 bp, Bos taurus
aggtgctaaatgcatctcgggcctcagtttgctcatctgtaaagtgggattagtgacagtactgccacacgacgtttgtgtgaggattaaatgagtcatatgtaatatgcttaaagcagtgtgggcctggcacgtcgtacgtgctgtaggaatgaataaatcatggagctaatcaacagctagcagacggggcagcactca

SEQ ID NO: 15072 - DNA, 201 bp, Bos taurus
ttcccctcccccgtctccctccaaggaaaagcaggtgctatttccaaccagcagtcgcaggccagccttctatcagccccaagtccccgccaatggccatgtccgacatgactgatgagtttctggatgacctctgggcttggggaaaccctcaaatatcttctgactcattaagacacatacgtatgtctggtgtagttg

SEQ ID NO: 15073 - DNA, 201 bp, Bos taurus
cgggcctgctgcagttcatggggcggaccgagcagctgaacagaaacagcagcactcagatggggacgctccaaaacgaagagcccgtgaacacgtgacccgcgcagcaggcgacccaggccccccaaccatcgcggccaagccgggctcccagcagctgcccctccacctccaccctgcagggcggtccaggagccacag

SEQ ID NO: 15074 - DNA, 201 bp, Bos taurus
ccacgactctgcttgctcctggctcactgctgagccccacgggaacaccaaggggacccagacaggcactggacctgagggaggcccacaggtgagtcacatgacacctcggagcactctggggtcctgtctgacatccagccttttctccccctgcttcccttcgagatgcacagtcctggaggccgaggaaggagctgc

SEQ ID NO: 15075 - DNA, 201 bp, Bos taurus
tgcccatgcgagtagccacaggcccccaagcactgccttcgagggaccctgtgcctggtgaccacagggatgatctcaggagcctgcgctccactcctaccattttaaacctcattacacgatggtcagagggaaagaactgggcagcattcctgccaagcgtttcttctgctaccagccagtcaaggaggcgatttgatg

SEQ ID NO: 15076 - DNA, 201 bp, Bos taurus
ctactgagtcaccagggaagcccttgtctgtctacatgtctggtgctttttctctatataattattgataccaatattgccagtattttttaatatgtgcttgtgttttctctctcactcattccattaaataaaaatgtattaagcaccagttatgtatccagtggtgaaagattctggtgtcctccttgactttctctc

SEQ ID NO: 15077 - DNA, 201 bp, Bos taurus
aacatcttcatattttcattggtataacaagaattactaggtttaccagccaagtaattatgcaagggaaataaaacagtgaggccgaaggaatgtggtagctgtgatagagacatcacacattattttttatgttaaatgcagttaatttcacctatctgaaagatagaatttagactattttaaaaacaagtaaatata

SEQ ID NO: 15078 - DNA, 201 bp, Bos taurus
tcctccagaatcttacaaggaaagttcaacataaacgatctttgaacaaattccgtttcggatgtatgtatgtgttagaggtagagggtggaccagggaggtggccggcattcagggcccccaggagaaaaagatgctgaatacagtctgtcctccattcgttcagaggttccacttctgcagaactcacaagagactgca

SEQ ID NO: 15079 - DNA, 201 bp, Bos taurus
cccaccactgcaagttcagagatgcccccacaactcgagagcctcatgaacacaactaacttggagtcccctgccacaacaagaaaattgcaccctgacataactagagaggtgtccgcacatcacaactagagaaaagccccccacaactagacaggagcccctggaaattgactgagaggagcccacaggaacaacaaa

SEQ ID NO: 15080 - DNA, 201 bp, Bos taurus
cgcgctgcccccaaggggtcaggaactaccctggccctaagcctaccctgaactccacctgacgagctcagtgccagcccctctgcccagtggcacccacgaggctcacaggccaggccaggatggcccgccattcctatagcacatgtctgtcgccaggagatgcccaaggcaggacagagttgatgaaccagggtggcc

SEQ ID NO: 15081 - DNA, 201 bp, Bos taurus
agggctcaggggtaagaaatgagggttggacaggcctggggtcgctggtctgaacctcaggaaggaaggatggagcagctatctccaggagggatgggagacaggggaggggatgtgagcctgggcggggggtgggggtgtctccagagcacaggtggaggtcagtgccgccaggtggactaagggcagacggaggggggt

SEQ ID NO: 15082 - DNA, 201 bp, Bos taurus
taacccaaggcctctcttcacagcaactgtaaagccagtcaggccccatcacatcagctgaacaccttgcacgccgggcccttcctggaagcagacggacacagatgggaggtgctcactaacacggacaagttacactcaggatgcactctacacacgggagtgatgctcagagctccaagtgcccagtctgaggcctca

SEQ ID NO: 15083 - DNA, 201 bp, Bos taurus
ctgggtcctctggctccccggccagccctggacacctgcaattcagctggtggttgtaaagtctcctcaaggtgcacaagagataagacctcccactcccggggccacccagcccctccatcccatccccagccctgcaccccgacctccctgcccaagacacccactccattatcttggtgaatgtaccaggccattcac

SEQ ID NO: 15084 - DNA, 201 bp, Bos taurus
ctgataactgtccgttgcttctccacctccttagtctcaggcctggattaggggtccagaggtgtcctgtaaggaatgacgcctccccttctgttttgtgtagagagctgccggttaggccagagggcacgctgcccctcacatggccgggagcagggcctggtcgtccctggtcagaggagagccgagtgggggaccctt

SEQ ID NO: 15085 - DNA, 201 bp, Bos taurus
ttcctgcctcccactggccagcttcctgttcctggtttgccctgggcaccaaccagacctggggcattgttcctatccgtccatgcccactgactctgcgtaggcttggtgtggctcccataggccctggacggcccagccccaccccgatcttgtgtgctcctcacctgtgccctgcaccctgcgtggctgccccttgcc

SEQ ID NO: 15086 - DNA, 201 bp, Bos taurus
ccgggaggaggcggtagggaggtgttgtgcctcgggcctcatgccagcacagtgaggctcctggccctagaccacaagggccctgggatgaacagggcagcgagtcatcagtggtacctgctcagacagagcgtccacctgcccactaccccaatccaaggccttggaagtccccactccaaatggtaacactgcgcaagc

SEQ ID NO: 15087 - DNA, 201 bp, Bos taurus
ctgggaggtgggggccgaggtccagaagccccacccagtagcagcctgaacactctgggtgtctacccacctcatggccactccctgagtctgtccacagggggggatggttgagttgtccctgggggtggggattcaggggtggacctctgagctggtggcccctgtgagcctcagtctccctgtctgagcagggggctg

SEQ ID NO: 15088 - DNA, 201 bp, Bos taurus
cctctggttgccatgtgggtgctcagcctgtctgggcctctgttcccttatctggggaatggctaatagtcatacacgtgttggattgtggtggagagaatggggcacattccgtgcaggccttccaatggtgcacaggagcgctctaagaatttgttaagtaaccgcctctctgagcctcgcacccctccttatgaaggg

SEQ ID NO: 15089 - DNA, 201 bp, Bos taurus
cttgcgagttgctggcccatgtccctgccgtctgggtgaccaggtctctcctgtgcagagatgtacatgcacgtgtaagcctgttcccaccacagtggctatgtgtcccaggtgtgagctgggccttacctaacacacgcaagagcttgagaccaggtgtaccaaggcctgaagaactccccgcctgggccctgcacttgg

SEQ ID NO: 15090 - DNA, 201 bp, Bos taurus
tgtccatcctggaggaggacaaggactggcggccagccatcaccatcaagcaggtatgcgcccatgcccaccctccccagtggagcccagcccgcggccgaagagcctgcccttcccaccactctgttctctctcatgcagatcttattaggaatacaggaacttctaaacgaaccaaatatccaagacccagctcaagca

SEQ ID NO: 15091 - DNA, 201 bp, Bos taurus
tggccgggttgggggtggtgagggcagcagggcgtcaggccccgcacagaggaaggcacgggcggcccccctgcaggcctggggggcgggagcggccagcgcgggtgccgcctctcaccagcttggtttctgtattaaacttgagattctggatggtcttgttgtcctggatgctggtttccaatttcatcatttggttct

SEQ ID NO: 15092 - DNA, 201 bp, Bos taurus
caacgagcacctggtgcagccaaataagtaaataaaagagcttaaaaatcccacaggcttcaaagcttgagaccgcaaagaatttggtgaaatgcttgcaatgtgatctgatactgaggattcagaggtctaagcatctctgccgtccagcttgtgttctcctaaaagggggacactggttcacttcagagctgtctccac

SEQ ID NO: 15093 - DNA, 201 bp, Bos taurus
aggcccgaacccctcccgtcatgaacgcagaacaggccgcacgagacagcgggcgcggccgtctgtcctggtgggcacagaagcgcccaggatttcttgccgccagtgtgcatgaccaacagaacccgttatttctaacagaaagggagcatggacaagcgtcaggtgtaacaagatccaccaaataccatggagaatgag

SEQ ID NO: 15094 - DNA, 201 bp, Bos taurus
tgtagcatttgggccatgggctggtgtggaacagaactaaaacctacagcccttcgtcctctgggcttgaggtctgagccccctttgtggtttcctcacagtgtgagaactcttctcataatggccctccatgcctgaatggctgctgtgtggcccacgggctgtggccaaggcacccctgccagcaggttgagggaaatg

SEQ ID NO: 15095 - DNA, 201 bp, Bos taurus
atgtgagactgaaagctccagcctttactgagtggggcgggtgagcatccatacagcaaggggaagaatgtgaacagtatttagggcatgacccagaggaactttcatgggtgcaatcaggttagtggacttcactttgaagcactgcatcaggaaggacagggataaaaagcatttctgttggcactcagctgccactca

SEQ ID NO: 15096 - DNA, 201 bp, Bos taurus
tgacatctttctgctctttttttacatgtttcagctaatatcatataagtttaatttttaggcatttttctcagttttggaaaaagggtacaagctggtaataatgttaaataattatcacactctgccaagaagagagtaaacagcaaaagcagccccccgcccccgctgtgtcgtgacaagagaccccctcaccagcac

SEQ ID NO: 15097 - DNA, 201 bp, Bos taurus
gagcaccctctcttgttccccagacaggccaccccgattctgagcagccccatcccctcacacctggggtgaggggctgcaaggaagccggggagactgcgaggggccttagcgcccattgttgctttctctccaaggaagggggaggtgccccactgtggaaggggaatgggatgggatggggtgcccacgcttgccaca

SEQ ID NO: 15098 - DNA, 201 bp, Bos taurus
ggagtccttctagaccatcttccttgttttcctttcagcaaagttgatcaagaaatcgtcaacattatccaggaaaggctcaaggcctgtcagcagagggaaggtgagagccacaggcagaactgtgccaaggagctggagcagttcacccaggtggtcaaggcctaccaggaccgctgtgagtgagccctcccacccagc

SEQ ID NO: 15099 - DNA, 201 bp, Bos taurus
cccacctcccatcctgccctcactccccctacagctgccacaatacacccgagctcgaccaagtccagcccctcggtcttccccttccacttcaagcatccggccaattctaagcatccggccaattctaagcatccatcaagagctctacactgcccagcccagcttcctcctcctgggctcccaggtgctgggtatcgc

SEQ ID NO: 15100 - DNA, 201 bp, Bos taurus
tgtggggaagtgggagcgagggaggcaggtgggagctagcagcccgggctgtcgggggcaggtacggatggcagcgggctttggggctgcatggccaaagtggcacttgaaatggagtcttccccctgcaggtgtggacttgttaacagaatccacgccgggtctcagcttcctctgggcctgacctaggcctaagcccgg

SEQ ID NO: 15101 - DNA, 201 bp, Bos taurus
cttggtcaaggggccaaaggaaggaaaaggggtgcagctgcaatttggaagcctggtgggaagatgccctgggagaggctgtctcaagatcctttttttttccctctgaggccacgtgtgtagaatgtgggaaggctggatggaagaggaggcacaagggaccccagtaatggaggggtcactaggattagtgaagcgacc

SEQ ID NO: 15102 - DNA, 201 bp, Bos taurus
aagcaaaggcaaagaattctattctggatgcgagcaaagcagctgcatcgatgccagccggggcgacttctgccagacagaaggcatgggggctggcctgcttctgcgacttctgagctcagtgattcttttgcagggggtcgaggtcaggagcgagcgagcaagggaaactgctgtctgttctcgctccctcccccgacc

SEQ ID NO: 15103 - DNA, 201 bp, Bos taurus
tccctggaggggcccaggggaggggccgacacacacagtgggagtggagcatccgggcatcagagttccactgctctgcggtctgagtcacccgagtgtcgggaacctggccgagtctgtgccggtgttactaacagggccctgcagatgtgagctcaggccctgagggctggcctgctgccctcctgccaccccgggctg

SEQ ID NO: 15104 - DNA, 201 bp, Bos taurus
tctttaatcaggtgaagtcccaggaagtggggaggggcattcattcgagggacaaatatgcaccaggatgcaacccaagccttcttttaggagacggcccccgccctcatgaagcttacagtctacttcaggaaagagaggatacctaggtaaacacaaattcataccaaatacagactgatcatgggcaccaaggctgtt

SEQ ID NO: 15105 - DNA, 201 bp, Bos taurus
tccaaacccctgtcgtgttttggtctcggtcttcatgaggggtttagggtgactgtcctctctgggccctcgaggatgaactgctcttagaaaactaagtcgccagtctgcagcaccttgtagagtggccacactattgacctgaagctttgggcttgcaagccccccaagtgggaatccaagtcccagggtttatagtgt

SEQ ID NO: 15106 - DNA, 201 bp, Bos taurus
ggagtacgtgcgccccgcccgcccctccacccggtttcccggaccccaggctgcccacccagccccggtttccaggcctctggccggtcttgagtccctcaggagagctctggcttccacccagaagcctcttttgcacgcagtgtgtgtgtccccaggcctgtctggctctttgtgatcccatggactatagccttccag

SEQ ID NO: 15107 - DNA, 201 bp, Bos taurus
caccacaacaacccagcagcagtgctgacagcacaaccccagcaacacaacggcagccacgcagtaacaaccatgccagcagcagagcgacaaccccacaatgaccacaggaagagcagcatcaacagaaaacaaggcaagtcaggtctgcttcctgacctgtgtcctgggctgagctcggggtccggggccacaggtgga

SEQ ID NO: 15108 - DNA, 201 bp, Bos taurus
ttgcagaattaattccttgcccctgacttgctaaaagggacatctgtttcagtcctgaggagactggaccccttttctggtgcccacctgtcaggacccacgttaggcattattgacaaaatggaggcatggccccagccccctctcctcattctgcaggcatggtcccgggatgaaggagttaggccttgtaattctgac

SEQ ID NO: 15109 - DNA, 201 bp, Bos taurus
ttttgctttggcgttggtgagcgagaactgctagactcccggacaaggctgagtgaagatgaaaagaagcaaagatgggtgctaagatgaattttctgagccatttcaacttcagaacaaaatcttaagaatatgagaagaaataatccacacacaaaaaatggagcaaagcacttagaattaggaagagaaactgacact

SEQ ID NO: 15110 - DNA, 201 bp, Bos taurus
gagactcttgtgtccatccaggaccaggtgtgaagggtgatcatacccagagggcagtgccatagtttggtacgagctggtgttcagaatcagatagcccggctcccagtgcaagctgtggggcctttgtgagcaagtgtctgtagctcttggaaactcagtttgcccatggaaaatggtagctcgcgcctgctgctgatt

SEQ ID NO: 15111 - DNA, 201 bp, Bos taurus
ggtgcatgaagtcctgggttcaaatcctggacaaatccacttgtttaaggcagttcagtttcaagttttatgatgctctatatatgtttgattctggagatatatatatatagcatctaataaatatactactgttcaggcaccctaccttctgagattctggatgaccgtgagcattaggacaccattcaacccagcaca

SEQ ID NO: 15112 - DNA, 201 bp, Bos taurus
gtggacacacaggtcgcgtacatcctcagcctgggagtggtgaaggagttcaggaagcacgggataggtaaggggggcctgtaagtccccccagctcgcccctgctccctgccgactatctcagaagacctgctcggtctctgtcttgctgtatccttcggccctctgttggggccagactcgcacccttccttcgttccc

SEQ ID NO: 15113 - DNA, 201 bp, Bos taurus
ctctgaggcccagacctagcaggcggccttcaaacagaactgtccttacacgccctaaatttagggttgttagtcttgaaaaacatcctacgcttctcactgctgacggcttcgcgtccaactaaaccaccatcagctcttacttgagcatctcaaacacgacacatcggctcagactctgacaccttcctccccctgctg

SEQ ID NO: 15114 - DNA, 201 bp, Bos taurus
ttaacctgtcatcagacactgaataaaactaggtagatcaaactgattatgactgccagagattactcctgggtgggaatttaaattaaatccacagttataacatggttgtaggttgtcacactttgctctaatgtattatacatatgaccataaaaaagcctgaatgaggctcagccactcagacatctacactcccat

SEQ ID NO: 15115 - DNA, 201 bp, Bos taurus
ccttcaatgaacccacgtgcggcaggggcacaccgaggcgcagccacaccctgacaactgccaagctggccagcacctcccattctatagtcaatcttcaagcaaaatgtgccaagttctatggggagaaaacaagactccaaacctccgcctggtctgtcccttatcgccacacccagcgcttccccacagccctatcgg

SEQ ID NO: 15116 - DNA, 201 bp, Bos taurus
caccatcacactttcctcaccattactcttccctgttctctagttcagaacaaaacatgacacaggagagtgaagcaggaggctgttgcaacacaacacagctgtgctttccacacacccagtgtccccacatacaggttgggcaaacaccagtctgaatcatcggaagttccgaaaattcaagattgagcgccaccactt

SEQ ID NO: 15117 - DNA, 201 bp, Bos taurus
ctgccctgccatatgctctactcagatcagcacttcccacaaccctggatggaaactgtcctctttttacagaggagggaataaggcccagaggagagcccctccgtcactaaggagctccatggggttgcagacgtgagactgcctgctctctccagtctcagaggccatttcaccaaggaatccccatttacaggatgc

SEQ ID NO: 15118 - DNA, 201 bp, Bos taurus
aaaagacacagaggtgaaatccaagacacttagcaggtgactatggaggaataaatctcttacacattaaaaccacattcattgtgacattcacagcatcactcaaaaccttcaagagtgctttacctcttattacatcaagtctaaatgtcttccttcattcatttacacccacggggtcaatggcagagcacctgcagt

SEQ ID NO: 15119 - DNA, 201 bp, Bos taurus
tgtccctgagccctgagaaagatacatcccaggtaacacagaccaggaaacgaatgtctccagaaactcagtgcagatgaaaactgacccatcccattgccgaattacgccaccccctttacctcctgctgacgacagcaaggctgggggtgagcagcgggtgagttttttaaccacagagcaagtcctacagctgtggcc

SEQ ID NO: 15120 - DNA, 201 bp, Bos taurus
ggctcccttcaggctcctctcagccacctggctgtgatcatccccagaatagccatcaggctgagaactcactcacctggtcccaggggtccagccctgcccaggtaaggccaggtgcaagagggcagctgaaggatgtgtagggcgagaaccccatctgctgaaacaaggccaggttcacggtgataaagaacccacgtg

SEQ ID NO: 15121 - DNA, 201 bp, Bos taurus
gggttattgttattttacatttcacagtgaggccagaggggtgacccctggaagatgctggctggtcctcccttcatctcgataagcacccttttcagagatgggaggtttccatggctggtgagggggatctctggggccagccaaaagatgctgatctcccccagcccaaattgcctcccctctctgggcttgtgaaag

SEQ ID NO: 15122 - DNA, 201 bp, Bos taurus
gggttctctttaaagtgatttgctcagctctgggggcttggggaccttctgtagagaggcactgtctcatttttctgtctcatataatcaggtttggttcagaattcaggaggcagtgtgctctaggtcagtttgagctcctgcagcttgtcctcaggcagtgtgttgtagcacaggctcacaccacacatacgggtcttc

SEQ ID NO: 15123 - DNA, 201 bp, Bos taurus
tgaccattcaggtactctgtgatgttgttgactccagtttggtttactttttcatattgacttcgtttatttaccataaaatgtctcctattatattacatattgtaaagccagtgaaatttagcagtattgttgatggtctggtctaacaatgttatatatgtttacagaatatgcattacatttattcataaatccttt

SEQ ID NO: 15124 - DNA, 201 bp, Bos taurus
caggaagtgtcagatgccctggctgggtgatcagaggtgaacactcccagtcttagggcttctcttttccttagaggggatggccccgtcgggccagcctctctccagaatgttcttgggacacctcgtgggtctctcctgcccctcccgcccactgcagccctgcccccccgcgtcagcatgggctcagccgcctcgggc

SEQ ID NO: 15125 - DNA, 201 bp, Bos taurus
cagtgggccgcgctgggcctcgtcgtctacagccacgcctcctttctttttaaccaggaaactacttcgcatcgcactttttcatgggaggtgagaaattcgataccccccaccctgaaggttacctctttggagagaacatggacctgaacttcctgggcaatcgcccagtccaggtgggtctcgtgggggctgggcacg

SEQ ID NO: 15126 - DNA, 201 bp, Bos taurus
ggcaggcaagctggtccctgagtaccccaagtggtcaggatgtcagctgcagcaaaggagtcccgtccagagtcgctatttgttgcaggaagagaaaccccttccagggcccaaaagtcggctcttgtgtaacacttggaaatgaattgtccgaggagacactcctgctgacaaagcaagagacttgatcgggaaggggcg

SEQ ID NO: 15127 - DNA, 201 bp, Bos taurus
ggactcacttgtctcaaagaggtaaacttccaccatgatttgtagagcccctcagctagaagggagtgttcagcctccctggccagagtcctgtcaacagctctggacgtgtttccaccttccagcccctctgtagctcataccagcttcttgtaaggaccaaggtgtctaggttttctgggccatctaggtaagagcata

SEQ ID NO: 15128 - DNA, 201 bp, Bos taurus
gggaaaaccatagcttgggtcttgtaagatgaaccagtttcagtgataatattgatggccacatttacaggaatgtgccatgctctgttctcagactttacgcatagtaactcatttagccttgcagtggccctctggggaaggtgctattgttatcctccttttatcagaggcagaaaccaaggcacagagaggctaggt

SEQ ID NO: 15129 - DNA, 201 bp, Bos taurus
acagggatttttattcctctctgtctgcaagttgacagtgactcaagaatgtcaggtttggctcgtggggcagtttagactgcggaagccttccagtcctggggccatgctggggccatgtgaggcgggccaggttccatcgcagagtgcaggggctgtaagagtgtttaatactcatgtgctatttcctgctatttcgtt

SEQ ID NO: 15130 - DNA, 201 bp, Bos taurus
attgtcttgttgtacctcagctgggaatgtgtcaggcaactcagatttttcttgctatgtgcagtcttgcacaaacatcacccaaagcgcttcatgtattaattctgaagttacaaagaaattttagcaagtaagctaattcacaaatacccacaagtagtgaggattgactctctgtgtgtgttaatgttagaggatgca

SEQ ID NO: 15131 - DNA, 201 bp, Bos taurus
cccgcaaaacaggagcaagctggctgaggggcgcttgtcagaatttgcagagatgagagatggcagcgaggcagagatttgtaaaaggcacagtcttggacgtcaggcagataatggtcagaattctacctgcttctctgagcctctgtgtctgcactggcacattgaaagaaaaaaaaaatgcctttttaggtgatgcat

SEQ ID NO: 15132 - DNA, 201 bp, Bos taurus
gggacagatgtattaatcgaaagagttcttggggaaggtatggaaagaaaaaccatcaggccaaactagagaaaaggaaataactaaccagcagggagatcctgtgtggctctagcctgagctgggaaggtatgagctggtggggtcaagtctcttactcaagaaactgagtaagattcatacggatgcaggaatctgaag

SEQ ID NO: 15133 - DNA, 201 bp, Bos taurus
tgagaaagccgttctcatactttggcctaagtgctttggtgagggaaacataagatgctatggggctacggacaggaggtcaaggaaagtactctgcattctcagtgaggccacttcagctgggtgaaggagcttcagtcgagagaagggtcggtttaggcaatgagagaagggcagtagaggaatggtgttcagtctaag

SEQ ID NO: 15134 - DNA, 201 bp, Bos taurus
gatgttaatatttaagaagtaggacactagattctattatctcacaagctctgtcaccaggccctctctgtagtcctgttatctaattattgggcttaaattgcattagtgtgctagcaatttgtctaccactggaaaagtaattgacatttgggttactgcttcatatttgggagacttgctagctagttccgaagagcc

SEQ ID NO: 15135 - DNA, 201 bp, Bos taurus
catgtcaagagagtaagggcttccctgatggcccagtgattgagactgtgctcccatggtggcaggtgtgggttcagtccttggtcaaggaactatcctacatgccgtgtggtgtggccaataaataaataaactttaggacttcgctggtggctcagtggtaaagaatccacctgccaatgcagggcacacaggttcgct

SEQ ID NO: 15136 - DNA, 201 bp, Bos taurus
acgtggctgccacaaaccagtccaattcctctcccatgattcagtgtcattccttgtccagattcatggcccagcgtgggcccgtgaaccagtgttctgatctcttccctcaagttttagcttgagtgtttgttttcctgttgctcagtcactgcccacgatcattgttttcagggtgacacgatacatccacagaatgat

SEQ ID NO: 15137 - DNA, 201 bp, Bos taurus
ggtcatttaagagtggttttatgttctttaaaattcaagcacaggcgaacaaaaggctgcgtggcggcccatatgtaattagccagatcatgtaagcatctgatcagggtcttgttaatgaaggtggcttgacctcagtgaccccttgaatcagtgagaaagtgagtgcgaaaaacagtactaaggggaggttttgagaag

SEQ ID NO: 15138 - DNA, 201 bp, Bos taurus
taagggaagaaaagtctttcctcctacctgtcttatggtctctgacaggggccccataaaacggattgatgaaagacagatgaacaagagagcagtgtacgaatttatttaacgtaagttttgtgtggctccagagccttcttaaggaaatgaggacatgaagaagcttgagcattttatgttaggtttgataaagagtgg

SEQ ID NO: 15139 - DNA, 201 bp, Bos taurus
cagctctcactggcgggatgttctgcctctccgtgtggcccagatctgtctcaccgaaagctgagcccccggtcatttgtctcccttcagtgaagatgtggaattcatggccccacatctcctcgacaacacaacttaaaggtacttgtttctaacagaatctcgcgtggccgctttacatgaatcatgcggctttccatc

SEQ ID NO: 15140 - DNA, 201 bp, Bos taurus
gatgctatatgcaactgttcttcaccagtcctattttaatttgcatgatatgaactctggtatttccaaaaaaagagatcagaatctggtttggaagactttcctccttaaaataaacaagcttcatgtccaagccaaggactggaaagtctctctgtggtccatcagggtaatgattcatggggcagcatctgtccctgg

SEQ ID NO: 15141 - DNA, 201 bp, Bos taurus
gttttgtaaacgtggccgaatcttaatgtgccctcttggatatatttgttggagacaagagacagtggaaatgacaatgctgggtttgacccaagccgagcatgttagagaggacagggccaaggatggtgatttttaaaggatggtgaccttgttgtatatgcaattgataaccaataggacctactgtatagcacaggg

SEQ ID NO: 15142 - DNA, 201 bp, Bos taurus
gcctagtaagatgggggggcagagtgggcaggcagccatagcctaaatggcctgggttttgagttgtgctgaccagggttcaagtactccaaaccaaaatactcatggataacagcactggccaatagaacgcaaggcatatgtcatgttagtttttctagtagcctcattctcaaaaaaaaaaaaaagcgcaaagaaaca

SEQ ID NO: 15143 - DNA, 201 bp, Bos taurus
ttctcttccatgagctcccacctggagttaagaattgaacgtcttaaacagattcctattttgttttagtggtcagttcctggccagctctaactgtgagcatctggttccttaaggccaatctgtagatattctcagtgacccctacatctcctgacatcactgtattcatagatggcttctctaggaaaaccattatta

SEQ ID NO: 15144 - DNA, 201 bp, Bos taurus
cctgctgtgtccacactccctctgcctgtcatgacaaaccctcggtgctctgtgatggtgtcttttctcttggtaccaccacaagcccagagcacgttgacgtcaagctcctctggccgtcctgcccacaatagcattctgagactctgcacacccagtgcctggcacagtgcctggccctctgcccatccttagagggag

SEQ ID NO: 15145 - DNA, 201 bp, Bos taurus
cagagactccatattgtcctcaagagtcgccaggatcatttctgtccagagacgtttattttcttttgttgtatgagcacaattgtgtggcccctaagcttgtcccttctccgtgtcaggatagtcacctcagttccaatcgtcacatggagagatggcaagactggccccaaagcctcctgcccctgaggagcaccagga

SEQ ID NO: 15146 - DNA, 201 bp, Bos taurus
aactggtcatcactgcaggtgttttctggtggtttctggcagagctaagccatagcatttaggaaaggagttgacaacaaggaagacttgccgtttctgacgcccataggggtgagatccgctatcatcccaggggatggttcgatcaggcaaccacttacgtttctgtatcttcatgataatcacatatcttaggaaagc

SEQ ID NO: 15147 - DNA, 201 bp, Bos taurus
gaaaggaatccccacgagtcctctctgtccctcgtgttgctggtttcctgtcaaccccttcaaccctgcacgtaggactctgggaaccacacttacagcctcagctatgcccaaactctgggccgtggaatctgaaacagatgctttctctgccagtctcagggatcgcatctccccgtcctaaccgccttttctacccag

SEQ ID NO: 15148 - DNA, 201 bp, Bos taurus
ctctcttgcatctcctgcattggttggtagattcttttctactgagccactggagttatttctaactaggtgggtattttaaagggtagaaatctatgacattatattctcttttttatcataagaataatagcttctgcttagacagtagctactcatgtgtcaagttctgctggctactttatctcttctgctcaggca

SEQ ID NO: 15149 - DNA, 201 bp, Bos taurus
tcctgtaatctaagaaatgggggcctcacaaaagccttgtgtccaccagccccgcaggggcctgcacgttggatacccaggcaggaggagggccagattttagccctgtggaaacctggcccaaatctttgtccatttgctctagtagaacagctggggctggacctggggctgggtggaaggagggggagggtgggcttt

SEQ ID NO: 15150 - DNA, 201 bp, Bos taurus
agagtttctgaagaatcatttcgtcactaagatatattgaatatgacagcagtgcttgcaaatcagtcattttggggaaaagactatagtcacatcctaaagaggagatggacccctttgttcggaatccatgtttgcagagtaggaaaaagtgttttaggactatctgtggcatggttagtagagctttggagcactcaa

SEQ ID NO: 15151 - DNA, 201 bp, Bos taurus
gtgtgcgtgcgcatgtgtgtgtgtgtgtgtgtgtttctccatgaatatgaccaaagaaggcactccttggcgcaatgcttcactatcatcgtagcaagctattttcttctatcacacagcaacctcttttcttctctctcccctatgattgtcagttgtaacattttctttttccctctctggtacattttttctggggag

SEQ ID NO: 15152 - DNA, 201 bp, Bos taurus
tctttattttatcaagagtcggctactagcattgctcttctctttcctctgattgcctggggtttgttttgggaagcaatcattaaagacactgctgagattcagagacacaatttctggatccgcttcactagagaacccagtggggagaggatgtcgggccaggcgaccttggtcactccctacaggcatccctgctgg

SEQ ID NO: 15153 - DNA, 201 bp, Bos taurus
gcaggcgaattctttaccacctgggaagcccaaaggtaggtagcttaaaattttacccgacaattcagaagggatgttagacttacagggcagtgaggccgtgctaaacactgatccacaaacactcatagggcaggaaggtgcatgtggtgaaagtcacagttcagatgaagacctccaagtggccataccttggggcta

SEQ ID NO: 15154 - DNA, 201 bp, Bos taurus
gcagttcagatctaagatagggttaggttttgatgatgggaaacacacaaaatcaaaaggagagagatacagagccagttaacttggagaccttgaagacaatgatgaacaatagtctgggtggggtgacgctattatcattagtggatttggcggtggggagagggggaaagaagggggtcctgagtggatctttcttct

SEQ ID NO: 15155 - DNA, 201 bp, Bos taurus
ttattaagttcagaaacatgtctactttgggaacaccaaactcactgctcagaatgcatccctgtatcggcattacatgctttaatgtatattttttacctagatgactcatttctttccaaggaagagactatttctaaccaagctgtgaatctagtgacattcaagaaagtgagttgctcagtcgtgtctgactctttg

SEQ ID NO: 15156 - DNA, 201 bp, Bos taurus
attctattaggcacacgtggaatatggaaatgacaggtccccataggaaaaaacaaacggtgctgttatgagaagaacaggaaaggggtgccagatagtcgaaaggaagacgtgctcatctcagatacaggtttttattccttaagtaccctggactgtgtacatctttccaaaagattattctgtaagagatcaatacac

SEQ ID NO: 15157 - DNA, 201 bp, Bos taurus
gaataacggaccaaatccacagggccaaaggaagatggagaggagccttgagaccccaaatttcttaatcattgggcgctagctcacatcttgagaaaaattggcctctgtctgttactattaaatgatcgatgtggcgtgttaaattctgctgatgctgggctgtgctgaggctaaggtatccaaggcgcacagctccct

SEQ ID NO: 15158 - DNA, 201 bp, Bos taurus
caaatcgctgttgtgatcgaggatacatttttcggaccatcagatctgcagctgaaacacttattttcacccagttcccaaagtgctgaactccggttgccgaccaacagtaaggctgcagtgaagggggccgggagggggtgtgtgttagtaatgaggaccagcccacacggacagttccagctgatggggagcggggtg

SEQ ID NO: 15159 - DNA, 201 bp, Bos taurus
ggtctgtcttctccaccctcagagcctagcgttgcactgtctggtcttcattaaagatggactgaatgagtaaataagcaaaggaatgaatccctatgatctggggctctgggccccaacctgactctgacacatctctcttcctcactgagtttattccattttgaccccaacagcaaagatccccagaactttatttat

SEQ ID NO: 15160 - DNA, 201 bp, Bos taurus
caatgccttctccagattacagttttggagagaagctggtgaggtagcatcttcagaaagctgcttggaaatgacctttctctttgcactcctgccctggggaagacagtgttgagaaaaagtacctctctcctccaatgaaaccgaactcataggtgcttggtcttctcatctgtgtgtgtcctaatccatgcctcccct

SEQ ID NO: 15161 - DNA, 201 bp, Bos taurus
ttctttatcatcttcctgttcgttttccagcacttcttccacctcacaggtttccttctttctggacagttctccctttcctgtggagccttcctctgccttttttaatgaaggtctattttcccacgtttctttttttatttatatattttttcaacctgacactgaaagcacagcctgccttttcctaagcaaggcaga

SEQ ID NO: 15162 - DNA, 201 bp, Bos taurus
acctacctaaaaggacggtagtgagaaggaagtggaatcagatctgtagaagtacttgaaacatctcaagtctgttcatttgcaacacaagctggcctccgtacagagaaggcaaggaaagatcaaagagagaggcagatcactccaattggtggttgttgttcagttgctaagttgtatctgactcttttcgaccccatg

SEQ ID NO: 15163 - DNA, 201 bp, Bos taurus
gaggggaggagggggagaccagtttccagtggccaaactttcctaattaccttcacagcagctctcgggtccctgggcgactctcctgaaaaagagaaatcgcctctggatgcgggccccaagcagggagcaggcctgcgattggcccaagataattgggctgttgtctgggtctcggggaaaggtctgtttgggaacatt

SEQ ID NO: 15164 - DNA, 201 bp, Bos taurus
caacccatgtcccctgcattaacaggtggatttataaccactggaccaccagtaactccctgctcttggcttttgtgtggggccagttctgtggctcccacttctttggcgctcccattgcacgctcctttatccccgctgcttcctcatggttccttggtaagaactcagttttagagccaaatgggccaaggttaagtc

SEQ ID NO: 15165 - DNA, 201 bp, Bos taurus
acctctttaggcctcataggagggcttaattgacattcagccaaatgagagcccctctaagatagggatagtctattcaacttagtcagtctcacagtttagtagggccttgcacataatacatgctcagtaaatatctaataaatgaatattaggaaaaatgagcagggatttgatgtaatctattcattcatttgacaa

SEQ ID NO: 15166 - DNA, 201 bp, Bos taurus
agggatggaaagaagtggacaagttggaaaatgcctaaagaaagaacagacaagatgtggctgaacgtagggtcgatgatggccagatgttctacacattggagggccttactattttgaaagcaattttttgttgttagactttaagccccaattcttggtttgcaatccatagtcccttaacaattacaggtaggtcta

SEQ ID NO: 15167 - DNA, 201 bp, Bos taurus
cagggcggggcctggaaagtcagagggaggcttgttgatacagcaaagtctgatggcagggacctggcatctagtaccttgtgaagagtagaatcagaaagttagcacaggggccctgctccaaggccagcggtcagtcttgggtgatcgggtggcctgaggaagagggtgaagctcacaaacttgggtctcagacttggc

SEQ ID NO: 15168 - DNA, 201 bp, Bos taurus
tgtcatactatggacacctcccatctcagtgcgcaggcctgcagcctcagaactggaaacacggggacccgaaagaggctgtatggctcaccagtggcgacggtggtttgtccccatggcctcctcgtgctgagcggttcagtggcaggagtgaggcgtggccacccctttacggaccctgtgctgcctgctgcctgcccc

SEQ ID NO: 15169 - DNA, 201 bp, Bos taurus
caggctgaagaggcccagcgctgtcggggggcttgttctctgattcgcagcctcaggcttgagggtgtgcccgtgaccccggccatggtcaagaccttctccaaaggagacagaggggctgctagagccagtgctccgtgcaccttctttccagggggctggaaatgttgcaaaatcacagccttggccctggttggaaaa

SEQ ID NO: 15170 - DNA, 201 bp, Bos taurus
tcgtgacatgtctcctgctgttctctgcaggcccggggagttgtcacagagccgtttctcttcccctttcaaagctctatatgattatatttgatgagcacatacctttcatttccttggatgagatgttataagtagaatataaatcagggctaataggcgactggccacttcgatgtatttttcttgtcccatttggct

SEQ ID NO: 15171 - DNA, 201 bp, Bos taurus
ctacccagccttgctagatgaaagaagaggggagggttatattgggacaggtgcccttcttcccgtgtcctggttagatgtccacccaggtggtggcccagtgttcaggcttctgatttggaagtcatcagactgtcccctgcagggtcagctggacaggagctctggccaggacctcaccccgtaccccatccagcctgg

SEQ ID NO: 15172 - DNA, 201 bp, Bos taurus
tctctgaacagctcagattggcctcttcccttgcacctgggactactggaagcatgaataaacatttgtggaatgaatgcttgactcccaaattttctttatgatgggcctgtggtgccatctctgctggcagcatggcgcccaccaggggaggggaaccttgggtgagggaggaagtccaggttgctgctggtagcccag

SEQ ID NO: 15173 - DNA, 201 bp, Bos taurus
gtcacccgagcatctgcattaaaggactctctagcaggacctgctacataaagtgtgggtcccagcatacaatgaaaacacagggcccctcattcaaaaattaagattcaagacagcgactcagagcacgcaggaaagtgtggggagtgggcgtctgagcacagggccctggctgtatgctttgcttactcgtgaagctgg

SEQ ID NO: 15174 - DNA, 201 bp, Bos taurus
aatgcaattgtccgaactcattccttttaccgaccaagtcctagggtccttgacatcggcatgttcttttccaggcaggcccagccctcttgcaacttcaatctcatgagccatgagaaagggaggtagatggagtgaggggggatcagactgggggacactgcctgctgctgtacaggggccaagcagggctgggctagc

SEQ ID NO: 15175 - DNA, 201 bp, Bos taurus
acataaacagagctccctctccagctgggagaaaggagagctataaataaagttggggttccgcctggaaccagattctcatgggagaggacactggtggtggccaaagtctgtcagtcttcctctttgctgatgtccaggcctggcttctgctgatccatgtgtcttggcaaaccgaatggaaatgatgccctcctgagg

SEQ ID NO: 15176 - DNA, 201 bp, Bos taurus
cgcttccagatgtgatctcgactggtcattgcacccctgatgcttctcacctagaaacccgagacagcgtagactctccttgcagacagcatggaagaggtgctgcggggccggcgtggagcacagtgcgtgccctgcccaagtccttaggaaaggccagccgtgtctgtgcttaccagttctgtgtaagtcaatttttcc

SEQ ID NO: 15177 - DNA, 201 bp, Bos taurus
tcgactgggtcctccctatcagcagcatgctggaggagatgcccatgtgagccaagctgggttgatggcatccaggccctcgccagagcccatgagccacgagcgtgtattccgggatgtctcaaggtccggatgcaagggctcaaccccagttcagtggaaggagagtttctgcagtggggccaggacacccttcttgtt

SEQ ID NO: 15178 - DNA, 201 bp, Bos taurus
caatctgaatctaggaataatttcccttagaagagccttagccacttcagttgccctctctgttctagtagggagagcctctatccatccagcaaaggtatctgtaaagactagtaagtacttgtaagtatccatgaggggttgtaaaacccttctttgcttccaactttacggggaactttattgtctctcgttaaaata

SEQ ID NO: 15179 - DNA, 201 bp, Bos taurus
catggagcgggacctggccttccagcaggcacatggtgggtgctaaacagagaaatgagctgggttgatcagcccctgggccggttggccactgagggaaagagcctgaggcaaaggtccagttctccactcattccacaaactccaatgaagcattcattacgagctaagacctgggccaggcctcccctgcactcaagg

SEQ ID NO: 15180 - DNA, 201 bp, Bos taurus
cgaccagtcagacaagagtatgttcacaagtatacatggataagggctcaatctgggatccacagggatctgtgcacctacatgggagaaaaaaaaaatacatttccactgacctctaaccgaaattcagcatttcctcctaccatgacgtcaggcagaaaaccacagaggtattcatgctcctgtgactctgaaaccaac

SEQ ID NO: 15181 - DNA, 201 bp, Bos taurus
gaggacagctgaaacctagactgacaaggggtaatgttctgacagtcagaatgatggaggaaaaaatgatggatggagatacaatgaaagagggaacgtggtgacagagtggatacagggactctaagaccaggataaaaagcttgggtttcctctgactcagatgtagagaatagacttgtgattgctaaggtaaaagag

SEQ ID NO: 15182 - DNA, 201 bp, Bos taurus
ttgataattcattgattcttccagggctggttcactcctgggtatggctctatcaatatggccctggtgtgtttttgttggaatcgggtcattctctgctggtctttagcgggagagagtaggtgacgatttcttcaaagagaaggcttcttcaaagccaaaccccctctcatgctgagaaaatttgcaaaacagtcccat

SEQ ID NO: 15183 - DNA, 201 bp, Bos taurus
tgcatttttcatataacttggccaccaaacagaagccacttacttcatctggtgctcaaccagagaaacagccattgtgggtaattttggctgagcatgattttagctgctccctctggccttagatttctgcacaagacaggattccaatgaatagctttgtgaaattcctacttggtgccatggataatcccacaatgg

SEQ ID NO: 15184 - DNA, 201 bp, Bos taurus
tagtctatcttatatttgcaacaggttttggcagtttccaaagccttttttatttgtcatcccactgtcactggaggtaaatggagaagagacatatataccttcaaaaaatttaaagcatattagggttcaaagaggttaagtgactttcctaagattctgcttctagtaaacgacagcactctgtttcagtcagctatt

SEQ ID NO: 15185 - DNA, 201 bp, Bos taurus
tcagtccatcccggtgctcgtacccacagaactccggggctctccttcaatgacctggggctcatggctctccaggcttcagatgaaatggaccatggcacgcctgggaacatttccagtgccagttcccaatgcctctttgtaagaccctagattggtagtctagcctgttaggcagttaaacttatgactcttgacact

SEQ ID NO: 15186 - DNA, 201 bp, Bos taurus
cctgtgatgtgacccggaatctcacttcacatgtttacactcactgggggcacacagataccatccctgaatggcatacactctcttctccagcctactcggctacacctcatgtctgactccgctggccactctccggtctttgaaactcaccttttccttggttttcatgcaatgctttcttctctgtttcttttccac

SEQ ID NO: 15187 - DNA, 201 bp, Bos taurus
ccgtccgcacgggacctgctacagctacaagcaagacgcactagaacaggcttccgaagcctttgcatatgctctgcgctccagccagagacataaatacacctcacacacagcgttaaaagaatcgttctgcagcctacacagatgtcaaaataataacaggatgatgccaggcaaggaaatatttctgatgactcttcc

SEQ ID NO: 15188 - DNA, 201 bp, Bos taurus
tggagaatgagtttttcactttgaatatgtgacctctttgtctttccttgaagctgtaatttatctgaggcacagtctcatctcactggccaaacatctctctctgggagcctttgtcagaatttcagggtcaaagatgatatgtaaaacattgtcctggggccaaatgtcagatgaagaccttctgctatgcagagcttg

SEQ ID NO: 15189 - DNA, 201 bp, Bos taurus
atatcaaatttgcctagataaggagagaggccggagtcacaagggacagatactacagatgtgacttccctggtttagtaccaggtctctggaggccaagcgggcttccctggtggctcaactggtaaagaatctgcctgcaatgcgggagacctgggtttgatccctgggttgggaagatcccccggagaagggaaaggc

SEQ ID NO: 15190 - DNA, 201 bp, Bos taurus
cagttggctggaactccccagccctggcccatgccaggtaagagttcgcattgcattcagatctcctggaggcaatgccgtttctaatccctgtctttaccgacaacaggcattttctctgttctgcgtaattccgatataccatccttcagctctaatgaacccagtcttgaacttcattcagtggaactcaataaaccg

SEQ ID NO: 15191 - DNA, 201 bp, Bos taurus
ttcctgaagataagtagagccccactgttgctctcaactttacagaggtagcgtgcacagaagtaataaagctccggccaaatcctgctaacgatcttacatgaaatagcatgaattaaagaaagtctttgtctcaagtttaattatagatgcttcagaaggagaaagcaagaaagagcctcaaactggggccttacttca

SEQ ID NO: 15192 - DNA, 201 bp, Bos taurus
aggacagggaggaaccacatctgttttgttcactgaatatatgcaactagcacacagcccctgctgcacactgaggcctagtaaatcttgaatgaatgaaggaaaaagaaaatcacttggacagaggagaaggtgtgtattactgacctctaggcttcagtttcatctgtcaataagaaatagggccagcaatatttcccc

SEQ ID NO: 15193 - DNA, 201 bp, Bos taurus
ggaagtgaaggacccaaggccctaaaggaggaaggaagacaagacaggaagaggctgctcctcagttcaccacatgaaaagctacctgtcctcccatcaagtacaacggagctggaccccatgggccttcctgggacaggcctctccctatatcctctgctttagctcctctccaaaatacctttgttgttgttcagttgc

SEQ ID NO: 15194 - DNA, 201 bp, Bos taurus
caagtggcctttgccctcaataaaatagaagccacgttcatctgctccgagtgacggggggagggtgatgctggagactgaaagaaagtagaaaaccaccacttgccgtgggctttggatgggccttatcagaggtaaataaaggatttactgaaaaacattaagaatccagttgaaatgaattaatgagtttgtggtggg

SEQ ID NO: 15195 - DNA, 201 bp, Bos taurus
tgttgtggggaaacaggcggccgtgggagggagccccaaatgacaagaaaccgaagccttctcaccaaaaccaggaaaacacggaggcccttagtccaacaggctgcaaggatgtgagttcatcaacagccacatgaatgtggaagcaagtcccccgctgggtgctgtggcctgaatgtttgcagccccccaaaattcacg

SEQ ID NO: 15196 - DNA, 201 bp, Bos taurus
catgaaccacaaagtccacttggcggccctctgatagaagctggggtcaaggtcaggcttggaggctctgaggtagacaaggccaggttacagactccctcactagaagggagggggtgaggggtcagagatgaggagtcccccatcttaagcagatgtcagaagaagagacctccactaactctgactgaaattccaagg

SEQ ID NO: 15197 - DNA, 201 bp, Bos taurus
cttcttcatcctttttagtttcttggcctttttccttccctctgagaggggttctgcacagggatctgtctgctcaagctcagtgtcagaaatctcccccgatgctcgggcctccaggccggcttctgctcgactgggactcaggtttctctttcctactgtgctggtggctgtgagactgaaatgcaaatagaggaaaaa

SEQ ID NO: 15198 - DNA, 201 bp, Bos taurus
ggggacctcagagcaacggctaagagcatggcccccggcgtccactgtctgagtttgaatctttgctccatcacttagctgctatgtgatcttgagcacgttgcccgctctgggcctccaccatggtagcagggcgatgacaatcagagctccctcgttaggcttttggaggatcaaatgagctcaagtaagtaaagctct

SEQ ID NO: 15199 - DNA, 201 bp, Bos taurus
gccaccatgttaaggtctcccatagcttgactgctggactaaaaggcacaggggctgctgccgatggtaaaggaagtgacgcagtacttagaatcgggccgaagttaagggtttacttcggcggtcttctggcttgatcagcctgagaaagactgcccttttggatcttgtttctgagttgggcccaaagggctgagctgc

SEQ ID NO: 15200 - DNA, 201 bp, Bos taurus
agtattcttgcctggagaatcctatggacagaggagcctggcaggctacatgaagtgacttcacacacgcgtgatgagagagaacacctggggccctccatatcctcagggctgacaagctaagacgtctcacccacctcccctgccaccaccagcccctctgggctggggatgcttagacttggctgtagaggccatggt

SEQ ID NO: 15201 - DNA, 201 bp, Bos taurus
ggctggtaagaagactgaggcctgtggtcagcagcagggtcatctcctggacagcagtgtcagcagagcagggaaggacccgtcacaacagaggaggcaacggggaaaggccctcctcgacacggcaggcgggctggcctctcggtgggtggcgatacggcacaaagacgagaggctggggctccagtcctggctctgccc

SEQ ID NO: 15202 - DNA, 201 bp, Bos taurus
atgaaagagtcctataagctgctgtcattagtggcctcacccccagcatcttaccaagaggcagtgatggggctgggatggaggtgtgccccaactgggggcttcgggccagagccaggttcagctcctcgctcttttcccacttcttagccatgtgcttttttggaaatgctacttaacttcccaaactctagcttgcag

SEQ ID NO: 15203 - DNA, 201 bp, Bos taurus
gacctggcagccaggtgtttggataagcatggttgacttctaaacactgatggcaagatgacttctgatatgtaatcttaggttaattttacaggtaaatgaaaaaggccagcaatcatccactaagattaataaacagtactaaaaaatttactgcatgaggactgtgctctgcagcagtttcccaagacaaagaaccca

SEQ ID NO: 15204 - DNA, 201 bp, Bos taurus
tgcggaggcttctcttgttgcagagccacgggttctaggcaggcgggcttcaggagttgcggctcccgggctctagagctcaggctcagtagttgtggtgcgtgggcattagttgcatcacagcctgtgtgatcttcctggatcagggatcaaacctgtgtctcctgtatttcaggtggattctttggcaccccactccag

SEQ ID NO: 15205 - DNA, 201 bp, Bos taurus
gaggaagaggagctggggaaagccagctttgttggctattcctgctaacattcctgacagtttaacagggccgttcataaatgttgagaggcttgggcctcttgtagtaactgaggattctgaggtagtcaaaagcctcactggagttagtttcgaatatctcagttttaggcccttctttaatgggaagcccccctctct

SEQ ID NO: 15206 - DNA, 201 bp, Bos taurus
tgggaaactggcttttgacttctgcctgtcctgcttctgcagaaggtggtcaccctgcagctttaggcctaaatcaccccaatttgcaggcccaacagaaagagaattcccaacccacagaccctgtgtccatctggggaaggtggactgatgggcaaactgcaggatctgatgggcaaacagcaggattgcaggggcctg

SEQ ID NO: 15207 - DNA, 201 bp, Bos taurus
ggcctgtgcataggtctccagaaggacgtggggcacacgatcatggttattatgacctgtttgcaagatggagttgcatctcagatctggtttaaagaagagtggccttgactcgccacttcaatgtgtctcttaggcagcgattgtttcatttctggaacagaaactcaaagagattaaagtgaataggaaattttattg

SEQ ID NO: 15208 - DNA, 201 bp, Bos taurus
cccttgggtgtatttggaaccttcctgtctgttttaagttccacacatctttggcgttaaaaatccaaatggtgccaactgtggttgggccccttggctgtgctctctgggttggactgtggttttcaaggtgtcagtactgaaaaggaagatgtgtccttatagaaatggcctttggtttgggctgcgtattacctgcca

SEQ ID NO: 15209 - DNA, 201 bp, Bos taurus
gtctgagtctgaaggcctgatacccaggaaatcccaccgtggaagttccagtccgaacattggcaggctcgagacccaaggagaaccactgtttcacaagctcaaaggccagaaaaaaacattctctcagctcagagaagtcagccaggagcagtttcctcttatttaagagagaacctaccatagagcacagggaactct

SEQ ID NO: 15210 - DNA, 201 bp, Bos taurus
atatatacacacacacacacacacaaactcactattcaatgtgtttatattattatggtgggctgctaaatgtttaacaactagctctctggagaaacacgtaagcttattcatatctttactgatatgaaggatgtgtagcgcacaatttacaaatgagaacaaaatataggctattctttcccatctaaccacttgatt

SEQ ID NO: 15211 - DNA, 201 bp, Bos taurus
ggattgccatttccttctccaggagatcttcccgacccagagatcgaacctgggtctcccgcatcgcagacagatcctttaccgtctgagccaccagggaagtccttatattaagagaaggaaagaggtagaatagtcagtctgtgaataatgaacatctgactatgtataatcactttgagaaacacagatcctctgagt

SEQ ID NO: 15212 - DNA, 201 bp, Bos taurus
cccctctctctttcaggaacacagcagacacagttggaaacatgaatccaccttgcaaactgccaaggcagctgtggcaggtcagaccttctagaaccagatgttggcctggagcctgggctgctgctgctgctgctaagtcacttcagtcgtgtctaactctgtacgaccccatagacggcagcccatcaggctccaccg

SEQ ID NO: 15213 - DNA, 201 bp, Bos taurus
ggctccccacatccacagaagggggacactgcagtgcaggccccaggacactttgggacttgttcagcccactttgtttgtagaagagaagcatctcctcgttgtcaggagctgagggcctgggctcggatactggagccacccctaactattggtctgagttcagaccagtcacgttactcttctctgcctcagtgttcc

SEQ ID NO: 15214 - DNA, 201 bp, Bos taurus
tggagtgtctccaggctccccagcgcctcagggtgaatgaatgggttttcagtctttttatcagcctgtcttggctgtgaccacagcaagctgtggcccccgaggaagatgccagaagcagggtctactgccaaagcgctctctgatgccatccccgggaattccgactccctggggctcccagcgggtgagaacaagggc

SEQ ID NO: 15215 - DNA, 201 bp, Bos taurus
ccagaagagaaaatatttccctttcctcttacactcaaatcttttggtttcccttgacagctgagtagcacctggggccagggggaaggccatggggtcacgcagagctgacagtccctgttgtgtgggtgacaccctgttgtgtctctgagtggacaacccttattaatctcgagtcctattagaactgctactggcccc

SEQ ID NO: 15216 - DNA, 201 bp, Bos taurus
attggactagaaggagggaatgaagtacagggccactttgtgggctgttgagaatctccatcgggtcacacggccctggggctttgcatagggcctggtttgcacactccatccctgggagtcccatgctgatagcatagaggaaggatgctccttccgtcagcaggcagtccccgagtgcctatgatgtgtgagggtggg

SEQ ID NO: 15217 - DNA, 201 bp, Bos taurus
aagagacaatggagggttagaaagtggaggaagaaaaggcggtggggaggctgatggataaggcggatggaaatggtatggacagaagggaagagagagaacaaaaggaggatatagaagtattcatctagtgagttgttttatccacaagaaggaaaacaagatttaattgacagatttacaagccaagataaaataaaa

SEQ ID NO: 15218 - DNA, 201 bp, Bos taurus
atatgactgaagtgacttagcatagcatagcatagcatggcagttctatttccagttttgtaaggaatctccacacaacactccatagtggctgtactagtttttgaatacagaatctacgtgtaactaacatgagttttagaaataaaggggaaaaaaacagaaaaaaaaatggagaggaagaaataactcattatatat

SEQ ID NO: 15219 - DNA, 201 bp, Bos taurus
tctttaacaaactgtcaccttttggaattaattttgacttcatatagagtatttaagactaaacatatctgagaaggcaaggactggctttcagtttattctgcagaaagaagtttcattttcatttctaaatagtctttaaaaaaaaacaaaaccctgtcataccaaattcccactgcactatatatgctatctatgaga

SEQ ID NO: 15220 - DNA, 201 bp, Bos taurus
ataatgtttccacttttggggctactgtgagtaatgcatgtattactgtgagtaatactatggccattcacatttgaaaacctgttttcaattttgttgcgtacatgctgagaattggaattgctgggcccatgtggcaattctgtgtttaattttttaaggaagtgctgaactgtcttccagaatggtttctccatttta

SEQ ID NO: 15221 - DNA, 201 bp, Bos taurus
gatttcctcaacttcagtcactatcagaataaaattcaaagttctcagcctggcctacaacaggtttttctcaccatgagcactgttgacgctttcggccgaatattctatgtgtgtggtggtggaagagctgtctggtgagtgctaggatatttatgggcattcctgggcctcatccagaaatgccaacatcacccccat

SEQ ID NO: 15222 - DNA, 201 bp, Bos taurus
ccaaaacatgattatccattttattacaacaacaaaatacaggcctgtggattggctttgtctaaaattaaaaggatatacacgtgactgcatcttccaccgattttgacatgcatggcccagctctggaccattctaaatatggagcagacaatcaggcatctcagtgttgaaaattggtccctttatccatttcaatga

SEQ ID NO: 15223 - DNA, 201 bp, Bos taurus
ctaggagacactacatttgttaatgtgagcagcactggctgttggccaacaagttggtgagcccaataaggcacagaagaatttatctaaaaatagaacacgaacataaagtttgaggggccacgctcctctgagacgcactgtccaacatttgcttccttggcttctttgagacaatgaagatatgaaatgttcagtatg

SEQ ID NO: 15224 - DNA, 201 bp, Bos taurus
gcttttgcctggtgagggcagaatcagaagctgccgggcctttggaggtttaaaaatcacacagtgaccagtgctgcctcctgcttcattctgttagtcaaagcaagtcccagggccagctgtctggaggggagggaaagcagacccacctccggctgggaagagtccacagggacactggggagggacgagcgaagtggg

SEQ ID NO: 15225 - DNA, 201 bp, Bos taurus
aggcagattctttaccgctgagccacctgggcagccctgctgacacttagcactgggtaattcttctttggtggggggaagggtggcctgtacacaatagaatgttgcacagcatctccagcacccccaccgcatgctggtagcgccccctgcagtcatcaccatcgcgcctgtctccatgtgctgccaaatgtgggatgc

SEQ ID NO: 15226 - DNA, 201 bp, Bos taurus
acaagcaccttcaaactggagaaaaattcattcaccttttagatttgatcatggtttatttttcactgcttcttcaaaatcatgttcagaataatactgtcttgtttaaggctccaggtgttcctgggaacttaccatttgattctagacggaattcactcttggttgcttttggttagatttcttccaccactaagctct

SEQ ID NO: 15227 - DNA, 201 bp, Bos taurus
gcttgtttagcctctacagtgggaggtgggcaatggtgaagtaacattgaaaatggcctctgggtcagttaataagtgtttgacatgattaccactgtgcacacagcaattcatctcttcttcatgggagcatgacctaggggaggatgggtcctcttcaactccaagggatgaatcatgattgaactaagaaattcagtt

SEQ ID NO: 15228 - DNA, 201 bp, Bos taurus
tttccaacacagctttttcattttttccctctctttccctccctcctctctacccgcagccccttacatacacacacatatatctttggaattccaatcatctgtctacttctctgccccgtctattagactgtgagcttcctgaggtcagggactatctcttatctctgttatgttcaacacctaaattactaaatatgt

SEQ ID NO: 15229 - DNA, 201 bp, Bos taurus
aaaaagttaaaaaataaaaaaacaaatttatttttcacagttctggagattgagaagtccaaggtcacagtaccagcatggccactttctggaggatacctccttcatggttcatagctgaagtcttttccgtgtgtcctcacacaagggaagggggatgagaactctctggggtctgtttcataagggcactaatccatt

SEQ ID NO: 15230 - DNA, 201 bp, Bos taurus
tctccaggggccatggagcgctctcctggatgagaggctgaatgggctttggagatgcttcctcagctgcacaaatggtctcagtttccaggccccttaactctgttcacttctttctatcgtccttgcttgagctacaactagggtgaatcctcagtcccttataggcctcccattcccttctggcctagtctgagttcc

SEQ ID NO: 15231 - DNA, 201 bp, Bos taurus
gcagctaggggccatgctcacccaccagcatgccacagcagcagtggcaactctacacaaaggaaggttaacatagcctacataaaagatacttattgagcacctcgctctgtggccaggtgggactgcacttccgaaccccataggacgtctcctacataagtcactccttaaagattcagagaggtagatgactttatc

SEQ ID NO: 15232 - DNA, 201 bp, Bos taurus
acaaagacccagggcagccaaaaacaaaataaaaaaaaaatttttttaaggatcactgtggccagcctcagaccacaaaatggcttctctaatattgagacagtcatgtctggttgtctttctccagcgaatatctgcttatatgcttactgaggtctttagcttactgacatcttaagtgtcctgagacaaaactattca

SEQ ID NO: 15233 - DNA, 201 bp, Bos taurus
gggaaattaaactacatacttctaaataacacatggtcataaaagaaatatcaacagaagttttaaaatattttgaggtaaacgaaaataaaaattaacatcaaaagttgtgagatgtcacaaccattataatattcagtgaaaagccttcccactaaaatctggagcaagacaaatatgtccatttttaccacttttatg

SEQ ID NO: 15234 - DNA, 201 bp, Bos taurus
agaaataattgttctcattttatagttgaatatgcagaagttcagagaatttaaataatgccgcaggtaactgagaaggccagatttgtgccactacatagctctttttcccattgtgctatagcctcttccagtggcagaaatgactgaggcctctaatcctacctgtcaagtctgtttgacccccaactgttaccagca

SEQ ID NO: 15235 - DNA, 201 bp, Bos taurus
ttgtgctgggtgctggacagggccatctttgccatttcccctggctcagggaattctgtctaaagcagtggtcaagtaacaaatttctataaagtgttagtaaatatttagactttttaggccacgtatgcttttaacatttttaaaatgcttaaaaaactaaagccattcttagcttgatgaccatcacacatagatcat

SEQ ID NO: 15236 - DNA, 201 bp, Bos taurus
taaacttgcaaggtcatatggtaattatatgtttaactttttgaggaatggccaaacatttccccagctgctatactactttacattcccaccagcagtgtgtgagggctccagttttctacattcttgccaatatttattttctgtttaaaaattaaaatattttaagttatagctcttagtgggtgtttacacattgtg

SEQ ID NO: 15237 - DNA, 201 bp, Bos taurus
gagtagaggttttggaattcaaaaggaaggaggacaattcaaatggagctgaaaaaagcaaatgtttggtaaaaaatacatttgctgggccaggcagaaattatgggacacagaacagactctactctatagtccctgcctgagtttcctccacacagctaacctatatgctttgcaggtacctctcataatagctctatt

SEQ ID NO: 15238 - DNA, 201 bp, Bos taurus
cgggctctgcagatgctgggcctggtggggtcagggggctggctctgggacctgccacagctgtaatgtctgattaccttgggcccagacctcctacctccgtgtctttctcctctgtttcaggctgatgtccgcaatgcagaggctctgcaccgtaccttcgaaggggtggactgtgttttccacgtggcctcctacgga

SEQ ID NO: 15239 - DNA, 201 bp, Bos taurus
caggcctccattgatggtcactgtgggctcttccctttttttgctgttactaattatgctgtggagaacacttcttcagaccactcatccgttccagggacgtgtgccgagggcctgctctgtgccaggcactatttaaggcaccagggctacagatgataaagaagtaaataagaggatttcagcttggggaaatctctg

SEQ ID NO: 15240 - DNA, 201 bp, Bos taurus
gtcacacctgaactggcccaggcgtttctggagaggatcagctcctccaactttgacatgaggaatacctctaccatccacaggcaaggggcgtgggtgccgggcccccggagctgtttcccatctaagcatcagcttcctctgagcagcaaaagagccggggagggggagggaggtggctgatccatctctttgaatcgt

SEQ ID NO: 15241 - DNA, 201 bp, Bos taurus
ttgttgccccccgccccccccaggaggcctgaagaagctgaagttctattttatgagcccagctccagctctgtgagtcttcccctgacctgaagtctttcgtggggacctgggccctcagagttctcaatgttccgcttcattttcctgggcaggtccaaagtttccaggcctgggaatgaacgccctgtttcagtggaa

SEQ ID NO: 15242 - DNA, 201 bp, Bos taurus
ccctctattcaatcagggagcaatcagtgcactttcctcatgggacatttgaagaggagtggaaccagcagaaaaagaaaaaaaaaacagaaccaaaaagccttttgggcttttctctcaaagcctaaaccttttattagtgaaaagagatttaagaccagagacaatgacttgaagaaatggaaagatgtcatttgtttc

SEQ ID NO: 15243 - DNA, 201 bp, Bos taurus
tggggaaagcccagtatggtcagaagggagaaagcaggagcaaggagaaagcatgactgggatgatctagtctaaataatttcagcaggctcttagctatcggggtggccctgagttacctggtatctgactctgggatgattaagatctggaatattacttctggaataataatatctggaatattacatggtgtggagg

SEQ ID NO: 15244 - DNA, 201 bp, Bos taurus
tgtccaggcccaagtccaggttgaacaatcgtgttttgtagcggacctcctagggagaagcagacccactctacatgtcttcctcaaatcgctgatcagagcagagaggccggatagcctaatgggtagaagcaagggccttgccttaaaggtaaaagttgctaagtcggcctacataaaaattaattatttctacatgac

SEQ ID NO: 15245 - DNA, 201 bp, Bos taurus
atcatgtgaataagatattcatgcagtccccaagtctctacctcacatacccagagtgtaataatatatggtcaatgggttaccaatttcatatcaataattgacttttaattataaactaacagtataaaaaccttatggtaccaataggaagcaacctgggcattgatattaaaaaataaagagtcccccaaaattcat

SEQ ID NO: 15246 - DNA, 201 bp, Bos taurus
gcggaacttggccacctcgttgtggaacttctccccacagtggttcacacacgtttccagcacctgcacagacaaaggacccccatgagaaggtgaagccattggccccacagctcgtcccaaacctggtaagtattggttggaaccatggctcaaggctgaggtcactaaagtttgggagaaaggatgagactttcagat

SEQ ID NO: 15247 - DNA, 201 bp, Bos taurus
acgacctggtctgcaggggcaagagggaggggtggcttcaagcctgtccagcctctgccttgcttacccccctcctctgccagcccaggtcaccctcaccatgggcctcttcctccaggtgagccagacagggagcccccacaaggatgtttgcctgacgataaagactctctccgaaggggtggctgccaccggaaagca

SEQ ID NO: 15248 - DNA, 201 bp, Bos taurus
catggtttcccacatgctttagtcctcggggggcgttgaaagggaatcgagaattctttgtgccagttgtctaatccttggggtatctgaaaaagcagaaggcacttcttagatcaatattttcaaggctcatctgatgtgagactctgcctggggctggaggcttgattgtttccctctctccagggtgggtatgaactt

SEQ ID NO: 15249 - DNA, 201 bp, Bos taurus
caaaggcagtgtttatctgacttttcttgaacctgggtgggagcctgtgattaccgtgacagattgtggtagaagtgacagtgtgtggtttttgacaccaagacataaaaagacagcttgttttctgcctggctgtctctcttaaggctcttacttttagaagcccgtcactactgagagaaagcccaaaccggcccagat

SEQ ID NO: 15250 - DNA, 201 bp, Bos taurus
gaactggttatcctgggggataatgtgggttgaggaagaagtgttttatgaacagaatcagcacaggggtaggaaggaggaggtgttcaggggcctcacggagctgccgggagatgtgggaagagcgtgcaggcaaagaggtgggctgtgtcgccggggtgactctctgccgacggcagcctccagctgggccttccgagg

SEQ ID NO: 15251 - DNA, 201 bp, Bos taurus
taggtcctcagagcagatttctagaagtctttagtggtgatgctaataggagtatttgtttcctcttggctccccctgatgctcatgggggcccagattcttgaggctctgtgttcatcttcccaatgtcagaaaatggacaggacggttattgttgacttcttttcttctggctctttccccaattctagtgtttttttt

SEQ ID NO: 15252 - DNA, 201 bp, Bos taurus
aggccatcctgggtctgttcacctagggcccagccattcagaccaggatctttgcagactcagttgctctaaaaagtctttggggaacagaatgggggtcgttgaaggccaaaacaatgagttcttggcggcggtaaatggaccacaactgaattgattttttaaattaagttttaataacgcagttaatataagaatgca

SEQ ID NO: 15253 - DNA, 201 bp, Bos taurus
cactggaccaccagggaagtcccaaggccaagagatttaaaatgctagctcttggggcatgtggatttcaaggatggggtggtttccatgatgacaaggaagaaggtggcctacatgaagaagaggttctaataagctgaggctgtcaggcagttttaaaaattaaattacatttttaataagcagtatattcccatggtt

SEQ ID NO: 15254 - DNA, 201 bp, Bos taurus
tgactcaggaatgaccttgacaattataaaaaatttaagctaagtagcggttctcaatatggtataattttgctccccatgggacggacatttggcaaagtcttgcgacatttttggtcatcacgacttggtaggagtgtgggggagtactcctgcatcttgtggcatcaggggatgttgctaaatgctctgcaatgcaca

SEQ ID NO: 15255 - DNA, 201 bp, Bos taurus
tgacataatgaaatttttgaaaattttattcttgtgacttgaactttgaaaaactgtgaggagcataagtattggaatgtttgaatatttgaagttcctttttaaagaatgtatttgagtatctctttgaaacagcagggaaatgaagggctgaaaaaattacagtgagatataggaatggatgaatatcttgtggcccta

SEQ ID NO: 15256 - DNA, 201 bp, Bos taurus
tgatgactaaacaatagcaaatggcttaaaaaaaaattgtggctatgaacccatggcatcctatagtgggaaacgcaaggatagatgcagaaggccatgtgcttcaggaaaacatgagagaatcttccttggtagaggtgatgtgtgtaagaagcaaatcagctcttctgactcccataggccacctgcctggctccatcc

SEQ ID NO: 15257 - DNA, 201 bp, Bos taurus
ttactattagattttaaaactatataatacatgatcactgtaaaaaaaaaaaaaaaaagagccacataattcagcaaaggccctattttgagaagacctccactgccattacggtgatcatctttaaagaagtgactcttaaggattggaagagactggacagggccttggaagagactggtcagggccttccaataagtc

SEQ ID NO: 15258 - DNA, 201 bp, Bos taurus
atcatgtcctgctccttgaacactataagactcctcaccaccccctccagagggggacacacagttttgaaggcattatcctgctgtggccccatttgcccggcaaagaagtaaagctacacttttctacttcatgtaaaactctgtctccatatttgtatatggcactcgaccagaggttgagtttctgaaacaagaggg

SEQ ID NO: 15259 - DNA, 201 bp, Bos taurus
tcagacggagaagaagaaagattcagacgcttgaggtgggagacaacccatcacagctgtaggtaacaccagtgggccaagggaatatgatgcaggcatcggcagcatctgctgcactcatggtgggcaaaaaaaaaaaaaaaacaacaaaacaaaactggggccactagtggcttacactatctctaagattggcaatcc

SEQ ID NO: 15260 - DNA, 201 bp, Bos taurus
agtaacatccagtgggaagctgaaagacacaagagttttccatgacacagtatgatttccccaatctaggtagcagcacaactgggagggtcaatggaatcgctgtgcctacttgaagcagtggtgaagattcatagactgtaaaaaagatgacaggtgcccagctcagtagccttaccaaacacaaagtaaatcagagac

SEQ ID NO: 15261 - DNA, 201 bp, Bos taurus
tgatctgagtccagatgaagtggttttttgggtgtagaagaggaggagatctttcttggtatccagcacccagacaggagtctcctgggccttgttatgcacgtggggctcttttgttatgtaggaaggacttgttgtggctggtagaagcttcatctttggcctcaggagggtggcctcccggcttcctaggtggtcttc

SEQ ID NO: 15262 - DNA, 201 bp, Bos taurus
acataagctggccctctgtggtctccagggctgttggcctctgaagctgttgttaactcccccttgcaatgtctctgatagcattacaggacacgggggcactgagctactgagccactctgcagcacagcatctcaggaaggcctctgttataatatgaacattatgttgaagttgaagctcagaaactaaatgatgcaa

SEQ ID NO: 15263 - DNA, 201 bp, Bos taurus
tttttctgtaaggggctggataataaatattttacactttgcagaccataaggtctctgtcacattttccaccttggtttttgtgaaatgaaactggccttaggtgatacgtaagtggatgggtgttgctgtgttccaataaaactttatttgcaaaagcaagtgaagggccagatatggcccattctctgcacttggcca

SEQ ID NO: 15264 - DNA, 201 bp, Bos taurus
ggaggcccacctgccaccaacttagcccttacttcacctcccttgtcccgctgtgtggatgcatgaaatgagtgtatagagtgtaagaatgcgaatgtgccgattcagaggggccatccatttattccctgtaatttattaagtacctattatataccatgctttatgaaagatagatataatacctagtgaacaagacaa

SEQ ID NO: 15265 - DNA, 201 bp, Bos taurus
cctcacgtgcctcaaaagggccaccattgaacccaaaccattgtccccaagtaactcttatcaagtttccctcacagggcccacctctctaaaaatcactcggaaacaacctttgccgaccatctaagaggacactgaatgacctggacaactctcggcctacagctgttcttgacccagttgttacaggacctctggact

SEQ ID NO: 15266 - DNA, 201 bp, Bos taurus
ctgtgcagggtcttagctgtggtatgcaggatcttcaggaccctttttagtttcggcatgcagaatctttaatttctgcacacaaactcttagatgcagcacgtgagttctagttccctgaccagggatcaaacctgggccctcttcattgagaatgcagagtcttagccactggagcaccagggaagtccctgtgcattc

SEQ ID NO: 15267 - DNA, 201 bp, Bos taurus
cctgtgcagggggaacgaggccaggcccaagggatgtacaaagtcaggagggcagagggaacgtgatctggggtaataattgattctcaggtggactgcagacagggtttggggaataggcctggggctgaagtcttaagggagttacggctccttctagcagacaagacagaaggccagaagggagaaagagatgcaagc

SEQ ID NO: 15268 - DNA, 201 bp, Bos taurus
gtaaatgtgtcaggaagatgcctaccaggctgtaggtgcttataaagcttcagctgagcctggatgtgggtgcctagaaaccctctgatccaaaagtgataatgatagaagatcaatggcccccagatcagggaggacatgggaagcatgctcagtcatcgaagaaaaccatagaaattctattacagttaaaatcctttc

SEQ ID NO: 15269 - DNA, 201 bp, Bos taurus
gagagatggaaagtggagaaggcccagaaagatgttttgcatctggcagagattctgccatctcagtcatccctgtaggcattcacacaaccccctctcacgagaggccccaagctttcagatctcagcttacatgctgtttctgcttcgggtcagacagaactagcttccagacccagctctaatactttggccacctga

SEQ ID NO: 15270 - DNA, 201 bp, Bos taurus
atccattttccctggcatttaacccagacccttacattcctttgccccaaacaccctgggtctgtcccgattccttttataataaccaccccaatcattatgcctccatggccttcactctcagatttgacctccaatccaccttctgtctcagctttgtttcctacgggaccactggtgcttgaatatcagatacttttt

SEQ ID NO: 15271 - DNA, 201 bp, Bos taurus
ggcaactctggcacatgatcggagggcaatgaacggtttctgctagtatctgtcatccttaaagccacagagccataaatttccatcctgaggccacctcattgctctgagtaagacagccccgtggcaaagaacgcaggatccaccgtcaaaacatcctgggtgacggcccagttctgacaaagagtagctgtgccacct

SEQ ID NO: 15272 - DNA, 201 bp, Bos taurus
ggagcccagagcctgcctggagtgttggagagaccaaacgaggcagacctaggggagtcagtgagcaggaggagggaagaggtggagacaactaagtaagcgggggcccgagcaggatgggagctgggaggcagggaggaggcaccgtgagacgggtggggccgagaccggcagagcagagggggtgggcattggcatttg

SEQ ID NO: 15273 - DNA, 201 bp, Bos taurus
caggcccgagagtccgggagtcacaactactgaagcctgcacgcctagagcccgcgctctgcaacaagaaaagccactgcaatgagaagcctgcgcgccccaacgagagagtggccctcgctcagcacagcgagagaaaaacctgaaaagcagcgaagacccagcacagccagaaataaataaataaataaaattatagca

SEQ ID NO: 15274 - DNA, 201 bp, Bos taurus
agaaaagagattactggggctgagagtaggaatgagattgcaaacaggaacaaggggcctttttggaaatgtgcaaaagattaggtggttccaaaactcagcaaacttactaaaactcagtgaactgtatacttctaatggctgatgtaaattatacttcaataaaactgctgaaataaaaataaaaaagaggaaatgggt

SEQ ID NO: 15275 - DNA, 201 bp, Bos taurus
ccctcctgctggctgcaaccggagaacatctctggcttcacaaggcatcctgaagtctaaacaacaccttacgtgtgcgagtgcccagaatcacacccggcgccccggatcaagggccacctcactaacagcctccaaaacacatctgacgtgctcctggaagactcagactttatccacctggattctacagccaactcc

SEQ ID NO: 15276 - DNA, 201 bp, Bos taurus
tgttcctgccagcctaactcccaagcctcatctcgctgctgatgagcaaggccctcgggtcacacagcctggaggcttccttttgtccccagcaatgaatattaatttcccattaatgaggcctttctccacttctcacttcagacagttctccaagctgtcttgagtgccttctattatcaggagccgttatttgcgtct

SEQ ID NO: 15277 - DNA, 201 bp, Bos taurus
ttgccctttccttctctggtagatcttcctggccctaggatcaaacccacatctcctgcattggcatgagagttctttactactgagccactagggaaacccaggaagggtagatgggtattgataaatggaaaatgtatccaaagggaagggcttggacacgtgacctcaatagccagcttcaacacgcaggcatgtttc

SEQ ID NO: 15278 - DNA, 201 bp, Bos taurus
acgtccattgagtcattctgatgcatgggccatattttgaatagtgtcttttaaaaatacaaataccatgaagtctcctctttgttgcaaccttctggaggtttctcattgtacttggaacaggccccaacttcctgcctgtcttttgaaccaccacccacctccaccaagattgtcaagcctccgcctatcctttgacac

SEQ ID NO: 15279 - DNA, 201 bp, Bos taurus
caaggtcgcagcaattcccgtcagctcaggagtcatccacttggtgggcagaggtggggtgggctgatggcagcctgtggaccaaaggccccacctctgccaaaatggcaggtaagccttccttgagggctccaagagtggacagcatctgatggcttctctggaaggagctgcgcctctggatgagcctcctgtttcagg

SEQ ID NO: 15280 - DNA, 201 bp, Bos taurus
ttttttgctgcacctggaggcatttggcatcttagttccctaaccagggatcgaacctgggtcccctgcagtgaaagtttgtagtcttatccactgggccactagggaattccctgtggatgcccctaaggaggactttactaagggcaaggactctctcccacctcccttcatgtatcaggttagtagggttcaagctga

SEQ ID NO: 15281 - DNA, 201 bp, Bos taurus
gaaccttcccattttaccgatgaggctactgaggcctaaagaggttacactttgcccaggacacaccacaaatgagaagcaaaggccagagtgaagccagtgctctttatcatccagccttcagctttccagcttggctctgagaagagaggtgagtcagcctgcccctggggctctctgcagctaggctgtggtggccac

SEQ ID NO: 15282 - DNA, 201 bp, Bos taurus
gggaggttctggagggtccttgtcctgattggatccccagtccccctgtgcgtgtaagccagttccaccctcctgcactccccccaggcccatcctataagtccaagaattatctggttcctggaacctcccaagcagaggctgtgccagggaagggtgggaccaggagttgtatgaggggtcgtgtgtggggcctcctgg

SEQ ID NO: 15283 - DNA, 201 bp, Bos taurus
gcctaagaagggcaataagcccgaggaaccggatgtcggcaacgagcgggcggaagtggtggtaggctaagctgattggcaccgggaaggctgatagggacctcaaactcaggcagctggggcaccgccttgtagctttaggttacaagtttttgtttacctgttttaatggacctccccccagtactgatccctcgtggc

SEQ ID NO: 15284 - DNA, 201 bp, Bos taurus
ttctcaggatgttcagatactcctaaaactcccagacaggggaccagggtgtgtggaatgcgtcccatcttgggtttattttagatcaagggtccccaacccctgggccaccgaccaggtacttcccgtcaaatcagtgatggcattagattagaaatattgtgcacaaacatataatgagctggaatcatcctgaaacca

SEQ ID NO: 15285 - DNA, 201 bp, Bos taurus
cagacggagccgaaaccagcttgatgtttctagaacacgtacctggggtgggaggagggaagggacaagggtacggggcctcaggccattcccctctgggtgaggggcaggcacttaccttgaacacaagcttttgccccagctggttcttgccgtctggtccgaccgggtcgagaatcacacagtagttgtgggggccca

SEQ ID NO: 15286 - DNA, 201 bp, Bos taurus
gcagccaaaactaaaaataaataaatacaattttaaaaagacaacacaaacctattctggagactagaattctgaaatcaaggcatcagcagggccatacgccctttgagatgctaagtagaatctttccttgcctcttcccagcttcagtgtttgctggcaatctctggccttggatttgtagatgcatcactccagtct

SEQ ID NO: 15287 - DNA, 201 bp, Bos taurus
gtctcgaagcagagggagtgcggggacgaaagagtgaagggtccatggtggtggctgtaattcaggatgacctggatttagcggatagtgggccaggcgggttagaattgacatctcccgtggtctcattggctccaaaactgcgctcgactcggctgcgtccagggtctctagttccccctctagagactgagaaggtgc

SEQ ID NO: 15288 - DNA, 201 bp, Bos taurus
tgtacactcagtcattaattctcctctctcagctgtgctcagcactcctgggcattgagtggcaggacctggggttcagcttgggaccaggccaaccttcctccaggcttcagaacccccaactcctgcccccaccgctgagtcagggagcagcctgtgcctgtggagagcattagcttaattgtgccctgggctgtggag

SEQ ID NO: 15289 - DNA, 201 bp, Bos taurus
aattggattgttctactttggggcacaagcccttagccctgacttggaaatatcctaaaaactcctgccatttatttccaaagcttggatttggggacttccctagtggtccagtggttaagactctgtccttccaatgcagggggtgtgagttcaatccctggttggggaactaagatctctcatgcctctgggctaaaa

SEQ ID NO: 15290 - DNA, 201 bp, Bos taurus
ggcaagttgcctaacctctctgagcctgtttcctcatttttgaaatgataacaatgcctatatcacagaatggctgaaacaagacaggacaagaggccagcgtatgcagaatctatgaatgatgtgtacagatcagagctcggcacacagcaaacactcagtcgatggtagctgttgttcacataagtatcctaacacaca

SEQ ID NO: 15291 - DNA, 201 bp, Bos taurus
gagctctggtctcatgcattgcagggagattctttaatgactgagccactagggaagctcaatcaagggagtgagtatccataaaatatttataccatgtatgatagcactcttgagtaaaacaagttatgtggctatgagaaatagtaactccttattttatggaatgtcaatttcaactgtaaaaacaactgacaaaca

SEQ ID NO: 15292 - DNA, 201 bp, Bos taurus
ttttagagactgcacagagttcatttcaattcaatctgatgacactgttatagacattctatgtgtagagtactgcagaaggtaagactcattcttccttccctggttgttaaaggggagcatttttttttccggccattccaggccacatgtggggtcttcattccccaactagggactgaacacatgccccctgcattg

SEQ ID NO: 15293 - DNA, 201 bp, Bos taurus
agggatcattgaaatattaacttttctaacaaagagggcatgtaaaaaaacattttatgcaaccattttgttttacaatcaaggaaaaatagtctcagggaggtcctgggcctgctcatttcatacagatgattagtgatggttagtgctggcccctgaatggtagagttcccagctcccaagttgccttctaggactttc

SEQ ID NO: 15294 - DNA, 201 bp, Bos taurus
tcctgcacttgtgtttgagggtgtgccggaattggccaagcccccaccccctccgcttgtctccctgtatctgcagtgggtgaatggggtccatgtgatcgagcatgaggggggccatctcccctttgaggctgacaggaggcccctgtcctcctgccgcatcaccatcgccatcaacaacacgctgtccccccacaccct

SEQ ID NO: 15295 - DNA, 201 bp, Bos taurus
cctccaaattccttggaaccactcagtattacaccatgaagagatgattggaaaagctgggggagtatctctgtcaaagtgagtagattttatgttttttatttgaccctatattcagctaataaaggggtgtgtgtgtgtgtaaactatagctctttcctggaatagagagagcttcatcaatgagttcttaaaagttct

SEQ ID NO: 15296 - DNA, 201 bp, Bos taurus
agcatgagatatgcctcagaccattaagttaaaaaaatgaggcctgcatcctgctagtcaagtctagcaagataatgacccttagaaccaaggacaggaccataagggaaagatgacattccaaagtagaagaccctcattataatgaaaactgagatgatttaacgtatttcagtatatgttaccacccttctgatttga

SEQ ID NO: 15297 - DNA, 201 bp, Bos taurus
gttctgttatgtacagtcccataatatgatttctaacctctgacatcacatttatcatgctgcatattaatcatgtatatgtttatctctcttaagggactctgagcttcttgagaggagggccataacctcatgtttgcatccttaatatctaacacttgacacataatgggctcaaaaaatatttaatttggattttat

SEQ ID NO: 15298 - DNA, 201 bp, Bos taurus
cagccagctatggagttctgcctttgagacaaagcagccagagacaatatgtaaatgagtgagtgtaacagtgttcgagtgaaattttatttacaaaagcaggcagcaagcaggattgggcctgtgggctatagcttgccagtcctttcttagtggagaaacttttggccgtacacgtccattttctttttccctaagaac

SEQ ID NO: 15299 - DNA, 201 bp, Bos taurus
tgcagtacgtagcaaccctagaatatgtttaaatatgaaattagttttcctgaatttctagaacaaaattacctacccagtaaggaactcaaccccaaagcgtccaaatttgatgtcttttcctgcaaaccttcgccccttcttaagtctccttattcttttcgacctaaagtactgcttcttctccattggcctgctgtc

SEQ ID NO: 15300 - DNA, 201 bp, Bos taurus
ctgggtgggtaagagagtccatgggctcccctcggcttctggctctgtgagtgagcacacctgggtcagggtgggggtcagttttgagaagtatctgggtgtgtgaggccagcctgggatccttgatcctccatgaagctggtgggggtgagaggagaccaaaccagtcaattctaaaggaaatcaaccctgaagttggtg

SEQ ID NO: 15301 - DNA, 201 bp, Bos taurus
ccttgcatcccaggagaaaatcttacttgattatggtgtatgagacttttagtatatttttgaacttagtttactgatattttattggggctttttgcatctgtgttcatcagggatatgaagttgtagttttcttttcctgtagtgtacttgtctggttttgttatcagggttaatactggacttgtaaaatgagtttgg

SEQ ID NO: 15302 - DNA, 201 bp, Bos taurus
agcgtgaggcacaaaaaccttcatcctttaacaatccagccaggtatggacagcagtgtgtccatcaacatcactgggtgacttctggttaaaagaaaacttttggctgagagaaatcttcaagcctatgtatttgtatggacaagaaggtctgaggaggagtaaatgcctgaaaagcaaataaggatatatttcctctgg

SEQ ID NO: 15303 - DNA, 201 bp, Bos taurus
tgtaaaacaccattccaacacagggtggtttctttaatttcttgatgtgttttttcccttaaccaacgatatttctctcatctagttaaggattgcagtcggcagtgtacctctagtcttaatctatcatcttgcatataaccaacaagtacttagtaagaacttgttacttatcccgtagtctaacaatcactatgggtt

SEQ ID NO: 15304 - DNA, 201 bp, Bos taurus
tttctgtttctctctcagaaaacaatccacttctgagcatcgttggaggccggttactgcgtctgcatgctgatgatggccgcgatgtgcccccatcccatgtggtcctctgccctgcatggggtcactttcatgttaggcaaatggctgaaatgtttggccagcagcagcacagataaagggaaatagtctttaaaattt

SEQ ID NO: 15305 - DNA, 201 bp, Bos taurus
acacaaataaactgaaaaagaaaaaaaaaggcctcggctcacactgtctcttcactgcttctcctcctaactgcctcaggttcttccacagatggcactgaatggcatggcaggcctcctcctcttgaaaactgagagtgaaaaactgtctttttaatggcaataatctcccactttgttgtcctcaccatctctgaattt

SEQ ID NO: 15306 - DNA, 201 bp, Bos taurus
aataaaggtcagcacatgtgggatgtgggtctgtagaccctagggccatctctgcccctgtcactgatggccttagacaaatctctgccgcaaagcacacgcatgtaaaacagggacgtgactgaagggtgtctgggccccttggagctctcaaatttcaagctcctctccctgcagctccagtgtgaaaacatacatacc

SEQ ID NO: 15307 - DNA, 201 bp, Bos taurus
agccagcatagcaaatggagagaagtcaccctaaattgacagccatgctacaaaggtacccgacatggacaatattgaattgtgaagctaaaactcatttcctaaagtatcacctctttaaaacaaaagtatcagtcaaccatcctgaaagaaagaccaaattgcctctcaattctctcaacagaaaaggatattccagat

SEQ ID NO: 15308 - DNA, 201 bp, Bos taurus
gactaaacagacacaaccaaatacaatatttggcactagatttgattctgaaccagaagggaaaaatcaagttgacatcaatgtgtgtgtgtgtatgtgtgtatccagcatcttaacagatgatacccaggtgcttgtgctcaggtgcttggttgtatccaactcttttgtgaccccatggactgcagccccccaggctcc

SEQ ID NO: 15309 - DNA, 201 bp, Bos taurus
agggcccgtgctctccaacaggagaagacactgcaaaaaagaagcccacgctccacaactagacaatagcccctgctcaccaaatatgcatgcaacgacagagacccagagaggccaaaaatacacacacagagaaggctgcgtgaggacacagggagaggacagccatctgcgagcctaggagtgaggtctcaaaggaat

SEQ ID NO: 15310 - DNA, 201 bp, Bos taurus
cagccgggcaaccatgtcaatagccacgtccacaaattctatacattcattagttctaattgacgaggacgcggaggactgaaaaccaaagtctagccagacttcccaaacacctgcccttagaatttactggatcaagaggctgaaaaagctgagggaagagggaatgaggaagggggaattggctttttagatgcttta

SEQ ID NO: 15311 - DNA, 201 bp, Bos taurus
tatgctgaacaatgatatgtgtgaagaaagactcaaagtaagtttggactaaacgagtatttctggtaaaccaccaggaaagccacaccactaaacggtaacgtgggtctctgtcaaatgcagtgacagtcgctcacctcatgctgggtaccccagattgaagaactaacaagccagagatgtcaggaacacagaaactag

SEQ ID NO: 15312 - DNA, 201 bp, Bos taurus
tcccccggtgagcttaaccttgaagaagacactcaaagttagtttcctcccgagtcgtggaggaaggctggaaaagtgacttcagggtgtgactttcactccacaagaccttcctgtcatttcttctccctccctggggacaggtagacacatttgtatgtctgtctgtctttcagcgggaagatgagatcttagaactca

SEQ ID NO: 15313 - DNA, 201 bp, Bos taurus
attgtcttttttcttcattgtaggatctctcctcctggtgggggaaatataatgacagaaggattaggggggctgagggggagaagagatccaacactttcataaagggctcggcctgttttgtcttacagaaaaattatatagaaagccacctttaaggttcaaatgtaagaaaggacagcagagatgaagagagggcta

SEQ ID NO: 15314 - DNA, 201 bp, Bos taurus
taaaactcaagcagcctagtgacgttctggaaaatatccatgaacataataagcacaggcccatagatgagagcagagctcaaaggaaagaaggctgaagcgtaatgaaaaatgaacattgggccaaaaaacacaagctgaataggttgtcgtttcatcatttcctggcttgattttctggaatctatttgtatgaggggc

SEQ ID NO: 15315 - DNA, 201 bp, Bos taurus
ccgcagcccctggggagcctccgagaaaggccccttttgggaactaaggagtccatttggggaccatgattgcctctccaggatcagcctgctgggctgaacttgaggctggcccccacccacagggcaaaaagcagggaaagtagctcaagacttagtgattaaaggaatcaagtgtaaaacatgtcaaaagaacagtta

SEQ ID NO: 15316 - DNA, 201 bp, Bos taurus
aaatgtcagaaagaacatcacaggaagaggagaaatgggaaaggaaagattatttgttttgtcatttaaattctttcatttctttttaaaggcctacaaagtggtttccagttcagaatacccactatattcacttgtgggattcccaaagataggtggagagggccaggctccacggagtgcagctcagccgcactcttt

SEQ ID NO: 15317 - DNA, 201 bp, Bos taurus
tttcagtggagtaagtgcaattactgccagtgaatgcattacaaagtacattattataccttaggtgagcccccaagtcttgcaaaaacttgtttatatatgtaaaaccaaacagaagctgaaagtgggaggagagaaaagcaattttcattgaggagacaaaatatacttgctgaagtagaggaaacagttctactctga

SEQ ID NO: 15318 - DNA, 201 bp, Bos taurus
tttcccaaattgagtatgctaatcacaaaaggtaaaatggtgttatttctgggaatgctcttcaatggttacccaaattatttttttagtgacagtagaattattttcttcctctagtaaaagttttttgcaaataaatcaaacaggttgggaggaaaaaaacaatactgtctcaacctgttaatgttccttttttgctat

SEQ ID NO: 15319 - DNA, 201 bp, Bos taurus
ctatacttgcagtttaggctggtcctcttctacaaggaccaaactacacagtacagccactaaagctttctactccctgtggtcaagtctgtgggaataacgcagtgaaacgagatctgttaagctccactcttaaagttccatccataaggctgtgaagccaacccctaccgcacaaatcttaaggcacaaagataatct

SEQ ID NO: 15320 - DNA, 201 bp, Bos taurus
tttttgaaggttaatttgtttccttgtgatttttccccctttactgtaaatccaagcactcaaaggaacagggaaaaagtaacataatgaaggattccaaaaagttatttgcataatcaagtcataagactcctggccttagtgaatattcattctttttggcaaaggactttaaaagttcataaaaacaaatactgtcta

SEQ ID NO: 15321 - DNA, 201 bp, Bos taurus
ttataattttaattgtggctaaaaaaaaaatttaatctgaagctcatgtccctaactaaagctaggattttaaaagtctgccccatgtgggtttctgagacgccacaggaagggctaaataaatggaacacacggttaatgccttctccaaccccactttacccacaacagctgggtttctgcttttatatttggttatgc

SEQ ID NO: 15322 - DNA, 201 bp, Bos taurus
tgtggaaaggggaggaaagggtgagaaggcagcaacagcgccaaggaaagtttccttgatttggatcaaattttttatttctacttaaaaaggaaaacccatcattattacttggatttatttgatgtggtgccttagtcctttcctttcaaaagtcatttctattaaaagtgcccttgctgggtcccccataccattttt

SEQ ID NO: 15323 - DNA, 201 bp, Bos taurus
ttacagaaaaaccacttccctagtgaattccacctcagcagcaactcacttcatctttttaatttaattaagtacaaagaaagaaaacagaatgaaactcggacaagctagcactgactgttaacgtccaggagtccctcatgtccctcctaaatcaaaatgcatattttaaagtaagctaaaaatgatacacaggcatta

SEQ ID NO: 15324 - DNA, 201 bp, Bos taurus
cacatcgggatccttaactgtcctgtctgatagctaggcctctgcatgaaaagttgaaagcagtggttaaggattttttttccgaatggaattcagaatgcgaaagggcctttcaaggatcggaaaagcaagacagttccctggtggcctgattgttaggcgtctgggttttcaccgcaatgttccgggttcaagccctgg

SEQ ID NO: 15325 - DNA, 201 bp, Bos taurus
tcggactcttcaagaccccatggactgaagcctaccaggctcctctgtccatgggattttccaggcaagagtactggagtggggtgccattgccttctctagtctaaccctatacgcatatataaagcagatagaactcttgtaagccagaatggttgtgagtctctcacttgcccagtaatgagacctaaatagagcgag

SEQ ID NO: 15326 - DNA, 201 bp, Bos taurus
gggaccttagtttctagacctgcaggcagaatcttcattctccgaccagggatcaaagcagcaccccctgcagtggaagtgtggaccaccagggagtcccccatcttaaccagttttataagtgaaaatgatagttggtcagtcatgttcgattctttgcaaccccatggactgtagcccaccaggctcctctgtccattc

SEQ ID NO: 15327 - DNA, 201 bp, Bos taurus
gctctatctgttttgattcacacactttgagactatgttgtttggtgtgtccatgtttagggttgttgtgacttttggtggattggtctctttatcattacgtaatcatgtgtgtatctctcagcggataatggagcatgattgtcttattactggtttctgtgtgacttgttaattttgaccctgatctggtcctcaagt

SEQ ID NO: 15328 - DNA, 201 bp, Bos taurus
tgtagctttccccaagcctcggtgcttagcgcccatcccttctctcataacgcacactttagaacttagcctgtctcctgacttcattctgttcagctgatgttccactctgggctttcagcccagttcctcttctgatttcagatccacacaccccgcctggtccccccaaagtcgtcgacactcagtgtctggcaaacc

SEQ ID NO: 15329 - DNA, 201 bp, Bos taurus
ggcccctccagagttctcctggttaattttctttttaatttatttgttgggctgccccaggtcttagttggcagcatgcagggtgtttagctgggacatgtgaactgatagttgtggcctgtgggatctagttccctgacaaaggattgagtccaggcacccttgcattgggagagcaaggtcttagccactggaccacca

SEQ ID NO: 15330 - DNA, 201 bp, Bos taurus
gaaaaaaaggaaacattaaaaaaaaaaggtgtgtgacaagcccaaagtcatacagggagaatcatttcccagaggctgtgcactgaactggaccataatctgctttcctgtcccatttcattccctgtcacagtggcaaggttccatggcaaccacaaaagctggtaaatctaatcaggaccagcaaggcgagtgttctgg

SEQ ID NO: 15331 - DNA, 201 bp, Bos taurus
ctgaggacaaatggaaattgtgtgtgagaaacaattgtgagagtgagaaatatagaggcctagtgcctgctcaggaccaatggcaagcaagggcctgaaggaccatcactgagccaaaaaaggtcagaagacaaatacaagctgcgatgggagagggatgcaaaggacggtgggggaatgttgccatctgagggctgatgt

SEQ ID NO: 15332 - DNA, 201 bp, Bos taurus
tcacagcatccagcatattgtctaatcaaggcttaattcttgagctatgtggacacatacatgacaatagcagttactaccatatcagggacaggagagaaacttttcatataatagagcaggatgggatgtacagatgaatatttaggtccttcagtgtagtgtcagttttatcttttgtatgtcacaggctgtccattg

SEQ ID NO: 15333 - DNA, 201 bp, Bos taurus
gtagacagaaagcaacatattctattgaccactgaacttcagattgagaccctctgtcttatcctctgtctccatttctgctacatgaaatttcaattaggttcttcaacttttcaggtcagtctaggatagtaaatggctttccaggtggctcagcggtaaagagtccgcctgcaatgcaggagatgcaggagacagaca

SEQ ID NO: 15334 - DNA, 201 bp, Bos taurus
aatgagctcctttccaaattattctgagttgtgtgagctctgggcctgaaccatatagactctcacttgagcatcttcacagagctttataaacaccaggttctgggtacacaagtcttggtcgcacctggagaggtacaactatttagcaaacccacaggaaaaacaatcattaataaaatagcccccaaaggcaacaaa

SEQ ID NO: 15335 - DNA, 201 bp, Bos taurus
ccctgtgccctctgccccttgggccctggttcttgcagagcctcagcccctgtgacaccctgcattctcccctccgtctttcccatcacagcatctggtcacggtggccatcttcttccatcttcctagatggcaatagctttggttcttctgtggggtgataacgaggaaagagtatgggatttttctttgaagactgtg

SEQ ID NO: 15336 - DNA, 201 bp, Bos taurus
gtggttcagagctccgccaatcgcagatatgaaagttgagctcagatggcatactgatagcatatcaatagcataatattctacggcctcctattggccacaggcaagtgtcatttcacccgagaggaaatgaacaagagcctgactcacagaaggtgtgttcactggggccatcttcggagacgggctgccagagtttct

SEQ ID NO: 15337 - DNA, 201 bp, Bos taurus
ataaaaggagaatattatagagcagaggtcatcaaaactacagcctgtgacaccagcccactgcctgttttcatcaataacattttattagaatacatccgggcctgttgtttacatattgtctaaggaggcttctgtgctgcactggccaagctgagtagttactctagagactgtatggcctgtcaagcccagaatagt

SEQ ID NO: 15338 - DNA, 201 bp, Bos taurus
caaagagctgcagtaaggccagccttaagcacagctgaaacaaccacatcagcaagtcacatccctcaggctctccattggtcaggcctgtacttggcacttacacataccatcccacctccttaaaacaacccaggttacagttgaggaaaatgaggcaccagggtgtgaatggtaggggtttggaggcccctcagcctc

SEQ ID NO: 15339 - DNA, 201 bp, Bos taurus
atcctgaacgggctacccttggtgggaaacaggcatgggtgtccaggtgctgaaattcaaaatgagcgttcagaggccctacttgagcaaaggaattacgggtacctgggacatgctggaagcctgttctcagtccggtttgcagggcctatctgcagggcctgtcatgtcgtagcccagctgttgttcaatcaccaagtc

SEQ ID NO: 15340 - DNA, 201 bp, Bos taurus
agagcaaatcatgactctatttccttcaaaacacatttaaccaacaagtgatgatgctcatggctttctgtgctaagactttacgttgtgggtatcaggattgatcatcattcaactgattatctagactagcataataaacgttgaacacattacgccagataaatttttcatctcaatggagaacagacatcgtccttt

SEQ ID NO: 15341 - DNA, 201 bp, Bos taurus
aaggagataatttttttaattcttatgtagtagaaagaagggggaaaatgccctaatggaaaaataggagattccactagtattctgctatatatataatgtaaattatatatatatataatatatatatataaaatattatatatatataatacttaaagacagtaaatacactacctcctcctgcttagaatatataat

SEQ ID NO: 15342 - DNA, 201 bp, Bos taurus
cacggaggctgtccctgctccgtgtgacctcaaggccgagagatagcaaggttactttcccaggtcagagacagtacgttaattcatccaaggtcacctagctcctgagtggggccagcaggggacttttccctgttcctattcagtcccttccccaatgccctctgctgaggtcaacgtcagccccttttccggaaagcc

SEQ ID NO: 15343 - DNA, 201 bp, Bos taurus
acctgtcggctgcgtttcacacctcccccggcccgcggttatgctcactgcatctcatgttctcatctgtatatcggggacgactgtcccctgggcctgctgggaacagcaaagagcgccagcgcccagccctcttcatcacttcatccctaactgctcccgtttctagagcgttccctacgtgctggacgagtcctcagt

SEQ ID NO: 15344 - DNA, 201 bp, Bos taurus
gcagcaatacccgcagttcattcagactcctgtagggggcgggggtggacagaacagcagtcagtctgggtccctcagctctcatcctccacaattagtccggtgcctgagactggccatcccgagggggggatactggctaccaagacacagcgtctgtgccaggaggggccacagaggaagcacgaggcttgaagccat

SEQ ID NO: 15345 - DNA, 201 bp, Bos taurus
acgtgcaccaccacaaccctgatccttctctcctgtacttgggagttggtgtcctggacggaagggactggtcttcctggttaggcatctttgcaaggagtctggggccacgacgggggcccgtctcctcccaaggcctgcttggtctgcctcttctccctgaagtaccagcatccagaaggtaagggtggatcaccctcc

SEQ ID NO: 15346 - DNA, 201 bp, Bos taurus
caagcttcgctgctgctttagccgctgctgctgcagcctgggggccaacccctgggggaagaggaaggggagagcctggaaagtgtgccccgggatctccggagcccgtctcttccaggcccaagaaaaccaactggttcatatctgggtgtggatgtggggcatatagcaagcagaggctgggagagctgccccagcttc

SEQ ID NO: 15347 - DNA, 201 bp, Bos taurus
ctgatgccttagctaagacacagagcagccaaataaataaaattttaaaaggccatgtgatgatgtgggggtgcagacacacagggagaagatggccatgcgaagatggaggtagacaagccaaggaacaccaaggatggctgtcaaccatcagaaactagaaagaggcatggaagcgttcttccttagagcctttgaaag

SEQ ID NO: 15348 - DNA, 201 bp, Bos taurus
caaaaggccgacctggctgaagttgaaaatttgtatggaagtcagtaagagaaaagattgaatagggacatggagtgacaattccagccaaatttctctggctggtattgtatcccaggcccttcactgcctccttcccagacccaacaatggagcccctggagttgttccagcccccacattttttccttttattgaagt

SEQ ID NO: 15349 - DNA, 201 bp, Bos taurus
tccaagccaggtgggtctggtccttgccaagggggatgatgttggaggctcagctgaatcaggtggcagacggggccaaggatctagcccctgcctctatcttacccagatcctctcaacacctgctcagatcctcagaagagggggctgggactctcaggtctgggaacctgagcagtgggctcaggcccaccctaggga

SEQ ID NO: 15350 - DNA, 201 bp, Bos taurus
cgcactgcactggaacgttttgtcttctgtcgggttgactgaggctggcagctccttcttacaagtcactgactgtggccgtgctcccgatgtgctgtacatgttatctccttgcaggtgaggatgacaagctgatcttatgtgacgagtgtaataaagccttccacctgttctgtctgaggccggccctctatgaagtac

SEQ ID NO: 15351 - DNA, 201 bp, Bos taurus
ggggagccccatcctgcatgccccccggccctgaaggggcgctgtggccaccctgcggctgggacaggcctgccacttctgaaagctgcttttgtgcggccgctcgggctcctgtttcgttgaccttggatcctgcttcttatttatccaactcgaagagaaattcagcagcagccgaggggaaaaaaataacctcagctg

SEQ ID NO: 15352 - DNA, 201 bp, Bos taurus
agacctcagtgcagagtaaagtctgcccaaccagaaccccgaaccctggggccctgtctcctttgaacccatttctgggaggatagtccgtgctggctacccctgaccacggtgatttccggccagctctgggcagggacccctggagaagcaccccaccccctgcccactgtccttgcctccaaacagcccattttcttt

SEQ ID NO: 15353 - DNA, 201 bp, Bos taurus
agtgcccctgccctctgtgcccctctgcccagggccaaccacctcccctttcctgcagagcccagctccgatttgtcctttacaggaacccacgccttccctataaggccagaatttcaaagcattccaggcggggtgggaaaaagcacacaggctcctgggggaattcaccacagttgtcagggctgtctccaagttggc

SEQ ID NO: 15354 - DNA, 201 bp, Bos taurus
caccctcatgcccaccccagtgacatctcctcactctcgatctccgtcaggctccgctgagccttctccgtgtcctcgcgcttcttcttgagctcgtccagctcggcccggaggaactcgctctcgtcggccgcctgctgccgcaggtgctgctgctcggccaactcggcctccagctcgctggtgcggcccttgagctgc

SEQ ID NO: 15355 - DNA, 201 bp, Bos taurus
ctgaatgcttatacatttggtggcccccccccgcttttttttttaatagatgcaaagctaccaaatgaggttcagggcttggaagggaccctgaaagtgacgggcctcgtggtgaattccctccgactcggctctgttgtcttctatgtagaccatgggtcaagcattttcttcttttttttctggctgcaccacatgact

SEQ ID NO: 15356 - DNA, 201 bp, Bos taurus
ctaactggaggctcaccaaaaacaggtgggtgcaggaggaagggaaggcctctgagcatgcgcacagggtccctcggatgggccacggctaaggatgccacgcctaagaaggcaaggcttccccaggcttgcggacaggaagccatagccacccggttttcctgtcttgcccaaggccaggtcccatccttctcttgtaga

SEQ ID NO: 15357 - DNA, 201 bp, Bos taurus
aaacatcaggagtaggcaagaaacacttatgaagttaagtacctttcagatgaggaaacaagttggtgaaaagcagtaacttactcaagttccaagtgggcagctgagtatgactcaactttggggagggaggaactgatttctacctaagagaccggaggcttccctggtagaacagtggttaagaatccgcctggggcc

SEQ ID NO: 15358 - DNA, 201 bp, Bos taurus
gaactgaatgttaatacaaaccaagcaggctcctcctcagaggctctttttcaatggccggcactgggttctggttgccatggtgacagctggagcagaaaccaggagataatgtaaacacctggctttttgcagtattgaggagagcaggcaaaggtcttgtcccagctgcatgtggaaaaaaacgtggagggaggcagg

SEQ ID NO: 15359 - DNA, 201 bp, Bos taurus
ttttaatatttatttttatttatttggctgctccggattttagttgtggcatgtgggatctaagttccctgaccagggatggaactcgggcccccagcatggggagcacggagtgtcatccactttaccatcagggaagacccgccctgtgggctttgaacacccctgtttccccgaccccccaacacctggcctcacttc

SEQ ID NO: 15360 - DNA, 201 bp, Bos taurus
tgtggcccatgggcttggtttccccacggcatatggaatcttcccagaccagggattgaacctgtgccccctgcaggtgggacgggtggactcttgatcactggcccacttgggaagtcctatatataattctttttcagattcttttctcctacaggctattacaaaatattgagtaagtttcctcagaggtgtctgact

SEQ ID NO: 15361 - DNA, 201 bp, Bos taurus
cccccagagtccccagttcatcaggtctggagtaggcccaggtgatgggatgttgcgggtctgggaccacactgaggacctgtaagagcaaggcttagcatacccaatctggctcatggcctgctttacttttctacataaaatattactggaccttcattcatgtattacttacggcgactttacatcagagctgagtag

SEQ ID NO: 15362 - DNA, 201 bp, Bos taurus
gtgtctctgggagtgagcagaagtgctctgggcttggatagggagggagcctcgggcaacaagacaaagttgcagaaacaaggtcatgctcactaagtcccttggctgggccagccagttacctgtgggcacaatgaccttcttgtcacttgctctcttttattcaccttgactatagaaaggacctttgtctctgaaacc

SEQ ID NO: 15363 - DNA, 201 bp, Bos taurus
atcccccaggggagggagccatgtgggcaaagatagggcttggaagctgtgattcggggctgggagtggacaggggctggagccacagtgatggcgtcctagttctttttcctctctccctctatgccattcatacctaggtgtgatgccttagcccacagcatctatagcagtgggtctcacactggaaagagttatcag

SEQ ID NO: 15364 - DNA, 201 bp, Bos taurus
tggttgagacagagtctgtgaaaaatccccggcgtgcagagctggaaactgtgactgtcctgtagtaacataaataatggaaaatgtgcgtcggtcctcaggggggccaaggctgtggcatcgcggggcacgcggatcctcacgtcccaggtcagccctctggccccgcccctgcgcactgcggccccgcccaccacgccc

SEQ ID NO: 15365 - DNA, 201 bp, Bos taurus
cgggcaggtgatttatcctctcccagcctctgcccccatgtaaagtggggggaacaagcctacgtcctaagggttaaatgagacaatgtagggaagttccccggatgggcccagacgactcagggacccagtaaatgacgagtattatgacgattcctgcgccccgcccagccaccagaccccgtctccagcagggagtgg

SEQ ID NO: 15366 - DNA, 201 bp, Bos taurus
tccactcctttcctgagtgctctggagagaagcccactggcatcttgcaggtcgcttaggggatgaacatgttctccctggagcctcagacactaattgaaggccccggtcctccccccatcccccgccaaaggctgctctcggctggtggaacgcacatctgctgtcctttgctcggcccctcctcctcgcgcatgcaca

SEQ ID NO: 15367 - DNA, 201 bp, Bos taurus
aaaaaggtgtcagtccctgacctggaaaaagtggttgctccgcagcctctaggcatgttgaacagggccatggtcacagtgaggactggccaggcccacatggatggagtgctcacagcccagggggctctcacttgcaggggctccccaaccattagcctttcccataaaacccttccctccagaggtctccccacagag

SEQ ID NO: 15368 - DNA, 201 bp, Bos taurus
ctctgtttacaccagggctcagctcacactcccggagctggaggggaccgaaagcttagcaacacttgcccgagaagagccactagaagactggccccacaagcacactagtgatcagaccgagcccctgtgtacagggaccaggatgtcttgctcactccaacagtcttagggccacacccagagacaactgcatgcagt

SEQ ID NO: 15369 - DNA, 201 bp, Bos taurus
ctatctttgtgcatctatctacattccagaccctgctctcacattaacaacgtgtcaactctggatgttttcccacccataaaaggagaagattggcctgggttttggaaatcctttccagctttaatgttaaatggttttacaattccagtgccttccaaatactgctttcccctagttggcctctccctggtccttctt

SEQ ID NO: 15370 - DNA, 201 bp, Bos taurus
gcccacggagggtcctccgtgtcctcatctggattctccccactgggtccagcccagctgtgatctggaggtggaggcagaatgggcttagaaaggttccggtggcagggcccacggagaaatatgcctcccacccgagctccttccctaaagccaagtccagccctgattcctctcacctgggtcagtgttgaatcccca

SEQ ID NO: 15371 - DNA, 201 bp, Bos taurus
gcggggatgacgtcatggtggtcagcgaggacgtaaatgatgagctgagcccagactctcaccagggcacgttgtactggagtgacctccaggccatgtttctgcggttcctgggggagggtcgtctggaagacaccatcaggtgaggatcagcttgtcccgttgggccctcaaaaaccatcatccgctcatctcgagtcc

SEQ ID NO: 15372 - DNA, 201 bp, Bos taurus
gggaggaactgactggacccgctcccttcttgcccctccccctgacccgaggccacatcgctcctcttcccctgggagatcccatctccccggcccggcagaaaagtccccatcacggctggaagtccccttgctgtgagggtgccctcaaattggggcacagccccgaggcccctctggggaagtccccgccttaaagat

SEQ ID NO: 15373 - DNA, 201 bp, Bos taurus
ggaagggcctaggattactcactgtggggatctttcctcctggattcctatttctttcttcactgctgtgcctgaagttccccagagaccccttaggtggcggccactggcctgcagcctctcccctccccgtccccactgaactaaatgctatttctgcccccttcttggggctcgtgtaagcgggagaaatggcggtgg

SEQ ID NO: 15374 - DNA, 201 bp, Bos taurus
tagcttcctgtgttctcactgattgtttcgctcctgaacaatggcttacagtcctgtcccctccgcaaccctgccaccctggaatcccagccccgaggccctctggattctaccaccaaaacatgtggcactcactgtcctgctccagccgctccttctccaccgccgacagcatcctgcgctgcctggctggccgcgtcg

SEQ ID NO: 15375 - DNA, 201 bp, Bos taurus
actgcaagttctagcctcgttcagccaaatggaaaagggcattagcagggaaggtatttcagccctatatccagctggtgtctcctgcctaactcggagcatgccatcccttcactccagcgggtgagctagccccagaagagtcctccagagaggggtgaagtggtacttagggactgaggaactgctgagaaggagata

SEQ ID NO: 15376 - DNA, 201 bp, Bos taurus
caataatgccttacaacaatatacaagctactttagcatcgtgtatttttgatttttttttaaactaccaattcaatgtgttcaacagctatagggaggggcaggctgccaatatttccttgattcaattttaatagattatgactttcagaaaattggtctatttaacgtgttataagatatatgggcacaaaatcattt

SEQ ID NO: 15377 - DNA, 201 bp, Bos taurus
gcttccccttttgtttgtcttcctttcctgtttctcttcacaaacagggcaagtcagtttctgcttctgaaccttcagtgtgctacatgaactcaaaaagtgaggccaagcaattgagtaaccatgttggcaacacaggtcccacagagagctctggtatagtgtctgaactcacatggttccaccaaggcagcaggtgga

SEQ ID NO: 15378 - DNA, 201 bp, Bos taurus
ctccaggattcccagccatgggaatcagtaaggactatgctgtacatgggccagttgtttttaatttgcccttgatggactctggttgactactctaggttcacgcaaactggcagtcaatcagagggtcattctcaggagcaaataatgtcacaaaccctcctaactatgctaacagcaactcaggagtaaagttaactc

SEQ ID NO: 15379 - DNA, 201 bp, Bos taurus
gggagacaggtaggggcacccaccctacaccagctctctcagtccttacttcctcagtcgaactcggggctttggcctgttctatcccctgaccccacagtccccaggttctcacgcctgtctgacctgcaggtgtacattgtgtgcacaagtggcccatatagccaccagctgggcctttggtagacatcgtaagcagag

SEQ ID NO: 15380 - DNA, 201 bp, Bos taurus
tctaagccaaaggcaggtacgaggattcggcaacaccacgtgtctgctgtgggtgagagcatgctctgggtacccagtgtacagcagtgaacaagacagatcatagagccaaggtctggggaggaggaggcagaccagcccctggtggtgcagggtaacggccacggagaagaaagaaacatggaagggggtggtgagtct

SEQ ID NO: 15381 - DNA, 201 bp, Bos taurus
agggttgccgggtgaggcctccgcaggtgcagtacaatcacagtgtgcgccttggaggccaaacacccgtacggagtctcggcccagaagtagctcctcgctccagagacccctggaatcctgcagtgtcatctcaggaggggagagcctgagcaggctactgctggaactgtccttgcaggctctgaaatggaagatgag

SEQ ID NO: 15382 - DNA, 201 bp, Bos taurus
acaaggccaggtattagtgtctagcgatcatcaatataaaatctttgaactcttctgtacgcaaaattccagtttctcttatgttcctgttggcccactcgaagcctgagcactgcgggagaggggcatctgctcgcctccccgggaggaggcagcctgggaatgggggtccagtctcccaccctcgcacagggactcggt

SEQ ID NO: 15383 - DNA, 201 bp, Bos taurus
actcccttttgccccctccacactaccataggatttaaccccaaaagcctctccagagctgatctggggtgacttatcagatcaggggcccccacttcccgcagttacatttccagcgaaggacaatgaggatttgtggtaggaagatgaacactatggctgctgcccttctgttaccaaagggaagtctaattatactat

SEQ ID NO: 15384 - DNA, 201 bp, Bos taurus
ccaggctcctccgtccatgggattttccaggcaagagtgctggagtggggtgccatcgccttctccgtactcactgggtggaccctaagtgcaatggcaggtgtcctgataagagacagaagacagactcacgggggaagaaagccatgtgacaacagaggcagaaattggggtgatgcttctacaagctggggaaggaac

SEQ ID NO: 15385 - DNA, 201 bp, Bos taurus
tcaggggcatgtctgtggcctgtgatggttccagaactttctctgaaatccctgagaatgaggtggtcttcttcactgcaaggctggtcacttaggttgaaggcctgcacagcattgatcctggaggtctttctcaggccttcttataccttctgtcttaatacatattcttttctgattataaaaaataatatatattct

SEQ ID NO: 15386 - DNA, 201 bp, Bos taurus
tgtctcagcagagagaagccagggaagcagactctgagctgctgagaaggggttcagcgttccctgcagaagcctgaggaaggaatcagggctctcgccacaggccagctccctcacctgggctttccaggtcagccgcttcatgtacacaccttgatttgtaaataggccaatattttaaattacattctagtgaaaaaa

SEQ ID NO: 15387 - DNA, 201 bp, Bos taurus
tgtcaagacccctccctctagggcctctcttccactcccaggtgatggtcactctatacccaagaagcctgccaaacggtgtcccccagcctgctcactccccactacaccccagtggggtcttcttagatgtgcaggagggatggcccaccgggggttcactcatggggaactccttggtccgcacaactggtcacagtt

SEQ ID NO: 15388 - DNA, 201 bp, Bos taurus
cccgctgggctccagccacatccgcctgactttgccccatcgcaccagcccttggcgtgtgctgtgcccactgcctggaatccaacgctctgatctttgcacagctggtcacgctcatcattttggtctccatgcagatgcccctcctctggaaggcctcccttgacttcctgggttaaaataatgctccgcgacctgcag

SEQ ID NO: 15389 - DNA, 201 bp, Bos taurus
acgagagtcttgatgaaaatgtatgtgaacagtttttctatttaccaaatatacttattttattttgcttcaagtctcaaacctggtctcaacttttcacctgtgttcacagttcaaaaaattccataaggagattatctatgagctggagaagaagacagagcttgatgtgaaatatatgaatgtgaggaccaggttttg

SEQ ID NO: 15390 - DNA, 201 bp, Bos taurus
cagcccctggcccagcctgtggttatcctcccaggagcttcttgtgcttgaacagcctgggttcttctcacaccggaagctttctagcgttttccgcacacgcaggtctaacacggcctttcgcggttgcagtagcgctccgtccagtcaccagggagctttgggtggtttctgaccgtcgttgttgtcaccacgagtgct

SEQ ID NO: 15391 - DNA, 201 bp, Bos taurus
cctaaaactggtgttttttttttttttttaatttacaaataggtataaatgtcaaaagggcacaacccaacagaaatgtaggcttacctggaagggcccgggggagtgggtgactacctcggtgggctccggggggctccgtgcatggtcctgctgctgatggagaagggcgaggccggccgcaatgtcgctgggcaccag

SEQ ID NO: 15392 - DNA, 201 bp, Bos taurus
aacagtatatcctcactggaaaaaaaaccagcaacccacgagtgaataagcgtgtccgcagcctggtggaagagtgactgatgctgtaactgaactcatcctcaagcacagctccgaatgcctgttaggctggaaaactgttgtgctgcgtggtaactggacataaaccaaggcggtcacatggctgattcacctgggctg

SEQ ID NO: 15393 - DNA, 201 bp, Bos taurus
ccggaacatccactcgcatgggctttggagcaaccttcgggagatctttctacctgctactgcatgttacgagagaaaggagaaatagggctgggaagagtgctgctgcctttcaaatacagtcacatttatttatacacgtgggtacgctgtaagcgttggtctatttgtttttctggtttctgctgtgtttatgagttg

SEQ ID NO: 15394 - DNA, 201 bp, Bos taurus
aggccccaactcccccagtgactttcagggaagagtttttaaagatggggtgtggctgttggtaggaatataaggtgcagccaccatggaggatagcatggaaggcccttaaaaaactgaaaatagagctactctgtgatccagcaatcccactcctgggcatatatcaggagaaacccacaactcaaaaagatccatgca

SEQ ID NO: 15395 - DNA, 201 bp, Bos taurus
ctgctgtttgatcctggccttgaatgagtagatttccaggtggggaaaggatattctgacacggagaaggatgcatgaggtcagggaggtcggagtggccggggcacgtgaaggtggctgggggggagcttgtgaataaggggcagggacaaaggatggtggagaggaggccagaaagttgtgctgggtccacgttgtgat

SEQ ID NO: 15396 - DNA, 201 bp, Bos taurus
gcacataaacagacagcttcttgcattcaaggcctgctcaggcctggttgtatgtattctgcttgcacttggtgatggagttttgcccagctcaataaattggttcttgatggccccctgatcgggcatttgaactactccaagactcagtcacagacccagagatgtttcttagagttggttactttttgtttggtccca

SEQ ID NO: 15397 - DNA, 201 bp, Bos taurus
ccctgcagggcggctgaggagagagggtggtgggcaggtgggtgttgacggggacacagttgtcgcacagggccagaggggcccccactgacctgcgtatcctctgcagatatcccagcccggtacccgtttcaagctctgccaccgcactatggcaggccctacccattcctgctgcagcccacggcggctgctgacgcc

SEQ ID NO: 15398 - DNA, 201 bp, Bos taurus
gggcctcattccagctcagccaatatgctcagaatttggggacagctcatagcattccttgggggtcatggcaacagcttgagaggggccagtcttatcattgcagctaagaaagtaagtaaatgagtgaaagtcgctcagttgtgtccgaccttgttaccccatgaacttatacagtccacggaattctccaggccagaa

SEQ ID NO: 15399 - DNA, 201 bp, Bos taurus
gggtgagccaggactcctgactggtggcccacagggtcagcggagctgcgaggggtcagcctagaccagcgaaggctgtgaccagcccgtggctgtgagcatctggaggccaacaccctgcaggaagataaagctggtgatccaggaggactagtgcagggggacgcagtggagtggcacgcacacattcacccacacaca

SEQ ID NO: 15400 - DNA, 201 bp, Bos taurus
aaccaagctcccttcagactccactgccctacagagggctcggggggccgcagcgaggaggtgccgcatttactctctgtgcaatgaggcctgtaacagatgacagctgagctccaaagctcacagtaccggcaagagtttaaacactgacaatctgtaaccgcgtttcatctgactccaagcagctgcgggcctccatcc

SEQ ID NO: 15401 - DNA, 201 bp, Bos taurus
ttggcggctgcccagggtgctggctgtccagctcagacagccagcaggccgtcatccacagccatgtgtgggtcccggactctggccggacctgactggatacccccgtttagtcccagaatgctccactctcagagcagaaacaggcaggctgggggcccgccacgctccccgggagcaccgccaggcgcaggcaccctg

SEQ ID NO: 15402 - DNA, 201 bp, Bos taurus
tgacctgcccttcggtccacttcagagtccctcacaggtttttctggcactctcccccgtgggactgtaccaaccttaaagactagtcttgatcaaactcgaccagcactttagagcaggccacgccctcctgctgtgtgacagtcctcagcctgtctgcagggtcccctgccctctctcttttcctttgtttgagtcaca

SEQ ID NO: 15403 - DNA, 201 bp, Bos taurus
tcgcttgtgttcttgaactggaaccgtaagaagagaactaatcgtcaatgccgctatgcagatgggggtccaccagtgtgacggcccaccacacactgcacgcaagcgccccaaggcaggtggaaaactctcatcttccaggcaggcaggatgccttcctacgtccatctgctctcagaaccttccagtgggccctggttt

SEQ ID NO: 15404 - DNA, 201 bp, Bos taurus
aggccacaaagagttgtaagtgatctagagatggtttaaagcacaagagaggattccgatgttacatgcatatactgcaccatttcatataaggggcttgagcatcttgggattttggtagctcggaagtgaggggtagtagagggtgagggttctgggaccaacccactgaggataccaagggatgagtataatcccaga

SEQ ID NO: 15405 - DNA, 201 bp, Bos taurus
gtaaaaacacgagcgaaaacaaggaccctgcctgctctgcttagggcgaaagacaatggcttggtgacggagatggccaaaaactgtccaggacaaagaataggaaggcaataataatttaagaaaaaaggaggatgaaagttatgttaatacacatggccttaagatacaaaaaacacaaaaccttttttaaggtctcat

SEQ ID NO: 15406 - DNA, 201 bp, Bos taurus
tctccaggccggctcctctgacctgcacactgtgcctctcagagggcactgggactctccgtctctcgctttaggactagtttcatttcccctctcgaagtgtacaggctcaagggccagagaatggctgtgtctcattcatttctgtatcttgaggagaccccctgggtggagggccttgcacagaacagtgactcagtg

SEQ ID NO: 15407 - DNA, 201 bp, Bos taurus
tgtgagatctcctgctgagaaggccgtctcctgaaaagcctggaggcacaagccataactgagcctccacccagtctacatcggtggatctgcccaaccacggctgcacctcagggccactcggggagctccgacaggcacggaggccctgatcctcacgtgcagcctagctgagaaccactgatctcattcactctactc

SEQ ID NO: 15408 - DNA, 201 bp, Bos taurus
aaaaagcacctccttccgcccctctggcaaggggccatgtgccctgccctcctcaccttaccccctggctccctagggtctggtgtccaggctgaggacctggcgacagggtctcctctgggcctctcaatgcccaaagaagctgacttagaactggcacagctttcaacgcctgtgggtttctccagattacaagaacca

SEQ ID NO: 15409 - DNA, 201 bp, Bos taurus
ggtccactctctgtgtcgggggcctagtggcaggtgggaaggagcctcgggctgtggcccagacgtggcttccagtcatgactgcccacctgtgccggcccgccatcacttcagcaatctgggagtcatttcttcccgatgaaatcagggtattaatgggattattttcaggcctgtcagctacattaaccataaaacgag

SEQ ID NO: 15410 - DNA, 201 bp, Bos taurus
gcctcccaggctgtgctccatctcctaggaggtctccctccgagtcacgctgtttctgtcctctgcaggcctttgtacacgggcagtacttagtccttgtcgatttcgtgcttactctggttttgtatttagggggaaaaaaggagcaggaacaaatagataaagaacttgctcagactgtaagacttacaagtctgtggc

SEQ ID NO: 15411 - DNA, 201 bp, Bos taurus
cttttttttttaatggtgttttatcaaactaaaaagtaaaaactccttaatatggtcagatagccagcctgtgtgcagatatcctacgttaccacagaactgtcgtgtttgtgtgagggtgtaagttaagtccttgccttacagttattaagctgtctctcaggtggagttccgtctccaggtgcttctgtcccttgctgc

SEQ ID NO: 15412 - DNA, 201 bp, Bos taurus
cgaggcctgttctcccgcgcttcggtggtgccccaaaaacccagcccaaggctacggagattaaagtcacctttgttcagagaggagcgcttggaagcgtaggggtgtgagggtgccgggcctcctgtctcgccacatcagagcagtcaggagaggaggggatgggcctcacccacagctccgagcctcagtttccgccct

SEQ ID NO: 15413 - DNA, 201 bp, Bos taurus
gctgctgcaccgcgtcacgcgtcccaccggccagtgcctccacgccctcgccccggtttttgcttctttcgacaatagctatctcaaccattcattctgcgcctgagcgcggccgagcccgagggtaaccctgatgctcactctggaggcttctgctgtcactgagccgtgtcccgctggacctcagcccaggagggcaga

SEQ ID NO: 15414 - DNA, 201 bp, Bos taurus
ctcccatttggcctgggatgtgggattcttcatgcttgaactagggtggtccaggacaaaacagagctgtcggttatccggcaggaagctgccacgtgctatgagtgagtgggtgggccacgttctaggagagctttcttgtttaaaagagatggcggtggggtctgacctgaaggccacagtgtgctgctgctgctgcta

SEQ ID NO: 15415 - DNA, 201 bp, Bos taurus
ggtgggtgagagagcggctggcgtcgcggccctgagtcggaggccgcgggaggctgcagggtccatgcgtgctgccagccagagtgaaggtgggcctgtcggtgaccgtggtcgccacgtaaggacgaaaggagcagggcggtgtggttcacctgcgagttcagagggtgcgcctggaggaccgagcgtggccgcggttcc

SEQ ID NO: 15416 - DNA, 201 bp, Bos taurus
tctgggagcagagatgggacctgtgtctccccgctggcaggcaagttcttcaccactgagccacccacgaagcccctgacattggtagactttgtaatgatggcctctctggccggtgaacctcagcccttcttactcaaacgtattctggccattcctccgcccggatctcgccaacatcctgtccgctctcccatctct

SEQ ID NO: 15417 - DNA, 201 bp, Bos taurus
cccccctcctcccctccagccacagggacctttagacacggaagccaactgcatccctcaccgtctcaaagtccccaagagcgtcccaaggcaaacagaacgagactcacgtattccccagaagccccagccctctcagccggcacggggggccctgtgcccactgacccaccacctctggcccggcccctccagtgcacc

SEQ ID NO: 15418 - DNA, 201 bp, Bos taurus
cttggcgcacggagcggttggtgtcacggatcacgcaagggcctgtgcttagagcactgccagtggaactcaatgacccgtgagggggaggagactgtaaacgcctcgtatgggccaggccctaaaggaggcccttctgcgagtgggatgtcatttaatcctcccaagtgttgaacgagcaagaatgggttcctccaagag

SEQ ID NO: 15419 - DNA, 201 bp, Bos taurus
tttattcaatgccacggcctagtctggaaggtgtgttctgaagagtttctgaagcggtctccgttttccaggtttgaagctgcacagcgaggactgtggacgtgggcccagccctgcagctgtcctgagacgggggtgtcgcaaaggcggcgggagggagatgagtctgaccttcccacttggttgagtgtgaacgtctga

SEQ ID NO: 15420 - DNA, 201 bp, Bos taurus
cctctcctgcgagtgctttgtcaccgcgctgccctttggcctccgccagctcagattctactgccgtggccggctgtgtgttctgacgggcctcagcaatcgggggtgtaaccttgagcccagcgcttgtcccaccagcctgctggcgtgggggagcacccggcggcctagccctttgctcttggctggccccttgcccct

SEQ ID NO: 15421 - DNA, 201 bp, Bos taurus
tcttctgacccctgaggccttagactgctgttcagtcacccccagaatgctccccccaggtctgaacccttctttaaatcacttgattggagcgccttcccgggccctccagggacgccctgctgctgcctggaggatttgaagccttttgcagggcagagggcagacaggtatgcacccggccagcggctgacttgagtg

SEQ ID NO: 15422 - DNA, 201 bp, Bos taurus
tcccttcccgcagcacttctttcagaaacgccagtcagactatggcgttcccagtggcccaccagctgtgcgtctgtgcgcctggccatatttactgggagtcctgagttttgcatcaaggttacagggcagctaaggggagactgtccctgctctcaggagattcaggagccggggggtgggggggccacagccacaaaa

SEQ ID NO: 15423 - DNA, 201 bp, Bos taurus
gtcaacgtggcccaggacacggctcggggcacaatcactcagtcgcgagctatagcccatgcggtacccgggggcagaggaaacgtcctgaacgccatccagctcctagagacaaggcccggcctcgccgcgcaagcctgtccattcaagccaagcgggagcaggacgcgtcgaggcccggagacggggccccggcgcgcc

SEQ ID NO: 15424 - DNA, 201 bp, Bos taurus
cctgcaccaaactggaactctcactggtcacgtagcaagtaacagttagaactggcattttaatgtgaatacttacgtattaaaaccactaataacagcatatttttctgcaatccatccaaaaatatcttgagaaaagatgtcagcaccttgctgaagaagaagtctgacaacatttgttgattcatacttgacagcaag

SEQ ID NO: 15425 - DNA, 201 bp, Bos taurus
tttgaagtttatggcccaaagcaagattcagctggacaaagtgcacttctgccaggatagcctcaaatgttcattgtcaatgtgatgaactgggaataaagagagaaagagagcatcatctttccactcccttaccagccccagtttgtttgttccacaggaactctgacttctgattattttgctacaaacatggacttt

SEQ ID NO: 15426 - DNA, 201 bp, Bos taurus
gcttataagtataattaggattcagaaaataagcagagttctgtgggctgcaaagaagggacacctaatcctaacagagagagtagggatggttcccagaggaggcattaactctctgatttgattgattcttattaaaaaaaaaaaattgtggggaggcattccaagaagagaaagcagagtggtatgagatctaaatta

SEQ ID NO: 15427 - DNA, 201 bp, Bos taurus
aatggctaacacatacaaggtccatgagagaaataatttccaactccatccagtataagagggttagagtggtcaaacagcaaacgtgaatacggtggcttggttagttcctttgacacagacacatttggttggcattttagacagaactgctgtaaagatatgtatgcattcccatttctcaaaaacattcttgacttc

SEQ ID NO: 15428 - DNA, 201 bp, Bos taurus
gctactgaatatagctcctgaatgtaatagtctatggttgaatgctggtcactgtgtctttgagttaatacttctagaaaatttcctttattttcatgtcggagaagaataaaatggtaatatgtgataaggcctgatgttgcaatctgagtcaatgaaaaatttaagtcatctctagtcttttctctttctattggctat

SEQ ID NO: 15429 - DNA, 201 bp, Bos taurus
cagaaaatcctagtatcctggttgctaactttaatttctttccacttggctacagggattaatccagtctcttttttcccttctacttgtccctgtcttgcatatcttaatttaaaatgacatcattaatattagtatttcttaagtattttatatattaaattgttcattaaagagattaggacacagtgatacaaaata

SEQ ID NO: 15430 - DNA, 201 bp, Bos taurus
atgagtttgaggtgttcaagcaaaaaagaaattattaattttaaatattttgatgtactggagttagggtggtgtttacggcctgctatagaagatgaatcagcagctcaggtgaggaaagggaattttgacctagcatttcctctgatacttcttgtaagtaaaggctggacctactgtcagagtgtagacgccttgtgg

SEQ ID NO: 15431 - DNA, 201 bp, Bos taurus
tcctctaaaagcacatatagtctcatctccctctgaaccagtaggtttcattcattcatttactactattagacaaatgcctgcaaaacccatggtgataacacctttacagcagtaggaaaatttataaggacttttgaaaaaaatgagggaccagtgaagataattccccgtcattcgtcagatatcactattagtgat

SEQ ID NO: 15432 - DNA, 201 bp, Bos taurus
cactaccatctccagccacaaagagggaactccaaggctttcttgaaatggctgaattctgttgtatcaggattccaaatcatggccttatagctaagccctatatgaggctctaaagagaggagaaagggagccccttcaatggaataaggacaactagcaggcctttgagactctaaagactgagtagagagccagcaa

SEQ ID NO: 15433 - DNA, 201 bp, Bos taurus
caaagaaaatatatttctaattatccaatgtttatacacaaaactaatttgtcaaaatggacaaatcaatcataagtttaataaaattaatgttctattggtcttgttatgtaggttggtgatcatgattagggatcatattaataaatttcaatagtaatgctttcacattaaacttaattatgcatgacgttttatatt

SEQ ID NO: 15434 - DNA, 201 bp, Bos taurus
aattacttctgctgtactttccataaaaaggttttgtggggaaaattggaaattagtgacttaatggtcaacctatgctatttgttggtttgaataacgagctatccctaagatatatgaaatacatttaaatttatacagccttaaataaatcacaaaaggagagaccatgtcactatatatttttttaaatatccagtt

SEQ ID NO: 15435 - DNA, 201 bp, Bos taurus
cacagcaaatatgtatgtatgaatatcaaaaatagcataaatgaaagcaccaaaattctaccgttcattttatgcttgacgttgagattttctgacatcttggttcatgttactatatagacttactccataaaaggtagataaaagaaagataaagtcttcatagacaaagccatctagaaagagaaaagcaactgagga

SEQ ID NO: 15436 - DNA, 201 bp, Bos taurus
gaatagcttaaaaaaaaaaagtataatacttttcagctttctacatgagaaatacttttctaagtgtcaatataaaagtagcataagagtgttttcaaaaaccagtaggtaaaaccagatattatgtgagagtattaacattagtgatgaccattcaataaattaattataatcaattggtgagctcaatatagtctttaa

SEQ ID NO: 15437 - DNA, 201 bp, Bos taurus
atccatggggacgtgcttttaagatttgttaggtggccctagacaagtgaaggcttccccagtggctcagtagtaaagaatcatcctgccaatgcaggaggcaaaagagaggccagttcgatccctgtgtaggtaagatcccctagaggaaacagcaatccattccagtattacctgagaaatcgcgtgtacagaggagct

SEQ ID NO: 15438 - DNA, 201 bp, Bos taurus
tgtgaaaatagcacagagtctaagtctataacagagttatagcttaaagaacaactgaagtaataccttttggttcatcaagacagtctcattatggaagcggattgggaagaaagcgggccaggggcttcagtaagcagggagtaagttgccccagtacctaaaggaaatcgatggattggccccctacagttactaata

SEQ ID NO: 15439 - DNA, 201 bp, Bos taurus
aaatggtatacatttattgtaagtttatatccagctgataaaagagtaaaaagttaacctttgcagtttcagtgctacattaagtgttaatttggtcataaacacacagagaagcagatgcatgcatccacacacacacacgactcacagagaaaagaagagagagagagaatatgacaaaaagagtttagcttcaagaat

SEQ ID NO: 15440 - DNA, 201 bp, Bos taurus
gaacaaagaaaatatgccactctgtagtaccaaactattgcttcagcttttgaacatgacttggcagaggtctgatgccactagttttgaaagaaagaagagttgttagaattgtctgagagttttcagaaacatatttctgaatgtgatttaccttatgaaataacttacagaacttttttttaggtgagtatacataac

SEQ ID NO: 15441 - DNA, 201 bp, Bos taurus
tatattaacatccatcaataaactgattgccaaaataccacattaaaataatatatatcataaaggttccttattctaaggtggacatcaatgagatattagatatctgaagagggcttccctggtggctcagatggttaagaatctgcctgcaatgcaataaactggaattctatctcttgatacagaagattccctgga

SEQ ID NO: 15442 - DNA, 201 bp, Bos taurus
ttgtaagaaaccaccttatgtgcagaattttgtttgaagggccattggttacacaaaattagtttcatagatccttaccaaaatgtgttttctcaagtcagtagtatttgagggccaccatttcctgcagtctatcaatattattgagtattatcaataatataaaatcaagaatataatcaagaatcaagaatataattg

SEQ ID NO: 15443 - DNA, 201 bp, Bos taurus
agaaaataccaaatgaacttttttgccaaaccaatagtataaatttgggaacagcatatgacagaatggtcagtgtgaaaagaatctacagaaggcaagataatatatatctgtctgtttctcagacaaggagataaatagttggtgttcaatggagggagtaagtggtgacagtggaaagacagagtggctgggtttgaa

SEQ ID NO: 15444 - DNA, 201 bp, Bos taurus
gagtaattacactcagtgaccttgcatagggccgtggaaatgattcatcctcagaatttcctgagtccacatagtatttgtggcagttcaaaattaacacatgaacaagactaaagatgagaatattcactcagatattatatatagaaaaatcaacctgcctcactaattttcattcataagatagaattttttggcatt

SEQ ID NO: 15445 - DNA, 201 bp, Bos taurus
tccatggacagaggagcctggcaggcaatagtccatggggttgcaaagagttgtccatgacttagtgactatcactcactcattctatggatcttatagcgttgatcatattacttgggtgccatcccttctgaagtttgtcctgagatattagacaatttagacactcagatatattaagcaattactagagcctttctt

SEQ ID NO: 15446 - DNA, 201 bp, Bos taurus
tgacagtaaaatttccaagaacagggatttgcatctctgattctttgtgtcttccacacaacttacctgaggtttagatattggaaagattttgactggcggtatttaattcgaattgttagcaactttcacatctatatgccaagctgcaagtactctgtaaaaattaaaataaaaagtatcaattttatagtagattta

SEQ ID NO: 15447 - DNA, 201 bp, Bos taurus
tttttattcctgctatgtgaagcattaacaatattgaattcaatgctcgtatttttttctcagcaactactagtaccacttgaacattagtgatagttaaaatttttaaaagatgtttctctacagttaaggagttaacctatttaagtgaaatatgacattctcattgcctggttatgtaagcaagttagcagactaatc

SEQ ID NO: 15448 - DNA, 201 bp, Bos taurus
ttgtcttggtcagtgactttgtgatggaaaacaataggacttaatgttagaaaggtagacaggagagtaattttgtggggttctaaatgtccctataaagagtgtaaattgtctgtcatttgagaaggaccattttaaggttttgaggagaaaagtaacaccaaaagttataattcagtaagatgaatttagtagaaaagt

SEQ ID NO: 15449 - DNA, 201 bp, Bos taurus
tcacaagacccacatctgtggaggtcctcttctgtctcatggacccctttattccctacaatttgaaagtttttgttctcacacatatttaatcattaatgtctaaaacagtctggatccacaaaacttggttgacaaagtaaatggattaaaatgaaaaagtggataaatttcataattaactttttacaattatgtgtg

SEQ ID NO: 15450 - DNA, 201 bp, Bos taurus
gtttattgagagaaatgatgacttttttcatttccccaggctcaaatgatacaggtaatctagggaattaaaattagcaaatgtttctatactaagtctaaaagtttcatcttttcccagccagaattctattcttgggagagtaggcaatctaggattcaaattttgccttctctggagttttaagattaaatcctagta

SEQ ID NO: 15451 - DNA, 201 bp, Bos taurus
gagcaaagaaaggaagtttcatttattattctacaatgtgttggtgtattcagtaattgactttgaggaccagggtattattgctaaatagaaatattgaaacgcacatatcaagatggacattgtaaattgataggaaacttgcttggagttcataataggtttttatgctgtataaattaatactttatagttcatctc

SEQ ID NO: 15452 - DNA, 201 bp, Bos taurus
aagaaaagtacccgcaccctgggaagtttccttgcccttgaggacatcagctgggacaggtggtgctgtggagccacagaagagaatacaacaggtttgcggtggacagaatggagagagacctgcacagatggtagctccccagcctgagacatgtatctgtcagtgtgtgccagggctggtggctgaagctcagacttt

SEQ ID NO: 15453 - DNA, 201 bp, Bos taurus
gaaaatatttatatattataaaatgttaattgtagaaatgcaatcaaataaagacaaaaaaaaaaaaaaaaccacatttaaggcctgaaacaaacagaatatgtaatttttatcaatgaaacaaaatgatctggtgggaaagactactttagttaagcaaggacatctggcctaaaaatggtcagattaaatcagagccat

SEQ ID NO: 15454 - DNA, 201 bp, Bos taurus
tgttgtgggccctagaacctttgcaacagtgcgagaacttctttggtataattgttctccagattgtgggtcatctgctcagcagctcagtagtggagctaatggccaacttcttcaagaggacttatgccacacgcagcacatcccaggtctgctgcagccagaacccctgtccctgcatcagacactgctgacaagtgc

SEQ ID NO: 15455 - DNA, 201 bp, Bos taurus
tcctgaggaatccataaataacaagaaaaagtgctggataagcaaggaaatgtggcagaattgaccacttctcttcctgttgcgtatcagttctgagctacagggagaagagtgaggggggtttttgatttggttgtaaaagtgtagttttttgatgcgcattcaaccagacctttgaaaacctgaaaataaatttaccca

SEQ ID NO: 15456 - DNA, 201 bp, Bos taurus
agtagaggcctgtgcattaggtaataggtatacagaccttggtgtggaattcaagttagctgaactcattggacctgatgagcaaggaactgaccctaacgtctcagggccatagcctggggaaaacctgggtaatgctgatttaagcagatacccatggatgagagagattttgtgaaagtccagcccactccagtgctc

SEQ ID NO: 15457 - DNA, 201 bp, Bos taurus
aacattgaacttttctttgaaaggcttaattgaaatcatgacaaaaatatttttagtttcaatctatttttctgagctaatttaagtagctggtatatcaatgagatcccaagagaaggggaatactgacctaataagactaaaatcaatgaactagtctgatgaatgtttaacagtacttgatgtaatgagagaagtaaa

SEQ ID NO: 15458 - DNA, 201 bp, Bos taurus
ggtcagtgatgctgtggatgggggcatattttctgcacttcctgcctccaggcaaccagttctctgcaactctgatataaggccgttcagtgagactgcagttactagcagagggtagttgaccagagtgaatacttactctgaggaacatgtgtgggccattgacagcttctgttaaaccaatcaaacaaagtgactaaa

SEQ ID NO: 15459 - DNA, 201 bp, Bos taurus
tgtccttcagctgccagacacttcccagaatatttcagtttgcacagagaagggtcacacctttctcactgtagcccactgactgatggccaagtgcaaaaaccttctcattttgacccaatctggaataactcaaacatgcagcgccaattccagagctccttctggaattggccaaaactgttgttgatcctgtacagt

SEQ ID NO: 15460 - DNA, 201 bp, Bos taurus
tggctggccttgactttggaccgaagattgggttggactcctgtcaattcgacatacctccctcttcagggatccatgactgagtatgtctgctcttcacacagtgagggccaggaccacaagagagcttacccaagctcctggtcacacgtaaagcttcttgttacatgtcacagtagctcacagtcctccgaccaaagc

SEQ ID NO: 15461 - DNA, 201 bp, Bos taurus
gctttgtgcacttaattgggtgttatctaaataatgtctcatagaggcctttgaggtagaaatcattattttcccctttgcagagaagagtttcctataactttgagaggctcagaaattttcacaaacatacagatgccagtggtggaaatttaattagaatctacatctatgagctaacagcaggttgggttcctaacc

SEQ ID NO: 15462 - DNA, 201 bp, Bos taurus
caggccacacatgtctgtagctcacaaaattgggttctgtctcaatatcaactcttaatgaaataacacttgtaaagtacttaaatcagtaccggattcacactataggccctctgtaaatgttagccattatcatcagtttcacgcctttcgagcgtttctcacaggctgtactctagatgctgagagcaattcaagagg

SEQ ID NO: 15463 - DNA, 201 bp, Bos taurus
tgaattttttctttccttgaaccgtattttattttcaatttagtagctcctgaggatgaatggatatttctccaccacgacaaaaagtagcagcaatttattagagaagatggtggtacattcagggtaaaaaaaaaactttttttgtttatttccctccaaaggctgcttcctttaagggggagaattaattgccttgaa

SEQ ID NO: 15464 - DNA, 201 bp, Bos taurus
agagaacagcaaatcatgccaaataagtctgttgtttatttattttttaaatactcctatctctaactgactactgtactcagtggctcccggaggcctagtattatcaaaaatccatatattttctgccattaaaaagtcaaactactcatctgtggtagatattatgtctatatttcattttacaaaaacacatgacca

SEQ ID NO: 15465 - DNA, 201 bp, Bos taurus
caccacggccgactggactatgccgcaccatggggatgagtgctctgtgttctatgtggaaccagacctgccccaggcaactggggcggaccatgcccaccggaagtggggtggggaggcccaaagcagtagagaactcacatgcctttaccctgacattgaactttctttctttcttaaacttcttgctgctgctgctcc

SEQ ID NO: 15466 - DNA, 201 bp, Bos taurus
ttcacaggtacatttggatcatctcagtggaacctaaaatagaacgtgagttctctgctaagtctgtactgtgttgcacggctatttttggttcctaatgtcccactctcttctcaagctgtttttcttttaaaaagaaagtatccttatcctctcaaaatttctaaaaggttgaaattagcagcatccgcacctctttca

SEQ ID NO: 15467 - DNA, 201 bp, Bos taurus
tatccatttttaacagaaacaatctaggtgtctttgtaagatttaggatttcgatgaaatttttagaagaagcagaaaaatggactaagacttagtaaggaaaaaaaacaatcttatatgtgagccaactgtttctttaatgaaaagattgcaactataagaagttaggaaaaaatacagaaaataactgtgtgaacttca

SEQ ID NO: 15468 - DNA, 201 bp, Bos taurus
taagactgttaaaaataaatggaaatgtagagtgttcttaaataacccaaaagcaattatctaagctaacataactactgtgaacattatatttatctctcaacatctaggcatcacaatgacataagaagcataatatctgataaatgaaaatatcaaaattaatcaagtgattagaggtaatcaacttatcccagggtc

SEQ ID NO: 15469 - DNA, 201 bp, Bos taurus
gcccctatatctgttcttcaagcccacacttccagataatctttgccatagactacatttggaaaccttgccttactagacatctcaacctgtgggcccccgttacacagagtctgaatctagagatacatgactctgacagcattctaccatgagtcctaagacattctcttcctccatctcccattctttgatcctatg

SEQ ID NO: 15470 - DNA, 201 bp, Bos taurus
acgcaatcctctgtattccaaatgtgtgtgcagttttcccacactaagctattctgcaactccagctgggagtcctacaatcagtcagacactgaaaatcaaggtcgttacctgtacttctgactgatggatgtgaatcacagattttccatgaccaactccttgggtggattacttttctagggtggctcacagaactca

SEQ ID NO: 15471 - DNA, 201 bp, Bos taurus
ctttcttcctccttcttagcttctttctctttgttaaagggagcagatctgttgtcatttaattttgcctcactgggaaaacactgaataaatgtcatttatgatgagtgttgccaacattcttggaggcactgctcttgaatttttagtaaggattcctcattcttgaggatagtgtatgtgtgtgtgtgagtgtaatga

SEQ ID NO: 15472 - DNA, 201 bp, Bos taurus
aagtatgtggagcataaatgaaaccatattggccaggaattgaaagctgttgaaactggtagctgaactgttgtctaaacccaacaaaaaaccacagggcggggaatgttgtgatgtggcccatttggattggactcttggagacagagcatggtggagtcatacacagaaggtaagaataacagactatcctaactcatc

SEQ ID NO: 15473 - DNA, 201 bp, Bos taurus
gcccgatgcctaaaagtacatctgctttaagaatataatacagttataccctgtcaattggtcatctagtatttctccctgctagctcacacaacccctcatcaggccacttgctttggcgtcctgtgaaaacacatggccttctgtgctgtaaacttttcctggaatggcctttcccccaaacagccttttctcatctat

SEQ ID NO: 15474 - DNA, 201 bp, Bos taurus
aaatgcagtcgggtcagtgttgactgcaggagaattataactatagcctaaactttaattcagattttataattgcaaccaactcagggccagtgtgctacccaactctaagggatcagaatataacctgtaattatataatccttaacatcaacctggcctctgagtttcagttgagaaacatctctagaaactatattt

SEQ ID NO: 15475 - DNA, 201 bp, Bos taurus
aaacaaaacaaaaaacctaattggatgaatgaaccttaatctccatcttcctagcacgacacatggtcaaatccaacaaaaggcctccacctccaacagctgtgctgagaccagctgtcttgcactatctcccctgttaactccccagtccaggccaaaactcacatcctgtgttttgtcagtcctcccatctggccttcc

SEQ ID NO: 15476 - DNA, 201 bp, Bos taurus
tgttgaacttatgtgtaatgagagtgttccacaggccacagagaaagattattaaaggttagagggctcagaaggtctttcactaagctgcttatggcaaaaacaagagattacagtgggccaggcattgtgctaagggctttctttctacataggattgcaatataattgtattaaccagaccacgacatccagagaatg

SEQ ID NO: 15477 - DNA, 201 bp, Bos taurus
gacacgactgagcgactgatctgatgctcagtcttataagaattgcaaggcaattttatcttgtgctgctaaaacaatcagtcatttaatagctgagaagccaagtcaccaattgtctttccttttctcattagtgataacaaaaataatgactactctgtgagttgctacatgcctggcaccattcttcacatgcattaa

SEQ ID NO: 15478 - DNA, 201 bp, Bos taurus
atatgaaaccagaagtattaatgggagtaattataaatgattcaaagaaaaatatgtaattttatataaacactttggattgacttaaatatttagtttactttctaccatgtattctcccagtaattacttccttatttcatatgcatgaagtatgctagacagctgagactagaaaagaaaattggttcagttccctgt

SEQ ID NO: 15479 - DNA, 201 bp, Bos taurus
cacatgggagcaactcagcctatgccccacaactacggagcccaggagcctcgtgcggcaaccaatgaaaccctcgcccctagaccctgcgctctgcagtgagaagcccgagcaccacaacaaagaccagcccccactcaccgaatctagagaaagtccatgcagcgacaaagacccagcatagtcaaataaataaataaa

SEQ ID NO: 15480 - DNA, 201 bp, Bos taurus
tctggacatcgctttacaggttcatctggaaatcacgaggatgtgatttattgtgaccagtacaaagttgatttttaagaatggccagtgccagaaatcatacagcttcttagctagtgtctaggaagtatgcctattttaactaatccttcagagaaagctttcagccacttccaggggccatagtgcaggatctggaat

SEQ ID NO: 15481 - DNA, 201 bp, Bos taurus
agccaaataatcacaaataaaagtaaatgtcaaggggttctccagtggctgagtggtagagaatctgcccaccaatgcaggtgacaaccggttcaatctccgatctgggaacagcccacatgccatggaacaactaaccccatgtgctacaactactgagcctgtgcttcagagcctgggagccacagctactgggcccct

SEQ ID NO: 15482 - DNA, 201 bp, Bos taurus
cgtaaaacagaaaggagggcataactggccaagaaggataggatgcaggataaagatctgagaactttcaaaaggagttatgatcaaggagaagaactcacatggcctaactgaaggtgctcggtccttcctctttcaactcttctatctgacaccagtctggctacttcagtcttcccagtgaggggggtgttggtggta

SEQ ID NO: 15483 - DNA, 201 bp, Bos taurus
tcttaaggcaggtccttactattttaaaggtaaaagatctgagactcagaaacattaaatgattttcccaaaggcacacaactagtaactgctaaagaatctgaatccaatggattaaagacctaaatgtgagaccagacactataaaactcttagaggaaaacataggcagaacacttgatgacataaatcaaagcaaga

SEQ ID NO: 15484 - DNA, 201 bp, Bos taurus
agctaagagcctccctagtgattctaccaagtcagtttggatataaaaccacatcctatggtccactggaattcacagggacttttgtacttggaacatactccacaagattctgccttgaatgctggacaaatgattatggagttctgaaacattttaattccacaaaatcaaaagaacgccttgaccacaaatatccct

SEQ ID NO: 15485 - DNA, 201 bp, Bos taurus
tagggacgtgggcctttggcagctacctcactgccaatctgaacaggaaaccagcacttggcagaatcaaatcaaaatcggagagcttcaggggcactgtcacatcacacacatcatttcacacacctcagaaattttttctgtgagataataaacattgttgtataaaccagttggagacagtttgaggcagtcttttct

SEQ ID NO: 15486 - DNA, 201 bp, Bos taurus
cagctaagtaacaacggcagtgtggcatgtgcacgccaaccctaatcccccagttcacccccacgccccctgccctgctgcgtccacgtgcctcttctccgcacctacgtctgccctgctgataggttcatcggtaccatttgtctagatcccacacaaagaagacgtagtacatatacacaacgcagtagtattcagcca

SEQ ID NO: 15487 - DNA, 201 bp, Bos taurus
tactgctcctgagagccctattcacatagaacaaaatgtggctagagttttccagagaaagagaacaggtagccctttcatccaaactaggaaagtcgacacaaatgagtaagcccaggccaggtgaaagggaatacagattggtgaggatttgggctgcttggctatcaaaaggaattaaattttatatgttcaaaatgc

SEQ ID NO: 15488 - DNA, 201 bp, Bos taurus
ccttctctctgtttgctcacatggcagacggagagagagtagagagttttcttgcatctctttccacaaggcaacaaattctatcacatcagagccccactttcacaaccccgtttaaacttaattacattcttatgaaccctgtctcgaaacacactcacatgcttggagatggggagggtggagcttcaacacaggaat

SEQ ID NO: 15489 - DNA, 201 bp, Bos taurus
agcttgtagaaatgattcatgtttctttttattttactatttgtgaaaatgaaaaaaatcaaacctaaataaatgattaaatagttggtaatacagtcaagtcataaaatgctatgtaaccatcaaaagagaatgagatagatctgtaggaagatcttcaagatatgaggaaagacgcaaacaaaaaatgttgtgctttca

SEQ ID NO: 15490 - DNA, 201 bp, Bos taurus
ttacacaagtttttcatgacaagaaatagaaaaaaatgtattacaaagaaatacctttacctcatagaatgtgatgcccaagggtaaggccagctgaagacatggcaggtataaaggtttgctgcttatcccatttccatgtttctgccttcacctttctctgccatcctcagcatcattttcaatctaacactggttctt

SEQ ID NO: 15491 - DNA, 201 bp, Bos taurus
tcaaagacagatttaagtccctcgctggggaccccccaaagtagccagttccaatgctaaccttcatgatgtttctaattaggggttcacattgccttgctcatgaaaccacctcaatctaagcaggcaagaagagggttagtaactattgaatatatatcacatgccaagacctgtgccatgcacatttgatgcattagc

SEQ ID NO: 15492 - DNA, 201 bp, Bos taurus
ccctacagctgcaacagcagaagggaatttttgtcctcatgacttttgtactttaggatagtgtgggacaacccacacttcaaaaacctgagatgttaccgtgagaacacacaaaaactcccagaagataactatgtagctttgtttctatgaggctttgtttgctcagtgcaacatctctagcactagtcttcaatagtc

SEQ ID NO: 15493 - DNA, 201 bp, Bos taurus
gaatcaatcttccttgggggaaaaaaaagtgaggcatgtgctgtaaaattttctcaacgtgtatttctaacttgaaacttataacggcatgtttttctttggggggaagaaaaaagcctaaaatcatgactgaatcaagtgagaagaaagtgagttcagagatgtctgtaatagaagacagacaatccatttgaaggcagt

SEQ ID NO: 15494 - DNA, 201 bp, Bos taurus
aaaaatatttttcttcattctgaccaaaaaaaagaaaagcaacacatacggactcaaatcacagccagcacaccaaattcaggtgatgacagctgtgcccagtcatcagctgtccttcttggagggaccatgagaatgttagaacagtaagcatacctttaaatgtttgtcttaacagttgtttttctgactgtgtggaag

SEQ ID NO: 15495 - DNA, 201 bp, Bos taurus
gtaagagagatttttaaaatgaaatattttaaaaatgctttgccttttggttctggattcttttcagatactgagaataaatatttaatggaaattaaaggaactcaaaactgtgagaattctctattaacaacttcctttttaaatactttgaagtaacattagagcttcaaaagaaaatgcagcatgaattgtcaaacc

SEQ ID NO: 15496 - DNA, 201 bp, Bos taurus
aggagcagacctggtaaatgtaatcttcctggataaggagctgcaaccaaggcaattctgattagaggaaatgactctcccaggcctccctgaagcttctgatctggcaaggaagacccttttctgtcacttccaacggctcggagagtgtttccgtgccctttgttttctgtgcttctcccaccctggcccacgttgcct

SEQ ID NO: 15497 - DNA, 201 bp, Bos taurus
ctgcagatgagacccaatttctttcaacagaagcacagccagttcatcctcatcatggacccaacagtaaatctctcaaacaagtttataaccgtggcctccacaaaaggcatcaaatctgggtctcgcatgaaaagccagcaacctcggaaacccctcaccaagtacctgatctcagagcctctttagacacccttgact

SEQ ID NO: 15498 - DNA, 201 bp, Bos taurus
tgaccgcagcagcctgtctcaggctaaaggccacggattttccctcaggacaaaatgtttctctcaggataccgagcaggccggccggaggctctcctctcctcttccactcacccagcctgcccatccctcctggtttccctcagagcaatagtctctgcccttctggcctcaagcccccttttcagactaagtcgcttc

SEQ ID NO: 15499 - DNA, 201 bp, Bos taurus
caataagtagtagacaccctacagctatcaaaaaaattctgattggcaactgggtgacagacattcatgtttaggtaagaaaactgttaaaatgtattcacgatgccacttccctttacttggtgcagtttgcccaggtactaggatttacctctcagatgctatggttagatcaagaagcctattctatatgtaatataa

SEQ ID NO: 15500 - DNA, 201 bp, Bos taurus
gttcttgaggccaactcataatttcttcgatctatgtctttaaaaacatatatctttgcagcaagaaaagactgtgtacactcacttgaatttgctttccgttctgtaaaaggagagaatacgttctattgtttgttaaaatattttctttacaataatttcttgtattttaagggcaatttttaaagtttttgtttagga

SEQ ID NO: 15501 - DNA, 201 bp, Bos taurus
cagaagaacaggaaataccataagggcccaagatggctgcggttatgctaacagtcatacacttcatatagtagagaaatatacatgtctcagaccacccctcctcctctgatgggcccaggtacatgaatttttttgtctgtgtctgtgtgcatgctaagtctcatcagtcatggctgactcttcgaccctatggactgt

SEQ ID NO: 15502 - DNA, 201 bp, Bos taurus
tgccttgatcgcagtctggaaggccaggctcaattttagccttcttggctctgcatcaggataaggtagtgtgtgggtagttggctcttcgtttgcagccaccccctcctcttcctatgcttggccttgctgcatgccctgagaacctctgggtctgcttgtgggcaccccaggcggaatgtcccaggtacacagatcatg

SEQ ID NO: 15503 - DNA, 201 bp, Bos taurus
agaacaggcattcaaatattgttgggttgactttggtacctcttaggaaggtcccacgttctatagaaaaggggcacttttctataaaaagtcaacatacgtggcgaacagcccggatcattaagtcctgagtccattacgaaaatcatattccactgacacactctaaccctcatttgaactgtcatgctgtggtattct

SEQ ID NO: 15504 - DNA, 201 bp, Bos taurus
ttatttattttgtactcacagattaagtgagtcagaaatctggacaaggcatgatggaaatgacttgtttctgctccagaatatttggggccttagttggaaaaactcagtgacaggagatgagttttggcagattgagggctgaatcatctatttgtattttcactcatgtgtctggtataggctgtttgttatctgggt

SEQ ID NO: 15505 - DNA, 201 bp, Bos taurus
gtccttgcaccaagtcattctccatcaaagattctttgcctttttcactcataggctatttagtattatctaaaacgatctccttcattcatgtgctttctcttttgtttattgtctgacttaagtctgttcgagcagacccttgtctgtttcatctgttttgagaaaaattcctgacttgtgtcgagtgttcagtaaata

SEQ ID NO: 15506 - DNA, 201 bp, Bos taurus
attattcatagtaaagaatttgctgcacccagagcaacaaagatctgcttgtgtgtagactgcaagggcagcaacagtgtcacactgaacagcataagcagagcactgagaaatgagcttctccttgggcccatggagtggtcctcagtaacaatgtctcatagatagagtttctgcatccttcttagcccttcctctgct

SEQ ID NO: 15507 - DNA, 201 bp, Bos taurus
ctccaagaaggaagagttttgcagtcatggtgagctaggtggggttcttgtgggacaaggaaaagagacaactccttgacctccaatgggagtcctggcccgttagtcatattctgcatttctctcacttgtgaagtgtggctacaactattaacaggggttttctcatatttgggagatatttgaggagagctgggccta

SEQ ID NO: 15508 - DNA, 201 bp, Bos taurus
gcctgtgcctctttgtggctaacaccatccggccaatcagagccccggcaacagtgttctgttcctacagctttgtccattccagaaagtcccacaaatacttagaataatatagtatgtggcctttgattctgacttttctcactcagataatacttctgagactcacgcatgccgctgcagatattagtagtccgttgc

SEQ ID NO: 15509 - DNA, 201 bp, Bos taurus
aattcattcttaatctttgaccatctaattctgtaggtacatgaaaccaacagtattttagctgaatagctggctgttctttactcaaagtggatgtagaaatagcgctgaaagatccattttccatatataattctcctagcaggccagtagagtctaaacttctaccaatcatgggtcattccttttgtgtaaaagcat

SEQ ID NO: 15510 - DNA, 201 bp, Bos taurus
gcagagttggatgtgactgagcaattgagcacacacacaacccttgctttgaaagctattccttcaagcctagtaagtactaatagcattcgcattcaccagttgctcaagctaaaaacctgaaagtcatctttgtctttgctttctccttatgcttaatttatctgcaatgtggattcaatttccaaaatgcatcttgaa

SEQ ID NO: 15511 - DNA, 201 bp, Bos taurus
acagcagtctctgtgagcacactcttcagttaaacatattttacatataacatactgaatttactaatgtgcttgaatttttattttacaaatttcatcataatctctctttatcagtgttgtatgtgatactacataggaaccacattctctaaaaacattagtttgagtgtatcttttgtagtctacagcaaattacat

SEQ ID NO: 15512 - DNA, 201 bp, Bos taurus
tgatatctattagtcttctggtcttttttatctcttctcctctgtctcttaaatgcaatccctcacgattgtacttcagaaaagcacaaattccatttctaccagcaatattctacagtgcctattttaccacattcttgtcaactgtggacattgagcactttgaaaagtgatcattgacagattaatccattcatttca

SEQ ID NO: 15513 - DNA, 201 bp, Bos taurus
acttcgggtatcactgttctaagtctgttaagcagacaaattttgttgctctgttgttgatttgctttcctttgtctacggtttatagtcagaaacttgctaagtacttacacccattgttctaaatacttgtacccattgttatctttatatattgactctggtaagtaacatacctctttttagagacaattcttatat

SEQ ID NO: 15514 - DNA, 201 bp, Bos taurus
atttttttaagttttacagaattaaaacaggtttcatacatttttgtttcatgaagttatgatgaaatgataaaatatgatcttctagccaccattgattttgttgtgaagaaaacaggacaaaaataaatttactatgtaggctattccccgggaacaactatagatatggtaagaaatacaaaaactgattatggtata

SEQ ID NO: 15515 - DNA, 201 bp, Bos taurus
tacttcaaaagtaatgtatctatgtgtgaaatttatttctaccttaaaaaatataattttccattgaacttttaaaccttgattatatgtatatagtttttttctaggagatttcttctttttctccttctctggggcttgatttcaatgatttgggaaaaggaaagaacaagcaatgctctgaatgtgtaacaggtacaa

SEQ ID NO: 15516 - DNA, 201 bp, Bos taurus
aagtagatttagacaagattactgttttgtttcctcagaacttagcttggtaagcaccaggttgggagcccccagatatggccagacagaaatatgagtttaccttgattgcagctaagatcctactgaattacaggcagtcctcagggaaattaccatggccataatgagaaacattctaattaaataagatcatttaaa

SEQ ID NO: 15517 - DNA, 201 bp, Bos taurus
acatggaaaagcactaaatttttaacttgagatatctagcttttttttgttaacagtaatcttttgttcctactcctgcccttgcttgcaaagctcctatgtatcctggcttccccttcacctccttggagcagttttctcagggttacttgagatgttgccttctgggcttaagatcctcagagtgtctgctgaataaaa

SEQ ID NO: 15518 - DNA, 201 bp, Bos taurus
attaggaatacaagatgggagttatgttattttataacttgcctttttttcacttgatgctgtaactcggacaacttcctggttcagagcatacagatgtcagtcttttctgatggcttcatttactatagaaatttttttttcaaataacctgcatatttccatttcctcctacatatttcagtttccagaattataata

SEQ ID NO: 15519 - DNA, 201 bp, Bos taurus
gtaaggtatgaaaaatacagcggctgaaattttgccccaagaactggcactttattactccctggctgtgggtgtgaccttcacctcagttttctcatttacaaaatgaccatgaaacctactcaatcacggcacaagattcctgagctaaattttatagaaagacttaaattgctagagtactttgaaaactttaaatag

SEQ ID NO: 15520 - DNA, 201 bp, Bos taurus
ttttattcttgcactgagtttatagaaggagaaaagtgagatagaggcaaagaggactcaagattttgatgttgtctgtaagtaagtttctttggaatactaaacaagtaatttacctctaaatagttcctaagagtggaagtgtcagcatttcaaaggaacctctctgaaggctaccagcactataccacagctgctaag

SEQ ID NO: 15521 - DNA, 201 bp, Bos taurus
aattccagtgatgatcccctgagaaatacagacctaggaacctgcagatgtgcttccaggagccttgagttctctagaattatgtattacattgagcttgtgtgtaaatttttctaggaaacagcccatccttttcatcagcttttctaaaatccaggttggaaatgaattacaaatcacctccttgaagagtattgattg

SEQ ID NO: 15522 - DNA, 201 bp, Bos taurus
agagaatggttcactcatttttctgccgtagaacattcccaataggtgtaaagagcaggtatggccacaggtgcatagaggaaaatgaaaacaaaggccactgcatagagaatatcaaggaatactgacatgaggggacgacctgagtaattgcactaccatcttatttacacagcaaaagggtctccatcctgcctgtga

SEQ ID NO: 15523 - DNA, 201 bp, Bos taurus
gaagaaaataataatgagtagttttattttggttgctttgttagttagatgcctaaaattccaataattagttttattccataggagccatcttaaggaacagtttctctttgcttcatgtaaaacaaaatgattatttcatcctatgaacaagggttggttaatttgatgactgcagcccactgttaacatgttcatttc

SEQ ID NO: 15524 - DNA, 201 bp, Bos taurus
acctcagactgactccaaggacaaaccaaaaacttgaggttaaatgctgcctgctctgatctgaatgtgtgtatcctccctatattcacatgttgaaatcgtaactccctgaagatgatggtgttaggagatggggcctttcagcagttcttaggttgtgagccctcatgaatgagattagtgttctcatgaaaaagaccc

SEQ ID NO: 15525 - DNA, 201 bp, Bos taurus
ataactgtaaaggtttctgctccttatacaacagagttcagggtacatgaagcaaaaactgatagaactaaaatgagaaatatacacattcacaattataagcagaaacttcaaaaactcactttcgaaaattgacagaacaagtagaaagaaaataaatatacaggggacttgaataacactttaatcaacttgatgcag

SEQ ID NO: 15526 - DNA, 201 bp, Bos taurus
tgaaaaatgtccattaggggtgagggtaaaaatgctcatgcagaccagcagacgttgatggcagggcatacaaagaaaaccactggctaaacagagatgtggttgaggagaaaagcaggggcctgaatggatacttagcagtgaacatctgaggacttttgaaggttttaggacattacttcagaggtaagtgtgtgctct

SEQ ID NO: 15527 - DNA, 201 bp, Bos taurus
gcatctagcaaaagtttaaatgaacttaaattctgacccagtacttctacatttatttaggaatctgtcatatagtaacactcccctaaatgctctagtatatttggataaaggtgcattagcacaacttgtaactacaaacacactggaagtagtttctatttgcagggaatcagctggataaattgtggtacattcaga

SEQ ID NO: 15528 - DNA, 201 bp, Bos taurus
aatattattttataagttctttgtggaggaccggcctttctcccttagtctcatcatccccatatttgtgtagatcttcatggaacatctataatgaactggagattgttgattcaggcctaaatctttttctcttttcccattatgtgcgagagctgtccttaggactgaggggtttataaaactatgtaaagcacagtt

SEQ ID NO: 15529 - DNA, 201 bp, Bos taurus
gccttgctaggacattatatagctttcagtgatcctctctcctgaatgttaaacacttgattgattgtctgccaggcatttatttagctatgataattcagagctgtctttagatagctttgatgaaatatctagttcctgtccttttgctttattttgtgttttatttgttgcatatttctggattcttttcttgaaata

SEQ ID NO: 15530 - DNA, 201 bp, Bos taurus
ctgttctatttctagcatattctggaactgctggtgggccagggggtaagggagtaactagctggatgactgtaataaaacagcaacaggcagcctcagaccagaaatttgcaatggccactccagccagcattattattcaaatccacatgtaacgcagtggggcctgatctgaaatttctgcctagtgggtgcctaacc

SEQ ID NO: 15531 - DNA, 201 bp, Bos taurus
aatatcgttctcttactacacaatagatccttgttgtttatccatcacatatacaataattgcatctgttagttctaaactcccagtcctttctctcccacctcttccccacgatggcaaccacaagcctgctctttatatctgtgagtctgtttttgtttcatgtgctatgtggtattagatgctcagtcatgtcagact

SEQ ID NO: 15532 - DNA, 201 bp, Bos taurus
tccatccaacagaaactagcccactggtcttggtgctatgtttccttccaacccactgatgagccttccctctctagggaagtgagggcaaagtttggagctgcacttaaccttgtgcccacatgaggtcaacagtggcctgcctctgccactcacagctagtggtcttcaggatccccatcaagttaactcagaattctg

SEQ ID NO: 15533 - DNA, 201 bp, Bos taurus
gagttacttctccactgatctccagcaacatattgggcacctaccaaccaggggagttcatctttcagtgtcctaaggtttggccttatcacattgctcagggggttctcaaggcaagaatactgaagtggtttgccattcccctctccagtggaccacattttgtcagaactttccacaatgacccacctgtcttgggtg

SEQ ID NO: 15534 - DNA, 201 bp, Bos taurus
ttttccatgggagtgtggcatgaataaagatgtaagtgtagcatcttctgggaagacttttccccaacttgggcagagatatgcatgtttgagactatggggagatacattcatgtgtgttggtgagagaggcccaagtgtgctgtgccttgaaggttgtgctaaggagtttggattccagctgaaattagcagcatgtat

SEQ ID NO: 15535 - DNA, 201 bp, Bos taurus
aggtaaaagggcccatcaacttaagtttcttgagtttcacaggaaggaacctgaagacttggatctctctctaggatgaggtccttcccctgattctctcacattgactcagctcactggccctcagactttagcccctccttgctgactctttgtcttagctaacgtttacccacctcctctagagaaagccccgcatta

SEQ ID NO: 15536 - DNA, 201 bp, Bos taurus
agaatttaaccgtacagccaaattcggcaagacgggccccagatgaagagcatgcacgtcaggttaagccctgacctcacaccgatattttgggcagcccatgctgtgggccacctcaagtaaagcccacacgaatgaagtcttcctgacaggcccctaggtaaacctcctgggctagagtaaagatggatgtactcatta

SEQ ID NO: 15537 - DNA, 201 bp, Bos taurus
gtatagggccaccatgctgacttcaccccatacaacatccccatgactaatctccaacaattagtccaaacttacaaatactctctccagccaaggcaacggtaggaaacctttccatatggccaaattttccccagtcaggagggcttgcaggatttgtaaattagacctttcagttgcacaaaaggaaagaagtgcacg

SEQ ID NO: 15538 - DNA, 201 bp, Bos taurus
aaaggatggctttcttcagcctccattcactgcacctcatctgatggcagaccccagccgtatggccggcacacttctctctctgctttcccaccaccgcgtggttattgccacttcctgccttttttcttggtgcccttctggaacaccgtctctattcctctctgtccaaattccagtcaaacttcatatccctctacc

SEQ ID NO: 15539 - DNA, 201 bp, Bos taurus
ttttttccccactgttctagacataagccctgcagtacagcagaggtccttcctaacctgaaacttcttgggtgctcctgatcaatttccatctctctaagtactcacatgttcaatgaacacaactgaccttataaatgaaggcccttaaggagggataggtttctgtttggagaaactgcagtatctctcccacaatga

SEQ ID NO: 15540 - DNA, 201 bp, Bos taurus
atcattcacccccactttacggatgaggaatccaaagctcagaaaaattaagtgtccacagccatatcacactggacttgcacccaggcctgcatgacttcagaaaccctgtgtctgatcccaattaacaacgcttcttatataatcataaactttatggataacatgaaatgacaggccatgtgctaaacaatcctttaa

SEQ ID NO: 15541 - DNA, 201 bp, Bos taurus
agttagcagaagttttaagttgaaaaattttaatcaaaaaatagacatcagatatagcagctatccaaccctagtctcaagagagattttttaaaaagtagttttaaggggagccctcatgatagtgacttcatggtggtgatttaccataaacatccccaaagttgttcagtagtcaactttatcatccgtgaatatcta

SEQ ID NO: 15542 - DNA, 201 bp, Bos taurus
atacttgttagcatctcatataaactctatattgtcacaccccatggtcatgtccctgttctcatcttattcatttttgacatagcaggtatttctcaaagtaaccttttttccctacttccttatctatttctctccaatctcacttggtgttttttacctcttcaaggctgcctggggctgctggtctctcatcccttc

SEQ ID NO: 15543 - DNA, 201 bp, Bos taurus
ggtaattcagaggcagacagacagttgctggaagctgcaaaggctggagatgtagaaaccgtaaaagtaagacatgatcttatggtttttttaacattggatttttattttgacagtgtttaatgaatctgtactgttaaaaaaatctagttatttatatgtgcattgttttaaaaggtaaataatgctaattagttctgc

SEQ ID NO: 15544 - DNA, 201 bp, Bos taurus
gtaagtcacttgattttgttgcacaactttctcacacattaaatgaggcgcttgggccaagaaaacctgggatactagccattcctaatattctgtgattacaaacattttaaggtcttgggcacagatttttaaaaaacctgcaatcctaattcagtagtagtcaagtacctaaactgctaagtcacttcagtcatctct

SEQ ID NO: 15545 - DNA, 201 bp, Bos taurus
aatttaccctttctcctgctgtaggacatttgtttctaaattttcattattttccaaacttttgtttccttaaagctatatttctaaagaaatccggactcgatgaaaggcataacattaaagcatctgacatgtattagcaaaatttttaagcttcagcagtttgtatttcctaaagaattaaccttctaatatgaaaac

SEQ ID NO: 15546 - DNA, 201 bp, Bos taurus
tggagattactaaaaaatatatattcttttaactatcatgtgatccagcaatcccacttctgagtatgtatctgaaggaattaaatcactgtgtggaagaaataacctacacccccacattcactgcagcattcttcacaatagccaagatatggaagcagcctaaaagtccatcaacagatggtgaagaaaacgtgtgtg

SEQ ID NO: 15547 - DNA, 201 bp, Bos taurus
agctgcacagtggccaaggcgggaaaaggtgaagatactaaacttaagagaatttaaatttcttgtccaaagtcgttaacctagtaagctgcaaagctgcatttgaatcttggcctaattccaaagtccatatgcattccactcccctgcactgccctagaaggccctttcactagaccctgtcagcactcagtctctttg

SEQ ID NO: 15548 - DNA, 201 bp, Bos taurus
tgcatggtacctctcagatctcaattagccaccaaagtcgagtagctagaaaaggagtgtgattggagggcatgccatagtttcccttgagaggctcaaggcttcctggggagacctttgtttttctccttcagtggacatgtgtagaggggcagcttctaagaagggatatggccccttttcaagtggctttggagtggc

SEQ ID NO: 15549 - DNA, 201 bp, Bos taurus
atccagaatttccttgtcatattgaaaaagtccatttaattaatataaacactactcatgtttatattcgtcattcccactgaagtcttctgttcataccagaccatcatacaccttgctagacgctcggaatataaagaaccataaagcacattccttgctctggtgtagcttatagtccaataaggttgataagtgttt

SEQ ID NO: 15550 - DNA, 201 bp, Bos taurus
gactcagaggctttcagtcctcttagggaagaagcggtggagtgcttctggagtcgtactgccctgggtgagcctgtgctgccgctccatgcagacccgtgaaatagaaaggccccctcacttgaaagggcagcctgccatcatcctctgtccactaccctgtgttgttattcttctcagtacaacttgtctgcatgtgta

SEQ ID NO: 15551 - DNA, 201 bp, Bos taurus
actagagtttctgtcttttctggatttatgcccaggagtgggattgctggatcatatggtaacaccatatttaggtttttaaggaacctccatactgttacccataggggcttatcaatttacaccctagagagatgtttttatccccttcggctgttagaaataaattgcattttttctttggacctagtatgtttttat

SEQ ID NO: 15552 - DNA, 201 bp, Bos taurus
gactcttaccaggccattgttgtcctggggctggagctctaagcctcgaacaatgtaaatcctaaccgtgcattcctgcgggacgctgtcaggtaactcccgaaactgccggggaggggccggcacgctggggtcatccggcagtgggtagattcggaaggagccctataggagagacacacacagatggagcccagggcc

SEQ ID NO: 15553 - DNA, 201 bp, Bos taurus
cagagcctgcaggctggaccctcagggctccatttatcaaagaaacaatgtggttagggcgctgccaaaatttcttctgaggctcttggcttccaggaccccaggttgttggcctgtgactggccaaagggaacagagggccttgacttgccaaagaccctttcgacagagaaactgtgtgaaataccccctttacctctc

SEQ ID NO: 15554 - DNA, 201 bp, Bos taurus
gggagctacaaggaggccaacggtggttcactcgatgtaagggtgatctttctatgaattagtagtgtcacacagtgggacagattgcattaggagcagaagaaatattaaggccaagtgttgtattttatctttcaggatatagtcaaaactcttcctctgtggatgagaggttgaccagatcaactctatggccctttc

SEQ ID NO: 15555 - DNA, 201 bp, Bos taurus
gcaggagacggagaaaggcagactcaagagcccacagagccagagaaaaatgttgtatcatagcaactgagggaagtgtttaaagaaaggaagtggccaagtatgtcaatacagagggactgcatctcaaaatgtatctgtcactcggaacacccacctcagaaccatgtggggtggcggggtgggggtgtgttattacaa

SEQ ID NO: 15556 - DNA, 201 bp, Bos taurus
agtttctaagggcaatgcaaaggtgaaggaacgtttttaatcttaatatttgttttttctaccaggactatgtaactgatacttgtgaaacttttaatttttaaaagtgaaagtaggagacatttttaaagtaccacttgatgatcacatgttaatatctctcactgctgttctctgttttaattgttgtactgttgttac

SEQ ID NO: 15557 - DNA, 201 bp, Bos taurus
tcttttggcctcaattttctctataatttattggaactggatcaggtccttccagttctgaaagttctgtatctctgtgttattatggggaaaaaattagcttggatgttaggagatcttggcccagtactgtcacttttatatttctgtgaccttgagaaatcatttttatccttgggccacaacttcctgtctttaaaa

SEQ ID NO: 15558 - DNA, 201 bp, Bos taurus
tggccacatcactctcccagcatctccacgtattcacccacccagaagctctctgaatcccttatcttgggcttttatgaaggcttcattataggcttaattgatgaaaatcactggccattgatgactgaactcaatctccagccgctagttcctacccacctccctggaggtggagagtgaagagtgagggtaggacca

SEQ ID NO: 15559 - DNA, 201 bp, Bos taurus
ctgacttactggttaaggcccagtgtcagcacgaggatttagcaaataacatcctatcagaatttgaaagtgaaattctggaataaataagcaaaccatggtcaaaagggctagcaggcccagagggattggggttggttttcctgtttaccccttacctcagccaccctggaatcccagggaagagccaagcagaggacc

SEQ ID NO: 15560 - DNA, 201 bp, Bos taurus
tgacagggttgttggttaaagtgttatctacatagtggtggtggtgctgctggctctgtggagtgatctgctgtggggcaaccccacagaaatatgctccgtggaacgtctccttcaggaggcctggttacatttgcacatgagttcagagctataacaaaatgcagttagcatttatgaattttattgctttgtaggaac

SEQ ID NO: 15561 - DNA, 201 bp, Bos taurus
gcctacattaaaatttttttcttatatgccttcatcaaaatgacccaattaatttatgtttgcacagctgtggagagaagaatgggtttgaatgggagacgttagtgaggattaatccttgctgactgactaaccatgatggtatcctcctcctccttctgcctgttaaaaaattaaaacctaccccttatccagttacac

SEQ ID NO: 15562 - DNA, 201 bp, Bos taurus
tgctcccttggaaaactttttcagcttcagtgctttctcccatggggttttcaaaatctgtatgtgctgtagtgaaacatatggttcttcaacatgcagtggaatataatacatcttaaaaaaccatacatggccgttcaaaatcacggagtgtttagagaacctataggttcagcatattgagtagctgggtcttgagct

SEQ ID NO: 15563 - DNA, 201 bp, Bos taurus
agttgctgcttggtcgtgctgtcccaagaagtggctgattgtggaaccctggggcattccagaggtagtgctggttcactagtgggtgagtcagggttcatgagatccaaggattggtgcctgaccactggaaggtaaagccaggtgctggatcacatgctggcccaggggagcagagccagatcctggaatctgcctaag

SEQ ID NO: 15564 - DNA, 201 bp, Bos taurus
aagaaaattgagaaggtgagaggtgtcagccgcttggtgacttaaaacgttcctcctttctcttccctctttaacaacaaccaatgagagatctttgccagcaaaggtccatttgtgcatgtatgtgtgctaagtcgcttcagtcatgtcagactctgtgagaccctgtgaaccctagctcgccaggctcctgtgtccatg

SEQ ID NO: 15565 - DNA, 201 bp, Bos taurus
tagatcatcatgaccactaactgtcttctgtttgaatctgcatgatctggtggttctgggctgagggtctgtttaatgaagtccatgcctctgatcctccgctgaatctacacctgttgttctgtgtaaaatctctcgtccttgctcttgatgacaaattgaaattataatggagtaatcacagttcaggcatacaaaaat

SEQ ID NO: 15566 - DNA, 201 bp, Bos taurus
ttgcagtgcacatgtctaggggaaaagtttgcagctgtgggagagcatactaatagccaggacccctgcaactgccagtgagccctcagttggcccaatctttgctgcctactccagccctatacactgtatgtgtgcctgcaccctgtctttgccccaacaaagaccacaactggcccctgcagctgaatctgtgcccac

SEQ ID NO: 15567 - DNA, 201 bp, Bos taurus
cttggctggtatgacagcccttaccctgacatggtcagacgggttctcactggccatggaccacatggtaacactccagttacttggttttgcttatcagaaggcatcatttgaaaatatctcccatcttcttgacgtgaagcatgtcaagaaagccaacatcatctggctacgttcagagcagacaggctagttcttttc

SEQ ID NO: 15568 - DNA, 201 bp, Bos taurus
cacaggaacgagccttgggccacctacaaggagactcttccagctcatctctccaatacccagctttccatgcatctccacaacaccactaagctcacagctcagcagtgtggctccaccaggcctaaagtctaataaacctttgctcaagggcttccctggtggtccagtagttaagaatccaccttgaaatgcaagaaa

SEQ ID NO: 15569 - DNA, 201 bp, Bos taurus
tcatccctctttgtttcatcactactgcaagtctgtgggaagtttctctcttataagaaacacttataacccagtctctcctgatgcatcccagaattcagcaagtgctacatggggaaaactggccatgtgtttagagctcctctagattccagcgttaggccagatcacactgatcatcaaaagctctatgagcttttt

SEQ ID NO: 15570 - DNA, 201 bp, Bos taurus
attaacctgccatgggtgtggggcagggaactaaataggttttttcctaacttgctgagtatgtagtgggggacttatgggatcctgtaggtttggcccattttagatacctctaccatattctctatggatcaaaatgggagcaggctaagaaagtgaacagagtgaatgggaagccaagttggagctgggagggcccct

SEQ ID NO: 15571 - DNA, 201 bp, Bos taurus
atgtgatgggggattctcagagaaaagggagtaggctaggccagcagacatgttatacgagctggcaatgttaggacaaacacttaaaccagtttcggccagactatggaatatcctttgtagtttcacaaaccaggctgaacatcagaagcaccagaaagccttttaaaaagatacagattcttctagcaggtgaattag

SEQ ID NO: 15572 - DNA, 201 bp, Bos taurus
agcgagactagtggtgtcaggattctgtcaatatttttgtccagaggcataaagccattcaggaagaacccttctctgggcccattttcttgcttttcccattttctgctgagaacaaacctccattaaactgcagagtgagctcctgtcctactgcttagtatcctggccaagtaatgccgattttggagaacagttcta

SEQ ID NO: 15573 - DNA, 201 bp, Bos taurus
tactgacacagaccagatcctttgctgatttctggagatctaaaaacgtgtagtgttctcaaagtgagttagtctcatagaggagacggacacagacagacgccgaggagggtatttaatctgtcattagagaagggttaagagactttcaggaagacttcctggaagtggtgacatgtacactaattatcctcaactcca

SEQ ID NO: 15574 - DNA, 201 bp, Bos taurus
tattgaacttctaatttatgactgaggtgggacataaaccagtttggtgtgatgattggtttttgttttgctatggtaataatttttgttcaggtataaacaggtggactataaagccactgtgaaaaataggattatatggtcatccttgcttgttgaaggatctcctggctttcatagaaaatgttctgattagaaagg

SEQ ID NO: 15575 - DNA, 201 bp, Bos taurus
cccgggttcgcgcctagggaactcgggccccagttggtccccttttgcctggcacccggtccggcagttcatcaaacaagctggctcctcctgaccgggtagcttgggccttccgtgaggcgtcagggagttggtttggtcggtgctggttttcggacgagtcaggtgaagatgaacagtcaccctgggtggcctgaggtc

SEQ ID NO: 15576 - DNA, 201 bp, Bos taurus
cataagcagtaagtactaatgcactaatgcacacaggatttgaattcctgtgtgacgccactataacttaagggcatagcaaaatcttgtgaaccatctacagcagagttgggcaagcttaggcctgaaagctaaggatatttttacttttttaaaatggttgaaaactttgtgtttcctggcttagctggaaaagtgtca

SEQ ID NO: 15577 - DNA, 201 bp, Bos taurus
aaggaagtatgccagtgtggaggccatagtaatccaaggacattttaagaaacactgacccaaggataaccagtgatcactataaacacattctatgtatatattcttgactactaagagtgtttagggctccatgtgtctgtttattcatctgttctctaccatctattaacagttgaacaaagtaaatcctgatatggc

SEQ ID NO: 15578 - DNA, 201 bp, Bos taurus
ccctgggtggagacgtgaagagccaactcacacaatacttgatactgctcttcatgccttcattgtacttacttggcagaggtatgggtttttgatgaaccgccctgaaaggaagaaattcagcttaattaaagggcaatgcacaagatgaataagtttgactttttgtttgcactgaagatactctgaacaggtgcatca

SEQ ID NO: 15579 - DNA, 201 bp, Bos taurus
ttcataaaatagggctgtgagcacctacctctagggttgtttggaggatcaaatgtgcaccaggagtagaagctttgatcattcctttaaacttggcaaagctctggccagacctgttatttattgaatattctcatcaaccatgggcttccccagtggctcagatagtgaaaagtctgcctgctctgcagtagacccagg

SEQ ID NO: 15580 - DNA, 201 bp, Bos taurus
tcttcacactccccgaggtgtcttcccagccccagggatgctggcaaacagtggttgagaggtctctgtggtgctccggaggccctggaacccagtgattgacagttacctgggcatttgtacagcttcctggcttgagctatgtctccctgactgagccgcacgcgctggccgatggttggcctgacaccgttgtcatct

SEQ ID NO: 15581 - DNA, 201 bp, Bos taurus
ggaacatgtacactgtgaagtctgagaagcactgactcaaagcaccagaggctttgcctccagcgaccatgcccctggggccacgggctctcctctacccctctgtgcctgtcatggctgtaaggaaaaggtcaagcagggtaattcttcacagaaatgtagaacatgggtgtataggccataggaaagatctaaaatgta

SEQ ID NO: 15582 - DNA, 201 bp, Bos taurus
ctggcctgaagcatctcaacatctagaaggaaaaaggagactaagaatttatatgttgttcttccacacatgcaaagacattttgtaaatggatacattgtttggccaaaaaagtttgttcaagttttttgtgtaacatcttatggaaaacttgaataaactttttggccaacccaataaaagttttgacaaattaagaga

SEQ ID NO: 15583 - DNA, 201 bp, Bos taurus
gcattcccaatgcaaggggctccctggtcagggaactaggtccctcatgccacaattaaagatcctgcatgccacaatgaaggccaaagatcccacatgccgcaactaggatctggtacaagcaagaaacaaacattaaaataataataatagttgggcccagccacaggattgtggtgcccatgtgtatatgtgtgtgtg

SEQ ID NO: 15584 - DNA, 201 bp, Bos taurus
tctctggcacctggccctggtgcttgatgttgcccttgattaccctccagtgaccttcctgtaattcctgatctccagacggcacaagagcgttaatgataatctcatatgtcaaacggaaggtatcgtcgtcattgccttttgtgcctttgaggtagcacctatcatggccttcaggttagcgctgaagaaagaagccaa

SEQ ID NO: 15585 - DNA, 201 bp, Bos taurus
cccttccttcccattacccggtcccgctacataccctctcctcacccttggtccactgtttcctggtctagagagcaccgggccttatttacctttctatgcccctcccctaaaacctctaaggctttctgccttcctccttcggaattccattctagtctgcacttatggccaagattgggaggtatggaataaaatgag

SEQ ID NO: 15586 - DNA, 201 bp, Bos taurus
gagtagggactgcctcaggaaggcacaggggaattcttggggtgctagctgtgttctagtttttgccttaggtatttatacatgtgctagttttatgactgtttgttaaactatatgtttatgtttttcgcagttttccatatatatgctgcatttcacaataaaaagaatgtttctgaaaagtctttttggctggcaggc

SEQ ID NO: 15587 - DNA, 201 bp, Bos taurus
ggtggggggagaccaggtccccaggacctggccacggggctcacctgtcgcctttgccctggacaggttcctcctcctcctcttcttcctcttctacggcagcttggttgagggcccggtgtttcttggcccgggactcagctttccggatgtttaccaggactttgtggtactcctccggcagcagtttcttcaccagct

SEQ ID NO: 15588 - DNA, 201 bp, Bos taurus
tgtgagaaagtgggtgagctggaaaaaggtggatttccagatctcaggggtgtccagcatctgtgtgcacctcacacttgacccaggcacttctcaccgaagctccccagggcctctcagcatctctgaggtgcacagaatcgggcaggtgtgcgcagagagtgaagggctggcacaggccagtgtggaaacagacctagg

SEQ ID NO: 15589 - DNA, 201 bp, Bos taurus
tcaaggccagggggggttgtcaaaggtgctttctcccttttttgaagattcacaatgctcattagcatatcaaaggctctgagaagtcctgcactgaaagcggcccctgagtaatggaatttacagtgttaagtgcctctggactgggatcagtttctcccaccttatattccaagtagtcctgactctcatttatcagca

SEQ ID NO: 15590 - DNA, 201 bp, Bos taurus
cctgttgagatatgagttaagtgctcatgctttatttacactggagaggaactacaaggatgtctttgtatatggagaattgtcaataaaaaggcctcaaacttcctatgttttcgttctggtccttgcctgccccctctccctgaggctagagagccaggtgccccccagtgctggccaggtttgcaggcctgggctgtg

SEQ ID NO: 15591 - DNA, 201 bp, Bos taurus
gagaaccacctgcccctgggcagacagagatggagacacaggcctgtatgcagccttagggtgtcacctgcagcctcatctcagaatctgtgctgggagtcggagccacccaggccactggcagggaagggctcatgaagggctcctatgagttgccagcaactcagggccccagttgcttgttgcaggggaaggtgtggg

SEQ ID NO: 15592 - DNA, 201 bp, Bos taurus
tgcccactgtgtcatggtgcctaagctgggtttcccaaaatcaagacggtaaagtccgttgtgactggaaccatgcttctccttgctgaggctcaaggttagggaactgaatggagccatgccctttcttgtaaatcagtccatctcctgtacaaacattaattgagcatctactatgttctaggtactattctgaacact

SEQ ID NO: 15593 - DNA, 201 bp, Bos taurus
cacacgcggcccttccatcagtcactcgaggcagggctgacatgagcgttcccatttcacaggcaaggtaactgagtccgggagaggacggaaactgcccattgttgtagctgatgagctgggccaccgcctcgctccaacaccagatgctagaggccctttctagtgtgtgcccttcctcctccacagccagaggcacag

SEQ ID NO: 15594 - DNA, 201 bp, Bos taurus
taacttgagtgcctcctccctcaggagctgcccccaacccgggagatgacctgacttgagtctgacaatggtggcaaagagaagcgtgggccagtgcatacggtagggctgggggctcagcctccagctacattcttaaggcaaagagattactgccaagcagcagggtcaggagctagccagcaacatcccgggcctggg

SEQ ID NO: 15595 - DNA, 201 bp, Bos taurus
agagcaaatagacttttgccccgtgggtacccgtgatccccagtcctctccacaaggagtgttgggaactctgtgccctgctgcctcatgccaccaccctattttgagggcatctgagtcacgtggtgatggccccggctccacacttgtctctgcatctcggtccctgccaccctttcagtgtagaaataagttgcaggt

SEQ ID NO: 15596 - DNA, 201 bp, Bos taurus
gtgtgatgtgattaaatttttctggttatataaataggcctgatggcagtggggaggaacccacagaggtgctgatggcagttgggaggaacttgcagagatgctgaagtgctgggcccagtaaggaagcccacgctgtaaccaggtaaaaaatgagacgggtctgatttaaatctctggcggtgggtgtgaagaggaaac

SEQ ID NO: 15597 - DNA, 201 bp, Bos taurus
cagatagaaacagcattttaggattatgtgcaaatacaaaatttcagtccatcctggttttaatcactctccttgatgttggtagtcatgtctccctggcatatccaaggtgcccatacttgagtctagtgaggatatcactgacacactgtatatagtttatatgattctaataacttcacattccactggatacacaaa

SEQ ID NO: 15598 - DNA, 201 bp, Bos taurus
agtgtgctgtgcatggggcctgaggagtgggctggtaccaacaggggtacacgctgggtgggtaggcatgcccacagcctcatacgcgggcctgagagcacggagactctcagcctgagggagaatcagatcagtgcaggggaccaaaaggaggtaagtctagaaagggggtccagggctgggctgaacgagaccagcctg

SEQ ID NO: 15599 - DNA, 201 bp, Bos taurus
ctttttcttggatcctctgggcatttcactgtgtagtcgtgataatttcctcttccttagaatcacccacttgttctggtacctcattggcaatgcagaaggcatcaggctcaggtctttgcagcagagatcagggtgcagaccttggacacagttggaagggctaggctgcagagttgccccgcagggcagggctgatga

SEQ ID NO: 15600 - DNA, 201 bp, Bos taurus
cagaccaagcagatgaatacaccctcttagaggtaaagtaacttcaagaataaagcattatttgaacctcagttctgccacttgctactgggaggacctcgggcgcattgtttttttctctctgactctcagtgatctcaacacctaccatggaaatctcttgtgaggagggagaagtcatacatagggtatgtgggacac

SEQ ID NO: 15601 - DNA, 201 bp, Bos taurus
agtcaaaaatgcatgtctaacaacatggctggcctgccttatatgctgtttgtccatgtgtgattctgcatccgcagatttaaccaactttgtatcatgcgtgtagtactgttgtacttgggcttccctgatggctcagtggaaaagaatccacctgccaatgtaggagatgtaggttcgatccttgggtcaggtcgggaa

SEQ ID NO: 15602 - DNA, 201 bp, Bos taurus
agcagagtatttttgaaagaaaaccctcagcaacactgaacaacctctctgtgccgctccatgtgaggacatggggctggaagaccccaggcatatcatgtagccactgactcattatcttcatctgcatctgccaggattccatcttaaaagatatttgcttgaccagcctgatttgcccttcacaaatgtaataaagaa

SEQ ID NO: 15603 - DNA, 201 bp, Bos taurus
ccttgacatcaacaatatcaccactcctgtatttgatagatccacatgcatgtagccaaagaagcaactccatgtttcctaaaaggccctgaggatgtgtaatgggtgcttctcccctttccctttgtgttggtcatttggcaaattactagaagatagcactcctggccaaaaataataataattttaaaaagcagttaa

SEQ ID NO: 15604 - DNA, 201 bp, Bos taurus
cccttgtcctctcccagatttagccccctgtgttttaaggcagtccctgaaacacttcccagctgaggtgatctcaaagtgaaatggccccttaatctagtaggattggcaggaaaaaagaggagagaaggtcaatccaacctgctctagcctgtgtggagtgggggagggggtcaggcctggtctgggagcccccatctg

SEQ ID NO: 15605 - DNA, 201 bp, Bos taurus
tgaacatacagagaaatgcatttttaagtcttgacagtacacttaaagatactgtccagcaaattttcactgatttggccattttcatgttctcagttcacaaaactgtctataataataatagcaggagtccaaccataagttataagaatgcatttggtattatgaatttaaataaattcctagtaaaaggccaccata

SEQ ID NO: 15606 - DNA, 201 bp, Bos taurus
tgttttctttcattatgatttatcacatgatagtgaatatagttccctgtgctgtacagtggggtcatgctgcttatccatcctttatgtaacagtttgcacctgctaattccaaactcccgatccaccctcccccaaggcaaccataaatctgttgtttcataatttgtgtcatattttagatttcacatgtaattggta

SEQ ID NO: 15607 - DNA, 201 bp, Bos taurus
acttggctccagtcttcaccacaatcatttctctttcctttcacatccacactccttcagtgaatctatgctggttgatttcatttcacaactgtttacttgctgtaatctggcctctgaaatagatctatttctccactgaaatagatctctccattgatatcacctctgttccctcctgacaaatttttaagttggagg

SEQ ID NO: 15608 - DNA, 201 bp, Bos taurus
ttgtgtgtgtgcacgcatatgtgtgtgcaggagtgttttggggtatgtggagtgggtgggactgtgccaggtgagtactggggcctaggtgggcatgtgggcagagggtctgtggtgtggttagggtggagggttaggatacatttggggggatgaggaggctggtgagttttgagaatggaggccgtcatgaagggctga

SEQ ID NO: 15609 - DNA, 201 bp, Bos taurus
ttttaagcctgaagtcagaggcgttgattctgcacatcggccaccagcatcttcagcagagcagagctgcagagaaaagcaggataggggtttcaagaactgatttcttgatggctccttgaatagacagaacttataacagagcttttccaaggcagttttgtttgccagaacttaagctttctgtagttcttttgaagt

SEQ ID NO: 15610 - DNA, 201 bp, Bos taurus
atctgcaatcagagctccctggccctgatgagggagcgcctgtcaacctgatcgctgagtgacagcccggccacctttcccggccgtccccacactcctcaaacacaaatacacacacacagagtcactcgcctcctgcaaacacaaacacacacctctcgccaacacaaatagcccctctctgcaaatacaccgttgcaa

SEQ ID NO: 15611 - DNA, 201 bp, Bos taurus
aaagttccatatggaaggtattcggttgattagaatgaagtcttgtgcagatcatcagaaccaaggctggtaagaccccagatgtgaacattcaggacagcaatttttaaaaaagataataataataatgaacaattacatagcagtgactatatagcaggtactattctaagtgcttttcaatactgtcatttaatcatc

SEQ ID NO: 15612 - DNA, 201 bp, Bos taurus
aaaataaaaggtacccaatatactcaatcaacagagagtcatgaacacttgagcaagaatacaaattcaaaatgagcactgcacagccttcaagacaataccacggcagttttcagaataatcatcaaagctgatagtcaaagctaacaacacactgaagtacagttgatccttgaacaacttgggtttgaactgtgtggg

SEQ ID NO: 15613 - DNA, 201 bp, Bos taurus
atgaggccctactttgtgaaaaaagggatgcgagggagaccctgggagggcagcttcaaacttttcaccttaggggaaggagctggaggtcagaatgaaccgggcctgagtattacctttaggaaaggggtcaaaggtcaggctcgactgggcaaaaggtacaaaaggggctggaaattgtactggactaaactagcagtc

SEQ ID NO: 15614 - DNA, 201 bp, Bos taurus
atctgtattaatgctggttgattgggacacaattgcaggctgggctggggaggaatgggagtaaaagaaggctgagctctctaatcaacagcacttgcccgtccctagcctttaatttaagtgacagaaattctgcaaactctagatgcaggcccaaactaaggaggaaaaagtcccttaaacatatcaattattttattg

SEQ ID NO: 15615 - DNA, 201 bp, Bos taurus
gattgagagtattacggagtctccatgaggctccagaggggccaccagatggcactctagaacctactgcaagatcaacttccttcctcttcctctaagtcttcccggcagccgggcccgctccgggcgggaccagagggctgaggcatatcagcttccccctggggttccccgacttcagaggtggccgagcattaggcg

SEQ ID NO: 15616 - DNA, 201 bp, Bos taurus
ttgtaccacatggcttgcaggatctccgttctccagtcagggattgaaaccaggccacgacagtgaaagcctggagtcctaacccctaggccaccagagatttctccattgtgcagattactgtatgtcagttatacctcaataagtctgtgggaaaaaacaatatttcccaccaaatacttcttcaggggcttaaaggcc

SEQ ID NO: 15617 - DNA, 201 bp, Bos taurus
gagtcctgaagctcagaaatgaggccaggcctttgttcttggctcggccagttgctcatctgtaagtgagaatgtggattcatagcagtttactcagagagatgtggttcactagactctaggcccttaactagcaggttagtataaattggtggcctctaaagatcctttaccttcctactccctcccccattactcagg

SEQ ID NO: 15618 - DNA, 201 bp, Bos taurus
tttcaacaaacaacagaatgattgttacatcaaattactttcatagcaacatagtactcttctgagtccttgagaatggtccccttccttaggttacttgtcctgaggaggcttgttaatacatgttgaacggcatgcgtttggggttaggaaacgtgcaggctcttatgtggttcttaaacagtttagatttagcccggg

SEQ ID NO: 15619 - DNA, 201 bp, Bos taurus
ggtggagaccataccagtcccttgaaagcacaaaactgatttgatgaacaagaatttcaagaaacaccctctattgtccagtttcctatattttcagccgggggcaaaaatcaaggtttagctcaggagaaggagcaggaagtgggtttggctgactgttgaaacctgctggaaacctggttttcattggaaagggctgtg

SEQ ID NO: 15620 - DNA, 201 bp, Bos taurus
attctcccagtagcttgttattaccaaggcaaatccaggttacttcatgccagtggaggtccaggggaaaggaatgactagatctcaggttactttgatatatgtttgttcattttaaagccaaatacttgagtagctcaaatggtaaagaatctacttgcaatgtgggagacccaggtttgatccctgggttgggaggat

SEQ ID NO: 15621 - DNA, 201 bp, Bos taurus
aggatgtgagtggtctccttggtaacgcctgggaaaactgcctgcagggctggagggaagtggactggccagtggtcaggctgggtggcacaggcagacctgggccaggctgctgagactccaggccggtcgggagagtctggcttatggaatagccggggcagcctgttggccattcctcagcaagccagagtccagggg

SEQ ID NO: 15622 - DNA, 201 bp, Bos taurus
ggcatccgcctctctgacccctcgcttggcacctgcagctctggccctctggggagctctgctggaggtaagtaggctggcctctttggttccatgtgactgtgccagcccttccaccctgagggacctgccctccaccctggctgaggcaggtctgcagacggggctccagaggagctggagatgggcccagtgaaccca

SEQ ID NO: 15623 - DNA, 201 bp, Bos taurus
cctttcgtgtggtctagaaggaaaggccctccatcatgcttctttgtgcatacccaacagagctcagaagccccagatacgatggtctttctgatccatcgctgcccaggcctcatctttcaaaaccattgcctttgtgaagctcctgtgactctctgtgagctggccttctgctctcctgccctcatgctctccctgcac

SEQ ID NO: 15624 - DNA, 201 bp, Bos taurus
ggcccgccctgctaggaagagggctgcaggggactggcccctcctcgcaggccctcctgagtgtttagccagggtggccctcaggcatgaagcagacttacagtcatggtcatctccactctgcttccagaacctcagtgcttagcgacacagggcctagtcccggagcccacagccggggtggggtggtgctcgcccacc

SEQ ID NO: 15625 - DNA, 201 bp, Bos taurus
gagggccataggaagtacacgtgtgcagccagaggggatggcatgtgagataaacgtgcggtgggaggagacccgctctccagacctatgaaatgacaggtggccctgggcagggttctgggccttctacccgagccggttagctgtcaggagctggaggccacccaggctcagtgacaccagcagcccaacggtatccca

SEQ ID NO: 15626 - DNA, 201 bp, Bos taurus
ccagaattgtggtctccgaccagccatgggatcaaagtcaggtcaaagtctggggcaaagacagcacattcctggcagagatgagaccgagacagacccttggtggtcctgggcccaggctgctgttcaggcagtgagatctcagaacaggtgccgtggtgctgccttaaccctgccttctgggaaagaagccacgtggga

SEQ ID NO: 15627 - DNA, 201 bp, Bos taurus
aacgtacgttgaaactttatttaggttaccatccgaggagtagctaagacgtagggtttaaggttgaacaaaatagggcctggatgtagtttaaagaatgattgccaaagagaggcaagggatacagtctactctgttaaaggttaaaggaaatgagggtgttcttacattaaaaggaggggtctgtctggtttggccctc

SEQ ID NO: 15628 - DNA, 201 bp, Bos taurus
tcttctggagaagcatggtgctagttgtgccagcttctagataacagtcttcgctcttttcttccctcttatatactggccacttcagggcatgcttctgcagttctttgtcattcactttgaatcttcatttctggatccttttattccttgctttgagttctctgtggtttactttggaacttctgaaagtatgttact

SEQ ID NO: 15629 - DNA, 201 bp, Bos taurus
ggccaatcacgcgtctcggcccttccgtttcttcccgcccccttgcggagtcttgagaacgcgcgcgcgcgcagtcccgcctctccgggcgctgggcgaagaggagctgcgtgtcaatcaatctggccaatcgcgcgtctcttcctcttcccgcgcggcccggcctctgagacgccgccgcggctggcgcgccctcggtgc

SEQ ID NO: 15630 - DNA, 201 bp, Bos taurus
tgtaggtttttctttctttcttccccctaaagccaaagggcagtgactttgtcttactcactgctgtggctcctatggccagccttgggagctgttgttctgtagtagttgcttaaacaaagtgttttctgcactgaactgctgcaaccttggcaggccatctgcttgtgaaactgtcccataggcagttcccaggcagtg

SEQ ID NO: 15631 - DNA, 201 bp, Bos taurus
aagtaacagatccaggaatggataccttatttaggtttcccgtttgttcctaacttaaacatttttagttgctagtggtggtaccttaaaaggccacctgctactcattttcaagggatagatcaaagagacgatggaagaaggagtgaaatgtcttttcatttcagatctacccacatgcctcttctgcaggcctcctct

SEQ ID NO: 15632 - DNA, 201 bp, Bos taurus
ggtcatcattgttggtgtttttaagagtaggacagagggaaggatgtggccataaggtagttgcccactggtaccctttaagagtccagttctggaggtcactgggcttggaagcctggtggcctttaagagtccagttctggaggtcgctggacttggaagcctggccaccaggggctcagaagggaagagatgtgagaa

SEQ ID NO: 15633 - DNA, 201 bp, Bos taurus
cttttgctgatggactgagattgaaacatgaggctgctggaaagagtttctccttcccacatagtagacagaaagatgtagacgttggaggagagttgactgatgagggctgcggaatcaggggtgaaacttgggtggggtagacttaaggtttgggaaggaaactctagaccagtggcccccaacctttatggcaccagg

SEQ ID NO: 15634 - DNA, 201 bp, Bos taurus
tcaggcctgggctggaatgctggccccagtacctaggagctctgtgaccttaggcaagttacataactctctaaaccttagttttctcatttgataagggggtgtgagagggcctataaccccattctttcataaggattaattgagaaaatgttggtaaagttctgaaaaaggggcctgagtataataaatgccccatga

SEQ ID NO: 15635 - DNA, 201 bp, Bos taurus
ggctacagtccacagggttgcagagagtcagacaagactgaagcaactgagcgcatatgcacgcacatgaggagatggatatgcaagtgaagggtctccactcccttccccacgtgcccagcatgtgcccaggggctgagagtctcattccaggcttgagtcacatattcactttggtcccaggaggggctggcaagactt

SEQ ID NO: 15636 - DNA, 201 bp, Bos taurus
tttgtatctgatttttttctgtctctttttcaatcgttatcttaaaaaaatatttatttattttggttatgctgagtcttcattgctgtcctggctttctctagttcgggcgagcagggactatttttcgtggcagtgcactggtttctcatggcggcggctgctcttgttgtggagcacaggctctggggtgcatgggtt

SEQ ID NO: 15637 - DNA, 201 bp, Bos taurus
cacaaaagatctctcttttcccctcttgtgcgtaagacggtgtcagaaagataatcaaccagctgagctctctgcacagagaggtttttagagtagccaaacctggcagttcaagccagcagaggccagtttacctccctcagcgctcagtggttcccagttccaggaactcctgcagtgtggagagtgccttcctcttgg

SEQ ID NO: 15638 - DNA, 201 bp, Bos taurus
tgggatatgaatgcagtgatcaggacctcagagtaaacgtattcaacttctggagtcacgaacactagccaatggccagtgtgctcctggtgataagaaatagagacacaatgcagccagaccagctctgcaaacgcaggatgataggcttcagtgcttcctcgggcttgggcgtggcattaggccatctctgtcttggca

SEQ ID NO: 15639 - DNA, 201 bp, Bos taurus
taagagcctgtgtccctagatgggggtgctgtgcccagggccactgcatcagggcagaaggcagtggctcccgggagggctggcctcagttgtcccctccgtgtctgggcgcctccccaaccagcagtcactgcagaagtgttgcctagtggctgggggcagagggaggtggccatgctcagagtcaaggacttggcaccc

SEQ ID NO: 15640 - DNA, 201 bp, Bos taurus
ctagtttacctgtatagagtgcatgtcagtgtgtcttttgtagtatgtctccaggtccaatgtgaactgtcatggttctggggtacacttaaggaagggacattcctttctggcttattggctttcatacatggttctgtacatacttagaatcttcttggaaggtaaagttattagaaaatagaagtaaatgtagttgtt

SEQ ID NO: 15641 - DNA, 201 bp, Bos taurus
gtctgggggggatgagggccttgtttctcacccttgaagaaccccatggtgctgccagccctggaccgtgggcagggacggccacttgtgccctggctccgtcctgtactcatgcagaggggaggtccctgctgggggcaaaaatgatggtgaaaagcaggcctttccaggtcaacatgaccaggccatggcagtggtcat

SEQ ID NO: 15642 - DNA, 201 bp, Bos taurus
gaaccatgtcatgtgactgagtcctcatcatggacacagacattttatctgtcacttctaagtcacagttagtcacatgatatgtgtcgcactggtccagcgtactctttttatctcagtaatgattgtaaggtatagtctctggattatgccgccctgaagacttcactcttcttcaaggaactggttatgaatcagtgg

SEQ ID NO: 15643 - DNA, 201 bp, Bos taurus
gttaggagtgttagtatagagacactaaatgttttaagaaataatatgaataagaaaaatttcagcttatacctaaaggaatattaaataacagaataaggtaacaccaggcctgatgagaatatataacaaggaagtatatactagtgattaaattgataggggtcctttaagattctgggttacaaataagggaagtca

SEQ ID NO: 15644 - DNA, 201 bp, Bos taurus
atttcgatatatggcaaaaccaatacaatattgtaaagttaaaaaataaaataaagaaaaaaaaaaagatgattatcctagcttatccaggtaggccctaaattaagtgacaaatatccttataagagacacagaaaggaaagatgctgggagaaaaggaggacatgtgaaaatggaagcagacactggcatgtagtcaca

SEQ ID NO: 15645 - DNA, 201 bp, Bos taurus
agaaggatgttttgcttccttattaacatatctgcctccttttgaagctcttctagaattatctggcaggcaggagtgctctcagctctggtctttcctgacgcaactaaactcctatatgtttccccaaatcaattattttatattaaatgtgtctgccctctctgggatgatcatatcactaataaagtatgtatactt

SEQ ID NO: 15646 - DNA, 201 bp, Bos taurus
atatttatattcttaaaaggttcatatatagctccaggtaaccatacagatttatatacattctttccctaaaattttaaattataccatctgttaaccatattatgactaattagcaagatcactgcatactatatctccaacaacaacaggagatatctagagctattatataggactggctctttaataaatgtactc

SEQ ID NO: 15647 - DNA, 201 bp, Bos taurus
gaatcttgccttcccatggaaggtgtggccgtggaagatccccatggtaccaagacctgtgtgccgatgcagtagcctgacatctgtgtgtgactatgcttctgcatctttggcccagtgaattccttgcagttagacgattcctctgtgtctgattagaggtgttggcagtgatgatgcaagagcagggagaatcatggg

SEQ ID NO: 15648 - DNA, 201 bp, Bos taurus
agtgtgtcaggcacagtcaggcttgtataacataactctgcctcttgatcatagttgtaggattcacatttgagcatttcttcaaaatctttttttctccattttactacatgcattttaatagaaaaaaaatagtctattgttagaattcggcagaatctcagaatgcaatgaaaacaaaagatggaaagagaaagaaat

SEQ ID NO: 15649 - DNA, 201 bp, Bos taurus
aatattgggtagattccttgtattgtacaatacgtcctttagcctatcttatacccaaaatttgtgtctcccactcctaactttattgttcccctgcaactagtaaccactaattcgttctctgtatatgagtcttcttctttttctttttattcactagtttgttgcattttttagatttcacatataagtgatatcata

SEQ ID NO: 15650 - DNA, 201 bp, Bos taurus
atatctacactgtcaaataaatttctttagacataatgcatttggtcctgtgccctaatatagacatataactgagaatactaggccaaaagaagttcccaagaaaggaccaaaagccacatgaaatccatatggggattctccaagggcagcgctgacttctgtaatagaaaagcaaatagatcaaatggccgcaatgag

SEQ ID NO: 15651 - DNA, 201 bp, Bos taurus
ttcatcacttccttaaatctcagagatgccccaaatacatctgtgtgttcaggacgtttattccatacagtggccgagtgcctaccacagctgtctttctgctaggggcataaggagcccagtcttaatgtcaaagggacacatggagagaaacaatctaatttcatatcaaattttccactgtccagtagagggcagctg

SEQ ID NO: 15652 - DNA, 201 bp, Bos taurus
tatggaacaaacctgtgtagcctacaaaggaagaagagactgagggagctgtcgattggacattttccaccaagaaaagcagttgctcttcagtttcaaagatagttacacctagttttgatatttataataccagcaagacaaagcgttctaaacagataagatgagcagtgacttgttattctctcatgttatgaagaa

SEQ ID NO: 15653 - DNA, 201 bp, Bos taurus
ctgccgtctatggggtcgcagagagttggacatgactgaagcgacttagcagcagcagcagcagctgtaccaagcataatataaagttattaataactgctgacgtttactattataaaacaagcctcgtactaagcatttgatacatcatatctcatttaatccccacagcaatgtattatgcaggcaccagtactgtat

SEQ ID NO: 15654 - DNA, 201 bp, Bos taurus
gtccaggtatcctgacagtatgtgagtctctggtagcagtgcagaagtacactgataaggcaggcaagagaagtggccaaagctgggagttattgtgtctctctgtctctggtgcttggagacagtgcagtgtgtggattacaatcctatactttgaagtcaagtttccagttttaaatcccatggaggccactctgtagc

SEQ ID NO: 15655 - DNA, 201 bp, Bos taurus
aaatgaagcaatcatgcaattttgaggatagaacaatagtaagcagtgcccatgaaacccacagtcctatcatatactattggcttaacacaagtttggggtggactttccagtagcagctaaattaacaatttgtagatgatatcttataaggcagagttgtgtctttcaggaagaagtatgtactttaaacagtgtctc

SEQ ID NO: 15656 - DNA, 201 bp, Bos taurus
gaatgtatagaagaaagaaaaccataattggaatgctccttcattcttaatctcccccacttggcatacactaccagttctgggagtctgacaaaatgggggatgtgatggtgctctcacatgaagtggttagctactggacaactggtagctcaaaaccttgtttggcaattgaataaagtcacactagctgggctaatc

SEQ ID NO: 15657 - DNA, 201 bp, Bos taurus
actggtagagttttagtgaccttattcttacagttctcttataattatgcctgagaaggtttaatttttttctaatattttatttccaattgcttctagctggtaggagtatgttctttctatgagcttttgcaaaagaaatttcagatcaattttatcaattttatttatgtgatttccatatcttcaatcatatcaata

SEQ ID NO: 15658 - DNA, 201 bp, Bos taurus
ccccaaatattccctcaaagaagcccatgattatttggtattattcatctatttagtgagcagatgatatgcaacaaaacagacacataaaaattcagattagcaactgctactgctgctgctaagttgcttcaggcatgtccgactctgtgcgaccccatagatggcagcccaccaggctcccccatccctggcattcta

SEQ ID NO: 15659 - DNA, 201 bp, Bos taurus
gccacatactcagggccacagacagaatcaacagggtcagtcaaggggcaaaggagtcgatcttagggataaacacagtctctctcaatctctttctctcgcttatgcacatacaggcccaatttctttctgaaatacttcaaaggaatttggagatatattcatttacctttaaatgcatcagaatatatttcttaaaag

SEQ ID NO: 15660 - DNA, 201 bp, Bos taurus
tgttcatttcattaagtgatttaaaaagctattttccgaccttgatgcattatggaaatgacagagactaatttgccttgaagagtaatcttctggaaattagaactttgatctcaatgatgttgccaaacacacactggagaaagaactccatatacccctttaactaagacttttgcgcttcttttgtgcttgagttta

SEQ ID NO: 15661 - DNA, 201 bp, Bos taurus
tcaggttcccaacctggctctgtgatcttagctggcttctgtgagtttatgagtaaaattaattcaagaatcagggacaaagaggcaagggtgagaaggcggaagaaagtctgagaaaaaatatatttttaaaatgtaatgatatttacccaatatccaattaccccaggctgcctgcccatgtataatgcaactctatct

SEQ ID NO: 15662 - DNA, 201 bp, Bos taurus
ggcttatggggcagaaatcctgccaagcccttgccatctttgcagatgctgccctctgcagccagagggagactaaataggaagagaacaaggagtgggttgaggtgggagcaccagccccttgggatgctcttggagggagagcaccaggactgtggctccagaacatgacttgggcaaaaccaccagtttccagatgta

SEQ ID NO: 15663 - DNA, 201 bp, Bos taurus
tgcttttgtgtctgatgagaggttaagaataaaccaagatattgtcctgggccatggtctagattattcagaagatcatatattcctccgtctctctcatccttgactgatatggcttaaagttggtccaattgtaggttcatgaatgaaggttccttttttcctttaggctatttctatttaaaaaaatgaaagcatctg

SEQ ID NO: 15664 - DNA, 201 bp, Bos taurus
tcattccctattccaaggccaaatttgcctgtgactccaggtgtttcttgacttactacttttgcattccagtcccctataatgaaaaggacatcttttcctacacaaaaatggccctctgattcccagctagagatgagcagaggtagatgaatctctgctttcatctctgttctgttttatatctttgtcctgtgctta

SEQ ID NO: 15665 - DNA, 201 bp, Bos taurus
tttgctgtttcaacacagaacacctgattatgtgccatgcactgttctagttgagaatatactctggaatgattaagagggccaaagtcaccactcttgcaagtttagatcagatcagatcagatcagtcactcagtcatgtccgactctttgcgaccccatgaatcggagcacgccaggcctccctgtccatcaccaact

SEQ ID NO: 15666 - DNA, 201 bp, Bos taurus
aatttaatttgatgggcacttatcatatagatgagaattcttttaaataaactaagaattctggggaccattttggtttatgtaagaaaaactcttctcattctttcaaaaaatgtattgatcaaaatagatctattggaatcataattatcttcctcattatcagtatcttcatattcctcttggatttctttcttgggg

SEQ ID NO: 15667 - DNA, 201 bp, Bos taurus
attcttgactagccccatttgcatagggcaggttcaaggtgggggaggagacaaacatataaaaggaagaagccaagactgattgaggcttctcctctggggtcaacctgccgtcatgcctccagggtgtactatcctctgcttgccaaataaaactgagctttaacggatctgtaacactagtctgctgtttcaactctt

SEQ ID NO: 15668 - DNA, 201 bp, Bos taurus
gtggcccagatgagagtgtatagtaaaaaaggaatgtgaatttgatgaggctttccctccttcctatcttgtatatctctagacagcactgctcgaaagagtactttgtcacagatgaggcaataatcctcctggcctttccaaaacaatgtcggctttggaatttcctgaacagatcaccttaaggaaatggcagcatct

SEQ ID NO: 15669 - DNA, 201 bp, Bos taurus
gaatcttatggatagaagagcctgacaggctacggtccatagggttgcaaagagctggacacaactgaagcaatttagcatgcatacacactctgttccattagtgattgctctgggcttaaaacatacacctttaacatcactgtctatcttcaaataatgtataatgtaagaactttggaacagtatgcttccatttct

SEQ ID NO: 15670 - DNA, 201 bp, Bos taurus
gagaactttaattagacaggaggtcctcactctctcgccttcctgaccacctgctcctgggcctgtggaacttcaccttgatagttcatttagggccactgtagtatcatccattactgccctccttgttcctactcaggactgatagaaaagttgggaacataagctccagctctcctgccacttcctcgtgttcccagc

SEQ ID NO: 15671 - DNA, 201 bp, Bos taurus
ggaagattcaattataaaaaagcttattttttacatttctttcactgatattaagaaattgctttctagtaatcagatcagaatttcattaaagccatataatgtaaagtgttttaaccatatttcatgaatttgaagggttgaatactaaaacaattcaggtagcttgtagaatgttgtacatgggattgatgttttcaa

SEQ ID NO: 15672 - DNA, 201 bp, Bos taurus
aatagctgcataatttagtgttcttcatggtaccgacgtttgtttttaagtgaatgctaattctaactagtatgggagataaactaatttaccactaaaaactgcttagtgaaattctttaacatattagcagtgtatgcccccacccccttgaatcaataaacagttgtcaagaacctaccatatttccttaatacaaag

SEQ ID NO: 15673 - DNA, 201 bp, Bos taurus
tcagagcagagacctgcgaggaggcctggtgagcccagcaactggaagcagttgcggagggaggaccagggagtgactgatgtcaggagaggagtcagggtggcagcaccaggaagaagacccaggactgccccttccttccttcgctgctcagtgttcaaacccaggagctcctagcctgctccgagcgtgagtagagtt

SEQ ID NO: 15674 - DNA, 201 bp, Bos taurus
gaaagccagatggagaaggaacaggacttgccgtctggaccagccattgccaaacagatggagcgcttgtccatctgtgttacccttctcctggaggacatgaggaggaggtggcttggtgggaggaagacaggagactcagctggtgggaagaaagagctccaggctgcttccggctgtgcagaagcctccattcctgat

SEQ ID NO: 15675 - DNA, 201 bp, Bos taurus
tgtaccattaagagggccaaggaagcaacacctgccaagaattcaacactgcggcagaagcttcttatgacacaccaaatggccttcgtccacccactgccgtcatctgccaccatctcccaccttgctgggctggaatcttgcccttccttctgacttcctgggcaggatgcagctttgctgacagtggccaagtcgcct

SEQ ID NO: 15676 - DNA, 201 bp, Bos taurus
ctttccacgtttcacttccctccttttccctccgcagcgccagctccatcgctacgattggccagaagacctcctcggattggccaataaacggcgccctgtcgcccccgtgttactgggtagaacaaaacaaaaacaaacagagcgagaggggccagagacgctcggaggcagcggcagacgctgaggtgcggggtcggg

SEQ ID NO: 15677 - DNA, 201 bp, Bos taurus
aataattatcaatatgtatgttcttattaccattttctcacttgttttgggtttgtttttaataggcctttttccttcccttcctcttctgttctctttccgtttgatgaccatttttgtgtgtttggactgctttttcttttttgtctgtttatcgtagttttgggatttgttgttcccatgaggttttgatatagcagt

SEQ ID NO: 15678 - DNA, 201 bp, Bos taurus
tgtaatttgattcaagatctctccactgggaggtccagaactggaatttgaacctaactccagtttctttccattatttggcctatttcgggcctgaccaggtatatctctgtccctgactcaggagcatctcttgtgtcttttcattggcttggcttcctataggttactggtgagcaactagagtgagttgtcaaacag

SEQ ID NO: 15679 - DNA, 201 bp, Bos taurus
aacatattattttttatcgttctatatattttacagtaaaaggtattatcaaatgtttcaagtcaaagcagattcaatggggcagtggcctttcagggaagtcaaactgcctcttgcaaacaaaccttctgaagtgaatcttcctgaatcctcagtgagcagaattgcttgcagttggccatgagcaaaactttggtacca

SEQ ID NO: 15680 - DNA, 201 bp, Bos taurus
tacatgtgtgtctccggccatatcagcctgaaggcgcccgatctcatctgatctcagaagatactgtttttaaaatgaaggcataatctgtaggggtgatgatgctctgtggtcaagtcaagaacgactgtaccaacaggtatatataatacaccctctcaaagaagagaaagattttatattgtgaagggctgaattaca

SEQ ID NO: 15681 - DNA, 201 bp, Bos taurus
gagggtgtttctggatgagattagcatgtgactcagtagactgaataaagctgatggccctctccagggagggtgggcgtcatttaatccactgagggcctgaatcaagctaggaagaagggagaatttgctgttgagttggatcttctcttcgaggactaggacttacaccatcaactcccctgactctcagactgaaag

SEQ ID NO: 15682 - DNA, 201 bp, Bos taurus
cccttggcccttatgttctggctgggctgacatgacacatgggcaaaacaccactcacaggcaagatatccttagacacaacagcatcagatcacacagccgggccaaactctatggttcatgctatttgcaaagagactggaaagcaatctataacactggccccaaacttggcagcccttggtatattttaaaaatact

SEQ ID NO: 15683 - DNA, 201 bp, Bos taurus
gtcaatgatgagctaacattgctctccttaatcttgcttttactaaggactccaggtaatcaagcgaattattggatttgctcgattgctttcacatggcacacagaatataggtgaagagctctgtgtgcctctggcagggccaaaccccagcacttgtgggcactctagcttttaattgactgtctacgaggctcacag

SEQ ID NO: 15684 - DNA, 201 bp, Bos taurus
tcctctacaccttcgttcaggagccaattccattgtcaagagcatcagtcctgcggcttgtcctgttttatttccttcccttttgcctgtcccacctgccgagtaagacaataaaatccccaagctcaggattcacaaccactgtctcttttcatctcatcctaggacatggaacaatcactcagaatttacttttaaaac

SEQ ID NO: 15685 - DNA, 201 bp, Bos taurus
tccagcctatctttgtacaggctcttatcaactccggtggatggtactggctctgctgacctccatgctctcataattcacttgatcagcaataagcttgcgaggcctttggaaatgtttactgaagcaaggctttccttggggttgggctgctggactgtgacttgtttggaagcgcagtagtagatcaaagctgactga

SEQ ID NO: 15686 - DNA, 201 bp, Bos taurus
taaaggagctgaaacccacgtcaagtgcagctttccagtaaatgaaggaagcactgagtagcaacctcccgaactgggaatgaaggcatgaagcctgcacggcagccgtatctcctgggaaggaatcgactgatctttcatcccgactccacttcctgctgtaccttacccgccttcaacacgtattgatatcgtctgaaa

SEQ ID NO: 15687 - DNA, 201 bp, Bos taurus
atggtcctggaaacccaactacctgcagactatcggagttggtcccttaggtcagggttcaaaggatgttgtggaacagcttgaagcttttactgctactacctatactcactcttttaacaggtgactggacaacttgagtatctgagtttatgagtgaagccagtagccgtattcttttttttttttttaagtctaaga

SEQ ID NO: 15688 - DNA, 201 bp, Bos taurus
caaaagtactgtagtggggtgccattgccttctccgaattacctctatacctttacttaaatttaggaataactgttaatactttccttcatttgcttctctgtctctttcgaacatacttgtgtgtatttctgaaggaatcaagcatgaactcccaagtttgtagcttgaataactaagttttccagtggaaaaactgag

SEQ ID NO: 15689 - DNA, 201 bp, Bos taurus
acacgactgagcgacttcactttcactttcctacagctttacagggaacacactatttctccgtccctaaacattgggctgagtcattgatttggccaattcggacacaacacgaataagatataaatgtgcttgcacatttggcttgccacatgccatgaaaagaacctgccctatcaagtcactggtccaaggaggata

SEQ ID NO: 15690 - DNA, 201 bp, Bos taurus
tcgtgcttcatccaatagggccttaggaagcctgtggtcctccccactttgctttgcagttgagaaaaagggactagagaggataaagcccagtatactttctattacatctcagggcctcccttgaccgtgagattaactgtaaacttgcccagcttgggactgtcttatgggaattggaaattccatagcagcccatgt

SEQ ID NO: 15691 - DNA, 201 bp, Bos taurus
ggtggtgtaggtggccctgggtcgggcacaggtgactgcctcagagtgaagggatccagccttgacttcctccccagcccaatcccctcatgtccttacaggagtgcgtcatcccactgggcctgagcttcctcctttgcatgtaaagggtctgggccagctccccttcacctcctggctcatcactgtggtcctataaac

SEQ ID NO: 15692 - DNA, 201 bp, Bos taurus
ggaaaaaaaacaaacaagaaggtaaatgctgtgcatttctgcaggactggaggtccctcctttgcaactgggaaataaatacatttgtaaaaggccattcactatgtcatggacacaccctcagcttggggaagatatttctttcaataaaggtaatctttcatgggatttccctggagggccagtgtttaagactttgcc

SEQ ID NO: 15693 - DNA, 201 bp, Bos taurus
aagtgcacttttctagggaaatgggtgataactgagtaggaacaaagtaaaggagaagggcaaagggggtatgagatgaatgctgggcctctgatgattgatcaagttcaagttggtgaaagatctgcagtgtgcctgttgctttaccaagtgtaatgactttaccaagggtaacaatagcttatctttcaaggatggcca

SEQ ID NO: 15694 - DNA, 201 bp, Bos taurus
aaattttaatacttaataatgttcaacttttaatttttggcatttagatggtcttctgattgttggtgttcactcggccaagtttccaaatgaaaaagtcctggataacattaggagtgctgttcttcgatacaacatcacccaccctgtggttaatgatgcagatgccagcctttggcaagaactagaagtttcctgctg

SEQ ID NO: 15695 - DNA, 201 bp, Bos taurus
aacaaaatggccttcgtttctatttacattttgttcatcaaaaatctgggttaaccatttgcccccctgacagtttccttcctgatacagctctcaaaagggaatctagtctgggcccttgtcctaggctcaggactttgcctttcttctggagtcctgagaaaggtcacacagggagtggagtgggaacatgctgatgat

SEQ ID NO: 15696 - DNA, 201 bp, Bos taurus
tagatgagaataaataattggatccagtgtcctgtggaacaaatgaaatgggaaaatgctcacggtcaagttctggttcaaagtgactggctcttagatacgcaagaaatttggcctcccttaaaatacgcaatgaggatggagcctccaggattgagtcttaaaagtgagtctttcacaggtttcaggaagcattcagtg

SEQ ID NO: 15697 - DNA, 201 bp, Bos taurus
aggtgttggctggtttggccagcagggagatggtctggattgttcggcaaacaatatgtaggagtgccagcagaggggcaagtggtcagcaatcagcagcgtggccctgcagtggctactttgtacgactctctggaccacatgtaactgtgtgtattcctgcaggggttttgccttccatgctgagaaggctatagaaag

SEQ ID NO: 15698 - DNA, 201 bp, Bos taurus
ctgagctttgggcactagtcctctgaccatcctgggctttctcaaaagctgttagcacaagtttccacccttcccagggctttccggccaacaatgggccgtgtccagcagggcagggctcgtgacacacccaggcaagcctgtttgatcctgaagggaggtggagcgaggcccccttccagcaacggggttgagggtgag

SEQ ID NO: 15699 - DNA, 201 bp, Bos taurus
gctacttgcctgggttccctgccttttataaggcaggacagccccaagagggggtgggacatgattcaacatggaaactttgactttttgaagagttagctaataaagtagttccttcctgttcgtgggcctccaaatttgacttctgttagctgaaccagagatactctggcagtttatcagaatgcagacacctattgc

SEQ ID NO: 15700 - DNA, 201 bp, Bos taurus
cctggaactcatgaatgataccttatttgggaaaggggcctttcacatgattaggttaaggatctaggttattctggattacccaggtccagagattattttgggttatccaagtcggccctaattatagtcaccagttttcttataaaacagaggaagaagattagacaacagaaaaggtaatatgaccacagaagcaga

SEQ ID NO: 15701 - DNA, 201 bp, Bos taurus
gctgaagtccaggatctatctgatgtaattttttgacaatcagccagtcctttgctcagtaatttcagtttctgtcaataagaaccagaacatggaattgctgaagctttaaggagttggagtctatgcagtctatgaaggcacatcataagctggtcaaactcttcctaaactgtttctggttaggcagcattgcttttt

SEQ ID NO: 15702 - DNA, 201 bp, Bos taurus
gccccatcctgtgtttctcccccttactgcttatttgagccacctatcatttgagtaacttgttccatgcccagttggaaagtttgaaatctggaaggtcataatttgtgattcacttcctatgtctgcataccttaaaagagccccatatgatgtgtctcctttatgcagtttttcttgccaccacaccatgtgctaaca

SEQ ID NO: 15703 - DNA, 201 bp, Bos taurus
aacagtccacacttcagccacagtgtgctggcctcttctagggcccctcctaagtctcagtgccccacagggcccatgtggctgcccactccttctcgtcctcagctagcagaccccgaaagcagggtgaggcccattagccttggctatcacccggtcaaccttccttatttttgttcagttgttgagtcgcgtctgact

SEQ ID NO: 15704 - DNA, 201 bp, Bos taurus
gggctgggtctcattccctgacctttactcactttgtacccattcctgcactggtgcttctctccactaagaagttctgcctgcaaattcaaaacacaggatgaactccagggcctttgtcagattcacccagtgccccatgtgggcattaagattctccttgacttgagtattatagttcattctttgcctttcaaaggc

SEQ ID NO: 15705 - DNA, 201 bp, Bos taurus
aggcccctgcagaaagctgccgtggccaggaggacattttttttttttcctatgctccaccaaggggtaattcttttaaagttctcacatttgttttgtattgatcagcacttgaggccagagcactcttctggatctcttactctgtactgtgtactatgttccccacccaacacatactcccaactctttcctctctca

SEQ ID NO: 15706 - DNA, 201 bp, Bos taurus
cttgagggctgtgctctcctcaacccactgcagtctggtttcttccccagtcctgctagcaaaaccactaagaccaccaacggcttcttagtgggactcttccaggcctttcccatctttgctttccttggcccctctgcagaatttgactcgctagcctcctcactggtgggacaccctcccttggttcctgtggtttcc

SEQ ID NO: 15707 - DNA, 201 bp, Bos taurus
agaaattggaggacttctctggccatcctgtgttaagactgcttttccaatgcaggggtgagaattaatcccctggttggggaactaagatcccagatgctatggggcagggccagaagaaaaaagaaaattggattgtgctattgcaggaagatacttcacccaatttatccctctccctgagagaaaaccagaaagtca

SEQ ID NO: 15708 - DNA, 201 bp, Bos taurus
cacagaaatacaaacaacctttattattatttttttttacaaacaacctttattgagtcttgctaaaggccaagatatttcaaatgtatgtcagctcctttagtgaaattgagaatgtgaaagattgtttcacataatattttggccacttgatgcaaagatctaactcatttgaaaagaccctgatgctgggaaagattg

SEQ ID NO: 15709 - DNA, 201 bp, Bos taurus
gactgtctggccctgacttcccgctcaggccatctgctcatctcaggggcattttcagaataaccaaggagaacttggggagccacgtggtccttttcattgggcaattaaactcaggccttcttggcctctgttgggttggccaaaaacttcattcggactttttgtgacatctcacggagaaacccaaacaaacttttt

SEQ ID NO: 15710 - DNA, 201 bp, Bos taurus
tgagcaggacttgctcttccaggtcatctcgttggcccaccctgctctcctggcgaggcccagacccgggtgggaggcgagtgctcccggccacatgctgctcattcattaaagctctggttcctccctgccattctaattatgcgccgcgataagaaagacgctttctccctcaccaaagaggcctatttgtgtgagaag

SEQ ID NO: 15711 - DNA, 201 bp, Bos taurus
taggtttcctcggtaaaagattcaaaaggacatcaagcaaaacgtgaaagtccccttgaccatacacctccaccctctccctggtgactcacacacttgcacaacctcttgtgccttcactcccgaaaagagagacatgagccttcatccatgcttggttttcttccctcccgcttccctcttttccttcctcttccccgc

SEQ ID NO: 15712 - DNA, 201 bp, Bos taurus
gtgacggtggcggccgcgacccctcccgcccagcttccacccgctccgcacccggtgccccagccgtccccgcccacgggccgcggccgcccgcacctggaggctacgcgcccgcctaccttgttccttcaggctggagatgagctgcagctgcttctcctcttccgagctgttcattttggcaggtggggccgggaataa

SEQ ID NO: 15713 - DNA, 201 bp, Bos taurus
aaaaaccagtgaactgtgtactttaaaagggtatgcagaattgtctggtctgtggatcatgccacaaaacaaaaacaaaaccaaaccctcaacaacaagagtcattcaatgaaggaagaaagattctgggagctcagctaaggccagttctcagcagaaatctcactctgaacttcctggctatggagatggcagaggaac

SEQ ID NO: 15714 - DNA, 201 bp, Bos taurus
ttttatattgaatataagtttctgagctgtttgcaagggaaacttcgaagtacaacatacttggcacagagtgtctgagaggtgtaactttctggtcattcgcttgaataccagatatcagatcaatctgtttatggctacagggcacagaatacagccaggcttgggaccaacagtttactgtccatctcaactagaagc

SEQ ID NO: 15715 - DNA, 201 bp, Bos taurus
acgtgaggaactgaccttatttagaacttttatctataataaggacagactatcctaaatatactgctttagagtacagaactctcacacgacaaaagttgacaggctttgttttcactgactattatcttagctcgtttctcaaaaatatcactggttgctaaaaccagaaaaacaaaagagagaagagatgagatgaga

SEQ ID NO: 15716 - DNA, 201 bp, Bos taurus
ttttagtcattgaagatattggctgagttcaaccatttgccgtaaaggccattccaaactttaaatctatatattgcaaaaactgaaggactgtagttagcggggatgatgttaagtgtggccaaggacactgcggcaagttttcaagcactgagtttctatttcaagatcatagacttactaaagagagtgacaaatgct

SEQ ID NO: 15717 - DNA, 201 bp, Bos taurus
ggaatcttcttaccagcttcattttcacggcccaccctggtgggatgttggcttcactcgttttcatgtaaggacatccttcatctttctttttgggggcattgcccccttgggccctccctcacacccaaagcgctctccttttggtgtgaaattaagcagatggagtcagagcagagccttgcagggtacggcataatt

SEQ ID NO: 15718 - DNA, 201 bp, Bos taurus
cggtaagtccatctgtccttcctctatcttgcctccaaatgggtccaacaaactgctgggcagaaacaagcaaaatttagttaaggctcacagagaactttaatttcaggaaggccatgctcactaattcccaggaagatgccttgtttaggggaggagttgggggtgggtggatggctggagcgggtcaccctgtggacc

SEQ ID NO: 15719 - DNA, 201 bp, Bos taurus
ataaagatttttcaatttgtctccttgatggtatttgattatagctttgaaattatcttttaaaagccctctaaggtaacccagcagaaagagtaagtctattcactcaagaaaactgaatgccttcagttccttcaaagaaatttgagacagatgtgcttttttcttcttcttcaacaaatccagaggacggaaaatgta

SEQ ID NO: 15720 - DNA, 201 bp, Bos taurus
tgagccacctggggaagcccaaatgtaagactgtgactggggaaatgcctccaggaagaggcaggttcacagtgctatgtgaaggggcccttatcgagtccggagcaatgagagagggaatcagagaaggcttccttcagaaatgatcactgcattgagctaagaagaatgaatagacatttcagataatgagaccagcat

SEQ ID NO: 15721 - DNA, 201 bp, Bos taurus
ggctgttcactacaagggacacggtttggagcctgacgttagttaactgcccactttttttaaaaaaaaatcagtttcttcagaggaacacaacaaaatccgggggctctacaatatatatcattcatgaatggatactacgcaaaatactaagtacatgaagaaaaaaaatgtgagccaaaaagcagtcaatggagactt

SEQ ID NO: 15722 - DNA, 201 bp, Bos taurus
aaactacacatgaacatgactttggaagaaaaatgccaaggtcaacttgactgcctcttggcaaacaagtacaatcagtggccatcacatactatgggtcgttccatcctagagtgcccagtgctttctcagatccactcggaagggtcctgactcagaacccacagcagagaagtaggaaggagagggccactcagaggt

SEQ ID NO: 15723 - DNA, 201 bp, Bos taurus
tggccccatttgactttctgtacaagggactcagtcattgcctgacccagtcatgcccaccatgtgtaacctcacccctggtcagggcagatcgacccaaagaggtggcccacccaacctgaggctagaatgtgtaagatagccagatgcaaaggaataatccaggtcaattatttctttctttccggaacctgaacacag

SEQ ID NO: 15724 - DNA, 201 bp, Bos taurus
agagtctgaggccttatctactgaaacaataaaactcaaatccaactcaactactaacatgactgactcaactcctcacactaagagcccaacagaagagcggcaggcccactagtaataagcataaaatcatttatgccagtctctactattgtttccatacacactgtccagcattcaattagaaacaccccaaaaaag

SEQ ID NO: 15725 - DNA, 201 bp, Bos taurus
atatgttttacacacacacacacacacacacacacacacacacacaggaatataccggtaaaaagggagacatgaagtggggtggccaagacagcagagtagaaaaatcctgaattcatcccttctgccatggaaacaccaaaattacagctccttacagagaagctatctaggagaacggcccaaaaactagcagaaaag

SEQ ID NO: 15726 - DNA, 201 bp, Bos taurus
gtccaggcctcggataagactctggcacaggcaaggcaagcactaccaatgagactaactagttagcagggaaaatccttcagactagaatgaggtggaatatttactgtcacttaaagggccataaaccatgatgcgacaacagtctaggtcctcccatgctgatgtgccagaagtggaggggggcctactctgggtagg

SEQ ID NO: 15727 - DNA, 201 bp, Bos taurus
cacatggagtgggagaagccctctatcaaattgaggccctctaacaatctagaaagcctaatacacacagaccaaaaatataaataaataaacacaaaaagctccaacaaaagcctggccaaagggccaggaaagaacactgttagcccatgacctctctactccagtcaaacaccacttaaaactgtggttccatctcta

SEQ ID NO: 15728 - DNA, 201 bp, Bos taurus
ggtctagggcatggcactggacactaaataaatctgaacttttccctgggagtcgaagctgtgcacggtcaatatccttggcagggaatcagcttccacccatttcaaatggacccctgtctggaccgtgacccactccctgcctgtgacttcccagccagctcctggccaccttccgaggggccaaggtgcattggtgcc

SEQ ID NO: 15729 - DNA, 201 bp, Bos taurus
actgtacatcagaaaaacggacacaatgtaaagcaattacattccaataaaaaagaaaatacaacgtaaaaccgtaacagggatggctacatgataacatcaccaaagcttacctttgtgactctctcacagagttttagtgggttaaattcgacttccagccaattgtaaaggtcttttacttctgggacaacatattgt

SEQ ID NO: 15730 - DNA, 201 bp, Bos taurus
cctgttaaaactcctaagtagcttcatgcttgggaaagcgatactttgtctctgtttgtcgccccagcctaaaaagatccaatccagggtggcaagatatttccatatttgctactgacttaagaactgactcatttgaaaagaccccgatgctgggaaagattgaaggcaggaggagaaggggacgacggaggatgagat

SEQ ID NO: 15731 - DNA, 201 bp, Bos taurus
tcacacgagctgatgagatgccagagccgtgaggatggggtgttggacgttaggagactcttctcatcggcagaaacatatttgagaccctggccatcgtgaagcacagggtggtccccagggggattgtcctgcctgcccttgggtctggattcagctggcagagttgggcctcgtttgttccctccgcactgccttagg

SEQ ID NO: 15732 - DNA, 201 bp, Bos taurus
tattttgtcttctaagaacaggaactgtaggaattaacacattaaaaatgcaaaatggtgtctttatccctaacatcagggttaaaatcaaatttgagactagaatttggcagtttcacagtaggcaaaagtccacattgccaaactacttcctatgtcaaactgcgcagaattttaagaacaccatgcctttcagaagac

SEQ ID NO: 15733 - DNA, 201 bp, Bos taurus
aagcctcttctgcccatgccgttctcagagccttgattcactttggcctctcttgctctgtgtgggtagcggtgaggaagaggagacacactgtctagaaaccagcaggctgaggacaggccgccccatcgcaaaatcagagcaggcaagtcatttaggggctgttcgttcagtcctctttcctgtccacatacaatacaa

SEQ ID NO: 15734 - DNA, 201 bp, Bos taurus
cacgtctttgtgccacttgcagtcctccctgggctgtacccggccaggtttcttgtctctgagggatgcgggaggtctgaacgtcctccagatgccaggtgtctgcaggtgtgcaggcctagaggtggaggtgacgggaggacgcaggagatgtggagccagttggggtggggctagcggcgggggtggtagtgctcatga

SEQ ID NO: 15735 - DNA, 201 bp, Bos taurus
agatcactgctcacagcaggctgtttgtattcagcgttacctccagcatcatgtattacagtgatggagctttagaaatgatgttcctgatcaggatgggtggaggctgggaagttgtcactgtttctgccagttgcctgaaacaatgaattgtcaggactcttgctcaaagtctgatgtacttgcttctcatatattttt

SEQ ID NO: 15736 - DNA, 201 bp, Bos taurus
ctgttggccttggacaggttggtttccctctcggaacctcagtatttagcaatcaggtacttggtgtgcagtcctggtcaggtaatgagggggcagaagatggatatagattggtcagcaagtggccttgggctgcattgtccttccaactttctgtgcttagagttgctgagggcccaatgaaatgctgattcccaggtc

SEQ ID NO: 15737 - DNA, 201 bp, Bos taurus
ggattcaagtagcattatgcagtggatccaagatggctacccagtacaagcctcagtcttcttctctgtaatgtggcaatacctgccctaggaaattcaacgagatgattactaggaataaggcagaggggaaaatctttcccttttacctttctgtgttctcagctggagccttgaaacaaagcacaggttaatagaaga

SEQ ID NO: 15738 - DNA, 201 bp, Bos taurus
ccttcaagttggtccttaacctctctaacttttagttcctcatctttgaggcagagacaagaacagaatttctgctatgcacagtgtggcttcagggccgtgtgatcattcatactaagcgcttggcagacagcccagcactggcagtgcacactcagggttctaggctgatagtagctatttggggggaatgagcatcct

SEQ ID NO: 15739 - DNA, 201 bp, Bos taurus
tgagttgtctgaaccctgagacttggtagcagagagaagtgccaactgctgttcacagaggtcttcctgggatggtgggggccactgtggggagcgagccgcgcagcggggagaaggaggtctgcagtctttgctttgataaatgatgccctgtggggccccgctgtaacactgcacaggctccacgcaggacccagcaaa

SEQ ID NO: 15740 - DNA, 201 bp, Bos taurus
aattttttcttttcatctttcacacataaataaatccctatgaagaagttcagacacataattgttttgcaaaatttattttatcagtaacataattttctgagttaattgaccctgtctgcacttaataaaactattaaagtgaaaagaattatgaacacacatgtacagaactaatcagtaatatgaagcccataggag

SEQ ID NO: 15741 - DNA, 201 bp, Bos taurus
cctcccatgcaataccttttatatcattgcttctgccacatcttagatgcctacaggcagctgttgttgttatggcacctggggactctgaggagggagcatgaaggggactcctggaagaacctaccccctcccctcacttccagcagccccagctacaggtctcagctcctggtttctcatgagcaggaggccagggca

SEQ ID NO: 15742 - DNA, 201 bp, Bos taurus
ttttaaatccatttgccccaattatttggctatcacaagaaaacttaagtgggattatcaggaaaattaccttcatcctttactccctttgtgctcgcacactgcttgtaggagctagaagagccaggaacatacaggtctcaggaatgcctgtggctgactctcttatcttgaatttattttcttaaggactctaacaag

SEQ ID NO: 15743 - DNA, 201 bp, Bos taurus
ggtgcttgttcctggggtcttggctcggcctccacagtttggagggagtaagcttccctctgtgacattataaagtggatccctggagcaaagtgtcccccggggcctctgctcaagcaaaacacaagctttccattttcatttaactattgcatcacgtttgactgacagtcctggctggtcctatggaaactgataagg

SEQ ID NO: 15744 - DNA, 201 bp, Bos taurus
catgttcagctgacatcagagacctgtcacctcttccgcacctttcggtggcctacactagacatctcttgggattgcctcttacagcccttggcctcacctgactcacactacaactgtggcgtgcagtgccatgaaggacaaaaggtctgtctctctcgctttctgcctttcagagacagcagcctgttgggccgcagg

SEQ ID NO: 15745 - DNA, 201 bp, Bos taurus
ggcttactctgctcctttccatctccagggatccctgcccttcatctcccacgactccgaaagaagccaatctcctatcagcccaagcccctgttagttaataattctttatatgacattttccaaccctggctccctgaaaaccttggacaatctactgtatcaaatttctttctttaaatggaaatgcagcaaaaaaca

SEQ ID NO: 15746 - DNA, 201 bp, Bos taurus
cctctgaactctttcagccacccttgccccaggtgtcactgcccttctcagatacctatgaatgatctgtctcagaggccctctctgtgaatggaggaaccggatcagttgcgacctccagaaccacagcacccagcctgagtccggctggcccttgggaaatgttgctgaacttgaaacgggttagaggggagtgatggg

SEQ ID NO: 15747 - DNA, 201 bp, Bos taurus
agagggagcagcccagtggtggcctggtcagcctccctattggtgatttagcattttctgtttaacacgtgaattgctttttggagtggcctggaaactaaggggtccacccttcaaaatattattaaaattttgtagtatttgtttctgccctttaatgagacattaggccattggaaagaccctgatgctgggaaaaat

SEQ ID NO: 15748 - DNA, 201 bp, Bos taurus
gcagccatgggggccatgaccaccccagcccccaacaaagtatggttgagggtaaccttgaccgccagggaagaatggaatgtgctgggcccttttagacgctcagcccttctgaagagacacacaagggagcaaagagcctattacttccagttggtgttgccacatcttcatgtcctgcctggaatgatggtggccctc

SEQ ID NO: 15749 - DNA, 201 bp, Bos taurus
tgagactttcaaaattcttgagacaaactttattcccatttaatcaagaggaaacagaagcttacagaggttaagccacttgctcaaggccacatggtcatgagtggcagagctgagattcaaagacaagatagtgtgatccatagctggaactttctgcatctcctccaggtaccctgtttagccggtgtcgggcaaatg

SEQ ID NO: 15750 - DNA, 201 bp, Bos taurus
tgcagccactgtcggtgggcacttgaagtatcaggcatgaccaatgtggcatccagaagtggacacatcccggcaaggaggccaactggccatgaagcacgaaggataaagaggatggagagggtgctttgagaatggtgatgtcaagagatgggtcgatggcaaagcagatgagtgcactcgtgaccctgacggccccca

SEQ ID NO: 15751 - DNA, 201 bp, Bos taurus
gtgccaggcactgggcccaggcacacgccctgccctgggcagcccccggttgcacgtgggagacctcgaatgttagggtgaactggcaccccacagccccgccttgctgaatcctgggcccaccccactcctagagattgtgatcaactgggtttgggaagggacagtggaatctgcattttaacagatgatccgggtgat

SEQ ID NO: 15752 - DNA, 201 bp, Bos taurus
tgggtccctgtagaggcaaccaggatatacagtgaaaacagctacgataagataacaactacaacaataacaactaacaagaaagaggctctttctctgtggccccacgcagtcagtactgggcacttcctatggagagaacctggcctttggagcagggggagctgggctcatatttcatctctgctcctcctatcaaca

SEQ ID NO: 15753 - DNA, 201 bp, Bos taurus
aacttgatcttcttggccccattctgtatttcagagtcacagcccaagacactagctttctttggagagggtcaacatgtttaaacgtgcctactccaacaccttccaatgtgttttctgtgtggccagacaggagttctgcccttctgagaaccagaagtctcccataggggtggggaaggcaggcaatttcagaattct

SEQ ID NO: 15754 - DNA, 201 bp, Bos taurus
gttggcctgaattcttcccatctttcagtgcccacgcttgttgctctgtgactccgcaatttctcccgctggaaaatagtgcctatttccctccctctagcatgtggactggcctcgtgactgtttggccagtagcctgtgacagatgtgaaggtctatgggttctgagcctagttctcaagagggtaggggaggaaggag

SEQ ID NO: 15755 - DNA, 201 bp, Bos taurus
gctggtgcctcgcctgcctgctgggccataacagcaaaggcaccacattgtgtttgggcggcagccaggctttttgcatcatggcccatccatcatctcagtaacaaatgcctaccgggaagtaattaggaaactgcgtttttttcaccacatagatgaaaggtgcagagatgtgcaggaggccttggatacttggcagcc

SEQ ID NO: 15756 - DNA, 201 bp, Bos taurus
gcacagctgggactaggacacatagccagagcgtgctcactgatcagggttactctaaaatgtctgagaaaaggaaaacatggctgggggtcacaccccggaggagggccagcttccagtgtcaccaccagattctctggtgccccttgatgagtcatttatggtaaatgaaagtgatcctcattttcaaggagatgtcca

SEQ ID NO: 15757 - DNA, 201 bp, Bos taurus
ggaagaagccatctcaataatccaggccagaggaaggaggagtctgcagagactgagtcaggtaacatttgaggaccaggatgaggtggaagtcagagaacagaagacagagctgacagcagggcctcaacagatgaagcggctgcacccctctgcacattaaataaagctaaaaaaaataataaagactagtgtccctgt

SEQ ID NO: 15758 - DNA, 201 bp, Bos taurus
acacttctcattatcccaaccttcagaccttgttagtactaaaataaataaatgtgctatttaaaactctgaggtgggcctgccattttgcagtaagtgcgtgcatgcatgtatgcattttaagtcactttacttgtgtccagttctttgcgaccctatgaaccgtagcctgcctgcaggcctcctctgtccatggggatt

SEQ ID NO: 15759 - DNA, 201 bp, Bos taurus
cctgtcgtgagaactggagctgattcgtgttaaatgccaggcacggagcctgccccaagctcaatgaaccatcgccatgtcggtggccagagccactagcggtgcagcccgaatcctcccctccatgtgggtacctggatgttgagtctcccccgatgggcccccaggccatagcgcttggaagtggatgcatggagctgg

SEQ ID NO: 15760 - DNA, 201 bp, Bos taurus
ctgggaagccaagaacggcccagatgtggggcagatgtcctgttacccctgagatcaacatgtgggaaacagagtccccacagggagtggcaaagaagcagaaacaggcagggcccctgccaccttctctaggaagatctacttctgggatagttacctacagatgtgattccagccccaggcagacaggctctgccactg

SEQ ID NO: 15761 - DNA, 201 bp, Bos taurus
cctagactgtgacagatgcaaggctcgggtacccacggcttctcatccaccggagctcaacgctctgactcaccacgggccttgtgttagtttcctggggctgccgctttgcagtaccacaaactggatgacttcaaacacgttgagtttaccctctcacagatccagaagccagagtctgggaccagggtgtccctgggc

SEQ ID NO: 15762 - DNA, 201 bp, Bos taurus
ttgagacccactgagacagtcagttgggtttgaattcactacctccctgccccaatcgcttcttggccttttgtctgagaccaagtgtgaattcactctccggattggtttgtggcctcttcaggagacgagaaaatccataacgaaaggccattaagagagacagaagaagagagggtctctcttcttccccgggaccgt

SEQ ID NO: 15763 - DNA, 201 bp, Bos taurus
tctcccctttgaagtccccagcattatccgcaacatcttttatctttagctgaagatggaatttaaagagatggttgcagccatcttagtgacttactcaattttcctgggtctcttccatgttattaaacttttttgtgattttctcctcttaactctggctcatgtcaatttcattcttagacctgccaggagaaccta

SEQ ID NO: 15764 - DNA, 201 bp, Bos taurus
acaaatccccacgtgaccctggatagacagatctggacccatcagacttcaagcccatccccatccttataggaggcccaagtcactcataacgtgagggttcttttgcaaaagtataagaaagtgctttccatcccagctggatctggcctctgctcagccaatcccctcccctcctggcctgactgccttcaagtaggt

SEQ ID NO: 15765 - DNA, 201 bp, Bos taurus
tgcctgcatccaggggatattcccgacccacggaagacccacgtctcctgcactgcaggtggagtcttttaccatctgaaccaccagagcagtgaggcccccaggcttaccaagtcctcagagcagcccttcgagtgggcactgctgttttcccattttacagagggacaagctgaggcccagggtcacccagctgtgaag

SEQ ID NO: 15766 - DNA, 201 bp, Bos taurus
ctagcagaagccacaggtgaggcctctccaaggctctggggagcttgatgggtgatcaatcaagcccaaatcttagcttcaccttcattaccagctgagtatcttggcccaacaattctgagcctatttgctcaggattagactggcagcagaaaaaaaaaagggggggggggaggtaaaaggagaacacacataaagcac

SEQ ID NO: 15767 - DNA, 201 bp, Bos taurus
caagaaaaattattattagagacccacctaattaacatatttctagtgtttcccagtgaaggcagaggcctttcttaactggcgctctctgaaatagtcacttgacaattggcacacctcaggcacgattgcccgccaaagctagtggggcctgcgcactcagcagcggttgcccactcccttccctccaagaccgctgcg

SEQ ID NO: 15768 - DNA, 201 bp, Bos taurus
caaggctcccatacgccgcaggacaactgggcccgcctgccatgactactgagcccgcaccacagcgagagagagtccacgtgcggtaacaaaagatcccgatcgctgcaactaaggcccgatgcaacccaccaagtaaataaattgcaaaacaccctgaggggtgatgggcaaaatgaccagagaagaacattcaagcat

SEQ ID NO: 15769 - DNA, 201 bp, Bos taurus
gtggatggagcgcagattgccacttccgactctcagcttctctccccacttcctgccccatcattcacatcgtctacaccagtaattctttttttttttttattcagatcttctttaatctttgttggaagagcttatccacgaattctgttttttaaaaactttgtatttggcgttggagtatagcctattaacaatgtt

SEQ ID NO: 15770 - DNA, 201 bp, Bos taurus
ttacaggatttcagaatgtgtattctttccactaggctatggtgcttcccagaaaatacaaaaggaaatgggcacacgagcaagagagatacaaagatgcgtgtgctgtgggctgtgcttagctgctcagtcgggcccaactctgtaaccccatggactgcagtcctccagactcctccgtccgtgggattctccaggcag

SEQ ID NO: 15771 - DNA, 201 bp, Bos taurus
ccaagaccacgacatctctgattcttcacaggcgtctccaagctacagaatttcagaagaacctaagtgtactggagccaaggccacaggggaatttgagcacaatgtccctccatgcctggttagaccttatcctctccattagctcggcttcctcattcttaagacaactgtacctgggacttctctggagtccagtgg

SEQ ID NO: 15772 - DNA, 201 bp, Bos taurus
tgtgaggctgataattcatagttaatgcagagagattagggatgcagggatcctgcacagggatgcagtttctggcagttgcaagttggccagagctcactgaatggtctcaagacacaggcagagccccgacagtcaatggacagatgtgatgtgactgggtcagcaaaagaagcaaggcatctataaacgatgatttga

SEQ ID NO: 15773 - DNA, 201 bp, Bos taurus
agaggtatgtatgtgatggaaaaacgtccaggcttaatcaaaaagggagaagtgtgactcacctaaactacgagactcagcaagctagacctggcctttcggatgactgtaaggagatccaaccagtccatcctaaaggaaatcagtcctgggtattcactggaaggacggatgttgaagctgaaactccaatattttggc

SEQ ID NO: 15774 - DNA, 201 bp, Bos taurus
ctcagttaccctaggaaatctgaggttactggggccagtgcatgaggctaaaatggtcaccacaaacctaagcaaaggtgccaggggtgggatcttagccggctggagacagtaagttagagctatgggagtggcatgagaaggagacagacagacagactgactcggcgcagagccccaggaaaaaagcagaaggccaca

SEQ ID NO: 15775 - DNA, 201 bp, Bos taurus
attttcaagtttcattcagtgtagcatttggcttgaatatgggtgtatacgttttcagtgagtttcagtcgtgtctgtaaggcctttactcatggaagttcttgtgtgcaggaaagatcattcagattttgagttggttcataacagcttccattgcatgggggccatgaaggggttggatctcagcttagcaagctgaga

SEQ ID NO: 15776 - DNA, 201 bp, Bos taurus
tctgcagtggtccctgagctggcagtgggctggtttgtctggtgtcctcactgacatgcctgttcctggtgacttgtgaatataacatgccaggcagagcggggccaggactgtgccaggcagaacaatggtattctaccaggctccctgcctgcatacagttgtacgtgaccacacacccctgtgtgtgacttctttttt

SEQ ID NO: 15777 - DNA, 201 bp, Bos taurus
attcttgctggttggcccagctgtaaacgtgagacaaatgtcctgtaaacgtttctcttacctctggttccccacagtcacattcctctccttcttcaacgtatccgttcccgcacttctggcccccgaaggactgcttcacttccggcaggttgaacagacacatgcccatgcccttctgcaggctggcctccaggtcct

SEQ ID NO: 15778 - DNA, 201 bp, Bos taurus
ctgggttgacaccttttagtagcttccccatcttcctctctgacaaccagactgtccccttggccttgaaatcctacctattgtggcccctgtcaaattacaggcaattccccacctccaggtaaaacttggcatcagccagaaatgtccttcccttccccatcccctgggtcatgcttcctcaaccttcgcatcttggtt

SEQ ID NO: 15779 - DNA, 201 bp, Bos taurus
gagaatgctattaataaacatgctaggtgcttatcaggagaagattttttaaaaaagaaagacgactccaaatacagagtgtgatgtgagcaattgccaactcgaacttcggagtgacccagtttccaacaaggcagtatcctgggtgcctctgtcttctgccagcggtcactgacacctaagaagaagctccccggcttg

SEQ ID NO: 15780 - DNA, 201 bp, Bos taurus
caacatcagtagcatcctgaccacgtattagctgttggtcctggcccagctgttgacccacttactagttcattcattcactcattcattcaccacctatctattaactgcctgccttgtgacgggccttcgagatctgatgtcttccacttaaatagcccgctgtttctgcttcaaccctcatgttacctggagcgagcc

SEQ ID NO: 15781 - DNA, 201 bp, Bos taurus
aagcaacttagcagcagcagcagcagcagtaggtaattgccaaggcatttcccacaatgttgtaccaactgtcactcccacgtataaaaggcccagttgcttcagatccacagtgacacaactgtcactgcttctacctttctgatatcaccctgttttggaaaccacttctgaactgacctgtgttcccctgcagaatta

SEQ ID NO: 15782 - DNA, 201 bp, Bos taurus
gagtgctggccaggtgctgagcagtggggagcaaggctcgccctctgattgagaagctctgagaggcgaggagcctcaggactctgcagagggttagacgtatcctgcaggcacttccggccactgagggcactgccctcccatcccgtccttggcaaaacagcccctgaatctgaccgcctctcagcacccctgccaccc

SEQ ID NO: 15783 - DNA, 201 bp, Bos taurus
gaccttgtttccaaatccagtccgttcagaggttaaggctcgagcacaacttcggagagacacaatctaacccagcacggtgtccccagcaggccgccatcgccgtgagttctcattacactgccctgtaatcagctgggcgtgggtctgtcccctcaagttgatggaggccttcagagggcacctcatcatcaccttccc

SEQ ID NO: 15784 - DNA, 201 bp, Bos taurus
gagagtcagggaagtcagccacggtgataaaagtgtctgtagaagaggtggagggtgcatcacagcgaggggtggacaggagacaggccgtctcccacaacagttcattaccagcctgggctttgggatccaggcgtaaaggtgtcttggagggcagaaggaaggatggggcaggaaagcccctgaggccaggaaccatcc

SEQ ID NO: 15785 - DNA, 201 bp, Bos taurus
tcaagagtcttctccaacaccacacttcaaaagcgtcaattctttggtgctcagccctctttatggtccaactctcagcatggcccaactgatgcttgaacctatgctattccaaatacactaggatgtccccctgcattttcctgtttgtaacgcttaccttcaacacctgtgcttgggtgaggccatataaatgagaat

SEQ ID NO: 15786 - DNA, 201 bp, Bos taurus
ccacatcttgccttgggtggctcatcagggggtcatgctggactgggcgtcatgtttgactctcgtttagctcctggcctcctctctgtttatcatcatgcttagtcatgtctgactctttgtgacccctgtggactgcagcatgccaggcctccgtgtccatcaccaactcctggagcttgctgatttccattgagttgg

SEQ ID NO: 15787 - DNA, 201 bp, Bos taurus
tgcgagttgtaagttcacgattgatgggaagccagttgtctagttgtttgtgccatgccatttcaacatggaaaaaagagaaaagcaaaaagccacatctgtacgaaccactctcgtatcgcttgaaaaaagaagagatacattggtgagtctggcacaaacccaatgaaattgatatgccatgatataaaattgagaggt

SEQ ID NO: 15788 - DNA, 201 bp, Bos taurus
aagataataatgattgaattttcttacgttttctcaattttctttcattcctctggcttctgttcttgcttgttctggcctcctttattaatatctggtcggtttttctcctgaggactgaagtcactttcggaccctctgttccccctggatgcacagaccttgaaggctctgggcctcactgcatgaggagcccatgcg

SEQ ID NO: 15789 - DNA, 201 bp, Bos taurus
tgttttaaagctgaggccgtgccttgggtgtgtctgggctctctccccagtgacatttaagtgaggctggaaccaggacttactctctccagcgctggccgggggctgaggaggcaaagaagaggatgatgcgtcagggtcggcaacagctcgggagtctgttggcgctttaagggtcaaaggccagcaggtacttagaca

SEQ ID NO: 15790 - DNA, 201 bp, Bos taurus
taccccattgtggccagatgcagaaaacaacatatatgaccttaaatggtgccaaagaatggcacggctttggctaagctgaggtcatgtctcctggtgacaaatgtgtcagtggccgccacgtgaggcccaccagaaccgaacatcggagcaggcggaggagtcaggaagtggttcccgggcaccactgaggaactccat

SEQ ID NO: 15791 - DNA, 201 bp, Bos taurus
gacccccacccagaaagaggcacggctggccttctgctttagggtgaccacagcctacgagtagccagcatctgggagtccagccagatgagaactccactggctgctccagattgtggcccgaatcccccccgggtagggttgggagggcggccgggtgactgtgactactcagccctgagacgctcttcccgccccgca

SEQ ID NO: 15792 - DNA, 201 bp, Bos taurus
gggcttaaaaatctctgagggctttacaattaataagacaatgtggaaggccattacagcttgtaaaatagtatacaaaatgaacgtgttataattattacaattgtggaaagacctccaggccccctctagtccttagggtactcctcttgctggctagatgagctcctttccagctctcccttagaaccacccctttct

SEQ ID NO: 15793 - DNA, 201 bp, Bos taurus
ggcccaagccctatgcgccagaagtctttccctctgcgtttctcattcatcccctcagccagctccgcttcattttctgagggcattacagctgggaaagaggggcctatggcaaagtctgagatgggagggtgggtttgtgcctagaagcaggccttctgctagctcagatggttgataccggtgccaacttaacctctg

SEQ ID NO: 15794 - DNA, 201 bp, Bos taurus
tgccatgtgtggcggggttctggtctgcttccgaccctagactccagccaaggcaacgcgaggtatgtgcttctgtggctccctgacctaggactgtagcatcagtctggccggagtttctctcaccccgtggtcatactgaggtggtataagccggtggaagcatactgacgaagcatgtggtcatacaaagggtcctaa

SEQ ID NO: 15795 - DNA, 201 bp, Bos taurus
gatgtttttctgctccgctcccatagttagtaagagggtgagtcactaagtcgaatataagcacggcttggagtaatttattccaggatcatgaagacacgcttctcggcaagagaatctctgctgaacccagcgccccgatgaacacagaggcttcctcagccgctgcgatcgcattttggagtatcgatatcatgtttt

SEQ ID NO: 15796 - DNA, 201 bp, Bos taurus
cagaggcccagtcgtgacaggacccctcccactgagaagcccgactccccagggtcccttcacagatgatacctgcagacttcaaggtaaataccctggtgagtagagaggacgcaggccggccttccccctggggtgaccgtgagcccgaggcctggcaggttcgatcccagtgcagatggcaaggccagtggcgaaccc

SEQ ID NO: 15797 - DNA, 201 bp, Bos taurus
ctggcagaggccgctgagtggaaggcagcgtccaagcctgcatgccccagtggtagttctgagaactggaagcagtcctggatgaaagtccaggaatactcgcagggcctttaaatatatatggtctaggggcattgtgagcagcaactcctgtgtgccctgaccctgcttcctcctgtggtcggagacacacagccaaga

SEQ ID NO: 15798 - DNA, 201 bp, Bos taurus
ctatttccactcctgcccaaatagtttaactcattgcaatgaaaagctctgtatgccatttcttttatagaacccatttctttgattcacttccaaataggttaaagtttgagtataaaatagactgcagtctagatttgaactcctcaaatgtaagtactaacctctgtgttcctgccgatcattcacaatccaccaggt

SEQ ID NO: 15799 - DNA, 201 bp, Bos taurus
atttcggtcagaccagaggctggagctcttcactcctgcctcaaatacactaagagtcctcaagactcttctcatggcctctgggcagctgcaccccagcgaggaagccatcgaggcatcagctcaagggctggaaacgccgtgggatgcccagcttggagctggccttgccgcctgccctccccaacccctgacctggtc

SEQ ID NO: 15800 - DNA, 201 bp, Bos taurus
caccccgccctgggaggtaggggtcctgcgagcctgtggacgcgcccctctctgatgtgacacaagcggtccctgtgggcacagacgaatgagggccgcacgctgggaggcgagctctgctggctgcaaagtcagtgctcatggttcacagaccctggagtgccggagccagcgtggttccctgccctgctccctgaccgg

SEQ ID NO: 15801 - DNA, 201 bp, Bos taurus
catctacatttttaagaagaatcttctttacttaagtcaatcactcttctacaacacaccttcacagcaacacctagcctatcatttgacccaataactgggcaccataacctggccgggtggacacacaaagtttaaccatcagccccaacaaggctccaggtttccagatcctggctttattcctcccgttgcctccgg

SEQ ID NO: 15802 - DNA, 201 bp, Bos taurus
ccctgagctctgtcttcaaggtcagcaacagtggatggagtccttctcaagctgtgccactctgaccatctcttctgcctccctcttccacttttactttaaaagtggttatctgggcccacctggataatccaagatgctctccctattttaagatcagctgattagcaaccttaattccatctgcaacattaattcccc

SEQ ID NO: 15803 - DNA, 201 bp, Bos taurus
tcttccaatgaatattcagggtggatctcctatcatctagagagtccattaatctaggagcccagtatacttgagaactagcccatggactccctagtgtgctgtgtcatgctaagtctcttcagtcttgtccaactttttgcaacactatggactgtagcccaccaggctcctctgtccatgggattctccaagtaagaa

SEQ ID NO: 15804 - DNA, 201 bp, Bos taurus
aaggaggggtcgtcctgcagaattaagactttcggccgtgtttccaaatcctgctccagtggctgtggatgcaaagttctcatcttggctctgactctctgggctcctcgcaggaggtctgggcctcggtcctccttgtagcctgcttcctctgatcattggtgcatctggccttctggctcctggtacattcgttattaa

SEQ ID NO: 15805 - DNA, 201 bp, Bos taurus
tgctgtaatgaaaacgttgaataaatttaggattaagttagagtcacttgtttgttcactcacagcacatgagtgcctgctgtgtgacaggcctcgtgccgggggacacacattgggcacagtgcagtaatgaacgagacggctccacctacacggagccctcgcccagcacaggacaggcctggtgggcggtcagctgtg

SEQ ID NO: 15806 - DNA, 201 bp, Bos taurus
cacgcctcctccccagggctggcctgcatcccagatgactactgcctggactgtgccttgcacgagtgttctggggcaacaaatccctgggttaaccctgctctcgatgacgggctcctgggccagtggtggtacctgtggtccgagcatgtgtccacacgtctgtccgtgtgtgagagtgtgtgtgcgcaggcgcactct

SEQ ID NO: 15807 - DNA, 201 bp, Bos taurus
taaaacagatctgacaggtaaactatggtctttccgacaaaggcggtggaggcggtgcgcccttggataattatttcactaggattcagtgaagcctctggaactccggctccgcgtggacagggtgcttttatttcctttgtatataagggctaaatgttttgggaaatcgctgtgttctaacgaagaggttgatgcagg

SEQ ID NO: 15808 - DNA, 201 bp, Bos taurus
gccgtggcttggcccccagcactgtacaggagggtgtattctttaaggggtgtgtgttctcagcataccctgaattccttgcacaggtaggaagggccagttctgctcacggcgcttgctggatactccagacatcgggtctgtgaggagagagctaaaggcagaagtggccctcgagagagccaaggtcagtgggacgga

SEQ ID NO: 15809 - DNA, 201 bp, Bos taurus
ccgaggaagatcaaagatggccaacaatccccagaagatggggcagggggcatctggggcacagtccctgtcacgtgagtctcccacaggggaagtgagaatgtatagggatgcgtcagggcctagctcgtccagctctgctggacaccatccaaggcacactcacttctcaccctgcccagaacatgagggtgacgggca

SEQ ID NO: 15810 - DNA, 201 bp, Bos taurus
gatgttgtaatacagaactgctggggtatctttcacagctggttcttatggaactcagatattattgtgcaaattacacggccttctagaaattgtttctcttgaacatttccaacataaaattaatcatcttcattatttttaagtgacctcatgggcaatacagtctacgggattctccaggccagaatactggagtgg

SEQ ID NO: 15811 - DNA, 201 bp, Bos taurus
agggccagacacagggtcagtggaggacgaggcagggccatgccctgctctccacccacacctgcctctgtggaccggccctgggctgggttctgtctgtcctctgcctcatcttggaagcttgttcatgtcactcccccctgcctgggacttgcagtccctgaggaatccaggagtgagcccccttggatttcctttctt

SEQ ID NO: 15812 - DNA, 201 bp, Bos taurus
gagtcctgaccacacacacgttaaagctctcccgagctctgctttctgagcccccagagctggccgttgcgggtggagaggcagcctggtgtctcttgatgtggaaccgagagaggaacggggccttgagggtgttctcatctgcacagaattctagaagaacacgcaatagtgtgtccactattgaagaaggcagcctct

SEQ ID NO: 15813 - DNA, 201 bp, Bos taurus
actgagtaatgatggcaatgtttcttaggctccggggcagggagatgggaccttcccgggtgtctgcaagcaagaaagggaggccagctcccacggtccatgctagtccccatctggggacagtccagcctcagggcatagaatgtggattcaggccagatggagcaacactgggctgcctgtatcagcatccagggttgg

SEQ ID NO: 15814 - DNA, 201 bp, Bos taurus
ttcaccactcccgaactccactctacgccagggtgcagccgccctggtcctgtgtcttccccgcctgtctcacccaggctgtgcctggccagcggcctgggttcaggggcacaggactccccaagtctcctgctgtatgtgggactggagcagccagctttgcaaccaggacgtgctctccagagatctgggtctctgaca

SEQ ID NO: 15815 - DNA, 201 bp, Bos taurus
tgtctggattctctcccttagagttattctgggagcaggaagctcattgttactgaattgtgttaagtacatgaaacaaccgctgatggacgtctgggccgtcctaggtctggggtatcagctgggacacacgctgcttgaactgtgtgagcaacgtgcacgcattctggccgggtcagcgatgacgctgagtccgtgcac

SEQ ID NO: 15816 - DNA, 201 bp, Bos taurus
tcctgcccagcccttctgtgagatgacccaggcatgccccttggccacttacctgggtggcccaactctctggaagttcagctctccgagggccctcgctgggggacatcagacaccatgaccgagccccgagcacacagccagagcccagcctgctgacctgcagaagcccctttccctgtgaccactcagccaccacgg

SEQ ID NO: 15817 - DNA, 201 bp, Bos taurus
aaatttaaggggaaattaaagggagaaaagcactgattttctgtttcccacagcgagctcctggtgttttcacacttggtaaaggccttgtcattttgagatgttagtcagaatcttgctcaaaaccttcctaccctcagacaggctgcctgcaaacacgacagttccagtgccccgggatgagggccactgggttggggg

SEQ ID NO: 15818 - DNA, 201 bp, Bos taurus
atttccttttatacaagataacagatttcagatttactatcggactgaatcaactttgagaagctcaggggtttgcagggagagaggctgcgttgggcagtcttcctggaacccggccccgtggcttctctcgtgacggccgtggtgactggtgacggatttcatcagcttgtctcatcgtgtaattctatcattaaaacc

SEQ ID NO: 15819 - DNA, 201 bp, Bos taurus
gccgtgggacaggctggagggagcccagcagggaggctgcaggaggcggctctgacatccagcccctctcctttctgagcaccctccatcttctcatgaagatggcctttggcccttccctgggtgggcccagcctgcaccgaggtggggtgcctggggagcctggacccggcaagagcggggctccgcgctgctgctggc

SEQ ID NO: 15820 - DNA, 201 bp, Bos taurus
gaccatttccatgctggtcctgctcccatctccagctgtgataaacctcacatcctcagaagcgatgcaagtccattcctccctgggatgaagagggccccggtgctgcatgggagaagggagatgctggcagcagagacacaggatgaggccgccccccaagcgcagagaccttcagaaagaagggcgtgcctgtgccgg

SEQ ID NO: 15821 - DNA, 201 bp, Bos taurus
atattcagtcaaatatacagtggggatcccatggaaatttctggagctcctccgtacagctccttcctgtctggtgaactgctccgtgaattccggccacaacagccttgctaaactctgatctgttcctcggctgagtgaggtcttcatgcaccacgtgggtttccactctctgtgtcgtaatctggaaatgactccagg

SEQ ID NO: 15822 - DNA, 201 bp, Bos taurus
tcctggagggctctggtcgagggacagatagacccaggacatgcccatgtcacagtctcactttaagatgaatgcctgtggcctgatggcaggggttccccgtggagagcagtcaccgccgggtgccccacgccctctcagcaccctgccacaggatcctgtggagtgaacgcagcctgggcccaacagccctgcctcggc

SEQ ID NO: 15823 - DNA, 201 bp, Bos taurus
tcaaagacaagctcgtgtgtgtatcggggaaacgcaaggcagggcaatggcaagctctcctgccagccccgcagagcagccgtcggcttggtgaggccccgggggatggtcatcttacgtggtctgggtgctgctccaagagcggttcacaccctctcagccgtgagtcagggggcctccgctcccccagtcaccccctcc

SEQ ID NO: 15824 - DNA, 201 bp, Bos taurus
gaagccgaggagcgtgaagggagatccgggcctccatgtccacgtgcggtcagcaccctgagcacaggggctctgcccagcatgatgctggtgtgtttgcgtttggccaacctggggctgaattcctgcatgtgggagcagggagcccgcctggacagctgtgcaggcagctggcccggcagggaggggtccagagagagt

SEQ ID NO: 15825 - DNA, 201 bp, Bos taurus
gggctctgcgggtgctgggggcggggcctcgcccccacgtggtcctgagggggtggggcgggctctgcgggtgctgggggcggggcctcgctcccacgcggtccgcctgcgtctccccagatttatgagatcttcagtgtcatccgggacctgggggccgtggcccaagtgcacgcggagaatggggacatcgtggacgag

SEQ ID NO: 15826 - DNA, 201 bp, Bos taurus
tgggtgtccaagcctcactcagggctgccagatggtagcccaaggcgcagcatggagacgccctgccgggcggcccggacagctcacgggagaccaggccgagatgtccaagccgcagaacttaagagggctggactcagccatgaggtttcctgcatccaactgaggctctgataggggaggggtgggcctcggacgtgg

SEQ ID NO: 15827 - DNA, 201 bp, Bos taurus
tttttctggagtttcaacaggggagtcagagcttccttcgtggtatgagaggatactcagggttccacttgagttggtgcaggggaaccaggccatatcttgagttgagagggaattctgtgtccttcaaattgcaccaggaatggtatggttcttcacgagtttcaaggtgagacaggcctcctcttgaggtgtgagggg

SEQ ID NO: 15828 - DNA, 201 bp, Bos taurus
catggcttcccgtcttcagtgagtttggctggagaagctgctcagcacgtggacatctgacagcaactgtctgtgcctcttcctgcaggtggtgacgctcgggtccagcccacacggcggccctataccgtgggcctgcctcccgaggggtgggtcccccctctgccggagccgctgagctgctcaagttcagagagctct

SEQ ID NO: 15829 - DNA, 201 bp, Bos taurus
cgctccttccaaggtgtggggggaggggagagggctctgtggtgtcagcttccagggagagaaagggtccttttggacgaggctggggtccctcaggccacgctgagacgccggggaattttctaataactaataaaaaccgatttacatcttcaaataagaatcttccttaagtcataatcaccaggcccgcgagttcca

SEQ ID NO: 15830 - DNA, 201 bp, Bos taurus
gacaaagggtccctgacctctgagaacaagaggcaggtgagagagtagggaagcgtctagtgccaggtggctctgggggagggaaggtggtcccagaagagagcctggtagagggccgtgcagggtccagcggggagcaggcagggggcggggctgggagaggagctgagcaccagcactggacaggggtcaggggtcaga

SEQ ID NO: 15831 - DNA, 201 bp, Bos taurus
ggggagtaagaggaaatggggccagaatcagtgccccctgctgctgagatgaggctgcagagagaggtctggggtcacagtgtcagattctgaaccacacagacaggaagcctcatcaggggcctggtttccagtttctgggagtttttaaagagcatgatagacccatgctgagaaaaatagagcatgctaaagacttcg

SEQ ID NO: 15832 - DNA, 201 bp, Bos taurus
ccaggagcacactggagccaggctcaccagctcctggggcctggggacgatcaggtccctcctcaaccgacgtccagtacccaggtgtggcgtatgcaccccaaacatgggccaggcttcctgccacccttacaccgggcatgggaggctggcagtaagcgccagacagcacatcactgggaggaacccaaggtgagagtc

SEQ ID NO: 15833 - DNA, 201 bp, Bos taurus
gctcatgggccccctgaagagctgtaggaaaagcctgcagcttgatatggaaagctgctcatgcttcctgtcttacggacccttcaaacccaaacaccacggtccccaggcctttgtcccctttcagggtccagctcaccattggtctcagatgctgtccccatgtccattgctggacatttgaatattcctcccacagct

SEQ ID NO: 15834 - DNA, 201 bp, Bos taurus
ataaaaacacaacattgaatatatacaaagatcattttaaaaactttgcttcatgtgtttagaactcagtaaaaggcctgtttagtaaagtttaggaaaacaatgcttgtttgtcctaaatgtcctctttctctggggcaggatgggcgtgaatgaggctgcatcccccactgacttgactgccttgcggctcagggccag

SEQ ID NO: 15835 - DNA, 201 bp, Bos taurus
agccaggaggtaagatggccctgcctctgagttctgaactggaagactaaccacttctgatgacgagttacatggtcttcaggaccgagtgggaaggcccagcatccgaggatgctgacccagcggcactgggttgcccgtcaggggctttccagggatggagcatgcaggagccctcctagacaaaatgtcaccagtgct

SEQ ID NO: 15836 - DNA, 201 bp, Bos taurus
cggactcaggcctcatggaagtggcctcagtctgatgtgagcagagaaacaggcgacccaagacacaccacagcggggccctgagggtgctcggcaccccgtgccctctgtggtcaggttcaatggtcaccaagtagacatcccccggcagctgcgttcctggcctggcttattgggagagctgctttttcttctttcccc

SEQ ID NO: 15837 - DNA, 201 bp, Bos taurus
gggggtgagctggcaggtgttgaacagccgccgccccccggggaggatcacaggaggacgggtagggaggcaccgtagacggactaaaggggtttgtgtcgtaagaggccatctggattttctctaaacaatcaatcacttggtgccggatggccagtaccatcaaggttagcttctaaagggcaagaaaagtggataaaa

SEQ ID NO: 15838 - DNA, 201 bp, Bos taurus
gaggtttggagtacaggcccctgcggagcccctacgagtaacccgattaccgaggctgctgctccaggggattgggggactggagtccggccccctcccctgctccagccccgtctgccccacagctgctgcgccttacagcccagcgtgtctgcccttcagatgagctgtgactctgcggtgactcacacacggctgtgg

SEQ ID NO: 15839 - DNA, 201 bp, Bos taurus
ctggtccagcctcctcccggtgagaccagagtagctgggtctctccatgtgagtcctggtgaccctgtagcttccagaggctataccagggcctgaccaaccttggctacatttttttcttggaatgacgtatcctgaatttctagcaagttccaggggaccttggcccatgctctgttgcaggttgagggttgcccaggt

SEQ ID NO: 15840 - DNA, 201 bp, Bos taurus
gtggagattctgggcacagaagggtccctgcaccacctgcaaccataagtacttcccagcttctcacctgtctgcccaggagcctggcccagcaggaggcgcaggcaaccaaggagccaggagagagaccacagaacatgagagcattacacactgcacttcacagctaggggccacacagatggcacccctcttccactc

SEQ ID NO: 15841 - DNA, 201 bp, Bos taurus
ctcatcctgtcacccacttctcctgccctcaatctttgccaggttcaaggtcttttccaatgggttggttcttcacatcaggtgggcaaattattggagcttgcttcagtatcagcctttaaatgaatattcagggctgatttcctttaggattgactggcttgatctccttactgtccaagggactctccacagtattct

SEQ ID NO: 15842 - DNA, 201 bp, Bos taurus
gcagtggcctttgttcagaaggagagagatgcttattacacttgcgtgtgcaaatgttgggtgggcaggtggacgcaccagtgtggaaatggagagagaggtctagggccattaatcagagatgcttcattctgctccagcagtggatcacactgaaactgctttccagtgtgactattattgggatgctttgcctttcct

SEQ ID NO: 15843 - DNA, 201 bp, Bos taurus
taacttgatgtaaaatgtttgcataagcaatataagctccaggatagaacatgtgtcctgttggctgaggagatgaactgttgacaatacattccagggccgtcatcgcttttatcagaagtaaaccattcaatgcccctcacaggtgtattgtattcaccgcctgacactccccagcaggggtggcacttcacagtgggc

SEQ ID NO: 15844 - DNA, 201 bp, Bos taurus
ttaatatcaggaggactgctttaatcagggaggtgaaaagggcatgacaatttaaaccacacacacacacaaaaaaagcaaaagaccataggttttacactgactggcctgtatttggagctgcaagtgcatacaagcatgacaccaaatcagagtaggtaaggacctcggataacctgtgtcagataccccacttctgtg

SEQ ID NO: 15845 - DNA, 201 bp, Bos taurus
ttcttacttgctacaggttataaatccttccttctcctactctttgccttggttgtgtctttgggattgacactaaccaagagagagaaccagttttgggtaacatgcaaaaatagcaaagataatccaacataacaatttggtttttacatgtaaactattgaaatgtctttctaatgtgaaattaattgtcaagaacaa

SEQ ID NO: 15846 - DNA, 201 bp, Bos taurus
tctccttccctgcatctctctgagccctgagatcccagccttgaaggctagaatcagggagcatccttgctctctgactgctgcactgaaaaaaggagggggtcaaggtcagggtcacattcctacagataagtgcccatttagtgcaaacacagctccctcctgtgagcaggcctctcctgtgggcacatttctacctcc

SEQ ID NO: 15847 - DNA, 201 bp, Bos taurus
ttttcacaagccaagtgtcttcttactgcagagaaaactagttcctatctgaacggggtattttttagatccatcttgcattgggggccggctgtgttagtgtgtgccaatgctgcccacctctcctgctgacggaggttaatagcccagtttattaaacaagctgcacgcctgggattggggcatgggcaggaagcaggc

SEQ ID NO: 15848 - DNA, 201 bp, Bos taurus
aatggcatcactgattcaatggacatatacttgggcaaactgcgatatggtgagggacagggaagcctggcatgctatagtccatgaggtcacaaagagttgggcatgatgtgcgactgaacaactgcaacaaacagcagcagcagtatatctgtatggtgtctttccagcccatggaaagacatccttgtgttagtaagg

SEQ ID NO: 15849 - DNA, 201 bp, Bos taurus
acctcaaactttaaaaatctctcaatactgatcagtttctacacctgatagaagatattctcacttttaagcaaaaagttttctgatcaccacacattctgatttgtgagggattatcttactaagacaaaaaaggcaaagtacaaatgtgtcccagggatggacctttccctcctaatcagacagaaagcatgaggataa

SEQ ID NO: 15850 - DNA, 201 bp, Bos taurus
ctcacattcacaactcttttcaggggtctctcaggacccttcccaccaccgcctccccagccaaacctgcagaagggagtgaagggcaagttacaggtcctggccttgtgtggtcaccttcacagcaaggaacacactggcagggtgaacttttattctcccaaagcagccatcttattgatgctgtggtttagttgctaa

SEQ ID NO: 15851 - DNA, 201 bp, Bos taurus
cactgggttggaggcaggggaagccggggggaccaaggcatcgggagggctgtggaaatgttaggcctgcgagcgtggctggtgggggcaggccacagagcccccaccacccacacgaggaatatgtgacgctaaggactgtgcatcttatcctgtaagccaagggccacgggtgccagcaattctcaagagagaagtaac

SEQ ID NO: 15852 - DNA, 201 bp, Bos taurus
gtccaaagccccctgttggggagaagagctcccctcagagtcagtagacacagctgaaagagagctgaagagaatttacagtgtctgtggatgtgaagcagagaaaaggctcaatttcaagaaggaagggggctttccaaatttttaaacatgcaacacctaaagcatatttacttgtaagagctgaattttgcaggtgaa

SEQ ID NO: 15853 - DNA, 201 bp, Bos taurus
tccatgacacgctggacttctcactgtcttctcagagaacatgggacagcacccgttctcacccctgtggagattccatgctggaacatgaggccagctctgacggagagcatgtggatctgagcggagccctggcggggctctctcatgcacatcccatgagccacatggaatgttcttggccttccttatgctccggcc

SEQ ID NO: 15854 - DNA, 201 bp, Bos taurus
tacaaggtggtacaggccaagtgcttttgtattgatctcctcagcaatgttgtttcgtcttaccaggctctattcctttattttgataatttatcacaagctgtaatgcagtctttcaagggccaaatagctactcttggaaggagcacttatcaatatttcagaatcataattaccttgcagacaagagagcccatgaaa

SEQ ID NO: 15855 - DNA, 201 bp, Bos taurus
ttaataatccaaaaactgtggaaacagtaaattatcaagaaaacaagaaatgacgtgtttattgaaatttgcagcactcacccttggactagagatgtcatttcattcacccctactctgccaagcctagattactacatttgattttcaaatctctcaattactgctaataaatgtctacatggcagcactgactcagtc

SEQ ID NO: 15856 - DNA, 201 bp, Bos taurus
gaaccagacagcaacggccaggttagctaagggtcaggtggcttgctgtgctgcccatcagatgtcttcttccagaaagtacgcacagccatgaacacaccgaagctgtcagtgaaggccacctgctgggcttactggaacatgcaaatgttgacacattaaagacttagcttccctgcattttgttcctgtgacagtgca

SEQ ID NO: 15857 - DNA, 201 bp, Bos taurus
aagtgactgaggccctccgtgtcaggaaaggcaaacctacatccaaaacacgctgcttctctgttgagatcaagctctacctttcccagggaggaaggagtccagtgtggccaactttcccccaagagatggctggctctgcaataaacagtgtcaagtgaaggctcggtgttggcctctattttaggcagtttgggtttt

SEQ ID NO: 15858 - DNA, 201 bp, Bos taurus
taatcctctaccatttcatgtttgtcatggaatgtaagaacgaaataaaaccttgttgttagaagcactggaattgtttactaggcctaataaaccagtccgtaatgacttacacaaccaactttgaagtgacattgtgagataaagtaactcggttatgctggtgagaaccaacgtgaggactcaaccccggctccctga

SEQ ID NO: 15859 - DNA, 201 bp, Bos taurus
caaaaaatgaatgcttgacagatgtacaaaagcatgggcatttccccccaaaacatctcctgtaccttgaaactgcctggacaggaaactatatttctaacgggataggctttgcaaagcaagtggagttttccagttctcacagtgcgacagagacaaaaactggagttcaagagacagcctgcaaacagaagaggcttt

SEQ ID NO: 15860 - DNA, 201 bp, Bos taurus
tgtggtaatttgcttatcgcccatgaatggcacttaaacaaaagcaacaatgcacatttcattgaaaagcatttggtttaggcaggttggcaggtgcttcagaaagccctcaggcttcattcccaaaacataaatctcaatcctgcagtgaggagcttcaggcaaaggcagggggagaagagctgtttccttaacgtgtgt

SEQ ID NO: 15861 - DNA, 201 bp, Bos taurus
tatccacttaattctcaaatgcccgaacataattaccgttgggcagtctccctaggggctgaggaacctaccaggtcctagagaagtggccttccaaggcaggcattgcagtctgtgcatctgatgactcttctcttggagaacaatcctccactccacaaggtcctgggatggaggtgggagtggggaagttgtatcagg

SEQ ID NO: 15862 - DNA, 201 bp, Bos taurus
ccctcgtgtccccatgtcgtcttcttctgaggacaccagtaactggatcagggcccattctcatgacctcattttaatttagtgatctcttcaaaggccctttttcaaaacacagtcccattcagaggtcctggaggttcgggcttcgacctgtgggctttgtggaggttcaacccctgacactggattacccatttcagc

SEQ ID NO: 15863 - DNA, 201 bp, Bos taurus
tgttctgctcttgtttttacccagagggacggaagcgggttatgagccaggccgggcagagcgggaggcaggttccccgggcccctgggttgcgccccgcccctctctggggctccacaggcacagagcagcgcgactcggttccttcggagactcggccttgtggcctgtctagagccctggaagatttcctgtgtggcc

SEQ ID NO: 15864 - DNA, 201 bp, Bos taurus
aaaaacaaaaaacctctctgcaaacttaaatgagcaaatgacctaaaggaaatttaccgccatggggagtcattaaatttgaaggcctccctgggggcctcggagaagccatcactccatgactccagcccatggaatcatttgagaatgcccttcccgggactggataaaatgatgcaggctgattttccatctgcaggg

SEQ ID NO: 15865 - DNA, 201 bp, Bos taurus
cgggggtgacagggtctgcgcaggatcgactgagatacgggccggggatgccccactctgctccgaagttctgagtcatcaccagtttcacaagcaatcgcgggggtaggcactccagggccggtgcaagaagctttctgttaagaataaatgtgccctaaattactcttaaatagccaacaccattttgagttgttggag

SEQ ID NO: 15866 - DNA, 201 bp, Bos taurus
gaagggaagcccaagaataatggaatgggtagcctatcccttaagaactcaatgtatacaacgattcctgcagcaggttgcaacctggaagagcagctccagggagagaagcagtgagtgccccctcatgatgcaagatatgctgacgtgggccctatctgcacattgcgtacataggaatattgtttccttcccccagaa

SEQ ID NO: 15867 - DNA, 201 bp, Bos taurus
aaccccttgcaacccttagactgtagcctgccaggctcctgtgtccctgggacttttcaggcaagaatactggggtgggttgctgtcttcttttccattacactattttaaaatggagcaaaccgtatgaggtgctgtatttacagccagggatacacctaccaaactgacgaaggtccaggcagagattcgctccctcca

SEQ ID NO: 15868 - DNA, 201 bp, Bos taurus
gaaaacaagaaggctcactaagtgccggacagaataagccttatcactttcgttaccaaattccactgtttagagaccaaaatgtttaggctaacatcgttccatcatctggccttaatttgatttcacagaccattcttccacataccctgggacaacaaagaaaacattttgaatttctcaaaactctttttccttacc

SEQ ID NO: 15869 - DNA, 201 bp, Bos taurus
ggctagtactcagagactcaattttaaatttacgatcttgctaggctctccctactgataactgagaaaaacacggggcccaaccgcacgcatttccccgctctgcgactacagcgcagccccgtaaagccggtctgcagcgtcagtgcagagtgcttcggccgtatatttaacgtcggaggagaaactttatgggaagtg

SEQ ID NO: 15870 - DNA, 201 bp, Bos taurus
caccaactagagctaatggccagctgccagcacaagaatgaaaagtcccctgttggtagaacctgtggcttggaatgattgcagtggagttgataggcaaaaggacagtccctcttggggccactcctggtaacagttgccttcacagcaggagcgaatgcccagagatctttggagagctgtttagatcagcaacggcca

SEQ ID NO: 15871 - DNA, 201 bp, Bos taurus
ctaggatggcccatatcctggcatctctgggtgctacagggaagatttctcaaacagcagtctttgtcactcattccacatttatttattatcttttgaatattaggaattatcacattgaaaacattatgcagtatgtgtcttaatagaacataccctaacctggctgcatggttataacaaaaaataaagagcccagag

SEQ ID NO: 15872 - DNA, 201 bp, Bos taurus
gtcttttggagaaactaaaatggtgtacccactggaacccagtagattttcaagacagatcacgtggactgggaatgaggcatttgtggagtcccaggcctctgtggaccagtgtgctgtgtatattcatccagtcctaacctagacaccttcgcttgactgcagataacactgacaccctagacatcagaaaattaaagg

SEQ ID NO: 15873 - DNA, 201 bp, Bos taurus
actgagttgttagtgacctttgctggaatgatttcagtgaagccagattgccttaagtggttagatatgataacaatgggtttaatcattttttccccccaaaaaaaagcttggctaagaaaaaaggaagataaagataggaatagctacaaagagttgaagcgtcaagggaaaaatgtgtttaaaatataatttgtttgt

SEQ ID NO: 15874 - DNA, 201 bp, Bos taurus
ctatgctttcaacaaccttgattgagacttctgttgttcatcttttagaagaggtacttaggatttctatagatctctataaatttattttcttttgagggaagaaaaagtaaaaaaaaaaaaattccaatatgctagaaatggatgagaactcccaatatagttatttctgagttttggtatttttttctccaacaactg

SEQ ID NO: 15875 - DNA, 201 bp, Bos taurus
attttgactttacaaaatggagagtggagagtggaatactgtatgaagaataaagggaaagggtaaagcatcaggccataatccaaatgaggggtgatggtggttttgactacacggctaatgtggtagggaaacaacttgtccgagtgagtatatattttctaggagaagtgtagtggaacagcaaggcccttggtctga

SEQ ID NO: 15876 - DNA, 201 bp, Bos taurus
cccacaaaatacccttgaattagtaaataatacatccacaagactgaccgatctatggtcttagaaatcaggattgtggttacccttaagggagaggtggaagtgaattgtcctacaggccgtttctgaagtgagagtcaaattttgttacttgacctgaatgctaattacatgggtgcgttttgccgaaattcttcctgc

SEQ ID NO: 15877 - DNA, 201 bp, Bos taurus
ctcagccccagtcgattctgagttattctgcaggggctctgtggggtcacgtgctgaactaaacccaaaggcctgaattcctttgttaaccctgaaaccgctccaacttcctcaaattcctttagatcagtgaatgatctagaacaaattttgaccttcaaagttgtttggaacaaactggaatctaaaattaaggtttgt

SEQ ID NO: 15878 - DNA, 201 bp, Bos taurus
aacttctaaccaatagtaagcgtgtagcatttgggtattagtggttctgtaattgtttcgggtactcagaatgtataagaacaaggccgtaataaaagtggtaatgattaactttaggacaaattctcttccagcatgctgccagttagaaacaccacagtcaattggccttctagtagagagcgtcatcttatggactgt

SEQ ID NO: 15879 - DNA, 201 bp, Bos taurus
catcaccaaatgatatagaggagtgtctatcaatctgtccagacttttaaaatattaacttggtaggagttgtaaggtttacagaaacttcaaggctcttactgctatgaaattaagtataaacagcctaagatagcctggaagaattctcctaagatgaagaaatgctattaaaaagttaggtgtcattgaagagaagtg

SEQ ID NO: 15880 - DNA, 201 bp, Bos taurus
acctttgtataatgatcctgtcaagaataatatctattcttgtgagttgtctatgtattgggcttggcaactcaagttcagtgtaacaaactgaaataatcgttctatgtatgtgagaggcttttagaaatgagatgattctgggttatgatctcaagatgtatgtttgactgtccctgcagccatggtctctctatcaca

SEQ ID NO: 15881 - DNA, 201 bp, Bos taurus
gtctttagtaatgagactgattgtgctgtgaagggaggtaaacctgactctgtcattttgaagcaggttggctgccccatgaccttttctcccagatggcatcttgtccccctagaaagctggctgagactgtggtatttctaggttaatggctcctaaacatggaatatttgccttagcagcctgtagcagttcccttcc

SEQ ID NO: 15882 - DNA, 201 bp, Bos taurus
attttacattcccatcaaccaggaatttaccttcacactaatatttgtaattgtgtaggtctattgctgttcttgttcagttgctaagtcttatccccagatctatgaccccatgggccacagcatgccaggattccctattctttactatctactgtagttttctcaaattcatgtcctttgaatcggtgatgctatctg

SEQ ID NO: 15883 - DNA, 201 bp, Bos taurus
gtttcctcgttaataaaaagatagaggctggtttggggtgcttagacatcaaagacactggtcttgagtcagatccaggttttatcatgtttagtttcgttcacagaaatcaaacaattttgaatcaacactcaaaaatcatgagataccaggtcaaaattgcaaatcccaggttcatttggaaaactggaagagctccaa

SEQ ID NO: 15884 - DNA, 201 bp, Bos taurus
aggccacagtctacgggatctcaaagagttggacatggctgagcaattaacactttctacttcgtttcgcttttcatgaactcctcctaaggtttgcagatggtaaccaagggcccctgaatttcacataacagtttcttccagtcataaaattgtatttcaacagagaatgtgttctactcgagcttatggttccttttt

SEQ ID NO: 15885 - DNA, 201 bp, Bos taurus
tgaaaaggatcaaactgataaggtttcctatattttggatacaaaattatgtggataacacagcagatttttaaaaaatatctaacccaaaatcctagtcgttgaagttaaaacatttttaaaggcttatgttataatcaaggctttgatccagaatttctactgtttacaataataaataagctaaatattcctgggaac

SEQ ID NO: 15886 - DNA, 201 bp, Bos taurus
ataaacatcatgatggtggttgcctaagggttaaaagagtgtaggtaattgggaaaggttgttcaagtgactctggcatgttgacaatgtattatttcttgactataatgatggtttcaaggatgtttgttttttaatttattacactgttcatttacagtaagcgtatgacactgtatatatcatatttcacaattaaaa

SEQ ID NO: 15887 - DNA, 201 bp, Bos taurus
caatattattattatcattctgggcagcctttcacagacgaaacttgactataagaaaaagaagtttttctttattcctcccaaatatcaaaaagtttcagtgccttttagtatttcagcttactaagatttaaattgccaaaatagcaagcacatttaaacacaggcagtcactgatacaactgataaagaatatattca

SEQ ID NO: 15888 - DNA, 201 bp, Bos taurus
aaagatgtaagacatcattgtacaatgggttgaaaatttcttttactcttaggcttcctagatgagaaattacttactcttgatttcacatcttatatgaaacactacctagaaatacggagaaggcaatggcaccctactccagtactcttgcttggaaaatcccatggaaggaggagcctgttacgctgcaatccatgg

SEQ ID NO: 15889 - DNA, 201 bp, Bos taurus
ggtccacatcctcaataaccttgtcatctctagcctttttgttggtaaccattccaacagatataaggtgacatctcttatggttttgatttgcatttccatgataaagaatgatgttgaacgtattttcatggactagcttatttgtatttctttttttttttttaagtctcagatctttatgcacattctttcattgca

SEQ ID NO: 15890 - DNA, 201 bp, Bos taurus
atcctggtgaaggccaccctgaactaactagcccccacgtgacagcagaagagaaatcaagcccagcagagactgactgacctaggcctatagatgcctgtgaaataatgtttttagactactaaattttagagttgaccctttgttcagcaatgccaaacagatacacctgtgtagctttccaatttcatttcttaccaa

SEQ ID NO: 15891 - DNA, 201 bp, Bos taurus
cttaatcactccttaatgaaatgagtcctttttctttctttcttttaagtagactgcattttaatttaaaatgtagctatgatgtgaacacacctactaaatttgaaatataactttcttgacaatatcagaaaagaatagactgtactttatcatctttcttcagtgtcttatgaacttattcaacctgaccatgaccca

SEQ ID NO: 15892 - DNA, 201 bp, Bos taurus
gaagttatgagaaccaaatttcataaacatttttctattgatacttcctcaatgtctggtgattcttggttcccgttatacctgaattaggcagtattaaaaagttctgatctttataggcgataaaaatcttgttattaaacagactttgaaagagctaaatgttattttctagaaatgcaaaaaatatcaaaatgaggc

SEQ ID NO: 15893 - DNA, 201 bp, Bos taurus
atataacccccacagcaatcaatcagtcaaactggtgaacctcctagtgccctttcacagggagtccttcactctggccacacagatgtgtattctgtccatgttatctggatatcttcaaaattacatggttgaaaggaaagtgaaaatgttagtcactcgagtcatggccaactctttgcaaccccatggactgtagcc

SEQ ID NO: 15894 - DNA, 201 bp, Bos taurus
cccagagatatggaagtaactaccagaggaagtaaaaggaaaaaatagttaaaagtgtttgcctctgggaagtagcactggggatggttaaggattcagcgggaccattatttttcattatacttctgtacaactattattaaaattcctatgtgtacagtatattagcattgtaaaattattcattctgtatgaaaattt

SEQ ID NO: 15895 - DNA, 201 bp, Bos taurus
tatttgcttggccaaaacattcatctgggtttattctgtaccttgaatgagctttttttgccaatccaggataagatttgaacttaagaaagtgacacacaagtggcccaacacatatccacttggaatgttgaggtggagacaggtaaattccacaataaacacttgcccaaatctttggactaaatcacataggtggta

SEQ ID NO: 15896 - DNA, 201 bp, Bos taurus
gaaaggattttcacataatttaacctagagggctgctcttacattttactgcaatatcagaaaatgagatccctctttgttttgattgaagaacatacacatctagagaagagcttctggggaagtcttctgaaacaggttaagatgtgtgatgtatcaacaaggacttctgaatagattacagtctttctttaaaaagat

SEQ ID NO: 15897 - DNA, 201 bp, Bos taurus
tatcattataatatacataatatataatatacatacatttatttatgaatgagttggtgatgttattctagaataaatgtccactgttaatgagttggttatctgacttagatggcccctacttttgtttctttctgccaaaattaataagttcccaaaatttggggtttaaaagttaaataagaggtttatgcaaatatt

SEQ ID NO: 15898 - DNA, 201 bp, Bos taurus
tgaactagtttggtgaaactattttgctgcagatttagtgatggaaaaacacatttgcctttaagtagaacaaagagaacactattgaaataaaatttcatgtgtccatttatggtcattttagggactgagtttctgtgtccacctcagtttccatcaagattcaggccttgaggcaatagtgtaagaaaatagcacatc

SEQ ID NO: 15899 - DNA, 201 bp, Bos taurus
ggcaattcaaggtttttcagaacaactcttcataggctgtgattcttatccctacccccaatctcaagtacatcacacagggattcacagaagaaactcactcaccagtttgcaaaagaattggggttggcaaattgttctaaagttaatacctaaacaaacagtaacctgtaagtccttgtataattggttactctggta

SEQ ID NO: 15900 - DNA, 201 bp, Bos taurus
aaatactagtgagtatccattaacctctagaaattgcatattattcaactgtaagagtcaaagatgagttttctgtccatcaggctgaactttgaagttctacagaagtccatagggcatgctttgagctgtagggacccagcacagctcactgataatgagctgatagggtctgaggctgttcccagatagaaattacat

SEQ ID NO: 15901 - DNA, 201 bp, Bos taurus
tgcatttcccagatacctggaaggcattacccatccgggcctgggactcaggaccagtttaagtcaccctccctctgcacctcagccccttccttctcacagtgaagggctctctcgggccttctctatgtctgctgcccaggctgctggcacatggggctggtgtgacagctctgccctgggcctctagatcactcagct

SEQ ID NO: 15902 - DNA, 201 bp, Bos taurus
gttcccccattttatctgcaaacctagcttctccaaaacaggatctgatcaatggattctagtctccatctagtacagagtgcagcccctgttggtcagaacaatcctgacagacatttactggatgctggccctgccaatagttggttttctttgggtcagcttttaattccatcaatcacttgcagacagagttccagg

SEQ ID NO: 15903 - DNA, 201 bp, Bos taurus
caatactccccttgaagagctaattggaagagttcaaataaaagcttagggagtattttttcatgggtcttgtttaatggccatgatagaagacacaaatgtttatcccagatttacataaacatacacgtatattttataggtatgtaaatatgtatttacatgtattggtgtggtgtgtgtatgtggtgttggtcattt

SEQ ID NO: 15904 - DNA, 201 bp, Bos taurus
gcagaggtgacggcagcggctccgcgtccgggtcaagcggccaaagtgacgaacgtggacgccaggggcacacgtggacgggtccgcgccccggcccgtccctggtcctgcccagaaggggctggggagagggggcgctatttcaacctgcctgatgctcttgaactcagattttcccccttactctccaacttcaggcct

SEQ ID NO: 15905 - DNA, 201 bp, Bos taurus
tgtaatgtgccactcacttttgcaggctcattttccttctagattaggtttgattaaattattatcctgacggtctctgaacatttattataagtggtcagaggtgactccagcgtggcacccaggctgctgtactcttccctcccatccctgcgctggccatgctgcctaaggatccttctcgaaaatgtgttctgggag

SEQ ID NO: 15906 - DNA, 201 bp, Bos taurus
aaattaatcttgagcagtaccaacacctatagaactggattaataactaaaaatgagcccctgttaaggagatgctagtaaaagtatacaggaatagggcgaactttataaagtaatttgaatggttgatgtttctgactcaggtgtcactaatcgaaaacctaaccaagcgatgctgcgcaccttgggtgtgttaacatt

SEQ ID NO: 15907 - DNA, 201 bp, Bos taurus
ttcagccaggatgcaggctccaaggcctccttccgctcccggagtgggctcttgaggctcgatcgggacctcaagggctgaggcctcagtgggctccgctgtccgctctgcattctcttcagccttttccgcaccccagcttctgggcactgggccctccggagaggtgcctggctcctgggagatgctgagcaccaggcc

SEQ ID NO: 15908 - DNA, 201 bp, Bos taurus
gatatggcagggagaggtgtcgtgaaatgacgcgggacctgaaagggagccttgaaccaacagagggtcacagatcacagattagaaaccggcctgataggtccattggtaaagaatccgcctgcagtgcaggagaccctggttcaattcctgggttgggaagatccactggagaagggataggctacccagtctggtatt

SEQ ID NO: 15909 - DNA, 201 bp, Bos taurus
ttggctgggtgccctcgtgtaaccgtacggaacttcacggaatgcgggtcacggcttcattttcctttccgtctgaagaggcgagggcctgtgctagcagatggggtgcttttctatgaagcgcagtgaaagcaagacgccagtgtggttcatgccagggccccgcagacggctcgcccgttcagaagacggcagttctct

SEQ ID NO: 15910 - DNA, 201 bp, Bos taurus
agacaaaggagcccatactgacagtcggaggctgtagcttttcttggagtgatgactcatttcggctcacaaaggattctgggcagggtagtgaggagtcgggttggctgatccacgcctgtgacttcactttgcagaggacaggcagcagaggagacactgccgattcccaaggcactgcagtgggctgtcggctcaggg

SEQ ID NO: 15911 - DNA, 201 bp, Bos taurus
aaatgccttttcctgagccttccaggggaagctcacactcgaaagtgcaccgaagccacagccatacccaggaccgaagatccaggaatgagagatccaacaaggccaaggagaggtccagatcgatggataactctaaaggccctctgggtgcttcttctctggggacgcctgaagacctggccgaaggctgtagccaag

SEQ ID NO: 15912 - DNA, 201 bp, Bos taurus
tctggtagaaggccatctaaatctggcttgacttgccatctcttttcatcagttggtcattgagattcgccacaaggccacgggcatcagctgaggtcaccagtgtggctggtccgagcatgctggggtacgactgactggcttctgggcctaatctgtgccttcaggaacagttaggcatcaacctgtgtatatcatctc

SEQ ID NO: 15913 - DNA, 201 bp, Bos taurus
cctgttaggggctgggcccttggcacgctgagcactgcacatccttcatctcgcttcagagccactaatgttctgagctcatctcagacaagggaagacacgggaagatgaactgctggacagaggtcacccagcaagggaggggccgggtgggtcatctgtctccagagtcctggcatcccaaggttgcccggtgttgcc

SEQ ID NO: 15914 - DNA, 201 bp, Bos taurus
taggtccgtgcaagaccttcctggtaggctggccgcccttcgtccaccccctccggatgcctatgttccctgctccaaggccctgccagagttctcttatcaaattcacatactatactgtcccctccttccttaagaccttccagtgacttctagtttctctcaggataagaatacatttttcagttggcccatgcaagg

SEQ ID NO: 15915 - DNA, 201 bp, Bos taurus
atagccagggcatctctaaagagctacagttccctgactcttctgtaagtggggctgaggttccaaaagaaggacaggatattaatatgtggatcccactacattcaattaggcgcagaactgacccaaatggaataaataacaagacacaactgaaacccataaccgatagagaaatggaaattaaaggcgatttctttc

SEQ ID NO: 15916 - DNA, 201 bp, Bos taurus
agggaactgcttatagctgccccgagagcagggtcttcctaataatcccccagcaaacctcccctggagtgtgtattcaatcctgatgagcgtccttcactattgttcctgctcctggggttcagttaaaaagaggcagaggtcacactgcctatgtcacatgcagacattactgcattttttattgtgatgttttactgt

SEQ ID NO: 15917 - DNA, 201 bp, Bos taurus
tttgaggcctctccattatcctggctgctgacagtgtatattgctaccaatttcggggattcctttcttcttcaggcggcttcttccagcagcatttattgttttcagagttgggaagatggccattgtgccggatgggatgtgatttcccattggccttttgactgacatttcctgtgtcacttagggatgcttaccatc

SEQ ID NO: 15918 - DNA, 201 bp, Bos taurus
tgccccggccccccaggcccgggacaccttccttcagacggcagcacagcagctgtatccccattgagagcagcgtcctgccccgctgaggaggcagaaagcagggcacagtggccgaagcccctgcaacaggctgtcggaagaggacacgagaggtctggctggggtccctgacgcctactccatgctcccagggaggct

SEQ ID NO: 15919 - DNA, 201 bp, Bos taurus
ttgaccccaataaagcaaaacctcaggtgctctgcactctccctccccctaccagagacttcacatgtgaggcccaggtgtgctgtgtcatttccaagtcctgtagtaagaaagctttattttttttccaagtttcttatagttattgctgaggggcatcttgcaatcatcttatgaactacatgggctggtccagccaca

SEQ ID NO: 15920 - DNA, 201 bp, Bos taurus
aattgacttatcttcagtacaacactgaatccacaagaaagagagaacagatactgattagattgaaatggaaaactgagtgtacatttctactctagtgcgaatcacccagaaaaaacaccttaaaagaatgaattaaaaagacacataaaataaccacgaccagagagtttaaaactttgagaaattcatgaatgataa

SEQ ID NO: 15921 - DNA, 201 bp, Bos taurus
agaagggctgccctgaggaagtgacaaccaaacagaaaagtagctgctggtcaaaggggagtacaggtgaagggatttcttgggccttgcacaccttccctgtcagctctctcacaccaccatgccctcctcacacaactcctgaatcactcctgcacgtgggcctccagccagcgtgagtcatcatccaaggtgcagcaa

SEQ ID NO: 15922 - DNA, 201 bp, Bos taurus
gcttgagtctttctctataggctccgaactttttaaaatgctctgccttcttcacttcattttctcaggcacctgatcttaactttctaaggtaaagactacttagcagattaacttatctaactaaggtagctctcccaaatcatgttatgtgaaaaactagcctctaagatgctccatgaaagaaagtcaagtttgttt

SEQ ID NO: 15923 - DNA, 201 bp, Bos taurus
tatgctgttaaaagcatttttaaccccatttaaaaatgtgactggtgcagaaaagttaaatccttggaacaaggtcacaaaaccgtaaatctacgtctcagtgcttaaaccaaagatgatcagagattaaggaaactttaaaaaaaattattaacagtgacttcctgataggaaaaattaggaataatgactggtaatttg

SEQ ID NO: 15924 - DNA, 201 bp, Bos taurus
tcagtgtctgcggcccttgcccgcgtttgacgcgtggcctttctcttcctggtagtgtttgactacagctacagagactacatcctgtcctggtatggaaacctcagcagagacgagggccagctctaccacctgctgtccgaggacttctgggaagtcgccaggcagctgcgccaccggctgagccacgtggacatggtc

SEQ ID NO: 15925 - DNA, 201 bp, Bos taurus
gcagagagatccccaacctcccccatgagggccttcaccaaggaccaccctggcgccctagtctccagactgtgagaaacacgtttgtgttgtttacagccggccagtctgtggtgtttggttatagctgcccaaactaagacactggccaagtgccggcattctagtagtaatggagcatatgctacgacttctttgctg

SEQ ID NO: 15926 - DNA, 201 bp, Bos taurus
gcagtacaacacaggccctggtttccatctgggacaataggagggtccttgctcccagcccagaggcagcagctgcagtcgggtagacatggctttgtgataagggggtgagaccaagggcctgagaccgtccccacctccccagcctgctggttcccatggtttatacttggagaggacggtttcgtaacgtcttctttg

SEQ ID NO: 15927 - DNA, 201 bp, Bos taurus
attggcagaagctgtcattttcagtgtaaacagttctaggaagcagaccatgaaagaaggcatcatggtgtacaagtgaggtactcctggggagaacaggcaagctgggaggactgcccagtcgtgggggcagagtcacatagtagtctcctgccattgagtgtggccttctttttaatctcagattaaagcaacctgaga

SEQ ID NO: 15928 - DNA, 201 bp, Bos taurus
gtgataaagaccatgtagtaaccttgtaacacatttacgatggggtgctaagtgagtcaaaacacactatgatactagttatggcggtgtcacaaagcttgtgcctggacaaacacagtgctgagacttctttcttttcaaatattgttatcctttactattataacattatggaaaacactgtacgattactatgaaaaa

SEQ ID NO: 15929 - DNA, 201 bp, Bos taurus
tgatgctttgagggaaatataactgtttatctaggtccataatatactgatcacataataaactgatgggaagttttttgttttggaatcatcattgacatacaatattatattaatttcaggtatacaacatgtgattcagtatctttatgcattttgatcacaataagtcaagttataatctgtcaccatgcaaccttg

SEQ ID NO: 15930 - DNA, 201 bp, Bos taurus
agcccttgatggctgttgtttctctcataaggcataacttgcaagtacagataatgtgtttttttgtttctaaaggaacttttaagatgaaatttacagacatgacatgctttcttctcttattgccaatttgtagtctctttggaagaatccctgatttaccagtaataaatgatcagatgtattaatcccttctgaatt

SEQ ID NO: 15931 - DNA, 201 bp, Bos taurus
tcttaatttatgcctctgacatttttatatgtattcgatatgaggaaaatgggattagggttgccacatttttctggaattagaattctagtttcagaaatcctgtttgcctgaaactaaatattattttaaatctacttggtcgtattacaggccagatattagattagtaataatttagtctttatttcacgctttcac

SEQ ID NO: 15932 - DNA, 201 bp, Bos taurus
aagaaaacaaataacccttcttgaagaaaacttctaaagtgatcttgcctctcctccccaaattaaataaatcactcaagcaaatcacattaagtctgtatactcaactactaatttgcaaaaacattgaggacagatgaaaacagacattagaaaacttccaatggtctgcaaaatcactgaaagcgctgcaggaaaaat

SEQ ID NO: 15933 - DNA, 201 bp, Bos taurus
atacatccctagtctctaaacaacacctgtccagagcagaaattgagtgctcttatctgcccgaatttgggtttctcaacagactgatattcattccttccttcattttcagcctggacttcacccatgtgcggagcatgattagagactcactgaattcattgctcatacagatttttttcaacccccccgcaaaaaaac

SEQ ID NO: 15934 - DNA, 201 bp, Bos taurus
tgggccccagtggtctaggccagtggttctccaagtgtggttcttaaatcagcaacatcagaatcaactgggggctggcttgttagaaatgtgcattctcagggccccaaccagatttgctcaatcagaaatcttggagttaaggcctaatgattaagcttttcacaagccctacagtgatctgatttctagtctgaaaat

SEQ ID NO: 15935 - DNA, 201 bp, Bos taurus
actttatgggaattttagtcaccatatttcatatgaagctcctaactacagcaaggaaaactacaattaccagaagttacgttttaagtggtaaataccatgtgtagatataccatcttcaggaatgaaaacgcttggcacccagggtcatttctacgcttttaagtttcctttgctagacttctggttagtcaattactt

SEQ ID NO: 15936 - DNA, 201 bp, Bos taurus
gactccatctccttatgcgctcctacaccgccctgctgctgtggaaaccacgtgttctgaccttggaaaatctggtctccacttgcacagctttgctcagtaggaggatcctgctttggttagggacggtttaagtaactgcacacagatccgctcagatgagtgagtagttgcaggtggaattcacaatgatggtttgaa

SEQ ID NO: 15937 - DNA, 201 bp, Bos taurus
tttaaacccccagaggactcccctcaccacttcaagttttaagattggctccaaccagcaagtccaacaaatgggcacctttgtgagttgcattatcttgggaatgatgctataccaataggtcgtggtcgaatacccagtgcagacagattgacttttttcttggtggaggcgaaggaaaatcctcacagttttctctaa

SEQ ID NO: 15938 - DNA, 201 bp, Bos taurus
taggcttgtggagcaggaaaatgctgatattccggccactgctatttcttgaataacaatattgtttgtcactgacttttgacagaatccctgaaacttcgatgagctacctaatttgcttctagtcaggataaaatctcagacccttcgttgttcttgacaacatcatgaaaaagacaaagaagaatgggacttctttag

SEQ ID NO: 15939 - DNA, 201 bp, Bos taurus
gtgtagatcaagcacctctcatgggtcccttcagctatagctaggggcgtggtcaggtgagcaaagttcgggaagggaaaggcattaaatcaagtcacaacggcctggagattaataataaataagaagtttttatactctcttcgatgtgactgagaaaccatttaagtttttaaaactattcccaaaataattcaaagc

SEQ ID NO: 15940 - DNA, 201 bp, Bos taurus
tgccaaagacagtaatagaacgggtgccgtcgagttctccggccacttctagtgcagctgtgagaggctcagcttccgtgatggctctcaattttgtcaccgtcagctttggatggccagccactatgctgttcatcttcaaggctcttgtctcctttgcaaaacttcttgaaccaccacagaactgtatgttcgttagca

SEQ ID NO: 15941 - DNA, 201 bp, Bos taurus
acagatggaagagcgggagaaggactcttgtttttggttttaacactcctattagctgaagcactgactctgctctaaaagcagctgctcaccttccctcatcttggctggaaaacagcctactgtaaggcttaggggaccgcatgacctccctgaggtggtcaagtcaagagcagagttagacaggcaacaaatttcatg

SEQ ID NO: 15942 - DNA, 201 bp, Bos taurus
tttttttagtgcattaatgaaattctcctttctgagaatattaggaaataggatttttaaattaaaaaataataaacacgttcctttttctcaagaaatatacctggtttagtgttttgcctctatggtatgaaaagacaacttttaataaaagacagctcggaaaatattttacaattcccaatgaaaggctaatagcaa

SEQ ID NO: 15943 - DNA, 201 bp, Bos taurus
tgtttctatgacttttattaatttaagataggctatatctcactttaaagaaaagctcaaggggcttcttttaatcattactttcacatcttcagaacatgaactgtttagaacttaaagtgaatatattctttttttgtgaactgagatatctataagtaaatttttacttttaaaatagttttagatttacagaaacat

SEQ ID NO: 15944 - DNA, 201 bp, Bos taurus
attcctaaccttagacaactgaaaggccaatagccctgactacacgtggaaggtctgcatttggtacttatctagtattccgttgatcaacatcaactaaaggaatggccttgaaggatcagaatacctgttccccaaacaaataaggtaattaatgaaaagaggaggcagccaaaatggcagggtggtctgggatccgta

SEQ ID NO: 15945 - DNA, 201 bp, Bos taurus
tgaatgagtttcttgaactcatttagtgccttgtctataacagtcccattaccaagccaccatgtaacttggcaactgttcatcaggggtggcctccggaatgaataagcaagaaggaaatccagccacttgcctcagcacttcatgttatacctgatgctcttggcaggctgtgattgaaagcaggtccttgccgcatgg

SEQ ID NO: 15946 - DNA, 201 bp, Bos taurus
gtgcttgtggttgaaatgcagtcatacaggaaacaagaatgacattgagcagtggatcagagatggtattaaggttttgataattactgaaaattataattcttgcccaatctgaaatgctcacatatataagtaaaaagactgctattgagatgacctattagttattttaaaagagaaacatacttggtaacatactgt

SEQ ID NO: 15947 - DNA, 201 bp, Bos taurus
ggtcaggcctttcaggaagggtgttaggaaagctagtttagaagccaaatgagcaaatgacgaacaggagggacacagggacatgtggtggaaggcgacggagtcagaaaatatcccggccaggagctaggtattttgaaggtttagagcagagacatgtaccaaagtccaggtttgaaaaatcaaaatcattgaaaggta

SEQ ID NO: 15948 - DNA, 201 bp, Bos taurus
atatttattcttaacatggtaaaacttcaggatttgtagtatttacatagctcccaaccatttccattgctgcaagacgtgggccatctataaatctcacatggtaatcactgacatttgtctttgttattgtcacctggtatcttcatcaatgtcaaaataagagtcttaaaaatgaagctctacaattttactggcccc

SEQ ID NO: 15949 - DNA, 201 bp, Bos taurus
ccattttgggccaacagttttccacagtcctggctggctctataccatattagtatctaaatgtaatacagtcagaataaaactgctttaattgagcataccagagacaatcaccagattggcccaggagtgtgtcctcgtgtgctgttataagacagaggatccttcctgattttaatcctatgaaacaaatcacttatg

SEQ ID NO: 15950 - DNA, 201 bp, Bos taurus
ttatcataaagaaatataaggttaatccttctgacatacagacatctgaatgatttaccaaagcactctaaattgcactcaacaaatatctacttctataaaaagaatatttattttaaatcattgcaaatcctgtgctttcaatacgttttgatagtcattaatatttttatcacatttcctcaaaggtgagctaattac

SEQ ID NO: 15951 - DNA, 201 bp, Bos taurus
acctgataatagtaataacttgtgaaaacctccagagaagaaaatgacagattcaccgatgtgcctttccggacacatgcatgtggcttgtgttctggccatggaatctctgacaagaacctgtgacagtgcctcgactctagagccaggcactgccaccagtacaaaccagagacacggcctgtgctgggctgcacccct

SEQ ID NO: 15952 - DNA, 201 bp, Bos taurus
aaggatacactgggaatgtgcagtcaatgaagaatagtctaaagagaggaagccttggaaactagtcagcagaaatattccagttttggaaaacatgtcagaaaagacaacatacatgagatgggatttctaaaactgccaactcagatttagtcttcttagccatgcttggatgaaatactcctttcataacatcaggat

SEQ ID NO: 15953 - DNA, 201 bp, Bos taurus
tttttcatgacacaagctaatgatctggtgctttcttgcatgttgaggttaatagataactaatatattttagcacattcattatggccagttttccactgagaaaaaaactgcatattgggttgttctgctttgacaaatgtggtgctacatcgtgaaggctgattaaaatcaatacttctgtggaaaattacatacaag

SEQ ID NO: 15954 - DNA, 201 bp, Bos taurus
aatttagttgaaggacattggttgggatagaaatctattaaacaggattctggcttttctacttataccactctactggcagtacaatacttagataaggaggattagaaaaatcataggtgatctttctgctgaagtaaaattgtatctacagccaaaaaaaaaaaaaaaaccaaactttttgtaatggtcttctcctgt

SEQ ID NO: 15955 - DNA, 201 bp, Bos taurus
ccttaaggtcattgcacttgcagcattctctgtttgtaacaggaaatgttaaaaacaaaaccacctgaacagaagcacccaggtgctctcaggggggcctggagggttgtgtagtgttggcgcttgtgaccctggcaggaggcgcgtccgtagagccactgcccagcgtccccagcgacagccatgttgccacggccccgc

SEQ ID NO: 15956 - DNA, 201 bp, Bos taurus
tagcctttgtgccctagttgtatgactttgtgttttacattgagaatagaattcctggacacaatagcaaatgccgtcatgggccaagagttctttgcctataagtattataatatttttaataataccagcttctctaacgtggaatcatggctcaggaaatctccaccttttgtaagactttccatcaggccaggcagt

SEQ ID NO: 15957 - DNA, 201 bp, Bos taurus
tctcctccaaatatgactatgtacccttgtaatacagattaaaaagccaaagagaggaaagcagtaactctgaacaccatgaagctccatagagactgaagtaggagccccgcccgcctctcatctacctcttcagacacatccgcacacggcacgcagttcatgttcagcgcttactccaagggctgagactcactaaaa

SEQ ID NO: 15958 - DNA, 201 bp, Bos taurus
aagacacagcactaaatagacttaaaagcacactcatttacagtataagagttcaaacaggaaggcaataagacctttggtttgatctcaactggaagcgtgtacgtgggtgactcagatttttcctactctgtgtatgcttgcaaatgaccacaaaagttacgctgagtattgactttgaggtttaaaataaatgttagc

SEQ ID NO: 15959 - DNA, 201 bp, Bos taurus
aagaaaataattagcttcatatacaccaagaacattaaaactagtatgaatacattttctgataccagtttttttcctaagaaaaagttttaggtccagcatatagttttactttatgatagtatctcctacagtttaactttattgctaatacacaaagacatggagcctgtggcatatacataaaaaaagatgaagcct

SEQ ID NO: 15960 - DNA, 201 bp, Bos taurus
taccatttctgtcctttattgtgcctgtctttgcatgaaatgttctagggataatctaaatcagatctgtccctcatcacaaaaagatctcaccagcagactcatctatgccaataacttaagacagctttttatttcaagataggagatttacttcccaaatgcactgaaaacctaactgatccctggcttgagtgggca

SEQ ID NO: 15961 - DNA, 201 bp, Bos taurus
ctacagataaatgtgtgcatattgagtgaaatactatatgtaaagcttctggcccagtgcttagcaggtattaggtttgcaataaatatctgttttaaaagtgataattctttaggtctttcagggactaaaaatatttcaaagaaaatgcacatataaacaacacattttcttacctaagtctataagttataatagttt

SEQ ID NO: 15962 - DNA, 201 bp, Bos taurus
ggaagttttcaagctggtggtcttttgtagggattttactgactctaactgaacccttgccgcctctttacattctctgcacataaatactaattcagtggacttgcctgtggcttactattgtttgcttgccctgagttgcaattcctctgctattcctgactaaactcccttttttctttttgcttgtctgtttacctt

SEQ ID NO: 15963 - DNA, 201 bp, Bos taurus
gagagcagaggttctgatcatacagatcataaagagagtttctgatcataaagagccttgacagtcacatgaaaattttgacttttattctaaaaggtacggaagtttttgaaagggtttgaactccagtgaattgatactgaatttttacagtattcttcatactgagaaatcattagaaagttattgcagtcatttaga

SEQ ID NO: 15964 - DNA, 201 bp, Bos taurus
gagatgaaggtcagcttttgtaatatgccggaatcacacaagtgacaagggtggtgttattgtttagtcgctaagttgtgtgtgtctctgtgtttcctgggttattagcagccagattctttaccgctgagccacaagggaagcccaataaggacataagctgcttcgatcatgtccgactctttcagacaccatgggata

SEQ ID NO: 15965 - DNA, 201 bp, Bos taurus
gatggacagggaggcctggcgtgctgcgattcatggggtcacagagtcggacacgactgagcaactgaactgaactgaactgaatcctgttatcttaaaacgtacattacgagggtggccttcccctgtagctcagtcagtaaacagtgtgactgcaatacaggagacctgggttcaatccctgggttgggaagatacccc

SEQ ID NO: 15966 - DNA, 201 bp, Bos taurus
gtggagacaactcaacatcaacaaggcatcgggcccaggaactgctaacaaacgtccagtgcagtggtggttcaacaagttttgcaatggagacaagagcgctgaaaatgagtggctggccatcaggagttgaccatgaccaacaggggatcactgaagctgatctcttacaatgaaaacacaagttgcctaagaactcaa

SEQ ID NO: 15967 - DNA, 201 bp, Bos taurus
agcacccccaaaaacagccatcgcccacgcccggcggcccatctgcctagcaacgcggctcgcccgctcggacccgccccggccctcccaggaatgcccacgggattcgtcctacctcctttttcttctgtcctccgccgagctggatacacaggagcagcaggaggaggaggaaggggaagctcccggtggggagatacc

SEQ ID NO: 15968 - DNA, 201 bp, Bos taurus
tatatatatgtttgagtttttaaaaaaacactctcagagaaacacttcgaataatgtttgatccaatatctaggcacccaatggcccactcaagttgacaaataaagctaaccatcacagaaagaagccaccagcagatgaaggtctggatcaattcagtagacaagtgcgagaccagctcaactggcctagagttaggga

SEQ ID NO: 15969 - DNA, 201 bp, Bos taurus
tgtgttctggccagttgaagctgaaagaccaatttctggtccagtgttctaatgatggagccctgaaagggtgatcaggggtggcaaggtttctaggcttggagctattgcggttcttccggccactaaaggggggcccttgtttcaatctatggtctcttcaaagtgggagggcaattcagatagaggatcagtaggatg

SEQ ID NO: 15970 - DNA, 201 bp, Bos taurus
actgcttccattataaccctctgtttgtacctcctcataattttctgacaaattgtccctctcagatgaagtctttcatgcttagtcttatcctagtggtacattttctttccttgcctttataaagaaaaatgtaacctttttttttttttttaatccaagttcaaacaagtaccaagcagccattccttttagtgaatt

SEQ ID NO: 15971 - DNA, 201 bp, Bos taurus
gtgttgtgatttctcacttttgggcaatgactatctgctgttatcaaacctagtaccatcaaggtcaagaagataagtcaattttgtctcattacacaatgcttttcatgctactgtgacttgtatgtaaactgtatattttaaattatgtacccagggtaataacctacactctattttttacagctgtctttgagtaat

SEQ ID NO: 15972 - DNA, 201 bp, Bos taurus
ataagacttaaatgcaggattagagaacgaatgtgccagaaaatgtgtacttcctttcagaatcagagtcaaaagatcctcctgaattctcagtggtgcccaatcagaaagaccttttctaatgatttaagaaaaacagtacaacatctaatttgaaatgacaacctgaggcctgactttcctcatctaatttgaaaatct

SEQ ID NO: 15973 - DNA, 201 bp, Bos taurus
caggccaatgttctgatggtgagaagacgtgtgtgcgtataatctcaagacccactgacttattttgcttgtttctttatttgttgcaatattggaagtgtatcacctattcattctgggccggtcaactcaggaattgtgtacagttacctcctctgatgcaagtaaacgaagaaaaaagtaaataaccccaccatctaa

SEQ ID NO: 15974 - DNA, 201 bp, Bos taurus
cacacataactatatgcaagatagtgttgaacattttatgtaatactgaataatgtttaatccagtgtaataaaactaatttagtaagtctttcagaagcatttaagtgaaaagtatgtatgatcccaataaggaggagtaaaatgaaaaataaatgtaggaaatgaattctatattaaattttggaacataaaaaaataa

SEQ ID NO: 15975 - DNA, 201 bp, Bos taurus
atttgagaaaattgctttattccaggaactgcctcatgtagcagaaatttatttaccatctgtgtggactttaaaaattttccatcttaactgatacacagctgaaatagaaacagactttccgtgcgtaggttttccacaggcctcaattttttaaagagtgttagctaagaagcttttgggatttttgtggtcccaaag

SEQ ID NO: 15976 - DNA, 201 bp, Bos taurus
ggattctagatactgctggctaaacttaccccttaaataagaatatcaaatcctgggtaaaagggatagccaaacatttgcctagtttaagaaacagaggcactcgttagcaaagacgtgttctagaaatgcgatacaacagttgccttttggaactgcataaagctcctcatcacaggaaggctgagagaagtattacag

SEQ ID NO: 15977 - DNA, 201 bp, Bos taurus
ttaaagaatttaggtttgagtcagcttgccctttggcctcttgggacagaggttaagttgaagcttggatgtgaagtgctcactgtgggggatctaaatccgtaacaatacatggccattaacgtagtatttctattccgttgagacctagttcaagaggcaaaattttaaatattaaaaagtagagatagttctttcatt

SEQ ID NO: 15978 - DNA, 201 bp, Bos taurus
tataaaaattttatttaaaaacatttttttaaaaaaagaatgagtagtaagcttgaaaaaaaattacccaaagggccttctaggcaaggtttgcgtagtgcaagcgttaaaatctgcacacttcccagttcactattggacattctcatttaggtagaaaccttattgtgtttttccttatagttatattttacactttca

SEQ ID NO: 15979 - DNA, 201 bp, Bos taurus
cagataggaaacagaaataaaaatataattttaaattggttgtgtattagaatgtgtttgcaccatacccatggtatgtggccaagtttctccataaggatttgaaatgaccttacaatgaaatttggatttaatgagtttttagaaatgaggggccaagttgccagccctactttgggctatggtaaaatcagaaattaa

SEQ ID NO: 15980 - DNA, 201 bp, Bos taurus
agtctatcagtaatactttgccatggtgattttatattcttttataacaatcacaataggtttcttagaaagaagaataaattctgaagagagactaagtatatgaaaagtggaaaataactcttagtcaaaagtgtgaaagaaatcacacaaataaaggcattccgtttcaaaacccaggtgggaagattaaaatcgaaa

SEQ ID NO: 15981 - DNA, 201 bp, Bos taurus
gaaggccactaaagacagagacagaggctggagctatgcttctaagcagaggagcccctggagccaccagcagctggaggaggcacctccttggagcctcgagtgggagcttggcccgtctttctcacagccttggtttgtgcccatattccaacctagactcttgattctgtgcagtccctagtgtattccagaaatttt

SEQ ID NO: 15982 - DNA, 201 bp, Bos taurus
gctttccagcctgcagagtttctcacccacccccacccgggacccagtctgtgtcccttgaagacacccctcgctgacaatgagtgaggcctggaagcaatgtctgccactcgattgtacccttattctgaatatcctttgtgcatttacaagccctcaaacctgagcgggagctctgagttctggccgagcacactgtcg

SEQ ID NO: 15983 - DNA, 201 bp, Bos taurus
gggggttggctgccgggggagagcctgaaggggctggggtgtggtgctccctgctgggggagcacggaaagaagcctgggccgccagagaggcaggacgccgttgttgggggcgcaggaccaccataggagcttctctcaggcagcagggggctgactacacgagctccgggggtgttagccgtgaccgccgtcccggact

SEQ ID NO: 15984 - DNA, 201 bp, Bos taurus
cacctaagaacaatgagtctctaactcctggcctgttaaggaagaaacgctacatgttcaagagcttgatcatctgttcacacaggggcagatgggaagaggtgaaaagaaggccatgaatgaccaatggaaagtaaagactgaacaactacaattcacagacggggccctcccaccagctgccctgcccacaggtcagca

SEQ ID NO: 15985 - DNA, 201 bp, Bos taurus
tctgggctgtagggagacaaggggtgggagatggaagtttgggtcaagtcacagacagccttggatgctatgatcaggaatttagcctccattctagagcccatgagtagccgctaacaggtttctaggtagatagtccaataaccaggtttatatttcacaaagatatgtctggcagcatttggagggaaaatgggaaag

SEQ ID NO: 15986 - DNA, 201 bp, Bos taurus
cagaaattctgagctgaggctggggaatctgcctctgcagatgtttggaggccctcctggtgattctgatgctcagctccaccaggcatcagacccactggacagcactgcttcccacagcagcactcacacttgtaatgggccttgtggctgggggagttccatcaccaaacctgccttgacccattaaaaatcccttta

SEQ ID NO: 15987 - DNA, 201 bp, Bos taurus
atttcttgaacattccaggcactttgtcagctctgggccttttcatttgttgtttgcactgcctgcaattctcttccctcagagagcctcaaagttggctccttccctccttcaggcctttgcccaagtagcacatcatcaaagagacctcccataaccattctatttacaattgcaagaccctttcccacagaatcatcc

SEQ ID NO: 15988 - DNA, 201 bp, Bos taurus
ggctgcttactcccctaatgagtttgaggctacagaggccactctggccaatcagttctactctgctggctcctgtggccgtagaaccatcctgaatccatccagccagaccctgcctcaagaggagagactggaaatggaccccaccagttctaagactgggaaggccaccccaaacagggtaaattgagtctggaatgt

SEQ ID NO: 15989 - DNA, 201 bp, Bos taurus
atgtatcatgcctaatgaaagaaggacaaaaacaaacaactgatttttttcagtggttctcaccaagaggttatattttctgcccccaaagtggccttgacctctgctgaaataagcaccagaaaatgaatgtattcccatgattggtaatgacagttacctcattatgagttcacatttcctgtcacttgggcaattagt

SEQ ID NO: 15990 - DNA, 201 bp, Bos taurus
taagaactttcctacttttccaacttactattttagtctttaaatgaccttgtcccaattacacagatcaagaaatagaaggtcattgaactcaaaggccggggtcactcagacgtggagcccagggttctgcccagctctgcccaccttcactctcaggctctttctggatgtcagcttccaccccgctgaggtcccctg

SEQ ID NO: 15991 - DNA, 201 bp, Bos taurus
ttgggtctgggctatttaacttttctgtcccattttgtcctctgtaacatgaagataccaatagtaccaaactccacaggaccattgaggagcgtcaatgaattaatatgcaaaggcctcagagcagagtctggcaaacgacaagctctcaggacctgttatttattaatatatttacatcaactggaggctcatgtgggt

SEQ ID NO: 15992 - DNA, 201 bp, Bos taurus
tggagtgggttgctgttcccttttccaggggatcttccctacccagggattgaactcacattgcaggcggattctttactatctgagccaccagagaagcatacttatagcctacttttataatgatctactccccatcccagatccttaacccttagcaaccaataacatgttcatctgtataattttgtcattttgaga

SEQ ID NO: 15993 - DNA, 201 bp, Bos taurus
gaagcagctgcacaaccaagggtgtgtcagagagccatggctttaaataaatactgaaacttcctttagattgatgtacttctttctgaaaaactttaacgtgtgtctgttttagttgcgggtcttgacatgaatattagccagttcctaaaaagccttggtcttgaacatcttcgggacatctttgaaacagaacaggta

SEQ ID NO: 15994 - DNA, 201 bp, Bos taurus
atacgaggtatcaggcagggcggccggtggggagaactccagagaggacgttgtgcttcctgtctacctgcgggagcgcaccccagcccgggactacaagggttcctactatggcctgatgctcttcgggcacccgcttctggtgtcggtgccccgggaccggctctcgtgggacgccctgtatcacatcctgctgtaccg

SEQ ID NO: 15995 - DNA, 201 bp, Bos taurus
tatttgtccaaagccccattgctgagaagtggcaaacccagagtttcatcaaacccagagtctctgacccagatccccagctcgtaacctttactggccaggatggtgggggtcctggatttcctagactgcagtgagaattcttagcaacattttgcatttagaattctggtaccaagtgggccactgccagggccattt

SEQ ID NO: 15996 - DNA, 201 bp, Bos taurus
atgagtaagagacatgaggggagaagagaagcaggctgtggtccagggctgtgcaggacacagagcatccgccctggcccccagcagcccttccagtcctgccatcagcatcatggttgctgggaataacttttaatcaggaaaccaaagatgtgttctctggggtcgagtctcaaagtctaagccaaacagcagagaggc

SEQ ID NO: 15997 - DNA, 201 bp, Bos taurus
actctgggctagactggagggaaacattgctcctgcggtgcctgggacctgcaggctctgtgacagcctcagttttgagggcctccacttctgccacttactgtgtggagaccagcccaggaataactgctcagtggtggtttgaacagctggatcatacgccaccgattcatcctcagagaccctcacacaggcctgggc

SEQ ID NO: 15998 - DNA, 201 bp, Bos taurus
cccggagcggagaaggggtggcgggtctccaggattaggcgccaggtctcacttttgaatcacctttccacaggaaccagagaccacgaaatgggccggagaccgttgaggcgaagaagaaggtgctgcggcagagtggcgctcagttgctcggacccaaaagtccaaaagcaccctctacggacacaaggctaaagggcc

SEQ ID NO: 15999 - DNA, 201 bp, Bos taurus
ggaaacaacccaatggccatcaactgatgaatgaataaacacaatgtaatgtatctatgtaacaggatattattccacaaaaaggaatgaggtactgatacatgctgcaacatgcctgggccctgaaaacactgttaagcaagtcaccagtcacaagaggctactgtttatgacttcactcatatgaaatggccagaatag

SEQ ID NO: 16000 - DNA, 201 bp, Bos taurus
acttcagccatttactcaatggaaatcagggtgattaacaatttttggctactacaaataaagctactataaacatttccatataggttttagtgtggccgtaagcatccatttctctgggataaatgcctcgtagtacaacagcagggtcatatggtagttgcatgtttagtttttcaagaaaccatcaaactttttcca

SEQ ID NO: 16001 - DNA, 201 bp, Bos taurus
ttctcatttctttccactcatcatatttactttgtcactgccaaatctcaatctttcagaaagggcaccatgtggagatcatcaaatccttttggagaacaggggccatctgttgagtcctatttccccagagggcattattctaaagctagacaagcttaaaacaactacacagtaattccagtagctacctgtactcac

SEQ ID NO: 16002 - DNA, 201 bp, Bos taurus
agatgtgtctctgataagctatttgattgtatacaatatcatctgaaagagcttgtgcagttttccccccctttttcctattttctttactactacatattgagtatagcaaattttcattcagagttaaatattaaaatgaaattaatatttcagttgaattaataaagatattagcataaattgaaattccaaagaaca

SEQ ID NO: 16003 - DNA, 201 bp, Bos taurus
tctcctgactttggggcagggcctagcctcctctgttaattgtcctgctattttcgtctcggagttttggtcaatatggaatgaatctccaattgctttaccccgaggggccatctacctcttgtctcaattctgtcttggtggtggaataggatctgattagcaaatcagactacttgtagttagtgattagattaattg

SEQ ID NO: 16004 - DNA, 201 bp, Bos taurus
tgcctcactgtctgcctctgtactcacatggccatggctgtcatgcctgtgtctctgcctccagatttcccactttctataaggacatcagtcataggactggggcccaccctaatctgatataatctcccacctaaacttgattacatcttcaaggagtcatttccaaataaggtcatattctgagatagtggggattag

SEQ ID NO: 16005 - DNA, 201 bp, Bos taurus
aagcttgaaaacaaataacataatttgcataatgaaaccattgagagtaaatcgctgtcattcgtcagggtatctgtaccattttgacttacagtttaaactcattcaagtttatttttctccttaccccaactaaacatgcttttgatttatccttgccatttaatgtcacataaaataaagtgttccaccagaaggagg

SEQ ID NO: 16006 - DNA, 201 bp, Bos taurus
aggacaaataaagagaaaagagtacaaaagttgagacatacaggatgtaaggatgtgattccatcactttactaataagacattaaaaagtacagagcagactggatgagagacagtagtcaaacaagagaataggtgtattttagagctgaagggaatcatgtatctttagattgaaaactccctttggctacagaagaa

SEQ ID NO: 16007 - DNA, 201 bp, Bos taurus
cttttaccccataaagttgctgtagagaggaagtggtccctgttcctaccatagatatgagaggatgttctatcagtggagtctgaggttagcctgagtcctgtcatctgctcagttactttagtaaaagcttagatcgtcactgtactaattcctttatcgctctgagtggccacgcaccatcagtgtgtcatgtgaatg

SEQ ID NO: 16008 - DNA, 201 bp, Bos taurus
ctagtagtaagaataaacaatttataaaaattgccaatgtctgttaatttcatcctaactgtaagcttcttcatctcgcatgaccacaggacagcactctctcttctctctgaggaggggtcctccatcgcataaatctagaggaatgcttagaaccctctatgtaagatgagatcctagagcatttacccttttcatcct

SEQ ID NO: 16009 - DNA, 201 bp, Bos taurus
gctcatttccaccccaccccccatcatgaggtgatgattgacagccagctctaactacacaaaagagggcagtaagaccgcattaacttggataccagtgtctctcaaagtgatttgaaaatcaatagcaagttctgaaattcactgtgtaagaaatagtaatgttgagggtcatttagaagaaagattagtctaatgaat

SEQ ID NO: 16010 - DNA, 201 bp, Bos taurus
aagggatgtggcacatgaacaggggtggggaggactctagcaacaacttttttgtctatgtttgtctattagtttcccgagtctggccctgctgataagcatcatgtcgtggctttccagtgacctggtctccactctactttttgaaatactgtgagctccagtgaatgcaactaggtcttgttgtggcgcatccagcag

SEQ ID NO: 16011 - DNA, 201 bp, Bos taurus
caaaggcctgtttgcggttagaaaaacataaaggtggatgaacatcagtttacctttagttagtgaagacgtcgggtttctctaacaggatggaaggttgttgaatgacatctggcactgggcctggcacacagctggggctcattaaaagtctgataaggttgcttaggttctaatcctggatgtaagaatatttaccat

SEQ ID NO: 16012 - DNA, 201 bp, Bos taurus
taacttcatgggtccctcacttttttttttaattggaataccattgctttacaatgttgtcttggtttctgctgtacaatacagtgaagcatctatatgtacacgtatatcccctcggccttggaccttcctcatcccatccctctaggcgatcacagagcaccgagcggtgctccccgggcctgagagcagcctctcact

SEQ ID NO: 16013 - DNA, 201 bp, Bos taurus
gatgtatctttgacttgggaccatgaaggagttccatggaggggctgagatgtgagctgggggaagattttcaaatggatggggagaagctaacagatccgcttgagtacttggtcctcttataagaagcagcaagttttagggatccttttaagtcctgaagctttcttgtgaaaattgtgattaattcattagcaatga

SEQ ID NO: 16014 - DNA, 201 bp, Bos taurus
tgcaatcaacttgccttagaatttctctccactttgtttattactctgagaacacaggcctgcagttcattttcttccaacctaagtttcttcatctgtagaaaggatagcgctggtttagttgctaagtcgtgtctgactctttgtgacctggtggactgcaccctgtcaggctcctctgtccatgggattttccaggga

SEQ ID NO: 16015 - DNA, 201 bp, Bos taurus
tattgcagcattatttataatagccattataaagcattctaaatgtccatcaacagagaagatgtggtacatacatgcaatgggatatcagccataaaaagggacaaaactgagtcatttgcagagacatggatggacctagagaccgtcatacagagtgaaataagtcagaaaaagaaaaacacaaatatgtggaattta

SEQ ID NO: 16016 - DNA, 201 bp, Bos taurus
ctcacttcaggggtgggcaggaacaaatcacggcagctgacagatgcgtgcaaggtacgggaaggcgctgccagcaggggcaaggcttgcccaagacagcagtcttcccggtggcctcacactcagccctgctcgcggctggccagagctggtcttggccccaggaaaaaaccacttctcccttttgcaacctcctttccc

SEQ ID NO: 16017 - DNA, 201 bp, Bos taurus
tcccctgcattggaagcatggagcctcaatcactggaccagcagggcaatccctactttcctagttcttcttaacggctgtgttttccaaatgttctgttctcatactaaataattctgaatcaatattcttaataaatatgcaatttgaatttgaaaataaataaaagagaagctgatatctctaggtaggttctagaag

SEQ ID NO: 16018 - DNA, 201 bp, Bos taurus
tggagggccgggtgggcagaggaaaatcagaagcaaaactgctgccatttcatcaaactttaaggtttgatactcagatggcaaacaaatgtaatacaaacgaatataatgcattacaaaaaaaaggaatatatttctaacaattacaaaatatgttagagcagtataaaagtagaggatggtctgcatcatacataacaa

SEQ ID NO: 16019 - DNA, 201 bp, Bos taurus
gtgttcttgcctggagaatcacagggacgggtgggctgccgtctctggggtcgcacagagtcggacacgactgaagcgacttagcagcagcaggattcttaggctatcgagttccagatttctagcgccatagagaccttcctcatccccagccttccctcaccccaacttcacatggattgtgtggtctccggcacctac

SEQ ID NO: 16020 - DNA, 201 bp, Bos taurus
tgtatactcctgtgccttttgatgagaaacattaaacatttttaatttagtacatcaatttgaaaatctaatttttttttaatgctttgtagtggcagacatgttcacggtgctgtcacgaccatcgaagaattatgagaaacttgaaccgcaaaaagtaaattagaaaaatctcatttcagttactctaaaaagagggga

SEQ ID NO: 16021 - DNA, 201 bp, Bos taurus
caagtacccttcggagtcaaagctgcaacaaacttaagtggcctacaacagcaaaaatttattatcttaaaattctatagcttagatgcccaacatgggtactgatgcagaaaatgtggcctccgtgcactggtgctaaatcgaatcttggagacaagagttttggatgaagtagaaatgaacagaggagcctggcaagcc

SEQ ID NO: 16022 - DNA, 201 bp, Bos taurus
ctgaaaatagaatagtagaaaaaaaatgcagaaaaaattcttgttctcagagacctcaattctactagaaagaaacaaagcataaataatagatgagtaaattgttttatatatttgttgttcagtcactaagtcatgtccaagtctttgtgacctatgaactgcagcatgccaggcttccttgtccttcaccatttcttg

SEQ ID NO: 16023 - DNA, 201 bp, Bos taurus
gatacaagacttagtgattagggaataggattttaatgtccatacagagtaaaagatgtagctgtgggtccagatgagaccaattgctggaacagacatcggcaaagagctggggtccctaagagctgcccaggttgttagctgaatgagaaaacattgttaagtcccaagaaatggcatggaaatatcccctttatgttt

SEQ ID NO: 16024 - DNA, 201 bp, Bos taurus
taaggagaggagaccaataacatgattatatagaagttatattgcatattagaaagtggtaagtaaatgcagaaaaataaagcagggaagaacaataggaggtaggtgaggatatgaagacaatttttaacatagtggtcagggaaggtctcactgaagcatctcatctgaaagaagacctctatgtagagtgttccagaa

SEQ ID NO: 16025 - DNA, 201 bp, Bos taurus
tggtttgtatggagaaaatataaataatatggcccatttgaggaagagttcccattaaaaaatccaaactgggttaggcattttttgtttactatgaatccgttcttagagagtcattggccttcttgggaaaaatgatgatacatttccatttattgaagattgtttgagcttctggctaagacattatgggagatactt

SEQ ID NO: 16026 - DNA, 201 bp, Bos taurus
caaagtaactcagtattctacagtttacaaaatgatcaccactgtagacaagtatttaaagtgacagtttattcaaatgaaactggtagagagagcagaaataagaaaagagttaaattcaaaagtgtttactactttgcatgattaaaatattcaactatgttaatattcatgctataaacttaatgttcttattattat

SEQ ID NO: 16027 - DNA, 201 bp, Bos taurus
gaatcctaggcgattgggtatgggggtctcttttacttcctctgctcagtcctaagttggaatcaaagacaaaaattagagaagcagtcagttatcaaccggttcttggccattaacagataatcattacagaagttattggtcacctttctggattgttcctagagacagcaatctgacttcgtaccagtctgtctgaca

SEQ ID NO: 16028 - DNA, 201 bp, Bos taurus
cctgttcatttccaccaaaccactctgtcttctgcttagcccatgtaaactgaaggtgtttccatccttccagtggccgacatcaaagtctttgagttctgtgctgtctttcttttgctacacatatctgggctgccaaaatttccattgactctactttcaaaataggttgagaatttcaaatcccccattagtctcatc

SEQ ID NO: 16029 - DNA, 201 bp, Bos taurus
tgtccttacattatatcaagcctttcttctttattactgtgtaggctgaacagagcagcaaatgacctgtggttgatggagagggttttcagtggaggccgaagtgccagacactggcagacgccctactccgcctcatgaatggtctgccctttctgtaccaattcttaaccctgagcctttcatctttctttctttctc

SEQ ID NO: 16030 - DNA, 201 bp, Bos taurus
gagagcagttgacctgtcagattacgaaacaaataacagagctaccagccaggcccattatcttagcgctgcaccacacctgcgcacggcagacacctccagagtggtccatcattcaaaagggccgtattttacccaatgaggtgcttactacgaactgctatagaaatgatctactaactccagcttcgttggcagtcc

SEQ ID NO: 16031 - DNA, 201 bp, Bos taurus
aggaagttattatattcatttatattagtttgaaagccacagaaatgtattatattattttaggctgaagaattgaagcagggccattgatggtattttttccccctgatcatccagctttcctctgaaggtcatcttcatgaaatgtgataattttggccttttcattttatttaagatataagcaaaccatgagacctg

SEQ ID NO: 16032 - DNA, 201 bp, Bos taurus
ttttaattttctgaattaagagcctttaaaaaatatctcttttgtgtattacatcctctaatcatcactagctcccatacaaaaggtatgctttctctcttgtacaggaaattggactcagagtgcttaagtaatttgctccaagtcagagccagaatttgattttggaattgttcacttcccgcttcctatgtttttatt

SEQ ID NO: 16033 - DNA, 201 bp, Bos taurus
tggttggtgagaatttcatttgaaatcctttctgtatcttaaaaaaatagtatatctctggggtacaagattattcttccatctgaagcttcccttttgaattcttatatacgtctctctgtttttatatgctcacttttcaaaattataaaagttaagtggcatttttagtcgctgctttaaagttattacacatgaatc

SEQ ID NO: 16034 - DNA, 201 bp, Bos taurus
aaatgataaatataaaactgctaaaattgtgtgttattttatcttttcagttgtaaaacatttcattgtgttttacagtattaccaatgtttaaatagacacagtagtagtttctatgcttctaaaaacaaatagaaaattatgaacttttacagttccaaaaagtgctggtatgttgttgttgttcattcactaagtcat

SEQ ID NO: 16035 - DNA, 201 bp, Bos taurus
ctcagtacactttccactcccccttgatgtattaataatcttttatttttaagcacatagacatcattagaaataaatttcagagccaggctggctgaaagagggccatttcaaggaacagctgtgactgtaggatggtttaaaacagaaattctgagctgaagaggggaagctttgtttcccgccttttgtattatggat

SEQ ID NO: 16036 - DNA, 201 bp, Bos taurus
gggttatgaaggctaagcgtcgtttgacttcagatccatctggttgtcctctggtccaggtgaccattatctgaggagatcagagaaccagctggccgtcgtggtctctgtctgctctggctgtcacattcagagacaggaggagacgtgaaattcttctctgaaggtcacatccctgaagccagggcctcctcctatttg

SEQ ID NO: 16037 - DNA, 201 bp, Bos taurus
aggtaggaacttgctatgaattttctagaacatgacagagtccggtagggctggagtagagtgcacagaggttacttggggaatctaaggtgggaaattaactaggggccagaccaagaaggactttcttagccatggtaaggatgtgcagttttgttcttagtggtgttcaaagctgtagaacgatttggacccagaaaa

SEQ ID NO: 16038 - DNA, 201 bp, Bos taurus
tttcgtatcccggaagcacacctgaatattgctgcctgtctcattaaatcaacataaacggctcagtgagacacacagcacaagtttctcctggccacagctcccagccctggatgactagcaacccccaatgtgaaatgatggaatagaggaggtagaaaaaccaccggccacaggcttcaggtacattttatatacaag

SEQ ID NO: 16039 - DNA, 201 bp, Bos taurus
gctatagaacatattctgagccatgtcctgtgagctgtcttgtagatactgaaacccctcaccaggtggaagaagttaactatatgatggccagattgtaaccatgcatgagtccatttttttttcctttaataagcacaggtgtgtgtacaggaggtaagaactggctaagaatgtatagctttcacagtgggccttagg

SEQ ID NO: 16040 - DNA, 201 bp, Bos taurus
aaccttgtaggtatctgcagttgtcatggatccctgagtgagatctgtacaggttgcagagacagcaagtgattcttctaatgaaaagctgattttctggccccaagtgctatatgggaccccaatctggagccaaacctgggcatctgctgggcatgaggattctttgtgtcttgctcttcatgctgttcatgatcttgt

SEQ ID NO: 16041 - DNA, 201 bp, Bos taurus
tgactaagtgttgtccttgtgccaatgaacagtattttctccttctagatttctactggagtgtgatgtgatgtaaaaaaaaaaaaaaacatagcagcttgattcataaggcacaccaatccttatgtagagacaccagaaaatgtcacactgtgctggcttcacagtctgcatcatattagctaagctagtggtcataaa

SEQ ID NO: 16042 - DNA, 201 bp, Bos taurus
tgcatcctgggatgaacacatctccttcagttgtcttttctgtcttcaataagtatatccctgtgcttctgttggaacttttccttctgaactttgctcctgatagtgtcgctagttaacttccatatggtacatctgttatgtgccagaagcatctagaagctaggagacagagggaagcaggctgtggctggattctca

SEQ ID NO: 16043 - DNA, 201 bp, Bos taurus
ggaacatgacactctctattccttaggcaggggtggggccttctttttaaaggttacagtatggtcaggggaaagagaaaaaattctacagtggtgaaatctgacaaacactacctcagtcaggccaccggggtcaacttctgtgctatgaattcttaaattgcagtacagttgacttacagtactatattagtttcaggt

SEQ ID NO: 16044 - DNA, 201 bp, Bos taurus
ccatccagttaatccttaatacatgcagagtctatattgtaaagtgcatattgtatataaagctgttgtagaatactgagtttaagaacatagtgtcttccttgaacattattctgcttttgtcttaaaggctatttaatcagatcctatgaaaaatctattttctttggtgtgtttttgtttgagatatcactttatatc

SEQ ID NO: 16045 - DNA, 201 bp, Bos taurus
atggggctctaataacattgctgggcagttcacattatagagattcctgttgagatcttccaaaccctgtaagaggtggccttggaaatttaataatttatcagtttgtcttcaggttcaagctaaaggttgaagcgtttttaggttcaagccatgggcaagtaaaggcatttgttgaaagtgctgggaactggccaggaa

SEQ ID NO: 16046 - DNA, 201 bp, Bos taurus
acctcctccccagtcggctctgccgtgggccaccagtcgtctttcttgtcaacctggagatccctgaaccgtgaaccttggcggcctcatctggccgggcgcagcctagaagccacatcacggtactgcgcatgcccagctcagtcccactgcgcctgcgcagcctgcacctggccagtcatctgggctgagtgcttttca

SEQ ID NO: 16047 - DNA, 201 bp, Bos taurus
ctgtaggatttcatatcaccttctagaaatccacacctgcttagtactgagtagccagcattttatctcccagaattacctttcttcagaggccaggtagctcttatgttcccagtgctcttgtttccagccttatgttttagaacctctaaagatgccttcctcatttcaattgatattcaattgatacataggaatcac

SEQ ID NO: 16048 - DNA, 201 bp, Bos taurus
ttgtcacgaatcaattatcagtgaacatggccattggtatttcattattgttaataacaagtattattattgccagttagttctcgttggagctagtagacgttaaagttactattcttagttttgtgcttggacagaatgaagcctaactctctttcagtcttcaagatactttcactacatgaatttttagaagattag

SEQ ID NO: 16049 - DNA, 201 bp, Bos taurus
caatgtcacccgggagggtgggctccaggcaggctggccacagggcagcagtgtgagggcgactcagcccaagagcaagggctgtgctttctgtagcctcctggtcttctgtgcatagtgggcctccacagctgcacaggaggttgtcagcatccactccactgcatcttctgcttacagagcccaagcatctcgtcaatt

SEQ ID NO: 16050 - DNA, 201 bp, Bos taurus
ggacctactctaactaggccagtgattctggtagctgccagaagacaaggtgaatggcttctgcagaccgtggacctggccccaaggctggccagagcatttgcctttggattcacaaaaatctaccccacaaacagaatcccatgagggcatgctatcttctgtttcaatgtccacgttataatccatattactatttta

SEQ ID NO: 16051 - DNA, 201 bp, Bos taurus
cacgaggcctcagagctgtacgtgacttggggtgtcacatggtccagctgtctgctgcccacgcatcacctcccgtccccagctgtttctccccagccctcggccttgttcaggagtttcagaccatgttctgagctgtcctcggagtctactgaggcacattagctcctaccgtggggctgtgaggagactgaacgggaa

SEQ ID NO: 16052 - DNA, 201 bp, Bos taurus
tgccttcctttatagtctgtttcagggatacataagagcatgagggtgggattggaagttacctcggctgaagtacagttagtccagtgtttgcagatttgggggaaacatcagtccagtagctgtgtatcatctgggacagaaatctaaaattgaaagacacactttacaatacataatgaattaacagacaagaaattc

SEQ ID NO: 16053 - DNA, 201 bp, Bos taurus
aactggtcttcaggcctggcttcgccagaagcgtttgcctcgtacttgatagggactttgggagcaaaaagctgccctttctgctcatacatcagaaagcggtgcttgcattctggccacccctgaagacccttgtgctcaatctaaccatcccagcatgtgggtgaagagaccaggagccctggtcagtgtcttgactca

SEQ ID NO: 16054 - DNA, 201 bp, Bos taurus
ccgagccctccacaagccccgtcgtgttccaagccaaatgctgggaggacgcgccgtgaaggatgtaccctgtcatcgggaaagcagcgaggggcggcccaccacaggtcttcgttgagacattcactctcctgcctttacctgtttcttgaaggctctgcacagccaaggggaccacagtgatgcctcaggtcagacaga

SEQ ID NO: 16055 - DNA, 201 bp, Bos taurus
cctgtgccaccgctggccatcttacagcacccttagccaagagcatcatttgtgcctgagatcccaaggatctgtgggtccacaggggagcactggaatctacccaggtgacaactccggcctgcacaaacccaaataccgactccgtttccatgggcactttggccggacggtactttgttcaccattgcatttgggaga

SEQ ID NO: 16056 - DNA, 201 bp, Bos taurus
ccgggttcttcattaggggaggggtcagctccagggactgccatcaagcaggtttcagtgacctctccctgacccccagggtgcctctgatctgctcaaggcagggaggcctgttaacttttaccagactcctttgacgtggagcgctaagaagaacccgggagggggcttcacgcaagtgttggaggctcagcgctgccc

SEQ ID NO: 16057 - DNA, 201 bp, Bos taurus
agggtcgagctgagaggaagaaaaggatccgtggacatggctctgacacctgtccttctttcttaaatgcttatggggctgcagagaaagtgggcccaacccatattgatgtaacagacatgtctttgctaaactgagcctgcctctctcttcctccactgcagaggtggtgccctgctgacttccaccagcggccctggc

SEQ ID NO: 16058 - DNA, 201 bp, Bos taurus
ccatgggatcgcaaagagtcggagacgactaagtgacgtcactttatttctttctttcactgagtgtccaccatgaagttctacagttttaggggaaagtgaacggtgtggccccatatggggagcggtagggcagaggaggaggggtgctcctggggggagtcccatttgaactgagtgtggagagtcaggtcaggaagg

SEQ ID NO: 16059 - DNA, 201 bp, Bos taurus
tgacagcagcttcgcagagatctttttgagaagagggaagagttttgtttctaaaggggtgaccatttattatttttggtggatgttatcttcatttggtgctgctcgacactgagacagattcaggaaatatctctcatgtgaatggaacttgaaattgctaattggtaatacagaagaatctttgaataaaggttatat

SEQ ID NO: 16060 - DNA, 201 bp, Bos taurus
tatatttttctgccgctcccatggtgtcaggtaggggaccacctgcaggtgagaagtgtgccaccctagatatgatagataccttctttctggcccactacttaagaactgtttgattttggacaagtcatgcatttgaaagaaatcaagacctgtttacatgttttccctcagttggctggggccccctcacaaggttgt

SEQ ID NO: 16061 - DNA, 201 bp, Bos taurus
acctggagaacaaggggcagcactgtcttagaatcaggagtggcggcccgccgaggtggctttggaaccagctgcccgctgggctggctctggccacagggtctaccctgcccggcaccgccttctctccatgtgtctcatttctgaccagctttccatctctttcttgtctccatcacacatgcagtcagatgggccgaa

SEQ ID NO: 16062 - DNA, 201 bp, Bos taurus
ttagaaaggcatttgtcacggtaagaggacagagcataccttatgttagagtttccgtggtgtgtgggggcctccatttgtagtctcttcctgggcctctggaatgttagacgtgagcctgtgggcaaggaggcagtaacacagtcaaaggtcctgaaacagcaaagcgtttggtgtattggtgcggcccagcctcggtag

SEQ ID NO: 16063 - DNA, 201 bp, Bos taurus
gcagtatgcaacatggcagagcatctcctggtccagccttaggcgagaacatgctcggcgggtcagcccagttctctgccgccccacacatgcccctgaatggccgggaacccaccgcacgtcttgacttggaggcgacatgggaattacagtgagcaggcaaattcacaaatacagaatctgcaaatactgaggatccat

SEQ ID NO: 16064 - DNA, 201 bp, Bos taurus
agacctacctgctagtgttggagggtcttcctgtggaggtgtgggtcaacagtggcttccgcagggatgatggcactggcagcagtcctggaaaactcctcttggcgtaagtccttttggaggttgccattaaccccacacagagttcatagaccccagggctgggttgccacaagccaggcaactaacagagagggagca

SEQ ID NO: 16065 - DNA, 201 bp, Bos taurus
aaaaaaaagaaaactcaataaatttaggctctgatatagtaatttctcttaaggttaaaccttgtcaagaagaacagagtattctggtatgtttcaaaacttcttccattcccctccccctgctgaaaatgcaagggaatttttctctgttatttactgtgagaatctggtctagctcctagaggtaaaattcacaaaagc

SEQ ID NO: 16066 - DNA, 201 bp, Bos taurus
tctgttggtaattatatgtcttcttcagaaaaatgtctattcagctcattttgcccattttgtaagtggaatatttgtgatttttttttgctattgagttacatgaattccaaacatactttggttattaaccccttctcaaatatatgatttgcaagtatttttcccattctgtatgttgctttttcatttgttaactgt

SEQ ID NO: 16067 - DNA, 201 bp, Bos taurus
tgattatcacaagacttataaaaacattttatagtgataacaggctatttaagataacagcttcaatttcatataaaattctacgcttttacttctttccccccacatctcatgctattaatgctgttataacattttttgatagagtgcatccttgaacaaattgttgcagttctagttatttttaatgcttttattttt

SEQ ID NO: 16068 - DNA, 201 bp, Bos taurus
attcaagctgatcctagattttgcttttctttgaaaattttcatattgtccaagcatcagccaatttcattctcagtgtctttgagttgttaagggtatgatcagacctgtcaatgtcctaaaatgaaggacctgacttagcacctaagattggggtgattggaaacctgaccttcagttagcagcctttaaagtatgcaa

SEQ ID NO: 16069 - DNA, 201 bp, Bos taurus
tggtctatagtttctactgagacatctgcttatagcctggttggggtttcattgtaagttacttcatttttttctgcatttcagattatttatttttgactatttcatacaatgagtcttacagaaggtctttttgcgttaatctgccctgttgtctgtactttctattgcattcttcatcttatttcttgaattcttcag

SEQ ID NO: 16070 - DNA, 201 bp, Bos taurus
ccaagacttatgactcaaaatgacaagcgctcaatttagctcagaatcctatggggcagcctggggattctcctggcctgagatgacctagccatccttgactgggttctctcctttgtctgtggtcagctggcagatcagctggtggctgaacaatgtgggatggcctcattcacacgcctgttgatgggcaggctgttg

SEQ ID NO: 16071 - DNA, 201 bp, Bos taurus
ctcctccttttctcctagggcctcgaactctctttcatctaggttcccactttttgccttataaaaactcaagtttggtggagacctagaaagaaaggagaggcctgggaacgagaaagaaccagaggaggcaaaccctgaactgactttggatgaaatggagggtgactggaaggctaagtgatggcaaacatcttatct

SEQ ID NO: 16072 - DNA, 201 bp, Bos taurus
tctaatatggcccttcatccctctcagcctctcatctggcccctgtcttccaatgttctagtctagtggttctcagaatatgctctgaagactcctacaccacccaagatcctctcaaggccatcctctcaagggcatccatatttttacagtatgactgagatctttttcgctttttttcactttgttaaaattctcact

SEQ ID NO: 16073 - DNA, 201 bp, Bos taurus
atggccagtacatggagggacttttcaatacggatctagaacctcaaatgtatccccatcctctcctcggactccacctcctggactggactccttgtagagagatagttccagaaggccatctgggagcacggtgcatgggaagggctgggttcaggctggtggtgagaaagtataaacccgatgatttacacggtttgt

SEQ ID NO: 16074 - DNA, 201 bp, Bos taurus
cagcaagctcctgcaggccagtccttgtcagcctggataaactggggatgatgacagggaaaccacttcctacacaggcgccagataagtgagcgcgatccgtggccccccagaggaaggcaaaccagtgtcctcaggcctctgatacctgccagatgttttcctaggttcatggattgtcacttaattctaataacagcc

SEQ ID NO: 16075 - DNA, 201 bp, Bos taurus
actaatcccctagaaataaatacaaagatataaagcttaggagactctagagaaaataaaacaggatgattaaaaagtatttgattaacccagaagtgaaagtacctatattaaaatcaaacaaaacagacttcaagacaaaaaggatttccagagataaagatgtttggtaataataaagagagaaactcattaggagaa

SEQ ID NO: 16076 - DNA, 201 bp, Bos taurus
ccatctgagacccacaatcctgagagcaccagagaaaagtgggattgcttaacaagtgtaaggccactcaagtgcgtggccaccactcaggaccttccatcaaggatacattgttctggatactgtaggtgatgcaaagaataataagtccatgaatgggttaaaagtgaggtaggagacagacgggcccctggactggac

SEQ ID NO: 16077 - DNA, 201 bp, Bos taurus
gtgtctaggtggaaagaaacagagccttggcaaacaccacctgaccctggactgatggcggatggggtctggtactggctcatcactcagctgcatccctcgtgcctggtcctctctttccctcctgttgcttttcccaggccacttggcctggagccaacacctccctatgctgacttcagcgggaaagtcaaaacccca

SEQ ID NO: 16078 - DNA, 201 bp, Bos taurus
aaatgtgacagactggcccctccttttgtgattcttgatagaagcatgcacttgtgtattttctgcccagatctgtacattcctgaaggccttccatccatggaaaacaaagcatgtttatttctccccattctcctgtattctcattcggttgaactgaatggcccatttcacagaaaagaaatcccttggaattagtta

SEQ ID NO: 16079 - DNA, 201 bp, Bos taurus
cctacctgccaggcgaagagtaaggactccgccaggtgccaaggccagaaaagcccagatggtaggggggggtgggcccctggaactcagcctactccaacgccctcactgtacacatgaaactgcccaaagccacattgctgatgctcgggcactggcccagcttccatggttccaattcccactttccagctctatccc

SEQ ID NO: 16080 - DNA, 201 bp, Bos taurus
tggccttttgtgaatttctattgattaagaagaccaggaaccctggtgagtaacagagtgacttagattaaataaggttcttcaggcagagaccggtgcccgggagcaggccagacctctacccaacttgaggaagagcctgttgacaacctgcagaaaagtcagctgttttctcagcagagatttccaggctcaggtggg

SEQ ID NO: 16081 - DNA, 201 bp, Bos taurus
aggaccacctgggatcactggcccctaccagcagctgggagagaggcatcggagggtttctccctcagcgcctctagcagccccagtcctgagacacctcgatttcaggcccagcatcctgaaccgtgagaataaagttccatcattttaaagccactccatttgtgttgaacttattccaagagctccccgtaagcaccc

SEQ ID NO: 16082 - DNA, 201 bp, Bos taurus
agtctacaaacagtaagccaagtataatgacacttacaccttgtcatgtgggttaaattttttgagattgtaaataggccttttaaaacccactagaacaatcatgctttttttttttctataatgtgctatttattgatttacaatgaagataaaggcttcagtgttattcctctccattgcttaatcagggaacaaatg

SEQ ID NO: 16083 - DNA, 201 bp, Bos taurus
cctgggggtaactcctgaggtcggctcagccagcgggggccctggcacgtagactccagtccacacctcatctttgccagctccctgtctccgtgcaggacctcccagggggcctggagtccaggcccacaaactgaggctaggacagcccaccttgaatgttcccccccaattacgtctctccctgacccagtctggggg

SEQ ID NO: 16084 - DNA, 201 bp, Bos taurus
gaggaccctgaactcacatcttctcacgagcacaccaaaattacaattaactgctgaacaaccatcaattaaaaagaaaagtctggaatccacaaaaaaagaaaaaagatattctacatccaaaggtgtacagaagaaatcacaagatggtaggaggtatgcactagcaatataatcaaatccataccacctggatgggcc

SEQ ID NO: 16085 - DNA, 201 bp, Bos taurus
tgtacttccagagactggagtccgtgttgaggggccttaaggcaccagcacctctgggtgtaatggcagctccgggatccagcaacatgtttgggggcccgtttgatacccacagctttcttacctcatccatacttctaagaatccacaggaggattgttcggtgttggccacagaacttgtttggctagttgctgttct

SEQ ID NO: 16086 - DNA, 201 bp, Bos taurus
ccagccacagacgctcacaccccgaggtggggtctttctgcctccctgagctggttgtggacagaagcagaaggagggccagcctcctgagtcccagagcggatccttctcagccatcgtgagggacgagaggtggggagggcgggaaagtgccgcccagctccggcctgcacatccccagcgcctcccagccaggccgcc

SEQ ID NO: 16087 - DNA, 201 bp, Bos taurus
ctgacaggcgacagagcggccaggaagcacggaagcgttcagagtgtgtctgcaatcaaagtggggaggacccctggtcaacttgtcagctctcgggactcttctgctccagaccggccatggctctccatcgccttcccagtaaaaccagcgtccccactgcagcctggaggagccggcctcctgcagcccctgccctct

SEQ ID NO: 16088 - DNA, 201 bp, Bos taurus
tctttttgggtaagacatagacctggaactcctaaaggatgaactgccttgagaacaagcgagtgcttctgctgagcagccctggggccaccgggcagggtggtagagaagcaatgaggcatcttctcctgtgcatctcagaacccctgtgcccagcatggaagcagctctcagcacgtgtctcaaccaaatgggagcttt

SEQ ID NO: 16089 - DNA, 201 bp, Bos taurus
ccctccattgattcctgccgtctcccgtctgcaacgttaggggccgtgtgatgagagcaagaacgcctgatgaccagccctgcgctatgagcacagctcacgtgccggacgccgtgccaggccctttactgacaacattgtcgcagcagtgcaggcgggctcctgtctccccatccccccgagggtggttttagggggctg

SEQ ID NO: 16090 - DNA, 201 bp, Bos taurus
tatttttggaggggtgaaggatatttcccaggtaagtttctgtggccaagggcattggtatgtactgagatagggcctctcttgacctcggaactcctgacttgggggctggagaattctttgctggtggggggcgggcggtcctgtgcattgtgggatactcagcagcacccttggcctcaactcactggatgccagcac

SEQ ID NO: 16091 - DNA, 201 bp, Bos taurus
cctagagcccacagtccacagcaaaagccctgcagtgagaagcccgcacaccacaaccagcgaaaagcccaccatgtagcaacgaagatccggtccggccgaaaataaagttaaaaaaagaaagagtgacaggggaattccctggtggtccaggcgttaggattccacactctcattgccaaaggcctggattcaaggcct

SEQ ID NO: 16092 - DNA, 201 bp, Bos taurus
catggtctcaataactaaataagatttctgccacagcaacccactgctattcgacttctcaaaagcagggggaggtttgtggccggaggcctttagattgcactgtgtcaaggagtgacacaggctgcctaagctccatgttgagatacccacaacaaccactagatggcagcattgagacaaatacgcagcagaggttct

SEQ ID NO: 16093 - DNA, 201 bp, Bos taurus
gccaacagggccgttgcaggcaaggggcagcgggggaccaagtcaggcacatcctggtgcactggagccaggcaagctgcggaccagcatcagacaagccacagcgggccggggcagggcgtggggagtgcctcgagatagtctactttgccagaatggggcttggagggtttgggggttttgggcattttggttcagcag

SEQ ID NO: 16094 - DNA, 201 bp, Bos taurus
gtggttcctggggttagaggctgtcactgtgggcatctcttcagctgggcgcttgtaagggcaggggatggaaatgctgggggcccgaggagacgcagaagactgccggggagatgctgcctcatgcgtttcattaacttgctgacgagggtagttgtatttacggcctgaggccgacgggaaggttgctgcaggtcagtg

SEQ ID NO: 16095 - DNA, 201 bp, Bos taurus
cccccatttcacagattgggacaccgaggctttggaaaattcagtgactgatccggatgcctggccagactctatgcactcctacacattctggcctgcacgcccagctgacctgagctctccatgctcttgctagtgattctttccggaaaacccaccaggcacactcctgccttggccttgcagtgctttcccctcttc

SEQ ID NO: 16096 - DNA, 201 bp, Bos taurus
caaacctaaggctcacttgttcctattctgtgccctgaagtgttgggctgcttggccaagtcccaggagctatattagggaaatactttcccttcagccatggttgaaaatggaactatgtgtataaatagacatcttgcttcttacatatttatttgccaattttactccgagtataatgcaagttcaataaaaatgtga

SEQ ID NO: 16097 - DNA, 201 bp, Bos taurus
aactttggccctgggagggctggctggctgggctattggccagagatctaaatgactgcacagtgaacatgctgaagggttcattgaggtccaccaccctgaagatgaagctccctgctaggcctttgtctctaaaggagagcctggattctgatcaactctaaattcccttcaggtttcaagaaataccacctgatgagg

SEQ ID NO: 16098 - DNA, 201 bp, Bos taurus
ctatttttaaacaatagtcttcacatggttgactaagccagaaatcgacctgcttcactgtccccaaacgcacacgccttcaccttgtctgggagggcccgtgctctcgggtaaggacaggctgtctgcagcagggcaccctgctcatctccgaggtctggacatgccggacacggtgcccttcctccccttgtgagcgct

SEQ ID NO: 16099 - DNA, 201 bp, Bos taurus
aagaaatgtattcagcaactgtaggatgacagtgtggacttagttctttttaaactagtcaatacattgttaccaccacattatcattgagaaggcggccggcgagggtgtggagtaaaattcagtgtcatttcctacaggtgatgtttatcaggtccatttattcatttactaacaatatattgagcctctgccacccat

SEQ ID NO: 16100 - DNA, 201 bp, Bos taurus
cagtgtgtgtcctgggccctaaccccagagtctctgattcagtaaatctgagccggggacccaagaatgtgcatttctggcaagttcttaggatgctggtggtgttggtgtggggccctcacttggagaaccactgatacagagaagaaggtgcagctgagcggagcagctctgtaaagagtgggataaaggctgaagtga

SEQ ID NO: 16101 - DNA, 201 bp, Bos taurus
ctcatgcccctgtgtccatgtccacgcgcagcccctcagcagggtgcaatgtctctgcatgtgggagagagctaagagttggcctttccgaggcttctgccttgtcccctcctgagccagggctccgtgcctggtgcctgcctgtctccgtatcctccagatggggctctctgcctctgccgtggcccacttcagctgctc

SEQ ID NO: 16102 - DNA, 201 bp, Bos taurus
gttgctgttaatacatcaatggatactttatagaagctccataaaaagaatccaaattatatgaaagagtttaagtgggcaagcgaatcagaggatggcccgaaagtgaacagatggtccagagccttgctctgcccgatgaggtgcctcgcagagcacagtggtgagtgcagccagagagagagaaacgaggaccagtgg

SEQ ID NO: 16103 - DNA, 201 bp, Bos taurus
gacaggagtccttgcttataaaacagatgggctgtgtgtttcccagttaagggggcgatgcagacatgctcaggctggttgactgggacacagctcgtccaactcggcctgtgtacacagagctcaaacagctgaaccgtaattgtcttttctctccatctgctgtgtgcacagctgcctctggaacttcattctaaggct

SEQ ID NO: 16104 - DNA, 201 bp, Bos taurus
gggcttttccagggaagggcctaggtgagaaggaccaccaggctgcctcccctgccacttcaggggttgtgagacaggccccagcgactcagtctttgatttgaggcaggcgtgtcaagcttgtctttaccccgttgatgtgtggtcactggccccaccatagagacgacactgggctcaccagagagcataaactccagt

SEQ ID NO: 16105 - DNA, 201 bp, Bos taurus
gcccccgtgactcaggagtgggaggtggcaggggtccgccttgtttacctgtgagccggtagtgccattcgatttgggaattacatgtgtgcacttccacggacagaggagcctacaggccatggggtcgcacagagtcgaacacgactgagcaacggagcactgaacacgttattttgataaaagtaaaataatccgtag

SEQ ID NO: 16106 - DNA, 201 bp, Bos taurus
gacagttttcattgccggtaactttctttctaggagtgatatctggaaatgcttttagctagtcccctagtgatcagttggccacctcagcagaaatagtggaggcaggagaggcttggtgtccgggttcaagccaagggatgccggggcataccagcggaggggcttatggtatggtgggccgcagctggactttaaata

SEQ ID NO: 16107 - DNA, 201 bp, Bos taurus
cgcagaggagaacgggcctgggtcacactgtccatgggaaccgggccgggccaccctcaccacagcctccattcccgccaccccaccatggccagatccttcttttcacagcctcatctcttactccactttttccaatcttctgtgggttcccagtctctgcctcagttatcctgagagcatctctgggaccaagacagc

SEQ ID NO: 16108 - DNA, 201 bp, Bos taurus
acaagatatgcacaaaaagcttatttctttcaactcttcaggatcacctgtgttctaagaaacggactaacaattccaccatctggccacgccctctcaaatatcttctttctccaaactaagttcaaaggctcttaagcttcagaccagtcactcagccacacggcggccctcccaggcccatggccggtcagccccggc

SEQ ID NO: 16109 - DNA, 201 bp, Bos taurus
cacgtggcctgtggccattagtttagacagggcagatcaagggcggttccatcagcagagaaggctctgacgttcagcgctgatctggaaaggcctccgtgaaccggtcccagagctggtcggctggcggacctgcaggcagtggagtctcaagttaaatgctggccacgaggttgcgtttctctgggtcctgggagaagt

SEQ ID NO: 16110 - DNA, 201 bp, Bos taurus
ccctgggaagaggactgcagtgggtggaaaagatttttttttttatcagtttgagcttgactggaagggaattaggaagccatcctccgagacaaactggcaggggcctggagagctggtagtggccaggcctgagccacagccccctgaccctcggcctgacatcacatgggcggcatgcctgcagtggccaggggcccc

SEQ ID NO: 16111 - DNA, 201 bp, Bos taurus
gcagcccttgtttggagttggggctggtgttgaagaccgccagctgagtgaccctgggcagatgacttcgctttcctggccttactttctctgtgccctctgttgttgtgaattttcttttttggtgtcttcttatagtggatattagcagttagcatggttcctgcccaaaggagatacaggcctagattacaggtatta

SEQ ID NO: 16112 - DNA, 201 bp, Bos taurus
gaccgcacacatcacacctcccgccaccacctgtcactcacacagcagttggctcactgacattgttgcggtggtctctgcactggcagtttaccccccacctacaaggctggcacgctggcccccttgtcctcactgagacttccctttctcagcatggatagcttccccaaacaccgtttgcaaccatccactccccac

SEQ ID NO: 16113 - DNA, 201 bp, Bos taurus
gtatatgtacatgactgcatattttcaaagctatgcctatattcttaatttggttgtgacctcagttacttgatgattataaagtcttgttttgttttcccatgcttgcaccagtgcctgtgggtctttgtagtgctggagctctaagcctgatcatcctgatttaactgtgttgaggtggtggctcagacaacaaagaat

SEQ ID NO: 16114 - DNA, 201 bp, Bos taurus
caggccagcaccctttctgttgtgctgtgtcctcagacacagggggagggaaagacagaaaagaaagaaggaaagaaaggtgcatgctaacatgctgtcccgagggccattggtcttgaagcccagcggcctagaggcttggcttctttcctatttatgcccttcttttggtgttgtggaaattagtcacactttaggttt

SEQ ID NO: 16115 - DNA, 201 bp, Bos taurus
taaagtaggtaaaaaattccaaaatctttccaaaatctaatacacatgatgtggctaccatacacttattctaactatctccttcttatcattatagatacagattttctaatcctatttcctatgacactaattataccaggatattgatagataagctttgaggagtctggtacttgtatgtaatgaagtccacagaaa

SEQ ID NO: 16116 - DNA, 201 bp, Bos taurus
atccaggcacacacgcggagcggggccgtctgtggaggagggacaggtgtgtgtgggcaacatgtgtgcttcaccctggaagacggaaggaggcccatgtgacaggactgtccgctgacgtgtgatgctggggtccaggtggaatggactatgtctgtgtctagaacggcctttgcagagggtgaagtggcagctgcctgc

SEQ ID NO: 16117 - DNA, 201 bp, Bos taurus
gggtggatttttttttcaacagaaagtattacattactaccagtccaaagttggttgaatctgcagatgtagaattgtgtatatggaggaatcaagtatacggaggaccaattataagctattcgaggattttcaactttgtagagggtcgggctcctaactcctgcattgttcacgtataaactatatatggctgtgaga

SEQ ID NO: 16118 - DNA, 201 bp, Bos taurus
tactctgatgtccaatctggcctctgtaacctgacaccaaattaaatctcagggacagagttttgggtgaagtataaaagaatatctttgttgctttgccaagaaaagggggccacagccaactaacgtcctcaaaactgtgtcccaacccagagtaggtagtgaggagttttacaatgatggttcaaagaggagggcgtg

SEQ ID NO: 16119 - DNA, 201 bp, Bos taurus
gagcataaattcccagtgtagccacagaaaggatcctgcttagtcactgctacccgggtgagccctctgtatgcaggcctatacaagcactgcttttctcgatcaggacggagggcagactcgagaagtcagtgtgacttaagatctttgtgctttagctctggacaaatatacaagggccctgtgccttctccctcctcc

SEQ ID NO: 16120 - DNA, 201 bp, Bos taurus
ctttcgtgcactgtcaaggagagcaggtcacttgaattccgtctaagagttctgaattcagtacgtgaaacccattgcatctataaataccaccaccccgctgataggtacacttcagttttgtgatcgcttctactctagccagtattgctttatgtcctgttgacgaatcctgcagaaacaatcagaacgtcagcctca

SEQ ID NO: 16121 - DNA, 201 bp, Bos taurus
cagtgacttttctttcaagaaactgtcacagccatgcatatcaaaagattctttgggagatttctctggcagtctagtggttaggcctctacttctactgtagggggcacaggtgggatccctggtctgggaactaagatcccagcctcatggcatggccccacaaaaaaaaaaaaaaaattgccaaaaaaactgcaaaaa

SEQ ID NO: 16122 - DNA, 201 bp, Bos taurus
caatgccattttagctataccagccttatcaaaaaatgaacagtctacaaaagaatgtctattaagccctttgaggtaatacatcacatacaccctacctcaatcccttgctcaatatatctttgtttgatgacatatatttgttggagccatggggtcaggaccctgcggcttttagcgcagggcattagagcttcaaac

SEQ ID NO: 16123 - DNA, 201 bp, Bos taurus
gcccagcctggcctctgtgcccccactcctgtgcctaatatatccacagctccgaagtccctgaggcaagcacaagaccatgtgacctgtggctcacaaccctgacacccgtggcctcctctggctggtttttggccctgtaccacattttcaccctggttctctcagagggcttccctagtagctcagttggtaaaagat

SEQ ID NO: 16124 - DNA, 201 bp, Bos taurus
tccatttcctggtaaacaaagataatcctagaacttacatcatcgagttactgaaagggttaattgatataatgcaagataagcactttgcaccataccttgcccacagtttgtgcacaacaaatattagttgtcattaaattattattaacaagaaatacataatggaggcacagctctgacaatgactcacgccaccca

SEQ ID NO: 16125 - DNA, 201 bp, Bos taurus
caccctaccgtgtattcacataacctcctttttgttctcactccagcagagacaatgaactctctgatgtctcttctcattagggcactaatcccatcacgaggccccatcctcacaaactcctctaaacctaattacccctcaaacattccatctccagataccatcagatttggggtgagggcttcacaagatggattt

SEQ ID NO: 16126 - DNA, 201 bp, Bos taurus
ggttgcagagacaggggccgcccttcatggcagagcgtgggcttctgttggagcgcaggctcagtaggcgtggctcgtgggctcagctgcccctcagcacgtggggccttcctagactagggacagacctcttgtctcctgcgtgggcaggcggactctttaccactgagccatcagggaagccccactgctctcttttta

SEQ ID NO: 16127 - DNA, 201 bp, Bos taurus
actcaaacccacagcttttaaaggtttttaacccatctccttcctctgctaggaacatcgctaggtgtgatgtgctagggcctatttactggcattggagaactgcaggttgggtacctccttttcttttaatcgatgtttataattttccaaacactgacttgaatcaagacatggttaaatttgacaagatagtctagg

SEQ ID NO: 16128 - DNA, 201 bp, Bos taurus
ctccacacctctgaacaggtcccttcctacctcatcagtgcgggagcctctcacccagcccacagctgcaaagccgctccctcccctgagggccactgccgattgtttaaagcactcaatcgcggtccaggtttacatgtctctctcaagccaggtactgagtaaagatcagggaccatctgcgcagttgtatggccaggc

SEQ ID NO: 16129 - DNA, 201 bp, Bos taurus
gtgctggatcaagactcagctctcctaccaacaccatgcctcagtgactacattttaagttgaattcatattgctgtttacacttggcctcagtagcctccgattcctagatatgcagctggtcttccacgtggactataaagtacgccgaggacacacctgcttctctgacgttgcattcaggctctccttacggcacag

SEQ ID NO: 16130 - DNA, 201 bp, Bos taurus
aaccaaagacaaagatcacggcactgaattccatggctgtgtagaagccacatggcctctacaagtaacacagtctgtaaacacaggttcagtacatgcacttgtgtgttatccttagggacagtggggtatatagcttacctgggaacttggaataagttaagtgattcttatacagtgataaataaacatcatgctaac

SEQ ID NO: 16131 - DNA, 201 bp, Bos taurus
tctcaaatttgcttcaagtgcggaatggccgtagaatggctgacactgaattcttcagcaacttctcatgtagttgtaagaggatcagctttgatgattgctctcaattggccatggtcaccttccgatgggtggccactacactcctcatcttcaaggctcccgtctgctttgcaaaacttcttgaagcacatcagcaat

SEQ ID NO: 16132 - DNA, 201 bp, Bos taurus
accaagaaatgaaaagggtataatgaagtataaggaatggggtacagggcaatggtacaaagtaaataaacaacactaaggcaaaccttggtaaggccaacagtcttcaaagacaaaacaaaaaacagacaggcaaccacagggatgaataaaaagccaaatatatcctgtgttggaaactgaacactgcagcgatgacca

SEQ ID NO: 16133 - DNA, 201 bp, Bos taurus
ctcacgctgaaaagacccaaactccccaacggttatcaaggaagggcaaatttggaggggagggctgccgagtgtctgaccttcctctgactggttggtggggaggtaacagggtgaggttccaggatctcaatcatcagccttctgggtccagccagttctgagttcacatactgtgttcagtcccaagtcaccatcctt

SEQ ID NO: 16134 - DNA, 201 bp, Bos taurus
gcgtggtagggacctggaggctgtggaatcacatctgggagctgagctgagggtggcttggcagcgtcctcatgacagtgtcgcctgggaggacaatgagcgatgactagctcacactggccagagaagcagggcaacccaccagaggcagtgacatagccagtctgcccttcctccttgcctccccgcccagcacctaag

SEQ ID NO: 16135 - DNA, 201 bp, Bos taurus
ccggatgttccagggcctctgaaattctggagcaggaatatagtgtgatgaatatgatattttagagtgatgtaagaaagcaattctacagctgggaatacacttttaaaaactggccactgagcatttatgaagatgctcattgaagagtggtttgtaacattacgaacgggaaacaatatgaatgtgagttcatatgag

SEQ ID NO: 16136 - DNA, 201 bp, Bos taurus
ccatcagccgtcacctgttcctgggaatggctaacggcagtggtatggcatgctgaattttaatgtgcgagtggccctctctggttcagaaatgggtcccgcaaatatgaacccattaaaacctttgggagcagttttggagtcaggaaaattcatcatacctggtatagacagcgttcaccatgctgctactgacacacg

SEQ ID NO: 16137 - DNA, 201 bp, Bos taurus
agcagacagaagccaccactgctgtttcaactcttctgacgtttccactgggccacaagcaaggacctcactccttgccacagccgacgaggcctgtagggtgtggtccagccacacaggtctcacgtccagccacactgccttccagtgatgctgtgatccagttagactcacagcagagaaaaaagaatgtgaacattc

SEQ ID NO: 16138 - DNA, 201 bp, Bos taurus
tcagggcctcctgataccacgatgtatgtcttcaaggcccggcttagagccctattccatgcagcttcggagctacagctttcggaaaagctgcaagcgtagagcaaggccaggagccggacacagtcaatcctatgcttggcggttttcagtagttctccccttggtctttggctactgacatcttcgtctcaagctcgc

SEQ ID NO: 16139 - DNA, 201 bp, Bos taurus
aagtaagagaggaagagaaacagcggtgaaacaggagtcgtgggggactcaggcgataggaaccactgcaggctttgtgcagggggtgaaatgaacgcacatatgattcaaccagtggagtccaccgacgcgtgtttcaaaaggatcacctctggccgcgtgttgagaattaaatgtctgggatggggttgaaagcaggaa

SEQ ID NO: 16140 - DNA, 201 bp, Bos taurus
ctgcggtgaggggtgggactttgctggaccggctcccggagcccgtacctcctgacctgtctgccctcttcccgcctcccagcctggccgcctcgcccctgcatgtccaccgtgactctgggcaaaggacaccaccgtcaggcagtgtcggctcctctgaccccaggcacggcctcctggaagagcagggactagtcctgg

SEQ ID NO: 16141 - DNA, 201 bp, Bos taurus
ctccccccggcgggccccctggggcctccccacagtggagggttcttaggtgacttagagactgtctgcctacatgtggaaacaaacctcaccctaaacgcctctttaaagaggcatctggcctagtttttaaaccgctggagacccttgacaaatctttactctgcttttatttacatgtgaactcacaaataggaactt

SEQ ID NO: 16142 - DNA, 201 bp, Bos taurus
catttccacaagcagggagcctcccaggcccgcgcacgctcacgacggcggggcccccacaccgaggtctcctaactcgcggggcctcaaccggcagagccgagtcccgtggtgaagtcaagcttccgtctgacagaacttccaccgcagagggtaccttcaggccctcagatccttgtggttacgcattacgtttatgtc

SEQ ID NO: 16143 - DNA, 201 bp, Bos taurus
tttttatgtcacttcagcttctggtcaacatggatgagacagggacaaaatgttcccaaacactgtgaacaacagagaaaaaatacatgaacaatgagttttaaacactggccatcaggcagctcagggcagtatttccagagaaagaaacacacacacacacacacacacacacacacgttccctatggtgcagagacag

SEQ ID NO: 16144 - DNA, 201 bp, Bos taurus
acacgtgactctgaaagggtcccccaggcctgctccttgagggggtggagagcatctccttaagagggggtggcgtggtatttgggtagacagctcttgcatgggcccttggaggagaacatggtggaatcctgggttccgcactgtaactgggtctgagctccattcgttgaagtgccaaactcctttttacagggagac

SEQ ID NO: 16145 - DNA, 201 bp, Bos taurus
aaccactgccctctgagaggaagatgcatcagctaggtactgaaaggagacttccaggtggccagctctgcacgggggcccctgcaccctgctgtgtgcccggctgtctcatcccctgccacagaggactaagcggaggcttccaaaggctaaaggccacgccacgaccaccagctgagagaggaagcagtgggttggaat

SEQ ID NO: 16146 - DNA, 201 bp, Bos taurus
aggtgcctggaaactgaggccttccacgacctacaagaagcagcattttgacatgtgtcatccgaaggtatggacggcaggaggctgcttgtcaaagaagcgtggccctaggtaaacagacctgtgctcatcctctctctgccccacagcctaggagtcaggccttgggaagggagagaggaggggtcagaaccagacctg

SEQ ID NO: 16147 - DNA, 201 bp, Bos taurus
cctaaaagatacaagtcttgcataattctttccctgtcatttaaaacgaaacttgctttactctgaactgaggggcattaacgagtcctttttcatcactgcgatctttatctttaaatgatcttaatttaagaaataattaaagaggacctccctggcggtccagtggtaaggaatccgcctgccaatgcaggctggatc

SEQ ID NO: 16148 - DNA, 201 bp, Bos taurus
cgcatcagtgatgctgcactgagtgtttaaaggtgcagcagatacgcgcgccctggtccctgcacactcatcggcctgcactcttcctcaggcgtgtggccgacacagcaggggtacacatcttccatcacccttgagaaagcacagccagcactgggaacagctgcccagcagacaaacctgtcagaaacacccttccta

SEQ ID NO: 16149 - DNA, 201 bp, Bos taurus
aaacatacgacgaatatgtggactttgaaaaccattttcttaatgaatataggcatttcctcaacaatatgagtctttataacttaaaaggctaccacaagagactagttttttacattccaaactgcagttgatgttaaacacgagccaagaccagaaattagcgctacatgtagaagaaaaaatacagcaacctagcaa

SEQ ID NO: 16150 - DNA, 201 bp, Bos taurus
gcaaaggacacctcagctctgtggaccgctcatgagataccggacaagacaaggcaagagcaagctgccaccctggcctcccctgagggacagagctctgtgcacagactactcatctgcagctgcgctgtattcgtgggagatgacacccaataaactaaaacaatgctaaaggccatcagacttggggagcagagtgat

SEQ ID NO: 16151 - DNA, 201 bp, Bos taurus
tattgtctgtaaatggtacaggtgctttgctcagtctcagtttgtgcgatgagaacataattggcccgcggaatttgaagggctctctccgaggcctctgcaggtgcccacgtgttggtcccaccctgagttgggggtgctggctggcggctgcagttgctcactgcctcagtggcctgcacaccagcttagcctgtagat

SEQ ID NO: 16152 - DNA, 201 bp, Bos taurus
tcaccacggaccaaaacgtgggtgtgctcttgtataccaactctgtgtgtcactcaaggatatcaacaaacctgattacccttaaactctaaaatgtgtactgggggattagaaatcaccatatcctgggcttatcatcaattatgtagccatctatctctctcaaatgctgcagtatattaataggaaaagatgacataa

SEQ ID NO: 16153 - DNA, 201 bp, Bos taurus
aaagcttacttttgctccatgtggtgtcggccagggtagcttgctgaaatgaggatctatatccacgtggttcacttaggtgggcttgcagggagccctgcggggctgctgggtggcccctcagtggtgctctgtgtgggtctgcccctgtggccgcttgagactccttctaacagggtggccggattctaagtgggaggg

SEQ ID NO: 16154 - DNA, 201 bp, Bos taurus
cctgcaagagcaaaagccacctagggagcttgttagaatgcagtctgcggggcctccgcgccacagatgctgagcttccgtgtgtggccgtggacctcccaccggtgtctgtcccgtgtaggctgcccctctgaaggcaggactgatcttccttgtatgtctggctgcttatcccccactcccattatctactcaaggaaa

SEQ ID NO: 16155 - DNA, 201 bp, Bos taurus
tgacctcagtttatgcagcgctccaggcctgcagcaatgacagggaatttaacagtatcttttggaagaagcagttcaattcaataactccccaaatgcccgctacctgcttattatagtcttctttaccccttggaatctttgccatcatacctaaaaagccaaatttgagatcactatgcaatgctcactactaacaat

SEQ ID NO: 16156 - DNA, 201 bp, Bos taurus
aataatttgggggccaactggctgttttgcaatttcgtgatgacgctgatgattcctgtgtttgtgctggggctttgctggagaattccgtcctcccttctgtcatctcctgaccttgaactggcctgcaacaggctatagaaaccattttgagtttctgcaaaagagagttaggttaaaacctcaagcacgggttggatt

SEQ ID NO: 16157 - DNA, 201 bp, Bos taurus
gcctcttcttccctggccaagtcgaagtgagtggagtgttcagctaaacttagaaaccacattgagtaggaaagacagtctggaggagaaaatgtagatgatgcaatgtggcctatatgagagccatgtcatatattattgtaaatggaacaattctgaagtagctgctgcaaaagtcacgttttgttgaagttgagcaca

SEQ ID NO: 16158 - DNA, 201 bp, Bos taurus
tgcgtcctggttattgggtgtggtgggacgcattctgaagattcaccttttgcttctgtttgtgtttgctttccttcgctctagggagaggggccagaaaatccctacctgcaggaagtcagggggttctggatggtagggaatcctggaagcacttggaagccctacacgtagaggtggccgggacgttgctgttcagga

SEQ ID NO: 16159 - DNA, 201 bp, Bos taurus
ttccagaatgacatttcttagctttcagaccttcgtttttaaagtgaaatttagatggttgacctctgagcaaatgatagccggcccactgcctgttttcgtatgaccaagaactcagcataagttttacattttgatgaaatggaaactgaattcggatgcaagttaagtgacatgttctcttgggccatgaagcctaag

SEQ ID NO: 16160 - DNA, 201 bp, Bos taurus
agtcatgattttgtgaatggattacgtggaggacttgtgaagaagtgcttcaaggctggggataaatgtcaaaagcatcccagtggagattgctgggtgtctgggtcatatgcacagaccctctcactcaacaacaggattattgtccacacaacttatcttggaggtgtcttgttcttgggaagtctttttctaccagaa

SEQ ID NO: 16161 - DNA, 201 bp, Bos taurus
ctgcaggtagagactgtgatgtccaccatcctcaggaggattgccccacaggtcccatccgagaagaaagtccattaaggtgctccagtgatgagaaggccagacagggctgctggaggaggcaggtgacaacctgattaaaaggaatcaaaagtgcttctgtgaagactgtctggaacttaaagaatattttcaagctta

SEQ ID NO: 16162 - DNA, 201 bp, Bos taurus
gaattgtgaaccaagaaaagattctaactgcatcttcatttaaacttttttaaggttaatcttattaaaagctttattttgtgttggaatacagtccgtgggattgcaagagtcagacacaactcagccactaatcaacaacagcgaaatagttgtttcaaggcgctgcgttgctttcaggcatgcagcaaagtggttaag

SEQ ID NO: 16163 - DNA, 201 bp, Bos taurus
catgtgggcctgctggccctctcccttcccttctcattgcccatcgtgtgcttgcacactgaggctaaacttgcagtcagcaagtctcattctctaactctatggaacctgccaagggccctttaaactctgggtatttccgtacctagcgtcttattcctttgtggagacaaacactcctttttgggtagctcttgtgtt

SEQ ID NO: 16164 - DNA, 201 bp, Bos taurus
ccagcccagataaggaaatggcaacccactccagtaccaggattcttctgggtaaagtcccatggacaaaggagcctggtgggccacagttcatgggatcatgtccaactgagtaactgaccacagggtgtttctaaaccaatggttttgctcttttctagcaccccatccagaacaccacttttttttttctctattgtg

SEQ ID NO: 16165 - DNA, 201 bp, Bos taurus
ggtctagaggggccagtgagttaacaccccggggtaactgatgggcattggtaggaaaataccccaggttctcagccctgagctgggagaactcagatgcattctgcacagactgcagggccccgggggactgagcccggggtcctcacatgagtgatccacttacatatgcaccttctggaggcttcctttctctacctc

SEQ ID NO: 16166 - DNA, 201 bp, Bos taurus
ctttcatcacccactgctgaatttatggatgttagaaagtagagaaatgaaacagaaacacggtgcttctgactataggcgttattgattctgtgaagcatccgggagagctgaaacttacttagcaactggcttaggtccaaagagatgtttgctcagtttcctgttcctcaaactcaggtcccgtacaaccggtagaga

SEQ ID NO: 16167 - DNA, 201 bp, Bos taurus
agctactttggggtttaggcacatatgtatctctttgttattcttttgctacttctaaactctaaattgtgaaataggcattatttcattaaatataaacataaaattaaaactatgatcaaaagcagccaaggacagaatcaaaatccaaaaaaaaattaaataaacgatgtggaagatgagtttgaagagctgacaaaa

SEQ ID NO: 16168 - DNA, 201 bp, Bos taurus
ctgaaatggccatatggccaaagagaaccactgttatactcattgggctaagcattcttattctggtatttacaaacctctaaactagcaatgcccgaagcggcaggcctactgaagcccctgcataatcaaagtcttgccttccatgggctctgcgtgtgtccttggatggccattgcagtagctgtttcatgactactg

SEQ ID NO: 16169 - DNA, 201 bp, Bos taurus
ccagagcattggagcttcagcatcagtccttccaatgactattcaggactgatttcctttagcatggaccagctggatctccttgcagtccaagggactctcaagagtctggccttcagtgtatttctgtaaattcagtatattaacaatatacttgtttctcttcctccactgcatttttcttcttgctgctaagtcacg

SEQ ID NO: 16170 - DNA, 201 bp, Bos taurus
ccagggcggcagcagccaggctttcatcgtgaagcgcgtacgggcgggtcgctcacaggaacccaccgccaagcaagtacctcgtgatgcgcatgcacagtgctgtacgcgatctcagctgttaaacacaggcattatttacaaagcgagaggtgagagagcctgaacactccgtcttggctaacttgctgtctccccaca

SEQ ID NO: 16171 - DNA, 201 bp, Bos taurus
gtttcactcgttgagttttctggttcacttctgggatattgctattgactgtgtgcaaaattatctccttgggccagaaaattcatctgaacatagaaacgcttgactgcatcccaggagagagcctgtaacgtctgacgaaaagagaagtgaattaaaacaaaatgtgtttatatgctacatacgcatagtgtgtgcatt

SEQ ID NO: 16172 - DNA, 201 bp, Bos taurus
gcgagctctgggcacagggctctgggcgcccgctctgttaccggcttttcctggtgttggggtgaggggtgaagctcctttgctgctctctccttcccccaaaagcccgtggtcttccagtcaccttgccacccaacctgagttttattatttacagaccaacgctaagtttttgtcttctcttcctctctgccgcctgcc

SEQ ID NO: 16173 - DNA, 201 bp, Bos taurus
ttgacccttaagtaacatttctttttgaaagctagcagccttctgccttggacatggaggttaaatcctaattatctccacagagagagatggttgggatattctgacaacggggtggaaagggctgagaggggagtttatctagtagaagccatggtccctgtcatgcagctgcttcctctaatcagaatcttttgtttt

SEQ ID NO: 16174 - DNA, 201 bp, Bos taurus
attttactgctctgctgatacaacctttatccgtatgaatctcatttctagagaccagacactgagggcatgatatcttgtgtaacagagagaagtgtattctcctgaagccacagaaatgcacttcagagggctctgaggagctctggatctgtgtgtctctgctcagaaagaattcagggagaggcaagtgatggataa

SEQ ID NO: 16175 - DNA, 201 bp, Bos taurus
gcattcgctttgctttggctgtggctcagtctgtagacagccttgccagtagcttacacttacgtgattgctccagtcagtcacccccagattataccatttggagcctggccgaactccagcgtgaaggtcaagatgccgcatgtgtagccgtcaggatactgacccctttggaccttatcttactttttgcccagcttt

SEQ ID NO: 16176 - DNA, 201 bp, Bos taurus
ggtagaaacagctttttgattcattttagttgccactatcaaacaccagctcaaacaggagacattaaccatagtgagttgaggggccttcaggaaagtcgggatgagaattcttttaatacttacttatttggctgtgccaagtcttggttgcagcacacaggagcctcactgcatcatgagggatctttcgttgtggcc

SEQ ID NO: 16177 - DNA, 201 bp, Bos taurus
ctttcacagcacagggatctaagacatgcaggtcaaagagcagaatccacgccccgccatcaacgcttccactgttcttggccatacctgttgtactcaggtcacagattgcttttgcttcgtcttccttgtgttgtagttgctttaacacaaggacaagatggatattagtagggtcatcagttactcagcaccaaggag

SEQ ID NO: 16178 - DNA, 201 bp, Bos taurus
gaccctcagggtttgctcatgaggcctgattggatgaagcctgtggacatcatggaggataatctgctttactcaaaggacagacgtcaatgttctcaggaagatgacgtccccaggatggccccaccgattgccgctgatctccccacttcgcaaggagaaggtctcacagctgccctgagcccccgagagaccccagga

SEQ ID NO: 16179 - DNA, 201 bp, Bos taurus
gcttgcatctttaatatgccagcaccttctgtcttagaggcatatcgtgccagatggaacatttcataaacactataagaaacaaattacattaggtaccctggctagcacagtgacacacagcaccttgatataactcaattttgtctttgcctacgtctgaaccatcgcgttttaaaccagcactgggatagtataaac

SEQ ID NO: 16180 - DNA, 201 bp, Bos taurus
tccagttgattacaaaagagacaccaatggtttgatggtgggcccctaagagggttcaaaagtggagacacaaaatttttaggtttaaggctctgaagctgttacagttgtaaggccactcactaccttggcagaattttgtttatggtcttgtagtctcttcagagtggaaaggcattttaaatagaggttgagtaaact

SEQ ID NO: 16181 - DNA, 201 bp, Bos taurus
caaggattattagtgcacacggaagaggattttgtttcctttttaaaacaggtggtgagtgatgctaaagatgtatatggcactggagtgtgacggggccttctgcatttcctactttttggctcctgagcaccatgtgttgaaagcaaattggacaactgatacaaggacactcgacagtcagagcctcaatctgtggga

SEQ ID NO: 16182 - DNA, 201 bp, Bos taurus
gcatctcaaggtctggatatgttcaaatttgtgtttgcaaaggccccactgccagacacaaagcgattgctgggacaggcttcctgctgaggcaaatcagcgagcgttcacacggccttggcactctatgtttgcttttagggatgcttaatttttttctgggggttgttcaaaaccataggaaatagaaaacacataaag

SEQ ID NO: 16183 - DNA, 201 bp, Bos taurus
ttccacactggggggtagagggagagccccatttgcaggctcatttctggcatcctatccaagttccctcctctgagctgtcatcatgcatcatgctacccggcacattatgctcactgggggcctgcagatacttcaagcagtgaaaatcctgcttgtgataatacagcttttaagtctaactctgacaaacaagtgtga

SEQ ID NO: 16184 - DNA, 201 bp, Bos taurus
ttatctttgtgcttataataaaactatttttcatctacaaaactgtccttgaactttaatgaactatgtatctaggcagcaagatccagggaaaatagcactgaaaaagtgctccacaatctgtttccctattagcccatctaagtttttcttgatctctttcagggaaaattttttttaagatgatgaatagtagtgaag

SEQ ID NO: 16185 - DNA, 201 bp, Bos taurus
acagaagaagttaaaaccgagggaaccactttggaagtgacaggtgcaagagattaaaaccctgttgttagtactgacagcataggaagaggcttatagaccttgagaaatataagctggaccaaggaactatccaaaaatgaactgaccccacactgcccacaacaacatcagagaaagtcctagatatatttttactat

SEQ ID NO: 16186 - DNA, 201 bp, Bos taurus
tgcacatgcaaaagtcacaagcagaaaagagctctattttcagtgcggtgagaaggaaaaattgagagcttagcatgggaggtctggccactggaagccttgggacgatgaggaaacttggattttgtcctgagggtaatgaagaattattttgtgacctgggaaaagtgatcagctttgcagtgtaggatgcctggtcag

SEQ ID NO: 16187 - DNA, 201 bp, Bos taurus
tgacccaaactggccaggccacagagccccggcttccggatcacagcactgagatgaaggtgaaatctgagtgaagcagggttcagggtgagttcctccaaggtggcacttctccacgcagacgagaagtttgtggtgcctggggatgaagcccacctccaaggaggggcagcgcaatgttcggcttccaaatcatgagca

SEQ ID NO: 16188 - DNA, 201 bp, Bos taurus
cccatcatcacagcattaatatcaagcacccacctagtcctctactctgcccagttaatgaagttctgttctcaaagctttggaaagaagttttaataaggatggtcaggtctggccagcaggctcttgtcaagggatccaggcagaattttttccagtggaaggtctgcaacaatttattccggtcagactgctactaag

SEQ ID NO: 16189 - DNA, 201 bp, Bos taurus
gcaaggagggaaaagaccagcgcaaacggccagggcccaaagtcacctcagttgttaagatctctaccagccacccagtgattccaagagcgccacccctacaccccttcagggccaccttcctggtacctcaggtgggtagaaaccaaggaagcagaaccaagaaacctcaccacggggccgtctgattgcaaagctctc

SEQ ID NO: 16190 - DNA, 201 bp, Bos taurus
ggtacagttgggagttgtccccagccctgactcctgacacacgcagacacacgctgcttcagtatgtctctgtcctggcctttcttttgctattggtcacgttgattcatgtattgtctttgtcttctctgctgggctgagatgtcctttgaaaagggtgccttctgtgtgcccagggcctggcacatagaagggactgaa

SEQ ID NO: 16191 - DNA, 201 bp, Bos taurus
gtgactaaatgtagggatggggatgggccaggaaaagggatggtgagcatggaaacaacaactgggaaacgggacccacagtgcttacttgagcaaaggcgataagaagttaacctccttgatggccctgtctccccagtgagtgatactgcaactttctatttctgacaaaaataaagattattatagatatggcagagg

SEQ ID NO: 16192 - DNA, 201 bp, Bos taurus
cattctcagcatccagggcactaaagaggagagcccacaggaaggcaaaggcgtcagtgccacgcacactgttcacgtgtgtgtttcctggtacacacacgtgagcccctcataagcagctaacgtctactgtgatcaaaactgcaactccctgggtcaactgtctaaattttataaagttactatcaaaaaagaagctct

SEQ ID NO: 16193 - DNA, 201 bp, Bos taurus
gaaggtttggccaggcagagtctgcacccaagctcaactgtgtggcggttggcagagttaggtcctcactggctcttggttggaggctgctctcagttcattgccccaggggccacttggtagggcagatggcttccatctctcagcggtgccctgcagtgcctggcattttgggttcagtgaatgatgcctagttaccca

SEQ ID NO: 16194 - DNA, 201 bp, Bos taurus
acagataaaggaaccacacaaaacgagtcttcggggacaaacaatgcatattccgacaaacaggcccactatgtagcttcttaagagcaggatgtgcactcgaacctgtgagcaaggactttcaagttaatgacaccaggaaggtgagagtggaggtaaaacaacaggaaaatgtctttgtgacttactttacaatcttca

SEQ ID NO: 16195 - DNA, 201 bp, Bos taurus
aggctcaccactcaattagtggctcctttgtagagtggtctccacacacatcaccatttaatgagaagtcccgctgggccctgtgcacctgctcctgtacggagtttccactgggatatagtctctgtgagttgctgtgggtggggaggcttgtggttttctcatctgcaggaaataggaggttaggggcctgcctgtccc

SEQ ID NO: 16196 - DNA, 201 bp, Bos taurus
gcagtgtgaagctgaccccttgttcaggatgtgttgaagtcaaaattcctgggattgaggctctaaggtctctccctgccctggggctggagggagggccggtctgagttcagggtgccttgctgtgaatccaggttccagctgtggctcccaccgtcttccgcagggcccagggccatgaggccttaggcctggctctct

SEQ ID NO: 16197 - DNA, 201 bp, Bos taurus
cctcccgcagcagctgtttgtggtggagcagatgtggatggtgaggtgacctgcatgggtgcagccccatgctgccccagggctgggccaggtgcattccgagaggatttggtgaaatcccacgccatgcggctcagctgcaaccagcagagactgaagggacccaatttgcggcccaggaacccgtactcttatcctctc

SEQ ID NO: 16198 - DNA, 201 bp, Bos taurus
acaaggagaagttggagctcgcgttgctgagctggaagcacagaaggcagtacccatgctgacctctgtgtatttggaggccacaaagccagatgccctcgtgtgacccatcccccgattccagcttcttccattaaaacctgctcattctgttcttccgggaggccacagaaataatgtgctgaacacctgtcaaagcca

SEQ ID NO: 16199 - DNA, 201 bp, Bos taurus
ccaggatatttgcctccatccttttgcatttccaacacgcagtggattcagtaggaccaccagcaggaatccaggcctcccctgagctaggaatggctacggcctgcatttcccagttggccgtcagagggcgacagtcccacctctcttaccagtgcaggggctccggattctgcccccagacttggccctgtgcacagc

SEQ ID NO: 16200 - DNA, 201 bp, Bos taurus
cctcctctctgagaagagagataccttgaggggtatcacgggtggtgacagagagctggacgctcatctggtccaagtgtgtcacccacaacatccacacgtcatgtggccgttgatcattagtgtgaggcagatcagggttagtgaagaccagtaaagaatacaataatagtatggaaaacagtaacatgtctgagtttg

SEQ ID NO: 16201 - DNA, 201 bp, Bos taurus
agtacttaacacgcatcgttttaagttttttattatttttttaatgttggctgtgctgagtctttattgctttgcatgggcttttctaattgcagcaggcaggggctactctctagtttcagtgctctggccccattgcagtagcttcccttgttgcagagtacaggctccagggtgcgtgggcttcagtcgttgtggctc

SEQ ID NO: 16202 - DNA, 201 bp, Bos taurus
cttgggaaggcccttgaaaagagaagctttcagcttggtttgagggagatcaaaaccattcatttaaattccattccagtctgtttatgaaattttatttcaggatacttcagatttattgatcacttgctgaaaagagtgaagtctctgcatgggagcttctatttaattcatctatgttgctcatgctgtgatttcaaa

SEQ ID NO: 16203 - DNA, 201 bp, Bos taurus
atgattttgagctaactgattttgagcattttctacatgtagaacttaagtgtttcatatacattccttctttcaattctcagatctaactacggtctaccgaactcgatcaagaagaaaatttgcattatttggtgttggcccatgatagtgaaggacaggggagcctggagtgctgcagtccgtggggtcacaaagagc

SEQ ID NO: 16204 - DNA, 201 bp, Bos taurus
ggagactgttggctttggttagtatactgatgacacagagcatggttttgcctgcttcaaagtggggtaggtgagagccagcccagaaaactgcaggcctcttgtgagagcagccggcatccaggttggtttactaaaaatccttacttgggaatggtgagagccatgtagcagtattgattgaggccacctctacaggtg

SEQ ID NO: 16205 - DNA, 201 bp, Bos taurus
gaaggaaattgcaacccactccagtattcttgtctgggaatcttcaggactgagaagtttggtgggctacagaccataggatcgcaaaacagtcagacacgatttcctgacaaaacaacaacagattgactaatggtatctagcttcttttcatcagttaatttttgacttgtataacttctttggagaaaagtttactga

SEQ ID NO: 16206 - DNA, 201 bp, Bos taurus
gtaaagaaatgaaattggtaattgggccaacggctgcacgtgaagcctctgtctaaggttgaggagcaagctgtttttaagacagaagactaaactagggggcagaaggccatccatgctaccattaataaaaagctcaggctgccctgggagtgttacatctgttatcttcatctaaacattgaaaatatgcctggaaag

SEQ ID NO: 16207 - DNA, 201 bp, Bos taurus
aatgagtgccatggagactctgagaaaacccagttggtagaaaagtagaccagggcacagcaagattctgcttgcctgaagaaaggccagagactaaagaaatcatgttccagtggtagcatatcagcctgggataggatggtgggtgcacaaacccctgggtcagaattctgactttgtctttgtacaaaggccattgca

SEQ ID NO: 16208 - DNA, 201 bp, Bos taurus
caatttttccgtaaccatttggcaatcattaaagcttcgcagttgctggttttcctactggtgttttacaacctaaggtaaaaacagagagatggctcatgaaatcatacaacacttgggcactggcgaaagaaaaacacacgacatctgtgcagagttttacagactgaaaaacaatcagtggagacagcagcaccgtta

SEQ ID NO: 16209 - DNA, 201 bp, Bos taurus
taaggcaagcctttctttttccttactgaaataatttcagaaatgcactattggaatgttgtttaagatagacaaaatcatattcacaaaaaataccaatcgttcacttcaaggaacactgtctttatagtgtacaaacataacgtacaattctttgggcaggttagttttttcatgtagatcataaaatatattggtcaa

SEQ ID NO: 16210 - DNA, 201 bp, Bos taurus
actccaaggggccttcctgacctagggatcaaacccgcatctcttgcgtctcttgcactggcaggctgattcttcaccactagtgccatcttccttactgtttgtttgattacttggcctttccattactggggaaagtgtatgaaaatcttctcctgtaatgatagatatatcactttttcatttttgcacttttgacaa

SEQ ID NO: 16211 - DNA, 201 bp, Bos taurus
cttcctgggcaagatgaggagctggcttaacctcggcagggtccaggtgtttatggcagtcgggctagagcacactcccccaaggagaaaataagttacttatgccagtgtttgtataggagaatgagtgacactcaaattcatacttaaaaaataaaagaaaaggtggttctctcctagttgttacttgcatgtattttg

SEQ ID NO: 16212 - DNA, 201 bp, Bos taurus
cacacacaaaacaaggttatatattgatcagttgataaaaatattgtgacctaaccctattttccccctggaaacagtggttcagtatttgctaactgagatttcccagtgattctatggaacttaacgaccacatatgagactcgactgtgtattttatactgtttagaaatagccattcagggacgttaccaggggttg

SEQ ID NO: 16213 - DNA, 201 bp, Bos taurus
acccttaaagggagactggcatcaggagtgtgtgaaggtcagagcaaggtcaacaatgtgcctgggagcacgtgtctggtgaggtctgagtctgataaggcccctgactttccatagagtaagacttgcctcttctacagcttctgtacattttaatacctacatttaaacacatacatttagtacttgttgctgaaaata

SEQ ID NO: 16214 - DNA, 201 bp, Bos taurus
tgggggagtaagttcttgcctctcttctgtgataattattgtctgcgtgaaagtgtgagggaagatattcaaacctgatttagtttgtgcacagcaaaccatcggggaagcaaagccttagctgaagaccacaggctgaagcccaggagtccatctttcaaaactttaagacaatgacctctcctactcttgtgtgcggat

SEQ ID NO: 16215 - DNA, 201 bp, Bos taurus
gctgagcagagggcgggatggagacctggaagccattaatttaattctgacttccccacgtgctgcttcagtagccagtgtcacatttcctgtgtctcactggccagactcaaggctgggcaagttgcttcctttttggttattctgcttttggtccacttgtgaatattgtttcccaaactagactgtgctttagagacc

SEQ ID NO: 16216 - DNA, 201 bp, Bos taurus
gagtataaaatagcttcaaattaaatgttgttcctacagattcaataagttactgtacccacaaaatgagggggagaaggatttcaaaaaattagagggcctaacaaaaattgattgctaaaataagagaaattcagtacacagtttgggagataaagtcaaagtaatctcccagaatgtagatgcgaatatcaagagatg

SEQ ID NO: 16217 - DNA, 201 bp, Bos taurus
catgttagaaaggaccctgccacacacacaagggacgatggggagcatacagaatgatgaaatttggggttccattaaataaacactacaggagacatttggggccagcctttccagctctctggacatatagtcaggcaggccacaaaagacccccacaccacccaacattcaaagtaggcttttgcttccaggaagagt

SEQ ID NO: 16218 - DNA, 201 bp, Bos taurus
cactggccccgattcccattgtcaacctgcccagagccttctgctctgccccacacactcagcacagccccactttaaaagactcttcaggggacttccccggtgggccagtggttaagaatctgcctgccagtgcaggggacatgggttctacctctggtccaagaagatcccacatgccatggagcaactaagccacaa

SEQ ID NO: 16219 - DNA, 201 bp, Bos taurus
caacttgatttttcatgtatgtcagttattccctttccatctcttagcaataaaaatgtacgatagttgtacggggaccctgaggaacaggggctgcacatacgcagtctctgcgttctggcagcatccctcatgaggctgataacatgctctgggcccctcaagagctgcagcgtggctcaaacagatgatcaaagtcct

SEQ ID NO: 16220 - DNA, 201 bp, Bos taurus
aaggccagggggtccctatagggtatgtctactgtgtgccactagtcagagaacaaagtcagaagaaactgagggatgttgggctgtttgtttgaacatcgatgcatcttagaggccagagcttccacaaactgacagagcccttttcaggtgctccacgccctagaagctgtctctttgtatcagaaacgcaaagcagcc

SEQ ID NO: 16221 - DNA, 201 bp, Bos taurus
aatttgctagacaagccagcacaggagaaagctgagttctggggagaagcaggggttggggagaagagaccttatgtggcctaaggatgaacacgagggggaaagtgcccagtggtttgggctggagatccagaatataaatgtgctggaaaggatgaagagggccagattcatggactgcagacccctgctttgtagaca

SEQ ID NO: 16222 - DNA, 201 bp, Bos taurus
cagacgacggggagcccaggatttaggtcatccccaggcggaagtagagaaggaagtgtctcgtctttaaagtcagagtggaagaggtgaatgaaaacgccgcccaaacctcgtggcattagtaggacgactggaaaattccacctgaagttgctgaaatgaatttgtcttttttcccagaagtgaaaaataaacaaattc

SEQ ID NO: 16223 - DNA, 201 bp, Bos taurus
gcagggaggctccaaaatatacggttggccaaaaagttcattcagatttttctgtaagatgtaatgaaaaaaaacaaacaaacttttggccaatccactatagcacttgacaagccaaagcagcttggattttataatgtgacctcagcagaagtcgttcaatgcagagaaaggaagaggttcattcaggcctccaaaagt

SEQ ID NO: 16224 - DNA, 201 bp, Bos taurus
caagtataattaaattagatgtagtcacacctggagggttttgtccaccatctccatcaacatagagaatagacccacgggtctgttctctggataatcatggtagaaactgtaaatagcggtagcatggaggactaacagggaggagcggggaaggccctgccacactgcgctgggcgttgctttcccttccaccacaga

SEQ ID NO: 16225 - DNA, 201 bp, Bos taurus
cagccttgctcccctaactgagcccctcagcataccagtgacactcgaaaacgcaaatcagaagcccctcgcctcagtggccgactccttttccttatagcgtcctctgttccacattcagcctcctctgtccccagccagcctgaactcttccatttcctctagggccgctctcctgccttttggcctttgtgtatattg

SEQ ID NO: 16226 - DNA, 201 bp, Bos taurus
acatacagtacagcatatcttgagggcccagcttaacgcgttttacatatgatatgcctgtgacacctggacatatctgtcaccctagaagttccccgtgtggccctttcagttaatacccatctgtcccagtccctaggtcctgctccttttggatcaagagaagcagaggcaggcacaagtgtgactaagaggaataaa

SEQ ID NO: 16227 - DNA, 201 bp, Bos taurus
aagtcgaagtcatcatccccatagttcaacgtgtatgtttagaggtagggcctttaaagaggtaatgaagttaaaatgaggagccagtgagaaggtggctatctataagccaagggaagtggcctcagaagaaaccaactttgtagaccctttgatcttggacttccagcccccagaactgggagcaaatacatttcttgg

SEQ ID NO: 16228 - DNA, 201 bp, Bos taurus
cttgtgtgctctgttctcttcctcacagctctgccagctgccgtgtgagccagtttcggcaggctggaagataatggaggatgagagcacgtggaccatcgaggagcctttccaaatgaggcctccttgaccagtctcccctagatgagccaccagctgaccagagatacaggagcaagatgaaagagatgctagtttgat

SEQ ID NO: 16229 - DNA, 201 bp, Bos taurus
ggacctggattcagctgattatgctccagggcaaatcctccagcactgggttcacatccctgtgaatgaagtcaggagtcctggcttggccttaccacatagagtgttgagtgtttgcattgtgggaaactcatttaacatattaaaaaaaaaatttttttttgtctttgtggcttgcaggatcttagttcctcaaccaag

SEQ ID NO: 16230 - DNA, 201 bp, Bos taurus
cagctggggagacaggggacgcgtcacatttagacaagatgagagtggggccttggcagtgcctttgagtgcaggtgtttgcgtgtaggaggcaagaacccgggagaaagaggtggtgaaggccgagtgacaaatcaggttggagatggcactgtggggatgaacgggctggcccagaagcctgctggccacagacattgg

SEQ ID NO: 16231 - DNA, 201 bp, Bos taurus
ccgggtgcagaggaaggcatggaggggaaactatgtcaggttcgtgaccctggaaagactgtcacgggcaggcatgatgatgacatgcagccttctagctcctctgaccctgagacaggtggatggtgtctctgatcccagagaccgccatggcaagcaggaatcagccagagcagatctggggcactcacggccttatta

SEQ ID NO: 16232 - DNA, 201 bp, Bos taurus
ctttccaccttaatttctgttcacctcatccagcgacctctcctgatcccccacaggtctacaagttctgatcaggagccccgaccctggggccccatcccagtgcttatggctttcaaggcatcgtgttaagattagctgtttacttatcaattcccttgttggccaatgttctctgagggtagaggacatatcttttat

SEQ ID NO: 16233 - DNA, 201 bp, Bos taurus
acagagagagagcgagctgatgagcagggaggatgagctcaggggaaaatgtgttggttagtttccagtcagtgatgatatccacaagcagaaaggcccaatgagcatttggacagtcaaaggttctgaagtcatttcagcgaacaaaagcaatgaaatggatgaggcctgtgagggatcagtgcaaatagaaaaaactag

SEQ ID NO: 16234 - DNA, 201 bp, Bos taurus
cagcgggggccaacctgagccttaggtggcacatcagagcttatttgcatcagatgattgtgtgctgatcaccgttggccccagaaaggctccccagggtgtaaggacgtgcagggaccagtttctccaatggcaccccaatccattgaacctgggactctgtgttaggagtttttgtgacttcgttatacagatatatca

SEQ ID NO: 16235 - DNA, 201 bp, Bos taurus
cacgtcactatttccaaaatatgctcaaagatgtgatctcaatcaagggaggatccatctttaccacacaccctttcctggtgttcaaaaccaaactgctagaaacataaagataaaaggaatcaccagaaactgaggaggaactggtcaccctccagctccttgcataagcccacatgggctctgacatgggcggtgatg

SEQ ID NO: 16236 - DNA, 201 bp, Bos taurus
aagatgagcaaacaaggtttctgatggccattctgtccaaaagtaacttgatacttaagtgttgggcaccctagtaatttaattcaggatgaatgcaaattgctgtttgttttttggtacaggccttgcatttccttaagtaaaaggctcaataacagtcaagaccatcataagtgggcttggaggccacaaggaagaagc

SEQ ID NO: 16237 - DNA, 201 bp, Bos taurus
aactccaggccatggccttccccttctgggggttaagaaaagccagtacttctcgctcttggcacttcctctgaggacagttggagacaacgtttatcagcggagccctggcactgtggccaccacattccgccctctgatgacaaggacctggaggggtgcagcgggaagtagggctgggggaggggtgcctgggaggag

SEQ ID NO: 16238 - DNA, 201 bp, Bos taurus
agatattcacaaacacaaccgaaggaggggatcactcctgcccgggctgcagcccatcccccagatgggaccaagagaccagggagtaatgcagggaaacacatgatacttccaaagccagaatgtccacatggtcaactgattgaaaaccgcagcgccccagatgcccaaatacgcattcttgaatttctgcatttatcc

SEQ ID NO: 16239 - DNA, 201 bp, Bos taurus
taaatcttaacaatgttactgggtagaaactacccacaaataatacctaacaagtatcattacaagccttattctgctttatcctttttctgaaggataacagcctagagtgctttcctacaaagagtgctgtacatacactttggccacgttactggaaaaaacttttggaggagcacaaagatttctataatttcagca

SEQ ID NO: 16240 - DNA, 201 bp, Bos taurus
ttctccactgactgccactctgctggcagcaagccctggagcgtgaacgagcaccgttctgctccgtgtttcatcatcagggcctaagaatcctgcccccagagttctgagtgttattcccaagccttcgtgcagtctgtcctttcagatctccttaggtcaggagctggcaagctgtcccctaaggagccagggaataaa

SEQ ID NO: 16241 - DNA, 201 bp, Bos taurus
cctccaccagctaaaacaccacaaaaccccacaggtcaccagggtgtggatgttgcagagccccccacactgggccccagaggggaatccctgagggccttgcttgtctgtctgatgaagttcataggcaactcgtgactgaagagtgtataagtgaaactactacataaggcacacggagttggcctatttatctagaga

SEQ ID NO: 16242 - DNA, 201 bp, Bos taurus
aatagaataactggaactaggaataaattgtttatagggttcctgatatattatgtcaaagtatacaatgccaccaaacctctgatcaagagctaagatacattcttcctactgtggagatgagttcctaaaaaaactttttattttaacataaaaggtaaaatatagtatctaaaaatttttaaaaactaaattagcctc

SEQ ID NO: 16243 - DNA, 201 bp, Bos taurus
gaattctttacctctgtgctacctgagaagggccttgggaattaaactgacaaaagacttgtaggaattaagatgtgtttgagtttcacaaggaaaatatactcgagattgtggccaagtgttgttgctgctgctgctaagtcgcttcagccatggccaagtgattgaggcttaaatactgttttagactaaagttaggaa

SEQ ID NO: 16244 - DNA, 201 bp, Bos taurus
agcgtcagtgagtcaaaagtatgatgaggccaccggggcaactagtgggatcttagatggcagcaatagcatcgcaggatctagagtttcagtcatggtatttagtctgtgtggcccagccaagatggaagcatacaaccggaaacaaaggggcttggaaatcccagcacacgtggtaggacgagagagccaaggatgtcg

SEQ ID NO: 16245 - DNA, 201 bp, Bos taurus
agttatcttctccttagttttacaagtcataaagatgggactctttattagtgagctaagcatagacacataaagatgggccaaactgggatttcccagatagtcaagtggtttagactccttgcttccagtgtagggggctcgggttgaatccttggcctgggaactaagattccacatgctgtgcagtgctgtggaagg

SEQ ID NO: 16246 - DNA, 201 bp, Bos taurus
acccccccttctcagttagggtggtgggtgctctccctaaattcacgtttcttggaaggaagcctttcaaagccagcagccaggtctgctgtgttgacactgcacagcccgtaactgaccaccattgagactttgctcctgacttcctctctcagtttgtctagtatctctcattccattaagtcatcatctcttctctga

SEQ ID NO: 16247 - DNA, 201 bp, Bos taurus
ttttctctggcttacaagcacaaaccatcacacaaatggttcataaacctctttctttcgtaacacgggcttccctggaaccataaagctctgtttctccccccgacctctctagaaatgtacagccatgtgtattttaaaaaagagtaaacaattttgaaatatacatagacttttatgttcaaatattattattttgtg

SEQ ID NO: 16248 - DNA, 201 bp, Bos taurus
tggcctgagcatgcctgcacccttcaggacctgtggatagtaggacctttttgttttttcaaaagttccctgatagtaattgctgaggtgagtcttgcaattgtgataagaatcgctagggccagtcaggccgtggccttggctccgccctggctcagcactgggggtaaggccccaggtgaatgcctcatgcatttccta

SEQ ID NO: 16249 - DNA, 201 bp, Bos taurus
accattttccaaaggaattctttcagacctgtgaattaaagctgtacagtaaccgctaacattattaaacatttatagtgtggccagcactgcactaagcgctttacatggattttttatttaattctcatgaagtagatgttttcattatccccattttagaagcgaggatacgggaacaaagaggttagtaactcttga

SEQ ID NO: 16250 - DNA, 201 bp, Bos taurus
atctttgtgcaactgttatgttgaaaggccagagctgactagagacctatggaaagcaactttattcttttttctcactctctttaaaactatttaaaggcttgctttgggcctgtttccatgaatgaaatcttgaccctgtaatttagaggactctcctgtccctttcagttgcaggagtgtgttggttcagtgctcaaa

SEQ ID NO: 16251 - DNA, 201 bp, Bos taurus
catgggcagaggagactggtggactacagtccctggggtcatgaagagtcagacacgactgagcgactaaatgccataagggattaagaagataaataccatgacgtcttaaagatgagtagtgacctcgtggaaatcacttcagcacaaggtccccatggaaatttcctacagaaaatgacttcctttcattgaaaaagc

SEQ ID NO: 16252 - DNA, 201 bp, Bos taurus
tctcctcctgcctgcacctgttaaattgagatattttgtttaaaaatgataatgccatctcccatttcttattgatgtagggccttttgtatgtcagtcacggtggaagtttatctcacttctcttctcactttgtcgatggcagaactggaataggggcccagctattgcaaattctaaagcccatgcttctcgctgtgc

SEQ ID NO: 16253 - DNA, 201 bp, Bos taurus
gcaaagcaaacagcaattgcctgagggctccagagagtttaacaaaagcaggaagattctggagagaagccagccttgggaaatagaattggggccgatcggttttacatttttaaggtttttagcctgaagattgtggtcgctaaacctttgaaagaacaagcacagtctctccgaagacaaaattcagggccttttgaa

SEQ ID NO: 16254 - DNA, 201 bp, Bos taurus
aagagaagctaaactatatcaaagaaaatcctctactgttttgaactgaatgtggcatgtatgtggtggagaagacccctttttcttgatcagctttagaacccaaatggatgagcgtagtttttgtagagttttaattctcattttcaaatgagaatattcagcatcccagatttcctggactaagctcactggcagtga

SEQ ID NO: 16255 - DNA, 201 bp, Bos taurus
gatgaaacactcattttttaccttcccctgcaattatttacctttcactagcctccattcaccaggtagtaagcaatggttttataccatctgcttatttttagcctcatttggttttgtgttatcgattcatcccagtctgtgcctctcctggcaggaagagctcctagtgcagagtgacgtaaggtttggaatcaggac

SEQ ID NO: 16256 - DNA, 201 bp, Bos taurus
gaggttgaaaataaaggagaggaacttgatgaagcatgatctgaggatgattaggggtggggaaatgaaatttacaacacaggtcaaaggccttatataaaaagaatacatacaccactaagcttgatgggggagcagtaaggatttaaaaaatgcagtaaactctgttatggaaaatcaagaagctgggggaactgttac

SEQ ID NO: 16257 - DNA, 201 bp, Bos taurus
gctgttctataccctgctcatcatgggtgtcttccacaacgaggacttgaaacacgtcttgcagttgattgagcctagtgtgttcaaggaagccgccagcccggaggaggagagcgaggtggcggagaaggaaccctttgtggaagactccaagctggaaggagccgctgaggaagaaaacaaaggggctaagaggcccaa

SEQ ID NO: 16258 - DNA, 201 bp, Bos taurus
tccaaaatcatgttatgtatttatcagttagttgttgaccaactagggatctcttagtttttctaagtagtagaatgtacatcaagagcttgctggtcaaatgtcatgagagtgggtgtacacctgagagctttgaagacatccttgcaggccaggaacaatattgtcaacaagtcttcctgtcactctgcagacagttaa

SEQ ID NO: 16259 - DNA, 201 bp, Bos taurus
tggcctggagaattccatggactgtacagtccatggagttgcaatgagtcggactcaactgagaaactttcactttcacttcagttagtgactgagtcaagaaccacggccccagaaagcttctagactgtcttctccttatcatgacaacttctgaatgaaatggaaatcagagaagcaacagaatcaatcactcagaaa

SEQ ID NO: 16260 - DNA, 201 bp, Bos taurus
tataaaggcagaatttgaagtgatgaggctggaagtaaaggcatgcaaacagtcaccagaagccggtagagacaaagtatggattttttcctgaaacttccgaaaggagtgtcgtgtttctaataccttgattttgaacctaagttattcagaatggtgagagaattcatttctgttgttttaaaccatccagtctgtggc

SEQ ID NO: 16261 - DNA, 201 bp, Bos taurus
gtaatacaggtttgcttaagacatttgggttgtctatacagtttttactgattcattctttttggtagttaccaaccttctgcaagtttccatatcaagcatatagtgggagcaacatatgtgttctatataactacctcatgaccacacataggaacatacatgggaacgagactaacctgagacactcaagcttttccc

SEQ ID NO: 16262 - DNA, 201 bp, Bos taurus
taccattttatggtaatgtcattgtcattgggttttgatgatagaacttgagacatttaggaaattatgctgaaagtgtaacctgtaaagtataccttacatgataaggcctatgactagctaaccatatcatatgatgtgccctgatataatggatgcatactttagttcaaatttttgtttttatctatgctttaatca

SEQ ID NO: 16263 - DNA, 201 bp, Bos taurus
tgctaaagcaatatgaattttatgatttttaaaatcctagaaaatagtttttgttgtatgattttatgagtgaaattatagattcatgtttctattttcaatgtggaaacattatttaagaaatagtgacaggcttctctggtggttcattggtaaagaatctgcctgccaatatgggagacacagattcaatccctgtct

SEQ ID NO: 16264 - DNA, 201 bp, Bos taurus
ggcaagtcggtgccatcccgaatccccacgctcctcgtcagttcgcctgggcggcgagggctcttctggaaagacgagtgatgaaccgaagggtggccccgggcttgggcgctcagtcctaggacactctcttccagaacgctgagcgggaggcgaccagcgcacagtggaccgggcgcctcccgcgcttcgggggatcgc

SEQ ID NO: 16265 - DNA, 201 bp, Bos taurus
atgatttctttttacattattttttgactttgttggaattaatactgtctcatagtctccctttcttccctgcatctccctccttcccttcctgtctttcgtctcttcggagtcttcgggccttttgctccagtcaggactggatgctctctggaccttccagatagctttcctctagcattttcccctcagtatacccat

SEQ ID NO: 16266 - DNA, 201 bp, Bos taurus
ccatcaccaatgctttgagatgaaccaaattgagaaacgagctttgagtgatatgtaaatcattgaaaacaactggaataacagagacggcaaccagttagagggatgtggccatggtgctagaccaggaaactcaccatgccactcactagatctcccgtggaaaagtgcttgagtttcttaggttatgaatcaggcctg

SEQ ID NO: 16267 - DNA, 201 bp, Bos taurus
gcatataaaaaggcaatctattcccacactaggcacaggacaaaagaatcataccagaatctgtgatgactaatgctttatttataaggggagctatggtcctggggttaaccctaaccaaaggactgtgagggagaaaaagcatcaaagcccatcaaagcaatgagttatgggctagtcctccagaggcttaaagaggca

SEQ ID NO: 16268 - DNA, 201 bp, Bos taurus
actggggtggagggggccatctcagggggtcaaatcctagatgatagaggggcagccccagccagcccacctctccaggcacatgtagccctgcatcgagaagggcttgataggagccagcaggccagacatgcaagcaacagcattatcacctccagggccatttcctctcctccctgagcttgggagggcaaacaccca

SEQ ID NO: 16269 - DNA, 201 bp, Bos taurus
cttttgttaaaggaggtcctagattataaaactgaccaccaggttttataatcgagtagtagtgttataattcagttctgcagacactttaaaagttggtacaaaatatacagcattatgaaattacaaaacaagatattaaagtggcaatatatgttgataaattattgatggatatggttcatcaagatgtagaagata

SEQ ID NO: 16270 - DNA, 201 bp, Bos taurus
gaggggaccatgctgggcacgtcagggtgcttccacagtgggtcactgttgtaatttaagtcatcactttggggcgggggtggggtacttcaaaggccccggcaataaaagtttcctgtctgcacttagaaagtttcatcctctgcgggaaaggggaggcagagcttcaggggacacggtggggtcaggaggagactgcgc

SEQ ID NO: 16271 - DNA, 201 bp, Bos taurus
ttgagggtttggcagaatttgtgccatggatttgcccgctggtgtctctatagttttggggcctggtccttcctttgatgacccacacttttcctgctgcgaaccattcttgccacaacaagctgcccaggaaggctcattttcaatgctccatcagtgcttgtttctggaatctttttcttctcatttgatgtgaggttt

SEQ ID NO: 16272 - DNA, 201 bp, Bos taurus
ttgagcccatttagataatccaagataatctccttatttacaaaattatttttattatttatttaattagctgctccgggtcttaattatggcctgtgagatctttagttgcagaaggtgagctctcagttgcagcatgtaagatctacttccctgaccagggtccaagcccgggccccctgcattgggagtgcagagttg

SEQ ID NO: 16273 - DNA, 201 bp, Bos taurus
gaggtagcttcaaatataaacttggtcttccttgaggcatttttgtggggttctgattatgtccttagctaagtctctctggccaacaggaaatgagataccacatttcttaagagataatcaggccttagcaataccaacacttgtaatgaaattgcaaggactcccaaccaaattaccaactctttcgtagggaaggac

SEQ ID NO: 16274 - DNA, 201 bp, Bos taurus
ctcactgagtgcattaagagcttcctacactcctggcaatccatcttctctttgtatttaggaacctttgatcccactttttgcctgaactggctgggattacaacttgctttcagtataagggggactctggtctatttgtgccagtgatatttcattttctaagttttgatttatagatctgagagtggcagtgagtga

SEQ ID NO: 16275 - DNA, 201 bp, Bos taurus
ttcctcactctgcacgcctcctcaattcccccagggccaagactaagaaagggcagacacaaatagctgcatggtggaggctgacttaattgcttggtcacggtgttacttgggccttctctgaatccctcctccagatgcttacctaattttcctcctccttgctctattttttttccctttgaaagaaaatgtagatgg

SEQ ID NO: 16276 - DNA, 201 bp, Bos taurus
cctttgtgcctcaaaaccctttcttccactaacacctggagctgctgcttcttaccattgttctgtcttatgaggaaggaggctggctttgcttttgaacgtagaagacaaagttagtgtgtagcaatcaggtagtcctcagtcttgtttgcttctaagatggcatcaaaaccctaatgatctcccacactttagcaatgt

SEQ ID NO: 16277 - DNA, 201 bp, Bos taurus
ttgccctcacccgccatagataaccaggtagtctcaagtccgtcaaggaaaacatcagaccactctgaagccggccaagaaaaagagatactctgtctaacaaactttttctcaaggacctccccacaggcatgattgagactgcttccaccaaatactttcatgtcaattggtctaataagttagaagaatagcattttc

SEQ ID NO: 16278 - DNA, 201 bp, Bos taurus
agggttggtttggcatattacacacatttgcttttttcaagtcagtaaaacctacatgattcgcaccaatcaaccgtagacccgcctagcacgctgggagcgggccaatgtaacaggaggcagaaattcagccctacacaaaggagtctacagtacttgggggtaaaattgtatggatacactcaaactcagctctgccaa

SEQ ID NO: 16279 - DNA, 201 bp, Bos taurus
cagcttattagcataaagcaaagaatacatcttagctcatcacattcatgaaactctgctttaaaaatattatattatagaatttaactgtactgttccctcaggaatgagttattcaaaagaactggagattggaatcacatgcaagtccactacttttgttctcatttttatttttggggatccatataaatatgcttt

SEQ ID NO: 16280 - DNA, 201 bp, Bos taurus
aggctattgcctgcagaggtcaaacgattcccacaaagggcagtggctctgaaagtaaccagaggcccaagccccctaagtcagtggcccactttaaacacgagctgacataagagcagagtcaaataatgcggatcatcccttggatgtcaacagctgggaccacccaccctttcttttcctagactcacataagtgaag

SEQ ID NO: 16281 - DNA, 201 bp, Bos taurus
catgcaaactcttagtcgcagcatgtggaaactagttcccagaccagggagcaaacccaggccccctgtattgggagcacagactttaaccactgggccactagggaagtccttgaattttattttgagtcattggagggtttgaacaagggttccattgtggtagacagaaaataggcggtgataaagctgaagcaagaa

SEQ ID NO: 16282 - DNA, 201 bp, Bos taurus
tcttctagcacacaggccattgagcaaagaatgttttttcttttttttcatttttaaagaattggagggggaaaaagtgaacaaagaagaatatgtgatacggacatatgtggccagatctaaaatattctctgatccttgaaagaaaaatgttacacatttctgatctaggcagaagggaaaattttctccaaaagaagg

SEQ ID NO: 16283 - DNA, 201 bp, Bos taurus
agcagaaagctctgatgacagtggaatgagaaatggaagctaatgttctccagcattcttgccttgctgatgaatgatacatttcttaagtaccttgtaattcatttagtttccttcttggtaaaaggtgtgacagcattctctgtaaatgagatttttttttttttttttgtaaatgagattttgcaacagagcaagaag

SEQ ID NO: 16284 - DNA, 201 bp, Bos taurus
atggggaggctaactgtctctcccttggaggaaaaaagaagaaaatgaaaatggactaaagcattccccattacctcagagcttaacactagctgtttcctgagtaaaaaaaaatcatagaggcatttaaaaataattggttgaaaagcataatgcttctcttgtggtcatctggtctgtatttctctcatatttgtcaat

SEQ ID NO: 16285 - DNA, 201 bp, Bos taurus
tacttgttctgggaagctgtctcccccttccactgccattctctgtggccaagtatgaaacctgatcactcaattagttaacactctggacacagcattgcgtctaaaaatacccgccttggggaatgtaaaggtttcccctgactcctagtaaggaggcccaaactggtcagaatgtccctaagtattgaaacaaggggt

SEQ ID NO: 16286 - DNA, 201 bp, Bos taurus
ggctgaaacctgatatcttcccttgcttcccacatcttataccttctctggataccctgcacacacaccagatttctcactgtataataactgtttgcatatctgtgtcatcagtgagactgagcttccaacaaagcaaagataactacatattaacctttggatttctgggttcactgtgcccagcacaatctcaggcac

SEQ ID NO: 16287 - DNA, 201 bp, Bos taurus
tagattctgactccaaattcccttccctgcttaacacctaaggggccctctaccctctgatcaaggcaccctgaattatatgggcagacttcagggctttcctcatacaacttctgcttggaaggcctgcttcaccattccttctccagtgttcctagagaatgtcacatccaatatttcttcaaatgtcacatcctcttt

SEQ ID NO: 16288 - DNA, 201 bp, Bos taurus
tctgtcaatggaatagctggctcatgtataaaggaaaaaggcaaagaacttcagccttatctcttatattgttttttaagagaaatgtctcgtgtgttaccatgtttggaatatctcctagcaaggctgaaaagcaaggaataaacagcaataattcagtgtgcctaatggcacaaaataaaggaggtattcacaaacaga

SEQ ID NO: 16289 - DNA, 201 bp, Bos taurus
ccttttcatctttcctgacacagttaataggcacggttttcaggagatgtgtgtttatagcagatttggccatgtggtctccaggtgaaccttctggaagtggtgaaaatcacacccggatagatttagatttagaatctctcccaccccctgcaaaatagataaaactggacttgttttgtagagtagggaagagaagcc

SEQ ID NO: 16290 - DNA, 201 bp, Bos taurus
tctcagttattattagaccactcccatctcagttcttagggcctaacagagaagaaacgaattgtctgagcacttcggctacttgatgttaagggcctgtaggcatctcttgatgttaagggactgtcccctgcttgggctggggtctctggaatgtgccctgaggccaaaggtacagcctcttgtggtacaacttagccc

SEQ ID NO: 16291 - DNA, 201 bp, Bos taurus
agtctgtgttccttcaattctccacctcctgccagatctggtgggcactctcagctagcactggagcccctttaaaatggccctccgtctcatcatatccggtaggtgccctgagctgttatcagagcccctccaatcatccccaaccaaagtggctcaccccaaggggctggccatacagaccagagcacccacaacagt

SEQ ID NO: 16292 - DNA, 201 bp, Bos taurus
tataaattcaatgaggttcccatgacaggcatatccatgtggccatgtcaagttcctctgtctagaagtcacatgatgaagataaagcttgggcacggccgggaaagatgagtaggggaggagaagtcatctggaatatgactgaataacatgaataaggacacagaaatctgaaaaattatggtgtgctcaggaaccagt

SEQ ID NO: 16293 - DNA, 201 bp, Bos taurus
tatatctcacagagggcctggaaaactgtaaggaatcaataaattatgagcaagagcaagagagtgggttggggaagaatgggagaatatcttcaatttagatttctgaatgactctaaggatgaaataacttgtattttttttaactagcttgagcattttctggtttcattcaaattatgatgtatacatagaaaaaac

SEQ ID NO: 16294 - DNA, 201 bp, Bos taurus
atttatatttgctggctgataaggatgttcatcaagtagatggactcaacttgaggccactgataaggccaatgcagttttacagtttgctcagtccttgtacttttccactccatttcccacacctgtaacttactgaatcataatttatctggccagtcaattgtcataataaagaaacataacagcctttccttcaga

SEQ ID NO: 16295 - DNA, 201 bp, Bos taurus
tgtgttcggccacaataaaagaagcaatcacccctaaatagcttaaataaattaggagtcctaggttctttactgaataagaagcctaaaggaaaggaatccatggccagtctggtgtctcaaatatcacctggaaccgagactcgattcagctctacacactgccatacttaggatgtgttattcacagaaatacctctt

SEQ ID NO: 16296 - DNA, 201 bp, Bos taurus
tgttctatcaaatataacaagtgatactctgtgttttcattcatctaagaataacccctcttaatttgcttttaagccagctagtaactattttcagtttagaactagtcaaagaatcaatcttgacccggttgctaggaaacttgctttggtgaagaagttaagaatcaatttccctatgcattaaagaacatatttaag

SEQ ID NO: 16297 - DNA, 201 bp, Bos taurus
gtgaaattattgaagtcatttgctccaatgggtgtgacaaaacatacaaagaggatggccagaaagatcatgatttgttattgcgtgaggcaaatcaaataagagaattgtgatactgtgtacctactgttggtgctgactagtgtgtgtgtgtatttgtagagatgtttgtgaggacgattaccaaatgtaaatggtgat

SEQ ID NO: 16298 - DNA, 201 bp, Bos taurus
tttatggtcactctgtattttaagccagtaatacatataactcttcaacactgtgtggaaaattaatcaaattatttgtgtggccataatgccatggaccggagaaggcaatggcaccccactccagtactcttgcctggaaaatcccatggacggaggagcctggtaggctgcagtccatggggtcgctgagggtcggac

SEQ ID NO: 16299 - DNA, 201 bp, Bos taurus
ccttcctaccttctttctctgctacttctaagctattttgtagagagttttcaaagtagtcttcaggaaaatcaattgtatcacttcacttccctcctcacgaactaacagtggtttcccattggccacagactagaggccctcaactataagttggaagatttccataacatgattctttacatcataggcaagtagctg

SEQ ID NO: 16300 - DNA, 201 bp, Bos taurus
tttataaagaagggccatgtgcaaagtcttttcaatgctctgtgcagcacaactttataacagagatcattcggttgacagagcatattgtatacaaaatagagataggttcaagttcagggccgccgtcttcacgatatcattctctgtatgtttatgtattgtacatatcactaatcctagagtaaaccggttgttcaa

SEQ ID NO: 16301 - DNA, 201 bp, Bos taurus
tagggccttagtgttttgttgattctaagcatcaaatcccagatgtcttcaaacttcagggtgcataattacctgggaacttataaatatgccaagttctgggcccatcctctgagaatgatttcaaggtctggaaatgaaggcccaaactctgcattcttacctcccccactatctcctggcgagtttgatgcccatggt

SEQ ID NO: 16302 - DNA, 201 bp, Bos taurus
cgactgaagcgacttagcagcggcagcagcagttagggaaggcctctgtgagaagttggcatttgagcaaggacttgaaggaggtgaaggtattagccccacagaaactggggaagagcttcccaggaagggagttgaccaggtgcaagctccagactggggctctgcccagcaccgggaggtcagtgtagctggtcagac

SEQ ID NO: 16303 - DNA, 201 bp, Bos taurus
ttgcagctctggatctttgaggcctgatggaggcctgtagtttacctgactagggatggggaagaagccatcagtcctgtgagttcggggcagtccatcccgtgggagaaggaggaggcccctgctgtagttaggctgcctaaagtaaccttccagagttatttctagacaattttgcttgtcacacatactaaccttaac

SEQ ID NO: 16304 - DNA, 201 bp, Bos taurus
ggaaaacataagatcaggtacattcttaatggaattgagtaagctgcattcctcttttggatttgtttctgattgctctttcttcacagaagcctgtgtgcgtcctttctcatttctctgtgtatacccataagcattaaaaacagtcctttccttgtattacttctttctctctgttgggattggttcttctcttcgttc

SEQ ID NO: 16305 - DNA, 201 bp, Bos taurus
gtgtaaagttataacatagatgtaatataaaacccttgtacaaacgtttctaagaaaacaattcagttaaattgatagaggcattgtgttaaacatacagtagtcagatttgtaggagtgtgttgttgagaaaagggtaatttctgtgaggcatattacagctaggtgtagctttggaggtataggttctacagatgttat

SEQ ID NO: 16306 - DNA, 201 bp, Bos taurus
tttgccttgttataataatctattttaatgggcttttcagaactccctgtatggctactaatgacttagaatataaaagtcatctcatgtttcatctatccctagttttattttcattaatcattatgaaataattgaagcactgacatttttctacacaaatccacagctgagagcatccataaagaaccatttgtataa

SEQ ID NO: 16307 - DNA, 201 bp, Bos taurus
cctctcccatattatcactttttccttcttcattgatcatcccctaagaatacagacatagtaaaaggaaacatgtatcaagtcatggaggaaagatattgtataatatggtttgtaaattttgtgtaagtccaccaaatgaaggaaaatttgtatgacaaagactatcaagaaaaaataagtcatattatgaaggaattg

SEQ ID NO: 16308 - DNA, 201 bp, Bos taurus
gggatgtgccagtgggcattctagggtgattttggcaggccagctagagcaccaggtgcatttcaatctgctgcttttccactgcaactcaaaacaagtcagtttgtgtgcaaaccatttaaaagcagattcttggtttcctacaactctcaggctctccctttcataaaacctagtagtttacaaagccaattttggggg

SEQ ID NO: 16309 - DNA, 201 bp, Bos taurus
actatttttcagctttgtaaatgttttcccatcaatattgatttataaagactattattttattagaaaactaatggttaaatgtgtatacagttgtgagtagagggagttttagattcctcactagtattttttgttttgttattaggtccaagtcagaactttctctttttatcaaaccaataggttttgaatttctaa

SEQ ID NO: 16310 - DNA, 201 bp, Bos taurus
agtaacacaggtggagaaacctgggttggagttgagtagagctgatgtggcagaaagaaaacactcagatattgatggtgaaattaattgactggaagaatatatcatcttacttaaattggatattaaaaaactaaataaattgataaggtgggtgaaagattaggaaacaaggaagttccatattcagtctaacgttgt

SEQ ID NO: 16311 - DNA, 201 bp, Bos taurus
gatgtctggccctagatgagtgatcccaccatcgtggttatctgggtcatgaagatcttttttgtatagttcttctgtgtattctctcaacctcttcttattatcttctgcaaaggccaacagagttctgctgagagcaaactttaacagggaaaagactaacagagttttgcttagagaatgaactggtcatagcaaaca

SEQ ID NO: 16312 - DNA, 201 bp, Bos taurus
cattaaaaataaaaggatgagataagtttgaacaaaatcatatcgtgaagttaaagtatagccattcctgagtgtcctggggccctatcagtaatgtatgaaaaagatttttttgtgaaacatgccccaaaaatggcagatcatagcaggcttctctacccctggccagaggtcatggctatatgagtgtttcctggtttc

SEQ ID NO: 16313 - DNA, 201 bp, Bos taurus
atattatgatttaatacagtaccatgttaacaatctatatacatatgctgataacatctgttatcacatatatgtgataatttaaaaagctcattagatttggatgtgtaatccccaaagaaaagtgaatagttatatttttgtaacttgattaccacttgctaggtatttaaaaaaagaatttagaaaattcacaaatat

SEQ ID NO: 16314 - DNA, 201 bp, Bos taurus
taaagcaaaagtctgctcgctgtgttctagccgtggatattatgtaaggctaaataggatgtccacacctgactctcctatttcacactgaactaaaaaatggaaaaatatgaaagaagttccacattacagaggagatgctgctcgataatacagtaattcagatctatataagacttttgtagctattattcagggtta

SEQ ID NO: 16315 - DNA, 201 bp, Bos taurus
gtactgccttttatttttgtgtcttggcctctgtaattacttctgtaccattgctacatctgtcttttatataattcaccaccaccactaccaacaacagcctaaagttagaattggccaattactgtatatgatgaagaatataagtactagatggtatagatctttcatattggtctgtgttataaactattctccagg

SEQ ID NO: 16316 - DNA, 201 bp, Bos taurus
tgccaagtctaaataaaaagcagaaaaataaaatcttcaagatcataaataaagatatgaggtttttttaaaaaagtgcacacagctcagttggcctacactgcttattctcctttcagttctaaacctccactgtcagatcatccaatcaaactatcttaaaccaattcaatgttattatctcagcaaccttgcctggaa

SEQ ID NO: 16317 - DNA, 201 bp, Bos taurus
ttttcattctattacagaggttatatatgtctcccattattatttgcaggaaaaaaaattcatttaaattacccactctactcctcaaaaaaatgtacatcgataagagaaggaatgaagtaaactggtttcacatgctgtttattgataagaaagtctccaaataaagttggggggtacaatttgataccacatatcaaa

SEQ ID NO: 16318 - DNA, 201 bp, Bos taurus
ctccataacatatgtttccttcttcagtattctgtgatactaagacttaaaaagtgatcttgacattgtgcaaagtcaaaactcttttgtttttttaataaatgaactattaggttgtaatacatgtgctcatcccaggggagaggattctttattcttccccttgctactcagtagattttaactttacaacacttaaga

SEQ ID NO: 16319 - DNA, 201 bp, Bos taurus
ttacaaaaatcattcagcttcaaaaactgccattcaaaatgtggtaagttgaccaccatttatacacaacacaaaatgaataagtctagtcatcacaagagacctctacatttgcagatggaaaatgcatgaattttaagaagtgggtaacatatgatgaaaagttatttactgtttacctaaaattcaagtttactgaag

SEQ ID NO: 16320 - DNA, 201 bp, Bos taurus
ttcctactccaggggatcttcctgacccagggatcaaaccctcgtctcttgtgtccccagcactggcaggttgattctttaccactggggccaccatagccgattcaaacttgcctaggttattctcttccgtccctgtgctaatggagggcttagcgaagttgtccacgcaaaaatgtcccacagatttgggccagctag

SEQ ID NO: 16321 - DNA, 201 bp, Bos taurus
aagagatacttgtgctcccgtctcctttcaaaaatgcaaccgagtgagccgtccttaagtgagtgattcttctgcagacaattaaggcacaagagatttcaaggtctttcagtaagctttaattaatgctatcaaacagagcctaggaaacacccacatattttaaaggcaaaactaaatacagtatattcaaaaacaaga

SEQ ID NO: 16322 - DNA, 201 bp, Bos taurus
ctaaactccaatgttttgctttgtttggcctccctgcatcaggcacgtggacttgtatttggtaacatttccttcttttccttctcttttatagaccaggggtccccagcccctgggccacaagtggataccagctgatggcctgttagaaactgggccacacagcaggagatgagccgtggcaagatgtaaaccatcccc

SEQ ID NO: 16323 - DNA, 201 bp, Bos taurus
ggcctccgtacaaacatggcaatagattcagatcagagcagctggaaactctggtgaactaagcaccctggtcaatcatgctcctcataattgaaggactataagttgcattcctaaaactgccaaaaggaacaatttccaactgggccaatgtttgtcaccttgggaaaggtattgaatctttatgagatattttgtaaa

SEQ ID NO: 16324 - DNA, 201 bp, Bos taurus
tgtactaccaccatccactcagcttccttttatctttctctcccattctttgtttcattcttctcccagacgttagtccttttacactatctcaacctctcctaccatccttttagggaattaaccaccaaatttaagtcaacgtgtttgagttcattccctacccttactaaacccttgttgagttctcacaacaaggac

SEQ ID NO: 16325 - DNA, 201 bp, Bos taurus
aatacttagaaaccaaaatagtaattagtcataaaattttcaagattcaagccagcagaaaagatatgttctatcaagtttcctaatattactcagataacaccaatgaaataatatcaaagacacaactttctatttttaccatatttaaagctaccagcctgtacacaaaactcatgtttggtagcacagaaacaaatg

SEQ ID NO: 16326 - DNA, 201 bp, Bos taurus
taaacatttctcactctaaacttcaatgttttggtttgtttggcgtcgttgtgtgttgcacacacaaacttgggttcaacaactgtgctaatgcaacatacccccaccaaaattaggcctgttgagaaaccttctgtacaaggtgattcctgcctgatattacccattcagaaaaatattaaccaaaagagtcaaccagga

SEQ ID NO: 16327 - DNA, 201 bp, Bos taurus
taatcaaagggtacaaagttgtaattctacatgataactaagtcctagatatctacttataacatagtacccaaagttaacaatattatattatacacttaaaattttgctaacaggggaaatcttatattaagtattcatatcaccaaaaataataataattagaataacaataagaaggagggaggaaatttttagagg

SEQ ID NO: 16328 - DNA, 201 bp, Bos taurus
caggtggattctttaccactgggccatcaggaaagccctccttcatggatcacagcattgtcatagtgagggggcttgcataactcaatgaatctatgaatcaagcaatgcaaggccaccaagatgagcgggtcatagtgaagaactctgacaaaatgtggtccactggagaaggaaatggcaacccactcttgtattctt

SEQ ID NO: 16329 - DNA, 201 bp, Bos taurus
aagccactctctttaagttattagaaagctttttatattaaatctgaatctgcatttctatgtatcactttgttttctatttcagtcttcattctgccccaggagggaagtttatatggtttagatacttcatgctgccatattctccctaagttgtcttttttccacactaaatatgcccagtttttccaaccaccctga

SEQ ID NO: 16330 - DNA, 201 bp, Bos taurus
ttacagatggctaccttctccctgggtgttcacatggccattcctccctctgtgcattctctctgtcctagtctcttcttatagaaacaccaggtgtaacaggttgggccctatctccacattcagaatgcagtcacattctgacttactggagattaggatttcagcatatgaattggggaggagggggacagaattcag

SEQ ID NO: 16331 - DNA, 201 bp, Bos taurus
acataatagggaggaaaaaagtaaagcaataaaagcattgcgtccctaggactagagatgcgaaaagtaacctggaaatttcctaattttattctaagaaggtgtccatcctatgccgccgagtggggaaggctacggctccacagcgcagatcactgggcgtctcattccgaccgggccgcgcgacctaactggccatct

SEQ ID NO: 16332 - DNA, 201 bp, Bos taurus
ttatactagctcaccattcttgttttttcaaggctttttaaaaaatgtttctgctttcaaatgaacttcataatcaatttgtctagttttaagataaatctaatggtatttttaatgggattagattaaattagaataaactgacattattctgatattgaatcttacaatcccattaaaagatttttcttttcatttgtt

SEQ ID NO: 16333 - DNA, 201 bp, Bos taurus
gtaggctgccgtctcgggtcgcacagagtcggacacgactgaagcgacttagtagtggtagtattgatgatagcttgtttgtaactttaaaatcattttgaatggatttaaaattcttggtttaccttttccttcaatatcttacatatgttttccattggaataaagcatactataaaaagtctgatgccagtctgattt

SEQ ID NO: 16334 - DNA, 201 bp, Bos taurus
cttacccctggaagttttgggagcaggtatcatttacagccccacagcgcttctgagtgttaagctgcaatagctgttgttttcaggtcgttgttgcggtgagtggccacgaacaggatgtgcagctctggttacccagttttgccaacacagccttactgcaagtcctgctttggggttgtaaattagggtggaatgagc

SEQ ID NO: 16335 - DNA, 201 bp, Bos taurus
ccaaggagcaccaagcctggggacagagtgttcccagcagctgtaggcagccgaggagctgcaaccctctcctaggtctcgtaaggccctcctcctgtactacggggagcattcttttgggtgcatgcaaatggggggctgagactggtaaccacaacactaggtctttcagggctcaagaggaggcctcctacacgaaag

SEQ ID NO: 16336 - DNA, 201 bp, Bos taurus
ataatatttaagtttgaaacagtgagagttttatccataaaatggacagttggaggtgagggtttccaagacactacaagatactacttagtgtgatgtactaaaagacagagaacattaatttaacataaactgttcttattttagggaccaaacttgctcaagcaaaaaagtttaatgatcctgatgatccatgcaaaa

SEQ ID NO: 16337 - DNA, 201 bp, Bos taurus
cttaagaccactcagtggttgttcctatccattcagtggcctgagcagtgggagctgtaaacccattttgagctacaggctgagggctctatcttccattaggaactgaataggcatggcagggccctgtgccttcagacccacctgcaacttcagaatgggctaccctggtggctcaaacagtaaagaatccacctgcaa

SEQ ID NO: 16338 - DNA, 201 bp, Bos taurus
gggccatcccggtgagtctgagccgtctgcctttcttcctcactgcagggtgaagatggcttgccagtccagggctgctggaacaaggtaagctttcccgaggttccagggcctcagggcagagttgtacgtgggctccattttctgccgtgggataaagcatgcacgatttcccttccaggccttcctgcagatgaggca

SEQ ID NO: 16339 - DNA, 201 bp, Bos taurus
atctttctcgtacttaactttgatgaatacctacatctctcggtggcaaaatgacataaaataggagtgcagtaagtacataagaacaacataacattcttacataagaatgtatgtaatgtatgtagtaaaaatgcctctaacttacatcatttacctctgagataagagggtgctgagcatgggttttgttgctaattc

SEQ ID NO: 16340 - DNA, 201 bp, Bos taurus
aggacggggcacagtggagggcctcatccaggtcggtcctcaggaaacaataaatagatggaagttgtcttctgtcactctcagggcagctgctggctcttagcactagaaacaaggcctcaaacccaaaagggcccggaaaatgcgcagcaatgctcatccatgggcccagaaggtactgatgacttgaaggtaacttgg

SEQ ID NO: 16341 - DNA, 201 bp, Bos taurus
ctccagagccccatcccttgtgccctagaagaccctgtgagcctcaatccaggcaagggagctcaggacaggctctgcagacagaggaggggcagggccatgggctgggtccactcacccacaatctcattctcttccagattgatgttctccagcgcaggcagggtggtgagctgctcggggaagtcgtggaactggttc

SEQ ID NO: 16342 - DNA, 201 bp, Bos taurus
ttgcctgtggtccttttgtaccctgagctatccaggtggtttctcctgctcccgagcaggtcccttccatgggacagaagcacattggataaggcctaacggtatactctgcaggatggtacccaagaatgacctcggaagacgctgaaacttttgagtaccctacccaggcccagtagtcattgtttctcagtccagtga

SEQ ID NO: 16343 - DNA, 201 bp, Bos taurus
ccttacttctgagttctcgaaagtagtttgcagtggctctcgcctggtgggacagtgggtgaattcctttccttttctctaagaaactgtattgaactaggctcctggcctttggatggagattggggagcagggtaagggatggggtggtggatgcccagtgcttctcagtatgacgtattcatccttagagacaggcag

SEQ ID NO: 16344 - DNA, 201 bp, Bos taurus
agcaggagtaacttggccaagggcaaacggccagggcagtgccattttcctattgtgcaaaatgtccccagggcagcccaaactggcaccattcaggccacgagtggaaccctctcttggaaaacagaagaaagggaaggtccgttctccagcctcttaaaaagatccaggcagaggagcttaagggatcctagaatttag

SEQ ID NO: 16345 - DNA, 201 bp, Bos taurus
gtacacctggtcctttgctggggtccccctctgcccaggccccagaacattaaagagaggaacccgcaggactcctgccttggcagcctgctctgggtgctgtgacactaggccatgccttgctttcctaccaacttagatacttggacatcttccccatcctgttagggtaaggaaagcaactcctaggcctggggggca

SEQ ID NO: 16346 - DNA, 201 bp, Bos taurus
gggtccccagatgccactacctactgcagttaaactctgaaagatgggtaatgagtgaaaaaaggcactgggtccagtcctgaactgtaataaggccctgctttctgtctagattctagaacaacaagttctctccaaggtggctcctgggcatcctggagatgcctgcctcagattatgtgtggcatgtttcccaggtat

SEQ ID NO: 16347 - DNA, 201 bp, Bos taurus
tgaggctgaaggggaggtggatttcttacattccaagtgcttggttggtatttctgaatggcccatcctggagcctcctcccaggcctgctggccaaacacatggtcatttgaaccttatggctgggattagggtagcaaggaactatcttggagccccctgaggcctggagggaagggttaaggagcagggatcataggc

SEQ ID NO: 16348 - DNA, 201 bp, Bos taurus
gtatgatgcctgacgatactaaagagtatgatgggctaaaggatggagaggaagagactgcatggccccgcagtggccctgggctggcatcttggaggaacgggcacctctgcttcactgtctctatatccttaaaatgccaaatactccggtggccctctggcactcttcgtgagaaagaacgggaggaaaggggccaag

SEQ ID NO: 16349 - DNA, 201 bp, Bos taurus
aaggggtctgagctgttaacaactgctcctagccagcagtgtgagagtcaggggtgaaggagacccctgagtttggagagggtcctgggccagctggagcgagtctggaagagcttccttctgaggagagcagggttttgaagggagaaggctgtagacctggccactggttctggaaagcccctttcccacctctcccac

SEQ ID NO: 16350 - DNA, 201 bp, Bos taurus
ttattagttgccaaaagtttaaaattgagagctcaagtaaaatctggacttctgactttgattgaaaatttagtgattctggcaaccctgggcccctctcctggcgtatgccagttggaactgcatgtacaaactggcagctgggttttcaccagtctctgcttctccgtaccgtctcccccaccagctccctggccctgt

SEQ ID NO: 16351 - DNA, 201 bp, Bos taurus
ggctgaactgagacaagataattcatctagccactcatttatttaacatatacatcctggttatctgccctgtgccaggcccaggactcaaggaaacacatgtgacaagacatgatccacgccctcaaggacctccagcagggaaaacccagggaatcaaggaaatgcagcccagggatcttaggatagaatataggccag

SEQ ID NO: 16352 - DNA, 201 bp, Bos taurus
cacaggcaatcagtaaatgcaatgggaggtaagaaaacgatggagagggcttgctttctagacaagccctttagaagagacagacactgagttgggcctcatagcaagtccaagacttagagaagaggaggagggagggcagcgtgaaagcagaaatgggtctggagggccaaggagatcggtttagatgtatgcagggtt

SEQ ID NO: 16353 - DNA, 201 bp, Bos taurus
atagcaagtgtgcaaaatctgtaagggctgtgaaacaatgcagctcagatggggacttgaacccacggttttgaaacacatcacacacgtggcctcagggttttaacgcagctcaccttcttgatgtctcatcacagaaagaattcagtgagacacaaagtgataggcaagaagtgaattcatgtagaaagaaacatactg

SEQ ID NO: 16354 - DNA, 201 bp, Bos taurus
ccactctagtcaatttgaattcactggccacaaaaaatcccaaatactgggaagccaaacatagataatgcaaaagaggaagaaaaggagcagataggatacctaaaggccacataatctgaagtctgggggaattctgagtcataggagttccaacagtcttcaactatactggagattatataatgcatatgcaaccct

SEQ ID NO: 16355 - DNA, 201 bp, Bos taurus
aaccaatctactgttcttacgtggcccactgcaggacagtgtggtgtggtttctcaagcactggagctggatctgcatccaatcatcccccatcttattctgcacacatttgcaaactggctggccaagatcagggcacaggctgtaagcatgaaacaactttagcacctagaattcatcaggtacacttcactttaggag

SEQ ID NO: 16356 - DNA, 201 bp, Bos taurus
ttctaaaccagctgagttacatggaaacaaaacagctctcccagcaaagccagtgaccttggcagttttctgaattaatttagcttactataaggaagaaatgattattggtgttaatgagatttgggtttctgtatttgttgctaaagttgctaaaacttggtattttacttttgcaggtcaccttgtaaattttgccta

SEQ ID NO: 16357 - DNA, 201 bp, Bos taurus
tgggtatttgttactgtggtacatgtttataagacggggttcaagatagccctcagtgatccctgtcctggtgtatttatacccgtgtgtactgtcctatggttggtctgtgtgaccaacagaatatggcagaaatggaggtatgtggcttccaaaattacattataaaagactacaacttctgtcatggaaaggcccatg

SEQ ID NO: 16358 - DNA, 201 bp, Bos taurus
acttctaatagccccatttctcagcgttgtcttgttcctgtggggaatactggggaaggctagggagttcaggggggccattcactacagccataccttaccaggttccagttgcctgttttgcaatttgattagttttgctgttcccttggctcacaaaattgccattcctctgatggcccctacagtgactgctggtca

SEQ ID NO: 16359 - DNA, 201 bp, Bos taurus
acagcacactcatgattgcttgtcatgcaaccgtgaaaccagggcagacagaggtaagttctggtgctctccttacgacatatcctttgcctcatccaagctggcccagttacccactaagcacctgccttgtccagcactgtctagattatacaaagatgtgtaaaataggatttatgcctttaaggaatttacaatctt

SEQ ID NO: 16360 - DNA, 201 bp, Bos taurus
ctccaggctgacttagggcctaagtggccctgacaactttcttaccaagtttatatttgaaatgatcttgtacataagtttccttttttctttttcaataacagtacacgaattaggccttcactagcctgaccctggagaaatgcctaacttttctgggcctcagtgtcaccttctgtaaaacagataatataacctgct

SEQ ID NO: 16361 - DNA, 201 bp, Bos taurus
ggctgggagctccacattctctcccaagaaggtctgttggccacggtgttctcataagcctcgttctaggcgcgtatacaaattctgaagaagtccattccgagacctggggcaggcaggccatctcagaggctgcagtcacatcacacagcccccagagctctgtcagagttcttgcctggtcccgagtccatggaggcc

SEQ ID NO: 16362 - DNA, 201 bp, Bos taurus
aaccacccatctaagccatttattctcagacttcagtacacatctgaaccaccaagcttgttaacaatagcctagttaaacaaaactggattggtacctgggcaactgtatttttagcaagcttcctgatattcttcaaagactgagaatcactgatctaaggaattcattttatcagttagctgaatcttctggggaggg

SEQ ID NO: 16363 - DNA, 201 bp, Bos taurus
gttgtcaggtgtgtgtatatacatgtttaaaattgttatattttcttgatacattgaccctttcatcattatacagtatccttattttctttcagtaacaatatttatgttaaaacatttttttctgatagtaatataaccacttcacctttgtctggttattattttcgtggtttatcatcttcctttcttttactttct

SEQ ID NO: 16364 - DNA, 201 bp, Bos taurus
gctgggagagacgagccagagggccccttgcctgcctcagcgggaaggaggatccagagacggggtctcactggagagatctggcatttgggctctagcagttggcaggtgttttacaggccagaggaccacagacaaatagatgggcatttccttttcctttttctgccatttgcctcttttcattctctggctccccac

SEQ ID NO: 16365 - DNA, 201 bp, Bos taurus
tgtctgacggcattaaaaggcctgcagaggtgacttgcacagaggcatgaagaaaatgaggaaggaccatatggatatataggagggagggaacagcaacggcgccggcctctggggcaggcttggcatgttctccaagcaataagggcagtttggcttaagagtgagaagtgaaagggtgattggaaatgaacttagaga

SEQ ID NO: 16366 - DNA, 201 bp, Bos taurus
agtgagtaagtgatgaagagaaatgaagggatggtgctgaaggttgtatatacacaccatacccctttgggctactgctatggaaatgatccaggccctcgttaggtgggatgggactgggtatagggaagtggaatagggagtagacagtgtcagtacccagacagtctgtatgggccccagtgagaggtctaactcatt

SEQ ID NO: 16367 - DNA, 201 bp, Bos taurus
ttactgccattctgcaggtgaggaaatgggctcagggaagtcagtggggaggtaggtactcgatgagaaggttgagggacccaaacctggcccctcagtcgagccactctgagtcgctaccctgaaaacgaacaagctcacagccccagccttgagactgtacacctgtctgaggagtgaacacttggcccgtgcagctct

SEQ ID NO: 16368 - DNA, 201 bp, Bos taurus
ctttcttgacctttcttgttcagtcttagttcccaggtcccgctcgctttgtgtttcatgagcttagcaaagcgtggcctccaattccctagttctagtgttttcacttaagatgaggagtgatgagccaaaggtttcaggctcaatccttgagcaaagggccgctctgacagggattattatttatttgtcatcttggat

SEQ ID NO: 16369 - DNA, 201 bp, Bos taurus
tgaaagctctttcgatctgaattactcctaaatgtttttaacggtttgttataaccacacaaatgtgatcttggggccatttggaggttattgagtttccttggagatgagacttggcattttccaaaccagagtttgcttttgtggcctagaagttgtgaggcgcatatatttggagggctaaagattattccccaccaa

SEQ ID NO: 16370 - DNA, 201 bp, Bos taurus
ctgttgtaaccaagccatggtgctcattctccaccatccttagctccatggcactaggctttcactcataactctgagaggccatggattgaagccgggtgaaacccagacatcagccaatcagcagcagcctttcctggtttgccatcagttcagttcagtcgctcagtcgtgtccaactctttgcgaccccatgaatcg

SEQ ID NO: 16371 - DNA, 201 bp, Bos taurus
tctctccagtccagcccctatctcaagagtgatggccaggctgcttgcctgcctgcttgtttgcctccctcttgatctcaaacattttagtgggggatgcttgtcaagttgcaggccctgggttaaatacacaggtaccaagatgtgtgaagttcagccctgatgctcaaagcgtgtctgggattaaagctgaaatgcaga

SEQ ID NO: 16372 - DNA, 201 bp, Bos taurus
ttttcactggtaggctcccggtagtcatggcctctattcatggcctacactgttctgtttgtcttttcttcttagctttgtactccttttcacccagtgcgatgtcttattgccaccagtgaggccactgagcaatgcttagctccacaacaggctctcaggtcacagaggaggccaatcccagtttgcacccatgctact

SEQ ID NO: 16373 - DNA, 201 bp, Bos taurus
gatagatagaactcattggaggcagggacccagttttgaaaaattcagaaataagttttcttatgtagaatgagtttgtgttaggacaggccttgaacaggtagaatttaaatctagatttgatttaaagctctgctctgtggttattaatctgcaagcagtgtgcaaggggattggaaagaaaagagccaggacttgaga

SEQ ID NO: 16374 - DNA, 201 bp, Bos taurus
aagcctatcattctgaaaggacttcttcctgctgctgaagtttatggggtgctttggttaccaccaggatcttgtggggccccagctgtccagagcagaggagagagaccccccgcccccaccagcaggtggattggtaacaggattcagtgtgatgacaggccagccttgtaatttacttcttcaagggcaaagcgacac

SEQ ID NO: 16375 - DNA, 201 bp, Bos taurus
aacttgtctagagtctcagagctgctcaggccttgttatggaatgttgtcatgctacaaaagagaacggtgtttttagtgaagaaggcaagagacagagtggataaggacaaggccaggtgtgtgctggactgccaagtcaatgttgtttccgggggacagtggaggcctggcttaggactcacagagtgagcgtgcctct

SEQ ID NO: 16376 - DNA, 201 bp, Bos taurus
agtcttagtttccaggaaattgttgataaaactgttttcctttgttgctgagatgatgataaaatagtcagactcgtgctggccttggctcaagagatgagctttgaattctagactcatcaatgggatcccacaggacattactacatcagaaggtagaaaatgacagcccaaagccaggggctagcaaacgatgactca

SEQ ID NO: 16377 - DNA, 201 bp, Bos taurus
gggtgatttttttttttaattttaatgatcctgtctaatgatggagagctcaaaggaagggcttctttataggatgtgatgcccaactagagagaaaaaccaatggccccctcctcccatcccacctcccactaccaacataacccaaatactcaaatcctctgctaatcctatgcataggactgaggcagagaagaaaca

SEQ ID NO: 16378 - DNA, 201 bp, Bos taurus
ttggactgattggggtcagccttaacttgggttccattggtgctcagcacgacacagggctcggctccagggagttgtacaagagctaaatggccatcagggatttgtaacacactttgaatgcaatctcattagagttggattcgaatccagagtcacagctggaaaccactcagcagccagttttggtactgagtcgag

SEQ ID NO: 16379 - DNA, 201 bp, Bos taurus
caggccctaaagtttcccctcctgctcttctgtgagaaggtagaagtgacctatacaaggtcacacagtcagtgcaatatagaacacagtgaaggacataatgtggccagaggagtggtggagaccatgggaaaggactcggcctgtgcaatcaactggcctgggttccaataccagccttgccatagatcagctctgtga

SEQ ID NO: 16380 - DNA, 201 bp, Bos taurus
cctctggagctgccacacacacacagcacactggcttgtgaacgtctccagacctggctttcacctggaacactctttgtaactccagtgccaggcccgcgtaaggcactcaaaagatgcttgttaagtgagtcactgaatgtccatttccaacatggggacaccgaggcccacctcattcgatgcagttacaacctaagg

SEQ ID NO: 16381 - DNA, 201 bp, Bos taurus
cagaaccatgcaatgtggctaccggtgttgccagggaggaaattatgtcttacacaaccctgcatccctggaaaaagaacggccacactgataaagattcgtggactaacccattcgtatctgctaccaaatattctgtgcatcgggtttggcaggcacaaggccacaatgtccaatggttagaaagaaatccataatgtg

SEQ ID NO: 16382 - DNA, 201 bp, Bos taurus
ggccatttaagagcaggcagtgaaccagatccagcccatagactctggtttgccaacccctgacctgactatcatgtccgtgggccatgaacaagggcggaactcattcaactcactgtgtcgaagacctgaaataacaggtgaggaagcaggggaggaggaagccagctgtcctgccttctgaggcccactgccccctca

SEQ ID NO: 16383 - DNA, 201 bp, Bos taurus
gtcccaggaaactagtgcagtctcatcacagtggccaaaggtgggtgtccccattttacacatcacctggccacctcagtcttcttctgcctaagaatttttctacagatttgcagacctttcctccttctgaccttagaggcagagggcctctcctccttgacgacagccctccagactcgggagagaatctttgcaccc

SEQ ID NO: 16384 - DNA, 201 bp, Bos taurus
ggcaggctacagtccatggggtcacaaagagtcggacacgactgagcgacttcgctttctttcactttcacacgcttgtcagcagaaggcctgaagctctgttttcttgagcttggtggaggcgggctgctgtgcagcttgtgggaccttggttccctgaccagggattcaacccgggcctgggcagtgaaagcactgagt

SEQ ID NO: 16385 - DNA, 201 bp, Bos taurus
tttgcctccagctgccactgtagacattgggtacctaaagtgaaggaatggtgggtgggtcctgtcgtgccctgttgggccactcccaggggttacgttattttagaagccatgcagtgcatggctttaagaagagagtaaggaaagagtatcaagatggtggcctgccttcggataatggcctgtgaagtaaaggttgga

SEQ ID NO: 16386 - DNA, 201 bp, Bos taurus
cagtggataacacgttatttcagccaaaaagaggggtcaaagaagtctcaaaacccagggagcacccttttaaaaagaaggggtgatggccgacttcacagggttcagaggaggtcagtctgtgcagggctcggggaggtggctggcacaggcagttaggaggccacgtagcctggattgatggctctccgggcatgatgg

SEQ ID NO: 16387 - DNA, 201 bp, Bos taurus
tgttgtctacgggtccctgggagtggcaggccctcctgactcaacctgtatctccagctctccgaggtggcagtggcagcagggggcagtcttcctcccctgagtccagtggattccgcctcatcaccactcacaggtggggtgtggctcccctcagtgccctgtgtgtagccatagcaactacgacgctctccttttgat

SEQ ID NO: 16388 - DNA, 201 bp, Bos taurus
cctggggttttagcctccgatctagggttttttctgtgaagagttgggtgctcagaagtagatggggatctatatggagctggagccctgagggccctctattctgcgctgattcatgttgtaaaatattgagtggattagcagtgccatttaacccaatctgggtgagccattatggagggaaaaatctgtgtatttgag

SEQ ID NO: 16389 - DNA, 201 bp, Bos taurus
tccctggggaagtcctgttgtgaagagctcctcacctctgaggagcagcaggggtgcttcctggcacttgtggggcaggtcttggctcacagagacaggtggtggccaaagatggtgactttccacgcccggagggtgggagcctgggactggaaggttgggggttagattaggaggtgaccctgttggcatgaggagggg

SEQ ID NO: 16390 - DNA, 201 bp, Bos taurus
gtgacctcaggtaaattgcttcacctttctgggccatgtgagcctcatctgtgaaattcagagaaagccccatccttaggaaatctcatcatgtagtaatgacatctggtgacatcattggcctttaattgataggaacaaagcaggaaatttgaaaggaaatatgtctgtgtttcctccctctccccaccacccaattcc

SEQ ID NO: 16391 - DNA, 201 bp, Bos taurus
gccattttccttacatccctggcatcatgtgctgagctgggcacagtaggtgttcagtgagtgctcgtcgagaagaactgtgggctggaccccagtcaccaggtttgcggccatcgcaaacgcaacacgcttcacagcacggggttcatcctgcagacctcatcaaccatgcagtcatggggagatcaattggtccggctc

SEQ ID NO: 16392 - DNA, 201 bp, Bos taurus
atcaggttagtgaaagttccaggagtgaagcagccagcagtaggaggggctcgaggggcagcagcaaatttgttggccagtattcccagaggatatgacacggggtcatcagttgagttttcagtcgcatcttgataactcaactctcagttgagttatcagtggcataagccatgtgcataagcttcggccaggtctcct

SEQ ID NO: 16393 - DNA, 201 bp, Bos taurus
cagggaattaagatctcacattctgcatggtgaggccaaaaataaacaaacaaggacagctgagtggtttacaagatccaatcatttatgtggcgcctaccatgtgccaagaagtgtttggccccatgggtaagggtgaaaaacatgatccctagtttctgagtgctcagagcttaggaggggagtggaaatgagtgcttg

SEQ ID NO: 16394 - DNA, 201 bp, Bos taurus
ggaacaagtctaaactttactaaggcccttctaaatacatcaactgtgccttttcatgactccccgtaggcaggtatatacccacttaatgcctaaggtcgtatggccaggaagtgccaggtaagagaccctcaaaaggaatccacttttcagtgggaacaaattctctccttgggtctcaggtgcgatgaagctctcttg

SEQ ID NO: 16395 - DNA, 201 bp, Bos taurus
gcagggcatagggctgtgccgttccccagaggggcaggtagcctgggccacttctctagttggtaggtgctaacccaggccccaggcccctttccattgctcctggcatcctccctggtccccagaccatggtggaaactcttcaggctgtcctctccgaggggagtagggattccccactggccctgtgtggggcaggga

SEQ ID NO: 16396 - DNA, 201 bp, Bos taurus
aaattggagcaagttgaagaagaggtgcctgccatggggaggcaaaaccaactcagaggcagtgctggcagtgtcctgcaggctgggcccccaagggtgaagggcactccctccttgcccactcactcgtctcgcccccgccttctccacctggtgtcacctcccagaggtgcacagactaaagaagggcctgggtctcca

SEQ ID NO: 16397 - DNA, 201 bp, Bos taurus
cctcagctgacctcctcagctcctggaccacaatgcacccttcttcccccagctcttaattaaactagccagtggcagtcttcacagcagaggcccagccgagcaagcgcctgcatcctgagccgccattgtctccccagcccgcggatccagcctcctgcaggcacacattttgccccagggcccagcatctgataggcc

SEQ ID NO: 16398 - DNA, 201 bp, Bos taurus
ccctacacctgtcagggcctgcctggcagaccaccggtgcccagggccaggcggcccaggcggtgggggtggcgggtggccattgttcccatccacccttcggcagccccaagtaatgacaccagggtctgacagcctcggaggaagctttttgtctcacagccacggccaaagtccataattgatatggattgcaggggc

SEQ ID NO: 16399 - DNA, 201 bp, Bos taurus
ctcgtaaaatgcatagggaacacgactctagtgaagacacacagcggtcttacctgatcaggggccgggctccgaactctagcacagaggcctcagcaccccacacgcctcctcccacctccccttctttctcttttctatgtccagcaggcagatcgtcatatcacatgggctgaacctccataaccacgtagctctgca

SEQ ID NO: 16400 - DNA, 201 bp, Bos taurus
acagagaagcctggccttgcagggccacttccaagaacaagcgctgatcacctgactgctgtaacctgggcgctggcctgggccacagtctccaaataccaagaaatgactgtgttcctcctcttgatacaggttcaggacttagctcctgccaggtgaggcggcctgcacacaaccctgcaactagaacgaggaatcctc

SEQ ID NO: 16401 - DNA, 201 bp, Bos taurus
tccaggcgtttggctgagtggcacagggttaccagacggcctcccgcctgggtccagacccttgctctgcccagcagtcttttctctttctggagacttaattctttggccgtgaaattggtagtactctcctcccaggttgctttgagaattaagtgaggcgaggttcacagtggatttatctcttgtccctgccctacg

SEQ ID NO: 16402 - DNA, 201 bp, Bos taurus
tctgatagggctctcccgaggggtgcctgtctatcctggccttgaaaacgcagcaaatcagacttgggctctgggtgaagctttggtggggccctcacggatgtgtctgcaagtgcccttgaatgcagctgtccctgctcctgatttcctctatcattgtctcttcagtctgaggcttttctcctgacaagactatgggcc

SEQ ID NO: 16403 - DNA, 201 bp, Bos taurus
gggtccagctgtctgggagtaggcaggacctgactccccacccaggtcatcacggggcccagccctggctcacccctagtcatttgctgaaggcctgagcaggctggtggaaaggcacttggagtctctggctggaatcagaaaaagcacacggcgtggagatggaaggacccgtctgccagtatgggacatcggggccat

SEQ ID NO: 16404 - DNA, 201 bp, Bos taurus
cccaccctcatgccaccaaccccagctgcctctaagacctgccttcctcgggtacccggagaaagagaggaagggcatagccaagggcctcacaaatttctctccaaagacatacattaatagttgttgccacagatcagggttgaaacaggggttcattcacagggtctagtttctatacccagaggcctttttaagaac

SEQ ID NO: 16405 - DNA, 201 bp, Bos taurus
gggaacatttggttattggctgtctgagtggcactgggataatttgaattgatggtgaggtagaaatttccaacaaactgtgtaggatgaggctttctccaccatagtgttggctgatttcatcattatttccaagtttctgtgtttaaatgtttttttttttttcctgataatattcatagtaactatttgagagaatgg

SEQ ID NO: 16406 - DNA, 201 bp, Bos taurus
aacacacgggatgccgaagtagagtaataatgacaataaatacaagcaccgtgtgttctcaggatgaattagaccctgccaggaggtgggtgagtactgacgctctggggaggactgggtgctctcagggacttgcgccatctcctaccctgcaaataccagcattgcctgttacgcgcattccccatgtcttactctaca

SEQ ID NO: 16407 - DNA, 201 bp, Bos taurus
gatttggactttgggtaagatttttcttaaggcttgggccaaggcaatcgctggacctgtgcaatgggaacactgccagctccaagacttctctacaaaacgactggatggggcctgacttgatgcagtcagactacaaaataatcagttttaattctagaccgtgcttcagaggtcttccttgctctgtgcactttccca

SEQ ID NO: 16408 - DNA, 201 bp, Bos taurus
gacactgaggatggccaggaaaagatcgaggggctgttggtgtctatgtcagttggggccccagtagaaaggatgagggggcctcaacaagagtcaccggatgaggttttattcacgaaggtggggtgtaggggacccctggtggaaagggcagtggcttagtggcatcccacacagcacccccaggccctcatgctgtaa

SEQ ID NO: 16409 - DNA, 201 bp, Bos taurus
caaccctggaggaggctgatgctgggagcaggaagagagtgatttctcccttaagggcaggcaagtgggctggtgtcctcaatgccttctcactgccttcgttggcccacagggcaatgacggggggatttgccccaaggtgggaagaatgagaggtggaaacatgaggaagagagcaagccaggcttgttaggaaccacc

SEQ ID NO: 16410 - DNA, 201 bp, Bos taurus
acatggacttctaaattattgtgctgattttaaaatagacacacagtatatacttattaaatgtttggaaagttatatttattaaatttatagaaaaagtgattctgtaaattctacaagataaagataggcaaattaggtcattaccaagatcagcctttcttacatatcctccactttggaaatttagagacactctga

SEQ ID NO: 16411 - DNA, 201 bp, Bos taurus
acttggtctctcaagatcatgtgttcaatctctaccaagacccaactgactaccatgagctaatcaagaaacagagaatattgttaaagaagctaaattttgttctaagattttggctgagttgactgggccccctactgtcgttattgaaggagcatcctgagctgactcagacactttgtttatgtcattagagaggct

SEQ ID NO: 16412 - DNA, 201 bp, Bos taurus
acctggttaaatgtttgttcattatgttttattaagtattcctaaattgtttcaaaaaacttatagcagtttttccttctgacaaaatacatgaggttatgcattatctcatattctcaaaagcagttttttaaaccattcaaatgtatatttagaaagcattttccatagtctagacattatgctaagccccaataatta

SEQ ID NO: 16413 - DNA, 201 bp, Bos taurus
tagttttggtgtgtgggactgagttctctgaccagggattgaaccaggcccccggcactgggagcacacagtttaagccactgggccaccagggaagtcccggtactccatttttattatcccatatttttatatgaagaaagtgaaccacagagaagctgcccagggccttccatctagtaggtagtgggtctacaattt

SEQ ID NO: 16414 - DNA, 201 bp, Bos taurus
tctttcacaggtgtgcgttgctagcagacactgaaatacagtatagtgtgttatgctaggaagaaagcatatttgcatagctcacacatgaacactaattcaaacacagtggcatcatgcatcaaaagataggattagagaggcaacagagatatgtccattgactgatgatgtaaaactttttctcagtctagttaacgt

SEQ ID NO: 16415 - DNA, 201 bp, Bos taurus
tgtggggtcgcatagagtcggacacgactgaagcgacttagcagcagcagaaagtgaatgaaatgacattcactgataggtaacatctcagaaaccacaggaccaagcatctttcactttttcagaacattgcttgaagcttcctctcatcactgagctgagttagaagaagcataattaaaatggagagaatccattcaa

SEQ ID NO: 16416 - DNA, 201 bp, Bos taurus
ctggtgggctacagtccatagggccacaaaagaatagtacatgacttaatgactaaaaaacaactgctcagaagagatactagggaagaggcgatactaattggcccttcagtcccctccactgattcacatttctaaaatgcacattgtattagttaattccctgttgaaaaattacgaaattacgatatgtatggtcag

SEQ ID NO: 16417 - DNA, 201 bp, Bos taurus
ttccatatcagaagaaaaatggtaattcaaaaggaagtcaaggacatacagctacattatagcagctgcaggagatgatgagattatcatgtgtaacatgatgttttcacaaggttgtgggagctgtgtaagcaagtggatatggctacagcctcctctttatggctgctgaccatttccttcaaatggtacaatgccata

SEQ ID NO: 16418 - DNA, 201 bp, Bos taurus
ttttttcagaaacaggtgcaatagggatgaaaccccagagagcttactgcagccacattaaaattttcatactcctacctggcctttcctgatgactcctaataggactcccttgcaaggcactgggctattctggggttggagacagaaagacctggcctgtgttaccaccttcatgactttagttaacaacttcttgat

SEQ ID NO: 16419 - DNA, 201 bp, Bos taurus
ggtgaggctaagaaacttggccagtctcacagaaacattagtgatagagctcggatttgagccaaggcttctgacctcttgaccagcatggttgctggccctgcatacagcccgaattactctgtgagactgattctgactgagaggggagagagggggaatgaaactggccataggacaaaaaacatgctgtgttaaaga

SEQ ID NO: 16420 - DNA, 201 bp, Bos taurus
tgtctttatcattctcctgatcaagtgcccagtggaaaagttactggtaagttccagtaactttttgatacccagctatagtgtcagaggccctcctctcataacgtttcctccagctcaactctttgcatgtgatttcccacagtattcaacggcggaaaggcatcctgtgactgcattggagaaaatgatggagtcaag

SEQ ID NO: 16421 - DNA, 201 bp, Bos taurus
ccttgaatgcacatgctgaatggtgaaaccatatagaaactcccttttagctttatgtcagggttaaaaccgagattttaataatataggatcatctgatcgggcaattgtgaatgagtgaactgaataagcaaagggcctggaatagtgttttagtaagtgctcagtgaaagtgaaagagttagtcgatcagtcatgtcc

SEQ ID NO: 16422 - DNA, 201 bp, Bos taurus
gctccttaggttctcctgccacgtggaagaagcccaaaaagacacactgggacaacaatcacactgagccttaagaagtggatgagatgaggagtggccaggaagaaggggagatgaagacatgacctctggggaaaagagaaccactgtgagatggagcaatggctcttccttgctggcttttcagcaggatgctcagcc

SEQ ID NO: 16423 - DNA, 201 bp, Bos taurus
gatcactgacttgtacactttaaatggatgcattaatggtacatgctttttctacctcaataaagttttttaaaggcggtagattaaatgttccagtagggagaaagagtctgggaaaccagaaatttggggaagagctgaccggacatccagtggacccagacctatgctgtgctgggcagcctcctactccatcaatgg

SEQ ID NO: 16424 - DNA, 201 bp, Bos taurus
cagcagcagcagtaagttaaaattctggaagactttcagggtgcctcatctaataagtgcaacttgttaacatgaaaccaggccaagaatgccaaacacacttcaaaagtgtagcttttctccctccctacacctgtgactttgataattaattttataccaattaatgaccttcctgttacacctgcttatggcctcaga

SEQ ID NO: 16425 - DNA, 201 bp, Bos taurus
gaggccctgctggaacatcttggttggactgagggagggggaggggaaggcctgagctccaggaagggggactctggagacaggaaagcctgagtgcccttaagttgcacctaagcccctaggccggagttcctgtgacaaaggatggtgaagactccctttcagtaagcagagcgggtgctcctgggccgggcctgggcc

SEQ ID NO: 16426 - DNA, 201 bp, Bos taurus
agaccctgcagggtgcctgggctcaaaggagatgaagacagaacctggaaattctctcagtgacactatctcatagtgaaaagtcagtgagatgaaggccgtgaaggcattagaaagagcccaagctccaggcaaggtcagccaggttcaaatctcagctcttccattcatatgctgtgatctaggacaagttacatggcc

SEQ ID NO: 16427 - DNA, 201 bp, Bos taurus
gaggccaaagatcctggtgctagtatgttgtattggggaggatattgacccatctcaagatgctggagctgaaggcaatcaatcaataactggctctgcagtggaagaggttcagtatgctggccacttcagtcatgggttggactttggttttcaagtgccgccactttttctgctgttcctggttcccagaaaccaccc

SEQ ID NO: 16428 - DNA, 201 bp, Bos taurus
cacctccctgttcctatggttccagttgatgtacatgcatgtcttcacttctcacagtgcaagatgctgttggccttgttaaggaaaggaatctctccacaccagtggagacttgcttgtttagatctggtcacaatgctttcctctgcacagtgccctgtgccagcagtgagaaagggcacctcgtttattacatggact

SEQ ID NO: 16429 - DNA, 201 bp, Bos taurus
aatcgctaatgtacaaagcctgtagaaatcattttgcagctattaaagaagcaaaatgaaaatttatggtaatagaacttgaagctggccagtgcatggtcctgctggcacaattattcattgctggtggagtttgaagtggaaagaactcttttgaatggcattgcagacatatttagtaagggccataaaagtattcat

SEQ ID NO: 16430 - DNA, 201 bp, Bos taurus
tacttagtcagctcacacacaggggagagatcacagtgctaggggagaggactatgtgaggatgagaatatgtggatgtatggcttatagacaggccagtacagagactggctagctaccacaggcactccaaggaagtgaggtgcttcctttgatctaaaccaaggagaaggagagaggcctcagtcagaaagactgtct

SEQ ID NO: 16431 - DNA, 201 bp, Bos taurus
cctctccggggtgatggtgatggcggagatggccagatctgctctctgaaaggcaaacccatctggtcagaaggcagtcctcagattactgctgggttctaccttcgcccaaggcctgtccattgccctttgggttgttcagaggaaaaggctgcaagcgttgacgcctcatgactttgaacgttgtaaggaaaatccagc

SEQ ID NO: 16432 - DNA, 201 bp, Bos taurus
ccacaccagctgcccccgcggccccacagtagccagaatcccctctcctctgtctgccttccccatcagattatctgtgttctgttccttgtaggaaagggtgctatggccacctggtcaaggatgcccactgagatgacagtccttggctatagtttctcttatgaaggagagaagaagccatgataaactttgcaaggc

SEQ ID NO: 16433 - DNA, 201 bp, Bos taurus
ggatagtggaaattgaaagtacactattgtgaggttctttcactatatgtgaacaggtataatattatttgaaggtagaagataataaattaaagatatatatgatacaccctagcacaagcactaaaaaataacttcaaaattaaaaacatatatctaagaaagttagaaccaagattgccaggaggaatatcaacaaac

SEQ ID NO: 16434 - DNA, 201 bp, Bos taurus
cctcagccaggtctggagggcccgccttgcagaagccgtctcgagccctcaattctaaactgcctctgtccctctagtgtgcacggcaacagtgtccacccggcactggccatgctgggggagagagagcaccatatgcttctactggtcaagggttcaagggcagagcttcatcttatttacctgagagtctctccttct

SEQ ID NO: 16435 - DNA, 201 bp, Bos taurus
cggccacaactggagaaagccctcgcacagcagaagacccagtgcaaccaaaaatagtaatagtagtgaagtttttaaataaggcactgaaggagcaggtcggtaagggccctctcccgagcatgaagcactgttcagccactttcccctgaatctagtgagttcttacagcactggtcctcaaacttactgtctacagag

SEQ ID NO: 16436 - DNA, 201 bp, Bos taurus
caccaccaccaggggctcagaaagaaacacacaggcctttgaggtgcaagtccacgagccatgccctgtcctgtgacccatggggaagaccttatttggaaacctccttggccagtgctgtttacaaggtggcatcctgaaatagggtggcagaaagagaaatgatagtttgctctctcccctggtggggccaccacggga

SEQ ID NO: 16437 - DNA, 201 bp, Bos taurus
ctttcagaggaagccaatgagtctggacacagacaacagaaagaccagagccctccagaaaagaagacccgagtctgtcttcaggcctctggactgggtggaatgaataggacccagaggcaccacctgagtaggcgagctatggctctcaaggatttctggagattctgtgctcatcagtgaggcctctaaggcctgctt

SEQ ID NO: 16438 - DNA, 201 bp, Bos taurus
cagacgggaggacagcagcgacccggggagctcagtttctggatcattaggggagtgtttggggcaagagccccatctgatgctgagcaggccatggaggaacaaggagacttcctccctacttctccatgatcactgagagcctgagggagccaggctgcaggtcagccaagtggaggcctgcatttccagagacacttc

SEQ ID NO: 16439 - DNA, 201 bp, Bos taurus
gggtggccggagggtgcggtgcggccacgcccatgcctgcagccagccccacatgggctctgtccaccccaacactccgtctgtcaacagttttccctccgtggtgaggccgcatcaggacagatgagaagggggctctcctggcggtcagagaccttcacctctgcccctctcaggccaggtgagggcccagggcactcc

SEQ ID NO: 16440 - DNA, 201 bp, Bos taurus
accttgcctggaagagctttggacaaaggacctcctgtctttgagtcagaggatgggagcaggctggggggaggaagcagtgaattcccccatctggcaaggacagaatggcccaaatgaccttcaacacccatatgccaccttctgtgcccattccctacactacactgctgacccctgaccaggcaattggcagaacca

SEQ ID NO: 16441 - DNA, 201 bp, Bos taurus
gtcagctctcaggagtagctgaggctgatagagagcttgtcatgtgaggtgccttcctgatggagagaacagcatgtgtaaaggccctgggtaggaacacactttacctgctgcagacatgggaagaaagtcaatgtggctggagcagggggtcaggaggagtggccgtagagaagcaagtgagctcagtcctctctgggg

SEQ ID NO: 16442 - DNA, 201 bp, Bos taurus
ttgcctctgccaaaagaatgtggcagaagtgataaatagttctgagcctgagccttcagaaaccttgaatgcttccacattttctcttggatccctgcctccaccatgagaacaggcctgggctagcctgctagaggatgagaagacatacggaaaagagctgaggtcatcctacaccagtcaacagctagcagatcccaa

SEQ ID NO: 16443 - DNA, 201 bp, Bos taurus
ctggggactctgacacctgcacagcatggacactggccagacttcatgagcacgtgagacagtagaactgtgaatcctttcaggtgtttgggtatgagaccttttcgggtcccctgtcgggccctcctttgcaataactcccaaagggccaggggagcagcaggcatcaaggtttgatggggtgtggggagggctggtcag

SEQ ID NO: 16444 - DNA, 201 bp, Bos taurus
gggtggagtgtgtgctgatgctggttccaggtgagcctgaagacgtgtccagcctggccggatccctcagaagggctgcgcttggccctgtccttgtctgcggagcgcacttaacgttttgaagggaaaagtcttgatgggtagaagctggtgggctgcccagcgcgttggacttgggggccctgagcacctaagccctgc

SEQ ID NO: 16445 - DNA, 201 bp, Bos taurus
tttggaatgcttaatttttatttgatcagtgctggaagtgtttaatatgttctttgatccctgtgcagcaaatttttttattgttctttcccatattttcagccttaacttatctcctttttattaagtaatgataaatgaaaagatacatgagaattaaaagcacattaacttgcatgactttttttgtcacttaagact

SEQ ID NO: 16446 - DNA, 201 bp, Bos taurus
ccctgggccttggagaacagatacaagggcggaccgtgtagccacagcccagagaccagagtcagggctccaccctgctcccgtgtgacttccagagatatgcatgacttctctgggccacaagctcccagctgcaacagttggaaacacttcttggggtctcactgatactggtgactagcccagctaggctgctgcgag

SEQ ID NO: 16447 - DNA, 201 bp, Bos taurus
ccctcatggggtctcaggttatggggtgtgggggtctcatgctgccagaggagcacttccccagccacagcagtggggtggccccacccagcttcttccttctgagcctgtgctgactcaccaccagcgtgagcgctcgtgtcctggcgcccggccgggcatcagaggcatctataaaagcagactggtccaggccccagc

SEQ ID NO: 16448 - DNA, 201 bp, Bos taurus
gtcagctatttgaaaaaaaagaaaaagatgaagtgtcagtgaaaagctgctaatacacaaagcacacatatctagacttcaagaatgtaggacatttgtggtgaaaggttcaagttaaaatgaatatttatccttaccttcatgtgttttctctaggtcaggtaaaaatgaatttattttttgaataataatctggtatat

SEQ ID NO: 16449 - DNA, 201 bp, Bos taurus
gttagcattaaaaatgattaggaagttataggttgacataaaagagagtagccttacatggattaaaggaaaatacacagttatatcaattttatggttacaactgtgtaaaaatacaggttgtattttttataaaaaaagcaaagccctaaaacacagtggtttggtttttccatgtcactaagcatgtatgtgtagagt

SEQ ID NO: 16450 - DNA, 201 bp, Bos taurus
gtacatctgggttgtttccagttcttggctattataaagtttccataaacattcaagtacaaggcattattcatagtctttcttttctcatgagtgaatacccaagaattgaatcaatagctggattatatggcaggcttacgtttaactgttaaagaaactgccagaaaaatagaaataaagaaactgcctgtttcccaa

SEQ ID NO: 16451 - DNA, 201 bp, Bos taurus
cgcttagaaatcactttaattacatttctctaatcaataacgatgctgagcatttttcaagtgatttgtttttaagaacacgaggtgaatttaggccttgaaattggcttctggagaatcggtcctactttgaattccttttcagttacctttcacagggaattttgtgagaggacgggtcatttacagccccagaggcct

SEQ ID NO: 16452 - DNA, 201 bp, Bos taurus
cacaatgtcccttcatagtgctgtccctactgttactcttattacttgacaccaggatagctgcagtgggctttaacctcttcttttggagccccttcactgccacggacgcctttcaccaaaccctgccagattcacttccctgaagcatgtgtctgatcactccagagtgctgctcaagattcttctgaatgttcctgt

SEQ ID NO: 16453 - DNA, 201 bp, Bos taurus
caccaacaggacacatggtgctggattaggcaccataaatgtccaaaatgttgagaaaaaatgtgagatgagcggggtcagaggcccacagcgtacagttgccagcttgccatgcagcctcagaacttgtgtccagcactgcattcccgacactgcttggctcaggatgtcagcgtttgagcttcaacaggaagcttctcc

SEQ ID NO: 16454 - DNA, 201 bp, Bos taurus
catcacttagactatgattcactttaaggcctgggaccagaacgcagaaggcttcaagaaaggaatcaggactcctgcacccaccggaatactgcaagtatccacagatatcctaaacactcagggccccaggattatggctgggagggataaggtcaaatgggaggggggcagaggaatgggaggggtcacatccaccag

SEQ ID NO: 16455 - DNA, 201 bp, Bos taurus
aaagccaattgattccaggatggatcatagctgttcctgaaacaggctaccccacatgctgatttagtaccaaaggccctagatcaggccatgttgggtgttgggtaacggcattgtctggatgacattttgtgagtctcacatcctctctggggtccctcccttccctctgtcaccatattctttctgcttgttctctct

SEQ ID NO: 16456 - DNA, 201 bp, Bos taurus
gagaaatgactctgaacaggagagcatggggccagaaccactgaggctcataatgccaagccaaggggcttaggattccggctgtgagcactatggagctctagctgattcttgagttaagtgtctcatatggtacatgatgtcctccaggtagaaaagtctgatagcaatggtcaaaatgatttgtaacaagagccaaga

SEQ ID NO: 16457 - DNA, 201 bp, Bos taurus
ctcagaatccattctatccagatggggtcatttttgagctatgtaataatgttactgtggctccatgcaaggaagtattatctaaaactcagttatctcttgaaaaagagtgggctggatctataggaagcgtgaccctggtaactgggtgcgtgtaagcaggcaaaattgagtctttttcctaaaaggggacaggtgaaa

SEQ ID NO: 16458 - DNA, 201 bp, Bos taurus
ctctgcctcttcaactaacgttgaccggcactaattctgatgtcaatggcatctcctttgaggactcagtttggaaaagatatatggggaggctcacctccccctggtggcccatcttggaagtcctttcaggacgaccaagcaggagactggagtcacactggatgggctgaagggtaggtctggcatgtgtttcctcac

SEQ ID NO: 16459 - DNA, 201 bp, Bos taurus
tctgactgaatgggagcttggggggaatccccagaggccctgcgcctgcctggcctgctctctagaaacatcacttacacaccaaggcctcctggccctggcacccaagtacagctctgtcagtggtctgggggtgatggcgaggtcttgattcatgtcatccgggcggttgcctgggccacacttgtcagtcaggagaac

SEQ ID NO: 16460 - DNA, 201 bp, Bos taurus
ggacagggtctaacttcctgccaacccaaaagtggccctctaaagcctggtccgtggaggagaacagtaatggagagtggctatccccagcagacagcagggggtagaagactagcctggcctctgactgtatgaccttggacgacctttaactttccaagcatagtgtctgcatctcgtgtaatatttaccttgcctggt

SEQ ID NO: 16461 - DNA, 201 bp, Bos taurus
actggaccctgagacataaaggtcacagacctgactcccactcttggggacccaactcaacaagctctccctagacctccccagagcctcaccagacctagtgagggtctcactagggccatccaggcctcactgcctctttagcttccactcctgatgctcctcagggacagtgcagccattctgcactgcccactcctc

SEQ ID NO: 16462 - DNA, 201 bp, Bos taurus
gggccagagggcctgggccttcggggcctggagagacgtgctaaggcgcccccactttagattctaagtggcaagcagccctgggagcaaaggtgcttcaagtgcagaaaggcccctttcctgctgcgtgggaaccattccttgtgggaacacggagcatgacttcaggacaggttcccactgaagctgtcttgagtggaa

SEQ ID NO: 16463 - DNA, 201 bp, Bos taurus
ctgctgcagcagtttgattagttaggtgatgaactcccttatgttctctaatgaagatgaatatagtgtacattcatacacgtggggttttttaaacagatgtaaagtttgtggctgttatagttcaaaaatttcggtaatgtttgtaggctgcatttggcagtaggacatacagtctctgctggtagtcagagcacattc

SEQ ID NO: 16464 - DNA, 201 bp, Bos taurus
ggacaggctgtgcctggctctgggaaccgacctgactacaagacataagctgggcaggacacaaactgcactgagccctgaaaacatgcactgcagctacgacgagctaaggaggcccacggcaggtcacctggcacatgacgtgcggagccaacgcccctcctcccacccccgcgaggcctgggccctcaccggtaactg

SEQ ID NO: 16465 - DNA, 201 bp, Bos taurus
cagtccccatgagtctgagcaggttcagggaatggctgtgcctggcccagcggccagctgcagggaagggctgcagtctccagcccaagaggaactccagaggggagaaggtcttgtgtgtgcctgatctgagagaggaagctggctgggtgttgtggcttggctgaagccacaaaggagaagcttctgggttgagaccac

SEQ ID NO: 16466 - DNA, 201 bp, Bos taurus
ccttggatgggagggaccacctcttgactggaagtggtttgattctaacttattgctctccaggccctgcaactgttgttatgctctggggtctacggtcgtctgggagaggggctgctatgctgtttagttgagagcaggttagcctgagaaacatggtatagattcctttgcactgatccctgccaggctgtcttgctg

SEQ ID NO: 16467 - DNA, 201 bp, Bos taurus
gctgggcacagaagctggtgggtgagagtgaaactgctggaagagaacaacaaagccccaaccagagacggcagcatgtccttgggaccaagcgaacagtggcttggcttgcaaagggaagtcggggcaaagagcagagtgagaagagagatggagcccaaagcagagaggcagcggcagagcaaagccaaggacccagag

SEQ ID NO: 16468 - DNA, 201 bp, Bos taurus
ttctccaaacgggcccttggctcagagcgggctcagtcatcatcacccgcaggcaaaggaggagctagctgggatgacgcattctcctctttctcagcacgtacgggcccccagacagcccaggccaggagaagcctgctcagtccgcacccgcttcaggcttctcccactttatctgtctggggcacttgcccttggcta

SEQ ID NO: 16469 - DNA, 201 bp, Bos taurus
atcaatacacacacacacacacacacacacacacacacacacacacacacagacccctcctcgcctccagaaaagtgaaagtaagaagggccgctaaaggggtttgctctttgcagtactcaaatggctgctattaaagaattctgtgttgatgcccagatggatgggcctgcagagaatttataaagaaaaagggaaact

SEQ ID NO: 16470 - DNA, 201 bp, Bos taurus
gctggattagttggataaatggatttagaccagaggtttctaggatagagactctgcgggagctggcctgtggtgagcacgccactggcctgagaccttcgcgagccccctgagtctgtctgtcctcatcggtcatgtggtttacctaagcagaaccattacagatatcaaactatactctgaaaacctgactactagaac

SEQ ID NO: 16471 - DNA, 201 bp, Bos taurus
tgagagataaatatcgaccaaattgagactgaggtcaatgctggactattgggaaaataaatcttaatattaaccaaaacctgtagatgctaggcctggtgtttttgactctaaactgctgatcaggcagaggtacactcaaagtcagttctttcctttattgtgtattggtgtaggtgcaaactggccttcaaattgacg

SEQ ID NO: 16472 - DNA, 201 bp, Bos taurus
gaagagccctgctcaccctgcggccccagcggaatgccacatcctccacatgaacctctcccgttcccccgagtatgtgaccttgtcttttccgtactctcatgcaagtgtcagcctcctctatggccttttcagactttctatcagctatgtcagtaaagtctatccaatatatacccatatcgacatacttctccagat

SEQ ID NO: 16473 - DNA, 201 bp, Bos taurus
cacctttcccagggtggccaccatgcaatgaccgatcgaagccaaagggtgaagacttggccatctctacccaaatcaggacacctctggagggccactccagccccacagctcccagaagtgtcagacaagatcaaagtttgattctccttcttcccatacctgctgctaacacctccttctacagggttggccccagag

SEQ ID NO: 16474 - DNA, 201 bp, Bos taurus
ggggtcccaggccctctgtcactcagcaacggtgcgacagggagtattccgaggctctgttatctcagaactgactgtgcagccacgtggaggagtgaggggctggggcctcccggggcagtctgctggggttctgtgggcccgccacgcccgctagccctgagcagctgcgtgcggcagtctggaccagggtctgtaggg

SEQ ID NO: 16475 - DNA, 201 bp, Bos taurus
gtcataaagaaccaactcgcttcttgtacgaggcttgtacacgcacctgtctggactgagaaaacagcaacactcgttggccctgcttgtgccatattttcagcaaggactcaacaactatcattttcccagaacgtttccagtatccaaactgatcttctcctagttcctcgtctggaatgcctttaagattcttggggc

SEQ ID NO: 16476 - DNA, 201 bp, Bos taurus
aacaatataaaagtatggataatgatacgactgaggaaaaaaaagcgttcgctaaatacaatctaagttataaactcagttatatgatgcttttcagatatgaaataggatgaacacttatgtttcagaagggtgaccccatgtatgcataacggaagaagcgtctgaaggtctgagagtatcagtgacacagcaaggcta

SEQ ID NO: 16477 - DNA, 201 bp, Bos taurus
ggacatgctggggcccgtacgggtgacaagtgacaggagcttggaactggtgatagcagtgaagataagatgctacgtgggaaatctttatgctacagcatttatatgcggactgctcaatcctccttcacatactcccacttgactatatcaactgcctgacttgtttttaccccgaatgtctcgttcaaataacaactc

SEQ ID NO: 16478 - DNA, 201 bp, Bos taurus
atcaatttccactcagtttcccacaaacgtaatggttttacatcaaataggaactgcagaaaagaaacactctctttagttaagtttaatctggcctttgatctgggagagcttggagtccagcacagttgacagtgtcgggctggtccccacgttgtggctcttctgaaccgtcgataccttgggaaccaggggcctgag

SEQ ID NO: 16479 - DNA, 201 bp, Bos taurus
tcaatctacagatgaacaaggacagcgtgagcagcagccaagtctgccgggctggagagaaaccaaagacatgggctcctcggtagctggctggctgtctgcagagacgtgaatgacacagacagacaagccacatgaaaccctggagaccagggcagctggagaaacactccacagctacagcccatctatcagacacct

SEQ ID NO: 16480 - DNA, 201 bp, Bos taurus
aaagaaacaaatctctggggaggctgaggagctgtgctcttagttccttggtgcttaaaggtaaactcatcacctccaaacttttgggagcccagcccttcaccacaattcatcagtgccttattgcttcatcataggagaaaagctgtgataaaggaggagactgaggacttaatctgagtcccagaactatcactgagt

SEQ ID NO: 16481 - DNA, 201 bp, Bos taurus
ctgtagaggagttcgatacaaccacttttctttatcaactttaagctgcatacaggcaaagagatcacaaactgctgggaggccataacggtctgggggaaagctgtgttcctcctgtaggggcgaatcaagcaatactccctgcaacaagacaaagcgtgggtcgctacatggcagctgggaggccggataccaacagtt

SEQ ID NO: 16482 - DNA, 201 bp, Bos taurus
ttcttaatacaacatgaaacaatgaaaagggcctagggtgttgtccccaaatttcgcagagcataaaaatcacctgggcagcttaaaaaccctggaactccggcaggcctcgctgcagaccaattaaaccagaatatctgggatgagagtcaggtatcagtagttttcactgacccccaggtgattccactgcacaggcag

SEQ ID NO: 16483 - DNA, 201 bp, Bos taurus
agtggaacaagtttggagttttgtgttgaggcctagatttaaatctgccacttagaactgttttgagtgtaggcaacttgttttaccttagttatttccttctttgtcattcatgtaggggcctcagtaccaaccttgcaggattgttaagagagagaatatgcaaagatcttcattaattatctggcacttgaaacttgg

SEQ ID NO: 16484 - DNA, 201 bp, Bos taurus
catttcagtctcaacaatcctagcagttaggcagcatcggccttactttatagtcagagaactttaaactcaggaaacttaaaaacttctcccaagatggcgcagctagaatctgaaatggccactgctttccaggctctagataaggtgaccccttgcttgtaaagggtacttagagatgagttaacatttgttataatt

SEQ ID NO: 16485 - DNA, 201 bp, Bos taurus
aaagtacacacgtgtctgtagccttgaatcagcacaggtggtggtgactatgactgcattgcctgcagtggacaccaggtacgccagaaagtgcaccaggtagaggattttgcccaggtgctggacagcagggaagccctccaaggtgaattcttggaaatttgtcccattcctcatttccatggccatggacatcttttc

SEQ ID NO: 16486 - DNA, 201 bp, Bos taurus
actttcctgccttcctgggccctagggaggtgggggtcaaatgcataccttgatccttgatctccaaagagaaagacttcaggaagaagcacccccatcactgtccctggggcaggcccaccatcatacttattaaaagtgcccagaatcctttcccaccaaggccgcccccggcaggggcgtggccatggggagggtggg

SEQ ID NO: 16487 - DNA, 201 bp, Bos taurus
tgtatgaatgcgccttagctcctgttggtcgacagcgtccttgtccatcttctgtcttgttgtttgatcatctgtgaaatgggctctgaagtttgcagtcgtagctgctgatttgtttctctccttttaggcctatctcttttttgtttacatatgttgcagcttcattgtttggcacagacacactggggttgccatgcc

SEQ ID NO: 16488 - DNA, 201 bp, Bos taurus
caggcaagttgtctttgagttaaaccaaaattgggccagaggactgagaaattgttcaaggtctcacaggcatgatgcagtgctggcacgattgagacacaagttcctccaactcctaaacctgtgcttgtgaataacacgcaatgttgaggatgtttagggaccagccatgagcgtgaggacctgcacacaggaacaccg

SEQ ID NO: 16489 - DNA, 201 bp, Bos taurus
ttaacaaattctagctcctgttttcatgagtcataaatgtactaagacctggggtttcgaggtcccgctatggagggcctccactgaaccagccacacttgggactgttggtgccatgcagatgtgcaggagttaagagaaagcaccttaccaatccgtcttcccagcagcatctcaactaccgagaaagtcgtctggtgt

SEQ ID NO: 16490 - DNA, 201 bp, Bos taurus
gtgaatttaaacaatagttgtaataaggtgtgggagaaggagagtaagaaggatacaaacgtgagcctgcatttaaggtttcagccgtgaggcatttctcattgtttgtcagggttggcccttggtacagatgtctggagttggatacagctgagcggcaagacgattgtgagttccatgagttggatcacccctccaaac

SEQ ID NO: 16491 - DNA, 201 bp, Bos taurus
attgtcaagatgctcgtgtgtacctttgagaagtagagcaggtcgcagagcaaacccagcacagagcaggacttaggactcggggcttcccttcctgggcgtatcgacagctttgggcctcccacaccaccccaagctctctaacacgttcatcttgctattctcagcaagtggcaccgagcccagcggctgcgtggcctc

SEQ ID NO: 16492 - DNA, 201 bp, Bos taurus
aaagagggtggaagggggaagaacatagaggagaaaggtgggggggagggtgagacaccgcggaagaagcaaaggaagagctgagtgatcttatcatttccctaaagtagaaccagctaaacaaagtggaaccttcagaaacctagaggtattttgaagggtcagtgtatgcagtttcacaggtagaacttctgtggctgc

SEQ ID NO: 16493 - DNA, 201 bp, Bos taurus
ctgttcctcccccttcttaatgatagtctaaataattaatacacatcctcctacaattaatattcttttccattggccataggaaagccacagtgtatgaaccaagaagtggtgtgcataggagatgagatcagtttttatattagctcatccatctgagccacctggtactcatgggccaggcttccttcctaaaacgtg

SEQ ID NO: 16494 - DNA, 201 bp, Bos taurus
aatagtgaatagaccgtgaaatatattataaaacttgcgtggctataaggctggaaggcttatatgctctgacaggcattcctgttccctggccagacacatggaagtcatcctttatccttcttccctttcctacagaaatcatgttctgcacataacccttggcagggctctctcctttcttcactcccctggttccca

SEQ ID NO: 16495 - DNA, 201 bp, Bos taurus
ggagggccttacctgagagccgggtcctgttctccacaggggctgtttagcgacggaggagtggatcacatcccacggctctggccccggagtatctcgcttgtgtgctttcttacttagtcgagctgttaaattgagttgttttccgttccccaaacctacctgccttctctatttctgtcgtgtggccagttcccgctt

SEQ ID NO: 16496 - DNA, 201 bp, Bos taurus
tcttgtgaataagtacctgtgctgtcgtctatccaattctagttcttgatctcaggcttaatcaatgacagaagggacatttagagacatggggacactttagccaggagaaggcatggttgaggcagagaaagaagccgtcgtcactgccgaacatctcaagtatttcatgcagcaggagtcggatatgttcttgtccca

SEQ ID NO: 16497 - DNA, 201 bp, Bos taurus
gaaagcttctccagctctagcagactaaaccgtctcacaatctgaaagcatctgtgagcgccttcccgtctccctgctgttggtgtctagtggcctccccggataaatcacaatctctagagtgtgctttgctgggttgtgtgtttctccccatctccatcagaggcctctacatggagtgggtccccaatggctatttgg

SEQ ID NO: 16498 - DNA, 201 bp, Bos taurus
gtggagagagcaggccagcttctgcattaggctcagatccctcatcccaccttttgcccaaatcatttaatacataaaacacaggaagtaagcttcaacacggaaaaggcctgacattaagtgacagcattgttcagaacgcggaaagccagaggcaaccttcacagccccaaggaagggaggtttctgtaagatgcggca

SEQ ID NO: 16499 - DNA, 201 bp, Bos taurus
cggtcactcagtcgtgggctaagcggtacccgcgggcaaaggaaacttcccgatcgctctacagctcttagaaacatggcccggcttcaccacgcaagcctgcatgctcgtcaagcgggagcagaacgcgcccaggaacgaccactccaagcacggactcaggccggctggccaagccccggagcctagagcgggtgtacc

SEQ ID NO: 16500 - DNA, 201 bp, Bos taurus
cactaaatatatatatatgtgtgtgtgtgtgtgtgtgtgtgtgtgtgtgtgtgtatcatgtgaaggctgttttgtgaggccccaggtagcatgccttctagggggtcacacagagttggacatgactgaagcgacttagcagcagcagcaggtagcatggtgatttatttgggcccagcagtaatgggagtagtctggcag

SEQ ID NO: 16501 - DNA, 201 bp, Bos taurus
caggactcttcccttcactgatactcttttgcctaattaagtttttaaaaaaatattcctgctccatctccaaatctatctttctctatttttgcctaccttgaccaatggcatcaagagaatgggtttgttttttttaagtattctttaaaaattcggtattaagaatatgttcttgcttgtgtgacctcacttcattgc

SEQ ID NO: 16502 - DNA, 201 bp, Bos taurus
ggaaccccaagtctgacaagttcctctgaccctattgtatctctgccatttcgagttgaaaaaaaaacaaacaaacaaacatcaaaacttcctctctaagtaagcataaaatgggttcttacactggacaagccctattaataaacactgacaaacaaagtgtaaccgagagatcagggcccagactacaggctccggagg

SEQ ID NO: 16503 - DNA, 201 bp, Bos taurus
agttgtggcggcatccgtgctaccatcagtctcctgcgtgccaggtcctcttgctggagctgctggagttctttcattagtttctcttgattcttccaaggataaagagaaataattaacaactgagtcacacactttggatagtaacattaatagtgaggaaatcatgaaggaaattaaaagtggagaaatcatgaagac

SEQ ID NO: 16504 - DNA, 201 bp, Bos taurus
agcatcagtttcatttaatgtcattttttacattttgacaattttcaaaaataactgttttctaaaactaaacgtagccacgcttatgattaaactggtggttctgtgatgtttttagtggaagtgccaagatctggtaaacactgatttctgaaatcaccaaccgggcctggcagcaacactatccagtcagaattagct

SEQ ID NO: 16505 - DNA, 201 bp, Bos taurus
ttggaatgttccagtgctgaccagttgctatgggcctgttggcgggggaggggcattggtggaactccagtgtttgtgaagtcttccatttccttggtagaggaacttgagacagcggggtggccagaggggagcagtcacagttgggctctaaagctagaactcagctagtggcctcgatccggcctgggctgcttgctg

SEQ ID NO: 16506 - DNA, 201 bp, Bos taurus
ttagttctgcagcacccccagactcttcttcaacttttgttttattggaagaatgggatttttataaagcctaagaagagtccacgatcggaacactgtccgcaagcctggtctttggcaggggcgtatggactggggcgggggcgggggcgtgcagccagctcacggggcagccccagcgcagcttccgggccaggtacc

SEQ ID NO: 16507 - DNA, 201 bp, Bos taurus
cacaaggccagatttcaatcgttcactgatccattcttctttttattcaaccagcattcactgaagactttccccctgacgttgggaagtattggtgacatgttaataaggcaccactcggcccttgttccccatgtgggggagagtgacaagctatgagacaaatcggcccaagtgcagctggaactacctgttctgact

SEQ ID NO: 16508 - DNA, 201 bp, Bos taurus
tctgtccctgagaagctggttccatcaatcaggaaagacaaacaaggaataacactgcggtgtgcagagtgttacaatagagccgatacaggctcccagacaccacagactggggctctgtaacctggtccgggtgcctgggaaggcatgcctgcaaaagccacactgaagcagaggcctgaagggttctgacctacatta

SEQ ID NO: 16509 - DNA, 201 bp, Bos taurus
ggggtaaggatggggaaagaatttgaaaatctcagtcttcatatgcacacacgatttttaaaattaacaaagaacctaggttgtctttggttttaaattatggctccagcatcacccagccctcagggtcatggtttatggttcttcctggctgcctcaggcaaggcgaaggaacttcagtgctgaaggtgcttcctgtct

SEQ ID NO: 16510 - DNA, 201 bp, Bos taurus
caagcagattcttaaccactggcctgccagggaagtcctgtggattactgtttaattgtctcggttatgcaggggattatatctataccatgtggcaaaatacgttaaggccactttaaactgtgctctctcttttgttgaagttgttttccttcactgactgactctctgcggctgcttccctacttggcccagcctctc

SEQ ID NO: 16511 - DNA, 201 bp, Bos taurus
cctgaccaatgggccaccagggaagtcccttgttttcttttgaaaacactgttttcctaacaggactgaacttattctctgatttgagtgagtcagggtagtgggagattcctcacgaaagtggccaactttaaactccagctcacggctcactccctctgcacagagcctggagttccagaagcaggtgtatgaagtcta

SEQ ID NO: 16512 - DNA, 201 bp, Bos taurus
gttctcagcctcaaaaattatgctaataaggtaagaacaataattcatagtatagtcactaatttctctaaggggaaatatgcagagaccctgggctctatgtttgttttcaactaattatcatgtatttacttttccattagtccaataatttttctttcaattcagaattaagcaataagacactgaattatataaagg

SEQ ID NO: 16513 - DNA, 201 bp, Bos taurus
taccatcagtcaaagcagcagcttccaaataaggcagagagtgtaggcagcgagcttaggtggcatgtcccctcaaacgtgagacgctgttgcagaggccatgaggacagctgcatatacttcccagcccacggcgtccatgcgctctaacacccgtgtttcttcaaagacagaagaatgacctcaggcccagaatagaaa

SEQ ID NO: 16514 - DNA, 201 bp, Bos taurus
atattgcttcccagactgggctcctggtacttgcccacacatttttggatcctggggttcccctgtggaggaagggtatttttccgtggcccatcttcttccctttccccaaatcgttttaaatcatttcggtcgaaatggaggagaggtactctcggtggagtgagggagtgacttggggcttggtgatttgcaaggcca

SEQ ID NO: 16515 - DNA, 201 bp, Bos taurus
ataattatatcatgaattttcaataatggctgcttttaacaatgatctcacaagattcctgagaatttagcaagtgggtttttggaaccaccatgagctggcttcagtgcattattccctaacccatgcttctacacagaggttaaactccagcttctttgaaagaccctctcttccacagctacccgatggaggagaggg

SEQ ID NO: 16516 - DNA, 201 bp, Bos taurus
ctcttgcttctaactgcttgaggcttcaggtctagccgtcagatgggacacatcttggccattcttaggaaatgcaggtcatcctcctgtaccatgttctgggtattgcaaaatgcatgcggttctctaaggccccatctatcagagcttgtctgagtgccatggagtcatttctcatctagagtctttttttgacgaatg

SEQ ID NO: 16517 - DNA, 201 bp, Bos taurus
gacactgaaaaatggtcttgcagaagggttgtaccattctgaatctccagggcaatgtatgagtgctctattgtttcattcctttaccagcacttggtgttcctggtttttatttttttaattttagctattttactagggtaggtggtagtgtctcgtcatggatttattttgtatttagttttaatggggatcaatttg

SEQ ID NO: 16518 - DNA, 201 bp, Bos taurus
gaataagtatagcatatgatgaaggaaatgagatggtgatcagcttgatcagtgtttgaacaccgtctgaatcaaatgcaggttgtgtgaactgtgaaagtttacataatacatttgagaatttttcctaaagtgaattgttataccaatatctgcagcataagactattaaaatgtttaaatgaaattatgcatgaaaag

SEQ ID NO: 16519 - DNA, 201 bp, Bos taurus
aaaggcatcatcttgttggtctctctgcttttacttgtgcattccttacagtttttcttcacaaaatttatctccattatcactctatggccaaagtaaacctcaattatttcttaaaaaatcatctaattctttagctgaaagtctttcttggttcagattaatattacacattccttgaggttgctattaagactaaat

SEQ ID NO: 16520 - DNA, 201 bp, Bos taurus
cagaagtaagaaagttatactttcctgaataagagcaataaattcctgaatttacatggtcatttcttagcaggatgaaaactaaagctacaccttcatgatatcactaaagtacttgctttgtagctgacgataaatctgcatttttcatcattcatagactcaatgaattgctaaacttttgtgagttgacatactttc

SEQ ID NO: 16521 - DNA, 201 bp, Bos taurus
ggggttgattatgacttgagggaacatgttgatgagaagcaggacagccctgggacacagagtggcatggacacatggccatatagataattacttcatgcgcacaatatagagcttagcaataggattggaattatcagtgagtactcactgataatgtacattgatgatttaaaataaaagaagccgaatagctattgg

SEQ ID NO: 16522 - DNA, 201 bp, Bos taurus
aaagttaaaatggcctttttggattttctccagttgagttgtgttgtccagttctgtgtgatcaatcactggattcaagccatcctaggaagggatgttatcttaggttccctgaaaactaaaggccctgacaaaatgagtgctatctaattattgtttttattgtctagttatggtttttatctagaacctagaagaaat

SEQ ID NO: 16523 - DNA, 201 bp, Bos taurus
taagaataaaggattctggtaccaagaagtttgcaaccaacaactgcacccttatccctttttgcataaaaggagcttgaattctaactttggtaagatgattctttgaggcactggtctaccaacttctcagtctgctggatttctgaataaatatctattgccccaacaacttgtctcaagaattactggcctgtcatg

SEQ ID NO: 16524 - DNA, 201 bp, Bos taurus
aggccgcccccgacctgcttttctgcccggccccttcccactccctgagctcacctgaggcatggcatgcacagccgttacccacaggactacagacaccgtgtaggccctcagtgctgtgtggaaacccaacatttttgctgctccctaactctcctgaacatatttcacactttaattctcttttcaagctaccaacat

SEQ ID NO: 16525 - DNA, 201 bp, Bos taurus
gaaagagaagcttgattctgtgcttgagttcagcatcccaggctctctgctgatccagagactcacaggaaggcccccagaatggccattcatacacaagaagttcaatcccctaaaggcgtccatgaaagatggtatcacagaggaacccttgatctgccaatcagatgataataaaaaggccttgaaaatccaccctga

SEQ ID NO: 16526 - DNA, 201 bp, Bos taurus
aaaggtggggaaaggcaggggtctctagcctccaaatgtaaccttttgctcattatagccccattacaacgatattagccttacagatatgaagtaccactgatgccaagactagggatgtaaatccctccactcctcggggaggagaagctgggatgacaatcagggaggaagattcccaagcccctctctccccggtga

SEQ ID NO: 16527 - DNA, 201 bp, Bos taurus
gtagtttaaaagatatcctattgctttatcttacattttcatgaatcatcatctagactctaaatatgacccattcagaccttgcaaggtattgaaaatgaaaataaactggaaaaataaagcatacatgacagaataactggaggatatattgatcttaaaatggataaaattagatctatatgttatagagaaggaatg

SEQ ID NO: 16528 - DNA, 201 bp, Bos taurus
ggaactctgatcccccaggtctagtgacacggccaatgtatatatatataaaaattatctaaatagatcattgtaatgaaaggtacaattagaagtggttcaaggagaaaggccctttaggatgaaggtgtgaaatacagcggaatcagtaggaagagaaaataatagatttaactcaacacaaaggaattagagattaga

SEQ ID NO: 16529 - DNA, 201 bp, Bos taurus
ctgatggaggataagaggcttatggatgcttcctgatggaatagactgactgagggggaaactgggtcttgtcttaaatccctaattttaaacccctataagacctgcactcctgccagcccatctctgttacttgccttccatcaccgctctgccactttgcttcatctcctctgtcctcttggtttacttagaatgtat

SEQ ID NO: 16530 - DNA, 201 bp, Bos taurus
tctatcagtactatctatatgtgaacactgcatcaagcatttattccctgttgaatttgtagataagtaacttcttttacccacactatgtcaagtagcttccttataaaatgtgggtaaaaatagaaaattagtaaatgttgttgagaaaattgaaatagttaattcatataaaaagagttaatctaatacctagaaata

SEQ ID NO: 16531 - DNA, 201 bp, Bos taurus
tagaattgtttgaattggaaaagagaacacattcaagaaaacactatttgtccatctgggagagagaagacgtggggtacagggatggctatatgtgtccaacaaaacaaggttaaatgaaatctcaagccaattatatttgagtgatctgctgctcagagtgcatgattaagttcctagcaggttttatgtctgctgggt

SEQ ID NO: 16532 - DNA, 201 bp, Bos taurus
ccctgctgtgtgcaaagcacagtagtaggttttggttaaataaagatgatatccttagaatgctcactgggttcaagagacagacaactgaggggccaaagcaattcctgagataatgccacagcagaggacagggctggctgtggtacaaaagtcatcagcattgctcagggccaagtcttcactacggagaaggtaact

SEQ ID NO: 16533 - DNA, 201 bp, Bos taurus
taactaatgtctgctcatttccccctctccctcaggcaaatttcttaatatcttttagcttcagtttcgtcaactcggaagtgaggtggctcttatccacatggagagctatgagaatgaagtgagattttgtacatgaaatacccaggacagtggctgacacagtaagtacatggtgagagctggctccattatttttgt

SEQ ID NO: 16534 - DNA, 201 bp, Bos taurus
gtcagacgtctcctcaggcttcagttgttttcaggtttttgtttgtttttaatagtttgtgcatctgtttgtttgtggttgtgctgggccttcgttgctgctctggcttttctccggttgtaggagcgggggttgtgctccacttgcggtgcgctggctcctcttggtgacgctgtcttcttgccaagcaggggccctgga

SEQ ID NO: 16535 - DNA, 201 bp, Bos taurus
ttggcccgtatctggaaataatagttttatatattctttgttttgtcctattttttaaatggaagagggtaaatctagtccctattactccatcatgggttcaggtagaaatttattttgtggttctttgtttcatttttcaaggttaaaagttttcaataagcctatattttcagtatttattataaatttaggtaccca

SEQ ID NO: 16536 - DNA, 201 bp, Bos taurus
ctgacaccgggcagggcagggcccctttgtttggcttgtaaaaactgcgaaacagaggcgccctcagtgacagccggcgagcagccccaagctggagtggcggcctgtgggctactgtgaggagcatcgatggtggaggtgacctcctgcccggcctcgcaccggctgccccgcaggtgtgaaaggagcctgttctgacat

SEQ ID NO: 16537 - DNA, 201 bp, Bos taurus
aaagaggttttgaagtacagttacacaccagtgtattctattactcattcaatgattctaagaaacagtataacaaaggattgagagcatcacagtgagagccagagagaacagatctgaaattgttcttttccttcttgctaattatatgaccttgaatatatgaacttacctttctgggtctcaactttattgcatgta

SEQ ID NO: 16538 - DNA, 201 bp, Bos taurus
atttcacaggccatctgtataatacaaaatagtctccccatctcaatataattaatttagtcacatctgcaaaaaaaacccttttataaggtgatacttacgtgttgtaggtaccaggcccttgactcctttagatcatgattctgtttaccatggacttccctcatggcttagccggtaaggaatctgcctgcaatgcag

SEQ ID NO: 16539 - DNA, 201 bp, Bos taurus
gtttaaaactagggcacccagatctgggagaaattactaaaccccattgaatggtatttgaccaagtcaatttgactgtcaaaatataccagaccttctataatctagctccttctatttctgcattctgactcttcatgttatcttacttgttctttccattaagccactccgacttatgtcctggttcttgcatacacc

SEQ ID NO: 16540 - DNA, 201 bp, Bos taurus
tacatctctattccaaagtgagtgaacatggttgaccctcctcgtagttttgtctaaactctggtcctgaaatattagacaatgactatataataaaatagagattctaggccttactcagaaatatatgctaatttttatctccataccatgactgacactttgaagtttttaaggatttttaaaaattcatccatatat

SEQ ID NO: 16541 - DNA, 201 bp, Bos taurus
aacaattattcagccacgagaaagaaggaaatcctgccatttgcaacaacatggatgaaacttgagggcactatgctaagtgagatcagtcagaaagacaaatattatatgatggcacttattggaatcaaaaaaagctgaacccttagaaatggagtagaatgggggttactaggggctgggggatgaggaaattgggga

SEQ ID NO: 16542 - DNA, 201 bp, Bos taurus
acacaatgccatggatttactcagcacaggatccatgtcttactctttttctgtgtagttgacacccagcacagtaccagacacatagtcagtgtgcaaatatacttgctaaatgaatggatgaatggctggatggatggacagataacaaaaaatgatgtctgagctacactggcatttgacaatgaaaaaagaaggact

SEQ ID NO: 16543 - DNA, 201 bp, Bos taurus
ggcaacatttatgtagagcagatctctagaatttattcgtcatgcataactgaagcttcttcacaggaaactatctggatttcaccaaaggtaggccaggtagagagtcacggaattcaaacaaaagccctggcagcctcaccatgacatagtctaactaaaatgggctggacaggagacagagtaagcctactggggcct

SEQ ID NO: 16544 - DNA, 201 bp, Bos taurus
cttgaaattggccatagtggatatatttataccacagaaatcagaaaaaagctagctgctggcttgctttactgtttctttctctctctttctctttttttctttctggccatataacagggcttgtggcatcttagttcccagaccaggggttgaaccttggtcctcggcagtaagagtgcagagtcctaagccctggat

SEQ ID NO: 16545 - DNA, 201 bp, Bos taurus
agggagagtggattctattacttggagtcacatggcaaggaaggtattaagagtaacaatgtctttccagtgtaaaagtaattaattaattaattaaagatgaaaaatgagtgaggccttctctgctgtattccatgtaccttggaatgttgtagaaaagatatcaccgcaggacgggttcacagaacacatttgtgtgtc

SEQ ID NO: 16546 - DNA, 201 bp, Bos taurus
cactacccagcggtatagtcaactcaaagagacctggttttattctagcctgattcttcaagccttacagaaaaggatgaagttggaaggcctttcaaacgaatgttaattgtcattccacatgcaagcaaagtgcctcctcctgaatacccaagccctcagaggtgaggcctggtatgtgcaagacccttcatgtgcatt

SEQ ID NO: 16547 - DNA, 201 bp, Bos taurus
ccaggggaagcagatgaagctgtgtaaatgcagcctgcttgttagagttgtagcccatcagtggaatcagccctggcattgatggatgactgctttgttatagactggctggtcaggcccctgaagaagcccaccctttgttcattgccttgtaataaagccccactcttcaatggcaccagccgaggctgtcacctgcca

SEQ ID NO: 16548 - DNA, 201 bp, Bos taurus
aaaactagaaattataactcacggtgccatcctaagagttcattatttttcttctaacctgtatttgaaataagacactcctaatttacttaaaatgaccgagaagcttaacttatcaaaacctttcttccaacatattatgtctccacttaaatcttctatatttcctatcttcgagtactataaatctatttataaaca

SEQ ID NO: 16549 - DNA, 201 bp, Bos taurus
aatttttatccctgatctatgataactaaagagacaagtaacagtaaagaacatttggccaactatatactcagattgctacagaaaagggtgagttacaaaagtgttcagtacaatagtcttcaactttcaactagaagtaatatgctggaagtgtattttgaactcaacagaggtcagccaaagaataataaaatgtca

SEQ ID NO: 16550 - DNA, 201 bp, Bos taurus
agttcccatggacacctggaacccttagtcagacggaagcctttccaacgagaccctctccgttggaaagcggccaggccgctgcgctgccgccgttgacggctcccaactgctgcagcatatgttcctcctcgcctcgctcccagctgttctcagataggccggccgcgaggttaatcacgtctcacattgtaaaacgga

SEQ ID NO: 16551 - DNA, 201 bp, Bos taurus
attatatgtatgtatacatataaagagagaagtttattttgaggaattttgtctcatatgatcatggaggctgatgagtccaaactctgcatggtaggcccgcagactgagacccggtaagaatccgtgtcttggtccaagtctgaaggctgtcttctgctgcactccttgttcaggaggggtctgtgttattctactaag

SEQ ID NO: 16552 - DNA, 201 bp, Bos taurus
tcaacagttgatgagacaggaaaaagcctcaggccaaaggtgacccatcatttgggtgaggatgtgaccagtgccgcctggctcaaaagggaggccagtcggaatcctttccaggaactagaatggacaaacgggaaaggttatatggagagaattttccaggtaggaagggaaatcaaggccaaaggatgctgcgattta

SEQ ID NO: 16553 - DNA, 201 bp, Bos taurus
ctatgctagctagaggaaataagtcactaaagaccacacactacacgattccatttatataaaatattcagaaaaggcaaatccatgatgaaagaaagtagattcatagttgcttacagcactggggatcctggaagctggagattaaccactaatggtcatggagtttctttgggggagatgaaaatgttctaaaattag

SEQ ID NO: 16554 - DNA, 201 bp, Bos taurus
ggatggcatcatccaaccagccagggaagcctggagtgctgcagcccatggggtcgcaaagagctggacaggactaagcgactgagcaacaacgaattaggggagaacacagaactcggaaacagggtgcgctgtttgatgtgcaactgcgcaagggactagagtagctaaaatacagagagggtggaagccccgggcaga

SEQ ID NO: 16555 - DNA, 201 bp, Bos taurus
tctcatttccacggcctcagcggcccctgtgcctgtgactgtctgcaggagccccagcgggattgctatcagtagctcgggccagactggctcagctgcatgcaaagtggggcaggggggttggggggatagttgggagagtagggcttcagaaggagaccaagctgggtgtccaggaggccagtagggaaacagaggggc

SEQ ID NO: 16556 - DNA, 201 bp, Bos taurus
tacgatccatggaattctccaagccagaatactggagtgggtagcctttcccttctccaggggatcttcccaacccagggatcaaacccaggtttcccgcatcacaggcagatgaaagccttttcccaataggtatgagcatgtgggcagtgccattcgtctttgtatgcccagcccttcagagcagagtttggtactgca

SEQ ID NO: 16557 - DNA, 201 bp, Bos taurus
ctgccaaaacccaggttgtaaattagtggaaggtcacttcttaatgagaaattcactatgttttacctgtcagggttttccctgaagtatgtgaactcttgtccagtgcattggatccctccctcgggcttggaacaggcagtgtccttcacctttattgtgaatcctttccaaatcctttccaaagtctaccatttagtt

SEQ ID NO: 16558 - DNA, 201 bp, Bos taurus
ttgccttctccggaatggatgttgaattttatcaaataccttgtctgcatttactgaaatgattatgtgttttttttcttttgttgatgcagtgtatgtagcacatggattgacttgtatatatattgaaccatccttaagaccctgggtccaaggggtgaatggatccaacttcattgtggtatatgatctttttcatgt

SEQ ID NO: 16559 - DNA, 201 bp, Bos taurus
tgctgtccaacggatggagtaacttgggccccagttcccattcgtgtgcttctgctgaggaagggaagattctctttttttagatcagatgttgagcctgcggccaggccatcatcatttcagagaatggaatacaaatggcttcttgggggaatgagactttatttgtgatgctgagcatagatttagtggtggaggtaa

SEQ ID NO: 16560 - DNA, 201 bp, Bos taurus
taacagatgacagtcagtaataagccaatgactgctactgttggggcagaagtcacagggggcactgtgtgccagcctgagccacaggcagaagaaataggaagccagatgaaaggccgtctaagagtgagatgcagagaaaaataagacaaagagaaatagttatggatagtgaggatagagccattaatccataggttg

SEQ ID NO: 16561 - DNA, 201 bp, Bos taurus
tatgatctgtatatacatgcacagatctcatcagatatgctaaatgaatgataaatctgtgcttaaattcttactggccttgcattttttcaaactctttaaaaaaaaatctatttaaattgaatttctgctgataacaatcaaatgtatggccttgggaaggttttaaacttccttcatcaatcatccattttctaccct

SEQ ID NO: 16562 - DNA, 201 bp, Bos taurus
ggccaccgaaaacaagaccaaccagtccacctcgtgttacggtgcaggtttcacactgcagatcacctaggaaacaaattagttccgcagatggatattcaagcaaacatgtaaagaactcaaggtccccttatatgtatcaaagataggcaatttcaagcagaaatacagtaaatgcatttctcaaggcatgttaaaagg

SEQ ID NO: 16563 - DNA, 201 bp, Bos taurus
ttatgtgtgaaggtattttaatagagaaatggaaagataacttgtgggcattgatcatagtcattagtgttgtaaggggtatgaagagcatgagtagactgatttaccagaatcaagaatgctataattaaaaaaaaaaaaaagaatgctataattgaggagaactttttaaaataaaaatcattctagaaaaataacatt

SEQ ID NO: 16564 - DNA, 201 bp, Bos taurus
atgtatctatttcacactagattattgagaatatggaacttgctttaatatgttcttcaatacccaggcctttttcagtgatttactgctaaataaatgtctgttgaatttaataatatagtgactgcatattaagttacattttctcagcttttggagaagttaacaattgtttgaaccttctttagcgctgagctggag

SEQ ID NO: 16565 - DNA, 201 bp, Bos taurus
ttcacctgtttctcccttccctataatatttcctctgtcatactatgtcctttattagtgaagagtattgtctaagctgtcagttctctgattatagttcggcataattacaactacgttaagcaattatttgttatgcatgttacctctagttgattgtgaggtgcttaaggggaggatacatgacttactgatcttgtc

SEQ ID NO: 16566 - DNA, 201 bp, Bos taurus
ttgctaacctatttccatagtgtgctcggctccagaataggacgttgttttcactattcgcatttccctgcacccacgtcttgtcctgctgccaccaatattatttccacccaggaaaccaagttagcacaagttgcttagttagcaaagaattggacaaagagggttagatattcttaaggaatatgtacctcaagctaa

SEQ ID NO: 16567 - DNA, 201 bp, Bos taurus
ctatgaacattttggtttgtgtcctgatgcgtatgtgtaagagtttatctataatatatactgagtagaagaaatgctggattacagaaaaaaaaaaaagtgtgaattttacaagacaatacaagattattttctaaagtggtcatggcaattcagactcaccaggaataaatgttaccattcattcatagattttttcct

SEQ ID NO: 16568 - DNA, 201 bp, Bos taurus
tgacttggtgatttcacataaaagtgatttcacatatctcaaggatcttcaaaaagacaagatccattatttctctagctctctgaaggatcagtagataccacttttcctttttgcatgaaaaagtaatcttttactcttctgaaggatgtggctgatagttatcccagtttcccaggctattcgaagtatgaaatgaat

SEQ ID NO: 16569 - DNA, 201 bp, Bos taurus
ttctcagctcctctgtatttgaatggtattaactagagaagagggcttctgcatgtggttgccattgcagtttctccgtactcatgtgctcagtcgtgtctgactctgcagccccatcaactcctctatcaactgccaggctcctctatccattgcagttttagtgctttttaatcctgtgaacattctgaagggtagatt

SEQ ID NO: 16570 - DNA, 201 bp, Bos taurus
ataccagcactctgtgaaataggaatagcgtgtcattgcacagttactgtgtcccaggcagatccacctataacatttgtagctcttgaagcaaaaatacgtagggaggccatgtgctaaatatttagaagttctaaatcaggctagtgaagcattgctcaatacagttagtcatcttaattcaatagatattctttcaca

SEQ ID NO: 16571 - DNA, 201 bp, Bos taurus
gacaatgttttctaaataatgttcaatggaacaagcaagatgtcttcaggtttcacttttaaatggaaaagcagtcctaactttttaataagtttgggaatgctcgatgccgtatccccatcttagagatgcacattatatattagtgtattgaagtcaatgcaaaggtctgctgtgtaaaatattaacattttctaaaac

SEQ ID NO: 16572 - DNA, 201 bp, Bos taurus
tcatttttgtggacctctgtttgtcaggctaaagagaaactcccatgatcttagaacaaaagtcaggccttttggaatgagactctgtgggccactgatatcaccagttggttctaaggcagctgggagtgagctggctaagggaagacagcttcatctgggccataactatagcttcgtagcaacatggtacagttgaaa

SEQ ID NO: 16573 - DNA, 201 bp, Bos taurus
aattatcttaagtaattattttctctggaagctgtaatgaataagataaatatcattactttacactatacagtgtcatgttaaaatgatacagttggttacaaagtaatgttttcaataaatattatgaggttttaccaacttcaagttcctcttgctggtttaagagacacttaactaatagtaaagaaagtaaatgaa

SEQ ID NO: 16574 - DNA, 201 bp, Bos taurus
gcagcgagacaggcctagagcatgcaaataggcctgttgtctaaaaccctttggcttccagataaattcaggaattgtcttttgagatttaacgtaactgcgtctgtacttgtagcaggccagttgctgaggaagcaaagactccatctttagaaacaggcagataaggttaaaattcccaatctattgttgactatggag

SEQ ID NO: 16575 - DNA, 201 bp, Bos taurus
agcgagagacctagatggctcagaggaccaccgctcagctctgcacaggcagaaggcacaatagcaagaaaagggggagaggcccaggaggcctggaagacgggctccaccgaggtgaacccacagcatggagcctgaggaggcagcaaaacttctaggtgctgtccctagacaggacataagccctacatggcttaatgc

SEQ ID NO: 16576 - DNA, 201 bp, Bos taurus
tgtttcttgagtatgcctgggtttttttttttttttattaaagtcctaagataaatgtctgtactgttgaacccgctgagtcagacttttcttaaggcccatctgtcactttaactcatcaggcagtctagccctaaatctagaacacatggcaaagataaattgcttagttggagttgaggacgacttggccacaaaggt

SEQ ID NO: 16577 - DNA, 201 bp, Bos taurus
tgcaagaggactttgcaggtcaagcttctctgttgccagaacatcctgctcaggcttgtatcagcatatccttttggccaggaggccctatagattatgaactaaaagtcaaagtggtagtcgctcagtcgtgtccgattttctgcgacccccatgagctgtagcctgccaggctgctctgtccatgggattctccaggcc

SEQ ID NO: 16578 - DNA, 201 bp, Bos taurus
ttttgaaagggcagctcttttgttacatttgaaaggacttaaaaatgagaaacataaggattaactttttaattagatataatgattataaactcttcattgcagcagttttcctttcattataaaaggaaagttgacagtttctgttcaattaatgttcattgaaatgttttttaaatgaaactattgctgagtagaagg

SEQ ID NO: 16579 - DNA, 201 bp, Bos taurus
tgagaatatttgcttattaatattaaatgttaatgattatacaaatataagccttttgatttattttacataatcagaatgcttaagagactgcatatgataatacaaattctaatatatattcttcataatataagcagtattctcagtcccctaaacttatttgctggatataatttttatacattttaggcttttatt

SEQ ID NO: 16580 - DNA, 201 bp, Bos taurus
aatcgatccactcagaaagtctttcacttctaagagcttttaaaatactttgttttttctctcttctttttttcatttttttccttattaggccatccaagtaactcatagcatacagaaaagatagatatcaatagcccaaattaaggagataaacaagttgcaaatcctaacacttaagacactgagtttttaatctct

SEQ ID NO: 16581 - DNA, 201 bp, Bos taurus
ggcaggacccacaagaagatcatgatatgcccagctttaggaacacagcggtaaatagtggggtctctgcccccaggccctcaggtctaatgggaggtcagagcaaggaggatggaggcaaattcttaaataagactgtattaaggaacataaggaacctagacagtatatagtggaaaggaagaaactcttgggccggaa

SEQ ID NO: 16582 - DNA, 201 bp, Bos taurus
ttctttaagaatctcattgtctcatcattaacttcttggacctctcttgtttgaaacttctcttttttctgtatgaaaacatgatgtgtataataaaaaggaatcactgaaacttacaatagcaactttccaaagggaacacaattattttagaggagagacaagaatgaactaagaggaaagaagcctttataagataaa

SEQ ID NO: 16583 - DNA, 201 bp, Bos taurus
ctccctactgtctaaatgacggcctggggagtcggaccttccagccccccaggtttctgaggctcaatcatactcccttagaaaatcagcacactgagaaacattaatcattctcctctctcacagataaaatagttttcctactgatcctgggcaggaagttctctcagaaatgatgtgtgttctaaggtcattcctttc

SEQ ID NO: 16584 - DNA, 201 bp, Bos taurus
tccaaggttctatgatgccatgaccctaaacctaactcactaaagaatgctctgaactgaaactcagttccaagaattctgggatgacaagaaatccaaccagttccctgtaggtggtcttgcaaaacctagtgttccaagaagagactggctagtcctttggattttgttctggcataaaattaaataaggataaggaaa

SEQ ID NO: 16585 - DNA, 201 bp, Bos taurus
attttcttcttctgagttgctccctcttctacccaggctttttagtgttttagggaggagaaatgagctgaatgggatgttagttttggccctatttcggttatctctgtgaccttgaataactctgcatttctttctccctttgtttaaatcctttgcaaagggataaggatccttgccccttggcctggtgatatggcc

SEQ ID NO: 16586 - DNA, 201 bp, Bos taurus
aaagaagtctagaggttagcagcttgaaaaggctagtcctgtggtttcatggtgttgtcagtgacctgggctctctctcagacaggcctctattttcaaggtcaccttcctgtacaagatggctgctagaggcatagccatcacatcccagtctcagcagcaggaaagaagaaaacaggaaggaggaagaatggcctgatc

SEQ ID NO: 16587 - DNA, 201 bp, Bos taurus
cttctgattactttgatggatgatccttactgttaagaaactcatactctggtagggtcagacatagataagcaaatgttgcaacaaagtaatagagatccatacctgttgagagtggtattataggagggtgtgataagcaagtcatcaagagggcaggcagaggagagtatcttgagctggggtacagtgtctgtagat

SEQ ID NO: 16588 - DNA, 201 bp, Bos taurus
gcttttgatacccttaggcttcaccttctcagcttcacaaaagcacaggaaaagcctggaggagcccaaagcactgggagaaaccaagtgtctcctgagtgctgagggcaggacatacagcacacacatgctttctccaccagcctgtggagaagtggcggctgcagtaaccagcgggaatggcatcttggagaagggccc

SEQ ID NO: 16589 - DNA, 201 bp, Bos taurus
atatatatatatatatatacattacttagcttagggtctgtcatatgcagcctctaaaatggtccctgtattaatacattcccctcctcttgaatgtggattgcacctagagacttgattctaatgaatagaatgtggcaaaactgatgggctgtcactgttgagattaggttctaaaaggactatggctttcatttgctt

SEQ ID NO: 16590 - DNA, 201 bp, Bos taurus
aaagggaaattaaggctgcagatggaatcaacattgctaaacagctgattgaacaacagggagactatcccggattatttgggtgggcctaatgtaatcacacatttccttaaagtgtaggagagaggcagaagggaagatcagagtaatattaccagagctgtgagaaggcctcaacctattgttcctggtttttgaaga

SEQ ID NO: 16591 - DNA, 201 bp, Bos taurus
gtgaaaaggactccccacttgttcatagttgatgccacccctcctaaagcctcagtatagtagaaagaacaagaactttggaatcagatggacatggattaaaatcttagtttcgccactggttttctgtggaatcttaggtttactaattaatcctgttgaacctcagattttcttggatacaagataggtataaaaaaa

SEQ ID NO: 16592 - DNA, 201 bp, Bos taurus
tatgtttccttagaattcgccctcttaaaggtttatgtgtacatgaaaattggtgcgaacaaaacttctcctttgatggttatgcattattataaccacctgcagataatcatgaccggcttcagtatagtgctgtttctgatggaacacttggcaagatagttctgtagctggaatcatcttgagagacttttaaagaca

SEQ ID NO: 16593 - DNA, 201 bp, Bos taurus
tattccacatattaaaactttctataaaagtctacttaaatatttcacatactaaaacctagataaggaaggttcaattcatccattgattaaatgtacccattgtagaaaaaccgtgaacaatccatgaagattcttagcccttcagatgtctatagattcttgacagttctgttcatggattttgattacaatcaccag

SEQ ID NO: 16594 - DNA, 201 bp, Bos taurus
agagggatttctttctcttaatccaataagagaattctaattaggagcctttactcagggaagggaaggcgaaaaggcgcaaaaggttctgtatggttccgacctaaggcctgtgtcataggagcagaggatgagtgtgtcagggaagtgtctttcgcttgctttcattttcctgttgctgggttgtgcataatttaaagc

SEQ ID NO: 16595 - DNA, 201 bp, Bos taurus
aagcatggcagcattaccttgtgaattttttttgagttgcacactcacattatgtacattttcccatgtatattttctagttcaataaaaatatttacaactgttttacaataccaggagaaaaagattagaaactgatgcattgatagtaataattattttaattaagcttcttggaaactgttattgtgattgactgat

SEQ ID NO: 16596 - DNA, 201 bp, Bos taurus
cttactttatatagtgtttctgtacaaaattgatcacagacacattataataagcaagttcaggctaaggaatttgagccatcaggatggaaacaaagccattaccactgggataacatcaaattaaacaaacacaccatgccaaatgctttgagggactgggacatatttaacagggctttagcccttaattccactgct

SEQ ID NO: 16597 - DNA, 201 bp, Bos taurus
tcgggcatacatttattttatatttcactaaagttccttaacatatgtaaaaattattcatgttttacataaacaaagacttgatgatgattgacctggaaggtagggaataaaacagaatgattatgtctacatttgtctctttctgaaacccaagtactaagctaccattctctatctgttctactcttctgttatcta

SEQ ID NO: 16598 - DNA, 201 bp, Bos taurus
gtgatcccatggactgtagcctaccaggctcctccatccatggaattttccaggcaagagtactggagtgggttgccatttccttctccagcttattcagatatctttattgaatatctattagggatctccaactgaaactatcagcagctgatccctttatccccagatataaatctcatcttaccacagtattctcca

SEQ ID NO: 16599 - DNA, 201 bp, Bos taurus
gagataagtttgatatgtgaagagtaagacattaaactttttgtaaaggaaatgtgagtcagcagggagatgcctgtcctgtagttttcacaaaaataatcagcagttgattatctggcctggatgtcccagtggaatctgtgcagtgttgaacatatcttaaagcccagaccacagtcgtctgtggagaggaatcccagg

SEQ ID NO: 16600 - DNA, 201 bp, Bos taurus
ccatgtccgtgagggtgttagttgaaacacaagtgcacatttattcctcagatgcttctcaaaacaagaggagcctgtggagctttgagttacaacacagcacagactaataatgcgtcccaggaggaatagagtctgctgagagccacagaacagtatacacatgctggtaagtacaaggaagatggtagagatggtgga

SEQ ID NO: 16601 - DNA, 201 bp, Bos taurus
agagagattatttaaggggcctggagtttagcaaaaaggtggatttgttcatttatattggagttttgtgggaataacagaaatcagaaatcatcctggagaaaggccaagaagaacaagtcaaagtgcctcgaggaagggtctgtatggagaatgggagaatgagacagagctaaatgaagagtcacttcacaatggcac

SEQ ID NO: 16602 - DNA, 201 bp, Bos taurus
cttgtgggcagcataccgtcattaactattaacttcttctacctactgggggtttcagtgtctgcaaaacaactcaaaaatattgttgcgggtggcccttgttggggaaccaggactttgctggaaggctgcaatgtttttctcttgacccttcatttcctcccggtctcacatcctccattccctaataagcaactcttg

SEQ ID NO: 16603 - DNA, 201 bp, Bos taurus
ttaggccctactgcacaatcatataatcatcaaattgtagtaataatgagagattattagctctgggagtacagcaaaacaacattttaagttgcaaacacgctgggccactctgagcagtgatcggaaaggcagttgattcctggtgtggagacggacgcatagcaatgtggcccctgaacttcatgtacttccttggca

SEQ ID NO: 16604 - DNA, 201 bp, Bos taurus
tccatctttttcttggactgcactggccttctggaaggaaaacgttttctccagttcatctctgtaatcccatagccctaatacagagggtagagttagcgcttggccacttatgaatcccatcaaactttaagttcatcaagaaattctgtgataacacagactacaagtgaagagggggtgaaatactagcctgtccca

SEQ ID NO: 16605 - DNA, 201 bp, Bos taurus
acccactcctggcttccaagtattatgccctccacgctgtatgggttggtatccaagagcatcatgttatccaggggcctattggatatggttgccaagtgtctaggaatgtgtcatcaaatcaataaagttcttagacttcacatacaatggagtgaaagataagagctatcacaagcactatcagtgatcctttagtct

SEQ ID NO: 16606 - DNA, 201 bp, Bos taurus
gctattcagtcccttgtgactcagttctcttgaacatgactccatttagtttatactccaacaaagtgaagtttttccatctgcaaagtaagacttagacacctgaccactacctcctgacatgccatctctctgttaggtaagaggaatctaacacttcatgaacatcattaatccaacagatattcattgaaagcccac

SEQ ID NO: 16607 - DNA, 201 bp, Bos taurus
aagcctaaacaaattcattccaatttgcatagctcttaggttattaaattcttgggaaatgtcctaactcttccatgtgtatcaactttcaatctaattcaactaaccactcttgaacacttagtcctgggcctctgctgagcacatgcctgtgtcttttctcagaaatcatttcactagatctcggtcacattgtatttt

SEQ ID NO: 16608 - DNA, 201 bp, Bos taurus
agatgcaaaacttacatcttaatcttcactctccattccactcccaaccaggtttcttgagctataatcaaaacaaatggtaggccaggtgggggatgagacatttactcttagttaagcacagactgcatttttttaatataggaaaatcttaaaatggcctcaaggcagtatttgatagggatctatcctggctttggg

SEQ ID NO: 16609 - DNA, 201 bp, Bos taurus
acaaaatgtaaaggagtaagactttcttgtaacagcctaacattcatctttggtaagggttctatttttgctagtcttgccctttcggcagccacaggctaggcagaatcaattaggcccttcttaagttcctatagaattgtatctgtgccaagcacagtgcttggtaattagaagggatggaaacactgtttcctgagt

SEQ ID NO: 16610 - DNA, 201 bp, Bos taurus
gtgaacccagatatgctgtcaggctcaagggcccacatccctggcctcccagtaggaacagcttgttggtgtcatgcacagaactaggacccatagcacgcagccaggacgtgattcagaccggcctgggtgggagtggcttgcacaccccaggacacagctcagattgccctgagacatatgggggaggcagactgtttc

SEQ ID NO: 16611 - DNA, 201 bp, Bos taurus
cagaagtggaccccagaggcagaggccagagagaggctgtgatgtggggaaggtcagcaggtgtcacagctcccagcagagggggaaccaggtccagctaggggagttaggccatttgatccctgctgtgtgctgagccccctactgtgagctgaacatcacaactctgccaggctgacttagggtgctcggtcaccaact

SEQ ID NO: 16612 - DNA, 201 bp, Bos taurus
tccctctgtccctgcccccagcactcactgctctgcagggaatggaagaggggcgaggagtacacggaggtgtctgggcctcgccaagtccagaacagagctcttgaacccagggatcatctactcccaggcaccccaccctgcctcccccagccggccccttcctccattcagctctgtctataaacagctccaccacgg

SEQ ID NO: 16613 - DNA, 201 bp, Bos taurus
ttcaaaggcaggggatttggtgggaaagggaggaaaagagaagaatgagacaaaaatggatgaaaatcatcaggagaccagggcttggggcccgggaggaagcagaggtcatggggatcgtctccatttgttcagcgggctttgtgtggctatagaggtgcaaatcactttcagatgcttcattttatgagctcttcactc

SEQ ID NO: 16614 - DNA, 201 bp, Bos taurus
ccctcccaaaacagcgggagaggcaagtccacggcagggccatcactctgcctgtttgcaagggagacagagcagcctctgttgttgctgctggagcgccacgatgatagatggagggccgtttgtcgagcctgaagccatcattcatggaggacaatggcccactgggacccaacacatttggagaagagcatggaagca

SEQ ID NO: 16615 - DNA, 201 bp, Bos taurus
gcctggagaattttgagcattactttgctaatgtgtgagataagtgcaatcgtgcagtagtttgagcagtctttggcaatgcctttctttgagattggaacgaaaatgggccataagaataaagaagaccctcttccctgccacaaaatgcaacacagactccaaaggccaggacttagagagcctttggtgtccctttcc

SEQ ID NO: 16616 - DNA, 201 bp, Bos taurus
ctacaggaagcaggaagaaatgggttggaggccttggctataggactttgggtgaatcaactgtggatttccacacttaagttcagggctaatgccccccgctggccaatttcagagcccagtgaatcaaaagcatcaatgtgaatacattttataattgtcacaactgccctgggaagagttatcatttctattgcacag

SEQ ID NO: 16617 - DNA, 201 bp, Bos taurus
ggagctctccttgctggccggccctccccggcctggacgaggagagcagaagccctctgtcagctgagcagatgtgtattgagccccaagggttgggtcctgggttgtgccctaggcccagggatttacaaatgaatggggtacagtcctcacccccccaccccagtgaagccatctccagcagagggtccaggcccttaa

SEQ ID NO: 16618 - DNA, 201 bp, Bos taurus
attttatgcccaggccccttctccttcacccttcaactttgtaagtcctttctgaactgagatcccgactgcgaagggccctctgggggtgggactgagaaacgtggatgcctgcaggtttggaggagttctgaacccttcagttctcttgggccttctgctcccaccgggcctcctgggtttccaagacagccaaacctc

SEQ ID NO: 16619 - DNA, 201 bp, Bos taurus
ggaattatgtgccttcatacttgttaaactgtcttggcaccagacgtggttctggtaacctgagctttacagcggcaccgccacagttaaagctgggcccgccttatccctgcaccctctctgtcggaggtttatagctaaagcataaaacaattcaacatgagttgaaacatgaaaaactcctccagattgcaaaggcca

SEQ ID NO: 16620 - DNA, 201 bp, Bos taurus
cagagtgctccaggactggagagcagaggaggcccagatgacatcagggacctcgatacacattgcttattgagccctggcccctcgtgttatctgattcgctgtcctccaggctccatggggctgtggcattagctcgtcaccagtgtaacatttcatttcagaggaggcctttcctgctagtgtttggcagacagctag

SEQ ID NO: 16621 - DNA, 201 bp, Bos taurus
gttagttgattatgtctgaaccagcacacaaggttttctgaggcaggtgaggatctactctttacagagctttactggtttattcttacaaataatagagctttaccgtatagtcaaagctattgttatgccagttgtcatgtatggatgtgagagttggatcataaagaaggctgagcaccaaagaattgatgcttttga

SEQ ID NO: 16622 - DNA, 201 bp, Bos taurus
gatcgtctgtgctacactttgttagttttgaagagtgcacacacacagctcagcagaaagtgggctgtggagccaaattgctctggctaaaactacctttcctgtgctgctctgcgctcattacttaacttgtctgagcttcagtttcttccattgtaaataaagtgaaatcacctgcctcatagagaagcaagaatgaaa

SEQ ID NO: 16623 - DNA, 201 bp, Bos taurus
tttcaccatcgacagttcccgaatggccctagacttcattatcttgctgagagtctccttccttaactcaggcaatggctggccaagaactgaatggacaactgaagaatgaatcattttcattctttaggataatttttgatcttgcctgccattatccttaggaccaaaatatgagagatgggccatattttagaaaag

SEQ ID NO: 16624 - DNA, 201 bp, Bos taurus
tcggacacgactgaagcgacttagcagcagcagcagcagcagcagctacaaagacggtgaccaatttgatgagtgctcagcgaggaagaatgggggctaagttcaggtttctgggtcagtgaactgctgaatgacggtccattctctaagatcaagaagtaatgtgagtcacaattttgtggggaaatggtggtaggaata

SEQ ID NO: 16625 - DNA, 201 bp, Bos taurus
aggtaacaaaaaaattaagactgggtttcaagctcttgttagctcactgtgagtttgagcaagtaatttctacttcctaggcctattcctttgtgtgttctaatccagtgattcttttcggggaatgtgatcctgctgtccaagtaccacgtatttctgtggcctagggaccatgcaaggttctgggttacagcttttttt

SEQ ID NO: 16626 - DNA, 201 bp, Bos taurus
ccaaaaagtatgttttcttgactcaacatgaaaattttttaagagagctaaggtaatgggccttggctctgataccagatactttgaatttcaattactcgtaggctgttctatacttcagtttcctaatctcctagtcaaaattgaccatcaggattgtagtgattatatgagattatgtgtgtgaagtacctcttaaaa

SEQ ID NO: 16627 - DNA, 201 bp, Bos taurus
tttggttccattaggaccaagaaattgcaatttttggctctttactgcatggatttttccatgtgtgttttcagagacccttctgctgagatcttgactgaaactcttggtggattcaatgcctgtcttcctgtaccctctaaaatttctctgctgatgtcctttttattctccctgagtttggagccctttaaaaataca

SEQ ID NO: 16628 - DNA, 201 bp, Bos taurus
atggctgtgagcatctggctattatagggagttgggaggtcatccatcttgtagccctgaaaacaacagcaagaagataaacagagcactgagagggacacggccgtccactcagacccagaacacagacaactcccaggaaactgcagtggacagaagcctggacaaagacaaatcctgccccccaccccctggcctcag

SEQ ID NO: 16629 - DNA, 201 bp, Bos taurus
gtcagctcactacctctggtgaatcatccttccctactcaaggaaggactctgagaacggagggcacctgtgcacctaagccggcccacagcccccatgctgggcaggtggggtggggttagggtggggggtcaccaagccctgcagtccctgtgcaggcccagcagctcagcttatcaggaagtcctgcaggtgtgaatg

SEQ ID NO: 16630 - DNA, 201 bp, Bos taurus
atagactatgttccaataacagagtctaccctttgataaacgttttagggcagatagggagaaaagtataacaagaagaaatttgggaattccacaaagatggccaaacccagaaatcctgagatgggaggaggaacctaaattactcggctaggatgcagattttgttcaagaaaggcaacacatgccaagaggggttaa

SEQ ID NO: 16631 - DNA, 201 bp, Bos taurus
agggcctgagcagttcttaccaggggggaagagtcctaccacggacacaggagggcacaactggggctgctggcgaaggcggcaatgaccaccatctttttcttggctccatgggcccacttgcctggttttcctcacatctcccttggtcctcccaggcttctctactcttctctacttccctgggctgcttctcaaccc

SEQ ID NO: 16632 - DNA, 201 bp, Bos taurus
gtaggaaacacaaagattttcgtggctccttttctcaaattgcttataatttattacctaaaacaccttataaaagtaatagaaatatcaattcacctgtgatacagcctagacattagcataaaccaaatcctatgaggatcaagaagaaagagctaacactttcttagcaaaggtcacagaattatggatatctgtatt

SEQ ID NO: 16633 - DNA, 201 bp, Bos taurus
aaaccttttgagtctttaccagagattggaagtgaggagtcccagtagtatgaaatctatttttttctagattctaccagataaacattaaaaaaaaactaatacttctgctaattaaatatattttattcccatatttgttaagctttctgtcatctatttttgtactttgacttaggacttattcatcattcaactcaa

SEQ ID NO: 16634 - DNA, 201 bp, Bos taurus
atattcctggcatggcctttactacttttcatgtgtgtagttttactgtctgcttgcaattttttcttttgtgaacttttagtattttggtgtagctgggacagcagaatccttggggcccatctttagcgctttatgcttctgcttgatcccaagccacaagagatttagatttaagaagttccatttggctgctcacag

SEQ ID NO: 16635 - DNA, 201 bp, Bos taurus
gcaaaattatttagagagaagtcttaaaaagtgaatttacattaatactaatttttatttggtttggttctatgcttattccataactttctgatcatccggtggtttttttccagattaatacaatttttttaactcattttatttttaagataatatgagatttaagaattagtgttatagtcttttatctattactaa

SEQ ID NO: 16636 - DNA, 201 bp, Bos taurus
tggttattgcaaaatgaaatatttcttgccatattggtgggcaagaaatgtcacagccatcagcgatttctagcctccaaatgtgggagcctctagctccgaagagtgaacacaatgcctgcctaccatccagcagaggccccccatccccacaccccacccacagggattgctgagcagctggggggtggtgggtgaaaa

SEQ ID NO: 16637 - DNA, 201 bp, Bos taurus
cagagttcagttgcaagttttacccagactttgaaccaaatccccaaggttgcaaaccatcaactgcatgattatttgtcattcatttggccacatatatttgcaacccttttttattaaggacaatatttctcaacaaagacactactgataattctctgttgtcatgacctgttctgtgcactgtggggatgtttagca

SEQ ID NO: 16638 - DNA, 201 bp, Bos taurus
gaaatccgcttcacctgaaatagaagagctggcaagttcattctgcttaatcagattcatttaatttgtttcacgggttcaaaggcccctaaaccattaacgcgtttgaatgtgttctctatcagcctatggacatgatgtgagcacagaaatttcatattaaacctgaactatgtaaaggtcaggccctgaaggcacttt

SEQ ID NO: 16639 - DNA, 201 bp, Bos taurus
gataaaatgtaacatacacacctccattcttgtgtgcatacatagacacacaataagaattacacaagaattataaagtcaaaagagagcaacagaattagctaacctccagaagactctatcaccaataccaagaaaaggaaatattaaaaatttttatctttcaacaataacattctaccttcattcttccagactatt

SEQ ID NO: 16640 - DNA, 201 bp, Bos taurus
taagaaaaggaattttttaaaaaaacttttactcaagtacttagtataaatatagtttgagtgtaaatgcaatagttgccttgattgtatcttgagaaacataccaaattaaacatttctcttaagtgatgtgaattcagttcagtaactcataatttccaagttgaccagagtcaaaactttcaataatatttaactctg

SEQ ID NO: 16641 - DNA, 201 bp, Bos taurus
aaatatttatatagtaagttctgtcatacgagctagacataatttttagaaaaaaattattatgtgtgtgccatatagtcacaaccataggtgtcctagggtggggagggggggaagacaagaagtcatagcaatgaatttccatttctcagcttcccctcatgcttgttcctcaatcattcctgtttttaaagacaaact

SEQ ID NO: 16642 - DNA, 201 bp, Bos taurus
taatcttctttaatcctggggaaatgtggactaaactgtactgcccctgcagcaactgctaatatttcatcacaagatcgaatgtttgcattaacactaacatggcctttaagcttcctatcccattgagtctcaaggaaatagaatcagggaaatgaccaagaaagtaagaatcaaaaagagaagttggtgctgcctagc

SEQ ID NO: 16643 - DNA, 201 bp, Bos taurus
aattatatttaattaaataaaattaatttatatttaattaaatcaaattaaactatatgactttctgaaaaaggcaaaattatgaagacagtaaaaacatcaatggttgccattggttatgggggtaagggtggatttgtggaggaggggtgaatagttgaagcacagaggatttttaggacagtgaaaatatgatatcgt

SEQ ID NO: 16644 - DNA, 201 bp, Bos taurus
aaatagaaaagtactcattgcttatcctctaagtccaccctcttgaacaagttggaaaattagccagcaagccagcatctgactgtggccttacctgtttctgggtagccctctaagatttttcctttttttgcatttttaaaagattataaagaagaagacaattatgtgtaagagactatttgtggcccacaaaaccta

SEQ ID NO: 16645 - DNA, 201 bp, Bos taurus
ccctctcaatttccctcatgggcaagggggtgataataaatatgtaaacggttcccacaaaataatcaaggagaaaaaaaaaaagaaaacctaacagcttaacagaaaaatagacaagatatataacagatgatccagcaaaataaatgaacatgaccataaatgtagaaaaaagataagtgtctcactcatattgagagg

SEQ ID NO: 16646 - DNA, 201 bp, Bos taurus
tcaatttctcatttctaaattgggaaagagagcactgttgagatggaggcccttttcagcaaaaccatgattgtttctgtttgtctgttagtagcgttgatgcttgccaggtgcaggacttaaggccccaccatcagtgagcttcactaatttcttttgtaaaattgggatgataattctttataggatttttgtgaggat

SEQ ID NO: 16647 - DNA, 201 bp, Bos taurus
tgaaaaggcattggagcttataaaatatttcttgtcaagagatcttgaacacctcttatttttactactgggggaaatcaacattccttttgtaaactaacgcctgttattagaatatatttaggaaaaatatttgaaatgctagcatagtcactttgaaacatagattcttgattgcagttcttgaagtactaagtagct

SEQ ID NO: 16648 - DNA, 201 bp, Bos taurus
accacagtgaaagggtctatctctgtttgcctgatctttgtcactatttccaaattctttaggctcgtgacattatatttcatgtcagtcttaacttggttaatcaaagggccataaattacatgcccaaaatcacagaatttcataatagttctacttctataaaactgccaacaggcctgaagaccctattgaaatagt

SEQ ID NO: 16649 - DNA, 201 bp, Bos taurus
catttttattttaacctcttatgtcacagatcttagaaggagagggcttctgagaccttggtcttgttttcagtaaacatcctgcttgttgtcctggattcctggaatgtgtctttagtctgataaattattagcactcagatccaaggaagtgcagtaattaaattctgttccatatgcttaagggaaaacaactggtga

SEQ ID NO: 16650 - DNA, 201 bp, Bos taurus
attccattttcttcatgctccaaacagaggacaattttactagttttgtccattgtagagcacaagtgagttttcatattttctatgattgctatgtaaagtgactggaagataaatctccccctggaaaggaagtgtaattaaaccatctagatccagagcagagaggtagatgatgaacagccttctgccagggactgg

SEQ ID NO: 16651 - DNA, 201 bp, Bos taurus
gtgtgcatgcagggcacttgtgtgctcctgggatgttgggggcagtgcttagtgcctgcttgcaggtcttatagcagtggctgtggccagtgtactcccaagaaagtgagggcagagtctggctaatttctaatctcatagtgtcatgaatggaaaagatgcttcatatgatttcaactttttaaaatttcccaaggctta

SEQ ID NO: 16652 - DNA, 201 bp, Bos taurus
agaaatgctgggaaggtaatggcctcagtggatagccttaggtgctatcagattaattgtcaagaacctgccaccttgacatcctgcccctggtctagctagagggcctaactacacagtccttgagtcccttagataaagcaatcccccaatctcttgattcagatggaacatagcaactctttgtccaggtttcactca

SEQ ID NO: 16653 - DNA, 201 bp, Bos taurus
acatcccattcccaaggtcgtcacagagcaccaaactgagctcgagctccctgcgtcgcatggcagctccccactagctagttattttatatgtcatagcatgtatatgtcaatgcttctctctcaatgtatcccaccttcttcttgccctgctgtatccacaagtccattctttacatctgtgactctattcctacctta

SEQ ID NO: 16654 - DNA, 201 bp, Bos taurus
tcaaacacattttcttacttttcatatctacatgtgaagacaagaattattctgacttgacagatgaggaaaatacagcttagaaaagatagatgggatgcggcactgaattcaaagccagaccttctgcttctgatctagtcttcattcaccggactattccacttcccacgccactgagcacttctcccaacaatttga

SEQ ID NO: 16655 - DNA, 201 bp, Bos taurus
tgtgagcgggcctccagtcactaaccacgtcttcctgtgatcctgcacaggtcatatctgccaagactgtcacagacagagactagctcccctgaggagacgcatggcccccctggaactgtgcccttgtggcacatccaggagcctgagcagcttagacctgggacgtgcacaccgccgtgggtgtggcaaccccatgag

SEQ ID NO: 16656 - DNA, 201 bp, Bos taurus
ccactgactccccagtgatgtcctgtatatactcctgactcaggatctaccctggtagaagaatcactctgtctcctcaacttccagaaacttaactttcgtaaatttacattatattgtcattattctgtattatctactccctttctgcaatggcttttttttcccaaacagagaagttatcttaggaacatttccatg

SEQ ID NO: 16657 - DNA, 201 bp, Bos taurus
gaggtgagagtgagcaagcaccatgcattgtttttattagcatgtttcctggttcattatatctcaggtaatgatccatgggcccagcagggttgcagattgccgatattcaaagtcttaacactcagaacaagtttttctaggtagggagtattttttcccactggcctattcaatctgcaatcttatagccttaaaaaa

SEQ ID NO: 16658 - DNA, 201 bp, Bos taurus
aagttcaaagcagaaatgccagggtaactttatcttcgtctttccccaggcctgatatttacaaatcacattgaaatttacaacacctattatgtgacagttctacgatatacagtggtgatgcaagggtgagctctcgaggggggtctgcagcctgtgagaaagacagacgtcaatcaaatgatcaaaaaccactctgca

SEQ ID NO: 16659 - DNA, 201 bp, Bos taurus
catgattaatcagcaggccgactgggggaatgatgaatatcagaccagttatgggtgtcctcacctctcaattttccctgagggatatgatcaaatctgacggccaatgatccaaaaattttatatctgcaaccctaacctctcctttaagtaacagactcgtatatccaatggcctcctgacgatctccatgtgcacatt

SEQ ID NO: 16660 - DNA, 201 bp, Bos taurus
tttagctttggattttaagtgtattggtaagttatttgggagttttaagtgtaagagtaatagtaatctggctgttgtatgtaggatggactgcagaggtactaaagtagaaaatggattaccagttagatagcgatcacaatccaagcaagaaatgatggtagagtagggatgtggctatgaaaatgctgagaagtgacc

SEQ ID NO: 16661 - DNA, 201 bp, Bos taurus
ttccttcatgagttctgaccaactgagaaataaatgagttagcaagaggccaagcatcatctttatcaacatgacagtgttgggagagcatagcctcccacgaaagccaaaatggactggccatcttccctgcctccagcctggatcctggcacagccatctgctcccaccgatcggggtggagaaagtgaaagaggactc

SEQ ID NO: 16662 - DNA, 201 bp, Bos taurus
agggccccacccggctcaggtgatcctgaccaagctgccagaatccaccatccaggcccatgtggaaccagattacatggagggcaccagaggcctcacactcttgtccacgtgtctgggagaagacagaccgctccgtgtcgctgatgggtgtcacgtgggggcttggtgggggctgggaagcatgcccagcgggtgaaa

SEQ ID NO: 16663 - DNA, 201 bp, Bos taurus
ttgtactctatcccaaataacaatagaaataattctatataggtatctcctgcttttcaaaagttcactttacaccatgtcccttttaaaaaagacctacattactatgttttccctaacagaaataaatttgaagaggatttttgcttttacaaaaaacggtgaaaagcaaaagtagcattcagtgtttgttctggagag

SEQ ID NO: 16664 - DNA, 201 bp, Bos taurus
atcccatgtgctacaactgagtccaggggcagccaaataaatttttttttttaagatctcacacacacagagatacacacaatgaaatattacccagccattaaaatatgaaatgtggatggacctagagcataccacgcttagtgaagtcagagaaagatactgtatgacatcattcatatgtgaaatttagaaagtaac

SEQ ID NO: 16665 - DNA, 201 bp, Bos taurus
ggctgcccctaattgccgcctggaatggcaggaactgggagaggccttgccgtccacacattctgattccccacgcactaaagggaggccgtgtggttcctgggctaggggtagtcaggaaacactgagctagttcattacatagatgggaaaactatggccttgagaataggtggccctcatccgagggagacaccagga

SEQ ID NO: 16666 - DNA, 201 bp, Bos taurus
ggagctccaggtagcctggtgggtcaggaggaaaggaataggagaagaggagggggtgccccacctgcaaaatcgaagctctcatgcaggcccactgattaatgaaatgatttgccccttgaaagctgaaatagcacccatttcccctgctctgaagcaaacctgattctggctccattatttaaggcccctgaagatgct

SEQ ID NO: 16667 - DNA, 201 bp, Bos taurus
tgggctcgtgctggggtccaggggactcagacactcccggctggtgagaaagggaagaagcttggagtcaccgctgctggccccttactgccaactctgcgaccctctggaaggtgtgaggtagcatccctttagccatttatcaccaaatcaggagcctctggaggccgcactcctgtagccatagaaacaaggccctct

SEQ ID NO: 16668 - DNA, 201 bp, Bos taurus
tctgtaaccaaggagcatccctgatttatttcttcacagagtccttcgtggagtatcaggttgtgatggcaaaaattcccagagaagaatgatgaggaaggaagtcattcaaggcctgggaaagctgagttcctttggagcctgccagcagcacctctccatcccagtaacctcccttgggagccatcggagcccttcttt

SEQ ID NO: 16669 - DNA, 201 bp, Bos taurus
ttaattcagagggtaaggctgatttcaagtgaggcgctggtgaggcccatggaaagaggggaacttgcaggcagtaaaggagacagatatgggtgcaattagcttgcccagttcaggcctccctcctctttccccagatcacccctgaactcctccccacttgactcccctctactccattaaaccctcaagctagagtta

SEQ ID NO: 16670 - DNA, 201 bp, Bos taurus
ttggtatttgatgcaacagggaaatgtgttgagtacattattaatcagactcagcaaaggaaaggtcatgggggtgactggcacaattacggggtgtgggcaacaggccaatgagagtgtgcaagggaggaacagaaatcgatggctatgaaattatggagggttatgaatagtgggaggcaactgaaaggctgacattct

SEQ ID NO: 16671 - DNA, 201 bp, Bos taurus
tgatcctgggcaagttacttaatcactctgggcctctggttcctcatctgtgaggaggggtttgcctacctcaagctgtctttgacagaatgaaaagaatgcacattcacgggggcctggccctctacagggggcttcccacgcgacgcagacagtaaagaatctgcctgcaatgcaggagactcaggttcaatccctggg

SEQ ID NO: 16672 - DNA, 201 bp, Bos taurus
acagggaaggagggaagaatcgcggccctaactcccagaccctcctttccctggcagtggcctgcaggaaggcactggacagcaccacggtggcagctcacgagtcagagatctactgtaaggtctgctacgggcgccggtatggccccaaagggatcgggtatggacaaggcgctggctgcctcagcacggacacaggcg

SEQ ID NO: 16673 - DNA, 201 bp, Bos taurus
gtatgttaatgacattaaatgctgagaagaaacacaaaggaaggaagggggttagggaatgttgcagatagtggttatgatggggagggcctgccaacatcgccatgacatttgtgtccagaccttacaaaagtggagggagtaagccatgtgaatacatgagaaaagagttttccagatagagcaaatagtaagtacaaa

SEQ ID NO: 16674 - DNA, 201 bp, Bos taurus
ctccaggtagggaggggccaagggctcttgaaccaaagacggagatgattaaagtggtgagtgtttggggaatgggtctggcaaaactaatgatgaatcctgagccctgctgtggcccaggagaacaggactccaggatgtctagggagggaaaacccttccaggaggtcatccagggaacccaggggagcatccggctgg

SEQ ID NO: 16675 - DNA, 201 bp, Bos taurus
gcttgctcagcgccattagcaccgagcgctgtgtgtccgtcctgtgccccgtctggtaccgctgccaccgccccacacacttatcagccatcgtgtgcaccgtgctctgggccctggccctgctgctgagtatcctggaggggaagtactgtggcttcctcttaacggattttagccatctttggtgtcaggtgtttgatt

SEQ ID NO: 16676 - DNA, 201 bp, Bos taurus
gtgaagaaagtggctttgaacattcatgaacatacatatattgaatgtttatatatgaacatatatattcaaacatacatacagtttcacctctcttgggtaaatacctaggaatgggattttagagccaagtgcaaagtatgtgtttatccttataaaaatgtgccagtctgtttttccaggtagagcagacatgggtgg

SEQ ID NO: 16677 - DNA, 201 bp, Bos taurus
gtgggtaaaaatcccacataaggctatgtaaatgcattatatggaatcctctaattatgataacagaggaatttgtagttctgaaataacactgggcaatgaatagatcaataaataattgttaaatatcttttttagtatgctttatttactttaaatcattgttggtatgcattttttaataagtcattttattattaa

SEQ ID NO: 16678 - DNA, 201 bp, Bos taurus
ccaagtactttacattctttgtcatgtgttaggctttattgtcttgaatttacagagaaggctgagattcctgttaaagaactgttacattttgagtgttgacagtgctgagtttcaaactaagactgttgaaatcagagccttaggtatttttttctttttccattgaagtggaactgtttctctggttacagtttttct

SEQ ID NO: 16679 - DNA, 201 bp, Bos taurus
gtcctaaaatgctgctctacctcatgggcctgagcccacgcatttcctacaaggactgtgtctcccagctcttcttcttccatttcctcggcagcatcgactgtttcttgtacaccgtgatggcctatgaccgcttcactgccatctgtcaccctctgcggtacgcagtcatcatgagccctagagtctgcgtggccttgg

SEQ ID NO: 16680 - DNA, 201 bp, Bos taurus
catgtgaacaggcaagcagccgtgggtgtcccagggtgttctgaaggctctactatctgctgtgccttagtaggtgttgcccaagcaggtgggggttcttcagtccttaatatcctttgtgtcaaggaccaggccaatgaaaactgtgagcacaggtcaggtatttagcagatttttcagcaggttatgatggagattcct

SEQ ID NO: 16681 - DNA, 201 bp, Bos taurus
aggttcaaattttcctcaacatggtgagaaagaaataatattgtcattaaaattattttaattaaacacagaaccttcctgccctgtgactaattgcacaaagggatagtttctaatcaaatctctcatgcttggattttttctcagagcagttttcacatctttattctcaagctgtagattaagtgattcatcatggaa

SEQ ID NO: 16682 - DNA, 201 bp, Bos taurus
tgtcctttcctttgtctttcattgactttgttgtaatgactactttgtcttatatccccctctttctttttttcctcttgacttgaatatcttttttttttaatttaaatttatttattttaattggaggttaattactttaccatattgtattggttttgctatccctcattttattctgtgtgtctctttagatccaaa

SEQ ID NO: 16683 - DNA, 201 bp, Bos taurus
atcagagagttgatggccttttgaaggtccacaatgaggcacacaaccatatgattacaggctgctcatccaggtctccctatctgataatcccagttgcgatcttctcaggagacagctgtggcctccacaggtttagtgttgtctgttctgtgtatctcatcagcatgcgcctgagaggcttgccacaatcgttcttct

SEQ ID NO: 16684 - DNA, 201 bp, Bos taurus
aggaaagcaaactaaagtaaaacaagttaattaaactggaatgagaaagagaatgagagaatggaggtcaattataaatctgtgtattagacagtggtaatttgaaggccaggaaccagttccaggaaactattcactgaaatattaaagtcactgaaaaagagtaagcagtatacattctccttaaagatggaaaaagct

SEQ ID NO: 16685 - DNA, 201 bp, Bos taurus
atcattaccatggaggctattaggctgtgacacctcaacgcctaacagccctgcaaggttagtattcagaactatccaccaacatcatcagatccccctcgcccttcagagacattggggagaaacacataactctgaaatttcagggaacaaggactgtgtgtctgaatcccagccctgacttttatgattttagatctt

SEQ ID NO: 16686 - DNA, 201 bp, Bos taurus
atcttttagaaatatagatcataatttctgtttatgactttcagtccactcaagcagcagagaaaaataagcattcttattattatttttgccacttggtagtcacagatttaatgtgagggtgatgctataatgtactcagttataaatgtggcagaagtttattcagtctcttccccagggaaacactctatgtataat

SEQ ID NO: 16687 - DNA, 201 bp, Bos taurus
ccttataaattcatattcctttactgaaattatacagtgtgttttattaaaaaccttgagtctgtattaaaccctttaaaacaaacattttaagcctattgattatgcttgatggtgaataactaatgatgagtaacaagcttaatggtagtgattgataatggcaatgacggtaatgacagaggtggttgtggtggtggt

SEQ ID NO: 16688 - DNA, 201 bp, Bos taurus
gtcactgtgctacaatccatacccactaacggagaaaacaaacagggggcctgcattttatgggactgtatctggacagtcgagggacgaatcaaatgccacctttagagcacatcacactggccaccataacgtatcagatgctaaagtgactaatattgattttatgactcttaattatggtcttacaagtctgtgtaa

SEQ ID NO: 16689 - DNA, 201 bp, Bos taurus
ggtctgggcacacctaggcctcccctcctgagataaacccaacgctctcgctgccctacgcgaggtgtcataagggcggtggaagggagtgaaggaagcaaacgggccggggttccggcccagcagacacctgcaacctaggcctgggccgtagaacccggttcctgcccggggatcctttcccgacctagagaagcaggc

SEQ ID NO: 16690 - DNA, 201 bp, Bos taurus
cgtggttatcaggggtgtcagtgaaaagggcactctgcccagttacagaatccaagttaagggccgcttccagccccaggccacagcccatcattcgctttttccctttcctaaggggatccccgggctgggccacagtctctccatttcagtggacaaccaagtgtcaccttttcacagatcagcgcgtataactatcgc

SEQ ID NO: 16691 - DNA, 201 bp, Bos taurus
gtcgcttccccccagaccccccactccttctgaagaagggggcagtgatcccgggtcgggagtctgcagggacgcttccagcagtggccctccacgctgtctgccctgagtccccaggtctgagcacgtgcttcgttttccacagttcacttcactgccaaggaggctggggacctctccacgctgttcgatgttggtggc

SEQ ID NO: 16692 - DNA, 201 bp, Bos taurus
ttgttttgtacctacacaatctggccagggagtatgactctacagtgtccttagagtcagtttataccctgattctgtaagtcaacaccagtccaagtcacccatgacccttcagctttctggggccctgggctggagcctcacgggctggacccagcacctgccatgaatcttaacaattaagaaacacgcacacgcgtg

SEQ ID NO: 16693 - DNA, 201 bp, Bos taurus
ctggcaacgagtgtacaaggaaaacatgtgactttgaggatgtagactgaatgctgttgagggcagctgggatagagcacagcataaggccattgggagaccaggggacggaaggggacaaagaaaggaaccaggagaggaattggaagagaagggagggagctgggccgtgtgagcccctggaccctagaggcagagctg

SEQ ID NO: 16694 - DNA, 201 bp, Bos taurus
ctgtaggagttgatggccagaatcagcccagacctgcctcaggaggaaaggaattgagagcctgggatatagacatgggattcggtcaagtgtgattccaggaatatgtcgaacaggccaaatttatacaaatccgtttagaaatattccttcgaagtcttcccagaggttgacctgctgtcccttagaacgaacgtcttt

SEQ ID NO: 16695 - DNA, 201 bp, Bos taurus
ccagggaaaaggatgcgaggcacccactcacatgcagggctgagagggtgatgagcggtttcggtaccttgaccagcagcatccttctttccatcactccccctgcggccccagcacaccaccctcacctctggtgcagcacttaccaccttgggttttcattatctgtttacatggctgtgtcccctgctctaaccgtgc

SEQ ID NO: 16696 - DNA, 201 bp, Bos taurus
acgaggctgcatggggtctataagttcaactatgtggtgggcttgtgcctttgtggggaacagaagcaggcacaggagagtgacatggcctctgaaatgcattggggtacagtcatcacacctcatttagatagtgattgacatgatccgagtgcgatccggactggcagcatcgcatcccctgggagctgtttggagaca

SEQ ID NO: 16697 - DNA, 201 bp, Bos taurus
ttcaactgccaagggctcaccggaagcgtgttgggctgcggcggtctcacttgagccacgctcactcaaagtgttgtcgattgaagaagtctcatataaaacctcatccaaagggtttgcaagtgaaaagtagtcacttgagagttgctgaactgatgcttgatgatccatagagccaagaaactcatcagattgagctga

SEQ ID NO: 16698 - DNA, 201 bp, Bos taurus
gcggtgcagttcccctcgccatacaaacagatgcccctcttaaaaatcgtgcagaccttacacaaggtggctggtgctgcagagaaacacacagggaagcagaggccggggtaggatgggctgcgaccaaggtgtgtaagacacagtaggacctaggagttgaggggcaaagcctggctctaaatacttgtcctgcatgct

SEQ ID NO: 16699 - DNA, 201 bp, Bos taurus
tcaaggtgaagactgatgaaagccttagactgaaaaggctgatgttttccttgcagatccagatgtcaacttgggtcattatctctcgctacactctccgcaccacaagtcctcttcaaaggcctgacattgactgcccctaccttttgggccaggtggactgtcctgaaatttaagtaataggtgcccttgatggggcct

SEQ ID NO: 16700 - DNA, 201 bp, Bos taurus
acattctatgttcatctctcagtaaaaaaggaaagcgatccagattagcataactgagagttagaaggggccttaaaaaattggcaaggccttttttccctttttaaaaaatagaactctgtgcatcacccccagatgtaattgctcaccctctttttctttaaaaggaaatgccacgacctctttaggcctccagttgca

SEQ ID NO: 16701 - DNA, 201 bp, Bos taurus
agcccggggccaagaccagctcactccccaccggtcctgcgagatcatgctgtgatgtttaggacggagagtaggcacagtgcagcctgtgtctagctagcggtcaggccagatgggctggagtgggtatctgatctattaccactgcctcttcccctctctcttggcctgctctgtgacagtgaagttcccaacaattag

SEQ ID NO: 16702 - DNA, 201 bp, Bos taurus
tctttcgtgtgccctctgggttgggcacttcctagaggagtctgcctctaggtcttgttgccatcgcaaccagagctctccattgcctgggaaagccgaatgaaagccaggccaggaaccctgggttcccaaagcatcttctgagttcttggggtctccccttgtctcagcaggaacaaaagaacagaatggatctattgg

SEQ ID NO: 16703 - DNA, 201 bp, Bos taurus
caggcttaggggggacccgccttgctaggaggccagcagggggtaggactctggtgcctgagccccagggagcgatgggatcacagggctgagatgggtcagtggcctcctttcgcaggaaaggaaaccaaggccatcaactcccctgatcacattttggtgtcagatcatgtcagtctgtgatggtcggggatgcactct

SEQ ID NO: 16704 - DNA, 201 bp, Bos taurus
tagtccatggggttgcaagagtcggacatgacttatcgactaacccaccaccaagttgcatagcagcccagcccagttgtaagggcctgggctcctcatttaaaaacagggaccataccagccctacctacctcgcaggcttgttgagtgggtctaatgagaaaatagaaattctgagggataaaacccatcaataccatg

SEQ ID NO: 16705 - DNA, 201 bp, Bos taurus
tgacaggtcatttccatctcattttgatcccttgctcatgaccgtggatgtttccaggccgtgggcagcatcttggcatgcagagtggtggccagcacgtacttctgtggtgcttcctaaagccacttcacagcccttgggatcagggggcaaacacaccgagtcaggggcccctcaagctttttcctcttcacacggggc

SEQ ID NO: 16706 - DNA, 201 bp, Bos taurus
cctggagggtgggcacccgtgatctaagggacaccactgcaatgtgtggccctattctatactttcccagccctctgtgaattcagagtttttgattttacatcaacctgtcaatcaatctggcctcaaccaatcaactgatacattcttctgcacacctccagctatgaccctgaaccttttttctctctgcccttcaga

SEQ ID NO: 16707 - DNA, 201 bp, Bos taurus
ggaagttctgggggagaagttatttccttgacttttccagcctcagaaggctgcctgcatccttggctcccagtcctgcatcacaccaacctctgcttccattgtcatatccccttctccgattctgtccctcttgcctccctatacgatgactcttgtgattgcactgggtttgaccacatcatacaggataatctcccc

SEQ ID NO: 16708 - DNA, 201 bp, Bos taurus
actcttctttaaaaatatattcagcagaacaacagaaaagaaattgccatctcaggcgagtggcacgacacagctttaagaggccaagaaatcagactgtgtgtattctcctgcaatcgggagttgcagcctggagctggtgccttggaggcagcgtggctgggaaggccagggggtaagattctcctgtagaaaaatggg

SEQ ID NO: 16709 - DNA, 201 bp, Bos taurus
ggtgggtgggcacccttcctgagatggatacaggccagccgggagatctagacaacctgttcctccctgagcagttacactcacaacatcacatgctgtacgttggccagttagtctgcaagatagcagaggccctggacttcaattgcccaggaggcctgtttgtggactgtgtggggagaaattttaaacatggtttca

SEQ ID NO: 16710 - DNA, 201 bp, Bos taurus
ttgcacagattataccaaaacggccttctctggcttagtattttatttttatgtattttataaataattttattactttctccctccaaacccctttgccacatctggcctttaatgggggaaaacaagtctaagattacaatgcatctagatttatacccaaatacaatttagttgcatttggagccctagagagtcagt

SEQ ID NO: 16711 - DNA, 201 bp, Bos taurus
cacatcctatatagttttattgctcttgtaataaacatttggctttgactattgaaagtccttatattcattttctttttactttgtctagcaatgccactttagataatcatttagaatctattgaaagattgttaagtataaaacaggattctggattcatagatatttttgttattatttctttgcaaatattatcca

SEQ ID NO: 16712 - DNA, 201 bp, Bos taurus
tcttattttctgtttcctaagttgacttgagttacccttatgaagttatgagaatttatttaattagatttgtgtatgactcttatcaagaaacatatatcaatattttttccttttggatatcaagagtgcacagaatttcaggaaattaagagtacacattggtgattttaagcacagatacaaaaagattggtattga

SEQ ID NO: 16713 - DNA, 201 bp, Bos taurus
caaaatagactttaagttaaaaactgttacaagagacacataagaacatttaatattgataaatgtgtcaattcaccaagcatatataataattataaacatatatgcaacaataacagaacaccaatatgtatgaagcaaatactgatagaaacaaaggaagaaatatgcttggccataaaacagctcccaataaatttt

SEQ ID NO: 16714 - DNA, 201 bp, Bos taurus
cccacaaaacccaggttcatccctggtggcaactgttccccggggacaaggcttcatttgcagtgggctctgcatgctatgtctgacttctctgaaccatgcagtgatgagacatggcctctgagagggactcagattcatcatgacaaagaggcacttacaggaaaggctcaggaaataaagcagggtaagggcctgcta

SEQ ID NO: 16715 - DNA, 201 bp, Bos taurus
ccagggaaagagtgagtgcaggacagaacggaagggacctgggcaatgaccctggccttgacctggctaccccgggactccaagaggtggctggccctccaggactcaatgttccatctcctataaaaccaaattcgctgggtgaagtcacaaactttcaatgacggaatttgtttcaggcaaaatttcatgataaggcca

SEQ ID NO: 16716 - DNA, 201 bp, Bos taurus
tatctataactccacaaatacatatgaatgttataaacataatattgagcaaaagaagcctgatcaaatgagaacatatttgtgattccatagataagttccagaaaagagcaaaatcaatgtgttagaagtcataataatgagattacccaagggaaagtaggtgttaactggaatggaaaaaaaggtggtctctgggac

SEQ ID NO: 16717 - DNA, 201 bp, Bos taurus
ctgcagctcccgacaggcagtgggccagtctggggactagtgacagggtgagtaatgctcgaggtcagagggcagctgctcctgggatcgagtctccttatatgaggaggccgcctcgctgtgatcacccagtggaataagttcccagagctgatggcaagataaagcacattaacaaaacgtgccctctttgattttatg

SEQ ID NO: 16718 - DNA, 201 bp, Bos taurus
gtactacagcacgcacatgcacgcataggctggttcacacccttcttttccctcccctttctctatcccctgtcaaggaagctcagcctccatctgcatcgccacaaagggctacacgttgcttgcttaagatatacacagcgtccatcttccagagaacacagccaagcaagaggcccagaaaaatcctcttctaaggag

SEQ ID NO: 16719 - DNA, 201 bp, Bos taurus
gcttcagggggacacgtgggacctgctccctggagaagggaaggaggcaacacggaaacgccccccaccttcggctctcccgccagaggggagggggccagggtggtgtagccgcaggagaggcaggaacagacaaaataggaaactctcaaagggcaatttaattttagattcaaggccaggaaattgttttgaaaacaa

SEQ ID NO: 16720 - DNA, 201 bp, Bos taurus
ctgtaaccatgtcccttatgacatttggtgtgtcaggatgagaaaaatctcttaccaagaaaattctaaaactaaaatttgctttatttctctctaacttggtgtttaaggaagttatgaggacctttgaaggactgtagaatttggaatgaaaagaaacaataatcctaaaaaaatctttgaacacatttatatgcctcc

SEQ ID NO: 16721 - DNA, 201 bp, Bos taurus
gaacctgttgtgcacttagcaaccatcctgagcactgcatgctaacacttctatctcattctcaggattggaaggtcaagggctcacatgagaccccacctggggcccagattctagccctggagtcccgtgccggtgcctaggggcaccacaaaaacacccagccagactctgggcttagagagacctgagtctgaactc

SEQ ID NO: 16722 - DNA, 201 bp, Bos taurus
ggggcctccggtggtagagtggagttctctctgcctgcaagagggggaatgtggccgagggtgccgggtttctggtcggatctgggtgggaagcggtctctccgcgccctcctgaaagccttgttgtcgtttgaaggtcggcagagtctgggctgaaaaggaaacaatttggggtttgaaaggatgtaattcattcttcct

SEQ ID NO: 16723 - DNA, 201 bp, Bos taurus
atgactctaccctccagacgccaccctccctgtgcagtcagcccacttcctgtcatttccttctgctggtcgaggtcctagctgcagcagctggccttgacggaggagaaggagccctcatccatctggagagagctctgctgctcgtgatcagtaatagccagcaccttctgtcacactctggccccatgcctgccttcc

SEQ ID NO: 16724 - DNA, 201 bp, Bos taurus
gaagcagcggcccaaggagcctccgtgaagaacagagtaagtcatctcacgcagaagaaagaccacaggcatagaagcgggggaacccaaaggacaaccaagcagagaataaggaaacatattattgatgctgagcagagatgagaaatgggaaaaacaggttacaaacataaatgttctggtattttatggagcatctta

SEQ ID NO: 16725 - DNA, 201 bp, Bos taurus
gtggtttcttacaaacctaagcatgatctcaccacacaacacagcaagtgcactccatggtatttacctgaaggagctggaaacatttccacacaaaaatacgcatgtggatatatacagcaatattattcataaatgccccaaactagaagcaaccaagatgcattttaataagtggatggaaaaacaaaattatggcac

SEQ ID NO: 16726 - DNA, 201 bp, Bos taurus
aaagatcagtgatgacagcaccatgggggccaggccgaagctcagcagagttccacagatgcatctggaacttacctcacatttttaactccacaaactctgagtcaataaagacacatgtaaccagtgagaggaattttgcaagaccccggtgtgcatgctttgcaggtgtgatgtttgtttcaggtgttttctgctagt

SEQ ID NO: 16727 - DNA, 201 bp, Bos taurus
gcaccgcccagtgcccgtggggaacacgtgtgcccctgccactgacgtcagctgttttccaccagcctctgcacggctggcaccgctgcaggccgtgtgtcgatagttatcaatgtcgtagaaaacaaaatggaagtaactgcacagatttaaatctccgagcagtccacaagccaaccgaaggcaggccccttccagaaa

SEQ ID NO: 16728 - DNA, 201 bp, Bos taurus
gtctggctctgtgtggccaggagcagaaccgagcttccctagtcagtagctgcaacaaggtcctgtcccaggaggcccagttccctggcaggtagtggccccctggccacgcctgatgtcaagggagaatgatgcaccctcttaaatggatggggctgaactgggagaccaaacccttgtcagtcaagcaccaacagggca

SEQ ID NO: 16729 - DNA, 201 bp, Bos taurus
ttttgtttcttattgtagtaacattgctatacaacttggtgtgtgttgtaggtgaatccgagaggcaaggagttgaggccaaggaagagacttttaatccgggagtcagcaagttgagaagatggcaggctagcacctcaaaataaccattcttaccagggcctggttgccaggttcttttaaggatcagagatgagggga

SEQ ID NO: 16730 - DNA, 201 bp, Bos taurus
tactaacctgccagccacgccgcccacacagcaaggcgggagggccagcttagaagctgagggcacaggccagcatcacgggcctgtcttcctgttcttgtcctctgtgaccctcttcatattgttctaggagcagcagtggtcattccattctccacggggcctaattgctcgaaaaatatttaattcatatctccagag

SEQ ID NO: 16731 - DNA, 201 bp, Bos taurus
tgagcaggccgctccccctgaggggaccttctggggtttgtaacccaccccccaagacagcatataaaatgtccatatatatacatgaaagtaccatgtggagggaagggccctgaatttcaccacctcctacagtgttcacgactctgcaacataaacgactctaaaacagcacccggtgaattaaagacatgaacactt

SEQ ID NO: 16732 - DNA, 201 bp, Bos taurus
gggcctctgttctacagacaacagggtccgatgggccggaatggatggtgcccaccttccccccattggctccagtccttcctacttgccggccaggcagtggcgcactgaggaaatagcactgggacatctgttcccactggaaagggttctaggtctcttcacaggccccatggggaggccttcctttccttcctgtta

SEQ ID NO: 16733 - DNA, 201 bp, Bos taurus
ctctaccataatgggccagtgcagaatgatcaacagaacaatctaccaggaaatgataaagattgttattttatccaaatcatgattctgactcaaaatatattttaagctgacagaattacctcaagaaatgaacattttatgggaaggaggtgggagggggtttcaggatggggaacagatgtacacccatggctgatt

SEQ ID NO: 16734 - DNA, 201 bp, Bos taurus
ggaggggtgaagttagctccccctgtgatcaccccgatccatagggagcagagccagcatttggagccaagggctcagatgctcacgcctgtgatgttgattgccctgtcatgacccggcgtgtatgacaacagtgttagatctcttggtggctaaaatagattatgaagctcagttcctaccacgaggtgctcacagtct

SEQ ID NO: 16735 - DNA, 201 bp, Bos taurus
taatgatgcttaggggaggacaaatgctaaaactaataataatttcataaactctatttcagttcatcatcattagaaaccaatgaggtagctgttatcatcccagtattactgatgaaggagtggatgctcaaagacatagagtgtatttctgtgatcacacagctggcggctctgggggttaggaagcaaatgcacatc

SEQ ID NO: 16736 - DNA, 201 bp, Bos taurus
gtgatggacatgattacctgggtgatcgtccgcggtaacatgtcgataagctggtaaagggtcagggcgacagccaccaggcgagtgagctgcaggccttgttggtggagctcctggccacatgtcacctgtcactgcaggatctgactcaaggaacatgggtgatgttattgctgggaaagtacaggctgggttcataac

SEQ ID NO: 16737 - DNA, 201 bp, Bos taurus
tgccatgtgaggataccgtcatcataacgtatcgtgaggattcagggctggggcggagtaccctgggccaaagtgagaagctggggcttagctatgtatggagccgaggcacccacaccagccacagatgcctgcaggatagtgggctgttagcgcagcccagtgcagtgagaaacggtgacttttcaaatatgcaatcta

SEQ ID NO: 16738 - DNA, 201 bp, Bos taurus
tttagaggcgagggctgggttctcaaggaactgtccaggagaagccccaaaggatgggtggaattcagccttggaaaaggacctggaggttggccaggacccacagcgaaaggagcaacgtgtttgagcgggtggaggaatcgagttcacgtgattgaaagtccagggtgcttgggtgggggtggggggttggaggaggca

SEQ ID NO: 16739 - DNA, 201 bp, Bos taurus
ccttccctgacctgcaccctgctttctgcatcctcaatgaggcaggcagtgagcctcaacttaataactttccactctcggcctgctggcttttcatctcaaaacaaaagtgatacatacaaataaataagcatcccaaacatgcaagcaaaccagtcgtgtccccttaaaatcaactgtctgggaggcccggtgcttcct

SEQ ID NO: 16740 - DNA, 201 bp, Bos taurus
tgacactgccagtaccagcgtccctgtggcaggaagagctctcataaacggctgctcagtatccatgtcctgagtgagtcctctcgcctctggcctctctcggagcctctgtgggatcagcaggtgggtctaatccagctgcccttcaagcgactgcttcttccctgggccctggaaccgggagattctgtgtgtgcccct

SEQ ID NO: 16741 - DNA, 201 bp, Bos taurus
aacatgtgtttagggctggccaaaatggcgttgcctgttaagttaggaactgttaacctttcttgattttttattttccaatccactcaagatggcccaggctattttgggttcattagtttgtgtaccatttcccctgcaggaagatgctttttgggttgaggaggaaggtggctgggaatgggccctggggagagaggc

SEQ ID NO: 16742 - DNA, 201 bp, Bos taurus
ctgtacacaagcttctctgattggctgatggtgagggaacagggtggtgtcacaggggttaaccttgtcagtccttaggccccaggagggaggtctggggatgtctactcatggatatcaagtagatgttgctgttcagtccctaagttgtgtccgactctgtggccccatggactgtagcacaccaggcttccccatcct

SEQ ID NO: 16743 - DNA, 201 bp, Bos taurus
cttcacagggcagtgaggtggaaggtttatatggtgggtccctgtgctctgaggggtgtgacttccaggatgaccagcagagcttgcattttcttcaggaagatgcctgagcgctgattgcctctgcgctctggccgcaggacttctcagacatcagtgctcttcctggaagggagacagctgtcctacgtgtgactgatg

SEQ ID NO: 16744 - DNA, 201 bp, Bos taurus
tcctcccttaatgcagtgtgaagtcttagataattgtgtgcagcgttcgttaatggctaatttaatggctggtgcttaggaggcccttactttgccaggtaatttataggagattttctccctccattttcaagcagccctgtgggacaggtttttatttccccctttaaaggtgaagagtccgaggtcagagaggctgga

SEQ ID NO: 16745 - DNA, 201 bp, Bos taurus
ttctgtcttcgattgtatgtccttcgtgaagcctcctctcatctctcatctcttggttcttcaattacttttaaagtcagcccaacattgaccatttgacaactttaaacagttaatgagctaaatgttttatcttaccaaccagactatgagcaattctgggcagagccaagtcttaactgtctctgtatctcctttatt

SEQ ID NO: 16746 - DNA, 201 bp, Bos taurus
tttggaccccaaagctctcttctcttctggtctctcgaggaaggcagtttgcctcctcagccctgtctgtggctgtgtaagcaggaccgctcaggccagttctggcgtgggacaccctccatgcgcaggcgatgcaaataattattacattggcagctcattgctttcagtcaaccagtattttaaagaggatggccattt

SEQ ID NO: 16747 - DNA, 201 bp, Bos taurus
tggttacaagaggactcattcagcttcagaggtgaccttggctctgggctctgcttctgtgaccttggcacaagggcccacacttgtgacctcgggcaggattccacatcaatctacagtttgtgaagggactgggcagcgagactaaaggcgcatgtggtcaacgtcttcaaaggccttgaaggttgaaggttggtttgg

SEQ ID NO: 16748 - DNA, 201 bp, Bos taurus
tgcttcagaaatgaaggcccatgggcctggtcccagagccattgaatgaaagtctccaaggacagccctgaagatatgctccgtgcgcaggtctccctgggaggccagggcccccaggagccggccagtctctgggcagctgtctgggagcctcccatctatgtccctaacactctcctcagttctgaatcacaggccgct

SEQ ID NO: 16749 - DNA, 201 bp, Bos taurus
tctcatcctgggagtgattacagaagcccgagcatgtggtctcaggtggccaggaccacctcgctggctgtcttaccccgtcatggagtccagcgtgccttaagggctgagaccagcggctggggcccactgataaaagccagggagagaggtggggaggacagccagacacacttgttacaaatgcagacactattacgg

SEQ ID NO: 16750 - DNA, 201 bp, Bos taurus
ttgatgcagacagcccacgtctgtcggtgaggcgtgggcttctgtgatgtgatattactgtttttcctctgggacatggacgtcaacagcctttaaagcacggtagcttccacagcatacttgaggtttactgacttgctttatgtaaactggcaaatcacactcctggccctatgcgcacaagaggatttctgtaaagac

SEQ ID NO: 16751 - DNA, 201 bp, Bos taurus
aagttggtgatggacagggagacctggcctgctgcagtccatggggtcacaaagagttggacacgattgagcgactgaactgaactgaataggaagccactgtgttagaggtggcctgaccttaagtcaaatcctggctgagacactggcctcagacacaagaatggctcagttttctcatctttgaaatgcaaacaatgc

SEQ ID NO: 16752 - DNA, 201 bp, Bos taurus
caggccaaatatgcattttcatctctgtcctgaatggggcagggagtcgctaagatggtttggagagcagtttgggatggcaaacgggacctccagccactcaaggccactggcagctgaagacggcagatgggctcaaaaggtgacttctgtggactcaggctcaatgatgatgctcctctgttatggactcagggagac

SEQ ID NO: 16753 - DNA, 201 bp, Bos taurus
gacagaggagcccagaggactataggccatggagtcgtaaagagccagactcgacttagcaactgagtccccatgcacatacggaggtaaggtccgacacgtctcacggccaaaaataccaaaacataaaacagaaacgatgctgtaacaaactcaataaaagactttaaaaatcgtccacatcaaaaaaaaaaaatctta

SEQ ID NO: 16754 - DNA, 201 bp, Bos taurus
catgttggggacatttgttattgcagcataacttagccaaagctgactaatacacattagtatccctcttaactaattttcattgaaataccccatcagactaactgatgctctctatttcctctgcaaaacataccaaaagtccaaagttcttagactaatacttagtatattagcacttttctgatcctacaagttagg

SEQ ID NO: 16755 - DNA, 201 bp, Bos taurus
cctgaaaacttaatatctgtcttccaagcaagaactcagggtcactatgtccaaaagacctgctccactttcctctggcttggctggacacatttctcccatatttctatacatcctgggctcctttccatcacagcactttctgtatttcattgtaatcatcagtttactgatttctctcctcaagtcagtggtgaacat

SEQ ID NO: 16756 - DNA, 201 bp, Bos taurus
ttccaggaaatcagtccaggttgtcctatgtgctggtctttgaagacaggtcccatgggctgatgaggggtcagtgcccttgtaagagaggccccagggatctccctcgccccttccacatgtgaggacacggcatctctgaatcagatggggagtctgctagaactttgctcttggcctccccagcctccacaccaggag

SEQ ID NO: 16757 - DNA, 201 bp, Bos taurus
aacgagaagaatgtcatgagatgggagggatatcggagggggctgagccctggattcagccaggtctggcatgtgctctgtagaaaaacaaaaccaaatggtgtaaagaggctagagtctgccaggaaggagggggaggaggtgactttggatgtctttctaatctcatcctttcacaggatttctgtctagcttggctgg

SEQ ID NO: 16758 - DNA, 201 bp, Bos taurus
atcgatcctcattctcttctgcctcagcgcagctcacttccacggcacttcctgtggttctgtgatgtcatttccttttgtagctattagttccctgccgtgctcgtggttcactcaacccaggcctgtctggtaacagatgtgatttccagctgtgtctatgtaccaaccacagtgggttcattaataacaattattaag

SEQ ID NO: 16759 - DNA, 201 bp, Bos taurus
actcagggtttttttaccatgttcgattagtttcccatttaagttttttcagagtaggcatcatttagagcccagcagtccttgtgaatatgaagtgtccatgaccaattgttttaagattgcaatttcaaaaagagccacagggaggcacaattttttcatgtcttactgttgttaacggggtaatcagagtttgggggt

SEQ ID NO: 16760 - DNA, 201 bp, Bos taurus
tgcctaaaggcctcataggcccacaggatctgagcacctgtctagaggcctcatagttaaacataagctgagcatctactagaggcctgatagttatgcacatgctgaacatctgcctagaagcctcattggctcacaggatctgagagtctgcctagaggcctcagaggagctgagcttctgcctagagaactcatagtt

SEQ ID NO: 16761 - DNA, 201 bp, Bos taurus
cccttgttgcttgaaaaataacccatctttcaagtccagatatcccccttttactctaagtatgttgaagtggcaactggtaactggccctctgttgatgacatctgtaagctttcatcttccttcaccatggctcaacctgctcaaattcttttaacgtaagttctctgtgcccaaagcactgtgaggccaaacaaactg

SEQ ID NO: 16762 - DNA, 201 bp, Bos taurus
aggaccactgggtaaaactcatgaactggcagcacagcaccatgtacctgttcttcgcagtctcaggcatcatggacatgctgacctatctcatcacccacgtccccctggggctggacagactggttatggctctggctgccttcaatgaaggtaacaaggtggtatggatggagatttaaagggactggagcacaacag

SEQ ID NO: 16763 - DNA, 201 bp, Bos taurus
catttgcttattcttattatttttgttctccttgtagggtggccagatactgcagaccttgagcatgtgacaggcacgtggtttcttcaataaaccttggagcttccgcagttctcctggggcccacagactgcatagtcctaaagagtcaaatattaagctttctcggcagccacaccttcctttgatgtttgggttatt

SEQ ID NO: 16764 - DNA, 201 bp, Bos taurus
tctcatttcttgtcatactccccaaacatacccctaccaagcagttcctccttaacacttctctctcagtgctatgctttcatatatttaacttcctctacctgcctaccctttttgcttagataacacaccagtcattttatgagatgtagccaagaagttaacctcctcctcctgaaagccttccttgattcatcagtg

SEQ ID NO: 16765 - DNA, 201 bp, Bos taurus
ggagatcacatggttcaggcaggaacatgccttcaagcaagtgacactcataatccagggaccatgtgcatgaacaaaggtgtgaaggcaagaaatcaaatagtgtatttggagaccatgtgcaacgggattttgaaaacatctcaatcgcaatttgggcggaggttccaaacaacagatactaccatttcaaagtgaggt

SEQ ID NO: 16766 - DNA, 201 bp, Bos taurus
taggtgaggatggggatagctcagtaggcctgggaagcagagaatgacacatggaggtatattttggaccctctgctaatcatgactcttgacactggacatttggacaaaggccccctctgtccctaattctgatctggcctctgctctccacttgctgtaattctgggtgtctttgggggagtccacttgaagacactg

SEQ ID NO: 16767 - DNA, 201 bp, Bos taurus
ccagtgacgcatgagagagattcaggtgggcaaccgacttcaggggccatgttaataccagtgcaggtggtctcaccagtggtgaactgagccctcgctcatgtgatactcttcagactaaaggccatgctgccctgggtgtccaatggattctgactccattctttacttcaaagtggcctggctggcggggagtcatca

SEQ ID NO: 16768 - DNA, 201 bp, Bos taurus
tgtgatcggattgcttacagactcctcacttcctttaggagaacaggccccaggaaagctgtaggtcagaggtttggctccagggactgtgccctccagtcacacctgcctcaccctgggggcccagctccataaccaagcagaccttggttttggaacttggcctcctttggcaggaccctgggtgaattccctcacttc

SEQ ID NO: 16769 - DNA, 201 bp, Bos taurus
tcacactcggggttgtcggccccagcacgcccactcccggagccccatgctgccttcctgtcctcgatgccagagcagctggagcgtttccgcttgctgagtggcccttgcttttccctgccctttaggactcaccccagcagctgtttgcctccttccctggggcccttgctagggtgttaagcccattaatcaaacaga

SEQ ID NO: 16770 - DNA, 201 bp, Bos taurus
ttactgtaaagggtaaaacttggaaatagctgataaaaagaaagggaggcacagggcagggtggggaggagcttccacaccagcatggccaccttgaccagccctgaggctccacactgctcttttccccttccttgtccccatggagctttcgcaccactgaccactccctcctggagcacattatttccttctgtgact

SEQ ID NO: 16771 - DNA, 201 bp, Bos taurus
tgccatctttgatgtttgcattatgctgtgggcccacgctggaaccaagcctagaaagcaaggcttcataacagcttaggaggcaggagaccagagacacgggatggaacaagatctcaggcccagggaacacagcatgctccctggtgacagaaggcccctcagagtggcacacagccttgggaaaggtggtaatgctaa

SEQ ID NO: 16772 - DNA, 201 bp, Bos taurus
aaaaaatcaatcaatatattaatagtatactgcattaatagaataaaagaaacaatcactgaagagtgatagaaggaaatattaatagattgtaatggcttatagtcttatctccttacctctaaattctttcaaaataaaaatcaatcattaatccctccaaaaaactgcatattaataaggcaacctaaaactctgcct

SEQ ID NO: 16773 - DNA, 201 bp, Bos taurus
ataatctagatgctgggctgaagccagccaagtgaggggacagagactggctcatcaggtagaggaaacagcaagtgcagaggccctgaggtggcttgtttaaagacaaaatagaaggtgggcatggctggaaggtaataagcagaggaaggagggagatgagatgaagctgaagtggtagccagggccagctcttggctc

SEQ ID NO: 16774 - DNA, 201 bp, Bos taurus
gggatagaacccaggtctccggcattgcgagcatcatcagttggcatatctgatgccaagatgactggagacagctttgagagggagatggtggtgggaacacccttctttgttacaaaacctagggacccagcggcagtcctttgcctctcgtgatcccatccgatagaacagtggtccccaatccttttttccacagac

SEQ ID NO: 16775 - DNA, 201 bp, Bos taurus
cagcttgtctctgctggtcaggaagctcaggccccatctgaggggcgaggagactcctcattcgggcacagaaccctgcatggggtgtgagtgacacaactgaacaccaaggccctcagtgttttacttcttcattaagcaagatgaaaagacgaaacaattagaaagcaagtctgtggaggcactttacctacatgattg

SEQ ID NO: 16776 - DNA, 201 bp, Bos taurus
aagctgcctcaaccctcaggctttagccaaagaaatgactccctaaaagtagacagccccattcccactgggaattggcaccgagagaggtaagaggtcaagggtgaaaggtgagggcagaacaaagggtctcctgcctcctcgtcaccaagtgagccaagcgtcttcaccatgtcctcctgaggccatcctgcctattgc

SEQ ID NO: 16777 - DNA, 201 bp, Bos taurus
gagacgcactaacgcaaggccagaacacaggctggacacacaaggaggcccccaaataaagttagtctgaggagtgggaaagccagggccagcctgagacaccgattccagacagacctgccctgactcctccacgtgtgtgtcctgcagagaagctacgcagatgagctaacagggggccccctggagaactggagggga

SEQ ID NO: 16778 - DNA, 201 bp, Bos taurus
tttcttctattacctgagtctccctgcatctctcacccctactgtcctgagcttaggtctctacctagggtctccaggtagaaagaagtgatacttctactcccaaggtgccagtccatggcagctcacaaccaaatggtttgtaactccggccctggaggaagctcagagaggctgaacactctgtgccccctggcccac

SEQ ID NO: 16779 - DNA, 201 bp, Bos taurus
tcgtggagtcttatcacagccgatgccaaggtcaatggggatgaaagtgtgaggggctgtggtgtgacaccaatatggcccaacatagagactgagcctggcttgtcttgatggagcacttgatcaaaaattacacccagccctgttcttgctcttaagaaatgtgtgtacgtttctctttggagtaacgaagactgaaat

SEQ ID NO: 16780 - DNA, 201 bp, Bos taurus
tagaagctgagtcacctggccgggctccacccacccaggcttctgaagagaccctggacctcctgagacctgagtgctcagatataccctcagaggacagtatgctgaagggttttggccttctgcttgtccaacttgtcatttttcagaaaaatcaaggactgaaagcactaagagtgtggcttctggtcacccatattg

SEQ ID NO: 16781 - DNA, 201 bp, Bos taurus
acccaggagggaaagaagaaacactgggaaaagaatagtgcctaccgagggtcagaccttcttgagccttccggttaaacttggaggccacttccttcctgctggagttcctgctccagatgtggaggggagagagctgtactcactgctgatgagtcacagggagagggacagcttcccccagaggccctttgattccac

SEQ ID NO: 16782 - DNA, 201 bp, Bos taurus
gacaaaagtagtctttatcttaagagagctatcagtctaattctcagaaagtcatggtccccggaggcaggagatatgattataggactaggtggccatattgaaccatgggcaacacagaccttaccactaggagcagcctttcctccacttcacccatgctggaaagcaggccagttggccatgttttcaggagaatcg

SEQ ID NO: 16783 - DNA, 201 bp, Bos taurus
gccaacacacacctcgcaggactgctgctaccagtgcccctgtgcacgaggcaggccactgctgacacaagttgccacaggagaccctcaaaactcaagattctggctcagtctcttgggggtcactgctccttcccccgggtcctgatgcatgcaaggatttgtttgtatcttccaagagtctctgtttcacccaatcct

SEQ ID NO: 16784 - DNA, 201 bp, Bos taurus
accagagccatagactcggaggcacacacaggctggacacaagccatggccctcggaatggaccagccaccagcagccacggttggctacaacaggcagataggacatgcatggagtatgccaggccctggagagaagacaccaggacccaacagcagggtgtgtgaacacacacacacacacaaacacacataaacacac

SEQ ID NO: 16785 - DNA, 201 bp, Bos taurus
ggcaccctgggctcaccctcaacttattctcatgtgttactcttgactcgtcatcacaaaaccagaactaccccaagagcaagacctggctcccgaaacatggcccttaccctggcattcaaggctcttggatgttgggtttcctcacctgctataaccccttgctgccttcgcccagtggctctgagcccccatcacctg

SEQ ID NO: 16786 - DNA, 201 bp, Bos taurus
ttgcagccaggcaaccctggcgcttctcagggctggcagtgacccgccggccctctggcatccaaccctgttcccaccccagcactctccgaggtggcccgtccctcttggttcctctcctagtttggtttccttccctttggcgcctcttccatccggctgcctttttttcttttttcttttttttcatccaccttttcc

SEQ ID NO: 16787 - DNA, 201 bp, Bos taurus
ggcctcctgtatccgtcctgagaacattgtgaatttttccctgatttgtaagaatgcctggactgtcactcgcactgtgaccttttggacgaggttgtacagaagacactacacactggaggcctctctgcctttgcacctgcgacctgagtcaacagagaagctgcatgcactgtcttcaggcatgtgtgatccgatctc

SEQ ID NO: 16788 - DNA, 201 bp, Bos taurus
ttctccctgctcttgaggtccgcactgcagggctgggtcccagccagcaggtgggacggctccctgagcctgcaggctggccccaccgcctcggacagccgccaatcctctgcccttctgtggggtgatgatgtgctggattccctgggtctccctcccaccgccgggtcggtactgggggcgccctcgcaggccccactt

SEQ ID NO: 16789 - DNA, 201 bp, Bos taurus
gtgataaattcaataaagacttcaaaaacggtccacatcaagaaaaatctttagaaaactaataatatttggccaagtataatggtgctttttatgacctcatcacatagtgtttataaaaaacaacgcgagggcttccctggtggctcagtggtaatgaatccacctgcccgtgcaggagacatgagttcgatccctgat

SEQ ID NO: 16790 - DNA, 201 bp, Bos taurus
ctgccccaagaaagatgtgggagttgctgccccctggtggaggctcacagcgagaactcctcttttttcctgtctggcccctcccagggctcctctccatgagtcacacttggttcctgactcacccaagtcgctgcccacacccccacccccatcacacaggcctcttcgggttacacacactataatatgacagcaatg

SEQ ID NO: 16791 - DNA, 201 bp, Bos taurus
tgcgggaaggagaaaaagaaaaaaaggatcagagcatctcagctgggggtggggggtgtcatcaacttcaaaagcagaggtgagcagggggcctctggtccagcctccccagcccagaccttacctgttgaatgtatcggtctgtggttttccacatgtaataaaactgaactatgctggccagtgacttccagggtagct

SEQ ID NO: 16792 - DNA, 201 bp, Bos taurus
ttttaagggtctgtggttcaggccagaactagaatccagacaccaacagtaattaatggtttctctctttattgtttctccttttatcaaaacctgtcacagctgggggccaaaaggaagtaaaaaaaaaaattcccacaaatatcccccccacttgtccccagtgagttctcccccacccgctacccagggccttgggcc

SEQ ID NO: 16793 - DNA, 201 bp, Bos taurus
cttccaccccagcgcccaacacgccccggcccactccccaaagaagaaccatgaaggggagaggaaggggtcctttgagacctgcaaagagaggcgctgtcggggccagatgcccccccacacccactgcatgtagctgaagagcacaatgacgctgaggaaggtgaagttgctggcgacaccaacgaaggcgcaggtcat

SEQ ID NO: 16794 - DNA, 201 bp, Bos taurus
tatggtaatcttgccctgcctcactcaggggcgtgtaagtcaatagtgagtcaaaacaggagtagcctccattgtgggccaggtggtgtgcaaagtctcgaaatgactctgaaatgagtgcttttatctccgtgctgaagcttggagaagttgagtctcctggccacagtcatgtgtccaacaagtgttcaaagcccagaa

SEQ ID NO: 16795 - DNA, 201 bp, Bos taurus
tggcctcccatttcccctctaacctcagctggtactactcttctcctcacttgtcgccagatgcagtggcttctttgctatccttcaactcaacagacatgttcttgcctgaaggcctttacataggttctgccctctgcctggtactcttctccatatatccatacagcaaactccctcaccttccccccatcttggaag

SEQ ID NO: 16796 - DNA, 201 bp, Bos taurus
ctggtgaggagatgctggagacagaaaaatgagccattacttttagtactcgagaactacattaaaaaaccctggagcatttcgggcccacttctcagtagtaagatgacatcactttttagttcaggcatatgcttgtcattttacattcatcatggagtggccagtgcaatttcaaccaccaagtcccatcccgatact

SEQ ID NO: 16797 - DNA, 201 bp, Bos taurus
ggcggcccagcctgtcaggggaggggaggcctgcagcaggggttttgaggaccagcaagggccaggccaaactgggagaggcgctggcctgggaccgtgatgtatcatgaggctgatgctgtatatcctcagtccagccccagttaggcgtgccaaccacccaccgtggccctcccgaattcagccaaggagtccccagtc

SEQ ID NO: 16798 - DNA, 201 bp, Bos taurus
caggtttgcctctttattggcttctgagtgacaagcggctgaaccccacttccagttatgttatcgagtccaaacttgccctgctggccgcacaataaatgagtgagtctgagatgaggtgttggactgggaagggactttattcgggagccggctgacagagaaggtggcaggctagtgcttcagaataaccatcttgtc

SEQ ID NO: 16799 - DNA, 201 bp, Bos taurus
gtggagtgccatcgccttctccgtactggcagtcaaaaagggactgcattcctaggcgtcgagtccaagatcttcacaagatcaatgaggccattatatccgtacaccccatggtcactaatccctacacccttctctctcatatttccctgacacactctatttcacaatattaggcctcaaagatgctttctttactat

SEQ ID NO: 16800 - DNA, 201 bp, Bos taurus
gattcaaacttaaagccagagaagtgtcatcgcttcctccacccccagtggcagctccttcacctgaataggaccttcgccaacatgactggcctggacacggagccctgtatggacggctgggtgtatgaccacagcttgttctcctccaccatcgtgactgaggtaaggccccattttcctcttctgagtacttggtgt

SEQ ID NO: 16801 - DNA, 201 bp, Bos taurus
ccactccagtattcttgcctacagaattccatgggcagaggagcctgacgggctacagaccacagggtcacaaagagttggatgtgactggggacaataatgagcaataatgctgaaaatgttgctttttctctttcatcttcaatattaaaatggctacacaaaaatccaccaactttgataagtttttaaaatgcacac

SEQ ID NO: 16802 - DNA, 201 bp, Bos taurus
tgggggccaccagcctgggccagcaagtcctggagcagctacgggagctgcgaatcagtggtagcgtccagctctactgtgtccactactgaggagggagccagagggcccagccagagaagaggacctgcctataccaagggccccaccagctgatcccactctcctccccttgttaaaaatgtccccacgatgtcaggc

SEQ ID NO: 16803 - DNA, 201 bp, Bos taurus
acctgaagcatggatttggggtgaggcagatcttctccttggtaaattttaatatatgccttagaatataaacagaaaacaattatgaaaaacgccactcgtcatatttaactgcagcttacctttcagaaacagtgaccgtacaattgcattttcctagagacctagatccacacccaggaattagcaaaaacacagcac

SEQ ID NO: 16804 - DNA, 201 bp, Bos taurus
aaaacaaaatgagatttttgttaagagaaactttttaagtgaggttgtaccatttttttttcccctgtaaaggttttattatgcacagaataaggagaggtctcagtcctttgcagccacttccctctggtcacttcttccagcaagggtaccactaacttgctttgcttggttaggttccctgctggcatctgtgggtca

SEQ ID NO: 16805 - DNA, 201 bp, Bos taurus
aagtcacgtcaggctcagcttttgcctgtagatgaactgagaccaggcgcgcctcatcgtcaggctgcccaggcagcgggtggcgctgggcctggcgctcactccacacgcctcctttcctcttgtaggttgaacgtctccatcgagtgtaagcgagtgtccggcctggagccagccactgtggactgggccttcgacctg

SEQ ID NO: 16806 - DNA, 201 bp, Bos taurus
cagtcctcctgggccagggtcccaccagcccatgcccttggggagccccgcagcacccaggggctcaactcagcaagtgtgtgctgaatgaacgagtgatctttctgaacctcacggccaatagtgcctctgctgtagccaccctccctgcaccctgccctttccgagacaaaggccagactctccagacttgtccaaagc

SEQ ID NO: 16807 - DNA, 201 bp, Bos taurus
agggaagcccatgaatcccgagaggggggccgcaaacagggaggagctaggcgagacactggggcacggggcgagttctgaacagggtgaagtctgggggttctaggccagggaggactccggagtgtgacaaggaacaaggctgggggcctgctcttctgtccggtgtttgggattccatcctggaggtggagagccaca

SEQ ID NO: 16808 - DNA, 201 bp, Bos taurus
ctaggcccttcagcaggcaactcccatcttcctgacttcacacgtaaaacactcaaagaccaggctaaactccaaactcctgggtatgacattccaactcttgaaaagcctggcctctgccgctccgccatccttccatgggtctgctatttcttctactggaaatgacagcactctacctcatgtcttcaagtcccaggt

SEQ ID NO: 16809 - DNA, 201 bp, Bos taurus
ttgtcctcactgactttgggcttagcaaggagttcctgacagaggaggtgagtgaaggatggtctcagcctcctgaaccccgctacacaggccttcccatcccggctccagctccacgcctggctctgcagtagctctgccttcaggaagttcccactgctccgactcgcacaagtccagcgagtcttactctgggccgtg

SEQ ID NO: 16810 - DNA, 201 bp, Bos taurus
tttttcatgtcattacaatacagctgagtagtggtgatggagaacctctggcccacaaagcctgaaatatttataacttcgtagaaaaagtctgctaacccctggtccagcggaatgaccagagctttggaaagaactggaagatgggtgatgaagaggtgagagagagggacttccctggtggtccagtggttaagaatc

SEQ ID NO: 16811 - DNA, 201 bp, Bos taurus
caggggtgcccactcctccctggggcacggaactgactctggatgccccccaggggtgcccgctcctccttggggcaggggcctgactctggatgccccctacagcttcttcctcaccgtctcatactacgggatagtcctcgacctgcagaacctggggagcaacatcttcctccctcaggtcctctttggagccgtgga

SEQ ID NO: 16812 - DNA, 201 bp, Bos taurus
gtggatgtcagcacaagcccgcgtcttcagtggtgactctgaactccctgggctacaccttcggccgggtcctcctggctgcggtggcctatggcgtgctgcagcagctggctgtctccgttccctgcttcctctgctttgtgtactcctggtgggtgccgcccagctccctccctgcaggagacccaccctccaccctgg

SEQ ID NO: 16813 - DNA, 201 bp, Bos taurus
acagccagggcctccattagctcacataaaaggtggttcccctcctccagacacatgcaaggctggggaacgcagtgcagaatggatttcagccctcagcggggggccctccagggaaacacacacacagctgcacctggctgcgccttgcagtgactgtgctgaccgctactggccatccacgacttctcacctcagcaa

SEQ ID NO: 16814 - DNA, 201 bp, Bos taurus
gctgcggccatccaggtgagcggagccctggctcatctgtctagtggagataagagtggtacctgcctctcaggttgctgagtgaaggcaccgcagctcctccctggcccccttccccactcccccaccccaccccattcaccaggccaggccctggggagacaaacaagaagcagccagcacagccttgctctagaggtt

SEQ ID NO: 16815 - DNA, 201 bp, Bos taurus
ctgctaatgcattgggtcccctggtctggtggagggagtgcccccattttaagcccttgtctttgcaggtccccctgcaccattttaccctggattttctaggcctgcttcaagcccagaacctgcttgatgggcctggcacagtcccctcccctgcccacagtgctccgctctaactctccccatttctgtatctgcagt

SEQ ID NO: 16816 - DNA, 201 bp, Bos taurus
tgggccagggaaggacaggccccagggatagaggctgggcaggtcagtggccgccagcccctggcagtgcccttttcctgcagctcctcggagtggaacggcgtggacccttacatgcgggagcagctccgggtcaagatggaggatggggagttctggtgagcagccccctcctcagtctgagtgggcaccccagctccc

SEQ ID NO: 16817 - DNA, 201 bp, Bos taurus
cgtgccctgcccccaccctgggtgcacgacggggacccgggtgtcctgtgtcttggtctctagccagcaaggcagagcccctcctggcaggagccatacacatccctcacttgccaagcactttacagtttgcaaaggactttgcgatcgatagtaatggcgcagggcccctgggttcttgctctctgcagggtctgtgct

SEQ ID NO: 16818 - DNA, 201 bp, Bos taurus
gcccccagccctctcacccgctggcccaggggcctgcccagcttcctttagccctgctcagccaccctttaggctcaggctctgtatcaaggaaggtcaggggagagctgctgaaggaataaaagcccctcatcgctttgtgtctgggaccccaagtgtatactaaccaggaagctgggggttcttgcgggtggaggtcct

SEQ ID NO: 16819 - DNA, 201 bp, Bos taurus
caggaccaagcctcagaggtgctgcaggtccccggtgggctgagcctcgaggaattttcccgctttgtggatctggagagtgaggagcctgtgtctggagcgtgcaaagaggaggtgggccctgcagacgaggcgggaggcggagaggacggcttcgagcccctgcccaccaaggctgatgccctccaggctctgggcacc

SEQ ID NO: 16820 - DNA, 201 bp, Bos taurus
aaactgagttccagtctcagctgccccggccagcaaggtgatctggtcaggcatgtgctttttgaggctctcttgtcccatgtcatctgggaggcttggggggccatcaaagaggctttccaggtattggtgttgtctacaaaaataatcaacaacaatctgcaataagaattgaaaagagttttatttgagtcaaactga

SEQ ID NO: 16821 - DNA, 201 bp, Bos taurus
ggccctacattcctcacctctgtgcgcagatgatggagctaggctctttgagttcataccctggctccaactattgcttatttaaaatattgatctatctatttggctgggccaggtctcagttgtatcttgcaggatcttccatcttcattgtggcatgccagatctttagttgtggcatgtgggatatcgttccttgac

SEQ ID NO: 16822 - DNA, 201 bp, Bos taurus
gggccagacctctctcttcctctgtgtcctcaggtggtggtgcccggctggggctctcgggcagctgctggggcttgggtggcccatcggggtgcaggaaaagggaaaagtcactttcgccctgaatggtgagcgtctggtgggaggtgaggatgtggtaccccttcccagctgggcagatctccttgaaggcagctgtgg

SEQ ID NO: 16823 - DNA, 201 bp, Bos taurus
ggagtccctctagtcagtttggcagaaccaacctggtgtcaggccctgagtcaggtacactgctgcccaagagcctgctggtagttggacagagtgactcaaggcccagggccctccaaggaagcaggaggcagcaagtgtccaaaaatggaaggtccagggagtctctgtaggaggaagatggggccacgaggaggccat

SEQ ID NO: 16824 - DNA, 201 bp, Bos taurus
tttttcaccttccaggtgaaaaccatccaagtcttggtttcctcagttggcaaatggggattacagtgcccctcctaagggggccactgttaggtggacatggaagcctgcggaagggctgtgagctgtagagtgtgctgcttgagttgtcttctgtaacctggtatctttcacgggccctgggcaggactcccaggacag

SEQ ID NO: 16825 - DNA, 201 bp, Bos taurus
tgaagcatttaccaaaatccattatgtgtttacccagaaaacaagtatcaacaaactttaaaagcctgaaataatatagactgtgatctctgatctaggagactcatcaaggaatcaaaacaaaaagataactacattccaaaatatttggaaattaaacaacatacttctaaataataagtcaaagaagaaattataatg

SEQ ID NO: 16826 - DNA, 201 bp, Bos taurus
gttccagggtcaaacctgggaagaggacaggcggcgccagacggagcatggcgacactgtcctccggctccgtcgtcatctgtgtgacctcaggcggccactgaacctctctgggctttagttctgccatttgtttgaccaaaacatctttgcttcataggaagtcttgcgatgattaagtgaactcatttcattcactca

SEQ ID NO: 16827 - DNA, 201 bp, Bos taurus
tgcacgggggaaaagcagagagttagcccagtgccttctgagaagacctgcaaacaaggagccccattaagaggaccatgtggccaagcagtcagggctcagtgagccagacaggagagaactgcaggaaaactggccaaacactacctccctatacccatctcagaaattcgttagaactgctgattttaataggattct

SEQ ID NO: 16828 - DNA, 201 bp, Bos taurus
cctcggcctcgtggtcccccaccgccccctggagatgaaaacagagaggtgagattgcagggttcttcctgggaacaggagagtgttttagaaggggactatttctggatttttagagaaggactcgagagaagatgggagaacttctgggggtggggttggttggtggaggggatccatgtttacttaaaacacaggtag

SEQ ID NO: 16829 - DNA, 201 bp, Bos taurus
ttctgtccccacgtctttgtgtctgatgtttctggtcccagacaggtgacctgctgatgcgttaagctgaacttatcttcaacagcttttacgattgtgtggtagaggctttttaaaaaggttttaaatctctttctcttttttctttccctactatcctttctttttatctttctagtccagttttccttgtccatttgt

SEQ ID NO: 16830 - DNA, 201 bp, Bos taurus
tcggggtcagcaaagtgggtggaaatgactaaaatgctctccataggcgtgtatggatttgagggcacagagaagtgcccacttcccccgcagcctttcccacactgttacaggggtgtgcgtgtgtgtctttctgtctatttctctttttaggggattaggttatttactaatctgataggtagaagatggcagttgttc

SEQ ID NO: 16831 - DNA, 201 bp, Bos taurus
tacgggtaggtagtggtcagcacccggcagctgaggccccagcctcgggcctgcatgagtacctgccaagctgctcaagcctgtctgttcatccggcaacacttccggtcttgtcttcatcccaggcctggctggacccgggggaaacgtgagggaaagctgggtgctgcctatgagcggccggcggcaaacacagtgact

SEQ ID NO: 16832 - DNA, 201 bp, Bos taurus
ggagccaggactctgagtgggtgtctcacccaagagcctgcctcctggcctccaccctctcctgcctctctgagcttcaggctccctcccactcacctgcatttccacagcaaatttattggccttttgcccacagacccctctgctcaagactgagccatttcatctcagtcctgccctgggagtcaaacttcctggtca

SEQ ID NO: 16833 - DNA, 201 bp, Bos taurus
agctgatcatctgggctttgaaccaataagtttactttggccatacgtgcccagatcacacagctgttttcattcccaagtcttctgttatataaagactacttcccttgcggtggacaccagctggcaggacaaaggcagccctgcctagagagaaagtaaaaagccagttatgagaggagaactactttgtgacataga

SEQ ID NO: 16834 - DNA, 201 bp, Bos taurus
atccagtaaagtctgagacataaagttaagtgttcctcagtgccctcggaaactctgaaggaagtagcaagaagtggagcttctgaatgtctggggaaatgttcacaagcctccctttcagggctcctgacttgtttctgtgttatccttcttttgtgggccagtgttttttcttaagactttactctctaggcattccag

SEQ ID NO: 16835 - DNA, 201 bp, Bos taurus
catgtgtgtttcaacatacccagaaccccttctgccaggaattagggcgtgtacctaattcttgtgtacctcgggcgtgtacacagtgccgggtttggccagcaggttctcagacaccttttgaaagaatatgccctcctgcagcaaggcacaggggttagggagcaagtgcggaacagaatggcctgcactgaacagttt

SEQ ID NO: 16836 - DNA, 201 bp, Bos taurus
ccgccccctccagtggatccctgcaccctccgacccggggggacgggagggggggggtgggagttggatgggggaggctggggagaccgggcctgctaacggagtcagcctttctttccactgtggcagcatcaagccaactcttgctttgtggttttgggagctgacgtcatgtcctttggccactcacttttttttttt

SEQ ID NO: 16837 - DNA, 201 bp, Bos taurus
ttcagttctggtagagaggaagaggcagtgatgtcatgtttcattcactgcctccagtagagtttgtctttgtagcctctcagggagtccactgttgagatctctgggtgtcctggattgtgcccaggctgtgggtggagcttcagctgttggtgcagacaggctctgcctttcactctctgctgtttgcatttgttgcag

SEQ ID NO: 16838 - DNA, 201 bp, Bos taurus
ctgtgagccttgggggtgtcccgtgtccccaggtgcccagacttcctttcccagccctacccttgcagcagaagggccagcctggctttttagaaagagccttttatttggaatgagaatatagagcccagtcctcctgcttcctcagaggagggagcaggagggctggcggggggtgggagaggtggcccctcacaatat

SEQ ID NO: 16839 - DNA, 201 bp, Bos taurus
gcaggatcctggttccctgaccagggatcgaacctgagccccagcagtgaaactgtcagctcctaaccactgaacggccagggagttccttcagtgactccggctccctgaactcgctgtgccttaccctgctgcattttgatgtctgatccatagcacttcgctccacctcacagagcgtgttttgtgtgaggcccgtct

SEQ ID NO: 16840 - DNA, 201 bp, Bos taurus
acagaagggtgcagctgtggctgcccaaggcccaggtgatcagcttctgttcgaagtcagaatagggtgggtagcggatgttgttcagcatctccaggcccgggtgggagagcaggcaggcacggtggtgggagaaggtgtcgaaggagaacttgccgtggtatcttcccatcccactttggcctgcacgggcacggaagt

SEQ ID NO: 16841 - DNA, 201 bp, Bos taurus
tctagactttggtcacatgtgattaaaatgatggcatgctggtgccctcagtgaatcaggacagtgtctccgagatacagagcaagcagcatatgtagtcataagttttctaatggcctcatgaaacggcaacaggtaaagttaattttaatgtattttaacccagtaatacaaaataatatcatttcagcatgtcataca

SEQ ID NO: 16842 - DNA, 201 bp, Bos taurus
ggcagttgcagagatggcagaaaggaacgtgagacgggccacttcactttgctgtgaactgccagatagtaagtgctcaggcccccgtggtctctgtcacatagtctcttcattagcagccctgttgtctttaacaaccctttaaaggtgtcagagcccttcttagcttgcagcctgtgggccgggtttggtctgtgagcc

SEQ ID NO: 16843 - DNA, 201 bp, Bos taurus
taaatcttttgtcttctcacctgtgaggccatgagcagagttcaggagactcagcagagaggctggctcacctgcccacagctcttggttccagaacgtgaacagagaggccagatatccttccatccccgtctgcacacacccagacctggatgaccggcaggcatgcattgcgagtccccggcatgggcagacccagct

SEQ ID NO: 16844 - DNA, 201 bp, Bos taurus
ttggccagtcctgcttttttccctctgtagaaccatagctgctttgtcaggggccgaaagatgaaaggaagcattagggccaagggctgcccccatgtcacgcagagaagctggtgcatcagcccaggggctgcttctgtcaattcaggggcatcccagccttggcctttgtaagctgtgtgactctcagcaggttataaa

SEQ ID NO: 16845 - DNA, 201 bp, Bos taurus
ctggtgttttgtccactgctctgtccccttcacctacagccaggcttggcacattcgagatgctccataaggagtctctgaaccaatgtgggaaggcccctgcggggcaggtcacgctgttgcctgcacttagtgcgtggagatgctgcctgtcttggaaacggacggcctgccggccacgttcctgttcttgtgtgaatc

SEQ ID NO: 16846 - DNA, 201 bp, Bos taurus
ggaggtaccagaatagaacccaggtctgcccgcgcccaagtctatagccccttggcccctcaaagatcctgccctgaccacggctgcccagggccccaggagttggggcatctgacgtctgatcacacccttactccataacccccgactggactggggcgacctcagagcccttgtgagatccataagtgcttgggtaat

SEQ ID NO: 16847 - DNA, 201 bp, Bos taurus
agctccggccctcttctgccaagcaaaccccacaagcctggagccagcctgcagccagagcccacttgcctcctgagcaggggcgatggttttcagcaacattcttccagcagggccaccctcctgcagctgtggggttgagcgccacaggagtttttgggttccaagctgcatcggaacccagaccacactccccacact

SEQ ID NO: 16848 - DNA, 201 bp, Bos taurus
gaggtagaaatcagaggaaggtatctacaagccaaggattgttggcaacactggaggccagagaaacaaggaaggaccctctcctggggcctcagagtgggacgagaccctgtgacaccttgagctcaacctctgttcttcaaaactgtgagagaatccacttctgaccgttgaagccacctggttaggggccagaggact

SEQ ID NO: 16849 - DNA, 201 bp, Bos taurus
caggttgggcctgaaactggccccccaggtgaagatggaggggacgctacctgcggggctgcccacagtcacctcaattcctgctgtggtctcagattccggctgggaaagcccggcccagccccaggctccagcatgtgactctgagtctccaggactgggttcggcttgcacacaaatccaggtgtgtggaggccaccc

SEQ ID NO: 16850 - DNA, 201 bp, Bos taurus
tcagaaagaaccacggaaagaaacttggaaaatttatcaaagaaccaaacgcctcccccggagctctggccaacaggctctgggcccgtgggatttgagggaaagaagttccaggaaaggcaattcgcggagtggagacagtacccagagaagagtggcccagtcccccgccaatcccgatccacagccaagggccacccg

SEQ ID NO: 16851 - DNA, 201 bp, Bos taurus
cgggacagagcgtgcggaggaggggtggccgtgcccttgagccaggagaccgctgcacgctccggggacctgggcacctctccagctccgacggcgcggctgctggcggccggagaccttatatagcgcgtctgcccgcgatgcgaagcccttatcgggattgcatcagccctccgcccctcgcacacacccactcacacc

SEQ ID NO: 16852 - DNA, 201 bp, Bos taurus
tggaagagggtgaatatggggtcatagtggtggttgtgaaccagggctgtaactgcatgtggaagggaagaggtgattacaggagaagcagcaaggtcagaatgaggccaccgatgagattcagaaagtgcgggggagggagccagctcactgggtgactcattcattcactcgtcagtcggttgctgagcacctggtgtc

SEQ ID NO: 16853 - DNA, 201 bp, Bos taurus
caggaatgttactgttggaaattatcattttaaaaaacttgtaaaaacaaacctccatagctgataggaatggtctcaacttgcagccccattatactaacgatgatctgaagtttctcaagcacgcagagaaacgtaagagaaacgttccagcaaagggaggggcgaaaacacgaacatgtttgtcttgaacatgtggtt

SEQ ID NO: 16854 - DNA, 201 bp, Bos taurus
catgaggggcgagaggggctgcttggcaggtgacctcctggaagaggtgactccacggcgtgagaactcagcgatggggagacatcagccatgagagaggtgaggccagggtgttctgggaaaaggggaacagctagtgcaaaagcctggaggtgggaaccagcctggcaggtttgagggccgcaaggacggccagtgtga

SEQ ID NO: 16855 - DNA, 201 bp, Bos taurus
agcactctgaggaccagccgtgtgacctgctggacccacgtcgaaagagagctgcaaagtcacggctctggggaccccagcctcctgcaggattgctgatagatggacctgggtgttcgagtcaaacgccttgcccagcaggcgtgtgaagagtgaccttgtcagttgcaacagtgaaacgcgggagtaaagaccagccgg

SEQ ID NO: 16856 - DNA, 201 bp, Bos taurus
gaatggcccccaggtgagcagcccgcctctcctgcagggaaactcacagagctgctgtcatgcaagaggcatgcaggagtctcctgaaaaggccacagtgtaggtattttagggtcaaggttgcatgtctttctgtgtgtgtgtttacagctcttttaagaatgtaaggcccgcctgcttgcagggcgcacccagacgctt

SEQ ID NO: 16857 - DNA, 201 bp, Bos taurus
ccaccgctgcccgcaccccccaccttctgggaaacagcaggtgagccgagcctgcagccatctcctggggatttccagccagcagaggagtcgcacccctgaaggcggctcaggattccagggccttctagagatcggagagacgcagcagcaacccttggtctctgcagccggaatctggctggactgttcagttttagt

SEQ ID NO: 16858 - DNA, 201 bp, Bos taurus
cagatggccggcgggggacaggggcctaccgcagggcgctgtctggccagtgcccacccatcctacttcttggcagctgtgagcaggcccctgtgctgtcgtagagggtctggaggaggaggggctgtccagggagacaccgggcagctcctggaacacctgcctcgctttctccacttatcagagcaggaaaacgctcct

SEQ ID NO: 16859 - DNA, 201 bp, Bos taurus
agcagccacgggctctttgtgaaaatacaaatcgggtgactccttcgccaaagcccctctggggtttctcgtcaggtttagaacaaaacccagagcagcgcttctggaccaggaggccctgaggacccagctcctgtgtgccacccccccccaagactgtggacccccgcccctctcagacacacatgcctggctcccgag

SEQ ID NO: 16860 - DNA, 201 bp, Bos taurus
gaaatttcactggctcaccttctacaagaaaaaacccaagaaatatgttcactaaaactgctgtcatgggtcacacgggggaaaggctctgagctctgaactgaagcgctcccgtcgaagcctgaagagcttcggtggaacctgccctgtgtcttcagctccccagcggctgtggtctcatcacacaccttcaaaggcaag

SEQ ID NO: 16861 - DNA, 201 bp, Bos taurus
acctctgtgacaccctgtctccccgtctacagaacgggccacacccttcccaggtaccaaagggtgagcgccttctgtgctgtctcaggacctgctagagagcatcacgccatcttgtaagccaccgtttcctcacggtggggaaaacacagactgccaaagcttctgagaagccattgcctgtccctccactgagtacac

SEQ ID NO: 16862 - DNA, 201 bp, Bos taurus
cccccacaatttggagaacaccctcacggagcactaaattgcattttctctcgagtcccctgtaagcctcacttaggccaggcttgaccttgaaaagccacgtcttgcacaccgtgttgtatacaccttatacacctacacggagacggctggatggcatcgccaggccaatggacatgagttcgagcagactccaggaga

SEQ ID NO: 16863 - DNA, 201 bp, Bos taurus
tgccgccccctccagggcccagagcagaggggatttcagcacgaggcccagtctccggggcccctccgtggggaggggcgctgggccaggtgggccccgaggctccctggttcttgcagtgtttctgatcctcaggacaagtcctgtgcgtcttcggagtgagagcagggtgcctgccgcgtccgacgagtggcgtggcct

SEQ ID NO: 16864 - DNA, 201 bp, Bos taurus
tatccatccactcaactgaacgagtgcaggatggaggtggtttcagagacgacggatcacggtgctgagaaaacgaagcctcgcaccttggaagggaggagcagaggccagtctggagacaggagtgggtggagggtggacttgagaggtgagcacagtgctggctctgaggcttttgccaagggcccagtgggtcccttg

SEQ ID NO: 16865 - DNA, 201 bp, Bos taurus
catcgcaggcagattcttcaccagctgagccgccagggtggctgagcccctaagacgtgaggtaggaatccacatgtacactgggcgcctggcctccatgtggacacagccagagcacgcgtgcacaccaagtccttagtgtacattagggcatacccattgtgttgtacattctacaggtttagacaaatgcttaggcca

SEQ ID NO: 16866 - DNA, 201 bp, Bos taurus
ggcgggagtgttttggtgtgtcttccgtgagggggtattttacgtgcgtacacgcccacccaggctgggctcacgccgtgcccggcccagccccaagtccttgtgtactctggacgttttccggggtcactgcgagctgcctactgtccctaacgctcatggccaggagcaagcatcctgcgaacgccctctatgccgtct

SEQ ID NO: 16867 - DNA, 201 bp, Bos taurus
ctgtgtcccctgcagagcccagactgaaatcagagttcctggtcctctgacccttggcagtggatggccactggcctaaaaatggccctgctgggatgcatctccagccagtgtggctctctgctggctgcctttccccaggacagacaaggagaaacccccttccccaaaggccttcctcctgtctcatttctctcctgg

SEQ ID NO: 16868 - DNA, 201 bp, Bos taurus
gggcctcaccttgagagagatgcacacgattagagcgacctggagaccccgagtccggagaaccagaacacacttcactgactccaaggagagaaggaaagaaggccagcaagtgactcttggaaggacggtgagcaccgtgcggacatcctgacacagacggacgtctccaggagaatcctcagtggggcagcagccggg

SEQ ID NO: 16869 - DNA, 201 bp, Bos taurus
gctcgtggtgggtgtttataacctcgtggtcccttgggatcagggggcgggtgctgggtctctagcgggggctcccgccttgctccagatcccgggggcccgtgcggtgtctcccctatggctcttgccaggggctctgcatgttgggtgtctttctcctctgcagatagcctgggtaccagggaatttgccgagtgttat

SEQ ID NO: 16870 - DNA, 201 bp, Bos taurus
ctttaagctcgaaacgaggccagtttggagtcaagcgagttctgctcccgcacagaaagcggcgggaacctcggcgccccctggtgacgacccaagaaaccgcgcctgggacccggggccgcgtcgcccgaagccgggggcggggcgggtctcgccaactccaggacaaactcgcaagatactaacactagggccccaact

SEQ ID NO: 16871 - DNA, 201 bp, Bos taurus
gaagcggtgcgatgcagtgacttccccggcggcccactagctaagacaacacttccaacggaggggacggggctctgccaaaagctgaaagcagatgagggtaagcgctctgtgtttaggggcccgtgggaaacaacagcccagtatatccccctttcctctgtcctaaaggcccacggctgactttggaaccatggacag

SEQ ID NO: 16872 - DNA, 201 bp, Bos taurus
gacccttggggcccaggaagcctgcagccccgcttccagggggtgaggctgagtgtggtcagggaacgtggggcagggctggggatgccggcagtgccccgggggagggccacacagtgtgccctgcacaacggtcggggtcaaggccgtcctcagagggccagctcgggccagacgcaggtcccaccccgaccctgctca

SEQ ID NO: 16873 - DNA, 201 bp, Bos taurus
tgcctggctgcaggctttcccggaaagggccctgagggagagaagtcattgggccaacccccatgcccagggaccgcagcccctggggccatctgtatgcagcagggtgggagtctggctgaaccgtttttctttctgcaaattctccactgagttccccagggcctgcccacccagcgccctgctggctaaggacttgca

SEQ ID NO: 16874 - DNA, 201 bp, Bos taurus
accttttgagtgacccctggggaggtgggcaactggggcaggagcctccccctcttcccagcgacctcgtacttcttaggccagagcccaggagaggcaggaggtgcagcaaggtggtgctttctgagccttttgcggtaagtggagctcaggcgaacgcgtttacagtgggcggcctccttctggggtccagagcccccg

SEQ ID NO: 16875 - DNA, 201 bp, Bos taurus
gaccaggcctgagagcctctggaccataaggtgctgccacctggcaaagcttttctccatcatcatgacctccagccatgctccagctgagcaaaggacagggagctggcctctgcaatgtgcatgattcactgcacttaccttttcatcagagccatttttccaatattgcacatggtaagtccatgagttataaatgtt

SEQ ID NO: 16876 - DNA, 201 bp, Bos taurus
aggaatgtctagcttcaagctgcctgtgctagaggcaggcatagccaaggagaagctgaatggggccagagcagtcagttcaccccaggccagaggccactgggagaccctgctgcgttgactcattacagcgaaacgtgcagccaaagaaactgaaaaacttcacgtgttggcccaacccctgaaaatggtcggaaaagg

SEQ ID NO: 16877 - DNA, 201 bp, Bos taurus
tttgcactttgaggagagaggggagcctccttcccgatacatcagttctgacactctacaagctcagcagtaaaacttgctctagactcagtctaattccctcttcggaaacctaggcctaagtccagcaatggaatattattcattccttggactgcaaggagatcaaaccagtcaatcctaaaggaaagcatccctgaa

SEQ ID NO: 16878 - DNA, 201 bp, Bos taurus
ctttttatgagcaagcaagagcccattttagagaggccattcacaaagagaatggaaaacagcttgaatggaatgtgatttgagcactagggccatgctcggctctgtaggacgaatccaagagtgggactaagttgcagcaacagactggtgaccaacatgttcccccgagacatttttatgccctatggatggcaacca

SEQ ID NO: 16879 - DNA, 201 bp, Bos taurus
agggactgaacccgggtttccagcattgcaggcagattctttaccattctttaccattctttaccatctgagccacccatttcttaagggctcaggaaagcgagtaagtatttgtctctggctacttccatgtcccataacaactggcttcctttccagtcctcttcccataagggaaatccactcttcctaagaggtccc

SEQ ID NO: 16880 - DNA, 201 bp, Bos taurus
gcctagaggctgagtggccctgggccacactaaccaccaagccaccctcctgtctatgtgaaaaagggtaatagccggcctcacaggtggtcctgaggatcaaaggaaacagcggactcagagcctcagcaacggaggctgacccccactaacatctcaccccctggctgaatgagctgagctgcacttccaaggagagcc

SEQ ID NO: 16881 - DNA, 201 bp, Bos taurus
attcttagccaagcctctttctagttttggcctttagaaattgttttgaccctccaggagtgaggacatttcagtttccgtatgtgtccaaagaacacgcgtagagggactggcccaaagctagctgtcttcagtttttaaaaacggattgggtggatggctggatcatatctaccctcatagaatcactgagaagattaa

SEQ ID NO: 16882 - DNA, 201 bp, Bos taurus
atccccacagagatgctatgaaggtaaagcacacaatgagctctgtgacccccagactcaccggaaggattccctcctatggcctcgaggtctgagaagcgtcttggattgtctgagaagcgtcttcggattgtctgagaaggaagggcagtcatgggccctccctggaggacttcctcgccaggtggtctagtgagcagt

SEQ ID NO: 16883 - DNA, 201 bp, Bos taurus
gctctactcagtgtgggtgggccttgtccaatcagccaaaggcctaaatgtaccaacaagcagatgctgtcgccataaagggagaatgcctcctgcttgactttaccaccgagctgggacactggcctcttctgcctttgaccttgggctggagctataccctcagctgtctttggtcttcagcttgccacttgcagagct

SEQ ID NO: 16884 - DNA, 201 bp, Bos taurus
catggatactgtagtggacagtttttgtttgtctccccagtgttcatttcccatcttctgaccagcacccagcatatggtttgggggagccagccctgctcgtgggacactaactgtgtaatctggggagggaggggtgctactcccactgttggtattcttcgcggtgctgatccgattgggcctgaagctcacaccgaa

SEQ ID NO: 16885 - DNA, 201 bp, Bos taurus
gctgactgtgctgtttctgcatgtagccccttgctctgtctataaaagctcttgcccactgattctgggctttggaacaggtgtctgccctctgtctctcgccttgccattgttgccaccatccaaagtaaagcaaactttcctttccaccaaccttgcctctttattggctttttgagtgactatcagcagaccccattc

SEQ ID NO: 16886 - DNA, 201 bp, Bos taurus
atactgacttcatcaaactcaaaaagatattcatgtatctctattcagttagttttctttagcagatctttccgtatagaagtctgagatgtgtgaggaattacagattagaactttagaagaagatttactttctttattttcccttcaactttggggagtataattgacgcctaacactgtgcaagtttaaggtgtgta

SEQ ID NO: 16887 - DNA, 201 bp, Bos taurus
ataattcaaataaagtgccatgtttcagaagctttctttgattgttaacctatagctcaatcctcactcagcatctacaaaaataattttcaactctcatgatcaagtacatacccttctgtagctgaattgagactaccttgttaggactgaatcaattttctaccaaaagtttattttgaaatgtttcagtttatttca

SEQ ID NO: 16888 - DNA, 201 bp, Bos taurus
aggagtgtgatgtttatgaaatatttaaaaaatcagtgaaactaactggaaccaagagcaaataagactgagtcttagcaatataatcttttttaacatacaggaaggttggaggaggttaaatgaacatataatttgcggcaggcaatgtaggtgtctcctttctttcaagtcctcagttggattagaggagcccaaaca

SEQ ID NO: 16889 - DNA, 201 bp, Bos taurus
cctcactccttctgccacgtgagggcatgagaagacaacggtccatgaacgatgaaatggatctttaccagacactagatcttctggaaacttgatcttggatttctagtctctagaactgtgagaaatatctgttgtttataagtcatccagtatatggtattctacgataggcagccttaatggataaacacttgaatt

SEQ ID NO: 16890 - DNA, 201 bp, Bos taurus
accatctggaaagttctcatcatattttcatgaacagctatgcttttatagctaaatttatggggattatttctctctgttagattaactaccccttattttgttttcttttatttttgttgttacagttttattatattgtatataatctcctgcttctcaatttataacttagttttactttgaggcaaatgaagaatg

SEQ ID NO: 16891 - DNA, 201 bp, Bos taurus
tatttaactctcagcggctgctttacaacctgtgcaatccttattattttcagaactgtaatgatggttttgtgtttttattgtgatagaaaagcaatcaaattgcttttccctccccaccccaaactgtcagacaaaatgacatgaggtaagaccttggagctatgatgggaaagttaagcccacaagttcactaattta

SEQ ID NO: 16892 - DNA, 201 bp, Bos taurus
gctttggggaggagagaggaagttggctgatgctgaaagagtctgcttctgtttgaggtctggcaccttttaataacttcttcctgtttctatcatattctgctttcttggtacttccccaggcttgtatatatctcacttcactataggtttttggtatttgcaatcttctctgaagaaaaggttggggcttctccaatg

SEQ ID NO: 16893 - DNA, 201 bp, Bos taurus
taaagatggtgaaaacatggcattaaaaggagctaggaaacatgagctatcggtatctatgtgctacagccaaagcaagacaagataggccgctaggggccggtccctgtgaagagccagtttaaagcataaaaaatgcagtgaagcggtctgtgaaagcagtagctgctgagtcacaggtgaggagaagggaggggacca

SEQ ID NO: 16894 - DNA, 201 bp, Bos taurus
gcatgtacatggccaatgaccaagaaattccatctctgggtttatggatttaaaatattttcacacaggtccacagaatatataagaaaggagatgatggaacttcctggtggcccagtgattaagactccgtacttccaatgcaggagaattcgattcctggttggtgaactgattccacaggctgcacagcacagctaa

SEQ ID NO: 16895 - DNA, 201 bp, Bos taurus
tttctcattcattccctttgcccaggagaaaagtggctctttagtttggctcttttgtcagctgctgccctgttaagatgttcagtttttcaccaaactcctaatttatattaaggcccaaagatcttgctttcaactcagtaatcctttgtcattaatttaagccaccacttccctttatcaaactcaataactagaaga

SEQ ID NO: 16896 - DNA, 201 bp, Bos taurus
aagaaatcttatccaggaactaagagtggccctgacatcagatttctctagaaccctagagtagctacaggaccaggtggacgtccagccaaggaagcaacggaaagccatccatgtctgagatgcacaactaataatatcttagcgaaggtgtggatagatacggctcaccaggaagcctctggagatcacaggtgactg

SEQ ID NO: 16897 - DNA, 201 bp, Bos taurus
gcttagctaaatgaaaggtgagagggttttaaatggccatggcaggggcttagctatttaaatgacaagctaaacaggatacctttggggctatttcaagctctgatccccaaattagagcttttaggagtaggatccagagcccttacatggggaagaccaagttagctgggaatggcgaagccacagcaggggcgggtc

SEQ ID NO: 16898 - DNA, 201 bp, Bos taurus
gcccagccagggcaatctcagacttgaaaagaggacagacacgtttgtgcttgcacaccttttccttaaatacatttaatgagaaacttctatgtctggctttgcttctccatccttttatggatgatatcttcttggcagacaaatttctctgaaatttgataagacttgaaacaggactaaagttcagtgtatgcaatt

SEQ ID NO: 16899 - DNA, 201 bp, Bos taurus
atttctttaaaatctagtcaccaggaaggatgggcctatgccttgcagcctctgtcggaagacagaatcctaacttggacaactgtcatccatgagaagcatctggcctatttggtatttgcactgaccaaccttcacttccctcactctactgagacccctgctaaccccttccctactccctcattcttcttttacaat

SEQ ID NO: 16900 - DNA, 201 bp, Bos taurus
ataatagttaagattgtatcctttgaaagagatagaaaaatgtgaatatttactgaaaaattatctattttatgactcagagttgggcatgaagaaagtccggtctttaacatcagaacacaaaatgtcctgtgaaattgaacttcagataaacaatgggtcattttttagtataagtatatatataaatgcatatatggt

SEQ ID NO: 16901 - DNA, 201 bp, Bos taurus
ttgtctattctgatcctgggctaggtcatgaaagtccaaactaaggttcacgattatgctggagatgttagcaatgcatgtgattttcaacttcctgtgggttttttttcagagcagtatgcagcatgcagggtttaaacatctaagcgggaagttcggcaggatggtagacaaagtagatgatcctgcggactccacaaa

SEQ ID NO: 16902 - DNA, 201 bp, Bos taurus
gaatcctctagaaagaagagggtattagccaagaatacaaggccacacacagaaaataacttccttcacaaatgtcaattggcacttgagaaaagaaagtgtggactgaagtgttcaggcctctactaaaaaaggaactcagacccaagctgtaagattgaggtcaaggacaaattaaaaaaaaaaaaaaaaaaatccatt

SEQ ID NO: 16903 - DNA, 201 bp, Bos taurus
aagggaagtcgctcagtcatgtccgactcctagcgaccccatggactgcagcccaccaggctcctctgtccaccggattttctagaaagagtactggagtggggtgccatcattatgcacctattatcataaaaatgacagtaatggatttcagttcagtttagttcagtcactcagttgtgtccaactctttgcgacccc

SEQ ID NO: 16904 - DNA, 201 bp, Bos taurus
tgagagatttttaaagttatgattctagatgtggaaaataagaaataaaaaattccataaggaaaatatattctgaattcctaatgaagaagcatcttacggctggcatgaattttcctttagatgatcataaaggcatcaatgtcagattctaagattttaatattttcttttcaatgttaataagtcattgatatagca

SEQ ID NO: 16905 - DNA, 201 bp, Bos taurus
gtgagatgaaagcaacaatatgcttcatcataagacatggaggtacaacctggctgccaatggaatcaaaagaagttgctttcactgtctctcgggaaaaacctgtagtgagccaagttctgcagaggagctatgggcagggctgttataaaatgaccagaacctgtccctgacaatttagggagaggcaaaatacttgtg

SEQ ID NO: 16906 - DNA, 201 bp, Bos taurus
agaatagcccattaatttccattggaaacattccagtgaatagcaagagtttgtgatgctttctttttttgttttttctgtagtaatgtctgagctccacgaaatcaagaggtgaaatatggaatcgtgtgctttaaaaaaacatgtgctacagaggcaaatctggcctcagtcctgaattccatagacagccccttattg

SEQ ID NO: 16907 - DNA, 201 bp, Bos taurus
tctcgccggaatagggcttcattaaatgtgtaagtgttcatgcatcctagtttaggttaagtttatgacctgtctaactcacccttaagacctgagtcatgaattttgggtgtctcaatttggtctttatcttcctaaaccaggaatctatgaccgggggtccagaggaagctagtgaacaatctgtaaggaatgccttta

SEQ ID NO: 16908 - DNA, 201 bp, Bos taurus
tggttctcttcctgtgtcagcttgactgcatcaggagtgcccagaaaactggctaagcattgtttctgggtatgtcttagagggtgtttccaggttactgcaacatttgaatcagtaaaataaattgtcctgctccttgtgggtgggcattttccaaaccattaggacctgagtagacaaaagatagtagaaaggagcttt

SEQ ID NO: 16909 - DNA, 201 bp, Bos taurus
taaaatcatttggtcaaaaatctaaaaaaggaggaaacgaatgtacaaacaagttaaaagttagttagaaacaggatgtgagggcacagttcttcaacttccaaggtcaatgtgcagaagctacgtttaagctctgattaaactgtatttaaacttcccactttacatttgtccaggtaaaaaagcaaagtttgatttatt

SEQ ID NO: 16910 - DNA, 201 bp, Bos taurus
aaacctggcagcaattatttgaattaaaatgactatatgttttatggcaactctagttcttgaattctaccttacattaaaaaagttacaccagataaaggactatgaggacataatgctatttgcagcatgatttgtagtgtgaacaagccatgaactatctgaatgcccatgagtagggaattgaataaatcactgcac

SEQ ID NO: 16911 - DNA, 201 bp, Bos taurus
aaatttttttttggccgcactgcacagcatgtagaatcttagttcccagaccagggattgaatccacatggaactccttacattggcaggtgtgttcttaattgctgaatggccaggggagtccccgcttgtctgtttaacccttccctcaactcatataagtttgtgtctcagctatccaaggttaacttctccacccag

SEQ ID NO: 16912 - DNA, 201 bp, Bos taurus
gaaagaaataaaggaaatgaagccattgcacacaggtgggtactggtgacttattgttggttgcatttgttaagactctggtctactgatgtaacatttacacctttctgagttctgctttttcacagcccagaagaagctcattctttctttcctttgatccagcaatcccactgctgggcatacacactgaggaaacca

SEQ ID NO: 16913 - DNA, 201 bp, Bos taurus
gagggactgaactgaactgaatcaagggctactagcatacacaagccagattagaaccatgacagattgttctggtaaagagaaatatgccatgtcacaaaagtggaaatcatagaaagcagagtatatatgaattaatgactcaagatacaggtgcagggaatccttagggcaaaaaccatggcagaacctaatatacag

SEQ ID NO: 16914 - DNA, 201 bp, Bos taurus
gaggtatttttatctatatctaacttgttgagagtacttaggttattgcttagtctctgtgtacttttttaatacagtgaatgtctttaaacctgtttctgccaagtcttctgttgattctcattttcttgtagcaaacttccacctgcaaaactttgattctcaacatcctgctcacatcctacagttgctgtaggttaa

SEQ ID NO: 16915 - DNA, 201 bp, Bos taurus
ctgttacagggagtttaagcattcaagaagcttgtaaatggaggggaaacacagagaaccagccagtctcagaatgcaccatggtagaatcagagactaaaagaatgagaataagagctttaaacaaagcatcaggcagtataggatacaggtaacaagtaaatagtactgctgcaataattcccacaaagttaagaaaaa

SEQ ID NO: 16916 - DNA, 201 bp, Bos taurus
ttactgagctagtaaattaaaatgcatcttctatttacagtgttaaattgtcagtcaaattgagttttcaataagaaagacatatgagtttttacacatatacttaatcttttccatttggaagcctctagggatctaattttagttttttgaggtatctttttagagtttagatacaaatataaaatatattttaccctg

SEQ ID NO: 16917 - DNA, 201 bp, Bos taurus
ctgtctcaaaacaactgactcatcccccttctccccagatttctagtgtaaagtgtgagggcaagttcagagtcagttattctttagtgagcaaaagcagcagtcctcaacatgattttttaatatataagagtttctagcttcaggatcattcccagtcaggattttgatactgtttttttcattttcttgtatctagtg

SEQ ID NO: 16918 - DNA, 201 bp, Bos taurus
tttcataagtggtgtcccagtgacccaaaagatttctcccaacttctaaaagtgctccttagtctccatggtacagtttacacagtggaaaaatatgatttattatctcacaaacatacattacaggcaaagaacttaataatttcaacattttttatgcttaaactgggtaacaataaaaggagtgtttctaaaaataaa

SEQ ID NO: 16919 - DNA, 201 bp, Bos taurus
atgggctttaacaacagacttaaaataacagcccaccatctgggtcaagattaaagaacttggctttttttatttttcaaacctgttttccagattctaattaggtcaagcttacaggaggtgctatcagactttctgcttaaaagataacctttattgtataaactggaagcataagtgacctcaaaggaacaaattaat

SEQ ID NO: 16920 - DNA, 201 bp, Bos taurus
ctgcctgccaatgcaggagacaggggttcaatccctgagtggggaagatcccctggaaaaggaaatggcaacccactccagtactcttgcctgggaaatttcatggatagaagagactggtgtcaatccctgggtcgcaaagggatctgtccatccctacagtctgcaggattgcaaagagtcggtctttgcggcggactg

SEQ ID NO: 16921 - DNA, 201 bp, Bos taurus
gtagggccatgcatggagataggtagcttatgcccaaaaagctccaaatgccccaaagtattgagggaagcatatataaagatgaggggagggaagaggggagggtcatagggtctgtgatctgttgtgctcagttctctgattggttgatgttgaggtaaatgggtggtgtcacattattaatccttaagctccattagg

SEQ ID NO: 16922 - DNA, 201 bp, Bos taurus
aagtgaaagtcagtatgtgaaatattcatgactgaatatctttcaacatcactcctaaattgatgaagtaataaatatgaatccacacctatagctaaagaaatgaaacataaatgtttgggccaatgataacaactactgtcacacatgaattttaaaagcagcataatcagcatcagttgacttaggcatttggttaat

SEQ ID NO: 16923 - DNA, 201 bp, Bos taurus
agcaacaatatagaagacattgatggatcacattttgttactgactcgggtacttggccttccttaatagaaattgataagaggccagacaagaaattcaagcaaggttttatgggggccagcacaggggagcaaaagcaaataacaagagcctttgcttgctccccaaggtagaatgagctggttccttacatggagtga

SEQ ID NO: 16924 - DNA, 201 bp, Bos taurus
cattacctccaccgtagtttggtctcaggtcaaacaacagggagggaacacagccctgaccaaaaccagaaaatttaattgaatttaagatttactgaacctggccctgtccatcagaacaggaaccagtttacgcctcagtcagtctctccaatcaggaagctttcgtaagcctcttatcacctccagcagaaggcagac

SEQ ID NO: 16925 - DNA, 201 bp, Bos taurus
tacaaaaagaatctggacatacacacacacaatagtggaaggactatttacactggaacacagaattttgcggttgttgtttacaagcaaaatattgtacgggaatcctttaagctaggcttcaacaatatgtgaactgagaacttccagatatacaagctgaatttagaaaaagcaggggaattagagatcaaattgcca

SEQ ID NO: 16926 - DNA, 201 bp, Bos taurus
tttcatgatttgtttatctaaaagactgaaacagtgcaaagttctcttcttacatacacaaagcttataataatgacctgcaggactggccatcctaaatcaccacagagctccactctactttagtggcttgattaaaaagatgaatggttgcaggttcaattcaggaaagtcaaggaaaggaacatataatgacctctt

SEQ ID NO: 16927 - DNA, 201 bp, Bos taurus
caagtctcaggcagagggttttgatggtaactcaagaatgtcacagtcattcacaggtaggcaggctcaggttatctctctgtgaactaaacaaaggcacattagcttaagggtcaagaggagggtgagagagggcaagggtcagagaggtttaagggtcagaggagggcaaggttccctgaccattatgtttgtttataa

SEQ ID NO: 16928 - DNA, 201 bp, Bos taurus
atgtacgccagattaataaaaatactcaatgtttggtgtccctgatatttcatatctttgcagctcctgaactaaggccagtatgttttctttgaggttttaaattcattccctgcaccccaaccccccaaattttaaagtgatgtgccttgactgtgattcataaattgacagaaatggccttcatcaagtagattgctt

SEQ ID NO: 16929 - DNA, 201 bp, Bos taurus
aggacaaaatgctttaaactggagatatgtgatatttttaccttaggtttacagtaaaagtataatctttctcacaagtcaaaacttctgttcatgactagagggaaaaaaatgtacagtttgatatacagaattaattttgatcactgtttttaatatatgtagtacaactatttgaagaaatatgcattttctaaatca

SEQ ID NO: 16930 - DNA, 201 bp, Bos taurus
tgaatccactgctttgtaactattgttggcatatcttgttttgactgtgaaagaacaaaaccttctttatttttctttgtttctgtttccatgaataatgagggtgcttctgagcctctagcagaactttcatgggtgatggttaaatgaattccaaagggtaggggtagagaagacgaaagaaaagaagaattatgtaga

SEQ ID NO: 16931 - DNA, 201 bp, Bos taurus
gaaatatttctaaataagaccagattacactgaagatgaagtttctactattttcaaatatatatattttacctcaagcagtaagtgtgttaatagatattaaaaggaaagatggatgggcattagactgtggaagtcaattaataaagaaaacaatactttataaaatcaaatagaagttatcaactaaattctcatttt

SEQ ID NO: 16932 - DNA, 201 bp, Bos taurus
taaatgcttagacaagtaaaataagaatgattattcaaaataataagtgaaagagaaaatctaggaaagctagctgataatgccaaataatatttattgttaaattttattttcaatgattaattatctctaagaatgtagaactggaagttcatcaaaaaagtactccatcagcatgccaacaattatttatccaataaa

SEQ ID NO: 16933 - DNA, 201 bp, Bos taurus
tctgtctttagtccatttctatacagtggcagagagttttatttaaattctggaaattgatttacttatttttcttcaagcaagttctgcttattgttcatgtttgttttattcattagttgaacaaaaaaactggatatttgttttcataatcctgtccaaattgtaggatcttctatgtaaataaacataatgttatac

SEQ ID NO: 16934 - DNA, 201 bp, Bos taurus
gatccaagatcatggattgaagagagaagcaaaggagccaggtactggatttcccatgaagatattttgctgattcctggacttggaaggacatgaggaacaaagccaagtaaaaagtaacaacaacagcaaaaaaaggtaaagcagaattttcagcagtcatttgttgctaaggaaacaaaaactggaattcaggaccct

SEQ ID NO: 16935 - DNA, 201 bp, Bos taurus
aataagtcactgatgactctacctgcaagattttgttatactcagagaagcaaattaacttaagttatatactgtgcaaagccagtgatttttgtaacatcgagattggtatttaatattaactttatacctcagttatttgggtgtactattctcagaagacaatttgtatcaggtgtttcttcttattttaatgcacac

SEQ ID NO: 16936 - DNA, 201 bp, Bos taurus
tatacaaaaaaggaaacacttgactatgtggatagagggagacctaactgctgaaagtttgatagatacaagagtatactgagtaacattctggcagtacgtacattatggaaaataaacaaataaactttctgaacaagtaaaagtattactcaagacatggaatgaagttaacttcagaagccatgcccacagagcaga

SEQ ID NO: 16937 - DNA, 201 bp, Bos taurus
ttacttgacacttttcactcatttggtccaattatactcagaggtccctgtcacatcagtaaaattttaacagtctgggccatgtctgaatatttcctttgaagtaaaggacaactattgtatttcacacattccagcaccaggaaggatacggtaggcagattattgggcctaccagagacttctgtatcttaatccttg

SEQ ID NO: 16938 - DNA, 201 bp, Bos taurus
cacagggatcgaactcgtgtctcttaagtctcctgcattagcagtagggttctttaccagtagcgctgcctgggaagccccaaccaatatgtagcacttatacatagcatttataaagtggttaaacttggacagttatacaacacttaaggtgaatggtgtcttttttttttttttttctgtattctcggagataatttt

SEQ ID NO: 16939 - DNA, 201 bp, Bos taurus
catgaatatgcttgtatctgtcttgtataaagttatctaagtttgtgtaataatgggaaaactcaaagtacagtattgacctcatgtttattttagtctattactatacaagagtgagatatttagtaaagagaagcctagtaatatgtttgcagtctcatctaaattctaactttaaacaatttttaacatttacatcat

SEQ ID NO: 16940 - DNA, 201 bp, Bos taurus
cttatatcattattccttgtttcccggggtccatataatttggtaacatctttggcaatatcttctcagctgaaatggatgctggtcaaaaaatatcttccaggctaaaaaaagcaggtaggtgggaaagattaaaatgacatctctctttcagcataggcagcctcatttaaaggattcctttaaatagttttatttaat

SEQ ID NO: 16941 - DNA, 201 bp, Bos taurus
aaaagaagaaggcagaaagcaaattctagaatattctaatatctaaatatttgagaagaaaagagctggcaaagagaaactgaggaagagtagagagtgaaatgagaggaaaatcacaaatccatggatagtctggggaatcaagtgaagaaaggcactcaaagatgatttattaagtttccaaatataatccttgttgtt

SEQ ID NO: 16942 - DNA, 201 bp, Bos taurus
ttattgtggtctaaaaattaaacacaaaactatgtaaacaagagaaagaaaactgctagagtccttcttagaactgaacaatttctggcttgaaaaccttggtttacaggaaaggaaatgttgcatatttatgaaacaagattggaaatcaagtacataatttcttagctttttactaacctaaaataaaatatatgacat

SEQ ID NO: 16943 - DNA, 201 bp, Bos taurus
gagctataattacaattcaccattcaaataaagaaatttagctcctttgataaacaccttattaatatcaatactgaatttctcactggctttattttcattgttgtcaaaactgacaaatgcaatagtacatgcattcaagaatttagcaaatgtgcagtcagaattttgtctcagagttaagttttatgagtcattttg

SEQ ID NO: 16944 - DNA, 201 bp, Bos taurus
tgtttagagtcaatgaaaatggctttaagcataactagatgtatgtgtatttaatacatatatgcatgaacatttttctttttggccataccatggggcatgggggattttagttccccaaccagggactgaacctaagccccctgcatgggaagcacggaggcttaccacggggccagcagggaagccactgtacacaca

SEQ ID NO: 16945 - DNA, 201 bp, Bos taurus
gaagtctgggctgtgtagtttcaggtggaggccagcacagatttatagactcatctctcccatgacctttgattggagtgtgtgacacctgcagtctcgtaggggccccacactcagaaggaccatgtgcttgtttcagggctgtactttgtttttcttttaagtacatatatttttgatgtgggccaaattttttttctt

SEQ ID NO: 16946 - DNA, 201 bp, Bos taurus
tggccaccaagttaccctggaatccggtcttcccataataaactgggtgtttcgtgtgtgaccaagtttatgatgggaagctcaggttacatggtaacttaatggcctagagcaagttgtttctcaaaaggagaaaagattcaagttagtgagcatagtaacagtccatcatcaaacagaatttgtatgtattgagattgg

SEQ ID NO: 16947 - DNA, 201 bp, Bos taurus
aatgagaaagggggaaaaaaatctcaagttactgtgcactgtgccagctgaccaaatataaaacaaaacaaaacaagataatcttcccccctaccaccaccagttaaaaagaaagaggagggagacgtttctcttggtgcttggtctgtacttgttttggctttttttcagatactctcccaagtttaaatttgaaatttg

SEQ ID NO: 16948 - DNA, 201 bp, Bos taurus
gagaatgataggtgcttttaattctcctgtaattcccacaatggccagttttataaagaggatatcaagactctgagtgctaattaacattgcctgaggggacacatagatgcttacttaccttactttcaacatttctttttgtgtgtgagtatattcactaaaattctttatcgtatcagattcagtaactcaccaaac

SEQ ID NO: 16949 - DNA, 201 bp, Bos taurus
tagaaaatagttgtaaaactaggtccatcatttcaggccaaatgggcagagatcaacagaaattaggtcactgggttaaaatataatattcaaaggataagaaatatctgtattacctcctctgctcttttgttataaagcttgctttgttattgttcagttgctcagtcatgcctgactctttgtgaccccttgtgaccc

SEQ ID NO: 16950 - DNA, 201 bp, Bos taurus
caattcaagtttcacagcaaaattgagcagaaagtacaaagatatccccttcctatacccctagccctagccccacacatgcactttttaatcacttctactgcacaaagggaagtgaatgcagaactagaagccaaatgttctacttctaaattctgtgttctttctactttatagcaaatagtcctctctaaacacagt

SEQ ID NO: 16951 - DNA, 201 bp, Bos taurus
atagctgagaagcagagagggggtaagtggatggaaaactactgagaggaaacatcaggaagagagattctagctagatggacctgacaggatctttcctgaagacaggccatggtagggacttttctggtggtccagtggttgggaatccactttccagtgcagaggagaagggttcaatccctggctggggaattagaa

SEQ ID NO: 16952 - DNA, 201 bp, Bos taurus
ccagaaagttgtctgagatggaattgaagagctaaggcactagtggggattttttaaaaacacctgtatatgctactttgccaagttagagctccattgtatcaataaatgtgggaatttaacagtaagtcatatacacacagggcttccctggtggctcagagggtaaagaatccacctgcaatatagaagaactgggtt

SEQ ID NO: 16953 - DNA, 201 bp, Bos taurus
aatcaaatagttctgggtccaaaacataattttttcttttactatttgtgaggctgtgtacagaatgtaatatctccaagagtcttctcatccattacagaaggttgctgatgttatgagggttaaaagaaaacagtgtctgaaaaagtgacagcattaaaatctatgatgactattagcttatagggattacttcatgta

SEQ ID NO: 16954 - DNA, 201 bp, Bos taurus
tagatctcaaagccatatgatgacatcatgaaattttagaagatccagctggcttcccgtgatatttttgcagttgaaaaatatgtagcatctggtctttcgcttatcattctttgctgaagtagttgtcatcttaagtttctttttatcatgtagatgtgctaagtttaaaaataaagttggacaattttgatagagcat

SEQ ID NO: 16955 - DNA, 201 bp, Bos taurus
tttaataccattaggacttttttgaggtccaagtgaaacaaaagcagtgatcaaataaaaatataagggagcatcacaactccagaaattctagaaactttaaaggtaagagagaaggtaggctatagtgaagttgcagtttgaagatgtgaaaagtaagcatcactgtgaaataaagtggcaatctgtcctgctggcagt

SEQ ID NO: 16956 - DNA, 201 bp, Bos taurus
tatgactttcattagagatcttatttattgtcatatgacatactctctaggcatgcagcataaaaaagaggggaaacacctgacatccattttcactttagtttgacttgacacatttcaggaaactgaatatttgaaaaacgtttctgtattgattaagatataagtaatagaatactttattaaaatagcttaaataat

SEQ ID NO: 16957 - DNA, 201 bp, Bos taurus
ttcctgccaagttccctgatgactggactgacaggaaaggtgggcacccagcacttgacacttcatcgtaccctgctctcgagaggcttataattttgtgcaggggagcgatcatagttcacaaaggatcagagagcaaggatgtggtgcctgcactgctatttctgtttagtgcgtttttctctctctggagtttctcat

SEQ ID NO: 16958 - DNA, 201 bp, Bos taurus
tctgatttttcaccttcaagcccatcctctaaagaactgatgcaaaactctatttaagatgtcaataacactaaataaggctgttcttcattatctacaggctaaatttcaaactcctttgataatacatacaagttattcatgatcttacctatccagcttcattgcttacaatcacttcctggaattctggttcagcaa

SEQ ID NO: 16959 - DNA, 201 bp, Bos taurus
ggggagcctggtgggctgccgtctatgggggcacacagagtcagacacgactgaagggacttagcagcagcagcagcaggtcatctaatatgactgcatatgtcttcttaccttcctgtggttagtgaaatgttttgttgccaaaactattatcttgaaacagtgctagttcataagcttgacacataaactagagatatt

SEQ ID NO: 16960 - DNA, 201 bp, Bos taurus
atattcacttcttttcaggatgtctcaaactgaccccagacaacctttcttgtggatgcctgccctccaggactcgtattagtcatttaattgctcttctatcactcagtctctcagggtgtgagcctgactctgagatcattgtactaatttaaaatacttggaaactggcaaaaagacagagttgaggatatattgact

SEQ ID NO: 16961 - DNA, 201 bp, Bos taurus
ccaaagagatatcaggtttcaattaaccagttagttttcttaggttgcagggcattgatgttaaggaaattatttgcttcaccatactacttgattgacagagaaaaacagacttttctttcatttctcacaagtataattgcaaaagttatggaaaattttcttattcaagaagagaatggaattgaattgtgggtaata

SEQ ID NO: 16962 - DNA, 201 bp, Bos taurus
agtctatgctcatgggaagggcacagaactgcagaaacagggccacttgtatggagcaaggtggagaagaacagtgcaattgcaattttgttagatagttctacagagttgaatagaacataaagtagtacccagtccaactgttggattaaagagatgagcagactgaagctcggaaactataaacttgtgaacctgtct

SEQ ID NO: 16963 - DNA, 201 bp, Bos taurus
gacctcctttattgtaaccactagttttttaaaataaacttgatggactgttttactagtgactttcaatttttgatggttcattgaacatttggggattcaaaacacatattcatacaatgtgaagacaaaatattgctacatgaaagtcattagtctatatactatctttctaatactgatcttgtaatataaatccta

SEQ ID NO: 16964 - DNA, 201 bp, Bos taurus
caatagataaaaatttcaaaatacctgcatccttgttaggaaatcacttaccacatcagactagttactaaattctttgtttatagaactaaaacacttcattaagaaattctcataaacaagccttccatccctagcagggattatcctgattgtttccaatgctcatttggaaatatttctttttctcccctgtcaatt

SEQ ID NO: 16965 - DNA, 201 bp, Bos taurus
gtggaatgtcagttccccaacaagggattgaacccatgctcctgcagtgggagcatggggtcttaatggctggacggccagggaagtcccattccaccttcttcatgccagtattgtcagttctttcctgtctttgcctgcccagtaggcacctggagcaaaactccaactctgcacttatccctgttcaacggcttcagg

SEQ ID NO: 16966 - DNA, 201 bp, Bos taurus
tatggccacaccaatattactcaaactgcataacagtcatatgaggcaagtgtcatccagaaatgggaaactgagatgtcaagattttgaacagatgtaaatggccaaatctgaaattgaactcaatcttgaatgacttcaaagaataccatcaaccatcctccttatatattatatatgggagaattttctattaactac

SEQ ID NO: 16967 - DNA, 201 bp, Bos taurus
acaacttcgaacaaatttgacaaagtgattatcaggcttctgttttaagtttaaaacagaatagtccaaatagaggccagaattaaaggaagaggattttatttcatctcaccaaacttccctccttatttacagaagattcccgttctattgtcattaaaacaaaagggaaagaattaaaaaagggaagtgttggtgaaa

SEQ ID NO: 16968 - DNA, 201 bp, Bos taurus
tcagtagcaccacctgttgatagctaaccttgctatgaacggagtgctattacaaagactgtggtaatgaacacgtttaaccctcacagtgattctatacgatccccattttacatcttaaaaaaagaaactgagaccctgtgcttaagaatccattttctgcgttgtagtgtgtgatctgaaacaaattgcgaaatgatt

SEQ ID NO: 16969 - DNA, 201 bp, Bos taurus
atcaaacattagacccttttgtgtttagtagtttacatgattaaatagttaatgatctttgagtcttagcttgcatttgatatatttaggctgcattgcttaatatattttaaatatttgtaggtcaaagtgtggtctcttttacaaccaatgcaaatcataattttaagttaaatatatatttaaccttcatgagagcta

SEQ ID NO: 16970 - DNA, 201 bp, Bos taurus
tgtgccaatataaggatgctctcattgtatacctcagtctcaattaaaatacctgcagtggtctattctgccaacccagggacatgaagatgtgaatagtttagaagctttaaaccatttattagatggtgcatttcaattagggaggagagaaaggtgttgattagcaaaatttaaaatatgtgcaatcccaggaagttg

SEQ ID NO: 16971 - DNA, 201 bp, Bos taurus
cccagtaattgcagccagctccgaccatctggagatgatgatgaggtcgtttttgaccttgcagccccagtaaagcccacagacaactatagatggctgaatggccccaaacaagatcacaagacccactcaacagagaccaaccttaattgctgacccacctaaaatgtgagcaaatggaataattgttgtaagccacta

SEQ ID NO: 16972 - DNA, 201 bp, Bos taurus
tgatcctgcttttctgctctcaacaaaaagtcatctttacacaacagcagccaagcaagtccgggaagatggaaacactggatggcagcttcacatacacgtagtgtgtgtgctctgtgagagcctgggctttgaaatgagactcctagattggaatccttgcattgtgtgttctcgtgcttttcattagtgaggatagct

SEQ ID NO: 16973 - DNA, 201 bp, Bos taurus
aggaagaattgaggataagccaactttacatttattacaatattttatatttaaaaatcttattaatcttcacaaaggtctaaggccttgtagaaacaaatgttacagcatcgtaaaactttcctagaacttttgtttttaccttttagaagttccaagaaatttttcaaagctaacttgaatatatgatatcctggcctg

SEQ ID NO: 16974 - DNA, 201 bp, Bos taurus
tgcaactgtaattattttgaagactttgttaaatgtcaggccaggtaaaaatatgattataatagtccccccttatccacagagggtatgttccagcacccctagtaaatgcctggaaacataaggattcctatgcatatttttattatacatacattaccatgatataatttaatttgtaaattagacacaataagagat

SEQ ID NO: 16975 - DNA, 201 bp, Bos taurus
acattaaaagataatgtaaaaatataagacaatgtatgctacatacttgctccaggtgatggtagagtgagagagccaggagaggaagacgttggggaagtttccataaaatcgagtgaccacatgccctgatttgaatggaagaattataatttatgcccatattcctggtgtaacaattaatatgattcacttttattc

SEQ ID NO: 16976 - DNA, 201 bp, Bos taurus
agactggaataaatggaaaaaagttggcattccaccttactggtcatcataaaaaatgagagaaaaagacatggctgttaacagaatgatttgatctgtcgtattgatgggcagagataaaagtgctgagaaccatacctcaagttggcacagctcactgaaagcaaatttgctgtgaatgatgataatttgtactgaaag

SEQ ID NO: 16977 - DNA, 201 bp, Bos taurus
catagaatcttaaccactggaccaccagagaatttccattagacctttagtaatgtagtagcaaaatgtgagggaagggaaagtgttctagagtcctatggttaggcctctgtccttcagtcagcttgtgattcttcttttcccctctctttggtggaacaggatggctcaagtgggctgaagttgtgtatttccctttcc

SEQ ID NO: 16978 - DNA, 201 bp, Bos taurus
ctgacccagggattgaactcgtatctcttatgtctcctgcattcaaaagccagttctttaccactagcgctacctgagaaacccaaaaaagacggtgtgtatgtgtgtgtgtgtgtgtgtgtatgtatgtatgtgtattttttttcagtcagttatgttcaactttttgcaaccctaaggactgtagtctgccaagctgtc

SEQ ID NO: 16979 - DNA, 201 bp, Bos taurus
gatatgggcttctggcatggaaccagggcctcaataactcttctgccaaggtctagaaatgcagcaactttatcaagacgttccagtttaaaaattagaaaataaggtcagaacagcagaggacctgaatggaagcccacctgctaataccagggactgccagccttggccactgctactggccctctgtagctaccctcc

SEQ ID NO: 16980 - DNA, 201 bp, Bos taurus
aagtgccactcccctgagatccccgtgttatgagaagcctgggctatggtggggagaccctggaagatgaggctgcatgtggagagagaggccatggaactctgagatggcagacatagagtgaagaatctaacttggaagtagatcttgcagccccaaagaccagaagaggccatgtgggttggtgatgaattacccagt

SEQ ID NO: 16981 - DNA, 201 bp, Bos taurus
gaaagccacatattaaatttaccagttacctcaggtgttcatacgctttcaagctgtaccaatattagtataactgatgccatcttgggcccttatggtttcttctgtccttctgctgactctactcaggactgtactgtgcagtgagtcatttctctgttgtcaggacaatgtatgttaacacatttttgtatgtgtcag

SEQ ID NO: 16982 - DNA, 201 bp, Bos taurus
tactctcttcattgtccgcattttctaaccatagtcacggttttgtgctcttcattctaatggtgcttttgatgattggggtcattttaggccttcagctcccccaaaggccacggggattagctatgtccaattgaggaccagagagagccgtggcggctttctcccattcatccccttccattgatttccccgcaatgt

SEQ ID NO: 16983 - DNA, 201 bp, Bos taurus
caagtgtatgtacatatgtgtgataacatgttataacaaacagatattacttttaaaaagataaaaatggagacctcaggaaaaaaaatgtattcactaaggcaccctgagtgactagatcagtagggaataaatatttgttgagtgaacgagtagtttataatcttacagaaaaacacaatacatccagggacatctctg

SEQ ID NO: 16984 - DNA, 201 bp, Bos taurus
gaacaccataggcccgtttaacatcaggaagcccatttgacagaactgcattatgtcatcacatctgtgctatatgttgtctgtgataggtaacagaatttaaaagaaagaaactgaatgtcatcattttgtttggaagggtaacttgcaagtgcacatagggaacatgataaaaaatttaaaagcttgtttattaaaagg

SEQ ID NO: 16985 - DNA, 201 bp, Bos taurus
atggattctggaataaattatgaagtaaaaataatatggaaatctatataatatggaaacaagtacaaatgagtatgtgtagctgtataactctgtaactataaatgcaattaagatgttaaggaatataaaagcaaacctaagactatatctatcttttaaagggcaagtaagcaaagagttggacacgactgagtgact

SEQ ID NO: 16986 - DNA, 201 bp, Bos taurus
aagatcctgatcagagtgcacaaacaagttacatgtgcagttactccaaattcccaggtaaacaccatggttttatcagcatccctccctctgctcacacacattgatctctggaggcttctggataaatggcataaaatgaagaaaaatgcatacattagtttgtggatgggtaagttcaatatgaggaagcagtgcagc

SEQ ID NO: 16987 - DNA, 201 bp, Bos taurus
tataaaagggattttttgtaacataaatctataaatgtgacaggattttttatatagattaatagttaataggtaagtacacatattcataaactcctaacagttcttaagggtatatgcatgcatgctcagtcatgttggacactttgcgaccccatggactgtagccctccaggcttttctgtccatggaattttccag

SEQ ID NO: 16988 - DNA, 201 bp, Bos taurus
ttgataccagaaagaatccttagaggttaaaactgtaatttttgtattatattatcacaatagcaacaacagcaaaactagaggcaaattctaaaagtaagatactgaaacaaatcctgagaaaatatgagaaactaggaggatagatataatatatgaatatgcaatgaggaaaataaaatcacttgtggaaaagttgaa

SEQ ID NO: 16989 - DNA, 201 bp, Bos taurus
attattataaattattagtgccaatcaaagacatgatttccatctcctgattaaatctatacaaaaggtcttcaaacacacagttcagctgccaccaagtaacatatcaatcaagaaagacaatacaagtgagtgatagggctgcaggcaaaacacaatggtttgtggatggcctttcccctctcattcaaagccctgtta

SEQ ID NO: 16990 - DNA, 201 bp, Bos taurus
cttactgacacaataggctgcaaaatcagtctcagttgaaaagtgattcaaacagcaagaacgagagcagagatgcatatgtaagaaatgcaagttaaacacaaccaacacatttgctaaaatatcttaaactaattgaaagatatttgagggaagtagcccagtgtcacatagatacaggctggatgctaaatcagcatc

SEQ ID NO: 16991 - DNA, 201 bp, Bos taurus
agtagcccgtgaggagggaaaaatataatctctagtgatttgataaaaaaaaaaataacaagctccatagaaaagcggaaatgctcattggctgtatcaatacaaatctattgacaaaaactatttcaccccatcatcaaccttgctttttcactatttatatactaatctcatttgaacagggaaaatggaacagggtgg

SEQ ID NO: 16992 - DNA, 201 bp, Bos taurus
atctcaagcccaacaacctttctttttctaatgtaataatcctcacataaaattcttaaatgtcagccttcttcaaatattcccaaacacttcaactcacagtaaactatttctgttcatcagcacttagtcacctcatttctgaagagttttcgagtttaatatatatcttccttatgggctttacttatggaccagagg

SEQ ID NO: 16993 - DNA, 201 bp, Bos taurus
ataatatttgttaaaaatacattcttaagaagaatataccaaaacaattatgtacattcttgtgattacactattttatgcccctcaattttctttacctgcaccttgatcctccactctagcaacagagagtagaaaagacacaatcataaacattctcacaaatatttacataaacacaataaaatctggttaactaaa

SEQ ID NO: 16994 - DNA, 201 bp, Bos taurus
atgcatagggcctaggactgtcatcacattcttcatagccaagacattattcttcattccttactccaaaaggatccaggagctttatcctctggagatattaaaccaggaggcctatggactaaggggcagcaggtgtggattgtgaggtgtctcactgagactgatgggacaaggggaagtctgcatgaggaagagtga

SEQ ID NO: 16995 - DNA, 201 bp, Bos taurus
tgagcctcaccaagttactgaaagtccccttgcatttagattggaggaggcgagatgaaattatcatgcccttacactttagaaaagcatattgagagcaacagtcacactgtaggcagtcctagtaattcctgcctgtgacataaggttctaccatttctcgctgtcactgtctcctgtgattcaggggaggaatttgac

SEQ ID NO: 16996 - DNA, 201 bp, Bos taurus
gaggctgttcctggcaggcttcaggggccaccagactcgcacatggactttgccttgccttctccaaagggagttgcagtcaaggattcagggtccccagctggccaggctattatacatatctgatatatctatagtatgtaatatgtatacacatgtatacgtagtaatacatatgtaatatgtataatatacatattc

SEQ ID NO: 16997 - DNA, 201 bp, Bos taurus
agactgaagactatgagataaactgggttttgttctgatgggtggggctatgctcattaaatctttatccagttttctgttgatgggtgttcactctctgttgtttgacttgaggccaaactatggtggaggtaatgtagataatcaagacctccttcaaaaggtcccatgcatgctacactgtgacctcacccctgttgt

SEQ ID NO: 16998 - DNA, 201 bp, Bos taurus
actgaggggattactgggtcttgttttcatgggcagggccatgctcagtaaatctttaattcaattttctgttgatgggtggagttgtgttccctccctgccttttaatggagccaaactatggtggaggtaatgaagataatggtaacatccctcaaaagattccaggcatgtactgccccagtccatgcccccaaccct

SEQ ID NO: 16999 - DNA, 201 bp, Bos taurus
tcttataaaaagaaggaagatcattgttcaccagatcatcacaaagtaaaccagtcacaagtttctggacgtgcttcaatcttcaatacaaactgaaagccgaggatcatcatgaaatcctgtagtactgaatagtaaatcaaaagctagaataaaccctggcaaggaagacagcaataagaatggagacagagaaatgga

SEQ ID NO: 17000 - DNA, 201 bp, Bos taurus
attacattccacataagaatttcttgtattttcttggacaaaggaacatataatatttgaatggatgtgtgcaaactaacaataccatggactgtatatcatcacagcaaaatatcatttgatgatattctaaataataacaaaaagggggtataaatggaactgggcttattatgccttcatttattaataagatttaaa

SEQ ID NO: 17001 - DNA, 201 bp, Bos taurus
ttcgaaaattcacaatgcatttgaaacaacattgtcactagtgagtcaaactgtttctataactgaatattaggactggaacaagcaacttcttttatttgcatgatcaaggaagaaaacactggattttcatacgagcaattacatgtttcagattaaaaaagaaatgtcatgttgctcaacctaaattcaaggaggtca

SEQ ID NO: 17002 - DNA, 201 bp, Bos taurus
agtgtgagttgtatggagaagatagagaaagaagaaaaacatttctttttttttttttagctctctaattgagctaggcaatagctcacactcttaaaaccgtgagatgttgtgttacctgccatatagatcttgtgataatcatctgtattgttgtccaactatttctgttggcagtatcactttgggttctcttcacag

SEQ ID NO: 17003 - DNA, 201 bp, Bos taurus
ttattcatttaattacacatattgttgggaaactgttatttgggcaaagcaagtaaaaaaaggcttttgacaagagaatggagacaactagggagaagacgactaaaagaagcctggaaagttaggttgggataagcttatgtatggcattatttctcatgattttccttttttcctaagaacgaaaaatcataagttgta

SEQ ID NO: 17004 - DNA, 201 bp, Bos taurus
gaagcctgtgtagtgactgagaatagacacagtatagtcttgacaaagtgggtctgtttgttacactgactttccctcaagagtatatgattttaatgctttttacttttagagactgaaaagaatgtattcaccaagtcaatagaaccacagcaaatgccagaggtaatgttgatctgttcttataaatatacatcaact

SEQ ID NO: 17005 - DNA, 201 bp, Bos taurus
ggcctggaactctgaggtgggagacccaagtccaggacgttggaccaccagagaactcctgatcccatggaacattaatcggtgaaagctctcccaaatgcctccagctcagcactaagaccaggccccacccaaaggccaccaatttccagtgcaagatttctcataccaaatcatcagtaaactaggaacacaatcctg

SEQ ID NO: 17006 - DNA, 201 bp, Bos taurus
tctccatcatactgcatatagtcattaatgatggagcatttcgagccaatgatattaaaagccaagaacaccaagcttcatttaaaagaaaccatgagcatctatgctagattcttcaagtaaaatcaaaacaaattcaaatatagtcagggtattaaaataatggacatttctaaaagtaagcacattaattttttttaa

SEQ ID NO: 17007 - DNA, 201 bp, Bos taurus
agcttcttttagataaaattcttaataaacatgttattcagtactttggaaggatgaagacaaaacaaacataattttacaaaattgtgtcctaaatactatgttaggaaccaactggatgcttttttttttttttttttcaatgaagtttcattttaaaagtaatatatcataccagaggcatgtgagttcagctgacta

SEQ ID NO: 17008 - DNA, 201 bp, Bos taurus
tattctttaatatgagaaaaattagaattttattccatctccttagatttatttcctggattttttttttttaatttggagtaacatttggattgcagaaatagggacaccaattaagacttctacagccttacttctcaacatgtggtcctgtctcattagcactaacaaacttacaggtttctcagaaatgaagaactc

SEQ ID NO: 17009 - DNA, 201 bp, Bos taurus
gccctttttattaatgccgtttaccaatctagcgtggtctgcctttttcctttgttctttccctgccctcctgcacaggggccagtttagattttacccatggaagctcctaaggagggttcaaagctatacatatatgaatatgtatatgtacatgtgcatgtttacaaacacaaatcttgatagatcatggccttctcc

SEQ ID NO: 17010 - DNA, 201 bp, Bos taurus
acaggtgaatgggtgctgtgaaagcacacaactgtctgtgagttaggatgaaactaggggccttaggttccctgtactatggaggagttaaaattatttcatacagtatttgataaatgaaacgaaataaatgacaaatgaaattcctaaattatatcctaatgatttgtgacctattgaagactagggcacggctgagaa

SEQ ID NO: 17011 - DNA, 201 bp, Bos taurus
gtatatgattataagatgtgggatgccttacctacgttggggtcagggtaaatttagtatattttcttggtagatgattctttgaatgagtctttggtcaagcagaggttgagataatgggctactatgtgaagtccctgaagcaagagaggactttcaagtagtgagtttgttaattagttatatctaaggtttgctcca

SEQ ID NO: 17012 - DNA, 201 bp, Bos taurus
tttctccaaagagtattctgtttcatactagtaagatttaagattttgagatattctttaaagaggaatattggaagaatacatgttctgaaaatggaccatttacatgattctgacatagactttctcttttgtttatatttttactcaagaataacaaatgatcaacttttctcttgtgatcatctattcttttcctcg

SEQ ID NO: 17013 - DNA, 201 bp, Bos taurus
atatactaaaagagtaaatatcttaaagaagaagaacttcacagaaaactcagtgttcaccgtagccaccataatcaagcttcatgggtaatagcaaacacggtatagtaatcacaagcctaaatagaactttttttgttttgttttttgtcatcaattcataaaagtagtttggactttatgagaaagaaattttaaaaa

SEQ ID NO: 17014 - DNA, 201 bp, Bos taurus
taaatatataccagttaattcctcttccaaccctcttgtgagttgattttgggattagactgccaaaagatctgattacctataaattaggtaaaagaacgtgttaagactaatctagtacttcttcatgaaggtacagtagaaataacttctattgttataagaaataaaagcagaattttaaagaagatcattatacaa

SEQ ID NO: 17015 - DNA, 201 bp, Bos taurus
taattaccccaaaatcccatgtcaggttctccatgcctttgggctgggttttacaataatcttttatttttcaatcttgacctgttttgatccattctatgtaataccatcaatgaatattcccaaatcatgaattttgcacagccaattatctactttgaaagaaagacaaaaagaataaaacttttctgcctatcttcc

SEQ ID NO: 17016 - DNA, 201 bp, Bos taurus
caattcatgtagctatgtagaggtttactttgtaacagatgttcatggtagtttaagaagctgctatgcttgattacatatccacaatatgtatgtggatatactacctacacttaggttatttggcaacaattttgaacttgaacaatttctattgaaaattcagttaattttaaaaaatccacccatgtaattatatcg

SEQ ID NO: 17017 - DNA, 201 bp, Bos taurus
ttcctaatagagttattttggtccctttacagttttttggaaatatttaaaaagtaataaattaagagaaagtatattaaaaccaattttcatggcatatattattattttctgttttttctgcatttcctttgaaggcatttagtagtgattacattcatatttcttaaaaatatttttaaaatgtgtgatatagtcaca

SEQ ID NO: 17018 - DNA, 201 bp, Bos taurus
ggaaagttgtttcacactcttagctgatcacattttcttggccagggtatttccatattagattatagagctgtggtcctcaaactttagcaggtaccataattacctccagggcctgttaaatctcaggttacaggggtctgaccccagtttttctgattgagtaggtctgggttggaaactaagaatgtatatgttaag

SEQ ID NO: 17019 - DNA, 201 bp, Bos taurus
tttttctttaaaaatacattttttttaaatttaccaaatcaattattatcaaattttctacaatcagaaaagtatgaccaatatcaaaaaatttagagacaagttactgttttggtcccagcctatcaatagtgatacttttggctatgactgcttgagacgcttggctcagctcctgttgcttttaggagcacctgcagg

SEQ ID NO: 17020 - DNA, 201 bp, Bos taurus
gttgaatatcacattaaggtctgcattagttattcaggtgctaggatcttttttttaacacagaaatgccctggagcattaaatctttttttatattcattttagtaactagaaaaagaactttgtagtggttgcttgaaaatgaaaactgctgggaactgagggagaggagatgtatgcagttctttgtcctgagtctca

SEQ ID NO: 17021 - DNA, 201 bp, Bos taurus
aatgaccttggtaacatttgtcttacttgaaatgtcagaagtatttggcatagctcattactcttcttctagtaatgttattatctcttttgtcatgacagtacatatttaaggtgtttcctttactatattgtctgctgcctcttagtctcttttgctccttaaccttctctgttctctaaaatattggtgagtcactgg

SEQ ID NO: 17022 - DNA, 201 bp, Bos taurus
agcaatagattgaggttacagtctatgaagaggcctattagctcatcttcaaagctgtggcctgagggtcagactgctaattaaacatgtatctaatggcgagttgtgatcccctccaaacttggagggtgggtgctatcttcacatgcactgtctctctgcacactgcagagacccaatacctcctggagggaagactgt

SEQ ID NO: 17023 - DNA, 201 bp, Bos taurus
cccccaatccccatctagtcatctttaaaattcagctcagagtcactttctcgctctccccaaagcatttcagctatcagaaacctcctcccatataattccagattagccaagatatacatctatttttgtctgtgtagctccactgcatttcagtcacttattttcatgtctctttacctagatgaatttccttgagga

SEQ ID NO: 17024 - DNA, 201 bp, Bos taurus
gtttcattaaagtgattataataaataatttcagtaggctaactagtgattgaatcactcaatgacctgtatatgtgtctcaggaggtttaatcttaactgtatttagttgtacatttcttgtttgcacattcactcctggttttgaaaatgaattgtccatcataatttatatacaatacccaaacctggtctttctgtt

SEQ ID NO: 17025 - DNA, 201 bp, Bos taurus
atccttacatctactctttctatttttgcctacactccctttctattgactcctactccttttctctaaaattgtatttgaaaattcatcagatgacttgatctcagagtccctcacttgtaaaagcacaatttatttgtcagatctcatgtgaaagggaaaaatgagagtttggtagggaatctcacctattggtaatac

SEQ ID NO: 17026 - DNA, 201 bp, Bos taurus
tcaataagtttggccaaactgccagtggtgtgtgggtttggatttttctctctccaggaaattataacaattcagaccagactagaagacacagggtcatgtctcatcatttatggcccatggcctgggaatggggactaggtggtcaagctcaactgtgtaatagtggaaaggagaaaggagatagtgtgaatggagaaa

SEQ ID NO: 17027 - DNA, 201 bp, Bos taurus
taagtacataagggacaaataacacttctgaggacattatttcttagaggggacttcagtgctataatcaaagtgataaactgaatggtaggattttaagaataagggtagaatggtagaaagatatttttattgaagaaactttttacttgcattaccatatgtggactgcaagtaactctgtatttgtttcttggtttg

SEQ ID NO: 17028 - DNA, 201 bp, Bos taurus
aatattactgactccagtactcaagaacttttctatacctggcatttgttaggctatatgtcagatatttgacaaacatttccagacttcatctatatatttagcatccctctagatctttaaggatggcaaaatcagctctgactattgtgaaagcaagatcatacaaaagcttacatagaatagctgaaaatagcctgt

SEQ ID NO: 17029 - DNA, 201 bp, Bos taurus
tgaatgatctaacattaaccatcctcatactgtagttaccattattattagcacagcagatgatctttacaacttagcaaaactccaagaagcattattaccgattttctttaaaagtgcttctaaatcatttgccatttcttttgatttatgtcccagtcagaattattttcaagcgactttttagggtcttcaacctta

SEQ ID NO: 17030 - DNA, 201 bp, Bos taurus
attcttttataatttgcttatacagtcttcagagatcctgtgaattattcctatctgaattgttcagtttcagtgttttgtaaagtagcaacagactgaagatggaaaatgttaactctaaataaatcagaaaccactcacagatttcttaaagccaaaaaagtaaacaagaataatctaattggtgctgccaagccaata

SEQ ID NO: 17031 - DNA, 201 bp, Bos taurus
gaagcaatcactgtgttgaggagagtgtgataagagttttgcctgtctgatagtaagcacaccccatagctaggggaaaaagtggaaaggaggatactacgttggctgccacatgaggaccatagatttgtggaaggtaaggagtttactcaagaagtgaatgaggtagtgagatagagagctggctaggtaggtagacaa

SEQ ID NO: 17032 - DNA, 201 bp, Bos taurus
tctgtagtcaggatatcagtactgagaaattaaagggtaacttggtcctcatgaaattgcgattgagagattcagaaagatgactttatagccttactagtcagggcagaagctgctaatagatggggcttaacttctagaaaccctgattattgaaaatattatggtacttctgactgcataatcaaaatatattcatct

SEQ ID NO: 17033 - DNA, 201 bp, Bos taurus
attaaattttataagctaggcttatcctatattgtaattgaaactcaagtattcagaaatttcataagaaataaggttgtttcttattcgtaagatgatcagttttatgatacaactgcggaacccagaaggatcaccttctttctcttcataatatggacaacatggaagaattattgtctatagtaaggagattggata

SEQ ID NO: 17034 - DNA, 201 bp, Bos taurus
ttaattggatattgaataaaattgctgaaatgttttagggcacctatgcttcattcagtggttggcattctttcataaagggccaaaaaataaatcatttggggagttaagtgataaaatagaggatagaatattggtacttatataatcttttgtagtgcatccatttaaaaatatgaaaaacattcttagcttgtgggc

SEQ ID NO: 17035 - DNA, 201 bp, Bos taurus
atgtaaaaatagttcttactgtaaatatgaagtttgcacgtactaatggtggtaagataaatctgtagacagaagattcatttttagtcagttttgttgcaaatgcacttgtatgtctaacacatgctgtatacagcggtcctctgtatccatgggttccatatttgtattcaacacatcatggattttagaagggacttg

SEQ ID NO: 17036 - DNA, 201 bp, Bos taurus
atgtggtaccaacatgctgccttgcttagtgattttatttatactccttatttcccttcagagactccgggggtagtggagggcaggtgtttttgcattattactagtcctttatgtatctattagctgttaggtaatacatatttgtgattgagactaatcttttttattttctctgtattgccaggaacctaccattga

SEQ ID NO: 17037 - DNA, 201 bp, Bos taurus
tttaaattcttaagcaaatcaaaaattgaacagtctaaatcaaagtttagtaattaaaaaaattgaacagtcattccctaatgacctacataagaacagaatcttaaaaagagcagatacatgtatatgtacaattgattcactttgctgtacagcagaaagtaccattacactttaaatcaactatactccaataagaat

SEQ ID NO: 17038 - DNA, 201 bp, Bos taurus
ttttctgtaacatgttaccccaatacaaagctaaattacattctgttaggttttgagaagtataggatggagaaggtgtcattatttggttttattcatcttgggttcaagaacgtaactctaagattatttagaggcatttaatgtaattattatgttatgggtattatatacaatactatatatttatatcatatcagc

SEQ ID NO: 17039 - DNA, 201 bp, Bos taurus
catgggaacacaatccacactctccttgcttccaacatcttgcctttgaatattttgtttctggattgctaaaccttgattccaccagttgaaattatataattttaacatcttatattattataaaacaaatactctcaaagtaacttgaaagaatatccttttgatttgctggtcaacagttacttggaataacttctc

SEQ ID NO: 17040 - DNA, 201 bp, Bos taurus
gccagaggatatgactgctgaaggttgcttctgttccaaggtgatgtgaaggagcaagggagtagagaggaggaaaggaatgcaaaccaggaatgaatgcgtgtcccattttcctcttttaatatgcatgcatctgtggaggaagatgtcaacatgaatgcctgcaaataaaatcataaattctggcaataaaagaatgtg

SEQ ID NO: 17041 - DNA, 201 bp, Bos taurus
tctagtcaaactttcttttaacaaaggcaatccatctacaatatccttgactgataagtatctagtctttctattttgggggcctcagtgtgtccatctacatgatgaagagagctgatcttcaatttgaatcaggacccagggtagaggctaggcctctgaagtttaaatttaataatataatctagcaaaggccaagct

SEQ ID NO: 17042 - DNA, 201 bp, Bos taurus
tgacattccataatttgatgcatatgggaatatttgaatgaatgaatgaatttaaatggaatttataatacatagatttggtccttaatggtatataggagatgaaagaatccaaagagctaagaggttcccaggttcagacaatcaggaagacattcactagacaaaataataaacacaagagaaagcagtaatgtgaag

SEQ ID NO: 17043 - DNA, 201 bp, Bos taurus
tccaagctctcttgactatttcaatagtcttgatctctactaaatagtcttgaataaaatgttcattccctaactccatctgcttaaggcaatgtttcttagacaaaatgcaggactgacaaacaagtgaaaaaaactaatttgagagagggtaaaaagagctggtcagtttagtcagttcactctctcagtcgtgtccga

SEQ ID NO: 17044 - DNA, 201 bp, Bos taurus
taaagctggccttggtcccatcattcctctcttgcttgttcctcttcagccatgcatgccatcttgcaggttctgctgtactctatgcaaactacctcactagggcctttgtacttgctcttgtctcttccatctgaagtgctcttgatgaaaatgtgcacatggttctccagctccatttcttgggtcttggctcaagga

SEQ ID NO: 17045 - DNA, 201 bp, Bos taurus
tccatcaaaatgttttttcttcattcagccatacattcgtgctcctctgtcatcttcaaatatttaatagcgttctacgctaaacaaaaatttatgatacagaaaggaataatacatagttgctattgacacatattttaaaaatacttaattttctatttatgttaaggtactcactctatgttcccaacataaaagtct

SEQ ID NO: 17046 - DNA, 201 bp, Bos taurus
tacaaatttgtcaaaatgcatactccaaaagcattattttccccaagtaacaatacagttcaaagcctattctctgctgagatatattccccaatgaaattatcagagacatcagtaaatttcttagtgtgaagtacctacattcaggttattttactttatttaggtctcctccataaacagaaagccaaaataaaacaa

SEQ ID NO: 17047 - DNA, 201 bp, Bos taurus
ccatctttggctcaaggataagaggcatgggagggatagcagaatactgtcagaaagcttgatggagacaaactttgaggccaccatacaggagtggttccccaaggagggagccaaggaaataacaaacctcagactcactcatccctccctctgacctcctttctgggatgcaaattggcccaacccaacctaagctga

SEQ ID NO: 17048 - DNA, 201 bp, Bos taurus
ggctcactgtcatatgatattaattttaattgaaagtaattattcaaaattatgttttcttttcttcatattagtgtcggttactattgttacatcagatgtcttggagatatcttaaggaaaaatattttcatataacttttcaaaaatatatttttgttaaaaataaaaaggtactgctctagagagaaagcagaaggc

SEQ ID NO: 17049 - DNA, 201 bp, Bos taurus
gatattctttgcaactggtaagaaaaaaaaaatcaatttgttgttgtttactagctaagttatctccaattccttgcaaccccatgaactgcagcatgccggtcttccctgatcttcagtatctccagagttttttcaaactcacgcccattgggtcagtgatactatccagccacactttgccaggcccttctcctcctg

SEQ ID NO: 17050 - DNA, 201 bp, Bos taurus
gttttatttagggcatatcttcaaagccctttaaatgactgctaaaaagctgttccatgttgtagaaggatagatttaactatgtaatttggcaatgttgtaatgttatatgacaaaccaataaccttaataaaaatctcaatatttatgtgaaattgataaaatgttattaaactttagtgtagttgtctaatatttaca

SEQ ID NO: 17051 - DNA, 201 bp, Bos taurus
gtggtgttaatatttcccaaataggctctttgacagtgcagttaaggtagactggcttaatgtactgcattgaaagtagttttttttttttttggaaaaactgtaaccctgccatatccaaaatgtttttctcagtgactctctactctcccctttgtatcttcatttgctttccagtcctttttattttcagttacacta

SEQ ID NO: 17052 - DNA, 201 bp, Bos taurus
gcaagatgtcctccagtcatgttccttactgcttatgacagcaagccacattcttatttttgagaaacttaaaggcattgaactttataaaactatctctgccttttaactatactttccctatcccattttgttcccatgacagtctaatgtcttcagcattcagctgagcattgcattgcccaagggaaaactagtcac

SEQ ID NO: 17053 - DNA, 201 bp, Bos taurus
catggacagaggagtctagcaggctacagtccatgaggtcacagaagggtcagacatgtcttagtgactaaaacaacaactacaccacctacacttcctttatgtactcaatacccccatgataattctctcaccaatcacctacacttcctttatgtactcaatacccccatgataattctctcaccaatcttacctttt

SEQ ID NO: 17054 - DNA, 201 bp, Bos taurus
agcagttttgctcaatatgatatcacattcatgaggagggaactcatcatagagtctgtttcagttgaaccctccactttcctttgcaagatgcaaatatgttcttcagttcttatacctgggagctcttaactgtgtaaacacactactgcctccccatccacttactttcacatactttcatatgtcctcttacaaatt

SEQ ID NO: 17055 - DNA, 201 bp, Bos taurus
ttctctcatagttttggaggccagaagtctgaaatcaaggcattgtcaatgtcaagctccctctaaagtttctaggaaagagtctttctttgcatctcccaaacttgtggtgttggccattaatccttggcatcccttggcttgtagttgtgtcactccattagctcaaatggtaaagaatctgactgcaatgcaggagac

SEQ ID NO: 17056 - DNA, 201 bp, Bos taurus
ccccagatactctgatattattcgagattgttgtctggctatggacatatatataatcaaatatagcagatgatatattccaaaagtaatagtttggttacaaggccattcatgatttcatgtatcttatattctatccattagtcacagtgaacaacctgcaaattccaaaatagtgatgataggaagtagtttcttgac

SEQ ID NO: 17057 - DNA, 201 bp, Bos taurus
ctcacaagtagttttcatgcttaccaatgttttggtttccacttcctgtataaagggaattataacttagtgtatgtattgtttgtccccagaagtaagaggataactgtgtatgtttgcatttaggtcatcctgtccattgaagaaggttacagactaccagctcccatgggctgtccggcatctctacaccagctgatg

SEQ ID NO: 17058 - DNA, 201 bp, Bos taurus
aaagcactggtaaaactgcaaccctgcttctttatttctagtatgttaatggtttgaaggattgggtaatactctggagcctaatatttgtttattatccattgagagctagaaattgtgtttacttactgcttccaataactctgtgaggtcaggatttatctcatttattcatgagaaaaaacaagatttagaattcaa

SEQ ID NO: 17059 - DNA, 201 bp, Bos taurus
actgaaattccgtacacctacttactgatgtactgaggaccttatcctacaagctatctgcctctgtcttttgcaaaactttccttttatcatgttggtattcaaaagtcctaaacatagttgccaggttatacttcatagacagaactatgattaaatcatatcccttttcaataacttttacaggattgacattgctga

SEQ ID NO: 17060 - DNA, 201 bp, Bos taurus
gggaaaatcaaaacagggtaaaaagataaaggcagttggggcaaattgaaaagaaaggagaatcatcacagtaattcatttgttggattacgtaatgatatcagagtctccaatgagatttttgtaaaacagcagaacaaatccaactcacagaatgaaactgaagaccctaccacatcttttagccttttcttaaaatct

SEQ ID NO: 17061 - DNA, 201 bp, Bos taurus
acttttttcatctatgtcaattagttaaccttcacaaagttcctgtcatgcttaatgttatgtgtcaacttggttgggccattgtgtcaagatatttagttacatcttgaattgcaccatcagctttcacttcggtctccagtacactggttcactctgcacattttcacttgtcggcctccaaagtcatgtgagccaact

SEQ ID NO: 17062 - DNA, 201 bp, Bos taurus
gaagttacagataataaaagcactgcttttgacctaaagtagttattaaaaagttttcaagcttgtaccagctacaaagcattctctgatattttggccttgtattagtcactagattagtatcctaagtaatcatttcagcttaaatctttctgaacattgttttctagatgtagagctgtttcaacttctgcttatttg

SEQ ID NO: 17063 - DNA, 201 bp, Bos taurus
attgagtctctagagttcttctcaaaatgtttcttctcccaccaatttgactctgtaatctttgaacactttcactgtggttaccatgacagatattacaaccttgtggacccactgctcatctaactggaaggtcacttgaggctggtttctatttcacctcttgtcctctttcgcttttcctcttgctggtcacagaat

SEQ ID NO: 17064 - DNA, 201 bp, Bos taurus
aaaacaaacaacttacccttgaaacgtcaattggcattgcaatgtatgagtgtgcaacaagaataaaggaaaaagaaatgataattatatttcatggcaacagtcactgacaaaaagaagaatgcattagatatgagaaaaggacatctgactcattcagtgaccacccaggagaccaagaaggaagggactccccaaatt

SEQ ID NO: 17065 - DNA, 201 bp, Bos taurus
atatcactatacaccattagaatagctagaataaaagaacagtgaccacaccagatgcagccaaaaatacagagaaattggatgacttattattgctagtgggaatataaaatggtacagccattatgacaaacaacttggcactttcttctaaaattaaaaacacatttactgtacaacccagctgctgtactcttgggt

SEQ ID NO: 17066 - DNA, 201 bp, Bos taurus
tcttgtggccccaggaggatgttgaaagtgaaagagcagatgagaggtgctcgtagtccatctaggagacatggagtcaggagagattggctgggcagccagagggcccagggatgcgccgtcgttctccacctcttagccaaaggctcacctctcccttactgtattccacatgtttttatgtgtcgccaccaccgcccc

SEQ ID NO: 17067 - DNA, 201 bp, Bos taurus
acccagcggctggagggaccaagagacacagattcgtgggagtcagagccgtggagagggaagagaagggagcagagtgaagggtaaggctagttatcccagagctgggatccttcttttctgcaatggccggaacttgcccccaacagcgagggcagccttctgtttctggtgccggaagctcagtgtcagtcctcccct

SEQ ID NO: 17068 - DNA, 201 bp, Bos taurus
aaattgactcttacatgaattatttagcttcactgttttcagcttttttactacatttataagtacatttgtaatgttgaagttctgataactgagccttggaactccttgttcagaagataacattacttttaattatttagttgtgagactacttacagtggagcatattctggtttcttgcttatggttgtgctccag

SEQ ID NO: 17069 - DNA, 201 bp, Bos taurus
aacccttgcacgcctcgtcagcttccgggccctcagaagccctgccccgcgtctgggactgtgcctccctttctcgtcatccactctggggccaaccatgttgctccggctcccctgactgtgaggggaggctgttcacagtgtggtgtgagaagagcttgccggtgtggcctggagcgtccgcctgtgtgagcgcaaggc

SEQ ID NO: 17070 - DNA, 201 bp, Bos taurus
tagctttctccttcaattaggtcaggttgttcctcctcatttacaactgaacacagacttcttaattttcagaatactgtgacagagaatgagagttccactttggacttgaaggaagtgtgtttaaaataagagaaatactttgttgagatagtgtttaatccccagggcattttcacaaggagtttgaagcaaattaag

SEQ ID NO: 17071 - DNA, 201 bp, Bos taurus
gcattacctagcgtggtctcaggtggttcagacacatgtgtaatagatcccacaactgtatcaaaacaaaggagaacaattttaaaaactgtaagatgttaagctgcagtcaagtatctctttcttgaatatcaacctcattctcttgggaatctgcatcacatttttacagataggacaacaggttaggataagaaaaaa

SEQ ID NO: 17072 - DNA, 201 bp, Bos taurus
tagttttatctacaagttacttttaagcaatgcttacaatcatcattactaaagttcttttccataatgtattcataatcttaatgtgctgatcaaatgccatgcagtagaagtgtgctggcttggagaacacagagctaaaacctaagagttgtgaaagaaatagatgtatctttttgaggttcagtaaaccaagggatc

SEQ ID NO: 17073 - DNA, 201 bp, Bos taurus
aggctttgtctgatttaacactcataacaaatgtgaaggttttattatcttcagattattgttaagaaactaagctttaaagaagacttgcctaaaatatcacaatatataaaggggtaaagtcaagattcaaacacagatctgcctgactctgacaccagcattctgaatgactacactacactcagtaactttaaacta

SEQ ID NO: 17074 - DNA, 201 bp, Bos taurus
aaatacaaaccagaagttacctttggatgattaggggtagaaaggcaattaagattggatcaacaattattcactcagatcacaactatttattgtagtgctagaaagcggaaaataaaatagagtttcacggtaaatgaaagttaaaagatctagtattatgtactaactgacatccccaagctttttaaccacaatttt

SEQ ID NO: 17075 - DNA, 201 bp, Bos taurus
ttgggagatccttcacttgtcactgaaaatttccatttgtatggttttgtttcattgatgaaaagaaaatatttgcatacatgtgtcctaaattttccagggcacttgcaattttaagttattttgtactaagacaagagaccttggtttttgatttagaaaggaaggatttccaacatattctagttaatattttttaat

SEQ ID NO: 17076 - DNA, 201 bp, Bos taurus
ggacctagatttgcagtccctctctccccaaactgtttaactctgctgttgccagactatgttgatgatggggaaaatgtatcgaaatctgcagtaagtgtatctgctctattggtgtatgggaagtgaggcacagctttcagaattccccagatctaatggaacattagtcatttttttcctccccaccctcaaggaata

SEQ ID NO: 17077 - DNA, 201 bp, Bos taurus
tggattgctgagttgattactggagaggagataggaatttttcctaaggaagaaagaattacctaagaggaaagctcaactctttcctttttgaggctcagtcttataaacaccactctgacagaccagatctttgaaaagtccagtgacataaaggtctccaatgtccccagggaggaactcactgtgggagaaggtaga

SEQ ID NO: 17078 - DNA, 201 bp, Bos taurus
gctgttgtaatagtcactctatggatttacatctaggaaagatgggttatatagagggataggaacaattgaatttaaaaaaatgtgttgctattatgccctattttagttactggaaatattaatttcagagtttcaggcaaaacctaaaaaaacccttggaaaaaaagttttgtatttaagcctgagtctggctctaca

SEQ ID NO: 17079 - DNA, 201 bp, Bos taurus
tttttcatcatgtggaggcagcgagttgtgttaaattctgcttctttgggaagatggagagtctgctgaacattatctccctaggaagataatttaaatatttaaaataacaggccatttgttgaccttgcagcataatagcatgtaacactccttgctggctgcaacagcttgggtttttacccttcaaccatttcacat

SEQ ID NO: 17080 - DNA, 201 bp, Bos taurus
tgaaacagtcactattagtaaaacacaatgatagtttatatggtgtttaagattggttcatttaaatcttgtttaatcatcagaattctttcttctgcttgtgacctgatagagtagaaactatctgacatgtgtcaaacagcactcaaaacagaaaattacattgcaactatctgaatcatcctgcagtgtgttcaccat

SEQ ID NO: 17081 - DNA, 201 bp, Bos taurus
tttcattgatgtataattgataaaattgttagatatgtgaagtatgcatcttggtgattttgatagaagggaataatgtgaaaagattcctcctatctacttactcatatatttatcttttgggggagagctgatgagtaatttttcttagcaagtttcagttgtgctatacagagttatcaactatactccccatgtcgg

SEQ ID NO: 17082 - DNA, 201 bp, Bos taurus
aatgcttctattttaagacttggcccacatgacatggaaaaatagtcatagaagagacatatcaatctttaatctaccttgggcttaaagtggcatatgttacttctgttcagtctgttggccattactagtgataagcccttaataaaacagcataaagtgaagttgcccagtcgtgtccaactctttgggaccccatgg

SEQ ID NO: 17083 - DNA, 201 bp, Bos taurus
ctcccatgagtgggtagatgagaggagcattgaaccaggtactatgtatcaagatcttttagttcaaattccagtctttcttttgataaacttttcaaccaagggcaaattcacattttcatgtttaaattttcatctaggtaatgccagagatttggtgttctctgaaatcttatatttcctgagctacctttcaaaggt

SEQ ID NO: 17084 - DNA, 201 bp, Bos taurus
tgtaacttgttatggtttagtagtgctattggctgctgtcattatcatgattttgtatttcaaaagagctttagttagcaatactgctagtcctataaagtgtttctagcaacttgagatattaaccaaggctggcagaaaattactccattgttgttaagcaagatcaattgttcaaagatgttacctttagtgattgtt

SEQ ID NO: 17085 - DNA, 201 bp, Bos taurus
tgtatgtctacatcatagctggatgctgcttgaggaattaccctcaaccaaaaataactgcctgttttcaataaggttgacatgggggtaaactgtaactgttctttagatcaactggagactgtttgaagaccatgtgacttgttaactccccatgggatcaatagtggtctatatcacaattgtaacataattcaagtt

SEQ ID NO: 17086 - DNA, 201 bp, Bos taurus
gctatgattgttaactctcttctgatcatgtggctaaaaattaatgatttatgaaatactggccttgcttcttcgtttcattattaattaataatgaggaccaaaaaggcaaaaaataaaaaaaattctttgatgtgccaactttagtgctttacagatatctgcataacaaaagtctgttatatgtgaactgtatctact

SEQ ID NO: 17087 - DNA, 201 bp, Bos taurus
aaacataaataaaaagcaaaaacaaatgtaccctatcctgatcaaggtataaaacacacacagttttagggccatatatacccatcttagcttgtcttatataagcaggaacttttaaaagtatgtcttatttcaaatgcacatatttatgtaaaaataaatcaacatataataaaaatgtaaatttctacataaaggctt

SEQ ID NO: 17088 - DNA, 201 bp, Bos taurus
gcaggccataattttcagtttcatctttcactatagcaggacatatgaaaaggatttcctcccttcggcaagctctacctttcaggaaactattgtctcaggtggcctgtgtctgctgctgctttttaaattttgttacaagctctttgaccctaaattgagccactggttcctgaacatacttctacatctgaatcactt

SEQ ID NO: 17089 - DNA, 201 bp, Bos taurus
gtcccagctccacataagtgagccccatactcaaaccagagcttatattagctgttttgtcccattcacatccattggcaacttcccttttgtagcaccctacacttttcctagataaagcctttctacaccttgagagtttgagtctgtcctttctctttcaaactaaacctgcagcttctacttggaaatccaagagaa

SEQ ID NO: 17090 - DNA, 201 bp, Bos taurus
caaactgaagttgtgggctgtgcatgagcagacatgtgtggaaccacatcctcaaggccaggggtaagagcctcaccttcaagcagctggccctggactcgcccaagggcttcagcatcatcctgctctctggtcctcacaaaagcagggaggtatacaggcatttccttaaggcccggggagcagcatggccacaccaaa

SEQ ID NO: 17091 - DNA, 201 bp, Bos taurus
acatgcctcttagagccatgtagccagaccgacccagcagcccttgttccccatgccaactttctgtctatcaccaccccaagatgagcaaaagtattacgtgaagttctctcagtgagagtacaacctcactcagtgctggagagggatggagagaatgctcttacctgatccttcatgggatgcttgtagtaggtgtct

SEQ ID NO: 17092 - DNA, 201 bp, Bos taurus
agtatctattcttttcctgagaaacactgatataactttgagactttctgtgattccaaggatgggcaaaatatatcaagataagccaatgattaaattccgtatgcctagacctcagattactttagagatgctcatgtgatttaagatagctcaataatattgaatttcaggatttcttctgggaaagtttgaacaaaa

SEQ ID NO: 17093 - DNA, 201 bp, Bos taurus
gagcatgctccggggattgttgatggacgggaagcctggtatgctgaagtccatggggtcacaaagagctggacacaactgagcgactgaagtgaactgagaacaactatctctcaaaaccaaaaccaacccggatttgtagtgtttgccaatttccaatttccatttcccacgatggcaatttcaagctgccagtgtgac

SEQ ID NO: 17094 - DNA, 201 bp, Bos taurus
ttaaaaaaaacctctcccacagagtgtgtaagagacgtacagaaacattttactatatgactcttattcttcaatattccttattaattgcatgcttctcgtagtataatctttcctataaggtgactttcgtagataatttgactcttgatcttttgtgacatatttttaattaggaaaaatttcaagatcttcagtgat

SEQ ID NO: 17095 - DNA, 201 bp, Bos taurus
tatttttgaattgaatcaatgaagaaaagaaagttttatggtatcctttaaggaagaaattcaaataaagtgtgcttcccactgaagcacagaaaaccataaggatgttctcttttttttttctttaaacaacatcaaatcattctcactaggaaagggggacttctaaaaggtcacggaatgcattgaagataagcagtg

SEQ ID NO: 17096 - DNA, 201 bp, Bos taurus
tctattagctctcagtgagccaaaaagtcatgagtcctgtccaagtttccatccagggataggggactcaaaaagaaggctcttttcttctgggatgtctggttctttagactgaaagtcattgaacggacactacagcaaccaaacaattgctgatttagccccattattatttgtatacctaggcttaacaaaggaaaa

SEQ ID NO: 17097 - DNA, 201 bp, Bos taurus
ctacttaccagatatctctagagagacacagttaaatatggaaataactcttgtggtggtcccaaagctagttacttatatttgcatagttcccgcctttgctaactataaaatactgcagcagatttttatgtctacttatgtttcacttgccacatcttactatctcctattcatatttttcctcatcttgattgttta

SEQ ID NO: 17098 - DNA, 201 bp, Bos taurus
agaagagaatgaggtattactcaatgaaaacagaaaacaattgttttctcttttaaaggataatgagttcaagatgaaactgtcttagtcttcctttcttcaattttaaatatcgtcccctagaaagccaacaagaagagaaaaaatttacgtctactgttctggatataacaatttctccggcctaaaaagacctaagag

SEQ ID NO: 17099 - DNA, 201 bp, Bos taurus
aagggagtaattagaaaatgggataaagcagaatattcacatcctaaaacaactgataaagtaaataggagcgagttaactaggtaaaaagggccaagaatggctttgtggaggaagacaggagggtggagggtatgagacttgaatccatctggctgggtgaagtggaggggaggcctgtctagccatggggttctcctg

SEQ ID NO: 17100 - DNA, 201 bp, Bos taurus
atggaattttgactttgtaactgaaaggattccagttcagccagacaagaggattaatcttattcttattatttttaaaaagctctccttaataggtcaatagaattttcactgtcactaaattattagggatttttgttctttcccatctctgcttcatgttatgtggcagcttagatgagaggggaatttggggagaat

SEQ ID NO: 17101 - DNA, 201 bp, Bos taurus
gggtgggccttacctaatcaggtgaacccctctaaaagaaggtttagaaataagagagagaagtcagaggttcaaagcaacagagacagacattttcctgttggccttgatgcagcaaattgcaattttgtagagatatccatgtggaagttaataaacaggtacattctaagaactgagagcagccccagtcaatagccg

SEQ ID NO: 17102 - DNA, 201 bp, Bos taurus
tacaaaactcttttagattaatgtgcagaaaaatatgaccagtgacaataattccaatctaaattaagattttaattatttcagattttgaatcactttgagaatgtcagtttttcattctgatatttgctatcaaattaggcaggtgttatgtcaataaaagtaaacttcctttttaaaataatacttaaaacttttttc

SEQ ID NO: 17103 - DNA, 201 bp, Bos taurus
tctcagtacctcagcagtagggcctgttgaggccaccaacaccacacagggtaggcccttaagcaataatttagacttgttatgatgacaaacagaaggatgaaacaatgtcttctcagttcagttcagtcgctcagtcatgtccaactctttgcaaccccatggagggcagcatgccaggcctccctgtccatcaacagt

SEQ ID NO: 17104 - DNA, 201 bp, Bos taurus
agtataagcaaaaggtcaaacagggaaggtgccagctccctcactgaaccacttttccccaaggatcagccccatgtcagggcctgggggataagaccagatggagaatcatctcactgccaaccgagtccaagataaaaggctcttcaggtttttatgtacctgagggccaggaagaagagggagagggaagggttagaa

SEQ ID NO: 17105 - DNA, 201 bp, Bos taurus
ccagggaactagatctcatatgcctcaactaagagtttgcatgccacaactgagacccagagtagcatgccacaactgagacccagagtagccaaataaataattttttttttaagagtgtgtccaaaagtcagtttctccatgaggctttccctgaccacctacttaaaatagaaaatttcccccagcatttcctatact

SEQ ID NO: 17106 - DNA, 201 bp, Bos taurus
aataacaaaaaaggagttagtctggtatcatcaaaagaatctttaaaaagtgttgacagtgtcagctgggagtaaaatggactaaataactgagtccaagtttagcaattatggtcagggtgctactataatggaatttcttattataaattaaaaagaatatagaatttttatcatagtagaataaccactctgacactt

SEQ ID NO: 17107 - DNA, 201 bp, Bos taurus
ctcaggggcccctggaggcgcccaggaccccagaccccggggctgccgagacgaacgaaccggcggtaggtcccccttttcaccccacatgttcaattaagctggattcccagagacaacaggacgcccttcctgcaagcggcgggggtatcacagggcatctgccgccccctgttggtgaccaggggcaaaataacccga

SEQ ID NO: 17108 - DNA, 201 bp, Bos taurus
agctttaattacacctctccaacatatagacacaaactaaaatctacatcaatatccagtgactgccattcttaccagacatgctttaattatggaaatggtcattcttgttgccagcatgtaaacttttttgttcagtatagccaccacctgaaacttccattgtgtcatattttctgaaatatctttttatagccacta

SEQ ID NO: 17109 - DNA, 201 bp, Bos taurus
atctgcttttagggtttgcgctcctgacagcaccctcagtctgcacatgtccaggtatccttttacattcccatgtacaaatgtcatattaatttataacataagagtgtagacacagaagtagtatgtttgggattagtgagagtagaaatgctgttctggaaatgccttacatccttgcaagagtatatatggcaagag

SEQ ID NO: 17110 - DNA, 201 bp, Bos taurus
agatttggagcaggggagtgcagtggtgagagcagcctttgaagagattcgcttgctggctgtgggggtggcagactgcaagggatccagttggttgtgacaactgagtctgtatcagagggaaaggaagggagtcagcaaccactccagccctgaacttgagtgtgtaggagaagggcttccagaagtttgccctgattg

SEQ ID NO: 17111 - DNA, 201 bp, Bos taurus
aaaaccaagatcacacaccttgtcaggacagcagatggccgggtgtcaccagcaggaggcactttgggtaagaaaaggaagtgcttagacagaaaggaccggagcaagcaaggggccaccatggcctcagtggccagaaagtgactctaagccaactgtgagtcctccccgaaaagtaggtctgctctgtgggttctctct

SEQ ID NO: 17112 - DNA, 201 bp, Bos taurus
ataagcagggtctattcaggtggtggtattctgactgaggatcaatttgtgccccgtgagtctgggaggaatggggaacccgggccctggcctgaaggacaaaccacccccaacaggcaaggggatagaagcaacaatgcagacgtgattgaaattacatggctcaatgatgattctcttggcttttgcatgtaaaggctg

SEQ ID NO: 17113 - DNA, 201 bp, Bos taurus
aatgagggttgggacatgtgctgggggtgggggacagagaggggtggtacctcagatctgatcagtgtttagacactgactcatcctaaagaaactcctacggcattaataaatacaaaccagcatagctgtttgctaattttcatgagaaattagagtatatatctttcacacagaccagagattgacagctttgaggtg

SEQ ID NO: 17114 - DNA, 201 bp, Bos taurus
gagaacagaatatgaaataacaaacaagtccatagtagttaaatgaacaaaatctgaaattgccaaaggattttttgtcccaatgactttaacatcaaaaaacactcacaattcattctgaggtttctagtaacccaccacactcttatagtaaagattttaatcaacaggataagggcaatttctactggacacaaaata

SEQ ID NO: 17115 - DNA, 201 bp, Bos taurus
ccccaacccgccaccgcccatttcccacctcagcgtgctctatcagctggtttgtgctggagaaggcaccaattcctggatttagttttcttccagacacgtagacaaaaccaacgttgtatgaatattttgatcagtaactggggatcctgggcagctgctccctgctgtggtcagtaactaagtatacattgtatagta

SEQ ID NO: 17116 - DNA, 201 bp, Bos taurus
catcaatctaaaggtgtatacttcaaatgcaacttaagtttctggtcagaaaatagtacctccttgtatttttccagcctctatcctttataaatgaggacggctcattcttcatggacctgaaaaatagaatatcagcatgttctatgagattcctgtgactttcatcagtgggacatacacccagaacaaagcccagtg

SEQ ID NO: 17117 - DNA, 201 bp, Bos taurus
cagaggagtgaaccatatggaaggaaaagatgatggatcattcctaggaacctgaggtcacaggtcaggggtgagctaactatgggctctgggccaaatttggccatgtcatttgatctcttattatggctgctttcaagctaaggttgcagacttgagtagctgcaactgagactctatggtccacaaagccaaaaatat

SEQ ID NO: 17118 - DNA, 201 bp, Bos taurus
accttctgatctgaatgagaagagcaaatcctgagaagacatgtatacaagcattctgggcagaaaaatgaagagtgcagaggccctgaagcaggagcacgcttagcaagttggaggtcctgccaaagacaagtgcggactgagcagaactagttggagatagcgtgtgggaagagagggctgcagtacaggagcctagag

SEQ ID NO: 17119 - DNA, 201 bp, Bos taurus
cacaggggccagagggaaactggagaaagccaggggatgggttggactcccctggaaggatggggcagacctggcagaacacacagatgttgcctttgagctcctgcagttggttatgtaaccgccggcactccatctcaagcccatggagatgttcttcccactcagccagtgagccctcccagactgcagccttctggc

SEQ ID NO: 17120 - DNA, 201 bp, Bos taurus
caagaggcagagattcttccttattaccagacagaaatttgagaaaagggaaaagtgatagagagcaagagagagcacaggcttagatttggtctgaagttgggtagattaactcatttgttaattcagtgactatttatagagcttctctgtaccaactttagctttggtgattcatcagtgggcaatgaagacgaggtc

SEQ ID NO: 17121 - DNA, 201 bp, Bos taurus
atatacacatagttataccacagatctccagagcttttccatcttacatgactgaaactctatacccattgaacagaaactccggatttttttcctccccgtcagccccttgcaaatattctactgtctgcttctaagagcttatataggacaattttcatagaagaaatagagaaagttatcaaaggacaacttcacaga

SEQ ID NO: 17122 - DNA, 201 bp, Bos taurus
aagcgtcttttaatttcatggctgcagtcaccatctgcagtgattttgtttagtgcacagataatctaggttctaatcccagctctgccagttcctggttttgtgaccttcagcatattatataaccaatctgtgtctcaggttccttatctataagatgggaatgctatagtgcctgtctggttaaattattgtgagaaa

SEQ ID NO: 17123 - DNA, 201 bp, Bos taurus
ctgacctcaagtaacctcactcattaatgctactaatacatgatatgaaaacatctgaggaactgagacagtgggcttttatagaaaactatattcagtaaccggacattttcaggaacacatagaacagttatgaaaattattgaccacattctaagccataaactaagccttggtatatgtcaaaaaagcagaattaca

SEQ ID NO: 17124 - DNA, 201 bp, Bos taurus
atatattttcaagttgtttttctgagaattatactcttgcccaaatgtttggattgctcatggcggtgctttcatttgaactctctcccagcttcctccttatgtcctgcagagtagtaagcagccacgtttgactaagcaaactgctacgttcaacatgagcctctactgccctccagtgttcactacaagtgatccgtg

SEQ ID NO: 17125 - DNA, 201 bp, Bos taurus
tggaaaataatattttctggaggccaagggtcaggagacatcagctcatgggaggggttgacagtacagttatgatcacaactatattagtagacttacagtcttaggagaggagaaaactctcctttctaggaatcaatcctgagacgattatcctgatgattactatggagactgtaggttgactgggaagaaaagtgt

SEQ ID NO: 17126 - DNA, 201 bp, Bos taurus
tgggtggaggtgttgctgcttaatgggtcacaatgttggcagttactcagtgagaaagaacagaactctaaggaatttataaaaatgatgacaaagcccataggcttgcagtctaaggatttcctggttggttgtaagttcctccaggtgggatctgaagctcattataaatccattaattgtttaaaaataaattctttt

SEQ ID NO: 17127 - DNA, 201 bp, Bos taurus
ccagctgatgtttcagggtctgagatttttcccaatcagtttgctgactttagcatattagaccggccttagctaaaattttaaggccctgtagctctgcgactttagctattagaacttgtttgctgttcagctgtgtccattcatctaacagcaggagatgtgggcctctgtaaattactaaatgctttttggctctca

SEQ ID NO: 17128 - DNA, 201 bp, Bos taurus
cttctaacaagtgtgaggtgatattgataaaaataaaatattcacagctattgcaagcagtgctacaatgaatacaggggtgcatatatctttttgaataagcataaagtataaaccaactaaatatatgttggtttgttaatggcccttctgagtctcttgagtttattcaaactggtcagtgtctataccagatggctg

SEQ ID NO: 17129 - DNA, 201 bp, Bos taurus
acatacttgctagtactcaaacttgccaaatactcttcacagtcactgccctgttgttctctgtgcttcctcttcagagctatgcatggcttcttccatgtattcaacaggttttgatgtaaaagtgttgtctctgtaaattcttactctgccctttttaaaaacaaacaagaatcttgcttcttgtggaccctaatctct

SEQ ID NO: 17130 - DNA, 201 bp, Bos taurus
ccccaaactagatcgtggtggtggcagacatccttaattacaggcaatggaaagtgaaggtcactgctggtttgaatccagcataggtcagtgcagcaaagaaagccattaacagctgattgtgattttgtgctttgaacagaatgaattgctgcctcaacccaatttcttagtaaacaggcatcctgcatccaagctaac

SEQ ID NO: 17131 - DNA, 201 bp, Bos taurus
atctgccttatggtagatctaatattggccttgtaaagtgtattactggacaggcaagtggtagcagaccttcctgtccaagacggaattcactggaccttaaaaaaacctcagagggcctggtgccccttagttgttctccagtgatcctgaagttgtaaatggagtcctgattccaaatttgctatggaatgtcatggt

SEQ ID NO: 17132 - DNA, 201 bp, Bos taurus
cttttgaaaatgacttaaaggttaaaataatactgattgggatagctccataagggagagaaaattcacctttcaaagtattaaaacttttcaaagagctttagctaaattcaagactaagccagagatacaaaatagaagttctctcagcccagttattaccttttgctgatgctttctcggcggtcatgatgtgtatgc

SEQ ID NO: 17133 - DNA, 201 bp, Bos taurus
ttttccatttttactctttgagcacaaggtttataggtaatatttctttggattctccttaatatcaggcatagtgtcatccccatgaaggttaattaacatgtgttggatgattcacatttgatggtaaatgacatcaatctcagtttgcaacttctggattaaaactggcaaatatttacatggctttatgctcaagaa

SEQ ID NO: 17134 - DNA, 201 bp, Bos taurus
tttctcacgggaatgctaaacactcttgcaagtaaaaggcaattccttcttaagtcaagtcttaaccctctatgcttccaatttcatcattattacttttaaagagaatcaaatgcagaatcatggtgattacctctggaataaaaaatcattgggctataactctctttattagagtaatcatttgccaaataaacctct

SEQ ID NO: 17135 - DNA, 201 bp, Bos taurus
tggatcggtctggttcaggccatgcttagaggagatcttcagaatacacaaagttgatcctccacatatcttactactgctgtctcagataatattgactatgtggcctgccttctacttagtgtatccttgaagactctaaccacgtgcaggggatgttccgtggtgaataaaacaccaaaccacaaatcagaaattctg

SEQ ID NO: 17136 - DNA, 201 bp, Bos taurus
actgagggactaacacataccttatcttacatactaaatatgtgattcttccaaaataaaattttcctttagatggtaaagttaaaatggagctaggcccgatggctttaccacagatggactctcttgtagaggtaacacctgttcttcagcactaagcacccagcagtcaaagaatgctctaaaagaaaatgtttgaaa

SEQ ID NO: 17137 - DNA, 201 bp, Bos taurus
ttccagggcctagctcaaagcctggtttatagtaggcacttaatgaagattagcaccttcatagtaacaaacaactctcaaatctcagtggcttaagacagtcttggattggcaaaggccctcttccccattatcctcactgagggagaaggctaaggaagcctttacagacttggacacaagaggggtatggaaatggtg

SEQ ID NO: 17138 - DNA, 201 bp, Bos taurus
gtggtcaggtatgtttatgaagaaaggtgtgagaaaccaagaagcatgtgaaagaaaagaacttctggctatggagtcccagaatcccagagtgaagggttggcagggtacatgcctttaagttgggggctctttgtgtggggctcgagttgctacggtggagagcaaatggcctaactcactgactggttacctctttgg

SEQ ID NO: 17139 - DNA, 201 bp, Bos taurus
tggccaaacacaatgataaccatttgtctgagttgtctcacaaaaggaggttccaataaagaacacagtgctgctgctgtaaactaaccaggaaaatttcagaggggccacaaggaaggacgacacaccaacccatagtatgtcttataaaagtaacctgaagagagcgggggaaaagggaactcccttgcactgttggtg

SEQ ID NO: 17140 - DNA, 201 bp, Bos taurus
tgaggggaatgtatcctctgaggaggggaggaggagcccccgggggaggagattcagaagtgcacacaggcgcagcttcctaaaatgtcagaggctgaacgaacccagttattacttttaaccagaagccgttagtcagtgagggttttgaaagaatggggaagccccatctgcaattgtaaacaggtcataagggctttt

SEQ ID NO: 17141 - DNA, 201 bp, Bos taurus
agaggtttagagaacataagcaatagagtttttaaaaggggggtttttttttacttggctagtttccaagtcagtatcttattttggccatgtagatgtagttacaattataatattataacttcaatgtatgaaaacaaagtaaagtatgctagtcacttactcaagaataagtgcttcaactcctggtttaaaatttgt

SEQ ID NO: 17142 - DNA, 201 bp, Bos taurus
ccaatgccacccatcatatcaaaatgtcataacaaaatccagtcataaagtaggtagttaacagacctgaaagtctgggcattcttgcctgagctgctctgtgtctttcaccatggaacagatcactggtattagaaatgatgacacagttaaaacatgcaaaacttcgggttctggtaaagaattacttaagattacaga

SEQ ID NO: 17143 - DNA, 201 bp, Bos taurus
actacttttgccctgggtcctggtatgcatgagaccttgtatgcatcctccaagaatggatctcgatttcccccagtcctatggtactcctgcgatcaagtcccacgggccttcaaggccaaatgctctgggggctcctgctcgtcataccagacctcccaagctggggtgcctgccatgaccttagcactctactgtcac

SEQ ID NO: 17144 - DNA, 201 bp, Bos taurus
gccttgggagcatagaatcttagccactggaccaccaggaaagtccctctcctgtcttttcttataaggacactaatcccatcataaggacgctaacctcatggtctaattaccttccaaaggccctgcctccaaattctctcaccctggggattaggcttcaactgatgaaactgaagaagctgaagttgaacagttcta

SEQ ID NO: 17145 - DNA, 201 bp, Bos taurus
ggaactactgccttagagtgacgtttggagaaaaacaaaggagggaaatccttctggcattaagtacataagaagggaggaggagtctgcagcctaggtaatgaaaagggaagcagacaagctaaagataaagctggcttgttcacagctttccttaggcttttaccttggttctgacttctatagatttaagccaggcaa

SEQ ID NO: 17146 - DNA, 201 bp, Bos taurus
gaatatttcttgcctttaagtctgtttcagctgagagtggtataggaactccagttttcttgtgatgactgtctgcatggtgtatatatccattcttttacttttagcttctttgtctttttgtatctaagttgtgtgtctcttgtggacagagtatagttgggtctatttttatccagtttgacaatctctgtgtttaac

SEQ ID NO: 17147 - DNA, 201 bp, Bos taurus
tgtttattgagggcccattatggggctgacgctttgctggggtgggtgtactgaaatgaattaaacttgtgagatgaattaaactgtattgtgaggccagaatatagtgcgtgtggaggtgggggatggcagggggtggcgggggagcgggaagtcatgtgtgattgggaaggggtgaactgaaggcccgggagaggcaca

SEQ ID NO: 17148 - DNA, 201 bp, Bos taurus
tagaaactttaggaatcctttcatcccttagtaaattactgcttaaagttctaaaccaatcaacaattgtttttcaaaaagataaatgcaagaaaaaaattcttcctaattgtctcctatgcctttgagtgaaagtggctttacttgttttagaagagctcattaaggcttgaatagttatcaaaattattctgaaatgtg

SEQ ID NO: 17149 - DNA, 201 bp, Bos taurus
acagggttgatttcataacgggttacaaactgacattttttgaactgatgctgatatcagacttttggttaacctatcagttaagaagtatactttgtacgtgacacttttcttgcttgagcaattgactccaaatatcttacttttattttgcttttctcactttcctttctacttctatttaactatatcttctttatt

SEQ ID NO: 17150 - DNA, 201 bp, Bos taurus
acaataatcagaggagtagggtgggagtgctggggaggaacggccctgcaggtttcactctgctgctctgcccctcaccatggagtccatactctgctccatgagtaaataaagacagtgaaaaatacaaatgtgctcaatgggtcctcctggctgtcttgttctcagtaatgggatacatagggaccctgtcctgcattt

SEQ ID NO: 17151 - DNA, 201 bp, Bos taurus
ctgctggtcagacatgtatctgtaaactagaagagtagagagtacttagggtgctgacttgggcctggctgtgctggcagagaaggggctgtgatcagggaaggctttgtgctcatctctgtgtatggctctacctaacttctgtttttcacttctggctgtgaacctggataggattatatccttttcctattcattctg

SEQ ID NO: 17152 - DNA, 201 bp, Bos taurus
ggtactcaaaaattaacattttcacattatgaaatctgtaagcaattttaatgcccccaaatgtaatcacttaccagctaatatgtcgattaacataactataggtaattcacatacatacctgtgcagctatggggcacagacagacttgcagtttatcaggtactctgaaatgtaaaacaaatatattttgtaagtaaa

SEQ ID NO: 17153 - DNA, 201 bp, Bos taurus
actgctcaaatgagtaaaagaagaccacgtagtgaaagatcttggggataaatccagatagactgcacactgcaaatgtccagtaaaaattatgcaaattgagaaagaaaatccattagatataggttaagattaaataaataaaatccataagaaggaaaatgaagcccagtttgcagagacagcaacaccaaaaccaag

SEQ ID NO: 17154 - DNA, 201 bp, Bos taurus
ccatggcaaatgaaagagcctcttgtgtccatgtataaaactgaaaaaagaaaaagatacaaaccctaaggcctattatactacacagaaccttggtttccaagacttggtgccgaatcttgcagtctaaatccccaaatagctatcttgtaaaaaaaaaaaataataataatctgtataccataaaaagaaaagaaaaag

SEQ ID NO: 17155 - DNA, 201 bp, Bos taurus
tctgctccacaactattccaaatagaccatgactcaatccctcactagccttcgttatttcattgatcacacaaacttaaaaaaaaatgtgtgtactctgacctatgctcagaggcccacatccaagaattaattttagttacatttgggtttgttatcttcccactgaactagccacataataatattctgcaaagagaa

SEQ ID NO: 17156 - DNA, 201 bp, Bos taurus
tggctttccacgtccccactctcccctctcctgaaccctgtctctcctcaccctcttcttaactccactctgaagtttcccttcctgtcctgctcacgtctgtgagtctgtcctctcccacccactggccctctttctctctgtgtggcaaacatttaaaaaaaaaaaaaaagcaggaacgatcccaagtcaaacagtgtg

SEQ ID NO: 17157 - DNA, 201 bp, Bos taurus
ccataagatactctttttccactgaatcaaaaatcttgacctatttaatggtcagtaagagaagccacatctcccacatcttaagggtcttcactgtagacggaagagatagatacctgaagccttaaggtctcacaggtcagaatttatctggcatccttttcgctagcagctgcagccatttgatgctgaggggggcta

SEQ ID NO: 17158 - DNA, 201 bp, Bos taurus
ccctgtggggtcgagctaattacaggtacatttcctctgcaaggcagtcacactctgttctattgaaggcacaattaattattgaacaaagctagctggatatttttgctcgtatggccatgggttacaggtagctttgctgtcacacagggagcagagcctcttctttgagtgtctttatgaaaggctttggattatagc

SEQ ID NO: 17159 - DNA, 201 bp, Bos taurus
gttagtcctttattttgatgccttctgctttataactttaaccctacaaatgaaacccttaatgaagcaacaaaattatctcattttccactagaaagaaggacacttggtctggaaattcatctggttcattctcagcattacagcgtgccattagcaaatgctctaagcagaggcaataaagtatcagaaatatcccaa

SEQ ID NO: 17160 - DNA, 201 bp, Bos taurus
agtctagttattgcccatgatctttgccagcaagacctgaggcccttacagtgtctgccttgcaccatctggcactatactgataacattctaatcaggggtccttggaggatgcagcgtgtgagaccctaatgctgctggtgatgcacctgaaatatacaagttgggctattgtctcatctaaaactcaagggccagcca

SEQ ID NO: 17161 - DNA, 201 bp, Bos taurus
gaacaattaaattttgtgtactgtggttttagtgcctttcttaacaccggtctccaataccacactcttcagtcaaaatttaatctcctcatccttgccttcagaacccacatcaagccttgcttttaatgacccatctctaggaactttctccttctaagtgaaagaatggaagaaagaaaatggaggatctgaaccaat

SEQ ID NO: 17162 - DNA, 201 bp, Bos taurus
actggaccaccagaattacaaacctcccttgtctcttgttgccatttcagatcattcagggccacagactcactgagagaggacgttttttccctttgccatttcactttctccgtgccaaacatctactgtggcttccaatgaatcaagttctccttcctctcctcccctggaagctcatgctcccagtaaaatgtcaca

SEQ ID NO: 17163 - DNA, 201 bp, Bos taurus
caatcatatttctctatagcttgattgggccactgttcactaatgccctgtaatgatcagcttctttgagctgtcatctcatacctgatacaaactgtgaggaacttccctagacccagtttggaaagccagttaaaaacagaaggtggttttctttttctactctagagttttgagtcatgggtggttgccttcccactg

SEQ ID NO: 17164 - DNA, 201 bp, Bos taurus
gtatttgccacacttgtgttcaggagctcagcaagggagcagccaccagtacagaactctctccaccctgtttgttagcaagccagcacccccttattctctgaatggagcctaggcctctccagcccttttgtctgttctggtggttcttccagaatccaagggggcttgtctccttcatataggactcgaggactggga

SEQ ID NO: 17165 - DNA, 201 bp, Bos taurus
cattataaaatacctcttctgattttaaaaagagagagcaaactaaagatgtatcccaaatgcaatatctgttggagtgtagaatcactaagaaggtaaacaaccatatgatgaaagaaaaatcagtaacatttatttatatatattttcttaaagcctcttatagtaattgctagttaactgtaagttttaaaccaacaa

SEQ ID NO: 17166 - DNA, 201 bp, Bos taurus
ggtgggattcactaccgtaatgattttctgccattccctctctactgtctttttctccccttgcagctctttgagtttttatatttgtttttcttagccataggtaataactaaaagagaacaattgagtcagacattctctgccacagttagaatttcagcacagacatgctttatatatgaatcctggtgaagaggaaa

SEQ ID NO: 17167 - DNA, 201 bp, Bos taurus
gagataatctgaccctgcccacctgtgaatggctgcaggaaagaagagattaacatatctcttccatagggtgtccattcccagagatgtctttcaaaactgatggctctttttactttacttcctcactgcctctccctctctattctgcctttttactttatttcctcacctcctcctacctctgctctataaaagaac

SEQ ID NO: 17168 - DNA, 201 bp, Bos taurus
agatggcagagggcaatgatacatttcaaaacaaatagactctaagagagtttatgaaaaaaaaaagtcatagtgggagtgtatggaatggagagacgcctaggggagttgattgttaaccctcaaacgtagcaaaggacagaaaaatgcaatccagtagtctggggaaggccgaaagaagaaaggaaattgcaatgtggg

SEQ ID NO: 17169 - DNA, 201 bp, Bos taurus
attttattatttattacaatctgcacgattaaagagttaaaagaaaaaaataatccaaattaatctctttattctgattttttggggaggggattggaaatggcagtccaccattggccaatatgatgtttttattttactatttgtaaattaaactgactcaatctatctgcatttactatgatgatacgtaaatgaaat

SEQ ID NO: 17170 - DNA, 201 bp, Bos taurus
ataattgtactaattttaacagttctctgccactcctcatcctcctaactatcttaattccatctattttatctatgagccactgttattatcctccaggtctttcatgacctaataaccccttgataggaatttcacagccaacaatttccatcactctcatgtcatattagtgaaataaaactgtagaaatggtgaggc

SEQ ID NO: 17171 - DNA, 201 bp, Bos taurus
cttttttgttttcttttcctattggacattacacctaagtctctacatataaacaaataaatccatgactgcagatcaagtaccaggtctgggattcacaactcaggaatatatgtctcccacgtttctctcatcacagcccctcagtcttccatgtggctctaagattttactgctggaacagagtcaggggagggacaa

SEQ ID NO: 17172 - DNA, 201 bp, Bos taurus
gaaatggcaacccactcccatattcttgcttgggaaatcccatggacagaggagtctgacaggctacagtccatggggccactgaagagtcagacacgacctggctactaagcaacaacaacttctaaaatgagagcttcctccctgaccttcattcatgaaagggccccaacccatttgtgactatgtttccaaggagga

SEQ ID NO: 17173 - DNA, 201 bp, Bos taurus
cctgaggtacattacattgcctggaggatcagccagatctctcacaaggtctatagtttgtagagttcagatcctgtcaataccaaattccactgataacgtcaacagtaacaaaacttcctgggaattttctattcattaaagactttcttgggggatatttccattttaggatgatttttcatcataccaggaaagaag

SEQ ID NO: 17174 - DNA, 201 bp, Bos taurus
atcttattataatagtaatcaagtgttaatatattaggatataaatcacaaaatatgcataaagttttaagagaaaacatgagcctccttagacatttttgagctcaaggctgatgattttgtggaatggcctacacttcccatctcatgcattcactctgctttttagggaccctggaatcccttgctgggctccaggta

SEQ ID NO: 17175 - DNA, 201 bp, Bos taurus
ctgttgtttccatggcatccttggcaactagtgtgcagcccccaaagtgcagagtgggtgccaaaacatacccgatggacatccaaactcgatggacagacgagtctgcgaaggggatgggacatgagcacagcttgaacaatgtagacaactaaggcagggacctttttctcttccctgatgtgtctcttcccagatgtt

SEQ ID NO: 17176 - DNA, 201 bp, Bos taurus
tcattctgttgagtagaaagtcactcatatgaaactagtacaactcattaccacagttctgcagttattctacacttgatctctgtcgctgtattttaacatagaaaaccctttagggtttgtaaagaatacttggggattattttctgaaaggtctaaggaagcagtagtgtgccatgcaacaatgtaggagctttcttt

SEQ ID NO: 17177 - DNA, 201 bp, Bos taurus
agtggcagattgaaaccacgaggttggtggactggtttcccatgatagcaccagcacacaccccagcctgaactgagtgagtgttgcagcactgatgtgcctcacattgcagctcacactggacggatggctgcgatgaccatggacactatagtgctcagactccaagcagcatctgcgctgagggaggaagccaggcaa

SEQ ID NO: 17178 - DNA, 201 bp, Bos taurus
cagaatatagttgaccttaagtgttggatgaataaatgtggaaccttgggaacaccttacactctctctctaataatgagtctcattatcactcaagtctgaaagccttcacacaaagctgtggtgctaattaacattcagcaacagttttgatttcaaaaaagcaatcatgcagcagtttcatccaactcctctcctcac

SEQ ID NO: 17179 - DNA, 201 bp, Bos taurus
gtcctcaccttccctggtcttgatttatcttaaagtctaacccttatgtcttcaactgtgtgtgctttgggttctgttagggctcatcagttggtcccttggagagatcagtgattccgagccaaagtaacaaaccagagggctagaaaaagatacaggaaagctgagtgacacagaatatgtgagtattgtagttgaggg

SEQ ID NO: 17180 - DNA, 201 bp, Bos taurus
ggaaagccattgtggttgaaaatagaggaacaaagggctccattagggcctgagtgggagaaaaggggcaaggagcctcttcctgcctaccaagagaaagacaaaaagaagaaactaaatgatacaagctttctacactcaaggtcaactcagggtaaaatttggtttgtaacaaaacaggtcttaagtttcaattccatc

SEQ ID NO: 17181 - DNA, 201 bp, Bos taurus
tgcagtggcttctctcaggatctttattctccacctggacactgtcaccttcccgtaacacagctgtgtgatgaggttctgttttttgttgcatattatctgtacagtatacacatttccagatatggtacaaagggagcttgtccatcctttaggaataggctgggaatgctttgctcctttgtccaatttgaagtccaa

SEQ ID NO: 17182 - DNA, 201 bp, Bos taurus
ctgtgcaaaactgtgggatttttacgaatttgttttcacagtctaagctggtgactgttctagtagaatttcgggcacttccatgtcggtacagttcagttcatttccttgtgtatcatgagtgtccaacattcaccctcctcagcttcagacaatttataggacccacattctacagaaaatgtggtaagccaaagacct

SEQ ID NO: 17183 - DNA, 201 bp, Bos taurus
tggtattagggaacctgtctgtgaatccagcagaatttcattaaaagtagagtcagatgttgggatggctaactctcctgcatcattagaggttgtgcagcaaggctggcaataagaataggacccaaccctgggctgcagctgttctaaataaacaacaattcagaaactctgttttcagttcaatcctgggcccccatg

SEQ ID NO: 17184 - DNA, 201 bp, Bos taurus
ttaggtctctatgtaaaagaagccccaagtttatctttaagtgacctttatgtactgaaaagcctgttaaggaaaacaggctgtaaccagcaatttttttaaaaaaatgccaacttataaatgtatagcctataaaagtacagggttacctacactgcattgtaccaaatcttcctggactgggagtgcctggattccttg

SEQ ID NO: 17185 - DNA, 201 bp, Bos taurus
agtctgttctacacaaagcattagaatatcctatcattgatcaaataaactttttcctgtcctagtcttaccaattttctagcctagtctttatttttgaaggccatgcttatcaaacagtcatcctaggcctgtttaaagatctctgttacagataatactgttggcttttaatgggctttctccatagaggaacatttg

SEQ ID NO: 17186 - DNA, 201 bp, Bos taurus
ccatctcttcagaagaaaaactggattattgcattctatctcaaggtgttctattttcatatgtgtacaaacatcctcttgaaggttctcagtggtatgcccctaatatttctgtagggaaactcaatatttaatattgtattatgtcttcattaattgaattagctgtaatagggaaataaataaactcatgattagaca

SEQ ID NO: 17187 - DNA, 201 bp, Bos taurus
ctgctctcagctccatcatggtctctgcttccttgagctgacttcctagcacaagcttctttaccctcaacccctccctaagacctggagctaaaaactcaatctctttcctggctagtagtaaagccagatacccaggctgtcctctcctgaacaggatgatagcatgatcagaacacaggcaaatccagaaaaacctaa

SEQ ID NO: 17188 - DNA, 201 bp, Bos taurus
ctcccctgcatccagctccaagtccagtcttgatggttcacactacctgaggctttgagcaacttggggctgggagtctgaagttgagagagcccctaccgacctaggacaggtaattcagagtgtctacataccttgtttcagaaatctgggagctagaagtgattgaatcccaaagtgccctgaaaaaccgctcttaat

SEQ ID NO: 17189 - DNA, 201 bp, Bos taurus
gcagggttatttagcttttttgtgaggtaattcaacctcaatgctaattcaaccattgaacccagagatttgcccgcgttggctcacagaaacctaaggttctgttaatggcacttaggaaacgatgtggcataagggagacctaagcaattggctcgacaggtagatgagggttccggaataggaggccgagccccagct

SEQ ID NO: 17190 - DNA, 201 bp, Bos taurus
atggtgtccactgggcatgcctggtatcagagcagcgggagtcctggtctctctccctcaaaagactccatgcttctggccccatgtctagcccaggcatgcaggggaactcggaaaacaccaccgaagggaactgagccaaacagaatggacccggccacctcctgggccagctactctgacctctgaccttgcccactg

SEQ ID NO: 17191 - DNA, 201 bp, Bos taurus
atgagttagcagaacaaacacaaagcacttagaacagagtcgggcatagaggaggcacaacacacaggctctgcccttgagggcacagtctgcagcttatccatcttggtttcccagcgccaaatacatggtagacatctgttaaataactcagtcccacaaacatctaacaccagtacctggggtcacacagagtcggac

SEQ ID NO: 17192 - DNA, 201 bp, Bos taurus
aatgaggatggagtgctactgggcccccactggtacgactccaaagccataccattatttctaacattcagccagtagtaccccaatttcaaccctaagacaaaggccacagagtctacactggatttcacaacaaggaggtcactagtgacctggaagagagccgcaccagcaggaggagtggtgggagagatgggaaga

SEQ ID NO: 17193 - DNA, 201 bp, Bos taurus
ctcctgcactatcaggatctgggacatagaaacacatttggaaagacagaggcttgactttatcacagaaatgaatcccccatgtggaattttaggttaccgtttcactgtcaaaactatgaacaggcaactccaacccatactaagaataggccgcccttaagtcctcacttacacagaaactgcaattgaggaaaagtc

SEQ ID NO: 17194 - DNA, 201 bp, Bos taurus
aatgaaaagttcaaatgtctatggtatactttggaaataatgtgcctcataaattaaaatggctcaactgcctgcagaatgaagtgccacaggcctggagaagacccagttccctggaggaggagctggggagtccccatatccagggacccttgggctggctgtgaccagagggccttatttttcatgagtgctttcagt

SEQ ID NO: 17195 - DNA, 201 bp, Bos taurus
cagagacaacaacattccttctcagagccctggtctgtgacaaaatgtgccccgtcctagagcaccccactggggggccagaaccagtggaatgacatatatagaaaacccttacagactgccagtccttcatttacaagaaagggaaactgagatccagtaagaagaaggcactcaaggccacacaatgagtgtagaaat

SEQ ID NO: 17196 - DNA, 201 bp, Bos taurus
aggttcacaggttctggcaggtgggaggcaaaaatgctgttgctactttcagtgggaaaaattgttcagggatgcctgctgcctccctcccaaggggcctgtgtttaccaggagtgtgtgtacctggcaggctgaagagcttaccaactagtcatgcccacctatcgcttcctagttctgttggccacaagttcacacatg

SEQ ID NO: 17197 - DNA, 201 bp, Bos taurus
gcctgggcctgaggtttggagcacatggactgcagaaccccctgctcatatccaagtgagaagaaacagcaggtcaggagccagctactctgtaaagccaaagccatgtgttttggcctctgtgaccagtgttggaaaggtctggagcatttcatttttacttgagatttttttctgctctgaggtaggagatctgctttg

SEQ ID NO: 17198 - DNA, 201 bp, Bos taurus
tggtggcagagctggaagagaccagggctcctacctcctcgctgaacctctgtaccacactctgcctgctgggcttccgagaagctccagggcctttctccagtctttccttcctgaggctacttaggagtcagtggttgcttgtttcctcttgatatctttgtggcaggactgctggtggggctgtgtgacaaagcagag

SEQ ID NO: 17199 - DNA, 201 bp, Bos taurus
aatgaggctcctcttctgtgaccactgtggactgacggtgaaggcccccagttctggagattctctgctttccactctcaggttccagaggatggtcacgcgcacagcagcccttcctctgcccagccttgttatctgaacctcattgagatgcttctggttcccgccttggggctgctggcctgattcatcctttcccag

SEQ ID NO: 17200 - DNA, 201 bp, Bos taurus
agagcccataggaattgagaagaaagtctaacaaaccaataaaaaaataagcaaaaaatgcaaacagaaaataaatacaaatggtcttggaacattgaggaaaaaaaaccctcccttttgcctccttgcagccgagaaagcaacatgggtcaccagcagctccactggagccatctgagaaaattcggccagggttctcgc

SEQ ID NO: 17201 - DNA, 201 bp, Bos taurus
gatttttaaagttgtatttctttctgcttcatttctggcacattattttttatctgactgcacttaaatttcatttacaaatcttctgttttgctatacaacttttaacatatgtatatgatgttcctaagaaaaatgttttacattgcctcttagttaccaatctttagtaaaacaagtctgaaagtattactctcattc

SEQ ID NO: 17202 - DNA, 201 bp, Bos taurus
ttacttgaaaaaaaatatttagcttctaaacttgtgacatttacacattcattttgttctgctctttctggcagcatcccttcctgaaactggccaagccattatccagcttgacaccactgattatggcagctaaagaagcaatgaagagtaaccgttaacatcattgccgcggcctcatattcttttttccattttcta

SEQ ID NO: 17203 - DNA, 201 bp, Bos taurus
gggacacccccagggaagccgtgatcggacaggacacagccaaggaagaaactccccgaagcctgacagaaaaagataggctcggccctgattcaccgcgggcagagagccatggacctgagtacaaccggagagaggtttaacctcagcaaatgggactaaaactaatgatcgatgctgctgccgctgcattgatgtagc

SEQ ID NO: 17204 - DNA, 201 bp, Bos taurus
tccaactgttagcactgtatacctcatgcgtacattcagctcaaacagtggattagaaaatcaaattagaacagtctggcctgggcactgctgctcactcgaccccagtgcctccctctttttgctctgctcaccatgtgctcatccagtgcttggtgcctcgcacagcaagactcttgtgtctgctttctgggcccaaga

SEQ ID NO: 17205 - DNA, 201 bp, Bos taurus
tcaaagccttaactggtgtgtatgtgtgcttggggaaggttggagagggtgcactatacaagacattgtgacaataattagggaaagttaaatacagactattttccagaatatattagagaaaaacttttttgtacaagacatacatgtgtgcaagagtatgtatatacttacgtagcagaacatatatttccatataca

SEQ ID NO: 17206 - DNA, 201 bp, Bos taurus
cacactgccccagctgcctcctctcaccagagggctattcacctcctcagagaagacccagagctgaaaagaaaactctgcctgggccaaaaagctctaaacttggcaagagcctcaaaacaacaagaaaaggaaaaggaacagaagcaagcatacctctgggccctgtgagcagtccctcagtccctaagtgctgagtca

SEQ ID NO: 17207 - DNA, 201 bp, Bos taurus
gaactgcggcaaccttctaaaggactctcttgctccagtgaagtcaatcatatcaacacactgcaatcaaaatgttctttaacaagcaaaaacatgatcaacctcctacttaacattttcaatggctctctccaatcctcaggttaaaatccttactatgactctaaaggcccaggatctggcccttatttatgcttccat

SEQ ID NO: 17208 - DNA, 201 bp, Bos taurus
acttccctgctgagaactccctcagtccatggggggaccagagcccatgtatatcaattctcaggtaacaaacagctctcatagcactcaccaggcctctgctgcatctccaccatctgcatcaggctggtccatcactggacattaaataacggcttgggaatacgctgaccagtgagaaggatgcagtcacagagctgg

SEQ ID NO: 17209 - DNA, 201 bp, Bos taurus
agaaatggtagatttcatcttataagtgcaaattagtgtgtgtgtgcaagccacattgctttgtgcatgtgtttccttgcacaaaggttgtgagttcatcgctgcattcctggccttttctccttttcatatccttctcccgccatttgtcactctggagttgatcactgctccctggagccttcttccagtgtgatggat

SEQ ID NO: 17210 - DNA, 201 bp, Bos taurus
tttaaagcatgcaagtcagtggcttgtggcatattcatagaactctccaactgtcatcatcatctaacttcagaatatcttcattactccaaaaggaaaccctgtactcattagcagttacttcttcatacccctgaatctccgtcacccctgaaaaacattagtctacattcctgtctctgtggatttgcttattcaatc

SEQ ID NO: 17211 - DNA, 201 bp, Bos taurus
ctcaaaatagaggatgatgaggagggtacaatcaattctcattgaagatcagggctcagtcagcagagccttcgccaaggtggtggccttgagcttatgtcatgtggtgtgaaccagatggaagagggagaggaggcacttctaagcagaagcttgaggttcaaaagaagcagaggtcagggtggctgtcagtgtaacgag

SEQ ID NO: 17212 - DNA, 201 bp, Bos taurus
ttcggtcatggctttggaggtataaacacacccagatgttttaaacttttcccctgttgcatctaatcaccagaaccactgggactcagcggactcgccccgccctgcaaggacatgcagagtctaattaaaagggtagtcttttgtttccctaatagctctcagccctggggagtccagagcatttggtcaacaagacag

SEQ ID NO: 17213 - DNA, 201 bp, Bos taurus
gtttaatgttacagttccccgacagaagaggtgtgtcctaccaggcagggccagagatggaatgccagattttgatcaggaaggaaaggaggattgaggggagtgctcaggttatggcctttataaaggagtttctgcaggaaatacaagacagggcagggtacatagatgacaactagctatttggaatgattttgatgg

SEQ ID NO: 17214 - DNA, 201 bp, Bos taurus
acagcaatgaagaaaagagagatactggggttggcttcatggaagacatagcatttgcaccaaaataagaagactgtatagatttcaaatatcttttaccaaaagaagggcatttcaagtagaaggaagcagcatgagcaagagagagctgataaatatagggcatgagtttttcaatttgaccacactgtagggtacgtg

SEQ ID NO: 17215 - DNA, 201 bp, Bos taurus
cagccatgcccactggtttctgtatctcagttgtgagctggccagaaacttctttccctcacttctccaatctttcctgaccacctttagcctttctcttaactagcttggccagtgtcatagcatggtagcctccgtgtaagtcagacttcttatgtgaaaggtgaaggcttctaaagtgaatgtgccaagagactggaa

SEQ ID NO: 17216 - DNA, 201 bp, Bos taurus
ctgggccaggggttagagaaaccaagatgtcttgccgattgacatgtgatgggctagtagctttatgtctctgagcctgtttccctggctgtcaaatgggtgtgggcccgatggcctcccacacgtcgtaagccagatgggcactagcctcctaggtgtggggagggatagccgtgtgtgctcctcccactcttaacagtg

SEQ ID NO: 17217 - DNA, 201 bp, Bos taurus
aaccgtttgttttcaaaattaagaacttgtcattatggtgccaccctacctctaatattagtatctattcttattatttagaatagattctattctgtgcctttacacaggacctaaatttggataaaaggtaaacataaattacaaaaccttgggcaaactcttctttgaagcttttcatcagcagagtagatggatcat

SEQ ID NO: 17218 - DNA, 201 bp, Bos taurus
ttatataagatctgtggtctcttcaggatggacttgagtttgaagctgaaaattatggaaactggtctaccaatagctttctatttatcagttcaaaatctggatattgagttaacttggaatagtggatatgaatattcaaggcatgagaataagtatggatgtgagtctgtgtgtcatatagagttgcatattgcttta

SEQ ID NO: 17219 - DNA, 201 bp, Bos taurus
aattttgggtggcacttttcattcccttcatttttttattgatactttgttcccgcatcccactcaaatgaggactttttaaatcttgaaataaagccaagtagtcagtttaatttatttttgaaatgacattttgcatatcaaaatactagcatgatgcctgagaaaaagtaggtattcaaggaataaaatcttttcagt

SEQ ID NO: 17220 - DNA, 201 bp, Bos taurus
taccattgctttatcactgaattcacctagacaggaacatggaagccacactcaggttattcccagataataacatggtggcctttgctgctgggcctcttctgcatgaataagaaacttttgcttgagtattatcatagattaaggaacccttagtatcaggctgaggcctgagaagataggatgagcaccacatttcct

SEQ ID NO: 17221 - DNA, 201 bp, Bos taurus
aaaaaataccaaccaaaaactgcattacttattcttttagaaaatcaggcattgaatcttatttttccttctgattttgctgatgtgtttgactttcctcagcaaaaggtaagatatattaaaaatataacatttttttacaatgatctcatatttctggcatatctttaaaaaagtaactcttctattcactcaaagata

SEQ ID NO: 17222 - DNA, 201 bp, Bos taurus
tcactttatgtgttactgtctggatctgaaaattagaggtacattttattttaaatcattcagcatttcaatctttttatacctattaggatatactggcctttgtaaaatgttaaactcatttcaaatgtgtgatttgatatgaaggaagaaacagacacaaggaaagaggagatttgagcagcattggtttgcgagaaa

SEQ ID NO: 17223 - DNA, 201 bp, Bos taurus
cctcaaaccagctcatgtgaacctaccaatttctgctgtctcacaacctcaccttctacatcagccaacaaccatcctgtggccgatctgaatacagagttatcttaatcacatctgctaaaatgacatagggatacactcactgtttctgaagtaaatgctggtgctgctgttgctgctgctgcctgtaggtttcaatcg

SEQ ID NO: 17224 - DNA, 201 bp, Bos taurus
tcatcaaatgaattgggatctgttcaaaaaataaagttgtatgtccaaaccatggccattgccttcaccatatccatctaataatacatggccaaccagtggtgaaattaatagacccatggtcttcactgttaaaaatgcaaatcacaacacaatagattcctcaggccagattgatctggctgcttctttttccgttca

SEQ ID NO: 17225 - DNA, 201 bp, Bos taurus
catttgtctgctttgttgtatgttgtgcatccagtgggactcagacaaattgcttcagctttctaaactgttttgtttcttccattcaattatcctttattccttttccttcctgcacctcactcttattcccaagttcccatttaatccacaatgagaggacacaattgtgctgttactcagcttcaggctgagaaagaa

SEQ ID NO: 17226 - DNA, 201 bp, Bos taurus
tgaggagcccatccataagcaattataatgtagtgggatctgtgctttaacctgggtaaacacaccatcctgcagatgcagaaggagggagcctgagatctgacacatcttgcaaggcattgtcagtccttcatgctctaactctagccttcctggcagtgtctaatccaagaaataattatcttcctgacagtacactat

SEQ ID NO: 17227 - DNA, 201 bp, Bos taurus
attctgacccttggtcaggtatattttgggtttctcttggcagggtcaagggaggcagagtggaggaagctgatatctaattgcttacaaaagtaggcctaagacataaaagtagcagaaaccacaggcaccatgaagtgaaaagcttttattttcaggttggtcaaggtgaaaagaaagtgttgattttggatttctgtc

SEQ ID NO: 17228 - DNA, 201 bp, Bos taurus
aggccaaattgggatgtgacagagactgccctccatctgacatatgtatcactgaaatacactgcaggtcatgctgtgccctgagataatctctcatcccgttcgctgatccttcaaggccctctggaaagaatgatgtccccaccaagcaataaagccctccatgcattaaagccctccatagaataatcctgtttgctg

SEQ ID NO: 17229 - DNA, 201 bp, Bos taurus
ggtgggggcaggccaggtcctgctaggatgggaaatgggagaagtcaaggatatctgccagatggtaggattccattccaagattttacaagggcagggtctcatactgaggaggagcaagatgggccccgagaactaaatacaggcagaggaatcacagcgccagggccaaggtgtggagtcaccatgctgacctggtgc

SEQ ID NO: 17230 - DNA, 201 bp, Bos taurus
caaggtcgatcctgactgctgacccctccagtcacgtggggagttactgagaaacacgtgcagatcatttgagttgtaaagagaggacctatgccattgttgaacagctcttaacattggaagttccttccaggcactggcagaaaaaatgttggtctcttgtaaggatggtgcactcaaatgcctgcagatgcccagcag

SEQ ID NO: 17231 - DNA, 201 bp, Bos taurus
aatcttggtagatcattctactcttggggctgaaaactgaatttagaagctacagttctgtgtagttgtgtgtgtcatttaataagacttctgtttgggtctattaggtcaatgtttagcaaaggaaggtgaatgatgtttccacttgcccattaagtgaattagtttattgaaaaaagtagcaagcacatagtgggtaag

SEQ ID NO: 17232 - DNA, 201 bp, Bos taurus
cattgaaagttctcttgcattttccaaatatccttcacctatatctgtatcttaacctaaatatctactgtgtttatatctaatacatgtttcgaaaagactgaaaataacaacggttaccctatgactgtgatttttcaattagaataaaaattcttacttgatagatgagaattctaatttttccaaaacaggaaaaat

SEQ ID NO: 17233 - DNA, 201 bp, Bos taurus
aataaaacagtaactactcaaacatgaattgtaggaactatgatgaaataaagtgctttaccagaacctttcttacttttgtcctaaaatctggcccttctgattatcaagaaattttatattttctagaacttaacaatattctgcacagacaagggcctgtaatatttacaatagtatttaacacacacaattccatta

SEQ ID NO: 17234 - DNA, 201 bp, Bos taurus
ctcaccaggtcattctctccacctagacatacttttgctctgtctcatgtctgtttccccaggttgggtaataggatcattaaacaactcaggcctgagttccctgcccttatgatgatcacccagtaatcctattacagtcagggtgtttcagacagggcaaaactgcatagccacttgaacttaaacagtgaaggccat

SEQ ID NO: 17235 - DNA, 201 bp, Bos taurus
tatatcacagaaagaatgcagaccatctttaccagttttatgttaaaagaagttggtaggagaaatctgggtttgagacataagatgatgtgtatgtagagtattaaaaagtaagacctagatatagaaatatgaaagaaaaaaacgttgagggaacaggatgtaaaaatgaataatttagatataaaacataaggcatga

SEQ ID NO: 17236 - DNA, 201 bp, Bos taurus
tacagcaaagggctttggttaaatgccctgtttacaacctgtctcccatgcgcagggggtgggggaattctcgcttatgatgattgactaaaccaaacgatgtgaaagcacctgccatgggcctgtcacgtggtacatcacaggaatcaccggttaagcgtctgcttgcttccctctggttcgtgcggcagcagcgtcacg

SEQ ID NO: 17237 - DNA, 201 bp, Bos taurus
tctctcacagagaagacagaatctataaaagaagcagacaactaataagggcattacaaagctgcattggccaagtgcacacctgttcctacagctttgcactggacacacccgaatttcttctccaacaacaaggacaagcagaggggaaagaccgtgagggtgcactcaaagcaatcctctccaccctcagcagaaagc

SEQ ID NO: 17238 - DNA, 201 bp, Bos taurus
acaactgcccatcagatttccactcctacccattccccctcacaaactctgctgtagctacagtggcctccttgctgttcctgggacacccaagcaacctttcaccataagatcctttctggtgatgtctcctttgagagcactcttccccacatagtaacagggtacactccttccttcagacctcaactcagaactcac

SEQ ID NO: 17239 - DNA, 201 bp, Bos taurus
caggcaacggagtgccgcctgaagagcttcatgggctacagttttataatcaaaggaaaagtggagagggggaaaggcctacttcttcctcattttggaatagacatcgaacttccatcatcaactcctcctccacgttgggcaggggagttttcttgtttctacgtcatcaaactaggactgttgtggtacaatggaaat

SEQ ID NO: 17240 - DNA, 201 bp, Bos taurus
gatcactagagaaatgcaatcaaaagcacaaggagatggcacttcacagccattagaatagccatgatttaaaaaaacagcaacagcacagaaaagaacaagtgctggcaaggcttgggagaaactgaaacccttgtacattgccacttacggtgactcttcaaaaagtaaactcagtgagaattccctggcagtcctaaa

SEQ ID NO: 17241 - DNA, 201 bp, Bos taurus
cggttccttataacctgcaaccgggtcaagcgggatcgagtggcagccccagagctgagccaggcaaaagagcagaacgaaggatttcatggtggcttcaaagaggccccggtgtgtcagcaggcaggcagctggaggcgtctggaccaacctaggtgctctgcctggtggagtgtcgaaaggctttatttatatgttgga

SEQ ID NO: 17242 - DNA, 201 bp, Bos taurus
tcacatggtacaggcttcaggcctcacaaaaatctaaatctccctcttcccccagatctcaaaacagataggttttaaaagcatgcccaatcccctggagtggcctttccctgacctgggtaccctggtcccgactttgccccactgcatttaggcacttctcctgcaggaagtgagcgagggtcatgtcttgcccattgc

SEQ ID NO: 17243 - DNA, 201 bp, Bos taurus
ttactgtgtctatctctccagggctccacactcaggcagctgtcagctcatctctgataaagtgctaccctgcccagagttgtttgccttttacaagaaattcttagagcagaataatctccatataccccaaattagtcactaatggcagaatacttggtcagggagctgtttggggtttctcagaactgtctacggtga

SEQ ID NO: 17244 - DNA, 201 bp, Bos taurus
tccttctacatgcctatgcctggcatggtctctgagaccccgaaagagctagttaacattggttgaccagaagctcccagggccaggagcacctgaagtggtaagatagggaattgtgtttgatgggatggaacgtgtgtgtgtgtgatgctcatgagcagcgttccagggcccctgtgctggcgtcagcctgtacaggag

SEQ ID NO: 17245 - DNA, 201 bp, Bos taurus
gtggtcaaccatctgagttcactggcttgtggcagtgggggcaggcagtgagaagcggtccacataagacatttgaaaatagtccaatatgttttgaaaaagagggaaaacccacgtgctaacatttatcccgtggatctggttttcctgaagcagcatattcttcccttgaaacgaagtctacactagactggcttcata

SEQ ID NO: 17246 - DNA, 201 bp, Bos taurus
ctgccatttagccccctctccatgtctccatttcctcacctgtaaatgaggagacactagcgataggaactgtgtcgccctccaagagaatgcggtgacagtgagcgtgggagaagcacttagaagaggacctgaggcgtatatagtcacaaggaagcttctctattctgctatggctatgattgctgcctctgccagcag

SEQ ID NO: 17247 - DNA, 201 bp, Bos taurus
catgagtctcttttactacaactttgccagcaatgactgttgccaattattttttggtgctaaaatagtgttttataagtgtgcattattttaattgccaatgagaatgttttttccacatttaatacatcttctttgtatgaattatcaaatttaccccttgcccatttatttacttgggtttgcagttctcataaactt

SEQ ID NO: 17248 - DNA, 201 bp, Bos taurus
agtatgtcttcaatacaaacatactgtgctccttgtagcactgactctgttcacttgtgattttttaaggagattgataaatagtatggtaaagaactgagtgtacctttttatattccttcagcaacaccaatatttgtttctacttatgtacttacctgtttcttctttcctgttttccttcaagccaagaataattaa

SEQ ID NO: 17249 - DNA, 201 bp, Bos taurus
atgcagagtaccctacctcagacgtctctgagccagcctccaagtagctattagagttctccctgagaatgattcccagccactttgatctccacacattcccaatggaactctttctctttctctccacattcctccttctttgttccctagccaatgactagcatggtccctgaaactcctttgctccccagactcaaa

SEQ ID NO: 17250 - DNA, 201 bp, Bos taurus
ctctggacatggcctggagcagtcccacttgctgctccacaggtgcgtgtcctttaacatccaggtacaagccccctgtgaagtctggaatcctatatcgtggcatggcgaaggccctgcatcctcacaactttactcaactggtgtaacctgccaggctgctcctctcagtgggattttccaggcaagaatactggagtg

SEQ ID NO: 17251 - DNA, 201 bp, Bos taurus
gcagtgggaggaacgggcttgggttatggcccacggccaccagatggtgctggcattcagcggatagtaccctggctttgctgggagactgcaagagaaccgaagggctcttgaagacggccagtgcaacccctcatcctacagatgagagaaataaggcaaggggagggtgtggggaggatgtcacacagcagtgggggc

SEQ ID NO: 17252 - DNA, 201 bp, Bos taurus
gagatacagtccatagggtctcaaagagttggatacaactgagcacagcacacaacacaagtgaatgcattgtttgagtccctccgcaaacaagaagaaaccttccctgcccctggaagcttatagctagttactgaagaattgaacacaaaggcagtgtagtctcatggtcaatggcttgcactccagagtcagacttgg

SEQ ID NO: 17253 - DNA, 201 bp, Bos taurus
gccagtgccccgggtcaggaagccctggggcttccggccgcttgtatcccacagaccttcaacagcacaagccaggagagatcgccaggacctggccccaaatcggcaaaactaaaaagccatccagcttgtgagctagaatccgaactaaaaataagctagtcgactctcagaggcccggctcctgctgctcctgggtcc

SEQ ID NO: 17254 - DNA, 201 bp, Bos taurus
gtctgcgagcagtcgctctcaggttccacggagccctggcgcacaggccgggagaatctgtggccagtgaagaggtcctggaggtggggccccaggggcagctgcccagtcaggtctgcagggggagagaaagaagacagccctgctagccccatttcaattggcccacctggaagccacatcctcccggctcccagcctc

SEQ ID NO: 17255 - DNA, 201 bp, Bos taurus
gagagcatggaatcctaaccacaggaccaccagggaattccctggcctccattgtcataaaatacgtgcctcatatatacactgatggtgcgctaaagctaaagtaatctgtgtaaaggccacaccggacactaagctctggagaaagtatagtgataatttaatatcatctgtaaaatgggtggaacatacccaactccc

SEQ ID NO: 17256 - DNA, 201 bp, Bos taurus
accactgagccaccagggaagccctgtatctttgtagaaaaggtataaaaacttcctgcgctagtcttttcttctgatcttcattcttttgtgaagacttacatgagcatgtaaaaatttaataacatcggtgtgcttttgtcctgttaatgtctttatcacttaactttcagacctggccaggatggaggagaacttttt

SEQ ID NO: 17257 - DNA, 201 bp, Bos taurus
cccccagtttggaaatgagaaaatctcagtatttctagaagcagcactgagtgtgtatgggccataaaaaggcagctgtttaagactgggcacatgtgtgaatactgcaacacaaaatgtacacacacctgagcaattacatcataaatttcacacccaaagatggagcaaagaaacttgatgttggcaagctcaaaggaa

SEQ ID NO: 17258 - DNA, 201 bp, Bos taurus
caaccatctgctttattaggtgttcacaggactcagctttgggccactgttcccttgtcctaatccccccagggctatgtacctgacaactaaggacagctccagtgccccagagttgactgaaatcattcaaactagccaaccttaaacctgcttacctttattccttcctgtgaaaaccataatgaaggctcttgccca

SEQ ID NO: 17259 - DNA, 201 bp, Bos taurus
tattttggggtcggcactgactcactgctgaagtattgggcaactaattccctatggtgagactatttctaactgtgaaaagaggatcttcatagctaccgctgttttacaagaatctcatgagacttggtgtctgtctagaaagtatttttattacacaaagattttgtttcctgcagaagctaagggataaatggttag

SEQ ID NO: 17260 - DNA, 201 bp, Bos taurus
gctaagataatgaagtccttgtccttaaccaaggttggctgtcccttgtgccaagtctaaccatccctcaatgaactgcatcctctgcagccacagctaccgctacttcttattgatcgcctctgaaaaggctaccactgtttggcatccagcctgcttacctcctagcctgtggagttcttttcattggctttcttcccc

SEQ ID NO: 17261 - DNA, 201 bp, Bos taurus
ccagcaggaaagcagagcacatgcacctcctcaaagatggtttcaggactttgcaggcggtccagcggttactactccagtgcaggggacacaagctccacccctgatcaaggaacaaagatcctacatgccgtgcaatgtggccaaaagattaaaaaaaaaaagatggctgcaaaggggaaaatctagttttgaggaaga

SEQ ID NO: 17262 - DNA, 201 bp, Bos taurus
gtaaagctttttctgttatctcactgatcatttttatagaggagttgatttggccaaaattagcttaaagctgtttaatgcctggcatgttaaaaaagcagacctttgttgagtaaatgaatgagggaataaacagttttgtgataccagagagagtcaactgcttatatgaaagaactttaaaggagaataatcctttct

SEQ ID NO: 17263 - DNA, 201 bp, Bos taurus
gaaaggaaagtagccccaattcttcagaacttttctttcatcacaggtgaatcatccaataatgaaagcctgtgtccttggtgcttatggcactttattcattggataaattggcctcaagaagtgtaagatcattgttggtcttaagtaataagaacttgatttccaggtgttgaattgaatttggaataacacttatat

SEQ ID NO: 17264 - DNA, 201 bp, Bos taurus
aagcttcctatctgttaaatataacatggacagaatttctaaggagaggccccacatacaggatctcttttaagtgatcatttctatctggatccacttttcaggtggtcagtatgttactcctacagccaatctgtgaatattagagggagctgagaaaaagtccagagagtccctcagactatgcttgctatccagata

SEQ ID NO: 17265 - DNA, 201 bp, Bos taurus
tctcactcgctctcaatccatggccatttggcttccatccgtattccatggatgttgctctggacaacatcacatctccattactgtccatgctcatagacgttcttcggcctaatttaacctctctgcaacatttgacattgttaaacacttcctttttaagggttctcttcttttggattttctaaacccagattttct

SEQ ID NO: 17266 - DNA, 201 bp, Bos taurus
gcaaggtctgtgagaactagggttgtgtaaatcataatcccatctggccacatgtgagcaagcatgcacagacctgtagagtggcacccctcgcccttcccgactgccccctacctctcaaggcccccttctcatcctactgccacccacaggcacacacacatacacacttacttcacacccgcagactttgcttgcagg

SEQ ID NO: 17267 - DNA, 201 bp, Bos taurus
tattccttatccccatatcaccttacagggctccaacacaagcctgatgcaaagatttacccagacaagccatttttttgttgcttcatttttgatcagataaagttagaaggaaaataaaataactaggttgatgcctgtctacacagtgatttcctgggtgttttataagaattggacttttaggttaaactgagaaca

SEQ ID NO: 17268 - DNA, 201 bp, Bos taurus
acgtacaatagaaatgtgagagatcttaacttagccatacgcacaaagaaactgggagggcaccaagattcatggctaaggacatgggatggccacatggaagaataaactcatggtaattatttatcactctatttcttttaaatgaaaatagcattctaaactatatgactttggaagaaaaataaatttttgattaat

SEQ ID NO: 17269 - DNA, 201 bp, Bos taurus
tttcatttgagtatctcttgcttaaatactgctctagtttagtttagttttgttttgttttttttttagtactctgtagcatgtatcttatttgctactgcttttcactgttacttgtaggaattctagaaaattatcagtcagtgttccttgtcagtgattcacataatccaagttagccatactagtattctctttttg

SEQ ID NO: 17270 - DNA, 201 bp, Bos taurus
tccacaggtgcctctcggtcccagaaagctgagaaagagccattggaatgctcctgcaaaggaacatgttgtcttcaagaccctgtttgccagaaacacacactcaaagggaacatgaagacaccctttgtctcattttcaccttccaagttttgtgtgctcatctatttaacaaaaactgatgttttcaaactgtggtgc

SEQ ID NO: 17271 - DNA, 201 bp, Bos taurus
gaagttgggaaaattacttattccttgttaccttgtttctttatctttacaactccttgagattattgtttcttggtgtgttcataatgattcattaagacagtacctgaaaaaagcaccttgtacataaaggagggaagaataatactagcactattattattctaatgtgctccccaagttgcatcaaatttaagattc

SEQ ID NO: 17272 - DNA, 201 bp, Bos taurus
attccactgaagataaacgttcaagtcaaagatggaaccattcctgggaaccatatagccatatatatatttagcatttttcacacaaagtataacttctaaacattctaagtaatacatggtctacaatccttagtgctctccagcaaactgccaatcaaacgccttggcaacagccaacagaatggtctttcctgtccc

SEQ ID NO: 17273 - DNA, 201 bp, Bos taurus
gcattcctgtttccttgggcaaaaactcctctaaagtgctctttaaattgatgtcactcattacccaagactgtggggggcctccgctcttatcactggataccaggtacgatacagcagcccccacacatacacggaacttcttgctggtccctgacacagggccgccttccacaggctgtagctttgcaaatgctgatc

SEQ ID NO: 17274 - DNA, 201 bp, Bos taurus
ttttccaggcaaaagtactggagtggggtgccattgccttctctgggtgacagtcctgcttatcaaatatttgttcaatgaatgaatgatctaataatgccgatttctcatcttgtaacttgatgacttgctgtgaccttctatgacctatgtgttcctattaaactgtaccaacagtttccaaatgcaaatcagttgatg

SEQ ID NO: 17275 - DNA, 201 bp, Bos taurus
ttttacttattgttacaaattctaaagaagagttggagatgctagtctatatgataggatgttacaaaatattctttagggttgaagtttttgtttccttcctgtctaataggggaaaagaaaacatgaccactggtgcatgcacccacacacacaacacactgtagcaaatagagcccactgttaatatacataaatcct

SEQ ID NO: 17276 - DNA, 201 bp, Bos taurus
tgtgtttgggtaatacagtatttcagagcaaagtgtggttgtttaataagtggccatagttctaattttttacctttgaaacaaaaattttacttccagggtccttaatttcacatatggtttgcattagactaacatttgtcttcgttcttcatgaaattgattttgtgaatgagtgaatcacatgtcagtgatgttatt

SEQ ID NO: 17277 - DNA, 201 bp, Bos taurus
acagactaatttcatactgaaccttattctagaattgagtgtctttattttattttattttttttttgaattgagtgtctttataagaggataaactcaggtctaaagagcctgtgtagtttcattgctatgactgaaacttttaatacagagttgtattaacttcactgttttgttttttttttttttaaggccacattt

SEQ ID NO: 17278 - DNA, 201 bp, Bos taurus
tgctgaaaccccccctaaccctggtcctgtcagttcatggtggtggtgagagcactgtaagagtgacaggtctcctgggcttgcttacggcagctctcactggccttacaaatggaattttacatcctcttgcacttacaaacaagaagcaatttttttcactttaataaatcaggctgatggttggttgctgtgaagctt

SEQ ID NO: 17279 - DNA, 201 bp, Bos taurus
acatgtttgactttatttgacataatgtgtgctgcaggcattaataatgccccatttagagaagaataaatagagcttttgagaggttagatacagaaatcaagtcctcttgttttcccttcagtttctccacaggctggggagatgaggcagagctgtgagtgcagtattgataggctgaagcagaggaaaggcaccata

SEQ ID NO: 17280 - DNA, 201 bp, Bos taurus
aaatttctatttaacacatcatttatgatatttctttgtagttagtttactttgactaatctgcaagagtctctactaagtccttggctaaaaaacacactagttaaggtatattaatacttcaaatatctgttaccctattgcatatattgggttggctaaaaagttcacttgatttttaagtaaaaataaaagacatat

SEQ ID NO: 17281 - DNA, 201 bp, Bos taurus
aggcttgaagtttgcagtggactggtaataaacttaagtagaaatgaaacagtgaaacagctcagtctgagaaatgtggctcaggtaccagaagtaaacagagatactaaggaaacaaagaaggatttcttgctcaagaaggaatcaaacttgactaggaattaggacctgcgaagtaacttcatgccagctagtatgtta

SEQ ID NO: 17282 - DNA, 201 bp, Bos taurus
gactagtcattgctggaagagcctcacattttagtaatgaatcctttagaaatgtttcacaacatttaatctaaaaggagagaaggcatttggtttgtttgttctcatactggttttccatgaaggttctgctctttgttgaaagtcactgggatatctcttatctgtctcctaactggtattttgctataatgtggtgtg

SEQ ID NO: 17283 - DNA, 201 bp, Bos taurus
actacaggagatacgaatttgggagtcatcagcatagatgataacagtgacgtaagttaacctaggaatgattgtggaaagcaaacagaagagatccaaggactaagtcctgagaaccttaaacatttggagatcaaggagatgagagacaccagcaaaaatgattgaaagattgtgacctaaaagaaaagtaggttgctg

SEQ ID NO: 17284 - DNA, 201 bp, Bos taurus
caggggctgctgtttgataggaatgctgacttgctttgctgctcagatgaaccagaagctaggctctgagcctgcctggcatatcaggccatacttcttgcagatgggcgaatggggcaagtatggaaccagaagatatgctacgtagctgggcaaggcttcaaacttgccttccggcccaggtgggctcatagaataggc

SEQ ID NO: 17285 - DNA, 201 bp, Bos taurus
cgtgcctccattttgtcagtaatgcctaacgtggctcccgacagatattattttctttccattttgtgggtgaaaatacaaaaaaaaaaaaaaaagcttatgaagagaacctgcaatggttatcagctattcgttttcagatttattatgtatagcctgtgtcattctgtaactccaactcatattactagagttgcttcc

SEQ ID NO: 17286 - DNA, 201 bp, Bos taurus
tatcaagggcatgagtagaaaatagactagaaggaaagcagacccagaagcaacaccagaactgacaggatccctgggtcagtgagcagtggccacacccctcccattatggagtatctggagtgaaaatgagcttctatgttcccttgagacaatcccgcctacagggatgtctgaatgtatggccactgcagtgacact

SEQ ID NO: 17287 - DNA, 201 bp, Bos taurus
ctatctagtcaccccaactcccatgctaatttttgtcctataccaatttatcctgtttctttgtatccttagataatctccaatctctcaatttctgcaaaaagtgtgttaaaaatcgtacatagtggttttggatgtattgtttccatctaagagtctgataatttttatttagtatatatactgattggtactaatgag

SEQ ID NO: 17288 - DNA, 201 bp, Bos taurus
aaggtgaatttccattattgaagagttaaaaacatatttataccttaaaaaatctagtgtgttgtggtaaaggatttatataaatccttaacaatatgtgtacccctgtttctgttatactgttaccataaatccaaagtgactattgctgtcctatctttaaataataggaatcctctaaactcttttttccctctccgg

SEQ ID NO: 17289 - DNA, 201 bp, Bos taurus
tgactgattattaaacgaattacaaaatgtatcctgtcttggactggctcctttgttaacacttgtgccatattattccttttagaaaaggtttttaattatcttgatatatgccaacatactcatttccaaatacattggactgtacattggatatccttaaaaatagtttcatcactcagtaaattaatattgaataag

SEQ ID NO: 17290 - DNA, 201 bp, Bos taurus
cgtgttatagctcttagatcagtgttacagctccgtgttacagcacaattttatttagaaaatagcaggccaatacgtcctcaaggtgcgagggcatgtcgacccaaagacgcaaagagaagagagggagtggggagccctggccctttggctcttccttttattatatgtttttcctcccccctgggcctgccctatgta

SEQ ID NO: 17291 - DNA, 201 bp, Bos taurus
cactaaactgcccagtttgtcttaccatgtttttgtttagttgctatgttgtatccaactcttttgtgacccctggtggattatagcccatcaagctcctcggtctatggaatttcccaggcaagaatattggagcaggttgctatttccttctccagggggtcttctctacccagggatggaacccacatctcctgtatt

SEQ ID NO: 17292 - DNA, 201 bp, Bos taurus
atacttgcaggaaaaagaaaatgactaatcacctactaaaaatggcaacagatgccataagcaaaatttcattcaacctgttaactttggttccactgtacgaatcatttaattaaaagtcttagtttttaaatatgattttttaaaaatagcatctgcttctagaatatgaggaaatgaattttatgctcaatattttga

SEQ ID NO: 17293 - DNA, 201 bp, Bos taurus
tatatctaatgtgtatatgtacacatacctacttttatctatatatgtagcaatatcatatataatgtatttgattcatttatcttggattacttctcattatgcaaaataaattagttctaacttttgctatgaagaaatgcttttttaactgccatgtcagtgtcttcctttaaaattcatagatgtattaaaatctgc

SEQ ID NO: 17294 - DNA, 201 bp, Bos taurus
acacaaaaacaatctggtcattgcctaatgggatttgcatctacattaagggaaagtaaataaaatatcacaagaaagcaccactgatttgtctgatggtcattatcatctcatcacacgtttctgaaagaggaaatggaaaaggccagaaggaaaaataactaattacatcagatctgacccctcctaaagtgcttgggg

SEQ ID NO: 17295 - DNA, 201 bp, Bos taurus
ttaaactggcaatactgtggagcagaaatccccaaagtaatgggcttataccccaccacaagaggaccagatgagagaagggaagtaaatagttgaacttctatgtattataattttttataaagcataaagagaacaaaactaagcttgataatatgtatacatggtttcataccagtgacctcacacagttgtatgttg

SEQ ID NO: 17296 - DNA, 201 bp, Bos taurus
gaaatatcctttcctgaaattctttctcacttgaacctgtgtattataattgcatgtctcctatattttattttggccatttttatcttgttcttttctttatctttcagtctgacacaggatttgtacaatgcttagcagtcattcctttaggcttatttctttgtgatttccattcaaaagaaatatggccgcatctct

SEQ ID NO: 17297 - DNA, 201 bp, Bos taurus
gggagtaacatagaaagggattaggaacattctgaccacggcaaagaacatcttcaatgatttactcaaatagccagaattcagttactatttcctgtttgagaggttaatcattttcccttagtgcattaatcatctttcttcagtgtttagtcatggacctacaaggatgacaaacactttctaaactattgtaaattg

SEQ ID NO: 17298 - DNA, 201 bp, Bos taurus
gatcttttgagatttggaactccacttacttctctgtctgacccctcatcacttgtccttcatcctccaccacctggaggcccctccagctgctagtttaatcttggagagcatgatcttaaacccactagcctataagataaaacatgtaaacatttaatatggctattaagacttccaaaggcccattcctaatttttt

SEQ ID NO: 17299 - DNA, 201 bp, Bos taurus
tctaatggtctctgatgcaacacagcagatgttcacagtgtaccaggtacaaagaagcacagttgctttgatgccattattaccatttggtgactctgtggtcagcaaatggtttgtcaatttaaagtctggtatcccccactcatatggaagtgtagtgcccacattatgttttaagaatttaacgacttctggaataaa

SEQ ID NO: 17300 - DNA, 201 bp, Bos taurus
ttctccatctttcctcttgcttctccatgaaatgaatctatctccttgtttaccacggttgctgtgccagtgagctgcactcttgctcttagatttctgctgagtcctattatcactctgaaggaactggctgctttaggagaaaagggaagaaatttctccagtactatgtatctctagcaatagtataaggggagggtc

SEQ ID NO: 17301 - DNA, 201 bp, Bos taurus
gggcccagctggggtctacttgatccaggaggatcggggagaaagtcagtgtgattcaggcacgcacagtcattccagacaatgcattcttcagtgatgacgcagtcttgatattatcaaaagaaatgtttatttccccccatctttagagctattttaccagcactgtattgctttcactgagagattaactacaacact

SEQ ID NO: 17302 - DNA, 201 bp, Bos taurus
gtgcttgtatggtggttaatggtcataattttccctgtcttgtgcctggcaagcatgcttagtctgagtggaggcaatagtggtggcctcgctgggaaatgagcctgcttgctgggtctatagcaggatgccattgtcgtcctcctctggactttcatgaaaacttgagcctgtaaccagctggctcgaatgttggcccac

SEQ ID NO: 17303 - DNA, 201 bp, Bos taurus
ggctacagaggtaatctcaaatcagaggccagaccatctttttctgtcttcctagataaggagagatgggctcatgtatagatgagaggtctcatttgtttctaaatcctcaggaaggcctgcctgctgagaacttcctggggaatgcctgacccctgaaatgcagccaaggtcagtggcatctaggagaatttgctgcag

SEQ ID NO: 17304 - DNA, 201 bp, Bos taurus
caggactacaccttaggagctcatgctggaggaagtcaactgagaaggctgagtcagagagggaagaatagaatcaggagattttgaaggaggagtgcattacagtattaagtgtggctaaaaagataagaaggatgaaggtgaagtgctggggtccagccccagctgatccagggtattcgaaggggagacggcttaggc

SEQ ID NO: 17305 - DNA, 201 bp, Bos taurus
aacaaatggcaatgtttatgattcactgtaagagacaaaagcagaatacataattgctctgattagtaattaaaactattacacaaatgaacaagtactgcagggaacaaggaggaacaccttggttttctagcatagtgaatttatgcacaattctttaaaaaaattattatttcttggtgcaatattaattgtattata

SEQ ID NO: 17306 - DNA, 201 bp, Bos taurus
ttagcagcttagcagcatggttacttagcttttatttgggaagaatataaatgtctttacatttaggcgaaagattcacatacagaagtctttaggtgacactttcttaatgagcagtagcttgtgccaccgtcattcttacctgtctgtgcgtggtctgagtgcatggatgactggtccatgggcatcattggttcctac

SEQ ID NO: 17307 - DNA, 201 bp, Bos taurus
taattacccttgtttgtggccaactgttttcaaattaagatttctacaaagtggcaatagacactacaatcctttgattacagactcatgttcacaaatttattaattcatatataccacttaactgtttaacctgaatgatttattactgctaaagccaggcaaagtgtgagaaaaaaaaacaactgtggacaatttaaa

SEQ ID NO: 17308 - DNA, 201 bp, Bos taurus
gtcacttaccacatggcatataccaaatttaactctaagtgaataatatttgaaatgttaatttgtaatctgcacaagtcttactcaaaccacaggcaccctgtctatttagagcaactatctcctgccaaggtgtccacatgatatgtcccttacatatccctcccatgttttctcctctaatcttaaattgtgttaccc

SEQ ID NO: 17309 - DNA, 201 bp, Bos taurus
atttcttatatatcattccaaagagtttacatgaaaacctatgtgtatacacataaacacatgcattgtagaaatcttttgtgcaaagtgtacctatattttctgctttatttttgtggtaatattttgtggatctttccctatgtctatgtatctatctatccacctgtttatgtttacatgggtatataaatagctact

SEQ ID NO: 17310 - DNA, 201 bp, Bos taurus
cttttgatccaagaagtagagaagtcaccttatctctcatgtaccaggatgatataattaaaataggacatgtttttgaagtgaggtatttaagggcttcaaagaaggtgtagagtgttagaggatcagcacctgcctacttctcaaatacagttatgaggacacatttatttagcaaagacatccttttgaaaggagaac

SEQ ID NO: 17311 - DNA, 201 bp, Bos taurus
tccaccagttaccactgcagtgtgaactaggaggcccccaccatcacaaatccactctattgctggggtagggacagaagggaaagaatagaaatatcactaaagcaggctctaaaccaatggtaacctataatgtggtcttcacttcactgtccactatttctaaaatgaaattttagttcaggtatattcagaggaggg

SEQ ID NO: 17312 - DNA, 201 bp, Bos taurus
ggttttcaatatcaataaatatatgcagtatttttaatgatttgcacaatagtctctttgtgtggctataccttatttaaacaattctccttctgagacaatttaagtttttattttcccaattctttttcctattacaccctatccttgtatttgcttgaatgtttctatagactcaattcctttcagccaaattgctag

SEQ ID NO: 17313 - DNA, 201 bp, Bos taurus
tcagtagtgacttccagaattttcctggttggcaggagcagattcttaaaggggctcataagataaagcttttgcttctctcagaatttcagcatttcttcgagattactccatcccattttcaaggagttctatgccccatctctggccctcccaggacatatcttcaaggttaatgtttaagtgttaattaagcctagc

SEQ ID NO: 17314 - DNA, 201 bp, Bos taurus
ttgtttagataacaccttcggacacgaatgcagtttgagctgtgaggactgcatgaatggaggccgatgccaggaaggaaagagtgggtgttcttgtcccaatggctggggaggcattctttgtaatgaaagtaagtaatactttggagcatgggtggggggtgatgaattctccttttactgctggtgaactactggtga

SEQ ID NO: 17315 - DNA, 201 bp, Bos taurus
ttgccattccctcattaaaagagagtaaaaagagaggcctttaatgccattaaatgtccaaaattaatttattataatcatatttcatattgcctgtctgccagagaggaggaaaacatggattatatttcctgaaccaagatttggtacgcattaactaaaaatatattttacatataaaatttatttaaataataaatg

SEQ ID NO: 17316 - DNA, 201 bp, Bos taurus
atttatgaagtacaggtccctctatgacctagaaaatttcccagtccaaggtatgacaagtgctgataatttctgcattgcaaacaaaactgctgacttatattctagaaataaagcaactgatagtctatgagttatagttacacctttttcctaataatttattgagatatcttttgcaaatacaaattgtacatattt

SEQ ID NO: 17317 - DNA, 201 bp, Bos taurus
gcagagccccagaagcataaggcagttttacatcagtcttttaatgtcttcctgtcaagctacaggatgagaaggggggtggctgggggatcaggaaataggtgcttgtcaagaagaacacaattgaagtcagaaaccagaatcaactattaaaaacaattaaatcagaattttttatgttacaaggaaaatcattcatgc

SEQ ID NO: 17318 - DNA, 201 bp, Bos taurus
ctaagggccccagttgtgttcaggaaaactaactgataatgtacatttccaaggtggctggttatgttcaacaaaacatacaaccaaacaaacaaaaaaaccggcctgatattaaagattttacataagagctcatccttttgataactattttctaaaccactgagaagagctcatccttttgataactattttctaaac

SEQ ID NO: 17319 - DNA, 201 bp, Bos taurus
tacccccaaaaggagggtctggaaatttacttggctacttccagtggaagagagggaataaactaagataggtgggaggcatccaaaaggaaatggccaacgtatggagaagaccagtcaggaacagaggaggaggggaagggagactgggtgagacagagattcagttattcaccaaaccatggtcttaccagaaacatg

SEQ ID NO: 17320 - DNA, 201 bp, Bos taurus
gtacaaaggaaacgcacaagtgaagaagtgaagtgggaaacagaagtagccagtagaaaactcagagcagagtcagttctggaaacaaggcagcatcttgagaaggaattttagcagaggaggccagattgcagtgggttaaatgatcaatgataaaatcattgatatgcatcaaagaactgttcttgagaaattaaaggt

SEQ ID NO: 17321 - DNA, 201 bp, Bos taurus
cctttgggttaaaatataaacatagtcccacttaagaaatgagaaccaaggacaagtcttggcatttgttgagtccttcatagaacaagaaaacacatgaaattttgctataattcaagagccattcttgtcagtgctttcaagggtagaaattaagctatattaaagcttgtcttggcccaattatagaatgaaagtgag

SEQ ID NO: 17322 - DNA, 201 bp, Bos taurus
ggtttggcagggatgttgtggaagtgatgctgtgtcctcggcacattgcatccagatgcacatggttgtcagtctgtcccattgttggccgtgttaactctgataacttacgcccctgcaaggtacccctttgccttgtgcaatacaagtaatctgtgggaaatatactttgaaattgtgtaaatattttattttttaaga

SEQ ID NO: 17323 - DNA, 201 bp, Bos taurus
atgaaagtgtttcctttaggtaatgtgatcttgttttctacttgcttttcagctatttagttacagtgggctgtgatgttatcttcattgcattcattctacttggggttgttgtccttattggattcaaggattaacatcagatttggactttttggccattattttttcaagcattttttttgtctccccacatctgga

SEQ ID NO: 17324 - DNA, 201 bp, Bos taurus
atgatatgttgcgagatggagagatgatcatttttattggttatttcatccaacagtgtaccttgcctttgtagactgctttagataaatgagccttgatagtgatagcttaggtaagatttcttatgttaaaaatgtctttattttaattgtggtaaaagcagttctattacaaataatgtgtagaaaaccatagcatgt

SEQ ID NO: 17325 - DNA, 201 bp, Bos taurus
gacatttctgtgtttcctatttttactctggacttccataaagtacttcaacacagagcatctgagtcttgcaactttcaactatatcctactattattatatacaaccctgttgatagaatggtaaggtgggggaaaataattaatctctaatattatgattaaatctgtcttttatgtaattatcttttgataatattg

SEQ ID NO: 17326 - DNA, 201 bp, Bos taurus
ttatcataaaatcattcaaataacttgccaattttaaatgttacaaagtgctatatagtaaagtgcttgaaagcatgttattaaggacatttatgaagaaaagatagtgtaactaggttctgaaaatgagtagcagtaattatttggaggtatgagagagcatcagagaagacaatggcaccccactccagtactcttgcc

SEQ ID NO: 17327 - DNA, 201 bp, Bos taurus
tggaggccaagttgggaacttccatagcagtaatgaagttaagaaacatgaatcttccccacatatatccataatgaaactacctgcctttgttcaccagtatggtaccagaagagacttgataaaatggatttaaatatgatgcagaatcttacaatgtaatatcccagattcacatgaaaattgcttatccttataaga

SEQ ID NO: 17328 - DNA, 201 bp, Bos taurus
taccacagactaagtgacttaaacaaccaaaatttattttcttacaattccagaaggtagaagtctgagatcaaggtttggtttcttctgaggcctctttccttgacacacagatggctgtcttctccatctatcattacgtggtcctttctctaagtgtgtctgtgctggtctcctcttcttataaggacaccaggtgta

SEQ ID NO: 17329 - DNA, 201 bp, Bos taurus
ataaaaaatcctttaaatgcaattattacaatgttaaattcctgtgcctatgaacccctctgcagaattcactcataaacaaagtcagtttgagagctaacgtggaactcagaaattttcaagaaacacagaaacattagaggggcatggctaatttttgtctggaagaattcagcatgaattaaaatgtaacataaattc

SEQ ID NO: 17330 - DNA, 201 bp, Bos taurus
ttcagattggcttctttcacttagtaatacacatttgaattccactcatgtcttttcatggcacgatagcatctttctttttagcacagaatactattcattgcctgagttaccacagtcacaaaataccttttgatcccgtgataatatttatgtatttactttttgctcattcactgcctaatttaaattaacaagtat

SEQ ID NO: 17331 - DNA, 201 bp, Bos taurus
atcaaataatagtcgtaagaactagaaaattattttaactggatcagagtactacagttttctttttgagtagcacttccatcaataattttatttgcttttaatagaagctcaaaaactgtcagatataccttctataatatgcagcagcatttgaagactcctttcatttttcactgagatattttcaattaaaagtca

SEQ ID NO: 17332 - DNA, 201 bp, Bos taurus
tactacaagacaaaagtctatcttcatatcattctttccctggtgggtaacaatatctgacaaaggaatatgctggatatacatctcaaaaataatcatagagtagaagttactatctctcatcccaaagaactctccatatataaagagtaatttccatacaaattcccatgaaagtgaaaaatactgtattgctgtggc

SEQ ID NO: 17333 - DNA, 201 bp, Bos taurus
tttgggttcccttaccctcctgctctctacccaggggccccttcctattaaaatctcttgctttgtcaacatgtgtgttgacaaattcatttctgaatgtcagataagagcccaatcttaggccccagaaggggtcccctttcctgcaacattattatatttgttatggtgatatgtgatgagtgatttttgatgttactg

SEQ ID NO: 17334 - DNA, 201 bp, Bos taurus
cctcctccagagactaatggtaaagactgggatataaacagattagttacagtataaatgatgcttactctgacagaggtgtacatttagtgcttcaaatcatccacctctgtgtgagtcaaagaagcctcacagtagataatggcacttaagatgacactcaaaggcagtctgccaggtagagagggggactgaatctaa

SEQ ID NO: 17335 - DNA, 201 bp, Bos taurus
cccacagactgaagcatgctgggcttccctgtccatcaacaactttatttatttataaataaaacaaaaaatgcttcaaaatattagaataggccatgcagtcacttgcttctttttatcctggcatccacaacaaaaatacatttcttacaagggtttctttagtttctgttatacccaatactgtaaaatacttaataa

SEQ ID NO: 17336 - DNA, 201 bp, Bos taurus
gtaattgttagtaaacgtaagtgggcatattagcagtagaatgatagaaccgaggtaaagaaaaggggctggtgatccagaaagtatataagcatctttataaagaacagagatatagaaacaaaccctcttgtcttgttggaggaccactgagaccaacagaatgccagtaagactcttggattccactcataaagagca

SEQ ID NO: 17337 - DNA, 201 bp, Bos taurus
gatctagactactttattaccaaagctttaacttcttgaaaaaattaggttgcatatatgtcccaatttagaaatgtccagccatccaaatcattagaaaggtgtcttatttattttgttattcaatgctctattctcattttaataatacacaaatatatagaagatactataataaactgaaacagtctgtggcccccc

SEQ ID NO: 17338 - DNA, 201 bp, Bos taurus
aatgaccatgatatttcatgtcattactctgtttacttattctgtcaaatgataatgtctaccatcttaaattgggcttttgtttgcttgtttgtttcttcttttacagtcttatattgttaatgtacagttatatttttaaaaagcataacaagtatgtatatggagaaagaagagtggagttgtgtatatagcaaggta

SEQ ID NO: 17339 - DNA, 201 bp, Bos taurus
tttgtgctttatcaaaaatattgcacaataaattccttttgtaaaattactcaaaagtagcatgaaatcagcttcagctaatctccaaaatatatgctaaatgtttattttgtgttaagtgaattcatgttagtctcaccagtaaaatgaaacactttccaaggaagaaaattttatcaatagatcttccaaaatgaaaca

SEQ ID NO: 17340 - DNA, 201 bp, Bos taurus
agcacttgaactggatattgtatacttagtacaaaagagtgctgcatgtgtctaggtgatggcagaatgtcgagagcattaaagaccaattttgagtaagcgccaacccagtgcagctgtggaactgcgcttctggcccaggcagagccacttctacagctggcctagatatttactaaaatttcattaagcattaccagt

SEQ ID NO: 17341 - DNA, 201 bp, Bos taurus
gactgtggcgatgcagtattgctggctgtgtctattgtaagaagcttttaggactatttaggctttctgaaatttgttcttaccttcctacagagtctgagagaaatagctggagtgatcctgattgaaggccacaggccccacgtttgccaggatccttttgaagttttaaagttttctgtgatacagtgagatgcttcc

SEQ ID NO: 17342 - DNA, 201 bp, Bos taurus
actggctaagtcacaagggcaagcattcctttctgcttttcttgaagaatactttcctagagatcatagaggaactatacaccatctattctgaagaaagggaaggagaagaatttatctgtaggtttctgtaccctattattcaaagtttacctgataaggcttcaagtctcccaagattctgaattgtaccagtttccc

SEQ ID NO: 17343 - DNA, 201 bp, Bos taurus
aggcaaatataaagaaatgaacagcctcccaaggagaagtattctaactagactgaccataaaattaatcctccaaaccaaaatacttctgaaaatggaaaaggctattattagtaattacatcaggaccacatgcataatgctggacgttcccaggcaaaacaagatgtatgctctctgtgcctcaacttccattgctcc

SEQ ID NO: 17344 - DNA, 201 bp, Bos taurus
attgcctgtgaggtgaaatacatctttgaaggctccataaaggcaggaatggaaatattataaagaacttcaccagggaattaaaaaggcattccacattcatttttaggtttaagagtaaatgcctaagactctattcagatagtaagtttcaacaaaacattacatgcagtggctttatatataatctgacaaggcata

SEQ ID NO: 17345 - DNA, 201 bp, Bos taurus
tagtgcatttatttatgatattcaaactgatgagttaatagaagaaacatgtactgctagttagtaggaaataaccatttagtcactaatttgcaatgaggtcttagacaatttgcaatttcctggaactcagttttctaaattgtagtgaaagtgaatatatgtttgctaacatccctcccagacgttttacccaaattc

SEQ ID NO: 17346 - DNA, 201 bp, Bos taurus
tgagatatcctaagtgtgaactgatgaactgcccaaattatgaccagcagatattataagtgcttcctgttaaaaccattacattttgttgtgatttgtcgtggagccatagataatgaaaacgctctcatccaaattaatcaaacacagggagcatttctccccacatctctgaatctaagagtgtctttaaagcctaat

SEQ ID NO: 17347 - DNA, 201 bp, Bos taurus
aggctttaatcaccctgtggttctaactcttggggcaggcattacggaaggaatgtactctccttacaggaaatgctttgtgctctcttcagtggtgactatagttatttgactgttagaaagcttatctgagaggccttcattctggggtccctgggcccaacctacccattaggcaattccaacaaggaacaaaagacc

SEQ ID NO: 17348 - DNA, 201 bp, Bos taurus
gggttgccatttccttctccaggggatcttcccaacccagggatcgaacctgggtatcacacattgtaggcagacgcttttactgtctgagccaccaggggagttcatgacactgtataaatctaagatttatagcataatgatttgactaacagaaatcatgaaatgattatcacaataagtttagtgaatatccatcat

SEQ ID NO: 17349 - DNA, 201 bp, Bos taurus
cctgacatgtaagcctgggcaggcaggaaggttgtgatgggggaaagtggagggaagacagaatctttgatgtgtggagctccaagaatgatatggtgctcaaagcacaagagactagaccttgctttccagggtagagcccaagggtagaaacctctgccccagtgtagagaggcaatggctgaatgagcccactgggac

SEQ ID NO: 17350 - DNA, 201 bp, Bos taurus
caactattccactgaacctggaaggcccagtgatagtaattctactggggataatctgactcacccttgtctagaattcagaagctagtaactcatcagagcaggaagccctaccatgctgtggcatccacatctctgctttgctttcttgttctctgctcattaatgcttaggcaggaactcttgtgaagcaaataaaaa

SEQ ID NO: 17351 - DNA, 201 bp, Bos taurus
caaaggtgttgccaggaaaaaaatggaatgtgaaattagaactcaactggcagctgtctaaaaaaaatatactttaaaaaaaaaaggtggatttcagagtatactgaaaagcaatatgaagacaggcctcttgtttgaaatctgataacatgaaattgaagatgacaaaaagtatttttaatctacatttttctattatac

SEQ ID NO: 17352 - DNA, 201 bp, Bos taurus
ttacttacatgttcaaacataacaatccagcacacccagacaagcacagcccagagtttcacaacattaataccacatccagacctttaaattaataaaaactgtactttctaagacaagaatcagacctgccaacaattttcatgtaaaagtatgtaataaacataatctttattaaatgatttataagaatcgaggaac

SEQ ID NO: 17353 - DNA, 201 bp, Bos taurus
gccatgataagtgcctggggctcctgaaattccacctggtttggaacaggattttccccaggacctgggaaagcagaaagcctacagacaatgctgagacatcctgacctgactaaatgagctaaagggattcaaacccagaatttccctggtgagcctgtggttaaaactctgtgctccacgttaaggcagctaaaatcc

SEQ ID NO: 17354 - DNA, 201 bp, Bos taurus
tcctgagagtgtacatgcaaaggggcaactggctcagttgggtcctctggggcctcaagcttgcacatgcttgaagtgtccagctcagtcatttgcctctagttgtaaagttctcaaacatggtggcttttgtcccagtcccagcctctgccagggattaaggaaaatctcgatgctctgagtcaaccagacgtgcttttt

SEQ ID NO: 17355 - DNA, 201 bp, Bos taurus
tctcctgtgtgtcaggaccaagacttcaagctgatggctggtgaagtgcctgccctgagcctctttgggttgtgatctgggcctgtgggcacttggtaccgaaacccctccagcagctccatgatcccagggctacaaggcagagatgtgctcttgcctggctagagggcaccccttggattggtttaacagattgggaca

SEQ ID NO: 17356 - DNA, 201 bp, Bos taurus
aaagcatcaattcttgagcagtcagccttctttatggaccaactctcatatctgtacatgatgactggaagaaaccatagctttgactatatggaccactagactaaatggtaaagctattgttttcctaaagacctggcacctccacttgcagtgtcgtgaaactggtccatgatttggatggtttgtatgaccggcctg

SEQ ID NO: 17357 - DNA, 201 bp, Bos taurus
ataaaaagtaaggtaaagaaacatcacctgagaatcaatttccccctttttttgcattagaattttttttttctcctcattctctgggaacccaaaccttctgcagaattataagaagtttggggaaatgctgttatgcttgtttctcccaccaatgataaaaaggaaataaagaagaaaattctcactcagctgtgcaac

SEQ ID NO: 17358 - DNA, 201 bp, Bos taurus
gaaggtttttttttttctttccttaaatagccattgagaaactccagacacatttttctgaaagaaaatatgcactgactgtcttcataatattcaggggaaaacttctatgaattaatgcagtgataaatattacagatatagcctctggatatatagtaacatggtgcttctaattaggatgcaggaagactctcgaat

SEQ ID NO: 17359 - DNA, 201 bp, Bos taurus
caaactgactgatgcttatttaaatttctcaagctcagaggcatcacaatctaaccatggatattcattaccatgatctaacccccacacattaaagttccagtacaaaattcacaggctactctcagcaagctctataccaaaccttgtaggtctttggattgctgacggctgaatattttgtttctagaagaagttaac

SEQ ID NO: 17360 - DNA, 201 bp, Bos taurus
tcaatcaaatttgacagctttcaaggacacagtgtggccctgaagtagaccagaattccaggcaaatggacggagcagttaggaccagcatgaaagagaagcttgccccgcaggcctgtgtgttttgagagaagactctgaatcccatccctcgaattcctcaatcatgactgggcaatacaagtgtacaaaacagattgg

SEQ ID NO: 17361 - DNA, 201 bp, Bos taurus
taagtcccttctctatgtctgtgtctctattcccatcctgaaactaggatcatctgtaccatttttctagactccacatgcttgtattaatataccactgtttttttctttatgacttacttcactctgtatgacagactccaggtccattcatgtctctacaaatgacccagtttcattcctttttgtggctaatattct

SEQ ID NO: 17362 - DNA, 201 bp, Bos taurus
atttaaattgaaatagggaagtgccaaagctagcaggacaatccacactcacatgctctctggcttcctcagccaatgaagatcagatgggaagggaggacagggagcagaaaaactgtgggggtgggaagggcagaggtctaacagtctctagcctaaggttacggaacatctggacaggtaagaagacatctcagagtg

SEQ ID NO: 17363 - DNA, 201 bp, Bos taurus
tcatcttcagtacgtcacttacctagtctgggcccaggaatcctgtaacacagttttaatcagacttgtttatatagtcagggtcccacacccagggttgcacacaccctaggatggccctgccctacatagaacagctgtcaaagtggagtgtctgatggctctgggagcccaggctgcccaacccttctgagacaaagt

SEQ ID NO: 17364 - DNA, 201 bp, Bos taurus
agcctctgctcaaagcagtgaagacccagcacaaccaaaaataaaaaaagttttgcatgctcctagtattgtcatagctgcaatgcatgagataggccccagtttttacgtatctgttaaggggtgaattgtgctcccccaaatagaggtaccaaggtaaagtgaagtcattgagatgggccctagtcctatatgactggt

SEQ ID NO: 17365 - DNA, 201 bp, Bos taurus
acctctgcctgcatcctcaaaagtatgataatgtgttaactgtgtttatgcttctgttaaataaaattattaaactgtgaactgaaatacatccattttacttacaagttctatgcaaaatagcctaaaacagagagaaaagggcttttactagaatgtagtactatcgatgagcatgtaatagcaatgggcctgcctaca

SEQ ID NO: 17366 - DNA, 201 bp, Bos taurus
atactaattgaatcattctaaacttgatacatgaatatataagatacaagtgaattaaatttagagctggagaatgtgaaactggaaatagagctgaatgtatgaaataaacagaaaaggtgaaaccttcaataattgatccagattggtccgagttctgccacattcccttcctttccactttgtctatattagttttgc

SEQ ID NO: 17367 - DNA, 201 bp, Bos taurus
ccagactaggggctaatcaagcccaccagacagtccatatagtcaaccaacacaacagaagtacccacatagccctcttaggagaaacttttagagcatatagcatgggtaatgagaggaagagactatgcgaggatgcattgcatatttcctacagaaggccacttttccaagaccaagaaaggtaactaacttaccaca

SEQ ID NO: 17368 - DNA, 201 bp, Bos taurus
gtcttgggtgcagtctcatactcattttgccctgggcctgaaaattatgtagtcagccctgcttgtagatgctcaacaaaatacgcttattggaccgcaaagtgagaggccagatatggcagagtgaaggtcaaagaaggcagtatctgcaaaactaggctttttatcaaaggttgcaagcctagaaagacagctgggagc

SEQ ID NO: 17369 - DNA, 201 bp, Bos taurus
aaatatgcaattgtttactaagtaacatagaagagaatttgaattaagtggaaattttacattgctcatgaattaaataagtcatctttgaaaagatatcaatacatcccaaatatcctataattttcattacaatccatataattttaattataattctattcaaaacatcaaactggtttctaggaaaaaatattcagt

SEQ ID NO: 17370 - DNA, 201 bp, Bos taurus
gaaggaagtggaaagtgacaattgcaggaaggacagggcatgattgcaaaagcaaaattcttgaggaggcaagacaatatgagtttctgtgatgccgtgcccagtggagaagttgtcccctatgggcacagagactgttggaatgatgtaaccagtgggaagatagagccagatagaactagacgtaggaagataaggcag

SEQ ID NO: 17371 - DNA, 201 bp, Bos taurus
acactttagtatggtaagcttcactgtagagaggtttggttacttactataatacccactctgagttgtgcatagtatgcaccatacacattgtgtaactttaaaactgtctctagggcgtttgtacctttggaaattaagtgaaataatcagttcctgtcacatgaaaaattagatactgttcttacatgatttaacttc

SEQ ID NO: 17372 - DNA, 201 bp, Bos taurus
agagaagaggaagtgaagcagaaggaacaaaagaatgaggacagcaaaagtaggattacactaaaacctcgtttgtggctttcttccaaatatttggccattcctgtctcctttgcagactcatctttatctgcctgtcaattacatgttcatgttcctcagcacttcattctggggcctctttttctctctctctcccct

SEQ ID NO: 17373 - DNA, 201 bp, Bos taurus
ctcagagttgtataagttcttgaacaactttattgttctcaaactgcattctaaacataagacctagctagactgcagttactgatcactgcccaataactgaattgaggttccagggttcctaatttctacaagtattattatagtattcaaactcctccctcctaccctattttttttaaaatcaagttataatttacc

SEQ ID NO: 17374 - DNA, 201 bp, Bos taurus
accaaaatttgttatttcattattggcctttgttcttttccattttatgtcttgagaccctgtgtgacatttcaggttatgacatgctccatggtttgctcttccctggtttttcacatacagaaggacatttaacatcactatttccatccaaaataacagtagtgctcctttgaaaatggtgaaaatcccagaggtttt

SEQ ID NO: 17375 - DNA, 201 bp, Bos taurus
ttgtcatctactagacaacccagagctggtgctggcgtagcatttcactgcgaagaaaaccgccacttacagaaagaagtacatggaaactcatcattatatattctaaacttttatgatgcttttcttctgagcttttaaaattctgctgcataggtatcattttcctgtctatgaagatagaggaactgagccataggt

SEQ ID NO: 17376 - DNA, 201 bp, Bos taurus
gatcacattacctagggaatcagagcagaagtcacccccattttggaggattctagataaatctttttatctcttgccctgctgttggtttcatgtctccgaaagtactgtaattgacgggctgggcattatatactccaagtatatgttttgtcttttggtttccccgcccccaacaactcttgtacttagtgattttcc

SEQ ID NO: 17377 - DNA, 201 bp, Bos taurus
atttacagcttcacagtcgagactctgtacccagtgggaagtggtgtcattaggatgtgcagacagaggaagaatgtcctgagaattttcagggacagtcggcctcgtgtgatgtgtgttaccacacgacacgcttcacatacatgaggcaggttcgtcgcgtggtccaatctgtctgttctgcccccggtccttgccttc

SEQ ID NO: 17378 - DNA, 201 bp, Bos taurus
ttttttaatgtttaaaacacacaaaattctcagaattcccgtggaacaggagtaatagagaagggatgctatcttattttaaagtagtaatcattcaaatgacttacctgtgatcatgttgttgtttagttgctaagttgtgttcaactcttgcaaccccatggactgtagctcaccaggctcctccatccacgggatttc

SEQ ID NO: 17379 - DNA, 201 bp, Bos taurus
agtttattctcttatagatcctgaggccagaagttcaaaaatcaatatcattgggtcaaaatcaaggtgtcacagggccacacttcctctggaggctccaaaaggaaatccttacctcttcccacttctggtggctataggtatcctttggcttgtggcctcttcactcagtctatctctctgtcttcatatgttctcctt

SEQ ID NO: 17380 - DNA, 201 bp, Bos taurus
ctattttaacacacagcttaatgtagacctcaggtattctataacctactggtcaaataagacagttatcttaagaacttatttatcaaagagttttccctttccttatttaatggattctgatgagactatttctcacgtatgctaatgttgcccaggaagtgatttaattgacaaagccccaaatgacagcctggcttg

SEQ ID NO: 17381 - DNA, 201 bp, Bos taurus
caatcagaccaacctcaggaaaaattgccaataggaatagattttctttggtgctaagcatctcctggttctgtggtcaatgccctcttctagcttgccatacctagtgtcccataaacctgtgttttgttccatgtagggcctatcaataactacattttgatctttacttcccattcaaccgtaattcagtattaagaa

SEQ ID NO: 17382 - DNA, 201 bp, Bos taurus
cttaatggtcatcacatcttttgctccattaaattcctcatttaaaacattttgctacagatgacttaggttttcccctattttttgccttctttctgtccgtggggctcatggatgaataagtattccctgaattcttttgttgttttttaagctaatacattcaaatccaaacaataaaatccactagaataggacact

SEQ ID NO: 17383 - DNA, 201 bp, Bos taurus
cccaactgctgaagcgaccctggtggagcagccccacccgcggcctgtctggggagagcctgggctctgtagctccagctggtgcctcttcattctttgaaataaaaataaagatttcctttgttttggaggcaacttacccttgtcctattggcttgaacaacactgggcaggaggactcctgttggagcccaacttggg

SEQ ID NO: 17384 - DNA, 201 bp, Bos taurus
caaaatattttgctatactattagaaaagcttacccctaccacttcttaggataggtgtggcacaaatttaatgtcatgtttataaatgaaaatcaatgcgtcaaatgcaaattacagttaaattatatgtttgcagataagcgaatctttctttcctaagaccctttcttgtggccttttctaatgaaaaaaattcagaa

SEQ ID NO: 17385 - DNA, 201 bp, Bos taurus
tttcgctttatggtggtgcctggttatctaacttagcaatcatctaaattatccattatttgcatgtgcattattaaaattataaaatcaatatacataaaaaattctcctggaagactgtgaacacctacaaatagatatgaagatattagtttgaaaaatactgaccagctcctacacaatgatttcacaagtgaaaaa

SEQ ID NO: 17386 - DNA, 201 bp, Bos taurus
ctgaagctcagattaagggttagcttctgtaaaaaactttgtccaaccaatgacatcctctttgtgtaccctctgcaaaatatttcaacagcacaagctgccaattcttgcttgtattgtttgcatgcttgtctcatccatgattacacccattcaactttatgtacctgacacctaacacaacgttgaaaacaaaaggtc

SEQ ID NO: 17387 - DNA, 201 bp, Bos taurus
aaacatggaagataatcattaacacagtttcttaatatatgctgttttttcaggtgctatttctgtggaatttctcaaggctgtgaaagtacgttattacgaattcccactataattttaggctgctaattttgtgataatttattgtataacagtagaaaactaatacaagagcttcaaaatacacaaagggaaagttca

SEQ ID NO: 17388 - DNA, 201 bp, Bos taurus
tgaaatagtaaatgagtattaatcacaagcaaagtataaaattaaacatagttatgaaaagtagaagaggcaaaatcagaaactatgatcctgttatttgcgaaaattttgtgtgctgttctgttaattatatctgagcctttatgataacttacaaataggtttacactgcacttctgaatgtttcttagggatgtaatt

SEQ ID NO: 17389 - DNA, 201 bp, Bos taurus
cgaggctgtgatcctcaaggcccctcaggaatcaggctgacagagcagtcaccatgctggggttgccggatgtggtagatggttacagcaatggtccaggcgtgatcacacctcctaccaccaccactgcgtcctcatggctgtgtagttccctcccatgtttgatcatcaaactaggaggaaagactcctgaagcgtccc

SEQ ID NO: 17390 - DNA, 201 bp, Bos taurus
aagtcattgcagtccttttgtttataaatctgtgtcttggattaaacattcatggtatccatacagtgaagaaaaacagagaagtgttccacccctaatggaagtttaatcgtgatctgatagcaaggtcttacaaaaaagcccagagctgcaactgtgtggcgtgatctcctcattggtcaaaaggtagggactgcacac

SEQ ID NO: 17391 - DNA, 201 bp, Bos taurus
cccctgaaactcaaagaggcaaaggaacttgaaaagcaatagttactatttatttgttaccagtaacagtcattttagctagtcagtaaattcctgcttccggttatgtcaatgttaactgactgataaagctccacaatacttgtgggatgaatacagaatgcttaattacgatgcatttaacttcagccctttaaaaag

SEQ ID NO: 17392 - DNA, 201 bp, Bos taurus
tttgctgctttgcagaaagaaacaaaaacccatagagttccttcaacaacatatatttactttacaaatatcaaacctaagtaccacacctgtgctctgagggctttcttcgtgtgcaatgactttctgtttcaatattgaatcatagagtaaacattttgaagacattgtaaagggcgatagagctggacatatccaata

SEQ ID NO: 17393 - DNA, 201 bp, Bos taurus
gtgggttaatcagaacaattctatcttaccaccaaacaaaaaaagaaatctaaatctgcaaatgcctcaaagaattaatatgttgtctctctgtgggtgcgcttagtcactaagtcatgtctcattctgaaaccccatggactgtagcctaccagactcctctgccctggggattttccaggcaagaatactgaagtggga

SEQ ID NO: 17394 - DNA, 201 bp, Bos taurus
gtgcctgatggggtattggaaggatagagatgtcaggaaggccagtaagggtataatacagtggaagagaaggggagttggtgggaagtgatgttagagacgggcagggtcctggtgacaggggccttgtaggccaaagtgaagcattagaatttcagttgcagcaggaagctattagaacaagctaagctattgtttaga

SEQ ID NO: 17395 - DNA, 201 bp, Bos taurus
catggggtcatgaagagtcagacaagacttggtgactgatcaaaaaccccttgtctgcagtctctgtgctttgttattctttctgatgttctttgcttttgggggccagaatgagttgggagcagtcttccttttgaatctgggactcaccttttttttttttttttccccacggagcatctaatgagactcttccttttc

SEQ ID NO: 17396 - DNA, 201 bp, Bos taurus
tcttggatttccttgtttggccagcagcctaaacatgaaacatctctgggttgaatgtctctgggtatcataccatgtcaggggcttggaggtggtgttgactcctgccttgcctctttctggaggccaggaggtctttggggagggggagaaagagagggaacattttatatttgtcagctcacttcactgttctcgaag

SEQ ID NO: 17397 - DNA, 201 bp, Bos taurus
tacaagtctaaaaccagttgagccgggggcatctggagaatctaagatccacctgtctgattctgggggcacctggaagtgctgttaaggtttgaagtcgggaaagtgtgtctgaacgtacatggatcccagaattttgtgtcttatcaactaagccggctgagaaatttccttagagttattctcacccagaattggaat

SEQ ID NO: 17398 - DNA, 201 bp, Bos taurus
tatttcacacaattttcacatcaggaaatattttttttaattttgttcaactgtttagaagtttaaaaaccagtctttgctcatgagcagtaaaggacagtgagtgagctggagctggcactcaggctgtagaccactgtcctagcagcgtggtgaattctaatgtccctggagccctgaggacaatgtaaaactgaggat

SEQ ID NO: 17399 - DNA, 201 bp, Bos taurus
ataagattacacttagaatttctaattagaaaccacaacttaccttgcatcatgaaaaggaactaaaacagaatcctaatgtgaatggttgaattaaagagtgacagaacaaaaagctcaacactttgcccatttgatgggaagagccgactcactggaaaagaccctgatgctgggaaagactgagggcaggaggagaag

SEQ ID NO: 17400 - DNA, 201 bp, Bos taurus
ggctattggactgttatgtctaggtagctctaaatttatatgaagtggaataatcctttaagcaatccttttaaagtataatttttttaaacatttttatggagaggtaatatacatacaggggaaaatgcacctcttgattgtacatattttcagaatcttttgtattgtaatggtatttggtatgtagttcttttagag

SEQ ID NO: 17401 - DNA, 201 bp, Bos taurus
tacgtctcaggatcaacctgacagcttggcctctgctcaagaagcctgaatcatcatcttggttgcacacgaatgagtcagagcctaaaggacagcgccctggccctcactgggagacaagcgctgttaactgggctgtattagctgctgaattagaaatacacagggaacagtgtgaaatgagcacgttgcaaaaacagc

SEQ ID NO: 17402 - DNA, 201 bp, Bos taurus
agaggagcctggcgggcccacagtctatggggtctctaagagttggatacaactgagcgactaaacaacaacaacaacggtttaacaattgggtcagttgcttattctgggcaaaccattgtctcaacttgagtgctacctcaaaaacgatggatgaggattaaatagaggactcttcactgttaaaggaccagatgatat

SEQ ID NO: 17403 - DNA, 201 bp, Bos taurus
caccatattaatacatatttataaatttggtaagtagtgttttcttagaagttgcatgtcaccataagtaagttatcagtaaaacggagccacctacactactagtaatttacttaatttattaaaaaatgcataagttcctaaaatttatgtataaaacttcagatacttgaatgatggacagtttctcggatcatgtct

SEQ ID NO: 17404 - DNA, 201 bp, Bos taurus
gtggtgaatcatttgtcttattgtttatgcttttttttttttactgaaaaatattaagaagcaatgaaatatccgattttttttttgtccacagttttgcgttctccgtgtcattgtttatttgactgtacattatttcaccatttctagaatgattcagtattagtttttgccaaatgatggaggactaaaatgcatccc

SEQ ID NO: 17405 - DNA, 201 bp, Bos taurus
gtacaattacttctatcatatcattattgtgttatctggaagaagagtattatatgtaaaaactggtagtagttaaaagtgtgacatagcaatctactttacagtgttacgttgggtaatactttctagttcatgcagtcttttcacttaggtacactggaattatctttataactattggcctttcattcattgaatcat

SEQ ID NO: 17406 - DNA, 201 bp, Bos taurus
gcagctgcctgatgcttattcaatgcctctctccacagctacaggatttcccagttaataactttaattgtgatcatttctatgtcatatgaatatgggacttttaaaaatgcatgtaattctatcatattattaattcattatttgtattctaagaatatggcctgatactgactctctaatcttacacttaaataaaaa

SEQ ID NO: 17407 - DNA, 201 bp, Bos taurus
gttgcggtttaggagtagcgcctcagtccagggaggactatattgactgcctcaccacagcatgcataaggcagaacggaagatggggcaggttgttaacgagaccactgaaagtcaacacatcaatcgactggtcccagagtgaaaatcctggtgaaccttagaaaggaaaggatatgagttggcattggctttgcataa

SEQ ID NO: 17408 - DNA, 201 bp, Bos taurus
actggcactgatattttcttttctaacaaaacacaagtattcagtgaggtaaactgctatggtataataggaagcagcttattcttccctccacagtctttctaccctctctcagatctcccttcccttgtttcttcacagcaactcaagcacattactaagatttccaataactttcagatgttaaaagtgtcttaattt

SEQ ID NO: 17409 - DNA, 201 bp, Bos taurus
tgatctcctttagtcttttgacttttccaaaacataaagatgataacagataatgcataaacagtctagcaagtgctttctaattttttgcagtatccccaggtgaaaaaaattgactacttatttcaaattatttatcatttcaaaacattatcatgcttttcattgtcttgttccatattctatgaacctgttggtact

SEQ ID NO: 17410 - DNA, 201 bp, Bos taurus
tagttctttttcatgaagttgcccagctttgaactgtgatatatactccgtcttcagaaagtgttgtacaattactgactgaatgcatatcgacaagtttagattagacatatcctttgccctggtgattttttgctttgcattgctgttcacacttctaggattgaaaacactgtagggggctgagcaaccaaggaaaac

SEQ ID NO: 17411 - DNA, 201 bp, Bos taurus
ccagagcaaaagcccactaatgatgcagcactagtccctgggcacctgagggttccacagccagctttctcaggacccagacttgacaatcagcaaccagtagcctatgtacaaggcagggcttggcaaccactcagactgggggccagcctcacctactaggatgtccacaagagtcagttcaatacaacaaaaggacgc

SEQ ID NO: 17412 - DNA, 201 bp, Bos taurus
tttactacacccattttatggtttgctccttccggtgatgaatgcaaagcaggaggatactgagatattacacatttcgacttggaatggtcctaatatcttaatgcatatggaaccaattctccacatatcaaacactgctgacagaggggacattcacaaataacccttttggggtctacacttctattttgtaatgga

SEQ ID NO: 17413 - DNA, 201 bp, Bos taurus
gatgccttcaaatacaaacatgtttgcagcaaaacagatacacgagggggaaagttgtaggaagagtttcaaatgatgccagtgagattttcacaacccaattcccttaatcttatactgcctggagctatcatttgtggcttgacataagacaaaattatttgaaatagttcaacatgctccatgatagtagtactctaa

SEQ ID NO: 17414 - DNA, 201 bp, Bos taurus
ctttatgatttttcattactatctgtgccttctcaggccacttaactatttttagaagtagacagtgtggctgataaagtagtaaatccaactaattcaacctctccaaattatattaaccaggccactgacttgttgagcaaaatctccatgggcattgagaaatatgagctggctagtcaaggttacagttattttttt

SEQ ID NO: 17415 - DNA, 201 bp, Bos taurus
aggaggagaagtttccacacagtaagaaactctctcaggggcatgtcttgggggttttggaatctcagagggcaacataactgggaagaagaagaagaagaaaaaaaaaaaaaagaaacagagaatatgcacctaaccgcaactgccagcagagaagtagcccagatgctcacgtccgccaccagcaagtgggctgggcag

SEQ ID NO: 17416 - DNA, 201 bp, Bos taurus
gggagactcacccatctgcatgaaggacttcctgtaaaaaatggaacaagatacattgctgtgtcatttatagatccctaagttattttcttttcattgagtgaattttcttttggaatggatgactggcatgaacatgcctttgaagttgtccttgagaagatgcgaggagtatttaaataacttccacagaacaacttc

SEQ ID NO: 17417 - DNA, 201 bp, Bos taurus
ctgctttgtgaaaatcctaccaggaacagggacacacctgagggttccacagtcactctgaaaaaagaaggtaatcaaacagcatatattataggctatcagtggcagggtggatagaagaattgcactgcatttgacataaagcacatatccaattgatacaccaaatcagtgggtttcaggaaaagaaaacacaaagct

SEQ ID NO: 17418 - DNA, 201 bp, Bos taurus
aataaagctattcttttctactttacccaaaactctgtcactgagaattaatttggcattggtgcacacagtctgagcttttggcatcaataacttaactaccttatattgaatggcattggatttgatttttaaagtggaaatgctgactacgaaatgattcagataatatgaaacttagcagattaaaaagtctggaat

SEQ ID NO: 17419 - DNA, 201 bp, Bos taurus
gatcttcctgtcccaaggattaaacctgggtctcctgctttgtaggtggattctttcaagctcattcactgtagatcaaaattcaacctagttattgattgagggtggaattattcataatagccagcatagtcattacccctgagctgtttccattctagtaacctctgcagtctaaagcagggtgcttaagaagcactt

SEQ ID NO: 17420 - DNA, 201 bp, Bos taurus
atgagagaagacatgcttacccatatcagcatattgttataatgattctgatggaattggctgtggttcgtgtccctggcttgaagagcttgaactcccttgggctattagagtctgggatttgattagtgctggctgcagtctagtcccttatcagctatttctgcaacacatcagttctgtgtcattcagcaatatctt

SEQ ID NO: 17421 - DNA, 201 bp, Bos taurus
agagatgctgttgttgcacatgttgtaagaaacatggaagatgaaggccagaatatctacagggattggatattatacagtatttccctcccagttttctattgtccctccagaagactctaaaggcaacattgtggacccaggaggggctcaggaaaagagcatgaaacagggggcaggacacaacttttgaaagaatga

SEQ ID NO: 17422 - DNA, 201 bp, Bos taurus
tattaaaggaactcttatgtatttcatctctatggttttacttttcacaataaaaatgggggttggggccagggaacagtatttcagggttggtgacaatggactcataaaggatacaggtttgactcagaaaaacatgaaaatttggaagctactgttaaatttaaaatactggtcaagcactatgctaggtgcataagg

SEQ ID NO: 17423 - DNA, 201 bp, Bos taurus
taattcaatttttcactaattaatattaaaggcctgtaattaatttcttcacattttctattatagattatgttcataaaatagcagattacaggaatcctgacaaaatggctgaaaaataactgttaaagtgaaaaagcttccacaagggcatgttctaagaaaatcattttattttagataatattttagaaactttct

SEQ ID NO: 17424 - DNA, 201 bp, Bos taurus
ggtgcatcaaccaaccaaaacttgtcaatattttttacgctctgggccatctatgtataaggggctcattttagtcatataacttcactttaaaatttcaatagtggaatgttttagttaaaacctgaggaaacaatattacaattttacttgaaaaacatttacttccttttaaaaaatggcagcatccaagagcttaca

SEQ ID NO: 17425 - DNA, 201 bp, Bos taurus
ttttgcacatggagatgaatctagctattatagtagattttggtggaatacaataatatttcaatctgacaagcaattgactctgctttttccaaattcagtatttcttaaatatagtgccttaacagattaggtttacataagttcaaagtagagttagaaagactttttcacttaaaaaaaaaaaaagattcttcattt

SEQ ID NO: 17426 - DNA, 201 bp, Bos taurus
tattagcaactttctccatcaaacttttgatgagaattaatgactgggagaaaaatgacctttcctgggcaactgtccccttatctttccctaaccattcaaagtggatttttttaaaagcagtgccttccaatataaacttggcaaagggaagaaagagcccaactatcttgcttagtctatgacaaagaatggttttca

SEQ ID NO: 17427 - DNA, 201 bp, Bos taurus
gaattgaccaagatgtctgagagagagcactcagcacacacaagcatcaggggcaacagaaaaagttaattcattccaatcccatcaccgaggtttgttctcccattggtttcaaatgacaagggcctaattacattgtcatgataaggaaaagctgacacttgaaagctcgggtcctgcttatctgtcaggtcagctctt

SEQ ID NO: 17428 - DNA, 201 bp, Bos taurus
cttttatgcctcctgtttaggtcctaataggtctgtgaaatgatctacactcctaatatctgcagtcagcagactttaatctgagccactctagggctgggagcctttatgtcaagttgggcatgaatatgcagatgccctagagaaacagttaaaaatgcagttccaatttttatggctggaaacagaactctgtgtaag

SEQ ID NO: 17429 - DNA, 201 bp, Bos taurus
agacatgagaaggggggcctggggccccactgttcacagaggctgggctcaggttaggctcattgcctagactcacctcagaaggctgggcctcaactcccctccattctgcctcccctactccttcctcctttccttccaggatcccacactatctatcctcttctggccccctccttcctctcccccctccccacttcc

SEQ ID NO: 17430 - DNA, 201 bp, Bos taurus
tgcaagtgtcagatttagtccaagggctcctgactctgctcaggagctctgagcggcatcaggagccctgtggttctgctgactccaacagaaagagctatagaatgcttggcttggcctcctccaaatcctcaagaagactgcagaatctctatgtccagcgacactgtgctcacggccccaggccctggctgtagccct

SEQ ID NO: 17431 - DNA, 201 bp, Bos taurus
tatatctcaacatcacacagggcataaaactaaattgataataaagaagtaactgagcagaaaagtatgaaaagtggcaatgtgcaaccaagtcctcttttagagaggcttacattttgttctgggtgattaccaaatctagccctcagatcttaatttttaaataacattgtctaatagaagaaatcatggcttcttgga

SEQ ID NO: 17432 - DNA, 201 bp, Bos taurus
aaaatttataacctgaaatattgagcattcagagagatttactcttcacaggatgtaggtaggagagctcgggtgttgctgatggaagttcttgccggcatagaagaggagcagatatctgatgggaagcctgcagactcagtggggtgatgcgactaaatgtatcaagcgttgacagtttggaagccgtttatttatgta

SEQ ID NO: 17433 - DNA, 201 bp, Bos taurus
aagcaatttatcttgctcggctccaagtaaatggctgtgtctcttggggttcagtcaagggtaattaaagtaagcacttgcaattaaattattttgtagcagaattaagcaatgttcatttaaaattcagttctcccaaaagaaggcagaaccagaggattcttcaatatatttacaacctaaataaatatgataaatatg

SEQ ID NO: 17434 - DNA, 201 bp, Bos taurus
ccaattgttaaagcaggacttgtggcctctttctctgtacttctttattacgctcctctgaagaaggaaaaacgatttctcttattcatgagaaggtaagtgtcttgggtcccctgaacctcctagctccactgcaatgattctcaaactttaattgcaagagaataaggagggctaagtaaaacacagactcttgggccc

SEQ ID NO: 17435 - DNA, 201 bp, Bos taurus
actaggaatctttcacaggttatgttcccttgagacctaaccttttctactgatccagcttcaggagcaatgaaagtagggcgaaggctgtatctatagcggaatgggccactggaatgactagcaatgatcactttggaatatgatttgcaggttacaaagtgcttccacctagagtgtcacaaacaagagagtattttc

SEQ ID NO: 17436 - DNA, 201 bp, Bos taurus
tctagtttcctgactagggatcaaacccaggccccctgcattgcgagcacagagtcttagccactggaccaccaggagtgcccctgaggtttctttcttggctatagaaactcaggccttgcttttaatttcctgtaacagcttaaggaggaggtgtagaacatctgaccctacatagacaatcactccagtaggtggagg

SEQ ID NO: 17437 - DNA, 201 bp, Bos taurus
acttcagatatgcagatgacaccacccttatggcagaatatgactaaggaacatgaaggaagatttaaatgtcactttaggcagcactatttcctaagagccttggtaatatctccagggccatggacattcaagttccttgattcttaattattgtattgcaatcaacttctgataggaccatagctaccataggtaatt

SEQ ID NO: 17438 - DNA, 201 bp, Bos taurus
taatgctggcacctgaagaaaggggccaactttttctcaaaggttgatttcattctcctgctttgaggtctggttaacatataatatagatgcacactgaactttgggaaaggccttccacaaagggagcatgtaatttttttcccctttctttctttgattgtcttgccatagaaaatttatgatattcttcatcaagtt

SEQ ID NO: 17439 - DNA, 201 bp, Bos taurus
gacagtggctaaggttagccaaaagatacagttttggccaatgaggtataaacagaagctgccggtagagcaaccaaagaagctgctgaaaggcactctctaacttcagcagtggcctgaaaggctaaaaagcttactcaaaactttctataatctcatgctggaaatgataaaagtgggagcccagggcccaacaagata

SEQ ID NO: 17440 - DNA, 201 bp, Bos taurus
tcatggcccaggtgacaaggttctaaagactagcagctaaaagttacaatttcctaatttttcaggcacctttctgatcctaaaagaggtggtaactcccgtcatggccccgatgcaatgtggcttttgtacgttatttttgaaagtttaagggcttcccagatggtgctcatggtaaagaacctacttgccaatcaggag

SEQ ID NO: 17441 - DNA, 201 bp, Bos taurus
tgtgaaaaattgttttctttgttgttatataaatatgcagataacatcctcagttttgcctccactcacagagctaaaatacttactatctggccctttacagaaaaaggctgccaacctctggtttaaaagcgggcttcccatgtgaccttaaagcatcttgatttagcagaaagagcactggactaggagttaagcgag

SEQ ID NO: 17442 - DNA, 201 bp, Bos taurus
tcggccctcagtagagactcaggcctcagcagagactccacagtctgctcactcacagcccagaaagcaaagtccacaggaagagtcactgccacatcagcagggggagtaggactgtgacctacttcagaatagctcccacatctcctaatcctcagacatcactgtccatggaagatgctcttgactcaatatggcatc

SEQ ID NO: 17443 - DNA, 201 bp, Bos taurus
tactggaaagggccgctttggtcctgatctggccttgccttccacatgggatgaagaatctacgtggcagtggagacatgcccacttagagacttacctccatgcttcaggtacttggggccctgtaactccctgcctgagtgacctcaagaccattttaccttgggcccactcccctgtacagagatcacattaccggtg

SEQ ID NO: 17444 - DNA, 201 bp, Bos taurus
tcccatctgcttgttacagcagtggggacttccagtcttgctcttctctgcttggttgctttcttcctatacagtgcccttgagggtacatattgtgtcctggccatctcaggttattccaagtaccaggcatggagaaggtgcagaaaaaaggagatgtaaaaaaaaactgttgataaacgaatgaacaaatgggcattt

SEQ ID NO: 17445 - DNA, 201 bp, Bos taurus
aactttagttaaataccagtggattagagacttcaggtgacttttgggttagtatacaaaatgcaggcagaccctataacacaaacaagaaataaaggatgtaatacatacacagagattagtgttcaataaacatgaggtaagcaatagttgctgcctccctcattcatcctattcccaatattcagagacatgattttt

SEQ ID NO: 17446 - DNA, 201 bp, Bos taurus
ggaaatctgttcttggatctcagctgcctcattcctctttgggagaagagaattcccagggcgacagttcatcagaacggcaggtaggaaagtgaagaatacactgcagctgtgtaggcaatgtaggctacatggagaaggtcatttgaccagattatgccaggtaggttacgtgtgtggccactgctaggaccaaagtta

SEQ ID NO: 17447 - DNA, 201 bp, Bos taurus
tcccgtttagatatttatagttaattcacaatcctccaaggccaggtgtagtttactaattagaagtcattttataagcaatgttgcctggtaacatagacgactttcacctttattatgtttccaggggaacagagctaggagttaactcaaggtcatttttctggagagaaagagagcgagtctgtaaaccattcacat

SEQ ID NO: 17448 - DNA, 201 bp, Bos taurus
ccccgaatcttgaaagcgttgcgctaaatgaaagaagactccgaagaacatataccctcttcttccatttcatggcattctaggaagagcgaaactgtagggacaggatgcagactgtggtggcctgaagccaggagctttggggggtgccacagggaacttttggggatgatgaaaatgttctacatcttcactgtggtg

SEQ ID NO: 17449 - DNA, 201 bp, Bos taurus
aatggaaatttcacaaatgggaactggttcccttgccaacctcaaaagtaccagaaaaactccccacaattacagtcccaaaggggcctgttcacacagctggcttataatgtgtgtataagtggagtttggaaggcttagaaacatgccgaggcaagggctgtattactgactatcaatttcacagcactgtgtcctatt

SEQ ID NO: 17450 - DNA, 201 bp, Bos taurus
tggggcaccatgtctcagcacactgacagccggccctctgtcccctacacttggatccttcacattccccatctttcctcccagcctagctcttctccagtgtggccatccaggcccggcttcatcagcatgtgacctgaacagtcacatggggcccccagcttggtttcatgctttgctgtttctgccttaaaattcttc

SEQ ID NO: 17451 - DNA, 201 bp, Bos taurus
tgtgagaaaataaatccctgaaacctatctctgaaggttgaatcaagcccagggaagagagcctctctgcctagaacaggtctgaatgtggcagcgggcttatccctgctcacacgttggccttcaaaccagtacttcattatggactctggaagaattatagccactctgggttgtccccatgctcgtctgctcttttat

SEQ ID NO: 17452 - DNA, 201 bp, Bos taurus
gattcctaaccactggaccacttgggaagtccctgaacttgaatgtatgaacaagggagaactccattctggacgtgaaagggggtcttcttgccttaaacccctaagaaatgcaccccttatgggtagaatagcaggtacagtggcatgtgggtgagagaaagtatttggacccataaggacagggcacttcatggggct

SEQ ID NO: 17453 - DNA, 201 bp, Bos taurus
tggtcatcaaagaagacaggaaagatttctgggaacagggggacctcagttggacatgaaaactgaactgtttgagaggaggctgtgtcagatatctgggctcaccatctggtttatcactagcttctgccttgagttgcttgtgacagtctatattttttaaacaatgaaattcctactgctgctgacccagaagcatgc

SEQ ID NO: 17454 - DNA, 201 bp, Bos taurus
tatcatcacctgagttgggtcttaacagattgggatgtgctgtgagtattccagttggaagaaactaaagtagcatatactgggttggccagaaactttaggatgttatggaaaacccaaacaaacttgttagccaacccaaaatcaaagcacttgaaggtgaagcaggaggccatgaggagctcacagagaaaccactga

SEQ ID NO: 17455 - DNA, 201 bp, Bos taurus
tcctgcagagataccaggacaagatccacctggccagggagccggtgcagaacgagatcagcgccacatacgtcaggtgggccctgagccaggggcagagcgtgaagtacctgctcccagatgctgtcatctcctacatcagggaacacaacctttacatcagggatgccagcccggggaggaatgaaggcttgccaacct

SEQ ID NO: 17456 - DNA, 201 bp, Bos taurus
ggggcagggacctgcccggagcctctttgcatcctgtaatcctgccagctcgcatgccccaggttcctagggccagacctctgcttcctgcctaccccctcacaagcacaccagctgtaatatctctggtctccagacactgccaccttttttctgggggggtctgcagaaacactgaggtgcattatctgggttcttaga

SEQ ID NO: 17457 - DNA, 201 bp, Bos taurus
ttacaatattgtattggttttgccatacatcaacatgcatctgccacgggtgtacacgtattccccatcttgaacccccctcccacctccctccccttaccatcatcaagcatggaaaaggcagtctttgaccataaaatgtatattatatatttacttctacatatttcctgcaagagaagatacattttcatttgaatt

SEQ ID NO: 17458 - DNA, 201 bp, Bos taurus
ccttttgtgaatggataaaactccactgcatggaggtaccatagtttattcagtcatttctgttgctaggtatttggattttttccagtcttttactcttccaaataatgtcacagttaggaatcttgcatctttttattacttttgtcagggtggccttgaatgtagcctttgtttttgtgagtgttagctttatttaag

SEQ ID NO: 17459 - DNA, 201 bp, Bos taurus
atcattagggaattcttcctggtatctagtctgtatcctcccaacaggatctgaaacgcaggactcccagagagggcaaagtctgacacagacagctcctggcaaagtgtaactggtaagcccatgctcagtgtgctctgcagtggggcgcttcataaggacaggtggtctttttgttgagggaagggctcaaggaggggc

SEQ ID NO: 17460 - DNA, 201 bp, Bos taurus
ctgaagcctttgatgagaagtactgtcctaacaagaatcaccagattttcttgttcaaaaaggtctcaggggactctgaggtccttcagcatgcaaatgtgtatgtggacggttcctagagagccaactcctcattttcctattacatccagatgtccatttggaaagccctctcagaagcatcagatgcttaggacaact

SEQ ID NO: 17461 - DNA, 201 bp, Bos taurus
ccacagtcccatcacattcaggttcatcatggttttttccttgagtctctggtttgcattctaatcatcactcacaattgtcacaatatgaagtgacaccggtacctatcacctcagacacttgaatagaccctgaaagagagaggatcaaggaggaggcagagtctggatgaccaggaatggggaaccatgaccagaaat

SEQ ID NO: 17462 - DNA, 201 bp, Bos taurus
cccatgtcctaaccgttggaccaccaggaaattccttagctccatagatttgattccatgataatgggatcagtacactaccttttttgggaatatgtgtacagatatggattaacactgaacataggttagcagtttttaaagttttatagtacttcattgcaatacagcatactctttttgttactttttgtttttctt

SEQ ID NO: 17463 - DNA, 201 bp, Bos taurus
tgtgatattactgtccttacaagcacactttgctttgagcagtgaggtcatttgtggcctcagctaatggggaacggctttgaaattgatccagacaggaaagttgcctttggattattatcaaggagaagaatttttcttcaatttgggttcagaaatgttgcttctcggcagatgccttccccagacatgttgtatatc

SEQ ID NO: 17464 - DNA, 201 bp, Bos taurus
ttggatgaaattgctgcatcatgtagtatgcatacagtcagtcttaggctgcttctttctcagcataaataggcactctcagccctcagcactccaggctgggtcttcctctggagtggtaggttcactgacttttgcaagggataaagaacttctgatacaaagtataatgagctcatggcatcctcttataagctcctg

SEQ ID NO: 17465 - DNA, 201 bp, Bos taurus
cccaaggttgcctctagaggcttcttttgaccccaggctgggctggcaggctgccggcaacactttcatctttatttttttaacaccaggccttctgtgcgccgctcctccccgttccctgcagcctaccgctcctcctgcagtaggaaggcggagaagagggccccttcccctctgtccttgccccctaaggcatctctg

SEQ ID NO: 17466 - DNA, 201 bp, Bos taurus
gtggagggtgcccctctttcagagaaggtctcagcagcaggctggcccctgtggccctggacgcaccggggcccgcgctcctgttctctcgggagctccacgtggctttgatgtggagcagccgtgacatggcagtaactggggggaaggagctttaaagctgctgttttaaatgacagtcattgttccttggcaatttta

SEQ ID NO: 17467 - DNA, 201 bp, Bos taurus
atccttctgctgccaaaccagtcctcctccagccaagcttgatcttatctcttctcagtacagaaacctaatggctcctcattgtctgctaaagaaagacagagcactttgggctggcatccagactcctccacaagctccctggaacctgccgtctcagcccagactacaccagcctccctgtgggccgggctgttcaac

SEQ ID NO: 17468 - DNA, 201 bp, Bos taurus
ccatggagcaaaaggtacaaagctgtcaaccatccagacactgcagaacaggaacaagaagagggctgtcctaagcctggaggggcctcactcacacagccctcctaaactacattctcacggagcctcggagtccccagactgctcgatcattccctcagtgacccatcaacataatgaaaacctccccttctgtggccc

SEQ ID NO: 17469 - DNA, 201 bp, Bos taurus
tctctttgtcgagccaccagccctggtcctgcaaaggaaccaaacgggcttttgtatttaagcttttcaatagaaggagatgggtggggggctgcagaccctctcagtctgaaacgtgaatatctcatagcatcactgagccagaaatctcctaccctctcccatcgggaattgatggcatttagggggcgggaaggaaac

SEQ ID NO: 17470 - DNA, 201 bp, Bos taurus
taatttagggaacttctgtttcttgttggagcactcatcttgctgctggcttgggatgacaggcagcagacacaacagagaggtacaagtatctgaccattgctggataaaacgtttgctttgtctataggatttaatttaggccaggggtccaaaatgaatgtcttgagattcagagacaactggattattttgtgaaga

SEQ ID NO: 17471 - DNA, 201 bp, Bos taurus
tttcagctttagcatcattccttccaaagaacacccagggctgatctccttcagaatagactggttggatctccttgctacatgcctcttaaaacagctacagttagaaaggcctgccacaccaatgttagagctggcgtggaggaactgattgataactctcatacattgtgggtaagaaagttaaatagtacaaccact

SEQ ID NO: 17472 - DNA, 201 bp, Bos taurus
acatatatctttatacatatctttatacatacacagttcacatatgtattggtttgctctcttttctcaccaaaaagcatggtccatgaaggcaggccctacagtttgttcaagctaagtatcccacctcagtgggcattcagcaaatatttgttgagccaatgatgaaacccaagaacaagaagcacggccaggaaagtc

SEQ ID NO: 17473 - DNA, 201 bp, Bos taurus
ctctattctattaagatagaggaatccttatagatttgtacaaatatttgatggctttggattcttttgaaggtgaaaggtattaataaattgcattattatgttttatttctaaaacattgaactaaaagccaattttagttctttttgttacctggagagaaaaccatgagttcagaagctaaaaataaaatggaataa

SEQ ID NO: 17474 - DNA, 201 bp, Bos taurus
gaggatgtgcttccaaatctaataggtaaggagctggtctatcaatgccttctaaatttcagtcatttacatgttatttgtgtgtgtgtatgtgtttactatatttgcataaaatcatcctttatttgctcaacactcttctttaaaaatctattaaagccctagtaaaaagaaaaaaaagtacaatgacttgaagaggaa

SEQ ID NO: 17475 - DNA, 201 bp, Bos taurus
ctggttcaatatgtgctgaacacattcccctcaaagccatatgtggacaccctggccctagcacctgagggtggaactgtgtgttagggcctttgaagagatgattaaggcaaaatgaagcttatggggtaggtcctaacccaatctgaagggtgtccttataagaaaaggagcccaggacacagatgcaaagaaggcccg

SEQ ID NO: 17476 - DNA, 201 bp, Bos taurus
aagagggtttatattcagcagagtcaatggcctgattcttaagtgatggtaagcttgtcagtgatactttatgaaagtgtacatacagttaagcataaccataaattctctggtgacattagttatttaagattttttaaatattttgaagtcatataaatctagcatttgtagatatcagttgtatgaaactgaggcctg

SEQ ID NO: 17477 - DNA, 201 bp, Bos taurus
tgatgagcttctgccatgaagtctgactccagtgtggagatcccatgacactgagatctttttctttgttttagggcaagaacacccatcatgtttaaatgctagaatcagaatattaaagagtaggaacaatcttgtagaacacttgatgttcttttttaaatgttctttttataggtggataaactgagactcaggaat

SEQ ID NO: 17478 - DNA, 201 bp, Bos taurus
aatatctgaaaaatatagctaaacaaaatatagttaagaatgtacaagaaattacaaattacctatctcttcagcttttcctgtgtgcacttctattggtctcttttgctatacattctaatttttctccctagcagtagaaacatcttcctctgttgttattacactttactacatttttttttcttttggccgtatctc

SEQ ID NO: 17479 - DNA, 201 bp, Bos taurus
ctaagacatggtttcctaaacatggttgttctctctatgaggaaaaagatttaaaactggcaaaatgcaactacatttacagtaagcttaatgtacatacctagttggaaaatgcaacattctggctaattgaaaaatctgttagctaagagtcagggtgtctccatggctgattcatatcaatgtatggcaaaaatcaca

SEQ ID NO: 17480 - DNA, 201 bp, Bos taurus
ctgctttttggaaatttgtctgtcacagaactacacaggcaaactcgggaagaagcattataggaataaaatccagggacataattgctgcagctccttggacaattcaggtcagaactatccaatataagacagagtttgtaatatcctattttaggaatctttgaaattgcccagatagacttctgtcagtaattccag

SEQ ID NO: 17481 - DNA, 201 bp, Bos taurus
gagtaatcttacccaagtcagaagtaggactagtgagatctccaggttagtgctctgcttcctccacctccctacttcaggccgccctcaccattttccttccccacttctttcaaccaggaattccaagccttcttgcaccaaaaatgtgagtttctcacggccaattatcacctaaaacgattttctaaatgggtactt

SEQ ID NO: 17482 - DNA, 201 bp, Bos taurus
agaatttggttcccacaaaaagagtgaacctaagtgtggtggtattaaaaaaaaaaaaaaagctgaaaatcctgtgatattctatccatcttgagggtcaatatctccgctccttgaatccacatgggcttgtgactatttctgatcaacagagtggtgtttggtgacctctgaggctaggtcataccagtccggatcagt

SEQ ID NO: 17483 - DNA, 201 bp, Bos taurus
aacctctgggctaaaatataaactgtgaacgatggaccctgaaggattatccaggggagatcaaattctagtgccaccatttgcctctttaggaaagacaagtcaattcctgatatttttttaaatgaagtctgagatgctctctccctcacatctctggcctcttccagacatgtctggtttctaggggcaggaagctac

SEQ ID NO: 17484 - DNA, 201 bp, Bos taurus
tgggataagtggttacgataaatagatttggggcttaaagaacaataagcttaataatcttgaaaaatggtttatgccttgagggctctggatagctagggctttgcttttgcagtaatctacattttgggctcaaattcagtgttaatgttcacattacctgctggtttgtttcttcacttttctgaataccactctctt

SEQ ID NO: 17485 - DNA, 201 bp, Bos taurus
caaactattaatttttgcaacacatgaaataactacaaaagatatgaagtaggaagcttagtaattccagtcctacctcctggaggaactgatttgataccaacacaaacaaccttcaaagtgcaaatttcatttctctcctaatgctgctttctattctccctctttcctttttgtgacccagtactgacgtgaacagta

SEQ ID NO: 17486 - DNA, 201 bp, Bos taurus
ctcttcataagctatactccaataagagaatatctctcctatttttaaagactttttaaggagtccacagtcatcttggcaggtccacagctttgagtcacggaaccttattaacacagatggtgtttaacagctctcagtgtaggaaggaagggattttccaagagggatccaagaccagttttgagggtttaatacttt

SEQ ID NO: 17487 - DNA, 201 bp, Bos taurus
ggccttttcatgaaaaaaggaatccaccttccttttcctgctggagtgagcagtgatggagtagcctgtctccatgacctgtcctcctgcttgtttgcctatggcccacactgttttccctgctggccatgctacagaattccggaagcatttgttggaaatggagcacatgatgggggaagaatatagatcaagtgttgt

SEQ ID NO: 17488 - DNA, 201 bp, Bos taurus
tttctttcctccctcattgaatagcagtcatgagatgtgaatagaactgaccctcacttaagcctattcacctgggcacagtcactgaggcctcccaagccgaagttcatggtcatcctgatagcttacggtgaacggtgttggattattgatctccaaagaagaagatttagcttcaggaccaggggccaggcttgatca

SEQ ID NO: 17489 - DNA, 201 bp, Bos taurus
ctcacctgaatcagtactgagtgctccaaccctgtcctcatcaacacacccagattcacacagtcccatggggccctgtctgcccctgggccttggaaatcaagacagatcatatagagcccgtataacaaatcttagttctcctacttggtttctaagactcccttgactcttcctaggaaggcacagcctggtcagcac

SEQ ID NO: 17490 - DNA, 201 bp, Bos taurus
tcaaagattagttaataagcaaagtttggagctataaacatgttattagcatatgcaaatcattaacaatttctatattgtaatacatttgacctgtatcagttcataaacttggctataggagaaaattaagtaatttgggtggaacaaaagctgaatattgaagaaggatagtttgtttgtcttaacatattaaccttg

SEQ ID NO: 17491 - DNA, 201 bp, Bos taurus
tagtgagaatttagtcagaacaaggcacacgtgcccagccagccctactactgacacagaagcagagaggaaaccggaaaggacaggccccacctctcactgcctcacctgatggacgggacatctggtgggtcctcttcaaccctgcccgaagctctctgacaggaccccaggcctccaggagtcttgagccctttgcca

SEQ ID NO: 17492 - DNA, 201 bp, Bos taurus
agcagtcagggttaaagctctaggtagtaatcagacagctagacagacagagaggcaggaaggtgagacaggatgagaagtccaaggccaagcagatgactaaggcagagatccagtttccaggacagggtatgaaggtgacatttgttctgagcaaaggctgtgagcttgcgttcaagacacagtgtacgtggccacagg

SEQ ID NO: 17493 - DNA, 201 bp, Bos taurus
gcaaccaccctagctgcaagaaggcaacttcaaagtcttcaaggtccttgttctagttctacttttcccaggttacatctcagaccaaaaactttaaagcttcttagagaaaagcattccccaactgatattaaagattgaaataaaaacccatataagtattctctaatactgtttgctgttttcatgtgggtgttattt

SEQ ID NO: 17494 - DNA, 201 bp, Bos taurus
actctggctgaaggaaattttaaaggctgtttctgagccttactgtgaacataaatgggaatgatttactgcagaggtgaatgattcactgcagtggtgccgagggctcctgggccaggctttcgagctgctgcccacatctggccactgcagggagaggctcagtacccctgctggtccgactgaagcccagcagcgtgg

SEQ ID NO: 17495 - DNA, 201 bp, Bos taurus
gtggccaagcgagtacctcacgatgcacatgctcagttctataagtgatctgttccacaatcattatttacaaaacgtggggtgagatagactgaccaccgccagctggccaattgctttctccctatgttccatccccttctgggtctctcgcctcacaagctatgtgtagtccatcttctgtgacatttccttggcgag

SEQ ID NO: 17496 - DNA, 201 bp, Bos taurus
caaggacctaccttcttcagctctaggaaattatcttctaatattccttcaaaacctgattcccttgtctttcttaagtttctctcatctgttggcctttagtctttgtttgtctcttgtcacttaggtgcttgtaaatatttctttgtttttaattttaattttttaacacctaaaacatgttgtattggggtatggcca

SEQ ID NO: 17497 - DNA, 201 bp, Bos taurus
tgtctatcaagtcatcacccatgaagagctggcccctttatttccagccagcactctgggctgctaagaaggcactcaagaatgttcatcaaattccctcatggagagacaggccctggggctaccctaagtggtctcaccagcagtggccccagaggctggcccctgcaggttctgccaggcttttcgccttcctttctc

SEQ ID NO: 17498 - DNA, 201 bp, Bos taurus
gcatgggaccggccctgccccggacaccatggggtgcagccaacagaccacttgtggtgccgggaagctctcaagtgggaaggaggggagctgaccacaggggccacggctctattttgcccatttatctaacactggcccaagaatgctttcctttgggacggacggagtattctccacttctataagcttcataatacc

SEQ ID NO: 17499 - DNA, 201 bp, Bos taurus
tcagaatccatgggttctgcatcctcggaggcagagagctggttgtatttcatcatagcttatactcgataaagagtggtttgcaggtggccccgggagacggaaggtgatctgagtccagcttagccttgacagagtgcatgtctccactttccctgtgggcaaggtgggggacagggccccagagaacatggcaggttt

SEQ ID NO: 17500 - DNA, 201 bp, Bos taurus
tcaggagaggcgcaatgtgcaggatacatggccgtttgttaatcactccttgtgcatgtacgactttgacctcccgtgtaggtggtacggctggcagagcccgtgtcactctcaggccctctcagacttgcagcaatgactccaagactcctagaagacaaggctaaataagatcgcagaatcataggatgatttatggtt

SEQ ID NO: 17501 - DNA, 201 bp, Bos taurus
gcaagtactgtggaagagataattaaattgaaaataagcacctgaaatcaattatgatacacccatacaatagaatacttgaagtttttaaaaatgatcatgaggaggtatttatgcactgatgtaaaaaaacacaaggtaaattgcagaacaatgtgtataggatagtactaactgtggggaacagatgaattaaaacat

SEQ ID NO: 17502 - DNA, 201 bp, Bos taurus
gaaaagaccagaaacctaccctcgagaaccacagtcagcagtttgttctagcaagtgaattttctgtcctaacttcgtgactatagagagtaatcaggaataactttgacctgcagttaactttaaagttacgacccaggtcaaggagggtgagaaggaagaacagtcaggacctttcagagtcaggtgagaaaaggagag

SEQ ID NO: 17503 - DNA, 201 bp, Bos taurus
gtgtgccaaccagcctgggtgtgcggaggatggaggaatggccgtggacagtccagcgttccgtccactgttctgtgctgtccagcacggcatgaaaagaacagtacctgtccactgactggcctagctggccacggcatcgccttcagctgacctctgaagtaggaattggagggttgggctgtcttgtcgatcagttaa

SEQ ID NO: 17504 - DNA, 201 bp, Bos taurus
tcaaactggctcctgtggccttctgagcactttctaactttagacatgacagaatattctgggttcttgtccctttgctacccctgtgttggaatcagccattttttctcaaggccttgatccccctggcatggcgggaatggccctgctgctgtgccagttgactccacagggctctgaaagcacatgtcttagaaatca

SEQ ID NO: 17505 - DNA, 201 bp, Bos taurus
tagaaccttatttggccctcacaaattctgcaggtcaggggtcagagaatgtatttttttctcccgtttgatgattgagaagttgagagtcggagcccctgaggccacactgcacaagctgcagggaagcccgttttctctctctaggtcccgtcgtggtttcccctggggtcgctgggctcacgtctcacctgctgtcag

SEQ ID NO: 17506 - DNA, 201 bp, Bos taurus
tagctcagccagaacctgctggtcaagtcagtgtcagcccagtgcccagcagctgtggccctaggctgggacgcttgtgggagaggccacgccaggcagtactggctccgggaacccagcctgcgccctgcacccctgtcctgcctcagggacgtaaccagggcccatccagggcgccggtgtcaccaaggagaagggctg

SEQ ID NO: 17507 - DNA, 201 bp, Bos taurus
caccttgctcttctcttgaggcctctgccccgcgtgtctgctcctggaagccttcatctggtcactggttctggtccagtctggtctcgctcaggactcacggggtttgattccatctttaccaaacaagcagctagcttagcttctgatcatactgttcatttactgctgcgtgtggctttcaccactaagaaccctgca

SEQ ID NO: 17508 - DNA, 201 bp, Bos taurus
tctgccctacttgcatgaaggtcgagtggccccatcaaggtcgagtggccctggcacaggcaggtcctgtctgggtggctggccaggcaacgctgaccgtcgccgcgtctccccagctgtgaatggcattattctaactgcatgttcatcccgtttgccatcattgctacatcattagcataaaaacttactgagaatgct

SEQ ID NO: 17509 - DNA, 201 bp, Bos taurus
agtccatcaaaaatatgaagatatagaagagaataagaaaaaagataaaaaacagaccccatagggctccagattagagttaccaacaacagaatttaaaataacagagtacaaataagttgtcaatgagatacaataaaagataaagaattgtgataaataattgggaactgtcaggttaatcaaagggaaattttagaa

SEQ ID NO: 17510 - DNA, 201 bp, Bos taurus
gctcagcagaggcttggacctctagagctcagaccaggagcttctcccaacagctcccactgcctcactagtgatgcattgtaactaagaagcaacatagatgcaggttttgtctacattctaaagtagacctaaaaagaagcaagaaatagttcaaagtttacacttccccctgatgcactaactaatacaaggaaggac

SEQ ID NO: 17511 - DNA, 201 bp, Bos taurus
ctttcctcctgcagtgatctcagtcctgtgctagcaatggcctgtgtccccagaccagggggtgctataagagaaggcagctgaggaacagggggccacatggcagatcagcactgaaaaccctcttgtagagtctgtcttcgttatctgtagaatttctcttatgatggccccagagaggtaccatcagcttcctacaaa

SEQ ID NO: 17512 - DNA, 201 bp, Bos taurus
gctgtgtcctggtttggctcaggatgctgcaccaggaaggggtgcagtcaggagtggtcattaggaaccttctggaacatctggccgctcctaggagggaagcaaaggggcgggttctccttctcaagtagtcacaacactggacccaggaacacagtgcttggcttttctgcctgtgatgggcctccacatcccactctg

SEQ ID NO: 17513 - DNA, 201 bp, Bos taurus
cattttggaggcagctgggtgggggcaggtgcagaaactcctgtggccgggtgggtgtcccaccccaggggtgatgcctgcctgtgttgagatggggagtaatggcagcccccagggtgggggccttgaatggagtggtcagttgggtcaggtggacactcagtgcaagacacatgagcccagggtcatctttcggtcagg

SEQ ID NO: 17514 - DNA, 201 bp, Bos taurus
gctctgggcccagacagatcaagcttagacctatagggaaatatgattgaggttcttagaagacgtctgtaattctggtgtggctctgccgggcctggtggtgtgtgtctaacatgtctgtccctttccacaattccagagactttctgtaattatatgtagtttggggcctttccccttgatgagtaacctcttcttctc

SEQ ID NO: 17515 - DNA, 201 bp, Bos taurus
tgagaaatcaaaaagacaggatgctggccccagagagctgagatgcctgtgaaagagatgacctcaataatccgggcctgttgcatcttcccgtacctacgagagcgctaaattccttaatgtgatatccatgaaagtgaaagtcactcagttgtgttctactctttgcaacctcattaactatatggtccatgggattct

SEQ ID NO: 17516 - DNA, 201 bp, Bos taurus
tggcctcacaggccacgtacagagcctggatccacttctccaccctcctctctgcctggctgatgcccgctgctgtcctaacgtggaggaaggagacgggcttcagagtgaggtcaggtgcctttgactcgcatctgctgcttgctagcagcgtgccctggacacctcgtctaatttctttcagctgtggtctcttcattt

SEQ ID NO: 17517 - DNA, 201 bp, Bos taurus
aggcagatcacccatgccagttgggattatcagtctagatgtggttagacactattcaccaaggttacccgggagagaaaatttatcatcagccctgagtactctgtgttaaaggctgcagtctgggtcaccaatttgttgagaaaggcggcaaattatacctgtcctgctgcagaatggcaacttcagtggtgctttggg

SEQ ID NO: 17518 - DNA, 201 bp, Bos taurus
accagtggcctctgatcaggggcctgtccttagggttggggggcttggtgcagggtcaggaaaggagaaagttcacctgcttcagcctttaactttccctcggtggcctccagggctctaatctggagaaaaaaggttccaaacactcccagatctgtgagttccaaaaccctgtggatgaaaggacccaggccacccggt

SEQ ID NO: 17519 - DNA, 201 bp, Bos taurus
tacttctggcagaggaaccacgagccgctagagataagttgccttgttttcagtcctccagttcaattgttttgaaaacatctatgtctagtctccacaacgcgtggacatcaaactggtaaatccctgtggtacagagttaaaaaagaaagtcatctctctctctgcagcctcttatttgtattttagatgacacagtta

SEQ ID NO: 17520 - DNA, 201 bp, Bos taurus
ctcggatccacatggtatgaacagatccaggccttgaaatctaccgagagccttccgagttcagtgcagcgacactggccaggccccattcaccagccctggcgtttgtgccctctgaggaccacctgcagcttcggttcctaataagtccatgactcagtaagcacagccacagaccaggcctggctgcctcttctggaa

SEQ ID NO: 17521 - DNA, 201 bp, Bos taurus
ttttcacttgttttgtttatcatccggcttttctgttagaccaattgttctcagcgggggttgatgtcctcccaggggccggttgtcccggtctggagactgtcttgaatctcatgaatgaccaaggatgctacaggcatctagcaggtagaggccaggggtgctgctaaacattctacgatgcacagacagccccataag

SEQ ID NO: 17522 - DNA, 201 bp, Bos taurus
agacagaggcgctcctggctggggtgatagtgcggatgtgggatgctcctctgggttgacagtgaactcaggacgtaccaggccagcttagctagcccagcggtcatctctgcagccccctcctcacctctccccagccctccctcgggggagctgacccctggcagccaagcttgcctctggcgacccctccagacccca

SEQ ID NO: 17523 - DNA, 201 bp, Bos taurus
cttcagggcctttcaagtaaactttctgcaggggtcagaggagccccacagaagggttatagccccacttcgtcattgcggggagaactacagtggatgcagtgagcacgccaagggtgggaacaacagcagctttgaacatgtcctcttattacggaatctctgcctttgcatccccaactcctggacatggaagggtaa

SEQ ID NO: 17524 - DNA, 201 bp, Bos taurus
atgtacctaacaaatcttactccacttggtacaaaaatttccaagagtaaccttatctttggatttgaatccaaagctatgtggcctctgacaacaacttcactttgctaaactgatatttcctctcttagccataaaaagtaactaatgatgctcataactcctggggctgcagaaaggtttacatgaggccctataaac

SEQ ID NO: 17525 - DNA, 201 bp, Bos taurus
tcccagacagatgcaaccggcctggagcatcagggcaggacctaaagttctgttttgtttttttttttatttggggcccagacaggttagaacgaaggcctgtgaactctatgtccagacccacgaagtccgcacccaggacgagctcctgcagcagagggaggctctgctcaaactcatcggcgcctatgtccatggcca

SEQ ID NO: 17526 - DNA, 201 bp, Bos taurus
agctagaacgtggcaggtgataccggaagccagtctcccccagcccaggccccacagttcataagttgtagccaccaagacccctgttccctccccctccgtctcccaacccgaaggcttatggccaacagaccgcctctgtcacagcacagcattcacagtcctttccagtcactttgtcctccgctcctcttcacctgc

SEQ ID NO: 17527 - DNA, 201 bp, Bos taurus
ctataattcaatccaatcccaaccaaagtcccagtagtatttgtagaaatgaataagcagactgaaaaatttatatgtaaagacaatggatctagaagagccaaaactatttttaagaatgaaactgcagtcatatagatctaatgggatggaatggaaaagtccagaaatatatccatacatacatggtcaactgatttt

SEQ ID NO: 17528 - DNA, 201 bp, Bos taurus
gggctacgtctgcagacctgttagaatgtctgagatttaaagtgtcgaccatggcaagtgatgccagtgacgtggagcaactggaactctcatgttgcttatagtgtcagcgggagtgcaagggctacagctgtcctggaaaacacttctgcagtttcatgtgaaaccaacacacacttgacggaatacctagcggtgtga

SEQ ID NO: 17529 - DNA, 201 bp, Bos taurus
aaaaaaaggccaccactgggcttcagcctgcaggccgacaaggccagcacttgcctgcctttaagaccttacgaccaaagaaagaccacagaggaggccatggagacagcagtggctttgtggatgggggggctcatccgtctgcagtacaatcctggagggaacccccaccacatgcggctgaaggccggcagcgcgtgg

SEQ ID NO: 17530 - DNA, 201 bp, Bos taurus
ttatacaaattattcatttaatctttttctgtccttcccaataaataagttctgccaggcaagattccaggctgggtttgttcgccaacaagctggccaaccccgagtgcctggagaaggctcattaacaatcatcgctaaatgaagaattcctccattgacccatacggccaccacccacgtcatgaccacactagaact

SEQ ID NO: 17531 - DNA, 201 bp, Bos taurus
ccgagtggagggccctggaacattccagaacattcgctcagatcctttctcagtcactccctgctgccactctccagaggcaaccactgttctgtttttcctttcggccacagattaattttgccacaaatatgtagaatcatacattatgtactttttgtggctggcttcttttcactcagcacagtgctttgggcttca

SEQ ID NO: 17532 - DNA, 201 bp, Bos taurus
tgaagaagttcaatgtgtatgaactcaggggattaggagtttctgtccgattcaggccagtggcttgagccaggagagctcacggccaggcagccccgaaaagaagagaccagagatctgctggggagtggagaatgaaggctggcctcagagagagcggcccagagctgaagcagggtgcttgggctctggtcttggagc

SEQ ID NO: 17533 - DNA, 201 bp, Bos taurus
taatagttaaaatggtttaatgtttgttcttggaggaaatacagtgagttgcttaggcttttatttctattaatccatgctaatagattatatgaaatatgaatagaattatttggaggttttcatattggggctgatagaattcctgatataatatgggtttaaaggatgtgtttgtctttggggtttttggtggtttgt

SEQ ID NO: 17534 - DNA, 201 bp, Bos taurus
aaaatccaggcccaacctgctcagacctcaggaaatgattcaccagcatctacaatagtcccattattttaaattaattaaaccatgctttgtagggccctatgatcttgaaaagcgttccaggtttgatctgactgatggcttgctgcttttgttttgttttgcatttttgcaggtcgttagtctggtttaatacgctgg

SEQ ID NO: 17535 - DNA, 201 bp, Bos taurus
ggctttaggtggactgacatggggtgaaagcgtcatgctaccggtgtagagtgacactgcctccatgctgactgataatgagacacaagcagctctggtgggcaagagcggccgaggcgcgaataaacaccaactttaccccttcgtcctgggaaagggggttattgatcatcaggtcttgctggccaacagccttcctag

SEQ ID NO: 17536 - DNA, 201 bp, Bos taurus
catacagagctggacacgacaagctcctgagcacacagcacacagactgcagcacgccaggctccttgttgtccacgatctccccacgtgtgctcagatttatgtctactgggtcagtgatgctatctaaccatctcatcctctgctgctcccttttcctttggccttcaatctttcccagcatcagggtttttcccaatg

SEQ ID NO: 17537 - DNA, 201 bp, Bos taurus
ggctgggcattgggagaagctgttgtgcaagtgtggctgcaatcaaggtttcagataatcatacagggaatgtaaccctgggcaagacagttctctggggtggagggcagttcccagggagggatgaaggcctgaatggtcagcatttgatattactagcaactggggggaggggtgactcagaaggagggcacaggtgaa

SEQ ID NO: 17538 - DNA, 201 bp, Bos taurus
gttgattccagcctgtgcttcttccagcccagcgtttctcatgatgtactctgcgtatgagttaaataagcagggtgacaagtgactccacacaaatgtgtgttgagtatatattgttgctgttgttgagtcgttaagttgtgtctgactcttttgtgatcccgtggattgtagtctgctaggctcctgtctgtctatggg

SEQ ID NO: 17539 - DNA, 201 bp, Bos taurus
cctggggctttgcgtcagatctttccagctttccctcttccgagcgtgtggtatggttgcgttttccggctccctgtgaagttgggtgaggctgtgtggcacgtttttatgaatgaagtgttagctgaggtgtcacgtgtcatttgtgggtggacactttgcgatctactgggtgatttatcttgtcttttgagccctgcc

SEQ ID NO: 17540 - DNA, 201 bp, Bos taurus
atgagctgtctctttggcccaaacaccttcaccatatgctttaaccaggaggtaaataccaaacacatctattgctgaactcaagtgagggtcagagagaaaagccaaaactgcatgctggcccaggtacactttcttatccttatcctatggcccctcctttatttttatttgtttttttcagttggttatgtatattca

SEQ ID NO: 17541 - DNA, 201 bp, Bos taurus
attatggccctgtggccttttccgtaacatttattttcaagtctgccatgtgtcgggcattcgtaacagccgggctgactgtcactctgcggctccaaaggcgtcggccgtgagagcaggtctggattcctgcaaagtgtgatggagttggccgggtttcatgcaacagactcagatgatggtcctttgtccagagcaggc

SEQ ID NO: 17542 - DNA, 201 bp, Bos taurus
ctcttacatcccagtgaaaagttcaaaattaagttactttattcgaaaacattctgataattgtggacccaaaatctgactccatacattctgaaagactattttgaaaagagtctagcaagcagcagcttgtatgtaacagtatacatcattcttttttgacatgactgttaatatacagttaacatgtctcagaaaagg

SEQ ID NO: 17543 - DNA, 201 bp, Bos taurus
tggatgcagggtgctgatgaagccgggacagggcagactccatcggcatctctgcgtctgtctcttgctcggtctaactacaaaaacctgcagggcatgacggctacagcttcctctacacctttcaagaacctcatgcaaacttttggtcaacttccctctagcaccataagtggacggatattctggggaaatccttcc

SEQ ID NO: 17544 - DNA, 201 bp, Bos taurus
tgccctcggctgcctctggcccccgtgacaagcttccagttgtttttggtaagaacacaatgcaatgtctttttaaactctttctagaaaaataggctcacgattattcactcataggccagatattttttttataaactaaggacattttgcttatacagacgacttgttcaataataggagaataactctaatgagtta

SEQ ID NO: 17545 - DNA, 201 bp, Bos taurus
agacggggagacttcaccctctgaactctcacctctcagagatggagttgtatacgtttgcatgcagacagggctcgtttatcccttaaatacatactattgagcacttctactaggtgatggcctctggtttggaggggtaagtttggaatagccaattccagttggctactactggaatagcaaataattggaatagtt

SEQ ID NO: 17546 - DNA, 201 bp, Bos taurus
aactgaactaacttgacctctgaagcacacttaccaaacgtcgataactggatttccttctttgggatggggtggtgttggttggagaaacccctgttgcatttttgagtgtccggggaaaggaaggattatctgaacatcttgcagtggttcctggtcacgtgaattctagaatcacaatgctgctctcctggtcctgtt

SEQ ID NO: 17547 - DNA, 201 bp, Bos taurus
ctaccatctaagcaagaaactcatgatctttacagctttggattcttcccaggtcctaggcactggcccacaatcaaataaaaatcactgaaccaaaagagatgcttatggaacaatttctttgtatatacataggctcaatatgtagacgggctgcaaatggccagcagatagtttctttatctggaaaaagttctaaaa

SEQ ID NO: 17548 - DNA, 201 bp, Bos taurus
caaaacctcgtgtgcaccaggacccaggaggaaggagcatgtccccacaagtgactgacccagacttgcctgtgagtgttcaggtgtctctggtggaagcgtaggtcgacagtggccggctgcaggatcaggggcactgaattcaagaacttttgaaagaggttgcactgccattatcttcattacccctaccatagcttg

SEQ ID NO: 17549 - DNA, 201 bp, Bos taurus
ttactggtggagttctaagccctatgttgagtgttctgcatgtcccattgaataccactcttctcttgggttagaatcttcttttttggtctctgaagcagaagtgacctttagtagccatccttgaaggtggacacaagtcaagaaaggaagaatcctttgttaattttcattttggcaagttaaaagtaccttcctgaa

SEQ ID NO: 17550 - DNA, 201 bp, Bos taurus
acaaacccaggtgggtcccaggccttctggggctccctcctggtggtgtcactcggccattcccactgttagaccaacagctactgtttagggccaaatcttcacgtcttttctgactttgagattcctgatcccgccccagagcgtgcagctcctgggaagttgagtccgtctgcacactctacttcttctgtaagacaa

SEQ ID NO: 17551 - DNA, 201 bp, Bos taurus
ccatcgatatttttaagtgcttgtttggtttttcctctcttcagatgatcaggacagccaaggaaactctagagggcctaaactccaaatcttctgtcccgagtcaagtgtctttgtgagaagcaggccacaaggaacaatatgtttcattctagagtcttttattaattgattgtctttctccagacttattaatagctg

SEQ ID NO: 17552 - DNA, 201 bp, Bos taurus
cctcacagctggtcccagcatcggcgttcctgagtctgtttcctgtgtctgctccatctctgctctgcgccctgaacctcctctccaaaccctgaactcacggcctgaacacacggccttgacacactcgaaggcctctgggtctaaaagtaactttcttgctatgatcctgtctttcattcttgacatcatctgcaccag

SEQ ID NO: 17553 - DNA, 201 bp, Bos taurus
tttcaccatttaatatcgttcacccttttgtttcctgaagacttaattttgttgggaaaataacttagattgactgacttaagctggagccacaaacttcagtcactaaaggtagtttcttcttgtgctttgcagatcattaaaaagctgatagaaagaaaacaagcccagattcggaaagtctacccgggactttcctgt

SEQ ID NO: 17554 - DNA, 201 bp, Bos taurus
cttggagatgaaacagacaggacagtgcgaatgaactctactccaaacacaatagcagtgagttacagcagaaaaaaagcagcgtgaggcctgaaggcacgcggtcgccttctggtttcctgccctaaaaccgcttgcaaagctgtgagatgtgcactccacattcacaaggccagcagggcagccctaagaaacacctcc

SEQ ID NO: 17555 - DNA, 201 bp, Bos taurus
ctaacttggtggccatctactagctgggagggtaagctttggattctgtcaggttgtgtttaaatctgtggctttgtcatttattgaatttatgaggagaaacaagtagcttgggcctcaggtttctcattatagtatcaggaggataataccactgcagtgctgctgctgctaagtcgcttcagccttactctgtgcaac

SEQ ID NO: 17556 - DNA, 201 bp, Bos taurus
agattcttgagaattgagttatcgtttatcattccagatataaattcactctaaataaaactcaccacaatgttggttttatggatactctgtaaatatttcttagatgcaaaattgaatccatttccgtgatttgtcttcatcattcctgccctagcttagatgtttttgtgagctccatgttagttttctgtctctcta

SEQ ID NO: 17557 - DNA, 201 bp, Bos taurus
ttggcacaactgcagggtcccaaaagtgggtcccctggccgtttagagtaagtctgtcaacctctgaagcaaatctcattgtaaatattacaaataaaaacacaaaatgctaatataacatcagcaatataatctttcatcaccaggaagcagacaagaagcatcactaaacacaactcaagttttactctcaggagcata

SEQ ID NO: 17558 - DNA, 201 bp, Bos taurus
ctgtgagtggttgtgtgtttgtgcagttcattctttgtctctgtgaacaaaagttcagattcacttttcactgtgtgaccaaaactgtttgaacaagataattctagatgaagatcacaagaggtcaacaagcctgtacacaaggttgtacacaatagaggatggtgatgactccctatctcaatgattaactgagcttac

SEQ ID NO: 17559 - DNA, 201 bp, Bos taurus
gtacttcttggaggaggcattagaaactttgggggtggggcccccaataccaggacctatccagactcctcttctaggtctttctggccttcccaggtctttccataccagagagaggcttaggaatgttttggggtgtctccaaagaccagtcctcaggcaggaggacagccaagttcaaggtgcctccacagtctccag

SEQ ID NO: 17560 - DNA, 201 bp, Bos taurus
tttggcccacgctagtcagaggtgcctacataccacagagtcccccagtaaaaaccttgggcactgaattcctaaggagcttccctgtggacatttcacacgtgtggccacaactcacagctggaggagttaagcgcatcctaagtgactctactgggtgaagacccttggaagctggcaccttgttttctgcagacttca

SEQ ID NO: 17561 - DNA, 201 bp, Bos taurus
tgacagctcttcccatttgactcattagtatcaaatatgcctaaatatatctagcacttgacttttttataaggtgagagaacaaatgcattatgatttttcaggagccctctgggaaatcacaaagacagttttaggtggaaaagtcgtcatttaggatttaattttggaaacgtaaaatatcaaaaattgtcacaagat

SEQ ID NO: 17562 - DNA, 201 bp, Bos taurus
agacagtggacttttcacagattggaagtacagcaagtcacagactagtaaagctacttacagtatcttgtagatggcaaaagattggtgtaaagaatgtgtgaagaacttctgagagtggataagaggaagccgggagtcaccatgatagtgggcatatggtatgaatacacagtgcttaacagagcacctaagtagtca

SEQ ID NO: 17563 - DNA, 201 bp, Bos taurus
tctggatttcctcttgcagatttttagatttctgtgaactgtttttctgcacacatgaagcttcttgcttgctgccttgacagaaaccaggggatagtagtccctgctggtttttcttactagcattctgtattattaatggctgacctgaggttcttaagtctacccaaactgagctggtatattactatgaaggtactg

SEQ ID NO: 17564 - DNA, 201 bp, Bos taurus
acttatatagggtgattctacctatgggaagaggcagcaagggaatatgtttcctggatcataatatgaaaaatccatataatcttttattattaatggtgatctaatctaaaatttaaggtcttctctaacggctcagtgataaaaaaaaatccacctgccatgcaggagacttgcaggagatgcaggttcaattcctgt

SEQ ID NO: 17565 - DNA, 201 bp, Bos taurus
cctctgcttctcttgggcctcagggtccatatcaccccagttcttgtgctgccctgggctagctgtcaagattttcctcagacatttcagggagcatttgccaaggaaaaaaaaaggcctcttcctgctagctgattgattcttcttcccattatacagaatttctgattttattgggtggttgaaatgttaaatccatag

SEQ ID NO: 17566 - DNA, 201 bp, Bos taurus
cacttcttcaagtattttgcctatttctttccttttcttttgtgactcccaatatacgtttgctgatattcttgattatgtttcacaggccctgaggctcgtaatttttcttgactcttttcctttcaattcttcagattttatatcaatggacttgtctctaaatcccctaattctttcttttggctattaaaatctgct

SEQ ID NO: 17567 - DNA, 201 bp, Bos taurus
ttcaaggtcagatctttcccagttcctgagaatatggcctagaggtgagtctgagggaggttcttgagatgtacgtgagctcatccttagaatgggtgtactgaaagttcactggcctagaaggtgtctcaactgtaccagtgaaatcgctgcatgcctcaaggcacagtacggctaatggcacaaatagccaacagttct

SEQ ID NO: 17568 - DNA, 201 bp, Bos taurus
ccaagtttagcgttagatatcaggatgccaacattcacctctaggaaactgcctatgaaaggttagcaatccagcaatcccgtaaaagggccttgtctccgatgtccatttcataccagggtatggagaataacggacaaagaacaacttctcagagggaaaaacttggcatggccagatgggcattccattccactgcca

SEQ ID NO: 17569 - DNA, 201 bp, Bos taurus
atctaggagtagagctgggactctagtcacctgaggaccaggagaccagaagtatatttaagactgggcaggacatgatttgctgcccacagagataaccctttaggtcaaggccaggagtactgttacctgacttctaccctagcccacctgagaaatgacaaaatccaatgagagtgctggcaatgagggcagaaaaga

SEQ ID NO: 17570 - DNA, 201 bp, Bos taurus
cttagtttactaactgggattgaacccaagcagtggaagcacaaagtcctagccactggatgcccaaaatttctcttcttctccttttaataaaagccatcctagccgaggaaacagaggtcatattgctaacatctggatcatagaaaaagcaagaaagttccagaaaaacatctacttctgctttgttaactatgccaa

SEQ ID NO: 17571 - DNA, 201 bp, Bos taurus
ggtgcaggtactagtgcgatcacaaaagtctgaggcccagttccgaatgactgggagagaaaccatggttggactggcttgagtcagatgctcacacctgctcccatcagccatggccagagaggcaggggcagagaaaagtggtgtgggctggggaagcttccccaaaagacatccgctccataggcagagaactcaggg

SEQ ID NO: 17572 - DNA, 201 bp, Bos taurus
tgagaaggggtgctcattctgctcagacacgtacggcaagggaggggggggtccctccctgccctgccctgccccttgaccttctccacagggatgactgtgagaagataaatgtttcattattcagagacgcttcccaccaagcagatccagggcaggctctgggctctggccacccctgacctcacagatccccctgga

SEQ ID NO: 17573 - DNA, 201 bp, Bos taurus
agtagcattttgttcttactgtagtagatattctggatacagatttgcctttcctgtatgcaatgcttctgccaaaactgccatccgtgggcttacagaaggccttgtacactgttaccatgttctatacagcattgcttcagatcaagtaattcactttatggcaaagtaagtgtggcaatgggcccatgcttccataag

SEQ ID NO: 17574 - DNA, 201 bp, Bos taurus
cagaaattctgctgcagaagacacttggccttcctttggatagaacaacccagtgcttcgtcttggtttaggttgctatttcaagcttgactgttggccaatggtgacctgaacaaccctggagaggtcttgcagtagctgctcatggctgcctgagcttgcctctgggaaggacgaggtggggtgatgtgcatacaagcc

SEQ ID NO: 17575 - DNA, 201 bp, Bos taurus
tggagatcaaccagcctgggcttcctgtttcagagaagatgtaaagaagggacatgcttgcttgtccccacatgggaccacaccaaaccccacagattcccagaacctagttgcaaaacccactcaggcccacgtggtcccttcactaaaagcagggagagggccctggcccgcccggtctgttgcttgtccaaggccata

SEQ ID NO: 17576 - DNA, 201 bp, Bos taurus
tgtgtggatgtggcctcccctccacggagagctgcccagctaaacagatgattctgagtaagccagctgttggcatttagaggcagtcctttatattgcaggacatttagtatcttggttccaaagcattaaataaaatggtagtaacataccctctccagtcattgctaaccaaagggcctttgcattcacaaacgcccc

SEQ ID NO: 17577 - DNA, 201 bp, Bos taurus
caggacagctgtgttattcagcttgatgatggccatggactctttgtcataagcacttccacttccatcttcctttagcccatatatacaagacacatcaattacaacatcaatcatgtcacagcaaagttcatatgactgcatatccacaggagaactgtctgttgcaatgtagattttgctgacaacattgaagagaaa

SEQ ID NO: 17578 - DNA, 201 bp, Bos taurus
taaaaatacacgttcaaaggaatagcaacagaaggcctttctggcactttaaaatgaccgtcacttagtggctagagtagggtgggctgcgtcctggaagggcagagatgggcctcctgggtgaagatgagcaggaggcagctgtgcaggtggccttgctctatcgagacgcttgcttactctctgggtacgtcttcataa

SEQ ID NO: 17579 - DNA, 201 bp, Bos taurus
gagccaggagcccggctggttcccctgggagcctgttgcttttctctttctctggttttctctccagctcccttctgcattctggattcttcttccacacggtctcctggcctccactcagcttctcgcctggctctgtggcttctggatggttcctgccaccttcccactgtgcctggaatcgaccgaagggtcgtgggc

SEQ ID NO: 17580 - DNA, 201 bp, Bos taurus
tgatgtcctgtgaatgcctttcagtgctgctgctcttctctgctccacgctagatacatgcacacagctcttccttaattccctagagtacagccaaggcgactgaaatactcagcccttcacggacgcgttagggataattcaagcacaacatagaaagtgtcttataattcagctgccactaaaagtgactctctgctc

SEQ ID NO: 17581 - DNA, 201 bp, Bos taurus
aacccaatttccaagtaattatgctcacaatgataatcagacatcattttacttgatgtcttgtttcacgtctcttttacagatattaggccttctgattttgtgtgaatgtcagcaggcagtgttatagttcttaacactgaggaaattgagacttaggggttatggggtgagcccaccattccaccaccagtatgtaac

SEQ ID NO: 17582 - DNA, 201 bp, Bos taurus
catcctgcttgacttgtggtggctgttaaacatttctttgataaattaacaggagaaaaagtgtctcgattcacaacagcatttgttttcttccctcttaaaaaattcttgttataaatatcttctttaatcataaaaaaaaaaaaaacttctctcattagctctattttcttaagtcactaacgcaaaccatcttttttc

SEQ ID NO: 17583 - DNA, 201 bp, Bos taurus
atacctagtcatcattaaaaacagttttgccacttatattcagtgtgaattggtttaatcacattactctcttcctaacacttcttgagggtagttaatctggaggaatgacaatttcactgggggtaaaaaaaaataatttgagagaatggggtattttagaggaatggagagcttaccaggaagacaaaagagggtggt

SEQ ID NO: 17584 - DNA, 201 bp, Bos taurus
ccaggcaagagtactggagtggggtgcctttgccttctccccttaaaagcagagaatgtattaatatttgcctctgagagaagaaatgaggcaagatggtgtaaaaagtctaattaaaaaaaaaaaaaaagccttgcaaacttgctcagttttttaaaaaagctttgtatatacataactcattttaaaaataaaaatcaa

SEQ ID NO: 17585 - DNA, 201 bp, Bos taurus
gataaaattcaatactgttgaaaggaagatggcataatccaaattcctacaaattatccacaatgtctaccacataataaaatattactaataatgcaaagaagcaggaaaatgtgcctattcaagaaataaaatttactagaaacagatccacagatgaccaagcacttggtaattaacagaacttaatagaactttaaa

SEQ ID NO: 17586 - DNA, 201 bp, Bos taurus
caatttcagtgtcatgtggagttgagagtactgggagctgttacaccccaagctagggagcattctggaatgactaggccagctctactaaacgaggaagcaaagcctttggtctttcagcccttgtactcggcactcgttaacagatgaagctggaagacgtcactatcttcagggcctccaaagttttcattatctttt

SEQ ID NO: 17587 - DNA, 201 bp, Bos taurus
atgtccccggtctctccaacctgtgactaagatcacaattccccctttgtatataggctttcacgacacaaactttcaacctatgtgactggcccgagtctgatattcctctgatttctttctgcaaataccaccaggagagtcccaaagcacaacaacacatatgccgcagagtaagaatttagattctcccacttcagc

SEQ ID NO: 17588 - DNA, 201 bp, Bos taurus
ctttcgtatctgaataaatgcttaatatggtctagagtggcaaaacaagttaatggttgataacaatttattatattaccatctcttttttcctggcacatagtataaagtgtggaaagtctaccaacgaataactgaagatatttttagtagttgccttttatagcatataacatttaaaaataaatgacctttaattgt

SEQ ID NO: 17589 - DNA, 201 bp, Bos taurus
cacttcctcgcccccacagccattggcggtcgatgtctgttgctgggcaaattatcctcatttccagtttgcagaagcagagagtgagacatgttcccagaagcaaatcagtgtcaggccctgtcatagctgagacagcagtactcaaagaggggttctgaaggatgctggttaactcgttgagaccctgtgtcttggttg

SEQ ID NO: 17590 - DNA, 201 bp, Bos taurus
taaacaaatatttgctgagcactctgtgctaagctctactaaactttggccttaaccaattgaataagatgaattggaccttgccctaatttttattttagtaggcgacagagagcatagaaagacagttatgacaatagcgtgttttaagtgcagtggtaatggaggcacagtgtatgtataaatctagaggatgcagat

SEQ ID NO: 17591 - DNA, 201 bp, Bos taurus
aattaatgactcttaattgattgctgataaaaagtaaggacattttcttaaaggatgagtcccagcatgtgagggaattacaaggcaattagttaaaaaggggacagtgcgtgaacaatctaaagagacatgtttatcctaagaaagtaactttttattagcataaaatttttaggtgtttatgtctagtaaaagagagta

SEQ ID NO: 17592 - DNA, 201 bp, Bos taurus
aaagcactacttgtatcttttgaaacagaagagcaacagttaattgagctgcatgctcagtgcataatagccattcagaccaacttacatttagaatagaaaatagacatcaggtcttggttcccccaaaataaatggtgtcattggtaccaatcttgatagctttgacagcagacaccatgtgagaacagagcagtcatg

SEQ ID NO: 17593 - DNA, 201 bp, Bos taurus
acagcagcaaaggaaaactataaagacattatgtttgagaataactcattaaagaagtagaagttgctgatgcgttacttcaaagggaaatatgtttaatgtatttggaagatgaaagaatttgcagcagaaggagttagctataggctgtatttaagtcttacacacccaccttaatattgggtatagaactgtaatatc

SEQ ID NO: 17594 - DNA, 201 bp, Bos taurus
tgggagaaaacggggagaagaagaaaagggaagaaaggaaaagactttagacctctaaccaagaggaatggtaaacattttatgtgttctgaattaatttatttgtactttcttgaaaaagtaattgctacttaatttttaggaaaagcaagttttatatttccataaagtgttgtttaattatgaactacgcagagcatg

SEQ ID NO: 17595 - DNA, 201 bp, Bos taurus
cccaagatatttgtgtgcatattctctatgtaacccccccaaaaaaactttgatatgcacagaagttcatataacaacatattcttattttctattattattgaagtcatatttcttgattcaaaaatcttagcatacagttttgtattgcttgcttccctctggtttctgatcatataatgattatatttaagatccaaa

SEQ ID NO: 17596 - DNA, 201 bp, Bos taurus
agcctgagcacagcagtgaagactcagtgtaaccaaaaatacattaattaaaattttgaaaaaagataactgctgcattttggtagccattctataaacagaaaggaaaagccaaaggttgaaagaatcagccaaggtacatgcatctcaagcagtcagttcctttaagggttaaggccttctggcaggattggttatgtc

SEQ ID NO: 17597 - DNA, 201 bp, Bos taurus
aggccaggatctccctcttacctcattctctgcctggcgaccaccactcctctgagagttggctgaatgagccacaaacggtgtctccttgacagttgctcttttggggaaggggcccactatggcgccaatcaatggttgagcaggatcaccaaccgctgctcattgagagttgcttgcttgggggaggagcccactgca

SEQ ID NO: 17598 - DNA, 201 bp, Bos taurus
tattttaaatctcttcaaaagtgctgcttaaaagcatatattctacttaactttcaatttttggtgaatttagaaatttctggtcatatgcctataaacgtttcaaaattaacccatctctgaaatgttaacctttcacgtgtcaaatatagacaatattttttcaacaaaaattatggcaataaaattcaattatcagta

SEQ ID NO: 17599 - DNA, 201 bp, Bos taurus
gtgcattctaaatgtatttcttcaaatttttttattgtaagaggagagaaacaccttaagataaatgtctgtgctaattttttttatggcttattgactctaacaagcatttgagaatcttttgagatttcttaattgagattagaggtgatgagttattttattacctctaagccaatgggatggagtttgtattgtaaa

SEQ ID NO: 17600 - DNA, 201 bp, Bos taurus
cagtgtctaatttctaccccgatgcaagggggtgaagttggtcacttatttaggctcacttgtttgttgtattttgaactggcatgtgtggaatgtgtggtgagtgttcgcagtggatggaccacagtggttttgccacagcccaaggttgcatgtgcttcctaggtctacactgctgcatgtccagggtgctctgcaagg

SEQ ID NO: 17601 - DNA, 201 bp, Bos taurus
tgagttgtaagatttgactctgaaaattactctggtaataagaagtgactggataatcaatggattgggtgtcatggagttagggagatttgcttaaaaataggattaaattgagccaagaaacaaccacaacataagaggatttgtagcttggggactcattgaaaactttctaaagaggattaggaaggaggacacttt

SEQ ID NO: 17602 - DNA, 201 bp, Bos taurus
ggacacagagtcttgagtcaacagctgaggcaaaggtgaacttgaatggtgattcttgttcctctgtaactgaggcattcgaatgtgagtgaatggtatgtattagtgtctattgttgttatttatttacgctgaatttgctatttggaaaaaaaaaaaagaagaagaagaagaagcattgaaaatggccaaaatgggaat

SEQ ID NO: 17603 - DNA, 201 bp, Bos taurus
tcaaatctgtatgtggctgcttgataaatctggcaagtcagtgtttagttggaaccacatatggagcaaccttatgccagcctacattttgccaacagacataacagttctgggtcattatattgccaactactctgacacatttttgcctacatagggccatggctaagacctgaacacagctgaaagccccaagatatt

SEQ ID NO: 17604 - DNA, 201 bp, Bos taurus
ttattcttcataagaagttgttatgaattattttctactaagctgacaggaaggagtacactcaaatagtaggtagaatcacaatgtggtactagattttgcatggacacgtttctcttctatctctctatccaagggacagaaatgctaagtggtagatctgctttcaaaatggagaaagacttagatttctcaggcttc

SEQ ID NO: 17605 - DNA, 201 bp, Bos taurus
acctcattccacttgttacctttggactttctgctgtgttctgatggaacatactttctcagatgaaaatggagtttatttccttggactgacactcatcttccctcttgccaattatttccccaagttagcaggaaaattcagccttctccctcacatccttaaaggatggctcgagtccgtctccaaatgaacaaatta

SEQ ID NO: 17606 - DNA, 201 bp, Bos taurus
atacacacatggccaagaaccaagaaatagctctccaccttgcaggtgcttggcaataaccctcaggactaaaattccctttaacagagatcaatactttggtaacttgcagaatcctgaacttgattttatgccactggcttctccttacccagcactgttactaaaccagcactgaggaaggaattttcccctctattc

SEQ ID NO: 17607 - DNA, 201 bp, Bos taurus
aaagcttatcaagttatctggccctcaaaacttagctcaggaaaccagatttactgagacatattcacatacatcagaagcactaaacaggattttttaatgcagtattaaaaatatggcccatttagaaagaaaatatatatacatatatagttacagcaatgttgttcttgttgttcagtcgctaagtcttgtcccact

SEQ ID NO: 17608 - DNA, 201 bp, Bos taurus
tcacccaggacaggacaatataaacaaggataattaaaatattaaatactatctaaattaataaaagaccctaattcaaactgttaattataatctttgtgtcttgttagaagcagctgtacagttacccttcatgaaattcacctcaccaacttatgaagactacaaaggctcactacaaactcaattatataatttaca

SEQ ID NO: 17609 - DNA, 201 bp, Bos taurus
ggttaatagaagtctttcttttcgtttcacagaagattttgttttatcattggtatattaagatatcacagttagttcctgattagatatgaataactgacaatgaacatgtcttcagaacactattattgtgtggaaaactctttcttcaattgttgatattagttcgctaactcatctgagaggttatatattcactct

SEQ ID NO: 17610 - DNA, 201 bp, Bos taurus
ttggggaaaagttcatgaaggtcatccttatccaactgccttcctggagcagagaatatgtattgagaaagagctgtgtgttggcttggatgaaggagtgtgacaagttctgtgtaagggacatgaagagaccaggatcaagggagtcttggggtggtggtggttggtgatgggagcacggcttgactgatgggagaatgt

SEQ ID NO: 17611 - DNA, 201 bp, Bos taurus
tggtagcaagtttgaggttctttcctgaccggtacctggggtgcagcctttctgtgctgttggttaagtacagagctttaactttagtggccaactgagccgggcaaaggatagctttgctcgtaaaagctgagggaatgtgaagagactctttgaatagagggccaccccgtctgtatgtatagcttatccctggtggct

SEQ ID NO: 17612 - DNA, 201 bp, Bos taurus
atctgtaactacaaggtttaaatccagaaccctgattgtgacagagaggggctagtgttttcccagtcaaatccccacagcacccaggccgggatgctctgtctgagtctagagtctgcccttccagatgcctggggtcccagcccaggatgagctaggcagtggaggagctgcccacctactgcttcttttgtaggaatt

SEQ ID NO: 17613 - DNA, 201 bp, Bos taurus
ctctttaaaccattatttatttcaacatttttatacattatgcaccaaatgcgataaataacccttaaaaggagtctgttctttcaagctgttagttttgagaaaaagagctaagccctaagaacaccaataacaccctcagtaaagaaactatctgattcctcaccttattttttttgtcattttaagagatgtccagta

SEQ ID NO: 17614 - DNA, 201 bp, Bos taurus
ccaggttggctggtcagacactgagtaatgccaagttggcttgactcctctgaaatgtatccaaaatacaatctcaaatgctaaacactgcagaacccccaaaaagtcatatgctataaagtatgggcttggtccacttaaaaaggttattattttcccgagagagactatggtgtctgtaagtggtggcatgaaagcaaa

SEQ ID NO: 17615 - DNA, 201 bp, Bos taurus
taagttctttgtatccataatctgtatcagctatgcccatcctcttctatcacctagcttgtaggtcatcaataaatatttcttgtactttttctcataccaccagctaagggcttcaacgtactcgaggtagtatgtgccaggcgattgcaatgccttcattctttcttccacaggagaacagcagattcctatactgtg

SEQ ID NO: 17616 - DNA, 201 bp, Bos taurus
gtgaagaaagtctctgggtgagagatgggtaaattttctaagaggcagagaaatatccaagaagaaagtgattgaaacattgctctttcgaattcaacatcactaatacctcattgatggatttaagtgctcgtgactaaggcacaatggtaaaagggggaaaaaaagctttctagatgctccagactccttcaggaaaag

SEQ ID NO: 17617 - DNA, 201 bp, Bos taurus
cactttggctatttgcaaagttttttatgtaagataaatcaaattgtctcctactattagtagagctctgtttttcaaatgcagattcttaatatttgagaagccatgagccctcagcagaacatatgaaagctatccactctctcctgataaaaatacaaataaatatacattgtatacaattttagcagagctggagag

SEQ ID NO: 17618 - DNA, 201 bp, Bos taurus
ttacagtccagtgcatcccagcacatgtttagtctaaactgaaataactcaaatagttgaagattttcataagggatctttcagttaccctgttctaccgaagtcaaaatcgttttaaaacttctcattaaatccatctagaacctatgtcaacaatctcagttttaaaacatgtacagcatataaagtccttgaggaagt

SEQ ID NO: 17619 - DNA, 201 bp, Bos taurus
acacagtgaagaaatctacctgggaaaatgtacgctggggtaatggcactttaagcagcctttcaattctaacatttcacagccacctttttaatctgtaccgaaacactgctcagctgaccgcagggatggagcactgcaaaagatttgctagatttagtgtcttttctctaactgctcttgaaatcttcaagatcaaag

SEQ ID NO: 17620 - DNA, 201 bp, Bos taurus
ctgaacttatgtaggcttgtttaactgttaggacaaatctgtaaaagtcccaagaggctctcaagctctttagattggtaatactcaaacattttaaaatgctgtttcttctgggaattttttccagggcatagttttaggctttgctaaggcaggtctaaagcaagccttattctgaagcatgtttttttacttctaagg

SEQ ID NO: 17621 - DNA, 201 bp, Bos taurus
tattttttgaaaattatgctggccacatgataactcacggagccaaaaaaccaacactgcctacccagtgtcactggatcagcagataacagctaggctacgcaagagatggataacaaaaggactggtgattatggcaaaccccacagcatcaccaaacccatccccagcattaaccaatgacaaccaagcagtcaagat

SEQ ID NO: 17622 - DNA, 201 bp, Bos taurus
taaatagaggaaggtgcagacaatggagccaaataatccagaaaaccaagaatcttcccccagacttttgtttggcttcaatcagcaaatgagttatcaataatgatcattgtaattcaagatgatggaaagaaactgagtgcatgaagacactgttaagccactgaatcaatagaatatcaacccaacttctaaactacc

SEQ ID NO: 17623 - DNA, 201 bp, Bos taurus
tgtcctcccacactcctgtctcaggtcataaagcaagaataatcaatccttttgaaaatattaggaaggaaactgcagcctgtgtctctactcaccatatcccaaacctccccaatactggtgggcacctgactgataacaagcaaaattaatgaagttggaaaaaaaaaaacctgttctcatgttctatactttatttgt

SEQ ID NO: 17624 - DNA, 201 bp, Bos taurus
tcagagttcctaggccttagagactcatttttaaatgatctgaatatgctagaatgtctcataggaataactgatgaatactaattaagattccaaattcctcacaaataaaaagttaaaagacaaatgtttagacataagagtaccttctagtaatgttttgagctccttggatgaagggttttcaagaacagctcagtt

SEQ ID NO: 17625 - DNA, 201 bp, Bos taurus
gttctacttttattttataaaatttgactcattatgacacttaaaaaaaaattctagagtactgttaaagccaatttcaaattatttaaaatagaattaaactaataagtttctgctatatgtcccttttccccttacctaggaccttgatatttaaatgaaagagttttaagaattacctttttaaaataaatattttac

SEQ ID NO: 17626 - DNA, 201 bp, Bos taurus
ggggaggaaccccgtttaaataatgctgattcagtaccacgtctctgacgctgttggtcctttccaaaaacattgtatttattattttttggccgtgctgcatctttgttgccgtgctgtggtgagcgggggctgctcttcgttgcagggtgcgggcttcccattgcgctggcctctcctgtcgtagagcacagactctag

SEQ ID NO: 17627 - DNA, 201 bp, Bos taurus
cacatgtctcaactaagagtgcatatgttacaagtaaaaagatcccacgtgctgcagctaaggaccccacttgccattatgaacattgaagatttcatgtactgtggctaagacccagcacagccaaataagtaaataaaaaacatacctaagggtagctgcaagtagcattttaaaaaagaaagaaacagcggtaaagga

SEQ ID NO: 17628 - DNA, 201 bp, Bos taurus
aaaacgtggccagtacctaaatgccataggtagttatccccaaataatggaaatataagttttcatttttatcatttcttatgcttttcaaaatttctctgataaagttgtattgctgttataataagaaagaaactcttcaattatttttataaattaatctgttttgtcaaggcaactcttctaagaacagattaacaa

SEQ ID NO: 17629 - DNA, 201 bp, Bos taurus
ggttacagggagaaggaacatagtggactaaaagtttgcttcaatagctgctgcttaagaaagctctttaagaaatttagtcagccttttggaggcatatagtagttacttatgcatttttttaattgccttaaattagccctgtaacattaccaaatgttatagcctttctcagaactaccttattataaatgggcattt

SEQ ID NO: 17630 - DNA, 201 bp, Bos taurus
ttatggtgaaaggtctttccagatagctcccacaggaagctttttcccagcttgaatcatctttcatccctgaatcaatcacgttttcatccttgagcctatcaaccaattcataactaggatgggttagtcctctgtcagtgcctttgctcaccagtgggtgagggggcagggttggtccttcctaaaatcacatattgt

SEQ ID NO: 17631 - DNA, 201 bp, Bos taurus
tcagaagaactaagctggtgataggaagaattagttgggcatataatatgctacataattttataaaaactacagagatgtgtaaaatgcaaagcatcacaactgaatggcagctccaagtgacttgcaaatcagtggtagcctaatatgaaaaagcctgcaaaagactcactttttcttaatatgcactatagtaatgtc

SEQ ID NO: 17632 - DNA, 201 bp, Bos taurus
tcattaggcagtgtgcctttagggtacctggactcatagaaggaaatgagtacagattccgtataaaggcagctaacattgtgggagagggagagccacgtgaactagcagaatctgtaattgcaaaggacatccttcatcctccagaagtagaacttgatgtaacctgccgtgatgtcatcaccgtcagagtgggccaga

SEQ ID NO: 17633 - DNA, 201 bp, Bos taurus
actgagccaaatttaaatattaagaagagctcttccaaataaaagatttcattttatcaagctcctatgcgccatactagcagtgaacttaaatgctctataaagataaaaacttcaagcacacaaggttaaaagcacaactagctggagggtcactagactacacttcgttcctggaataaattatgacttatcttagta

SEQ ID NO: 17634 - DNA, 201 bp, Bos taurus
agaaaagttttatagctcttatttcaagttatcaaatagctttcagatatattgagcccatttataaagggagcagcatacccatacctctcctcacagacacctgccaactttgttcaattcacatttaaaaactcaaattagttttccttagtctgccaggcaggcttcagagaacctcctcccacatttaccagtatc

SEQ ID NO: 17635 - DNA, 201 bp, Bos taurus
tctgatatacgttcataaacaagtctttttattttccttaagcactgtgggcatctgtgggtctaagcctcaggaaggcagcatcccttagttgacaaaagctgggctgcctcctaccagacacttcatcatggctggaaactactgttaccctgggagtgaagaactttcatcccctaatgtaatgagctctttacatgt

SEQ ID NO: 17636 - DNA, 201 bp, Bos taurus
gctttcaacaaatttgtgttggattgatttgaactgaaatacacatatagcataagaagatgggaccaaaatgtcttcacttttacactcaaggacttgtgtttttttttgcggatgggtggcaggggagaagggtgtccacaactgcttaaggaccaagaaaaataatctggaaaaactggacatctcactgtaacatac

SEQ ID NO: 17637 - DNA, 201 bp, Bos taurus
acacccgccttatcttcctagggcaaatctgactgtgggcccttcagatcctcccttcccatcagagaagaaaaaatccaagctggcacattggcctgcctgtgctcacctcctcgccctccatcctgagccctctgctcttgacacacccgccactgttgttgttgatcagtcaccaagttgtgtctgactcttcacgac

SEQ ID NO: 17638 - DNA, 201 bp, Bos taurus
gtaagatttaattctacatagttgatgcatataaaaacattctaaggggaccgctaccatcaccaaactgccaaagggagcatggcatataaagaaacccataataacttgatcatggtcacaaaactctttgaaaactcctgattgtatattttccaatacttaatgaataaagggtgttaagacaactgaggttaaatg

SEQ ID NO: 17639 - DNA, 201 bp, Bos taurus
cccccacttaaattttcccaataaacaaagtgccatgttgtcgcagcctagcctttcacctcgttacggtggtagcggagtgtgatgtcacagttgacccaataccagcctgcccataaatgatacagcctgttccccctttgcttcctggctcaagcactgggaaggagcttagtatgaaattcatgccgtgttgacaga

SEQ ID NO: 17640 - DNA, 201 bp, Bos taurus
ctacacagaaatgagatcacagcttttgcaggtcgggaagtctgtcttgcagccagcctttcctcctttacatacaagaaagtttggaggttgatttactcgttttcttttatgagatctttctacttagacacacatatataaatatttgtaagggcaaggcaatcctgtgaacagagacaatccagcctcaacatctct

SEQ ID NO: 17641 - DNA, 201 bp, Bos taurus
aaattccactgtatcattttaggatgatgatagcacaaagggaagtggaggaaagaaataaaaaatgaatgagaaagggtgatgtggtcggtggatcagtacatttagaaggtatcttaacatacattcagtggaggatctatcaagttctaaaataggaagtagttccagaccacacccaagaaaatagcttttctcttg

SEQ ID NO: 17642 - DNA, 201 bp, Bos taurus
gggcactgtgaaagggggggcacaaacttttggtgggtggttagacatcacagccattatgagaaaagaaagggccaaggaagaggtgggagccggactctgggctgtcatgtagagaagggtgggaattcaaaggaagcagtggggagagggcagcaaacgccgactttgccggccgtggcggggtttgtgggctttttc

SEQ ID NO: 17643 - DNA, 201 bp, Bos taurus
ggccagatcgtataaggcctgaggatgccctgtgtacagtgctttaggaggagtgtacaggaccttgtttgaggagggatccctggtgtaaagaagaaacatttgtaagtgaaaagggcctggaagaagtaactaagtatttcaggagtacacatactaaacataccccaggaatcacgaaagtagggggatactacttcc

SEQ ID NO: 17644 - DNA, 201 bp, Bos taurus
aaatgagtttccacagagatcagaattgggaccatatagatgtcctgcaggagagcacaagaagaagctcctggactataggtgatgtaaggtagccaccgtgggatgtccatagaaacaaaataccagaagaatctctcaaaactctatgatttcatatagaattgagagaggggtgtcagcatttagaagtcacacaaa

SEQ ID NO: 17645 - DNA, 201 bp, Bos taurus
agtaaatactattaaaataatattttgtttgatcaaagcaatctacactaacaacttttaggcatacaatggaagaatgattagaaaaattattaatgtttttatagatttaaatacatccaaaaataattcttagacctaacatttgctttaatcactttatgtattacaaagcctgcaagctttcattcctgctgctga

SEQ ID NO: 17646 - DNA, 201 bp, Bos taurus
aacttagatatttactcactaaccaccctgtactccttgttaattcttgctttgttcataattttattctcatctagaatgtccttcttccttctctattactttccaacccctgcccatttttaaagtttctgtttaaacctttcatcttgaaaagttctctcatctaccccttggaaatatcttgcccttttgagcatt

SEQ ID NO: 17647 - DNA, 201 bp, Bos taurus
attaagatgctgtgatagatatggaaatctacatacacatagtaactttgggtattttatcttcagcctgcccttcttgttaggaagcaatttttttttgacagttctttgtccataaatgctcttcttggaaaaattgtaaagttaacatgaaatacctaggtttaaaatgtcagacaaaaaattaaatttatatctctg

SEQ ID NO: 17648 - DNA, 201 bp, Bos taurus
ctgaacagaccaggtgtggggagagctggcagggagggaaccaacatactttggggtacatgttgaaagtatcaactaaaatactcagtccccagtagaaatgaaaggaaccaggccaaactgaaaataaactagatggaaagagagactgaccacactttctgagctttgatttcttgcatctctcatctcctgccctgg

SEQ ID NO: 17649 - DNA, 201 bp, Bos taurus
gaaaaccttgtcaaaaagcaattttatccataaggtaagtccatagcttgggaatgctgagactaaagaatcttccaaaaggttctaggacataacctccaaaacaatatgtctaaatacatacctttttaggataagtatgttaataatgtgacttaaggctttgaaaaccttgaacgtggagaagtgcaacacatatca

SEQ ID NO: 17650 - DNA, 201 bp, Bos taurus
gactttattgttttgtttttttaatgaattcgttaggtacacaagactataaatacagaatccttcttaggtacacacacagaatgtttatttgaacaaactcatgccacacattaaaaaaaagaagaagaagaagaaaatgttcctcgagttctctaagtttgaattttgcaatacaagtaagaaaaagaaattctagag

SEQ ID NO: 17651 - DNA, 201 bp, Bos taurus
ttaaatgaagcttagctctcatctggcatttaaccaaatgaagattaaatgccaacaaaagatcagagaggatgagaacccaagatcgaattaataacatctaactttcccggtttttggtacctcaaccccaaaactgggaaatagaaccagtgagagaatgaattcaataaaattaggggaattaaggtaaatgaaaat

SEQ ID NO: 17652 - DNA, 201 bp, Bos taurus
tttcatctttcaagtgaaccagtcatcagcataaatacaaataatttttaaatcctcaaatcctaaaaactctccaaatgtagttcatattctggtcactcgcctttccttcctgatttgacaaacctctagccgtgggcaggaaacacggtccctgtgttagagccgacattccagaactacagtgttcgcacctagcta

SEQ ID NO: 17653 - DNA, 201 bp, Bos taurus
ggttgggaagatcccctggagaaggaaatggcaacccattcagtatgcttgcctaagaaaacccatggcgggctacagtccatggggtcacaaaagagtcagacacttcttagcgacagactattttgcaatctctaggagttagctaaccctaggaggggcggtctatccaggaagaaggcctcagatgcctgaacatca

SEQ ID NO: 17654 - DNA, 201 bp, Bos taurus
cccacctccaccatcaacatcaattagaaacggcttccaagattcttcatgtgaaggtaagctgtggtcccagctcctgggaagctataatggggcagcaactgagtgggaggtgtgtttgtgtgtttgcatgaacgtttcttgtttgtgtgacctccactgttcacattgcacggcactaatctaagcattctagggcca

SEQ ID NO: 17655 - DNA, 201 bp, Bos taurus
ccttatgagagttcacatgtaacacctaacttcatcaaatcctttaaccaaattttaagatgagcaagaatgtctctccctttgtagctgcagtagaaaagaaacatctttttcatctctttactagattttttttgttgaatgatgaagttctatattttcaaagtcaatctctgaaatatcataagttagcattaaaag

SEQ ID NO: 17656 - DNA, 201 bp, Bos taurus
taaacacttttttcctagagccattgtcccctggccagctgctagtactggaaaacttgtccactctgtgcagctggctccaaaccacatctttggctgtattttttctctgtcttcagcttctgttttctcttccagtgtctcctagcaatcttacaggtgctgacactatcatgagcaattagttctgaacagtgagca

SEQ ID NO: 17657 - DNA, 201 bp, Bos taurus
ctttcagatattttattattattacttttggctgagccgggtctttgttgatgcacccacgctttctcgagttgtggccagcaggagctactcgagctgtggtgtgcaggcttctcgttgaggtggcttctcttgctgtggtgtttaatagttgtggcactagggtgcagctggcccgcagcaggtgaaatcttcctgggc

SEQ ID NO: 17658 - DNA, 201 bp, Bos taurus
tgtccttcccctcttagcaacattccacaccagagtggtacatgtgttaccattgatgaacctcactgacacatcacccaatgtccataatttactgtagggtacactcttggttctttaccttctatggatttagacaaatgtatgaagacctttgtccacagtatctcatagagttgtttcactaccctgaaaatcctc

SEQ ID NO: 17659 - DNA, 201 bp, Bos taurus
gtatctattggtttcttaggctttcttggataagctcatcatatattcacaaaaagtatggatgttgacacatgagcatactttacacagctactataattattgctgttcctacagatatttagttgtttatcaactctccatggaggtaatactgaatgatcatctgccgtactgtgagccttaggttttattttctga

SEQ ID NO: 17660 - DNA, 201 bp, Bos taurus
gctcatattatgcaacagtaccacttttgttagaaaatctgaaagaacagattatttatgcttcgaattaaaagtattatagaatttactgggagttaatgtatgcacaatggatggctccttacgtttaaccctaattctgctgaagacattgctttctgctcacacaggtacacgtgatttgagagcacccatctctgg

SEQ ID NO: 17661 - DNA, 201 bp, Bos taurus
cccattttaaattaagtgtagcattgtctaataaaaaaggcatagatcagttgcagtcaagggaaccaaattttcacttggattctgacactagactgtccacattctactgagcaagtcattagcattattgcttcatggtaaatatggtttttccctctggttgaagagtaattttcttgaaggcggagataatgctca

SEQ ID NO: 17662 - DNA, 201 bp, Bos taurus
gcccaaaagagatacttacagatgactcttcaacttgtgatttaaagtattttaaagcagtattttatttcttccctttgtaccagattgtagtctgacagattttgctaataatggcccttcaaaactggaccccagctcttaacagctgagaaataaaaacaccatgctcatacacatgcagttcttgatccttgtccc

SEQ ID NO: 17663 - DNA, 201 bp, Bos taurus
acctttactaagcattctcaacttattactactactaataataacatcttccattcatcagtattatccaacagttctcagagtgtggtccagaaacctaagggggtccctagacactttcagaggctccatgaggtcaaaattgttttcacaataaagcaaaagctttatttgcctttttcactgtcagtctctcaaaaa

SEQ ID NO: 17664 - DNA, 201 bp, Bos taurus
tcattacctatcaagaggttaagtttgtgactggagcccccaaagcagcaagctgcgccccagtggtgagccccacctcccaaggctttctaaacctgcttacccttctccatctaggggtcttttgtaaccaaaaggacggctgggaattaaatccaggcagatttgaaggccgattaccttcctcactattccgcggag

SEQ ID NO: 17665 - DNA, 201 bp, Bos taurus
acagaaaagcagagaaagcaacactgcagaatgagcaacggatgaaacagagacacacaaagcagagacaagaggccatgggcctccatgaagaacatagcttgtttagttcccgattctttttggattcctggttcttcttttgcatgaggcccatctgtccttcctaactttgagacttttcagatacccatggtagtg

SEQ ID NO: 17666 - DNA, 201 bp, Bos taurus
agctttctgggaaagtgatagagttgaacttgtaggttgaaccacagaagacagaaattggccaggaaggactgaataagcccagggcacagacaggcctgggtgtacgcctgtcatgaacagcctgctggggacaaaagaaatgtggtggggagagaggctatgggagaagctggaggaaaatcataaagcagagctgct

SEQ ID NO: 17667 - DNA, 201 bp, Bos taurus
tttcatagaaaatctgttttgttcagtgaaatgtgaaagtatggtttacaaccatactttgatttttaattttttatcttagagaaagtggttggaactcacttagcataatcatgagaaacaacagaggccctgtgtgcctttcacacagagatgagagttcccctcctgggaatgagggtgaaggtctcaaattgcagg

SEQ ID NO: 17668 - DNA, 201 bp, Bos taurus
aggttttgtgaaagattactctctgagcataatgaaaactaaaaggaatttgaaggctttacagtactttgtttgcattggcaatataaattttctttctcctgatacgcaggaagagcacaaataataatagttgtgcctttttggctcctctaaacactacagatgaaagctgcaaccctgcccaaaagggtctctcaa

SEQ ID NO: 17669 - DNA, 201 bp, Bos taurus
agtgccccttcattccagacatcctacaaactaatcgtcttttttctgactcaagggctcagtcaaggcctgcaggcaggttcacttttctgatctgcagctgcaccttgggtaaatgccatgagtttctgatctgaattcctaaataaaagagaagtgactcttcaaccacattcagaagcatactctgagccaagagga

SEQ ID NO: 17670 - DNA, 201 bp, Bos taurus
taaaaatattgttttaatattataatttaaggaaataagggggaggtcatttgctttagttttctttgaagcacttcagagggaaaatttataataacatagcagctcttgtaaagaaatggcaatatttactaggagataaaagggtaaaaaattttttcttttttcttttaattgtagtgattatattttagtgataat

SEQ ID NO: 17671 - DNA, 201 bp, Bos taurus
aaaatctgtctctaaaattatagtcctgagcttgagtgctctgcactcagtgttcagtgttcagttctgtgcacacactgtgtacatgtgtatgcactgcgtggtttatacaagaaaggaaaaaagaataaagtggttaggagacaggttgcgctgaggaaacactgacaaatctgaccttataaatggattatgcaagcc

SEQ ID NO: 17672 - DNA, 201 bp, Bos taurus
ctgttgaaattattctctgtataactctctgaggctgcagagctatgggtacacaaacttctttaaatatatttatttggctgcggtgggcctcagttgcggcacacaagacctttgatcttctttcagcatgcacatcttttaattgcagcgtgtgagctccaagctgcagcatatgggaactacttccctgactagggt

SEQ ID NO: 17673 - DNA, 201 bp, Bos taurus
tgacatttcataggtccaaaaaaattaaaaatgaacacatctgaaattggacaccctagtaggtctttgataggggtagcagtagtggtagtctctcaatcgggtccaactctttgactccacaggctgttgcccaccaggctcctctgtccatgggattctccaggcaagaatactggagtagatttccattcctttctc

SEQ ID NO: 17674 - DNA, 201 bp, Bos taurus
aaaatttaagttttagtctattctcctgaggcaactcctttattatttgatcattttgatatgattttagttctctggactgtccctaagttctttccttcggtagactgtatgagaagcgtacactttccagtatggcaccatgcttggagtgggagctgacatagactggttatgagcacattgcttgtgtttactgta

SEQ ID NO: 17675 - DNA, 201 bp, Bos taurus
tagcatctgtgtgaatctgagtgcagtgtgtgatggtgtctctgactgccccggtgggacagatgagtccccactttgcagtaagtctcctgaccacagtttactggccatgaactcatcctgagcaggggccagctgcgtgtcgtcattgtcacaatcaccatgtagttgttgaggaaggaatctcagttctctgaattt

SEQ ID NO: 17676 - DNA, 201 bp, Bos taurus
aaaatgataaacattatgttttatatatattatatattacaattttatcataataatttaaacaatctatctttttgttagaaaacaaccttctcataatatttagtcagacactgcatatctgagattgtttgattgcttttggtttgcaggctactggctctcagatcgggatgatggtcaatgccttcactaacattg

SEQ ID NO: 17677 - DNA, 201 bp, Bos taurus
aaaagaagtaccactgctttaccttcagtatggaatcagcctcagaaagcattacaaggggaaggaaaaattaggaacactaccttagtttcttggaaacgttgaggtccgtttttccaggaggctgtttgcaatttccagagaggcttggatagtcagtcaatgagggccaaatcctcaggtgcaactagacattggcga

SEQ ID NO: 17678 - DNA, 201 bp, Bos taurus
taaataggaaaagaaaattttcaacacagatgtccgtagaactaaatatcaatgaagaaaatgtttgtaagattagtagagcatctaacaggcatttggatgtgaaaacctgacctttagtgttggcagtgtggttttgtagaccactttagactttttacacggtgggtgtgtgatgctgtctaatctctgactctctta

SEQ ID NO: 17679 - DNA, 201 bp, Bos taurus
gtaaacctcgttttaagattaaggtaaacaatgttgtttgttttgcgtcgtttttcctatggtacaatattctaatctacttccttagcttttcgtaatactagcataaaataaaatgatcttatttgatttcctgggatagtcagtgtgggctgtattcccaggactaattgccctcttgtaattgtttcctcaagaaga

SEQ ID NO: 17680 - DNA, 201 bp, Bos taurus
cgaagcagtcatttttatctcatggagagtgtaagatctggcatctgaagctctgttacttactagctatatgactataatcaagtcaagtctccacttacggcagatttggtagattagctaactgatttcccattccaatccccctttagcttttcttccaggaaataggtcatctgtaatagaagatgaagtccagac

SEQ ID NO: 17681 - DNA, 201 bp, Bos taurus
tgttgtatgccatattatttgttattttcagattcctaaaaagtgcctaatacatagaagtgttcaacactcttgactctaaagcgcattcttgggagcggggagtggatgagttctgggtagctgtggatcaagcctcgattgtgtgctcaaagtccaagctgactgaacacctcatgaccaaatacactggctatgtaa

SEQ ID NO: 17682 - DNA, 201 bp, Bos taurus
aaaatgtgcaaccattctcaaacataaaattaacatcattcctagttcaccagtaaattattcatctgctccataattattttaaattactaaataggggtgaagtaatctttaaaattaaaaaaaaaaaaaaaacaacttgtaaaaaatgctgacattttggacagctcccttctgatttctacaacatttctgtgaggt

SEQ ID NO: 17683 - DNA, 201 bp, Bos taurus
ggaatatagccaacattttgtaataacggtaaatggaagataacctttaaaaattaaataattttaaaaaattactaataattgactgaaaactaaagatgctattgtcataaaatacttgcagaaaatagggaataataggacctgtaagtgttctaatggaaaacagagggtggaggaacatgttataaggctacagtg

SEQ ID NO: 17684 - DNA, 201 bp, Bos taurus
ttggttgagtccaaaatgaatactcctatgtcccaactttttactttattttattttttgccccaactttttaaagaaaatattcagtgtgccattatttaatattcttagaagaaatattcttcagggaggggaaaagatgattcaggtcttgaatgcacatttccttatttctttagtttaacatatctcatttagaag

SEQ ID NO: 17685 - DNA, 201 bp, Bos taurus
tttatattagattctgatatgaatgcacattgtaatctgagaattattccaaagtgtactgtactggtctaaggggtacctaagaccatttagtgtgtccatgaggatggtttgattttcataataagatgctatttgcccttttcactgagttggcattttatttgactgtgcggaggccatgacaagtaaaattgctag

SEQ ID NO: 17686 - DNA, 201 bp, Bos taurus
ctttcttctgaatataatagaaaagagggggaaagaataactgggagatgtggttaatgacagtatcaggatactgatttgtcttatgtgatagaaaacagcatatgggcccagtgagattggaaggtaattatacacttagatgagttgaagcagccaactagttgttaatggtagatcaagacaatgatagtatttgta

SEQ ID NO: 17687 - DNA, 201 bp, Bos taurus
agtctaggattaatcaccaaagagacctagtattcatggtgataaaaactactctctgaatgtagagagatgtgaaatttgtataattctagacatgtttgtcttaactgcagaagtcccagaagaatagattttctcacgtctccatggggtgtttcttaaatctattactttatgaaattaaatattggcatatgaaaa

SEQ ID NO: 17688 - DNA, 201 bp, Bos taurus
ttttcctactggcttccgttgggcatggctccatgttcttagaagatagccacattccttgctgcgtggactcagccattttcaaaatgaagaatctccatgtcaaaccactcttctgttttgaatctctctcatcagcaaaaagttctatcccatttaagagttcaccagatccactaaggataacctctttaactaatt

SEQ ID NO: 17689 - DNA, 201 bp, Bos taurus
ctttcttgcttattgtccttacgtgccccttacccataccacttctctcattcttttttgctgtcttcagctttagggtccttcatcacttctcccctgtatttttcaagagagagatgcttttcatgattttactgaccgtatactttctctaccatcacttaggagtgatgaactatgttctccccacagttctgacca

SEQ ID NO: 17690 - DNA, 201 bp, Bos taurus
ttggctgatacatatatcctgattaaatcagttgcaatcatcgactaaaatcacataactttagtaccaatataataccttgtataaactactgaaggaagaagatatggaaaaatctatgtgtgtatagataaataatcaatgatatatacatatgatcaatgataaatatggttactgaagttcttatttctgcaaata

SEQ ID NO: 17691 - DNA, 201 bp, Bos taurus
tcattttccaaatatgtataatttgggagatttccaaaaaactgtagggtagatcattaaaagctacaattagccagtggccatcatttcagccttctgtcaccatcctcttccttccccagttcccatgaggctgatgctttatgataacaaccctcaatgtgggctagtggcctaagagatcagaaaaaacgtttatat

SEQ ID NO: 17692 - DNA, 201 bp, Bos taurus
ttcctatgtagttctctacctacaacccttcacttacccgtcatcagaatataggatatagaccaaactgcttaaggtgggggaaaagatttctataatctgaccaatttctctgcctcatctctcatctgtgcctcttgtgtacactttgctttcatcacagttctgaaatacatcacagttctgaaataatctctgtac

SEQ ID NO: 17693 - DNA, 201 bp, Bos taurus
ggtgattctaatgtgcggctaagtttgaaaatcaagagaagttgctctggctttaatccatagaggccatattctttgcaaacagctctcagtgttccccttataactgacccatgagaaaagcactcattcccacagtgtcctggtttgtttcaagtgtgtattgaatgacattagctgcagtgctgatttaggacccag

SEQ ID NO: 17694 - DNA, 201 bp, Bos taurus
aagtcaacgtttattgaccaagtgctaggccagtgttatttcaacatgttacctcttgagcgatagcaagggcagcatcacctgggaatgtgttaggaatacagattctcaggcctgttccagacttcctgagtcagaacctctgggatgggggcggggtcatttgtcttttaacaagcgctccaggtgcctgtgaagctg

SEQ ID NO: 17695 - DNA, 201 bp, Bos taurus
ttgccgaacggaattctttcttaccacccccttggcctacattatgcctcttccttcaggtttcacacattgcctgacacccaccccagatctcttattacagtgctgttggcctgtgccattatttcatagcatttatctcagttttgaaatcatccatgtacttccgtaattacttaaataacatacgctctttcctaa

SEQ ID NO: 17696 - DNA, 201 bp, Bos taurus
tctacaatctaggctatgatttgaagatgtaatttcttgctttgtgtagttattcttaactctttgtagcatgctttaactcaagttgtaagcaagtttcgtataccaattaggctttgtgccagctaagttcaactgaaaccagaccttgaatccctaaaattgtaaaggtttattgtgacaaatacagaaacaagatat

SEQ ID NO: 17697 - DNA, 201 bp, Bos taurus
aactgaaggcatgctatgacagaggtcctctttagctcattttctgctggcagatatcctgtatcagaagcaatattgatctttttcttacacagataggcttgtgattgttactgagtttttaaaacctagagtatgtgttgttagaaatcacatttagtgaaaaatctaaagaatagcaagtcaatgactgacatgaaa

SEQ ID NO: 17698 - DNA, 201 bp, Bos taurus
ataattaacaaaataccattttatcagttaagaaacactaaaattttatacccagggcattcaaaaaaataaaggaaaagtgtagaaaaagtttaagatgcgtaaaaactggtgggtttaacaacaatcacagagctaaatctaatagttatcaactggctctccacaaaaatgtatttatttatataaagaatgcataga

SEQ ID NO: 17699 - DNA, 201 bp, Bos taurus
gagtttttaaatgaaatgacctcttgcattctatatttgaaagtttccttatgtaattccatgtatgtgatttataaaggtatggttagaacctataagacggttagattttagagttctctatccatgcacatagatgcataagcccacacatgacaggtcacatgatttccatcccaccatacgactgtagcggtttca

SEQ ID NO: 17700 - DNA, 201 bp, Bos taurus
tataatatgaaattacattttgatgattagaagcttatttgccttcattggaatgatgatctttcttcttgtttgaatcctaaagcaagaccttttccaacatagcaaataatttttcataaatcttacttttgctataattaaacactagagaagatcatagtaaacttctagacatgagacatgtgaagtaggtacagg

SEQ ID NO: 17701 - DNA, 201 bp, Bos taurus
tctcaactgtcctcagtaattattttggctgaataaagtctgaagcaatgaaagaggtttcaaagttctattacagaatccatgagactcaatatagttcgtaagcagtgaagccttgggaagaatcatggcaacttatttagattaaaatctaacaactaataaaaacattattcttgttgtagtcatcatacacagccc

SEQ ID NO: 17702 - DNA, 201 bp, Bos taurus
ctttaattcttaatgttacctatattattgaacttggctatagaagaaggattcttacacaataaaatgaaggttcttattatcttgggaaaaaaaaaaacccagtaaattatggtgtaactctggctttaatctgtgtttcagaaaactgtgagagtagtgatcaattttaagaaaacgcagaagacaatagtaagagtt

SEQ ID NO: 17703 - DNA, 201 bp, Bos taurus
cctgacccgaggattaaggcagcacggttctggtagcacactaagacaggaaatggaatgttaaagcagcagagagtgctcatggtcaaatctgcatctcgtggtccagctgagttttccttttcagtgttctaatagcctgggttcaagtctcatcacctctcttctcaggaattcctttcttctcacagctggtccttc

SEQ ID NO: 17704 - DNA, 201 bp, Bos taurus
aaaaataaacgttgatattttccaataagttgcttctatttcttatagcaaaaatgctctatgttacaaagtatgaaaaaagaaaataagaattttaggcactgttcattaattgcatgcatttatatactgcatatttacttcttaaatacatgtaaattctaaagtaagtcattaagcattcatgtgatttaaatagtg

SEQ ID NO: 17705 - DNA, 201 bp, Bos taurus
catgtttttccatacactctactacttataagaaagaaaaagaatgtgtgagtttctccctgaatccttgaagctcttttgaaatgtgatttaatagaaagttacattttacttatcatgtgatatttcatgtttaagggccaagaatattctgtatgtataagagaaaagcatagccagagtgtgttgaaatatgagtca

SEQ ID NO: 17706 - DNA, 201 bp, Bos taurus
tttttttcattatcttcactgctctctgtacactgtatcatggccccagagagctctcaaagaggtcaggtggagcccaggcctctttttatcaatcagagtaatactttgtttcattatctaggaattgtcaaggcaaaaacaaagataatggccacaagaatgctacctcaatgttgaaaacctcatggaggttcagat

SEQ ID NO: 17707 - DNA, 201 bp, Bos taurus
gcaatttcaatttatctctgacagtgtgaatatgacagcagaagctaagaaatatatgcgtagtcacacaaagtgaacacgcgagaacccaaacaccaaacgtatgctcacacagcatatgaactgttcactttttcttaaccaggagactccacttaacaaaaggggagaaattgcaacctagttgttaaaatttctgtg

SEQ ID NO: 17708 - DNA, 201 bp, Bos taurus
ttaagccaacaaaagaggtgatttaagatttaacatccattgataagttgagtgactttttattttcctgtgaaaggacataaaatgtctgtctctggaatgaagtggttttatatttgaaaaatattaacttttgtcacgtggagcttaattagtctatacccacttgaaaagattctcaccaattactcaaaagaagga

SEQ ID NO: 17709 - DNA, 201 bp, Bos taurus
catttgtatcatttttttagattcaggctataagtgatacatgatatatgtctttatctgacttcacttagtatggtgatttccagttccagacatgttactgaaaaatggcatcatttcattctcagtggctgagtaacatattctgctgtatatatgtaccacatcttctttatcccttcatctatcagtggacattta

SEQ ID NO: 17710 - DNA, 201 bp, Bos taurus
tcagtctagtttcaattgaattggcttctatttcaagccttgtaatatcattgtcagatgtaccaataagtcattatttccaggaatgaaacctacaatatggtggcatatcccatcctcttagttacaaaaaaaagactaatacagatggaaagaataaataaatccatagtagccttgtgagtatgtgagtcactcggt

SEQ ID NO: 17711 - DNA, 201 bp, Bos taurus
tccaaggaggggcaaacaggactttcacgctttcccaccactctgagcatccactgtctctcctgttgttttggcacttgattatatttagcctattggtgtatactgactctcaaatacttttcttaaatcacaagcatgtgaggaaaggggcactgcatatgaaaatctctctcgttgagggaacgggacatcagatca

SEQ ID NO: 17712 - DNA, 201 bp, Bos taurus
gggaggggaactgggtgaattcggcttttccccccgaagttgcttcctcttttttgcagataaagtcattctctggctggtgctgggagccccagggagagtgagggtgaggtcccggctctcgggggtctgggtcccgtcctgtgcgcggagtcatgggggtggggaaggtgggaagcggcgaggcagctgtcgagaggg

SEQ ID NO: 17713 - DNA, 201 bp, Bos taurus
ccctcacttttttaaaatgttgaatttaatcatgctattacaacctagtaattgccacttttctgaccacggctcagaactaaatctatcatatttcattcccctttgaagttctaaaggaatttaatcttgaaaagtcatttatcatatccagatacctgacacccatattttgtcaagattacgatttctgccaacctg

SEQ ID NO: 17714 - DNA, 201 bp, Bos taurus
ctagactgactgtccttccccatctgtaccataggcactgtgcctgacaccttcctcaaggcagggacagatgcagaaaatattggcccctgcaggtacatagctccatccctcactgggagttgtagtcaaagacaggcacctgccttacccaaggtcatggcccttcccatgggatacctgtaaccggtgactagctgc

SEQ ID NO: 17715 - DNA, 201 bp, Bos taurus
tccactgtggttctcagtaaaagatcaaattctttactatatctgcccccttttccataaaagtaaactgaacttttgtaaccttgtatgattctcttattactgaggctagttacagttcagctgttaggctaaattttagataaaatgtactattctgttgtcagatttagctgttacaaattttgtaatatcaggttt

SEQ ID NO: 17716 - DNA, 201 bp, Bos taurus
tacttggcatgcaaagagttctacccacagtttttacatcacaagggcaactctaagatgctggatgtactctaacatacacttctgctaaaacaagtattcaaattgtccaatgtggaaaattggtatcaagagcatgaaacaatcaggaagcaagctcaggatatatccatatatttaaaaataactttcttttccctt

SEQ ID NO: 17717 - DNA, 201 bp, Bos taurus
aaagtctgtaaagataagaaatgattgtaactacattgcaagtttaaatgagatcaggactctgggggtgagattcttgtatgtgttagaggaaaaccataaaaaaaatgatgccatttcaaaataatctcaaattttaatcctgccatgctggctttagaggtatttcaagaggtttcaaaattctgagtgaccatcgta

SEQ ID NO: 17718 - DNA, 201 bp, Bos taurus
atgattcccattctatatactgtggaatttctcctggtcagtaataaatatgccttcatttttttcagaggtgttctgtgtcttgaatcagacctaaactgtattggcatatggacatgcttacccagaaaggctcttgtttattttgcttgttatcccaaactgccttgtaaacatggagagggttcagcttttgtaaga

SEQ ID NO: 17719 - DNA, 201 bp, Bos taurus
gccagaagtgaatatgtttcctaaaaggataacaaagaacttgctaggattttccccactccaggatgaaagagtatagagttaggatttagcattcacatacacatgtagctgctgctgctgctgctgctaacactttagtcatggccgactctgtgcgaccccatagacagcagcccaccaggctaccctgtccctggg

SEQ ID NO: 17720 - DNA, 201 bp, Bos taurus
tgttgacttcaaggagcaagggaaaactccaaggtagaagtcacctactttgtcattggaggtgtccaatggggttgtaaagttaccattcaaagcggccgcccaaccccaaatctaactttttgataaggaaaagaaagccttcctacctataacatatcctttgattctactagtagaaattaaatagagagcaagaaa

SEQ ID NO: 17721 - DNA, 201 bp, Bos taurus
cacaaacacggtcaatgagtttttccataataaggtatggattaaattattgaaaataatttctaatgcagaagtagtcactcccttttatagccttatttaaaactttagaccataaaataaaagcacattcataaaaacacacatttttaaactatgagagaaaaattatttcacaatttgcacataggtaactgatac

SEQ ID NO: 17722 - DNA, 201 bp, Bos taurus
cacattgcaccaatggaaactaattttaagattctaaaacttgtctgtcatataacaaatatagttctcagtgaggcatagttataagccaagttttgatgtttaaatattacctgggggaagaaacttttggtatagcctttttttgtgctcaagaatatcaagaaatttaaaccccaaaattacctggatagatttact

SEQ ID NO: 17723 - DNA, 201 bp, Bos taurus
taaaaaaaggtggaggataaaatgaccaggatcagtacagcagttcttcattctctacattattggtgcttcacaccccttcaattataaggatttactccaaggagcttttgtttgccttttaaagttctggatctttctgctgaatattactgttgccttaagaacaatgtacagttgaccttgaacaacatgggtttt

SEQ ID NO: 17724 - DNA, 201 bp, Bos taurus
tgacaatatcagataatgatgaggaagtagaacaatcgaaactcttcacacgttcctggtgggaagtagtccagcaatatattttaaaagggatcatgactctaagacacaaactattttataaaaagttatgtacaagaatgttgataatagatttttaaaaataatttcccgaaattggaaacgactcattgaccatca

SEQ ID NO: 17725 - DNA, 201 bp, Bos taurus
ggatttcatttattacctatttcttttgttatctatttcctttcaggaaaggattaacaaaccggcataggtacagcatataataactcctgaaaataacgtactcttattgcagaggacttttatgaaaggcttttaggttgtatatattgttgagctccaatttattgttttacttgtgtaagacttctgagtggtaaa

SEQ ID NO: 17726 - DNA, 201 bp, Bos taurus
atgaaaacctagattaaataagttggtctctaaagaaatataaattaccaaactgacccaataaaagatttttttttaaacaagcaggccaattgccagtaaagaaattgagaaggttatcaaagattaacccctcacaaaagcaccaggctccatcaatctcactaatgactgcattcaaaacattagatgtatttcaat

SEQ ID NO: 17727 - DNA, 201 bp, Bos taurus
aagattccctgcaatatcaaacaagcatttgatttggggaggaggctggatggaaaacatttcaaaaaatggatgttgatcaggtatgagttaaagtggtcgcttctatccttgactactctttgtctttttacatctcctcaaaattttcagcttcctaataaaataaaattaaataaaatctgatgggagacaattaac

SEQ ID NO: 17728 - DNA, 201 bp, Bos taurus
tttgttgtactatgacaatttcaactgtagtactatgctattctataaataagtacattgcagttactcttgggaaagttcaaacctgatggaaatcctttcttattgtatatagaaacccacatggttgaatgtgacactgttcctatcaaataggattagttcattcgtgtgagccttacaggagcaaggatcttttct

SEQ ID NO: 17729 - DNA, 201 bp, Bos taurus
gccccatggttggggagcatgagtgaggaggggacttggacacaatccatacaaagagctacaatccatagatttgggctccattgcaactctccgcctagacctcttgttctggccggggccctgtatcctcagcagatttgcctcttccctgggtgcctatgagtgctccccctcagtcgggtcactactgaattacac

SEQ ID NO: 17730 - DNA, 201 bp, Bos taurus
acatagagaggccatcccatcccaagagctggcagtcattactaggtccctagagttcaatttggctcccagccaggtttactcagtgtttattcccccaggagtgttttgaggtgccccagggctggtctagccggccccagattgttattgtctgatgtgaatgaggggctgggtccaggcaagatccaagccaaacag

SEQ ID NO: 17731 - DNA, 201 bp, Bos taurus
ggagcacatggaggccctgagtatatttttgaactaattgtatcaagacctacatatctgtcctggaaagagcttgaaggttcttcatctgaagttatgcgtgttcttgagatatttgttgaagaaaaacgatgttcacaatgtagatgtatatttatatatacatatatagtcttcccaggtggcgctagtggtaaggaa

SEQ ID NO: 17732 - DNA, 201 bp, Bos taurus
tcatatgtatagtaacaaacatgattgctgctgtttttcttaaacaacagaaatttattgtgtcacagttttggaggccagaagttcagaatcaaagtattcaaagtattcctttcaagggctgtcaagcacagtttaaagaccccctcatccaagagctgatggcagaagttgtctgatggccacagcccactgagagaa

SEQ ID NO: 17733 - DNA, 201 bp, Bos taurus
atatgattcatcaagaattctacaataaaatagaccttcttttccactcaacataaacttgaaagttatttgaagataatttgcctccaaatttggagcagtgtgcctgaatggaacatatcctatccaacatggttgagggttatgtctgaaaaaagaaaaagaaagaaataaattttcaaatattttagaaggatcatt

SEQ ID NO: 17734 - DNA, 201 bp, Bos taurus
cagagtcggacacgactgaagcgacttagcagcagcagcagcaactacaccattatacaactttgaagtagatgatcaatagtagttgttaaatgaattagcagtagacgagttataagaggcagcgaatgatgaatccttcaagtaaaataatttttccttgaaattttattaggattctcgaatttctcattgtcttta

SEQ ID NO: 17735 - DNA, 201 bp, Bos taurus
tgagcaactaacaggctttgcaacacacctttatattttatggcagattttggtctttatagcagagtttagtgaaaacttttaatcttaaatgttaaaaaaaatgtttatctggatctatcctagttgaaagcagtgtccttcataagtattattatcagagtttgctaattctgtagcccagtttatacatatcgattt

SEQ ID NO: 17736 - DNA, 201 bp, Bos taurus
cacacatccaccctgctgactgtacgtactctcgtgaacttcatgccaacaacacctatagtaggctaaataatggcctccaaatatatccaggttctaacttttagaacctgtgactgctaccttctttggcaaaagggatcttatgatgcaaagattatcgtgggtcatctgtgtgggcccaatgtaaccacaagtgtc

SEQ ID NO: 17737 - DNA, 201 bp, Bos taurus
ctaatccaacatggctggtgttgatatcagaagaagactatgtgaagtcagggacacagggagagcaccatgtaaagatggaggaggagaggagagtgataggtctacaaaccaaggacggccaggatggctggctggcaccgaagccaggagggaggcatgaacagatcctccctcacaagctctcaggaggagtctacc

SEQ ID NO: 17738 - DNA, 201 bp, Bos taurus
tgtatgtcacaagaaacacaggaacatgcccaaacataacactatagtgcggtcttacgagagcagggttttggatggaattgtgggcctaaacaacctattgatttgaactcttacaaacaaacttaaaggcactagaatttcaatctgtttgaactgaaattacataaatccttatttggcctttttttcctttggttc

SEQ ID NO: 17739 - DNA, 201 bp, Bos taurus
ccactgtgaggacataatgggctgcctatgacctagaacccactgcttactcttcaaagagacacgtgcgtctgatctctgtggaactaaagagtggtagcgatgagcagttccattaaatgatagtagtgggcttcctttatgattttgtttgtatttcagaaaactctggtccaagggcttctaaaacttcatagaaac

SEQ ID NO: 17740 - DNA, 201 bp, Bos taurus
ataaaaaacagagagagagaatatttccagaagctagaataattctttctgtggaatttgtcttcaactgaatctctttcactttctgccagtgaaacattatatatcaaagaaatggacacaaagagtgaaaggcagattatagaccttaagatgtgggattggatcactagcagtgatgagaagcaatgagaattctct

SEQ ID NO: 17741 - DNA, 201 bp, Bos taurus
tgctggcaagtggggtggtttctgtggccaggggcaccatttgtgtcccctcctgttccagggtaactaagcaagagctctaactaggagcattgtaggacgcaagttggggtgctcacagagttgtcagatttcataatacagtgctcagtggcttggtttgcacttttacatgcttaatttttcctacaagaaagtagg

SEQ ID NO: 17742 - DNA, 201 bp, Bos taurus
gcaaatgtgattaaataaaggctcttaagtggggagattatcctgaattatcagagtgggccccaaatgcaatcccatatatccttataagagggaagccgagggagatttgaaaggcagtatgaccacagaggtgaagacaatgctgggagccacgagcagctgaaagaagcaatgaacagcttctcccttagcacctca

SEQ ID NO: 17743 - DNA, 201 bp, Bos taurus
agcaaaatgcaagcaaaaattaaaaatacttctttagcaactttgcttttaaggttttcatatcagatcattccctcttgactgtaagctttatttctgcattaataacattttatttctttctacttactaggctgtcttaagcaatatttggttttgctgctttattggattgtagggcatcagtttcagtttatttct

SEQ ID NO: 17744 - DNA, 201 bp, Bos taurus
caatcccttcctgtcacagcctctctctcaaattcagaccataagttgaatagagcctctgaaaataataaatccattttcagttagaagataaacaacccggtaagcattagaatgctctgaggccatgtctttctccactcagaaaacattcacttcttgtttattcagaaataaaatggcatccttggaaggaagaaa

SEQ ID NO: 17745 - DNA, 201 bp, Bos taurus
acttagcactaactacatgcgaaaggacttgtagaccttgagaagaagtataagctggaacaaggaactatctgaaactgaactgaccctgtaccatccgcgacagctccagagaaactcctagatatattttgctattatcattttttaatcttttttattttaagtcctatattattcctttaattttcatttttataa

SEQ ID NO: 17746 - DNA, 201 bp, Bos taurus
gtacagggtttggggatgaacagctggcacaccagggtttttagggcagtaaaactattcagtgcttacatgctacatttcaaccattttagtctgccttaaaggtgaacctaggtaccatgatgcacatggtgggaaaacaaaacaaaaaaactattgacagatacactatcaaatctgttttctttaacagcttctaaa

SEQ ID NO: 17747 - DNA, 201 bp, Bos taurus
tctgggcttattccactgcatacatctctctctttagtccaaatatgaatttagaaaatctcgtgctatatagtccctgtattttacacccctaagtctgcaatttcctcatcttaagtgtcatcatcttcagacatcaaatttcatcagggtcaatgtgaaattttacatacctcaacaagacttttcaacaagtctttc

SEQ ID NO: 17748 - DNA, 201 bp, Bos taurus
atttcctcaatcctttactgagcttgccttaaaaattcctgatatgatcaattattaatttcccaaaagcttggtgaggtgaggtttcaatgttacatgaggaagaatttcagtagtattgtatattttagtagaggattgaaccaaaagacaaatgattgataataataagtaatagaataataggtaaattaaaaatta

SEQ ID NO: 17749 - DNA, 201 bp, Bos taurus
gatatgtaatttacattgcaattaagaaatatatctatagaatactatctgaccctgtataataaatttatctttctttggatttgcaattgaaaaaaaataattaactgatgcatgtacaagccactccaattgctgggaaacactgcaagttagaaacagcaagcagtgattctcccttgaaggtttctgaaagaatat

SEQ ID NO: 17750 - DNA, 201 bp, Bos taurus
tatcaagttctagtgtacctaagtcccctacaatgatttatatttctaaaacaaagtacatctcagtgtagcatatgtttatgaggttaaacattacatgtatgactatccaacataatatctattctcatattttgcttttgtgaactagaaagttcaaatgaagaagtatagttatcaaaatgactaagccttagggta

SEQ ID NO: 17751 - DNA, 201 bp, Bos taurus
tgatagaatcacatttcctccctgtggaacatggaaatacagtgagatagtgttcctatttaccatctttccccttggctatgtccacattagagaaacacagattgttacaatttgattttatccttttcaaagctatattgatgttttcatataagctactgaacacaacacaccacatcaaagaaagaaaaattgact

SEQ ID NO: 17752 - DNA, 201 bp, Bos taurus
tctttaatcttatatattccacagttatgcttctccaaccaagagttttcatttttctctattatatctttcttaccagtaccactagaacattttcttcagaaagttgtgttactgtttaatataaacaagaacaaaacaggccttgcaatggtgaagatggtacattttcttccttataagtaagaatgtggtatcact

SEQ ID NO: 17753 - DNA, 201 bp, Bos taurus
ctgtggttgaatatagcattagctatagaggacttggcaataagctggattgtcagtggcagcctgaagaagtactgcttattgaggagaaacagagaggagctagaatgaggcatgaaggaaaatgagaaaataacagggaaaatcatatttattgcaggaaaagatgtgacaaaacaccaactcttcctctctccctca

SEQ ID NO: 17754 - DNA, 201 bp, Bos taurus
taatttaggacagccagcagcagcagacaggccaggaatcctctacttctgagcatcctccaacattgatcagccccaaaaactccaccagggcccctgccgaagccccaggcagcacgtggatcaacacccagtgactgatgcaggtttacacacccaagtgggacaaccagggcaccaggaatgacctctggctacatg

SEQ ID NO: 17755 - DNA, 201 bp, Bos taurus
ttccttgaatatcataattttatatccctttgtcctctgtgatgagaaggctctcctggggttgccaagcagctctctccccatgtcacttccacatcatcacttcttctagcagacaatacattttccacggactgaacaaaatagttccttttccgtacttttattgagaaaaaatggctagaaacataatctttcatt

SEQ ID NO: 17756 - DNA, 201 bp, Bos taurus
cccatatgccagttaccagacttctttatgcagaagaaaacttgaactctaccttgttgaaagcaatgaaattatgttatataaaatccattgagcctcaattgctcacaaaaatgttagagcaacaattaattttgtttgtaaagactactaaaaataatactgactcaagtgttctagctctgacaagtgcagactagg

SEQ ID NO: 17757 - DNA, 201 bp, Bos taurus
ctttccacagatagcatacatggggaaagcaagagaggcgatattcttgagcgtgttacctactgcgagttacctgtgcctttttctgtggttcagactgcagctgacaacacagtgtattttaaatcaataaagggggaccaaccctcttcttaatgcacattgtttaactcttactgatttcaaccatctcatactctg

SEQ ID NO: 17758 - DNA, 201 bp, Bos taurus
gaatctaggtaataaaataaaatctaaccttttattcctttgtacttagtccatctgtgcttgctcccggaccgcgtgctgacggcttgtatctggccctccacaccagagttcctactgccaacggcaagacttcagccaatactgtggctacgagagccacgtgcaggcgcagcagttgaaggtggcggtgaggacggg

SEQ ID NO: 17759 - DNA, 201 bp, Bos taurus
gactggatctgatttaaacactggactgggtccatctttaaaaatggtttgggtccagaactaaactgaggtcagactaggtttgacttgagctgaagtgagtccagtaagggccactgctaatgggaatctcagaagctgaaaaaaaaaggggggaggggtgcagaattgatgaaccttggttgagcatttcaaagctgt

SEQ ID NO: 17760 - DNA, 201 bp, Bos taurus
ctctttctagtgttaagcctgcttagatgtgatgcaatttttcttcattggcccattgagactatggggactttagtgtggctgacaccttaagtgaggagggtcacaagaggtggaggggcctggaggctggcactgtagcccccagaaggttgtcagtcctctttcaaggcatcagaatgaaacttctctgctagtctc

SEQ ID NO: 17761 - DNA, 201 bp, Bos taurus
tccagactttaccctatgtacctttaccctttgcttattctgttttatatcctctagttgtaaaaaaaaaaaaaaaaatacagtcatgaaggtgactatatgctgaatcctatgagtcccaatgaatcattaaacctggtggtgatgttggggacatctggcacaccagaattggattctggaaaaaaaaaaaagaggcca

SEQ ID NO: 17762 - DNA, 201 bp, Bos taurus
ttcaagtttggccctttcttggtctcctttctgcggcttagactcagaaagaagcataagcccgaaccagggtgactgggcttgtacctcactcagattcactgaaccccaagaaatggcctcagacttgtgggaaccagacaggcagccccatcccacgctcggtcactgcagactgcttcctaaaacagcaccaccctc

SEQ ID NO: 17763 - DNA, 201 bp, Bos taurus
ctttgcctttggaaccaagaggaatattccccagaggcaacggaaatacttgtaacactggaagttatggtcacaaggattatttctggggccatgtgtcatctctgcttctattaacttgtcaatatagctctctctctctctgttcctgagtgctgaccagttcctacctgtcggccccaaataggcaataccctaggt

SEQ ID NO: 17764 - DNA, 201 bp, Bos taurus
aatcatctcggttggaaatagtgacagatctctgagttttcttaggggttagcaaggcccaccttggccatcacctatggcctttaggggagtggaggataaatgcaggatcaggaggctcgctctcttgctgttcaggtgctgtgctcagggccagacgtggggacccagaggcattacaatatgaagtgaatctgatat

SEQ ID NO: 17765 - DNA, 201 bp, Bos taurus
tcatctacatttatctcatactttgtctccataggccctctgctctggttccatgtttctcacatctatagactcattaaacaaagtgttacctgtatgcgattttgtttggcctgcatgctgtttaaaacaattaaatttcaagtatctttaaatccatattttcttgacttgcctgatgtgattttgtcattctctcct

SEQ ID NO: 17766 - DNA, 201 bp, Bos taurus
tgcctgtgaggaagacatggcctggtttgtagagttgtcctgtacagacattttatcttggagtaagccctctttctggaatattctcgagtatcatatgtgcatcctgcagttctgttgtataccagggctaccatgtgacacctgtcagacaccagtcctggggtgcctgcttcttcccttgaaaccctcttcctcctc

SEQ ID NO: 17767 - DNA, 201 bp, Bos taurus
tcctgtcacctatgcaatcatctttatacatcattcaaattgctcatcatatttcttttttctctctttcctgcaaatatgactttgaagcttttgtaatcaaattagtgatctcctggaatcacaatttctttaaactttttgaagtgatcttggaccctttgcagggaccaaattcagtgattgtaagaatataatttt

SEQ ID NO: 17768 - DNA, 201 bp, Bos taurus
ggaaagaacttcacattttcctctgcaaaggtaagaactatattctgttcagtctccaatcaagctttttatgacatatggaatgactaggttccttttttccacagaggccagctttcattaatcaagtttctcaactcctatagaagaaagcctgacacataacttaaacaaatggttaaactaaaaatatgatgtggt

SEQ ID NO: 17769 - DNA, 201 bp, Bos taurus
atggatcaagaaacatttacgtgtattgcttaaaagttgtagtcaacccctagaagaaaggagaaaaaattagcaacagatcaagaacgaaagaaatggaaaaaggacttgattcttcatatttcatatttgggagtaaatagataattatctaaaattgacaaattaacaaatcaagtttcaaatatgtaatttagtgtt

SEQ ID NO: 17770 - DNA, 201 bp, Bos taurus
tgcctggaggagcagagctcttccacatgggggagcacacacagcccaggccgcccagttcctacagacaggaactcacagcagcttgactccacaacagcaccctgttaatctctgctctgagagcttcaaccagaattccagcccagaatgaaacagaggcgggggaggtggagcccatttctccatctggggttctag

SEQ ID NO: 17771 - DNA, 201 bp, Bos taurus
caacattccatcctcaaaaaaagaaaaaaaaaacttaaaaaatagaaatatatagatgtgccataaaattcaaaatgtataagatataaccttataaccagattattgtgtatcctttaagagatcttctaggcatatacaaatatataggtaactatattcttttattttcttataaaagatatagtaacataataaaga

SEQ ID NO: 17772 - DNA, 201 bp, Bos taurus
tcagtggtcagaatcctgcagtaattattactttgagttaagcattaatagtgtgtgattaagtgaaaaccattatctttaagagataacatgccaaattttgtgtgattattattaaagactttgctttaatgataatatttttgggcttatcacaaatgataattttaaaaataattttattttgtatttattcgtggc

SEQ ID NO: 17773 - DNA, 201 bp, Bos taurus
aaattagtctatttaataatgttctgtcccttttcttctctcttttgtgatatttaccaattgttctcgaatgtcaccatctggatgaaacactgaataaaacccccaggttgggactctgtccactaactgaacttctgagccagttcagttcagtcgctcagtcatgtctgatctttgtgaccccatagactccaacat

SEQ ID NO: 17774 - DNA, 201 bp, Bos taurus
aatcccattactaattccccgagccatcaagtctcccctatggcctggatcttgtcctgaaacccaggtctcctgttgaaataacattagacagcagccactgcattggcaggcaatggttttaaaataaaggggggagaaagaaggggaaaatgtgcacttacagagttggctttaattattactttaaagtttttcagc

SEQ ID NO: 17775 - DNA, 201 bp, Bos taurus
tagcatgtgaaattagtgcaattgtgttttgtaatgtagaagttactataaatgggtgcattttgatgatttttaatcaagatcatttgtttctgtgggttcatgttagaaagtatttaggtctttgaaaagttttgttatgagagattagatatctcaatactttgtgtgtgtatgagtgtctttgtgtgtgtgtgtgtc

SEQ ID NO: 17776 - DNA, 201 bp, Bos taurus
ggaaatgtaccatattcaccagccccctcacattcaacaaattctgtcaatatctggatatttctaaataaacagaccaaaaatatgcttctttaaagttggttttattctagttgtcatctgggtgtttgaaattatgaagaaatgatttagtagcaaagatatatcaaatacaaatgacaattaggacaactgtaagat

SEQ ID NO: 17777 - DNA, 201 bp, Bos taurus
atgaagactctatagacacagaatcaactggtaggattgattggactcaaaatagtgcatcagaaaacccaatctgtatcaattcagcaggaaaaaaacatagcaaacttctgaacccaaaacccacactatctcctgtaaaattttctaggtgctatattttcaaactgaaaagatttgtagagcacagctttcatgagt

SEQ ID NO: 17778 - DNA, 201 bp, Bos taurus
aaaagagggcccgattcagctctacaaataattttctcatctctgcagaggacctgatgcaatgaacctacaaccatcatctttaaagtacgtcctctgtgcatagaatggtgtttggcccataccaagtgttcaatgagtatttgttgactagacaggaaatttttttggaaccacctagcatgaattggttcttttggt

SEQ ID NO: 17779 - DNA, 201 bp, Bos taurus
tcaaggattaaaaagggttagtaggacacctttgaatttattataatttgcccattttcattgtgaatagaggcaagctggggcatttctcaagctcatacaggaactagatgatgaaaaaaaaaaaagtatagggaggcaagtgaagatttgtgagcaacacaaattttctcagagcatagggaggagacctaggaaact

SEQ ID NO: 17780 - DNA, 201 bp, Bos taurus
actttctgctgcattttacagttactccccactgtgctatcctcagaggtgataaaggagacctgtttactatcagacttttcccagcctccatcttcttattcccttcgatccatgtacttgaaagctgtgattgtgtcttaactgaaatgaatcttataaggaatatccacattctataaggaagtttaaacacaacca

SEQ ID NO: 17781 - DNA, 201 bp, Bos taurus
tagagacatcacgctactgtcattccattcctttctataggcctgggacttattttccctgctgaagtagtcttttggatctctaatatcaagggcaaacatgttacttgacagcattccacacttgtctgttgggaagacttacaccacctgattctctctcctgctcctggtccaatgttgacctccaccacaggccta

SEQ ID NO: 17782 - DNA, 201 bp, Bos taurus
tttcttaaattatccttttttttctcctaggattttatatgtaataggaaagtatttactaaattgacctttctctaaaaatgcaaagtaattgaaaagggcggtgagttttaacctgagaaatttcctttcgaatctctcaagtccaggtgttatatattctgaattattttttaaatggtaactaatatccttactgtt

SEQ ID NO: 17783 - DNA, 201 bp, Bos taurus
cccaagagacacaacaagccccactaatattcacagaacaggtactaggggccaagttccctgagggggtctgatagcatgatggccactgctgcttctcgccttgccccctaagcagcataatcctttctgctctgtccatggagaagaggaggcagggcctctcctattgtgtcctactccatgctaactcaacattgc

SEQ ID NO: 17784 - DNA, 201 bp, Bos taurus
cacctgagacactatagaagacaactaaattatttcctgagggccatctcacaatccccttgatatggtgtcttggccagattttcaattgaaggtcattaacactactttcccaacagactgaacagactcttctttgtcatgaagtcctcattctcagccaccaccacctcaccccgcagcagcccctacttctcaatg

SEQ ID NO: 17785 - DNA, 201 bp, Bos taurus
aattatacattattaaacatctcagcaattttaattccatttttcacctagttttacttagtttttttttttttcatgtaaaatctaagtcatagtaaaagatgtgtgtattctttccattggtcacttaacatcttcaattaggctattttttacaagctgctactagtttatgaaatctaattaagtgttttaaggaaa

SEQ ID NO: 17786 - DNA, 201 bp, Bos taurus
gtcagcttttcatttgcatctgatactagaacaccctggtcacatactcattacttcctgactgttctgctcttggttctctgtcttcttagctgagttagttactggtttatttttatcagattttagtggtagctaattcttttcaagtgcttgattttctacccagatcttcttgcagttttgagctttcatttgacc

SEQ ID NO: 17787 - DNA, 201 bp, Bos taurus
aaagagaaaaagtcaataactgtttctttaaaaaaataataaatcaaaatgaattttaaaactctgcttagaggtgagcaactgctatatactactaggtattttgatagttgatttgttcctttagtatgcaaattttaggtttacaaagatctacagcttttatttaagaaatgtgcctgaaggctagattggtaagct

SEQ ID NO: 17788 - DNA, 201 bp, Bos taurus
agctcaacgtgtgaggttgggacaggagaggagcttgtagatctaggtggagatcagtgcatttgacatttcacatcctaatttaagggacttgatttttttacagtggaatgagttggctggattttgccttcttgatatgtgccttttgtagccaggtatagaatgaacttgttgggaagtcaggcttgtaaataagaa

SEQ ID NO: 17789 - DNA, 201 bp, Bos taurus
gaaaatggggatcaagttgaagaaaagtagaatgctttgaattgagagattcagtcagtggaaaaaggaaaagaagactgatggtttcacttggtacttctggtagggtaaagaagagaggaaaggatgtgggctgtgtgggtcaggggctggctgattaaatgacagtggaaatgctgcttactgccagcgtggggacag

SEQ ID NO: 17790 - DNA, 201 bp, Bos taurus
agtgtccacaggctggggctcatggtgggagatgctacaagggaagtgagctccctagtcgcagagcggttaacaggatccttgaagagccgacatttcctgttatgactgagtattgtcagaccctgatacaggaatattccttgaggacaccagtgagctgcttgctagatattgactacatcagactcttcctacagt

SEQ ID NO: 17791 - DNA, 201 bp, Bos taurus
aactgaaaatccaataataaatcaccactgtgatttagcactaatgctggaattcatatcacgaacgatgtgacagcatcagctgaaactcaaacaggtcgctgaaaggtgcatttcatcagcaagcaatttaattcgtatcaaaggaattttactccaagtgagtggcaactagttacttttgagagcagttaactgttg

SEQ ID NO: 17792 - DNA, 201 bp, Bos taurus
cagtttgtgtgttaacaattctgttattcagaccattgtgttgaatcatatcaggacactgagaaatacatgaccatgctttttttctggaagaatgtatcttgtctttcactgctgattggaaatagaggtttttgtaatgaaagcagataaacagcataggttagagataatgagggcaggcaagaaaggtgtgatttc

SEQ ID NO: 17793 - DNA, 201 bp, Bos taurus
aaaataaattttatacatttttcacagtgacttgactctggctgcacaagtggaggctccaaggtgaatgtgtgcatctgagtgacaggctgctcagtgacagagggcagggactgatggtgttttgcttcagaaaaaagaacagttagggcagctgtgatgactgaatgcaaaaaaagaaaaaaaaacaaacaaacccca

SEQ ID NO: 17794 - DNA, 201 bp, Bos taurus
gtggttaaagctagaagaactaatgtgtatgcccaagaattcttttccagtaatttgtcaatggtttcctttggcctgggatgttttaacccagttaacttattctgtttaggcagtcaggttggtttaccagctgatagagagaaagtactcactttcagaaacctgcaacgtgcaaagcaacttaaaatacataaaaca

SEQ ID NO: 17795 - DNA, 201 bp, Bos taurus
ggtttcaagaatgggtgattagaaatgtgtttctaatctcaaaaataataaggaaacaaggagaaggttgtttgggggtgaaatgcttatttattcagaaaggacgaatcatcaaagtagaaatgtccggtgaacatttggaaataaatggtgagtgccaacacaagaggaaaagatttgcaatagagattttggaattat

SEQ ID NO: 17796 - DNA, 201 bp, Bos taurus
agacattctttctgcttgatttttccttggcccactcaatatgtgccccacacaaatccacactttctggtttgttcccagttttctgtaaacaaaaatgcaataagaagaaaaagcacacaacactggtgatgcatgtcagaaaaaataagttattgatttaatagctatatattaatggcataaaggctttcttctttc

SEQ ID NO: 17797 - DNA, 201 bp, Bos taurus
agagcctcatgatagccctgagagaagaagactccttactactgccaaagaggtccttgaccatctttctccttggagcaaggctacttcttagactgatctgggctgttctgcaatgccaaattggggggccttttcagccttactttcccaagatggccagcaggtaacatcatccattgatgggagccaattaatgca

SEQ ID NO: 17798 - DNA, 201 bp, Bos taurus
gattaaccaaggagtaaaaatggaatgcattctgaaatatgtatgtgtcaatctgtacaaattagagtaaaatggtattaggattttgttgccttcttacgtcaagccatactttcatattttcagaaagtatagtagcttacagctgtagttaactaaaagaaaatatgtttatgaagaatgtgttctgttggaaaagta

SEQ ID NO: 17799 - DNA, 201 bp, Bos taurus
atcaaatcatttggaagttgtggttggaaattcctagagaccactggtaatggtgctaaatttcttttcattagttccattcattagcttcaatagctgaatatattaactagatctcacttatgtattaatcccataacttactaatgttaagaatgtaatttgattgttaatatatatggctttttaaatatatggctt

SEQ ID NO: 17800 - DNA, 201 bp, Bos taurus
aagaaaatattaagaactcaactcatctgatgagtaataaaattccttaagcaggagaaagatggcaataaatccaaacagatcatcagaaaaactccgcttaattttttccattacttcttgaacatgatcaactaaacattaaaccaaaacctcctgtgtggatatagttcattgcatataaatatttagagtaacata

SEQ ID NO: 17801 - DNA, 201 bp, Bos taurus
ttaaatctttcacatcagtctccttcaagcacaggataaagcatgcctccagatattgagaaactacaccatgaatatatgcctggcactagaaaatgatcttctggcctatttggtgtagctgtaatatatgtcttaaaaaatgtggaaagagaagagaggcaggttaagtagtatttctagagtaatgtgctaaggcag

SEQ ID NO: 17802 - DNA, 201 bp, Bos taurus
gtacttgatcagtgctgctcaactaactggtgataaagcaggaataagaaccttggtcaaatgagatattgcccagtgttcttataccatatgaccaacctcttttttatatattgatgaaaaacttactgtagttttaacatattaattttttttcattttcctagacctaattttcataattagtgaataaaaattaaa

SEQ ID NO: 17803 - DNA, 201 bp, Bos taurus
attatggcatgacacatctgtagaacatttaggagactatttttttttttttaatgaggatttgtaataaactcacattcctcctcttcccacatggaagtactttagtgctatctctagcaagtcatgctttgccatgaatcatatactgtcttgatttcttcatttgtttagttaattagtacttcacctacctaactg

SEQ ID NO: 17804 - DNA, 201 bp, Bos taurus
tgtgattagataggcctctataaaatacttctaaaacttcctcaattgtgtaaatgtttctgaggtatatgttcaacaaaaaccactgtcagagataatggtatatggtagagacaaaggcccaacttacacctcaacataggactggtttatctaggagactgagggattattatactcaaattaatttctttgagtaag

SEQ ID NO: 17805 - DNA, 201 bp, Bos taurus
atgtcgcccttcattttcttcacaggtgtacatacctcctaatactttgcaaatattggaattaaagttgcactgaactcgtgttaatctcagctcaatctccatgtcctacctgaaactgcatgctaccaaacacagcacacttgtgaaggaaagcagttaaaaatgtgatatgcattgaaatgctacagttggagaaat

SEQ ID NO: 17806 - DNA, 201 bp, Bos taurus
ctaatgaaaatacaatgagtatatctgtttgattttacccagtgtaaaatacttaatgaaaaacaacttaaaaaagaggcggtgtctgtcacagagaaacgtgctaattttaaaaatccctaaagaaagagctcaggtgggacagactaaggacaaggtagacaggaaaaaaaaaaaaagacttccttattcatatattca

SEQ ID NO: 17807 - DNA, 201 bp, Bos taurus
gccacaccattatctttctaccataatttaactttgaagatataaatagtaccaataggcattctctgttgaagattaatagccattagagatgtaaatacagtggagtgttacactggtgcacatagaagccactttaattgcataggtaattaacatttccattgttcttctcattatcattttgttccagttgaaatg

SEQ ID NO: 17808 - DNA, 201 bp, Bos taurus
gtgttgctaacagaagcaaatgcagtgtaacactggcaggcatgctggctgcagacattgaccatctgctcaacacagacctccaaaagatcatcgtgtcgtgtgatagataggcttgacactttcagtattctgacaaaccctgtaaagcaatgcagttaatgataacaacaaaaaaaaagacaacagtgtaaatccaga

SEQ ID NO: 17809 - DNA, 201 bp, Bos taurus
tcttacaaatattccttccttttttaatatgccactttatctctttgatgatgtacgaaggatttcttcatcctagtctaaacaatgtaaaggttaaatgagcttctggaatagttagataagctaaaaagaagcagagatgaatgaacgagatcataaaataaggttttaattcaatgagaagaccttggaactataaaa

SEQ ID NO: 17810 - DNA, 201 bp, Bos taurus
cactgagaaagccccaaagagagctatatgcattatcaaattcacagttgcattctttattcaggaatattatattgtgacttagttctagtacaccaagtcattatcttgtggaattccaggtatgaaaatgagagcataatgaagtgattgcatagggatgctcatcctgagattcgttataaaaagaacatgcctttt

SEQ ID NO: 17811 - DNA, 201 bp, Bos taurus
cttaagatagaagtgtgttgaactagtgttgaactagtgagttgaactagtgaggtcagtgggctgcagccctgtgagccaaactgacagagaagtaaatgccttgagatttgggtagaacttgcctccttctacttcttggccatatgagtgacctggcagcaataatccaatctttgattatctttgcaatccagatag

SEQ ID NO: 17812 - DNA, 201 bp, Bos taurus
tctataattcaattaagtaattttaacaactggagatcactccaattgaaatcagaggaagtaaaaataaacctttgtgtgcagctttattttcaacattcgatacctgacaatagtcaagtgatctacattggtatgatacattgtgtaagcatttataatacttatgaagaattcatagcaagaaaaattgctcaggct

SEQ ID NO: 17813 - DNA, 201 bp, Bos taurus
tcctcatatagcctttttagacacttggcaggatgggcatatgagctcctgctccccatcaggtctccactgtcaccactgtggaggtggcctcattaccgctggattacttgaaaatcctgattctccactgtgcttcctttgacatcactatggaggggagggagaggggacaccattactatgggtgggagtccagac

SEQ ID NO: 17814 - DNA, 201 bp, Bos taurus
tttcaagttcatttctttgttaatccttttaacattggtgataacattttaaaacgtgtaatttataaagctttcatagaagcagtatatactgagagaaactatcaatagactaaaagagggagactgtttctcactacctgctttacttgtattatgcttgtattgtcatactaggctattggtgcagctgtataatct

SEQ ID NO: 17815 - DNA, 201 bp, Bos taurus
agtggcttttatttagtaactttttatttcaagtacagatgacgtacattgttttggttcttaacaaatacattcatttcctctgagaaatttcagggaccgcattttgggtaactatgaaccttattacagtgcaagttatttttgcatcttgcattgagctttagagatgaaccatatctgacatcctccttaatatcc

SEQ ID NO: 17816 - DNA, 201 bp, Bos taurus
actgtcattttggtttttttttaatggcaatcgacacgctgcctcccaccttatagaattggcaaataggtacgaactgacagggaagtaccttgtcttcattgttccagtgatgtagaactcgcaggcaatgttttggatgccaatgacaaatctaaagatagagacagaaatagtggtgatgataatgatttcctgaag

SEQ ID NO: 17817 - DNA, 201 bp, Bos taurus
cagaataatggttgtcttgagaaggaataataatggaaaggaatatgagggggacttgtatagtgctgaaatgttccatggattcatctggtgatggctacaagattatctttgctttgtgtgaatttgttatgatttgagcttgtttatcagttatgcaatatttcagttcagttcagtcactcagtagtatccaactct

SEQ ID NO: 17818 - DNA, 201 bp, Bos taurus
ttaaaatgcagatgccaaccccagagggtctaatccattttaagaaactctctgaggtcatcagtatgtccattttgtaaaacagtgtcctggcctcttccattattgcatgatttcagaatggaaatactggtttcctccatgtgtgctgctgaagctcattatcatggtaatgacagtggccaatctaaaacttgccca

SEQ ID NO: 17819 - DNA, 201 bp, Bos taurus
ataaataaaaatctaactgtagtttgtctacgagtgaggtaatttgttttcaaacttttgtcctagtttttattttttatctaattttatacacgtcagcattactcttagaactgtgaaaacaaactaaccataataaatcattaagtacttattgaaaatacaaatttcttcacaaatgccccttttgtcattttataa

SEQ ID NO: 17820 - DNA, 201 bp, Bos taurus
gcaaaagagtcagaaagatagagaatgaaatatcattattattggaaagacaggaatggtctttccaaaacagacacgctgagggctgttgctttatactttttagtcccaaaatagggaatgagatgggctttcagaacttctagaaagtaggtcttcgtctgacccctgtgttggtgtcccctgaaacaggaacagaga

SEQ ID NO: 17821 - DNA, 201 bp, Bos taurus
aaaatagaaagctcaataacaatttctaaccctttaattgcttagaaatacatttaatagagtctatatgagagaaattattaaatataaacaaatacgaggtaagacagtattaagcgaaattgcattccactgtgaatcttaatgcttttattgtgttttgtttggggaactagattaaattattttaaagtttagatg

SEQ ID NO: 17822 - DNA, 201 bp, Bos taurus
gtagttgattgccggaatgtggtatttttattttaaattttttgaggaacctccatagagttttccatattggctgtgccaatttacattcccatcaataatgcacaagtgttctattttatcctcatctttgcaaacactgattattattattttttttttttaagtagtcattctctcaggtataaggtgatttctcac

SEQ ID NO: 17823 - DNA, 201 bp, Bos taurus
actgctgtccgctctgttctttccaggctctgagagctgagttcacagaggagaccctcttccatgctgtatcctgcctcagtccctcagacaatcccaattaaggcagagaagtattaacagtcccagcatattcacttgtgagtagcttagagatgagcccatatcgcagtggcagtggtccaatcacagagcttctaa

SEQ ID NO: 17824 - DNA, 201 bp, Bos taurus
gtgttccccaagaaacacaatataatcaatccttagagtaaggggataacctgttgctaccagaaactgtctattgtacttgttcatgaacattttttatgtctaatttttagtagagaaactcttgtgataaaataaatccaatgaaaatgagtagacattttttcaatatattttctaaaattgtgttttctttatcta

SEQ ID NO: 17825 - DNA, 201 bp, Bos taurus
gacctgcaacatgagaaaaatcatttcaaatccagaattgctgtactcagtcaaactgtcatttcactttgaggagaaaataaaatcattttagaacacataagatatcagaaaatttaccatatcagggctcccaaaaaactaagccaagaaaaattaaatatgaattcaagagaaaagaagcagaactaaatctaagtt

SEQ ID NO: 17826 - DNA, 201 bp, Bos taurus
attccactgcctgattctccaaggcaacggttactaatacccagccccttttctaggcactggtagaaagtactggagaagaggccatatcatcccatatttcgttgaccttataacctgaacaaatgaactagatttacatataaaaactaagcactcttaaacaacaggtatgtaattaggcaatcatgggcctagtac

SEQ ID NO: 17827 - DNA, 201 bp, Bos taurus
taaatgaaatacctgtctacagaaatacagttgatcttagtcatggctctaatcagaatatcctagttgcttcaggcacattactgaacaagatgctatactcatttttttctcttagaggattcaaataaataagaattatatatcacatcttaccatcccagtctatgactcacaaccctaaaaagtgacagggggtag

SEQ ID NO: 17828 - DNA, 201 bp, Bos taurus
gaacccgagtgcccacctctatcctaggggcagtagatcacacacacctgcctggccccagagccctcttgtagggagatggggaatgagacagaggaagaacattaaagaaggttctgtaaaatgacaagcaacacccaaaaggggatcctctacagggaaacctcatgaaaaattttgcttaggatttatttaatggct

SEQ ID NO: 17829 - DNA, 201 bp, Bos taurus
gagaaatctcttaaaggaatattaatatactatatatagaaaaccacacaggttaccaattccaagttaatactaaatccagaaataaattaactttatttcaaactggccaacaagactttctctgaaaggcatattacccctcccaggaatacctatcccatttgttctaggaaacaaagcattccatgcctcccagaa

SEQ ID NO: 17830 - DNA, 201 bp, Bos taurus
acctcaaggtggatggataatgatttgagatttagagatcccagacattagtgtcctgtgaggatggggaccaagggaccagagggagagagtgaggatataagtggaaaatgtcagacaagaaggcagggaacatgaagaggggctgctggtgtcaacaatagtgtctggtgttcactacagtggccaagacatgttccc

SEQ ID NO: 17831 - DNA, 201 bp, Bos taurus
cccatgtggcatagaactgaagtctcctgtcatagttctgtgagtgagctgtcctagaatcggatcctccagccccaatcaagtgttctgatgactgcagtcctggccagtatcgtaactgtgtcccatgagagactctgattcagaacctctcatctaagcctcttcctgaacttgagacccataataactgtgagataa

SEQ ID NO: 17832 - DNA, 201 bp, Bos taurus
agttttatgatcacaggatataaagaaaggactcaattttaattcgtgcattttttgtttgttttagaagaacatgacagaatgatcaataaaaaactttcaagcataaacaaccatacattaggataagattttgtggaataagcagaatagatggaaaataaagatgtaaaatattcaaatgctaaagggaagtttgtt

SEQ ID NO: 17833 - DNA, 201 bp, Bos taurus
gacattttaaatcaccccaacaagacacccccccaaacccattagtagtcaatcctcactccccacttctccctagtcccttgcaaccactaatctactttctttctcttgggatttgcctcctctggacatttcattaaatagaattaggcaacatgcaaattttctgtcttaaagtttcatttttttctgttatcaatt

SEQ ID NO: 17834 - DNA, 201 bp, Bos taurus
gctgattttatcagagacagaactattttccatgaaataaaagactgttacacctctgcctaactggaatccaggctctgtcttcctttctatccaagtgctggccaaacccacttgggataacagtatccccattcctgccacccaaatgttgccaccaaatgactatagctccttcttcatttgaataagaatcctgct

SEQ ID NO: 17835 - DNA, 201 bp, Bos taurus
aaaatcactgagcatgtgtcaaaggcagccaatcaatagctcaagaagaaagagcccatgtggggaaatttgtacaagagacccagcagatggtaagtaacaaaagtttacttcatgccttgtctctactggcccaaaatactcaattctgggaatcaacatgagcaagataacctggtaaatcactatagcagaaataaa

SEQ ID NO: 17836 - DNA, 201 bp, Bos taurus
actccaaaggctatcagaagcgcaaggccctcaagaccacagttatcctcatcctgactttcttcgcctgctggctgccctactacattgggatcagcatcgactccttcatccttctggaaatcatccagcaagggtgtgagtttgagagcactgtgcacaagtggatttccatcaccgaggccctagctttttttcact

SEQ ID NO: 17837 - DNA, 201 bp, Bos taurus
tgacaggaagaggtgcaggtgggcctttctctggattcctttctattcacataccccctgaagtcagcacactaatgggctgatttgaaagccaaataaatggcccagaaacagactaaggaaaagtatcttgatgtacttagccccacgtggaaaagagcaatgaaaaaaagggcccagcaaacccaaaccattaatgtc

SEQ ID NO: 17838 - DNA, 201 bp, Bos taurus
agggggcgggcagcagtagggatgaagatggcaaactctgactacttcagccttactcttttagaattgtagtcagaaaagattgtgagtcgtttggaaatgagcacttagcccatttctatcgcacgctggaaactatgaacattttcactgcacgtacacggatgatcaatttctaagcacatctttgtttttcctaaa

SEQ ID NO: 17839 - DNA, 201 bp, Bos taurus
attctaagaaacatattttttgaatcagaatgttttaagcccattgccaaattgatctctgaaagcattgtacaagcctatcttgctatggacaagttataaaggaacggttttcacttaattcttctgaacattgaataatagtgtatatttttaaatttattctagtatgagaggtatgtgtcgtaatccgtatttgtt

SEQ ID NO: 17840 - DNA, 201 bp, Bos taurus
atccgccacgggtgtacacgtgttccccatcctgaacccccctcccaccgccctccccatgctttacattttaaccttaatatgactgagtggtaaacttaaaaagttcaaattataaaagtttataatgcttcttaaatatctattaaggcagaattttaactgagaataaaaaaccttgtaattacactcttagattga

SEQ ID NO: 17841 - DNA, 201 bp, Bos taurus
gccttggggtgttttgtttagcccatctccccttcctgcttcttgcaggatcttcagtccttttgcctccctctcactcagaatcttgggttttctctctctgctttccctttcccggtcccctgcagaccctgctagcctcacccataaaaccttccaacgttttcaacaccggagtgcccaggagtctatactttttgc

SEQ ID NO: 17842 - DNA, 201 bp, Bos taurus
agtattaatagaatgtcccttcatcaaggtcataagaagctctccctaccccaaagagtatgaagaatattctaaactcctgtgcttgggggattgttagcgggtgggctgggggaggctccatacagcaaagcagccagagtgggatggtaactgctttttatatttagatgaaaatggacccaggtctgagcttccctg

SEQ ID NO: 17843 - DNA, 201 bp, Bos taurus
agggaagccttctcttggaagacaagttggtcccagtagtgatttgaaggcaaattacacttgagaatgtcaaatgtttacaaatttcataccttaaaaatgatagagtatattttaaagataatcataatgcttaagatgacattatttgtaaaaacaggagagttaggtttcttcctatatatgattgtattgatggtg

SEQ ID NO: 17844 - DNA, 201 bp, Bos taurus
gacctggcattagtctagcacctgagcacagtgtaggcacttcaaatatatttgttactgtatacacgaatgaagtggccagtcaaggtgtcaagcatggcgatgctctcatcatcagcttcatcaacaacaagttcatccttactgagcatttcctatgacaggggtccccaaccgctaggccacaggctggtataggaa

SEQ ID NO: 17845 - DNA, 201 bp, Bos taurus
tcaacttataccctaaggatacctttgtcaaaattcatctatagtcttgcccctaggatgctgtgtctcccaggctgggtctgaagtagtagccatggagacaatatcagagaggactgggaagattcacaacaaagcttgaaagaatttttgatgtagcagatcttacttaggagggggtcaagacacttctagcagtag

SEQ ID NO: 17846 - DNA, 201 bp, Bos taurus
gtatgttgtacgtgcttgtttcgattttcatcatcaatgtcttgtgcattctgccaccagccccttgcctatgcatgcagaaagtgtatttttccttctgggttaatattcaatcagacacaagtgttctgtcttactcaagcaaatcccaaatgtttggaaatgccttgctttatctcaactttccttggagaagctgat

SEQ ID NO: 17847 - DNA, 201 bp, Bos taurus
acaatttttaatggaatggaaatccacccactccagtagagtccaagagcagccttctagactctgtattgaatgcctctgtgttaacccttttacagaatgattaaaagtagggactttcattcccttcagagaatagaagatcccagccccacccacagggagatgatctgtctgaccactggggcagatgactcactt

SEQ ID NO: 17848 - DNA, 201 bp, Bos taurus
acctggctagaagatggacccctcctatctttccctttctgaatgcctttctgttcttctggtctgatcccatttgcgtcttgtctgttagtgagagcccagcaatggtcatgctctgacaccaaccccttctctccccactgtgtagctccatattctggccttgctttccactgaagcttggtcagctctgcatgcgtc

SEQ ID NO: 17849 - DNA, 201 bp, Bos taurus
ggactgcagcctaccaggctcctccgtccatggtctggagaccttcaaatgcctaatttaaggaatgggattttatcccttaggaaagaaggaactatgtgagattttaagtgtggaaaacacaatcaatgatctgtttcctatctcctactggctataggatactttctcaatatctcatcactgcttgcttgttccaga

SEQ ID NO: 17850 - DNA, 201 bp, Bos taurus
tggggccatctcctttgctggttcctctttatcttcttgactttttaaagttgaaatggcttatgggatttaatcttgaaacatcttctcttttctaactatgttctcagccttaatggcccacctgatatgacgataaatttaatttaaccatctatggtgactcagaaggtaaagtatctgcctgcaatgcaggagacc

SEQ ID NO: 17851 - DNA, 201 bp, Bos taurus
cagtctgtatttgtaagtaatagtacattctgtctcaggagggtaagtaacttcccctcagtcagtgagttggttggtgagtgagcttggattctgaacccatgcagtctggttgtagagtctgttgtgttaaccacacctctgttctgcctcttcagttgcttgactctcagagggaatgaaaatggattttgagagttt

SEQ ID NO: 17852 - DNA, 201 bp, Bos taurus
ttaaattctaaaagaaataaaaataaattggattgtaggaggggaatagggagtacttaataaaagtttaaaatggttctatagatcatgtagggaaaaactgagaaatttttgaaaataaaaggaatagcaaatgatggcttactctaatattagaacggtatggacttaagtcatgtaaagcagtatggttattagtct

SEQ ID NO: 17853 - DNA, 201 bp, Bos taurus
ggtctctctgcctccaccatcctcaccccttctgccatactccaactgccccaatgtgtatctcaaaatagtgacctagcaagcgttagaggagatgggtcatgtgcccaggatggaaggtaaaaagagacccttccagcactgggtgtctcacaatgagctggcagcggtgaaggcaaacagcctcctttgagtgactca

SEQ ID NO: 17854 - DNA, 201 bp, Bos taurus
agagaaaagacctgagaatcttaagcagagcatgatgagcctctggagttagactgtgttggatgataaagaacttggctggcctttgcccctgagagccccaaaacccttggaattccccagagtaacagtagggtcttcattattgcaggtggggccctcagaccacacctgagtttatgctaacaagacggctcctgg

SEQ ID NO: 17855 - DNA, 201 bp, Bos taurus
aatgatactatagagcagattatattgatttttgaccaatgaattttccaagacttttaaaggaagaaaacaggtacaacagacaatgataacaataatatcttttattttttcaaaaccatttgcatttaattcattcaacaaattaccaaatatctggtaaaacccagacactctatcagacaccagactaggcatgga

SEQ ID NO: 17856 - DNA, 201 bp, Bos taurus
acctaataaattacttatttgtatttgttattataatttatagttccctccttcttttctcctgctaaatactattataagaagttttaaattttgttttgcattgaaaaatcacaggcctaaaaagaagacacacatttatatcagaccaaaaatctttgctatccaattttcttaagaaatgaacaaattggttaaaaa

SEQ ID NO: 17857 - DNA, 201 bp, Bos taurus
cttctccaatgcatgaaagtgaaaagtgaaagtgaagtcgctcagtcgtgtccgactcttctggctctggttaaacaacctgcccagggcttgactcagagtagatgcttaacacttatttgtcaggggaaaattagaattccatgtttattaaatttcagcagttctggttcaaccaaggaccaaaacctaagcaccata

SEQ ID NO: 17858 - DNA, 201 bp, Bos taurus
gtgtgggatcttagctccccaaccagggatcgaacctgtgctccctgcattgaaaagcaatcttaacccctgaactgccagggaagtcgtgggatatcttaaaataggcagaagaggccattctcagtaacttagaaaatttggcactaataaagatgaagatgattgtatataataggatttcaggattttagcaacccc

SEQ ID NO: 17859 - DNA, 201 bp, Bos taurus
aggagaatctcccctatttttcatttcatagttaatgggaaatgaatcctatcagaaagaattttctatacttctgtttgagacaaactctgggccccaacgcttttattcaagaattagaaacatgaaataaatctagtgccagagtacacatcttcctggggccccttcctttcttcctcctcatactcctgtggcctt

SEQ ID NO: 17860 - DNA, 201 bp, Bos taurus
tgtattgaacttcagtgaaatgccaacatcagtgtgtccaaactgtaactgtcttgtatgctattggggaatgttccacaagctgggattgccatctcagcagtggggaggagaatgaaaataagagtcaggcaaggatctggtccatgaaaatgtttcatgactttttctcctactgaagttattgtaaggaagacagaa

SEQ ID NO: 17861 - DNA, 201 bp, Bos taurus
cctggcctctacctctccagcgcggctgcctgatcgcagtctctgcccatccatgggtgtctgcccctacatccactccctggtggtcccagcacttccctgtggagtgtgggccctgccttcatacctaccatctttagagtcagactgtctcaaccctactcttttgcttaggacagtgcagatttttttttttttttt

SEQ ID NO: 17862 - DNA, 201 bp, Bos taurus
agatcaatctgctgccaacatgtttttccccccctcagtagaatgcatcctggcaaacccattcaatcatcctggccagcttccccagtgggccacaacaatcttatgctttcaggcaaaataattttcctctaaggcaagtgtgacttaggaatatggcaaggccccaagtaaattggaaaatattctcagaattttaac

SEQ ID NO: 17863 - DNA, 201 bp, Bos taurus
aaaggattaactgaattttttattccatttgtgaattgtttgtgctgattttatcaaattgtttaagtgattttgtcattaagtggaagaaacatatattttatttcttttcattatttatgacccactggtatctgcagacctcattcagagggcaaaaaattttaagaatttactggaagaacagaaatggcatctcct

SEQ ID NO: 17864 - DNA, 201 bp, Bos taurus
taaacatgaagaaaagaagaccttgtctcatcatcaaacactgcaaatttagatgtaatagctggcgtccaccatccaatttgcaacctgacttaaaaacatgttatcttccacctttctgtcattagggggagtagattttgcttatactgatcagctctgctaacattattttcatttcatttaacaatattccaccaa

SEQ ID NO: 17865 - DNA, 201 bp, Bos taurus
gggatttggatacagtctttaagtgccaagaattcttgcaattttccttccagggccaaggaaaagtgttttggagggaccctaggatctgtctcatagaactttatttcaaacctgggcattaaaaacaaatatgtttatgtgagtagtttatactgaatatctgaattaaaaatgcttctgggtgtgggaacagaagac

SEQ ID NO: 17866 - DNA, 201 bp, Bos taurus
gacttttttttacatctggcccctaaactttgtgcccaagtggagtgccttgcttacctcacctacccccagccctgggtagagccctacaaaatatctaataatgtgctagaaagtgttgcaaggcccatggttataaaatctggctatacaagagaatcaatcaagggaatttaaaatatggtaataataaaaccgtat

SEQ ID NO: 17867 - DNA, 201 bp, Bos taurus
ctttccctggcatagagctttacaggactgtcttgatgatctgaattaattgctttgtctttatgtcccccaagagagggccaggagccatccaggatggatttgaatgaaaggcagagctaggcttcctgaatttgtgaatagtgcgtcagctcagaacctgggcctcacaaggctgaggtcatggatggacttctggtc

SEQ ID NO: 17868 - DNA, 201 bp, Bos taurus
atgttttcaaaaatataatatggtccattccctgcacttccatgaagttctgagctcaattcattcactgtctcttcctattctgtccccacccatcagactgtgatttcctgaaagtcagggactatttctacatggcctttgaatgccctccacaagtgttgggtgcctggaataggccagaggtgcagcacattggtg

SEQ ID NO: 17869 - DNA, 201 bp, Bos taurus
tggtcagtcagccttagctgcccagcactgcctcattttcagactgggttttgaagctctgagtccagactctgcataggggcctggcagaataacagggaatcatttacctgaggttggtagtgcttgccccatagatggttacttgcagaattatgggcagaggtggatagtcaagctggccacaccatctcacttggg

SEQ ID NO: 17870 - DNA, 201 bp, Bos taurus
gggatcaaatctaaaaagactgggtaggattcttccccaagcctctgatgtcacatatatttatctgcctccagcaccagccaccagggccccacgtgcctgggcaaaggcaggtctcatctttccgaggacaaggctttctgccctcactcttcccgcactctgccaggtctctcttctctgcccaacccttggccccac

SEQ ID NO: 17871 - DNA, 201 bp, Bos taurus
ggcaggggaccaggccactgacaaacagactgggaggtgatgagttgccttgggctttatgatattcagaatagggatggtttcctgtccacaccttcccttccctcacaaggccagccagtgaccccctggcccaagtagcactccctagttcccttacagccagaaaggcacctaaaaacagaaatgaattaatgcatg

SEQ ID NO: 17872 - DNA, 201 bp, Bos taurus
ctcatcagacaagagtggtcagaggggcaagtgggggccacatccttgctttctttatactagtcctctttccctgacactggccaggcctagaagtaggacaggtggagaaaaggcagagagagccaagcaagaaggtagcttctctgctctcccaccactcacgccaggctgttctggatttcacccctgaagggccca

SEQ ID NO: 17873 - DNA, 201 bp, Bos taurus
tccctggtccagaaagattccacctgcagaggagcagctaagcctgagagctgcagactgagcctgcgctctagaccccgagagccacagctgctgaagcttgcactctcgagggccctcaagcctagaactaatgaaactactgaagctcgtgtgcttagaacccctgctccacaacgagagacgccaccacaatgagaa

SEQ ID NO: 17874 - DNA, 201 bp, Bos taurus
caagtagggtcactgccccaaagcagagatgaggaacccaggccccaagaggcaaagtgacagacagggtgacagcagctaggatcccacctccaggctgcccgttggtggcagcaggcctggacgctaactccacatggtactgctcatgtcccaagccctgtgacatggccatcctctcccagccttggccttgctgtc

SEQ ID NO: 17875 - DNA, 201 bp, Bos taurus
gttacatgaggaccaggcagccaactgcaagccagggatggaggtcttcccagaatccaaccatgatctgggatatccagcctccaggcctacgagaagataaatttccacggttcaagcccggcatgatgttcaagggagggcaggaggacaggaacaggagggtacaacttagattcatctatgaggccaagatgctgc

SEQ ID NO: 17876 - DNA, 201 bp, Bos taurus
gagtcttcagccagctacagacctcagaagcttgctcgggccctgaggcaaggagctgaggtaacgcgtcccacctttgggagaggaaccacccccacctcttccttgctgcccaggcctcgagactaatgtgctgcccttggtcctggcccaggacgaagccaccacggtcatcaccctgcccaagcaggattcctcgcc

SEQ ID NO: 17877 - DNA, 201 bp, Bos taurus
aggagcaaggcttatcaagcgctgccaaagttcctggcccacatacatcatgagcaaataaaatagctgctgtttcagccgctcagctctatggtagaggattaggcggtgatggccccaggtggggtggggggaagatcccgctgcatgtcaggtcatggtctcgaaccatttacgaagctcagaacagccctgccagga

SEQ ID NO: 17878 - DNA, 201 bp, Bos taurus
cccgtctgggcttgaggtccaggggatggccttgacggggctctggaaaggaacagcctccaccaagcccaagtccgatggcaaatctggggcccttcacagaggaaattcctcagcctcaccgggtggtaacagaagacctgaaaacagtccacagggtctgccgtgaggacttgactgacatggagaatcagccagaag

SEQ ID NO: 17879 - DNA, 201 bp, Bos taurus
ttagctgtcacctggaagaatgtagtggagagaaatcatgggctttgggattgctcagatacaactcatactctaccaatcactaactccatgtcctgggaagttaatatagctcttggcacctctgtgttcttatctgtaagatgggctcatcacactacctgcctggcaaggtgtgttaggggagctcatgcctgagga

SEQ ID NO: 17880 - DNA, 201 bp, Bos taurus
gccttgcacgtggctgttaataagatggtgatgggggctgcttcatgctcagaaagacccctgcaccggagaaatcctgtgggggtccaatgtgccagcccaggaaaggacagaaacggggcagccatgaagtgacaggccctcctgttgggctagatcaaaacccagaacgcagggatggggccacaaggctgctgccta

SEQ ID NO: 17881 - DNA, 201 bp, Bos taurus
ctaaccctcaaaacttcctcaaaggtgaaacaagatggacaaacactgaaaattgctgaagcatgttgataggtacatgagaatatgttacaccattcgccccacttttgaacatgtttaaaattatcagaaatttttaaaaatcgaaaatactttaatttcttcaaaagaattgtaaagctgaagtctatgtggaaaaaa

SEQ ID NO: 17882 - DNA, 201 bp, Bos taurus
tccatcttttctcccagagattgagtgggattccttggtttggaatgtctctgcctggtcatagggtcccaccttctctgggattctcctttctgtgtgtataggccacccttccactcttgttccttgtcctatctctgataatgctgaagctgaataggaccctgtggggctcctgtgtatggaagcttttcaagcagt

SEQ ID NO: 17883 - DNA, 201 bp, Bos taurus
tggcctggatgggtggtccttgcacctgaatctttagaggagctgctaaaactaaccagtgatctatagccacaggtaagtcagtgatgctcatatgaccgcagggaaaggaggcccttctttcccttgccccccgacccttcccaggttcacaagttctccttctacattttcataggacccttctgaagcaaatgtccc

SEQ ID NO: 17884 - DNA, 201 bp, Bos taurus
aggttatgaggccaatgctaatgtgatgctccattgaaaattttcagaatattctcttttaaaatggaatcaagaaagtaaataaacatgtttttatttttcttatttttcattatgctgccaaagatgtgcacaagggaatttgtacaatgagcatgtgtgggagatgacagctgttgcttaagccattgagatggagat

SEQ ID NO: 17885 - DNA, 201 bp, Bos taurus
gcctctctctctccacatggtcaaaggcactctgtcaaatgttccagcatcttaccctatacatcagaccccctccagactccattttctcccatcacccacagcctgcttgctggggcctggggcttatattcttcatcctgggtctaggaacctggcttcctgcctctttgaccaattacttcttactcttctccctct

SEQ ID NO: 17886 - DNA, 201 bp, Bos taurus
ggctcaggccttctcattgtgatgggagaacatgttactgaattggacctctttgttggtagagagttgcctttaatcagaattccagcaactggggagattgtaactcagtgtccctaaagaatcacctctgaagattcttcttgacctcgtaaaagggaaagagggaaataatctcagttagtccttgaaacaagggtc

SEQ ID NO: 17887 - DNA, 201 bp, Bos taurus
taacttatactctaacagctttctgtcactgttgcaaatgtgtagacagataccgtctcttatcctgagagtgttagagaatcacagtaaattacatgcacggaggtgaagaaaggtctttggcattaaatcccaggctgggacttcctcttcatcccatatggattgttaacttgccaaattcaaggctacaaagtattc

SEQ ID NO: 17888 - DNA, 201 bp, Bos taurus
aataaagagtagtttcagaataattgtagatttcttggaaaaataatatctcctcgtacttgggcctccctgttttgagaagttaagagaggatagattctattgggaactgtggacatattggttactgcaatgttgattgattaaaaatatacttctagaactggcagctcagaatttctgctcgaatgtctcctccct

SEQ ID NO: 17889 - DNA, 201 bp, Bos taurus
tatagtgcctatatgggttacaaggtggcagttgggcaaaatggctgggcaaatgcaagatgacattatcatggtgcctctttgatgtcttagatatacaggaccttctctcacccttaattatttgaaaaagattaagcaagactctgcatttaagggttgagttctaattgagtcgagctgtgtgctgttctacaggaa

SEQ ID NO: 17890 - DNA, 201 bp, Bos taurus
tataaaaagaaaaaaaaatccacatattttttagtgattatcattatgaatgtctacaatgtagctagacagtgggccaagaggaccaggtactcaatgcgtattaattcctttaaatttcaaactttactgtagtcttgtgtggtagatgtatcatcaccatttgacagatgcagaaactgagggccagagaaatcggac

SEQ ID NO: 17891 - DNA, 201 bp, Bos taurus
ataagaaaatattatttgatgtcacttcagagttagaactaccaagataacagaaagctggaagtcaatgaattgaccattccttccaatttcttaagtctttggtaatgttatttaactcataaaatacttgtgtactttaacaaataattaataggagggaagatcaataaggtggttgtgtttcagggctggatcaag

SEQ ID NO: 17892 - DNA, 201 bp, Bos taurus
tcattgtctgcttaaatcctttaacctaggttcaccatcaataccactgaaataatattgattgagaacttttgcataagagcctttagagatcagacagcttatatataccctctgatttaatctgtaaaatgaggataatgagacctaatagagattatttggaggatatatacatttatatgtaaatgtagatttaca

SEQ ID NO: 17893 - DNA, 201 bp, Bos taurus
tagaacagagaatatagacttgaaagtgcatagatcgacagaaatctgtaagggtagggataagtagatcagaagaacgtggaatcatcgaagaaaaatgctttgttctttgctgtgtactcttctgcaactttttgcattttgtaccacttgcaaaaacatattttaagaagaaactgaggcaatagaatgaatgcatga

SEQ ID NO: 17894 - DNA, 201 bp, Bos taurus
tctaagaagtagcaccttttactaaaagtgaaatgaagagatctaggtttgaactccaggtcaactgccatcagatcttgggacactagtaggaaagcaaatagcctaaatggacacattgtctttatttgcagaatgaaattgatgagtatggtaatggaactcttacaacttgtggatatgctatcatctccatgtgta

SEQ ID NO: 17895 - DNA, 201 bp, Bos taurus
gaaaaattaaactcctaatttcataattttgtgtatttttctgtggctgaaaaaaaggctgacattacatgatgcagagaaacaatgatgggtttggacaaactaccatggaagaggggcggttggtctgcattttaatggggctctttttctatacgaacaactgttcagttaaaggtaagaggttgtggaatattttgt

SEQ ID NO: 17896 - DNA, 201 bp, Bos taurus
tgacaactcaaaatgtcagccatatgattccaaacccaaatgtgaacagctgaggccgtactggaggcttgttcaaagccaaaccaaagaagacaggtccatttagacatgatccctattacttggcaagaatattgattataggacaaaccgaaagaacattgtctatatttctttttgtggaatcctccgaatcctagt

SEQ ID NO: 17897 - DNA, 201 bp, Bos taurus
ttctgtcactgtttccattgtgacctccatgaggtcacagagaatcgaacatgactgaataacaccaatattctggaaacatctaccataaataactgtttctttattcatcaaaataaatgcctctcaaaacactctctccagctcatggaaccaaaaggcatgaaggcaatttttttttttaagagttttaaacttcta

SEQ ID NO: 17898 - DNA, 201 bp, Bos taurus
tagatactgaaatctcctctaggtagcagaagctaacaattaattatgctgcccacaaacatgtaaaccccagaagagttggaacctgaaagttgatgacattgactcctgcttacctcaccactaatgcatcagaagaatgcaagactgtcactatcttgatcattattacatactcctgatcatgagccctgactgtaa

SEQ ID NO: 17899 - DNA, 201 bp, Bos taurus
cttcttggggaatgtattagtttggcaaaagttttgataggtgaggtatgggatcatcgtagcccagactggagaacaaaatcatcaggtttccctggggcctttgcatgcttttgtgcttaagaatttagaattaatcccatgtgcaataggaagcccttgaaggattttaggaagatctgccttttaaaagggattccc

SEQ ID NO: 17900 - DNA, 201 bp, Bos taurus
tttaggtaagtgtaacttttgtcatatttcttaactaatattctctttcattcaaatttggtgtactaaacatcatgttttagttttttaaagaaaattagtgacaaagtttaaggtccatggataatgtcatcccttgctttttctaagagggccaagcagttctctcactagtaacctttccacagcaaacatgtttgc

SEQ ID NO: 17901 - DNA, 201 bp, Bos taurus
aactatattcacccaaattaatacacataaacacacataatccaatattgtaaaggcaatgctagtcattaaatattaatgatgaaaaagtgtgttatagttaatagggtaaataatttattactgcttagggaattcttccaaatggaggacaatactggatcattaaaattgaccaatacttagttggtggtaatttta

SEQ ID NO: 17902 - DNA, 201 bp, Bos taurus
tgatttggtgtagcttaaagacactcagagatggaaattgtcctctaaactgtgcgtgtctcccagaatccaagtgctagagtgccctcagatttctaaagcaagcactagagctcacaagggtttaggatctccctcaatctctgatgcttccatctgtaaaagttccatgctcctctcactctgccttccctgctgctc

SEQ ID NO: 17903 - DNA, 201 bp, Bos taurus
tttaagtaaataaggaagctgaggtccagggacatgcaagcacaagcttcaggatcatgtggttgtctctgtcatgcagcttcaatgaccattgggttccatggccccattcatgacacagtcctttagtaaccccatggaactctgagggcaacactttgtctttcagacctcagcagcttttcctgatctcttaacaac

SEQ ID NO: 17904 - DNA, 201 bp, Bos taurus
gatttagaggttggttttattgtaaagaaatttgctgaaaatgtgcagcagtgattccaatgagactgatgatggtgtattcatattagtccactaagttctcatcttttatttctccctgagctggaattcagtgcagagaatatttttgacatttaaataagataaaaaagaaaaacattgtctacccaaattattgag

SEQ ID NO: 17905 - DNA, 201 bp, Bos taurus
agctcagctcctctcacaaggcctgagttccgagatggagggctgtcagtgaaaacttaagaagtctttttcatgaggaaatctgcaggacacaaaaaaacacagtgttgtttcagggcccagggaccaagtgtgacacacaaggcagaaacaagcagctttccagttctgtggggagactgcagagagtaggcatgagga

SEQ ID NO: 17906 - DNA, 201 bp, Bos taurus
ctcataaattagaacatctcattacagaggcacacacctgagccagatcacacagagccctccctcctcttgcatacataccacagcgtctgcaggactcaatgacactgcttttttccctgtgagacttcaccatgctgctgtgcatccttctatgtctttccctgtgatttaactcctggaccacatccaaacccagaa

SEQ ID NO: 17907 - DNA, 201 bp, Bos taurus
atcgacaacctcaaaaaacgctttgaccacaatgagatatatgtgagtgtgcacggaatgtcatctggggagtttagactttgcattttatggtgcagagtaggcttctcttcctcagactcttcttttttctgtttattggagtccagaggtatttgttgataccctcaggaagaagtttgtgtttgctcacttggtgcg

SEQ ID NO: 17908 - DNA, 201 bp, Bos taurus
tggccaaagtgctggtcatggcgagggcagcagcgactgtggcacagagcagggccagggaccgaggcaggctgctgatgaggccccagaggagtgcagctcacacagggtcattgtgggtaccatgtaagtttctcagggactcagggaagtagatgagacatctggccacatggcaagggtgggatgagggtggtagat

SEQ ID NO: 17909 - DNA, 201 bp, Bos taurus
agggcctaagcacgaagcaatgtccttgagaagggatgggtttacacatgggtgtaatgtttggtcttagaaatacaaatacatcttctggctcatggaagttatctacagatgtaggcaggaggtgacactgaaaagaggaggatgaaatagatctcttctgattccatttattgcctgtattgcatttgtactcaaaag

SEQ ID NO: 17910 - DNA, 201 bp, Bos taurus
tctctagcaacacagctgaaaatcatcttcagcactcagccttctaatttagttcgtactgaaactttctttgtatgtaagatttgtctacaaattcaatgcttttgatatatataggattattcatgtttctcttttatcttgttagactttggtagtttgtctctttcaaggaacttatacattttgtataattcatca

SEQ ID NO: 17911 - DNA, 201 bp, Bos taurus
tcaaattatttatttcagcaagaagaaaacattaatctgtgagattaagttcacaacttatgaacaagaaaatatttagtttattactttggcctatttgcacaggggatatatggaaatcagatcctagcaaagtgcaattttagtgtcctgaataaaaactgggaaatactgactgagacaggggctagaaagctacct

SEQ ID NO: 17912 - DNA, 201 bp, Bos taurus
atagtggtgtgtatatatcaatctcaatctcctagtcattctctccccccagtcttctccttctatacatcaggaattgtgaatgatctgagatttttactccgcttgctaactgacaagctggtctggtacaagttcaaagattttgatggaaatatggggatcctatgtagagccaagggaatccattactcgaagaac

SEQ ID NO: 17913 - DNA, 201 bp, Bos taurus
aagcctagagaatcaaggtaccagacatgtgaaggaacatgccatcttggaattggatcctagccatcccaccaccccagccatctcatttgtgtcagagctgaaccactgtgacaagcacatctcaaaaactatactcaaaactgtaagcaaaataaaatggttgttttagacaacttagttttgtgatactttgaaaag

SEQ ID NO: 17914 - DNA, 201 bp, Bos taurus
gggttgttttaagctaactagtggaataagagtgtttacaggcttgtgagataaagagccaataaagattatttttgacttagaacaatttccaaatttggagacatgtcacatgggaccctgagtgactatgtcttctctaagatctagcccactctggtcatgtttgcaagcattcaagtagagcctagttcccacatg

SEQ ID NO: 17915 - DNA, 201 bp, Bos taurus
tgacacccaggctatatttggagatagggcctttaaagaagtaagtttttaagaacttaagaatttaagaagtaattaagtttaaatgaaatagtaagggcggggccctgatttgataccattagtattcttaggagaattcagagagctcactctttcactccatgtgtgcacagaggaaagagcctgtgaggatgccat

SEQ ID NO: 17916 - DNA, 201 bp, Bos taurus
ctaatactgccactgaaaggacatacgtcactgggaaggcccagcgggttgccactctccctgatacaattaaaacacatgaccataaagtttacaaaggtattacataattcagagttggccatgataaagactaagacattcaaaaaatcttgtgtcttcactgctgttgctgaaatatttatagaaatacttctctgc

SEQ ID NO: 17917 - DNA, 201 bp, Bos taurus
taatcccatggacagatgagcctggcagcctacagtccatagggtctcaaagagttggacacgaccgaagcaacttagcacacgtggcctatcttgcttattttcataaagaaaaaacaagagttatactttatgtttctacaaaatacttccaatgaaaagttacccaaatcttaaaatatttggcctttttatcaatat

SEQ ID NO: 17918 - DNA, 201 bp, Bos taurus
gatcacaaagagtcgaacaggacaacatactgactcaacaagaacaaacagggtataagggtggagttgtcagccctctgatgtcaaaaggtcaccaagccagatacttgcacatggccagttggaaggtcagggagcctacccagtcttaattagctcatccataaatagacacagctgattccaatctcctggaaaaca

SEQ ID NO: 17919 - DNA, 201 bp, Bos taurus
agtactaacctgatagtataacctctatagcttctggaatcaaactgcctgggatgaggtgaaagggaaggaagagagagatgggatgtggcagggagaggacgggaggaggacctactatttatcaagacctttctctgggcctttttgcagatcccattaaatcctgacagcaatcttgtgagataggaagacagtgag

SEQ ID NO: 17920 - DNA, 201 bp, Bos taurus
gcacagcaagcacctattagatgcaagggcacttggcagagtcaagggagatctgcaatttcaataggacaacatcctcaccatcagagtccacaggccagtgtatcagacacataagcacatcaggtaagtacctaacttggagatgctccctgaagcagaagaggacagcacagtctcagggcccaacaccaactgaaa

SEQ ID NO: 17921 - DNA, 201 bp, Bos taurus
atgtgagccttaaaagttttggcagatgcgaggaacaagtatctttgattttttagttataggcaaagacagaacttggtgccagcatgacccacagcagcgcacttgaaagaggtattagtaatgaaggtgcttgcttgtcaacatggtggctgttgagactgaaaacctgtcataggtcacagaatacttttaacagat

SEQ ID NO: 17922 - DNA, 201 bp, Bos taurus
gcaaagtagcaagctcttgggctctgctacccccacccatctggctgtgagttttatgaatatgcaagtaatggaacccttatttgtggctatcattggggctgatgagtcacaactcatacattcatatggttcacaatgtcacacaactaggggatgcagtaagagggaaatggagctttcagattcagacagtcttca

SEQ ID NO: 17923 - DNA, 201 bp, Bos taurus
atttatccaataagaaccccgtgtgtctcagtgtggtttattgtcagttaacacagtgttcattgagtacccactttgtgcagcagatattgagataaaagggcacagctcttgctctcggcccactattactggcacagatggggtcatgacacaatgcaatggctatacaacttgagggggtgccttacagctgaatgg

SEQ ID NO: 17924 - DNA, 201 bp, Bos taurus
ctgttgtcttcatctccctggtgtctagtttcttgtgtagactcaaatatgaaacatagcctcttatgcttgattctagggttctccttcctggggggctctggggagaactagaaagccttacagaagagcacatgcttaacacatctccattttcaaaaattcttttgctacttcagcctgaaagtgctcccctacctg

SEQ ID NO: 17925 - DNA, 201 bp, Bos taurus
atagctaagaattactaccattatttaagacttgaagtattataattttttgacaagaacctcttatgtgggatccttcgattatatgtcactgttcccacgattcctggcatgcccctggttttctgatactcacaggatgatcctgacccatcctaagtgttttcccttagcccatcacctctaacttccccctccttc

SEQ ID NO: 17926 - DNA, 201 bp, Bos taurus
tgcccctgaaacactgaagagagtggcagcatggtgatgaagaacataaaatcagggtatgtcacttatcctcactgcctcagcttcatcacccgtcagaggggctaacaatagtaattgcctcatacaatcatgtgaagttgatatttgaagtgtttagaatagcactggcatataataaatgctgtaatagtgtttgtt

SEQ ID NO: 17927 - DNA, 201 bp, Bos taurus
gtattcactcctaagaacaacaaagcagcattattgtccattgcccatataccatccatggtatcaatttatggaacataggaaataagggtggggcagacattattttagacaaagaagagaatttagcctcgccacatggtgccttacaaaatattttttttaattatgatcagcactgtcatatcaagtgcttattta

SEQ ID NO: 17928 - DNA, 201 bp, Bos taurus
tctatcttttgccaggcctttcttctcctttcttttatggcctgcacttttaatgacaacatttcgtgatttcttgatttccgagggttctgctgtgctaaccctccgctctggccaaccttccttccctagtgcccgcgcgggaaagactaggcccgactgcccgagcgcagggtgccggtgccgggcgtgggattctag

SEQ ID NO: 17929 - DNA, 201 bp, Bos taurus
agagacagggctaccaccggtgctaagccccccaaataaacggccctcctcaaccccccaccagctgcagtctatgcgcccttatttcgtgcggaagtcaggggctggttctctacaggactcagtgcacagaggcacttaatatgtgtagaatagtgctttctgccacacccccgatcccccaccaccaagcgaccaggt

SEQ ID NO: 17930 - DNA, 201 bp, Bos taurus
aatggctaaaagtgtgttgaaaggcatattcaaggataacatagccttgctcttcagatgcctcttagggtgtttcatcacgggcccctgcagacgtgtcttggggactgagagccagaaattccgaatgtctccactaggggctgccttgactgagggccaagaccccaatgggagcagtggacagtgctgccaggggac

SEQ ID NO: 17931 - DNA, 201 bp, Bos taurus
gaacttgctttgcttttgaagcaactgcatgtaaggactcctgtttgggacctccttactccaccaccccatctagaaggttctgtccacaatgggccacaatatacttagtaaggatttttaagtttttcaaggtttcatgtcactttgtttcacagggttgagtctggaggtacttatatttagttgtgtgatcaggaa

SEQ ID NO: 17932 - DNA, 201 bp, Bos taurus
agggggttaggccttggactgggccccaaaagtgattattgtagtatggcatcaaatttcaaatccatgagagaactggaggaaataaagatcccttcctttcttttctaatttctcagtggccatagtcatttgaaagtaagagatttcaaaaacacacgagaatagagctctcctatccatacagaacttggaatttct

SEQ ID NO: 17933 - DNA, 201 bp, Bos taurus
cgtgggttcgatccctggccagggaactagatcccatatgtcacaactaaagattccataggctgtaactaagacccagtgcagccaaataaattaattttaaaaaaaactacataaggccttaaaatatatcatgtacatgcgtgcgtgctaagtcacttcagtcatgtctggttctgtgtgaccctatggactgtagcc

SEQ ID NO: 17934 - DNA, 201 bp, Bos taurus
catacaacacaataaatctcaatgaacataatattgagcataaaaagaaaggcacaaatgaatatggtttgttttcatctgtatagagcacaaaaatagtaaaaactaagctatattgtttagagatgcatatgtaaatggtaaaacttataaagtcaagaaaattcttatctccaaatttgagatagtggttacctctta

SEQ ID NO: 17935 - DNA, 201 bp, Bos taurus
cataaacctcccttgttatggtgggggccataacaagagaggtttacagggacttggagggatccatccatagtcaagtttgggcaaaggtcctggggaggtggccttaacccccaaacagagcatattgtacgtttgttgttcatcttggagcctggggttggaagactatagtcacagatgtatcagtgtcccccacca

SEQ ID NO: 17936 - DNA, 201 bp, Bos taurus
ttctgctggtcgggaggccaaaaaattttcagagagatgcactcgaggctccatgggcaaaggagaagggcaaggtgaatgagatggtgaatttggtggtgtggaaggggtagacaggcctcgagggagaggctggaggagggggttctctgaaattgggctgtggtacactttagcggagatgcctcgctcctgtagaag

SEQ ID NO: 17937 - DNA, 201 bp, Bos taurus
tgtcaagtagtacaaaagaaccttttatattttattggtttccataggggtccactggcttttggaattgataccttatgtaaaattagctaaaaagtaaataatattatgtgaaatatattataaaatatagactactattatggagattgcatattacagagagtatatagttacagaggaaaagtacagaatatagtt

SEQ ID NO: 17938 - DNA, 201 bp, Bos taurus
taacagctatgagaaaaaaagaaattattttattatttggctctgtgacacgtatatgtatttcacctagttctaatgtatttgcctaggttttttcctctgttaaggggaagctaagtaaggcattaatatgattttctaagcatatttcctttgattaggttggaatcgtggaagttctgtttatctctggaaggatct

SEQ ID NO: 17939 - DNA, 201 bp, Bos taurus
catgtgagagaccagctgggggggcacttccagcagcaggacaaggtaatcacttatggggtagatgcacccctttggcttgtctgtgactctgggctcattttagtcatcttccagggccacacataagctgtctgaaagccaccccactgaagaagggaaatcagcagtgtttccgaccatgtcagtgggattaacgct

SEQ ID NO: 17940 - DNA, 201 bp, Bos taurus
tttttctgaaaactttttactctcaatttagatgaggttgctaagtaagaaataagtaatatttggttcacttccaataaatccatttaaatctaatgtgctatagtcaatagaactgctgcttctgtgcaatgacaatctagtactagaattagatagcaaatacatagtttctgtatgaaatatcccccctttctatga

SEQ ID NO: 17941 - DNA, 201 bp, Bos taurus
aagtttaagccatacagcataatgatgtgacatatgtgtagcaaagaaaaaaaaaaacaaaacgtaagcttagttaacatccattacttcatagttaccaaaaaaatcatttttccttgtgatgagatcatctaggatctagtctcctagcaactttctaatacaccatacagcaagtgttaactatagccattgtgttgt

SEQ ID NO: 17942 - DNA, 201 bp, Bos taurus
aggtcactggaataatggccaaatcatttatacctcttaaatatccatacggttgaataaaatggtcctaagtaaatggtcctaagaaacaaggaggcaatttgtgttaaattttaggccaagatgttgaaagttaaaaaaaaaatccttcccatcatggaaaactccaaaatacccctttctacctttcaaaggaacaaa

SEQ ID NO: 17943 - DNA, 201 bp, Bos taurus
agactgtatcttattcatatatgtgttttctccagcaccttgcatatggcatcttgtacatacagaagttcagcaatgtttgtcaaactaaaagatgagagatactactaagaaatatctggcaacactttgaaaactagattagagtaacagaaacaactaggggagcgctgtttgtattaatccatgtatgaagtgatg

SEQ ID NO: 17944 - DNA, 201 bp, Bos taurus
tgcttacttgggtgggctggagtcaggtgttcattcaacttgttctcagagttagaaaatggtcctacttggctcgaaaattggacagataggggttaatcggcatattgaagtaagggtagttatttttccatataagatacaatgaaaggccagcatcttccattttctttctcacttatgttggtagtatggggattg

SEQ ID NO: 17945 - DNA, 201 bp, Bos taurus
gataacctctattctactttctacatctttgattttgcatattttaggtaccacaggtcatacaacatttatccatttgtgactgactccatttcgcatagtattttcaaagttcatccaattgcagcacgcaccattacttcactcctttctatgactgaataacattccattgtatggatatgccacattttgtttatc

SEQ ID NO: 17946 - DNA, 201 bp, Bos taurus
atagggagagatttaggaatatttttagcaacatgaactatgatgttaaaaataatgaggacctaggactgttgaaaaggctattttcaatttcagttaaaacctggctatgtctggttacagcacagctgccaaaggtgaatgtcacacttcagaacatagcatcccaaatttcacaatgctcccggagcttcaatactg

SEQ ID NO: 17947 - DNA, 201 bp, Bos taurus
agtatggtgtactgatttcccagcactgctgtaatgaagtacctcatactgggtggcctaaaacaacgtgcttttctcatagttttggaggccagaagtactgaaatcagggttggttgctcaggaggatgggttccatgcctgtctcctagcttctggtggatgccagcaatccttggccttccttggtttatagataca

SEQ ID NO: 17948 - DNA, 201 bp, Bos taurus
acaaagttgaaggtacagaggacagaagcagccttctggtccagagaagttcaagatcttgtccaaggagtctgactcagactgggcttgcatcaattaactttactacttaaacagtggaattgccaaatgttaatggttacattgtgagagacttcagacaacatccagtcctattctgtcttttttttttatcagttc

SEQ ID NO: 17949 - DNA, 201 bp, Bos taurus
cacaacagatgctcctaattcaaaaagcagaagaaagaaatacaaagtaaccacatatctggggttctgaaatcctgctggccaggctggggagactccatgcagggtgagggtagttccttgattagcccaccaactcaatggacatgagtttgggtgaactctgggagctggtgatggacagggaggcctggcgtgctg

SEQ ID NO: 17950 - DNA, 201 bp, Bos taurus
ccttcctgatgagtatgtgtcagtctggctcagagctgttgtgggaccagcagattcttccttaccagaggtacatgtgcctcctctatggctgttaccagctgtgacagtctccttggcttgatctattctttgtccttattttatcttctttttatttattttcatgatattgagactatataggcaatttcataagtt

SEQ ID NO: 17951 - DNA, 201 bp, Bos taurus
cttagtacccatagctgactagctccaataatcacattttcaactttattttttttattctacaaacaatttattgctctgtgaaaagtattcaatgaaaatttcaggcccaattgagttgcgtccctttggccacgtgcccttcattttggcaaagggccagtgctcagcgcaatccagttactcaactcaattacacct

SEQ ID NO: 17952 - DNA, 201 bp, Bos taurus
ccaagcaaatcagtaaagtggcccacccattcaaggccaacccttgctctatcaagccatcaacagtcactgtctgctaaaacttcctctgtgtttggcagtggcgggccataatgttccagaagagcagactccattgacactgcatgtgcttcactcacagcagagacagggatgccgggacttaaaggagctgcagca

SEQ ID NO: 17953 - DNA, 201 bp, Bos taurus
atttcggtaggatgttgttgcctttaactttttttatccaggggaaaattgccattttagggtcagcatgaacagctctttcttatatgcgatttaaaacaaaccagaaagaaaacttcacacgtcaaaatccgtagaagcgcctccatgttagaagcggacaagccttaacgtgctttgtgaataggagccattcattca

SEQ ID NO: 17954 - DNA, 201 bp, Bos taurus
agcattatatttgggacatatcctcatcgtagctttaggttattcgaatgtgaaatttctatattagagattgaactacagtcaaagcacacacgatcaggtaatctccaagttctgacacctacccaagggcactgaatcctggaaacaactatctaataccaagccagaaatgtcttttttttttcaaatccccataag

SEQ ID NO: 17955 - DNA, 201 bp, Bos taurus
atgtggaatctgaaaaaaaggatacacatgaacttacttataaaacagaaacagacccacagacatagaaaaagacttgtggttactgaaagggaaagaaggggagagagagataaactgagaatttgggattaacagatacacaccactctatataaaacagataaacaacaaggacttcctgtatagcacagggaacta

SEQ ID NO: 17956 - DNA, 201 bp, Bos taurus
gaaagagatttggaataccctgggtatttagtactgtgaatgagaataggaaaaaatgtgataagtaaacatcatggagtattacttgacaactagaatcgaaggattaaatatacacatgcttggtgaaaaaagttggaagcacaaagagatatacactacaatatcatttacaaaaattaaaaaaaattatatacactc

SEQ ID NO: 17957 - DNA, 201 bp, Bos taurus
ttccaaacttctttttatcaccttccctcactcctgcccaagaaagctattgtaagagaaaaggttaaagaaaagaaaaaagaaaaacactctataggccgtgctcctctctcgtcatcctaaccccttcctggaaagctttgccccctgctgtgggggaagccctgaggggccaggcaggcagtgcggagctggggacct

SEQ ID NO: 17958 - DNA, 201 bp, Bos taurus
gatgaacctatttgcagggtaggaatagaaacgcagacacagagcacagactcatggacacagcaggagggggagaaggtgggatgaactaagagtagcacggaaacatatatgttaccatatggaaaacagctagctagtaggaagttgctgtataacacagggagctcaacctggtgctctgtaacaattagaggggtg

SEQ ID NO: 17959 - DNA, 201 bp, Bos taurus
aggttgagcagttatgtcttctttcttcaaacctaccaatgcttctctgtaataataggtataactgggtggcattgtggctctttgtgacagagatgacaagggccggtgactctcctggtgtttcccttccctacaggcccagggcatctgcactggtgaatatccagcttatatatccacctgttaatgtcaactctc

SEQ ID NO: 17960 - DNA, 201 bp, Bos taurus
tccccacacccattagcagtcactaatcttttctccctaacccatcccacaagcaatctctactttctgtcttcataattttacctactctggatatttcgtgtaaatagaataatatacataatatgtggtgttctatgactggcttctttcacttagcataatgtttcagggttggtgttgattttttaaaaaaaatta

SEQ ID NO: 17961 - DNA, 201 bp, Bos taurus
gggacagccagagcttggggagaatgctagccgattatcgggccagaggaggaagaatccagcaaaaaaactcagacccttttgcttactcaaaggaggcgtcaagcacctcaagtggaaaatcaggaagcagaactgaaggtgatgaagaaaaagggttgattaccagtgatgcagtgtggtcgacaaaggtgagcaaga

SEQ ID NO: 17962 - DNA, 201 bp, Bos taurus
cagagtctaactgaatatagcatgaactgaacagtccatctttactggaagcaaagactcatagaaagtcagtgtaattaatagatttgatgttgcaagctcataggtgattattatttatgaaagacaaatatgtcatgctcaaatcatcaagctaacatagcaccattctttggtaagttttcagtacctgcaaatgct

SEQ ID NO: 17963 - DNA, 201 bp, Bos taurus
ggaaggaggccctacggcatagacagtttgatgacacaaactttggtctggctgaacaccacaggaaaaaactacaccctcccatcaccctactgcaggttgctgcagacactgggccactatgagcacagctctgtctcctggttggagggagtctcagaaactgggtggctccattcttcctgtacatgatggactggc

SEQ ID NO: 17964 - DNA, 201 bp, Bos taurus
tctaagaacctttatacgttcctttattctgcaaactatgaggagttttacagccagcattttccagaaatcactgataggtttgtttttttcatgctcagttcagttcagttgctcagtcgtgtctgactctttgagaccccatggactgcagcatgccaggcttccctgtccatcaccaacttccagagcttactcaaa

SEQ ID NO: 17965 - DNA, 201 bp, Bos taurus
ttattttttttgcagatgcagtcctaggagctcagggctcagtggcctatcaagataatgtagtctttgtgggaagaaaaagccttctcctctaaggacatgaagccctttaccagtgagttggcccacagcgcaagaactaacaactactcagctcttacatttgggcacaaatgtacagtcatgtagtgctccacacct

SEQ ID NO: 17966 - DNA, 201 bp, Bos taurus
ccaaaaagtcgcacacaactgagcaactgaactaaatcttttggagacaaaaggacatcagacaatatcagggacatgggcccatatacctgcaaaagaacgatggttattaagcagcccagggaaggtagaagccaagtgaccccaggaagggcctacattaccctgctccacagttgttctgttgggttctggtagcca

SEQ ID NO: 17967 - DNA, 201 bp, Bos taurus
attgaaaattttgtcttcttcctcaaattacttttccatgttattaatctgcatcaaattactttttaaagcctctttaataggcttaattggtaaacaacagactgaatgtgtttaaagtgtacagatcagatcagtcactcagtcgtgtccgactctttgcgaccccatgaatcacagaacaccaggcctccctgtccc

SEQ ID NO: 17968 - DNA, 201 bp, Bos taurus
ctcagaagagagctggctgacccatccagcatccgcatctatgccattgccaaggtagtgtgtgacaaggggccctgagctaccttttattttcttttcataatatagtcagtctggacttcaatgtaaaactgaatcacaaagtggtcttgaattcagggatttctggaaagtttttaattctttttaatagtattaaac

SEQ ID NO: 17969 - DNA, 201 bp, Bos taurus
catatgcattataaaatctattggaaaactgaaagcaattaatgaatttttgtgtattctaagtttctttgaaatgtcccacatcttgtgaaattccttataaactatatattcctatttaaatatattgcccaaataactgctttctgaatagcaaagtgagattacatttaaagatatgtctttatggatgaccaaaat

SEQ ID NO: 17970 - DNA, 201 bp, Bos taurus
acaatacccaaacacaaaaaagtccagcaaatccagtataccagttttttccctcctgaccaagaagttatttgttctggcatcttgtcaatataacacagagagtccatacaatagcaccaaattgtataaatagactatgagtttgatctgtaatttgaatgcaaatatctccctacctgtattatagcagatgtaatt

SEQ ID NO: 17971 - DNA, 201 bp, Bos taurus
tggtgccaagagcaaatattgaagtttaagaaaaaaatatatttgataggcatttgtatccatttccctctttctgcttttactgttccagttcaagttcgatttattccaaatcttaactactgaaaagcctactgagaccaaaattcagaatttgttctttcttcattaattacggaatccacacttttcacatttaac

SEQ ID NO: 17972 - DNA, 201 bp, Bos taurus
tagacactggccatagaggaaaggaagaagagttctgaagccattccaagtcctgttccagaggagaacttggaaggaagaaggattttcatgagcaggagactggatggagtgggccacccaaatgatggaaggacaagatagatcagcagttgagaagcattgctggcatcaagagagttcctactggaggggaacctc

SEQ ID NO: 17973 - DNA, 201 bp, Bos taurus
ttcatattactggaatggccaccatggtatggtgttccagctgctaaagaaacaatccgtgataaggcaataacttaccctgagcttcagggtcagtatgcgccatctattctcatgagtttaacatccataaaactctccagccctgacctctccctagaaatttaagttcttatgttcacaggactgctggtaaggtat

SEQ ID NO: 17974 - DNA, 201 bp, Bos taurus
aaaatcatatccattgagtcggtattttgtattttgtactctggaggttagcaaaaactttaactccttccagagatatcacagagtaggccatatcttccatttcaaaaatttgggtggaattttcagagcagatacaactgattaggataaaggactcttctgtatgtcaattaatattatgtattattaatagctgtg

SEQ ID NO: 17975 - DNA, 201 bp, Bos taurus
cgtctaatgatagccttgtgctctattctcatcttttttggcccttgtctgggaagaaggagccattctggcaaaatgcctttacggctttttggaagtggtacaatctgaatatggccataagtgcaaccaatgaaatattaggatctcaaaactattccaagtcttcttgccactctccaatggtcatggtgtgcttac

SEQ ID NO: 17976 - DNA, 201 bp, Bos taurus
tatggtacattcttctgaaatactttgacaagtagaaacacatatgctaaaagtaatgttttttaaaatgttttcataaggaacttaccaaagttcaatacgaaagggggaggacaatatgatattttaaaaagaagttgcaattccatctattcagctcaaacatatcatgtaataaaatcatataacttttttttttaa

SEQ ID NO: 17977 - DNA, 201 bp, Bos taurus
ctatgagtacacattccaaccaccctttggtacattctacccgatgttatctccttgcagtagttatagttaaaaattacaggcaaagggtgacatcctggaactggtgaaaataagtatctgtctcctacacagacccatggaaggcaaagactgattgaaaattgtatttcaagaagttaattagataaggtgaaaatg

SEQ ID NO: 17978 - DNA, 201 bp, Bos taurus
tgactccagtgttctttcctgggaaatcccatggatggaggagttcggctggctatggtccatggggtcacaaagagacagatactgcttagcgaccaaatagtaacaacagctggatccatacatgatctatctgtaatatgagtatcttttcaatctatgatatcagatactcttgaattatcctgaataatgctatta

SEQ ID NO: 17979 - DNA, 201 bp, Bos taurus
atggatgactccagggtttttggtcagatcaaatgaagacagagtggctattaatttcaaggctaagggagggccaggtttggaatgtggggttggtcatgtcaagtctgggaagcttattaaacttgcaagtagacttagaggtgaatgggacccattgggctccactgtgaacacaattcacagctgcatgtgctgcct

SEQ ID NO: 17980 - DNA, 201 bp, Bos taurus
atattttcaaatagtcttccaggatcactgggcctgttgtctttgagggcttttgagactgtgaggcacaaagtccttaggctcttccagttgatggcctttcttttgtctaatctgtttggttttattgattttacaggtttctgtgtcagtcttaaggcatgcctaccataggacagacattccttgcatgaatggcac

SEQ ID NO: 17981 - DNA, 201 bp, Bos taurus
attttgaccaagttgacaactttaatatttgtcctgaaagtattttctattgccattttaattttttgcatttccttctatgtaaatttctgttcttaatcttatactaaaatatattacactgttataatcatcatattatatatcatatcacatatatataatgaaagcattgcatttatcacatgcgtgaaaaaaagg

SEQ ID NO: 17982 - DNA, 201 bp, Bos taurus
aattattattgatacgatcaatgactatcaggcatcctttctcccccacacccacttcctgcttttggaaatataactagctctttccatagcgaacacaattttgtggcttagagacattctcttactctcttgtcaatagcaaaggaatcaatcaatctggccccagagattttctaacatagagaaatgcttaaagat

SEQ ID NO: 17983 - DNA, 201 bp, Bos taurus
acttttcctaacttagagctcctcgatttttaagaatgttacttcagccttaccaagttaaaatagtaagtggaatcctgccaattgccttgtcactttgaatttgtataacaaactttatagattggacctatttccccccaggtactctacatataatgccagtaacagtcaccacataaagaataatgctgtaaggta

SEQ ID NO: 17984 - DNA, 201 bp, Bos taurus
acaaatatttcaagtataaaatgtaaccattttaaaaacatctgtattattataacttttatgaaacatcaaatgattgcattttcctattgaattgccccatgatgaaaattacacaaagtacacttcagttcagttcagtcgctcattcatgtccaactctttggaaccccatgaaccacagcattccaggcctccctg

SEQ ID NO: 17985 - DNA, 201 bp, Bos taurus
actgagcaactgaactgaactgaactgacagctgcttcagttgagatgttccaagatattatatagtataacaaaagtcagaatattttaatgactgaatactccatctcttcaaaagcatagctttgtcaagggactgaatttttcttaacttggagctatgaatacatatcacaattcaacgttcaacgctggcatatc

SEQ ID NO: 17986 - DNA, 201 bp, Bos taurus
cattcattataataaggaaaataaacacaaaatggccttttgaaagtgaatcactgtaattcactccccacactccacttctgctcttatatgagaaaaagagaattccagaaggcctcagcttccacacgaaaacttgttctctactcggcaattttcctacatctcttttttaatgatgaaatatcaaggcatttaata

SEQ ID NO: 17987 - DNA, 201 bp, Bos taurus
ggatttgtgtttcacttaaatgttctttaattatggagatctgttcaattatagcatatactggtacagtatcaaatttaatccaacaaagaggctcctgtgtcaccattactaatggctcagaacaatttttcccttatctgttctgagaggctgggttatccacctgcttcactgaccatcatgctaaactctagggct

SEQ ID NO: 17988 - DNA, 201 bp, Bos taurus
actcaagagtgctggactaaacaatatttgaagtcccttccaggcctatcacccaatcatgtttgagactctttcttatttattttacaaacataccaggatactttgagggaaaaaggatggaatttaaagttgctcattttcttcatggaattatttcccaaagtcaaaagacaaaaacaggaaaagaacagtcgcttg

SEQ ID NO: 17989 - DNA, 201 bp, Bos taurus
tctaaattatgaatggttgatttgacaaagacatcctgcagacttagacaaatgaatattaaaagtctttaagactactctgttattactcagctccagtaatgggaaaattcaggcccagcactgcaattgtcttccaatctagattttcatgtgcaacttttaaaaaaattacttttaaaatcctgttgtctgaaaaaa

SEQ ID NO: 17990 - DNA, 201 bp, Bos taurus
gtatttctatagctctgttgcctaggatacctcaaccatctgaaatgttaggtactctctggagtcgcaatttctctactacagactgccctaggcctccatgccatatgcccaaacactcattttccttccttgttgttccctaacactatgctcagtggggaggcctctgagattggtccaacagtggagagagagggt

SEQ ID NO: 17991 - DNA, 201 bp, Bos taurus
agtaggctttgggctatgcaaacactcagaaaatgtatacaacattgagtataattccaaatactgtcttccaccccaccctcagtagaaaattgacagctttatcagctttttacagagtttcaagacccaaatgagatctagaacttgtgctgtggtgattcaaataagctaaagtgtctcagaaaagaatgagaaagg

SEQ ID NO: 17992 - DNA, 201 bp, Bos taurus
ccaggaaaatttgaatgaactttttggccaacccaatatttgagggtaaaggcaatcaaaacccatcagatttaagaaaagtcaaccacctaaatttatattggaaaggtggcctgtacccataattattttttatctaggaaacgtatctgcataacagggaaacttgtttttcaaacatctcctctgccttcccatgaa

SEQ ID NO: 17993 - DNA, 201 bp, Bos taurus
tcctctctctcactcatgctggcctccagggcaggagcttattggtgacatcactggcccatagcctttgggcagaagggccatggtgccagcactgagcggaagctctgagaagctctgtgagtttcactcatcctcctgtgctagaccccagtcgttcctgcccctttagcctgggccccatcataaggagacactcag

SEQ ID NO: 17994 - DNA, 201 bp, Bos taurus
aaaagttaatttaaaaataaaatttgaaatcaaactctggatacttattagtttcaggaatatagcctatgtcattaattaagccacagtaatattattggtaatgatttcataataatccatactgtggctgaacttccagtgtttttcatgtctttattgtcaaacaatttttctcattttcgttttaataaacaagca

SEQ ID NO: 17995 - DNA, 201 bp, Bos taurus
ccgtcccagcatggtccctcaaggataagctcttctagagatccttctctagctttccctgacgttgctagccacccctcctgtgtggtccttcagcacagtgggtgtgactctggtccaaggtactcattgttttgattatgtcatcttatggttgcttctcagcttgccagactcttccctggagcatcttatctccac

SEQ ID NO: 17996 - DNA, 201 bp, Bos taurus
cccagcacccagctttttagcaaattaactgactctactgggggacagaaagggcagggacagatgttcattcatttttgctcacactatatagtaggaaatggcttctgggtataagtaatgaaaggcctaagaagatatttgaaggcaggagaaggggacaacagagaatgagatggttggatggcatcaccaacttga

SEQ ID NO: 17997 - DNA, 201 bp, Bos taurus
ggcagcctgaagggcctggatcagcagttggaatgagactgatcaaggtctagactgaccattactgaaatatgcacttctggagtcaggtcctttctcctaggacagtgacctgggcccgggagaacctggctaggtgagtcctgcagcctgtaggaactgcaaaggcagagagaaaacagcctcatctcccattttgtt

SEQ ID NO: 17998 - DNA, 201 bp, Bos taurus
actcttttggaaggggtcctgaagcaggcacaagggacactgagctgcgggaggctctgctggccccagggcctgtggggaggcctgtgggggcagtgccctaggagaaagcccgagtgggaggaggggagagccagaggcgctggtcgtcagagaggccggcagagagtattccactgggagagaagggtcagtgtatgt

SEQ ID NO: 17999 - DNA, 201 bp, Bos taurus
aaaaaaaaaaaaaaaaaacccaaaaaacccagaatcacaaatttgaacagtgatgttaaagagcacacatgtgtgttaagagcatgaaagtggatctgaccaatccaggggtgggaaagtagtggtaaggccagctgccctaacagcatcccttcctcatagttctttttctgagtttagttggaaccagggagtctagag

SEQ ID NO: 18000 - DNA, 201 bp, Bos taurus
agggatggtagtccctcccttgtcaggggctttcctgggtgtgccctctctgatgatctttgcttcctaggagcagagagggagatggatctgaaggatgtctgaaggtagggcctggggtggggctgggcctatagcagcttttctcagagtggtcctcagaccagcagcatcaacatcacctggaaacttggtgtgcgt

SEQ ID NO: 18001 - DNA, 201 bp, Bos taurus
atatcagtcttaagtccactttgcattatgtttcttccctgctgaggggagtaggaaacttggaattaagagagttggggttggtggtgaaaaccacctaaattacgaagcctctggttcagaaaatacgcatgacttctgctgtctgcctacttcctccacttgcctccaccctcccatttgtcacattgtccctccctt

SEQ ID NO: 18002 - DNA, 201 bp, Bos taurus
aagcccaaaaggccccctgggactcctaccgctagatgctcagctgagtcccatgttctttttcagcaaagtatcccatgattcagaccctaagtgagtgtgggggccttgcccacccaagaccatctctggggaccaagacaggctgcagggagaagctgggaggctctgggaagaccacccagccccagttgctccctg

SEQ ID NO: 18003 - DNA, 201 bp, Bos taurus
gggatacagacattattcagcccataacaagcaccatgtcccattttgaggagaatgacctccctccctgataacactctcttacatattcatgagacaaagttctagcaagcgctaacaaacttctgtctttcatgcagcctggcttgttttctcttacatgcagcccgccacaccaagctctccctggtgtggctccgt

SEQ ID NO: 18004 - DNA, 201 bp, Bos taurus
ctcctgtgctacatgtggtctcctgcattgcaggcagatgctttactagctgagccaccagggaagccctttattccccaatagctccgtgatttttaaatcacaaaacacttggtcttggacttgagccatggccctgtcatggtatatttcccactcagcgcagtccccttgttggggacagagttagacagaagccta

SEQ ID NO: 18005 - DNA, 201 bp, Bos taurus
cttgcaaggacttcatggttcccaagaattaaaagaaaaaaaagaattccacttgatcaacttaattccttttctttatcttccctccctcactcccctttcctgccccttcttttccaagctgttttgctttgcaatatgttactggtaatgagttgcaggataatgcaatcttaacttgttttctctaagtatttgagt

SEQ ID NO: 18006 - DNA, 201 bp, Bos taurus
tccaggagactctcaaaagagtcttctcttagagaagtgctagtgtatttcccctttatttacttttttttcccagtttatccagtcaacagaatattgatcacttactgtgggtgcgacctggtactgggaacaacatgctcgttgctcctagttagatgagtagtccttgttaaagttcagtgtcatagagacagcaat

SEQ ID NO: 18007 - DNA, 201 bp, Bos taurus
gtggtactgcaagggagcagcggatgcctagaggctggagaagggaggagcagggcacagaaaatagagaccttgaactggagtcaaagaacatgcatcagcgcaacagctgtgccaagggacgcttgtggttataggtccattcttgtgatttcaggctatttattaataggtgagggtgattgtgtctcctgtcaccct

SEQ ID NO: 18008 - DNA, 201 bp, Bos taurus
aaaaaaaaagccctgagactttataatatttaaaggaatttgcattaaagtatcaacatgattttttcaccgacaggtaaaaaacgggtttatataaatacagaacagggtctggaagaatacgcagtaaattatgaacaggaattcattttaaaggaatgtaattggggaagcagagcagaagtctttcaatttgttact

SEQ ID NO: 18009 - DNA, 201 bp, Bos taurus
tgtctgattggctgctcttgggaatccaaatatgtagtacagtccatctaagagtctttcactagtgctccacccccatctgctgtgtggatgaagatggtagtgccatgccttggaaaggtatctatgcagccagtgtccaatgccatccttacgagaatgataagggacctacacagtctatttgccaggacaggccag

SEQ ID NO: 18010 - DNA, 201 bp, Bos taurus
ctgcagagccccttggtggcatgcaaactcaagggacttcggtcctgagaggtccgattagtctacctagaagcacaaagagaggtcttttgagaagtctgggcctcagcagagcttctgctctgtccagccagcagtatccccctgcctatgtaattttcagcaaaccgcttatgttctttgaaccttgatttctacatc

SEQ ID NO: 18011 - DNA, 201 bp, Bos taurus
gaaagctgtgacagtctaggcacttgtcaactggctgcctggcaatcccagaccagtccctgcccagagccctggcagcctctccccttccctctatgatgaggagggcctcaggagctcctgtttagggacaagaagcagtatgagtcagatgttcctggggcggggtggaggggaaagagaagaggcctaggagggggc

SEQ ID NO: 18012 - DNA, 201 bp, Bos taurus
ccttcgggtgggaggactgaatcagggtaggggggcagccggatccaggcattcagatgtccaggctgagtctcttctctggctgttttaagaacctacaatgtcatcagcccctttgtaggggcctcttggagacatggaatgcaatgaccttgagttccaggacctcctgccttgatgtttactagggagaccctggaa

SEQ ID NO: 18013 - DNA, 201 bp, Bos taurus
tgctatctggggctggaggggtccaggattccagctcagggctcccaggctggaaagaattttccagtctatgagaatcactcgaacaaacatgtctacgtcaaggataggtccctgcaaatgtaggtgtagggagcccctaacctgtggtagcaacctgtgatagcaacaaactgtaatagctctgggacctcagctttc

SEQ ID NO: 18014 - DNA, 201 bp, Bos taurus
aagagaagcagcgcagcttgagtgactaaaccaacccgtattacgcataaaatcatagaaggaaagggtgggaaatccacaaggcctctcctctgggctcaggcacacggcgtcccttccggggtgactcacagtgggctcaccttcacccctgcttcatgtggtaagggcctctttataaggagacatacccgcggagcc

SEQ ID NO: 18015 - DNA, 201 bp, Bos taurus
ctcaaactgaggaaggtcagagaagtcttaccaaaggacagcgaaaccaaacgtggaggagctacggctctgaagaaaaatgtgtatctcacagaaacatcggtgttttcagttcgtagagtaggtatagcagcgattgtgaactaaatggctgggggagggtgccgagaagcaggcgaaggacccagttgtgaaagaccc

SEQ ID NO: 18016 - DNA, 201 bp, Bos taurus
aacttttcattatcctctgggggctgatgagggcccctgagctttgagaagaagggggaccctactttgcctacacggtagcactaagacaaccagccccatgcacgggccgctcacttggtgatggtgccccaggactgatccaggtaccagatggggagggagcctggcttccacagtgacgggggagagggttcagag

SEQ ID NO: 18017 - DNA, 201 bp, Bos taurus
aaggaaggactccccaagcacaccggaagcctgcagtttttccacacggccactggagggcacttcaaccttgaaatagagtctttggagagcccagattcaacaaacgtttttaaattatcacaataatgatagctctcctggttgaatatccaatgagggcctcaacgccttaaacatatagcatctcgtttaatattc

SEQ ID NO: 18018 - DNA, 201 bp, Bos taurus
gcctggccgtgggcggcaggcttagggcccttcggggctcccttgttcactatcagggccagggatgctctatttgagaatgagagttagccaggattggcgcaggagtaggggcctgctgtagtgggtgtggacatattcagaaatacctgtttcttagttcaaataaagtccagtttgtacccagctggtgtgctgtgt

SEQ ID NO: 18019 - DNA, 201 bp, Bos taurus
aacctgggccacagcaatgaaagcccagaatcttaatcactatgctaaccaggaattcccattatcttaaaaaaatggttttttattaaaaaaaaaattgttctgaaacagctggggccattggcattttgttctccaccccagaaggagcgatgagtatgggtgtccaaagaccctctaaggggagatttcactccatct

SEQ ID NO: 18020 - DNA, 201 bp, Bos taurus
tcacgatgttagtgagttattataaaaagatttggggctcatctgaggaaaacgtgagtaacataagccatacattaatggatcacatggttggttaaatataggcttttaatgaaatccccaactgtgagaatttctgtttctctaactatcccttggacctccagagtccttgtcttggggctccatcctaggggagtt

SEQ ID NO: 18021 - DNA, 201 bp, Bos taurus
tctttctccccagttctctcagaccccacccacacccagcagaaagccctgttcttttcatgttgttttcctgccttagtgaccttcaaggcccaattagagaggatggattcaccctttagatgacgaccccgaattattagtaacataaagcttggctttcccaggcagggcctggttaattgcctagaagcatgaagc

SEQ ID NO: 18022 - DNA, 201 bp, Bos taurus
gttaccttaggctctgcttttgagggaactcaaacaaggacaggttgctcagagagtctctaggaaggtcagaaaaccaggctgggaggccacatagccaaaaatgatgttataggttgtctacagagctggttcattgttcataccactgctgtctcgcaaacagcaaacacatcagtgctgatcctggccactgggcat

SEQ ID NO: 18023 - DNA, 201 bp, Bos taurus
acccacaggcttccatgctgggtccccaggagctgtgaatatctccgaatgacctctggccttggtgctggtgccagatgagttgacacagtaggcaagaggagtgttcctaagagtggtcctaccctgggacggctaacaatgacttcactatccacagaagtgactgtgagccatcgaaatgcctctcactgaactcaa

SEQ ID NO: 18024 - DNA, 201 bp, Bos taurus
tggcttggggctgagggtaagcagaggggcctgctagagcttgttgaaatgatacaacccgagtcctttctctgcaggccactgaccttctatttggatatgtaaagtggtagtctggagagaaaccagcttgcatgatagcggcattttcctccaggccctaggaaataagtgaagtgataattacagggaagataaagt

SEQ ID NO: 18025 - DNA, 201 bp, Bos taurus
tttgataaattcaacattaatagaatataacttccttgattaagttatgatatatggcttcaaaagagatcactcaagtgggccaagttaataataaaattttaaaatctacatgaaggagtcagaaagaagaatactgaggtccagaatcactgttccattgctggcttaaaaatggaaagagccacgtggcaaataatt

SEQ ID NO: 18026 - DNA, 201 bp, Bos taurus
ctttgtcaagcttatttcctgatacaacaatgaatttggctacagcaacagagtgatggacctcatggtctacatggcctccaaggagtaagagtccctgaaccaccagccctagcaagagcatgaaaggaagagagaggtcctcaactcttggggagtccttgccccaccttgatcctccagcacactgagaaatctccc

SEQ ID NO: 18027 - DNA, 201 bp, Bos taurus
ctcctcagtttagtttatcaaattaactgcaagtgccttgtaaaactctcgtgggaaggagattggactgaattaaagcatgacaggggacagagaatatcgataatctaaccagaaggcgaggaagacatagtagattgaccaaagtgacaacgtttctgaattttaagtaattatcagcttcaatctctgtagcgtaca

SEQ ID NO: 18028 - DNA, 201 bp, Bos taurus
catgcaaagccccaggcatgtaaagtacatgaaagatatttaaccatactggttaagaccactgtctctgtccactctggcatcaaattgtgccaagtgagtctggggtgggcctgagccatttttttccctaaatatgcattcatgttcatacgtaatacctaatttttgttcattctttcagcaaatatttattgagca

SEQ ID NO: 18029 - DNA, 201 bp, Bos taurus
ttccaccgggatgctggcacaaccacatgcaccaaggaagggatacaagcatttcagagcatacagcaaaaaaagtgagatggacgtgaatattctctcaaccttgccatttcatctaaccaagactttgtcaatggattttagacagcaatgttctatatagctttaggcacagaaatatgggaacagaagaaatcagtt

SEQ ID NO: 18030 - DNA, 201 bp, Bos taurus
tggtagattcattgcagtttatcaacacacatatatacagagacaatccaacagtttaagtaacatgctccttacgcgtttatgctggatccaaactctttgttcttcatgtttctggggtttatatttgttcagtctcaggctttattgattcccttccctaattctgttgatggtttaatgatggattaatctgcttta

SEQ ID NO: 18031 - DNA, 201 bp, Bos taurus
caattgctccggtggcattaacatctgatttccacttaattgatctgatcaactctgccctgatctgaactggtcaccaagacaagtgaaagccccggattgaccctgccaccgtctgctgtttttcagttgtctagacatagtcataaatagctggatgactgcccactataaatttttaatgagagattttgaaattag

SEQ ID NO: 18032 - DNA, 201 bp, Bos taurus
tgcccatgagttgaactgaaactacaactttgtctccagtgaagacactgcttatttttaaactacagcagagtttatacttctgacccctccattttgacaccatatgcttacaagactgagggaaactgcccacaaaatggtggccaccgactccagctgtgcctgtaccaactggcactcctcccatcaggagtgggc

SEQ ID NO: 18033 - DNA, 201 bp, Bos taurus
taagagaactgcattgctcaaagtgtggtccctggaccagttgcatatctatcatctaggagctagttaaacatagggttttgttatgacttcactgagccgtaagtacttttgtcttcatggacctcttcctccataaagaaaactgaaaactatatttctatgactctgctaatataaagacagacatattaatattat

SEQ ID NO: 18034 - DNA, 201 bp, Bos taurus
aggcacgaagatatagacagtaaaaagaaaagatttctaagattctgttcatcgttgagtctagtaggggaaccaagagggaaatcaattaagtacttggtgttgttaaaaacattgccagcaagataggctcaaggtgatgtggggtgtcatgtagcttagactaagaggataaagaagacccctgtgaggcactgactc

SEQ ID NO: 18035 - DNA, 201 bp, Bos taurus
tactgctggctgccattaaggaagttttagcaaaaacatccacatttttgttgcttggtcaggaaaaccttgtttcatttatacagcatttctctctcctggggacacattctgtattcatttccctgagatggtccacttaaggaaaagtaaactgaaggaaagtcatctagaaaacaaatcggccggcagtcagcctat

SEQ ID NO: 18036 - DNA, 201 bp, Bos taurus
ccccctaatctccctccccatttcctcccctactcaacctccccaggagctagttatgagtgtattcaggcagatttctgcatggaagctctagccaaagcaatgtgataaattcctagaatatataccagtccttcatgtcaaagcagcttctggcatgaggattacactaggatttactgaacttggttcatctatctt

SEQ ID NO: 18037 - DNA, 201 bp, Bos taurus
aagcattatgtttcctctctgtaaagtgtagctcatttaactctattctaaacctgtcgtgagactgaaatgattcaattttccttttgggattataggcggacatttacataagcaatatgtatttattgtagaaatattggaaaatactaaataaagagtgcacagaataaaaatcataccactctgggttactgctct

SEQ ID NO: 18038 - DNA, 201 bp, Bos taurus
acatcagacctcacctgaatgaaacataaagccctgctacctgaagccactgaggttgttagggtacatttgtttctgcagcaggatctggcctgcctgatcaatatactggtagatgtagtattattcactttagttcacttcagtcgctcagtcgtgtccgactctttgcgaccccatggactgcagcatgccaggcct

SEQ ID NO: 18039 - DNA, 201 bp, Bos taurus
ctatggagaactagttataagtgttggaaaagccaaaaggggaagcagggaaagcaagacaacccaatggtctacgaccacaggaacccactgctacccatagctctgaaggacaatgagagaggtatgtgcaggctgttcccccaaagagctgtgtagccaaggccatcaggtgtgaaccagagtcacagaacagatgga

SEQ ID NO: 18040 - DNA, 201 bp, Bos taurus
ggttttggcgccagctatgctgttgacaactgtcttcctgggcagaatgttcacttttgaccaaacaaacaaatgtccaaggcacatatagtcaaaaccactggccagaggacatgtttatagaaagtcccaggggatatactttgctcattcaacagtgaatgaacttttgtgagcatctagaagactggtcctccgtct

SEQ ID NO: 18041 - DNA, 201 bp, Bos taurus
aagcacaggggagcatcagggcatctgataaacctgagaagaggaaaataaaacaaaaagtagacagatttccctgggaaatgcgaagggtccatttgaagtccacaacttgaaagggtcatggctaccccagcagtggattcaaaaaaggagtttcccaaggattcttgaagaggctggggcagggcagcccctgtgaac

SEQ ID NO: 18042 - DNA, 201 bp, Bos taurus
ccagcatcacctggccttccaatcacattttgcgtagtaaggaagtagggcacgaggcacatatcagtggataactgctatcagacacagttgtttataattgcctatgcaatatcacacaacatcagaaccttccctggcagcaagtttttatttcgtttgatgaactgcagcccggttcaatttcacctgctccctaaa

SEQ ID NO: 18043 - DNA, 201 bp, Bos taurus
caccagtccaaggtgacccagccaaaagaggtagagtggtccaactcttccattatttcaaaggtagagatacaggtagcatctccatcagaaagaccaggaggaggcctgacctgtgaatctcaccatgcattattgatctgtcagctgaaataaataaagctctgcataaaacaggaggacaaagtgaaatttcactgg

SEQ ID NO: 18044 - DNA, 201 bp, Bos taurus
aagcattttcttaactatgcattttgattgtttcattgtttatctttgtacttcaactggagtttaaatatttaattgtttccggagaactggaagaaaatcttatttcagaactcttcacacgaactgccaaattgctttttggaaaatgtatcttagttattgttctgaactgcaatccaagactgctagtctattgtc

SEQ ID NO: 18045 - DNA, 201 bp, Bos taurus
gcagctcagccaatgcacttgtctgtgtgcccttgtcctgagcctgtaaaacagtgttaataaagtgcatctcccagaataatcctgaagacattcacagcatggccaacatgtgggagggatctacaggttgctataagcatgtaatgcatagtgatgagtccatgaaggtgaaagtcttaaagatcaattcttaggtca

SEQ ID NO: 18046 - DNA, 201 bp, Bos taurus
ttatggcacagagactctatttggggatattttgaggtgggcttagaggtaaggatatttggctgaagtcaacagtaagcaatgaccacagagtcaactcggattagagtacaatacacaatacgggatatccatatagatagagggagacaatgtgaaacacacgagtcaaagaaactcaaggattttgagaacatcatg

SEQ ID NO: 18047 - DNA, 201 bp, Bos taurus
tcagacaccactgaagtgactggacacgcacgcatttatttagcaagtgcaagaaccagataactgagctacatactttttattcaaacctttgaaagatgaataggaagtagtgaggccaggatttgcagttagatctgtctcactctacagctcaacattgcacagagacatatctcctccaaattgccactggagata

SEQ ID NO: 18048 - DNA, 201 bp, Bos taurus
tgtagaattgttgaaacttggtaacccttcccatccagagtaaatctgacactttactattacattaggctgttatacagttagagtagaagctgtgactgtctcctctgctcatctcttaggtcactggcttgttgcctttctaagtatgggaccttgctcaaagtgagtatggagaggaacaaaactgggagaaaccag

SEQ ID NO: 18049 - DNA, 201 bp, Bos taurus
aagatattattaaaagctattatattttaccttccctaatagagatcatattttaaggggaatgaaaaccaagatggcaatgtggtcaacatctatttccaatttgttactgtctaccctggaaatgttttgagggaaggaggaacagtctatgtaccttacccaaattctaatagttaaatcaactgaaaattctatttt

SEQ ID NO: 18050 - DNA, 201 bp, Bos taurus
agcgtaagctcccacctcagggccttacttggcatttgctgagatgactttccttaagacatatatgatttactcactccctgagttttttcaggtttttggtcaaaggaatcaactctaaaaggcctcccatatcctccccccacctaacagtacactcactgactgtgctgaattgtgtatagtttctgtctgttatca

SEQ ID NO: 18051 - DNA, 201 bp, Bos taurus
tcttcacttctctgcccagaaactgctgattaaatcagtctgccccttccccatctgtccgtctgtcttcagtttcaggtgaaagccagaaaagagaatatcccaccttttttaatacaactagagaccttgtactttggtgaataaaagagactcactgggctatttataaaggttcccactggactttcatttctttgc

SEQ ID NO: 18052 - DNA, 201 bp, Bos taurus
agagttttgagttgtgaatcaatgaagcaataaataatgaacacactcctgtgtagttagaactcctaggtttcagggcatgtttttcttcatcaagtaagatcaaaacatgttcatatatgggtaaaattcttagagaaaaacaaagtttatgtagttgttgtttagtcgctaaatcctatctgactcttttgcgacccc

SEQ ID NO: 18053 - DNA, 201 bp, Bos taurus
gtgtaggatgagcatgccttcagaatcattagatccatgtatatgttgggcaagggattgaacctcaaagccaatgatttcaaaatccaaggcagggagtaggaagggtgatgaagagtcagaatcacctagtcctcaagtgagtagggacagggaaagagtggagagttaacatggcccagggaaatgtgctaggattgt

SEQ ID NO: 18054 - DNA, 201 bp, Bos taurus
ctcaaagaaaaatttggaatggaaatagaaggatgaggctaggtgggcaggaaaatggaggaaatctgaagaaaaaaataacaaggctcatgacccattagctataggcctgtagaatactcatgcaaaaaaactcattgtttctgaatcagctcacaatactacggtgacttgggtccacttttcttgctaaggttggag

SEQ ID NO: 18055 - DNA, 201 bp, Bos taurus
taacaacaacaaaaacacacaaagaagctaaagatttcactatttctacccccaaagtaatgcaagattactttcaagactttggatgagacccaaaaaaatttttaaaaggccaataatatttttttcatataaaagtaaaagctaccataaaatgtcctttttttcccctcccccatcacactgattaaatttttctga

SEQ ID NO: 18056 - DNA, 201 bp, Bos taurus
ctggaacagcagcctcatctcgtgtgagtatcagaatcaaccactcctgccagggtagaggcaacttgctttaccttcttgtttcttggcacaaggagagcgaagtgactggtgcagcccagtagcttaaagtttagtgggacccttgccttgccccttggtgcatgtttccattctgggaattaggacctttacatccat

SEQ ID NO: 18057 - DNA, 201 bp, Bos taurus
gcataagtaatcaaaagtgtttatggttctgttaatttgctgaaaggggaacttaaatggatagcaaggaaggaaatccaaactatcaagcccaatatttccttgttaatttgctgaaaggggaacttaaatggatggcaaggaaggaaatccaaactatcaagcccaatatgcttaacctttacagtacttatgatgttg

SEQ ID NO: 18058 - DNA, 201 bp, Bos taurus
tcagtgtcaccctaagtgactctaacattcagtgggttcttaagtttcttccaacaactttaaatttagaaaaaaggacaagatggcacgagaatgaaagataagtagcaatgaaggactgaaaatggaacttctatttaaacattttactccatcttttccacttcaggctttttgaagattaaaacccaatagctccta

SEQ ID NO: 18059 - DNA, 201 bp, Bos taurus
ggcttctatggaagaagcattctaaaaagtcaagacctaagatgcaagcactttttgaacttctgcttgcatcatccttgctaattcgcattggccaaagcaagtcctatggctaaggcttgaggggatgtggaagggacttactacataagaatgtgaacaccagtgggtaaaaatccatgggggccaccagtgtggcag

SEQ ID NO: 18060 - DNA, 201 bp, Bos taurus
tatccctgtaggcccaacgaatgtgctcagaatctggtggaatttggcatcctagaaatagtcatggtttctcaagttgtatattctattatcagtggtctgcaaccttttcggccccagggaccagttttgtggaagacaggggcaggggggatggttttgggatgatccaagtaactacatctactgtgcactttatct

SEQ ID NO: 18061 - DNA, 201 bp, Bos taurus
gaatgtattctttgaaattaaatgcatcagagcaataatatagtctccatgatgttaggatcatccttagcaaaattctaatgggaaatgtaaataccaggtatttctgtttcccagtcatctctaagactgtataacacaagaaactggcttatttgacatggctgattagacagtcgtcttaggaaatacttattcatg

SEQ ID NO: 18062 - DNA, 201 bp, Bos taurus
aagctaagaggcaggccaataaataatatttaagaaaaaggaggcggtccagcctgtctacagtcagaggctgagtgggagaggaaagggagaaacaattcaaaacagaagtcggggccaattcatggaaggctttgaaagccaagaaaatgaaagtttccattgtatcatgaaagttatggaaaaccactgaaggatttt

SEQ ID NO: 18063 - DNA, 201 bp, Bos taurus
gccaagtcagatgttcaggcctgtgttctgtttatagaatgtgtgatctgaaagcccaaacagcactggtcattttgacagccttaatgagtcatttagactggcaattactaaaataattacatgaagacaagctcactgtggtcatcacaaacggtttcacctttttcaatagactctcctctatctcctgttgttaaa

SEQ ID NO: 18064 - DNA, 201 bp, Bos taurus
agaacctggtactattatttagcaacttgatggtgctggccatatttgataacactcatgaagttggagtgtgtgataggaaatcagaatattggttaacgatagcccttagatgactggccgctagcttttcccattggcctcggtcaagtcagtgtcagtgatggctgttaagatgcttactcacatgatctctcgtgt

SEQ ID NO: 18065 - DNA, 201 bp, Bos taurus
cctctgtagggttcttttggactttgtcaaaagctcacaggtcctagctctccatgttctctctgcatccaagttcctgtcatttcttcctctccaaatataatcctttaagtctataggtggtagcagcaccagtgaacttacggttgctctatatcctgtgtaccctttgcagtcagtctgtttgcgtataagtccttc

SEQ ID NO: 18066 - DNA, 201 bp, Bos taurus
ggttttgtttttaaggacaaaagcttgaaagaacaatgttttgttgagaccatcaggatgagttatgtggttggatgcagtttaggactataacttgttatttagtccatcagtcatatatgacttttttgtgattccatggacggtagcccaccaggctcctatgtcctgggattttccaggcaagaatactggagtggg

SEQ ID NO: 18067 - DNA, 201 bp, Bos taurus
ttgtgctgaaatggggacacagcttctgggccaggcgtcacaaagacgtggagacatagaaagagctacctacaatcttgaaaatctcttaagtgatgtgtctgaggcccttctccttactgagcactgaaagttgtcaaatctgacttgtagttcctatgattcatcctggggaaagccatcattcatgtttcatttttt

SEQ ID NO: 18068 - DNA, 201 bp, Bos taurus
tgaacctgggaagctgtcccactctgttgccacctgaggttggccttttcagctttgctggcaaaatacaagctcacggccacggctggttagtgacggattcagctctatagaagaaatatagagtaagaaagaattttggtaggaaaaaaagaaacaagggagacgaagaaagcaggccacgcggaggaattggcatct

SEQ ID NO: 18069 - DNA, 201 bp, Bos taurus
ccaaatagagcagtgtgtaattaattgtcactctgtagaaaaaacagggataaaactaagaattggaagagttagggatggcctagtggaagaggaggaactgccactgaggacaagtaagattaaaaaaaatgcaagcaagaattagaaaatcaaatttaaggcctgaagtcaaagcttatcaatcctagtattaaggaa

SEQ ID NO: 18070 - DNA, 201 bp, Bos taurus
tttcattcattcagttaatgcttatgaaatagctactctgtgcaggcactattccaggtgctggcatgtctattttgaagtgtcaaacaatgcctgcgtgttcatcgcttcagtcatgtccgactctttgtgaccttatgaactgtagcccaccaagctcctcaacccatgggattctccaggcaagaatactggagtggg

SEQ ID NO: 18071 - DNA, 201 bp, Bos taurus
aactagattatccactttgttttattccaacatttctcttctttcttataatgatgaaattgtaaaatgtgtagtcagtgggcccaaataatttctttaatctagttgtcaaagctgattttaaatctgtctcatcctttatgattcacctaatgggccatatttaatatgaaaaatattgtaagtgtatatgagtcaatg

SEQ ID NO: 18072 - DNA, 201 bp, Bos taurus
gggtttagcagtacagattagagcagtgaaacacaggacatttcgtacaagtggatgcatgagcaaaagcacagataatggcctggaatgagggagttcaggatatattgacagtcacagaagtgttaagcagcaagatcagatcagatcagtcgctcagttgtgtctgactctttgcgaccccatgaatcgcagcacgcc

SEQ ID NO: 18073 - DNA, 201 bp, Bos taurus
cacttcatattctatgaatttccctttgattcctgctgtacatattctgggtctttttttgtagctcctcaaaaaagtatttgcatcatttccttctttcatattgtttttgcttcaggaatttgtattgttttcttctccagttgaaaatctctcttcatgttgtagactaacataaccccttacctgcttctgattttt

SEQ ID NO: 18074 - DNA, 201 bp, Bos taurus
aactagagactaagtctgaagtcatgttagtttggtctaaagtatacttaagcaaactgtcagtacttctaaagttcaggatttttatagaatgcatatatgatagtttctcagtgagaagttgaagagagaaccactgtaatttgattttgtgcaaatggaaaaaaaaagtcaaaaatcattacacacttagtcataaac

SEQ ID NO: 18075 - DNA, 201 bp, Bos taurus
cctactgtttttcaagtatgttggaagcccagcacactcagtaccccaacatgcagcagtaatattatatttgcaaagctaacttgcgggagggtgatatgtctactttgaaatgttccctctggtgattttaacatgtcatccttctttggtcaaggtttttactccttaggggtgactttatgattagcatttattgaa

SEQ ID NO: 18076 - DNA, 201 bp, Bos taurus
gtctgcatttcagtcaaggtctcttctggatatactgttgcctaatcgctatcttgtaaagttaacctccaataatcctcatatgaaataatatgaagtaggggagagacagaggatgaaagtaagatacacatgtaacaagtgaaaaagaaaatacccatattttctatgaccggtaccaatcatgatgtcataatggat

SEQ ID NO: 18077 - DNA, 201 bp, Bos taurus
ccaaatggtgcagggctatttgctaagagacaaacctctctccaagaaggcttatggatcagaacaaaacagcagtttttggataagcaagaagtatgagagtgggagaccagggggccatatccgaatccaacttacaggtgagcacacgtggaagggatgagcgtttctaacctcagatcagatcttgaagaaagtaaa

SEQ ID NO: 18078 - DNA, 201 bp, Bos taurus
aaggaccatgagggagattcctaagcatgtatttttatttttatctaaagaatgacctttcctaaactctgtattagtttccttgccaaagtggtctaatgtacatgcttgtttgaatgacctataaagaagttaatttacttggtatggttaaaacacaaaagcatttaccattttctcctgggaatccaccatccccag

SEQ ID NO: 18079 - DNA, 201 bp, Bos taurus
tctctgggtgcagtcgtgtgggctctaaagccacttggctctctggcagtcacttgttcagaactcatgtattgattataggtgaactcattgattgagactaaatctctggtatgaaaagatttgttaaaaattaaatagcttttcattttctaacggtcatcaagagccttggaaagctgaagatcttgtttaagagct

SEQ ID NO: 18080 - DNA, 201 bp, Bos taurus
ggctcccgaacttcggccatagtctcttctcacccacaagtgtgatgtactaccaatgacttctacatctgtgaagtaagaaaaaggccatttcctgatctgtctcatagactattatgattattttcctatttacagaaaccatttttttaactctctttcctctaagtatactttattttatggagtatttacttttct

SEQ ID NO: 18081 - DNA, 201 bp, Bos taurus
aaaaaaagaatctgaaagtgcttcagggcaatgaattggaatatgaagaatctaggagtacatcttcattttctaattcataatttcagtttatggaaacattcagctccattagaaagtagaattttctgtctctgaactcttggatttggattttatcatgtctgatttttttgttttcattttcaaagctctggtttg

SEQ ID NO: 18082 - DNA, 201 bp, Bos taurus
agtttatagaatcctataacctaatagttgaaaatggaccatggaagttacctagcacccaccactgaaagattttactttttaggtgtggaatcaagcatagagatgagagttaaagccttgacttcacactgccagttcatgacagaggtggtacttgaacattataattctgacttatttgttgactaggtttcacaa

SEQ ID NO: 18083 - DNA, 201 bp, Bos taurus
ggagacaagcctctcttatctgggtgtgtctccttaggaatctgagagattgttgtaggtctatttctgtgactacagaagatcttttggatagcacctattggaatttaaaaacatgcaggaaataaggtaagtgtgagtcgtttaatgacacctattgttattgttgtttagtctctaagtcatgtccgaccctttgca

SEQ ID NO: 18084 - DNA, 201 bp, Bos taurus
tgggtaggagacaggaatgctacacccattgaatttcacgggatagtctgacacaatgaagaaatgaagtttctcacccaagtgccaattatgccataaattgagcaacactagacaaagcgggacatatgcaaagagagggtatgggatggaatagctgcagcttaagccaaactgttatatccagtggctcagtggtaa

SEQ ID NO: 18085 - DNA, 201 bp, Bos taurus
gaaaatgaacaaaaagtgaaaattatacacatgattttggtacagtttatttaatcagctgtaaacatgtcataaagactactggccatctttgtgtgttagagaggaagtcatagtcttcatcatttttttttaaattgtagctatgggatgctgtaaatggaaaatgtgtggcaacattaacaggccatgatgatgaaa

SEQ ID NO: 18086 - DNA, 201 bp, Bos taurus
ttaaacaataaacatttttttccccacgattctggaggctgtaagtctgatatcaaggcaccaactgatcttgtgtctgttgagggaatacttcctgttttcagatggccatcttccttctgtatcctcttatggtagacagagagagacatgacctcttccacagctctccttataaagggctatggtttttccagtggt

SEQ ID NO: 18087 - DNA, 201 bp, Bos taurus
ttcccaagccagggatcgaatccaggtctccctcattgcaggtggtttctttaccatctgagccaccagggaatcccataatgtacatccaggcctgccactgactttggatgatttttgtgcaaagtgtacatggtgcagatttgctactcatgaaagggacagcgggtttggccatgcaacgcttgagtattggtctgt

SEQ ID NO: 18088 - DNA, 201 bp, Bos taurus
gcatcactgattcaatggtcgtgattttgagcaaactccaggagataatgaaggacggggaagtctggcattctgctgtccgtccagagtcttaaagagttagacatgtcttagtgactgaacagcaacatttctacaacatgctgaatgacttcctcaaaagaaagcaatttaagagaaaattgcatatgagccatccat

SEQ ID NO: 18089 - DNA, 201 bp, Bos taurus
tctataatgtgtgagacaggtcctttacataaaaagattactgcaaaatactaataccattcctaatgagaaacactgagacttgtatgagaagctttggatttgtttttctgcttgaaatagaaaggaatggaaaaatttgtcttgggaatgaaataatctttgaaaaagtaagttcactggggctgctatatggagatt

SEQ ID NO: 18090 - DNA, 201 bp, Bos taurus
attccaggatgtctggctctaggtgagtgatcacgatgttgtggctatctgtatggtcatacaaatgggagacacccttatcaaatgtgtggacgatctaagtttaaaaaagataataaattcatggtgcaatagaataaatatccaaaaagttcaacagacaggactagattaaccagatgaaaccaataagaaatagct

SEQ ID NO: 18091 - DNA, 201 bp, Bos taurus
aaggtcaggatggggtacacatgtacacccacagctgattcgtgtgaatgtatggcaaaaaccaccacaatattgtaaagtaattagcctccaattaaaaaaaattaaaaaaaattagttgtgatgtatgtgctcaaccacaaagaccacatcctgcctcttcaaagtgggacatgcttgtgttttacacatagtgctaaa

SEQ ID NO: 18092 - DNA, 201 bp, Bos taurus
ttgttgatttatacccatggttaattttacatttttatgttaacacagaaaagtttcttatcctttcaattgttgttgagagagctttctattgcttctcaaacagtaagatatatatatatacatatatatatatatatatgttaaataaatatatatgtgtgtgtgtgtgtgtatcagcacatatatatagttgtgttt

SEQ ID NO: 18093 - DNA, 201 bp, Bos taurus
agacagtcaccttattctctctcttgataaaacagagtctggtggcttgaatacgtgaatcagggaccattcatggctcatttactaagtttctgccaccgtgttaagcatttatatagagtatttgattaataaacataagccttacaaagaccctataagataagcattgtttttctctgcacattagagatgaggaaa

SEQ ID NO: 18094 - DNA, 201 bp, Bos taurus
aattcttgaacacactgaaggcaatgagtcaggcatccatgagcattaggtcctagcactttctaccctctcatggcacctggaagaaaggtggagatcatggcccagcttctttaaccgtgtctcttatttatctccacttcatgggaggcaggtggttgtcaagaggcagttacactgtcagtggcttatagcttccag

SEQ ID NO: 18095 - DNA, 201 bp, Bos taurus
cagggccctcccacagcctgtggctttaccttcctcctggaatctggagcctgtccatccagatggcaggaggagaatgaaggaacgctgcacatttcatcggccaggcttggacaaggaatacatctcttctgcccgcatttcaggggtcaggactcagttatatgggacgcctacctgccaaggagactgggaaaggtc

SEQ ID NO: 18096 - DNA, 201 bp, Bos taurus
agtggagccttccctgcctgcccccgttccccacccagaagagggatgagatgcggttgtgcatacatgcacgctcagtcattcagttgtgtgtgactctttgctaccttgtggactgtagctcaccaggctcctctgttcatgggatttttcaggcaagaacactagagtgagttgccatttcctactccatgggatctt

SEQ ID NO: 18097 - DNA, 201 bp, Bos taurus
agggccctcatataggttacagatggccaccctttccctgtggccccatgtggcagaaagagggggagcgagttctctgggggtctctcttatcagtattcgagcaggcatcccgttggtgaacactccacccttgtaactaatcacctcccaaacctcccacctcctaataccatcacataggggttgggactttgacat

SEQ ID NO: 18098 - DNA, 201 bp, Bos taurus
cccccgcccatgtagtggcctgagacagagccctttccaagccccagagcccatgcctggtgattgtgaggagagggtgctttctcaccagaccctctgcctctgtcaaattgctcttctggtgacaatttgggaaccagtgttgagatccacgctcactggcatcacatgtgttttaaatgacctcatttccaaacttgg

SEQ ID NO: 18099 - DNA, 201 bp, Bos taurus
caaaggggccaggggctgaggcccccaaacctgtggtctaaacaagcccctctcagccgggacagaccacctaggaccccacgtgcctggagaaggttgacggtggccacgttaacctgaaagccatccatgctgtagcagatccccgctgcagggctgttcctgtggtcaggaggctgcactttgtcctgtttgggaggc

SEQ ID NO: 18100 - DNA, 201 bp, Bos taurus
aatattttttaacctacagaaaagttgaaagaattattaacaataaagagcttccagctgttagcattctgcaataaatgtgctctcttgcttactcactttcttggtctcgttctgtgcataaaatataatttacacacatacacattttctttttgctgagttgaaagcaggtggcatagtttcagcccacatctccaa

SEQ ID NO: 18101 - DNA, 201 bp, Bos taurus
agacctttctctctccttttatcacaacacagacaccctgggggtccttgctgggagctctgggagggcagagagggcctgagcatcttcccagtgtcctgcagagtgggcatggtatacctgaacttgcagaagtcacagggcagggccgacaccctgtctcgagagctccaaggtgccacttcatctaggacaaccccc

SEQ ID NO: 18102 - DNA, 201 bp, Bos taurus
ttaattttttcctaatgagagaaattaaatactaaggaataagattttttttcaggtagggttgagctatggagggccacaagccattgttaacaggtaaattttttcactccccttcagttcagttcagtctctcagtcgtgtccgactctttgcgaccccatgaatcacagcacgccaggcctccctgtccatcaccaa

SEQ ID NO: 18103 - DNA, 201 bp, Bos taurus
gtgctacagggtaaccacccttcatcttcatcccagtggaaatcaccatatccctgactggaataactgtagtatatagtgcttgacaatctccttccctggacgggaaggaagaacagttaggattaaagaactgtttttctgctcatcctgacccacagcaggttagagacactgagatcaaagcctggcacaccatgg

SEQ ID NO: 18104 - DNA, 201 bp, Bos taurus
gctgggtgcctccgcaggttacagccttttccacctggtttgctcagctgggcctgagtaggccatgtctgggagagaggaaaggtctgggccccatgattggagtctggaatgcatcttaggaagctgcgtggcttcaatagtcacccacactctacacaccaccaggcctgactcctcttacagaaactgattcactct

SEQ ID NO: 18105 - DNA, 201 bp, Bos taurus
gattccaggatcaggggccctctgaggcaggcctaaagagaagaaggatgtgtccccaacagaggcaaggacgacaaaagtagaggcaggcatggtgggtactcagtgaggagggtggcccagcagctcaacctgcccggagtccagagcagaggagacagaactgccaggtggaccccaaatgctttcaacaaatatttt

SEQ ID NO: 18106 - DNA, 201 bp, Bos taurus
ggaaaagaaatggccgagaagcatttaggagaaggaatcaggaaattcctgactctacaagggatgcagtgagaaagctggcctgttacacagacctgcccggaggcagccatattgggcggaagcttcctagtgaggcgaagatgggaccggcgttcagacccaccccaccccaggccaggctgaatctgctttcaaggc

SEQ ID NO: 18107 - DNA, 201 bp, Bos taurus
aattcacaatctgccgttccagaaaatccttttcacctggacacattaccctttcctgccagttgcatcaagtaggcctggcagcccctctcatcaagttagggctgaggacagtcttcagagtcaaaaaggctagtgtcctgaccacggtcctgccacaccctcgctctataatctacatggtaaaaaaaacatcacctt

SEQ ID NO: 18108 - DNA, 201 bp, Bos taurus
ctgtcatctgtgctgttatcatatattttatttaatacgttactacatttgtcttaaataattatcttttttgagaaacagcttttatatttacctacttatttactgttttggacaatcttttttcctttgcgtttccatcttttatcaatttcctttagcctaaagaacttcctttaatatattcagtagttcaggtat

SEQ ID NO: 18109 - DNA, 201 bp, Bos taurus
ctcctggaagacaaggtctgtgtctcgctcacctctgaatccttgacctagcgcagtgctcagttctgagcttgtgaccactaagcgtgggctgaatgcatgaatgagcagaaactagtgaacatcttgatgcataaagttttcccatgctgaagatggtctcctttgaacgggttcccagaagctgcagtgattggatta

SEQ ID NO: 18110 - DNA, 201 bp, Bos taurus
cacgtgatggtgatgagtttcatcaccctttgaccttccccacctggacgccgtcctactcttgctttcgacacacatgctcgctttgcacgtgctgctctattttccctagtcaaccaccaactcttcctcgcatggggacccacccaagaagtcttccctcacccttcaatccccacacaagtctggttagggttctcc

SEQ ID NO: 18111 - DNA, 201 bp, Bos taurus
accccctacctcattcctcagcatctcccatcctctctgcactttgccacgctgagaggaatagcaggggccttggcaggccatgcctgccatcctgcaccctgccagggcacagtgttcccattgtcttgagcagcgagaggtgtccaggtcctggcaaggggtgggggatcatgccaggcttctcctgtctccaggggc

SEQ ID NO: 18112 - DNA, 201 bp, Bos taurus
ccttaaatgtgctctgacctagttccctgtgaaaattcaatagtggtagtttacatgtttttgaaacactttgaaattattttatataaagtttggttgtggtgaatttattgaaaatattttctttgaaaaaagttccctaagtagatttttcaatatttttttaaaaaaggtatttctgtaacacaataaaagtaagag

SEQ ID NO: 18113 - DNA, 201 bp, Bos taurus
cagccacatacagccctccgttctgcaggtctgccaggtcggtgacagggtggccataaggggtgtagagagcacgcacggccactggggcccgcacagccgatgtcacctcacagaggaaggtctccagggtggggaagcggcgttgagtcaccaccagctggcggcctggggagaaggggtccccgttctggtacacca

SEQ ID NO: 18114 - DNA, 201 bp, Bos taurus
tgttgggccagaaagcaaggacattgtcaaggaataaggggatcatgtccaaaggatgtacaggagccaaaaagaaaagcaagatatcgattgaaacacattgactatataaacatttatatggccctattgatgctcagagaaagaaggcttcaaatcaaccaagtatcattaaataccattggaggtaaccagggcata

SEQ ID NO: 18115 - DNA, 201 bp, Bos taurus
atatcatctgccatccatggtgggtagacccagtgtgacgcctctgctccagttccagccccagaaattccagaaaaggctgaatgttttcctggtgccctgggcctggtgaggaagcccacagccccccacacttcacagttgcacccccacatactctgtgtctgtgggtctctccctccctgggaatggctctgagat

SEQ ID NO: 18116 - DNA, 201 bp, Bos taurus
aatggagttgttgttattgctccaaattaggcaccaatttgcccgtgtaattgttggctaattggcatgaaatcctaatgtaattagttgggccccttattggggagcttggggagccaggggcggtgggggtgggccgctggagcagggagggtctagaagtctggggaaatgtgtctgagggaggaggccctgagctgc

SEQ ID NO: 18117 - DNA, 201 bp, Bos taurus
actagatggtagccccagtggtgggagatggggaccgaggctctgactgctgcccccaaacactgggacctcatcctgttggtggagggccttaaggaagcgagaagttaggcagcgtgggggaagagggatgagtcagacgtagtccctgctctcggggagctcctggccacgtgggggatgtggcggagacccagctag

SEQ ID NO: 18118 - DNA, 201 bp, Bos taurus
gtagccagggctggggttgtcagcgtgaagctcgccatggccctgtgagggagaggggcatcagcagagtggagcatcagcccgcccgccgggaccataaggctgccaccagaggtgaaagatgggtccccctgccactgggatgcagagagccgtggagacgtggtgacagggctgatttagcgggggaggagggaggat

SEQ ID NO: 18119 - DNA, 201 bp, Bos taurus
tttgctaatggcttctggttttgcgtcatataaaggtctttcaaactccaaagttaatcagaaacccttctatgttttcttctgccgtttttatggtttcataatgtatccactggttcatggaactggaagcttttcttgtcattttctcagcggtgagcacctagctggatcctgaaaggcttggggtctgggtagaga

SEQ ID NO: 18120 - DNA, 201 bp, Bos taurus
ccctctgttcttagtgccttcagggaggacaagcatcagatccctccctgccactgccccagctctccactcaagctgccgcctccttccccttgcccctacttgcccacattcaccctcttgagaaaaaagggccccttgttctaaagctccccaggagagggtcttgaaggagagaaacactgagagctgctcagagcg

SEQ ID NO: 18121 - DNA, 201 bp, Bos taurus
aaactgtgccacattgctggtttgagtcctggtggtttagcaggttaccttggagagggaatctaaaagattttcagttgccgggtttctaaagaagaccatgaaaaacaggtccacggttcagatgtcttacattctgacagagtaagaacctttctaggtatttgtacatgattttcagtagagctgtatctttcctgt

SEQ ID NO: 18122 - DNA, 201 bp, Bos taurus
ccacatgtgcctgtgtccatgctgtgggtcaaaaaagacgcagcatggagctcacttgtctcctcattgaagtcagggtgaacccacatccaggcccttctcagactgatttctccctcttcatctctcagtgacaaggactctagattggctcagccttcagaaaggccctcattctggggagacgttccagccccatcc

SEQ ID NO: 18123 - DNA, 201 bp, Bos taurus
accatagctgtcaaaacctccgtgcgcttagtagcaggaggtcacgattatcaaggggagaagctgagggcggtcaggaatcacggggcctctgtgtgcaaagggaaagagaaagaactccttgtgctctgactgcagactctgtcagaacctttgcttcagtcctcatgaccttctgggctatcctgttggcccatttgc

SEQ ID NO: 18124 - DNA, 201 bp, Bos taurus
ggagagaagagactgagggcttcattcattgagccctggccccgagacaaatgtccaggctttatcttcatgaagtttaaaaacagttgaagtccagcacggcgatccgagagcaggtggtgaaaaggatgagctggatgtgagtgcaggcgtcaccctgcctggacatagggtgtgatgcgtgcagggcctgcccaaata

SEQ ID NO: 18125 - DNA, 201 bp, Bos taurus
tcatctcctacagaactgacatgcctgtcttcctcctggatcagggactggtgtcttccattgattgtcagaggccagcagagggtctgagtcagactgaggttgctctggggttggttcctgcctctctgagcctccaggttcttatctggcaagtggggacagggttatcactctcctcctacaggatggtcggatgag

SEQ ID NO: 18126 - DNA, 201 bp, Bos taurus
gattcctggccaagtgccccccaacctcatgaaaattacttcactccagtggaggtgggggagggtggggctgttattttacaggggaaggactgcagccccaggaaggagtggagtaaaatggggccaagtcacacagccaggaaggtcccacccaggatccacccacccacgtgggggcagggaggagtcagggccggg

SEQ ID NO: 18127 - DNA, 201 bp, Bos taurus
tggactccacaatgaacctgaacttcaggagcgaagactctccaacctgggtgtgaattcagagcagtcctcagagagcaaccagccagagttctcatttcctgctggtcttagtctaaagctctctcctctaatgattggctgcttagcacttgttaatatgatggatctgatttgttggaattgattttctcataaaga

SEQ ID NO: 18128 - DNA, 201 bp, Bos taurus
gggttttggattcttaggacctgtcaccctttccttctttcctagttctgccctgtggaatgggaatgtcaagtctaggcctgtctcatcactgtattttggaagcacttatctcttcttaatcctaaaggaaatcaaccctgaatgttcattgaaaggactgatgctaaagctgaagctccaatactttggccacctgtt

SEQ ID NO: 18129 - DNA, 201 bp, Bos taurus
ggcagctggaagtggggaagagccaggccaggttgctgggtcacactcacatatgtgtgttcctacttcagagcatgaccttgaacaagcccctttgcctcgcagggccacagggtccccagctataaaatgaaggtgctgaaccttcactttaatctctgtagccccaggcacctctgtctccacatcaatcagggattc

SEQ ID NO: 18130 - DNA, 201 bp, Bos taurus
gtggccagacccagtgatgttagtactcatctttgttactataatggttaacatgcaacctcacccaccagtccacaggaggagtatgtttaaggcaagtgggcccctgttgttgaccaaaatcttggctttctctgcccaccaaagccaaataaaaaatatggaaacagagtttgaaggaaatagaaaggtggctttaat

SEQ ID NO: 18131 - DNA, 201 bp, Bos taurus
cctgcactgccacaggatttttttttactgctgagtcatctaggaagccctaaaaataaaaatatggcctagggtaaaagcagctttaaggccagagccccgccccatgtccaaatcatggagcagcccagggagccctgctccaaagcccagatgccccctcatctctagacagcttctcagatttgaccttgaccagcc

SEQ ID NO: 18132 - DNA, 201 bp, Bos taurus
gcaaagaaaacgtccaccaggttgtggcagcggatcatttccaggaccgtggcgcaggcgcagaaggtgccgctacggccgcccccatttctaaaggagagacatgaaaagatttggggttgggcttgcggggtagggtgaactcaaagatggagagcagggccagggaacccaaaagagaggagtccgggaatccagaag

SEQ ID NO: 18133 - DNA, 201 bp, Bos taurus
tttttaaactcccatttgggggcagatggttcccctgtgtgctgtgagggtcgagttcccggccaagctaaccctggaacacaggaggacacaaagccacatgggtttcttcccaggaggactttccagagccttcttgactctaatgtgcagtctgaatcttataaagggagtttagtgttgcccaaaagtattgtgcct

SEQ ID NO: 18134 - DNA, 201 bp, Bos taurus
atttttttcagcatctagttctcatttagctatttttcaataattttataatttcctccattaagactcaatacatcttaggccaacatagttttcttggcatcataaattgggtcttaaaaaatgacattttctgtttattgcttgtttataggaacatgattgattttttttttctttttggccacacttcatgggttg

SEQ ID NO: 18135 - DNA, 201 bp, Bos taurus
aagtgtgggatctcttttgattatcaagtgacagaaactttgacttctactggcttcaacaacatcaaaagaagagcccaggattacatgttttgacccaattgaatagagggattcaaacaatagtatagagacaaaagcgacatttaaaatacttaacaattggcattgtgttgtcactgaacagatgtcagaggaggt

SEQ ID NO: 18136 - DNA, 201 bp, Bos taurus
caaagagtcggactgagcaactgaacaaaaacaaccctcaggctagcctaagaaatcgtccgtttttcactgttactcttgtttctttggtgttattttttctcacaggctctcaaagtagtgattccttcaattctccaagtagtcctaacacttagcagggtttactgaggctttagtgaaacagaaggaaaagttcag

SEQ ID NO: 18137 - DNA, 201 bp, Bos taurus
gaaaaaaatcagataaacaaggtcctaccatatatatagcacagggtactatattcaatattttgaagtaaattataatggaaaagaaaaaatgcaaagaatattaagaatagatattttactattttatgtattttgaaaggattttagattcagaattataggggagattttttttttccttaaggagaaccactttat

SEQ ID NO: 18138 - DNA, 201 bp, Bos taurus
acacacaggggctagttgaatctggccttggaaaagtccatctctggatgctgatccatgaacctgcagagacaaagcgggaaggtgggacaggccatccgtcccccaactttgcccctttctctcagcctccaacatgaggtctcatctgtttacaactctcagcaacctggagccatgccaggcaggagtggggccccc

SEQ ID NO: 18139 - DNA, 201 bp, Bos taurus
tgtgtccccaggccaggagccagacactaggaggcgcacgtgttaaggaagcctccagccttgtcctcaggcagctcccccaaatacacaataacgaaacggaagcgtggcgtgcaacagtgcaggccaagtgctggaggtgcccatagggtctcactctctgcccggggtaagatctgggaagatgcgacagtctagctg

SEQ ID NO: 18140 - DNA, 201 bp, Bos taurus
gttacgtgaggcttccgaggtactcaggaaggggtggccagggaggagggaagacaaagtctctggttccttgtttgaggctgggaatgttaggacggcagtcaatggctgtctggggccataaatgccaagctgaggagaataggtcctgaggctagcctctctccaccccctgccctgcgacactgaatttcacccccc

SEQ ID NO: 18141 - DNA, 201 bp, Bos taurus
cagcagccgcttgctgaccgggcaactgtcgggagaggcagcgtcccccatggttaggagcccaggcaaacactgattccccctttctggcttgtccagtgtgggtgtacatgctgggtctcatgatgaaaattcacgtgcattatttcattgtattctcacatcagtcataggaggacaatacttttgcccccctcctct

SEQ ID NO: 18142 - DNA, 201 bp, Bos taurus
tctccaggggatctttccaacccagggatcgaacccaggtctcctgcaatacaggcagattctttaccagctgagccaccaggctatgagtgagcatatcgtaaactcttactacatttcagctagctttataatcattactgggaaaggaaatccttggtcatgtaagcttggcaaatgtattgagctgttcaaaaagta

SEQ ID NO: 18143 - DNA, 201 bp, Bos taurus
acggaggagcctgtaggctacagtccatggggtcacaaagagtcggacacgaccgagcgacttcactttcactttggtgattcagaggtaaagaatacctttgagtcttttactgtctcttgcattgacaggattctttacactagcgccacctgggaaacacaaaagtttccttcttcccacaccgggagtcgaacccgg

SEQ ID NO: 18144 - DNA, 201 bp, Bos taurus
gctccaaaatgaaatcaactcaacaaatatttgatttaaacattttttatttttagacatttaagcatttaatatctttcattgattcagtggccaaatagggcaccatctgctcagtgcggaaaggcacctgtcagaaacaaaatacaactgtgttgcaagacacctgtctcaggaggccagctgcagactccctgagag

SEQ ID NO: 18145 - DNA, 201 bp, Bos taurus
ggcagtccctcagagtcacccacgtgctttgaaaagagatcaaagtcgctctgcagagtccatggaacctaagtctctgagggcacggccagacatgcacgtggtttcttacaaccatccaggtgatgctaatgtgtgaccagggtggacagcagcatctgaccacagacaggggatgacttacctaaaacctgagatgtt

SEQ ID NO: 18146 - DNA, 201 bp, Bos taurus
gtctgtaagcggagttagtgaatttacacagaaaagaaatagcctagaaaatttgaaaaggtttttaaagatgacatattttatgtggcccttgtaaggaatatgcctatgggacagttctttcttcaggggaccatggtggtaataggctctacctactcatcacagttgatggcctccctagtcatcgatttggcagcg

SEQ ID NO: 18147 - DNA, 201 bp, Bos taurus
caacacaggttagggcaaccagccctccttgtggtggaaaattcacttatacagggttcctccatatatggccattccatcttctcggattcaaccaaccacagatcatatagtactgtctagtattactattaaaaaaaattaatgtgtaagtacaccagtgcagttcaaatgtgtgtgggttcaatggtcaactgtgat

SEQ ID NO: 18148 - DNA, 201 bp, Bos taurus
gccaaaaaacaaaacataaaacagaagcaatatgctacaaattcaatgaagactttaaaaatggtcagcaaaatggtcagcatcaaaaaaaatcttaaaaaatagtatctcttcctgaaggccttttcttagctcccaggatggggcttctcggtgccccagaaatggccggtttccttgtctgttgtctgcacacgctcg

SEQ ID NO: 18149 - DNA, 201 bp, Bos taurus
ccacggggcagctaagcctttgcacctcaactgccagaggccgagcgcactagagcctgcgctccatgacaaaagaagccgttgcaataagaagccgctacgtgccgaaactagagaaaacccgggcccagcaatgaggacctagcacagtcaaaaaagtgataaatagacaaagccgaggtcccatctgcttactaccct

SEQ ID NO: 18150 - DNA, 201 bp, Bos taurus
gttgctgagccattctgagccttggcatgtctgtctactataatagaattacgctgtgcagttagagtctagccagggccccagcatataacaggtgctccgtaaaactcatttctccctttttctttcttcttaagggagtactcagggccagcctctgtgatcagacacaggtcagacacagagttctgggagaaaaca

SEQ ID NO: 18151 - DNA, 201 bp, Bos taurus
ctcattaatgacccccttcaccacatgcagtcactgttctgacttccaccatcgttgacgagttctgcctggttttgaagttttggaaagagaacctttctatacagattctctggtgcctggccacttgctcagagccatgattttgagattcactcatcatgctttgtgttatcagcaatttgtgtgtgtgtttttttt

SEQ ID NO: 18152 - DNA, 201 bp, Bos taurus
gccccagagtggagcctggagggcgtttgtcacatcccacaccgccatgggtgtgtcttccttcagacaccggcttttggacccccttggggtttctggggaggagtcctgtcccgcctgatggcctagcaggggtgcccgcaggccctagactcagatttgggtcagattcccagttcagccactttgtggggagctctt

SEQ ID NO: 18153 - DNA, 201 bp, Bos taurus
acacccgtggggagggaggcttgagagacagtggaaggtggtggtggagggtgtggctcgggaatccaacaggaccccagtgtgtgacttcgggccagtggctcaatctcccagaacctcagcttcgacatttgtaaaaagggggtaaatcacgtcttcaaaggattttggcctcagctttctcatttgtaaaatagagtt

SEQ ID NO: 18154 - DNA, 201 bp, Bos taurus
gagtctacagggtcgcaaagagctggacacaatggaagtgactgagcagaaggaaaccggacagccccagggaagggccagaaagggcctgctggctggacgggagaatctggtcctggagttcctgggcaagacgactcctaaagtggacggggtggtctctgaagcccccttgagcatcatctgaaacggccagcctgt

SEQ ID NO: 18155 - DNA, 201 bp, Bos taurus
atccgatcagatggcacctcaccaacgcagctgaccgcagagagggcagcagtgtggtccccctgccctgaggggaaggacagagttctccccacacaactagccgtctgttaatcgggccactgcaagtgtggaagagcttattccattcccaggaaacggatatattcttgagcccaggaacacctgagtctggagccc

SEQ ID NO: 18156 - DNA, 201 bp, Bos taurus
ccaaaccatggatcagcgtggacgccaccatggatgccggagtccagacccggggcaggggcaggcagccgggaggcaggcgagaggcccccctcccttcgtgggaggttccagggcaccacggctctgcggtggggctccaggcttgggtgggatgagttcacagctggccgcagctcctcctgagccgctgggaacaga

SEQ ID NO: 18157 - DNA, 201 bp, Bos taurus
taggatccaaggacctatctagtccagggattctcacactgggttaggtctccattcacctggagagccaattaaaatagattcctagattgcaccacagtgcttactggatcaaaatattaagggggaaccgtccaggaacctgtacgtccaacctggcgcccaggtgatgctgatgcagatgcctatgcttggaaagag

SEQ ID NO: 18158 - DNA, 201 bp, Bos taurus
gagaagtgaaggaagcagtggccaggcctggagcggccctgggacccaagtgggctcagaatgaagctctgcaacttgcccgcccagcctggccccttcttttcccaccctgggctcagtgtggacaccccagccggtacgtccaaattctgtccaccaccacccccaccccaccaccagacatccactctgtgaccatct

SEQ ID NO: 18159 - DNA, 201 bp, Bos taurus
agtaccaatttaccattctgctatccagagtggctagaagtcattttgcaccaacagctaaatactattttctttttaataatgaagttcatttgtaccacaacttggaattggttggcgttgagcaaccttaggcacaaaaaatgactgccaatcctaaggaagaaaaattgtgaaataaggtgatctacattccttccc

SEQ ID NO: 18160 - DNA, 201 bp, Bos taurus
tcttcttggtcctaggccgctggccgtgatcaggtgctgggccacccgccttgtcccctcggagggactcgtcctctgagagggcagctgatggccagggcgggaaagggcagctcctgtttgggttttctcgtatcctccagccaccagccagcggtcacctctgttttactttgttggcacatctcatggggccttggg

SEQ ID NO: 18161 - DNA, 201 bp, Bos taurus
ctctggagaggcagctgaagggggaaataaccaccaacacactgagatttgatgattaaatgattatgtctcatttaatcctcctaaaacctctgagcaagtgttagcatttttattttactgataaggaatggatggggaaacagtggaaacagggacagactttatttttctgggctccaaaatcacagccgatgatga

SEQ ID NO: 18162 - DNA, 201 bp, Bos taurus
ggtgttgatgatatatttagcccagagagagtgaaataaaattgaaaaaggaaagccttcacaacatgtgaggttatgtaagatcacatctgggtaaatcatttcctgcttgggtcgtttctatgaggcaatgagctccctggtagaaagagatgggtcagtgtcctttgctaccagcagagcgcatagcagaatgtctta

SEQ ID NO: 18163 - DNA, 201 bp, Bos taurus
ctggccagagtccttccctgagactctataattcaacccagagaaagagaagggtgcttttctctagggctctcagctgcccggacgcaagcctggccctcttctgtgggttccaaggacatcaggagataaggacaagggcacacacagagggaagctgagggatgggagcagacgcagggagcggcgctccggcaggcc

SEQ ID NO: 18164 - DNA, 201 bp, Bos taurus
gacatttcatttgttttcccttttgtttttattattattactgctactacaaattgagattatggaataaaagtagttaaggattcactgtaattgttacagaaatagcaattataggtgactattgacatatcagaatttgttttagttaaaaactaatctgagttttggagaaggcaatggcagcccactccagtactc

SEQ ID NO: 18165 - DNA, 201 bp, Bos taurus
ttcaggttctttggggcgagcgtgtgttcaccccagaggcttaaatgaagcacattagcagccactcgggcggatggcctctgcaacaggaaggggagccggagcttagaacacctgtgacagtcttcacccacagcccgctttgttagcacagcctgtctcagggtcttcccttctttggccctgagcatactcttcacc

SEQ ID NO: 18166 - DNA, 201 bp, Bos taurus
ggcaaccagattgggtagacggtggagggggagatgcatgtacattattcagtgtcagcttgcggggtggaaggaaaggtgaaagccactgcctagcttcattccctcgaaataaaatcctaaatgctgacttgaaacatatggctgtgctttgaggtaaatctcaagtctagttcctcgtggatacccaaaacagctaac

SEQ ID NO: 18167 - DNA, 201 bp, Bos taurus
gctcctctctgtctccccagattgcgagggcaaggggcgcaaaccggtgccctgggctggctgacgagtagcctccacatgttttgttggccagcgtggtattctgagagaatctggattcattttcaacatttagaatttggggagtttcacattttcagaaaaggccaaactggtaatagtgctcatttctgttgttta

SEQ ID NO: 18168 - DNA, 201 bp, Bos taurus
cttgccttgtgggaaaggtgtatgctgacggcatgaatgagtgagtaagtgaggaacacagtcttgcctggaagggccttgcagatcctcataaaagccctggctcctacaagtgcttcattctgccttcccctgagccagtggaagggtgctcgtgttatccctaagggcccgtgagccaaggggagaaaaaaaaggctt

SEQ ID NO: 18169 - DNA, 201 bp, Bos taurus
gctgcccacccccattcatcccgcctgcgtttcctgagacctgctgtgtgcctcaggtggttccagatgccagagacgcagagggtagacgtggcccctgagctcacgagagccaagctccatgagagatgggaaaggaggagcagtgtcagtgagaccccttcagaccaaggggcgcgccaggaagagtgggacaggggc

SEQ ID NO: 18170 - DNA, 201 bp, Bos taurus
ggtccctcctgcgggctcagggctggggcagggagtcagcccagctcttgggggaagatgtggaaggcgtctggggacacaggtgtgactaggcctcgggcggcagttggagtgtgggatgcagactgggacaggcagcttccagaaacctccttccacgtttcacccccttgccagccggctaagggtgaaggagcctcg

SEQ ID NO: 18171 - DNA, 201 bp, Bos taurus
ccactcaaggggctccacggccccctcgccagcccccaagcgtgggtcactttcccaatttcagggttgcctagctggtctctgtccccacacttgttttagagagggatggatggggccctctgcccggcacccagctctttggggaccctagaccccgcatgccccccgtgcccttccatttggggcctcggcagagtt

SEQ ID NO: 18172 - DNA, 201 bp, Bos taurus
ccttggagcagagtggctgacaaggggcagacagacagggacaggtcctggaggcagtgggggcaggaagccccagtgcaaccccacagaagggctgcccgtctccactgaaggcctggagtcaagttccttctcgggcgacatttttttcctctatgcctgtatgactatcagacaaggagatggtgccatgaaatgaac

SEQ ID NO: 18173 - DNA, 201 bp, Bos taurus
gagagagagcaaaggagattgtcagcacagcaggaagatggggaagccgaacctggcagacaaaagccagccaagagaaggctgccggggaaggagagagccttgggcaagagataaggccgggaatgaaaaggctggggaaggagagaagagcaagagctgccagggtggggaggctcggagctgagcggggcggctttg

SEQ ID NO: 18174 - DNA, 201 bp, Bos taurus
tggtctgtgatgccctagtgagccacctgccaacctctgcctccctccacctggtcccaccccgccctcctcctggtgtcccccacccagtggcagaccctctgaaacctgggcccccagatgcaaaggactagagggtgcctagacccttctcgtgccaaggctcagggcctgccactgccacggccgcacctgccctgc

SEQ ID NO: 18175 - DNA, 201 bp, Bos taurus
gacccagaaatagtttccctcttccccacccaagttctgagcacactggaaaataagacaaaggagcagcagggggaggccagcacgtcacctctggtgcagctaaaggctaatttggagagcagaacacagctttctgtgagagccaaacaggcccgctcaatgaaccccggaattaagcagaccggcccaccttgtcac

SEQ ID NO: 18176 - DNA, 201 bp, Bos taurus
ctctaggcatgagcagtttctaagaattaaaagctatgagggagaaaggatgagaggagggaggttagtttacactggagacagccagcagacaagcatcgtgagttctactatgaaaggaagcaaagaaatacagcagatgtgaagaggtatgggaccccaggaggtctgggtttttttaagatgagaaataatacgcta

SEQ ID NO: 18177 - DNA, 201 bp, Bos taurus
agaagtggctccattcaagtgagatccaatcagagcccatcttggaggtggaagtgtcatttccagcctgtctggtaggtgcgtctccctgggtgacatttgttacataagccgcagcacggcacacctaagtgatgaatgtcggccgcacacccatttggaaagccacaccggcttcccctgggagaacactggtgtgga

SEQ ID NO: 18178 - DNA, 201 bp, Bos taurus
gcatttagaggaactgacagagatgcccttagcttcccttcatttttgaatggggaaactgaggctcggggcagagccgtaactggcctgaggtcattgtcgagttggtgcagaacccagacaggagtctgccttcttggctccccgtgagcagtctccatctcccggcaggggcccggggcagcgttcacagctttggtt

SEQ ID NO: 18179 - DNA, 201 bp, Bos taurus
tactccacctctccgggcctcagtttcttaatctgtaaaatggggataaaagcagtccccgcttgacgctggtgaggaatgagcgaatccaagcgtgtcaaacccttgaatgtgcctggcctgtgtcagccccctttgtggtggtggtttggggttttgtttttttgaccttgcagcttgcaggggatcttcgttccccga

SEQ ID NO: 18180 - DNA, 201 bp, Bos taurus
gcatctccgggtgcctcctcaaccctccgcagcagcaggctcggcccaggcaccaggagccatgcttttcctctcactgcctggtcctcccgggagccgatgtgcaggaatggaggcccctaaaagggggtctgaaggcctgggatttgcactcccttggggccagctcagcgacagtcctgaccttggagaggcccctgg

SEQ ID NO: 18181 - DNA, 201 bp, Bos taurus
caactttgctcgctttcgtataaatgctatgtatgtaattacagggaagttattatatattatatataacaactacagggaagcctaccatgcttccatgctgccacacgtccatggggtcacagagtcggacacaccttggccaccgaacaacaaagtaactcctgttatattagctgttatcatccacactctacctcc

SEQ ID NO: 18182 - DNA, 201 bp, Bos taurus
gcaggagaagggcacagattccctgtggtgtccctggccccgcctaaggagggctgaccgacctctgccagtaagcagatgggcccccagcttccccagcatggctcaggtctgtgtcaacccgtccataatctccagatttggtgaatccctacccaggcccggctccttcatggatcacagccttgtcgtgacaaacct

SEQ ID NO: 18183 - DNA, 201 bp, Bos taurus
gatggtaggacttctgtgtgtgtatgtagtttttttgtttttgctttttggagtttttttttttttgccttattcaggaaaataaaaatttgttgaccctatatgagtccaaaaaaacttgctgatctgtgaaattcaggggtctgagaaccactgcaatagaagctttccccaaaaggctaagagagtcttggcatgcag

SEQ ID NO: 18184 - DNA, 201 bp, Bos taurus
gaggcagtggccccgcctcgaggggagtcaggcagccaggctgcagctggctgggctcccgcctctgggatctcctcctggccccagccctgacccctggttgccctttcaggttcctgcaggacctggagcagcggctggaggcagacgtcctccgcttcagcgtgtgcgacgtggtcctgcagcactgtccggccttcc

SEQ ID NO: 18185 - DNA, 201 bp, Bos taurus
tggtttcataatcgcccacttgaacccgaatggaagaagtaaaccttccctgttgaggcagagccccggccaggctatggcccgagcagggtccatggactgacttggtgacagtctgtggggtacggtggtctgcctggggggtggggagggcggacctacagccacagtaccggcagggatggcgcggcacccccgggg

SEQ ID NO: 18186 - DNA, 201 bp, Bos taurus
tcaccctacctggccagcagctacacaatttgcagggcccaagactggggtggagagggcgtggtacttggatcaggagggtaagatggccctgctgagttgcccacctaaccctctcagttcagttcagttcagtcgctcagtcgtgtctgactctttgcagccccatgaatcacagcacgccaggcctccctaaccctc

SEQ ID NO: 18187 - DNA, 201 bp, Bos taurus
actcaacaaccagagttcacactgaaaaccaaagacttcctctcctcctctctccccaacagttctgcttatcagttggtcttcagagagagtcctgcctcgcaccacaggtgagcggtggagaacgcagggccaattatgcaagaggcctgtattcaccccaccttgcccatggggacctggatgtggcgcatccaggcc

SEQ ID NO: 18188 - DNA, 201 bp, Bos taurus
aaaaaatattagccacatacaaaaggaccttccccctgctagatgaggctctttgaaactttggtggaagagaatattataacaacatttacctgggcgaatgctatcaaattattattaatggaagaattcatgttctaattcaactgttttcatgagtgtgagttttcacttagtggattttcgtagcatacatgtgtg

SEQ ID NO: 18189 - DNA, 201 bp, Bos taurus
ctgccagagataaaagtacaattcctttcctcaagagaactttaggttattgggcattcaccagtgtgggttagtatacagtgtgaaatccacataaatcaggggatctcagagtagatgcatctgacaactcagacacgtgtagaagccagtggtaggagggaaagggggactcttgaacaaccactggcttcccggctg

SEQ ID NO: 18190 - DNA, 201 bp, Bos taurus
caagttaaattcaaactacttttttttaagacatatattaatggaagcttcctagaggtagaagagagagttgatgtatatttgggataggaagtgcaggggggagagagagagagagagagagagagaagagagagagagagagagattctctttctacccctgccccaggctctccagacactttgattgagaagcttt

SEQ ID NO: 18191 - DNA, 201 bp, Bos taurus
aggaattcactggtgtgttaggatctcctgaggcctttgggaatcttttcccattcaattatctccccttaaggcaatcctaaggaaagatggctgtgcacttttaataataaaaggtacccagtgaaaagagctctggggtagacctactagtgtttaattggagggcaaatttcttgaaagctaaaagtgcctgaatta

SEQ ID NO: 18192 - DNA, 201 bp, Bos taurus
aaaagccatctgctggcactaggccagtatgtctgaattttgtcattattagcatctcatttttccaaaaaaggaaatgtgtaagtagcacgtgtacatacatggccatttctacaaagccttctctgcagtcttgacctgtgtgaggacaggttctactgatggaagcatttttagaggcagaaggaaaaacattaactt

SEQ ID NO: 18193 - DNA, 201 bp, Bos taurus
gaaaaaagtaaggcatggaccgtgtcttcctggcaccagccccacacttccagctgatgattaaataccatcacttaaataacacttgggtgttccacaggctttgccaccttctgaattctgtttctattgataatatgacggtcttctcagacatccagaatgcatactttgcgatgatctttaatgtccccttttcac

SEQ ID NO: 18194 - DNA, 201 bp, Bos taurus
gacatagacttgatggggcctcttaaaagtaggtgacttggacagttcttttagtgggggaaaatgaaaataatatgatctggctttggaacctaatttcgcattgttcctcagcacaaggcctttatactagccaaaaagtctatttattattgtctaaatcgaaatagtgcagattccacctctgtgcctgcatttatg

SEQ ID NO: 18195 - DNA, 201 bp, Bos taurus
ctattaatttcataatctatttatggatcatggcctgaaatttgaaaaatactgcttcacagggcaattactttcaaacctattcccaagttttagaactgtaaatcctttgaatctcaggccaataaatatgttttaatcttctgcatatacccacactgtgtcaggtgctaagactaaaaccaaagacacagaaagtat

SEQ ID NO: 18196 - DNA, 201 bp, Bos taurus
agaggagagcattcaaggcctcgtttgaagtatcctccaagccgtgcaggaaggtacagaggggaagaagggaagaaaggggataaggcccctcttctctatgtgtaccctggactctggggtgtcgatgggcacctggtggggatcggggtgggagtgctgttcagacagtctgggcgggtggccttgagccccattgga

SEQ ID NO: 18197 - DNA, 201 bp, Bos taurus
catcctaattgtccaatatggctcacagagtgccaatcacctaccactttcgttagacttccatgaagtattcacttacaatacaataaaatgttgaatgtagcatgcttctatcacttcaaaacgattctccactttaaccaactcatttaaattaacaaccaaccaccaatcttaatattatctattaacagagcttct

SEQ ID NO: 18198 - DNA, 201 bp, Bos taurus
aaagttcttttggaaagcataacttttggcagagtcaccttgcaaatctataaatgaatggcaaagtcaatccatgtttataagcatatatttttagttggtaggaatattatatatatgtaaataccttttatgatggccattccccaaattctttaaaaataatattacattgatgatattgggtgccatagtccttcc

SEQ ID NO: 18199 - DNA, 201 bp, Bos taurus
ctttgaataaaagcatttttatgccttaaaaaaaagtgctaattgaactaatttaaagtgagaatcactttatggcctcttcccagctaaggcctggggaaagctggggtttgcttagggatgctggactccttgcagatgtctgctgccctcctcgagggggcagggcctctatctttaaattagcttcatgagcacttt

SEQ ID NO: 18200 - DNA, 201 bp, Bos taurus
agagaaacctatggagcttgggttattgatcaaatgcagacacgtcattaaactggtttttatcttctgccttgcattgcactttccagagagagacaacagggagtttgaggtggttcactatctggtgatgtagacataggaatggattagtctccattaaaagcaacaggaagagttttttttttttttttaatagtc

SEQ ID NO: 18201 - DNA, 201 bp, Bos taurus
tttccaaagaaataagagaaaaatactgcttccaagaaacaaatactagcttcatgggcaggaaagtttacatgggctccaaagactgtgtgaagacttttgtttaattccacttagtgcagaatacaattataatagaatattcagggaatgcttccttgaaaaatactgcttccagaatacaattataatagaatattc

SEQ ID NO: 18202 - DNA, 201 bp, Bos taurus
gtccataagtatattaggtccatgttaaaaaatccttgatattcgatcctcttaaaacctccaccctcagaaaacatccctgggttccaatagcctatgacatttatttatgtttttggtttatagaattaatatgtaaaaataccatccatcatgttttattggtccaataattgtgttatgtctatattgccactaata

SEQ ID NO: 18203 - DNA, 201 bp, Bos taurus
caacgtggtctgacactacagacagagaagagatgggcctgattgaaaaaaaaaaaaaaaaagacaggacacattttcttttgcaagaaaacaactattgggtctgtgataaacagaataatggccttgcaaagttgtccatttcctaatccttggaacccacggattacatggcaagaagaaattaagttttaaaatgca

SEQ ID NO: 18204 - DNA, 201 bp, Bos taurus
agattcaattagtttaaaacatgactgatttgcaaatccaggaatatatttcataaaataatgtacattcaagtatctactttatgtcttaggacagatgcgtgatgtctagtcctatgatatatacataaaacacaaagatgcaagggttagctgttagaaccagagttcagaggatccatgtagcctaggtgatatttt

SEQ ID NO: 18205 - DNA, 201 bp, Bos taurus
acttttcctcacaggatttatggccacccgctttctggcctgcaggtcaaggcataaatgaaaaagaaggtcccataggggaattgctaacaatttaatgagacaatcagggttttggccctgaggtcaaacacctttgaagatttcaggttatttctcagggaaaatgtttctggctgtggctccttcagccacctacat

SEQ ID NO: 18206 - DNA, 201 bp, Bos taurus
agtttcagggaatgactgacaaaatcacaaataatcattgcagggtaatcatagctcaggagctgctccacacagttgttggcatgactgcctgtgaagacgtgattacaggatagaaaagtccatgcagctggactcacgatagagtggaattctttgcagaaaattggtgaaccactgcaagctcttaggttgaaggta

SEQ ID NO: 18207 - DNA, 201 bp, Bos taurus
acaggaaagcctacattttatgcagatatttatgattccaaataattcagtttagggggtcccatgcaccaggtagtgggcttcccacattaatgactgcaatgatttggtggtttgttgcgcctaaaactgagggtgtctggacaatccaaaccagtggtatttttaggtagtatagggcttaacagggcagtgtctgaa

SEQ ID NO: 18208 - DNA, 201 bp, Bos taurus
atcccttaaaaatcttccatctgaaatcattcttgctaacatcaataactgccaagtgtaacagtcatggtgcagttcttatcatagttaatttcttcttggcaaccaatgcttttgagcacttgtttttcctcaaactatccgacttacttgtatgttattacattctccttagtttcatattatggttcctttttcaac

SEQ ID NO: 18209 - DNA, 201 bp, Bos taurus
aaaaattcaaattcattaccataaaaatgagcctcttctctgtcacagcttacaattctctctgacattcaattgactgatcagcagacctgggctttatagtaggagactttttgcattcctctttgatctgatttccccctatttaatagacaattataggctctttaaatcccaaaggttcagagagagcaaataatt

SEQ ID NO: 18210 - DNA, 201 bp, Bos taurus
aaggttctaggcaccacatcaggcttcccagtctggggactcaacagagggactgggaatctccagggaatctgacttagaagtccagaggatttgattgcagaactttcacaggcctgggggaaacagagactccactcttggaaggtacaaacaaaactgtttgtttgtgcatgccagggcccaggagaaaggagcagc

SEQ ID NO: 18211 - DNA, 201 bp, Bos taurus
agtaagcaagcagtttgttttctttcttaagaatatgaagcacagataacaataaaactctgttttcagctggatatgacagcaatcatcttcaaaggctcccacatcacataagactcagcacatttgtaatcatttttctattgttgattagaagagagtattctacagtttagctgttctttgtacacatgattgata

SEQ ID NO: 18212 - DNA, 201 bp, Bos taurus
gtcttacactcacctgtcccacgtatctcttagacaagggacgtctttgtaacccttgaaacacccagcacaggactttatatatagttggttattgacagagtttatttgaacataattaaaatatgcatttttattctgctacatttttgttttagtgattgcttgtactgttttccacacttactcaccttttaaggt

SEQ ID NO: 18213 - DNA, 201 bp, Bos taurus
ctggacaaggtttctactcatgaaaaccaaatgatcacatggtaacagtgctacagatgttggaggacaatacaatattaattaactcttaaagatgtgtattgatttcaaagaggttttagggcagtttatctgccctttcctatttgtaaaactgaattgaaaagattttttgtggaattcaggatggcctcagcaaga

SEQ ID NO: 18214 - DNA, 201 bp, Bos taurus
aaggtaagacaagaacaatagggaaaacctttggaaatattatggaattgcagcaacagtttggaacaaagcaatttttcccactctggatctgataggtggacttctaaaagtggaggttcctaaacttgtttcttcctgctaaattacaaaaatgcaaataaaaatagcacactgacctgcaacaaggaggcaaacgta

SEQ ID NO: 18215 - DNA, 201 bp, Bos taurus
ctggttttgacaaatgtatgcaacatataatcaccacctctatttccctcagggagtttcctcaattctttttgcaatcaggcttcattcacctctctcagtctgagcaactaagcatccaatctctgtcaatatagattaattgcatctgttgtaatatttcaagcatatgggatcagttttgctttgtgtctgacttct

SEQ ID NO: 18216 - DNA, 201 bp, Bos taurus
gtttctccaaagaagacatacagatggctaataaactgtgaacttcttaaaggtaggatcaatgactttactatatttgaatccctaccaaattccttgcatgtagtaacagttgataagcaaagatttactaaactaaactgaattcaattgatctctgctttcctctgagccttgatttatggcagttgggtgtggcta

SEQ ID NO: 18217 - DNA, 201 bp, Bos taurus
aagcagacagagagagcaagagaggcagcgcacacaatgaaagcgaggaccttcattaaaggcgctgctgaaaaacccagaaggggaagggcccacaagatttcaaagaagacagcaaagcctccacacatttggattcctccagagtaaacaagtttcctcggcacaacaaagggcctgcctggggcagctctactggaa

SEQ ID NO: 18218 - DNA, 201 bp, Bos taurus
cagccagaccaaacagctttctggccaattaattcctccctctaatttaatgagctgctcattaagtactggaagcaggtcatagggaacagagctgctgacacatggcccgctgggctgacaggtgctgagggagaggagacagggccacactccagccccaagggctccagatcccgtgtatggccagcgccaccagac

SEQ ID NO: 18219 - DNA, 201 bp, Bos taurus
actatcaagtggagacaatacctagcagagggtttcatggaaaaattaaataacatgtaaagcacacagactgcacctcactaagtggaagctctcctacaaaaagctaaaaatgctcaagataccatagctcttgatccctccttggaccaccgcccagctgccccatcagaggcagcccagtggtgctgggtatgaaaa

SEQ ID NO: 18220 - DNA, 201 bp, Bos taurus
gtgccctccccgtggatggggtttatagctctgtcttgcgacttgtaataacccagagtaagttccttggaagtgaagactgtttaactttgtatcttttctacttctgattctccttcccaaaaaagcctggccctaagaacacaatatatgttgctgtactaagcctttctctgcacaacttctcttacacctaccctt

SEQ ID NO: 18221 - DNA, 201 bp, Bos taurus
ttattaaactgtcttctaggccagtgctacaaacttagtgcacgtaagaatcgtcctgggagtggggaagagagtgtattaaagtgcaaagtccctgggtcctaactagaaaagaggcctgggagagaagcagaagtctgcatttttaatgagcagaaccaggtaattctcatatagatgctagaggcatagcggaaaata

SEQ ID NO: 18222 - DNA, 201 bp, Bos taurus
ttgaattgaggcaaggatttcagagcttcatagaaaagaactagtcctgggaagaggtagagaagctgtcaggtgttgttcccaactgtgctactctgccgttcttttcaacttttcaaaacttgggtgtagactcagctctcactgcaatctcttctgtgtgtcttcttttccccacagacatcagactgcgggttcggg

SEQ ID NO: 18223 - DNA, 201 bp, Bos taurus
gtttaatttgaggggacactaatgcaaatggggtatattgtagctgtggttgctggggctttctccttaaggacagatggggttggcgggcctgtcatgatggttacccttcttggaaagtgggttgacagcgtcttgtgttccctcttcagggacttattgagaaggagccaagtggccaaatcacccttagtgtgttat

SEQ ID NO: 18224 - DNA, 201 bp, Bos taurus
ctgactctacgaggagctctggagctgggatgctcctcaagggctgctctaaactgaggcaaagagatgggacttcgatactcattgaccaactgaccaggtgttaggtgtgggtggccctcagggaaggaacttgctgaaggcagtgcctagagacggactcagctgagagctgtcgaccactaatgcttcgagcaactg

SEQ ID NO: 18225 - DNA, 201 bp, Bos taurus
cactttagacatgttgagctgagatcatgagtgtatatttaggtgaaatgtccagtaaggagttgcaggtgtttggccagagcagggtgtaggtatgtgcatgtcatcaaaatggaacaggcaccagggactgggaggagaagagctcactcgggtgcattaggagatgaacagagcactgaggcctgatgaccagtgaag

SEQ ID NO: 18226 - DNA, 201 bp, Bos taurus
aggggagcctgcttggaactgacaagagggccacctgaacctggcaatgtaccatctgttccagggaaggcagaccctgattataaaacatgacacagacgaaggggaagtgtggcctccaataggaccgtaggtatttcccgcctttctctgatcttgctgaggaattgttatggactaatgctctcaaaccggagaagg

SEQ ID NO: 18227 - DNA, 201 bp, Bos taurus
aagataagactctctccaaaaggcctataagggaaaaaaatttgaaaaccccaggcataaaagtttagcatttcctgaatgtcagaggtatggggaccaataaggccagagcactgcatcctctggcctgggaggatcttcttgcagagaggaatcctcttgaaaccccaaatctgggagctctgcttattccccaaagag

SEQ ID NO: 18228 - DNA, 201 bp, Bos taurus
gaacacagtaaacttcaccctactgactttgtgacttgctccaactgatgccacgtgggcagaagtgacagcacactggcctggagcagtggctttacaaggcatctcatcctttgtctctttagcactcagaacatccaagaagagaagagcaggcccccaggagctgttgcttctttttcagactcctggtttgagaga

SEQ ID NO: 18229 - DNA, 201 bp, Bos taurus
atctgctgtattgaaggtggaagaataagagttaggagtaaatggaagtgtgaaaaatgctgcctgtgtgaggattacagggagtaaagaagatattgatcaatttcctactccagtggtgaataagcacacagtacaaaagaaatattgaaaatattaaaaacaggattctggttaattagaagatacagtcttacagtg

SEQ ID NO: 18230 - DNA, 201 bp, Bos taurus
ggctatgacctgtgggcccagagtgattgccttgataagctaaacaaaggcggctcgttagcctcatgatccccatgaaagttgaagaaggtgcggagccttggtagtcaatggccctccttccagcaatgggttcgggtctctaccagtcagcctgaaacattcagagaaaacaagctgatttacaggatcttttcttcc

SEQ ID NO: 18231 - DNA, 201 bp, Bos taurus
cactccctcttttacctcctccccacctgggtggcccacttgccccatcctgcctcagccctctcctgcctgatgagcttgcacatcccaattgccaccacggcacccgcactcctgggtggccagctcaccctgagcactgcacccccctcccacctggatggacttgtgtgttccagcagcctccagagcagaaagctg

SEQ ID NO: 18232 - DNA, 201 bp, Bos taurus
taaatgtctttgctgatgcgtttttgttttgtttccttttaatagttttgttctggtatagttgatccacagtcaatgcacacatttaaggtgtataattgtgtgcattttgacgttgtgtgcatctgtgacactgtccccatagtcaagaaaaggagcatacccatcagcccctagaagtttcctcgtgcccttttgtaa

SEQ ID NO: 18233 - DNA, 201 bp, Bos taurus
actagaacccaggcttcctgattcttctgtttagtgctctgttctgtaccccactctactaactcttctccatgggaaatgtctgagatttcctcagataagaaatctggctgctttccagagttctgttgcatgggggcctgggtgctggttcccttcctccagatcccagcttagccctgttcccctaactggtctggg

SEQ ID NO: 18234 - DNA, 201 bp, Bos taurus
tgcactgggaggctccccttctgtttggggcttgatgacttttgttgtagttggagctttggtgttcctgctgatgtcatttccatccacatacccccgacctgatccactcagtgttgtcaccagatccgatttgtaacccactgagaggccagagggaaataatcgccctctcccaacctctttctagtggtctatttg

SEQ ID NO: 18235 - DNA, 201 bp, Bos taurus
agctctttgtggctgtggagatgctctcagctgtggtcctgatcaaccgggctctggaagccaaggatgctagtggcttctggagcagtctggtgaaccccgccacgggcctggccgaggtggacagggagaacgctcagcggtaagaaaggtgtagcagcatgctgagggaggggatgggtgatggagagagtgtagcca

SEQ ID NO: 18236 - DNA, 201 bp, Bos taurus
aggcctggtgggctgccgtctatggggttgcacagagtcgggcatgactgaagcgacttagcagcagcagggaacccaagcctgaattttgcccgtcccctctgctgctattctaatggctttgtccttgggcccttgatgaggaaccacatttgagacaacacaatgttttacctgcaagtccattcattattatcctat

SEQ ID NO: 18237 - DNA, 201 bp, Bos taurus
gtcgccggccctaccggtctcactccctacctcatggaggttcagagtcccgctcctttccctcatgggtataacccccgtgccggtccatttcctcaccaagtcacaaaccagctcccccggcccggcaaacggcagacactgtcaagcgctgtctccacgccgcgcgtcccgcagcggagaagtaagctcgggtcgtaa

SEQ ID NO: 18238 - DNA, 201 bp, Bos taurus
agctggccaggcattcctaagccattgcaggtccacatgaaataaggtcgttgaggagaaattccctagaatgcactttgtagcaggtggagctcctagacggccaggaggaagatggctagaaagttgatatcaatgccaaaggggaggggactgggaagggatggagtgaggggttagcagatgtaagctattatataa

SEQ ID NO: 18239 - DNA, 201 bp, Bos taurus
gcccttcctctccccactcttcttcagccctctgggaccccggtaagtgaggaacattggggcatgaacactgaggtgctcgcttggaagctctccagcttttggagggccctgaatctgcttcggaggtgaatgggcacagagcatttgtgaatccccgtgccctccctggcatgctgggcttattgtgttgggagcagc

SEQ ID NO: 18240 - DNA, 201 bp, Bos taurus
gtcgtaatccgcattgtacttctgtggaggaaacgtccacggtgaggtggatgctgggggactgcgggaacgcttcctcaaggagggaggcctcctgtccggcaccacccaccctgacctctgagcacagcagaggtagagtaaggagcttttcttgcggaggccccctcgcctgggcccagtcagtagcctgttgctgtt

SEQ ID NO: 18241 - DNA, 201 bp, Bos taurus
aatgtttacacagcgcctggtgctgcaaaatcgctccgtgagcaggaactatcgttactatgagccaatagttctgagggccagggggccaaccccgggaacaacagaagcccagccctcctgccttccctcctcacccggtgagtgtgacgctgtcccagggagggctccggtagagcctgagggagcacagatgtaggc

SEQ ID NO: 18242 - DNA, 201 bp, Bos taurus
ggacagaggtgatgtcaccttcctccaggacgagggcttcggctgggcccgttgctgtaggttgagttactgcctgtggaggggctcagagctggatggcgttgacgggttgacccggagaggcctcctctgaggacagccgctggcgtatctgaggtggtgtggtaccatagctcccgcaagggccaagctccacggacc

SEQ ID NO: 18243 - DNA, 201 bp, Bos taurus
acataacaacagagattaactttgcctgctgaattttatataaatagaatcataatcttttgtattttttttcaatagtgagaatcaagggcattgttgaatgcagttgtagctcatcatcttcattgctgtagagtgttccattgcataaatgcaccactgtttatccatttcaccacggatagatatttgggttgtttt

SEQ ID NO: 18244 - DNA, 201 bp, Bos taurus
gcagccatataggccattagagtacagagttgagttacctgtgccatatagtaggttcttattttatatacagcaacctccccatttatctctcccctccggtatcccctggtaatcataagtttgaaaaacaggtattttaaaaaaatgtttttaaataaatatccttcatcttaataagcactgaatacatgaacctga

SEQ ID NO: 18245 - DNA, 201 bp, Bos taurus
atcaacattcccattgtcctttgggttctgatttttggggttgtaactggtgattcttagctcctgcatcttgaacgcaattcctgttcccagataggccaccaggagctgctgggctctcgaggtccgtagtcatggtcagggcaggatgccaagagggtgggcaggatgttcagtagtgaggtgggtgacctgagcagg

SEQ ID NO: 18246 - DNA, 201 bp, Bos taurus
aataaacatttgcggcatgattaatgaactaaaagcattgttggtcgacttgattgtattcccactggaagttgaacttagaaagggctaagacctgtgcaccattcatttctgtgtcttccgtgtctagctgagttcctgaatgtcatagttgcttattagcttgtgtgagtgagtgggaaaatgagagctgaatgtcac

SEQ ID NO: 18247 - DNA, 201 bp, Bos taurus
gtacctttacagcctgctagcggcacaaccagaagccttgtcctctttgtcaagttacaactgacaaaccttgagatcagggtctcctttagttcttgatagcccactgggaccttctcaggatgtgtttactcttgagatgtatctctctcaggtgctcctggagcgcatacttgcagggaggaggaggacggtggctga

SEQ ID NO: 18248 - DNA, 201 bp, Bos taurus
ccaggggacctgttacataggtctggacaggctgaggtgccgggcagggtacatagctctggcctgggcattccacataacaagtttctgtataacaaaccggagcacattctacatagcaggtctgcacagggcatgggccttcacactgcacataggaaacctcagactggcatggaacctggcattgaacacatgtaa

SEQ ID NO: 18249 - DNA, 201 bp, Bos taurus
cttacaggccaccagggccgtggaggagccacacagctatgggcagctgactttctcccaggtcccagcactgaggacagaggtcacattcagagaaacatggactctcagaattggaaggcctcccatccaggaaggcaccagctccacagtattcccggcagctggcagcctggcttctccatgaacacattccgaaaa

SEQ ID NO: 18250 - DNA, 201 bp, Bos taurus
agacccatacctaggaaggccccctgtgcaaggcttcaggccatctgaccagtgagaaccatggtcaggggacacagcagctattgaggcacctgcactgtgtctgctgtggctgtgggtggccctcagcaaacctccttgacacctgccacaccccttgccacatacctgagctctgttgttacaaggccctataagggg

SEQ ID NO: 18251 - DNA, 201 bp, Bos taurus
attgagcagtccattgacaacatcccagaagcctaggggaggggcttgcaaaggctgtgatgagaatgcttgggaggtacttgatacagtacttaatttgggggctctggagtcaagtagaactgagctcaaatcctgcctgttattgtcaactttataacttattgataagaataggtaccacctattgcccaatttcta

SEQ ID NO: 18252 - DNA, 201 bp, Bos taurus
gaagagaattgctcattctgcagaaaccagagttccacggaagcagccaatcagcgtaagaagagaggaagtgacagagccaggtggagccagagagccagctttatggaaaaacactggcactagcttaaaacaggctgcacctctggcagttcctccccacaaaggagatggtgacgtggctgctgtgggaccagaaga

SEQ ID NO: 18253 - DNA, 201 bp, Bos taurus
tttttttgccaaggatgcgcatgttgacgaccaagtcaccatctttgctcaattctccaggcatctgactcaaggttcctaggaagaaagcaaagttgctctaaagagatatggcacagattggggaaagaatggaaaataaagagggtactgggttattgggacaaatggggtaatctctgatccttaaccacttttcct

SEQ ID NO: 18254 - DNA, 201 bp, Bos taurus
caattagcattaaaagaaagcatcattatgtatatttactgttcatttttctcaaaagcctcaattttgtctctaatatcaatagaattttctctctctcgcttgagtgctatggttctctatagttgagaatttgcaaataaagacaatgcttaaaataatggttttctatttaattaagcagatatttacaagtaggtt

SEQ ID NO: 18255 - DNA, 201 bp, Bos taurus
gatggacactggttaagtggccaacatgttgctacagcttttgaaaagaaaggaaaatagcaatgaaatattttaggaagcataatctagcaaaggtatgttagcagatagaaggcctggaaatagacccagttatatatatgtatgtatgtatatatatataaaagttattctaagtctagatgtgaccctagtataaat

SEQ ID NO: 18256 - DNA, 201 bp, Bos taurus
aatcttcctacctaccttgagtgcatctctgttccttgcaactaaaataaaatgggtgaagtagattcccactatggcatggccttgacgttagctcctgaaattagtgatggggcactgtggtataccggaaagagcaatggacagggacccagaagacctcagttctgctcccaacccagccactggtcattgtgtggc

SEQ ID NO: 18257 - DNA, 201 bp, Bos taurus
agtctgaatccaaggagggcacaggacaaggctgactgcaggatacttttatctcctgatatcccctcacctttccatctgggccctacatcgtctttaatggtgacatctattatctctctgaaaaccaagaagttcatcccttgtgaagaaacttagctttccatcagcctggcccacctgtgggacaaacagatttga

SEQ ID NO: 18258 - DNA, 201 bp, Bos taurus
gggaaaaaagagacctatttccgcctggtttcgaaccggagacttttcacatgtgaggcaaacgtgataaccactacaccacggaaaggcgacagtcgctaccactgagccctgtatccaggaaaacccaaggttcagccgccactatccaagccaccaacttttaacattcatgcagaaaccttggagccccacgctctc

SEQ ID NO: 18259 - DNA, 201 bp, Bos taurus
tgagtatttttgtggaaagagatgctaaaaaaaaaaccaaaacacccttcctctccctatgcctttttctaatttagagatgtgttaggatattaggcctgaagctcccgtcttcaggttggggtgggtcatcctgctcagtccttggctcggtaccacaatctcctgccgtttccaaaacgctctcttcaaacccttttt

SEQ ID NO: 18260 - DNA, 201 bp, Bos taurus
agcctggagtgggggttaagcttcccacacaaccccgattcacctgacatcggtctctcaagtaccctgctgcccgggcgtctcggcccaggctccgcaactctcgctcggatgttccacctgcccctcactttctctcccctcttgaccagctcctcccatccccctccccccgcggtccatttttaatttttttggcct

SEQ ID NO: 18261 - DNA, 201 bp, Bos taurus
agtacagagcacctatattaaatcttccttctccttaccataaacactgtcaaacccatcattaataaacaccattctactacaccaaagtactacactttttatgatacaacagatttttgctctctcaggatttacattatgttccatatgaatttgttgttcagtcgctaagtcatgtctgattctttgcaaccccac

SEQ ID NO: 18262 - DNA, 201 bp, Bos taurus
ttcacagaccagctccctcccctccattcctactgccacggccttcatctaggcccacatcatctcttggttggtctctctgttctcctgacttcctgccatatcatccttgaatccatcttcctctcccaccagaaggatctagcatgtttcctgcttaagtatggagtcctgccccaaggccacaggtgcgaggccttg

SEQ ID NO: 18263 - DNA, 201 bp, Bos taurus
tcaagaatttgggacttttgaacatgctaagcagaaacacagtgaggaatcaaaggatgaactattcatggtttggagagccagcattttaaatgttggcgtatcatgctttatgcctaggtgcagggtgataatgagatggctccttaagaagcagaaagtctttctatgtggaaagccacaaggaatgatgaacaactt

SEQ ID NO: 18264 - DNA, 201 bp, Bos taurus
cagaacagtaacagcaaagccacatcagcggtcatgcagcttagaccagtgccccttaaagagggtttttctggagggcctcagctctgccctgtatttagaatttgttctgagaggaaggtagtcatgtgttttctactgctattggcagatacctcagtggtccagtgtggtactcatttaaactatctttgtggccaa

SEQ ID NO: 18265 - DNA, 201 bp, Bos taurus
tttgaactggccctctacagtgagggcatgtctgggctgcctggctccctgaagaaggagaacatccagcaagttccagaggtgtgagcctcagggaagacgggctcccagaagatgagcccaagcagagtaagttttggttgagaaaggtcattcaggagcaaactgagaggtcaaattacatctttggcgatgaccacc

SEQ ID NO: 18266 - DNA, 201 bp, Bos taurus
tgacagtgttgtttgagtttctggtatacagtgaggtagttcagctctatgtctatagtctttgtcatatgcttttccacaagatattaaatatagtaccttttgctacagtaggaccttgttgcgtatctattttatatacagtagtttgtatctgctaatcccaatcctaatatatccctcccctgcccttttcccctt

SEQ ID NO: 18267 - DNA, 201 bp, Bos taurus
atgactaagtgaggatgataaggccagagaagacaggacaaggaaggcagacattccttccccacttgatgacgctgtctgagcctgtttctgttggcactacccattcctggcccacccatgtgtcaatgcactcggaaacacaggaacagtaacagccacagcaaggcatgaggttgttagtaagctgtgactgagtca

SEQ ID NO: 18268 - DNA, 201 bp, Bos taurus
ctttgtccttgccctgcctaaaccctctctggctacagtcttcagaaaggtgactctaaaatttgaggcagtgaggcctctgaatcaatcttagggccaattgtttgctaggaaggttaagggaatggaatcttgactctgaagggggttccttgctttgggtcttgagaggcctgggaccctactacctgttgtcagaaa

SEQ ID NO: 18269 - DNA, 201 bp, Bos taurus
tcccagaatctgtagtgcctgggtataatagatgctcaataaaccttaccacaaacaaaaaaagtaaccttgaactcagatatgtatgtggccctttaaaactaggctgatgttcccccaaagacttgcctgggtgtcacctatcacaaaggaaacttgaggcaacacaggcccactcagttaaaacacagaggaaaactg

SEQ ID NO: 18270 - DNA, 201 bp, Bos taurus
aacaggtttcatttcgtgtctggtctcttgggccaaaagcccatttggcttcctgaaactctgctccaaggaacagggggcaaggagtaggagcttcagccactccagaaggcccacccgtggaaatggggtgatctgagccccagccttccctgcaacagccctgaagccaggttagaggcacagctatctacagaaagg

SEQ ID NO: 18271 - DNA, 201 bp, Bos taurus
gtacatgaatgttcacagcagctttattcataacagtcaaaaagtggaaacaattcaagtgtcaatcaactgataaatgggtaaataaaatatggcctactaatacaatggtatactattcagtaatataaaggaatgaagtgctgatagatggtacaacatggataaatcttgaaaatactaagctaagtgaaaaaagga

SEQ ID NO: 18272 - DNA, 201 bp, Bos taurus
agagtaaggaatggccttctctatgtcatttcaaaagggcttaacttagtggttgttttaggatctgccctgacccttaaaagggctgttggcagcaggcgataccatggccctgacgtttcctgacgtttgactaaagtttttctttagagtatgattagcctggttccacttttcctgaggactgaggtctccaggatg

SEQ ID NO: 18273 - DNA, 201 bp, Bos taurus
atatctggtgactaaaagcccttggtgcctgaccaaggtgaaacacagcagagctggtcggaatcttccatctgagtagggccagtgatggacaggctgccgtcagaatggaaacaaaccctggcttatgtggaaaagtgacttactgaacagacactgggtagctcacgggaccaaccagaggccgagagccaggcttgt

SEQ ID NO: 18274 - DNA, 201 bp, Bos taurus
aactcctaattccattcctttgcattcatgctgtctctatcctgttggagacttggaatagataaaactgtaatattacaatactgtaatattgtaaggcgatgaagaactaccttaagacacttcaactttgagtcccctcttctgcctagctcaggagggccaaggttgatttttccccacacccagatgtaacttatg

SEQ ID NO: 18275 - DNA, 201 bp, Bos taurus
tgctaaaacaaagctataatactgctgagtagacagagttatagtttaagtatctgaaatatgaggatattaaagaaagaaaaatcctggaagaaaatatataggaaggcaataaaatacaaattaaagctcatcaaagcagaggaagaagaacaatgtgatcaaaggagagattagctcactaatctctatgttgaccac

SEQ ID NO: 18276 - DNA, 201 bp, Bos taurus
acccctctattgtgcagcccatgaagcccaattcccacgaatccccttatataatgaatatccccaagaaacacaggccctaggcaatgccagttactaccattctctgtgctaatgcgccacctagaggtcagcgctagctcaaacgattgtgtgggttcgtctcaccatttgcctcggcccagaaaacgtggaaaagaa

SEQ ID NO: 18277 - DNA, 201 bp, Bos taurus
tataaatattcttataaattatataaaatttctaaaattggatatgttctggtataatgctaccagtcataattctaattatgatcttaaaatgttgtacattatagcaataactaagtttttttgtcaattgcattgtaatcagatctctgctgctgctgctaagtcacttcagtcgtgtctgactctgtgggaccccat

SEQ ID NO: 18278 - DNA, 201 bp, Bos taurus
gtagattctttaccatcagagccactagggaagcccaagaatgctggagtgggtatcctaagccttctccaagggatcttcctgacccaggaatgaaaccggggtctgcttttgtgttaggccttatttatatatacttttcagcatgggaactttagaggctttttggtaacaaccttttaaattcccagcgctatcttg

SEQ ID NO: 18279 - DNA, 201 bp, Bos taurus
ttctctagacagactgtcctggggaagtctggggcaaggccagagtttcttaaggaacattgttgaagaagtctcaagtcttcctgaaggaacaggaggcatctgaaaaatttgcccaggccccggcttgtttgtggtgacaattgctttggcggggtggggggtgtgtgtgtgtgtgtgtgtgtgtgtgtatgtgtttaa

SEQ ID NO: 18280 - DNA, 201 bp, Bos taurus
atccagcatatataaatagctcatatagctcaacattaaaaaacaaacaacccagttttaaagtaggcagaaccgtgaagaaaagctacagggctcaaaatagcctggagttaaaactcccctccagatcctccccactattccatgcaaaataaagaactctcacccgaagaaaaaaaatggacattaaggttgattaca

SEQ ID NO: 18281 - DNA, 201 bp, Bos taurus
tttccttttctgttttacagtacttagattaaggctctactatcatttctttatgtctttatgtttgctggcattaatctaccttcgttgttgttcttgaccagaataattttgtatggtctattacaattttcataggaattgtatagaatctatttgaaaaagcttcccatattatttttcttattcagacaaactttt

SEQ ID NO: 18282 - DNA, 201 bp, Bos taurus
tcaaaagacgcaagggacggagtcactgcgggggccgtatacatacaaccaaaggaatgttacagagaaaagcgtgttcagattctgaggccaatgtctctgaggcttacacatttattaccgcgagttagtttagccggtagtatgtggaaaaagaggtgtaggaggataggtggccaagatattagagacctctccctg

SEQ ID NO: 18283 - DNA, 201 bp, Bos taurus
gatagtatataatacataaaaaatatcctggctactgaaggaaacttaggtgtaatcttctctgtgaatcattatgttttaaaatgttaaatttatagttgaccttgattcagcactgaattagtcattccttacttatgcagggtattacatcaggaattcctcggtctgtgtccaaccctgtgagcagccaactgaagt

SEQ ID NO: 18284 - DNA, 201 bp, Bos taurus
tggctgataagatcaaagcattccctctgccaaatcattaccttattttcgaggcaattatagaacttattgtatcaattagtctggtctccagctgcagccgtttatctctgtctctcctggtgcgcttgccgaagaaaggggtctgcccagccccgcgcagccagccaggccggcgaggggagggcggccagtagggcc

SEQ ID NO: 18285 - DNA, 201 bp, Bos taurus
aagttggagggactgtggtccacatgggacactgaagtgtaaattcggagagatggagcctgctagtaatggtccagttgtggccttgaaaagcatggctgagagcagcacagaaagttgtctgaagtgattaggataaagttagggggaggttagcgtgtcgaatgcatgggtgtgagcagtttgcctcaggcccttggt

SEQ ID NO: 18286 - DNA, 201 bp, Bos taurus
agtgggcatctgattactattgaggtgagatacttccgatggcaagaggacaaagggatgctccattaatcctccaagagagaaacctgaacttggggcctatctgtcctgtgacctccacagtcacttatccagacgcgacagctataaagattgatggatcatgtgttttgggggacttaggagcagggacaagaggca

SEQ ID NO: 18287 - DNA, 201 bp, Bos taurus
ggtctggtggttaggactccatgcttccactgcaggaggcacaggttcaaaccctggttggggaactaagattcccacctactgcctggtgcaggccccccaaaataatttgtctgcttcaccaagtacccaccacagcttctttatcctggcatgtcaccacctctgtggactttgacctgagcgcttaccctctttagg

SEQ ID NO: 18288 - DNA, 201 bp, Bos taurus
gaagctagaaagggtgcgagaaattcctcctggatctctatttgaagtctgaagtcatgcctttgggcccagagttaaaaggctgccctgaagtggccactttggaaaaaccacagagatggacagagctgccagaggagccccagctgtgagacctatcaataaagaagataattccagacagccaccatttgactgcat

SEQ ID NO: 18289 - DNA, 201 bp, Bos taurus
accaagaaccaaaggtaattttcccatgtcagggtgttctttttatcttatgtatatagaaaatttttctttcttgattcttagttatctatgatacctcattttacctcctctcccatcctccttttcatcgaatacatatcatacacaggtgaatgcttaagccaaagctttcatttgagggaaatgtttgagaagtgt

SEQ ID NO: 18290 - DNA, 201 bp, Bos taurus
gcaaatgcccttgttgctgttcagtcgctggcaaaggctcttggaaaatgccaatttctagtttacaggcaagtgccaatttgctgacaagaaatcatctattcttaaaggggtgggctgaaaaaaattacaagtggttttaaaattttttttatttattttttgtgtgctgggtcttcattgctgcatacgggctttctc

SEQ ID NO: 18291 - DNA, 201 bp, Bos taurus
gtgtcaggttaaatgctctcaccttctttgggctcttatccttctgaatctatggattggacagaactgggtgttctctggttctacctcttaccagctttgtaactgttggtgggtcatctctcctcttggagcctcaagcttttcatctcagttgcctagcatatcaggttcacaggaaatatttgctgaatcaatggg

SEQ ID NO: 18292 - DNA, 201 bp, Bos taurus
cgctgtattcggtcatgtcaacctgtgcagagctgatctctcctagtctctgcctgaggcaggtttgggctggccctgttgccaggcctgacagatccttccagaggcagattccagtttttatccctggtgtgagcatgggcacctgcaggctttgctcttaagggaggctcggtttccccacctggagagctaagcagg

SEQ ID NO: 18293 - DNA, 201 bp, Bos taurus
gaagtgggggagggacactaagaatgtcatctagagggccatcctgctgccagggacagttagaagaaggatggagaaacaaggcctgagaactggcttggggtgtgggggcttaggagactgaggaactcaggacgaacaaagcagatgagggtgggccctgggattccgaccccagcctcccagcccctgaatggagct

SEQ ID NO: 18294 - DNA, 201 bp, Bos taurus
ccttcttcatggccctgcccccaaactccagctgggtgataaggctttacccacaatccctacccctgggtataagacagatattgagatttcctcttaactcagaaagcaggacttaagtggaaaatgatgatttttttttctttcattcagaataatttggttatgcaaatattcaaacagtaaagttgttgctaaaga

SEQ ID NO: 18295 - DNA, 201 bp, Bos taurus
tggtgtctgtgggatgcaggagagggaggcggatacctgagacgatattcacgatgtggtaagggatccccagagactggtagaactcctccgcggtggcaatcatctcctcaaacatctcccaggacttgttgtcgtgtggcgaggagtagacaaactgctctatctgcaaggacagatccgaggagacagggatgatgg

SEQ ID NO: 18296 - DNA, 201 bp, Bos taurus
cctatttgataggattctgaaggtgggccagtgtgatcacatattgaagtgtcggatgaagtgtgtgatcagatatcaagtgtgggtgacttaacaggatacctgctaaaactgtggtaggccagccaaagacaggacagggttcaggaaggtgtagtcaaaagaggacacaatctaacttcagtttggttaaggagagtc

SEQ ID NO: 18297 - DNA, 201 bp, Bos taurus
taagacattgaccacaggagcaccagctttcttggaaagttctttactggctgtccttaaagcctggggctgagagctgaagatgttattgttgttcagttgctaagttgtgtctgactctttgtgaccccatatactaaagcaccctaggcttttttgtcctgtactatttcctggagtttgctcaaatttatgtccatt

SEQ ID NO: 18298 - DNA, 201 bp, Bos taurus
tttcattataacttctttcaaacaatgagttgccattgagctataaaaatgttctctgttcagtctttgcattgaagggatccattttcacagccttttcgttgttgttgttttttcctctttttcttgccttgaaagttctataaaattatcttcaagtgaaatgaatataaagtaggaagttggtcatttagggtctgt

SEQ ID NO: 18299 - DNA, 201 bp, Bos taurus
ctcgtgggctaggacttctcaaataggatagattcaggacctttacctcagaattatgtaaactgtgattgtgttttagaaaagttacttgctaaaaccaattaagtttttgtatatgtgtaaatgatcatgaaattgagttttataagatgttctgtatagtgaagttacacactcaaggtgtctcttggagtggattct

SEQ ID NO: 18300 - DNA, 201 bp, Bos taurus
gtaaaacactgcatgctttttgccttttttcccctgttgtttaacttcaaaaggccatcaggctatttttctgtgactgtttcatgaggactgttaacatgtgaattaactgaatttgtaggtctttataaagaggaagctgtagacactgctcatttctgcccatgtcacaaatgatacctattttttagttttaagcca

SEQ ID NO: 18301 - DNA, 201 bp, Bos taurus
agatagaagaggcatcaaccgttcttcccctaatctgccatcccagcctccattatgaagggctctctcagtctagccattgagatgtctccaggtggctgtggagagcaaaacaagtgatgttaatgatctccttgtgctctaacattggttctgggctccaaaatgcatttgctttgtttattttttacgacagtcaaa

SEQ ID NO: 18302 - DNA, 201 bp, Bos taurus
atgatattcaggataacattgctatcactaaaaataggatgagtatttcagcttagtattttgcacctctaattgaggaattcttggttttgaaggctcaaggatctctgcagatcatgtaatgatataataaaagggatgaaaaccaaagggtaagaatgggaaaagagtattactgacagctaacatatacagttagat

SEQ ID NO: 18303 - DNA, 201 bp, Bos taurus
attttattattttgaatgaattttgaaggttaaacatttcaatgaaaattaaacaactggatctgcacacagcgaagctattgcccgaggtatctggtgtgctgttacaaggaagttttatgatatgtattgtttatctcaacctacatcttaccatatcttagatgtctgctaactaagattatttaacttagtctacaa

SEQ ID NO: 18304 - DNA, 201 bp, Bos taurus
tgatgtggtggataggctgctatatatatgatctagtattatagatacaaactttaaaatgagaagttatttggaaaagcagatctctggttcaagagaaaggggtatagatttttgatgattatagatatagctatagagaaagcacagagtcggacacgactgaagcgacttagcagcagcagcagcatagagaaaaca

SEQ ID NO: 18305 - DNA, 201 bp, Bos taurus
gtttttataataagctattatctgcccccttcaaaactactctgaaaggaacactgctctgccagtcaagctgaatatattgtttatttttcttatgttatgtacatgctttgtacaattcataaaacataataattatagaaaagaaattacacatcaaataacacatacaaaataagtgaaaaacttttatcctatact

SEQ ID NO: 18306 - DNA, 201 bp, Bos taurus
gatcaccaccctgcttggttacatttcctttcgtccatgtcatatatggaattgaattctatcctgaggtctcttgcacttgttgtgatacttcctgaatgaaacaattttttaaatcactctatctactgttgagttccagttttctttaacaattattagctatatatacaaaaatcattttagcaataaaaataatta

SEQ ID NO: 18307 - DNA, 201 bp, Bos taurus
ggaagctatagaaggttagcgttgaatcagcccagaaagctttctggatgatgtaaagtgccattatacaactgtactgttgatccattataaccccattcgtcgagtgttgcttaagtgtctattgcaaaggtaagtttggcttaactctatggcaaagctcattagagtagcataaaatttttgtaggataaaattctc

SEQ ID NO: 18308 - DNA, 201 bp, Bos taurus
tatgaaaaagtctgtatcttactgagtcattataataattaaatgagaaattgtctctgaagcaattaagacaatgctaactcagataatcagtgtattacgaagttcaataaaaataagttatttgtatagtgaaataatgttgataaaatatgtcccacttcttaaccaaaaatatgttttataaaaatattccattaa

SEQ ID NO: 18309 - DNA, 201 bp, Bos taurus
aaaataaatagtgtggacttttccaattttttcttcagtatcttctccaaaatcacaggatatcaattcacataataccccagaaaaacccagatgtgatggggtaaaagaacactgctggggttaaacctcagttaatgggcagaagaagctggtagatgaaacttctaacctatcttttggaagaaaatattggaaatg

SEQ ID NO: 18310 - DNA, 201 bp, Bos taurus
cattaggctccacagcctggagttactataccaggaagccatatccccagaatatctggctttgacggtgagtgggtatagatacagcaaagttggagcactgtaggaaacagagactctgctcttaaagaatctccacacactccaagttccatttcaaagacagtaatttgaaagaagcctgggttagaccctattggt

SEQ ID NO: 18311 - DNA, 201 bp, Bos taurus
agtaacaaaatatgcagagttgccacagtccaggtttatatagcttatttaatgttgggatgagaattagaaactccttttatatacttttcaagcactttatcaggattttttactaggcagattacccaaaggtctctagaaatcttatcttaatgggagtagccacagtctttgaatgagttcagttattgaacgtgt

SEQ ID NO: 18312 - DNA, 201 bp, Bos taurus
ccagtattctggtctggagtattccatggactgtgtattccatgggtcacaaagagttggacacagatgagtgactttcacttttcactttcagaggagactgtcaggattgtcagctggtgccaaaaacaaatttaaataggactgaaatatttctgaaaggcttttgggatgaagaaaacaagcgttcaatcttataaa

SEQ ID NO: 18313 - DNA, 201 bp, Bos taurus
gcctttggaaaatgccaatttgtggtcaacatgaccatttaccaaaacctttatttctgggaattaaagagcatataattattttaattggttactaaagtaaataggaggaaaaacttaattacttggcaatggtggctttattgtatcaacactaacctaacaaatatatcacttctgaagcaccaatactttggccac

SEQ ID NO: 18314 - DNA, 201 bp, Bos taurus
actagtacaagttaggaaaaactcttttttttgtttgtttagaaatcaatttcaaggctatgctgggagcacgtgctatgaccagctttctgacacacataaatagggaaaggatttggtcccatttgttttacaaatggtccttcagttaattatcataaatatgtgatccaaaacaccttacttttatccataccagct

SEQ ID NO: 18315 - DNA, 201 bp, Bos taurus
gtatcagtaaagtgaaaacaatttgtaacaagaaatgagaaacttgtacataatatgttttaaaactctctgccagcctctgctaacatctgccacgacttctaggtattcatgaaattttcatttgcttgagtaagttgataactgtgtggtaatgagtctgtcaactgataatgctgtgtcagtcaggtggatgaaata

SEQ ID NO: 18316 - DNA, 201 bp, Bos taurus
cagcaagggtgacaaaggagaaaacgtgagtttcctacttcttattgagggggattattaatttaatttcttttgctattaactatggatatttcttcatattactatttccttatgtctccctatagtattactactatattacctctgcagtaactattcagtttgagatttggtcaattctaataaaacctcttttca

SEQ ID NO: 18317 - DNA, 201 bp, Bos taurus
tggtttagtcgctaagtcatgtctgactcttgtgaccccatagactgtagcctgccagcctcctctgtccatggggattctctaggcaagaatactggagggggttgccagttccttctgtgattctatggttaggcaaactaaaagaatgtattttaccataatagaatagggaggtttgcttatgcaaaagaaaggagt

SEQ ID NO: 18318 - DNA, 201 bp, Bos taurus
caaatacaccaagagatacatacaaaatcattcactagcagtattgcagtaaaaacctcaaatgatacaaatgtctgtgatacgtgacaacttgacagcatattcatgcaatggtattctataacatattaaagaagttattatagaaccatgcagcagtatggatgaatctcaaaaacataaaatgtatgggtgaaaaag

SEQ ID NO: 18319 - DNA, 201 bp, Bos taurus
gaacagattgaatgatgcaatttcttcactttttaaaattaaagtaaagttacactaaaagtccacactgtcatttgaaaaaaaaaaatagttgcttctacctaagaatacaaatcagatttttattgtttcattacattttcaaagcccacatattttgaatactatgtgaaatttctacccatataaagtgcaggtatt

SEQ ID NO: 18320 - DNA, 201 bp, Bos taurus
agcatttaacctgcacaggagtgcttatttatagctgcttagtctttctttaatatttatgatttatgtacttggtggccctggtcttggcggcagcatgtgggatttctagctgcagcacgcacacttagctgtggcatacaggatctagctccctccccagaggtccgatctgggccctctgcttgtaagcgcaggggc

SEQ ID NO: 18321 - DNA, 201 bp, Bos taurus
ctcgaggccgcagggcctccagcggcggccggagggcagggcggcaggtgcgggagaggcgggagccttccccatccgggaggatgtgccccggaggtcgcaggccggggcgagagaggaaagactcgggagcccgagatactggccccccgggagcggtggggcagtcaggggcgactgtagacggccgcgtcgggagca

SEQ ID NO: 18322 - DNA, 201 bp, Bos taurus
ggtgagcctggtgataagttttcagtgtggtttccaggccttgagagaagttcagtctggagatttactatgaaaaattccagcagagtaggtttaaaagcgcctctatggccaaccactattcttgctggacttatacagataatcaggccaagcttattgaatttaaacttactttgcaaacaaagtagtcttaatttg

SEQ ID NO: 18323 - DNA, 201 bp, Bos taurus
agtcatcagcctcttttgttggatgtggggcatctcctctgcttgctgaatcattgatcggggatgaggtatcggccgagctgggctgatgtgattgacactgttacctctctcctctgcaagtccattgtccatgttgtgtatggatccattcacatcgttacccagtccattagctttaatttttaccctttcttgaaa

SEQ ID NO: 18324 - DNA, 201 bp, Bos taurus
ggggcccagagcttcatttgaatgtttttaaacttttgctgttaccaccttgaaattctgaatactttttgaacaagggtccccacatgttcattttgtattgggcctcacatattatgtagcagatcctgctttgaggtcattaactgtcatatgaactgttagaaaataccgggtattgggaaaaaggtgaatgagatg

SEQ ID NO: 18325 - DNA, 201 bp, Bos taurus
tctgatttcagctcattgacaagagatctcagggccaatgtcaagccaaatttaagtaatttctaattgcttggaaaaactcagaattgtttttcccctcaaagagctattcatttatggaaatgtttctaatgttcctaatgtaagcttgtacgtttatctctaaaagagagaatatttcctgtgacacctctgcttgat

SEQ ID NO: 18326 - DNA, 201 bp, Bos taurus
caaaaatcacactaaatagaataaatataaaatatttaaatgagactcaaaagaagagagatattccagattgaatttttgcttcatcagaatttaataatttgaatatttatcaaactaaaaaaaattgtccacatctggtatctatattatttaatagtgtactaagaaagcatgtaagaacatgaagaccattaaaag

SEQ ID NO: 18327 - DNA, 201 bp, Bos taurus
ttccttccttcattttttatttatttatctcctactatgtgctggtcattaccttagcccatcgagttacaacggtaaataaagcaaagtgcctgttctcgtgggagcatatgttctggtagtgagttgtttaagtcactcagccatgtccggctctttgcaaccccatggacttcagcatgctaggcttccttgtccttc

SEQ ID NO: 18328 - DNA, 201 bp, Bos taurus
gcacaagaaagtatagaagagatgatgattgattctgtctggctgtaggtatcaggatatggagtcagcagacttcataaaaatcaggatatgagtaaagcgggaaggtaagaaaaactggaagaatattgagtgatttgaattgttggaacttaaagaacactgctagataagattgcatagcatgctcactgtgcaagg

SEQ ID NO: 18329 - DNA, 201 bp, Bos taurus
tcattcattttcacgggttgcaaggagtttggaatttttaggttcagaaactgatataggcttactttgacctttctcagcatgccaaatgccctccagttctctgcactggagtgtggagagcagagctgaattctcatcagtctcctgaaggaaggcaatgcatctgatctgctgaatagtttcaagccagtgcttcaa

SEQ ID NO: 18330 - DNA, 201 bp, Bos taurus
tctggagccttaccaacattccccaataaaaaccagagctgaaaccctgcaaacagtttctagagccctaaatacacattgagagaaaatcatatttctctggattagatgagggtaaacaagctatagaatatacattttataagattccctggttaaaattctctaagctattttgaactctcattactaccattgatt

SEQ ID NO: 18331 - DNA, 201 bp, Bos taurus
aagaaatgaaagtatagaacacaattgctgtttcctgaatctgaatattcctccctataggtctttcaaaagaagtggaccaggacaaacacaccaggaaaaattatgtttctgaagaagtaagctttcagcacttaaaatttacttccccttgtgccttcctgaagatctgtgggctcctggcaatcatctattctaagt

SEQ ID NO: 18332 - DNA, 201 bp, Bos taurus
gaaccctgactggaaggagacagtccagggaaagaaactgtgacaatggcccccagttaaacctcttatttggggtactcttaccttttgagatggattgcgtcctgtctatgaaatgtgtatctcccagggcctctcaccttctgagatggcccacacactatctacggcatgtgtatctccctgagtaagcctgctttc

SEQ ID NO: 18333 - DNA, 201 bp, Bos taurus
ctcagaaggacacacagtgatgatatagtccctgactgcctctgagtgtgccaaaaaggaggataaaccttgctttcagatggacaaagtaataggtgataacatttcttggacctggagcttcaagctcagaattcaagtttcagatgatttgtcacagctagatccttatcagaagttagatccaccaccctcctcccc

SEQ ID NO: 18334 - DNA, 201 bp, Bos taurus
tagttgattaggctccaggcgcaaatatggtttgactccaagctgcaaattgaactcagagcatgctcttctcatggctaatagcagaagcatgagagacaaaaccaaatcatttaacattggtacctgctaaatcttgctcagagctgcctacttggagccagcatcagggcttctgcctctccttgtccggccaacagg

SEQ ID NO: 18335 - DNA, 201 bp, Bos taurus
tctagacaggtcacttagcctctccataccttagtttcccttctagaaatagagattactattgcatctacctcacagaagggttaggaggacacagtgcttgaaatgtagtaaatcgtcactacattttaggtatttatcctgcatggaaagtcatttaagaaaatagtatcaagaagaaatagaaaaccatctgctttt

SEQ ID NO: 18336 - DNA, 201 bp, Bos taurus
cctacaaaattccttaacatgtgccaaggcccttcaggatccaacccattctcctttcccgcctttcctctcactgcaacttaacctgtaccctgtcttacaggcccgtctgtactggccctttggcttaggtatattcttttatccaaaacctctgaatggcaaatcatattcatctttcagaatccagttcaaatttca

SEQ ID NO: 18337 - DNA, 201 bp, Bos taurus
gaactgtatgattttgtgacatttctgctcattccccattaggactgaatcattagttctttctggttttgcagaaacagaagcaaaaattactagcacacatgctgattaaggtaagtaagtgccatttctggaaaaatgaaatgttttattcagtgtaggtacctgcttgataatttatagtgtgttttggtcttagta

SEQ ID NO: 18338 - DNA, 201 bp, Bos taurus
caggacaaggatgcagtgctcagtggtgagcaggccctggatacagggctgcacaggagcgccacctgcctcccccaggccctttcggagggctctccccacgtcaacctcatctgacctggaaatcattggtggtagaaaagagggaggcaaaggcaggcctgggtgtccatatggcaaaattaaagttgtggatctgtg

SEQ ID NO: 18339 - DNA, 201 bp, Bos taurus
aagtcctaaccctaagtatctcagaatatgagtgtgtttatagatagggcctttaaagagattattaaggtaaaatgaggtcatatgggttggccctaatgcactaagactgatgtccttacaagaagagaagacaggaacatacagagggaagaccacatgaacacacagggagaagatggccatcttctacaagccaag

SEQ ID NO: 18340 - DNA, 201 bp, Bos taurus
gctctgtttacccattctagattttttaagatcatgtattagtcatttggacaacaatgcttcactgagttcaactgcaggccttccaattgcaacacattatacaatatttttcaaaattacacttgttaatattgccacccatcttaccagaaaggccttaagcactgggaagctagcaagctcagggtagcaaacaac

SEQ ID NO: 18341 - DNA, 201 bp, Bos taurus
tttgtttagttatgtgtcaataccttattgtctccattgttttatagtgttttaatgtctgatagggatagctcctctttccaatattctttttgttcagaattttatttttccataagcacttttcaattgatttttcctagttccaaaaaatatgtgctagtattttgaaggtgatttgaattaaatttaaattaattt

SEQ ID NO: 18342 - DNA, 201 bp, Bos taurus
ctgagctgtagatactgtaggtaaaaccaaagttctgggattatacttgcatcaagtctgtaaaggaatttttaatgtattttgctactgctttatttgataattcagaaattatttttattttggtataaccattctcaaaaaaaaatgtcaattcaaatctagtagtataattagcaatccatagaaaaagatattaat

SEQ ID NO: 18343 - DNA, 201 bp, Bos taurus
catcaccgactcagtgggcctgaacagtgaaggactgggaagtctggcgtgctgcagtccacagggtcgcaaagagtcaaacacgacttagtgactaaacgacaacagtaatagccaggcacttggccaggtgctgggcacacagtaacaagacaatcacggtctctgcctacatgatgtttagcctagattttcactcag

SEQ ID NO: 18344 - DNA, 201 bp, Bos taurus
tgaaggggtgccatctggccgtgcactcactctctagtggacctttatccacatgcgagtgacctggtgagtgaaggagggaggcatccatggccctggacctggcagctccatttgttctggaagcttccccagggaagcactgccttcccaagccttttctcccaccaggccagtctcttaaaggcccaggcagtcttt

SEQ ID NO: 18345 - DNA, 201 bp, Bos taurus
gaggacccaacattaataaagttagctaggaggtagcaagcatgccacttgatgccataggtcttggagctactcaagaactcatggttctctgcccaccccaccaggatggagccagaccttgtggacagaagagttctggccctctctgaaactcagtgaggtccacagtgattcttcagcttcccctcgcaatcaaca

SEQ ID NO: 18346 - DNA, 201 bp, Bos taurus
gctgctgagccactctttgctcacagtgctgctctcccacctgcagggcaggctcacagcctgggataagttcctgacaggccaggcagtggtgaggacgaagaagtaccagtgagttccctgccctgtgggtccaggtctgcacctgtcagtgaataggcctcaaaaaactggacagtgttttttaaaaaatggacactt

SEQ ID NO: 18347 - DNA, 201 bp, Bos taurus
atttttagaaaagtataatattttattaaaagatcagagcttaaagattgtaaccagtcattactgaattttaaaaaatatacaggcccttagcatcatttcttccaaagaaatcccagggatgatccccttcagaatggactaaagctgaaactccagtactttggccacctcatgcgaagagtttactcattggaaaag

SEQ ID NO: 18348 - DNA, 201 bp, Bos taurus
gtgggtatcgtgggtgggggggacagttcagcctaatgagaatcaggcagtctcattcctagatatctgccccctcctttcttgtggaaatggtagtgccggtcctcttggttcacttcccagggactttgtggagcttagtgcagtaatgcctagaatttcagaggacagatactatcaccatcaaaggcattgcttatt

SEQ ID NO: 18349 - DNA, 201 bp, Bos taurus
atcccatgggcagagaagcctggtaggctgcagtccatggggtcacacagagtcggacacgactgaagcaacttagcagcagcatagctgataaatcagtgttggagataaattggagtgctaaaaatacttaatataaaattaggcaggcaaaaagggaaaacaaaaaataaaaaacaaatatgaagatgatatacttaa

SEQ ID NO: 18350 - DNA, 201 bp, Bos taurus
taactgtccaggaagcaaagtattaacttatattaaattttagtaagacacagattcaagttttaatctagggaaaccaattaatgattagtaaaagaacgtataaaaacaagcaaacagaggacaaaaaaatggaataatgatactggatccaaagaaagaaaggagagaaagaacacagaacagatgggacatgcagaa

SEQ ID NO: 18351 - DNA, 201 bp, Bos taurus
tcaaaaaacaaacaaaaaaaagcatgatttattaaaactgcctaaacatactatcactagtttcaattagcaggctgttaccgaacggaagcaaataaacgttaaccctaccacttactggaattcctttaaaacatcccttgtcacaattataggaataaaaaatctcaaggctaacatacctgcttggattttctgttg

SEQ ID NO: 18352 - DNA, 201 bp, Bos taurus
ttacttgacctctcagctatatctgtcaccagtctattgtgattctctttaaactctttgctggtttccaggataccactttccccagattctgtttgttcacttattaaatatctacaaagtgcctacaatggtggattgagctaggaaatggggatacaataatctcttcacaaagatctacaaacaggcaattacaac

SEQ ID NO: 18353 - DNA, 201 bp, Bos taurus
ctgggtgattcttggtaacccaaactaatttcttggcctcatgaatattagactcttaattttcaaacttctcttgtttgggtatgtcctggaaagccaacatgcattttttaaactctgaattatgaaagacaggcaaccatctggaaccggaaaagtgcggggtttcagaagagctcttcacgtcatgaagcatcattc

SEQ ID NO: 18354 - DNA, 201 bp, Bos taurus
aaggtcactcatcatattcattttagggtatcaaccagaaaagaaaaaacaaaattcactactggcatttaatccccactaacaaaatcccaacagggccttcagtgatacaggactattattatacttgtcctaaatcaatgagctcctttttccaagttaactgttactaactttcaactgttttctcaaggcctcctc

SEQ ID NO: 18355 - DNA, 201 bp, Bos taurus
cccctttacaggacctgcattttctggttcagtccaggcctgcccccactcccccacccccatcactctaccctgaggtgaataccaagtgcctaagtcatctcacgtgaggcccacttcaggcagtgtttggtatatgcctaagaccatagctaatatccaactccaactcgctctctggttagcgcagaacttacaggg

SEQ ID NO: 18356 - DNA, 201 bp, Bos taurus
ggagtagctcctctcggccctccttgcctgtgcagctgcctcggctgcctcccctgacctcgggcgtgtggtacctcctccaggccgccgccctggactcgagtgtgtggtagcttgttttggaagctgcccctgaccttcaacgtggggtagctcctctcggccgctcctgtgccaacgtagcctggcactctcggtcgc

SEQ ID NO: 18357 - DNA, 201 bp, Bos taurus
cattattgataaaggaattctaagacaaccaatgtgtttgaggaagattattctgccaagtaatttgttgctctagactggatacacttaacataaaatttatcattttatcatatttaaaagtacaattcagtagcactaactgcattcacatttttgtacaactatcactactgtctatctccagatatttgggtttct

SEQ ID NO: 18358 - DNA, 201 bp, Bos taurus
gaaactcaggtttcagaggacagacctggggagaggactgggtttggatgctcagatttacactgccagtgcccatgggccatccaagcagaatactggtacatggttggtctggctgctatgggctttgcaatgtaggcacacaagggtggggccagggtctgggctgattccatagttcccatggtggatcctggtgcc

SEQ ID NO: 18359 - DNA, 201 bp, Bos taurus
ttactggaagagcaagagagaactcttgctctcaaactgcaggtatttaactgcaacaccgtgtggttcctgttattctgttttccctccacactccctggtcacaaacgtggcccagcagtgaacttgaagcccagaagaaagaccttgcttgctcacttgtacttttcaatctttttttgcctgcctgaactggcccct

SEQ ID NO: 18360 - DNA, 201 bp, Bos taurus
gaatctgagaacattgcttagatgttcaatctaaggtctgtcttgtcagctataacaattaccacaaacttgattgtattacagtgacagttactctcacggtactaggctccagaatccaagatcagaatccactgagtcaaaattaagctactaccaggactacagtccccccagccccctagagagagtccattccta

SEQ ID NO: 18361 - DNA, 201 bp, Bos taurus
tgtgaaaatggaagatttttcaagtgtatagttatccattgtattattcatctgctatgctgtggaaaaggtttgaattcatcacatgttattgatccatatatataatgtcagtagtgaatttcattcagtctcatggacttaactgtcatcagttctataaatttttgtcagaaatagaagctgagtatcttgacttgc

SEQ ID NO: 18362 - DNA, 201 bp, Bos taurus
taagaattgcatacctcttagtttgattctaagtcccagaattagtagaattaatcaaaactgtaatctccagccccttacaaaacaacaatatgcaaaatacatggccattgtgtagagtcaaagcaatcatatatgtttgcagtttggtcatattcaattaacctcattcattttcttgataacatcattgagtatatc

SEQ ID NO: 18363 - DNA, 201 bp, Bos taurus
agtataaatatgagcattcttttttaactctgatcaatgaatagaattgaaatgtttgtatcagtcctcatttttccagactttaagtgggtatatttcaggttaatatatggtcatttaactcaggcggtgtctgtgtcagaagacacagggttgggtaaggagtaggaatcccggaaggaacactattatgtcaaacgg

SEQ ID NO: 18364 - DNA, 201 bp, Bos taurus
tacaacattgaaaattatattgctatgtaactatggatgtcacatatctgatcatcaaagagtgaaagggataaaagaatgtgtagctttggccagacatgccacaagatgaagcatcactaggttgctcttagtttttgaaggtaggactcctttttaaacagggtagaagaagctgtctttaaatgcatggccagccac

SEQ ID NO: 18365 - DNA, 201 bp, Bos taurus
gtattgggcataagttgagtgagtgccttctcatgccttcacaactgcacaatagccaggcaagcgctgaagccttcttatatttggaaaatgactccatatttctaatactagtttttctttgggactatttgtaaatgatttatcgttgtagcaaatcggatcatgataacataaagctttttagaggtcattaaagag

SEQ ID NO: 18366 - DNA, 201 bp, Bos taurus
ttaaactcaaaaacttttgcacagtgaaagaaccataaacagattgaaaagaaatcccacggaaggggagaaaatatttgcaaatgatgagactgacaagggtttaatctgtaaaatttacaaatggatcatgaggctcaatacaaaaaacacaaacaacccaactaaaaatacatagaagacctatagacatttctccaa

SEQ ID NO: 18367 - DNA, 201 bp, Bos taurus
ggcagattctttaccatctgagccaccagggaagcccttttattttccagctacttctatctagattgtgcaaaatgtgtagccagtagctcctgtgtgtgtgtatcaaggtctccctctcccatttacgtattctctgggatgagtcttacctggtccagcctgaaatcagaacacaccttagaacattcacatctggcc

SEQ ID NO: 18368 - DNA, 201 bp, Bos taurus
ggctctgggagctgtggcccttgactcctgtctggtcctctttcagtaccttgtgccgcttccctgaggggacagtgccctgaacaagatgagtttatttgaagagctaagaccaaaacagacgaaaacatgagcaataagaagtcattgtataatgaaatacctcatggtgtggcatggactctaaggacatacccgtct

SEQ ID NO: 18369 - DNA, 201 bp, Bos taurus
atctgactgtgcatgttctaaaaacatttactggcctggtgtgtgagatccctgtggtgaaagcccatatacattgaacatggctctgctattctttccatggttggtaagaatgccaaggcccgggcctgaactagagaagtcttagatgtgtctctgctgcctgaagggcttggcatgcacatctctttgcagctggct

SEQ ID NO: 18370 - DNA, 201 bp, Bos taurus
ccataggccaaactcaaaacgagatgacagttacagaagcattttctaaatgataagttctttaacattgtaaaggtatggcttttattttaacatcctagacaaggagtgattaggcctctgaattcccagtttgcttttgatcaggtatctcattcctttgtcaaagttctaattgttagaaacttgtaccctgttatg

SEQ ID NO: 18371 - DNA, 201 bp, Bos taurus
ccacatcactccctccatttcttttgacagtctctcaaggcctttggcactaaatttctccttccttctttattcagaaacatatgctccaagaacagcaatgtatacaaacagatgactggagttgtcggcaagtccatccggtttataaccaattcggttctccagcccactttggtctcaggtggcccaccaaagacc

SEQ ID NO: 18372 - DNA, 201 bp, Bos taurus
cttaaatgacctccacaagttttagaagatacaggggttatttgaattattatgattcatgaacaattagatcacatttataatcagcaatgcaaaatatattttagtgtatagtcctattttaatgatgcttcatcaagttgaaaataattagtgttaaatagttatttgttccgaatgattaaagacacatcaagttaa

SEQ ID NO: 18373 - DNA, 201 bp, Bos taurus
tgatctgtttaggataccagccttataatgcattcacccaggatgtaactacctgccaaaactttgctcttcattttctaaatttcttgattaaattatgaatccttcttgcctctttgggccacaatacctatagatattttaataacatttattggattctgcttatttcgtatctgcatatctgattctaaacatagc

SEQ ID NO: 18374 - DNA, 201 bp, Bos taurus
ttaagagtttgaagcatttaaaaaatatttgtttgaaagtatcatgaaggctagtgggagattaactgtcagagtgcaggcaggagagggatcaggtgtactgtagtcatggttaccctagtcattctcttttcttggacccagtgatatctggttgctctgggtggggtctgtggttcccaagacccttgtactcgtgga

SEQ ID NO: 18375 - DNA, 201 bp, Bos taurus
catgagaaatattggcctgtagttttcttttcttgtaatatctttgtctggttttgatattaagtagtactgttggcctcacaggatgagttagggaacatttcctctgtttcagtcttctgagaaaaattgtagacgactaatataatttcttccttaaatttttcatagaatttaccagcaaacctatctgggcctggt

SEQ ID NO: 18376 - DNA, 201 bp, Bos taurus
agaatcttctgcagctataaaattgttcttttgtttctccttgacttgcttactctctttttctgtataagacaggtgaatttacaagttttaaatctgtggatcaagtgactgcactgcacaaaatgatacattggtatgatggcatatatttttttcttttctgttgacttaccttagaatgatgaaacaaataaaatt

SEQ ID NO: 18377 - DNA, 201 bp, Bos taurus
cggaaagaaagcctgatgtttatccatttccctttgatgtcttggcatactaatgctatgccaagtggttgactactgaattcctcctaaaagttatcaaacttacaatttcatgaaaagaaacagaatacaggtatcctttgaagagataatttaaatgtttagtagaaggctgaatttttgtttttttgtttttgcagt

SEQ ID NO: 18378 - DNA, 201 bp, Bos taurus
ctaaactactttttgccagcccacaagtgattagcattaaagttttggcaggattccatgcttattttgccatacctaggatgggaactggttttgcttctttgctcaaaccaaccatgaaagtgaaagtgaaagtgaagtcgctcagtcctgccagactctttgtgaccccatggatagtagcctgcaccaagctcctct

SEQ ID NO: 18379 - DNA, 201 bp, Bos taurus
gttttaatgtaaaagactggactaaccatcaatgaaagatgatttgcccatatatgcagaaaagaactttttaattgtgcagtaaaactgctggagtgtgttaatgacagtgtgaaaatcagaaattttttctaagtctcctcttaggtttatgctttgtcccctactgtgaaataaatataaagcagtacactcacattg

SEQ ID NO: 18380 - DNA, 201 bp, Bos taurus
agtgcaacaatttgataattactaggtttcattccattataaactaagttaagcctccttatgcaaccacctatcagcatatgatgtattattatgcaagcaggggaagctttctctggttatttctaactgacattcatggtgagagtggacaggtatctgtattattatcttccaggctgtgccacaggagatgtagtt

SEQ ID NO: 18381 - DNA, 201 bp, Bos taurus
tcctaaaacatacatagacaagaagcaaacatttaagaaataaataagaaaaccaagtctgaaataaagtaaataatgtgccaaaggtttcaggtttctaatgttcttttttttctgaccccagcaccaattgttttccattatgtcatgccatttactgaggctagagccacgattttattcatctttatatatctatca

SEQ ID NO: 18382 - DNA, 201 bp, Bos taurus
aatatttagattgctttcagaatgagattcggcacagggccttgcacctaggtccagaaaagcccccttctttccttcaccttcacttaccattgcacactgaagtagggcctatctgctcttaagataaccaattcacataatatcacgacattgtatattccatcctaatactttctgtccacatacacacatcactga

SEQ ID NO: 18383 - DNA, 201 bp, Bos taurus
acagatcaaggcaagtgccctctgctacatctcagtcacaaaggcaaaaattatctaaaatcagatagataaatgatagatacctaaactgatggaaagaaagaaaggatggaaggaaggaaaagataattttatatccactggtggttccggtactagaaacagtgatacaagacattatctgctgctataccctagtta

SEQ ID NO: 18384 - DNA, 201 bp, Bos taurus
cctccccaagctataaaacgtcaagcgataactctctgtgatttaggccagtgattggaataaatacctcctggcaacaggtgcagtgacttaggaccgagatcattcacattcacattcctaataaacagacgtactgctatgagatgggaatttgtaagaccagaattggaattctaacactggatttcacatcattta

SEQ ID NO: 18385 - DNA, 201 bp, Bos taurus
tcctcacatctgtgggtatctctcaggagaaatgaatcattagctcaagattagtagcaaaaactactaatcgcacatttgagaaaaatgtaagaaattacgaagaatcagagattaattcctagaacaagtagcttctaaataatcatgctgagaggaaagtgatctcttcatataggaaggaaaagtataaaggaaaga

SEQ ID NO: 18386 - DNA, 201 bp, Bos taurus
tttttcccacacaaataaagcttaagtccatccatctgtctgttcaatgagtaaaagaatatcaaattgattattctcattctactacgtacagccacttccacatcaaataaaattattttcaaaagttcaagctttaaatgcaattttgaaaacaatcaaaagattttactgctgtgattcaaatgaaaaacaaccttc

SEQ ID NO: 18387 - DNA, 201 bp, Bos taurus
tatctgtaggcttccactattagacttttgtttcctcggtacaatatatagacattaatgtatcttccaatatctatttcaaaaaaatctcttaacctggtaagtaagaaagttaacctctctgaattgagaaaaataaaacacaactcttttacaattgttgctatatagagataacatttaagtgatttgattggttag

SEQ ID NO: 18388 - DNA, 201 bp, Bos taurus
cttctctcctggtgccagaccaacaaataatatcaaatcacaataataaatccagcagataaatgctgagcctcttaattggggaaaagaactatacaatggtgacaatgagaatggcaggattcccaaataataatcaaaatagaaggaagagaatttatgatgcacataaggttggagtggtaactagcatgtgggaag

SEQ ID NO: 18389 - DNA, 201 bp, Bos taurus
gtaattttggacaaattctgagaccctgactttgagataggcataattataggaaaaactttcctaaaattatttgacatatttccctaggaatttaatgatctagtaaatatttaaaaatgaccatttcctcaaagggctctaattaggcatatttatttaattggtatttcagcttcataggttatcattaatgttgtt

SEQ ID NO: 18390 - DNA, 201 bp, Bos taurus
tactaactgcacatatcaggtaggcagtagcagaaatcctaagaagcacaattaccttagtaaggcatgtgattgctagggaatgggagataaactccaaaaaatgatttaccaaatcaggtgtctatatctcaataaagctgggcaggggtcaaagtaaggcaccaattgacattctcacaaaaaagcctctgaaaagtg

SEQ ID NO: 18391 - DNA, 201 bp, Bos taurus
gagatggaagaattgtctaatgcagaaaaagtctgtttaaaatttgtcactactttctcccctcctccattgtatgttcacacattgagttacatagtagttatagtttcatctgaggtcatcttatcattctggggaactagttacaaataagagccatatttttttatggcatgaggcaaacacagcatggtactttat

SEQ ID NO: 18392 - DNA, 201 bp, Bos taurus
ccttccctgtcttttagccaccgccattttggactcctgtttcctattctaactacctaacagcttcacatgcttttttattttgatgtgcaactcaaacgtgcacatctgaaaatctgaactcttggcagtctttatgttgaagtgctatagttttcccattgaattttttaaaatgtatttactttttaattgaaggat

SEQ ID NO: 18393 - DNA, 201 bp, Bos taurus
gtctcctgagctgcctggacctcggaagggcacaaaatgcatgcccaaccacgtctgtgcctttgcgaagtacccaagaagctgaacctgagcctgagcagtttagacctgggaagtgcacaaaatgcagggcccactttgaacagtacccctgaagagcaacctggagcctgagcagtgtagactgagaaagcacacgca

SEQ ID NO: 18394 - DNA, 201 bp, Bos taurus
gaaaactataatccaattcccagtgaagcaactggcagaaaaaaatgaaaacaacagaacacaaaacttaaaaagtgttttttagccaacccacatgatatgaattggaaaaaaaaaaaaatcactcactgttgtctaggctgttcagcatttgaaaatgaaatatccctgtcaggctacctgacaataaaacagagtttg

SEQ ID NO: 18395 - DNA, 201 bp, Bos taurus
tattagtcaatatatgtattcataaacttgacctcaagtcagttgatacattcatgagatgagattcaaaagatacacaactggacctatacatttgtagtagaaaatggacatcactatatattgaattctgaacatgatttaagtaagtgctgtccttcaaactctggtgtgcatgccctcagtgcccagggaaatcac

SEQ ID NO: 18396 - DNA, 201 bp, Bos taurus
ttgtaatagaaattttaggaaaccaggaaaagttcttacatgaaggtcatctttggctctcaaacaggaattccactggtaaaattatttggggagagggaaaattatttattaaaggatagaactaggcaagtgactagaaatttcatgatatgtagtgagaaagagatcaatttaaaaattgagtttgcaaaacatagg

SEQ ID NO: 18397 - DNA, 201 bp, Bos taurus
ctaagaggattttattatatgcaatttttgtttttcatctttgtttacatgggaaatgaaacattatgtatgatagctgtcaaccttctgaaattaccatgggaggaagcatattatgttagttgtgcaaaacaattgaacgcagagggatggtatggggagggaggagggttcagaatggggaacatgtgtatacctgtg

SEQ ID NO: 18398 - DNA, 201 bp, Bos taurus
ttattaggttttctttcagtaaatttttataagaatccttattatcttttatattacacattcataatcataataatcattcatttgaatttatatattggagaatttattgtctacaacattgttacacctccatctcattttcccttgttgacatctgtcttctaaattcattattatttgattcaggaggtatcttga

SEQ ID NO: 18399 - DNA, 201 bp, Bos taurus
gcagccttagtgattttcttaattcctttattagacaagtagtttcctgcactttccccttcaatgtctcccactgcattaatgtgccatattccaaccatgactccctacatcttgcagaagctgaccccaccctcctctgctgcatcatctcacatctcttgattctcttattattacactccacacattctgatcctg

SEQ ID NO: 18400 - DNA, 201 bp, Bos taurus
actgcctagtgttactcgcataacctttaacctccgccacatcttagaacattcctttttgtaaaataaatgaatcctctgttgaattaaattgcccctgaattagactgaaatatgacctctctttagtttctttttaaaaaattattccacttttttgttttgtttatgtgctgtacaattctctgtgaaggactgctt

SEQ ID NO: 18401 - DNA, 201 bp, Bos taurus
ccacactcaccagagcaagagagccttcgccccactccctcattgtatagtgtcttcaggattgatttctccatcttgacaggaaccaggaaaccgttttaattcttcctggaaaccttggaccttactcttgattgtcatcaaaattcccactagtcagttctcttccactgcctcagtcccatttttctttgcacttct

SEQ ID NO: 18402 - DNA, 201 bp, Bos taurus
ttgactggtttttagaggctgacattaaataacatccttaaagataaaaatcactgaataaagttaatggaaatttagcatcttctctaaatttaactaattgacaaatttataaccatcctaaatacagcattgcagaatttgaatttaaactcattataaatacaacacttttaaaaactgaagtgtagttgttgtgta

SEQ ID NO: 18403 - DNA, 201 bp, Bos taurus
cagtgctagaacccaccccacccactactcttacctattcttcccctactggctccactccaccaccttaaaaactgaaatctacccaagtggcctttggcagaagctggatggaagcaaacattaccccagaaaactctgagatgaaatctggggcttatgttcccaaccttagcaggcctagcatccagcttggcaggg

SEQ ID NO: 18404 - DNA, 201 bp, Bos taurus
aggctatagaagacgtagcagctggaaagtcacgcatttctgccccttccccaccacctgccctgctgcaagcaacactaggaagaatttcaggattctgtcacatcactttaggtttctgtgcctgaactgggcccaagctggagatagtagacatatgtcaaactgaatgagaagctgaagttttgatttatattgggc

SEQ ID NO: 18405 - DNA, 201 bp, Bos taurus
ggtttactcaagttctatttcatctgatttctcatttttttcctcaggtaaccgtggagaattttttacgggtgttaactgggaggattccatctagcacacctcggtcaaaacgtcttctttctgatgatcggagcaatattcttatttatatgacaggtaattttcaatttagatatttaatgatagaatatgctgact

SEQ ID NO: 18406 - DNA, 201 bp, Bos taurus
actcagtgaagcttcttggagacgggattacatcatgtgcccaatctctactctgaataactgtagccttccctggacctgtggtttttctaaatggcccatgattttgaggatgtgaggtattgtggatagcccatgtgatttctagtttcagactattcaagctaccatagaggcccttgtctcaagggccgtagtttt

SEQ ID NO: 18407 - DNA, 201 bp, Bos taurus
aaaagagtagtgtcaaaatgcccactgagttgtatcccttgctggggtgttagaataatgccaggctgagtacaaattggaagttcctgtcgtataacaggtctagtctgcgaacggatggggaaaaagtaggcaagtgttcttggtagactgagcaaaaagaaaaagaaaaaagaaagcacttaatacattttttcctag

SEQ ID NO: 18408 - DNA, 201 bp, Bos taurus
gcatttgagcaggaaaggggaacagagtttctacccagtcattatttagaaagttgaaggattaaagaagcatttagttagtcacatatttactcagtgactgcaaaagtatgtatctagatacagccttccgagcatttgcttccgttattaattttccaataaagatagcataagtttttcttcaagagctataggaaa

SEQ ID NO: 18409 - DNA, 201 bp, Bos taurus
cacacacatatcccaggccctgccaaagggcacttttttccccctaatcacaccattcatgaatttttgcccttgtgggagtgctttcatgcctgttgaggatgcatgacttcagctatttattctttactaggtacctgctgctgctgctaagtcacttcagtcgtgtccgactctgtgcaaccccatagacggcagccc

SEQ ID NO: 18410 - DNA, 201 bp, Bos taurus
actgactgaggctgtggcccccacgggccccacttctgccttggacagctggcagacattaccccaggcaccacagctgaaaccagcactttcatatgccgcactcacttgataatggccactacctgtctctaacaagccatcaagatcactagtcatctcttccccacaaaggctcctcctgtatctcctgtaacaaca

SEQ ID NO: 18411 - DNA, 201 bp, Bos taurus
gtggcaagaggtactttataaaagaccctgtgagagggaagatactgtcatgatgctcaatggaaacacaatctggcaaagaagttaaacataaaaattaggccaggaccagtgaaatctctagggacctcacagaggcaaactcaaaacggctccagatcctatgggattcacacattaaacaaacccttctgaaaatca

SEQ ID NO: 18412 - DNA, 201 bp, Bos taurus
ggtgaaaaaggatggagggaggcaaaaaagcagtcaaagaggaagtgatgcctaagcagagacataaagggaacaggaatttgacccataggtaaagaagagaacattccaggaagagggaaatgtgtgtgagaagaaaaggagactgaacagactggcaggagatgatcctgaaaggccatgcataccatgctgaggagg

SEQ ID NO: 18413 - DNA, 201 bp, Bos taurus
tgttccatccaatggtttccaaactttcagaaacactggtaattcaatccaaacttagtgaactgtcaaaaaacaatgccagacatttcaataacatataaaagcagatattgctcaatgtgttaagagaaatcatcactattcacatttaaaattctttactcttagggttattattgcaaacttgcttcagcaaatctc

SEQ ID NO: 18414 - DNA, 201 bp, Bos taurus
ttgttctgtacatttttggaaacttgtgtatttttctttgatagtctctaatttttgaaggttatgacatgacctttccccttgtttgacggctgttgatatgtttttgctgctttaaaaagttgctcttttgcattaactattcaagtaattaagctatgtggaagggagatttttagatttgactgaactctagtatct

SEQ ID NO: 18415 - DNA, 201 bp, Bos taurus
agtgtgttattgtttttattttatatttttgctgtgtctcagggtggataagtctgcactcaggcccctcaataatacctgcccctgttgcaggtcatgtcgtcaaaggtgaggtttcagtgtatagtgtttctctgtctttcctaccaatttctatgtggtccttctatttgtagagctgttcagtaacccctcatgatg

SEQ ID NO: 18416 - DNA, 201 bp, Bos taurus
attttctctaaatctcatttcacaatatccagcttacagaataagtcgaaaattacagtttagagcatttcattttgtaatgcattatagacattgttttctgaatagttgcaactctgttcctcatagaaagcttatgtagtcaaccctttatttaatcagagtaccctttatatgtgcatgtagaaagataatggagag

SEQ ID NO: 18417 - DNA, 201 bp, Bos taurus
ttactaatgttaccatttcattaaaacacaaatgcacgtatatatacaaacacaacacaatttagagcatatcattttgtagacttggggtgttatacagcactattaagtctggtaagttagtatgaactatttcctgacaccaacagattctccacttggatggatttttttgctgtcaagagctaggagctaaatgtc

SEQ ID NO: 18418 - DNA, 201 bp, Bos taurus
taagaaaacaagagaaaagaaagcatcataatttgtatgatacagtaatttggtattttgtttcctttatctcaagaagaagaaacctgctcatgccttgataacaccatttatctgtcagatggcgtaggcaggagtcagctgtttcccataaagatatcttgggaaacagcaacggtgctgtctacactggcagatgct

SEQ ID NO: 18419 - DNA, 201 bp, Bos taurus
tctataaggatatttccttgaatcatggaaattgtatgtgaataagagtgtcttatgctcctatggataaaaccattaaggagtattacattataaacatagtatatactttttttctggatcagaaagtcagaatttagtaagatgaagaaaaaaaaaaaaaaaaacctcagtaagacttaagaattaatcaatttagaa

SEQ ID NO: 18420 - DNA, 201 bp, Bos taurus
ctctggatcaccctttgggttacgggggaacccattttaggttgctaactagcactgctgaaggagagaaaagaaaatgagattacagcatcagagttgccgtggtgcgagctacatctttctctcttcagtgcatatgttgtaacctacatatgtcactccctcactcttttcgtgcaaatcttttatgcttgacaataa

SEQ ID NO: 18421 - DNA, 201 bp, Bos taurus
tgctgacattatgacatgcattggcctctactttcctttcaggtggatggctcatagtctttgccatcatgctgcagctggtggtagcctgccctgcgtcatgtgcggtgtgcaccaaagatgcaactctctgtcaccaactaacctatatagtaggtaataaaaccgatcactctaaaaatcagtgttcagtgtacttgg

SEQ ID NO: 18422 - DNA, 201 bp, Bos taurus
tctggagttgggaaacagacattccttgagaaagaaagattaggaagtttcactgaaatggcattcaccattctgtggtaaggcagagacagtgttgtctggtgttagcctgcatgtactacatcgtagatggcaatagccctgatagagaccagtatgaaaggcaaaactgaacataatacagtgcctgaaacttctgac

SEQ ID NO: 18423 - DNA, 201 bp, Bos taurus
atattgaaatcaccaagttgtaaaaattgatgttttgcctctttttattgctgtttttgtagtttttaatgaaagagagacacaatgaaaagccttctctccacctgagtttttatggagagtaagtcagtcagtattccccatataactgttgagagaatcaggtaatgttttgttcaaagactttatgccaggatatgc

SEQ ID NO: 18424 - DNA, 201 bp, Bos taurus
caataacagaagattaagtggataccaacaatagaaatttatttctcatagttttggagtccaagaagtccaagaacaagatataggtagatactcataactgaatcaattcccacaggcctaccacaaatatcatcatagtctgcaggttgtctcagtatatgaatttggggtgaacacaaacattcaatgtatagaaac

SEQ ID NO: 18425 - DNA, 201 bp, Bos taurus
ttattagctcattaacccaaaagatgttacttgtttaaaaattatgttttacttaaacgtgtttaaaatttcaggttacttatatcaaagtaacctacacgatgcagacttattgagaaaattattctgtctttgggcaagatagcacagtgtacagcaagcacatttaacaatgtaaggggaaaatatgcttaacagtgt

SEQ ID NO: 18426 - DNA, 201 bp, Bos taurus
ctcacatgatagcaatctggagtcctagttgggaaaggttccaggcagtgcatccactccaagggtaagacacaaattgcaattctgaagactcctgcttgtaatcccaggcgacaaattgatatcatcatcagtttgcatgcaaaaatggaggtctggttttcctttaactttacaatgcagtttgtttcactttgtgag

SEQ ID NO: 18427 - DNA, 201 bp, Bos taurus
tgcctagttgacaaagggaaggatatgggaaagcagtcaggagaccatctggtgtgggcaaagactagaaccagaggcagcgtggagattccatgtgggggaataggaggaaatggtgcaggaatagaagactaacaccagaggaaagaaagaccttttaaaccacactcaggaccttagtggaaaagtcataaaagggtt

SEQ ID NO: 18428 - DNA, 201 bp, Bos taurus
atgcaaatcattctgaaccattcaaaaatagagaacaaatttttgtgacatcagtgaaatgatcctatccttgctttatgtacagaactctgtgtgcgtgatggggggtgtttgagtgtgtgtgtgttacgtattccagttgaggcagttttagcataaggttaagaataaagttcaagcgtcagactgcatgggttttaa

SEQ ID NO: 18429 - DNA, 201 bp, Bos taurus
acatttgagcaggaacttgaaggaagtggaccaggtagatatgaaggaaagagcattccagccccagggaaaatctggaggcctgaggaccagtacagctggagagaaatgagatcagccacagaccagaagacagagagtcacaagggtgaacatatgtgacgatgagggccattgtagtggttttggctgttgttccca

SEQ ID NO: 18430 - DNA, 201 bp, Bos taurus
cctgaaatattccccataaaaggctcgccaggcttttagggtattgagaaattcctgtaattcatttatataatgcaggccagatttctgaagggacaactttcccccttaatttttccctttgttggtagcatgaagtaaaatttctgggatgaggtacaacttcagtgtatttcaacttctcagagtctcctgaggggc

SEQ ID NO: 18431 - DNA, 201 bp, Bos taurus
caatcttcaaattctttttttctctacattccccctttcttccttttctgataagtggatattggtgtgtgattctgaattttgcttttgtagtttaccagactacattacaagatgtaataaatttaaattaagttagagtgctggcttattgtaatcatctttttcttactatatcaaatatgtaagaacagaaaaagt

SEQ ID NO: 18432 - DNA, 201 bp, Bos taurus
ggtgttttactactggttaacaggattgaactgtactagaaatcttctagagatacaattaagcctaaggttttgttgagggaagtaagcggtggtggccggcattgtttattttgtctaagaataacatgggtaaagattctctggtaaggtgatgtttgagcacagacctggaggaaatgaagcagaaggccatgagga

SEQ ID NO: 18433 - DNA, 201 bp, Bos taurus
cacaaagcaatactatatcagaagtctgctatttttatgaaggtattttactaacaaattgaattggtatgaggaataacagtcttccctcatcgtgaagttccttacagaaataattgttacgtgaaatgtttaggatatgttcattgctgaaatctctctctctctctctcatacacacacactcgcgcgtatgcaaag

SEQ ID NO: 18434 - DNA, 201 bp, Bos taurus
cactacaaatgttagctgttttcaccaaggatatacttttaaattaaattttaatgtagagaaaaatacaaggtcacaagtcacaaatgtatagctcaatgaatgatcacaaagaaatgcacctatggaatgcccgctgatgtcaagaacaaagaaccagaaaccccctcataacacttccagagtatttaaatctcctta

SEQ ID NO: 18435 - DNA, 201 bp, Bos taurus
gtcactgggagacgttgattctctctttcccttggccttcactgcagaaatatgtagaagcacaatgaatgtaatagtcttattccagtagaagggatgtttttttgtttattaaccatgttttaaatatcatgatttttaatcaaaacaactgtccattaaaactttaaataattagattgagacaaaattaaattcaag

SEQ ID NO: 18436 - DNA, 201 bp, Bos taurus
taaattgcccaccagttgcctggaaggactttgaagggtaaatgtctgatatgaagtagcctcagaaaggtgatagcattatcatcctagtatcttgccaccagtaaaccagcaacatcaatagttgaccatttacttagtgaataaacttagtgggttaaagaaataaaaagctggggacattggagacagatacttatt

SEQ ID NO: 18437 - DNA, 201 bp, Bos taurus
atgtaataaacacaatgatagacatatgaagaaagtacaaaagacacacagaagggaagcacctaattttgtcctgagcatgtagcaggtgctgtcattgccccttagccctcatcattcctttatctgctgacaggttcttactgcaagtacttgtgattttctgcctctggtctttctctgatcatctttctttgagca

SEQ ID NO: 18438 - DNA, 201 bp, Bos taurus
acagagggagcatacggaaatatattacccagtgaatattaggtttattctagaaccaccctgctctaagctcactcttcacattgcctatctactatgtgcttgacatgagatgatgaaatgggcctctaatgctatataatagtttataaagttttttttacttgtgtttctcacattcacaaaatatgcttgagaagt

SEQ ID NO: 18439 - DNA, 201 bp, Bos taurus
caccctaactttccctatggtttaagcttgttggaactttctataaattgcaaccaaagcacattaattaatataaggctagttaatacaaagaatgttagttaggataaatataaatgtcccatagtgaaaggaaaagcagggcctgcccttggctggataaagccagtgcacaagccagcctcttatgtggtcactgtt

SEQ ID NO: 18440 - DNA, 201 bp, Bos taurus
gaaaaataggccactcaaacattaaatgtaagtaacagagcatttaaaaatttggtttttagaagcaggacaaagaattcattcattcatttgttgagttcctactaggagtatggtagctcctactaacactgtgctaagtatgtcctagaataaacccagaaaagactaggatcccccaagatagggagggtaggggta

SEQ ID NO: 18441 - DNA, 201 bp, Bos taurus
tgcataatagatctgacttatacaagaaggctgatatctcaaaactcaaatcaacaaaactttattcagagaaaaccttttggctatcccctacaaaactaatgaataaatgtactttgatacgttttaagtttgagaaaagctaaagttaggtatcactttcacaactccttccttcactagactgcttacaaaacaacc

SEQ ID NO: 18442 - DNA, 201 bp, Bos taurus
ccagctactttcctctgactgtttcagctaagaacaccaggataagctgcaatgactcagcccatggaaaactagggccgctgaagtttcccaggaagtcgtgttgctgtacacacgtctgcagccagccagggcaggaagtcgctggcagtccagggttctcccagcctcctgggggggtgggcagaaggccagaagaat

SEQ ID NO: 18443 - DNA, 201 bp, Bos taurus
tctatgctctcctagagctcaaagtcagagtgtctgtacaggcaagaattacacagtgtgactgacgatgctactgccaaagggaagatacaaggtggtctatctggaagcacatgggacagaacacttaaccccaaatggaagtactgggctcggggagggcttcttggaggacaacacactgctataggtgaggcttca

SEQ ID NO: 18444 - DNA, 201 bp, Bos taurus
tgatgtcaagtgtctcacagtggaattagaagattggagttaactcctggcacttacacttttacagatgtgaacttgattaagttatttcaaataggaagtagtttcacctgtgaaaagggaaaattatttacctaacaagttgttgtcctcattaaggttattcatagtacctggaacataaagatgcattttctatag

SEQ ID NO: 18445 - DNA, 201 bp, Bos taurus
aagagaagtcatactaaaggtgtgtttttcaagttagtgaaggttttttccccgtcttgtctgtcttaaaacataagcatctccttttgatttatttctttttattctccttattctaataatctcaactgtttcacagcatttacatgctatcttcctaggctagtttagttttatggttggaattcaacattatttggg

SEQ ID NO: 18446 - DNA, 201 bp, Bos taurus
tctcccccaagccatctgactttcttaagttgacataccaagtcaagtcatgaacaggcagccccttggtgctgaacagccaaagaacaacctcttcaaacagagataaacaacactacacagggtgctgctgggtggtcactgacaacacatttacttcaaagagaaatggctgtcaggtgactcacagccacaggaaat

SEQ ID NO: 18447 - DNA, 201 bp, Bos taurus
tgatcttgatatattctggaagctgaacactctctgtgttgaactgcagactcaaaagcatgcagggcaaggagcaggaaagctatggatcagggcatgagagtttcatggagcttcggtgaagtggccacaactcagggccacttgaacacaaattatgggcctaatcctgctgaatcttcagagttgtcagagaacagg

SEQ ID NO: 18448 - DNA, 201 bp, Bos taurus
acagttaaagatgcataactctgtcttttctactcagaggcaatgatgagtataagacaagaacgatagcacagaggcagctgaagcacacttgggtggcggaaaatcaaagcaaaacaaaactcaaagtgtaaagcaggaaagagtcagaatgtatccacctttccctggaacatgattaaggatggcaaatttcaagga

SEQ ID NO: 18449 - DNA, 201 bp, Bos taurus
ttccaagaattggaagggaagtctcaaggtcatctggccatgcctctgcttctgtccataaagaagaggtaggttggtataaaatgaaagctgttccaagcatatgagtgtctgtggatctcacagctggtcaacagagcctttggatggaagttccagtaggacgcaaaacagagtgaaattgacttacctctcgggatg

SEQ ID NO: 18450 - DNA, 201 bp, Bos taurus
attcctcactttctcttctaattcaatttctggccagtttctcagctcttcaatttttcttttacaatgcttcatctgtttctctcttcttttgtctcatcattcagaattaacaagaataaaaaagttcatatgcaaagaaaatctacataagtatagctctaaaaaataaagaacttaagatgttactatttctttctt

SEQ ID NO: 18451 - DNA, 201 bp, Bos taurus
tgggagaattagataagaaaatgatgtctactgagggtgagcacagtgcccggcatgtaccaggagatcctctcctgagatcagaggcgggcctgtggggtgttggaaacgacctagagtactggacaagcagcactagccacactagaccctaggacatgcagcccaaagagcaactgagaggcagggccaaaggctgaa

SEQ ID NO: 18452 - DNA, 201 bp, Bos taurus
tgatttaactggaaacaagaacagcaataaaaacccatgtctgggaaacaaggcttgactgagccaccaccaagagacaggaacaaaactctggggcctccgtagactttggaggcaatgcatactatactatgatgctcagtctaaactcacttgaccagtgactcgaaggcatcttgttctgagtaagtttcagagtga

SEQ ID NO: 18453 - DNA, 201 bp, Bos taurus
ggaatgaggaggccagagctgagacaaaattttctttggaggagtatctggatggcatatcaccatgttcaccatagtacataaataatattaatctacatataaacattttccaggatatatatcaaattttataaaaatatcacccttgcattctattcagggcatgaataaacactttaaattttattttgacaatct

SEQ ID NO: 18454 - DNA, 201 bp, Bos taurus
catgatacaaaatttgcatgatatttttctccaacctctccaagctacaacagctagtacttttgattttatcactttagcaacttacaaacttttcaagctccataattaatcatccgtatcccaaatctacatcaccagattactgctattctcttatctccttcaaaagctttgacaaaataagaatgatctctgtac

SEQ ID NO: 18455 - DNA, 201 bp, Bos taurus
gtggccacagccatgagtatgttgaggcttcagaagaggcttgcccccagggtccctctgctgtggcaaaatggtctggttggaccccaaggagactaataaagtcaccaaggccaatttccatcagcagatccagaagccaatcaaagatgggctgatcacctggaagcctatgacttcttggactcaatggtggaaaaa

SEQ ID NO: 18456 - DNA, 201 bp, Bos taurus
accagtagactttcttgagactgacagattttaggtgggaggaggttagtggagagtactgacaaaggatgggaagcacaatgagaaggacaagggggaatttcctgtacaaaaccctggtggcctaagaaatagcttcttgtgtcatgctaaaaagtttggaccttattctcaaagcaaacagagaaagggatttatgga

SEQ ID NO: 18457 - DNA, 201 bp, Bos taurus
acatttaaaacatttagctctatatagataaaacttagagtaatgtagaatgaacacttattccatttcctctcattttctatctcttaaatctctttttaaaaaaattagcatgtatcactatctggcattgtcttaaactatttattcactcacttgttttcaactatcctccccaactaggaacctcttctgtcttat

SEQ ID NO: 18458 - DNA, 201 bp, Bos taurus
ccttgcatcacatagaccttaagttgcaatgctttaattctagttatgtttttgaatttattagcccagctacttctcagttaaacacacttgagaggtcagccttgaacagttgtctgagcaaggtttttttccttcccagctgttcatttctactttgttgaaggacttcatggcttctgaagtttgtgttagcattcc

SEQ ID NO: 18459 - DNA, 201 bp, Bos taurus
gaagctagctggccaggtgagggaaggcccctataggagcttagagttggtctctagattaatggggagtctttagagggtctgatgtgtgctttgggggcaaagtgaaggttggcttggtaggcaggaggaaagtaggaacctggggtcagagaagttagtttgaggcctttggtgttggggtgagggggagaaagaaca

SEQ ID NO: 18460 - DNA, 201 bp, Bos taurus
cacatcttctgtgggccaaggattatgttagaggcagagaaatgcacacgacgcagtccctatgccccaagggattccagcctaatacaaaaaaatgttacagataaatgaggccactgcagcatatgatcatcagcataatacacacacacatattaagccctggggttgcagaggagaggatggtcaagatccctgagt

SEQ ID NO: 18461 - DNA, 201 bp, Bos taurus
cagaggtatttccttaggtttcttagtcaggcctacaccggtgtaaaccagaggtcagcagaattgttctgtaaagagccagatagtaaatatctaatcttgtgggccacatagtctctgctgtaactactcaactctgacattgtagcacaacagtatcatagagaacatgcaaacaaatggatgtggatgtatcccaat

SEQ ID NO: 18462 - DNA, 201 bp, Bos taurus
ggaattaatgacaacttaatttttaagtgtttcagggaagaaaacatatgcataactttattctcccctaaagcatactccatgaataaacttctactagtttataaaggatttcttctgcccagaataggaatcatctgatttttaccaaactatttaacctcactctgaaaaacatatagacagtccagaaaaatgaca

SEQ ID NO: 18463 - DNA, 201 bp, Bos taurus
tcctaacctccagtacatcagaatgtgactgtatttggagacagcacctttaaaaagaattagggtaaaatgagatcgtttgggcgggccctaatccaatgtgactggaatatttatttataaggagagggaattgagacacagataacacacagacaagagaaggccacgtgaggacacagcaagagggtggccgtctgc

SEQ ID NO: 18464 - DNA, 201 bp, Bos taurus
aacatcttttgtcaacgactgctttagacattaagtgagaataacacacgttaatatgctcgattatatgttgaaaagtttgaatgcatttgattttgtgctattgtcaaacaaagtctgaggcaatataacacaaattaagcagagcacccccagccactccccaaaaaggtaaacagacactgggaaaaagaactggga

SEQ ID NO: 18465 - DNA, 201 bp, Bos taurus
ctttaacttcaatgtgagttaggagttataaactgagatactgggccttgaggatccaatttcctagatttctgcaggtgcataagaatctaatgataatgacaatgaaaatcaaggtaaggcctctgctaggatatgtgggcccaacccagacttgctgccccttctggtgtgaaagtgacatgttcttgcctttacttt

SEQ ID NO: 18466 - DNA, 201 bp, Bos taurus
ttgcagggcaaaagtgcctggctcagtcctgaataaattcttcataagtgcgttttactacatattaggaaaaaacacaaaatactagaatattagagtatggatcattctttaaagcaatgctttaaactttaattttcatacagatcacctgaaggtcttattaaaatgcagattctgatgaaacagatttggtgagga

SEQ ID NO: 18467 - DNA, 201 bp, Bos taurus
gttaaggcatcatgatacacaaagttgagagctgcttcatagctttgagagaaaagaagagaaagggctccatacctccatgcatggcgtctatacggatatttagtcggtttggaccagaaagcagttctttcagcgcgttaaaatcaaagatgtttctcagcattgtagcataagcttccaccgaatccacaatttcca

SEQ ID NO: 18468 - DNA, 201 bp, Bos taurus
aaagtgaaaaagtgatttaccaagtggcactacagagtaaattgtttcacatttgttaggttgtgagaacacaaaaatgatcctagttcaaacagatggacgggacagtggcatcatcaatatcattttaaaatacgaaatgtgacaagtatggttatataatattagagggaaacaaaaggtagcttcatgaaaatatga

SEQ ID NO: 18469 - DNA, 201 bp, Bos taurus
gcctgtatgaagaagatgttatcaagtttgtcctgcaggcaggcctggcccgtgaagaccctcactactggatggctcggggcacttgccactccaaagagtcatcgcattctcgattttcaccgaattccacttcctctgtgacaacgcctgcttcaccaggctttctcttttgcattgaatcccttttttgttccacca

SEQ ID NO: 18470 - DNA, 201 bp, Bos taurus
actagctgaaggtcaagtttgagaagagaatattgttattagtaaatagtaaagaaatcaaagggaatgtggactcagaggtcactggattcgacagttgtgttagtggtgcaattagaaccctttcggcaaattagtgaggactgaggacataattttgtgaagcataaagaaaaaaatcctttctctaacagaattctc

SEQ ID NO: 18471 - DNA, 201 bp, Bos taurus
ataatcgtgttcaccactactttttctttgtttattgagttttaaaaggtaactggaatagctttaaatggtaatacacaggattataagctgttactgctgtttgttctcttgtcttctcactctttcctacacccagtccattagcaagtgctttaggaccacctctaaaatatattccaagtccagctacttcccttc

SEQ ID NO: 18472 - DNA, 201 bp, Bos taurus
tgtatggtttcacttgtatgtggactctaagaaacaaaacaaatgaaaaaacatagcaaaacagaaacagagttataggtacagagaacagataggtggttgccagaagggaggtaagtaggagaaggaaagaaagaagtgaagaggattaataggtacaaacctccagttgcaaaataaatgagtcatggatatgcagtg

SEQ ID NO: 18473 - DNA, 201 bp, Bos taurus
tcttcaggactcctttacatgaaagaaatcaagccccagttgactaaagccacactaacagctgtggggggaggcgtgtgggaataaagagggaggttcaatttataagcagctgaatgcaatcactgaatgatatacccatgattccaccaatttaagtcttcattttatcatgtcatattattattttttgcacatgta

SEQ ID NO: 18474 - DNA, 201 bp, Bos taurus
acagacaccagtttcttatgtggtaggctaatttaaaaaaatttgtaatgtgttggttgacctgtaagcttaaaaacatgatatctaaagaaattttatacgcatgtataagatgtttatttcacctacaattcttttgagtttatttttacctcagtcatacaatgaaatcacagtcctgagttttaaagcagagaacaa

SEQ ID NO: 18475 - DNA, 201 bp, Bos taurus
agattaaagtacagttagaagagagagtagcctgtaatcaaatcaagaaagttaagaaagtattttactttcatgggaagttttgtttttttcagtttgtatattttgggggagaacaaagataatcattagaatcataaaaatagattttgtaataggattaacaaagcacacgcatttttaaacagttaattgttcaaa

SEQ ID NO: 18476 - DNA, 201 bp, Bos taurus
tggctaatgaatttaataatttcctgaactgggacttaaagggcctttgctaaaaagctgcttttcctctttaccatccagttccttcaaatcccatcaacgagggttcccattaggcccggcaccggcacttgagctaaccttgcccggtgttcacaagccctcttattctcttttcagtgctcctcataggtggtactt

SEQ ID NO: 18477 - DNA, 201 bp, Bos taurus
cagatgcagttagggaagcactaagaagttgtacaaaaaggcatttatttggctttggcttatctttagactgtcacttaaacatttggtttgctacacttattacttgacaaagtcatcagacctgagggctcatgtgcagatcttgcacctgcagtgtgaacaagatagtcttcctgaattaagaatgaggataaatga

SEQ ID NO: 18478 - DNA, 201 bp, Bos taurus
acttctccctcatctttcttcttcctgtttccttccttttcccctattcatttgttccctaaacctctcctaacctttgtacccctctttttctcaatatttctgagaactctttgctgttttacaggataaagaatcagatagattcagatttccctggatgttactttccttatttgtaaaatgagattaataacagct

SEQ ID NO: 18479 - DNA, 201 bp, Bos taurus
aatagattggagggacttagggccaaaagcagagatatgagttatttgctgataagatattataataatctaaggggtaatggtggcctaaactaggctagagttagtggaaacataaaatattttaaaagtatatggtcaggctcttcaagatggctattctctctctctctctctctctctgtacatcggttgcttcac

SEQ ID NO: 18480 - DNA, 201 bp, Bos taurus
attatgagctgtgtctttgtaaaaataatgcacaagttataaactaaaatttgattctggaaacaatatatttaaatataagaactatttcattaatgtttttctgaagcatttgtttaatgaaagctgagttggctgaagcttgttgaaaataaattcgatgaaacagggattaacattctttgagcttgatgttctttg

SEQ ID NO: 18481 - DNA, 201 bp, Bos taurus
cttatcatgtttgtggccacagtgatcttcacagcattgcagaatttaaaaagccagaaagtctgttagtaatcatcttgtctccttactgaatagatgaagaaacctaggcccttaaagtttcagtgattttctaaaatttcctagttaaactcagcagttgaattgggacttgaatcaaatatagcactgagctcagcc

SEQ ID NO: 18482 - DNA, 201 bp, Bos taurus
gccaaagtatagacatgggatactgatggcccaggaaatggtatgtggtgggttagagaaagggcattaaatagccttgaaacacatgacaagaatttcagttctctttcaatccattcagtgacaccaatgaggaaagcatcactttggtgctctgcacctttagaatctaacacttcactaatcttcatttttacaaag

SEQ ID NO: 18483 - DNA, 201 bp, Bos taurus
tagtagtagtagtattatattattctcctaaataatatcaataccccagaactggcattctacttgatgtaacccttttctccagaggtcctcaccagtattctaaaggtggaactgaatatgtatgatgtattgaatatcatatgtttctcctccatatccacaattctgtaccacatgatccaggagaccagtccatat

SEQ ID NO: 18484 - DNA, 201 bp, Bos taurus
atacaagtttcttaagacattaaactgcctttgccaaaaaaacaacaaagccccttatatttctatcccattacccactggagtcacctcctgggtaaacctctctcacctaaaacgggtcacttctgatcctgtgctgccctccttaactgacccctctcaggtctctctcactggacctacctccttaaaaatcacccg

SEQ ID NO: 18485 - DNA, 201 bp, Bos taurus
gaagggtggctcagccattccacctgtttcaatgggtattttcttagtcacccagtgtgtaggagtctctagtttcgtgaagtttatcgaatctgtgggtggagggttgtttgcctatttagatactccttccaacacaccctgccctgatgtccagggcagaaaacattctgtccagcatcagcaattctcgttcagcta

SEQ ID NO: 18486 - DNA, 201 bp, Bos taurus
aaatctgggacaatttaaacataaaaataaatgacgatagtaatggaattatagtccgttgagtaagatcaatttctaaatgcaaagcacgatcctggatcagattctgaaacaagaaaaaacttaagttttaaggatactgagatagctgatagaatttgcatatgatttatagattagataatgatttgtttcaaatac

SEQ ID NO: 18487 - DNA, 201 bp, Bos taurus
tttctataaagaggtcctgagaatgagagtctctcctgatggtagtaacatgtaggatatttcagtaagggaagctcttgaaattatgtgcctttggtgttttctagggacaacagcagaatttgctgtgcggtcacaaaccttttgttgtccctctgctggaacactcttcatgagttcttgttatggtctctcttgttt

SEQ ID NO: 18488 - DNA, 201 bp, Bos taurus
atactttgaccacaccccttggaacacactctatccttctgcccgctagtgcaaccagcaacaacacagactgctctgatattaagaccaactgcccagctgggatccccctgagagggcatcgtgttcagctgctgcacttggacgctagcgtcaggtcctgctgtctatccctgctctgcaccacatcaaacgttctgc

SEQ ID NO: 18489 - DNA, 201 bp, Bos taurus
tgagcctgcctgtggtgtctcagggccagccgagcagtgcctctcccgccccatgccccactgccatggagtgttgcacagacacctgggaagctggaaacccctggggctggcctgtcagccagtggcaggtgcccctcatcagtttcttgactttcaacaagttctattaaggttagattttatctgcaatggattagc

SEQ ID NO: 18490 - DNA, 201 bp, Bos taurus
tccatctgtgtcatgatctctggttctgatgagttgagaaggaatcacaggatcttgacatttcaatcagggctcaaattcccaccagcagccagacacccgcagctcccaccatagccaggctcggcaatctttcttcaagatggtttgcttatcacttccgccagtcacttgccctgcactgttacagatccaaaccag

SEQ ID NO: 18491 - DNA, 201 bp, Bos taurus
gggtctgtgattgcagagagatacgaggatttggggaaaaagagctgaaacagtcttgccattcttcaggagtatttcggggaaacaagccagcatatcatggtgatttagttttataaagcattagtttgccttggaaggtgaaggtatgggagtttggagagtcaggccttgtgagaagcagagcttatcctcatgttt

SEQ ID NO: 18492 - DNA, 201 bp, Bos taurus
tggatttgggaggatggggcagatttgagaggccaggtctatggaatgtggggatgagggctggagagcatcatgtctggggtgcaggcgttgggtggacgatggtattttccacaaagccggggagtgtgatacagagatcctatgataccctcatgttgagagacaggtccttagcagctctgactccgttctgtttgg

SEQ ID NO: 18493 - DNA, 201 bp, Bos taurus
cacactacagcccatgaggttacaaagattcggataccacttagcaagtgaattacgacaatgacagaaacatatactgaggcttacctagtgtgtgactgtgatgatgaaggatgttcttgcatatggtagcaggtcaatatacagtaacgctttctctcctaggtaactcaatcagggcatgggagatagaatttgatt

SEQ ID NO: 18494 - DNA, 201 bp, Bos taurus
attgttcttcatgccctgaaacctccatcttaaggagtctggcagtgcagttaggaacgaagccacgtgctcctgggtccctatgttctgtcatgttctaactgtggggccatgagcagattacttaacctgtctgtgccttatttttctcatgtaacgtaaggataataatctttatctcatcaatttgttttaaggttt

SEQ ID NO: 18495 - DNA, 201 bp, Bos taurus
ggtcgcaaagagtcggacacaattgagcgacttcactttctctcactttctctctctctctctgtggtaggcacggtgctaggtggaaaggacacagataaaccacttccttgggatcaaagcaccaaagctgtattatactgggtacctgagattccacgttgctagaacagactttggatatttgaaaagaagagatta

SEQ ID NO: 18496 - DNA, 201 bp, Bos taurus
cctggaggcttgcgtctgagttgggaggccctaaggagttcaggagcagagttctttaaatgacaggctcacatttgcatatagaatgatggctcgggcggcagtgggatctcaggtctgtctttctctcaagtggcccccatgtcctcactctaacagaggggagctcaagtgttctgtcatgtagcctgaactctgttt

SEQ ID NO: 18497 - DNA, 201 bp, Bos taurus
gaagggaggggactcagaggtgggtgagggtcctggctttcatagctctagggacactgcaccatgagaacaggaggaagggcacagagcataggtgcagtgctgggggtgcagcatcgtggtacatcggtgacaggaggtcatggcaacatctctgcagtgaagtgtgacgcgagggcatcagctaagagggtctgggcg

SEQ ID NO: 18498 - DNA, 201 bp, Bos taurus
ccaccaaagaagataaattcagtgattgcttgttcaatataataatacaatgctcaaatattattaaagaacaagttactttgaatctaactttcaagttgctgtagggttttttcccctataactagtttattgcccagtagagtagaacggttgtaaatctcttaactggtttgatttgtgtgtatgtattttgtattt

SEQ ID NO: 18499 - DNA, 201 bp, Bos taurus
ctgcttctgctcccctctgccctcttaagacatgtttcttaaatggtgagtgtctggcttcgtccctgacagtaccctcttaaaaatgacctttggtggatttctggtgcctggagccaccctgaaggcaggggaagaatcttaattgaggctgcattatttttgataattcacttaagtcaaacattttgtttttgctgg

SEQ ID NO: 18500 - DNA, 201 bp, Bos taurus
ccactgctctccagataagctgttcctggggaaggagagtggcatctacagtagtaacaggtctagtaattagcagccgccccggggccttacaacatttttaaagaagacgaggtgattcagtaagatctgtcaccactgctgagagtctcccagatggagagacaggtggggatccccaatgctaatgacagggaggcc

SEQ ID NO: 18501 - DNA, 201 bp, Bos taurus
aaattctgatcttatttttttcattagtccgggacacttttttctctgtaaagccccatttataatttctttctttcttcgtaccttctcttatagatcatgcacattgaaccattattgtatggtagtgactcatgatgaaaaattccatttcagagtgtaaatggtcaatgtgcttaattgaataggaattctaaatta

SEQ ID NO: 18502 - DNA, 201 bp, Bos taurus
catacaatgtttgtaatagatttgttaaatgaacacctggcagaaataaaacaagcactagtagacctttgtcaggaaaatgaaagaagggccaattatccgagagtaagaattggctcacatacgtttcactaaaggacctgccttgttcttgtgtggctcctaatctgactctgcctaggaatcattggccaagctttg

SEQ ID NO: 18503 - DNA, 201 bp, Bos taurus
ccgcggtcatttctcagactttttattaaggtccaggtagtaaacttggcagccttatggcctcctaaccattttcttttgccgctgtcatttgaaggccaccacagatggtatgtagacaaatgagcttggcgagttcccataaaacttgctttgtaaaaatgagtagctggcccacaagccataagctgctggctctgt

SEQ ID NO: 18504 - DNA, 201 bp, Bos taurus
aaggaagtccaagaaatgactagtatcaaacaggaatgtaaccatatatgccaggtacaaagggtatggatgggaagatgcctccagcaagactgtgtcagtaggagagaaaagagggaaaagatgggatcaagagtggactgggcattcagaactaagagcaggaagtgtttggcatccttttacacaggacctagtcca

SEQ ID NO: 18505 - DNA, 201 bp, Bos taurus
tgaggactctgaaacagcaggaggggcataaagctttacctccagaattctgggaggtgagcctggaagacaaggaactctacttaagatagacaagtctgggcacattaatccacaggaccaggtgaccaagaagaaagcatgagctgtgtggagggcggctgcttgaaacagctgctaagctcagccctgggtacttaa

SEQ ID NO: 18506 - DNA, 201 bp, Bos taurus
ctgtcccggctccagcctgtgcccggaggcactcagcatgcctgggtctgcaccctgtggcctggacacgaggcacctccgttctggggtgcgggattgtcacactctctcctcctctcctgggtgcccgatctgcaagcagaccaggagctccagcagctccaacgaccatccgcctgagctcctgcatggatgatttcc

SEQ ID NO: 18507 - DNA, 201 bp, Bos taurus
gttttcccaccccttccatacacacaaaaaaaggtactttgttactctttctctctttttttgatcttgagaaaaacatttggccagtaggaggcatgaccggagataggatgggaggaagggagacaccaggctaattgcctcttttctgtagaagccctaggaggttaatgtgccaatggccatttctctctcaccctc

SEQ ID NO: 18508 - DNA, 201 bp, Bos taurus
ttaaacaattaatctgcatttgcacagtattttcataaattagtaactctttatgatcatcttttgctccactgagtcttattcactaggtgttctttaaatatttcatgaatgaatagaagaaggaaggaaggagcattatttccactaccaagtccaaagggaattcagacttggccttttgtacaaagtaagtccact

SEQ ID NO: 18509 - DNA, 201 bp, Bos taurus
tcatcatcatcgagacgagcaccatcaagccttaccaccggggcttttactgcaacgacgagagcatcaagtatccacagaaaactggggagacaatcaacgacgctgtgctcactgctgtggggattgttattgccatcctcgcggtaagtgcccagacttcgatgggcaacctgtctgattccctggcagcacatcatg

SEQ ID NO: 18510 - DNA, 201 bp, Bos taurus
ctctgctagtggctgaccatgtcaccctggaaaaggcaattcacctctctaggcccatcattattcattcacatttctagaagtgctcctgtgggcctggcatttttgtaacggttgagacaacttgtaacgagacagctgctgcagtggaagacgtcatggcttctgtggggaaatgagcaaggccagagactgtggatt

SEQ ID NO: 18511 - DNA, 201 bp, Bos taurus
caagctctcacagacaaatgcttgcagctccgctctttccagaggagctagtcagatccaagctctggagggcaaaggccattcctctgagagaatgaccgctttctctcccaaagctgcttctttcagagctgtggctcccccagccccagccactgaatgcagctacaccaagaaatcaatggttctcacggccagaga

SEQ ID NO: 18512 - DNA, 201 bp, Bos taurus
agaagtatagcctagttaggagggtctgatttgaggacaagtggtggtcaggggtccatctaagccagaatctggagttcaagggactggatctgaccctcagaggtgggaaaagtgctggccaaggtcaagcgggttgtcagaatcaccaggcctaggacagggctttaatttaaactgatccccaaggaggctcatgta

SEQ ID NO: 18513 - DNA, 201 bp, Bos taurus
aacactattttagaaaggtttcatagggtatatagaacagttttgaggtcttggctgacagaaaatcttgaaagagcgtcatggattgtggcatagcaaggagaggccagatctttccccgcttctttcttccttctgtcacatctggtttaggtcatcaggtaaaattaatttgttagtttcaccctgttgacatctgtc

SEQ ID NO: 18514 - DNA, 201 bp, Bos taurus
ctgagactatacttaagcattttaaatgactaccaaacttaacgattatctaagactaaataaggaactcagagggcctacctcaactttcatccaggaatataggaaggactacccccattgagaggataggaggacagtgctgctgctgctgctgcgtcacttcagtcgtgtccgactctgtgtgaccccatagaaggc

SEQ ID NO: 18515 - DNA, 201 bp, Bos taurus
aatgtcaatttccccaaacatcttcaaattccccttacttcctcccctgatagagggcctgctgtatgttcgcagggggtctgaacttccccaagctttacactcacgtcacctacttgtaataaataaagccatggattgactatccagttagttagtaacttccccatgtaaggggaagctctgtcatgttggccattt

SEQ ID NO: 18516 - DNA, 201 bp, Bos taurus
ggcccacctccatctccttatttcacacgaaggacagtcaaggggtgcagtggacctcaggaaatgggagggcagctggtttcttgaatgctgagaaagataggcattttcctctgggaatgagaattctgtgacgtactctgaatctctgttttctcttctgagatttgactctgggcgccttggagttgcccttcatag

SEQ ID NO: 18517 - DNA, 201 bp, Bos taurus
gtaagcccttggcatttataggctagagagagggctccaaagtggccactgtcagcacctgtatccttggggtaaaacgggctctccaaaatggctgcctccaatatctgtgttccgaggggaaactccacttgtttctgtctctctgggaggcttttcaaaatcagcagatggactgactcagtttcctttcgaattact

SEQ ID NO: 18518 - DNA, 201 bp, Bos taurus
caatggtgtaaacaccatcaatgaatcccaaaacagttttgggcacttatttccatgtaaattgtattacttaattctctgaaatgttttataggattgggagtataacacatagttttaaaatgctgttcctcttcctaaaagatctttcttccctttgctgtctgttaaatacacctgatctttcaggatccatctcca

SEQ ID NO: 18519 - DNA, 201 bp, Bos taurus
ctggctcaaaaatatagtggaaattcctcccccctcttcttttctagaagttctctgtcacaagggtaggcacatttctgtggaacttttcaataacacaaggggtacagttctaaaaagtatcctgaccatttctagttagaggatgcaaaaaagtccttttttttttctcatgggaactaaagagtataaagggaatct

SEQ ID NO: 18520 - DNA, 201 bp, Bos taurus
tcagaaattctctaattatatagagcagcaacaaggacaaaacaaccaaaagaacccacaggtttgcacatgaaacacaaaagggagtgttgttccatagtacagaagggatggaaataatctgctttaaaattgtctaaggcaaatctgagtgagatattgttttcagttagcaggtcttcaaaatacagctctatggat

SEQ ID NO: 18521 - DNA, 201 bp, Bos taurus
agcagggatgctggcatgcagggatataaaacccaccagatgactgtcccaagaaagacccagtggacaatctcattactaaagcagtaagaaatatactgatgggagggaaccagaatcggagaaactcagtgttggctgtgttttgtaggcttgggctgaaaaataaatacattacaaatctagattcttcaaaggtga

SEQ ID NO: 18522 - DNA, 201 bp, Bos taurus
ccacctcttggttgggtaccatcataatcccacagtaaggaaatctcagaaatcttgagatagtcctgattaaagttatcaacagaagagtttcctttagtatcatttaaggttctagtcaatgaggtgaagaaaattaataaagaaaaagaagctagaatgtaagaatggtaccagaatgtgtaattgaacaacaacaac

SEQ ID NO: 18523 - DNA, 201 bp, Bos taurus
agaggaagaaattctgtttctgctcttctttctagaatcagatcattataatgacaaaccttcaaatgtgtacagcctttaccttctacagaatgttttttcattgcttgcatccttccaatagccctgtgattaaaaagagaaggatctttatccctattatatagatgcatccataaattaatcatctcctgacaacca

SEQ ID NO: 18524 - DNA, 201 bp, Bos taurus
ttttacacatatataggaagaaacggggaaggtgaagatctgacttggtagttggggctgagtccctaattagtcctcctaaagggccaatttaaaaggaaaattacagctttcatggactctagaagccaaggatttatagccactggaggtgaccatgaataaagctcatggaaaggtctatgggagctgttgcttctg

SEQ ID NO: 18525 - DNA, 201 bp, Bos taurus
attatgcttctgagagggagaagaggcagtgaggagcagagggctgccgaggctggaagggaaaattgtggtgaggacaacatctgctttctattccccagactcgggcccccggccgccctcccggtggaacgtttctccattccgtataaacagaaaggatgattctcgtaatctcggcaacaaaatacgcaagcataa

SEQ ID NO: 18526 - DNA, 201 bp, Bos taurus
aaggtggctttggacaaccaaggcattgctggaagaggctgacagcttgaaagttgtctgccagctgtactggcaaaagctaggcaggaagtcccgccttcaaggggaatctgagtggcacatgaccatatccaccattcttaatgtatttctccattcttctgttgatggacatctgggtggattccagttagcactatt

SEQ ID NO: 18527 - DNA, 201 bp, Bos taurus
ccctttcagttggcaggcataggcaaacctagaaataagagggtagcagcactccatggaagcaatagacaaatgcttccttttttttcatcacttgggtggacaattctgaagttcttagagggtcccaatggaaaagccccaatcacccaccatggtgatcagctcaataacacaacctgacattgaccttcctttcat

SEQ ID NO: 18528 - DNA, 201 bp, Bos taurus
tcacccaccaaggggcaggcataagaagcaagaaagctgtaataccataactcaggccagactctgccctgggaccagctggaccctggccttgcccactgacatgccaacacaaaatttgggacactgcaaaccccatacccaactgtggcagaaaccgtccccccacccccactgagcaatgaacaatctgaaatgagc

SEQ ID NO: 18529 - DNA, 201 bp, Bos taurus
tatagcagagagggctagacatggattagtggaacacctctactctcagagttcagggtgggcaaatggttacccagcctttctcaggcttctttgcagcttggtatggctattttctcaccaagacattataaaggggaattgcttgccctccgttccctcttttccccctcttccatggactggaactcgtgtgtggtg

SEQ ID NO: 18530 - DNA, 201 bp, Bos taurus
tcagacccagcatatgaagtaaataaaatccatttaccatctctgagctagatcaagtagatcagacccagcacatgaagtaaataaaatctgtttaccatctctgagctagatgatttttatccgttttgacactgtacaacccatgaaagatagaagcatgaaaacagagactaggaaacctgaggcctagagaccacc

SEQ ID NO: 18531 - DNA, 201 bp, Bos taurus
attttgcctcgttgcctcgtggggttgggcaccaaccctgaaacagagtagctaagccgtcaggagacatgctagttctcctttgcctctctctcattttactctgcatgtatctaaatccccctttaccatctcactccttcttctgctgtctgttaaaactgaaggtctaactacagctaccagcttttttgttcctga

SEQ ID NO: 18532 - DNA, 201 bp, Bos taurus
gtaagaactgtataaaaagttctaagggagaaaacccagataaatgtcagaatcttatctcatgggtccagaactactgttgccagcctcttgtggacatagctgtgtccagaacttctgacacagcgacagcctagcacagtgtcctctgacccaccttgtcacagaagtggctatagacttggggttgacgagcactgt

SEQ ID NO: 18533 - DNA, 201 bp, Bos taurus
cactcacactcgcaagagttgcccaaagcagctgtgtcagctcctccctcttctcagacgcaccccgcctttgatctggccagctgacaaccagccaacactcacagtgctcctctccaacccccatccccaccccagagattcagggatcaggggaaggcagagcctcttgcacctctttcccttcatctgagtgcttcc

SEQ ID NO: 18534 - DNA, 201 bp, Bos taurus
gctggccccctccttccagctccctcctattccaatccatgcacccaagttcctgccacctggggtcctgtacacctgctgctccctccacctggagagctctctgtccccattcagggccctcatttcacaaccccctttgagacccatgccaaataccacatcctcgaagaagcctttctgctgctaccacccacacct

SEQ ID NO: 18535 - DNA, 201 bp, Bos taurus
cttgaggttgtggactgcctccaccaccagcagcccatccacactcttcagacccttcaccatggagggcaggagggcctgcaccttggcagcctgcagagaaggagtatttgggatgggggctcctatctgatctaacaggtgaggggcccagcctctgagtcacagagatgaacttggtcaagcaagtcctacctccag

SEQ ID NO: 18536 - DNA, 201 bp, Bos taurus
gctcgcatccttattagcgccttcaaggccctgccgggtcagtctcccctgcccacctccgcagctcattttcccttactctcccctcactcaccatgcttccaccacgctggcctccttccaggcccagcaggctttgctctcaggcctttgcacaagctcttttcctctacctgggcctctgctctcacacccccttgc

SEQ ID NO: 18537 - DNA, 201 bp, Bos taurus
ggcagttaacactttgcactgtccagcttggccccaggctcctggaccaggcacaggtgaagggcagaggtgcagcctctccaggccatagtgtgtatgaggttgaagcaggaggtcagctctgaatctgcattgtcagtgtgtgaaggtaggcagaggaggttggcatgggtgagtctgggtgggagagtgaggctactt

SEQ ID NO: 18538 - DNA, 201 bp, Bos taurus
ttaggtggcaggccaaatagtgtaacagaaagagagagccatctaccagtttaaggggtgtgggatgccaaaggtcacacctgctaagcttccaaccgttatgcctcctcccgtggcccccatggtcactctgtggtttagtccaactcccagatggagaggttgtgcccaggataaggagatgacttggctgaagattct

SEQ ID NO: 18539 - DNA, 201 bp, Bos taurus
caggctctgtgactttagaacaagtgccaagtggctgatttgcatccaggtacgtagtagtaggtgctcaataaatggtagtaagagtgttaaaaatgacggagggtaagggcacagggcatggccaacctgttggttgtgagggattcccctccctcacagcccccatgtgtcctgagtatcctctcggtgcaggatccc

SEQ ID NO: 18540 - DNA, 201 bp, Bos taurus
gcggcctcccggctggaggacgacctcagcatcaatcaggggtgacacacagttcagcgccaccaagatcatcgtgggagacggcaggcccataaatccccgcctgcccagacaccagaggctgaaatatgtctgaggcgtttcccggagagaggttgagagttcctggcctctgcctgccagctccttccttttcctccc

SEQ ID NO: 18541 - DNA, 201 bp, Bos taurus
atgcaccatggccttctatatgccaagtcccatgacagcttctggggccacaaaaacattaagacagtctttccagatgcagacagtataccaggacacatgcatggaaaggaacacgtttccatcacaatactgtaaagtaattatcctccaattaaaaaagaaaaacaccttttacatagcacaagtacaacaagtgca

SEQ ID NO: 18542 - DNA, 201 bp, Bos taurus
agttggccatgaggcacgttggctttcatggagctgatcactagatcatcaaaagtcagcaaattggcatggttctgtcacaggagttggcatgaggtagactcacagtaaacatgagctgattctcattgcttttatcatcagtggtcacttagtgaatgtttgctgaataaaccaaggtcatttctgcactgcagttta

SEQ ID NO: 18543 - DNA, 201 bp, Bos taurus
gctaaatctgaccttgactgctatgaggctatttgtagacttcatttactccttgtactatgaccgtgtttccattcactgtggtgtgatgatgtaggtgctgtcccagaccctatgggagtgttatgtaatatgcatctttattacctttctaaagtcctttaatcaaagcttcgggccttaggagtttaagacaaagca

SEQ ID NO: 18544 - DNA, 201 bp, Bos taurus
ttcaaagaatcgaatgttcctggtaatcaagtgggaaggcttgatgaataggacctgatgcatgctgggctgctgggcaccttctggggccctgccttctgtctctccacatatcttcctgtgggaaggaggagcagataacccggagcgggtaggttacccaacgggcctgttggggaaagaacctcagaaccacatcct

SEQ ID NO: 18545 - DNA, 201 bp, Bos taurus
cttccttcatcttgatgataatgctgatgattcacggagtggctaagaatgtttctgacatcatactgatgctgtgtctacattgctttatttaatcttatgctcaccagaacccatgaggtcagtgctgtgtgtctgggactaactcggacaacctctatgaaccttggctgtctctcttctctccaggttgggacctgg

SEQ ID NO: 18546 - DNA, 201 bp, Bos taurus
tgaaggggaggttcagggctcctgcgccggcccaccccgcgccccctgcaggctgtttcgagtccgcattagcgtgttaattacaccagctgcccgggcgaggctggggaggcggcggcctggggatggtgtcactcttgggttcaaagaaccacggaagaaccgtggggcagggagaacaggctggggtcacggctgaaa

SEQ ID NO: 18547 - DNA, 201 bp, Bos taurus
accacagggcctggcccagagccaaggcatttgagtggtatgtgaatgaatgaatggactgaggaaatgtcccccacttttgagagtgggaatctagtatcagtcagatatgggggacccaggggcctctgagaagcccctgaggggtccttgaggctggaaaagggagctgggtgtcctttagggaccatagtaaggtcc

SEQ ID NO: 18548 - DNA, 201 bp, Bos taurus
tgtgcccaccaggcccctcatactcttctccttgccccacagccaagaagacctgtgcagacagcgacttcacctgtaacaacggccactgcatccgagagcggtggaagtgtgatggcgaggaggactgtccagacggctctgacgagtcggaggccacgtgcagtgagtcctgcccctgggctgtggtggggcctggct

SEQ ID NO: 18549 - DNA, 201 bp, Bos taurus
tcttctgaaactctctgtcagggtggggtaggagaaaggaaaaagtggcagctagtttggaatagtcattccaatcagactattggggtcttgtccccagtgtgcccttctgtagagggtcatctgtcaatgtcctcctcattcatctactgtggacttgcagcagggttgggtgatagtggcggtggtaaaattctgctt

SEQ ID NO: 18550 - DNA, 201 bp, Bos taurus
tgttccccaaaccaaagagacttttaagcttgtgtccagggtctgtgggaagaaatgagtgcaccagctcatgggtatgcgtaccctgactccctgagacgtgcgggaagaccagacacatggacaccaagaaaagcagggcactgacatctcacatcgaagaaacagcctctgcctctcacagtctctgcatccacaggg

SEQ ID NO: 18551 - DNA, 201 bp, Bos taurus
aattaagtagactgattgtatgattttggataaataaaatagcttcagtgatttcataataaggtagagatattagtaaggcccacctcatagagtttttatgaggattatgagtggtaacacacatgaatgaaacatactgcatagtaatgaggaagtgttcaataggtgttagcaatgattactatttactctaagagg

SEQ ID NO: 18552 - DNA, 201 bp, Bos taurus
tctgagacttgattttaactgagaacagctgaaaacaagttgcttcagtgtcttcccacttactaattaaattttgaactaaggcttcaaatgccaaaaatccaaggacttttgggagagatttgtaagtgttttgaagtcaagcagttatataattgtttcagatgttgcatagttattctttgtagcttttctggaata

SEQ ID NO: 18553 - DNA, 201 bp, Bos taurus
ttacactgtgtgttttttttttttttttgcattgtatttttaaaaaagaaaaacattacttagtgattattttgggataatgtagtaagatattttgccacggttgactgaatatttgaggaaattaaatacttagggttttgaaatatgataaaatatattaggttatgttaaaaaatgttcttatcctttagaactata

SEQ ID NO: 18554 - DNA, 201 bp, Bos taurus
gcaaaacatcttcaaaatgtttgtgaaacatctttaagattgtttgcttttagtagatggacattgaataaatcaggcagatttggatttgaacctggaacctgaaactgactatataagccaaaattttctctgaaatggagattaaagtaccttggcaattaacccaccttggaataatgaatccttaccttcacagta

SEQ ID NO: 18555 - DNA, 201 bp, Bos taurus
aggatcagagtagtgggagcctgggaagggaaaccaggtacttgttttgaagtacacaagacgacaggtttatgggagttagaactaagatgacagtggtagagatgaggagacagaatcaggaagaagcacaaatcgctgagatttggtgattgtctaactatgtcaggatagggatgataggaagaaggagttgtcaaa

SEQ ID NO: 18556 - DNA, 201 bp, Bos taurus
ccaaggtgacaaccttaccattttgtttcctcacatttatttattgagccaatgtttattgaacacatgtcatgtggtgctggtgctggggtggtctacagccccaccctcagtgtggaaaagcacctccacatccacaggcccccctccacctcggaccagccccacccagcagctgcccaattggaagatggggaacag

SEQ ID NO: 18557 - DNA, 201 bp, Bos taurus
tttgtggaagtgaggtgtgtgtttgtgtgtaagaaagaaaagtggtaaagaggatgaattttacactctgattgtcatggactagatagaggcagcaagtactgacatagcccctgaaatgagaggccaccttgaagatccaggccactgagaattcagagaggcatatggacttacactgtctgagactggggtcaggat

SEQ ID NO: 18558 - DNA, 201 bp, Bos taurus
tccttttcctaagagagagataccaccttatacaccaagtctgactgtttctctatgccttagctcttcccttattggcctatctagtactgacttattcttgccattccttcccataaacccatccgaggatctagagacctgatggccattccctgctggcatttatctctggatattgctcttcctgttctctcctgg

SEQ ID NO: 18559 - DNA, 201 bp, Bos taurus
gagcatcagaaagctgataggaggaataataggataagttaggctttcagtaactaatacacaaaatgtgtatctaaaataacagcactttaaacaagatcgaagtatatttctcttccatatacaagtctagatgcaggaaatccagagctgatggtgtggctctgctcctgaaaactactggagtcaaattctttcagc

SEQ ID NO: 18560 - DNA, 201 bp, Bos taurus
cctctgtggtcctcttctccttttgctggagaggaaatggcaagcactccagtattcttgccacaagcaccccatgaacagtataaaaaggccatctggtataaggacataaatcactgttatatgcaatagaaacacttaatccttgcttcattcccacaaatgcctgactgtaaaggccaggtccctcaaagttccttc

SEQ ID NO: 18561 - DNA, 201 bp, Bos taurus
gggggcagagcagaaggtggtattcatcacaggacgagtccacccaggggaaacaccctcttcattcgtgtgtcaaggtgagttgcaagacctcatgagcatactgtgcctaacccccatgtccaactggggcactgatggcctctgggaccatgtagccacatgcagagtccttatcttgggtgacaatttacttcactt

SEQ ID NO: 18562 - DNA, 201 bp, Bos taurus
tggggctaatctaccaatgggcatttattgggcatctgctgtgtgcctggctctgtacagcaggagaaatagcaatattgaacctttagttgtggtttgtctgatgcaggtcatcatggccacgtgaggtcggcacagggcagtgaggtcggccacccagcttccatttccaaactctgccacttttccttctcttcctcc

SEQ ID NO: 18563 - DNA, 201 bp, Bos taurus
tttatttaccatgtgtgctaattccaacaaaagcccaggccatgctaaagccacatggagcatttcccagcactgaactctacaggaaagctctcactccgagacccacgttgggagaactggcctgtgacctcttaagccttccttcggcagatgccagcaccggtgtcaggaggttgctgctcacggcatcccctgggg

SEQ ID NO: 18564 - DNA, 201 bp, Bos taurus
atcaaaagataacttcatgtattttaactatatttaacagcttttcataattttatattaatagtttcagacctctccccccactgagctcccctgctaggtgtgtaatatgtagttttcatgtacagttctctgtgtcatcagatatcgaaaataatttttactgattatgtgatattctatcatcctgctatttttcag

SEQ ID NO: 18565 - DNA, 201 bp, Bos taurus
gctgtccctattgttttctcttgcctatagggaaaaatagcagtttcattatagcccctgctttatcgcttctgagatttgctgcttgttttgtgtctgccgtatttaaaatgctttcacgtgaagatttgaagcctgagaataaatccttcagtgtctgtgagtgagagactccctgcctcagtcatcaggagagcttgt

SEQ ID NO: 18566 - DNA, 201 bp, Bos taurus
tgtatatttatggatgatgaatttccttaattgggaactagaacaaggactaataataagaaactcaatcccaaggaaaatctggaaaaagtgacatgtgtttaacattagccgcaaaatttcatcacaaggtaaatacaggactatgaaatatagcacatattctgcctaaaagacctcaaaaagagataaatatttgtg

SEQ ID NO: 18567 - DNA, 201 bp, Bos taurus
gcaaggagcagccctgaaactctgagtggcttcaaacagcagatgcttatctctcacccatgtgaccacgtgactgtcacaaacccaccagaggcctcagggcagccactctgcagaatgcggagagacaacgagagcaggcaggtttcacttggttttgaagctgccgcccatgggtgacacacaccatatccactcaca

SEQ ID NO: 18568 - DNA, 201 bp, Bos taurus
ccagggtgcattgttgggtctgggccctaggctgcaggccgaggaatgtggactctgcaggaatctgtttgctcatttcccagagcttgacatccctggcttgacagcacccagggagtggccctcggccctatcaccaagcagttccctgttcaggatatttgcacaggggccactctgcttagtctgtattcattagaa

SEQ ID NO: 18569 - DNA, 201 bp, Bos taurus
aggccctaattcaggaactgacccattgggcagctctcagatgcatgccctgtatcagtccttggccagaccctgaggacccacaggtaaaccatacacgtgccacaggatgactggactctgaagtaaagaactttccttctggcccatgtgaggggatcaccagttaacagcagggtttcttctgccctcaaggggctc

SEQ ID NO: 18570 - DNA, 201 bp, Bos taurus
ggggattttgattggggtctgtgagtgttctggaaggaaacatgcaaatgtgcatgtgaacaagctcttcaactctcagtgctggaaagagcttagggagcattgcagccatccccgctcctgctttaccgccaaagtctggtcagagggggaacaaggtggtggctggcctgaaatgagaattcgctggaccagggctca

SEQ ID NO: 18571 - DNA, 201 bp, Bos taurus
cttcacgggaggtctgggaccaggaggacaggaggaactaattaaaaacacaatggaaacggcaatgtcaggttttcagagctgctggggccctcagaaaccacttggtcctcactgtacaaatgaggacacaggggctccaagaaaagggactcgctcaagttcacacagcttaggaagcacagtgcttgggctggaaca

SEQ ID NO: 18572 - DNA, 201 bp, Bos taurus
gccgggccatggattgggtactgctggtggcagccaggcggctgaggaggaaaacgcgagtggacgacctgggcacgatagtgagtgtgaaagaggaaagtgagagctctgggggtaggcctgcctgcctgggcctaggaggccttgggcctgacagactgctggagcgagggggtggggccggaggcctgggctgaagtt

SEQ ID NO: 18573 - DNA, 201 bp, Bos taurus
agtttagtcaatctcttcccttttcttttctcttctaaactagagcttcttgggccttgtgggtattgttaatgagacttttcttgacaacctaaggcctaagtgtcactggctttatgtcatttatcttctgtcacttaatgattatcatcagtcataatattggtttgtgatttttgtttaaaaattatttttacctaa

SEQ ID NO: 18574 - DNA, 201 bp, Bos taurus
ggagagcaggatgggtgagcagagttcatccccacctcaccttggggacagaccttcagctgaagccacagggcccccttggtgcaaagcctagactcttcccgggggcccagagagcacacaagctaagccaagccagacttatctgtgaggcgaggcagccatgagaggccttcctagttagggccaatggctgatacg

SEQ ID NO: 18575 - DNA, 201 bp, Bos taurus
cactgagccaccagggaagccaataaatagcaactaggcaaatgccttaatttgacctaatttatttgtgtgtttgtctgttcagccactatcaaacatctattctgtgtgagagccagtgctaagtactaagactataaaaataaatcttggaacttccctggtagtccagtggttaagaatccatcttgcaatgcaggg

SEQ ID NO: 18576 - DNA, 201 bp, Bos taurus
cagtgtcccacagaaagcagaggcctgcaaggagtggacgtataagacacattccattttcaaaggaaagcttctctgttactagttagaaagaatctttccccattttaagatgctgtggaatgccctaaaatcttggtttatgaacaacctgaacttggagtaagacttaaatgatgcttaataaaattcttctatatg

SEQ ID NO: 18577 - DNA, 201 bp, Bos taurus
ctgctgcctttttcttacctggtgagggaagaagaagagacagacacataagctgggctatacgtggagagaaacgccacgtcccaatcctccaccccaaacctctgctgcctcctagggcttcttggcctggaggaagggtgagcctgagggtctcagagcccatgaacattattccgctttgcagctccagaggctgtg

SEQ ID NO: 18578 - DNA, 201 bp, Bos taurus
ctggaaatgggatggccttctcgcagtagtctctcctggagtgatcattagcttcatgctatggttatctcctaggtggtcctgaaagctctgcatctctgtgaatcacagttgcttggcctctgccccctgagggtcctggatctcagtgatacttgtaaatatgtggtttcaattgagggagaaagttctcccgctttg

SEQ ID NO: 18579 - DNA, 201 bp, Bos taurus
aagtgcagttctcccccacatccctgttgaaccttgatcttgacctagggtttcgatcccttgtggtgacagagggaccttagcatggcccataatcttgttaatttaatttaatttttttttaacgtcaagaggtccaggtaagagtggcaatactcttcatctcccggatccacaggagcccccgcatcaggtgaccca

SEQ ID NO: 18580 - DNA, 201 bp, Bos taurus
gcttactactcctgaaccacattccagtaaataggaggcccagctgaaaggttgtttcccaagagattctcaagtctctcttatatccttgaaataactcgcaaccactcaaggccacctgaataaagccccaaagcctaaaacaatatagatgggaacagagccctggatgggggtgtgaatctgctgggcaatgtgcgg

SEQ ID NO: 18581 - DNA, 201 bp, Bos taurus
cacaggcctctaacgcagtgcctcacacatccaccgtctcatacgaaacacacacggcatcagacacacacaagcaacagaggccatgccaccctcatccttgctcacgcctacaaccactcatggctgtgcccacagctctccccttctcaggacaagtgacctgatggctcttgtggcgcgaggcggcctgagcctgtg

SEQ ID NO: 18582 - DNA, 201 bp, Bos taurus
gggctaggccccctgctggatagggtatctccagcatgtatcactttgccaacatcttttgatttagaaagagctgggtttcccaacatttaacactgaagttggccttgggccccaattgtatgggaagtagagaaatgcccaatttctcaacccaggttctttctagcttttgattctccctgtttgacttctccagga

SEQ ID NO: 18583 - DNA, 201 bp, Bos taurus
tatttgcagtggcatcctgggtcctatggtaccaagtggacatgtgagctcttctgctggggaggatacccttggggcctgcccttagcccaggacctggtatgcagtatggaatcaaagtattggtgttggatttgcaagcttgtattaggagacagggaaggcctgcatgctgcatgcagtccatgggatcgcaaagag

SEQ ID NO: 18584 - DNA, 201 bp, Bos taurus
ggggtgctttcaagcagaactttacaatatagcttgcctcttggtccttgtggctccttggtgttttgcctgaccctcatatggaatcagagacacagggtcaaagctgacaggatgactgcccagtcctgagtgcctaatgactaggtttggactttcctgttcactgcccaaggcacctaactccgtgtcaggtgattt

SEQ ID NO: 18585 - DNA, 201 bp, Bos taurus
tgtgagaccaactgacacagcaggactgttagaggaaatgcctatcatatgctcagtgtgaagtgtggcatgtactagtcattcagtacatgacagctgcgattaactgctgaagacactatatgctagccctgtaaagaaggcaagaatgaaaaagattccttatatgatcttgttaaaaattcaattaaaaaaatggta

SEQ ID NO: 18586 - DNA, 201 bp, Bos taurus
ctctgcactttgacggccgtctcatggtatgccaccctggtgacccaggagttcttcaaccccagcacacctgtcaacgccaggtgagtgccaggacatgacttgagccatggctgggcctctcgctccaccttctctgaggccactggccttcgtccagcagggtgcccggaggggaaacaagggacaggccccaggagc

SEQ ID NO: 18587 - DNA, 201 bp, Bos taurus
tattttttatacatatttctggttaaaagtgtaatcccctcctacccattagactagctatcaccaaaaagacaagagataacaaatgctggagaaaatacgggaaaaagggaacgcttctggactgttggtgggaatgtaaattggtacagccactgtggaagacagtatggaggttcctaaaaaaattaaaaagagaac

SEQ ID NO: 18588 - DNA, 201 bp, Bos taurus
tttttagagtttaaaaaaatgtttatattctctgacctagtcatcacaccatgaagggaataaccttatataatagggaaaaaagctttatgcacaaatatgctgacggcacaattattcaaaatactggaaaatcaaaatactggtatacagtagtcatttgatatttgttgatgagtaaataaaatattatcatctaag

SEQ ID NO: 18589 - DNA, 201 bp, Bos taurus
gtgtattctttttttggtccatgttagtactgtattgtatttatttgtaaattgtctcttatttattggaattctgtttgggtcatttcatttgtaaagcgttgtagaaaaactggaaaggtttgagaaaacataagatacagcattgagtgataaacagtgttgcgagaattatagatatgtaccttgaagaaggaagat

SEQ ID NO: 18590 - DNA, 201 bp, Bos taurus
caatgaatgatatggcaggggagccacaggcccagaactgtttttcctacaactctactaaggatgtgactgtacaggcagcctccagggcagccagggcggtgggtgcccatccctgggccctgtcacccctgtaagccaaggactcaggcttcctttggatggtgactctcttattaggatgagggacaagaggtcatt

SEQ ID NO: 18591 - DNA, 201 bp, Bos taurus
ttattcccttgaacagaaattacaaaaatctgtggccttctgcttccagttttgctgcctgtcttttggacatgtgggcctttttaagttcttgtaagacggctgttactctccagagctgagcccatcacttcttacctcctcagctgcaacctgtttctttgcctttgacaaggccacctctacttcacagctaccaag

SEQ ID NO: 18592 - DNA, 201 bp, Bos taurus
tcccccaagaattccgtgacttttggtttgggcaatgggatgaggatggacatagtggcaaagagaagatggggcctccagagggatggggtgctccaaattcaggactgcacccaacacaccctccatcccatccaaggctcaggtcctggtggctcgagacctctcagatctgccccctccctctcctacttctaacaa

SEQ ID NO: 18593 - DNA, 201 bp, Bos taurus
taagctctaggagtgtgcctgcatcctcccgaaactcaagagtctagctgatccaaccactccctagccacgtggccacagacaagttgcatttcctctccagatctcagtttcctcatctccagaatgggattgttctggcttcttcaccaggggcatagtttggtattttgaggccctgcccctcactggagtgctgtt

SEQ ID NO: 18594 - DNA, 201 bp, Bos taurus
gcctggtctgctgaatgttctagaaaggccacctggctacgtgtgaagaccacactgcaggaagccaggttagcatggcaggctggtgctctcatcaagaggtgatagtgcggccagggtggcagccttgggaagtggttggattctgcgtgcagtctgaaggcagagccgacgtgatccaccaacagatgggaggtgtag

SEQ ID NO: 18595 - DNA, 201 bp, Bos taurus
gatggcaaggatgccttggatttctagaggaagagtgaccaagaaggagggaaggaagagccagagggagaccatggacacgaatggagactctcctgtcgcttgtgtcagtaaccaactggggcagaacagttacttggagacaagttattgaaatgtcagagggccctgagcagcagcagtcaggagggcttcctgaag

SEQ ID NO: 18596 - DNA, 201 bp, Bos taurus
agaaactgaggtgtaggtgaattaaatgctgtgcccagtgtcaaatagctggtaaatgtcagaatagcaactcaaaaccaggccttcttactagagattcagtattttgtccagaatggttcagtctcctatgacttacttttgaagactcttatgctttcccggagttggtgatggacagggaggcctggcgtgctgcaa

SEQ ID NO: 18597 - DNA, 201 bp, Bos taurus
cattaagaaagtttttagtaaatgttgagtgactgctggcaagtggtaccactcttctgccttagctgtttagaatgctgattatatattctttctctatcacccccagataatttttttaatctataatattctttagcttaatatatgtggcaaagattatttcactttcagtcaaatcagttttctctagaagagagc

SEQ ID NO: 18598 - DNA, 201 bp, Bos taurus
cagctgaaagggagcttatttacacagagcagctcaatctttctccccccatcgagactcctgacttcttttcaagggatctcatgttttgaaaggtattgtatccaaataactaataactcattaatttcctactatttattaatcaatatctatagtccagtcagagtttctgattagcatgagatgtttatattcacc

SEQ ID NO: 18599 - DNA, 201 bp, Bos taurus
agcagtttcctgaaaaagaagcaaggtggactgtccaatgactgccatactaacttctcttagagaaagactgaggtgcagagatgttaagcaactggcctctagccattcatccaggatttaaactcaggtcccacccagggtgttaaccttgccatggcactacaatgcttaccaagacatagcgcaccccaggcccaa

SEQ ID NO: 18600 - DNA, 201 bp, Bos taurus
ttttactctctaggctctcaaggaacacctcccatccttgcctccatctgtctcctcagcaggcagctggaggctccaagtatttattcccaatcaccacgatgggcagaaaacatcagtgttagtgaaaggatctaggaagttcaatcacatggtcagaacttacaccaatcaatgaaaatttcttttacaacagataca

SEQ ID NO: 18601 - DNA, 201 bp, Bos taurus
ccaggacattctattaaggtctcaaaaggaccacaccttaggaaaaagctatatatcctataactaagagttagaccccagaactaggaccaaaagcaaaagtagacttattttaacaaagagtaaaactaaaaatccacaaattcaagatgatcctccagtaatttaattgttggcttaagaatatttgacattctttgg

SEQ ID NO: 18602 - DNA, 201 bp, Bos taurus
aatacaatatataatgaacttgtttttgttctaagtttccaatttcagtttgctgggagaaattaactaggtgtcttagatatccaaacagagaccttttttgaggccaaatcaacccacctgtaaagactgaaggaagagtacccaggcttcacatggcagttcactttcagacactgaaagcagtaattcaaaacaact

SEQ ID NO: 18603 - DNA, 201 bp, Bos taurus
gcatggaaaagattcattggcaaggacaaaatatattcaagaggagaagcgcttctggctcagcagagaggagggagaaaagcaatcaatcaagtcaattgttgattctcctccggaccaacagagcaaattgtccctcaaaataataactttggcacaccgcaatttattctgcacgcccaactactcattaagagccca

SEQ ID NO: 18604 - DNA, 201 bp, Bos taurus
cacagcaagccccagcccccgaggagcagaggacaccaaggtgtgaacgcacatacccatctcttcaaagtggtgtggaacagagatggagctgcaatagccacagagatggaggtcagggtctcaggaaggggacactggacctgggccttgaagagtaagtggatgatggccaggcagccgaggtcaagacatgccttc

SEQ ID NO: 18605 - DNA, 201 bp, Bos taurus
tgtggtcatcttcaaaatatcagctcaagtaataaagaagacactcataaactatctggaaaagaagttaatggtaaccagttgaggggaaaaagagaaattgatggcaaagacagcaaaagaaatcactactttaaaggtcactgttccagtccaggtgatgctatagagcttaacaaccacgtgggacagtcaccccaa

SEQ ID NO: 18606 - DNA, 201 bp, Bos taurus
cagctggggcatcgtcactgtagcaagctggcctcagtgtagtcagacatctcactcggtgacgggcatcctcctgagcacccccaaacagaagctgccgggacttcttaaggcctaggttctgaatttgtgcttcaaccacattctactcgtttaaataaatcttggggccagcccagaatcaagaggaggtaggttcac

SEQ ID NO: 18607 - DNA, 201 bp, Bos taurus
tcctggccttcttgaagggcagtgactttgtttgggatgtcagagtctggttggaggtgctgggctttgaaaactgttcaacttggtgacttaaaggctggtgttctgtggccattacaggagaaagagccctggattagaagtcagaacacctgggttctcacctggctcctccttgtggcctctcagggctctcgtctc

SEQ ID NO: 18608 - DNA, 201 bp, Bos taurus
tctagcagccagcatcctcttcgtttcctgctcaacttcttgatacaaaagaaagctggctccaggcatcttttgtgactgtcttgaggtccattagctcttgatggttcaagggtgccctgggccagtcaattataactccatgtgttgggtcgcatggaacacagtagggctcctttagcccaaaaggccagagatgtc

SEQ ID NO: 18609 - DNA, 201 bp, Bos taurus
ttgaatctctgcctcacttctgcaagactgcctgtgatcacaggtcactagtggccgccatgttgctaaatccagtgaccacttctccaagcttattttatttgaccatcagcaatatttagtacagttgaccacatattttaaatatttattttgaaacttttcaaacccatagaaatttacaatgttaatctagcagac

SEQ ID NO: 18610 - DNA, 201 bp, Bos taurus
ttagtcatcattaaaggccccatagtccctctccacctctctgagagtcacttgtgggcttcaccaactcaactgcttctgcaaactctccagtttcctgtggccttttaggaggaacccctaaaaaaaaaaaaaaaaaaaaacagattgggctcaggacagaggtttgaatgctgagtcaggtctctgggatccttcttg

SEQ ID NO: 18611 - DNA, 201 bp, Bos taurus
atgcaaatccaagcatcagaaccctagaacccctagctatctcaccacacagtaaatgcagggtcctcacatggaagggtgtgggcccccttgtcaggggcgtatctgacctcagcagtcagaccactcaaggttggacccacagggggtcaactcgggatgggcaggagcaggccagccccccaggcccaggtgcagaga

SEQ ID NO: 18612 - DNA, 201 bp, Bos taurus
taaccagaggaagggtaacatataaacacaaggcatagagctgcggtgacatagttcctaaatcctaaagcagccgtcatggccttctctgatctgatacatggatttctgctcaacatgtctcacgaacctatacacgatctgatacataatctgactcacacacctgcctgtagtctgacttgcggtccatcacagctc

SEQ ID NO: 18613 - DNA, 201 bp, Bos taurus
gctctctgttacataggccaccggcagcatggagaaagaaagtcaccacatcagaaatacagttgacatcggtgctatgtttgaaatttgaacttttcaggtcaggcctgggaattttctgctgttggcagtaaaagaagtgaccctcccagtgctgagatgtaagacttgattgtcaagccacacacacagagaagagat

SEQ ID NO: 18614 - DNA, 201 bp, Bos taurus
cctctgtgtgagtgttttagaattggagacacctatgaaaatgaaaaacatttgagaagacatcagtacccctccccattttctggtgtgtccattggccatgcctctgaccttctacctccccagcctctgctgtccatcaggagagaacccggactagtccaaatctctccagagccaggtgatgccctggccgcttct

SEQ ID NO: 18615 - DNA, 201 bp, Bos taurus
tgagcctgtgcttctgtaaatacagccataggattctagctgtttggccactatactccaagctcagaatctcctaagcctctgagctttttctggcaacctgccccatgatatcttggccatgatgcttaccagaggttataaggaccttcatgatctatctgcttcttcttggaactaaggagagaaaggagtttatgg

SEQ ID NO: 18616 - DNA, 201 bp, Bos taurus
agcagaggaattcaggctctgaacatgggcagtctggctacagaagaagtgcatgactgtctcttcagtttcatggtacctatttttctttagagcagtgctttcaaagagtcatccccagacctgcagcatcagtgctaacttaggaacctgttagaaaaacacattctcagtctgcactctgacctcctgaaccagaag

SEQ ID NO: 18617 - DNA, 201 bp, Bos taurus
ggcctctgcttgggcaggcagctgcacccctgagcctcagtttcctccttcacctcttggatctgttggaaggactcagggaggaagtctgtgtgaagtctaggctacagggccaggcacagagtggtccccagataaggtttacttccttgaggctgagtaagcccatggccccatagagtcaggactgatcccaaggaa

SEQ ID NO: 18618 - DNA, 201 bp, Bos taurus
caatccaggcaggctggctgcagagtccactggcttgactgcactcccaccctggttcaggatccggggtcttctctgatgctgcctctgccaggcccccgcctcccttcatcacctaatccctgaccagtcctggtgatagagaagcaaacccagcagctcccctcctgtctggccccctgcttcattccctcatcccgg

SEQ ID NO: 18619 - DNA, 201 bp, Bos taurus
aggagagttaacttgccaggactgaggaatagtgaggaggcccataggagtggagcaacgaataggaggagagaaaaggcaatgacgtgggagtggtgacggtgtctcgtggggccccctgtgcaacactgaaggcactcaccatgagccccacttcacagatagggtgagggaggggtggagggccgaagctggtggcca

SEQ ID NO: 18620 - DNA, 201 bp, Bos taurus
cattgtctgggtcgaaacagaagcccagagagaggtaggtgtaggaggcctggagataggggttgatgaggttgtggaataattctgacaaaccagggagttcatggttggttggcaataagaatgatgaaagtgaaagtcactcagtcgtgtccaactctttgtgacccaatgaactatacagtccatggaattctccag

SEQ ID NO: 18621 - DNA, 201 bp, Bos taurus
caaacgagcataaaaatctcaagttacagattttacactctaggtcataatacttctaaaaattaacttttagttattaataccattcacttgtaaaaaagcacctagaaacatctgaaacctgctttactcttttaactaacgatgattttaaaatgaaatcattaaatagggaaaaaaagaaacacatagatacatact

SEQ ID NO: 18622 - DNA, 201 bp, Bos taurus
taaatttctaccctaaaatgagttttaaggaactcatttagtcctttagtttgggttaaggtatatgaattgaacacaggtgttggtagcaaaggagtttatggtgtctctctgtgtattttttttccttaaacgtttgttgaacctggcttgtacttcttaattgggatctaaaaggcaaactgacatactggttggtgc

SEQ ID NO: 18623 - DNA, 201 bp, Bos taurus
ccccttgggcctgggtttggttactccttgctggccagtcttggctctgatatctgtctgctcaccaagataccagttcactgccactgcaggatcttcacgatgggctggcctgctacagagccctgttcaggctggttctgtccatctcgggtggtttctgtgtccctgccagttaagtccctgcaacctctgtagctg

SEQ ID NO: 18624 - DNA, 201 bp, Bos taurus
tcaatttatatgtacatgtgaacaaactgcatctcaaatgaaatgactgcaaaataccctgcatatacagaataactcattaataaaaattaagcactagcgataaatagttaaattacaactgggtaacagtggttatatttccaaatagcagtatgaaaaaagtcaaggcaagagatgtttattttggattctatgcta

SEQ ID NO: 18625 - DNA, 201 bp, Bos taurus
gcctgtccccttgcagcccagagaactgtgaactgagcaggcaaatagtgtcttttgttgggcccaagcagtgggttttcctgaatctttgtgttctgtaaccattgtcctatacgataaaaagtttcaagttgtgtccgtgcctggccaccccactgcaaaaaaagaaccaggattgcacttgtttctgtctgtcagagc

SEQ ID NO: 18626 - DNA, 201 bp, Bos taurus
cagaatggtctcccaggtaggcctggccctggccctactcctgtctccaccaccccagctggcaccctggcagccaggcctgtctgtgcttatcagctcccgtgttgactcaggatgggtacgagcctcctgtccccccttggaaaacaagaaaacatgttttgccagtggcggggtggaatggggtggcctctctggctc

SEQ ID NO: 18627 - DNA, 201 bp, Bos taurus
cccaaactgtagctctctcctctgttctacaggctgctgcagtcagcctcttgacatttggatatctccagtgaaactgcaggggtaccacttaagttctccaagtggtctctcaaagccattctcttgtcacctggggtgtaggaggtagcatccatgggctaatcagactaggctgggataacaccatccaaccaaagt

SEQ ID NO: 18628 - DNA, 201 bp, Bos taurus
gctggctcctacctctccctccacgtccatctctttctcctttctgcaaattctccatctttccctgttaaacatctgcttgtcagctgctgctcaaccaagagtgttgtcaaggaaggatcggactgctttgtagaaggccctagtaaatatccactgaattgggcttgaattctgttctttccatagccccagccagtg

SEQ ID NO: 18629 - DNA, 201 bp, Bos taurus
ctattcccagttgacatctgagcacgtcgttgagccggtattgtggttctgtcgagcccacctttcctcttcttgtgcatttatacctcattgaaacctgagtactccatacctgccacattttcctgattttcccaactggtaagtcttttgagacgggaatgaaggtaatgagggtactcttggagagagaataccact

SEQ ID NO: 18630 - DNA, 201 bp, Bos taurus
tgccctgcagcctggcgttgagggtgagcactgagtgctggccctcggtggcagggaggactcacatgggtgtgtgtggcaggagctcagtgcaagtgccatggacaggaaggtgaggcctgggtttcagagccctctcgcttttcaaccgcagctgcgatccgccaagagagcagaggatattgaagaagacaggtcggg

SEQ ID NO: 18631 - DNA, 201 bp, Bos taurus
ggctgctctggaaagcagacaataaaatgactgtctctcctggaaaggcattgagaggatagccaatcctatcaaagctcttccctgccccaggatcttcgtacttatcctggcttctgcctcagactctgtcccctgacgtcaccacatagccaactgcccccatgtcactcccaggtctcctcatctaaaggcatgccc

SEQ ID NO: 18632 - DNA, 201 bp, Bos taurus
cctggtggggcgggtggtgcaggcatcgtgggtctgcactgcgcggcgtggaagcagcggcctgtctttgaagagcatgttgaagtagcatccacgcgtggacttgggtctgaaaagaatcctcggacgcaacctggcagtcctcccgtagcgcaggccggtttctgcccgaagctcctcggtcaggaggctttctctacg

SEQ ID NO: 18633 - DNA, 201 bp, Bos taurus
gacacagggggcgcggggtggattcaggagtcgaaggagaggtttgcccacagaaggacattcggcagtcggagctgttttggcccatgacagtgaggagtggggggcggttgttgagggtgtgcccctggtgtgtccgtgggtgctcgccaacaccccgcagctctgtggggtccgtcctgtgacaaagacataccgggc

SEQ ID NO: 18634 - DNA, 201 bp, Bos taurus
ccctacacagagcagtggaagcctagtggggtccgcatcagaagaggattcacagagcctgcacagaggcatggggacttccttcctgtccaaagtgcaataggtcctggagcctggcaccctccgaaccccactgtcattacaaaaagctgccttgcccactgatggtttaggtaacaggaagttctactccatgaggca

SEQ ID NO: 18635 - DNA, 201 bp, Bos taurus
actggacggcgagggaattccctacagtgcgtttttgactcatcagactaggaccttgtgatggttaatgctatgtgtcagcttgaccaggccactggatagccagatatctggttaaacgttatttctgtgtctgtgaaggtgtttgcggaagagattaggatctgaactgacagactaaataaagcacccaaatatggg

SEQ ID NO: 18636 - DNA, 201 bp, Bos taurus
tcgagggtcatgtttctctgttggtcagtggcccgccctggagtgaggctgggtgggggggacgcgtgcctctggggacatcacgcatccatggcactgggcagcgagtggtcatccggccttcaggagcacagagacatccacctctagtccaggtgcttccaaaatgtcactgctttgcttaaaattctggcagtattt

SEQ ID NO: 18637 - DNA, 201 bp, Bos taurus
gatccttggtgtggatcagcctcttatgtggtccattggaatttgctccaagagcctggcctggccacacttcagtgcagaccaagttggaagggcatccatcactgtgtcataatccttgaggcagctctccccagacagcaccggggttcagggtgcagagcctgacctggaacgctgcccttatcctaagccagacac

SEQ ID NO: 18638 - DNA, 201 bp, Bos taurus
tctttcttgtcccaggagggcctctgtgtctaaaaagtcacagaaaccagcacaatattgtaaaacaattatcttccaatttaaaaaaaagaagaaaaaaataatgaagaaagctgctggaaaaaaaatcacacaagtgtaaaaggaagcactttgttttgctgtgttgtgggagccccaccaccctcaaagaagctgagt

SEQ ID NO: 18639 - DNA, 201 bp, Bos taurus
ttcagccactcagtttcaaggtcagaccagggaacccacgacggttgaactgcactagcttcaatgccttgctcaggctgcatagaggataccaacaatggggggagggaggcttgaggagtcagtagtgccatcaacagcaagacggcagagccctggtcgtccctgtactgaataacacctatgcccttactcttagcg

SEQ ID NO: 18640 - DNA, 201 bp, Bos taurus
gagggactgaacaacaacaaaaaatatacgtgtgtatgcgtgtgtatgttagatatagattcagatatatgatatgtgtggagattttccaaaaatacacacaggaacacaagaaactattacagtggttatctctaaccatggagtagagcatgtgagacagaacagactcacatttcattgcattctttctgtgctatt

SEQ ID NO: 18641 - DNA, 201 bp, Bos taurus
aagtatttataagtctgttgtgtcaaagccatcagtacctgcatcccaatgctgcacttctgtccacttagtctggcatcagaggggctggaaaccacctttctccatcaaccccctgggagcacccctcttggctaaacaccaagcatgcttacaggcagcagcagctaagttgtgatgccacgtctggagggtattgtc

SEQ ID NO: 18642 - DNA, 201 bp, Bos taurus
gacggaagcagcttgggttccaggctcaaatgagagcctcataggaaactggaggcttttaaaggcatttaataagaaggttgatgtcagcagtgtgacggttcatccatttgttccttaacaaataattactgagatcctcaatgagggataaagtggtggaaacaaaactcacagcaccctggcaccctggacctgata

SEQ ID NO: 18643 - DNA, 201 bp, Bos taurus
cccttcctccaggcacgatggttccagggctgctgtggcaaaacggcggcccctgtcaatcacccagaggacccagagctggctcccacaccactggccagaaccttcaatgctcacaaggttccccccctttcttgtgccagattctctcccaggaaccctggggtatgaaatggaacttggggtggtccgttttcagga

SEQ ID NO: 18644 - DNA, 201 bp, Bos taurus
aaaagtgaaattggtcttggctctgggctccatggaggttttttccattaaccagaggtgagcccaggtgcgaggttaatggaaagatgcaaaagaggccatcgaggactaaggggatagtttacacagcaaggaggacgcaatgcctgtgataagtggatgctcttttatgaagcagagcccctggcagggcagggaagg

SEQ ID NO: 18645 - DNA, 201 bp, Bos taurus
ggttctctttgactccttagttcctcgtgggcctacagaatgatcgtagccgtgaccccgccatgagctcaggtcttgctcgtgtgcaggagccgtggccgcgctgagcctgatgtccctgtgggtgtgctttggggcgtccggggtggcatgtgccctctagatgcatagacttgtcatctgagatgacgtccctcccag

SEQ ID NO: 18646 - DNA, 201 bp, Bos taurus
actccccatgatgtagtcatcagctgttgttaccgtgtgttttggtaagaaagcctttcatctgtttctctttgctggaggttcttggcctttgagggtcaaactcattgcatcctccgtccttcccggatgggacgtttaaacattaaaaaggagggacgtgtagatggatgatgccctaagagtcacattgaacgtctg

SEQ ID NO: 18647 - DNA, 201 bp, Bos taurus
gaggacagacgctggagcctggagccggggaggccactgacaccggccacgtgagcacgtcacgcccctcccaggcccaccccagggtcctggccccttcatctccaggactattacaggcgtgctgatggactcgagtggctaggcagagggtacccttagaaactgctttatggccgttcatgcatcttggtcttagaa

SEQ ID NO: 18648 - DNA, 201 bp, Bos taurus
acagggggctgggctgcaatgggagagccaggcaggtgtgcagtctcccagccttgcacaccatggtgggctcttgatgagctggtatttctggcttacgtgaaccaccagtaacatgcatttccccggagcacaacagcccctgaaccccaccggccccttttccacgttgggaggaaatgccccggtaaagagagtagt

SEQ ID NO: 18649 - DNA, 201 bp, Bos taurus
aaaggctgaagcccaggaccaaacaggcagagaggacaaattatcccttcccctgccatcttgttctgttgggttggcctaaaggttcattcaggctttttcataaaatgctgcagaatacgggaaagagctttttggtcaacccaatatttgggtcctcaatggattggacgaggcccccgcacattggaaagggccact

SEQ ID NO: 18650 - DNA, 201 bp, Bos taurus
agcgaaaaagagtggaggtatacggcctggctgggaggaggtgggagtaacagagggcgtaaatggggagaggggggcctgcctggctggccgggaagggtgttccaggtctgtgactggaaactgctcacatgctgaaggcagtgttggggaaccccggttgggtacctgaatgtggggccgtccgtgtcctgcaggggg

SEQ ID NO: 18651 - DNA, 201 bp, Bos taurus
tgggtccctcccccatcctttccatgtctgttctgatcactaatcatgtgaaggtccctgtgggcagggcagagccttcctgcccactcctgagtccacggtcagcagaaccgggcacagagcagagcctgccattacctgcggggtggcgagtgcagctggagctcactgtgtctgcaggtgaggtgagggcgaggctgg

SEQ ID NO: 18652 - DNA, 201 bp, Bos taurus
ttggcctctgtcatctgacggtatatggtggcttccggtatttgctgtagagtttccacatggaggggaaatgctgacccagcaaactgtggaaagttccagagtcttaatgacaaccacagtccagcaccgtaggttgctctgttaatcctcataacagccctgcaagatgcgtgtgcttatcaccttcatagatgcgtg

SEQ ID NO: 18653 - DNA, 201 bp, Bos taurus
gttcagacagactaaatggaaacctgccattaggcagggtgggaggcttgttctgtggagagagagggctttgggctgtggggacctcaggtgcctctgctgtcaaatacagccatgtcaaccctggtgatcagtgttttgcgtcctggtttatatagtgagagaacagagagcttgattccgattgcagtcttcagaatt

SEQ ID NO: 18654 - DNA, 201 bp, Bos taurus
tgttcatgtggttgagtcactgtattacagaaccaggagtcatctttcccacactgtgcaagaccagcatgtgtgtgggtaacacgttagtcatgactggcgggccccataggcagattccacttaaactatcaaaagttatatatccttcctcttcattcttactctgatattctgtgtgagttagtatgagttgaaatc

SEQ ID NO: 18655 - DNA, 201 bp, Bos taurus
tgaacggggtctctgagcaggagcaacacggcccacgtcacgtgtgggcagacagggttcccacacaggagagcacatgtcccaccagcatccccactccgaggtggaccaggactcggccccatggaccaggacacaggctgccacttcactggctgggtccgcaggaaccactgctgccaggcacgtcatgggctgcaa

SEQ ID NO: 18656 - DNA, 201 bp, Bos taurus
gtaagaatgggggcccaaccccaagaacctgatgtgtgtagccccagagccaaactttcttctccaaagaaacttttaaatggatgattaatcacaggagctgcaggggatgggcgggttagggcccagctgggatgagttaaattatcctcagaatgcagaggactcttttaagagataaatctcatccagctgtcaact

SEQ ID NO: 18657 - DNA, 201 bp, Bos taurus
ctcctttccccggggtgccctcttcaccaccagagattaggagagtcccagcccagccctcaaagggacttgcctgcccagctaccccaagagacagggatattaaagggccctcccgtgggacccaccttccacgctgatcttcctgaagtcatggacgagacagccatcccgccttgcttgtccggtccacttcaaatc

SEQ ID NO: 18658 - DNA, 201 bp, Bos taurus
cccagcaagggctcgcgtcccacacgctccatcttcaagggaacggccgtataagacacttcactgcagccagaatctgcagggctcgcagcagtaagccgcaggtttcacccggaaattgtctaggaaagaaacacgcgtttgggggacgtcaaggggctcggcatcaacagggaggccgctttacgtttgtcctgttga

SEQ ID NO: 18659 - DNA, 201 bp, Bos taurus
ggtggaccgaggttacaggactggccaaggcgggcaccacgttcttggcagagcgcagctccccgcacgggcagtgtcggtcccagacctgatcgttcctcctcggtgcctctccctgcagaaaaaaatcagacggtgacgctgacaataataattagcttttcactgacttcagtgctaatcctccttcaagtcgctttg

SEQ ID NO: 18660 - DNA, 201 bp, Bos taurus
cagttgctcacttgtgtctgacacttagtgatcccgtggatttcttcaatttccttaatcaacatttaataatttttagcatacagctcttttaccaccacggttaagtttcatcctaggttttttgttttttttttttgatgtgattttaaacaggattttttttttaaaggttattttcctgatattttcttattaaag

SEQ ID NO: 18661 - DNA, 201 bp, Bos taurus
agaagaggagctgatggaaacaggcagtggccctgaccaccaggaacaaggaagctcagagcttcagcagagtcacagaggggcacttgcacctccccagcttttggccctctctgagaaagtgatgtctaagcttaaaaaaaaattagggtaaagaaggaggaaactgtccccaaacagaagtaacaccatgaatttttt

SEQ ID NO: 18662 - DNA, 201 bp, Bos taurus
ccacggtgggcccgccgcacagcccctgctcccctccgcacggcctcctctaaaccaggctcttacggccatcaaggactcttcactaaagccagtgacgcctcacttatcagcacaaagagccaaccccaaggtgaacatgaaccgattgagctctgagcctcacctttaggaaatttcctgattaagttctgatgcaaa

SEQ ID NO: 18663 - DNA, 201 bp, Bos taurus
gggcccgcggatggttgaatggcctgtgtcgaattctctggggaattcttccttcatcccagtgccctggtggaggacacagccacaggtgtgcacagtcctcatggtgggcatgtggcccagcaggccaatcagagtattctccgggatggatgtgtgatgcaggccgagaggtttctcttgcagccactgagtgaggag

SEQ ID NO: 18664 - DNA, 201 bp, Bos taurus
gggtcagcagttcacaggatcactgtgtgatctgtctgatttgactctagaaacaattagcattttcccccaagggcccttaaagtctaagctgacttcatatatcatccagctcagtgggcagtcatggggcatcctggggatgggggtgcagcctgggggtggcttgcacgttgtcctcagggctgggccctgactgtg

SEQ ID NO: 18665 - DNA, 201 bp, Bos taurus
ggcctctgtgatcaccgtgcctcagcctcatatgtgcccacaggcagtggacatcctcccaccaaagagccacgcaggcaaacccagaggacagcccaggtagtctgggccctcggctggccgcggggagaactcagcaaagaagggaagggcagagctggttctgaagccgtaccctgcagaactcctggtgcaggcacc

SEQ ID NO: 18666 - DNA, 201 bp, Bos taurus
acacggcctccttccaggccttaatgctgcccccccaccccgcaaaaaaaactccacaatcaaaactgttgataacacacgttcgtctggccacagatttgtttttatcctttataggagtggaagcacggagcatatatgttttgtgtctggcttcactcactcactttgtatatgtgcggtttgtatgtgtagacgtag

SEQ ID NO: 18667 - DNA, 201 bp, Bos taurus
tgcgaggctggcgggctgccagggaagagtggccagtccagaacccccagttctcagtgtctgcactgctctggctctctgcatttgccctgagacacataaacacctgtcctgcaggcccatcaggtaggtgtctttcggtcagagttagtgaccacggggggcaggggaccgggctctgcaggggcggctgtcaccatg

SEQ ID NO: 18668 - DNA, 201 bp, Bos taurus
cacccatgtcattggctgaggtgcatcgctggctttctctggttggtcgtgatttgcagggcaagcgtgagggaggctgtcagttactaatcccatcccaatcatttggggccagttgttacaggcgtggatgtttcactttctgaactgtctctagagacagaggtctgccttcctaaaacaatagcgggcagcaaccgg

SEQ ID NO: 18669 - DNA, 201 bp, Bos taurus
gcagtgcacactgcctaggaagaggcgactgaaggctctggggccctccgtgacccctcatctctggacaaccgagcacggtgcaaagtcaggataaaacaacacgctcagggcacggggcccctcataaagcaggaggacagaggccgctggtgtgtttcagggtctacacggcaacacgtcttcaggacagcacccctc

SEQ ID NO: 18670 - DNA, 201 bp, Bos taurus
ccccaaaccagccacagttatggcttttattgtattgacttcctgttttccttacaggtttcaacctgaatatgtctctccaaacacttaaatctcattttgccattttaccaccaggtacatggaatcaggactttcctggcggctcagatggtaaagaatctgcctgcaaggcaggagacccgggttcaatccctgggt

SEQ ID NO: 18671 - DNA, 201 bp, Bos taurus
tggcctctggaatacgaaccatctgcctgggccctcaactcagacaaaagctccccactttcacttggacctaaacctggatgagggaccacggcgactgcgtgttgtggccgcgaggtgcaggaacaggcaggagctcgagttccctgaccagaggctcagatttctttagtccagggacagcccgtctgctggtccgca

SEQ ID NO: 18672 - DNA, 201 bp, Bos taurus
ctgcaaaacccagctgggcctgcagcaggccaggcgggtgctggtgcctctggagtgggaaaggtgcccacccgtccagggtttccattcagattggacttgggccctggtctcagtcctgatccagaactgaccctcgaggaagcgcagggcacacaccctccccgggagaggccacgcctggccgttcagcgtgggggt

SEQ ID NO: 18673 - DNA, 201 bp, Bos taurus
agtgagccggacccgtgaaggctggtcctccctgtctgccggtcactgcctgtcctgacccctggggtcacagcagctccagcctcggccgaggagggctaaccagacaagacggtcctgagaaaatcctttaggacactggtctccatttctgtcaaggcgaccttaagaatcagagatgggacttccctgtggcccagg

SEQ ID NO: 18674 - DNA, 201 bp, Bos taurus
acgacgggcctggccaccatgcacctcaccggtaggaccaatttcaaatcgcagggcttccaagaccgactgcctcagcaccactaaggcggtgaatggatgtgtgtggagatccctctctggggtcacagagtcactgagcaggagaaagaggacaaggggcccaaacccgttaggtgtgagaggtaaactcaaagggtg

SEQ ID NO: 18675 - DNA, 201 bp, Bos taurus
accatggccatggggaaacaaggctcagatttttcacgtgaaaatctgaggttcacggtgaaaaattcaggaactcacgaagacacacgggtcctcagacactgaggccacgactcttcccaagggacgtcaacaagagaaacagtgagcccatttgggtgcaggctagagactcggaattattaagatggactgttagag

SEQ ID NO: 18676 - DNA, 201 bp, Bos taurus
gcaaggccagtcaacctgagaatggtgggagatggtcactttggtcacatttgccaggattatgtttgtgaggacctggctgagcagaggtggacagctaggtcatggccacctcagctgtgagcacaggggcacaggaactggctgggtaccagggtgtgcagccaacgtgtgtagggcagaccctcaactccaccctga

SEQ ID NO: 18677 - DNA, 201 bp, Bos taurus
gacttccataaatagaaagccggccgtgcagtctgggctatcttccgcccccatgaacgtgaccctgggaaaggcagctcacatgccaggccccaaagccatcctggggctggcgacatgcagtgcgccaaacacagacgtgggcgcgcttgccagcctctgaagctggcgcccaggaggaagctgatgggccaggtcccg

SEQ ID NO: 18678 - DNA, 201 bp, Bos taurus
gggcacgttatggcaaaaccataaacacagaagaaaacgcagatgatgatctcatgacctggcaaaattataggcagaaacggaacagccgggcactgggggcaggaggagacctgctccagagggaccgggtgcatgttcggggctgacgggactattgggacccttgaccgcggtagtcatcacacagcaccatgcttg

SEQ ID NO: 18679 - DNA, 201 bp, Bos taurus
ctccttttcagacacgaaattctgaggacccaccccccaccccctgcaaactgccgcctgagcagaggatagggaagggcccgtcctgcctgcactcgtctcctgaacgactcagcagcggctttcagtgctcctcccatctcgttccctggacttgctgcacggccctgtgggtccagacactgctggccttggcccctc

SEQ ID NO: 18680 - DNA, 201 bp, Bos taurus
gaccctgggccggtacgtttcccgaccagaccctcagcccgggcaaccctgcgcggtcctgggcgaccctcgggcacagagtctgaagaggggacgagacgggtattgtcacaagaggccagaaccagacccggcgacaccctcggacacacgaaaaggcgcctggaagacgggtgacccagcgctggcactggccacccg

SEQ ID NO: 18681 - DNA, 201 bp, Bos taurus
gagggggtcatggggttcccagtccccagccccatccggcagggccgccccgcctctggggtggacgggcacacacggatttagaagccgcgctggccctcggacgtcggctttctaacctcaggctgcccaacttggctgacttgaagctggcttcccggtgtgggaggtaggggatggggatgcggcacacagaaagga

SEQ ID NO: 18682 - DNA, 201 bp, Bos taurus
aagtttctagagatgaagaacataatatctggattaaaaagaaaacactggacggtgttcacagcaggttagacgctgcagaaggaaaggtcaacggccttgaagagagaaatgggaacgattcgacaagcagcccagagagggtgacacggagggcagcagtgagggggggcctgtgcagggacgccgcgcgcccagcag

SEQ ID NO: 18683 - DNA, 201 bp, Bos taurus
tgcatggggctcttctgcttggaatgcagaggccaaccctcgagagccctcctcgttttccagtgcctgtccccaagccctgaccaggcagcctctgtgccgcggccactgcctgcctcctgacggcatggcacggcagggcgggagctgcaagcaggccagtcagtggcgctgccagggaggggcagagctggccttgcc

SEQ ID NO: 18684 - DNA, 201 bp, Bos taurus
tacagccgacagactgcacgggaacgagtgtctgtgaacagagagagtcagggtgacatgttgcgtctacaccaaaactttaacaccggaggtggagtggatgaacgcagggtggctcctgagtttccagggaccacgggctctggcttccccgaggaacttggcctcctgcaacaggtaggggttgattacaccggcctg

SEQ ID NO: 18685 - DNA, 201 bp, Bos taurus
attgtcttgaccgtcgatgccaggagggaaggccctcgggcgtccgggagcggcctggacgctgggacctgcctcctgcctccctttcccgatctgtgtgtggccttcgtggcccctcacacgttcttgtcctcttgtttgtggtggatcgctccatcttttaacaattgacattggattggatgtcagtatttatggtta

SEQ ID NO: 18686 - DNA, 201 bp, Bos taurus
ggacgacagtgccacagcggcccagaatccaacctgtcaacccagggcttccatgggtcagaaaagctgatctgataggagtggctggggtgacctgaagtggacttgtggcagaacaaacgggccagggtacacaggccggcacgcctgggcaaggctggagctgaggaggggagtggtcctgttcctcattctgaactg

SEQ ID NO: 18687 - DNA, 201 bp, Bos taurus
agtgaggccggggcggacgctgggcaagacgagcgcgttagcgtgttccctcattcatgttgcaatattttacatttattttaaaactaccttgtttccagcgatatttaataactcaacggccagttgtcattctggatgtttccttgaacagacgagaagccacctgagccctgttgcacagagaagcaatcttagggg

SEQ ID NO: 18688 - DNA, 201 bp, Bos taurus
gacctgggggtcatctctagaagcgtctggcaggttggaatcacctcctctttgaacgtttagtagcttgcagatgaaggtgcttgggcctgaagttttcattggtgatttttttgaggagattgactacaacgcactttctttcgtaactacaggactctccggcttgccttttcttcagaattgactgctcatcttttt

SEQ ID NO: 18689 - DNA, 201 bp, Bos taurus
gtcggacacgactgacgtgacttagcagcagcagcagcgagggtcggtagctgtcattctagctgtctggtgactccaccagctgctgtgggcggtgcttaccggggccccgcccaccgtctgctccgaaagagcgtagccccccaggggcgtccctagggccctctgaaagggcgcctcctccttgtccaattcggcagc

SEQ ID NO: 18690 - DNA, 201 bp, Bos taurus
ggtccccaagccccagcctccgtgggggataatgttctatatgatggtctacactgcaggtccttgcctcactgtgtagggccgtgcctaaggtcctgttcatagtctggctccatggccagcctgtgtccaccttcacagcttcatggatgctctctggtgtacacacccactcacccacctgccacccaccttgctcct

SEQ ID NO: 18691 - DNA, 201 bp, Bos taurus
gctttttctggagaacatgttcacacctccaaacttaatcactataatcaattacttggttgactgccaatactgtttttgttgtcagatgctttacaattgttagttaaaaccataagtcactctactgtagttgcatgaagaactgactcaatggaaaaaaaaaataataataaacctaatgctgggaaagattgaagc

SEQ ID NO: 18692 - DNA, 201 bp, Bos taurus
gctattcctgagttgcgtcctttatattaaactggtcatctagttggtgaatgtgtctgggttctgtgagatgctctaacaaattaactgaacctgaggaggtggttgtgggacacttcagcccagtccatcagtcagaattataggaaaaagattggatttacaactggtatgtgaagtgctgggggtgcagtcttgaac

SEQ ID NO: 18693 - DNA, 201 bp, Bos taurus
tgttcaatccagtagatattgtggagtctctactgggtgcctggcttgggatcctggtccgtagtcaggaagatacaatgtagtgatggagtgggtacttgatgaaatagggagagttcagcatagcttagatatctggtccctgcattcaaggagcttgggatagagatatcaaaatctcaataactcctattaaaaata

SEQ ID NO: 18694 - DNA, 201 bp, Bos taurus
gcaggacatggggcaggaagcatttgcagatttcaggcagagcatggcctgctttgctgtcctgtggcaggatctcaggtgggtgtgaggaggccagggaggggctgtgacacttattcagctgagaaatgactgtgggttcaggcgagtagtgacagggacacagaggaagactggcctctgctggaggggtgtggacta

SEQ ID NO: 18695 - DNA, 201 bp, Bos taurus
gagtagcaaatgacctccacccatggccgcttcttactatggctccccatggggaaagaggtagcaatggagccacttgataaatgctggtctggaggtttgtgcaagtgggaatcaggcccggaggcgtagctgccatgtccgtgtaggagtgttgcctgctcttcctagagactgaggtccttctcccatcttgagaaa

SEQ ID NO: 18696 - DNA, 201 bp, Bos taurus
agaattcttttagactcagggtaggcaagtgatatgggacacatggagaggagagcagacattaggtcattgcccaggcctgagaactgggcacaggtggtgccaacaaggaaatagacccctgtgacagcagtgatctcaaagggagccgggcccagccgcagtgcccgcgggactgcacgttccaggagaaagccagca

SEQ ID NO: 18697 - DNA, 201 bp, Bos taurus
cttagggtataataggcagcaactagacgtggtggcaataaggatatccttcttcccttagagccatcatgaccgctgctcttctggttgaggccacagagaaatcactgtgggaccccctttactgatccttgtacctcattccgtagaaactcttctgaattgtcatcacactcaacaattctgtcatcggcctcaatc

SEQ ID NO: 18698 - DNA, 201 bp, Bos taurus
ccacatccgagtttagtgttctaagggccatggacagctcccagtccttcctaccacatgctctggtagggagcacttgcttggacacctcatgcaagtcgcttactctcggccttcgtcatcctttgtttcagggctgtgtttgcatttgtgtgtgtatggttatatgtgtggaatgtgtggaatgtatatgaagtgatt

SEQ ID NO: 18699 - DNA, 201 bp, Bos taurus
agacattatttaaaaaggaataataattgtaaaacaaagagatgagcctggtggttctcaatatcagaaatactctggcagcttaaaacagggcccctcctctgctgtgaagtcgtgctttctctggtcaggggtgcagcccagtcctggagtttcaggagctccctgaaggggtttgcggcacagcccagtggtggggcc

SEQ ID NO: 18700 - DNA, 201 bp, Bos taurus
tgatgccatccaaccatctcatcctctgctgcccccttctccttttaccctcaatctttcccagcatcagggtcttttccaggaagtcggctacttgcacttggtggccaaagactaatagtcatattcaaaaaacagacctgttgagcctaactctgcggaggacatggctagaacattgtttcccatctaacaatgcaa

SEQ ID NO: 18701 - DNA, 201 bp, Bos taurus
gcactcatatttatgaaaacggatgatccactcattctccttcatgacgtaggccttctgatttactggctttgcaatctcaagtctctgaggccaatgatctttttgcccttcctgtgttaagaaatgttaatgctcaaggacaactaatacctcaatatgaaggcattgatttttctcacatgcaacaaatgaaaaagg

SEQ ID NO: 18702 - DNA, 201 bp, Bos taurus
gaataatgtattgatccctttaaaagaagaaatactctcacaggcccccaatgtttgcttcagttcttttcattgtagaaaatgtatgcaaatagaaaacactacaaactcttaggcctttagcttgtaagtacctatttaaaaagcacctataaatttactgataggatataaaataaactacaaatccaatggaactga

SEQ ID NO: 18703 - DNA, 201 bp, Bos taurus
atttatctcttctcagccatcttatgtgttggtgagatttaaagtcagcatgcacctagttttaaaacctcattgctgtgaaaacagggtggttctatgaagtgttgcctacaattttgaccatgatggtgttttctactgagtgagttgcccaacgtacaccacagaggaaggtaatcttgtccttggcattgtgaaaag

SEQ ID NO: 18704 - DNA, 201 bp, Bos taurus
gcctctttaccgcactcctcctcctttggggagcttaggggagatacccacgccgtttctcttcgcatgtgcagctctgccttctgtcaactaaacagagcttctctatgtgcgctcccacttgttctcgtactctgtctttaataataagctttgtacttgcatttaccatttctgcctccatgataaacgtctttttca

SEQ ID NO: 18705 - DNA, 201 bp, Bos taurus
acagacctcactcactcactcaacttatcagttctttctattctctgttcttgaacataattagttccaaatactgactttttaatcaattgtcacagacccaccgaagtttaatgcagtctctgtccacagacagcaatgattgtaacagttaagagcccatacaaatcaactataacataaagcaaaacttaaattaaa

SEQ ID NO: 18706 - DNA, 201 bp, Bos taurus
cgggtcgcaggtcagcctccccatgggaggccgcgctatgggaccaggtaacagaggtggtcgcagcctgtggatgcactgttcactgtcagatggccagcttcatgtcacgtgcccgtgtccctcagggagttacttttcagtggctgtccttactcttctgtcctcagccaccgggccgcgcttacccgaggatgaggt

SEQ ID NO: 18707 - DNA, 201 bp, Bos taurus
catggggttgcaaagagtgggacatgactgagtgactgaacaacaactggcctttgaaaaaatcaaacttaaaaggcagattccggggccacgagacacacacagctgacaagcaacgccatgctatctatctggtgctcctgtcaccttttttttctccttttcaagttcctcggcctctctttgccaaatcgtcttcat

SEQ ID NO: 18708 - DNA, 201 bp, Bos taurus
tatttatgtaaaaaccttatatgttttagtacaaacacaagtcttatgtgacagggattagaaaaggagaagcaaagactgagatgcaaataggttgttcagttcagttcagtcactcagtcctgtcagactctttgcaaccccatgaatcacagcacgctaggcctccctgtccgtcaccaactcccagagttcactcaa

SEQ ID NO: 18709 - DNA, 201 bp, Bos taurus
tctaaaagcgttgcccagaagaacagcagcagttgtagagtgaatgagagggagatgcaggaagatgaagtggagcataatgtagtgcaggccagaagagctgctagccacgagccaagatagagactggggggcggaagagtgactgggtttggtctatagttaccaggcacctagtctaaagatattccttttattttt

SEQ ID NO: 18710 - DNA, 201 bp, Bos taurus
gcttcacgttttttacattctccagctctctgattggttcagccttatgcaaaatagggcttgtacccaccaccaattagggaagggaatgcaaacggtcgcactcttaaggctaatcagtgaagagggttgtctcggggcggagggggggcctgttttcctgccagaaggtctcactcccgccctccgcttcctttttgt

SEQ ID NO: 18711 - DNA, 201 bp, Bos taurus
ttatgatagctttttttctgtaaagaataaatttacataactttctataatatggaggttgatttttaaatcatcagccatcatctttgtcacaatttttctgaggtgttatcttatatttggatattccaaaaccataaacaggcaatcaataaatggttacctgtgtgtttataagcattttaagcagcagttaggtgg

SEQ ID NO: 18712 - DNA, 201 bp, Bos taurus
cctgcattggcaggtggattctttaccatgagtgctacctgggaagcaccatccattaaagtaacaaatgtgaaagtttctgcctactagctggccaacttgggcatggtcttgctgaggtgttttcaatccttctaattcttctgttctgcattgacggcatcagccctgatcagtggcagggctcggacagcacacagc

SEQ ID NO: 18713 - DNA, 201 bp, Bos taurus
aaaatgagatctacagataagtagctcttccatctagttcatcccacccctacccccacttcctcagtctctgagttggtgaaattgtgacttgctggccgtctgagcatggtatccaatcaccgtatatgtcagggtgttcaccagctctgtcttgtgaagatgccagaggctggccccagaggatagactgataatttt

SEQ ID NO: 18714 - DNA, 201 bp, Bos taurus
acagtgataaaggtaaagcatgccctctctccacgacattcctcagcactatacagaggtctgcggatcttgccagtcattagactgttcacgctagctgcatgtggaagaggaaaaaatctatcattggggagaacttccattttctctcacattttagtttccatctcatgaacaggtcaacaaatctggaggttggta

SEQ ID NO: 18715 - DNA, 201 bp, Bos taurus
aacattcataggctggcctgatgcccaacaaagatgaatccaatccataagcaactagagaaaccttcctctttctacacgaacagctgggtctctcatcttgtagcacaggcttaaggcccaaaaacactttatcacattctcatggaagaggaatacctctcccaagggatttgaattttgaataggctgaatttctca

SEQ ID NO: 18716 - DNA, 201 bp, Bos taurus
accaggctcctccatccatgggattttccaggcaagagtacaggagtggagtgccattgctttctctgaaggctctactaaaatgatgtaattaagaaaagaaagtgtgttggaatcactaggaactgtgtgtgggacaccagtggcagggagtaagcaatgatgaaggaacagagaggaaagggaatgaggtgaagtagt

SEQ ID NO: 18717 - DNA, 201 bp, Bos taurus
gcagaggagctccgacttgtcccttggggctgttggtgcgtaccgggtgcctcacaaggtgggccatggaagtgaccagccgtggcaattcttttatttttttaagttggtatttcctacaaaaaaagtgcacataagagagattaatagtccattgttgtttttcagtcgctgagtcgtgtctgactttttgcgacccca

SEQ ID NO: 18718 - DNA, 201 bp, Bos taurus
ttcccttgtgtgactacttcacagtttatatcaatttatatattcattctgtggttaaacattgaggttatttctactttctggctgttaaattcagtaccgttctgcacatggttatgccgtgtttctgatgcattcttgcatgagtcttctggatacgtatattgctaggtcataaaatgtatatattcagatttatta

SEQ ID NO: 18719 - DNA, 201 bp, Bos taurus
attttttggagttcttatatgaacaaaatttcctgtatttttcattatcctagaaattggctgaatccgatttatatgtaatttatacaagaatttaagtatattcaaccataaatttcaaatcaaactcatttcctgcctctgtgaaggagaaaattgaaaagaccatgtatatacgtaactttatagtataaagtacag

SEQ ID NO: 18720 - DNA, 201 bp, Bos taurus
gtcaatggaaataaagagaaatgaattattaaaaagatctaagaattgttcatcccatgacaaggttaagttctgtaaatatagagactttttcaacttgttcactgatgtatccccagcttctaatagtgtctggcaaatactgggcccttgataaatatttggtgaatggatagattgctgataaaacatgttatttta

SEQ ID NO: 18721 - DNA, 201 bp, Bos taurus
gggaagcctggcaggctgcagtccacagggtcgcaaagagttggtcatgacttagtgactgaacaacacaaatacacaaaggcaagcagttgtgaagcacaaccttcttgtactagagaaactgctcttgggggtttcagcagcccagccgtggctgatgctgcagaagatgcactgggctcgtctttggatgctgggtaa

SEQ ID NO: 18722 - DNA, 201 bp, Bos taurus
gtgaaaattccaaattaagaatttctaaacaaactttacaagagtttatcttctgagaaacacttcaacaaatttattaagaggtataattcagcaatttctctggtggtctggtggttaagaatctgccttgcaatgcaagggacaccagttcagctcctggccagggaagatgccacatgtggcggagcaacgaagcct

SEQ ID NO: 18723 - DNA, 201 bp, Bos taurus
caagttaattgttcttaataatatgccatggggaaccattgactttatctgtgaagtttagtaagcaagaattaaagtgatgagtataaaatttctattttgacaagcagtgattacaaagtcagtccatgaactattgtaggagagcataagtaacacaaagagggtaacccatgatattagtaagtttactcatgacat

SEQ ID NO: 18724 - DNA, 201 bp, Bos taurus
ttctacttgacacctgaaatggaaaaaactaggcaggagcatgaaatagtatttacatctttgctgaactcactgatcttcatcagtggaccaacccagcctgaattcttgcaactgatgcaaaggcctgaatcattggaaaagtccctgttgctgggaaagattgagggcaggaggagaaaggcgtgacagaggatgaga

SEQ ID NO: 18725 - DNA, 201 bp, Bos taurus
tttttaatcctctgcttcccttgcctcttccattcttcacacttttcaaattctcctaattttctgcccattagttcctttccaatttgctgtagccaaaagagcaaaaatcactttggccaagcggggaagagaaaccagacagctttgataaatgagccaagcctgagctgcctgcagaatcgagcaaggccaggaggg

SEQ ID NO: 18726 - DNA, 201 bp, Bos taurus
atgctgttttaatggatttgtgctgtaacagcccactgtaaattcttgtgcctaatttgttctgctgcttggtgaactactttctaggccaaaagtcaagcacaaatgctaagtcaccaggtattactacattctaccgtcttaccagtggaacaagggtgagataagaaatgttctgggtaaaatggcctttgactccga

SEQ ID NO: 18727 - DNA, 201 bp, Bos taurus
aaaacgtggccactttgggtgaatcaaaacagacatctctatgcaccccagtcatttagcaaatcataccagtgcttggctagacaaatcctgcttgtccgtagtaagactgtttgcagggtggggctcagaagttggagcatctagggatcccataggcatatttgcatttgtcagtgaggaaaggaagcaatgctacct

SEQ ID NO: 18728 - DNA, 201 bp, Bos taurus
gaccccatgaatcgcagcacgccaggcctccccgtccatcaccaactcacggaggtcactcagactcatgtccatagtgatatgctttaatcgagtaactactaggtgctacgtgccttgtatatcatttctgattcagtcctcaaaataatcttcacaggtggaaatatcactgtcctcattttacagaagaatacactg

SEQ ID NO: 18729 - DNA, 201 bp, Bos taurus
ctgccactccagtcttgtccatttgaccccaagtcttgcttgccacccacagggccaccccttcatcactgaggggccgtttgtcctgctaaggaaggcgtatcatcaggtgatcatctcttcttgattagaaccttccccgcaaggccaaagtcacaatggggcggagcccccggcactgggagctggttcctgttgccc

SEQ ID NO: 18730 - DNA, 201 bp, Bos taurus
cctggccctgctggagccaatggggaccgggtaagcatgcattttcactgacttgcaactctctgactgatagcaatatcgaaaattccctgctgccctggtcccatagggccccagcaattcatttttatgcctttgtataaagcccatctatttaaaaacatacctgttagtgtggggcagcagagaacaaatgctacg

SEQ ID NO: 18731 - DNA, 201 bp, Bos taurus
ttgtttttctctgccaaggtaagagaggatgataaggccaagctacgacctaatcattatccctttccatagctcttcttagaacactagtgagcaaggagtttgtatggtctagaggccaatgacaagatgtgctggcagattccaaaggtgtgttttactggatattaattctttggggaatactgtgaacaaatggcc

SEQ ID NO: 18732 - DNA, 201 bp, Bos taurus
ccaaataagcccttgatgggtatttttgtttggaacataaaataagaccaaaaagaggtttcaaacaaggtggaagattgcttgtgaagtttactttcaggcttgagaggggccttctaggatgaggctaggcttctgaggactgcgctctatccagtcttccacagattaagtgtgatatggtcagtagacaagtcagtg

SEQ ID NO: 18733 - DNA, 201 bp, Bos taurus
tttagctccatttaaagtttgaaggggaagtggcctctaagaagcctaagcagtgaaaaagggataaatacaaagggaactgggggtaataattccctcatccatcatccccagttcagttcagttcagtcactcagtcatgtctgacattttgcgaccccatggactgcagcatgccaggcctccctgtccatcaccaac

SEQ ID NO: 18734 - DNA, 201 bp, Bos taurus
aaccactttattaaacaagtcttctaaagttactctctgtcacatcaccttggaaattttcttcaaggcacagttatatttgaccatcttgtttatttgtataccaatttctcacatgactccctcattcgacttaagcttttctgtcttgttcatatataatgaacaaacagatgagccagtagagaccagattgcattg

SEQ ID NO: 18735 - DNA, 201 bp, Bos taurus
gaaggcctcctactgtcgggggagtgtgtaatttccttggttctgtctcgtcgcaacagaaatatgaagtgatggatggaccagcgttacagccctgggacgggccggagtttcagctccgtgttacagctcagttttatttagaaagtaaaggaaaatacatcctcaaggtgtgagggaatgccgacccaaaagatgtga

SEQ ID NO: 18736 - DNA, 201 bp, Bos taurus
cccaagtgaaatcagaggatgggttgtatgattcgatggcttgcatctcttccagcttcagggcccaaggattaccatgttagtattttgctaatatttcccttgtactctcgtagtacagtgcttgggacctggccagtcctttgcagtgttagtgcccagtgaaaagtggctgagtataaatctcaatgcctctctttt

SEQ ID NO: 18737 - DNA, 201 bp, Bos taurus
cactcaggagggactttgaccatggcctaacctggagggcgcaaggaagggcgcggcaccaggtaactcagaactgatgaggattagttaagcacaactcgagaggcccctttgttaataaggaaatagttcccagataacaaagggggaaagctggcagagaatttaacacggcagtgataacgaactgatagcacacgt

SEQ ID NO: 18738 - DNA, 201 bp, Bos taurus
tactatttctcttatttgcaggcctcattttgggcttcggaaatgctggctttaaatagatatctttcccctaaactaggcacttgctcagtttgttgacatgtaattatgaattcataactgaagacttatatatatataatgttccctaacacaactgattcattagcaataatcacaatatctcatacttaactacta

SEQ ID NO: 18739 - DNA, 201 bp, Bos taurus
ctatatatacttttgtttccatggaaaatcttcatgggaacaggagtcgaaatttacagcaattaatttgtccaaagttactaacaagttagcttggcctcacactagccctggctcccttagggtctccatgagggtgggggaggaggtggacattcccctgagagccatccagcaggggcctttggagatgtgcaaaga

SEQ ID NO: 18740 - DNA, 201 bp, Bos taurus
actgtttggtagtcgtttttcctcttcatgcaatgtaagatggtgaaatacctcatgagcaatgagttcacatatctgatgaaatacagaataagtctttgaaattaaacccctgtaaaattacccatcactacccgccacagacttttggggctacataagtgaacaggagaatctgaagtcaaggagtgctgagtgctt

SEQ ID NO: 18741 - DNA, 201 bp, Bos taurus
ttttttacaagccacccagggtctgttacagcatcccaagtagactaaggtggcttgtgaagcatgcgcatactccaggcctttggggcctttccaaacctatggaatcagaaagttctgcagaagacgctcagaatctgtatttttaacacccaactgagttgattcttatggccagagaaatttggaaactctgttata

SEQ ID NO: 18742 - DNA, 201 bp, Bos taurus
gtcactgtcattcaaggttattttcgataaggttaacttgcttgcttgctcggccttgaagcaaaactcacttcccgtgaggcctcgaactggcttaaggtggaccagaacccggtctggtttcccagtcggacccaggctgaccccggacccagtccagcttccaagtcggaatcgcttggactcccgctggtttccggg

SEQ ID NO: 18743 - DNA, 201 bp, Bos taurus
ctagaatagattcattctgaagaaagagcttatgaaacaaaagaacaaaaaattggggaaccagaactatttgagaggaatattagttgaagaaagtggcatggtagagtgtatgtctaacatgcacatttcccttgctaagaaaaacatgtatttatttggtcctcaaaagttggattcattcaataattactaagagaa

SEQ ID NO: 18744 - DNA, 201 bp, Bos taurus
agtcttttaagagcaatagttagagaaacaagaaggggaataatgtttgcaataatagaataaaataagttataggcagcattctatgtgattttccatttgggtcactgctacttcagcaaacaaaatatctgttgcattgcacttcaaaatcactaagtgatttccactacatgcaatcttcagaatttccaccccaaa

SEQ ID NO: 18745 - DNA, 201 bp, Bos taurus
ctcaagattgttttttctattcagggtcttttgtgtctccaccaatactcacagcaactgtcagtttcacagttataattcaatgatatcttatgaatacgtgatttagtaaatgcaatatacatcagtgttatctgttatttagcaatagttatgaatatttaaacatttaaaaacattatatataattgttaattgaaa

SEQ ID NO: 18746 - DNA, 201 bp, Bos taurus
tctaattcatcattgtttaaaagacacctgtgagttctaactggaaaagacaagacagagaaacgcagatggtcacattttgcattatatctatcacatttttttgtactctaattagaggaggaactcattctccacaggaaaaagatactgcttaattgaatatttgaataaaagccagtagatacagtattcaaaaca

SEQ ID NO: 18747 - DNA, 201 bp, Bos taurus
gtctacatatagaaacaaggatgtacgtgaatgaggtcaggaaaagggacagactgtggctaattcatcattttatagcacacccatatagattttccttacttttcctttgcctggaagaacagaacatgatggctgtgctgtctgtatatattagtctatgctctgaccttgagttcagaagtcagcctagcagagaga

SEQ ID NO: 18748 - DNA, 201 bp, Bos taurus
caccatgtagttaacctggcaagggtttaattatttacaaaacagctgagaggacatgcctcagtatactatgtataggccttgtgaagtgagtgaaagtcgttcagtcatgtccaaccctttgtgactccatggactctacatccatggaattctccaggccagaatactggagtgggtagcctttcccttctccagggg

SEQ ID NO: 18749 - DNA, 201 bp, Bos taurus
attgcataaataaataatatgtgcaactacaaatgagataaactaaaggaatgatttcagactttcagaaagaaacagctaatctctctaggattgtaaacgttttctagttcacagcagttacagtcaaagttaataaaacaattttgatttgcactaaagatcagttacctaatttctaagcacagcagaattctacat

SEQ ID NO: 18750 - DNA, 201 bp, Bos taurus
tattcattagctttagcaagtcataatcatttgcttttcacagtccctcagtacccattcacctactttgtggataatgaagtggcttgtttctgttttaccaatagctatcagcctcctgcatttgaaatgtttgtcaatattcctctttaaatactgctctgaaagtgatccttttgtttttttaaggatgtctgctat

SEQ ID NO: 18751 - DNA, 201 bp, Bos taurus
ttgacactttaagatgaacccccaggttggtaggtgtccagtatactactggggaagaggggagaaatagctacagatgtgaatagctacagttggccatctgatgtgaagaaccagcacactggaaaagaccctgatgcttggaaagggcaggaggagaagagggtaacagagaatgagatgtttggatggtatcactga

SEQ ID NO: 18752 - DNA, 201 bp, Bos taurus
ttgcctgggaaatcccatgaacagaggagcctgacaggctacagtccatggggttgcaaaagagtcagacatcacttagcaactaaataagaacaataaatatggatcattaagaattttcattttggtcatgatatctcctggtcatgatagtaacctgagtttagtgatcagattttttatttataggaatcacctgtg

SEQ ID NO: 18753 - DNA, 201 bp, Bos taurus
atccaaggagctttttcttgaatccaacaaaatagttttttttcatttacgatctaatgtgtctggagtgagcattgactttgtgtcctttctaacagatgaccatgaagtctgacacaggttgcttagcaactccttatgcccagaagtagaaataactctttgatatactcactatgtgtatttctactgatttatttc

SEQ ID NO: 18754 - DNA, 201 bp, Bos taurus
ttatgcattaattatgttgctggcatggtgctgagtgttggcttgatctttgccctcaaggaatttacagagtacagcagacagaatggaataagctagacagaccagggacatctccttctaccatacactgaaagagctagaaattaaaattagacacacattgtatattaactatagcttattgcgggtgttatttca

SEQ ID NO: 18755 - DNA, 201 bp, Bos taurus
aggtacaatgagacaaaggttaacgactggattattcgccaagccaccttggtttcagctggtcgctgtcacatcccagcacctgagtcccttcttcgtcatctagagtttctatccgcccctttccctcctttcacaaatcaatttggagacaattgagatcttaatggctaatactgattttttcccaattcacaaaca

SEQ ID NO: 18756 - DNA, 201 bp, Bos taurus
ttgattccaggtgaggaacaaaacagataaagacttggcctctctcctgtgtatctgagagagagtaaaaacacaaccacaggccaaaaagatatataaaatcaggaccacagagaaaactaaaaaacggcaagaggaaataaaagggataaaggtagtcaaggaagacttctcataggaggtggcatttgagcagagacc

SEQ ID NO: 18757 - DNA, 201 bp, Bos taurus
gcagttaattcattaaggaaaactgagctggataaaatattaggtaatatttgaaattttttcagggaattaaggtcatgcctaaatactgttctacttttatgtttaaacagacatcagtattagtagtcaggacatatataagtatatatatgtataaatttatatatgtataaacatatataagtatgtatatgtata

SEQ ID NO: 18758 - DNA, 201 bp, Bos taurus
agatagatattatttatatttccttttttttttagatgaggaaatgaagggatggaggttaaataatttgcttcagatcacggcttgtaaggaataagattagggttcaaatgcagaagccagtttgtccccagagtccatccacttaaccagtatgttatgccacctaagaaaaggcctggtatactagaaacgtctagg

SEQ ID NO: 18759 - DNA, 201 bp, Bos taurus
ccccaactgtggttgtaagtagcaacaattagacatctgtcagccagtaaaactgtatttatggtgcccttggtttagaagatcatccaccttgctttcattctataaagtaggtagaaggagactgggagtttctagggttcattcaagcaatgctcacagaagaattactttctgatatggatatatatggaactttag

SEQ ID NO: 18760 - DNA, 201 bp, Bos taurus
cgtgatacgctattctcctaggaccatgacttagaaaactctgatacatcctcttacctaatctgagctttatcagagatgttattaaatctaacacacacgctcacacatacagcttagagatgcaagcttttaaaaacccacacaactcataatacctttgtaagctctgatggttcactcccttcttctaccacaatc

SEQ ID NO: 18761 - DNA, 201 bp, Bos taurus
tgtggaggaaaaaagaaagaattggaaataagaacagaagagggtgccttgggtttgaagatacacagggggagtcatgctggttaatactctctgttgaatccaaaaagagtctgtagagactgtagcctcctttttatgtttcctcatcttggtttgctctgcttcagggtgtttctagtggtctcaaaaatatcacaa

SEQ ID NO: 18762 - DNA, 201 bp, Bos taurus
gttaagtggcagcaactactctctttcacttctttctccaaatcaatttttatgtgatttctgagcaaagcccttgttattttgtgtattactccaattttcacataggaaaagttgtttgcatcacttttcaacattgtaaagcttttaattttaaacatccaaagagttttttttttttttttctttaatacactttgg

SEQ ID NO: 18763 - DNA, 201 bp, Bos taurus
acccagctgtctccatttccttcaccttgccctgcacactggcatcttgaaaacaccaaatatactcttcaatcacttctttttttttttttggccttttctctcccactgtctgagttaacactctcaagatggcaccatggcttgctcactcatttctgtcaggtttctatggaaaaattaggtaattcacagggcctc

SEQ ID NO: 18764 - DNA, 201 bp, Bos taurus
tttaggtcatacctgaatggtctagttgttttccctatcttcttcaatttaagtctgaatttggctctaagacctactgagtcagaaaatctgggcctggctcccctcccagctacccgtgttgagcaagtcctcctggtgactctggagcagactaatggttgagaaatgtggcttttccctttcttttctattttgtgt

SEQ ID NO: 18765 - DNA, 201 bp, Bos taurus
ggcattgggcaaagattgtgacataatagtttaagatcagtagacacattaaggtaaggatctaaaggtaccctggggtccagctctgcagactttcttggtatgaacaccaagtgttgaaaaaaaaacaatttttacacacttaggagaaaaatagactctctatattttaccataagtttaaccagttttatggcactg

SEQ ID NO: 18766 - DNA, 201 bp, Bos taurus
tggatacaatatctctagagtcagtactttccctcagatgtaccagcatattttaaattttattagctgatggataacaggtgagctaaaagaggcttaacatgttactgatctgtgtggatgagtttgatgctacttttgaagtgaagtaattgttttagagaaggatgattggtgaacattatctgcaagagtgctttg

SEQ ID NO: 18767 - DNA, 201 bp, Bos taurus
ttgcattcaatacctgttacactctaaagatcagaagcagaaaataagattttacattacaacaaagctctctaatgttgttcttttagcccctgctgtaatcaaggcatagagctcagaaataatgtcccctttctgaacttgtcaactatttatttcacgttcttaatttttgtttcatcttgtttcaagactgcctaa

SEQ ID NO: 18768 - DNA, 201 bp, Bos taurus
tttttcttactatattatttctgaagctttctggaaatgtcccaagaagaactgtgtgaaagatgctttgacccacttaaagagttatttaccctgtgatacttttgggatggataaaataaatagtatagcctagtactggagatattttcttatattacaaattgaaatataaaatagaatatgttaaaagtagggatt

SEQ ID NO: 18769 - DNA, 201 bp, Bos taurus
tgagggtcaagagaactgcattaagtgaatatgaagaagcagatggtacacctcctcctgttatattttatcaaagcaataatgatggctcagaaaaggcaagtccattgaagacaaggaatctgactggaggatgacacaccaaatataagccacatggaccatggtcctcacttacctccagaatagaagagcggttgc

SEQ ID NO: 18770 - DNA, 201 bp, Bos taurus
agaattctttatggaaaagataataacttttaacaatcctccattccacacctactgccaaactactgttttgatctctcatgttacattaaatttcctttgcatagctaaaactgtgttaaaatagttggctttttatagagatgctacccagagcgattctgggtaatataatggaaaatgtttttctgaaaattccac

SEQ ID NO: 18771 - DNA, 201 bp, Bos taurus
tgtgggcactttatctctaggtacagaactgtttcaggcccaagatctattctttttgtggctgcagaatggggagggcagggataaagactgcccatgcaaatgctacctttccccaaaaatatccaaaaacctttttcattagtcatatccctaggcaaagggtatctcaatttagtaaacatatttttttgctgtaag

SEQ ID NO: 18772 - DNA, 201 bp, Bos taurus
tagatagataaatattaaacactaaatattgtgagccaactatattagtgagaaaaatcaacacaaggtatttcatactaaattcaaagtagaaagtggaagaaatcttaattgtaagagttccaataattcattatctttgagactgggacagttactggtggtattttagaaagtgtgacttaaactgtgtcttgaagt

SEQ ID NO: 18773 - DNA, 201 bp, Bos taurus
ttcacttaagtttgataatctctaggttcatccatgttcctgcaaatggcattattttgttctttttaacggctgaataatgttccactatatatatgcgccacatcattgggcttcccaaggactcagtgacaaagaatctgcttgccaatacaggagatgaaagttccatccctggtttgggaagataccctggagaag

SEQ ID NO: 18774 - DNA, 201 bp, Bos taurus
tctcaaccttatgaatcaataaacagtgtgggatgttgcctcctcatcgattacagtatgcactgtttatttttattatggaagtgcttgctagttttccaagttaatggcaatagatctgggttgttcttctaaatccaggtgctttgtagatttatttttgagggggaaggaaagggagacgtgaagatttcttgctat

SEQ ID NO: 18775 - DNA, 201 bp, Bos taurus
atttccatactatttttaacttgtatatggaaatgattatctgtttacctctgaagcatgaaaactcttacagcaccctttataatgtatttatgtaccactttccttctcatgtccttgtcagaagtattcacatctacctcccagaacaaaagttgagaagcaggctgatttcttttttgtattttattattaattttt

SEQ ID NO: 18776 - DNA, 201 bp, Bos taurus
tgaaggtgaacaagttggagaaaagtatgttcctacttcatttatacaagtatggcttaaatgaaacacaaaacttaaatatagacataattccaactttccaagtgaaagattgtgccttgggaaaaattcatgatgctatacctctgcacaattatttacagaaaatactttacatgaaaatgtaaaatacatgtaatc

SEQ ID NO: 18777 - DNA, 201 bp, Bos taurus
ctatgataattaatcaaggctgaacgttctataatgaattggaaacttcacactaaatcctaactaactcgtggtgcatgtgtattgcatgaaggtatagaaatgtatcattatagtagataaaccatcaaagtgaggatattttcttctatagaccttaataaagtcttcattcttctaggatgtagtagtcccacaatt

SEQ ID NO: 18778 - DNA, 201 bp, Bos taurus
gctcttaaaattgtgccttatagttttatagtttctgtatttgttcttactgtgatgtgcacattgaggatgatattctttcactggaaatgaactatacgtgaaaatgtttatagagcagttgtaacaccacattttgattttattactctttgccctaaattgagaaagaaatcaattgtattccaaatagcttgagaa

SEQ ID NO: 18779 - DNA, 201 bp, Bos taurus
catttagttacttttttataatatgccgtctgaaggcccatgccagcttgaaaaggggtaaaacaatgaaaatggcccataaccaaagcaactgggcagcttttaactaaagtgtggataaagaaaggttttcaagcaaatagactatatctacaaaaggcgaggtctggtctgaaagaaggtactataatcatagagtag

SEQ ID NO: 18780 - DNA, 201 bp, Bos taurus
tggataactgtaagcctgggtatttgtccttccgtgtctggcctatttcactcagcaccaggacgtggtacttaaggaggcactgactctcaggctcatgaaggggcgggcgtggcccctcagagtaagcaccaccttaaattttccatccctggaagccatacttgcactatcctaatccagaccctcctttgaagacaa

SEQ ID NO: 18781 - DNA, 201 bp, Bos taurus
ttcttcctgaattatacttaaataaaatactgaaaggtaaataaatattctctcacctgggaaatacttttttccccctcttttctttaacatttaatcaatttctcagtggtctcaagaacctgctgcctgttttgttttggtccagttttcactctgatacctgtgtcttcctgatttcttagccccctggctttaagc

SEQ ID NO: 18782 - DNA, 201 bp, Bos taurus
atgcatcatataccacaatcaccttctgaggaaatgcctgctcaggactcagactctagacctcattgcaaatgagcccagaaactattcgcctcaactggttttatcacaatttatccactttaagtggagttaaaaatatttgaaatcccctgtctcatttgaacaatatgagtggacatatgttgatgattaaatcac

SEQ ID NO: 18783 - DNA, 201 bp, Bos taurus
gccatccttacttctctagcctcagttattgagttctaggtcaaaatccatatggctttatcctaggttgcttctaaacactgccatactctgtagaaacgtgctacagaaggaatcagtttctgcttccacctccacagaaatgaaacacacatggaaagacagaagggctctatcctttgcccagcactgctcaaatcc

SEQ ID NO: 18784 - DNA, 201 bp, Bos taurus
tcggagacccatgcagaacaaactgtacaacactttcatcacattaaaaaaccaccatcactcaacagtgtcagcatgccaacaagggaatggctttacatgctgtgttcaggaaaggtttgggaaaggataatagaaatcaggggccacttaggcagcaaaccataaccaattatgagttaataaaaacaaggaaactag

SEQ ID NO: 18785 - DNA, 201 bp, Bos taurus
tataatctattatacacatggaaagtaaattataagtacatgaaatacaagtcaacttattaaaaataaaggtaacctgagtgttcagatttgcagaggggttatcattagactatatgagccatgtatattaaatactttgaggtctctagaatctttgtttcttaaaagagaaaagcactattatctgtgtaagcatct

SEQ ID NO: 18786 - DNA, 201 bp, Bos taurus
aagtaaaaaaaaaaaaaaaacaactatatgttttattttagttttctttcttgcattactaggaagcttaaattccatcccattctcaatttattttgcccttgttttccttctgtgaattattcacacttgtttatgttcatttttttctgagatgatcatttctctgattcatttatttctctttacacagtaaagcta

SEQ ID NO: 18787 - DNA, 201 bp, Bos taurus
agtgtgacaatatcaggagaaattcctattttctcttctttggtgataagaaaactgaaatttataaggaactaacaatttatgcaaagtcatggagataataagtggtggagttggaatttggattagctttttaaactttgcttagtgaacaagggtaggaataaaggagtgactaggaggtaatgatgaccattatat

SEQ ID NO: 18788 - DNA, 201 bp, Bos taurus
ttctaaggatgaattgtgaaattcaaagattttataatttgtaaatgtataaaattaatacttaaaaaactctagaaatgttttctccttttcttttacagctcattattatgcttcttttgattcagatgataagttaaactgttttctacctttaagataactggactatttgtgaaaacacataggataaatacaaat

SEQ ID NO: 18789 - DNA, 201 bp, Bos taurus
ggattaagcgatttaaatgctcagaataactccaagggcagaacgctccattttaacccaatgcaacccaaattttatgacgttgtattggccacaagaccaagcagcacatctgataaatcttgggcttagtattaatagcctcataaattgttatcattcaggggcctggaaaacacatcaacaggtgcatgggtccct

SEQ ID NO: 18790 - DNA, 201 bp, Bos taurus
tagctggtttctctttctgattgttaagcccaaagtgaaagtccaagacagcagtaccataacaaacacactagtgctgacagactaagagaatgaatccgtttgttgctaataatttggagaggcctgtagcaatgccaccgtagatagccaagaactgtggtagatagctgtgttcagggactccatttaacccacagt

SEQ ID NO: 18791 - DNA, 201 bp, Bos taurus
ttggaagaaaatgggtagttctagtattcaggccaattctggagtttactaacctgtgaaaatcctaaaatcatgcctccaagtaaagaaaaaaaagcactgaactaggcccaattagtcttgggcaaatatcctaaacactgtggacctcagagtcctttgccgtaaattaaatggctgaattcaatgaatctaaacctt

SEQ ID NO: 18792 - DNA, 201 bp, Bos taurus
ctcttaaaagcatcctgtcagtgactactataaacttcctttacttggagcaggatcaagggcacctaccatttcttagtcccttggatccccagtaattggacttcaaatggtgctgagtccatgttccttgaagaccaaactggggcttttgtagcatttaacaaaataatactccctggccaaatccgagtctcaaaa

SEQ ID NO: 18793 - DNA, 201 bp, Bos taurus
ttatctcatcaattaacaccccagccacagatgcagaagcagaagggtggaatatcaccctgaaatactaacaaaaggggagatggaattgagacagagaagaggaaagtgctttatgtctactaggtggccacagttagcctcccaacccacgtactggatgagtccttaggacacgtgctcacatctctacaaagagtt

SEQ ID NO: 18794 - DNA, 201 bp, Bos taurus
aagccctgcctcaaactcagctctggatctagccacaccagctccaaccccagtgcctatcaaagtgatggtacaggcataacctgagggaagactgacacgcattcacatcatagctactcctcagccaaaggtactcggcacaagcactctctataaggacactctgagataaggacaccccttcacgtctaccatgag

SEQ ID NO: 18795 - DNA, 201 bp, Bos taurus
aacaacaaacttttacacctctctcaagcacccatgataacctttcctcctcatcactgatgttgtcaaccatctctctatataaacttgctgtcagtttgcttatcttctcaggcctcaactctttctgacttctacttccattaaattccccttatgatcactttcctaaattcaatggaattttttcaactctttaat

SEQ ID NO: 18796 - DNA, 201 bp, Bos taurus
agatgggctaacttctttagattccattatgctctcaaactggttataaccaaagtatttcattttatctatagacaaatcttcctgaagtttctctattgaaaatttttaaattatataagtctgaatggccttctgtggttctggggacactggcttctgttctaaatggaactgttcatccaatattttccatcatct

SEQ ID NO: 18797 - DNA, 201 bp, Bos taurus
gaggaacaagagagtgaccgtcagccttttaagaaggacctcaagcctaactgaagagttagggcatccaacaaaaaggagatgttaaagatctaatgtcgcattaccataaacttcactgacgggagaatgagagcgccttcgtaataatgggttcacgtgactgagtggtcagcatcgttatgccccccagtcatgttc

SEQ ID NO: 18798 - DNA, 201 bp, Bos taurus
ttcagtttaaaaaaagaaaaaagagagagaaggccatctcttttcctccacgggcaccaaggaatggtcacatcaggacaaagagggacggtgactgtctactggccaggaagtgttctcaccagaaactaaatatgcaggcaccttgatcttgcacttctcagcctccaaaactgtgagaaaacacgtttctgttgtgta

SEQ ID NO: 18799 - DNA, 201 bp, Bos taurus
cctgcttaccttattacttcagtgatatttttgatcactcaaggtggatcttgctttgagaagtaataaaccccaatggctcagttacagagcattcaacatgtccaaagaatatcatggaaattattccatcaagaagattagagagactttccctactttcatggattcagcttgctaagaagaacacatattaaggta

SEQ ID NO: 18800 - DNA, 201 bp, Bos taurus
aggctgaccctgaagtattgaaacttaagtggcctgaattccctgccactgaacctaaaaacagacctggcatttgggccaccttaattatccatttagatctctctagaacactgacagtgcatttggaaggacaagttgacgaggtgagccaggtttttcttagccacccagcttacccaagggcctatgctgctgctg

SEQ ID NO: 18801 - DNA, 201 bp, Bos taurus
ttaaagccccattgagagtgaagtgagagaaccgcaaagctaattttgaggattggatgcttgctgagcagtcacctcagtgctcttactattactaaagcaacagcctctgtaggctcacttctccaagactgtcagttactacacgtcggtaatccttagggtctcctgcagtgatctaagccttctgcatcaaatcct

SEQ ID NO: 18802 - DNA, 201 bp, Bos taurus
atgaagaaagatatcctgcctggaatcttgaactaaagactaatctgagtggtttatcaattcctgaacagtagaaaatataaaaacaagtgcatctataataagagtcttctaagcctagaatgggttgggaaaaagtacaactggacactgtctttcctgtagcagcattattacacatgcatgatgacgtaacaaaag

SEQ ID NO: 18803 - DNA, 201 bp, Bos taurus
ccttacaaatacgagtcaccacaagcttccagcctcaaaacatctcaactgccgaaataaactttgatgttgctctttcattctaacagttaggcctcttgaacattttaggaataaccaaaggttatactgaaggctgttcgttttctcaggcaagacttggagtcaccatgtagggttcactttggtttgaggaactga

SEQ ID NO: 18804 - DNA, 201 bp, Bos taurus
ttgattgattgaatcaggattgcctgtgtcttcgtatcactgaacagctgagattcacattgtagaaacttgctgccataagagatgtgaccttagtcactgtaatctgagacctgtaaaatgtagacattccctttctttgcttagtctgtgactagttgacctcattttccacagggcctatccatagcctgtcagtga

SEQ ID NO: 18805 - DNA, 201 bp, Bos taurus
tttttttttttaaagagctgtttctataacatccaatgaaagatagtctattccaagctgacgtatgagcaagaactctcaccactttaattggcagctctgtgatatactcagatgtttaataacttctgattctttagcagaagatccagcacaatttttctcttaatctaagaattagattaagagaaacatttttta

SEQ ID NO: 18806 - DNA, 201 bp, Bos taurus
gaaagagaacaaggaatccttttagccaacgggaaagaaatatgcctacatgtaaataagaacatcaacaagaaatggcctgttttaatgcactgttttggtatcttcctgtctcactttaattttgtaaaatgagataaattatttttcttctctaagaatttcacaattaagaacctgaaaaagagagtatccaagcat

SEQ ID NO: 18807 - DNA, 201 bp, Bos taurus
taaattttttcaggaatattagtatcaggagagcacagccttaaaatatgttctgtgactcacagaatgaagataatgtttgacttctcttcaattatttggttactcagtaggttcagtcaataaaagccatgcagccataggctgatgcagttatggcagattgttgtgtaattgcatttagaaaatgcaaattaatta

SEQ ID NO: 18808 - DNA, 201 bp, Bos taurus
ttatttgtaattcacacatcaaaacatcagcctaagtcactatgacctctaataccttaaaaaattcttttgattataattttgattataattacaatagttctattaatcctttgatgatagcatatcactttacctgtggagcaggcagcttttcatagtcagtgaaagtaaatgaactaagtctgtattaaaattctg

SEQ ID NO: 18809 - DNA, 201 bp, Bos taurus
tcctaaacattgttcttgggactttggaaaagaagatatcctgcattttcattgcctcattcagctgtgaaccaccagagtgattttccaatggaataaggtgcttttccaggctccttgctaaaaatttaggtggttttgggaaatgagagccatcaaaccttccctgacaggtcagttttggtattcagaggaatacag

SEQ ID NO: 18810 - DNA, 201 bp, Bos taurus
gattgtgaaattagttttgtaactcttagttcaccagttttcttgagtatatgagggttgtcaaattgatctcagagaccttgatgaagaggccttgtttgagagtggtgttggttgtcagcgtgttgaccacttgcaatatacccgcaagcttgggtgcttctgcatgttataagccaagtgaaaaaaaatgcatttgag

SEQ ID NO: 18811 - DNA, 201 bp, Bos taurus
gtggacacataaagcctacaggtgtgagaaatctttgtaaataccagacattgccatgatgtaagggaatagagcactttattgaagtctgatattataatacttcacaaatctattcaaattctattgggttgctttgaggaaaaatgtgcatagtactatagaaccattaactaatagagtatcctaaacatctttggt

SEQ ID NO: 18812 - DNA, 201 bp, Bos taurus
tcaagggaagaatgatactcatttcccatccaaataattgactgcataaccttgaaatttttttgcacagtttatgatcaggcttcaagttacaaaatgacaagcctcattacagattgttaaatgctgattgtgcaagtgaaatgatctgaaatacataccgtagtctaatagtgaaattttatttgcaggataaatgaa

SEQ ID NO: 18813 - DNA, 201 bp, Bos taurus
gagtcaaggccttcttactcctgtcactatgagaacgctgaagaaacgggcatgtcatgaggttgtcaattggtttgtcatgaattgcagaacacaatgatggcatttgagaggccgaacattaatataaaagtgactatatcattactccaggcttttatatttgtagagactgtggagtcacataaagctatattttat

SEQ ID NO: 18814 - DNA, 201 bp, Bos taurus
ccttttctaattattcaataatcttcaaatcttgtagttatttcttagtcagataaaattctaatgcatgtaggggcagaagaagctgttttccacggaggtgtcctagtaagagaaagagtgcgcacgtgtgtgaggcttgtcttgcttaagccaagagaacactttgtccatgtccattccatgccacagcctggcagt

SEQ ID NO: 18815 - DNA, 201 bp, Bos taurus
actattagatgtctcctgggccactgcccttcccaccaactttgtccttcatacctaaaacagatcacacattccttcagaggaggaatagaatttataaaaaaattgagcctagcatttggtaaaactacaaatcagaaacttctggtgaataatcaagaagaaggaggctctatgggggaagtagggagttcaaattaa

SEQ ID NO: 18816 - DNA, 201 bp, Bos taurus
ttaaaggtttgtgcttaccaagcaaaatatgaaagtctgctgaacaaattatgaaattatggatttttaaatttcctttaaggaggtctaaaaggcaggcgatagcatgcaggggaaactagttccatccacattcagaagttctctgatgaactcctagtcttctctgactgctttccaaaccaaatggaaatgcttaag

SEQ ID NO: 18817 - DNA, 201 bp, Bos taurus
acatcaattgagcaggaatggttaagtgccagtttatggagttggggggaaaagtgacttccatggttactttcagtcttcagattttaaatataaaggcgccacaaagtcaactaaaaggaaatatacttataaataaatcatggtatttggaaacagaaaactgcctccttcatgaacccatactgattttatttatta

SEQ ID NO: 18818 - DNA, 201 bp, Bos taurus
atatttaagcaagaaaaattacttgccagtaatgggagacaagatacaaaaggaagaagtagtgaaatctctgaacaagtaagtaggcaatggccaagagctaagttaaatctttatttactcactcattcaacaagttctgctgacctaattccatgtgctaagaactatggctaacatcaggccagttagaaaggtaag

SEQ ID NO: 18819 - DNA, 201 bp, Bos taurus
cagggaaacaatctgtactactgtatttcaagccattgccatcccaaccattacttcatttgcaataaaaagcacacaaaaaactgggcaagtgcattttatacatgtttatttctaaagtgttaataagtaaatgcctgatcagtgttggcacagaagtggcagaccccccgcatggtagtaggatttgagtacctatct

SEQ ID NO: 18820 - DNA, 201 bp, Bos taurus
aattaacacaccatcatttaagggtttgagagaaactctagtgtggggaagaaagaaagagtccagcacttcagagcaatgggcccatggttttctttagggtttctactccaactgcagtgtaaggaccagtagtaccagcataaatgaggaacttgttagaaatgcagaatcttagggcctctctcagatgcctcggtg

SEQ ID NO: 18821 - DNA, 201 bp, Bos taurus
accattttgattatctgctttattcaccttataaaaacttcttctattaaaagttttctagtgacatgattaaaattaatagtgtaaaatgttgaaagtgcttgttttctaggctctatgtacagctttatttggtcttgagcttcctatataactagagctatttatgatgttgctgttggtaaaaattcgtttcctgta

SEQ ID NO: 18822 - DNA, 201 bp, Bos taurus
ggtcatgcttctggatgtctgtaagagttactatccagacattaaatgcttataatccattcctgagagctattatcccagaaactatacttgttttcccattgacagcaggtggctttcatctttgacctggatttttgtgtttgtttttatctttttattccttgagaggccacgcatggcggctcaatgggtaggcaa

SEQ ID NO: 18823 - DNA, 201 bp, Bos taurus
tgtctacgaacatgaaatagaccactggttcacagggtcagggaaccggaaaaaagaagataagataatgaattaagagggggaaaaaggaggcaaaacacgtagcacagatggtaaatgaagtatgagataaggggaagaggggtggcagtgatgctctagttacatggttttgtttttcacatttttaagtgagtaaac

SEQ ID NO: 18824 - DNA, 201 bp, Bos taurus
tagcaaagttaattttttaatccatttgttgtcaggtttttcttgtaagtaattctatgttcatccaatgttatctctggccttatatttaatgagttgaatttagagttcatcttttcaagtgacattctttctgtcatatttcatgcttctgggtaaagcttccttgcccttccatgcactaaaatggccaaagagccg

SEQ ID NO: 18825 - DNA, 201 bp, Bos taurus
gagttggtgatggacagggaggcctggcatgcctggttcatggggtcacaaacagtcagacatgactgaccgactgaactgaattgataagtcgtatttacagatttttagagaagtggcccaaatattagtttttgagtacacttatatacatatacatttgttatatatattatataacctttctgtttaactaaaatc

SEQ ID NO: 18826 - DNA, 201 bp, Bos taurus
aagaacttatctgaggccactttaaatgaaagttgtgatccacaattaaaagttgcaggtgacagaaacattctgttgcagaggaattaaaagaaacaaaggtattcactggaaattttgtctgtttagtgtttggcgattggcaacagaacttcaaaaaacagagaataggaggtactactgtcatctacagactcagta

SEQ ID NO: 18827 - DNA, 201 bp, Bos taurus
tgacacattgatgttgtccttgtgaatcccaggataaagaagcagctgagctatatggtgcctgggcttccaacacactgaaattgagagagattatatgggttttattttaagccactaacttttggtaatttgctacagtgacaatatgaaactaatatgggagataagtagtcccatatttttatttataaaaaataa

SEQ ID NO: 18828 - DNA, 201 bp, Bos taurus
ctagctctcacagtaatggctacaagcccagccaaacatcaggaagcagcttcttcaggagcttgaaagaaatcaggtctcattaaacaataagggaatgggccacacagctcacttatttcctctgcccttggaaaaatgtagattccttggtgtaaagtagagaagcaaatcaaaactaaattacctctgtgtaaataa

SEQ ID NO: 18829 - DNA, 201 bp, Bos taurus
tagaaataataaagaataattctagataagttaatggaaaaagcaaaacatatttaccacaaatgttttgctcatttctaaaaagtttgcaactttcctcatgtcatatacaattttaaaaatagtcaaatctgctaccctatttgcaattacctttatggtgtccaagaatagcaaatcttgccctctccatgtttgaaa

SEQ ID NO: 18830 - DNA, 201 bp, Bos taurus
gaaaaaaagggtgtgatactttcagagtttcctcagggttcaccacagggagtggctggagtggttgcagtctgatgactgctaggtagcaggtatttcctttccttgggtctgacgttgaagggttgtagtcactgattccatttatagggcctttccctcttgatcatgaatctgaccattatctgggaaacatttcat

SEQ ID NO: 18831 - DNA, 201 bp, Bos taurus
cagacattaacatgctctgtgacttgctttggccaattaaattaaatcagaattgacaagtgccatttctgtgcaaaaactgtcagaaactaataccaagcgtgtaaagtttcctttcctggcctcaacagtcacagatgcacttgccaagatgaaggctctgatatcctgggtcccagagttacttgctaagcagggtct

SEQ ID NO: 18832 - DNA, 201 bp, Bos taurus
tgctgtggtcaggaagatggcgatcagttttctgagttttcttcctgaggtcaggaaggtggtggttaggcctctgagtccttattgctgctgctaagtcgcgtcagttgtgtcggactgtgtgcgacctcatagatggcagcccaccaggctcccctccctgggattctccaggcaagaacaacggagtgggttgccatt

SEQ ID NO: 18833 - DNA, 201 bp, Bos taurus
cttgggatacttgataaaaaattgatatttttatttcttgggatactaaggtgtttttggatacagagtttatattttacaccaaattttcggccatcatctttccaaataatacctcttcctcattccttcactcttcttcggggacttatggaaagatgaatataaatagatagagatagatagattgactttggggcc

SEQ ID NO: 18834 - DNA, 201 bp, Bos taurus
gtaatgtacagcatgatgattatagttaacaatactgttttacgtatttgaaagcttctgagagtagatcttaaaagttttcatcacaaaaaaatatttacagatgtgtagtatgagataagggagattaactagaatgattgtgaccatttcacaatatatacaagtaccaaataattatgttgtacatctaagactaat

SEQ ID NO: 18835 - DNA, 201 bp, Bos taurus
tcatgcttgcttcctctctatccaaatccttattaaacttacctaaaaaggggaataacttttggatttatctttactggtaacccctattgccttgcacatttgtacactatgaactaattagtatgttctcatttttcacatgttctgagcactcagaaatgtttggaatgattaagatataggcctttgcccttttga

SEQ ID NO: 18836 - DNA, 201 bp, Bos taurus
gaattcaattttcctaggagctttggtaattgagatcttgttcccagcaaaggcggttgcgtgaacagtgctgtcagaatgattacactaaaaatggacagagccctatacaagcattatctcctcttatgttgccagcattcctaagaggaaagactctactgccattttacagatgtagactctggtgtagcaagcttc

SEQ ID NO: 18837 - DNA, 201 bp, Bos taurus
agaagagtaagaaaggagaggatgaaggaaagtagaagaaggagaaaagatgaagggagggaaagtaaggagtctggaagagaaagtaaagagaatgagatagaagagggtagagtaaggaagaaaaaaggaaaatgcacactcttttgtcatgaacatatacaagattcacaatgttttacaaagccattgttattaata

SEQ ID NO: 18838 - DNA, 201 bp, Bos taurus
tataatctgggttcttgagttgaaaataagtcaaattcacctgcaaaaataagataatgctactaatgtgttttggcaatttactgagacaaatccaaatactttatctaaataacctagacatttttatgacctatgaatttcatgtgttaaagagtatatatagattctgctttgtacttttaataatgggagggggta

SEQ ID NO: 18839 - DNA, 201 bp, Bos taurus
gtttaacatgacatttctagattagaattaagaatttaatgatcaaatctgaggtattatttcccaatagaagctcatttcattgtgatattaatgggggccatcattgtttaataaagatttcccccaaacaagggttcatggtggtccttgaaatttgaacttaactacactgaagaaatcgatgtcatttaatttccc

SEQ ID NO: 18840 - DNA, 201 bp, Bos taurus
tataggagtgaaattgctggattatatggtaactctatttgtttaacattttgaggaactactaaattgttttccaaagtagcttcagtattttatcctcccacctgcagtggttgaagactgatttctctacaacttcatcaacactgatttcctgtatttttgtttatagtcattctactagatgtgaagtggtctctc

SEQ ID NO: 18841 - DNA, 201 bp, Bos taurus
acaaaaatgctgatttttttaaaaaaaatcactttattagtctgcctggaggactgggcagatgcatagttattacttagtagacacttgtcaaccaagaataaatacagatggaggtcaaaagcggggcaggcaagcacagcgctccaaagagggtgtgtggaaagggaaatctggcagagtgtttcaatggccaggttt

SEQ ID NO: 18842 - DNA, 201 bp, Bos taurus
gtatattttcaatcaccgtgtagtatttcaaagttttatgagtgatagttgttcagttgtaaagttgtttagttgaaagaaggttatgcagtttcagttcatgaaagtaaatctgttattctttttctattctaaaagcaagtaagcctaagatatctgttaaatatatacttacctaagctggaacttttcacatttctc

SEQ ID NO: 18843 - DNA, 201 bp, Bos taurus
aagactgatgggacatggtactacattttagtttaaagttttgttttttctgtgagtacaaactgcatatatatccatacaggggtgacacaaagattatgctttacaaagaagttcttttatattttatagtttatctatatctttattgatagttatagtagagaaaatatattaaacatttctttcctctaagtgaac

SEQ ID NO: 18844 - DNA, 201 bp, Bos taurus
ttaggtgacacagaattctagtaaaatctagaggccacccgatgtctaaacatttatttcctttccctattgagttaatttttaattcaattaggactttcccaatgttataaaatcttttgaccttattctcttactgtcttctctcttctcattatcttccaacattttcacttctctgtcaagtcacctagctcatga

SEQ ID NO: 18845 - DNA, 201 bp, Bos taurus
atgcacaaaaaaatagtagggaaaatcttatccaaagatatttttgagtttcctccaaaattaagtttgtgttttaactgtttttagcaaaacaagcatccgttgttaatacatatggaagagtaagtattttcagcaaaggaattttattttcagatgctgtttttgaatgactcctgttttaaatttttcttttattga

SEQ ID NO: 18846 - DNA, 201 bp, Bos taurus
acttatttaaacaagaaaacactgccatcatctggacaggatatgagcaaaaagctattccagggacagttgcttttcagctggccttccccaaagttctgtgagtcatcatcagctaaaagagcatgcccttctcacctttaaataaatgactaaaagatgagttccttgtattgctacttatggtggagttgaaggcca

SEQ ID NO: 18847 - DNA, 201 bp, Bos taurus
ctgaatttaacatcgtcagtcaatttctaattaacaatgtacaatactgtgtttctttacctttcttatcttttgttagattccttgtcatacttttcattgccttctttaatccatctactcagacctgttctcctcaacccctacaagcttacatcctatttttcttcaagaaattatgaacaatcacaaagaaccgaa

SEQ ID NO: 18848 - DNA, 201 bp, Bos taurus
ggtcaacatttatattcaaacagtaaattatttaaatgaagaagtcagtttactatgctttaaacttattatctattttgccttccatattatgtcatacactccttgaggatggggagaatctgagcagatttcaatttttaaaatatccttcttacattttgcacagcaaggtactcaataaacatttgtcaaatggaa

SEQ ID NO: 18849 - DNA, 201 bp, Bos taurus
cctagaactcatcactcaaatcttagtctgtgaattacccaactaatgcttctagagcataatgtatgggttggacacttaatatatgccatttgttcaactatcacactcttagcactgtcagaaagtataaacaatttatgtaaggtcttaagggaattacctgtcaaaattgcaattgaagtaacctacggactattc

SEQ ID NO: 18850 - DNA, 201 bp, Bos taurus
aagcatgagttaagaggatcattcttaagacattacaggcagatctactggcaggaacataaagatcaaggaggaaaagccaagtgttgtgctgaggaagtaagcaagggtcaggtcacagagtgtcttgcttagtatatttggaggttacaaagtttctctttaggtgggacttcgataatctgagcgtacccctccctc

SEQ ID NO: 18851 - DNA, 201 bp, Bos taurus
actattgtagaaacacccatcttatggtaaaactggtgcagaaaataaactaattaatagtgaccataaaatccattaatctcagatgagtaattctttccgcaaattttaaaggattaaatagaaagagttagctccttgcattattggaaatttagttgtttcatcctgtgtcggttctataaaacctggcatatgaca

SEQ ID NO: 18852 - DNA, 201 bp, Bos taurus
tggagggccgcatttcttacccattggtaggagaagccagtggctaccggtctgcagatcacacttttgagtggtaaggctctatttcttttataattgatagttgagaggatgaaggtagattttggaggaagagaagagacaattgatttctttctccttttcccacacgcttcacagtgaaacaattgcttcatttct

SEQ ID NO: 18853 - DNA, 201 bp, Bos taurus
gaaatcataaacataataaggttttggaagttgattagaactaatctaaatcataaaatctggaaaaatatagcaacatgcaaacaagttacaaattgtcgttaaggtcttttgtgagaagtttttcatccttgctaatccatgtatctaatggaaatacccttccatgtgtatttattctggaatattattggaaaactt

SEQ ID NO: 18854 - DNA, 201 bp, Bos taurus
tttagtggtactactacagcttttaatatcctaagacaatcacaattgcataaactcatctccagtgttatcatacatttggattcatttggttccaacagtatgtcactgaacttctctatcacatcttatttacacagatgaataaaattctctgtagctttccctgttcagtgatatttcaaacccttgactcagttt

SEQ ID NO: 18855 - DNA, 201 bp, Bos taurus
tatccttgtataagctcaaacttaatttttaagataatttcagaaaatatataacattacccttatatatcaattttaaaagtttccaaaattcaagcaatttccaaaaacaacagaaagaagagatgttaggtgatagaactaaaattctatccacgatgaagaacaaagcccacaagctttaataggatgcctaatgcc

SEQ ID NO: 18856 - DNA, 201 bp, Bos taurus
ctggcaaagcttttccctgatggggagaaattacctagaaagcaagcagttgtgagcccctcagagatggagtggatactgtggttccacccaggtccccactgtagggccagtcactccatcctcagccaagagtaatcattcccttaggcagctgtcctcagttgcaggacaccacccagctaaggcagcccagcccag

SEQ ID NO: 18857 - DNA, 201 bp, Bos taurus
cacatataatggaaagaaaactttcattattaaaataagtttctttaggattaccactctaatactaaagcctgaaagctaaatctaaaaggtcgaaccacttaaaccctgacctaattttctttaggtcaattagactaggtcctctgttttgtaaggcctaattcactgctcctagtaaggacagtgaaatacctccga

SEQ ID NO: 18858 - DNA, 201 bp, Bos taurus
atcactttgagagacatgatacatatcctagactggactacagagttatttggaaaatataaaaactcatccacttgtaactttctactagacttccataaacatcaaaacaccatgttttatgccatagcaaaagggtagcaactctacctgacactaagggattgcagtagccattttatttagttttattttggggac

SEQ ID NO: 18859 - DNA, 201 bp, Bos taurus
atctcagtttaatacctattcccctattttacttgtgagtttgatttcttaagaaacaatcatggtaaaatatggcaatatctcagagagctgtccaaactctcaccacatgggttatcactgatctactatgtatttgatattaaagtcacctttattattcagaaatttggagctttaacttttttaaactggaaacta

SEQ ID NO: 18860 - DNA, 201 bp, Bos taurus
actatggatgggaaggtcactgaaaaggaaaataaaattaataggaatttgaaaagataatctggcctcatcatctaaggacaatcaatataaattagtataattaagaaactatcagaagcctgataagcatcagagaatatggagcaacaaaacttcctcattgctggaggaattaacagactctaccattctggagtg

SEQ ID NO: 18861 - DNA, 201 bp, Bos taurus
aaaaggcaaaggccaatttgtcactatagttttagcatcacattttctgccactgtaaatagatctctgacttaaatttgccattgtatattaaagccaccatatgtatgaaaacactgggtgtaattctgaatatctaaatcaatgttagactcaaatacactgtcacaagtgcaaatatttcactgtgactttgaatat

SEQ ID NO: 18862 - DNA, 201 bp, Bos taurus
atttttaagactacccttgaaagtcccactgtaactgagctttctcaaaatgatttttattatgtggtgtttccaaacatgggaaggggtggaaattatagggaacttggaaatattggtatattcctaatagcaataatgaactgctacaaagtggagtgaaattaaaattataaaagtattttaaacttttaaagttag

SEQ ID NO: 18863 - DNA, 201 bp, Bos taurus
tgttaccaaaagtgatcaagaaagtattgacttcagaagggaaattttcacacatcatgtctgtgtatatcattacatcatctatagaaaagagtttggtaacatattcatcctcctggactcaatgcttccattactgaaaaactaaaagtaaataatgttaattatgaaaaaggctatttatataaaatttttcattgt

SEQ ID NO: 18864 - DNA, 201 bp, Bos taurus
gtaaaaaacattgaacatgtaagttaacagcattcagtttaactggatcaatgattcttaaacatcttggtcttaggtcacctttccattcttttgccaatgcccagttttaatgcagtatacttgacatataacattgtatacatttaaggtgtacaatgtgatgatttgatacacttatactttgggaaatgggtacaa

SEQ ID NO: 18865 - DNA, 201 bp, Bos taurus
cccctggtattattgattgcttttgtagaattttaagattcttaacctaattttatgctctgtattttctcaagtttacctaccacatctttattcatccaaaatccacagcttctagcatcttttactattctggcaaaatcatgttactccatacatagacttcatttctcttgtatgtatagagtcaggtaatgatta

SEQ ID NO: 18866 - DNA, 201 bp, Bos taurus
tcctgtgatacaaaaatcccacttgactatttcatataggagcaaccaaacattttgttgttgtattcagtctccaaatcatgtctgactctttgccacctcatctattccagcacaccaatccttcaccaatccctgtccttcaccatctcctggagtttgcccaagtttatgtccatttaatcaatgatgctatcccat

SEQ ID NO: 18867 - DNA, 201 bp, Bos taurus
attagctttgcaagactatctctcagttggccccttagagagcagactggaggctgatcaagatgaacatggttagatgtggctaccaagtccaccaagttactgatggcccagagaataacggtggcatggaggaggaaatgctgaagaatttgtgagcacgaatataagttagtcttttcactgcattttaccttatgt

SEQ ID NO: 18868 - DNA, 201 bp, Bos taurus
tttctaagctgccaggagacctgacaatgcttcaggtccttgctttctgccttattcagcagtgccctgatggtcaccactatgcttggcccttatctcccgctttcctgagctgagtacagacctgaccttgacagagatcagggagttagacaaaacaacaatctcagtctgaatggtccaggaacccagaatctcagc

SEQ ID NO: 18869 - DNA, 201 bp, Bos taurus
taagctgaagagttataatctattactagagatctcagatttaaagacaaacacaatgcttgatgtaccacaatgaaatcattctgaacattacaaagcaatcctattgtaattcaatctgttcctaattataaatagttgataacctttcactgctacaaaactatatacccagttatcaagtacatgtaggaaaatcaa

SEQ ID NO: 18870 - DNA, 201 bp, Bos taurus
aaagatcaaaaagtgaatggggcccacagaagggaagtcatagtttagagctggagcatttacaatataaaagggacctgtgttccccttactgcctggagaaggcccagagtcctagaggatgagtactagggttggctggcggaagaactctctcttttggaactgatgccttcttctgcccagtttgctctgttgctt

SEQ ID NO: 18871 - DNA, 201 bp, Bos taurus
gtgtgtcagtggccctcaggcacaccgccagctttcagcgtttcagactccacaagaaggatcaagcttcctttcaccatagtttaagacaatcgtgagcgtaggccagtcaccctgagttggccatcaggagagacagctggccactggggaccaaaggtcactactgaagctgatcttcctctgcctcttctttgtgta

SEQ ID NO: 18872 - DNA, 201 bp, Bos taurus
tacttacctcatttgctaaggcaaaagttccccagtgaattgccacagacttctttgcctgaacatcaatgtgaatctttacagcctcttctgggtctacgtgctggtacttcataaaccaccttagaaaacagtaatttattaaatatggcctttgaagtatacactaaattctaattactgcttcatcaacctttacga

SEQ ID NO: 18873 - DNA, 201 bp, Bos taurus
ttgttgaagtcaggagtaaagtaaaaatagtctaggaaaaaaaatatgaaaagagccaagcctcaaggaacaactaaatgtaaaggtcagtggataggataagctgacaaatgagcttgaggagaaacagccaaggaataaagatgaaaatcacaagattaaaatcatgcactctaggagaagagttttaaaagagataga

SEQ ID NO: 18874 - DNA, 201 bp, Bos taurus
taggtcttttaaaggtagaaggaaggactaggcaagggcaatgattagggctcaagctagaaaagtggaaaattactaaacacaggtaaaggggctgctccgtgtaattagggcatctggattcgctgagtgatgcttatcagaggcaggttttctggtgttggctggtatgcagtaaattttttggcagccttgagcttt

SEQ ID NO: 18875 - DNA, 201 bp, Bos taurus
tggggtcagctccaatctctactcatttcccagtctgggaatctacccttcagtccttagctgtaaggtcacttctttccctgctgtattgatccccagcaccccagcaccaggccataagaccaccagacaacatctttaggcttcttacacagcccccatgtgtgaggaccatgcaagatctacaggctatgtagaatc

SEQ ID NO: 18876 - DNA, 201 bp, Bos taurus
ataagagtggctgatcagctcagtacatgtggattacttttgatttatatgtacttttccataaaaatctttacagtgaaatttgaaagtaaaagtggacatagcctgtcttttagcatataatactagtcactgtagcactcatatctaccagctttgttcttgatttttttttctctttactgtaaaatttctcagtga

SEQ ID NO: 18877 - DNA, 201 bp, Bos taurus
tgacaatatgtcttttgtaattgtttttgttattctttggcctctattttctaagggttttgtgtttattttttttaaccatcactattctcacatcttgcattgtgaagatgaccaaggttgtaggtagatattttcatttattatggtttaaaatttagtttcagcaagtcactattttaaagatattaaggaagaaat

SEQ ID NO: 18878 - DNA, 201 bp, Bos taurus
tcgaatgcaatgttctgaccttgtctgtatcatgatttaaacgagtcctctgtatgcaaaaggcatttctgaaacaatgaggggaaaactgaacatgcaccgggtatgagatattaagaaattattattgattttgtcaggaggtgataatggtttagggctttagtccttttctatcagatatatgctgaagtagttaca

SEQ ID NO: 18879 - DNA, 201 bp, Bos taurus
gaactctggaaagaggccccgctgaggaggacacgcctctcctagctctgctctctccgaggattccgttttctgcctgcaatttggtaaggcccatggcgtctatctctagggtggaatccagggggatccttgaatacacaagtgcagtgtcctcgaaatcatcagactgagatccaatataggagaaaaatgttgcca

SEQ ID NO: 18880 - DNA, 201 bp, Bos taurus
cttggttccctgcagggcagtttcaattgtgtctgcttagagtatgtctcccgtggaaactgagaggacctgctggcctgtttgtatattccttagtgatcggacctcagaatctcaacaggcttcctgggttctgagagtctgccagatgggagcttctcagaagaccaccacttccagaggccaggccattttgatcag

SEQ ID NO: 18881 - DNA, 201 bp, Bos taurus
ataggagtgaatttttaatattttggataatttcttattgaactaataagaaaaaaatttactctccctaatctaatctgctggggaactagaactctgttgactagtactggctataaaaatctaagtaacacttttttaaagtatgtatttggatagtataaagtataagtttccatctcctttgatcttcctttgaat

SEQ ID NO: 18882 - DNA, 201 bp, Bos taurus
agttcccagagacaggggttttcacgttgttgttaccagaaatggccacaaggtggcggcactgggtcattcccatgtgtgctcaaggggcacctgggccgcagtgaatgtcttctcctaaacttacccttcaccttcccctgccccacttcccaccagtcccaagcccttgaatttagcctggcttcaatgctgtcatcc

SEQ ID NO: 18883 - DNA, 201 bp, Bos taurus
attatggcaaaatatacataactaagaataatagatgaatcatggctaaaacctacccccaaagaaatccaactttcctcttctccaaagtactactctggagccaaaactgaggctcccaaggaagggaaacattagagtaccaggttgacaaataaaagtaaattcattacttatatattttacattcacttcaacatt

SEQ ID NO: 18884 - DNA, 201 bp, Bos taurus
tgagacgttcatgccttcctcacctccatttcaacacgtagttattaatctttttctctgacgacaaaccagaaagtaagatggagctgtctatcactgagcttagagcctagcagcggggacaaacaattaaacaagcaattataataaactgtgtgtggtggtgcaaagacaggcaagcgcacgtggaagatcctcaca

SEQ ID NO: 18885 - DNA, 201 bp, Bos taurus
ttttttcttctgtcattcctgggtgttgagcattgtggcagacactaattattgctcccagaatttgttctacttcatctccaaatatttgcttggcacataactgctcaaaatagtttccattcccaagctttccttatagccatgcatctgagttactgttgttgtgtaataagtcaccttaaaatgtagaggttgaaa

SEQ ID NO: 18886 - DNA, 201 bp, Bos taurus
aggtgacctatacgttgatgagaaagtagggcctgggtagtgggaaccttccctcctgaatcattcactgctaagacacaaattcatgacttctcttggtaggagaaggccaggaccttcagtgagttaggggtggggtggggggagtcccctgcattctctgagttcagaaggaagacaagtaagaggattctggcttca

SEQ ID NO: 18887 - DNA, 201 bp, Bos taurus
gaaataaaagtatatgtccatataaagatttatatatgaacactcaaagcaccttgatttgtaatagccaaaaactggaaacaacccaaattgtccatcctcaagtgaatgcatgtacaaactgtagtatacttgaacaacagaacactatacagaagtacacattacaatatggatgattctaaatacaatcctgctcca

SEQ ID NO: 18888 - DNA, 201 bp, Bos taurus
gggctacgtcattctttcaaaagttgtgccctgtccctttccctcctattacaactccaagaccctgaggaaggagtaagggggaacagtgcagcacagatttacactagaaaaggaagctatccttgaactatttttccctcccttccagaattagtaattgtttaagtctgctttttgaaactcagagaaggtctagga

SEQ ID NO: 18889 - DNA, 201 bp, Bos taurus
atttcctgggagaatctgggcaagccacttaaattcctcatatgcaaaatggaaataataaccctcatactggaagggaggaaatactttagcccaggccaagcatctagctgtgtggggacacagccctacccaccagcagaaaggcaaacttggattccctcagctaccttggccacacagagaatctgaccttgccca

SEQ ID NO: 18890 - DNA, 201 bp, Bos taurus
aatatggtttttgagctgatggagagattataaagtagtaaataagcctaaagtatttaaccttagggctccagttatctgtcgttggtaggactttggaggtggtatttaacctcatccaagaagtgtaaatacttggaatccttcatatagtttaaggataaagtgagataatgctcagaagtgctgagattcctcagc

SEQ ID NO: 18891 - DNA, 201 bp, Bos taurus
ccacaggccacctattcccaagatgccccctgctgcaaagcagacatactctagcatccttagctgcttttcattttagtttggagaaacttgtgatgactagttttaattagaatttataaggaaggagtcactattgaagaaagactgagagaattggcgtttcatgcctgcatatggcagctttgtctcatgttaggt

SEQ ID NO: 18892 - DNA, 201 bp, Bos taurus
aattcatccatgcatgcatccatccaagcatttacttatctgttctttatccaacaaatacttgggaattatagtaaaccctaaccaggagctcataaagcagtggatgaaagaggtagagagagctacagttaacagtgtgaggtggcctttagaaaagaaactgaccttctttagtggaacttctaaaagaaagaagta

SEQ ID NO: 18893 - DNA, 201 bp, Bos taurus
catttcctactccagggtatcttcccaacacagggatcagtcctgtgtctcttgtgtctcctgcacccagttacatatgacttattaataagaattcactgatttcatttgatcaacagtatattgtaggcaactgcagtgtttttttttgaattgtggaatgacatatgacataatattagtttcaagtgtactacataa

SEQ ID NO: 18894 - DNA, 201 bp, Bos taurus
gggttttagcgggaagaaaacatttttctctgtcttcaggcaaggcataatgaaaaagcagcaatttcaatacttctcttccttccaacagcagacggtactaggaacagtaccagacagggaatgcatttgaccttacatttgcccaagaggcactgaagtctccagcccagaagctccatcagctgctcccaggggcca

SEQ ID NO: 18895 - DNA, 201 bp, Bos taurus
caacactaatcaaagaaaatgaactgtaatcgtttcgaggaagctgaattgcatcaacatttgagtatccattattcctttcatcatttcagcattgtacactatcattatctattctttcagggttctgaaaaggctttagaatctgctgattgtcagtcactagctaccggatgccacaaagctctgcaattctactgg

SEQ ID NO: 18896 - DNA, 201 bp, Bos taurus
gccttgatttactggtatcctcacattgcagtgctagtatctgacactggtttgggcttaagggaatcagaccctgcctaacggagggcactgcttccagttcattactcacctaggggaaaggagcctgtcacctcttccagcctagagtaacagagctctgccctgggattcaagaccaaggcttcagctactcatgca

SEQ ID NO: 18897 - DNA, 201 bp, Bos taurus
ttctgccacaattcaccctactcattactcatctttctttttcttaaacaaaactagaagaaacaaacaaacaaaaatcttcacaattccatctccaatgaatcaggatttctttgcagttcttatctgaatgcttgtgtgtatgtaatttcaacagaactgcaatcttgatattttaatttttaagttaacattatctca

SEQ ID NO: 18898 - DNA, 201 bp, Bos taurus
atggcaagaccctggtttctcaccactggactgagtttacagatgggctaggggaagagactagactgatccttggggtaatggattagagtgggagacattgtaaaaacttatgtttagcttcatttagatatacatagttacataagaatatttacagacagtttatggcacaagttattatgggcctatacatttcct

SEQ ID NO: 18899 - DNA, 201 bp, Bos taurus
aggcctagtaacactgttcttaacaacttgatacactgaaataaaaacaaattgactctctaaaggtgtgtgtgcttaatcactcagtcatgtctgactgcgtgcgaccctttgggccaaagcctgccaggttcctctgtccacaggatttttcaggcaagagtactggagtggattaccattttcctcctccatgggatt

SEQ ID NO: 18900 - DNA, 201 bp, Bos taurus
ccaagtagatgagcagaattacctgcaagagaatttctgaatatgaccttaccctatcaaggatatatatcaagaggatgtattgtccctgcacttcgccatctggtgttttcaggggtagtatatattttcaatcactgctgctttaccaggtttagattgtcagtaaattgaatcagatccatctcaatagttgtcaac

SEQ ID NO: 18901 - DNA, 201 bp, Bos taurus
gaaatggagcaatcccttcacacccaaccagttcctcagggagagatgagcaagcacattgattcctaatattattgataagctatgatttctctagatataagaatgttttattaatagattatgcatagaaataaaggtaaattatggcatagtgcagctcatttcattagtctagctcagttatagaccaaagcatga

SEQ ID NO: 18902 - DNA, 201 bp, Bos taurus
ataaaaaaaaggaaaataatattctcatggagaaaaagttaccttcttatgtggaatcacagtttttaatttaaatggctcagaagcctagaggtggccacgaggactgatttctcaagtagtttctagaagagcagctgctgggcactttctcttttttccctgctctgaagtggtatctggtgtggtcacagtggaagt

SEQ ID NO: 18903 - DNA, 201 bp, Bos taurus
catcaatgtttatctacctatcccataattaaaatcacatgtctgaccataagctctgagtgagggtttgcttaccttaatgcttgtaaactacttggccgcttaagtgtcattggctctgtgaattgaatcagaagggagaaaagtgtcaatgtcagaatctactttaggcctttaagctgattctacaacttataaagc

SEQ ID NO: 18904 - DNA, 201 bp, Bos taurus
tgactaaggtcttgctgagttaagtgtttttagtgtctgttatcctcacattctctctcagagtagaacatacattgtcttgctgtggccggaagtaatatagagaagaaggctgggaccctgggttgagagacttgatttgactgccaccactaggtgcccagaggccctttccttttctcccaggagactgtgggactt

SEQ ID NO: 18905 - DNA, 201 bp, Bos taurus
aagcccgtgtaccgcaacaaacagtaaagcctgccggtagcaacaaagacccagcccagctaaaaaataagtaaatcttaaaaaacaacaacaacaaaatcatagagtcagatgaaataaagatatgattgggcagaaaagctatttctcagtcaacagacactaggatgagtattaaacttttcattacctcattataag

SEQ ID NO: 18906 - DNA, 201 bp, Bos taurus
gtccatcagcagatgaatggataaagaaaatgtggtatatgtataccgtggaataatactgagccataacaagaaaatcttgccatttgtgacaacatgggttaacttggagggtattatgatagatgaaacaaaccagacacaaaagggcacatactgtattattttacttatatgtggaatctaagaagttgagctcat

SEQ ID NO: 18907 - DNA, 201 bp, Bos taurus
atttagtgtacttaccaaattgagcacattattctctaatgtcgtattcttaaattaggccagtagctaagtgtctgggtggatttgaaataaaagagctcgatttagcaagattttattgtttaatcctgcacagtgggccacactgggaggacaggatcttcattgtatcagcagaggagtttaagctgtaggtaatat

SEQ ID NO: 18908 - DNA, 201 bp, Bos taurus
ataaatcaaatttaaaaattgtgatcaattaattttcttattaaaggagaccttgaaaaatatttctttgtaaccaccctacactgccattttaatatatctctcagcagtttacctaaaaataaaatcaaatatctggatcattggttttcaaagttatttattttgaccaattattttcataattatttcagaatcacc

SEQ ID NO: 18909 - DNA, 201 bp, Bos taurus
cctggggggccaggacaggggccacacgctgcacactaagtcttccctattttctctgacttctggcattctgggacatgtctcttcctggtcacaacagcttgttagaggagcggaggggccaggtcactgtttccacccccctcaacatttcctctttctagagcagatgactagagagaaaaagtgtctcaaatgagc

SEQ ID NO: 18910 - DNA, 201 bp, Bos taurus
tgtacttcctaaatcaccttcactgaagatactttgtttataacaagaaaagttatttattattaaaagaataagaacagataagaataattactttccctggaaatgtaactatattacatccaatgtcaggtggaaggttacaaaggttacctccaaaagtctttctggtgatttacatgggaaaaaaaatcaactgaa

SEQ ID NO: 18911 - DNA, 201 bp, Bos taurus
agttattttacttataactgagaaagttcactaagagaatgcctgtaatgggttgatattttaatatttcatctcttgccaactgttttaaaagtaatgaataatttgtgtctttcaatcccctggggacaagtgaggactcttaaccatactaccttatccttgagttattcttccaaaagaatcctagtcaacacgctt

SEQ ID NO: 18912 - DNA, 201 bp, Bos taurus
tgatttcttgttatcatatgagcatttttcaaaactataatccttgacatatctatcactaccacattggatccctttctgttgtataatcaaaggaatatagatattcttggacacagaataaaagttctcatccacatttgtcccttacagttcatggggacaaagcagaagccaaatttgcaacattagcttcctggg

SEQ ID NO: 18913 - DNA, 201 bp, Bos taurus
gtgacaaagactaagattagaggatagtacagggcacggggaagataccatacaacttgagatatttgagtcaagagagaaaatcacccagtacaatacactgtctagggatttacacatgtgtagcacaactaaaggcaaggggaagatgaacaaataattcacaaattccatttacccaattttctggggcaggagggg

SEQ ID NO: 18914 - DNA, 201 bp, Bos taurus
tcatttaggttacctgtttacaaatctttatacaggatatagacaaaacataagtggggaagaagaaaagaagaagaaaattcaatatactgatttaacattggaaagggaaaaggaaggacagagaaggcaagaaaagaagtacattgcagacagaagttgtaaaccatcagcaactgcctcctttgctgcgtccagatt

SEQ ID NO: 18915 - DNA, 201 bp, Bos taurus
taaagaaatactactgaggttgccaaacatttgatttgtctatggtgtgggtttcagacactagggaatgacatcacagagatttctttttgatattcatgtgtgtctgccttaaatgaactatctgcgtaatatttgctaggcccagaattgagttttccccggttgttaataacctttaatcttgacactaccatcatc

SEQ ID NO: 18916 - DNA, 201 bp, Bos taurus
cagccatatatttattcacttatttataatttaactctctcctctagaatgtaaggttaatgaggagaaggatcttgtctcttattcaccactccagtaccacctgacacagttggtgttcagtatatatttcattaataaataaatacatgaataaatgtttgactatggacagtagacagtctctgctatagactgaat

SEQ ID NO: 18917 - DNA, 201 bp, Bos taurus
aagaaaaatgtattttttaaactctgcctaatatattctatgatttttttagtaaaggggtttaagagctttgtgtaattaacaaatcatttcaaattaacgaacatccacatcaatataaattaggagaaatgaatgtccttatttattttgttccagactgcagactgaagtctgaagaatacataaataagtaagcaa

SEQ ID NO: 18918 - DNA, 201 bp, Bos taurus
taaatacttttgcttgatacccaaactgcttgtggaatagcaaagaaagctgtttaaataccttgtgacctgtgagaaaatgtcaagccaattcttatagaggcatcttgctgattggggcattgcttaggataattaaatgtgaaatagaatagcatgagtaagtgttttctctctgcttttaagttcgagtaaatgaat

SEQ ID NO: 18919 - DNA, 201 bp, Bos taurus
attgagacatcagtgtcaggtaacagcaaagcactgacagcaaggtcgtggggagtctatgctgcaactgaagctgcagtgagtcagaaccacatgaaaagtaagatagtgagggcagaggagccattatgaaggccaacatggagaatattaatcttcagacaaggaagagagagagagggagagagggagagggacttt

SEQ ID NO: 18920 - DNA, 201 bp, Bos taurus
tgtgggttagatcaggcttgttaaagatcacaacaggacctacttaagaaattaagcttttaatgggggagtggtatgacaaaatgatgcttcaagaagccgacttcagttaagactcataggggcttatggcatataataaaagaagaggactcaaaatgtgacaaagtagacagctaattgtaaagattaaataaagat

SEQ ID NO: 18921 - DNA, 201 bp, Bos taurus
ctttttattattttttcctaaattttgaagcatataaatgcatttagtcaataatttaagacatgtggtatgtttatattaaaagtttattggcccagctctctctattttcattctcttcattcacccatagtactgtcggcagtcttggttttcaaatccctttggccagtgacagtccttactttcctgtttgaagac

SEQ ID NO: 18922 - DNA, 201 bp, Bos taurus
aagacatcatgaatgtcagacttcacacaccttgcagactgctaataactcttaaagtgtgtccttgtttcaaattgaagtcagtattggaaattttatagtatctgctcttgctgaaagtattaaaaataattctgtaatagctaagctaaaaaagaaaattgtgtctttttacaactttgccttatttttggttcaatt

SEQ ID NO: 18923 - DNA, 201 bp, Bos taurus
ctaatttaaatctctaatatataggatggataaagaccttttcaaaagcctataatttcttagaaaataatataggaagctatgttgtgaacttggagtgataagtctcatagacacaaaaggcaaaaagaaaaatagtcacacatatgactatacctcccaataaaaataccatacaagtagcagatgagacagaatatt

SEQ ID NO: 18924 - DNA, 201 bp, Bos taurus
tcttcattatgcagcttctaatttataggacaaataatgaattacgtatatggaaatgctttttctaacattagtttaagagattgacacaaactagaattaattacacagttgacaaacagcagaagtcaaagaccttgaagctgtgattaaaaaaacacaaataagtttctgtatacttccttagtcttggaatcatat

SEQ ID NO: 18925 - DNA, 201 bp, Bos taurus
ccacaggaggtcaagagcagcagctagggagtatttattcacattcttgttctctcactgcccagtgatgctactccctcttccatttgataaacctacctatctggcccatccacccacaaggtagaccctctccaactcccaacagaaagtaaagggaaagaccctttgctctcaatttacctctgcaatcttcacctc

SEQ ID NO: 18926 - DNA, 201 bp, Bos taurus
tttcaattatctgcacatctcccccaaactcttggatttctcaatctttaggagacaactactatttatttgtatgaattttccccttcaaaataggaacgtggattagtttccctgagcaaactgtttattacttattcttttattttcttctaattggttcctatatccatttgatagatgtctaccaccttccatttt

SEQ ID NO: 18927 - DNA, 201 bp, Bos taurus
tatggacatgcagaggtctgaggacagcctagcatcactgaaaatctgaaagaagttcaatggaagaggataacccaacgcaagggagagaaatggggcacggagctgaaggaagagcagaggtcttaatcaactttgaaaaaggaggacatgctttccaaattcctacttataaaagccactctggaataagtaaaatga

SEQ ID NO: 18928 - DNA, 201 bp, Bos taurus
tttgcacctacagtggaaaaaatgacattccaatagcatgaatgtgtatgtttgaaataatataaactaaaatccacatgtaacattcaattgcgggcatgtagcacccgcgtaccgatggagggaattactgtcagggtgtgtttcttattcctctaaagatccagggagtcgactcaactggcctggaggagaggggtc

SEQ ID NO: 18929 - DNA, 201 bp, Bos taurus
ctttttttttcctaagtaagatctgccaaatgttcatggacaaaaacctctcattgcaaactgaactagtgaaatgacaagggtaagccacgtttctttcaatagctttatggcattaataaagctactgtttgaatgcatgttaatattgtcatgtgtaggatgaagtctcacaaattccccaaaatgtgaatgatcaat

SEQ ID NO: 18930 - DNA, 201 bp, Bos taurus
agccactaggctggacgttcctgcaactctgctcaatcctctttataagtctcattagagactaaagatctgtccaaaatggtacagggggttacacccactgttctgccacccttcctcaaaaacacacatggtgaaggttctgatgatgatcagtgtggcctccaaaactgggcctacattattggctattaaaattgt

SEQ ID NO: 18931 - DNA, 201 bp, Bos taurus
agcaaactataaaaggtagtgttggtctggcagctgattcagtcagggtgcaaaccataaaggtgaagaatgggaaaagattcctgaaaaatggcctagcaaactaatgagggagtgaacatttttctttagttctttgagttaggaagaaaaatgagacctagaaaataaatacaaagaagctttcctctgaatcagaga

SEQ ID NO: 18932 - DNA, 201 bp, Bos taurus
aaaagataaatactaatttcagatttctaaggcatacaacaaatagcaaagggtgaccagaataaggaaacataaagcagaggtaaaaaatgatctacaagaagagagttagggatggttaccaacaggcatgaaagatgaatgtttctttaaaagttattcttgcctccagtgctttggtcaaacaagccttctattaaa

SEQ ID NO: 18933 - DNA, 201 bp, Bos taurus
aaggatttttacatatatgttcatgagaaatatttctctgcattttttgctttccctgcaatgtcttagtctggttttcatattaggtagtggtggcccaatagaataatttgggaagtattccttatgctcttatcttgtgaataaattatagagaattggtataatttctttcttaaatttctgatggaattcactaat

SEQ ID NO: 18934 - DNA, 201 bp, Bos taurus
tcctaacagcattcactattataatcatgtaacaacaaataagggactatagggctatgcaaaacagaatcatttgttatatcaaagtaaaaattttctcatgaaacatcaaaatcattttcaactgccaggtttagagagttatttagacacaggctcttactaaagattctgcaatcaactctgaatacttgccatgta

SEQ ID NO: 18935 - DNA, 201 bp, Bos taurus
tagtggtcaagggcttttaaaatcagtttaagttaacctctgctttcagaaaatttgtaatgaaaaataatttacagatggctggattgtctcctaaaagagataaaaattgagacaaaatacatttggcattcagagatattaacttcgattatctttcaccctcatcactgaagagacatttggtttgactgatacaga

SEQ ID NO: 18936 - DNA, 201 bp, Bos taurus
attaataagagaaactctaataggggcacctacagcaagtgtaaatgcagcaaggggcatccaggaagccgctctctaattgatgagcatggagctatcaatgtgtatatcctaagtgaggagaaagggcaatgacaagcaggaatggttgaataatacaatgtgatatttggaagctgggaaggagagttattaattttg

SEQ ID NO: 18937 - DNA, 201 bp, Bos taurus
caagacagaagccttgatcagatttcttcctcccaacgctcagaaaaaacagatcctgctgacaactggatttcagaagtctagcctcccaaacttgagacgataagtactgttgtttaagtcactcagtttgcagtactctgttacagcagccctagcaaactaatacagtctcttaggccaaaaggtgataatgaaatc

SEQ ID NO: 18938 - DNA, 201 bp, Bos taurus
agttattggaagttcccatacagagctggcatcatatataatatattgaaaagtcaatctatcccctaagaaatacgtgataaagatttggaagcgagtatcctgtagtgaaaagatggtgggagttaaccatcagggagctgaatcttgactgagatatttctgcaagtccataagcaactacataaaatctgagactat

SEQ ID NO: 18939 - DNA, 201 bp, Bos taurus
tcttcttaagggctgaatcttagtcacagagaagttccctctctgttaaaatatcagttaataatgacatgtacttaatttctctatatttctccatatgttccctccctctgtacactttcagtttcttttacatgcacagaaatttgtgtaagcctgtattcagcactaaagaggtatgggttggctatttctgtaaga

SEQ ID NO: 18940 - DNA, 201 bp, Bos taurus
cagtcacaatgtctaaaacactcagggccctgggagatacagttgaattctgttggcaataatccactgtaagcctctagcttctgttagcttgtttaagtggccatattaagataaacatttcttaatgttgctttgcctttaagttcttaattaagagagatgttaattaaataatggtttccctttgttttcatggga

SEQ ID NO: 18941 - DNA, 201 bp, Bos taurus
tgttttcatctaaattagtaactataagtacttccctacattttggggaagttctagcacttccttggttatgcaattatagcaaaataggcaaaaatacggataaaaacaacttgaaatggcttgttttacccaacggcaattatttgctaatttgtctatatttacaacagacaatgagcttcttacagttaggaacca

SEQ ID NO: 18942 - DNA, 201 bp, Bos taurus
gagtggttagtattatatttaacccatggtgtttttttgcacgaatctttgaaagttatgtgaaccaaaactagatagcacaatatgcttgtctactaaataagaaagacaggcaccacaaaaaaactattatatgttgaaagtgaactaataaatatgggcaggatgtttgactcccactctttctagaatagctgggag

SEQ ID NO: 18943 - DNA, 201 bp, Bos taurus
tgtttgaaaaacccccttaaaatgccattaagaatataaccctgtaattttatattccattttttattggcttaggatattaaccttctaatagcaactgcatttttaatgtatattcaagtacactttagaataatttgtttcatttcagatataaactgttaaaaacaacataaatgatgttgggttttgtatatgtgt

SEQ ID NO: 18944 - DNA, 201 bp, Bos taurus
gttatcagtcagaaaaatattaaaatgcatgttaacctgttaacaatgatcttctcaagacataggataatgggtgatctttattatacttttctacattaaaaaaaatcagtgttactagtagcagtgataatattttaaaagtagttagaataaattggataggttactgatactgaaacagaaaagaagaacacagaa

SEQ ID NO: 18945 - DNA, 201 bp, Bos taurus
aagccaaaggtgatgaggccctgagtgctggcaacaaggatgatgcgccacagtgctgccctcaaacagtgagttaggtccccagaccgtgtgctctccagcaatcgctctgtgtccttcaccaagaaaggtgatcatcaaaaggctacaaggatggtgacaaaactgttgacttaaaacctgactggggcaagggctcta

SEQ ID NO: 18946 - DNA, 201 bp, Bos taurus
aggaggccacctagacccaaaaggcagagcctgcgggggctaccctaaattctttgaacaaaaactctttccttgaagcacatccggactaatatttccaattattggcctactgctgcccccctttctattaataatgagacaaattactgttgtttccttgttaatttttacctgtgcttctcacttatattcctgtgc

SEQ ID NO: 18947 - DNA, 201 bp, Bos taurus
aaatctccctaccaaagttagaacagcggtccaaaggctccacagaaaggcagcagaactccttattcctcctgctttccatttctagaaccatggattatctctgagggtatctgggattatttaatttacacctccatcttgttttcttaagtatttcaagtggttataaagcaacatagcagaaaattagtaaaggaa

SEQ ID NO: 18948 - DNA, 201 bp, Bos taurus
ctaatcattcattttgtaaattaatgaggcccaatatttaaaagatcaatttactaaactcctactaagagtgggagcgtgtgtggggacggatgtaaaccggcactgtcgcatagtctcagcagcacactgggacagctgatgaggctgcgctggattagtatacacatcgataccggtggaaggtctgatccgtcctcc

SEQ ID NO: 18949 - DNA, 201 bp, Bos taurus
actctaaacaggtaaagcccaagatggtctactgagtggtgtcttgtgaagggaggtgacaggcaggtattttgacaaggaatgttcacggaggtgaatacgatatcttgaagtcttcacatgagatgctgtaatagagaagttccaagaggaggtttatttgaagtctatattactaggcattcaacatcaaatttgaga

SEQ ID NO: 18950 - DNA, 201 bp, Bos taurus
ggagctgaggtctgtccagcagtcagctgtattccaggttggaaagaaacgaagacaaaaaaccatttgcacctcagaggcaccgtactcaccctcataattgacacctccggctccaccacggttgccatcactgtcctccccttgggtagcagccccctgggtcttgggagcagccattactcggctgaggaaaaaaaa

SEQ ID NO: 18951 - DNA, 201 bp, Bos taurus
ggtgctaaaatgtcaaactgttcccaagtgtgggccacgactgaggaggctagatagagaaaacacccttcagataaaggatctgctgagcttgtttattactcagccactggcttcatcgcttggatgcttgaatgagcatttattaagtaatctttggttgatagtgagctacttatatttggggagggagcaaagtaa

SEQ ID NO: 18952 - DNA, 201 bp, Bos taurus
tgcacacatccgcttcgagtttcggcattgttccagtaagtggatggagtgtctccgtggccttgttatgttgggtactgcttactaagctgaaacaacagtgtggcatagtctgtagaaagtgtgtcacaaaccagagacctccatgagaaagaaatggaggtgaatggaatcctgggaggtaaatggtgccattctcaa

SEQ ID NO: 18953 - DNA, 201 bp, Bos taurus
ctctccatggaaggatctaggtgtgaaagggttaagaccgatctctgtgacctttatagaaaggatgcataaaatgtatttttagggattgtgcttacttcgctttcttccaaattgagaatttgcccacttaacttcgttatacagtttttaaaatactctgtaacatgtgttcactaacatttggagggaacacggttg

SEQ ID NO: 18954 - DNA, 201 bp, Bos taurus
acccacaataaaagtcttggccaagaattcacacttattttgcagaattattctagagacaaatttgagtgttatagaattattttttaaaagtatcccagctagtcctagtttcagttcaatctcctgcagcacaggttgtagctatgagtaactgtcctaggcagtacctatgtgacaatacctatttcatgcaaagcg

SEQ ID NO: 18955 - DNA, 201 bp, Bos taurus
aaacatgcagattgtgttaaaacataagagaaagtgatagcttacagtgaaccatgtcagatttgtcatctccaaagacttagcttcgggaccagagaccgggcttgatcacttaaaggtttctgtgtagcagcattttattaaagtataaaaagggacaagagggctggagggctgcagtctgtggggtcccaaacagtg

SEQ ID NO: 18956 - DNA, 201 bp, Bos taurus
gccgtaccagtgtcctacaatgaatattttggttgaggtttagtcctgttgaaggctgctgttgtttcatgtctgatctaaggcttcttggcgataacttgtgtaatgaaatgttttcattaagagtgtgttcacagatctccctttctctgcttccttcagagatctgtctatagctgctatctgttactaccagatttc

SEQ ID NO: 18957 - DNA, 201 bp, Bos taurus
gagtcctgttagattttttcccactgcttcagtaactgctttccccactggtcctctatctgggtccccggattgtgaaatattgtcatcatgcatttcttttttgttttcttttatgctccagagttggaactgtgaaaggcagcttcatttattgtttagttgaatcagaatgactgcagttccacaaacaaattggac

SEQ ID NO: 18958 - DNA, 201 bp, Bos taurus
ttaagcatttcattttggttgattggtgttgaccatacaattgacaaatccaataatcaaaccaagtataatggcctcccataatgagagtgagtagtgataatcaagcagatagatgattaaactacattcatggtttataaataaaaccaacaattgtaactattataaattttagtctctttcagatatcaaaaaaat

SEQ ID NO: 18959 - DNA, 201 bp, Bos taurus
tgatctcatttgtaatataaaaaccatcaccaatgttatttcaatgtacaagtcattaacaaaagtagactccttttctctgtgtatcaatctagatccataagtaaattcagaaaatgagaactcggcacatattggccacatccagacctgtttgttttctgccacactgagttgtttgtttataccatctatcaaatc

SEQ ID NO: 18960 - DNA, 201 bp, Bos taurus
tagacatgacttagccactaaacagcaaaacaaactagttggaaattttcactctttgccttcagctccttcccctgatgcttccctatgccacacaagcatcccagtcagaattcccactcaaggaaaagacttaggaaaaagtccttttcaaacaacagtgaatgaaacctatattagcaactccactttctgacccaa

SEQ ID NO: 18961 - DNA, 201 bp, Bos taurus
aagaaaaatgtaggtgacatatcctcccttttttgctacagtagacataccaaatattttctctactatcatcagcgagtgtaaaaaagtatttagcccacgtaaaaagtaaattcttaagcagcagtttcagagagggcttaaacacagaagacttttcctgtgtgtgtgtgtgtgtgggcgtgggtgtgtgtgcgtggg

SEQ ID NO: 18962 - DNA, 201 bp, Bos taurus
ttttaattctcatagaaacacatatgtatgtaactggatatgtatttctttaatccagaactttggttttctgtaactccatattttcaatctgagatgcatcataaactttatattatcacaaatctaactcatttgtaatctatacacagcatttgtcagtttaaatgcattgtaatttctaagccatttatttattgt

SEQ ID NO: 18963 - DNA, 201 bp, Bos taurus
tggtggcttattagttctgtgttccttaccaggacctcctgtggtaaaacaactcatgcaaatgattactatggtgcctggccagggtgggcagtttgtcggtgtgcttcccctaacagtcccatggaaatcttattttgctgataccagtgtagagaaaggagttgttgttcccagtttctgcagggtgcgaataggcca

SEQ ID NO: 18964 - DNA, 201 bp, Bos taurus
cataaagtataatttacttagtagaaggcccctattcttaggatagatttatctttgcaataggttgaggctaggaaacaagtgatacattttgccttaagagaacatagagcgaagagcagagagaacattccagactttattgtatttaaaaaaaaaatcacttagtggtttccagtattgccttttgaagagtcaaca

SEQ ID NO: 18965 - DNA, 201 bp, Bos taurus
ttctatcaaacatcaacaaaaatcaaccataggtttacccatgcccctgccctcttgaacatcactccccatcccaccaacaacactaggttattcccgaaccctagtttgagttctctgagtcatacagcaaattcccaatggctatctattttacatatgataatatatgtttccatgttactctgtccatacatccca

SEQ ID NO: 18966 - DNA, 201 bp, Bos taurus
tctcaccatctggcaggaaagacagagtttaccatggccgagagtggctgcatctaccatggcagcagggctggcagtagctattgaaaccttcttgtcccgaatcctctcctaccaatggccctctaggttgtctcagtgctgtctgcccaatggtctaagcatggtttaaaacaatgtcaacaacagtaaagactttta

SEQ ID NO: 18967 - DNA, 201 bp, Bos taurus
ccactgtctttgatattctgcatagctcataccacatttatatcacactcatactacatgccaaatgtaaggctctattccacacagtcattcagggatcctggctggggaagtttctattatattgaaagtatttcatttacagtcttgctgcgcaatgtatgatctgcaaaccagcatcactggtatcattaggaattt

SEQ ID NO: 18968 - DNA, 201 bp, Bos taurus
atatatgaaactacagccgaccatggaaaacatcactcacccttagacggacactgctataagcactctgaggcctgagattaggaagagaggggaggcctaagcccctcgccatcccagttcagcaggaagtagccagaatgacctcgacacccctattcccaaagaattgggcctcatatctcttgagaagggaatgtc

SEQ ID NO: 18969 - DNA, 201 bp, Bos taurus
cagaatgtacgtgtttgaccttggtattttgaacactgccaagagcaatattctcttaaattttctcctcctaattagtacaagctgtctcttgctttttgtctctctacatttaagtggaaatatgagtcaaaaaaagacaaattgttctttgctcctttcctagctgccaccaagacaaatgatgctcctataggttat

SEQ ID NO: 18970 - DNA, 201 bp, Bos taurus
cacttatcagactgacaaaaattgatacttgcaataatacccagatttgaaaagacatagagaaattaacagaatcaaatattgttgagagtgatgtaaactttacataaaaaaaatttgaaaatgcacatatctatttcaaatcctaaaatatgatgctattaaagtgctatactcaatatgccagcaaatttgaaaaac

SEQ ID NO: 18971 - DNA, 201 bp, Bos taurus
ctgaagtaaaaatgggttttgtttttaatttagaaaatataaattcagtacaattaaaggttttttccatcaatttcattgtacttttaatctctaagattaatctctaaattttgtgttagagtcagataaaacaaactactaactctgtccattcctcttttcttagatatgtggtaacacactgtacatactattttc

SEQ ID NO: 18972 - DNA, 201 bp, Bos taurus
aatcaaaataagaacactgtactagaaaattttattttgtgggaatatatttaaatataaatcacttaaagatgacctgattattaaaatgtgtattatacctccaaaaacttgtatacacttgagtaggtagaaatgaaaatatggctaataatattttatcttatagttaactagataaataaatgttaagtagatata

SEQ ID NO: 18973 - DNA, 201 bp, Bos taurus
tggtcatttttctttcctgactacctggagtcttatcttcaaatgcccacatcaggactgtgcaacaattcaaaggaacacctatgcagatttgatagttccttttctgtgtatcttcctcttgtaaatgctttctactgtagttaacctacaccctaatctctgtctctgcagtctctcaaaaccagttttctgcatgaa

SEQ ID NO: 18974 - DNA, 201 bp, Bos taurus
aatacagctgttaaaatttgtaattttggcttctcttcatctttccttctattcatgaacaatttggactcaaaatcatgagacagggaagagaaaggtaggcattttaatatctgtatattgaaaactaaaattttgttccagtatcttcaaatctagtctaataccacagagtctattttactttatccctttccagtt

SEQ ID NO: 18975 - DNA, 201 bp, Bos taurus
agcattggaatctgtatttttatgtttcttaagcattgaaaatatgccctggttttcttatgccctggtctacacccagtgcttcctctcagacacttaagtgactttttgagtaattataaggaagcaaccagggtggctagccttcctttgtaagaagaatataaaataaaacagtcaatagctcttatttgagatctc

SEQ ID NO: 18976 - DNA, 201 bp, Bos taurus
aaggctttcaagtgtttaatgtgggtggctaggagaaaggttgttaattcttttatacttggtagcaataaattaccttgcaaagatctgttaccacttgctacccaaaatgataatatcttaaggatgtgcacagtccctcagttgtgtccgattctttgcaaccccatggactgtagcctgccaggcccctctgtgcat

SEQ ID NO: 18977 - DNA, 201 bp, Bos taurus
catcaccactgtagcctgttcagagcaacacacaggatccttaaggactctacatatgtgatatataagcactcgctttatgtgtattaagcaacctgaaaaactactgtaccttcttctgaaccctgcaccatctgacatcaactaacctcttatccagactccactgtagcaagatcactgaagggcaccattcactct

SEQ ID NO: 18978 - DNA, 201 bp, Bos taurus
tacctacagatggcagagtccactcaaggctactcctcctggttcagttttactcactctacattctctattaccatattatacttgattccttcagacatatccagcctatcttcctgcatctcttcttgtccttcttcaatccatatttaaagaaaacaattcagaatatgttacagccttgattaagctaagcaccac

SEQ ID NO: 18979 - DNA, 201 bp, Bos taurus
tatcagctgagagctgacttcacgggctgaccacttcatacagtgaaaaagcaggtaattaaatcttcaaatctgtaggaatccacagggactaaacagccacaagaaattttacatttgagacattttgagaatcaggtcaatgaataaacagatatttcagatttgattccagcatatatactgacacaaagaagcaaa

SEQ ID NO: 18980 - DNA, 201 bp, Bos taurus
aaatgcccaggtgacaaagctgtcagtagtgatgccgaggtttggatcagtcccatctgataccagtgttagggtggctcacatcacagcaggttgtgttcgagatgccagacaccacactgtctctttgaaaccagcagcaagctcagttactcttccttttctggtgtttccatcccattttattcagtagctctcctc

SEQ ID NO: 18981 - DNA, 201 bp, Bos taurus
aggacgttgtctgtggcccagctgcttatcccagtgatcttgtccagttctgcttgtactcatccctctaaagctctctcactcccgtctctccttgtgcggaactcctggcctatcacgctcacgcctccttgtgttttccagctttggagacatgctgtccttcaccctgacggcctttgtggagctgatggaccatgg

SEQ ID NO: 18982 - DNA, 201 bp, Bos taurus
ttagttgtcctgtcttcttaggctcctccaacccgtagtaatgtctcagtctttcctttgtgtagcaatcttgacacttttaaaagagatctagtgttgtgttttgcagaaagtgcctcagtttgtgtttttttctgatgttttctcatgattagactggagttatgatttttctttggggggggttatggtttttaagaa

SEQ ID NO: 18983 - DNA, 201 bp, Bos taurus
aaataacaaagagaaatggaaatctcttaagacttttctgacttcttgagaagagtctcaggattctgtctagtactgctctgttcaatctaatgctgtagatacaataagataaacagagaagtgtgggagagatggggagggagatgaaatgtcttcttgcatttcataacagattagtgaaacaccagctaccagagc

SEQ ID NO: 18984 - DNA, 201 bp, Bos taurus
aattcccattcctagtaagtggtcaagagggagttcacccaaatctttaaaacttgcgtttatgcagtatactttcctgcttctagtttggacaagtttagtttatagacattccggctctttgcttcttatcattttctctatttattcactggccacagaagccatttttctcatattcattttaatgttcagtgttta

SEQ ID NO: 18985 - DNA, 201 bp, Bos taurus
tctgtgtttttgccttttattaccaatatttcagagcatacattattcattgtcatgggtattagagaagagctaaagcacagctggatcccccgaaatgtaagtggccccatagtcatttcattgaagcctttacttttgagttgggggttaagaaggaggatgcaagtgacttggatatttcaggtatgggaatctcat

SEQ ID NO: 18986 - DNA, 201 bp, Bos taurus
tgggccttgaggtccgagttcatctccagttccaagagggcctgggagatgcccaattcagactcctccaacttctctatgttgggcttcatgatcttcatgctggaaatgaacatggcctgcacctggcagatgtggccaacacttgttgctgccactgacaccagtaggcctaggaagagcaaatcttagatttttaaa

SEQ ID NO: 18987 - DNA, 201 bp, Bos taurus
gaaaaaagcatgcagaaacattcttgagaataatcactcagtaaatcatgttggcctttcctgtgcctgggaagacagttttttcgaattgtgcaaaatatttctgaccttcagtttcacccactgcttttgcctctggctctcattagtaaacaccttggaagaatctcagaattgttaatggaaaaatgattaatagaa

SEQ ID NO: 18988 - DNA, 201 bp, Bos taurus
ccatataggccaagtaaaatgtcagagagaaaatcattctgttgagtggcgagtaggaataagcaaagttgggctggtactcaattttatctttactttttaaatttttatttaggcccttaattttatttttagaatggggttttgttaagtaaactcagcacagtcatatctaaacatgtctgtatttattttcacaaa

SEQ ID NO: 18989 - DNA, 201 bp, Bos taurus
ttaactataatagaaatttttgaaagagtgatttcaaaagtttctattttagtgttacatatgtcatatagagggatacatttccctccttttattagagaacatcattccaatttttaatactttctggaatttcaaagaatcattaaagaatggagatattgtgattccattgggactatttcttaggatttatctaca

SEQ ID NO: 18990 - DNA, 201 bp, Bos taurus
atttcaaatcattttattttgatagtgattttcaaaacttgcatgtgtgcaaagattgtgtgcacactttccaggaaggagacgctcccacaggtaaagaatggaggtagtgagtaatacttagatattgttggtagccagtgtgttggatacctgagatttggaggatatggccatgggtgttattttaacttttaaccc

SEQ ID NO: 18991 - DNA, 201 bp, Bos taurus
catacccacccttgacaactgccttctggaggtaactacagctactagctttcagcgatatttgatgtctttcttgtatttatacacatacatagagcatgttaatagagaaggtaattttcaggctctcgtgatgagtaagaagaggctccatcattcaaaagcacatattttggaagtacattaaatttgtataattta

SEQ ID NO: 18992 - DNA, 201 bp, Bos taurus
cactagcaccacctgggaaggattaatcatgcttggccttctaacaataagccaattacaaagttttctgggcatatttagactttcagatgttgatactgtgtaaggccatactgcctatggggcggcaatgcactcatttattgctctgtcctaataagtgctaagtgccttaaccatcttaaaggtcctggcctcctc

SEQ ID NO: 18993 - DNA, 201 bp, Bos taurus
ttgaagatacacttcatgaggctgcctaataaatcacagttttaacttcctctttgatccagaagttctaggcgaggtgtgcatataagtaagtacatgcatgctcagtcatgtccaactctttgtgaccccatggactatagcctgccaggctcctctgtctatgggatttcccaggcaagaacactggaacaagctgcc

SEQ ID NO: 18994 - DNA, 201 bp, Bos taurus
caaatattcctgacagtgattttaacaagttcagtatattcttatgaaagtagagaagctaactggattatacataacaaatgtctctctccagtaatattaaaaatataaattaaaaacaagtttaagatactaaactaacaaatgccctaggaaaataattggggaaggcagaagaggcttaacaatactcttttcata

SEQ ID NO: 18995 - DNA, 201 bp, Bos taurus
ctctttttgctgccttgggaagctggagatcatctgatattaatgctacataaatttcattctgttcaaattatcacccattccttttgtcttctttccaacctctgaagacttttcccaatttccttctgaggctagtgtttccatctctcctatcctctcctccctccctaggtccttcttgactttgagccccttcca

SEQ ID NO: 18996 - DNA, 201 bp, Bos taurus
tgagtttgaattgagatctcaaaatccgttcttttcctaatactgtagcttataatccaaaccaattgaaaattcagttgatggttgtgtggtttgttaccgtgtctaagcactgattttccagatatttaaattaaattactgatatttaaactgaattttttcagtattttttttagtggagaaaatgtcaagtcttat

SEQ ID NO: 18997 - DNA, 201 bp, Bos taurus
attgagaggcaaggagtgtgggtgctcctctaaagaaacttatttgtgagagggagtgatgatccagataagggatagctggctagtctaccttgccaaaaacaagtaagtcagtatgtggaagagaagaccctggaattgttcttagaggaagtcagcatggcacagactgaaggtatagtaggtgtatgaatgagaggt

SEQ ID NO: 18998 - DNA, 201 bp, Bos taurus
taaaaaagagaaaaaaaataggcatgaaaatccattgtgattgaaaatgtgttttgcagcagagagttatggttcctggggaactggcctttagtgactccttcttattaataagtatccacattgatagctgtccattcttaacccttgccatctttatcttttctatttctcccagattatttctccatctcagtcata

SEQ ID NO: 18999 - DNA, 201 bp, Bos taurus
tagtttattggtacaacggaaactgaaacagagccctgtagatcttaggctggtttctttccactacactaagcatgaactgtggcatttgggttggcaccacactccatgggcctactttccaaggacaaccgccacagtattccatctcactgctcttctccaatgtgaccttggttaattaccctcctcttgcatctg

SEQ ID NO: 19000 - DNA, 201 bp, Bos taurus
tattctaaaaaggcaacactatagtgtggaaggaagatcagtacttacctaggctgatgtttcagggaggggattgactataaaagagtacaagggaactcgttgagatgatggaaattttctgtcttatgattatgatggtgttcacacacatacacgtttacccatgcttatgaaaatttacacataaactgggtgaat

SEQ ID NO: 19001 - DNA, 201 bp, Bos taurus
cacattttgcattctcagatattcagaaacttctgaaaagatttaatttgggttcatgtatttatgtttcgatctctaactatatttttgccaagttggaagtagatttagatctttatagatactatgctttggaagtttgttatgtatctggaaagaaatcagatttggttgagaagtatttagttggttcatcaaaaa

SEQ ID NO: 19002 - DNA, 201 bp, Bos taurus
cagaagtgaccctcagattctgttacggataaactgaatagcttcacctgggaattctcactgagttgcctggatgagatgcaccagtgtgatgacagtgagtttcctcaggtcaagaggcggggctacacctggcaactggctttcctaagcatcagacctctacaccatactggcccgtactcaggtggtccttttcct

SEQ ID NO: 19003 - DNA, 201 bp, Bos taurus
cgtagagtttgtgaactatttcagaatatagttggggattaaatgccccctagtggtcatgtgaggcaaaaattcaagccagatgcttaatacagaacggaggtagtaagtgaatttggaatttttcaatgactatagtgtgttttcaactcagttacatagttgtgggcttatgattaattaatttgcttttaacctaaa

SEQ ID NO: 19004 - DNA, 201 bp, Bos taurus
ttgcagacatttattttaaaatatgtcctcatctcaccaaatctcatcaaataaaccaaataaagaaggcaaggaaatttcaaagcgagagaacattaactcaaaaccagaggaggggagggaatgaaactgtaggataagagctaacaaataaatagctgttggggtgggataccataatcactgatttgaaacataaat

SEQ ID NO: 19005 - DNA, 201 bp, Bos taurus
tcgatgcaccctagacaaaacaaagaagtaaatgacactctatttatgggtcagtttattctttactgctataaatagcttgtcctttgagcattatcatgggtgtttactctatatcacatgtgagtgtgttactttttgcccttcaacatctggaaattctgataagcataagcataaatggacctccagatttgagag

SEQ ID NO: 19006 - DNA, 201 bp, Bos taurus
tctatttagagcttaatcagcaaaatgaaaatgaaatcattaaaaggtcaatagggtcagtgcagtttcacactaattgccgaaaacttttgtctctttcaaggtggagaattttagaaaagagagaaaatataggagcctctggattccaggggtctttctaactaacattcccactgactcacatcctgaaacgagatc

SEQ ID NO: 19007 - DNA, 201 bp, Bos taurus
gattaaactcatgaatgatttggcttgaactcttgaaagagatcaaaattgtgtagcatagcagtgtttacaggtttatagatctgcctgggccatctgatgcccttgaccatgatttattattacaggacagagattatctcagactgggctggaaatggatcttggctgagttatttactcaccggatgcaatgtgtga

SEQ ID NO: 19008 - DNA, 201 bp, Bos taurus
tcatattataatctgtcacttagacaaacacccatgccttttgcaaatcagggaaagtaaattatgtacttcttgggcaactagtaataactaggcatggagttaaagaatactgatcattaagtgttgaaatttagaggaaaacaaattagaaatttgaactgaagtgtgcagaatactacaaatcttaaagaaaataaa

SEQ ID NO: 19009 - DNA, 201 bp, Bos taurus
cacacagagccagaataaatgagtaagccctggggagcagggtagggagcagtcactccagaggaaggattcactcactcacaggatggaaaggatggagcgtgcaagggagggagggctcactgggaggaattctgcatctgtgggcacagtaccagaggctctggggttgatatctaactccaacatttacaatgagaa

SEQ ID NO: 19010 - DNA, 201 bp, Bos taurus
gcctatcttgcctccatatctatgtatctacctctattttgttctgttcgggcagtttcattttttttacatttaaatctcctacccatctgaaatgtatcgtggcacatgttatggcctagggaatctacttttcctccaaatggtcggtctgctcccagcgacatttttcaattaattctccgagtcctttctgcattg

SEQ ID NO: 19011 - DNA, 201 bp, Bos taurus
tggagtgcctcagcttggacccctgcttaacctcccaacagtatcctcagaagctgagcgtgtactagtgtccccgtgtgtgcagtagtaggctcagaccccaaggccaaaacagccagtctcattttgcaaaatgacctgctatgtaacaactgtattgcacagcaaacaccaccagcctggccaagggaaaggagccca

SEQ ID NO: 19012 - DNA, 201 bp, Bos taurus
acaggtttctgactgttgaaaaaaagaaactcttgacatagttactttctttcaacattatgaaagttgaaataaaggtgaaagttctttgacaaagtcaagacttttcttccaaaattctagaataaggtatagaaattgtggtgagcaactggaaaagcctcattcattggaaaccagatccttcccatgtaagaatca

SEQ ID NO: 19013 - DNA, 201 bp, Bos taurus
gcctttgatactcaaatgggcaagaatgaagaaactaataaaaatgaattacagatggtaataacaaccctttccttgtctaatgtagaatcaacattcagattttctccttaatgctagtttcctaaaatatgagctttttccaagaagaaaattcaagaaaatagggatatatatatttatatatgtgtttatgtataa

SEQ ID NO: 19014 - DNA, 201 bp, Bos taurus
acagatgacaaaaaaataaagccgactggcactttggaccagaaggaagctcggtgactccttggaagcatgggtttcctctgagagctctgggacttccagttggagtcctcagttctccatatatgggtatcaacaagtcacagcctaatggaaaggcattcttcccctccacttgtgacacaggcagtaagagccctg

SEQ ID NO: 19015 - DNA, 201 bp, Bos taurus
ctcaggcctacttaaaacactcagttctcagacgaaagcactgtgtggccaagcaaagcactcatctttaccagtgagatgtccacagacggccacatccatgctggctgctacggctcacagagccagtgactggaggaagctactgtttccatgctgccgctgggcggagcccagaatccaaacctgaagcgcaggccc

SEQ ID NO: 19016 - DNA, 201 bp, Bos taurus
accaaaggcaacacagaaattttgaacagatccaggaaattcttaggacaattgaggaaatctgaatgtaggctggatagaaggtggtattatggaattaatgttaaatctcttagctgtggtaaaggtcaaatccgaagtcatcccaggaatgatcttatttttagaaaatgtcagctgaagtatttacagataaagcgt

SEQ ID NO: 19017 - DNA, 201 bp, Bos taurus
tccagccagggcctccgcttggctgaacccacaggaagctagagggcaaatgtcaacggatacatggagaaaacagcagcggggcagagaaggtgggagatgaagtgtgggtaatggccactggaggaaaagcagcatagtccacctgctgttctgtgccagaaccacagtgttctaattattgcggctttgggaagatcc

SEQ ID NO: 19018 - DNA, 201 bp, Bos taurus
tttttcatttcatagcacagttttttgatgaccaggccagcttctcaaatcgtttttgggtttctttaatgagcagtcagtggcagggagcatgcacacatagagcaggtgtgatgataaaataatcagactcattttgtgggtggttatgggaatcattctcattgttttatagtcacaagctacattgtgcacagtata

SEQ ID NO: 19019 - DNA, 201 bp, Bos taurus
gggatgtgtgttgtctgagaaggggtgtttgtagcaggaaaccctgggcgttggagtcacacgaagacgtactgtgctggccaagcaagtcagttagctttgctgagcctcagtttccttctcagagtaaatggggctggggtgaaccttcctcctgggtggacccggccaggggagtgaagttccatgcatagtgcctgc

SEQ ID NO: 19020 - DNA, 201 bp, Bos taurus
gagtgctgtagaatgccttgctgtttccaagtcatgctttctttagggaaggggagatgtccttagatttcacttacagtatagctcaatattcatggaagtatttctttttcttttaaaattgatcaggggagaaaagtttggggactcagatcacagatttttaatcaaaggaagagttgttctctggaaaatgcttgc

SEQ ID NO: 19021 - DNA, 201 bp, Bos taurus
ggataatgtagatccaaattctatcttctttcgccagcatgaccctatttgagaggttcagcactgtcgggaagagcgggaaatcagaagaacattgagactcaactcttgtccacaaaatgtttataatctacttcttccaggggttggcatactctttctataaaggatcagatagtgaatgttatacgttgctgccat

SEQ ID NO: 19022 - DNA, 201 bp, Bos taurus
atctgagaaaactggctctcacagtacaggacttgagaaagaggaggctgccctaggcgggtgaactgtgtgaggttcagaagtccctggacaaggcaagactccctggtgattagtcataaaactgacacatgattgctcctcaagacagcagctagtatctatgggggaaaacatcactattttaaatcagtgtgagtg

SEQ ID NO: 19023 - DNA, 201 bp, Bos taurus
gtctgtgctaagaaaaggtgatactctctttctggattttaaggcatttataaactgatcacaccttatttgacagaaaaatatctccctttgctcctagcatgagaccttctctctagttgtaccatcttctgcatgctttcctgcacaaattcagtttacttctgcttctatgcctttgttcaagctcctattggttcc

SEQ ID NO: 19024 - DNA, 201 bp, Bos taurus
agttaaagctgaattagttcactgtctaaggaattaggcaataaagtaaatcaaaatgacaattgagttactaagtttagaggggtaaaagtatagggctttatgggatttcatagttagaaccctcagctcatcattgacggtttggaaaaaaccatcctggaaaatacagggtctaagcttgattctaggggagaatac

SEQ ID NO: 19025 - DNA, 201 bp, Bos taurus
aggtacttactctcataggatgactgccttttgttccatcctcagtgctccacatcagaggactgaagatggtatttacccctcttaccaaacaattcctcgttatgtaactgagtgaaaagaatactgattttttgataagaacatgtaggacaaaaacattactttagtcccacattccttaactttttatagtaggcc

SEQ ID NO: 19026 - DNA, 201 bp, Bos taurus
cctaccccttgaccgtttgcagttgaagtgggaaccatctggtctgctgacggaaaggagtgatgctcggaggtcatttaaagaatctgagggagaactcagatcccttagtttctgcagagcttgtgtcccctggagaggagtgctgacttactttcctcagagcttcaggccccttcctgaggggaagcccagggaagg

SEQ ID NO: 19027 - DNA, 201 bp, Bos taurus
ctttaaaatgtgacacgtggaccccactgcagagctctcgattgaattggtccagggagggacccggaaaacaggtattgctaacaatgctccatgggtggtactgacatgcacaacacccaaacgtggcctccttcagagctgcccagtggcagagtaaacacacccaaatttacaccattgagggctctggagcaagtc

SEQ ID NO: 19028 - DNA, 201 bp, Bos taurus
agcaggcaaagcaaaacagtctggtcttcattccttactcttctccattgttacgtgcttggcctgagcctgcaaaggctcccgtgccagtctggggtccagggacatttgtgacactggaaccctggaatcaggactctagcctctgggtgcagcaggcacatgaccccctgaggtcctgctgtgaacccaggaactcaa

SEQ ID NO: 19029 - DNA, 201 bp, Bos taurus
actttagcattaataaacatatatttataaattctagactgtaaggaagttgactgttcttctctagtgaaaatcctacatgtttttttctagagcgaatgatgttttggttttcagatcttttctaggctgtattgtttattctttgtgtgtatttaactgactttcaaaatcacaacctgtactttatgatttttgaac

SEQ ID NO: 19030 - DNA, 201 bp, Bos taurus
ctacagtcataataagcaaataaaaagtttctactgctgctgcagtacagtctgtcaagcaatgtaactaaagtacatttctgtttatcatgtatactattcgccatatataaaagttggcactggatctgctaaagctccaatactttggccacctgatgcaaagagctgactctttggaaaaagaccccaatgctggga

SEQ ID NO: 19031 - DNA, 201 bp, Bos taurus
cctggtgacctccaaacctgctgtgtcctgggcctttgatggcacaacacgcccagctgctgctccaattgttctccaggaacagatggccactcaattcaagagacccaaaaaggccagaggactgctgcctgtcctacaattcatctccttcatccacaacagtgttcatcccaaactgaaggactgtggggtctccaa

SEQ ID NO: 19032 - DNA, 201 bp, Bos taurus
aatttcaaaaaagaatgacatgacaccaaatcatttacagtcacaaaagaatttctgcatattttgtattctttatttaattctgaggaacttgactttagtcatacaagtaaatcttaacattttggccttttggaaaagtcaaaaagaaatttagaatgttgcaggaaaaaatattagtctgtacttacgtaagaacgt

SEQ ID NO: 19033 - DNA, 201 bp, Bos taurus
tatttctctctctctctctttttttttttttttttttcatctgggcttccacattaattgaatggattcatttggtgccatttttgttccctctagaattctggtcatgaaaattaagaatcataactctcatatctcacacagtctgtgagtaatggcaggatgctttattgctctgacctttccagttttctaagtttt

SEQ ID NO: 19034 - DNA, 201 bp, Bos taurus
ttaccaagtctggctggcctggagcctaaggaagggtctttctcattgttattttaagcttaattattcacgaaagccattcccaggtcttcatctcaacaaatagccacagatgatgggccatcttcaattttcaggctgaaaacttgacatccccacctagatttccaagtgtttgctgtactctcaccaattcagctt

SEQ ID NO: 19035 - DNA, 201 bp, Bos taurus
tgtatagctgagtgtagtgcttaggtcagaagtaaagacatatatcttagcttctccacagaaaggatacggtagtgcttgcacaacagggaggcagagttaagtcatttagacaaatgaatcacccagagacacgccagtcaaaagacaactcatagtcctcaaggttccaggagtttccaaaagtcagtggtgagagta

SEQ ID NO: 19036 - DNA, 201 bp, Bos taurus
tttggcctcactggtgaggagaattctacaaatgtaactggctattagtgaactaggtccgccccaggatagtaagtaccctatccttagaaatagtaaaatcttggccaagtgaggattttcagttgataaatgtcaaaactgatacagaaatacttgctaagcttcatcagtactgacacaaaaatgtcacaataccat

SEQ ID NO: 19037 - DNA, 201 bp, Bos taurus
tgtttgcacctttataaatccatactgaatatttatctgatgtcttggatttgctttcaaataatccaatatgtggagggagactaataaattgattggaggtatagaagcagggtgatagatacgtggggttcattaagcaattctatttacttttgtatatgcttaaaattttccataataaaaagtaaacaaatgagg

SEQ ID NO: 19038 - DNA, 201 bp, Bos taurus
catttattatttatttatttggctgcaccggatcttagttacagcatgcgttccctgacaagggatcgaacccaggtcccctgcattgggagtgcagagtcttcgccagtggaccatcaaagaagtcccttgagtctagaaagataagcaggagttaggcaaagaagaaagagaaggagatttcttaagaaggaatgccca

SEQ ID NO: 19039 - DNA, 201 bp, Bos taurus
gtggccggagctgggattttaacccaagtcgtccagccaaacgtaagattctgtttgtgaggttaacactgaacccccagggccgaggactacgtccccttacaccgcagataaaccaactgcagtgcctcggctaagactgaaagacccggcagtggccaccctcctcaggctggatggatggatgctgcttccgccact

SEQ ID NO: 19040 - DNA, 201 bp, Bos taurus
ccaccgcctctcaatgtggtctctcccagatgtatagacgtggtggcacttccaaaaggacatgatccttgtgtgtgcaggggaggagagggaggtgttcggtctggggccccggcggatgggccattctcagtgtccactaggagactaagcagtgctgctctgaaggcacaagggactgcagcccctcattctaactga

SEQ ID NO: 19041 - DNA, 201 bp, Bos taurus
atatgatggaatattgtcatccttaaaaggggaatgaaattctgatatatgccacatgccacaacatggataaactttgaagacattagactaagcaaaacacatcagatacagaaagacaaatattgtattattccatttaaatgaagtaactagaatagtcaaatttatagagacagaaagtaaaatagtggttaccag

SEQ ID NO: 19042 - DNA, 201 bp, Bos taurus
aattttacaactccagatgctggaatactaatgctatgtttcaaaattctggggtgtagctctagccttattcatagtaaaatgcaatcagacataagacagatctttggggacggttatacaaagggagttcagccactaaaatagaaaagtgttctggccactgggtgtttttcatgtattgaacttgaggacaacaca

SEQ ID NO: 19043 - DNA, 201 bp, Bos taurus
catggggcaaccactttcaattctttctttttcctcatatgtattaataataaatatagaaggagagagagaactaggaaatgtctgtcatgcatgtgtgtgggctaagttgcttcagtcatgtcccagtctttgcaaccctatggactgtaacctgccagactttcctgcccatgggattcttcagacaagaatactgga

SEQ ID NO: 19044 - DNA, 201 bp, Bos taurus
ccatggactgcagcctaccaggctcttccgtccatgggattttccaggcaaaagtactggagtggggtgccattgccttctctgaggcttacagtttcctataacatagtttataaaaggtattatactctttttcgcctttgaaactgttatatagtgagttcaatccaccataatgaaccacaatgtattatatccacc

SEQ ID NO: 19045 - DNA, 201 bp, Bos taurus
cttatgattcttatcatcatttctattggtactgaaggcaattaatctggttctcctgtgaagccgtaaactccagaaaggctgtaatatgtctgcctcaacactctatttctgacatttgggacagagcccagtacgtcactcggttactgttgaatgagtgaatccagggagcctgtctgtaaacatgctaattgagat

SEQ ID NO: 19046 - DNA, 201 bp, Bos taurus
atttgttcttccctattgaaatttggttacacagggcttttgatattctgatagtctttagtcatagcatttgctaaaggagagctattaaatgcagggagataataagcaagtcttgttttgagcattcactgtatacccccaatttgactataaatccctaattattctaactttatttttgttttaattctccaccct

SEQ ID NO: 19047 - DNA, 201 bp, Bos taurus
agccttgtgattgtctatccacaaataatcctggttcgtttggtcattttttctgcttcaagttcattaacatcattgacacccctgtttatagttttcattaaatgcagcccacaggccagctggtaatgaggggaagctgttttctcctagaatgtttaattagctctttcagcctgggaaagtatgggcaaaaagaca

SEQ ID NO: 19048 - DNA, 201 bp, Bos taurus
gaaatctattgtcctttgaacatttttgtaagtaatgggccatttctctcttgctgatcctaggacttttctgtgtttttagttttcaaagtttgaatatgatgcattttggtatttggcctttttagttcattcagcttattgagtctttggctgtattatgtcttggacaaaactgaaaagttttaatccatttttttc

SEQ ID NO: 19049 - DNA, 201 bp, Bos taurus
aaaaaactttattgggaagatgaaaggcagagatctatcttctgtaacttcttcagcctgacgaggggctatctagttgcggtcattgagctctggccctgtctcattaaaggggctcccaggtgacttctgttgttattgcaacaggatctgttgtggggagtgactggagtccctgcatcacctttgccctgtgatgtt

SEQ ID NO: 19050 - DNA, 201 bp, Bos taurus
tataaatagtgttctgttctcatagccaggatataattaatgtgaaagaaaacccattcattactcatgccaaatcaattatatcagttgtgtttcaacatgtggtagagttcattctgaataccatagtctcaggaggaatacatttgtgtagctattctgaaattggagtttcaggcataaatttgtatgttcagttta

SEQ ID NO: 19051 - DNA, 201 bp, Bos taurus
ctaacagtgcagaactggtgctactctgaaagatggaaagaaatgtgttctacttaatgagttctccatcccctctaagataaccaagagaatcagtgatgacattgaaatctagagtctatgaatgagttttatccttttaggcttctgaggcaaaattagctgaaaacacttttttttcatagaataaaatgatactag

SEQ ID NO: 19052 - DNA, 201 bp, Bos taurus
actgctaattatagccttctttgtggatgcagatctctggctaattaaaatttgttatttttaaacaattctatctccttggcctttttcctttagatacgtaggtttagttgctcagtcgtattcaactctttgtgaccccatggactgtagctggccacgctcctctctccatgggattctcagccaagaatactggag

SEQ ID NO: 19053 - DNA, 201 bp, Bos taurus
aataaatgtgtaagatgtctgctcttttgtaatacggttactgaagtgaaggtatctctctccgtgttagtgttggacctggtgggattgagatccttgttgaagtgagatgagtcttgttgggagggaaaaaggggcatgtcaaaggtcaccagaagagcagagaaatcagttcatttgagaatgttgctgtcttgactg

SEQ ID NO: 19054 - DNA, 201 bp, Bos taurus
gttggcagggctggctccttctgaaggctcaaggggagacgccattccttgcctttgtcagcttctattagcagccagcattccttggcttcctgggcccgtcccaagaggtagcaaaggaccacccctctcacctctacttttgtcatcacttctctgaccctctcctgcctctcctttccttataaggaccctgtgatt

SEQ ID NO: 19055 - DNA, 201 bp, Bos taurus
ttttgttcaggttatgtttatgactacatcagaattatattcaatctttttatttctgttttttaaaagtctctattgtttgaaaatgaactcattacaatggtatctattttaacaggagatggtcacaaatcatacttagagtcttgattttataaggcagtcatttaggaaaaaaacctactgattaatacaatattt

SEQ ID NO: 19056 - DNA, 201 bp, Bos taurus
ccatctgggctccttcagccacactctcctttggatggtaatgtttagggatacttctttgccctaaccccatccttcaagttcaagagtaagaagcatgtcatgcaaaagtcataaatgaatcttagaaggaggttgaagaatctcattattctcagacgtttctcaggccatcaaagggtgtctcaaacaagtttgtta

SEQ ID NO: 19057 - DNA, 201 bp, Bos taurus
tatcctgacatgaggataactgggtttgtactaatctaccacagtcttggtcccttggccataacaatcttccatgtgggagtaaagagctggtctgggagggaccacaccagtgacttgagtccctagaatcatctgtttggtgcaggcctctgggccacgtctgacaaataatagctgtctggtatacaaagggctttt

SEQ ID NO: 19058 - DNA, 201 bp, Bos taurus
cccactggcaggattgttcagacctcttggcctgctgattatggaggcagctcatttcttaggatataggatacccagcattcatatattcatactgcttttcatttcacattaaaaatgtcagcctccaaatgaacacactcactttctagcttaatggaggatcccgaagacttcatccaaaaaatcaagtagataatc

SEQ ID NO: 19059 - DNA, 201 bp, Bos taurus
tctctttgccctggtttatcaaataacccttgcaagctgcatatcatggaatagggggcatgagtcatgggagatggaaagattaagtttggcagttaatgatctacctacctacataccttttcctggtgaaagcagcctcatttttccagtgttgggtcatttaaagttcaatcgctctgaatccaagactcctccttg

SEQ ID NO: 19060 - DNA, 201 bp, Bos taurus
atctttcccttccaacctcaatgttctaagagctctgagaagtccacagtggttccaggtagaagagatcggaaagaggcccaagcaggaggcacagatcaggataaagtttggtaattggggtgaacatcctgagaaccagtcaaatcaagctggtccctctgtaggcattcagatagactctggccagggggcagaaga

SEQ ID NO: 19061 - DNA, 201 bp, Bos taurus
caccccagagccccatgcaggggggtctcagggagaagagtcccagggcctgcaggacagctgcctggcctcccatcccgactctgcctcttccagggccgttagttaagctctgtctcaatcccaccctgtctatcagggtgataaccacaccaacctcctcagcagggtgttctgagaaggggacaaacacctcaggcc

SEQ ID NO: 19062 - DNA, 201 bp, Bos taurus
ggatatgatcctgggtgttctgtgagaccctgggtgtcggggtgtgaccctgagtataaagtgagtttgaccctgggtgcgaagggaagaaatggcctcccgggctcccctggcagctgtgttgcctttttgccctgggggcaggcttgcccctgaggcactgggcggtggccatccacctgctggcagggaggaggaagc

SEQ ID NO: 19063 - DNA, 201 bp, Bos taurus
taccaccagctgctcctgtgggctttctctctggaatcaggctgacgcctcccttctctgaagctgggaacgactttttgcctcctggaaagatgggcctacctgatgacacctctttctccatggcacgttgtaaattcagccttctactccctcaggcagccagggacagctgtctctgctcctgaactgctctgctct

SEQ ID NO: 19064 - DNA, 201 bp, Bos taurus
tggggtggcttgaatcccagggcctgagttctggctgtagagtgagcctaagagtggagtcgcccttctgcccctaaagtgggctggtgcacttgtctttggggggttttctgattttggccccaccaccaccacccccttccctagctagtgttccctttctgtccagaaaggaacagaatgccaccttgcgtgttgttg

SEQ ID NO: 19065 - DNA, 201 bp, Bos taurus
gctgtctcttggctcatctccccctttctctgtccctgacacggccacactacctgataccctctcatcaccaggcccctggactgcccttacacaagggcgcagccagcctccagtcgaccgtgctgtgatcgaacacttgcaacaccatactgaccttcaggccctgttgtaccaggtcagggagtacccacgctgttg

SEQ ID NO: 19066 - DNA, 201 bp, Bos taurus
gttaccagtagtctttggaccaaggatacctgaggctgagagcagtttatctacatgaaatgttggcataaatctgtaaacttgacaagttagcattttcatgtcctattacttggcctaagggttttgtttttggtggtgcagtctctctatattttgctggtttatcaggaccttcctcttagtagaaggagtaatgtt

SEQ ID NO: 19067 - DNA, 201 bp, Bos taurus
gcactctaggctcacttaggggctttgaaaatacagctttgcagtaacacaaaccactgttttaaatcacttctcagccagttactcttctggttaacttgagaaagcaagtgaaacaagctcagtctgagccttgtgggggagacacgtggtagaacttattttgggatgcaaaccttcgccacagcatgctggaaagac

SEQ ID NO: 19068 - DNA, 201 bp, Bos taurus
tctcattcaatttctctttctttttacatagggggaaaaaccctcaaatctttttttacttacactagtaagtaaaagtgatactctacttacaaagtccttagtggtttctgttcaactttccccagtccgtcatttttaatttatatgaaaggaaaaggaatgccatttgtaagatttcagttagcctcatctgatgaa

SEQ ID NO: 19069 - DNA, 201 bp, Bos taurus
acttaagacgagggttaccttgaagatagtggcggagaccactctgcagaggtgatacatcatctgagatttgacaccaaatgaaccaaatgaaccaagacggagatgctttcctaggcagaagcagagcacagttgaaggctctgagatgggaactggaaatgtataatttcttcttatacattaagtagtaatttaaaa

SEQ ID NO: 19070 - DNA, 201 bp, Bos taurus
attttgcttctctcaaaatgcttgaattttgattggggttgcattgaatcttccatcaattttagggtatgctgaaatttttaccatgttggaagtgtatattcttcctttttaagtctttattagcctcaacaatgttttagatactgtgaaggacttttgaataccttttgttatgtttattcctgtgtatcagatgtt

SEQ ID NO: 19071 - DNA, 201 bp, Bos taurus
ggggggaggcggggttgcagagagaaggagctgcagccagccaacattggagttgaggtctcagagttgtcaaagtgtggcccaagaatccacacttcgagtcacctaagtttcatgttaaaggcagattcctgtgtcccatgtgacatttacaaagcagaatctttgaaggttagtgtggtctgaccttgagggccggag

SEQ ID NO: 19072 - DNA, 201 bp, Bos taurus
ctctttatttggagatcttagataggaaattaagtttcatttgataagcttcaaaaactccctctaattaggcagtatgatttccatcaattctattaatctttcatggcacatagacaaaaaccctaaacatagaaggaaataaaaccatattagagcaacagaaggggttgactaggtgcagaaggtcattagagaaaa

SEQ ID NO: 19073 - DNA, 201 bp, Bos taurus
tatagtaatctttgatggcaatcactgtactgttcagtaacgttctggatctggcaattttcgtcagtggcatttttaggcctctgtcatatcccatgtgtgtgatacccctgtttttacagtaagagccagcagtgcttctagatggcaaccaactttcccatcacattttcactctcaagtaaagtgtgtgtgcatgtg

SEQ ID NO: 19074 - DNA, 201 bp, Bos taurus
tttgacatggataccataccacaagcctggtatcttaggatggccctagtatgaagatgaatgtagtattcttaagccaatggactttaatgatttctggccccactgacaaaatcaaagtcatcatcttatggagtagacatagcaagatatcttggtttggcactccattgaatgtttaatgcatccaacatggttttt

SEQ ID NO: 19075 - DNA, 201 bp, Bos taurus
agcaagatgtaagaggacaagaaagaaaatacaagttaagggattatggcttaaaaatcccatctctcagtgaagtcttccctaactcattcagaagaggtcatttcccctctatctctgtccattagtagcatggaaggttgtggaaggaaagaacttgtccaatttgttcagtgctctctccctaggagctggaacatt

SEQ ID NO: 19076 - DNA, 201 bp, Bos taurus
tactactagactacatcctcttttaaggagcaaacaccaaatgtaattcatttcagtgtccttccatagcccttagcaaaacacacaggtagtggccttttattaaataaacaagcacaccatacctttataggcatttttcatttgacttgctctttatattaaccaaggcacagagaaagcagatggaagatgaagagg

SEQ ID NO: 19077 - DNA, 201 bp, Bos taurus
gtctaaaactgaactcattgtctttctgtcccaaacctggtcttcttcctgtattctcaatatcagatggtagaacgactgtgccctccgtgttttgacataaactgcagcagagaagttgagtatgggcgatgaattgataaacaaaatagattatatacatctatatgatggaatatctttcagccataaaaagaatga

SEQ ID NO: 19078 - DNA, 201 bp, Bos taurus
gatctggaagtccattctatatggctaagtgcaaaatattgctgaggcatgaatctgagttaccaaactgccaggtagtgtggctcagagccagttacttcgtgactagactcagcttgttgcccagtctctacttcttatagtagcccttcctgtcctttctatgttgttgtgtgtgagaaagcttggaggcatatcctt

SEQ ID NO: 19079 - DNA, 201 bp, Bos taurus
taatagactccctctgacttgaagcaactccgtgtgtctctgcttctcacactaaaggagccaagctagcatggcaacttattttataaaccgtgattctcccatttgacaacttctggtcatgcaagagctgcactcttttttgaaggaagggtgcacagaagattattgtttgatgggtattaggctgttggaatattt

SEQ ID NO: 19080 - DNA, 201 bp, Bos taurus
ccctgaaactttgcttcctacataaaccttccattgcctttatggtgaaagcaactttaaaccacattcaacattcagagcacttgtccactatagagaataggggtcagtggataacaccctataggacacagagacacagtgggttaccttgtagattttgcaatggcagagtcataatgcctccggctgcagctgctg

SEQ ID NO: 19081 - DNA, 201 bp, Bos taurus
ttatttttggatctgtgtcagagctcatattatacaaatatgtctacgaaacatgacttggactcagatgataatagcaaagttttaagtccaaatactttaaaaactcaacttctcgagcttacatttggctttacaatggtagttagtctctgaatttaaatagaaaacagagccaaccattaactacaatggtgaaaa

SEQ ID NO: 19082 - DNA, 201 bp, Bos taurus
taatttttaattttaattttctatggcagagaacttgatttttgagtttttttgggagaattttatgtgtgtggtctagtttttgatcagctttttaaaacagtctatagatacataaaaacaaagtattttctctgtttgcatgagaaccttgaaattaaacacttgaaattaaaatagaaatttgtgtcattatttact

SEQ ID NO: 19083 - DNA, 201 bp, Bos taurus
atctagggagagatttctctttttcagccctaccaaggcctaccaagacctaccaattatttctgcaataaaatatgcctttatcaagagatgatgctaacgggattgccctggcaggccagtggttaagacttcaccttccaatgcaagagatgcaagtctgatccctggttgccaagctaagatctcacatgcttcatg

SEQ ID NO: 19084 - DNA, 201 bp, Bos taurus
tagactttcatcccagctcctcaactgctaatagctacagccctgggatcacattattaaagtgtagttcatctgtactacaatttccgtgaaatagaccatctgcgggtaccaacaacatcacattacagacattttactactatggttagtggttaagtaccatttttttcccctcttgagagcagacctttaagaata

SEQ ID NO: 19085 - DNA, 201 bp, Bos taurus
caggggtctagcctgaacccctgtggtgggagcactgagtccaagatgctggaataatagagatcttcaggtcccaaggaatattaattggtatgtgtgctcccagaggtcctcatctcagtaccaagacctggctctgcccaactgcctgcagactccagggctagatgcctcaggctgaacaaccagcaagacaggaac

SEQ ID NO: 19086 - DNA, 201 bp, Bos taurus
ggtaaccaggtaaaaggtggagtctgtgatgcctgcaaatgaagagttaaatgtttaaaattcatattatattggtgttaataatggagctagagagactcatgtttcatgattattagtggttttcagtctgggtgatggagtaagggttatactgacactggaggatgagatttttaattaccaattgtgaatgagtta

SEQ ID NO: 19087 - DNA, 201 bp, Bos taurus
ccttttgtgcagacttggttgtctggttttcattcttttgccatatgtatttatcgtttttgttactgtattacttttgccttcatcctcacatcacattgtaacattgtaagatttccatgctgctgggctgcaagaagcacagtcatgtcttctatattttaacaactggtaattaaagaaagttcagccacaaggtaa

SEQ ID NO: 19088 - DNA, 201 bp, Bos taurus
taaagcattttagaaaaggatttactcttcacatgtccaaatttttgctttatgtctgaacactgttgtggaaacaagaggcccaagtttgttgagaaccacagatgcagggcagggtctctgtttgctgtgactgtggctgcctctgctggcctgcctgtccctatatcagctgcccagctactccatccagtcctctgc

SEQ ID NO: 19089 - DNA, 201 bp, Bos taurus
ataatgaccacatgctgttaaaactccttttagaaactagaaattggttatgtggcactttgcaattcttaagtctcttcattagtactgagtgtaatctaaccacacttgcagagctaaaactatgccttgagattggaggggtagcctgaagccaggagaattggtacttcctgattgtcagggttaaatatcgagctc

SEQ ID NO: 19090 - DNA, 201 bp, Bos taurus
gggtgccctgaaggcagctatccctgcaccttctccaggtgccctgcagagcaaagactctgttcctaaagcaggaagccccgtggaggattctatttcccggaccgtccaccctggagcaacatcagaggccaagacccttccacttcatctgggaagacagggctgtcctggccagatgtgcctcaggcctcgcacccc

SEQ ID NO: 19091 - DNA, 201 bp, Bos taurus
ggaagttttcttagaactcatgatcacttatggtattagaactggaaattctttgcagataatgttactgaactcatctcctagagcaagattttggaggccaatatagaagcagaagaagataaatgactccccacctcccctcaatttttccaactgtttctttgctctttctttttccattgtaatttcatttagata

SEQ ID NO: 19092 - DNA, 201 bp, Bos taurus
tttcctggaagtttcattgatcaaaattatcttggtagcttaaaactgagcaaaagattatcaataacagcctgaagagttaaatgaaaaaataagacaaagaggccctctgtgagtacaaaatgtagtattatgcaatattaaattgacaacagatagctactaacatatgtacaaaattaaaattaatagactgatgct

SEQ ID NO: 19093 - DNA, 201 bp, Bos taurus
tgatgagtaagatttctcatatactgttaataatttaatggtggcataagcatctaagacttaatggacttgtgtgagattgaaaaatagttattctgaaatggtactttaagaacatattgtcaaactttgccattacagcaaatattatttttttaatgtgaaacttattaatcaattttaaaacctcctctaagtctt

SEQ ID NO: 19094 - DNA, 201 bp, Bos taurus
gtgaatggacattagttaagcatgatgagggaatgtgaatgtataagcccagtaaaactggttgtgaaggagaagtttataaaacttaatagagaggttgatattttagttatatgttgataaataatgaaaagtgtgtttgtaatgaatggctgcttatgagagaacatgttaggcatttttcagaattgttactgaaat

SEQ ID NO: 19095 - DNA, 201 bp, Bos taurus
ttgccaaccacacagaactgtatagaaatcacacacctaaggcacattgtagacctacttaatcagaaaaatcctggggcaattaattatagcatgtacacgttgaaaagaggttcttcagatgttttggaatgattaagaaaaccctcgagctggtatttaataatattctcaggaaaggaaacaggattagaaggtgca

SEQ ID NO: 19096 - DNA, 201 bp, Bos taurus
attttgtctattagcccattttttctttgcttttctgatgaaagatgtgatattgtcaggctaaatattgatgataaatctgaaaaatacaacatagagtcatttcaatatttaaaacagtgtgcccagagttagttgctgggccctaattccaatggagtgctgaaatagaaactctgtaactgcaatagagactggagt

SEQ ID NO: 19097 - DNA, 201 bp, Bos taurus
cagagtgtgattttgtaggtgggccgctcagatttagtttttgctgaatgacttcataaatttttattaaacctgttttgacaaaaatcatgtcctttattctagatatactgaagcccagagaagatttactgataatgaattctgagtagaagaataagagtttgaggtatgtaagacagagaccaaaagggaaaaaag

SEQ ID NO: 19098 - DNA, 201 bp, Bos taurus
agccatttgtttacgttccaggggttgtaaacctagagaccttctcctttctccagactatttatttatattccataacagacatcaatttctttccatccctagagagttagatgtaccaaccacccagtttcacagtttagtggttactctcctgtgacacataccctgcatctgttttcatcccatcatcaccctatg

SEQ ID NO: 19099 - DNA, 201 bp, Bos taurus
ctttgctgtgaaataactgtgattcaaatgtgtgtatggattctcatatatcttcagcataatacaggtactctgtaccttattgatccagaaattggatgaggtccaatctcaaatatttcaggattactacaggtcacaaaaaaattccttaagatatgtaagtcttctgggaaaaaattgctcatacttaaattccca

SEQ ID NO: 19100 - DNA, 201 bp, Bos taurus
gatgtaacagaggccagatgtgaaggtttaaaacagcctagtagcaatggggagacagcaaagaggcatcttaagatgacttaatgtttgccctttagatatacaactccatatgcaggggccacttaggaatctcttaattataaaattgtcaatgatgcttactagtgtagggattgtagaaagtatagagtgttgaaa

SEQ ID NO: 19101 - DNA, 201 bp, Bos taurus
ccaggtagttggctgcaaagtagctgtatcataaaacaatcaaaattatgactgaatatatgcagatattaagtccgaagcattcaggcacttacaggccggttatctggcaccattatattcttaaattactaagtttttagggtatattttaattatcacaggtaattaaaaattatgctatccagataagattaaaaa

SEQ ID NO: 19102 - DNA, 201 bp, Bos taurus
taagaaatacaccacctctaattatacactatttctcttttataatgtagtatataaagtttaggaacatatacatccaaattgtatgcaaatccaaaaatgtagctttacaggcgttattatgtatttgtatgtctagtagaaatgattcctggaatgtagttaatcttgtttatatgaccatgattttgtatttgtttt

SEQ ID NO: 19103 - DNA, 201 bp, Bos taurus
tcatatagtataacttacagcagtgttcattgtattactatttatcactgttgtgtattacagctctggtacttatttatcttataactggaagtttgtatctttcaactaccttcatccactctccccactctcatccccacacactggcctctgataactacaaatttgatctcttttttatgagattgtgtgttcatt

SEQ ID NO: 19104 - DNA, 201 bp, Bos taurus
acattgaaataggtgttttgttttgtctctggactaaaatagcctcagctcaataatctcattttgtagtttgctctatttttgtttataaagagtgtgagtctaaaatcaccatctgtataatttggacctaatacttacctgaaatatatgtaataaatattcagtcatcaaatttatgatgcaggttgcccctcattt

SEQ ID NO: 19105 - DNA, 201 bp, Bos taurus
ctcccactcaagaaagtgtttgcttgcaaacagtgggaatgcaactcacgtcccctggtttacaaagtgtaaattatttataaattttgacattttaattttttttataaccaatttcttagaacatacttcacacctgatcttgacaaaaagaaactcttatctgctgcccaagtgtattatgactatgactaagacaag

SEQ ID NO: 19106 - DNA, 201 bp, Bos taurus
aaagagatgcaaaaatgaggcttgaagaccataacttttaggggtggggaaggggaggaaccagaaaagaagactgaaaagcagcagggagaggcaaagatgaagaaagaaaatttggagtgtgtagcatcacaaagccaagaaagaagaggagtagtggttaaaatatgtgtaatgtgactgacaattagactaaggtga

SEQ ID NO: 19107 - DNA, 201 bp, Bos taurus
cactttgttggctctgaagaaatatccccatttatgtgaatattgtagaacctatgcaagaggaaaggaagatggaaaattattttaaatcaaggatttacctccctatctattgattctacatatacccacttctttgccagctccaacagatcagaaaaatctgagaccaccaagctacctattgagctatcacagtga

SEQ ID NO: 19108 - DNA, 201 bp, Bos taurus
aatgcaagggcccaagtcttcttgttggcaaaggtgaatgaagaaaaactgagactgtgagaaactgtgtgcctggtatgagcctggaaggctgtatggacaagcagggccagtgaagcaagatcttgtggagtgggagtgggtgtgtctggctggggctgagtggagttcagtggctacgtttgcagtttgaaggcgaaa

SEQ ID NO: 19109 - DNA, 201 bp, Bos taurus
cttaagagaaaaatatgtaaaagtataaaatttcttcaattccttcttagttaagttctgtcacaaaccagagtcaacatataagtgaccctgagctgttggaacagcagggaattgtctgagcatcagaattcctgcctctgttccatctccctgagtatgctgccaagggaagtgctggcttatgcatcaaggcattga

SEQ ID NO: 19110 - DNA, 201 bp, Bos taurus
ataattttaaaaaaatctggacttccctggcagtgcagttgataagaatctgcctgccaatgcaggggacatgggttcgattcctggtctgggaagattttacttactgcgtagctactgaagcccgagcacctagagcctatgttctgcaacaaaagaagtcattgcaatgaaaagtctgagcactacaacaaagagaac

SEQ ID NO: 19111 - DNA, 201 bp, Bos taurus
aggaaatactaatagaccttgaatttcattaaaagagttttgattgtgggcattgaactgggtgggcttcctggtggcttgcatggtaaagaacatacctacaatgcaggtgatctggatttaatccctggatcaggaagatcccctggagaagggaatggcaacccactctggtattcttgcctggaggattccgtgggc

SEQ ID NO: 19112 - DNA, 201 bp, Bos taurus
ctccctaaatgttaatactcttcactgtcttatcattaatcttcttgcttgttaagttgaagtatttcatccatgttcatggttttaaattgtcctctcatgctgtgttccccagtacctgtctgtggtccagacttcttaatgcctctcagattcatatttttgattgcctaaccaacttccatggaaatctcagtctgc

SEQ ID NO: 19113 - DNA, 201 bp, Bos taurus
aggtccagcataccatagtaagacccaacacagccaaataaacaatacagttgtgaattatgtgcacacactatgaagaaaatctgttcctccttccatggataaaaccattttgcaagtcagaaacattgagattcaggaaggaaagttttttcctaaaacatacagtagttggtggcaaagccacctacacacctccaa

SEQ ID NO: 19114 - DNA, 201 bp, Bos taurus
aaaaacagaaaaataaaacagaagcattttcattgtaattttcaacagacgtaggagttagacctgtcttgctctttcacctcttttatcgactttgtgtatttaaccaccagtgttttattggcttttccagtttatattaaaattctgtcctttcttttagtacagtaccatttcttattaacatgcttagaatttttg

SEQ ID NO: 19115 - DNA, 201 bp, Bos taurus
attcttttcagcttctgtttgacaagactggggacatctcactctaacccttgtgttgctcagcttgattttttataaaacagagacagtaacacgtgttgtacaggtctttgagagcactgtgtgctgagttggttcagttgtgtccagctgtttgctgcccagtggactgtagccccccaggctcctctgtccatggga

SEQ ID NO: 19116 - DNA, 201 bp, Bos taurus
atttcaagaccactctaaactcctcagggcaaaggagttcagaaagaaatggtctttgaaattacagatagcatgctcaaaaagcaaaaccaattattggaagtagcaaatgtatacctcgtgttttaatattttcattgcaaagcagtattaaaggaaatcaactcaattagagatgggatagatggatgaccgcacatc

SEQ ID NO: 19117 - DNA, 201 bp, Bos taurus
aaactgcaaaatggggggtgggggggggggtaggctctgaaaataactgcagtataaaaagggattaacagtcatcttaatgtatgaagaacacttgtaagtcagtatttaaaagatgaacgtccaaatggacaaaaaggacttgaacagataattcagaaagatataaatacgaatgactggtatggaaatgctgaactt

SEQ ID NO: 19118 - DNA, 201 bp, Bos taurus
tttataattctagataatcctgacatacatgccccaagaaatcggctgaaatttcaaaggattcaacagttctcttattaatactctttttttggacattcaatctctagttgcatgttttaaaagtaactaacaactactaagtacttgcatgtgtatgtgctgagtggcttcagccgtgtctgattctctgtgacccta

SEQ ID NO: 19119 - DNA, 201 bp, Bos taurus
ctaacacttgacacaacctaatactgaaggcttagacaagtttagttaaatgaacttaatttctcattagttagttaaggatcatggtgtgttacctcccagtatgaaccctcatttccagctatcatttagttgtgctttgcgttattttccatgctaccatctgtcactgggctacgatctcatcaagtttccaagtcc

SEQ ID NO: 19120 - DNA, 201 bp, Bos taurus
tcttgtgtgaagttaaaaagagtccattatccactacattttgttttgccaaaaattatatggtggagacattctagttcagtagtacctaaaatggcctgggcgctgagtcgcttcagtcctatctgactctttgtgaccctatggatgaaagcctgccagactcctctgtccatgggatgccaggcaagaatattggag

SEQ ID NO: 19121 - DNA, 201 bp, Bos taurus
agtagtaactgctcatctgtggtatttaaattatttttagaagaatgacagcaattctcttcttggcacctcaattaaccataaacatctatatgacatgatgaaaaccttcagtctatgcaatgccattcctaatattttaactgccacaaaacacaggaatttgcttccaccgcaatctctacccacagaaaaggggat

SEQ ID NO: 19122 - DNA, 201 bp, Bos taurus
aagcagagagagcaaagacagaaaaaaacaaaacaaaacaaaacaaaacacaacagaacagaatatctaagaactgtgagagagctaaggtgtaacatacacattacaggaaatcatgggagactgttaggggattttgcccctctaatcatgatatgtgactatgacatctctatattcaagaaagtttcaaagtgagtg

SEQ ID NO: 19123 - DNA, 201 bp, Bos taurus
gattccctggggccagtggcacagactctgcaggtgttaaccagttaagtggggagaaacggacctgaacagcgtttcaacaatctcaaccacagctcaactcggccaccccagtaagatgcaggctgacatcttactggttgtgcccacagagcacaacctccccaaccccagaagcaccagcagccaatgtaatgaatg

SEQ ID NO: 19124 - DNA, 201 bp, Bos taurus
cactgacttaggattgatagtgagaaaagaattcttcactgaaaaagtcattagctttctcgcaggttagaaaaaaatggaataaataagaaattatggacgaagaggccacatgggttgagtctcagtttttgctgtatcttgcccatatttgacagaattttaaaccatgatttaccataaagttagcaaaacttaaaa

SEQ ID NO: 19125 - DNA, 201 bp, Bos taurus
ctccaggggatcttcccaaccaagggatcaaattcacctctcgtatgtctcctgcattggcaggtgggttcttaaccattagcaccacctgggaagccccaaaaataggatacttggggttatatggagccattataaatagctctgtcaaagatggaactggtctttaataatttatagtatttatcttagcacaaacca

SEQ ID NO: 19126 - DNA, 201 bp, Bos taurus
cactgaacttattttatactttattaaaattatgtggccccagagaggtgtccctaatgagattttataatttcctcttgaaatgctaaaactagcacataaattcatggcccaggagtcttgagagtatggagaaggaaatctgcaggtagaaacaacactggggagtctgaaatctttttataatttcttagcatcatt

SEQ ID NO: 19127 - DNA, 201 bp, Bos taurus
ctgaaatatacaaagtaactgatactctatcacatctcaacccaggtcacattgtccctggtttatggtgagagagtccaaggccatgaaacagactttgcactttgggaaattcatctctatagggtctatagggtctctttctggatggcactcaaaaaaaaaaaaaaaaataaagtctatagtttgctaaataaatta

SEQ ID NO: 19128 - DNA, 201 bp, Bos taurus
gaacttctggtaatatataattattagaactttaagttttaacctaaacaagtgagttctctgtagcacccatacattgaagagtaaaagagcagtgtgtgtgtaaaaactgagctttttgtgattttgacaataagaattatttggaaaagaagaaacagatatgctacgaagaatctcatttggaaattcttggctttg

SEQ ID NO: 19129 - DNA, 201 bp, Bos taurus
ggttgtttctattttgtaacagttcttatgttcagaaggattatgcagatatttcctggatgaattatttaattcagttaaccagttttgctgaatttcccaaggaagacatttccaactttggaacaattgtgcagaaatcgtatataggtcagataggctcttaacatactatgttgagctacacacaaatgaaaaaaa

SEQ ID NO: 19130 - DNA, 201 bp, Bos taurus
atgtatatattatctaacttaacccttaaaatagcttatagccttgtgaggttgtctttattattgttattgtgagaaagagtatttaatatctctgaaaccttagatgattctatgatggtcaaaatattactaggagacagagctagggtataaatttaagattttaaattccgaaatccatgcctttggggaaacatt

SEQ ID NO: 19131 - DNA, 201 bp, Bos taurus
cttggattgcttgtgcatggaatcctgagccaccacatacaaagttcaactactctgagccttaggatcatagaatattttatgtggaatttcaggactttaaaggactgttttggaaaacaaggtagaaaatcagataatcacaactgtaactaccagctgaccatagccacagaaagacgccaagggagaacttctgtc

SEQ ID NO: 19132 - DNA, 201 bp, Bos taurus
agttattggggtggagagaccctcatagcagaaaacagttatatggtgagatagacaattgcaacttctctgtgcctgacctcatcttccttcatcagaccacagatggaggaatttttaatagcatgataagcagaggagtcaagtaccaaacactacacctgacttcttctttcagatttctctggctggtctgagtta

SEQ ID NO: 19133 - DNA, 201 bp, Bos taurus
tgcaacatataagcaaaacttaataaaaagaatataaagaatgtcaggagcttctttacctcaaaaaatcaaaatgttgccatctttgggcatctgagatagggacattctgagccgctcagagaggaatagctctgatctcagtctgcagtgcttgagagtttgacctcaggcaaagaaaacacatgctacttcttgaga

SEQ ID NO: 19134 - DNA, 201 bp, Bos taurus
agttaaacatcagtaaactgtatatagaagtaatcttcctcatccttttctctgttaaatactagcatattcaacagtgaaaggctaaacactttctaaggtcagaaacaaggcaacaatatctattcttacttattctgattaatatcatagccaatgaaataaggcaagaaagtgagataaaatacaaaattattggaa

SEQ ID NO: 19135 - DNA, 201 bp, Bos taurus
ccataagtcaggctctaatatccgtacttgtaatcactgtcccatggtgccttcattaagctaaactgaacacaattcaattgctcatgttaaaaacagcatataatgtgtaactattgcgactgtggtcagttagaactgaccctaacacattccctgtgatagaaatatggcctttatttttcaaaataaatcctatgt

SEQ ID NO: 19136 - DNA, 201 bp, Bos taurus
tgtttttctttttacttcaataaatggttttataaattttacattatgttccttagaatcacttaaaggctttactcaaactatatctcactggaaagcatttcttagagactacagtttaacaggcctgggaaagaaactcaacttggcatttttaaaagaagcccttcttctttcagtgattctgtcatgtaattagtg

SEQ ID NO: 19137 - DNA, 201 bp, Bos taurus
tgtctttttaataaaatataagttccttgagggaaagttctggagaagttcagcatgttatagagttttaacaaaagttataagtaaccagaaaataagattccagaagatattgtcatttagccttagtaaactctgatcacacttccttaaaaaaaaaaaatcaattagttatttgtttatttttggttgtgcagagtc

SEQ ID NO: 19138 - DNA, 201 bp, Bos taurus
cttacacctgaaacatggagataagcctgaaactttaaaaaaaaaagtgctttaaatgaagggaaaatgagccttttcttttgtggattaaaatagaacccttcctcctccaccttcaattctaacacttcatccctgttatctcagggcagaaaatatgtagcatttcttcttttaatctattcctttatctttatttgt

SEQ ID NO: 19139 - DNA, 201 bp, Bos taurus
agatgaaagaggagggcagtgagttagtttgtcagagaaaccctgagaaaagactttgaaggagagtgaaggttgttagctctaattcataaggacctggtaatccagagagttctaaagactggcttggtgtggtgtttaatcaagaggaaaatgccatgataagaggcaggaaggacagactacaggaggtggtgccga

SEQ ID NO: 19140 - DNA, 201 bp, Bos taurus
cagaagaccaacttccctggaccacaagcttctgagcataagaaccatgacttctatggttctggggctggattcatttcccagcacgggccaggcatcaatatattagtgcttgaataaatgaccccacataacctctttcaaacctatgaaattatttcccatttataaaaatttccagagacaccagacatgaagacg

SEQ ID NO: 19141 - DNA, 201 bp, Bos taurus
atcagtagtgtgaagttgccacaagaaagtgatatgcgtgtgcgtgcgcccacacacacacacacagaggggctacatttccctaccttccttccatctaggatccagccagagccatgtgtctactctttgtagaatgaatgaacagaaatgatacagatcacttctggcccaaggaaatcaagaagaaaatgcttcctc

SEQ ID NO: 19142 - DNA, 201 bp, Bos taurus
gttgcatataatattgttaaaactttcacagcttaagtctagtgagacacttataataatttcatcatgaggcaacttttaatactctttaaaattattacagggatacatctaaatgacagggttgcactggggatcagaggatggacagtacatgatctaagcgcaaagtgaggttttttgggaaacagtggtggtact

SEQ ID NO: 19143 - DNA, 201 bp, Bos taurus
acaaataagtgacaagggctgataaatagtgggaaaaatgaagttaatgaattgtcagtgaacaagggatccaggctgataggaagatggtgatcagagtggaatgacggataaggtgttagctcaggtcctccttcaggtcctcctagaagctgggaaagattgagggcaggaggagaagggtgacagaggatgagacgg

SEQ ID NO: 19144 - DNA, 201 bp, Bos taurus
tagaaagtatgatctttgtaatgggccttattacatgttatcaggacaccaagacatagggcaaacagcataggatttggaatgaaaagatccagatttgtgtcttgagtttctggtttactaactagattattattaaacttctcaaaaccatgctcttgtcagtatgatggtactgtaaagtggtctcctataagggtt

SEQ ID NO: 19145 - DNA, 201 bp, Bos taurus
aatactagattctctaactttttcccagacaagagtaaatataaacaacataaaatcaattctaccatttttgtgcctagcattgcatattatccctgattcttaaaaagtccacatagcctttgggttataacaactttaatacagtagtgcctgttaggggaaagttatgcccctaaaacaccattatttttaaaatat

SEQ ID NO: 19146 - DNA, 201 bp, Bos taurus
cgccaagacaacccagggccgaggacctaagggttgggctcatcagctgggcaggatcctacctcacttatgaaccatttaagaatacggtgacagctacggcaaaaggcttgggccggagacaggtaacagagcaaacctgcactggaaccctttttcctggtagccacgctgtatgagtgtgtgtgtgtgtgtgtgtgt

SEQ ID NO: 19147 - DNA, 201 bp, Bos taurus
gagctgccacaaagttttgttttgtttttgaagacgatggcaaattaatggcatggaaggagcactagggatctaggaagatgctgactccaaaattggattctgggataggtgaagtgtgggagagtcacctcttctcaacagtataagggagaatctgagtttcaagattaactggcacgaaagtaaggttctcgcccc

SEQ ID NO: 19148 - DNA, 201 bp, Bos taurus
aggctcaccttgggtggtctgttgtccacccccttgcggtgctgtgtgtaggcatccggagcttttgcacctccagtggtggcaagtctgtggcctctttgtatcttgtccatacatgcagttacttggagtcccttatagtttctttgtattctattgtttagaggccgtttgtccacctgcgagcactcagatagaggg

SEQ ID NO: 19149 - DNA, 201 bp, Bos taurus
agaaatttataatgtggaaagttgaacacatacctttgaaggtaagcccttctaacagtgctacgtaagttcccccagattgtttctaagtatgtccctggattcccccaaatgagattacagctaccattgtgtctttgctttttaaaatttgaaaatgttgccatagcagaagatacagatttcccttgttgtcaacag

SEQ ID NO: 19150 - DNA, 201 bp, Bos taurus
ctccccatgagtcagctgcttccaccatgccgaatttcttgtggtttccataaggcaccacgtgtttagatgctgcaaggatgttgcacatccttcactcgattcaaatatcttttcttgtgttttctacctgttgttctcacattgctctcaagatacttgtccttattgatggagctcttccaggctaccagtgtgccc

SEQ ID NO: 19151 - DNA, 201 bp, Bos taurus
tcttaagtggactggtatttaagaaaaatgcttatgttgtcgatgccagtttcctttgactctgacagcaacctgtgctctttgttgtaaggaagtctgcttttcagccccacacctcagcagccctccacacctcctgcaggtcagtgctaaggctttctccagtgcaaagactgatgactctttcggtcagtggaaaat

SEQ ID NO: 19152 - DNA, 201 bp, Bos taurus
aaatagttatcatgggggcagtagtgggttgaagaacctcttagcccagctttgctttgtttgatggatcagcttaagttcccctgctggtttcggcctccggtccaaatgaagtggcttactgactagccctttccttggataatgagtctggcttaccaccgtgccccgtcagagccaccaggtgtggtagaagtctgg

SEQ ID NO: 19153 - DNA, 201 bp, Bos taurus
gtttcaaaatgatcagtttggaaggctatattgtggttatttggttttaaggttcatttttcaaagtaatacattcctataagaaaagttcaaatagaagtatttataataaaaaatcagtggccttttgccacactcttcacctgcacctagtcccactgttcagagacaagttactttaactgtttctgtttatagttt

SEQ ID NO: 19154 - DNA, 201 bp, Bos taurus
cttctgacgtagatgcatgtgtgtctggaaagtatggaaaagcatgcccttgggacccctccctaactcctgaaagaaagagggccaaacacactgcacacagactaattcaaggagtcttggactccctgatcgtggaactcagaaccaacaccctacacggaggccagtcttgattaacagggctttctttgtggctca

SEQ ID NO: 19155 - DNA, 201 bp, Bos taurus
gcctcttagtttcgtcatgagagatgatacgtcttagccagctccatgcgtgaagcaatattaagcatgttgcacctcttgcacatcctccgttgtgggtaggaggtagataactctggttttacagtgagacagatgaagatcagccttcaaattgacttgacatactttctagttcagagctccataccaggcaccaga

SEQ ID NO: 19156 - DNA, 201 bp, Bos taurus
aagtcattgtaaataagtaagaatgacttacaggcatgggatatattccagatggaatctttaaaggattaatttgtcatagcttctgaggatttattatagattaacaaagatctacaatgaaaaattgaccagtatccgtacttctgtttgaggactggtttatagaagtgtaataaaagtactttgtgaatatatttt

SEQ ID NO: 19157 - DNA, 201 bp, Bos taurus
ccaggagccatctctatatggcactcatcttgagttttgttgaaggaggattttactgcttggcacaacacctcgaccagtttgtgatttgaagcaactgtgttctgttgtggggaaacaacaggtaattccttggggatcacaacagtggcctaggcttgtggggccgcccttgcaagctaaggtcaggacaatgctgtt

SEQ ID NO: 19158 - DNA, 201 bp, Bos taurus
acgtggtccagatgcctcaaggtgtcccgggaagcctccaggattcacctgaagcccttggagccctgctggcgagactgccctccttccaggggcctcctgtctcttctaacaggcatgggttttcctgtctctgggtccccgttcaggcagcttcctctctgtggaagggccggcccatcctctccatctcagaaagca

SEQ ID NO: 19159 - DNA, 201 bp, Bos taurus
aagtgaaactaacgcattctcctgcctgaggcttgccaggtctaggggacattttcaaggactgaacagtctttttactttgtttccttaccctctgcccacatctctgatccaaccaggcccctacaagatggttgttctgaggagctagcctgccagcttctcggtcagccggcttcagaatcaagtctcttcctagtc

SEQ ID NO: 19160 - DNA, 201 bp, Bos taurus
taaattttatgttatgtgtattttactgcaattaaagaatgttaaaaaagaattcagatcttctggtgaaacagtaatgggccagaatttaggagccttgctttcaaataccggttttactttcaatgaactccaggtctcaggattctaatttagaagacaattgggtgagatgatggcccatattccctctgaaattct

SEQ ID NO: 19161 - DNA, 201 bp, Bos taurus
tatttatttatttatttgtagttgcactgtgtcttcattgctgtgggagccttcttccagtggcaacaagtaggggttactcttggttgcaacatgctggcttctcattgaagtggcttctgtggttgtggagcactggccctaggagcgtgggcttcagtagttgtggtacatgggcttagttgtcctgaggcatatggg

SEQ ID NO: 19162 - DNA, 201 bp, Bos taurus
aggctttcagaagctgttgtagaattaatgcaatcaatcatgtttttctttgaggtcaggcactattatttctaatacagccatcttcccggggctctccttggctgtgtggatagcgggtgctggcaaggcaaactgcagagtggggacccatgctcacctcctgtctctgcaaggaatatacaggcagtgttaacaggg

SEQ ID NO: 19163 - DNA, 201 bp, Bos taurus
tggtctgggcaggggcaggcatgactgaacatatgaccgcacatgtcccatgtactaggctgtagcacataacatcatcccactccatcatcacgcactccgatatctttatatgatccagaggaatgttggaattggtttcaagtcaggattaggtttattatagggcttcccaggtggtgctagtggtaaagaacgtgc

SEQ ID NO: 19164 - DNA, 201 bp, Bos taurus
tagtgtggctgattgcacttcatggtgttgttggtaatttttaaaaaaaatataagctgtgaaatactctttcctctaaatctcagatcggccctccagccttatgttccttctgaaggaagagagctgaagattacttgaatgtgtcatggcaagacacctccgcgtctccctgagaagagagtgccaaagccaccctgg

SEQ ID NO: 19165 - DNA, 201 bp, Bos taurus
ggcctgagcatcggcatcacacaggcataaaggaaccctccgtgagcacgtgtgacatgaatgaatgaatccatccaccacagatttttcctttggcttcgatgtggctttgaggagaccagctcgtcttgctctgcctcttactatccctcttccccataacatcagaaaaatcattcctgccgttaaggaatttatgag

SEQ ID NO: 19166 - DNA, 201 bp, Bos taurus
gatgcggagaacagagcttgccctgctgagttggccgaggggctcagagacggtgaccctgtcactcctgaggacaaggatggcccgagccctgatggcagctgcagagatcttgtttcatttcttttgtttcctttggtcctgttgcatcacctctgtgatgcaatatgggtcagaacttcctcctcagaggacttaccc

SEQ ID NO: 19167 - DNA, 201 bp, Bos taurus
tctcagtaatcactgagcgagagtacattttaggctaatctcatggacaaagattttgattgccttttcttctttgagagaaaaatccctctataccatcgtatccctgaagttataagtgatgctataaaaagaaaaagcaaaattggtatgttggtataagtgaaattctgagtgcaatctacttcgtaagtgggaatg

SEQ ID NO: 19168 - DNA, 201 bp, Bos taurus
agtatgtgcactgagccaaaggaagtcacacggtgctatttcccccatggctagactgcacagcggtggggcggaggatggccccagggactcagtcatcagactcacacctgatggcactgggaccctaatgctgaaggacaaggaggctaagaaaggagccattacactggcaaggatcatcgacccagatggccacag

SEQ ID NO: 19169 - DNA, 201 bp, Bos taurus
ttttttgttttttttcagtgcagattgagtgacacaatgcgtggttaaaaaaaaaaaagaaagagaaaggacaaatagcaaatgtaggccatctctgaccaggcacattgttgttcagtacacaggcacccaggaagccagccagccagaaaaactgttgagagtctctgtggtgtaattgaaaagttccaggccttgggc

SEQ ID NO: 19170 - DNA, 201 bp, Bos taurus
cactttcaacttatatatgaatcccgtgaaatgagggggtccaaatgggatctcagtgttccttattcttcactggccatatcagcattttcttgcttacttcagttcagttcagttcagtcacttagtcgtgtctgactcttttcgaccccatgaatcgcagcacaccaggcctccctgtccatcaccaactcctggagt

SEQ ID NO: 19171 - DNA, 201 bp, Bos taurus
atccctgctttgagaggctgcccataccatacccctcatttccattccgtctactctaggagatataaggtctttgaagacagagacgtctctgaactgcgtaacaccatggtaaagtcacttcatattaggagttggaaggccttacagtgggctgtccaatagaactttctgtgatgattgaatgttccctgtgctgtc

SEQ ID NO: 19172 - DNA, 201 bp, Bos taurus
gactgttttacaaaagcctgggcacgtggatcagtgtctttttctttaactagttctctaccttagaaggattctttgtaattgatcatataaagtcttcatcatgaaagctactggggatcctgggccccgctgtccagtcataaacattgtggaaatcacgaagcaatctgggccctttacaacctacgtctaaacatg

SEQ ID NO: 19173 - DNA, 201 bp, Bos taurus
tttagaaacaaacccaaacctccatttcctcatctatttgtaaagtgggaatagtaatacttacttcacagacaggaagattaaatgagattattactaaagtgcccagaataaagtgtccaatactactggaatattggaagttctaaatgtattcagtgtttcctcaaatgtaaaaagaaaaggagttaatgaattaga

SEQ ID NO: 19174 - DNA, 201 bp, Bos taurus
gtatatatatatttttaatatatttataccacacttattttcaaaaaggatctcaggtaatgattaaaagtatatataaatgtacatgcttccttggtggctcagacagtaaagaatctgcctataatgcaagagaccagggttcaatccctggattgggaagatcctctggaggagggcatggcaacccactccagtatt

SEQ ID NO: 19175 - DNA, 201 bp, Bos taurus
agccactgagaatcaggagagctagttacaggccacaagcttcattaggtcccaggagcaaaacgcaactaggaagatctgaggttggggaaggtactcttaacaatatttccaatggccaaagagggttcaaggagagctcattggggtattaaaagagtaactgttatgttctggttttggttttaatagactttattt

SEQ ID NO: 19176 - DNA, 201 bp, Bos taurus
gatggacccagaagagaacccccctccctcccctccgctgggttgctcacctctccagccaaatgtcccacttctgtctcaggctctctgcctcggtgggtggcggtcccctccctgcagttccacagtttctctttgcctttgtgcttttgcacaggtggctctctccttcttgcaagcattcctttgtactgtctggct

SEQ ID NO: 19177 - DNA, 201 bp, Bos taurus
tgcattatgccattgaatatctataatgaaccagtaaggaagagatttgctgacttctaaggaaaggcacacaagattcctctctgctcctttctcaatcctctcttcagtcattccctaaaaccgagttgctgttaagttatgccatctccacaaagaaaggtccaaatctgaacccaatttcaggtttcctgctggacc

SEQ ID NO: 19178 - DNA, 201 bp, Bos taurus
aaaagcataactgcaaattttaaaaaaatgctttgtagaggatggtttccatttgtaattattactgaaaagcatgtggtcttgtgggccctctcatagctgttcacaagggggtggacctgtgaagaggtctggacagtgtacctggttttaaaccaggccctgtggggatatgagcggacactgccatcagctgggaac

SEQ ID NO: 19179 - DNA, 201 bp, Bos taurus
atcttaaataacgacagagaagacggttcacacaaagtccgtattgggactaagtctgtcagtcaaggtgaacctgatcattcaaatggaaacagagggcgttgaaggcagagaagcaggatgtctatgacaactggtcagctctccaaatcggctttactctctgaggtatctattccatgcagcatcaggctcccaaag

SEQ ID NO: 19180 - DNA, 201 bp, Bos taurus
atatcaataaggcactgtttctatgggccagctgcatgagacatggaaatagctttgtttcataacactctctttgtattttttggttgttgttataatggaattttgttgtatatggccctgaattctactaagtgcttcagacttgaagagtttggttgcaagacttattcctttactttccctgtgctatgacaatag

SEQ ID NO: 19181 - DNA, 201 bp, Bos taurus
caccggcattcaggtggcctgtcacacgtccgggttctttgactccacctctcaaatcagaatctctggagatgggccccaggcatctggatgctaaaacatgactctagtcattctgataaacactgaggatcggaaatcactaccctgggtgatctggccattcactgcatagacactggagattaggtttgatgtgag

SEQ ID NO: 19182 - DNA, 201 bp, Bos taurus
attcatatattctaaagacagagagctaagagtaactataaagggacatgtacactgacacagacatagggagccctgcttgctaaagtagcatgatgtacggaacaatttcctagggaatttgttagaaattgtttcaaaaggggagatttgcactggcaaaaaatgatgggaggaaagttttatttagagaagacacac

SEQ ID NO: 19183 - DNA, 201 bp, Bos taurus
cccaaagagtcggacacaactgagcgactgaactgaactgactgacaggcattttaccacaaaactagtctggcacgttcctaaagggtcacgggcctccggcaggaggaactgtgtgaacccaactgcatgcattctctccaggttcctgacaactgacaacacataatcacgaaacattgggtagggaaaggaggacag

SEQ ID NO: 19184 - DNA, 201 bp, Bos taurus
caatctagtgctgtctaatccttgaaaactgccctgtccagtgtaaaagccattgcctcacatggtggtggcgcatttgaaaggtggcaggtcccaatgaggtgtatcctaagtataaaatacacaggccacgtattgaggacttagtagaaaaaaatgtaaaatatttcattaataattttttaggtggattacatgtct

SEQ ID NO: 19185 - DNA, 201 bp, Bos taurus
ttatcctaataagtcatttggttctgaacctttggctatacaacccaaatgggtggacttattcagcttcttcacggaatggccccccctcagacagcccgcaaagcatctcaggagtgaagctgcagaggctccactgctcacagcatcttgcctggcctcctccacacagcatcctaataaccacctatgtgaccgaat

SEQ ID NO: 19186 - DNA, 201 bp, Bos taurus
gcccaggggtggtaggcagaggttgctctggcaacgtaagggaggccctgctctgcccagtcctgggacctagggcagccagtcctgaaggactgagatcggaaggacgaggatttggccaagaggaaaaagtgaggaaagaattacctggctggtagaatttagggtggctttttcttacttccttttatacttttctga

SEQ ID NO: 19187 - DNA, 201 bp, Bos taurus
gaccagagtgggctgcaggacagccagtggggtcactaggtaaagactgggtgattcaggtatctcccacccctctcccttcccatgtcacacccaggccaagtcagaagggctagcagccccagcttcaccccaggaagctgaagaactgctccctgaggaagatgagctcctggtctgagagggcccaagacctgttgt

SEQ ID NO: 19188 - DNA, 201 bp, Bos taurus
aaattgatgttataagtgcgaacagaaacgctgagagggaaaagcttagcattaataaaatgcttcactgaagcaaaatgcttctgttttctctactctgatcttcttaataagagggcagaattaaaaactgagagttgaaagtggtctctgaattccctttatacagcttacggtcttacacacaaaagaaaaaactga

SEQ ID NO: 19189 - DNA, 201 bp, Bos taurus
tccccacctggtctacagctgaggtcttggccccagggccctctgcacctatgatcccacaaaaccactccagccagttggtcccgtcgctttgggggcctcctagtgtgacactggcacctggagggaccccagcctgtccccaccctaaggttaagtcccccttgagaagcctcactgctgtgcagggggaaaggcagt

SEQ ID NO: 19190 - DNA, 201 bp, Bos taurus
gaaattctctcagccaaaggtcaccaagaggctaaataaccaaaatgggcttcatccacagatgcttcttaaactacaactaggccactcatccaaactcggcacagtcctgcacaaaggaggaggggaggctttctcagaaggcagcagacacaggcctgtgcaatccggcagcccggcggggtcagtggctggtcagcc

SEQ ID NO: 19191 - DNA, 201 bp, Bos taurus
aagagctatgcctgggatcagggtgggaggtgcagggagcagagggaagaagccatctcagtctggagaaggcttcatggaggaggtggcctgggggatcaaaggtaaaggacacatcatccaggcagaaggagggagcgagtttacgcccaaggagcagcaggtgaaaaggcccagagttaggagagcaggtggccggag

SEQ ID NO: 19192 - DNA, 201 bp, Bos taurus
attcctgaccatgctccaggtggggctggtcatccagggaagcagatactgtgtgtgaatcaagagcaagcatttatgtttacagaggtcaccgttacacaccttggtcctgccttcctgctcgaaggtggagtttgcaaggagggactctagaggggtctggaggacccatctgtgtcagcgagtcttgttagcaccaac

SEQ ID NO: 19193 - DNA, 201 bp, Bos taurus
aataaatacaatttaaggggaaaatatataaataaagaatgccagtggaaaagggttttctgcagggtgtctctatgacttgatggtggttccggtggtctggaggcagcagaagacctgtctccatgagcatcactgactgcaggctgacacttgctgcgtcaagggtgttgcaccaccgattgggctgcggcccctaga

SEQ ID NO: 19194 - DNA, 201 bp, Bos taurus
gagtggtgacttagacgaatgtgaggctctgctgagggctgtggagacatgaagctgcatggagattgaggaacacagagagggcaattggtctgtggcctgcagaagggaatagaagctttcagccgaggtctcttcccggggcatcatttcaccccttgtgtctctgaatatgtcagtgacttcattaggcttcttggg

SEQ ID NO: 19195 - DNA, 201 bp, Bos taurus
tggcccctctgtgattcctatatcacttacagttggagggctgggaacctaagacctggttctgaacaatgggaggcgtgtaagccaattatgtaagtcactttccagccttggcccttataattttctatggcattgtgatgggattccccaagtatcctcccatttggagatttcctataaaggctcgtcagatatgac

SEQ ID NO: 19196 - DNA, 201 bp, Bos taurus
taagtcagtcacacagtaaatcactgtgacttgaaggtgtctgtcgcttggaaatgaggctctttttcggaaacatagtctggccaggaaaagatatcctacaggttcaagagcttcaggctgctctgctgaggtgaccttttggggttaagaggatacagtgggctaggaccctttgggggcagtgacagaggagtcccc

SEQ ID NO: 19197 - DNA, 201 bp, Bos taurus
tcaccatagagccaccgagcagatgactcacaaactgcagaacaattacaccaaatagtgactgtgacaagactcaaaacttggtcttctgacttcatctggggaggaagaagataggagtacaagatgtcctgctaactatgcaaggatttctggtcatggaatcagcttgggtcttggtctttcctccatttaactgtg

SEQ ID NO: 19198 - DNA, 201 bp, Bos taurus
aaagcagcagtatcttgtggtaactgatggcaagagaggaaaaacagcatggaattgaacagttactgtcttctaccccttatgtagaataattttttccccttacactgtttttagcctggtcattttatgggtgtcatgagacaaatgtgaaagcaaaagagaggtatattttaaaagacccagttacatcacaattgt

SEQ ID NO: 19199 - DNA, 201 bp, Bos taurus
accatgtaggaagtaaaacatttgagtgaataggttatagatagatatatattcccataccacgtaagtatcccttaggccagttaaacacacattcacttatttttgtacctgattttgccttgaggacagtgtttatataccaatcaccatctaccctaaagcactggccttacagtatgaatgaatgtgttatgtatt

SEQ ID NO: 19200 - DNA, 201 bp, Bos taurus
cccccgcaccctgctcagtatctgatggggctcctcctcctccaccatccccctggtgataaagggtcactctggccagccttcggcaagaatcctgtcaagtcggtttagccagaatccccccgttgccttctgatatttcttcttcgtaattttccatccacagacccctaacctgctcctcggccataaattcccact

SEQ ID NO: 19201 - DNA, 201 bp, Bos taurus
gattaagtttatgatgagctactgtccaaaatccattgggtccctatattagccaaagagttgagttattcaactccaatataataggaactaacacccctgcatctttcaggtatttactcttggtattaatctttggaattcctctagaaatgtgtatatttatttattattatttattctggaagaagtagttatctt

SEQ ID NO: 19202 - DNA, 201 bp, Bos taurus
aaattatgaataaaacccatttatctcaacctgatatatgatgtatgagaaatagaatattgagctattgatataaaatctttcttttccctttttaatcctcacaaaagcccatgacatggccagacacctctgtatctggagaagggaagaagctgcaggtagtagataaatggctcaggaaagttattataaaaataa

SEQ ID NO: 19203 - DNA, 201 bp, Bos taurus
gaagaagaaattaaaaagttcctcgaatccataataacttctatgaaattattattcattttttgaatagtctctcatgcatgaataaagagcttaatcttcccctaaagttctgatattatgaatgtgtagtgaaggtaaaaatttttgaaacagcttaatgtgctttgaccctttgtgtctctgtgtaggactttctcc

SEQ ID NO: 19204 - DNA, 201 bp, Bos taurus
cattgtggggtcctgggtcccagggcctgctctctgtcagggtgcatttaccgagggacatgagagtccatggaataataaggcttgtcccagcattgtccgggtgttggccacttggacatttatttgttgtgtgctagaagaaacttaaaaagaacgttaaagatgcatggcccaaagattaatagaagtagagaagct

SEQ ID NO: 19205 - DNA, 201 bp, Bos taurus
tatctgtgggcatccttctgggtcaagacaagtattctcttgacctggggaggatgaaggtggtgctgattgagaggaatcagaaaagcttcacctgcacgtaggcaggctcattcccagatggggtcttccagccgaggcctgcggccaggtggtgcctctgatctgggtttcacctcccagagcatcagctcctgtgac

SEQ ID NO: 19206 - DNA, 201 bp, Bos taurus
ttcacacaagtttgtggcctgactcttctgcttcatgtggtctcagccaggacataagaatgactgaatggtacatagtggcctcagtcacgtgggtgccgaggagtttccctggggctctcagccaggggcctcggttctcttgcccagacccaccccccacctccggccccacctccaaggctcgacctcatggctgcc

SEQ ID NO: 19207 - DNA, 201 bp, Bos taurus
gtggcctattaattggtccatcttcccgtatgggcagctccacagaatacagacagtatgaactcagcatcagaagactttaattagagttcatggtttatcactggccatatcattcaccttaaaacctaaataaagaaacaaacaatcggccaaccagaagtatagaaatggtatagaatttaaagactcaagagacag

SEQ ID NO: 19208 - DNA, 201 bp, Bos taurus
tgtggcccagcctccaccagagcctccgtcctgcagcccaggacctgtcactcatccgcaggacctgtgcgctctgcttgtcattcactgccctcacggaacgcctggtacccgttcctggcccggcacttctcaaactagatcatttcagcctctgccacgcatctcgtgtgtgtctcagtgtctggcccgtctgtccat

SEQ ID NO: 19209 - DNA, 201 bp, Bos taurus
agtggaaccgacaactgacagtcctgctcaggttgttctaaactttttaatattcctcccaaggagatatagtgctcgtctgggccgtgtacaaaggaaagcagcaggcattgaggtggctgtgattcttgtgggcaacaatggcaaaatgggtttaaatgaaacagaggtctcatttgggaaaacaggcagtgttgaagg

SEQ ID NO: 19210 - DNA, 201 bp, Bos taurus
gcagcgctgggttatagacccaggcgctctcactccttggcccactttcttttctttttctttgtttttacgatttatttatttcattgtttctggctgcggtgggccttcgttgctgcacacaggctttctttaattgtggccagcgagggctattcttagttgcagagcacaggctctagggtgtgtaggctcagtatt

SEQ ID NO: 19211 - DNA, 201 bp, Bos taurus
tgtaggatacttcccgagagcaaaggcacctcatgacatctaaacattggggtgcagatctcagcacagggagaggtccctggttctaaagctcatgtgaggctgggccctagaaagctcatgactgccccggggtgcctcacccctagaaggaaggcagggagcctgatgaattgtgggctgaggtcccaccggggtgag

SEQ ID NO: 19212 - DNA, 201 bp, Bos taurus
gatggaggaggtttgcatcttggagccgggcactgctgagttaggctcctacctcccattggaggggacactggctgctgttcctctgatgtttgcgctttgaagagatggctcccagatcctcaagaaacacagtcctggatgtaaatctggcaagaggcttagtgagtttttcaaaatatttacatacacctcaaaggc

SEQ ID NO: 19213 - DNA, 201 bp, Bos taurus
ggcgccattgtgggtgaaccagggagaacctcatcaaggagagttccgtcttcccatcctcagcgcgctgagacagtgaggcctcggtctgtccctcggagagccactaaaaggaacgatggtccttcacgtgctgccaagatcgtgcagtacagcttgcaggatctcagatccccggccagggattgaaccgggggccct

SEQ ID NO: 19214 - DNA, 201 bp, Bos taurus
tcggggatggccacggccaggggaaccgctccttggtccagccctggagtaggcgctggggggaggtctcaccaatgtagtctttcaagggcactgtctcactcttctttagaaggcctaagacgacgagctcttcaaacagggagtccataggcctggcagagggtggcacaggggggcgcccaggacaaagggaaaggg

SEQ ID NO: 19215 - DNA, 201 bp, Bos taurus
ttgatattatgacccaattctagggccatcaagtgtgtgtaacaaacacatgaactggtatttggggatccccaaaaccagtcttcattgccagacatagtaaacgtggaaggccaggctcaggaacacggaatgagagcagatcttaaggcagaaacgtgttcctttcattcccctgaccacctgaccctcaaactagct

SEQ ID NO: 19216 - DNA, 201 bp, Bos taurus
aagaggcaactaagagcactcgctctgactttcaagacacatggatggttctagaagcctgcaacatcctgggaactcaggatggcaggaaccccagagggctgggccttaacaggaagagtgaaacagaaatcaatttctgcaaggactgctgcacaactctgagtcacgtgcctggaacagaaaataaagctgtaaaag

SEQ ID NO: 19217 - DNA, 201 bp, Bos taurus
catttctttttaggttcccggatgtcacaggtctttccctaatcttaacagctaggttcatcaccgccagctagcgccccaacacctaaggaagctgtacccatgtggcaccagtctctttgctgcaccggtctcacatgcctgccatctttgtgtccccagtacactgaactatgagctggatgctcgtaaatacttgtt

SEQ ID NO: 19218 - DNA, 201 bp, Bos taurus
tttccccctaggaattcatagttcattaatattgttgtgcaaccatcaccactgcccatctccataactcttcttgtcttgcaaaactgaaactctgtatacattgaacagtaaccattctccacttcccccaccccctagagctttcttttagattagttttagggttacagaaaaattgagcagaaaggccagcaaggt

SEQ ID NO: 19219 - DNA, 201 bp, Bos taurus
tctccccctctccgcctctcatctctaggggaaggaaagtggacaacagccacattacgcagggggtagccccacgtgcagctgccatcccacacacagcgtcgttgttggagcagatgaacacgcacgcatgcacgaatatttcggcacatggtcattgatctgccctgatccttatcagaaaagagtatcagacattct

SEQ ID NO: 19220 - DNA, 201 bp, Bos taurus
ttgcagttggcttgaaatcccaaaggtggggaggccttgccaagaggatcccagcagcagcgtgggaagtgaagcagtatcagggttgcctcattacccgcaaagcccctccccaccattgctgatggctactgctccggcgcgaacacatgggcttgcttaactgttcttgcagcagtttctgagctccaagggcagaac

SEQ ID NO: 19221 - DNA, 201 bp, Bos taurus
ttaggtagtgagggcagagtctcattagtggggtcagtgccctcattacagaagcccagggaagtccatttgtccctctgccatgtgaggacacggagagaaggcccatggaccaggaagacagctctcactgtacaccaagtgtgctggtaccttgatcttgcgcttcagcctccagaaccgagagaaataagtatctgt

SEQ ID NO: 19222 - DNA, 201 bp, Bos taurus
agataatttctgactctgacagaatgaactgtgttaaaaagttacaaaactagtgtcacaaaccagtgttcttattttatatgtttaagatgtaaattccggatggagggagttaatgtcctttcctatatcttttaacaagaaaaaatgaatcttttgggccttccctggtggctgagatggtaaagaacctgcctgcaa

SEQ ID NO: 19223 - DNA, 201 bp, Bos taurus
aaagttcactgagggtagacatacccccccagttgaaatgtgtgatcatttagatgtggtcacagtagcttgtccatggtacgaatgaagagcaggttcacgaagagggtcagttgtataaaactattgtaaactgagttcttgtttgactccaaggttctctctggccctaaaattctggggatgcggacttccctggtg

SEQ ID NO: 19224 - DNA, 201 bp, Bos taurus
caggaggccttctgcctgtggccttgtcccagagaaaccatcctccagcgttgttttctgttcgacagacctcaggtgacttcccaagaactctgttggacgccaaaggcccgagtagagatcgtctgacatttcttctcgttttacctatggccgcctctccacaatgctcatgtgtgctcaagtccagatgaagccatt

SEQ ID NO: 19225 - DNA, 201 bp, Bos taurus
tttcacaggaggaaaatggtaaagatgacacagagcagacaaaacacaggctcttggtttaacttacacaggtcgtcaccaagatttatatgaaagtgacatcttccagggagacggtgcgctcctcctggactctgtttccatcacgtgaccgccttctcaggagcacgtctataagcccagagtgaagggaagtcttgg

SEQ ID NO: 19226 - DNA, 201 bp, Bos taurus
gagacaagcatgctgttcattttggaaaccacatcagactttctttaggacagcagcattcagtggatagagaatggaaaatatcaattaacctattaattagcccagagaaactattagccagggaggtcatcaaatcgcatctgaaaagattgcctgaccgcagagaaaccgcacaaataattccttctgccagaatcc

SEQ ID NO: 19227 - DNA, 201 bp, Bos taurus
tgaaaatgtccattatgtaaaagttttcattttctccatctgaatcctttggaacaactggtcatctatctatttgattagggaagtcagtgaacttgacgtactagctttgggactccatgcatcctacacccaaccctacacacctctgagcgtgatggtcatggcttatagtattccagcccctttcaccacccttgg

SEQ ID NO: 19228 - DNA, 201 bp, Bos taurus
cagggcccgatggggcggcaccagcttcttcttcttcaggaccgtgttcagccagtgtgccgtgatgcacctcttcctctccttcatcgcctgtgaacatgatagagcgggccggtcgctgggggctttaccgcaggcaacacacagagctgtgaggctgtaaactacaaggtcacttctgctggaagtcctatcaataca

SEQ ID NO: 19229 - DNA, 201 bp, Bos taurus
cttttattttaaaaagaggacatttatttgtgccccctgagcctggcttgggagccgcccccttggctgtttgacaagaatggaagtagtttagaaagggaaatttgtgatgcgtcccactggctcctgcgtccacgccatcattcccccaccccgacccttgtgatggtctggacccgccgccaaaaccagaacggacca

SEQ ID NO: 19230 - DNA, 201 bp, Bos taurus
tcccctcggtggagtggtcctggctgggccggactgggcaggcgagttgtagagccgcatgaaaataaagatatactttgtcccaaactcctcccgtccctaccccggaggctgaggccctctcactgtctggctgagcagctgatttcatttcgggagggagtaccccggcactgttctcaaacctctcatgcttcagtg

SEQ ID NO: 19231 - DNA, 201 bp, Bos taurus
agactctggaaataagtgacaacttcctcccccgtcggcctcccccgaggatccctgcctcaccctgcagcagtggccataccccagggctccttctggatgcccccctctagagcaccccaaattcacgttcaagctgctcccaaaggcctgccgggtttccaataaaggggccgctgtcatgcacttcctgacggtccg

SEQ ID NO: 19232 - DNA, 201 bp, Bos taurus
caacccaggccgaccttgcatttcacctaaagccgccaggcctcaaaaacccggcaccaagcgttttcagagccaggagaactgcccggcgaaggaagctgggagccactctgggcttggcctttggcttcaggggctcagaagcccagaatgctatgaaaacccactcagccatgccgtagtcccgtggcgctttctgac

SEQ ID NO: 19233 - DNA, 201 bp, Bos taurus
ccccaccccgagccctcctttcctgtccaccttctgcagttaaaacaggcacaacttttgcaaagatgctcttctccacagtgtcaccacgtcacacagccctccagtcggcctctctccgctagacttcgttgacacccgtaccttgcagagccaaaaaggaggtttccttctgaaatgagaggcctgtcgccatgccta

SEQ ID NO: 19234 - DNA, 201 bp, Bos taurus
ctgtggcagtgattcttctccaatccgttcttgtaggtgttctaggcgacttccattttcaggctctcaggatttacacacgggaaaagaagctgctccacggctactacatgtatgaagtgacaatgcagcctgctggcggtacgttcagagcagggctgagtggccgtggggctgagggcgtgctgcctcagcaggcgt

SEQ ID NO: 19235 - DNA, 201 bp, Bos taurus
aggaaggagaggatcctgtgcttacgactgtaggatgtgcgtgtggggtgtctgtggctggacatggacactcctgcaatgctaagggaataggccatcacgtggacgttggttccggcttcagtgaacccaaggctgtccagggatctttaggctctgctccttttgctgcaaacttagccttttcagtaagctactcag

SEQ ID NO: 19236 - DNA, 201 bp, Bos taurus
aggaggttggacgtctcacatgtccagtggtccagcttccaggaagggagtgaacaggaggcagaagctggacctgggtggctgaactgtgcagacggtcggcatgggccccagcccgccaagcagcccctctgctctggagggctctggagtgttgtgccctcagccccgggccctgactccagaggctctggccctgca

SEQ ID NO: 19237 - DNA, 201 bp, Bos taurus
cggtctctgctgcagggcaactgtctcggctttcaggcctgttggccgagttgcgcttgtggaatgcagtgccctccggcttctcatctatcagataaaacgaccagagctggacaggcccgcacgcctggaggatcacagaaaattatttcacctctctgggcctcgtcaacagagcaagggacttggctctgctgggtt

SEQ ID NO: 19238 - DNA, 201 bp, Bos taurus
ataacagcaacaaccaaaaccttcaattaggcaagacagtaaagaggagaattggaggacagagggttgtaacatgggacattttgtattacaaggttctagttaaaaccaaatccccagggaagacaagtcagtacctgccatgataacgatacagtgagaaagcaactcaagctaaacagaaagagactcatagacttt

SEQ ID NO: 19239 - DNA, 201 bp, Bos taurus
aaaaattggttttatttgtaaaaccggctggttttatttgtagtattctgtaactcagaggcctctgctatggtatctctcagaacattgcttatctttacttggtgtgaaaggttgttaatgtttttgtgtgtagtgactcagagcatttattttttatggaaggaatgagccactcgaagttattgtattgcagaatga

SEQ ID NO: 19240 - DNA, 201 bp, Bos taurus
aagaaaaataacatataataccataatattttccttctttgtttatacaacttcaaaaaagatgatactttcattccagcccaagaatctaacatacttggtctacttttatcacttagaaatcatttcagtcctagttaaatcacacagagtctgcactgatctcttctataggatacttcttgttaatttggacctcac

SEQ ID NO: 19241 - DNA, 201 bp, Bos taurus
acttagatgaacatgagaaaatgaagtgctctgcccaaccacctcttagaaatggctgcagtctggaagaaagctgaatgtcaacctgagatgaaagtttagctgtatataatatagtgagtacataaaccacaaggaaaccataaggcaactcaagaaaaaaatgtattcaggtggcccaccccatggaccatgcctcat

SEQ ID NO: 19242 - DNA, 201 bp, Bos taurus
atcatatctatgaagaaaatattttagaattgatagagtttactaaatatgtgttctgttttctataggtaatgtggactgaactaccatgtaaaaattttcatcttcttctctgttgtgctattctggagtcagaaaaacaacaaataatggaaaaacattatggctttaatgaaatacttaaggtagttttttaattta

SEQ ID NO: 19243 - DNA, 201 bp, Bos taurus
gtcagttatacattgcctgctggtagctgacagctcttctgggacatgccagactgttctacatgcagttgtcacttgggatcccagctcaggaggcagctgcactgggggacgtgccttttttttggtgcagtagagagtaacagtcagctggtggaagtatatgctgactcttgatgctttggctctgcactggggcct

SEQ ID NO: 19244 - DNA, 201 bp, Bos taurus
caaaaacataataaattatattaaccataatagtttgatcaaaacacaggctcagagtagcaacgtgaactgcttaaaaattacataattgtcatttgcacaagttacaatcactttagattttcaagaaattcttcctacaactaaaatataaagacatgtttgaaacatctgtcagttgcattaattggaggttttcca

SEQ ID NO: 19245 - DNA, 201 bp, Bos taurus
tggtaactgtcaaatgcagccaagtttgaaatataaggcaaaaatatagagcttggattatctgataactcatgggcttgagttatattttaatgtatttccttgtcccctagtcaggtgacttattcatttgccagtcaaggtgattcagtcttcggaagattcctatgatcctagaattgcttagttatttagagactg

SEQ ID NO: 19246 - DNA, 201 bp, Bos taurus
ggtaaccaaaaccatcaaagcagagaaaagcacttaggcatttaactctcaactccccatcttggcacgtataaaattatctcacgacattcttttgaaattgtcttcccttctttttacaaaagctaatcctatccccaaacctctcactacctatgtatttaatctctccctttttctcaacctataaaacactgaagc

SEQ ID NO: 19247 - DNA, 201 bp, Bos taurus
gtcaacacttgggcggggacgtagactatgctgttttgcagacatcggctccctggctatctgcattagaagcctcagcacaaactccaggagatatcatcagcaatgtgacagtgcccctggtgtgcactagctatggaaatactttttctcactttggcagatacagaagacatctgtgcagcaggctgagccagaaag

SEQ ID NO: 19248 - DNA, 201 bp, Bos taurus
gcacctgtttccatggtaaattctaccctaggtattactcataggtcttagagcaccatcaaccttacatcccagccagtgactaagggaatatgaaaatgagaaagacagtgtctagatgtacaaagaatgctataagatatgttcaccagtgtttggaagtatgtccacaatattatttgccttttctctcaatgtcaa

SEQ ID NO: 19249 - DNA, 201 bp, Bos taurus
ataaaagttcatattacttacagctaatttgcatgctttctgtttttcatatcaggcaaatcggtatgaatatcaatttgtgtgctacagtcagtgtgtcgttgttgtttttgttcagtcacccagtcatgtacgactgcagcacaccaggcctccctgtccctcatcatcccccagtttgcccaaattcatgttcattgc

SEQ ID NO: 19250 - DNA, 201 bp, Bos taurus
atgtatttggggggttttgttgttttgtcttattttaaaacaagtactggactacgaagcctgctatactgtactttatatgacttttggaaaacttttataacaacttctatagagaggtttcaaatattttaaaaatatttgaatagtgaatatttgactgtaacgccattgtagatatataataattgacctaataga

SEQ ID NO: 19251 - DNA, 201 bp, Bos taurus
aatgcaacagaagtaatttcttactgctagcaatgaagttcaagtggacgaacaccatgaatatggatcaaataaggatattacggaaaagggaagtgatcattttatataacagtaaagctaatattttccttatctgaacttagaacatattaacagtctcctatttaatgaattggaaagaagactaagtaataaagt

SEQ ID NO: 19252 - DNA, 201 bp, Bos taurus
tcggtgtcacagctcagtttcattaggaaaacaaagaatagtacaccctcgaagaatgagtctgacccacaagatgaatagaagagaggcctcaatccttttaggtttcctccttttatgcatttgtctcctcaccccggggcctgccctatgtaaattgggctatccaggagggctgtttgttttacctgaggtcctcac

SEQ ID NO: 19253 - DNA, 201 bp, Bos taurus
tttcattagttctgttctttttctctctctcattcattaatctctccatttttgctgagacattctccattatctaccacattgtagaactaaatttctccgttatcaaccatcttataaaaaaagaagtaaatcaaaaaccaaaagctaaataaaaattgacactttacttctgtctgtttccgcaaaacccttgaaaga

SEQ ID NO: 19254 - DNA, 201 bp, Bos taurus
ctttaaagaggactactttttctgcaaaaaaaaaaaaagtcaaattgagcagaacaaccacagaccaaaacctactcagcttgcctttcacctaaaagcccaaacttaaaatcataaaatgtttgaactctagtaatagaaaaaatcaatcctaaatacttaagtaacaatagacagaaaatatgcaagttccataagagc

SEQ ID NO: 19255 - DNA, 201 bp, Bos taurus
ctaatataattatatttaaggccaattacacacagcaataatacctggagagaatgcacagagcagctactttaagaccctgaaaagaaaataacaaggagctttggaaaaaaggccagaatttgaaagccagtttaccaccaaactggtagtgagtttaacatatcttttttcctcacatcttcataccacttaaccctg

SEQ ID NO: 19256 - DNA, 201 bp, Bos taurus
atcttccaggcaagagtactggagtggggtgccattgccttctctgattctaaaggcagatctgcttaatcaatccatgtcatttatcttcctagattgccgtacctgttagtagtagacattcattgttcagaattgtgctattgctacttctgtttctgtacatgggcttcaagttcaaaagtaaaacacaagatcaga

SEQ ID NO: 19257 - DNA, 201 bp, Bos taurus
gaaagaaggatagctgctgtgtcaactgctttcaagaattatggagggcaggccaaggaaaaggcttaagaataatgtaatagttgttctttagtttttttaaaaaatgttctaaggcactggttatcaagactttccctatgaaaacttcaaagctcagttttcagatcccagattaagatgctggataaatgcacagta

SEQ ID NO: 19258 - DNA, 201 bp, Bos taurus
ctacatgagaagggccatgtgaaagaatgttcagtgccgaaccacttatcttcacaaaaacctctggttaaacttaatgtttgcatccccatactaaaggcagcattggcctctggaggtatagcaggatttttccaaggcctgagaactaaagcagaatcataagacttttcatccataacattcagcttagcattagta

SEQ ID NO: 19259 - DNA, 201 bp, Bos taurus
gcctggtgtgctgcagtccatggggccgcagagccagacacgaccgagtggctgaacaacaacaagatagcataatctcgcagcctgcagaagagagacatgtggggccctctagggtaattcctgcaagttgtctcaaagagacactttctgaggaccaccaagcgtctacctttcctggagagcaattaataaccaact

SEQ ID NO: 19260 - DNA, 201 bp, Bos taurus
tacactgagataacattcctacccagaggccctctcttccgttcaagcctgttctcctgcattctggtccttttattaccccttatgacatggcacagcactctatgtcaagcctccatgtttgcacactactctgttgacctaatccttgactgctggaaaacacatctcttgcatgttaactattcaaatctcatctcc

SEQ ID NO: 19261 - DNA, 201 bp, Bos taurus
ccagaaagcaccttgaatgggtgcttgaatgggtaaaactgcaccacaaagcgactcaaggctttatcctgcagcctaggactttctgtacaggcgaactagccgtctgtcgcgcccctctgcgtggagccccctattgcgcgcatgcgcacaccggtctcaagccctcgccggaagtcagagccggcggaagaggcagga

SEQ ID NO: 19262 - DNA, 201 bp, Bos taurus
ggaaggccacagtgtagaaatgaaagaaactagacagatgtttgcaggtcagtgttacctgtgggaagttcgagtgctgtggtaatatactatgggggtgctcctacttcttccaagtggtagaagagtaaaggacaccagtgaccctcatctgggttttgcagtgcaaataatttcatgggattctatttcctcagatga

SEQ ID NO: 19263 - DNA, 201 bp, Bos taurus
cctctgtcacttggaatgcattctcaacttctaaccattcctagaaaagtgtggattgtaaaaaagcttgtctctttaaatcagagactgaatcctgcattttaaactctgtcctcaagaccttctggagatccagatagtaggtaatcagaatcctattgcagaaaagtctagaaaattaagataagccgaggataagcg

SEQ ID NO: 19264 - DNA, 201 bp, Bos taurus
agtagattagattattagatttagattagattcaatttagaccctattagatttttcaatattgacaccctactattgaaaatgagaaattagctttcatataattcaacactcaggcacatgcacacacacacacgcttttccactcatcttcccacgatcattttttgggttagatcagtattcagtattatattatca

SEQ ID NO: 19265 - DNA, 201 bp, Bos taurus
cccagcctgtactgcggaagttccactctagacagctgagatctctcagctccagttttgctcaactggactccagccctcacccaggggccctcacccccgtctccagcactgggttccatcctgcccaagagaaggcatctctaacaagtgcttcagcccacttcctggtcaggccggctcagccgcgcttctgggatt

SEQ ID NO: 19266 - DNA, 201 bp, Bos taurus
gataagtaaactacttctgcccagagggaaacctgccaacctcagatgcgaacggtctgcggaaaccaaaagctctggacttaccaaggtagggaatcttgagagcaaccttcccaaattaagcagaaacctcaaagcgctatgttctcagagataataaacgagttctccaggacaataccccaatccacctcatcagcc

SEQ ID NO: 19267 - DNA, 201 bp, Bos taurus
aagcaggaattctgccttcaggctgtcttctgatttatgactccaacatcaactctgccctggtccctatcctgctagccttctctgaagacctcaaaacctgctcccacaactgcatgaaccaatttcttaaaagtttaatagacagataggtacacaaacactcagaggacacaaacaaaaccttgtgtgcaccaggat

SEQ ID NO: 19268 - DNA, 201 bp, Bos taurus
aaattacatcttctgtgagattctctaaaaagtatgcggtttatacacacatctttacactcatgaatttcactggtgtgagttaacaaattgacaaatagataatgaataaaagaactagagaatatatttcgaactaaaaggagtattccattcagcacctcttgttatttttaaaccgtgttttactaccgttaaagt

SEQ ID NO: 19269 - DNA, 201 bp, Bos taurus
cttattgccattggccgaggccacctgtctatgtctgcccaagtaactagtgctatgcctgtgtgagcaagcatggtggtcagatgtggcaatgactggccgctgaactctgtaacttctgcaacaggtagccagaaggtggatgacgattcctgcatctccctgtatgtcacttcctctatttttcttggaccacaagct

SEQ ID NO: 19270 - DNA, 201 bp, Bos taurus
aattgaggtggggattaggtagtatgttagaatcccagacatacctgaatctgttctgtcaattacctttgtccctgttcagggcccctagggaagataagtgcaggcaatagcagccaaatggtaatcagaataccactttattaattgcttgagctggggccaattacccttgatgcaggtctctttggaaagaagtgg

SEQ ID NO: 19271 - DNA, 201 bp, Bos taurus
taggtgcttggagaccagtaatcaagacttgcaaatagatgggactctgcatgtcatgcgccaaagaactgtcgtgtccatcaacgtgaatcagtcaataactgttcgatcaattcatgccttaaatttttgatgatcttctttttactgaactttcttgtggcttggaaccttttgtttactgtgatagaattaaatgat

SEQ ID NO: 19272 - DNA, 201 bp, Bos taurus
ggacatgactgagcaactaacactttcgctttcaaacaggtaagagactgctcatgccttcctttgtcaaatgctctagatggctttcagtgcttgttttctttgtgttttttcctttgctctgagtagttggttgtcagtgtgttagctttgaatccctttcatgccagaagccctggacaagaggagactctacttctt

SEQ ID NO: 19273 - DNA, 201 bp, Bos taurus
gctggaatgtgatccagaataacatccctctgtatccaacatttgtcttgagcatttttattgcctctcttttccctcatctcatctcacttcttccctctctctgttcaacagatttacacagactgggccaaccactacctagcaaaatcgggccacaagcggctgatcaaggatttgcagcaagacattgcagatgga

SEQ ID NO: 19274 - DNA, 201 bp, Bos taurus
ccacatggtgtcaggccctgactagcagggactgcagccacgcagcatagctggattctatgcccagtgccctggttgtcccactgatggtcttggtgaacgtgtaaactatcgctggccgtcaggtgtcagtcagtgtgtgatcatgagtagaggcaaaggccttgctagagtggctgggaaggaggtccggagaaggct

SEQ ID NO: 19275 - DNA, 201 bp, Bos taurus
cagcagcagcagtaaagatgttgaacgtcttttcatgtgaggctccatctttcttgattatttcatttcaaaggaatgagtctttatagatacccgagggaaaaaaaaatctggtttgtagaagatttacatctccaagtgccagagaaagtataaagtaaatgccctaagaaaggcaatataataagccaatagttaaga

SEQ ID NO: 19276 - DNA, 201 bp, Bos taurus
agtggaatacatgaattaaaacctaaagtcctgcaagaaataagaggatattgtgttgtatgtagtgatttttttatttttttcagagagaatgaaattgctaggtaattgctgtattctaacaatgatattgcttccctagaaattgtctggttcttattacagagggaaatatggttgccctaaaaaagaaacattatt

SEQ ID NO: 19277 - DNA, 201 bp, Bos taurus
aaaacactatacttggaacaataggtgaaactacaggaaacaggaaaagcaaacacacacacacacaacacatatacacaatccccaacaaccttttagcaggaagtaaaatcttttgaggcgagatcctctaaatctttactttaagacaagggtgtatttaaaagaaacgagatttcaatagaccttaacgaagcttga

SEQ ID NO: 19278 - DNA, 201 bp, Bos taurus
tggctgacctttagaaatcctgtagtttatttatgaatacctgttgtaagttcttgacttctattgtttgtggaagacagttggtttacatctgctaatttgcgtgaacttagttttcatatttgtaatctcaggagagagaaactcagagagagaagtttgggtcaaatacacaattagagcttaacaaatcttgaacag

SEQ ID NO: 19279 - DNA, 201 bp, Bos taurus
ggcttagttttgtggtccttcttttataagaaaaggaaaagtataaaatattaaattacatgctatttagaatattgtttatcacttatttttgctttcttattcctaggtggcttcacttgtagaaaaactcccgttaaatattagatgatttatcaaattcaaaaccagctggtcctactacctttaataattgtgtat

SEQ ID NO: 19280 - DNA, 201 bp, Bos taurus
ttcttgcttggagaattctatggacagaggagcacccatggggtctcaaaaagttgcatatgactgagcaactaacacttttacttttactatatttccttttggggagtacctatgtgaggaactgctgagtagtaatgtaatatttgttttctttgtataaaaaagattgtcaaacttttcctaaaaatgaccgtggta

SEQ ID NO: 19281 - DNA, 201 bp, Bos taurus
agtgtataacatctagtcgtctttcataagctagaataatatgtagagtaagtcttttccactatgaagctaagtgcaaaaggagccaagtgagtgaattctctcagttttgaagagaagttaatttttaagtgcttttacattatcagagtactcctgacttgtgttcaacaatcattaatactaatgatgtttatgtaa

SEQ ID NO: 19282 - DNA, 201 bp, Bos taurus
catgatggtcaagaaaggggagaaaatgggtaaagggaagatttgagaaatgtggatatagagtggaggacagaacagagcaataactgatgtgtgttcacgtgtgtatgatgtgtgtgtgtgtgctgtgcttagtcacccagtcctgtatgactttttgcgaccccatagactatagcccaccaggctcctcagtccatg

SEQ ID NO: 19283 - DNA, 201 bp, Bos taurus
tgtgtcatggaccactggagcagaattctttgatctagagcaaagtagctcagtcattctgctggtgaatggatgtaacaccatcaatttctggcctcacgtcattattatttttacctagctattggatattgtggttctgggtctgtccggttcactctgatgagtcaggcactaaagtgcaccctccagaaaagatgc

SEQ ID NO: 19284 - DNA, 201 bp, Bos taurus
agaaaatctataggttgcccaaggcttgaattgggaaatacataaagtaataagctctgcttgccttggaaagggaaaagggaagagagaaaaagtttaacgtatcacaaattttatgaaaagtatggcactcatgggattttcatttgcagtcaacttttgcgctcatttccttttcatgaggttgaaacccacaaaata

SEQ ID NO: 19285 - DNA, 201 bp, Bos taurus
cagaatctcttatcagtaggtttctagtttagagtccaccaggcagaggccacaaagtttgaaatgccaagggaaacagaaatcattgctcttcatccaagcaggagacctcctgggcttcaacaagagatgctttgcagctccactgcttcctcctggaagttattcctctggtgtagcagtgacctgagatcatcactg

SEQ ID NO: 19286 - DNA, 201 bp, Bos taurus
atacttgcagacagcaatgtatcattactacagtgttctacaaattttgctaattatgtgatctgcgctagtataagaatattaactataatttctgatgaaagtttctattccaatataggtttatgacaatattaggatagtttctttgactcaaattatgagaaactgaatgaaaatgatgcaactcacactacagta

SEQ ID NO: 19287 - DNA, 201 bp, Bos taurus
aggtacttttttttaacatgcaggatctcagtttctcactgactatgagataaaggttgtttaagtctccaagtcttaaaagggcttataagtgttaaagatatcaattattcactcattgtgtgtatagtataaagaaaatgatgaaagagatgggagacatacagtaaattattacaaaactatttctttagagttgta

SEQ ID NO: 19288 - DNA, 201 bp, Bos taurus
ccatgccacaagtattttgttgagagcttatgttacgacaagcgttgtaccaggcataggagacagggaggtactggggcccagacttgtccgtggagagctccctgtgcagagatgggaacgaaggagcaccttgactctacatggatgtctgaggcctgctcagaatctaccaaggagggaagactcaccttgactctt

SEQ ID NO: 19289 - DNA, 201 bp, Bos taurus
gggaggagaatgttaacataaaccagtcatgatacttctctctcagttggaagttacgcaggaaactcatcatcagatctgaattctgtagtaactatttcaatggccttctcagtttttattttaaatatattctgaattacttttttagcttcagtaatacttcagctatagtatataacatttatatacattttaata

SEQ ID NO: 19290 - DNA, 201 bp, Bos taurus
acattctttccccttctaatttgccctttcttagtctttgaaaagttatactttcctcaagctcacaaaaattttcagagctttctacttttaagcacattaaatttaaatatatttttaactttaaaaatccaaaccatccaaaacatgacctttctcaattaattagctttctttttcatcaaaaaacagaaactacca

SEQ ID NO: 19291 - DNA, 201 bp, Bos taurus
gggtccaacatagaaacaggaccaaactaggggtctgactgcggtccgactcagaaacggaccgggtttggggctggacctcggacaagttagagactgggctggttccaggtcagtgtgggtccgcctgaagctggactgggcccggcgtgaagcatcagctgaatcctattgtgttttgaggccgaaaaagcaggttaa

SEQ ID NO: 19292 - DNA, 201 bp, Bos taurus
atgccaactgtggagaaaactgggaacatatcctgtacgtgataaccatatgctctgctaaaacttaggagctctaaaattagagagataatgaatagatattggacttctagtatttgtctttagctctttcctaatctttctacatacagtaacttattgtgttgccatctcctattttcaggggtagtattccaaaat

SEQ ID NO: 19293 - DNA, 201 bp, Bos taurus
ttcacttaaccttactgtcatccattcccccagatgagttacacctctgggaacatcattctcactctcttaagttaggctaatgggattaattaatgatgaacacaggcacaatttcaagtgggtgtggtgagggagagaggaacaaaaggatctgaagaatatgctaagagaaaagatcaacaatgccaggaactaaat

SEQ ID NO: 19294 - DNA, 201 bp, Bos taurus
tattttcctgtactaattattttcccatcacagttggtttaatgttttctcatacagggaaaggagacaatagcagtctgctatcctcctgcttcatatataggtgttatggacacaatgttcgtgtcccactaaaactatatgttcaagtcccaacccacaatgtgattagtacagtctttggggggtgattaggtcttg

SEQ ID NO: 19295 - DNA, 201 bp, Bos taurus
caccagcaaagttatttccctttgtatgtatactcaactaattttgcagagtctcatgaagacagggatcactgagaataaaacagaacaggcagttgagcggggtgaggggtggagatgacaagggtatctgctgcttttcatataagctataatttgaggtcagcaaaaaccagagtttgactttatcttttcccctat

SEQ ID NO: 19296 - DNA, 201 bp, Bos taurus
actaatttggggtggtttgttacatagcaaaaagataataggacattttgcactcatctgataggtgaaagtttaaaagaacaataacacccaaggcctgaagggatattggggaaaagctctaacaggtgttaggtacttggtttttccaaacaagtataaacatctggcccaaactagaaaacacacccctccattgac

SEQ ID NO: 19297 - DNA, 201 bp, Bos taurus
taatgaattttaatttcattttaaaataattttaatatatctaacgtacaaatatttcccagaatctggtcatgaaaggttgctctggtcaatatggttaggaaatattttaggttaattcacctatgtaaaattattcttttaatacaaattttctacagcaacaaagtgtggtactatcagaagttatatatatatatt

SEQ ID NO: 19298 - DNA, 201 bp, Bos taurus
acaatacaaaatggtacttttaaaatcctcacttccccactccatatatatgcttaaaaatagaagctatataaaaaatacaagttatgcaaaatacatgcgtccagatttatagtggaattctggagtgatcctgttgtaaactgaaaagttataagctggcctccctgtgctagttgctgataacccgcttcatctgtc

SEQ ID NO: 19299 - DNA, 201 bp, Bos taurus
catgaactggagcccaccaggccactctgtctatggagttttccaggcaagaatactggagtgggttgacatttcctactctaggtcccttttaaaataatgggcctaaaaagagtaatgatatgtgagaatacttttttgttagactggcattactatggatgtggaaacatttttcaatatttagttaatcttaaattt

SEQ ID NO: 19300 - DNA, 201 bp, Bos taurus
ctcccccagccctcctccctcctgggagctctactgatgcctcaaatgggacatcttcaccaaatcatctgactgaagccagggattactatatctacacaggtatttcttttccaaagcaaagggttgttgagtgctatataattcagtgacctgatctttctaatgttcaaatttcagttcttcttattttcttactca

SEQ ID NO: 19301 - DNA, 201 bp, Bos taurus
ctatctgcactgctactaacagaactctattaatgtacctcaagatttatttataagaagatccagctttttaaattcctttttaaaatgagtgacttggagacctccctgtcagtccagtggttaaaactttcttaccagtgtagggacctaatcatggattaggtaactaaggtcctccatgccctgtggtacagcata

SEQ ID NO: 19302 - DNA, 201 bp, Bos taurus
taatgactgactttcttggaaatctggaagcttgtcagtacacagactcctaattctttcacctgtttaagaagcaaccagaaaataattttatagttcccctagtagacatctgtgtaaaatgctgaattgcccattcaattcagatttttttaaagtattttattcatcccagcaactagagagaataaatattttttc

SEQ ID NO: 19303 - DNA, 201 bp, Bos taurus
cttccaaaatgccccagactactgctggaacaacactgggccttcttaacttttcagacaggagccacccacatagatgtggaagccaacctggggcctgatacctcatgtgagtcttcccatcagtgcaggtggataagtcattcctggatggctagtggttgatacacttgatccaagatgtctctcagggccttcctt

SEQ ID NO: 19304 - DNA, 201 bp, Bos taurus
caaggagttggacatgactgaatgattaacacttcactttaaaagatttaattggattttttctgaaaatttggtatttcctcaaattccaatttttaaagtatactattaaaggagacaaatgtatcgtggatatatcctttcaagatcagtcaaaatagaaatagttggttttcatttattgactaaagtttacattca

SEQ ID NO: 19305 - DNA, 201 bp, Bos taurus
cgctgtatgtgaggaagcgctcaacgaagtgtcacccaaatgccaagtgaaccttccccagtcttcacggcaggtgtctcctcacatggccacccagcctattctgatgtgctgacagacctttcacttcagtctgactaaccgtactaattggtctggtcctaccgaacatgcgtgggccacccggccctcacatcatct

SEQ ID NO: 19306 - DNA, 201 bp, Bos taurus
cttaatctccagataagttcaccttatttagtcctccacagcaatgctacaaagtaatgtttattcctttctactctagatgagagaagactgaggcctacagagaaagtggtttacctttggtccactatctagtgagtgtaagtcagaaataaattgagatcgtctgtctccagtgactgttcttttgatttttagata

SEQ ID NO: 19307 - DNA, 201 bp, Bos taurus
ttaataatgacagtgcctagggcaatgtttggataagttttctagaagcctccttgtaaatgattggcattttcctacactcagtgttttcctctaacacaaatcactgtgtacacaggcatcacctggaccttgtaatgtaagtacgtgggaattaaggtttggggaactactggtaaatgatatgacactgactactgc

SEQ ID NO: 19308 - DNA, 201 bp, Bos taurus
gtgcaagagaagtaattgcttctattgtacctttgatcttttgtcctggttagtatttcactctccagtaaattaaatgatatacgtcctggaataaattgtaataaccggtataataatacctttttaatcctgagttacacaatctttactgttcaataagtcaaattaatggaatttatctaaaggatccaactcaat

SEQ ID NO: 19309 - DNA, 201 bp, Bos taurus
ggtgaggactaagcatatatgatggagaatttttaaaagaattttatcagttacaaatgccattctttctttttcctactataagctagttaatatgtgaaaacttgaactatattaaattttgtaacatttaatcatgaatcatcattggctcatttatgttaaatatttctcaaatatgcatcagttatttgatcatct

SEQ ID NO: 19310 - DNA, 201 bp, Bos taurus
gctccagccttgtccctttctgtttctgtccaaagaggaacccagaactaacacactcagtagtgcatatccaacccttgggcccagactctacctctaaccaaggtacacaaacccaaaagaagaaccaactcaatcgtacagctccaaaaccagaggccctggccatgctccaaccaaggcagaaactaccatcatgct

SEQ ID NO: 19311 - DNA, 201 bp, Bos taurus
gttacctgtgtcaggggagtttgtaattccctcggttctgtgtcctagcaacaaaaatttgaattgacagatggaccagtattaaaggcctcagacagactggtgttacagctctgtattacagctcagtttcatttagaaagtaaaggaaaatacatccttgaggtgtgagggcatgtggacccaaaggatgtgaaaaga

SEQ ID NO: 19312 - DNA, 201 bp, Bos taurus
aaactccaatactttggccacctcgtgtgaagtgttgactcattggaaaagaccctcatgctcgcataggttgaaggcagtataagaagtggacgacaggatgaaatggttggatggcctcacctattcaatcaatatgagtttgagaaagctccaggagttggtgatggacaggaaagcctggcattttgcagtccatgg

SEQ ID NO: 19313 - DNA, 201 bp, Bos taurus
tctctattgcttagtgaataaatggaatctactctaacaccacagtaatcctttctccaaggcacttaccaaattttgcttgttcttctccagctttttcaacttcttccaaagctagctctacttcttgagctttcatctaaacattaaaaaaagttatttcagtatgcctttacatcagaatataagcactaaaaataa

SEQ ID NO: 19314 - DNA, 201 bp, Bos taurus
tttaaaaagactagaagagattgaacgtattttaaatggtgaatagcattactctttatcatgtgacagggtttcaaagaacttcagtctatatcatgtgattacttatactgagagctttgaaaatagtgagcatactaagagtctctcatgagctgcctctacgtagtatcaaaataagattttcattgaagacccttt

SEQ ID NO: 19315 - DNA, 201 bp, Bos taurus
ggaaaatctattgccctgtctccgaatagacaaaagaaggtttctctatgcccagaagaaattctcaggctataaatctggatattaattgaaggtgtcaaaataaatatggatgaatcaaactattgaaagttgttaaaataggacaaaaaatgcttgtgtttgtatgcaagattattgattcaggtagcatttcatgca

SEQ ID NO: 19316 - DNA, 201 bp, Bos taurus
tactggccctgagataacacaggtccctatccttgaggaattcagctttacagtaatacaattttagttgctaacttttattgatctcttattatgtatcggccactttgccaagggtattgcatatgttttcttttctttttttgattggtaagaagtggatttattcagatacagagagaagcacacttcacagacata

SEQ ID NO: 19317 - DNA, 201 bp, Bos taurus
gtgcaaagcccggagaagcagaaacatgtagtagctacaagtgtggaagctgacaccttgctgcctgtatgtgtagcccagttctgctactttattgtttatctggcctcagtttcctaatttgtaaaagaatattacctggtttatggagagtctagcaaaaattaatagattattatagtgaaagtcttagagcaaggc

SEQ ID NO: 19318 - DNA, 201 bp, Bos taurus
aggagcctggcatgtgtgtagacaacagagaattcctgtattattaacccctcattctctgacccacagatgggaggccaggttgacctaaacccaaagaaagaaaaagctttcgtgggtgtctggaggcttagaagagctcggcctcatagagaaaggcctgggaaggggcagaggtatgcttgccctacgtgcccctag

SEQ ID NO: 19319 - DNA, 201 bp, Bos taurus
ctgcgcccaccgcggatatctccgggggcacctgaggtcgcggggtctccccaagctagacgccctgcacccacgggcctgcctgctgacgcccccgctccaatttgcatctttagtcacccgcctcttccctggtttggagaatgtaggcttaaaaaaaaaaaaaaaaaggcggctgctaggcccaggttgccaattttg

SEQ ID NO: 19320 - DNA, 201 bp, Bos taurus
gaaaacatttagtgccttcatctacggaagatacgtgcacgtcacatatttctaactcttcattttctttcaggttggtcaaagaataagcaatatatgctgtaaattaaatcaaaatccctgccatatgtcctgtatgtgctgttgctaattaaaataagtgtattcttgctgtggaaattctgtggtttgagagtttgt

SEQ ID NO: 19321 - DNA, 201 bp, Bos taurus
acactaaaattaagaaattttattcactgaaagacaccactaagagaataaaatggcaagccacagagaggaaaaagatgttcacaatacagttatccaatatataacaaagaatatataaagaaccttacaagtcaataaggaaagtcaagaaaacacagtaggcaaataggcaaagggcttaaataggcacttcataag

SEQ ID NO: 19322 - DNA, 201 bp, Bos taurus
aacaaagagaagcacagtattctgaatgagtccctctctgatacattcaaagtttaaggaagtgcaatcagaaaatatcccatacacacaaacaagttcatagagaggacagcttacaaaaccagagcaatctgaggtatcaacatagagcagttaagtctaatagctcaatcccctcaattccacaaagtgtggaatgta

SEQ ID NO: 19323 - DNA, 201 bp, Bos taurus
gcataaagtacaaaaggggccaggaaaatggagcttcaaggaggaatctgtaagagaggggagagaagacggatagagagtgtgctcagagcatggagagtgggcatgtgaccatgtaaggccagaattatcaaggagcaattaaggggcattacagcaacccactccagtactcttgcctggaggatcccatggacggag

SEQ ID NO: 19324 - DNA, 201 bp, Bos taurus
ttaagtgcaaacactaaataacttttaccacggagcaaaaacatctttagattgtttatcaagaccttctggtagatcttgagtctctttaaatggccctgagacaccaacaactctagattttcttctcagttggatataacaccagttatctccttaagcaaatttgaaaaagggcctgtcactacactgtacaaatga

SEQ ID NO: 19325 - DNA, 201 bp, Bos taurus
cccctcccagaattcaatgcaaatgaacttatttggtcaaagagggttataaacacatcataaaatctgacctttccaagaggggattatctataaataactgtggtgctaggcataagcctggtggaggggctgagaggagggtaatttcctctactccctgggcatctcgctgagatgcaaatggctgaagggctttgc

SEQ ID NO: 19326 - DNA, 201 bp, Bos taurus
aaaagccaggaacatggttgactggtccctgggtagtatggagggaaattttgcatctggttaagagttaaaaatataaacaaaaaaacatggctgctatgtgatccacaactggatggaaggctagaagaggtcgctataacaaacacaatcacaatgaaaaagccccaaagattatgagacttaaaaaaatgtgacaca

SEQ ID NO: 19327 - DNA, 201 bp, Bos taurus
aggtttcatgcatttgaaaacagacagttaaggcctgtgattcctgagtaaacatttcggagtctgaatactttcttgcaaatttacctggtaatgaaaatttaaagttccttaggaaggtcctggccatagttttcatggctgttttagctgccctgctaattccgttctgaggatgctatctgagacatttatgtgaca

SEQ ID NO: 19328 - DNA, 201 bp, Bos taurus
attctttcattcatttttggtgaaattgtccattctaaaggcctttattactagacagtttggtaatatgaaacaaaatgtatactatgtatattatagcgttctaacttctagttaaacttaggagctagtatttagaaagataaaagatatgccaaggtttcatcatagcagcatttttaatattaattaattggaaac

SEQ ID NO: 19329 - DNA, 201 bp, Bos taurus
tgaatattttgtccttccctcaggataacatgctgagatctcttccatatttttttaatacatttcttgacctgcccctagactttttggggttgatttttataatgaacatttttcttttatactttcttttgaacacttccagacaaatgaagaacttccagacaaatggaaaaacaaacaaacaaaaaaaacaaacct

SEQ ID NO: 19330 - DNA, 201 bp, Bos taurus
ccctgtgagaaggaggtcagaaaactgccgagtggtcagaaagtgatctgtgtcagagcagagtggccaggggcttatgccaatgaaagatctaagccaatgtagaaagcacgtttttaacaagtaagtagtgctatttaaggagaccagttgcaaaagcagtctcattgcctaattggagagggcttgttgatcatgcaa

SEQ ID NO: 19331 - DNA, 201 bp, Bos taurus
acagtgacagcaagtgacagcctccgccacccacagctttgacctgccccaagatgcatccttattttggcagtcccttctcccccatttcattcttcccggcctttactcgtgactccctgagatgacgttctctagtaaactaccttcatgaaagataagtctcagactgctttctcgtgggaacccaggcaaagacag

SEQ ID NO: 19332 - DNA, 201 bp, Bos taurus
ctgaagctctaagcatgcccaaattactggaagaaatgaaaaactgaaatggatgggactcatgggggatcatgtagaagacacttgcaatggaaagcacctactactcagcacagttcacaaaactcaattatgaacaactggttgtgctgaatgaggtcagtcccaccactgactgatctgatgagaggtcattagaaa

SEQ ID NO: 19333 - DNA, 201 bp, Bos taurus
ccctgagagcaactcacatgcagggcccagagccagtctccacctgcccacccaagtctgttcccacccggctgacaccatgatgactgctgttcacctgttcggcctcacaaagaccccaagtcacctgcactccttcagcctctcctgccctaaatatccacacatttgtgcaataccatcaccctgttgctgctgcag

SEQ ID NO: 19334 - DNA, 201 bp, Bos taurus
cgaaattgcaaggaagataattttaattcaacttctaattggatgccgttactccaattaatctttcaaaaagtggcagttaataaatttttgaaagtaacttgtctagcaaaaaaaaatcttctgaaacatttaacagattgaacagtttaggatattaacaaaagaaaattaggaagcatctatcaaaattttaaaggg

SEQ ID NO: 19335 - DNA, 201 bp, Bos taurus
cttctgcagtttcagtatcctcagtttttctaatagttactcaaataccctggatcccaagctcctcaccagctctctcctagtgatccagcccagtaccccagcatcttaaccaagtaggatgagtccagtagattggacccttccatgagtgtttcctaaaattcctaaaattcattgacttctgcttgctccatcacg

SEQ ID NO: 19336 - DNA, 201 bp, Bos taurus
aaatgctgccctggggaaatttgcccccaaactcggagcccactggacagaaattgaggacctgactctcctctgtattcctagcagccagcagagtctctagcacatagtaggtgctcagaaaaacgtttgtcaactaaatgaatgaatggttaaaggctactatctatgttgctcagttttccaacagccgccaaaaaa

SEQ ID NO: 19337 - DNA, 201 bp, Bos taurus
gcagcccatggagttgcaaagagttggacatgactgaccaactgaactgaactccactaagtgttaatttcatcagatcccaagatctccattcagatgtgctttctcagtgaagcctccataattgaatctgcaaacacctttccaccctatcccacaccctccctctagcccggctccttctcaccccctacatagttt

SEQ ID NO: 19338 - DNA, 201 bp, Bos taurus
gacccactcaagatgaaaaccaaaaccctgcatggcctccatcacatttctggagttatcctgcaaactaccccttcccttcactctctgacttcaggcccctgcctgatacacactttcttccctcttttccagcttacctttcagatctaaattccagcaacaactgcttgccttcccctttaaggtaaatcccctacc

SEQ ID NO: 19339 - DNA, 201 bp, Bos taurus
tgatagagattcatgtacctgaagttcccactgatacaaagatgttcggagggatggagattattagtaaacccagcaatctgattacatttgtgtattttacaaggctccctacaacaagtcttctcctccttactattcctgccttggagtttctcttctgattaatttatttcaaatattttatcaactattatgcat

SEQ ID NO: 19340 - DNA, 201 bp, Bos taurus
tacaacagaggacaatagagtctgaagcttctaaagcctgtctgtaaagagggcatggcatctatctttactggcacaaggggccagttctggctgtccctgcttatcacaaccaccacatctgaacagcagcagcctactcctgggagaatcatgagtagatgccctggcctcttacctgagttgacagggggccagaca

SEQ ID NO: 19341 - DNA, 201 bp, Bos taurus
aggaatcagaatttctagagtgccaaagatgttgctgtgatttcaaggaaagaactgtgaataaagcttggctcagccgtgtctgtagaaaggatgaaactttattagtcatggatggagactggtgtggaatcaacagcccacctgttctcttggtagaaatcatctctattcctgtttaaataattttgatattgtgaa

SEQ ID NO: 19342 - DNA, 201 bp, Bos taurus
tgacagtaggaaaggggaaggatttgcaagagaaaaacctgttagcaaagtaggacagcagtcagatgaaagataacgaaggctttgttagggtggagatacagaagtcaagagcaggacagatttttcaaagataaatttgccaagatttattgaccaaatgggtgacaaaggagtattcaacaatggattttgaatgtt

SEQ ID NO: 19343 - DNA, 201 bp, Bos taurus
gatgaggaggaagaacacataatacaagaaaatgaaaatgaggtagaagaaaagtaagaaccaagatttacgtgaaggattttattctttttttgtgaaaatgttttaacttcaagactagaaattccactggaaagggaaaatgagtgtaagtttactgtgtttaaagctaagatgtgaaattataggaagaacctgggt

SEQ ID NO: 19344 - DNA, 201 bp, Bos taurus
cagcctgggttcccatattcattaagcagtcacctggttctacctcccttcccttagtcttagaatgttttttactttcgccactgtggatacttgtaagttgtgcaattctggcccctggttatacaacatcacgtctacaggaagcctcctgccgtgtgtctcgttcacctttggtctgtgaatgtcattcccagggaa

SEQ ID NO: 19345 - DNA, 201 bp, Bos taurus
cgtaagtgttaaaaaaaaaggagcctcaagctttctccttatttattaccccttcttattgcccgccttccctgccatctttacaaggttctgaaaaaggatgaacacctaccaggagtccatagacaggtctggtggtccccaacccctctgtgggcatgattttccttgccctgcccccacgtattaccatgttggaga

SEQ ID NO: 19346 - DNA, 201 bp, Bos taurus
ttggtgttgagcgctgccacttggccctgccaccccgagatccaattattcccaccatatttaggtttcccagctcagtgactgtaatgcccactgtaaggtctggcctacagagaagagtgatcacagattccaaggattctggggctccctttacaaatttctcacagtagtgttgaaagatgtgtcttctggggacta

SEQ ID NO: 19347 - DNA, 201 bp, Bos taurus
ctacccagcttcttctgggcttgttgcctggggccagggtctcagaggagcatcttgtgctgtcctttcaggatgtggatgctgcctacttgaacaaggtggacctggaggccaaggccaactctctgaccgatgagatcaacttcctccagatgctctttgaggcagtaagatcatgcatgtgtttgtccccctctatgt

SEQ ID NO: 19348 - DNA, 201 bp, Bos taurus
gacccccaaagtccactccccctaccccagcctctagaatagttagaaaaatatctacaaggctgtctgtccattcctgctgtgccactgggcccagaggacacacagacgagggctccctgggcagctgcatcaggacccttccgcacattcccttccagctcctccttcagcctggcccagagctcagcctggggcccc

SEQ ID NO: 19349 - DNA, 201 bp, Bos taurus
agggccagatggcttctctgatgagttccaccaaacgtttaaagaattaatatcagtccttcataaattcttccaaaaaataggagaaaagggcacacttcccaactcattctgtaaggccagtattgccttgatacaaaaccagacagagacatttaaagaaaagaaacctatggactaatatcccttatgaatatagac

SEQ ID NO: 19350 - DNA, 201 bp, Bos taurus
ggctcgcatcgccgaggacgagacggtggtggtgagcccaaacatcgtcaccattgacctgaacacttttgagttctccaagcctgtccagaggggccgagtccagagtcggggcaactttgactggagcctgaccttcggctgggaggttttaccggcacgagagaagcagaggcgcaaggatgagacctaccccatcaa

SEQ ID NO: 19351 - DNA, 201 bp, Bos taurus
agtatttttatgatgtatggcaaaatgcctcttagctcagatcatctgaacggaggatcactgcacgggtctgcaggcctggccccgttggatacccttgacgtgggctgtccgtccagtcccacactccaaacgttgggagtgtcagtctccaagaggctgatggcctggggtcaaaactcctcctcactcgactcctag

SEQ ID NO: 19352 - DNA, 201 bp, Bos taurus
ataggttctttttcatatgcaaaatgggtggagtcatttgtaagagtggtggtttagtcactctatcctgtctgacttgctgccccatggactgtagcctacctaacttatttttaaagatagctgctgctttgggtttaccataaagtcaacgtgttctacatttctagaagactaaattcagctctggtcttaatattc

SEQ ID NO: 19353 - DNA, 201 bp, Bos taurus
tatataatttaaatgcctctcaccctcttttagttactcaggacagttacacaccctcctatgaagacataggtctccttattaaaatttcattttaatgcatgacatatataaaaaggtttatagtatgtatgtaggttttaaaactttctagaatgtgtacttgtgaactcatccccaactcaagagctagaacgtgtg

SEQ ID NO: 19354 - DNA, 201 bp, Bos taurus
cgattgcaggcctgagtgatcctggctttgcttctgcagtgcttcccatgtgtcctgtactcagtgaggatggggagtgagcacctggagtcccagcaacattgtacagctaagctaggccttctttcaggaccttctccccaccccatagctgcctctgtgcccctctcacctttaaggccccacagatctctactgtgt

SEQ ID NO: 19355 - DNA, 201 bp, Bos taurus
ctctacttcttctctaactccccctgatttataatctccccaattaactaatttatcccccacttctccccatacactcttacaccccaggtcccctctaatttttcccctgactctaaactcgcttctcatcactgagctgaccacagtttaccattggttactccctgaacccctaatcgctccctcagcctccagttc

SEQ ID NO: 19356 - DNA, 201 bp, Bos taurus
gagaaggtgagttctttgcttgcagaaataagagggcaagaaggcatcttgagtttccatcagaagactgtagggttctcaattgagttaactgtgggggaaaaaagtcattttgggctatgaactgaccctgtggcactgaaagggatcttgagttcctaaattcatgcttcagttaccgagcggcacaaagtgacaagg

SEQ ID NO: 19357 - DNA, 201 bp, Bos taurus
gcggccggccgggcagggccttgcggggcggtccggccatcgcgggcctctccctgactcgggcggggcagacctcctggattggagccggggcgtttggggataatgagcaccaggccagcctgccctggacttggccatcctagcgtctactctctatttcacctttcgtcatctcttctactctgtctctgtcagtcg

SEQ ID NO: 19358 - DNA, 201 bp, Bos taurus
tctaggctgtgcgcaggtggcttcttcctcctgggagaccttctccaccctcctggctggcttctggccccggcctactcttcctccaagatgcctttcccgatgacccaagactgcccctcctgggcgttcctagagtactccagactttccttatcacagagctgtcacaacatggtgttgtctctgctctggcctgcc

SEQ ID NO: 19359 - DNA, 201 bp, Bos taurus
cagggaggcctggcatgctgcggttcatggggttgcaaagagacatgactgagcgactgaactaaactgaagaaccagtaatggtaatacaaagggcaaacttatataacaggcctatacaaagtagaagactatatatgagaagacagataacagcactcacatttattatttaggttctaatagcttctttcagtcttc

SEQ ID NO: 19360 - DNA, 201 bp, Bos taurus
agagacgagtagcaggtggctcacggcagggaggagctaggcccatcgtgagcatcccagctgcccaggctgaaggaagtaatcctaagttgaggactcaaagccaggggggtcaccttggcctccccctcctccagtgctgctccctaggactgtggctgctttctgcccctagaaggggacatcttcatcttgtacagc

SEQ ID NO: 19361 - DNA, 201 bp, Bos taurus
gggagataatgttagcccttactttgtggagttgaagtgaggattaaatgagataattcctcgaaagtgcttggcattgggtttgcaacaaagtgataatattgtgttctcttgttgctgttgttcagttgctaagtcgtgtctgactctttgtgactctgtggactgcagcacaataggcttccctggccttcaccatct

SEQ ID NO: 19362 - DNA, 201 bp, Bos taurus
tgggcagccgctgctccttggacgtggggttgctcctctaggcctctgcccctgacctcgggcatggggtatacaatgtggtctcctctaaacagactctcacatatgtaccacctggcccttttttaactgtggatgctccacagttacatgtaaaatgttaattcaaattgcatcactcctttgttttaatccctttag

SEQ ID NO: 19363 - DNA, 201 bp, Bos taurus
aagtaagtgtgtctatgaatggtggcaggggacaaggttgtctcatttagagacgtcaggtcagtgtgtggagcaggggcggaatacaggacctgacctgctgccacagactagccaccacttctctatgctcatcctgttatcacaataggaaaagttgtcacgtgacttagggattgcaggtccctaagaccttagaac

SEQ ID NO: 19364 - DNA, 201 bp, Bos taurus
tgtctaagcatgacatattagaacttaagattcaacattggcgtagttactgaccataagactaagggtgttacagactacagggaggcggaaaaaaaaaccccaaacaaaaaccattgaagttggggtcaggaaatgttgtggctagggttcagtgggtcaccacaccaatactgaaatccctcaggataatgagaagga

SEQ ID NO: 19365 - DNA, 201 bp, Bos taurus
tttaaaagatcaatatgactatttgtagaaaatggatgaggagagggagggtaggcaagaaaggatgaaggtatcaattatgattgttgcaattgacaaaaggagaaggcaatggcaccccactccagtactcttgcctggaaaatcccgtggacggaggagcctggtaggctgcagtccatggggtcgctaagagtcaga

SEQ ID NO: 19366 - DNA, 201 bp, Bos taurus
agcacatcattcgcatgaaatagttcttgcatcacaagcgattttcttgtattctcatttggaatgagagacgaatagtcatgagtttaaatatagttgagttagaatgtcaagaccattgctaatagtatgttctaggcacactagatgttatagttggacaaaaggaacacttcagcaggaatgtgacaataactcagt

SEQ ID NO: 19367 - DNA, 201 bp, Bos taurus
tgtaggataaggtggagcagactaggggtgtgatgggacagcctaggttcatggagcatatgatggtgatctccagtggccttggcctgcaatgtcttgaggtgggtcttgggttccccaccagaaattgggctgggttgtggcaatgaaaacaccagatcctcgcaactagaccagtggtcagtgacataggccctgatc

SEQ ID NO: 19368 - DNA, 201 bp, Bos taurus
gattactattaacacaaatagtttaactgataagagaaagtgatgggaatcgatttccaaattgttttcttggacactttgttttcgaaggcttgattacgcaatacggatctgtgttttccaggcaaggtctttttggttgagcatcagtgaatcatttccttcatattcagatgaaagatatgcctggttaggtcaggt

SEQ ID NO: 19369 - DNA, 201 bp, Bos taurus
tgcatattgtatgattccaattacatgacagtctggaaaaggcaaaactatacagagatagtgaaaaaaaaaatcagtattttagcaggggttagaaaggtaggcagttaggagaaatgactatgtgaagaacggaagattttcagagtggtaataatattctgtatgacactataacggtagatccatgatatgcacggt

SEQ ID NO: 19370 - DNA, 201 bp, Bos taurus
gactaataaatatgaatttccagagcctaataaggtttctgattttgctttctacatatttggccacttataaaaacatctatagaatttcctgataccaagttccaattcatatcattttttcaatttacatttttatttttttgacaatctctgctgtacagtcatgtgtactatataaagtgtacactataaagtggc

SEQ ID NO: 19371 - DNA, 201 bp, Bos taurus
tggtccccatagaaccccgaaactcatcaaatcttgttttcaagatcttttatagagcttaatctgtagcactttccttcacctcctcagaggttggttgctggggctggaagttctaactctaatcacgtgggtgactagccccatcctaaggctacccaggagtatcaccctaagtcacctcattagcataagctcaaa

SEQ ID NO: 19372 - DNA, 201 bp, Bos taurus
taattctgttccctgtgctcttggcataacttttcacagaactatcttgaggtcttgggttaaacatcacttctatatagaattctactctggccacccagtctaagtagccagactttttattaatctcataacatcacctagtttgtttcttttctagcactttttacaatttttgattgtacacttgattattaatgg

SEQ ID NO: 19373 - DNA, 201 bp, Bos taurus
acttggcaatgagtgagccttagctaaaaatagaatgaattggcactaaacactgctacgatatgctgtatctaagcattaatatgtgcaataaatctgatatgattaggatatttaaatggaatttatttgtcttggcatgtatagatatttttatatattccaaactctaactagcactgcccatgcagaaaaaaatga

SEQ ID NO: 19374 - DNA, 201 bp, Bos taurus
ttcttagaaggtaatcttcgttttaaaaaaatgtttatagcagagtttggcaatttagcagatgatatttcaaaatgagaacaaaatcttccaggggtcattctcttcaaatcaacataaagacgcagtgaattaacaaagctcaggactaaagcatgacacttatctggtcactttgggggctagaaagtgtatagttca

SEQ ID NO: 19375 - DNA, 201 bp, Bos taurus
aagagggaagaccgaagtctaatcttggattaacaacccatcatttatacatgctcaattcattaaaagtaagccactagattcaacctacaattaaggaaagaagaacacaaggacttgaataccaggagaagggtcactgggaccatgtcagacactgctgattgcacacacagttacaatcatattcttatatgacat

SEQ ID NO: 19376 - DNA, 201 bp, Bos taurus
acttgagaaactaggaaagaaaccttatcaaatatcaaatgttatttactagtgagaaaacataattccctcctggttccccagagtttaggccatcctgtcatcactccatcccacaagatccaatttggtatcaccattacccttccagaaattggaggtttgagtgtgtatttagatggtgacaaagccagtacatta

SEQ ID NO: 19377 - DNA, 201 bp, Bos taurus
agtttcttgtcacgttagggtgtccccctatagccataaaaggttgtttctctaattccaaagtaattctgtaatttgtcagaggccactgctactggtacgtcataggatcacagtcacacgtggtctgttgacttcctttcctctgtgcctgttcatacactgagctcacacacttgctgctaggcctctcatgacacc

SEQ ID NO: 19378 - DNA, 201 bp, Bos taurus
tactcatcagttcagttcagttcagtagctcagtcgtgtccgactctttgtgactccatgaactgcagcatgccaggcctccctgtcctactcagactcaagtgaaaatgacttttctgatgatgtctagtcaagacctcaagacatgataactataaaggaaatgaaaaatgcaaataaggggcctggaaattcagtgct

SEQ ID NO: 19379 - DNA, 201 bp, Bos taurus
cttagggtgatgtatggaggcacctggataaatctccagcctgcagtaagtagccaaagggtagcatttgctgagttgtgtgttgcaaacacatggtgaaaaattataattttatcaggagatttgaaggaaggcctgggaatatattcaataattttgagaaaccgctataaagtcttcacttgctatgttcctgaagat

SEQ ID NO: 19380 - DNA, 201 bp, Bos taurus
gagtttgagtgaactctgggagttggtgatggacagggaggcctggagtgctgcaattcatggagttgcaaagagtcggacatgactgagcgactgaactgaactgaactgaatgtatatacagtgacaaagacccttctttaaggctctctcttgctttaatgcagtggaactcaggggaacaatttctaccaccttccc

SEQ ID NO: 19381 - DNA, 201 bp, Bos taurus
gaaacatcttggacacaagttttcagaggagatccagacagatataagcagaattttgaagctaaccttttaaaacaagcttgagctatattataacaaactccccaaatcttagttctctatttttaaatcatgtttgtgtgtctatatcaagtaatatttttctgaacacatttcagctagtatacaaccatcaaatgt

SEQ ID NO: 19382 - DNA, 201 bp, Bos taurus
tttgttcaacttaatcaagaaggaactatcatagtgaagccagggagatgaggatgagcacaaaatgtgagcagggcaggaggtcttattatattaacagcgagaacatacagtaataagagagtgaagataacacttcaacatttaacttgcatttgcattgtacaatgatgacataaatcaaagcatagaataattaca

SEQ ID NO: 19383 - DNA, 201 bp, Bos taurus
aatctaatatttcattgaactaatgcttatacaggcatttacattgaaagagaacaaaatttagaaatatggataaaacattaatatgtattagcaagtggtggcatctgttttagaaagaaaaaagatttggcaggatttcaggaatctattctgattaatcctcaacacagctcatacaaggtcatgttaaaaatattt

SEQ ID NO: 19384 - DNA, 201 bp, Bos taurus
tgtctaggggtggctgtcagctcagtatgactttaggcagcctatctgctgatgggtgtgtctgtgtttccactctgcttgttgtttggcctgagacatcccagaatcagagcctgaggtctgttgggttggaccaggtctcagtgccacaatggtggacctcctggtaagctcactcagcaaatattccctggggccagt

SEQ ID NO: 19385 - DNA, 201 bp, Bos taurus
gttgcagaattctaataaggtctgtgtgttaagaagagaattttggctatttaaactgaaaccaaaggaaatattgctgaagtctgctattagatgaaatataaatttattacctgtactccatcttcacaaacttcatagcttttactaacagccttcgaacaatcatcaggaattttactatcggcaatgtgctcattg

SEQ ID NO: 19386 - DNA, 201 bp, Bos taurus
gttggtgatggacagggaggcctggcgtgctgcgattcatggggtcacaaagagtcggacatgactgagtgactgaactgaactgaactgaatgggtttggtgtgacttttggcaacctgtgtattgaagctcagctatgttcctgtgttgttggtgaatttgcatggtatgtctttctctggaacttgttggcccttggc

SEQ ID NO: 19387 - DNA, 201 bp, Bos taurus
gaacctgggtctgcccaccagtgggccagcaataaccctgggacccctgaaacttctaaactagcagtcttgggatcctgcccaacacatcagtaaccagtagcttttacacaaggcagggcctggcaaccaaagggacaaagccagccatacctaatgaactgcctacagtagtcaacttgccacgacagactcatgaag

SEQ ID NO: 19388 - DNA, 201 bp, Bos taurus
ctgagccaccagggaagatatgtggtgaaggatattcaaatgcagacacaaggacaatgcctgcctcccccacaaggcctcaaacattcttaaggggggaagaatttgcagtgggttctccccacagttttcgacgatgacccatgtttcactgtcctgtgtgctgtcacaccaattgttcagaatcatgtaaatctctat

SEQ ID NO: 19389 - DNA, 201 bp, Bos taurus
ggacactttagtttacttattttaagaacacttgaagataaagcttaaaaattggtttggatttccttgacatcacagttcctaggccgtaacaagatgtcctcttgtaaaacagattacgctaactgaatcttccaagtggttgtcaggacaaccttttccttcttctcagctaggattcaactgagtgttaacctggat

SEQ ID NO: 19390 - DNA, 201 bp, Bos taurus
gcagccagagtcagcacctcagtctatggatggctggaatgacatcttgggttccctggactactccacccttctccagcaccacggaagaggtaagtgaagagaaaggagtgcatggagtgtgtcttgggaaggcctcagaaagcccattgcttgaaaagactggaaataatttgctggaaataatgctacttaagtggg

SEQ ID NO: 19391 - DNA, 201 bp, Bos taurus
aaattttaggggagaaagtatacttctgatttaaataatctaatcccttacttaaagtattaagtaatttgcagaagtgaaatacaagtatgactgaaaacatgattacggtctcgatcaggtcaatatttttcaataataccatgataacatcaagctattaacttataatactaattcatacagaaggcttcttatcag

SEQ ID NO: 19392 - DNA, 201 bp, Bos taurus
caaggttttctgcagaagtgacttgtgaaaagtcttgaagaagactagaaagaagaagcagcttgaactagggccaagggctgagaaccagtgcttgaggagtactagagaatagagtaggatgtgaggaattgagggccaaatgatggccaaaaagtcaggcagagtccagatcattcagggcctcatgtgatatgttaa

SEQ ID NO: 19393 - DNA, 201 bp, Bos taurus
atcccctcctcctattgtgccccccaggttcctcccttctggcaaccacctgtttactctctgtgtctatgaacttattttcattttgctttttgtcaattcattttgtttttcacacttgtgagattctgtgagtgccctttaggagcagagttgctatttcctgtagctctccacctttctacctctcctgaacttaag

SEQ ID NO: 19394 - DNA, 201 bp, Bos taurus
actacagcagcttaattactgtcgtaatgcattcagtgtttggagacaatatgaaacccttattatacactttacaattaatttgcaattaatttagatacgcagttgtgctgtacagaataaaatgcacaagtataaatataaatgatgaataataagccataatgaacgatcaggatctggaatcctctaaaggacaac

SEQ ID NO: 19395 - DNA, 201 bp, Bos taurus
agctagaggggttcatcaactccaagccatgtactgtcaaccccaagaagtgacctgcagggcactgccccaggaaaacctccacctaatgacctagaatcctgggagtctccccagtcttccttgtacaaatagtcctgcattgatccaggaagaaagaagctaaccagttctttcaggcggaggtaacatggcccagtt

SEQ ID NO: 19396 - DNA, 201 bp, Bos taurus
aataagtttgcaacttccaagcttcactagttctggatggtcaaaggtagaggcaatttcaccacctatgaacaaaaatattcattaattaaatgcacaataggtttgaaatttccgctttcttacaagcaaaaatgaacagaaaacatattaagttgactgcttactatatgccaagcactctgaagcactttatacaaa

SEQ ID NO: 19397 - DNA, 201 bp, Bos taurus
agaggccctgcatcctagtaataacggggaaggaagggaaggtgggcccagggaaagatgtgaattctgttttgatggccagcagaggaaaattttgtatgagttgcttctgttctgtctttgtaatatgaggccaggtcatctactgagagcacatgtcaaataccagtggttgggcatgtttactgggagtttgaaaag

SEQ ID NO: 19398 - DNA, 201 bp, Bos taurus
aaactctaaggtcttcctcaagctttctggactctgttgtttcttgagatggtggaagtttctgggcaggggattacctacagaagtttcaaaaaactattgttgactcatcttttggggaagtagggcttagagacaaattttgtttgatttagagaaataaagcaaagtggtggttcttgcacccatttatggtatagc

SEQ ID NO: 19399 - DNA, 201 bp, Bos taurus
ttatatcaaataccaacatgcatttgggttaagggaaagagattaaatcagaacttcctatctggtgatttaaagcaattggtattctttctagctctgtggtcattcaatgcaatgtaagatagtagtttgctgagaaggtaggaaatccttatttgagtttgtgtgcaaataaacagacattaaataaaaaatacaaaa

SEQ ID NO: 19400 - DNA, 201 bp, Bos taurus
ttagatccctcttcacccctgaaacgatgacgacaggcttccttctcacctctggcattcccacccccatcggccccaccctggcctgtttcaacagcatttcctcaaagcctccttccctaacctattggatattaggtccccagttatactcatatcacctggccctttaccctcacagcacaattttaatgtctcatt

SEQ ID NO: 19401 - DNA, 201 bp, Bos taurus
gccctcctcccgggcggcgacaatctcgcctcctaccaacaaaatctccacaaacccacgtgccccgcgccccccaccacgaaaacctaaaggctgcgcgaggggccgagagcgagccgggagacacaagtcacagagcaaaccccgaactgcccacgcgcttccacgccgatacctgatgctcactaactggggttttcc

SEQ ID NO: 19402 - DNA, 201 bp, Bos taurus
ccagagaggagcggctgcacccatcacgtcgcactgtaggctcaacgagtccgacttccaggagccctacatcttcaaccacaccttcactctggctcaggaggtactcatctcagtctttctcttttgcatcttatctacttggaacctgaatagttcttaaaatttcttcagaggacatctaagatctttaacagatga

SEQ ID NO: 19403 - DNA, 201 bp, Bos taurus
aattcgctatgaaacatttttacatttgtgtttacctttcaatcataacttgaaactaatacagccatgttctaggttagctgaaagacccatctggatttgattgtaggcctcaacttggaatctgcatttatagatatccatacattggcaacaagtggtattacttgaattgccatgagctagggaggagagatggaa

SEQ ID NO: 19404 - DNA, 201 bp, Bos taurus
agtggcaacctcagatagctagtatttggttgttttctgtgtatctgtgcagatcaggataccaaacaaaaatgactggcccttccatgtggtggccctctacttatagtgcacacccttcacacctgttctacctgtgactgtggtcaccagcctctgtctccaagcatccaggcctggtgctctctaagcacctgtctg

SEQ ID NO: 19405 - DNA, 201 bp, Bos taurus
aagcacatctttggagtccaggaaaagtacctcctttaggtaacaaaggcaaaaatcagtgttttcatgacctgttttaaaataaggctacctaaaatctaagatggcaatggcttcttcttactgcctgggcctgctctcttcttgaagcagtgaatgcctccgctgagtaaaggactttgaagtaataagaattgccag

SEQ ID NO: 19406 - DNA, 201 bp, Bos taurus
gccaggagacccgcctaggcgtgactgctttgggcctcttgttttttattcagaagttgaatttgtaagatcaaaggcactttattcaaggaacagatctgtaggcctcattccatacaaattgtatcgggatctagggctgggacccaggattctttttaatgcacgttcgttttgatgctcagccagatttggaaagca

SEQ ID NO: 19407 - DNA, 201 bp, Bos taurus
ggtggcctctcctgcttctcactttctctgcggcttccgaggcacctccagcaatctcaaggaatcagatggggcagtcgctggtctcggtctccccagcggacagtggccccagccagatgttgcaccggaagccttcacacccctctcccattaggcagtaatggcgcccgggctgcagggggaggggcgccgggcagc

SEQ ID NO: 19408 - DNA, 201 bp, Bos taurus
gtgggttgccattttcctcctccaggggatcttcctgtcccagggcttcgaaccctgtgcctcctgcattgcaggtggattctttacccattgaaccatctgggaagccatttttaaagctggtgatctaaaagtggaaagagaaacaaacttgcagttggcagatttctcctcaaaccctggctgtgccacatgacagtt

SEQ ID NO: 19409 - DNA, 201 bp, Bos taurus
ctagaaaagatctgtatgagccccaacaggtcttcatgtgattaaaaatgctgctgatgagagttttgtatacacatgggcacttgggttgccaaggaggacccccaaggaaagttccaactataaaaaggttccaggctccttgagagagaaaaaaggaaactgagggcctgacaatcagagccccacaccccagacacc

SEQ ID NO: 19410 - DNA, 201 bp, Bos taurus
aacagaacaaggacattttcatttattttaaatacattctatcaatgttagtgtaattccaaattagatcatttgccacaatcaagcactctaaccagcataagtattttacttatctgttcttccaacttttttctaaaagttggctgagtgagtgaagtcgctcagtcgtgtccgactctttgcgaccccatggactgt

SEQ ID NO: 19411 - DNA, 201 bp, Bos taurus
ctgtcatttgccttccagggggccagtctttcttcagcaggaaggattccattcgcaccatctatacttccctgcacaacgagctgaagaaggtggtgaccggccgtggtgcctttgggggcactgctcctcacgtggaagagctcctttcccacctgtcagagcagctctgcttctttgttcaggctcgcacagagattg

SEQ ID NO: 19412 - DNA, 201 bp, Bos taurus
tcaattaatattcatggggctcctgctaggtgacaggcacgatgtcaagcatttggaatataatagaaccaaatggagcaggcccccctcctgacacttaggtcctggaggaggctcttccacgtctggttagacatttgttggctcctccccacaggccacactgaatgacaccccagactccactttctctgccttcct

SEQ ID NO: 19413 - DNA, 201 bp, Bos taurus
agttttctattgagcattattttatgtatgcagtttcttcaactagctataaacacctttgagagcccttccgaagacttctgtccattcagcaaggacacagttatgaacatacacatagtagattcttaatatgctgtgttgtccagtgaagcaaaaggctgacccctctgtgagaaggtatgggtttccgcccatttc

SEQ ID NO: 19414 - DNA, 201 bp, Bos taurus
tttaatgagaagccacaataatgaaaatacataaaaatctatttccataatttgtacattacagaaactaagattaatagcaaaagtaaatggccaccaccagatctgcttactttgaagaatggttccataatggtattctaagaaactgattagaaaagttaaggcctgaccagtgccataactgataataataatagt

SEQ ID NO: 19415 - DNA, 201 bp, Bos taurus
agggatcttcagcacctagcttttcttttgttgtaaaaagctcaatgcaatcttttaatttcacaaagggttttttaggaggtttgtattccacactttcgtgtttttcaaaatcctaaagagaagtatttcttgagttaagaaaacaaatgaaacaaaactaattttagtgatatcatattactatgaatagtcatgaaa

SEQ ID NO: 19416 - DNA, 201 bp, Bos taurus
cagttttgtcctctatgtaagggctttttggaatgtgtttattgacaccatgactggcaatctcaacacattttaaacagtgactatatctatattctctttattgaatatgtacctctgcagtcaaaacacaaactgtgcattacatgagagaatgctattctggtttcaaatggtatctataaaatttccagaaacata

SEQ ID NO: 19417 - DNA, 201 bp, Bos taurus
ataaagcaagtcacaagctttggttttccagtgcatgtaagagttttgtgtatactatagtgtggtctagtaagtgtgcagtagcattacatctaaataacgtacatacctgaattaaagaatgctttatggttaaaacatgctaaacatcatgtgcaccttcagcaagctataatctttttgctggtgggagagtcttgc

SEQ ID NO: 19418 - DNA, 201 bp, Bos taurus
aaccaaactgctgggagttagaagatgtgtgtagtagccagtgtttgggccacaaaataggatgcacggattgaacagcaaggctctgagagtgaccgatctttgagactacaattggacacactctgtggtcctggcttgggcacaatggtgagggcactgatgagaagctagggtcttaaagattttggatatgaaact

SEQ ID NO: 19419 - DNA, 201 bp, Bos taurus
cagttctctggctgatttcccctggcagtccctcctatcaggctctgtgttggcagagttgtgcatggaagcagtttcagagataaccagcttctactaatcgtgctgtttcctaccctttacaccttaggtgcatcacactaataaaaggctttgtacttctcagccttctctgcatcttctggaaatatactagctcct

SEQ ID NO: 19420 - DNA, 201 bp, Bos taurus
aacaatggacatatttcaaaatatttgtttgctgatggtttcctccaaatatttctaattcattgtctttctcttgtctttcattctgactactatatttgctatttgtcttaagtcatttgcttcagaatatattgagcatgtcattcagggctcctgccaggtccaatttatagtagatataattacccacacacagcc

SEQ ID NO: 19421 - DNA, 201 bp, Bos taurus
ttgatactgaaatttgttaattgcttcagtttgctagatatctattgtgactatgtttccaatagtaatcaaatatttgttgctgtttgttagatttcttgtgtttcctttggatgtcttacagaaggaactggtgtgccaattgtcattcttttgataaatgcagaaagaatgaatgacctaaacatgtggtattccaag

SEQ ID NO: 19422 - DNA, 201 bp, Bos taurus
aaaaggttacttacatttttgtgttgcttgtaagttagtcaatgatcaactcaactgaaaattatgaatgtatggaacccaaagtccaaatttaagtaaacttacacaaattcactagaggaatccatttcagttgtatttaagaagcaggaaactacatatcttaacattagcatgttttagaactcaggacaaaacagt

SEQ ID NO: 19423 - DNA, 201 bp, Bos taurus
aaacagcagaatgggaactgcttcttttactaagggcaaactaaggttgaaataaagataacctttctattaatactaaaccagaaaagactattaatagatttacagttgagtggtatggcttggtcatagttgtttctttaatactcaaaaggttgaagctgactattcctaaccatggtctccattttctgtataaag

SEQ ID NO: 19424 - DNA, 201 bp, Bos taurus
acctgctgcctcccgaggagatcctccaagaccagcaggtaggtctggcccaggctcctgcgaagtcactgctttggccctgagaccttgtgtgcaggttccaagagtggcatctctgcctccctcagccctgtggagcttctgcgcttaggacctgctggccttcagagcaaatgctctgggggtgggggtggggggctc

SEQ ID NO: 19425 - DNA, 201 bp, Bos taurus
aaattcagcttttctttcaaaatttttcagaatgtcctaaagtggaagtgatttttctactccagccccaagctcctcaatacttctttcaggtaaaagtaaaatgaaaagtaatcactaccttattcaaagttttatgtcacattgttattttcttatatacttaattattaaaactattagatctgtgtattagccata

SEQ ID NO: 19426 - DNA, 201 bp, Bos taurus
aggcattgcttgtggaatgtgaaacagtacaaatcctctggaaaacattttggctgtctcttataaagttaaacatatatttaacatatgactcagccatccaactcctgagtatttaacctggagaaagaagagtttatatttatggaaattcctgtacatgaatacatggatatttataacagctttagggttccaaat

SEQ ID NO: 19427 - DNA, 201 bp, Bos taurus
ttaaaaattctttgtgaaacatacagtcataaaagacataaagtgctcctttcagcaactcctgtgtgaaaaaggaggccaaacctcacattcctcacaacgtactaaaaagaaccctcttaaaacgacacaaattagaaaatgttttgctgatacttgatctcacccaaacttggaggccctcctttaactcttcttcag

SEQ ID NO: 19428 - DNA, 201 bp, Bos taurus
actcaaaagtgaagagatggctgaatggtaattgaacttacggttcagtgattaagacgtgttttaaagggacatgccacattgacaacagcagtgaagccgatgtggaagctgccacagacccgttcctttgtccctttttgggaccctcaggccctgtgtatttgaaggggagcgtgtatggctcagatccttttgaag

SEQ ID NO: 19429 - DNA, 201 bp, Bos taurus
agtaagggatgctgtatgtgttaaagctatttcaaaactgactgagataaccggcaggtaatattcatatatgtacagacataagcaaagctattatgccggtgtggaactacccagtttgttgacctaaaataactaacaaacattcactaattgaaaaaacgaggggaacaacaaacaaaatcttacaactaatagctt

SEQ ID NO: 19430 - DNA, 201 bp, Bos taurus
cactcttgtctgaaatggattggtattcatttttcagatacgaaagtaggcaagagaaataactgaaaatctcttccagtttgtattttattagagcaggaaggcacagaaggcaacagccagagcagtcctgaaccggtgtgagtttcaaaagtcaaccttggtgtattggagcaggttacataaaataactcttttgtc

SEQ ID NO: 19431 - DNA, 201 bp, Bos taurus
aactgtgccattgatgctgacaactggagctccctaaagaaagagttcagccagcccctcaagtgctctaccaggaaccttcagtgagtgctcccaactgcctcacactgcctccctctcaaacatgaatggacagccaaggaagacagggtgtatgaggaaagtctctaatatgatacaaacagcagaaaacatgaaatc

SEQ ID NO: 19432 - DNA, 201 bp, Bos taurus
ggacaggaatgaagaataggttagggtttattctcagaattgtttaaagagccagctgacagtgtgttgcaccggtcttcaaggctcagctgtatggcacttgggagggttacctgctctgtgggcaccaaacatttcctgtcctgactcctttggactgcccctgtcacctccccaccccatacctttgaaacccagtct

SEQ ID NO: 19433 - DNA, 201 bp, Bos taurus
gagcctccctcctggcctgggttccttgccaattccgggaaagaaggcagaagggattgtcctcgctctctgatattcacccttggctggtccccccttccacctcccaaaggccaggcaaagccctgctcagcaggccggtgaggacttggcaagaacaggaatccccggcctggcctaggctccgctttggtatttttg

SEQ ID NO: 19434 - DNA, 201 bp, Bos taurus
atcccccttcttggggtccttgttgaagttctttctaactattgccatgttctgatcctattgcaaggactcactgccctcagtggcctccaggcaccctcgctcatggcttcattgagctcctaccacaggtggtggatctccagcagcagcttctgcgtcaacaatgagacattctccagctccatctgctccttagga

SEQ ID NO: 19435 - DNA, 201 bp, Bos taurus
cttctgagggtttaaagatgaagaatgagttagtaccagtagctaagtagcacctcagtcttattagcttattaaagaagaaataaggagttctctgtccgtgtgtttatctattgaatctcttgacagtacagctttcccactacaaaaagcagggtaaagatcccacagtgtcagacctggtctgatactagctgcttc

SEQ ID NO: 19436 - DNA, 201 bp, Bos taurus
attttgctctacaaatgaggaagctgaagcccaggttgggaaggaaattactcaagccaaacaacagaacccaggtgtagtggccttggaaatgggctactgggatcttctgtaaaagagcctatggtagtgggcatcgctgaccaccatggatgccatgttacttgtgtggtgctcctagttaatgactaagcacaagac

SEQ ID NO: 19437 - DNA, 201 bp, Bos taurus
gagaacagacaccaggcgaaaccaatgcatttccctgaaataggcttggggccattgagttgcatttggggaggggattgtgggcatccagagcatggtccagaagtggtagtgcaatatcaaagtggacacattctctcggtccactgattcttcagcccatgagctctctaaaactcgggattcctcttgcctgggtct

SEQ ID NO: 19438 - DNA, 201 bp, Bos taurus
gctgagacttcatgcaaacatattctcctttcaggttgcatcttcacatagtttctctaagtgttcaaggttaaagagtacaactttctgtatgtggtcacttttttccacacgtggtggcagtgcttctgtttcagcaggttttcatacacacctttttctctttttttcctgtcaacagcagtctccaaactttcacaa

SEQ ID NO: 19439 - DNA, 201 bp, Bos taurus
ccgagcctgaggtgttcttgctgcctggggcccggggttggggtaaagataaagcgacttttcacgttccactttacacactccaaaatcctgtttcgtccagtgatgttgagaggcccgacagccctttggaatactgagcccagcctttgagtattctcaagtaaatgtgttcatttagcaaatgtttactgagcgcct

SEQ ID NO: 19440 - DNA, 201 bp, Bos taurus
atgatgcgggcggggaccacgctggtggagtgcaagagtggatacggcctcaatctggagacggagctcaagatgctgcgggtgattgagcgcgcccggcgggagttggacatcggcatctcggccacctactgcggagcccactccgtgccaaagtaacctcaacagaagggactggagtttaattcgggcagttgaaaa

SEQ ID NO: 19441 - DNA, 201 bp, Bos taurus
aacattcaagttattagcaagagttgaataataaaattagagaccaaaaataacacttgacgattatttagtcagttctcgtattttccagatgtagaaactgagactttgaaaggttaaacgactttcaaaggtcacagagcttagaggcagagccaaaatagaaacctgaacttttatttagtttagtattctttccat

SEQ ID NO: 19442 - DNA, 201 bp, Bos taurus
gtctctcattaaaatggaagggatgttcttcctctttccctttaggtctttgggccatatctctgcaaattgccccttcatcccgatccaacttcctccccgaatttcttcctcttgttagagacagatttgttgaaggaattgcctttgttcactgttccatattcttcccctcctacttatacttggcagtctgctgtc

SEQ ID NO: 19443 - DNA, 201 bp, Bos taurus
tttgggtccttcttagaacttgctttgttagaatcagaaaaaacactggaaacatataggtacattctgaatataagctaatgaggttatgaggaaaaaaaccccaaatactaaccaaggtagtgtcagttttactagaagacacaaatacgtattgggaacctttatcacagagaaagatcaggttgagattaaggttag

SEQ ID NO: 19444 - DNA, 201 bp, Bos taurus
gaactggcatctcctgcactgcaggccggttctttacactagcaccacctgcgaagcccttgttatgaacactctgtatatttctccctcttcatctaacgtctttcttttaggacatacagtggccaagcaagtatattataccagtaaaaagaaggattcttcaaagtggttacctgcccttcatttttttgaaatagc

SEQ ID NO: 19445 - DNA, 201 bp, Bos taurus
tctggcctttatgccttatgcacttcattgttggttgtataactcctgcttcctgttctgattagagtctgatgttttgaaggggatttgccctgtttgataccctttattagttctttatttggtgaaaaagactttgctggagtgagagaccagccgttctttctgcacaataggggtcaggtttcaaaagctcttttc

SEQ ID NO: 19446 - DNA, 201 bp, Bos taurus
gtccacattccttggcatttgactggccacatgcctccaatctctgcctccctctctctgtgcgtcagttcccatctgtgtatctcttacaaggacactcgccattggatttagggcccccttggataatccaacatgatcttcttgcaagacttcaacttaattatatccacaaggatctttttttccaaataaggtcac

SEQ ID NO: 19447 - DNA, 201 bp, Bos taurus
aagaacgatgcagagaacagaatttatgatctgacagtgaaatgctttttcattaccatcattgctttattgtacactagtcctaccagcgttttgtcatgtccttttgaaaatttgcaacttttccaaggttaattgtgagtttgttggagcacatgtaaatcaccaattctttttcttcagttgagagataaactctgg

SEQ ID NO: 19448 - DNA, 201 bp, Bos taurus
catattcagttcgaccaagtttctgtcctgattgagtgaaatgaatctagtattaaatgtattttatgcagctatgattatacatggccccttggcttttgcatacattatgtttaatcctcacaaacacccctgttgaaacagtatcattccaatcacaccaggaaactgagactttaggagcataagaaatctatacat

SEQ ID NO: 19449 - DNA, 201 bp, Bos taurus
ttctacaatgaagctgaagcactattataaagcttgtctcatctgagaagttcagagagaacccccacgtccaggaaaagctccccccacacaccagtcatgtggtcacacagcaacatattctcccccaaagtatgtccattccaccaaaccaagaaatttccagaaagcatcctagagtagagttgagttcactccttc

SEQ ID NO: 19450 - DNA, 201 bp, Bos taurus
gagttttgtcctatacactgtctgctatatcttctgcaccaccaccccacccccaccaatgccaacaatgccactaatcctctttcaaaaggcctgtagtgttcctagctgtaattttgcaaactcagaggatgtgctttacattatacttgaggcaggtgccagatggcacatttcccattcttatcccccaggcctcag

SEQ ID NO: 19451 - DNA, 201 bp, Bos taurus
ttaggtagctatttacgaagtgacaaatagcttctctgttgaaatcaggaaacaactaaaattcaaagacaaaaaatctatccacacagtcatttttaaacctgttatgaaacatccctgctttctcacagaaacacttttgaaatcaattttcttggatggcattcacttaattacaaaattaggcagcctgatcaatct

SEQ ID NO: 19452 - DNA, 201 bp, Bos taurus
actaagtagagcggccacaagttcctcccatgcagggacctacctgcctgcatctgtgtccataaaagtagccttgcccctggtgctaaaggtgttctaatcgtgctcccagctaaggccaaccttttgctttgggctggaaaaggaaatggcaacccactccagtattcttgcttggataatcccatggacagagaagcc

SEQ ID NO: 19453 - DNA, 201 bp, Bos taurus
caacgcagcagcagcaggctagaagggctgaagtggaggggcatatctgctcttgaggttccagataaagatgtataagaatttcacaatgggttagctcacctctccctgccaagaatatacagtaggttttcagaacttagctgtgagaggactggagacagctcttgcacaggttctgtcctggctctaaacaaacct

SEQ ID NO: 19454 - DNA, 201 bp, Bos taurus
ttaagtagcttcatgtggctagaaaagcacaaatggtcagttagaattttccccaggactaggtcagagcctcttggtagcagctctttgcaaagttgacaattcagagtggtacgaaaacctgggtgtgcatggatctgccacttcctaacagctgaccttaagcaaacagctcaacttcccagtgactcaatctcatct

SEQ ID NO: 19455 - DNA, 201 bp, Bos taurus
gaatgtttcgacccacaatcctcttcccctcctctgattttctaggccattgttgtgtacctactcaggctttcaattacctgctctcttgtattgttactcataggtgtatcatggcctcatctcaacctgacaaaaatggccaaggatgagctatacaaaattcttcatatctgacagtattttccaccatgcagggta

SEQ ID NO: 19456 - DNA, 201 bp, Bos taurus
gggcctagaaagtgtatttcatttagagagaaaatattagctgctcgctggttcgaagaggtgaaaacattcttcaattaactgtatcagcactaaagccgatgcatccatctccatctgtctgtatcttacaccatattctcaatgagtttgaaactcaggaaacaagaatgctttaagtgctgggcacctaaacaccat

SEQ ID NO: 19457 - DNA, 201 bp, Bos taurus
tggaggggcaaaaagtcaagaggggcctgctgaatttctgaagtacacaatctcaaaggattttaggaagatttggggcctcagtgtgctcagagataccgagaatttaataaagtatgccttttcttatttaggtagagactttgcctgggcccattaagtgactaagttgacaaagttccagttggcaaatagcataca

SEQ ID NO: 19458 - DNA, 201 bp, Bos taurus
taaggtaaggagccttcttggcacgggggcgtgcgttttgtgtttctgggtgtagatgtgaaactcagcagacctgacactcttctgtgaagggagggtgcagggaaaaggccaggtgggacatggcatggctattacaatgaccacacagcacactctgtcctcccctgattcagcacttcacatttctccagtgaaaaa

SEQ ID NO: 19459 - DNA, 201 bp, Bos taurus
tggttcccagtaaacctcacctgtgcagctctaggaaatcagagagtagttctggtagacaactagatcttatagagaattcccaaatcaaagttaaaactatactagccacagaatataggaagtgggttgagtgtaaacattatttacttaacttctattctataattaggaatctagttatcattccatgtatactgt

SEQ ID NO: 19460 - DNA, 201 bp, Bos taurus
taggggaggcagtctctctgccttagaaggattgaactgaggattgctagactgagactgcagctaggattaacgggagagagtgcggtggttgattaaggttgtctgcgtcagttgctggaaaggagagtggtggttgtacttttgttacatatttgcaaactctgcctgaggagttgtaatatgttcatcagttcagtt

SEQ ID NO: 19461 - DNA, 201 bp, Bos taurus
catagcttgcttcatacaaaaactttcttaattgagagattggcttcataaatatatctaagtaatccttcttgaaccatccaagttttaatttaagactgttctacagctggagaaaatatgaaacccaattagggagctgtagaagtcattagatttcccctctcagatatgtcatgaggccaaacatagccaggatac

SEQ ID NO: 19462 - DNA, 201 bp, Bos taurus
ttgaccaaaattcggtggaaatgtgttttcttgtgattcgttgggtcctggaagctatatggactgctctctctgacgggagtgatgacacctattcacaaatcagttacagagtcactctgctgtacagcagaaattaacaattatttatgaagtaaatcaactatacttcaatttttttaacaaaatataaatcagtta

SEQ ID NO: 19463 - DNA, 201 bp, Bos taurus
aattgcgatgtttcatagaatagcattggggcttggagtgggccacccaaaatatgcactatggcacgttgattattttgaattaaagttacttaataaatgaccagtgggacactctggccctcctttctgttgcctgaaagcaggaagtacgtcacatgaaaggtgcactccctacatctaaggaagtagaaagacacc

SEQ ID NO: 19464 - DNA, 201 bp, Bos taurus
agtgagaaggtttcgtgggggttttatttggtctatttccaaagggccaagatgtgggaagccttgggttatcatctaagacccagacatatttctggtggttcatgctccaatgaagcattctggccctaaatttaggcaagggtcaagcctgggtgggtgacccacaactctctctctcatccaagtacaaaggctctc

SEQ ID NO: 19465 - DNA, 201 bp, Bos taurus
acctgaaatctggactcggagagggatgaggctgcccctcccgaggggcgggaaggaaagtttgggagggacgggcggcctcgagcgtggtggcccccgggtcgcagctccactccgaagcccaacaggtaaaaccttcccgagaagcttccggggaaacgggcatctctcggtggagtcgtgatcctccatgccctggcc

SEQ ID NO: 19466 - DNA, 201 bp, Bos taurus
tctctggagaacagagcaaccattcagaataatttacaaaacactttacgactgcccgttcactgttgactcgctcagtcctggtgaggaaactgttaaattcctgagacctgagacagaggcatcatttacaaacccagtctgggaagacccaccctctctatcttgggagccttgatatggctcccaggtgaaagtgag

SEQ ID NO: 19467 - DNA, 201 bp, Bos taurus
tcagccagccctccttggacaggggctccctcctgtcccattagagcccagaatactgagtgagtgtatctgggtggttttctgcatctctttctagagaaaaaatgttatatgaagtgaactctgttcagccttagaaagaaaggaagttctacatgctccatgctccatgctacgacgtggatgaacctcagtgtgcta

SEQ ID NO: 19468 - DNA, 201 bp, Bos taurus
ccccgccgcatcaaagtccactgcaggcaccctgagcccatttccacccagcgccaagcaccccagctgccagtctcttggcctcagggctgattctaagctcttgtgttgcagctgcaggatctttgtcagaaatcctctgtgggaagatgggccgggctgcaggttgaggtaccaggaggcccatgcagcctcagcagc

SEQ ID NO: 19469 - DNA, 201 bp, Bos taurus
tttccaacaatgactctggggcttggccatgtggactagctttggtctgtagagaatcggcagcacaatgtaaaagtggctgcttggtaagtacttgcacattgggtttgctgactgggagtgctcttggtaactaggtatcatattatgaggaagctcaagcagccatatggataggcccatgtagagaagaaccagagc

SEQ ID NO: 19470 - DNA, 201 bp, Bos taurus
ccttgaaactggccttttgtcagtgatttgcacattagtaaggcattgctatggggatgtttacagcaagactgttgttctgcagaagacacggagggcgcaagtcacaaaagagaggaaaactgccgagaaaagaaaatccctattcggataattagctcgtagaggatattttactggacagtcattcctcatgtgaag

SEQ ID NO: 19471 - DNA, 201 bp, Bos taurus
aaaatcctcgtgaaggagaattgaggcttcaggcaatggccccagtgagcttctagataaaagccagtggttgacgtcaccttggatctatcatttgtcctggaatgctggccaagagcaggtgaggcagaactgtggtagtctactcacagaatcatgataaggaataacttaataaattattgctgtgttaagccacca

SEQ ID NO: 19472 - DNA, 201 bp, Bos taurus
catttttctaaaacatgctctcctgtcctctttgcctagctggctcctgctgctccttcggatcccaagcctgggcttatacccctacttggtgctgccatagcttcttgggtctgccttctcagctcttgtccaagacttacattttattggctgacagtttgagctcaagagagtcgagaccatgtctgttttttctct

SEQ ID NO: 19473 - DNA, 201 bp, Bos taurus
tctccttgcacttcaaaggactctcaagagtcttctccagcaccataattcataaacatcaattctttggttctcagccttctttgtggtccagctctcacatctgtacatgactcttggaatagcagctagtagctacaccaatttccattcccaccaacagtgtaaaagggttttgtctttgccgcatccctccacatc

SEQ ID NO: 19474 - DNA, 201 bp, Bos taurus
gaaggtcccagcagtccttgagtcttcactgagtgtgtttaatgccggttccctatgtgttgaaagcagcagctatggaccctgttctcagttggccgatgttacggtagtcccagtgcacagcttcgtggctgagacaggcgaggtgtccagtgagagatgttggatggatgatggatgagtggatggatcagagtaaac

SEQ ID NO: 19475 - DNA, 201 bp, Bos taurus
attcgttgccatggcaatggctacttgacctctgaccaaatgtctgggcaggtgagcaaacaggaggaaccgaggatgactcagggcgtccctgcctggggtgattgggggatgactcaggtgttaaaggaaaaggacaggcaggaggccagccttacatgacgggcatttctgtgaagattttgcctttcctgaaaagat

SEQ ID NO: 19476 - DNA, 201 bp, Bos taurus
ggttttcatttcacacgtccaacaccatttcagtgctgtagaaatgaaaaaaccattcaaccctccttttctacccactgctacccacagcttgggcctcgccttctctccctagagctgcttcccaggggtctttcctcttaccttccttcccttgattcagtccacacatccagggaccagggtaaagcccggcgccaa

SEQ ID NO: 19477 - DNA, 201 bp, Bos taurus
aaattatctttgacgtgtgtttcctcctacgatcatgattacagtatgagtcaccatctgagcaagaaatggccttaagaaaaataaataaatgaaaaacaaagtatggtctcactgtctttagtcctctgtccagaaagtatacaagggactgctgctgctgctgctaagttgcttcattcgtgtctgactccgcgtgac

SEQ ID NO: 19478 - DNA, 201 bp, Bos taurus
attcctggtccaaactgagacaacaaaattaatatttaatcacacagtggacttaggtcacccactctttctgaatttggatcttgggcccagtaggattgtcaactagaagtcctaaatcattttcagatttcccttccagcaggtctattatggaagcagctgtcaatacatataagaccaggataaggaggccatttc

SEQ ID NO: 19479 - DNA, 201 bp, Bos taurus
ctccatgaggacatggattttgtttgtttgtggccatatccccagtgctcaagggcaaaggatgctgaagaataagcccaggttatccagaaaaccaagaatgcttctctttgccaagagaagcaagagctgttaggaacaaacgatggcctttgcaggttggcttgctccttagcacttctgccagcagagggaagggag

SEQ ID NO: 19480 - DNA, 201 bp, Bos taurus
ttttaaagcatttggacagaaactcccgttctcactataaaagttttctaaccacaccataatctccagtttgctctggctgtcactttttactatccataaaataaatacctctggtctctttttcggtcttttttattttggggggtgcagctcatattccccaaatccttcattacagctactctcttgaatcactta

SEQ ID NO: 19481 - DNA, 201 bp, Bos taurus
gggtaggggtgctgactgtcagatatttattctgctctctgtccccaaccagcaaacgatcgcctgtgccacccctgttttgcttccaggcctctccacccgaaacccacttgctcccatcaaaacctggagtcatctttgattcattccacttctcaccttcacagcccaaacatccccccaagatgcagaggctcggcc

SEQ ID NO: 19482 - DNA, 201 bp, Bos taurus
tttaggtgtcaaagtttaatgccaacccttttagctcgaaagctgctcctctcttcctgtgacgtgcagctctgttctagaactcgctgaaaacaagggggtcatttttattttttgcggccgactgtccttgcttcctcctactccccgctagtccaaccctcgcctcagatccgggtaaagttatggcaagaatttggg

SEQ ID NO: 19483 - DNA, 201 bp, Bos taurus
ttcccttctaatttggcaaggatgaaagctttagcctgtcacaggccaagactgtgtcaaatggggtgaacttctaatgaatatacactactgagactaacaaacttaattacaccacaggcctcttctgaaatggacacttccaattccatacaccacaaatattggccccgaatcaaggatgaagtctgagccgatgtt

SEQ ID NO: 19484 - DNA, 201 bp, Bos taurus
gtcctggagaagtcagggaatttgccttccttggcaaaggtggagaagcaggaacacccccatctgtcagggattttgcaggcttagcctggctggacacatacacaaccctgggaggagccccctctcatatcactacccttttgatacctgcagtctgtgttgagattctactttgcttactgaacagatagactgtac

SEQ ID NO: 19485 - DNA, 201 bp, Bos taurus
cattttcaatctgtcttggctatacttctggaaatgcttttgccttatagactgctattctgcccaggttctcttggcctctgaccatatccttgtccattcctagatttgcttttactgcctgcttctgagtgctgatagcacatggcccaggcctggctcctcaaatgagccagagctatgcagtaatcatttagagct

SEQ ID NO: 19486 - DNA, 201 bp, Bos taurus
cccagagacagagccctaggtgctatggatgccaagcaggagcatcttcagtggcactttctagtctaagaggactcaagtgtagggctgcatccggcaacggccaggaggtaagatagtttgggtgtgccaagacaacatgggcatggagggggcgagcagtctttcttaggatacatcaggaatcatttttccatttct

SEQ ID NO: 19487 - DNA, 201 bp, Bos taurus
ggagaattccatggattgtatagtccatgagttgcaaagagctggacacaattgagcagctttcactttatgacattatatgtggccatgaattatttgacgttgatgtgagctgctgatcagtttcacaaacattctggagaagagagaactagagaagaaacaaagataggcatggaaactgagaggcaccgcagtgca

SEQ ID NO: 19488 - DNA, 201 bp, Bos taurus
aaaactgtgcagaccagaaggaagtgagggaggagccatgggatatctgagggaagagcaactaggcagtgggaacagcaagcacaaaggctaagaggccgggtggtgtttagcatctctgaggaacagcagggaggttaggtgattgaagtccagagagtagaagagaggagtagtttatgagatctgaaagatagtggt

SEQ ID NO: 19489 - DNA, 201 bp, Bos taurus
cacagcttcttccacctacactttcagcagacccagatgcaggtgagggctggactgagaaagggggtgagcaacccccaacacgtgtccagcctccctcatgctggccactcgccactgtctcacacacatatgttctggctgtcactctgcctgagctttcctgtttattattttgtgtctccaggcagcgacattgct

SEQ ID NO: 19490 - DNA, 201 bp, Bos taurus
gttaactatggctaaaagagatatgagtgcatgacaggttgacaaaggatggggtctcttttgagctagtaagctagaagtgggcttcccagaattccccatgtatctccaggatacactgaccatcaaaggcacatgtatgagactgagaagtggaaggggaaaaaatggcagctctttttttcttttcttaccccatga

SEQ ID NO: 19491 - DNA, 201 bp, Bos taurus
atactggtcactgtaaggctaagtactcaaaaagcataaccctttgccatgtgacttgtgcctactgtctttaagattcagattatgggcacgaacagtatgtctcacttggccttggtgcctgtgcctcttggctctctaatgtcacccccacctgggtgtgcaagctctcaataaagacagctccctggctctcatgtg

SEQ ID NO: 19492 - DNA, 201 bp, Bos taurus
cccgtgcttgtcacgaatcactgtgcggagacattgtgctgcaggaaaagtgctgtgtgaacccaagtcacagacgtgtcagctcaagtcacacctgagatgcaggggagccttaagacacagattgtaggatgctttaagacggcaaaagcagaagctccaagcacatatcaggatataggaaattaacagatacacact

SEQ ID NO: 19493 - DNA, 201 bp, Bos taurus
ctaccctttatcctatcaagctgaggtcacagagctggtaattgacagaggcaggatttaaacccaaagtcaaccatggtgatctcaggacacacacttctgttctggatggccgaccacagaatagcaaacccagaaaaactcctgaaatctttaggtcacctctgttcatagtggaggattattctcaaacctggagag

SEQ ID NO: 19494 - DNA, 201 bp, Bos taurus
cccgtgtgtggctcctgccggcacttacctgcctcagcccgcggaccatctcacctcttctgtgtctctatgagcttggtattttttgatcccacatataactacagtcttgcagtattactttctgcatcttgcttagtttgcctaatataatgccctcaaggtccatccatggcacacgttgcaggatctcatttttta

SEQ ID NO: 19495 - DNA, 201 bp, Bos taurus
ggaggatgtataatcagggaggatttggacagggaacatgaggaaggaacgcagaggagaggagcacccaagcaaaggctgggaggtaggcctgtactttggtgccatgttcctcccccaaaccactcttctgattcagccaagtgcaccagcagagcagctgacctggccagtccatagggttcccatcggggggcaggt

SEQ ID NO: 19496 - DNA, 201 bp, Bos taurus
aggtctgaatattcttttttgaactgtacagtctctcaccgtagctctgagattctgatttatatctcctcatttctaactgggatcatggctctaaacacacttctggacttttgtgacaagcttctttccaatgattcaaaacagtaacctatatgcaaaaggaggacaacttctgtgccttacaagaattagtaaagt

SEQ ID NO: 19497 - DNA, 201 bp, Bos taurus
cataagtgtgagaatcaggccacgtggctccacggagtcgtgtcctgccatgcccgtgatcaagcccggactgaggcggtggctgccagggcaatggatacgggccaaaccaagacggatgcagaagcaggagggagaggagtgatgggggtcagcgtcacttgtcatgacacctctgaccacaccattccctcctgaccc

SEQ ID NO: 19498 - DNA, 201 bp, Bos taurus
gagaaatgaggaacagaggactataagaaaccaatagaaagagaggggaaacgggggtcggtcggaggtggaaagacagggagagacagagagagaagacagcgagtgggtggaaagccagaatgagggggagtgatgagaaatgcgtgacaggagaagagaaaagaggagaaaagagcagagaaggggccagagggaggg

SEQ ID NO: 19499 - DNA, 201 bp, Bos taurus
ctctgttcacaggattctctaggcaagaacactggagtgggttgccatttccttctctgtagaataggtgaggcatactcaataaacagcacaatttttttaaagtgtgttttgaaggaattgtcaacctgaggaggaagcagtgggagtgaattcttgtcatccgagaggaatgttccccacacctgtccgatagaaggc

SEQ ID NO: 19500 - DNA, 201 bp, Bos taurus
gggagaaggggagcagcaggtggaggaagagttggaagagaaaaaaagagatatcatccagccaagtaattcagatagaaaaagatatgtagaaggagagcgagagtcagtgacatactgctagcagccttttgtttccgttattcttatataatctcaagagaagtttttagataccaatcaaagcaagcatatcattca

SEQ ID NO: 19501 - DNA, 201 bp, Bos taurus
gaactgggtaaatggtaaatgcacctcatggagaattttactattagtagtaaaaagagctcttgggttgaatattctgttttctaaacaatcatagttagaaatcaaaaagaaaaaagaagtcatttctaaaatgctttcctgggatgtctttttttctttctgtagacttctggtttgatcgctcatctactagatatt

SEQ ID NO: 19502 - DNA, 201 bp, Bos taurus
acaaaatagatgtctaaatgtgtggtagtggcagttgcagcaacagcaagagagggtcacacagctttggaaggcaccaaaatgtttagaaaaaggcaacggttcccttagttcaccaagtttgattttgagacagtcaagatcctcggcttctgtttccatgtgcattcaataatagccatatctagaaaaatggcagta

SEQ ID NO: 19503 - DNA, 201 bp, Bos taurus
ctgatctgtccaagaactttaacatggactgtccgagagcggtgatatgcccagggctttaaggtctatcacttcaaatctttgttgtgacaagacagaaacaaggagatcacactcctctgacacatttaataaattttttggagtcatatatattgaaacataatttttacacagtagaatttattttttccgtacatt

SEQ ID NO: 19504 - DNA, 201 bp, Bos taurus
tggagattagactctgagtccactttggcatcactatcaaacagcagttgtcttactgaggctgaggatggtgactcccaagggtgttctgaagattgtgcttccatatctgcagcttactgacaactgatggaaagtttatccacagtttattaaaacacacaaagacataacaaaaccaaaaaaaaaaaaaaaccaccc

SEQ ID NO: 19505 - DNA, 201 bp, Bos taurus
gacccagaagaaaggagcagtgacccaaatagagactgaaccaaacttgcctgtgagtgtccaggagtctctgggggagacatggattgacagtggccagccatggggtaaggagcactaaatacaacagtcctggcataagccctcttgaaggtcaccatccccataccatagtttggcctaagaccaaactacagggag

SEQ ID NO: 19506 - DNA, 201 bp, Bos taurus
cagctgaaccatgctgttctgttgagtataagcagccccacgggaccatccactacaagcaaggtcactgtgcaacccacgaaatacgaagcaccctcttccttcaagctgcctggtatatattttttagaagtgctctgctaagcaggttttcacctaacacttaataatgaatcagatgagggaatttttaaatacatg

SEQ ID NO: 19507 - DNA, 201 bp, Bos taurus
ttgacgaagggtatctcctcatggctgcccttcctgaccttgaacgtggagtagctcctcgtggccctcccgtgcctgtgcggccgctgctccttggatgcgtggttgctcctctcagtttttaatccaattttctgttgatgggtggagctgtgttccctccctgctatttacctagggccaaactgtggtggaggtaat

SEQ ID NO: 19508 - DNA, 201 bp, Bos taurus
agtaattgagactctgcacttccattgcagggggtgcaggttcaatccttggtcaggaagtaagatcccacatgccatagcatgtggccaaaaaaaaaaaacactaagaaacatatcatttcttttcaaaatctctttcccctccctaggatttctggatgtttccagcttgctttatttaaggttctgccatctggccct

SEQ ID NO: 19509 - DNA, 201 bp, Bos taurus
cacgtcaaacccttggatctgtgtatcaggagaactaggagacacgggagtaatgcagattcccaaaaacctccttgaaatgacttttgaagtaggttcagctaattgctttcttagcacaaagtgtcatacatagttctacacaacaatgccagtttcagtttttcatttttccccgagtcaaataatacaaagggtaat

SEQ ID NO: 19510 - DNA, 201 bp, Bos taurus
gtggcaggcctgtaatgtggtccaggtactagacatctggagggaatatgatcagaaggaataggctgcttgctcgctcgctctctttttttgcatctatggtcgccatggccaaactcaggagtaggtcagagtaaaacatgtctgtggggagaaatggcccagacagtaggcacttcatcagtgcaggcttgcttgggt

SEQ ID NO: 19511 - DNA, 201 bp, Bos taurus
tacacaggctgtagccatcaagagcatgaaaggaaatactgggcttcttttctttcttttaggcttcatgttaggaagaggcatttgctttcctgaacaggactttcagaaattttttattcaggccattggttgtatttcaaatgattgtctttcctaaattatttcccaatatctatgatttccatctaattttgcttt

SEQ ID NO: 19512 - DNA, 201 bp, Bos taurus
ttctaacgaatacacccaacttctcagattcttttaattcaataattccctcctcaacccacattctgattcatgagttgtttcaagtcattactcaggacagaagcttaatgggtatgaattttaaattctttcgggaaggtttctgagcctacagagctgggaaaagagtttcccgataggggagaccactgacagttc

SEQ ID NO: 19513 - DNA, 201 bp, Bos taurus
tataactctaaccaaaattttgttttcaaacttaaattattttcaaagccaagaagtccataattgttttaattcatgaccaaaaagcttttaaactggtcgagtgttcatcaagaaatgttttcagcttcccaactggtggtacagatccctatttttaattctgttaggagaaaatatcttaaatatctgatggtctct

SEQ ID NO: 19514 - DNA, 201 bp, Bos taurus
caagagccactgactgctgtcacttgagacactataagtttcagcctacattagctttatggttgtagaaaggctgaatatcttaatgaaatcaagcctccttaagtgacctataaattcaatatgattttaatcaaaactttataaatttggaatatttaatgtctaagaatagctaagaacccataaaaaaagaaacat

SEQ ID NO: 19515 - DNA, 201 bp, Bos taurus
tggccatggagaccctcactcccatcccctcaggttgttcctgtatagccaagaacagtcctctccccagatccactctcctaactgcattaggagcactcggcccccaccagcactggtagcctcctgtctcaggctggggtgcccagggctgattccagaggcagctttgatggtggcagtgctcaggactccggagct

SEQ ID NO: 19516 - DNA, 201 bp, Bos taurus
gtcatacagttggaatcatatagtatgtagcctttttaggttagttaatgtgcatttaaatttgttccatttttatggtttgatactttttttttttagcactcaagtgatattgtgttgtccgaatataccataattatatatccattcatctactgaagaacaccttggttgttttcaaattttggcaattatgaataa

SEQ ID NO: 19517 - DNA, 201 bp, Bos taurus
ttatagaaataattaaatgtaatggagccatagaagtgtcatgaattctgtattttaattttggcaaagcatctgatagtctcattgtattcacatggacgcagatgatgaaatactggctgtgtggtattacttggattgagtgttgataatatgtgcctgtgttccagcatgaaagttggtttcatatttcttatccag

SEQ ID NO: 19518 - DNA, 201 bp, Bos taurus
aatcactttcagtaattatctgaatagatcttatggataacttgctgccgcttctacatcagcaggtgttgtttcatcttgcacttttgtgttaatggggatattttctttttgaaagccttatgaatcaaactctcctagcttccagctttaaattagaattaaagagttaggaccatgctctgggtcaggccttggctt

SEQ ID NO: 19519 - DNA, 201 bp, Bos taurus
cagcaactgaagaacaatagttctgaaagctaggcatctaagtttaaagtgtcagcagaattggttccgtctgagggctatgaggaagaatgttccaaacgtttcttcttggcttgccattttctttgtatcttccctctgtgcatatttctgcttgcatatttctcccttttataaagataccagccatatcggatgatg

SEQ ID NO: 19520 - DNA, 201 bp, Bos taurus
aggaaaacacagcaagagtgaggttagagggagcagaaactactttagccagatgtatctgaagaaggttatttcaagacatggccttttagttaagaggtaaatcatgaagtaacaatgacctagttaagccaatcacaaaattctcagaaagcatttattctacataagtatccttccaaagctaacaaattttggcca

SEQ ID NO: 19521 - DNA, 201 bp, Bos taurus
gaagagcaatcatgaaagggattttaataaatttaagaatgttgacactaccaaaacttagtatctttagaaatgttctctcagtgtccccttctctactgcaaagctttcaggtctttcagataagtctgtctccctgaacataagaggcccttttttgggggggcctgttgatgttgacccctatttggcctgagacag

SEQ ID NO: 19522 - DNA, 201 bp, Bos taurus
caacttttatttgggttgcactttccagttacactttcaccttaattgtgtcatttgatatttcaaaaattctgtaagatgggccaggcaggaatcattagcttcattctatagataaaaaaactgaggcaaaaagaggtcacttcccaatattacactgctgagaggtttcagctttgacccacccatggtcttctgatt

SEQ ID NO: 19523 - DNA, 201 bp, Bos taurus
tgaaaaacaatattttaaagtggtgagggaacaataaaaccacgtaggataaaaaaaaaactcatctttaataccaaatcccacttaattacgtcattttttaaaaataacctctctcttaaataagcctgagaatctagttaacctgatttgggggaaaaataagtcttcttcaaattgctataatttgatgcttttctc

SEQ ID NO: 19524 - DNA, 201 bp, Bos taurus
tgagtcccccaactccttgttccacacttcagggcaggaaccacggtggaggttgggcgggcggcggagggggggggcttgagatagacacagatgggcccgaagaaagggcatgcctgtcctttcttgagttacattgattcttctccccacttctgaatggctctgggccatcctgggctctgccatcgtttttttttt

SEQ ID NO: 19525 - DNA, 201 bp, Bos taurus
gtcgtggcccaggttcaattcctggtcagggaactaacatccaccaagccatgtggtacaagctgtaccagagaactgagatgttgtcaatcttctttcaaaaactgagtcaacagggcctctaattgtaaagcctgagttacctttcagttcagttcagtcgctcagtcgtgtccgactctttgcgaccccatgaatcga

SEQ ID NO: 19526 - DNA, 201 bp, Bos taurus
aaccatcccccacctcccctggtctgtggaaaaattgtcttccacaaaacctgatcctggtgccaaagcggttgggggccactgtaaatgagaactaagacggctgatatctttattaatatatacatatttcttatttagtagaaattttataatattctacttcattttggtagtaaagattacttgggcctttcacac

SEQ ID NO: 19527 - DNA, 201 bp, Bos taurus
ctcccgcccacccacctccccacaattatcctttaaccaggatttacctgatgtttctgaatcctgagttgtcacaaaataaggtagagtattgttcttctagcttgtattggtaacaaaggggcctggtttatattttctaacttaatttttcatctacatatctatttaggaaacacttatattaaggaaaactgttaa

SEQ ID NO: 19528 - DNA, 201 bp, Bos taurus
tgatttactttgtggtatagcagaaaccaacaaaaacattgtaaagcaagcaaactccagtaaaaaaaaaaaaaaacaaaacttaagaaaacaatgccaatagattgctggatgcaccgctgccacacactttcaatttataaaaagaatgcagtatctgtaaagcacaataaagcaaagcaccatgacacaggtatgcct

SEQ ID NO: 19529 - DNA, 201 bp, Bos taurus
tggaaactaacacaacattgtaaagcaactgtatactccaataaaaataataataactactttcaagctttcctcagaaatcagacaagtaacaggagtacggactaagatattttaaagtgttgagagaaaaaacccaccaaactaaattctgtatcctgctaaattacccttcaaaagtggaaagagaaagaaaggttt

SEQ ID NO: 19530 - DNA, 201 bp, Bos taurus
ttgagatttttgctgacccaagtggggaaggaagaactttgttctctgatattgtaaacaggtaggcctagaatcttacaacaatggccatgtccccatatgtgaaaaaggcaagcctgtaattaaggaggaagacagctgagatccagaaagaaaaaacaggagagattcttgatggcatttagaatcttgactccaggt

SEQ ID NO: 19531 - DNA, 201 bp, Bos taurus
tcaggaacaatctttgggcttaaaaaggaaacagacattgcagcaactctagtaactttgatttatactgtgtggctttaggaaaagacaaagaataatgcgttgaaaattagcaaaatattgagtttttttccccaaaaagctttgcaataagagttacaagcagagttctttccatgagcacccgctcaccattcctct

SEQ ID NO: 19532 - DNA, 201 bp, Bos taurus
ggtaatgcattctgtgaacacagtttagatcatgatgatatagttacactcagggagttggggagggaaaagagtgtaggccagattaggttaagtggtttagggcaagcttctttgagaaagtggcattagactgtgacttgaatgcaaagaaggagccagcgattagaagagctgggagaagaggggaaaggcacagaa

SEQ ID NO: 19533 - DNA, 201 bp, Bos taurus
ctagcattgcctagtgctgataagcagtgaggaataatctttgaggaaagcagggaataataaaaattcatcagccgtcaaggggccaccgtgtttttcaatgcagcagtgtgactagccttgtgtctggggatccgtttcctcacatgtaaaaatcaggaaatgcattgcccctgtttcttcacctggcctactcttgat

SEQ ID NO: 19534 - DNA, 201 bp, Bos taurus
ataagccagaattaatgaaaataattgcatataatgtgttagagggaataaatagaagtgatagagatggaactaagtctcctaagatcttcccaggtggcgctagtggtaaagaactgcctgccaatgtaggagactcagaagacgctggttcaatccccaggtcctgaagatcgttggtcaggaaggtcccctggagga

SEQ ID NO: 19535 - DNA, 201 bp, Bos taurus
aattaggccctatctgttaaacctgttgtgtcaaaatcttcttgaagtgtcttcatttacatatttctaacgttgcagaacaatcataatagttggttctgtcaaggcccattgtcaaatgctttcattctttgattgacagtgataataattgatactatgggtcctttatattagagtagttgtttatttgacataata

SEQ ID NO: 19536 - DNA, 201 bp, Bos taurus
gtattccctcccgatcaacggacactggctgcagctgcccagcaaggattcctccttcctccaggcttcagctataaggctggatgtagtaagtaccgtttatttttcatttgggagtgggtggagggcatgtctttaggcaatttaatattcctgccacaccaagaaatgagatcacccgtatagcatttttattttaaa

SEQ ID NO: 19537 - DNA, 201 bp, Bos taurus
agtattctaggtttttttggcaatcagcagatcagatagaagagtctagtagtataacgaggatgtgtaatctgacatgattagacaaggctctttagtaccagaacattcataattgagacaaagaaagagtattaataacactttcctaacacggcagttagccattttatatttcctttctttaatcttagtgttttt

SEQ ID NO: 19538 - DNA, 201 bp, Bos taurus
aattagaacaatagggtaaaattaatgccaatgttaagtacagatgtgccagatatgatgggtagttgatacacaattcaaattgacaaccacgtgcaatatggaaagtatccaggcataacctcagatccagttggccaatggatgtcatgattgcctcacagagaacatatttaaaagagatttatttggcagtaagaa

SEQ ID NO: 19539 - DNA, 201 bp, Bos taurus
aactcagataacatgctcagtgccttgctcttcccttctcctccacatcctactgtacacatttggcaataaacatcatgcataggtgcaagttgatcctatatcaataaatcgtcaagtaaccagaatgcccagagactgggcctaacagacttttttatccctaagcattatatggatattccactcttcctacaagct

SEQ ID NO: 19540 - DNA, 201 bp, Bos taurus
caagcatccagtgttcaagcttgtctgggggctacctgagggactggtttctgtctctcctgactccaaatgctaactgaactggtggcataatttgcaagatgctgaaaataggccagaaactagtcacattagaactacatttccacatgcaaataccaagaagaataagagatcagaaaatgtttgaaaggtcctgga

SEQ ID NO: 19541 - DNA, 201 bp, Bos taurus
gactggaatcaagatgttcttggcaataaggatcaatgaattctgaaataaattaccaaaagaagttgcaaaaggttctgaagatagaatttcacctttttgggatagtttatcattgttcctgagcagaacaaaccatgcatctttttcagttctaggattctgtatcacaaagatcttctgaatattaatttatttgct

SEQ ID NO: 19542 - DNA, 201 bp, Bos taurus
caagaaattttgaaaatgaatcttatgaaggaagacgtgaatttttagaaattaaaatgtatttttacattttatagatataattcttatatagagtgactctaggcagaaataggcatgttaatgagattagaaagtccccagacacccataatttaataagttttaaaggtacagaatcaggacttaaaaaaaaacttt

SEQ ID NO: 19543 - DNA, 201 bp, Bos taurus
cagtacagattttattcaactaatccttctgctctgtctgccaaaactaccatcagtaatgaagcccaaggttacaactgctgttagaaaagccttataagattgggcctgaagtcaacccaaatctttaagccttttgcttcatttgtttataagcaaatattcaggcactttccatactggaattttattaaaatttat

SEQ ID NO: 19544 - DNA, 201 bp, Bos taurus
ttctgagccaatctctgggcctcataactatgtgtgaaatgcttttagacaaatgaaacatgaaaagacagtttgggccatctgtccagtgccagaccaatagagtaaaatgattgggaggggtgggctggagcagtaaggggctagtggtgtcctgaaagacaagggtagatgaggcccaggtggagctagctggctcac

SEQ ID NO: 19545 - DNA, 201 bp, Bos taurus
catctaaagggagtttcgttgaccaagggaccagatgctacagaacagaatggccatactttctacccttatgtgtgtgtggactgtggcccacaaggctcctctgtgcatgggatttcccaggtgagaatactggagtgtgtagccttcccttctccaggggatcttcgtggccccgggactgaacccagatctcctgca

SEQ ID NO: 19546 - DNA, 201 bp, Bos taurus
aatgcaatcaaaggggaaatttagcactggaaaagcacagtttagtgtctgctcagactacccagatgtgtaaatagccactgtttgatgtatacttttcgggcattaatcataaacatcatgacccagaaaagtacatattagttgctggaaaaacaaaacaaaacaaaaaaaaaccttctgcaaatgaaaaaagatatc

SEQ ID NO: 19547 - DNA, 201 bp, Bos taurus
taagtgttagcaagatgaaggaggagaatatcctgaggggcataacatctcactctaacacacagagctgtgatccaagtactaactcaatctgagggtgccaggatagactcaaagaaaggtctttgagtcctcacatacagtcctctgtgagtctctaagaagggacctgcatggcaagggatgtagcagtggctgtct

SEQ ID NO: 19548 - DNA, 201 bp, Bos taurus
tgttctaatgaggtgatccttggtggctcctggataccttcaggatggtggctgctcaccaaatgattaagccatgatagcttagtttgggatttttttttctagccccataaacaattttccagggaggggagaggggctggagaatgaattaataaccaatcatgcctatgtgatgaaatttccatgaaaatcccaaaa

SEQ ID NO: 19549 - DNA, 201 bp, Bos taurus
gtgccccatccttaggttagaacacggacatggtggtgggggtgagccagcctccaccatgcctaccaggaccacatcctaggatgacagggccccagccagcatgacttcaatgccactcacccccatggattaacatctcagactatcttgtaaaagagaaataaatcttttatctagtttgtcatttctaaactggcc

SEQ ID NO: 19550 - DNA, 201 bp, Bos taurus
aaacaatgctgttctgcacccttcaagacaatacaaggtttctactccaggagaaataagggagccagggatatgttcagatggagaccaggcaacactagaacaggtgaataccagacaagcaaaactagaataacaccagagtagtaccttagataccactctgttagtagcttaaatggagaactgtgaagtaactgg

SEQ ID NO: 19551 - DNA, 201 bp, Bos taurus
cgtttgggaagagtgtgtactctgctgttattggttggagaaatctaaataacaattatatggcatggtttaataatatagttcagatcatctatgttcacactgactttttatctctatgatctgtcaattgctgttggaggggtattgatatcgtcaaataaaatggttgattcttctatttcttcttttatttttcat

SEQ ID NO: 19552 - DNA, 201 bp, Bos taurus
tgaccactaatgatcctctggaacactgaaaataatcactacaagaaaggaggaaaaagggagaaacaggaagataaaataagctgcaccaatagtaaacggtagtaagatagcctcagttcagttcagtagctcagtcgtatctgactctttgcgaccccatgaattgcagcacaccaggcctccctgtccatcaccaac

SEQ ID NO: 19553 - DNA, 201 bp, Bos taurus
actataataatagagaaaacccaaaatagccttaccttacataagcatcacaatttgggacacaggtctggagttggcaccttcaccaaatcccccccccttttttttttgtctctcaaggataatttctctgatacagcttccattatctctgacaggacctagaacactatttttctttccaggcgttttcactatttc

SEQ ID NO: 19554 - DNA, 201 bp, Bos taurus
tttagaaataataatttcttcccttcatgggattgttcctacagactattctaattttttcccctgccactctttctcccagctagctttgctgtagtaatatcagcctgatgtaagtttattgaacaccccaggtttcttcccagtttagacttattcactatctttgaaaagctcttccctaacaatgacatgagtcac

SEQ ID NO: 19555 - DNA, 201 bp, Bos taurus
ccctcataataatatcctaaagtgggcaggtgtggtagattggttgcataaatagactaaattcctcatctcttcaggcatccaggtccctgggccacacaatgttgctattcttctaatagactgagtctgtgtcctagcactttaattctgcagtcacacatatgactttctttggccaatagcattttagctaatctg

SEQ ID NO: 19556 - DNA, 201 bp, Bos taurus
ccatctcatcctctctcaccatgttctccccctgccctcaatctttcccagcatcaggatctttcccaatgaatttttcaggtaagagctgtcatcagcaatatctccagatgctaggacaggagtgtctctgttttaaagaagccctgggcagtgagccatggcatccacctcagagagtcatcaaccatctcacttctc

SEQ ID NO: 19557 - DNA, 201 bp, Bos taurus
ggagaactactaaagcaagaaagtaccagattagttgtgactacatttgtttcctcactctttccagagacttgaaaagcaaagctttagccctttgaacgagtttctctttttccttatggctcttctccaccccttttcaaccccaagtgttgagttggaaaatttagatcatctgtgagttcctatcagaatttaatt

SEQ ID NO: 19558 - DNA, 201 bp, Bos taurus
aatagtagaatcagagttggaagtaacccgcgtgtcttttcatccaaccccctcatttttctttttagcaattctggggtgtgatgtaaacagacggtagtgagtccacatgctccagactcactcattaaaaacacaaaacggcttctgccactcttgtgttcctttccagctacgatgggtcccgcttcctttcttgca

SEQ ID NO: 19559 - DNA, 201 bp, Bos taurus
tttcttatgttgtccttcaatgagagcctggggcatacataagcttaaatagtcaagtagtgaatgtattctgtcagtacattacatcctgctgttccaaaaaacacaaggatggagctggagaaattgtgttaagtgggccttaaattctctctagtatcgtatgtcttaatatttgctttcgttagaggagtttaacat

SEQ ID NO: 19560 - DNA, 201 bp, Bos taurus
cccatatgtcatgtcagttacacaaaaaattttatgggttctctgctttagttttcaagataggtgtaaactgtgttttgtaaaaataccctaaatcatatagaatcatgttttatgaataattatttgaatggctaatttcatatactttgaggaggctgtcatatttttattgcaattactcttaccgtctgatagttg

SEQ ID NO: 19561 - DNA, 201 bp, Bos taurus
ttttcctgcgtcccttggaagactattggtgtgggtgaggaaacgggataaaaggtgtggtgattcacggctttcttccgttctctgattggtgctccccatcacattctgacaagtgagtgtcactgggtttgaggtgggtgtcttggttacaggagataaggagtgacagcgctgtagagtacatttccataaattcac

SEQ ID NO: 19562 - DNA, 201 bp, Bos taurus
ccgaggggccaaatgagactggacaaaagtctctttccagagcctggtgcctggttttgtattcccttgcagtagcattactgaactatatagaaacatacgaatcgcttaattgttccttaaacgttcttgtctggctgcatccctctttcctgcccacaggttgaaaagtaatgaatatgaaacgaagtgaaggtcaag

SEQ ID NO: 19563 - DNA, 201 bp, Bos taurus
cccctacattggcaggtggattttaaaccattggacaccagggaagtcccatctcctttctttacctacaatagtgcaatgatttggctctagagtcagaagactgggttcaaagtttacctctgtccttgcaagctgtatggcttctatctgatggaagcaataacagtacccaccacacaggttgttgtaataattaaa

SEQ ID NO: 19564 - DNA, 201 bp, Bos taurus
caagggactctcaagaatgttctctagtaccacagttctaaagtgtcagttcttcgaactgattctcattagttatctgttttataatagtagtttatacgtgccaatttaatcatctgtttatggctgtgagtgagaaatactaaagttgaatgctttacctacctttaaggaccttgctggggcttccctgatggctca

SEQ ID NO: 19565 - DNA, 201 bp, Bos taurus
ttaaaaactgaggcttcatacgtggaacagaagacatccagctggggatagcttttatgcaatagactcatgattactgactcgagtatggggcctctcacagccgtcctgtcttaaagagacaccacttccactcattggcgctgccttctcttccttaggctggaatctgaggcctgggacccccacccctttccacag

SEQ ID NO: 19566 - DNA, 201 bp, Bos taurus
cgtttctcccccagcacttttttgatcatctgtttctttagccacaagctggtgaccccatttaatggtgaactacctggccaataatcttgctttcctgtggggctgagaagtttccatctagaggctgcccagaactatacaagaagcccaggctttggagggaggcctattaggatttgaatccagttcagccgtata

SEQ ID NO: 19567 - DNA, 201 bp, Bos taurus
tagtccttaagctgagaatgctgttttatggttctaacgagaggaagaaggaagaggagggaaggaagaggacaagatggggcgaagttaaggagaagcatggagaccatatgtggccagcaaagcctcaaattgttactatttggcccttttcagaaaatacaaagaaactcttgtatcaagttcataaaatagtttagg

SEQ ID NO: 19568 - DNA, 201 bp, Bos taurus
atcattccacaatatatacaaatatcaagtcttgtttgcacacctgaagcaaatataatatttcaactacatctcaataaaagagattgactccaggggcctctttgtcctgttctgcaactgcagcttgtgcctaatcactctgccttacccactctgtctctcctctgagcctatatgtcatcctgtcactgatttctt

SEQ ID NO: 19569 - DNA, 201 bp, Bos taurus
gattttatgatgatgaggttagctttctgggttttctccggccactcatcttgactgtgcccacatttggttcaattcaaggcccttcctgctggcacacgcatctctcagtcaagatgtttcccagcacgagcgttttagggaggttggcagaacatcttatgggttggcctctcctccctccttttggcccctcccaag

SEQ ID NO: 19570 - DNA, 201 bp, Bos taurus
cagaatcaggggtcagagatcataaaatgtgtccagggtcacacagctcatcctagcagtaaagtcagaattcaaacttatgctttttaagcctaatctctccctatcttttcttcagagcccattaattcaaatgattcacttcaatgaaatatataccatgttgggccacgtgttcaggaccttcttgatacccttgac

SEQ ID NO: 19571 - DNA, 201 bp, Bos taurus
ggccttggctgaagctcccaaattctagaggcttgagggctcagtcactccattccatttcctcaaagcaaagttctgatttaaatttatttttccctagaggggtggaatgggagtggggaggccggctcaagagggagaggatgtatatatatagttatgactgattcacgttgtacagcagaaaccaacagaacactg

SEQ ID NO: 19572 - DNA, 201 bp, Bos taurus
ttttttacaagcttatacactgcaattataaatgtcttaaacagactctttgtatgttttaaatcttgtttttccttctgtagatgttaactggtaaccaatgtacaaaagggttggatctcaccttcaggatatctgaaatttacagtttattgtccgtttttagctcatactctgtatacttctgtaggtacatgtatt

SEQ ID NO: 19573 - DNA, 201 bp, Bos taurus
atttgtttcccaagtattcagatttctttttaaagtaatttctttgtctggcatctttagcctgagtattgtgaaagtctgttgaaacacacaaggaccatttatgatggttttccttattgtttgtttcttagattaattgctccttaagaaattataataatctaatcattattgggttaatcatctcatctgttgagg

SEQ ID NO: 19574 - DNA, 201 bp, Bos taurus
gcgcccatcccccatctgcggaaaaagtgtcttccacaaagctggtgcttggtgccaaaaagactggggacactgcctcaaacagagaccaggctgaaccgtatactttcactaagaagaaaagactgatcaagcaaattagcagagcaaataacacatgggtggtactattttgatgcagaaggcaccgtcttgagcaca

SEQ ID NO: 19575 - DNA, 201 bp, Bos taurus
agatgaactatgaaagcaaaggtccacatactctttttacaaagggccacagagtaaatattttagactggcaaatctcgtacagtctttgttgtatatctgtttttgttagcttgtgggccatgattcatttgacctgtgggccttagtttgctaagctttgaaaagccttgatttcagggcttccctggtggctcaatg

SEQ ID NO: 19576 - DNA, 201 bp, Bos taurus
acatgaacagctcttggtcctttcctgaaagcagcttacttcaatgggagaaaacagaagtgtaaataggtaattacacatattttttgcaactctgtgtagtcatttatcccaacactttcaccatctaataccttgattctcttattcttttctctcccttatctctgtctatgctcttgtcaactgttaaaaaacaaa

SEQ ID NO: 19577 - DNA, 201 bp, Bos taurus
taatagtctctacttcttagaatttttttcagctacactgcataaacaagttttttcctttcttgatcagaattatgccaccttgttgcttcttccagttcgagagctctctgggcaaattaatattcaccatggcctgtaaaaacttgatttatgggcaataaagtagatgcctttatcagggacaaatatattcttatt

SEQ ID NO: 19578 - DNA, 201 bp, Bos taurus
gataagattaccatactattaaccaatatatttcagataagcaatctaattttacaaatattatgtgaaatgcctcaggattatgtagcaatgcatatttaacttacatattctatactaccacttttctgctgaaaaaaatatgtatatttatgaattttatagaactgacaacttatctcaggaaattgtttacatcct

SEQ ID NO: 19579 - DNA, 201 bp, Bos taurus
taggtaggcctgggacaaaagtcatcgacaagtcttcgtggaacctgccttgcttcatggaattcttccttttgcctatatactgtgtcctgagtatcactgcagttctcccgaggcctggatagacctctaatctagtatgtatgtatgtgtgtgtgcactcagttgtgtccaactctgcgaccccatggactgtagact

SEQ ID NO: 19580 - DNA, 201 bp, Bos taurus
attcaaattatttgggattcagctttaatattttaaaactgggggaaagaggaggggtgtccatgaaagaagacagatcaatgcacgatatctcattcacgctgcggtaggaccttcagctctacaaaccctaatgaaataatgggtgtgaccttcactccagcgctgaggagagggcacatattgacaactgagatttat

SEQ ID NO: 19581 - DNA, 201 bp, Bos taurus
gttctgaatttgtattaagttctgaataatcatttcttcaagtttgtttgccaatctttcactttgtcactgggcatttcacttctgggccaacatgcccgtgagtatccagattcaactctgtttcttccagtcagatttatttacttcattgctctagttatgaattttagaatcttcttgccctgtctcttcgattca

SEQ ID NO: 19582 - DNA, 201 bp, Bos taurus
ttttctaacataagcccattcaggtttaccagagaagtacaaagtcagttgcaaaagaatcaacaaaatagccatgtaaacatcttgcctttgccactctgcttgtatctctagttctctttctgtggaacaccttattgactgaggaccattcacatagtccttcacatattcagtttattgctttaattctcttacctt

SEQ ID NO: 19583 - DNA, 201 bp, Bos taurus
ttctcttatcccctagatttctattccctccacatttaactctgtaaaccttaatataatgtgccctacttgtatcctttgttgtttatgtgaagtgtgtggtgttagtcactcagttgtgtccaactttaaggatggtagcccaccaggctcttctgtccatggaattctccaggcaagaatactggagtgggttgtcag

SEQ ID NO: 19584 - DNA, 201 bp, Bos taurus
tggccatcttctcctctgtgtcttcacatggtcttccctctggcatttgcctatctgtgcccagattttttcttcttatgaggagatcagccatattggaatagggccccctgtaaagacttctttttaacttaaccaacattttaaaacacttcatctcctaagataattgcattctgagctatgagtattgaggtcctc

SEQ ID NO: 19585 - DNA, 201 bp, Bos taurus
gcctatggggtcgcacagagtcggacacgactgaggtgacttagcagtagcaggggacttccctagtggtccactgtttaacactttgagctcccaacgcaggggggcctggatttgatctctggtcacggaactagatcccatatgctgcaactaaagatcctacatactccaacaaaagtttaagatcccacaggccac

SEQ ID NO: 19586 - DNA, 201 bp, Bos taurus
tacagtctagagattctgttgttgttttaatgaaagcacagacttactctgttcagttctctatgctagaagtctgaccagggtctccttgggccaacatcctggtgtccacagagctgcgttctttctgaaggcacgagaaggactcctttcccagcgtttcccggttcctatgtggcctcattccttggctcagagcct

SEQ ID NO: 19587 - DNA, 201 bp, Bos taurus
agtgtactgagctggggacaggagaccaaatgaggtggctcaggagaggggtatggaccaaacactttttgtttgaatacaagagtgctcactaagacagtaggcaccgggcctccagcttcctcaaaggtgatgcggggacctcagggaccagggagacatgagcgctcccactccttaatcaagcctctgtctgtcctg

SEQ ID NO: 19588 - DNA, 201 bp, Bos taurus
ataagatatctgataatctattatcagatagataatagagatgataatctctccaggccttctgttgtgacctgtagctctaacaaaaattagatgcccttatgcagttctaggtgaattgttctcctcaagcagagagtttttaaggtaggggctgaagggtgttgacattttccctgcagttactgaagacaagggcaa

SEQ ID NO: 19589 - DNA, 201 bp, Bos taurus
cggtccttggaggtcaaaggggagtgatgctaactaatgctggtctatccagaggcctttgtggtagaatccagcttgactgagatgtgtgcatacatataggaggatcctgagatatacgaaatatggactgtgaaccaggcaaataaaaatgattagccaaaggaaacctggaagaaatacaccaaaaaagtaattcaa

SEQ ID NO: 19590 - DNA, 201 bp, Bos taurus
taggaatgattgtgttggggcaaaggttcctttttagcacctggctaaatcctggctctggatgtttctgcggtgtgtcctgattcagtgtagtgggcagcggcagggtcaggggatgaggaacatgggccatcggaggggtgctgagctcagcagaagtgccttcagtgtgggcaaaggtcagaggtcagatgatagatg

SEQ ID NO: 19591 - DNA, 201 bp, Bos taurus
atccatggcaggtggacaaatgactactgaacagtgaacaaatacaggcataaatacagctacagacatcttgccaataaaaggtacatgtttaggggtcacatgcctgagagtcttggtttcacaagaaccatgctgtgaccttctcctcttcatatgcactgctctgccctctgtctcctgacccctcactcccaaacc

SEQ ID NO: 19592 - DNA, 201 bp, Bos taurus
tctcaaccattctttacatcctcctgtgatgaagaggaggaggaggacagtgatagatatatttatggagctcttggcatataacaagccttaaattaagtgtattacatagattttctactttgacccaatgggctagttaatatttatttctcatcttaaaggtaagaaaactaaagcttatggagtcttacttcatac

SEQ ID NO: 19593 - DNA, 201 bp, Bos taurus
tggccatacccttccctccagatgccagcctctcctctgctcaagtgggcagccggcccctcctgtatcaccagttttcctctcttgagtcattcctatcggcacacaagcaaggtgtaacctctcccatcttaaaataaaaactcctccctccaactgttgttcatttagtttccatccctgggtcgggaagatctcctg

SEQ ID NO: 19594 - DNA, 201 bp, Bos taurus
cagggttgcgtcaaaagttcaggaagaaggatgacaggatgaagaggagaggaagccacgcagacagcattatgatccggcccgagacccggcatctggatttccaaactgcaggaaaccagaggggcagtgaccagagttggtcctccctctcaccaggccaaagggaccagggagtgggcagggtgctgccaaaggacg

SEQ ID NO: 19595 - DNA, 201 bp, Bos taurus
tttatttatacctctttccctgacctctcttctctcacttcctctgaatcctccccgccccacctctctctgctgatggagtcggctgtgatgaagttcacgaggccgcatgtatgactctcctgctattgaacccggagcctgcccctccacatcttgcttccaggaggggcctttaagctcccctctggatatttgttt

SEQ ID NO: 19596 - DNA, 201 bp, Bos taurus
catgtaaataaggcaaatttactggggcttgttgcaaggatggcttaatgtttccatgagcaaaggcaatcctaaagtgcagcagctgacccaactgaccagaagccaaggccataaatgcgatccacacagccattgggtgccattaggggccacccattggattccagggttgcactttcagtctgagccaggccagcg

SEQ ID NO: 19597 - DNA, 201 bp, Bos taurus
gcctgagaggacattctggacaccaacatccctccccagccctcactgacgcttggtgaacgactgccaacgaggtcaaccctgcgctctggctggctcagaggctggccttgcacacatcctgctggcctccagttttgttttgttttgtttttaatgtgggtaaacatggaccacagacccacaccaggcacctactct

SEQ ID NO: 19598 - DNA, 201 bp, Bos taurus
gttgatgaccacgcgctcgcagcattcgtggtcgtcgtgctcggccggccgcgggtagctgctgtcctgagggtggcctggggcagccgaagcctcgtccacattctctccagacatcaccgtcatggtggaggtggtgggaggcagagatggtggccggaggcgggaggcgggggaccgggccggggcggggaggggcga

SEQ ID NO: 19599 - DNA, 201 bp, Bos taurus
acgcgcccacagaatgtcatctcaggttttaatagaggctctcattcactatatacaggattctccgccaaaggtggcctggttggtagcaacccaaacaacaccaaaagccgcgggcagctcaggggccactagtgggaattgtcttggccggctgcacgtcctcgatctcagaagacagccagcggtaggtgcggtgac

SEQ ID NO: 19600 - DNA, 201 bp, Bos taurus
ctgaagcatcctggaggcagaaagctgtgttcagtcccgggccagagcatcaccaggcttcctccaaatgtgagacggcccagcccagcgcagggcttccattctatttggaaatgaaagcagaagcacttctgtggctttgtcttctcttccccttgggaaccccacagatactatgggaagatttctggccaagtcaga

SEQ ID NO: 19601 - DNA, 201 bp, Bos taurus
ggccagggaccccactttgagaagcaagattctaaatccttctcaaagacgtttgtgctccttcagcaagaatttgaggggcgtgacccgtgtgctcagcatgtcccaggcactctggagggcccaatttggtggccctggatttcatgggcaggtgccagaggctgtgtcaggtggcgggggtgtgttgaggacatggaa

SEQ ID NO: 19602 - DNA, 201 bp, Bos taurus
agccgggaccacctcagggagcctatgtgggcagcttctgcacactttcggccaccccatggagccccctcaccctcacctttgaagcaggccagccgactgccacacctcctgtgtctccccacttcactcttgtcccaggaattcgagcagcgtccacagtctgccccaatcgtagcagcctagctccttccatcaaca

SEQ ID NO: 19603 - DNA, 201 bp, Bos taurus
ttccttccagacctgccccggcctctcacaagcatgctctttccaacagctcacacctgccccacaagtgttcacagcactcacaccagaccctgactggtaggccaggcggaagccagcgtgcagatgaagccagccccagagtctcaacaaggagaacgccgagcctggggggtgggcttcccagacgagaggcacagc

SEQ ID NO: 19604 - DNA, 201 bp, Bos taurus
ctctgcgggcagtggaaggagctgtcttttcactgcttccctacatgttccagagatgagagtgtgtgcccaacaccagccttgatcccctggagtgtgaggtttgtgcaggcctgcttggggcaggccctttggtatggacgccttggcagcacccaagggcagctggctcgatgggtcctcaccttgtagccccggagc

SEQ ID NO: 19605 - DNA, 201 bp, Bos taurus
cgcctgaggaattcagggcatcccgggcccagcattgttcacatcacacattcctcttcttgaaaagctcctggatagctctcattcctctacctcccgggagaaaccatagtagaggacgggccaccagatcccccatgtgatgggaacaaaggggggacagccacagggtacccctgcccaccagctccctggcagggg

SEQ ID NO: 19606 - DNA, 201 bp, Bos taurus
atttctccaaggtctgcagcgtcagctctgcacgttcttaactctaagcaccgggacacattaagcccgagagccgatcagatatcatgaagccggcaacgggagcaggacgccggcggcccggcacccgggaaagcatcagggcagctgcagtggcctgctccgtcctgcccccagtccccaccgagccctgtcctgtct

SEQ ID NO: 19607 - DNA, 201 bp, Bos taurus
aatgagcaaaaagtcaagctaagggacgggcagggcctgctgaattgcgacacctagtggggagagttcacagtgctggaggctaggttaaaggtccacctcaggactggccattggttatttcaagtcagctggtaaagcaaagaacaacagctaacatttaccaagcactatattttccagtagttatgtatggatgtg

SEQ ID NO: 19608 - DNA, 201 bp, Bos taurus
aatgcacaaaagcatctctctatggctgaatggctaactaggacattcccacactgtggaagggtttataaattttaataatgcacagcaacctggaatttgtgcaccatctccaagactcctcctgcccactaactgtaagcagatttaataagccctgagatacagacaaggaggtgtgctgattctctgacagtcccc

SEQ ID NO: 19609 - DNA, 201 bp, Bos taurus
cggcttatgccccagttgggaaggcagcaggcaggaaggcctcaactcagaaccaggaggggagttgggatccctcccactgatgtgctcgggcttcccccctcccaggaagcgcctgaaggccaagaacctgatgtacatcaagcagctcctgtatcttctggagaagttcgtggctgtcctgggcggtgagcggcctcc

SEQ ID NO: 19610 - DNA, 201 bp, Bos taurus
gggcccgggccactgctccttcctcactctcagcccaaaacaaccggactccagagaaaagtcacctgcgtgcctgctccactgccacctccttccttccccagcccttctcagaaccacacggccaacagcagaggccctctcaaggccatcctggcacatcttcctcttggcccgaaatccagtgagaggagcagcagt

SEQ ID NO: 19611 - DNA, 201 bp, Bos taurus
gtgtcatgggccaggctggagtagaaacatctgaacgtggccccctcctccttgccagttgcctgccgtccagaggaggaactgggccctctccctgaagggcacagctcaacaacccagagcaagacccagagttgtgtgtctccttcctcttgctgtactagggtctctgctgcagggacctcatctgctgagctggcc

SEQ ID NO: 19612 - DNA, 201 bp, Bos taurus
gggccagggaaggtggttgtaagcagtggtatctcctttgtctgagagccctgggcagaggcaagtgccagggtcaggaccgaggggagagtcactcaccgtaggcccacgccacgcagaaggactcaaagatagccacgaacagcaggcacatgccgctggctgcatagtagtcaaagagctggaacacgtacatgccgc

SEQ ID NO: 19613 - DNA, 201 bp, Bos taurus
ttctggcctttctcacgctttgtcaccccattttcagaatgtcccgctgggtgagatactgtctccccgccaccctcctttgtctttgggggaggatcccggagaccctcggttcacctggcccaggtttgctgtctgccaggagatagctctctgaatgggtctgcctctcaaatcgccggcatccggagctgataggag

SEQ ID NO: 19614 - DNA, 201 bp, Bos taurus
cagcgaccaagcaagaggccacagggtcagagcagaagcgccagaagaagggagagttggaatcagtgtgaaccaagaataaagaagcccgcagcaaattcaggtaggaaacctataagatgggccagaggttgccagcctctagcatagaaggaaaactctctgtgggccaaggcaatttgaagcctcaggcagagagca

SEQ ID NO: 19615 - DNA, 201 bp, Bos taurus
ggctcggagaccgtcccgggagggtgtgcagcgcctcctcgtccgccagggggcggcagcgcaccgcgcggctgggccggagcgccgctgatcccgctgaagtgaggtgactttctctctgacaaaagggggttagagggacttcctaacacttcagtgggcacggctcggagttcccaatgcaggggccccgggttcgat

SEQ ID NO: 19616 - DNA, 201 bp, Bos taurus
tgcagaagtctccagaagggaaagaggaaacaggagaattttatgatccccaggaactccctcccctgagcaaacatgaggtgaggggaggggcagtgcgctgtctgtggggggcagggaggatgagtgggtaaaaaatgcacgcttcacagggttaactgtggttaatctcggacagggaaacttggaatgatttttatt

SEQ ID NO: 19617 - DNA, 201 bp, Bos taurus
ttttgaaccaaggcctttcttgtagggatcctggaattttccagtattcttctctttatggttttcctgacctagatgacaagcttcgtggtatgaatatatagtagtggccaggtctgaactctgttttgttgctgctgttttaagaactcacagaaatatagtagcgactatgagaagtaggatttaaaacattaagaa

SEQ ID NO: 19618 - DNA, 201 bp, Bos taurus
ctggcttcttgctgtgatccccatacctgtagaatattcctcttttatcttaagaatccgttatgtgtgaccacagccagttagtttcatgtaacttccagaactgaaaaatccacacatccaaatttctgttagcttgatttgtctctctcacttgagaaaaaaataaaatattgtctctgctgcccgtttgccagttag

SEQ ID NO: 19619 - DNA, 201 bp, Bos taurus
ggtatatatacatgtaagttttttgttacttgggaattgaataaacaagattattcgaaagaatactttagtggtgtctaatactaattaagattattgggaaagaaacctaagggaatcaaaagaacaaagccagatgtatgttatagcaagataggcaggaaggatgaattctttaaaaagtaaattattaatgaccta

SEQ ID NO: 19620 - DNA, 201 bp, Bos taurus
gttaatgttatcattgcagtagttttcagtgactcgttagagctttgggcagtgtttgccataagaattctcagctagtaattcatatttgtgtgtaataagccatgtttgcctttctgatagaagtccatatttacctccccagaacttccttcttagtttgtatagattatcagggctagtggttttggttgtctaacc

SEQ ID NO: 19621 - DNA, 201 bp, Bos taurus
ttgggctacaagaaagagctgatataccctaggtaattactgtttgagttggaaaactgacataaaaaagcatgaagacaatctgataaatggtggtaaggggaaggtcaaatttcttatagtaaaatggaatctggaaacatgctagctcactgctgtatggctgggaatgaaaaagtggactctcaggcctctgttctt

SEQ ID NO: 19622 - DNA, 201 bp, Bos taurus
acgtgtgtacttcttaccagctcgtctcccttctgggtggcaatgcctggagggcggatgccaggcctgtcctcacctttgctgcctgtcgggcctggccatagcagattctgggagtgtggacgaaagtcctgggggcacagttgtgtgtgggtcctggtgtgtagctgtgtctctgcagggaaggccgggtggttcctc

SEQ ID NO: 19623 - DNA, 201 bp, Bos taurus
ggggcaggcgcgccagtcaaggcacagtggacgctgccggctgtggggtgtggaccgggctaagggggatggacgtgacctggcagcagtgaggaggggcatggacaccaggcctgtggggtttcctggaggtttctaaccaaagactgagccagccctgcctggagggggagagagggtgggtgcagaagcacagagaga

SEQ ID NO: 19624 - DNA, 201 bp, Bos taurus
tgcctggggggctggtgagcagagcaggtgcagagtgtttggccagaaaagaacccacgagtacaccgctgatgggttgtacttatgggcagaaatcccacaaacatccctcttctctgcgggccccttggcccccgtccaggggaagaaggctgtcatcacgcctccgtcgtacatgaaaacactcaagcctgctgcctc

SEQ ID NO: 19625 - DNA, 201 bp, Bos taurus
ccttcactgagccatttccctacttcagctgctgaaacaactcaaccccagagcaggtccagctctcgggactgggccccactctgtacacagcccggtcgctctacctgtcctcctggctcaacactaccagctgtgtcccctgcaaacagcctgaccttccccaagctctggaccgtggccgtggctggctttacagcc

SEQ ID NO: 19626 - DNA, 201 bp, Bos taurus
attgccggggcagaaagagccaaccacggctgtgcccaaatccccatcagggtgagggaagaaataaggtgggagaggaaacggggcagcagtggggccgaggagcagagatggatgaaccgggcagctcggggagacggaaaggcaaacccaggagcaacgtctgtcgggcagggatgaatcacggtcccccaccagctg

SEQ ID NO: 19627 - DNA, 201 bp, Bos taurus
gacccctcctttggacccacccagttgcccacccggccaggtcctcttcccctcttgctcaacctccagctcatgtgtcactgcccgaggacgtttcttctaccctctggccatcgaagtgggtgggaccttcatgacaccctgtgtcttccttgaaagcacttaagtagctcatgattccatgtcaattaggtggttatt

SEQ ID NO: 19628 - DNA, 201 bp, Bos taurus
attaggctagcctaaatagactagcctaagtctattcccctcatgtccacaagcctctggaaaactaaggcaccaatgtttatggccattgtctttcccaaaatattctatgcagtttaggggctctgtgaccttaacccacatgaccttaacccctgctccccaccactggccgatacagctgggtattcttgttacaaa

SEQ ID NO: 19629 - DNA, 201 bp, Bos taurus
cctctcccggggcggagcagggtgtgcgggtacgtgcaaaacctgcccctcggggtgtcctgttgtgttggaggtgagagaagaggcccctggaacagccacaggattagacacggggacgtgagggctgctgtgctgggattttcatgggtgttgtcaggccagatctgacctggagacggttagaagtaaagccagagg

SEQ ID NO: 19630 - DNA, 201 bp, Bos taurus
ttcaggcagctggcacagccgttgtggctgccctgctgtcacaggatcagttctcggttttctcttaaaggtggcaaccttctcacttgacaaccttccccgaaggccaggccaccccgcagttgggtctgtcctctcgctctcctgcacgtgggtttgctctctgcacaccggggcctttctcgaatctggcttctctcc

SEQ ID NO: 19631 - DNA, 201 bp, Bos taurus
gctgagttccaagatgctttacaccgtacagcccaaccgacagagcgcttctgctactagtggaacgtggcctctgtcggccagcaggtgataaactggcgcaattgctttgaagccgatgtttacaggacacacctgaagagctccgaacagcagctccttgataaggcccccctgaaaccaccagtgacaatcaacaga

SEQ ID NO: 19632 - DNA, 201 bp, Bos taurus
ccccctggctcactcatctgcacctttttccaggtccatcatgtggttagcatttctctggaaatgtcatgcctttggtcaagctgtttccatggccaggtacaggcttccgtgtagagagggtagcctcctccaggaagccctccctgactgccttctctgggtcagctggctcctggggcccccactgcccactagggg

SEQ ID NO: 19633 - DNA, 201 bp, Bos taurus
gagtatcacattccatttagagcacaggctaaggctcctgacaagttaactaatagtgacatttcaggaaatgaaggtgtctatccttggggaaaactgccgttcttaactatttgttgtatgcctaaggtggtgagctccctgtcattggaggtatgccctcaggagttgtgtgatcttttagaaaggggtcttggttag

SEQ ID NO: 19634 - DNA, 201 bp, Bos taurus
aaaatggtgaaatagttatctttaaactggttttgcatcactgtattctcaccaataaacattgttctggtaactaaaggtggccccttcttgatcagccgcctctggattcttctctttggctcagatcctctggactttctccatctacctggaatcagtggccattctgccccagctcttcatgatcagcaagactgg

SEQ ID NO: 19635 - DNA, 201 bp, Bos taurus
tgattttcagctggggatactgctgcttacaacaaaagacagtatttcccacgtctttgtgtattgatagagccatatgactgagttcaggccaatgagacgtaagtaaaagtgttgtgttgggagagggcttcataggagctgactcagctggaaaggaccctttttggcccttttatcttgcatttttatttccccaac

SEQ ID NO: 19636 - DNA, 201 bp, Bos taurus
atttatcctgccttctatgtgaagaataaatggtaggggcaaggtctaaaggaaggaagctagttagaaattattatcaataatccagaacagatattaacagatggtttaggccagtgaggtaacaaaggagaaggttgtgagaagtaattaaatttacatttttttctccctctctgtacacatatagatacaaatagg

SEQ ID NO: 19637 - DNA, 201 bp, Bos taurus
cagtgggcctcagttgcctcacctgtaaaacagaatgacaaaaacatctactccataggatggttgtgagattaatcaaattctttcaaaggtctcaacatgggccaaacggggtcagaattcacacccagggtgaagccaggcagtgagggcagcagctacacgcatacactcagctgccatcgtagaagcccactctgc

SEQ ID NO: 19638 - DNA, 201 bp, Bos taurus
agggactccttgtcaaagggctgggtggtggacaatggtactgaaggattccccatgctcccaacgggagccaaaccggaaaatggtggccactagaattcgacagagccaaatcagaacatgacaatcagcacagtgtctctgtccgcccgtcagtaagttcatcatttctggtttctgacaactctagaggccaaagga

SEQ ID NO: 19639 - DNA, 201 bp, Bos taurus
ctagtcctgttggtctcaactcctctctcagcccccacctcacgtggcccagccaccatcacctcttccctgcatcaccacacctttggcctccccagccggttagggatgtactaggtccagcaggtgttcagtcattcactcggtaaacatgcactgattagcgtagcgctgattgggtaccaggcaaaggccctgccc

SEQ ID NO: 19640 - DNA, 201 bp, Bos taurus
atggaggaagagggcatttcaggcagggcaaacagcctacacagaggcccaaaggagcatatttagtataaggagaagatggcacagtgttgtgcttttataaagctggtgtcagggtacagggccaacagctgtcttacagacctgtaagtgacgtgtcagactcagattacatttcagaactggagatagtcttagaaa

SEQ ID NO: 19641 - DNA, 201 bp, Bos taurus
taacttatgctgacagaaagcacgttagtggtggcatagggagggagagcaggagggaaggattaaaactgggacaagatgggggacttcccatcatgcaggaattctccgggcaatgcaggggactcaggtttgatccctggttggatcagtaccagctcactaaatgaaaaaaggaccatacttagtggtttgcatgtt

SEQ ID NO: 19642 - DNA, 201 bp, Bos taurus
agggcagcccacgatctcccattaaacagacaaaattactctgagcagaaaatagggagaacaaggtataaaaatctgtttaactaagttcacattttagcgaattcacaactgttttcttataaagatgttgtgcttggaactgacattcctttaggatttctcaaactgttaatatctgcctacattacatgaccgagt

SEQ ID NO: 19643 - DNA, 201 bp, Bos taurus
tctgaacccagcttctgatccactaattttggggcaatttagcaaaatttcacagaaagggagctagagtaaacttggaaaaggtctctgcacaagtgaaaatgattttcaagtggatgacaccaagggaatgaagggtaatgatcttaattcccaataaaataaaagctcttccgcttttaatcataacgttctagctaa

SEQ ID NO: 19644 - DNA, 201 bp, Bos taurus
gaaccacggactaaaaggagggagggcacgggagggatacaagggaggcgagcgtggcggcgggacttcctgtgactgacggcccagcgcagccaatgggtagcggggagatgacctcattgtcgaggaaagtctggaactggtggagtggcggcgcggaggtgggaggaggtcggagacgagccggaggcggggcgctgg

SEQ ID NO: 19645 - DNA, 201 bp, Bos taurus
atctttgccaagaaagaaaagggtgttctaaataatggaagcaggcattaagatactcagacaggcctggtgggtggcctaggtcacccagagttgtgtcctgagtctgaagagaagtaagtcagggtatgatgcagtgggcatgaccccaggaaaatcgtgcagaaaggcaggggccagggacgtaggaggtccaacacg

SEQ ID NO: 19646 - DNA, 201 bp, Bos taurus
ggccagccaagcacatgcgtttctcccagagccgtcctgagaggggaggggaggggagggttgccctcctacacctggccccacctgtacctccttccgtgagcctttgttctagctagaagggcccctgaattctccaggtaacccctgagagggaaggaaatgccttcccagagatgaacataaagccagctcaggccc

SEQ ID NO: 19647 - DNA, 201 bp, Bos taurus
ggaagatttgttgaggaaagcttgaaattattaggaaaaatgatgtgtctccagtccctgtggagtgtcgtgtcctctggccacagggtagtatggttttcccctgcctggagcccagatctcctcatgagaagatcagtgtccagcctggcctggtgctggtcattgcctgcctgtcttatcaggcggcactcagccagg

SEQ ID NO: 19648 - DNA, 201 bp, Bos taurus
cttgccttctccggaacagagattttcaaatcttgattcttgctgtgtgaccttgggcaaattcctctcctttctgggcctcagttttatcggctataaagtgagggattatctagaatctagcagaatccgatagagcaaaggtggcaaattgttggccgaaggtcggcatcctgcccacgtcagagtctgttctgggtt

SEQ ID NO: 19649 - DNA, 201 bp, Bos taurus
ggtcctcacaggctttgctctcaggagcaaaagcataataaacaccttttccaaagccccactgcttgacccttcagaccggtcttagccagtttcctccaggtccctgggtcgtcatagcaccattttttttttaatcaatagatcccaaatgtgatttgttagaacaattattaactcacatctttactatttgaggca

SEQ ID NO: 19650 - DNA, 201 bp, Bos taurus
ggtcctgtggcctagagctggcttaggagcatctgctggtcatgtgaacaaatcacggagcgcacagatacgggtacttagggcagctctgtcttgctcatagtgtggccccaggtcagcgtcccctggggacttgttagatatgcagactctgggcctcagaaactctggaatgtagcctggcaagctaggctgcaacaa

SEQ ID NO: 19651 - DNA, 201 bp, Bos taurus
tgatgggggtatggaaatgtacattcatgcagagagaactgctttgaggcttttcataaaagtcaaactaattcaaaaatagccaaagccccagagtatgtgacactaagtgctcaaatactagttaatgtggcaaagaacctcagcacagtttccatcattgatagacaaccttccgaggcgttgtgtgtgtgtgtgacc

SEQ ID NO: 19652 - DNA, 201 bp, Bos taurus
ctggcaggctcacccatctggtgctgaccttcagtgtcctagatgtgacacttggttcccagggctcctaccattacaactgctcccctggccattttgaggtggcttattacttttacaatcctcttccccactcgacctcaggaatttattcctggctcctgtagagtgaaaccagaagccacacccatggtgcaatgg

SEQ ID NO: 19653 - DNA, 201 bp, Bos taurus
ttgaggctaaaaataataaagttccagttccccaatagtgtgagttaagaatgacatttccattcaaatgagttttcattcttctcccaaatagtgaatttggagtacagacctaatctctcatctgttcttctgtgcttcgttcctttcccacgtaataaatatcatcagcctcatggccagtttctttaaagctctcag

SEQ ID NO: 19654 - DNA, 201 bp, Bos taurus
ctcacctggccagtgctctaatatttcccatgcactagactgagactggacagaggcctggttcagcacccagcactcatcggcaacaaggcctttcccacaacgtcaaaaggcaacatactctacccgataaggcgagttcacatgcgcctagaacatctgggttgggccctggcacacccccaccccacgcaccaatct

SEQ ID NO: 19655 - DNA, 201 bp, Bos taurus
agcctcagagtgcagagctgggctgcccacgggctttgaggccagggactacagaccattcgccccagagttctggcctccacacgctgcccagtgatgttcgtgcccagaatttcaccaaaatgcactgaggaccctggagtcatcagcgagaaggagggttccctggggcggcccgtttggtccctcgcccgagtcacc

SEQ ID NO: 19656 - DNA, 201 bp, Bos taurus
tccccgagctgtcagaagtgctggcatagcaggcaggaggtgtgactggagtctcccgggaatcatctacctcctggtctggggcatcagctggggccctctctggggctcctggctttccagcaggttggttgtgtgcagaagacacacggtctcccgttgtagccctgttctgacaccgaggccctcgggctaggccag

SEQ ID NO: 19657 - DNA, 201 bp, Bos taurus
ctcggccgcccgtcaacaggaggatggagaggtgggcagggttcccgggaatgagaaggaacacgtgaccagtgtgcgcagcgccacgactctccaaaccgcagtgccgagcagaagaagccaggcccaaggagtgcacaccgtagccccgtttctcaggaggaggaggtctaaatgcacgcagctaatctctgctggttg

SEQ ID NO: 19658 - DNA, 201 bp, Bos taurus
ccctcggagccggccgtgaggttcgcctgcatcaccgcctggaactctgtctcgttgcagcagtatttgaaaactgtgttgttatggtgacagcagaggacgaaggttttgttgtccgagagccgggggcagtggaagccgaagtggtagcggcctttgtggtctgtgtacggctcacagacccggaaatgcgcagacaag

SEQ ID NO: 19659 - DNA, 201 bp, Bos taurus
gggaggcctggcatgctgcgattcatggggttgcaaagagtaggacacgactgagtgactgaactgaactgaactggactcaccagaaaacattcaacaataggaagcctacaggcccaaacacactgtgctcctaacggtaaggaatcgtgaaaggaagtgttgtcgatcctcagcctggcagaggggctgctgtcagac

SEQ ID NO: 19660 - DNA, 201 bp, Bos taurus
gtgaaggaacaatgcaaagccccggcccttggccgttgcgccgcctccttctcctgcgctccctttcctgtcttctccctccagagttgggcttcggggcgcctggcctcataagtcacaggattaggagtgggggcttaggaaccgttttggattgtgtttttgtatgtgatgctgctgctgctgctaagtcgcttcagt

SEQ ID NO: 19661 - DNA, 201 bp, Bos taurus
gacttggggtttcagcagcagcctcctgggagtagcggtggcggcatcaagagtaacaggcttactgagggctgggcctgcttctctgtacttcactcttaactcatttaaccctcttgaggttactttccccattttgcagatgaggagaccaagggccagagaagttatgtgcccatgaccacacagctgttaaatgac

SEQ ID NO: 19662 - DNA, 201 bp, Bos taurus
cctgcgttctcaccaccgtctccctccttccacagtgctgcccttcccagcaccagctggaggctcttatcttggaaagtcttttttttttttttttaacaccgtgggccagttgataaacagtttccgagacactatctgttagtggcaagtagctcatcagaatacagcatgcagctgagagtctgttggtgggttaaa

SEQ ID NO: 19663 - DNA, 201 bp, Bos taurus
agtccagctgcgcgcgggcgccgtggggcccattcctcacccatcactgggtgtaagaggcaggatccatcaatccgttgggtgtcatgggcagggggccctccgtacattctaagtgagatacttctgactcacagatctcctacccgctcctgcccccacattgtcacagctcccagggtcccctccagggggtgatga

SEQ ID NO: 19664 - DNA, 201 bp, Bos taurus
gtggagctgtgccctccccatccccctcctgcatccttgcgtgcccatcagacagtccagacgtgtccccaccggaggggctgccccgggccagcggggatgaagcgtgtgtccgctgctacttccgtcttcctccgatacacagaggacacggcaacgcagagggagtcccggccgggtcagctctggttcctgagacga

SEQ ID NO: 19665 - DNA, 201 bp, Bos taurus
tcagtgtgaccctctgtctccgcagggtccattgccagctggtccggctcttcgcacgaggaatcgaagaaagccccaagcaggagtcccgcggctgagcaccggccgtgggaaccgtgtctcagacaatgacgacagaccaattatgttgcgatacattcaaatttagaaatttatttttgatagttgaatattgatttt

SEQ ID NO: 19666 - DNA, 201 bp, Bos taurus
tttgtgactggcttctctcacctttcataatgttttcaagattcatcacgcggtagtccgtgtcagtacgccattctattttataagcaaataatattccacggtatgaatagcccacattttgtttattcatcagctgatggacatttgggatgtttccactctttcactggcaatgagttgtggtgccgtgagcattca

SEQ ID NO: 19667 - DNA, 201 bp, Bos taurus
tgttctgagatgatccgcccttgggaacaagtcctctgcaggaagcagctcctctcgtctccctgggtcccccagacggcccccgcgtgtcagcaggggtcgacgctgtccccattcgtcagagatgtgtctgcagcctgccacgtgcactgagcatttgcggaggcgtgcagtaaccccaggccaggcgcccgtgcgctg

SEQ ID NO: 19668 - DNA, 201 bp, Bos taurus
agaggaaggcccccctgcggtgtccctgcgccccctctgtgggcccccagggccgcccccaggactgcacagctgagcctgcggccctgaggagcggccaattcatctggaaggcatgaggctcggctgtctcatggacggatgaccctgagcttctaaggagactgagaggcgatggtcacactgggcatgtgagctgag

SEQ ID NO: 19669 - DNA, 201 bp, Bos taurus
gtccttcctcttgtcccgccgtcgtctccaaaccacgctctgatgcggcacttcctgtactgtctccagccacccccactgccctggctgtttggactcccgcgtcttaccccaggccatcaaaactgccaatgtggtttctacctccagttttacccttttcaataattttctttaccaggcagccgtgaaggatttttg

SEQ ID NO: 19670 - DNA, 201 bp, Bos taurus
gcgcaggagaaggggacagggatgcagaaaaaagggggtgcggcagtgagtggtttgcactcatcaaagtgagcagggcgagtgggtggccagggctctgggaggctcttggtggcccttccggctgcctggtcagcagggttgaagggcaggctgcctggcccccagggttattatttcttgacccctcagcctggtttg

SEQ ID NO: 19671 - DNA, 201 bp, Bos taurus
gggaagcctggcgtgccacagtccagggggtcgcaaagagctagacatgacttaggggctggacaacaaaggaaacccgaaagttcaaaaccaaggtgtcagcgggccagcatccccccggggctccagtgaggacctgctcctcgcctcccgagagctgagaagattgaatcagaacattctggaggagcagttgatgaa

SEQ ID NO: 19672 - DNA, 201 bp, Bos taurus
tatgatttttagtagtgttaaaactgtgatttctttttgctgccttatttcactggctggatcctccagtacatttctgaatagaagtgagggtagcttgcctttttctcaatatgtatcaggtagaataccactaatgttttgtcattgtctattaatcttatacttgtgttcatttcttagatgatttccattagactc

SEQ ID NO: 19673 - DNA, 201 bp, Bos taurus
ggctctgttcaggaggatgggcctctgagttttgggcccaggagaccccaagggccggctcttggccggcagagctgagaggtgctctggatgacccgaagcctcacctgcttctcaaatgtgggctgtggaccagaagcctgccctccccagggagcatgttgatcaagaccttccctcccaccgagaggtccactccag

SEQ ID NO: 19674 - DNA, 201 bp, Bos taurus
ctaagttaacatggctcctctgactttctctggttgagtgctgctatggcatctctttctccctccgtctagtctaccgtgccttcgtattcctcacagacgacatagggttggaccttgtgtttttgatccactctgaccatctctgtctttgaactaatgtatttagaccattcgcatctacagtgattattagtgtag

SEQ ID NO: 19675 - DNA, 201 bp, Bos taurus
cggtgggcaccgtgcccacctggggcgctccatgtcggtgttcctgaactcacgtcttcatatttactcttgccgcgccaattgaattagaaaaggccattgtgcactttagaagcaagagtcctcgtaaatactttattggaacaagctcaggatttacttgctcataaagataccctggacggctctgctccgtgatga

SEQ ID NO: 19676 - DNA, 201 bp, Bos taurus
aaacaactctgatggggatgcagagagaatgcttaatcggccttttcacctttaatggcttcagggggtgcaaccagaggaccgttcatcatcacacgcttggagtcggaggagggccgccatttcagtgtggatgtgctcggtgtctggagcctcagagtgtaaggaggggccccagaacttgtgtgttggagcccagga

SEQ ID NO: 19677 - DNA, 201 bp, Bos taurus
caacagacaagagccacagggaagaagcagttgacaaaactccacaccaattcctacttaaaaaacagagcaaaggggaactggagagggaggcttcctcggtctgacaggctgtgttctcaaagagctcagagagacccccgctggagcagcacttcagagctgctctcagccttgagccaggccaccaagctccctgtg

SEQ ID NO: 19678 - DNA, 201 bp, Bos taurus
actggggcccaccagccccatcaggccctcttgcactccctgtggtctctgcattcctcctgctcagtttttccctcacgtccgggccactggactctggcgtctccaggggtcattccaggctccaggctcacaggtctcccagggatggaaggcaagacgcgggcgcctgcagtcagtgacagacaaggggaagttctg

SEQ ID NO: 19679 - DNA, 201 bp, Bos taurus
gctggtggaggccagggggctgcaggaagttggccccctcccctcccagcggcactgagaccgaggcaaacctcagccacggtgacactactcctggtggtgccggggccagagggccacgtgtgccccacggacacagccaggtgcctctctggagcgactctcgagaatgggtgcaccccgagcagtcccggaggatgc

SEQ ID NO: 19680 - DNA, 201 bp, Bos taurus
ggacaacatttcctgtccaaagtcagataccaggcaagtcttttctttcttggatgtggatttttgttcttaaaccactgttggctcacaggctggaactgaccttgggctgtagtctgccaaccctgacctcaagcttccttggcagttggtccctcctggggatttaccctaaaggaatgaaaacctacattcacacca

SEQ ID NO: 19681 - DNA, 201 bp, Bos taurus
agctcaacttcctgctgcaggaaatcgacaactgctaccaccgggcggccgagggccgcgcgcccaagatcgagaagcagatccagtccaagggcccgggaatcacggagcgcgagcggcgcgagatcatcgagaacgcggagaaggagaagagccccgagcagaacctgttcgagaagtacctggagcgccgcggccgca

SEQ ID NO: 19682 - DNA, 201 bp, Bos taurus
cttcgctttcactttcacttttattgccctagggaaatcactgtactactgctttgttgtcctagggaaatcatttattcatttaccttaacattttttttcccatgtgacaggcattattctagaattatcaattaatttggcaataagtttttatagaaaaaacaagatagggtttccctgatgctcagtggtaaagaa

SEQ ID NO: 19683 - DNA, 201 bp, Bos taurus
atcagaattcccaggccacagcactccacagaagttaactcctggggctgggagccattcttcacgcccacaagatctgatgacctcaaggaaaagtattcgggccggtccttcctatttaagattcactgcttgtgcttactagagtagacattacagctgtggtctaaactctatgtgtttcagttggttcatttactt

SEQ ID NO: 19684 - DNA, 201 bp, Bos taurus
tgcaactgaaagctaagaatgagactcatttatatgaaggcacttaatatattatagaggtaccattacaaatccaggaagcaaagatagtctattcaattgctggtgctgggatattggtacagtaaaattaaattcctctctcatagtatacgtaaattaatttcagatgaactaaaagcctaaatgtgaaaaagtaac

SEQ ID NO: 19685 - DNA, 201 bp, Bos taurus
ctcttgttttctgttgatctccatttacatgaactatctttttccagctcctcattttcagcctgtacatgtccccaggtttgaggtggggtctcttgtaaatagcatatataggggttttgtatttttatccattcagccagttagcttggtaaggaacggactcaaatgcatcctgactatgatttcgattcctctttg

SEQ ID NO: 19686 - DNA, 201 bp, Bos taurus
gtagttctaattctccatacagttacaaaatggtcaaagagaccaggaaaaggtgaccaagaaaggaaagtttgggccacacgattcacctgtttctggctgctcccttctcagggacgttgggaccctcttggcattggcaggtcggtataaacccctgacaaggctaccctctggtgctgccatcagtcattatgaagc

SEQ ID NO: 19687 - DNA, 201 bp, Bos taurus
atctttatccaaaacttctgggtttaaaaacaaagttttctcccgctgattcagaaatgatttttacctcattatttgtttcctgacttcttaacagaaaaggctctaccagtttcttcaaaagttttatttctaactttgttgtactcatctatttatagtaaaagcttaagaaactttccatgaaaattcttaaagagc

SEQ ID NO: 19688 - DNA, 201 bp, Bos taurus
actggagagaaggtagactaatttccaaaaaccaactctgaagattctgctcaaccatgaaagtttcaaaagcaagaaagtgacgttcatcattttgggagtgggccagtcttcattatcctccactgtgtgcaaagtttctcctgattggttggtggggagataacagggcggtgctccaggaatcttgttctgagcctg

SEQ ID NO: 19689 - DNA, 201 bp, Bos taurus
aaaaaatgggccaaagaactaaatagacatttctcccaggtttatttgtgataggcatataattcttcgaaattcttatcacagattccaccgagagtgaattttgctaagagctgggcctaccaggctcctttcattgcatgaattaccttgtaaaaatttcttgcaaatgaattgctgcattatttgctgtgcatattc

SEQ ID NO: 19690 - DNA, 201 bp, Bos taurus
agattggtttattggcgtaaatccacaggtgtgataggccagttttccaatcttgaactaagtaggtttttcccccaagttatagactcagttggacaattgccagcttcatgcatggggtagactccttgctgcagtagatgatagcacccagactgtacacatcctgaagagatctccttagaaagagatcctaaagga

SEQ ID NO: 19691 - DNA, 201 bp, Bos taurus
aagctatggaatttcagtgtatagcttgaagtctgttagcctaatcttgtctaaactaagaaaggatagcagttcatcaagagaatcatcttttttccccgtatgtaataaggatgcttacacgattcaattatataatgacatgtattctcagcagcaactttgtgaaatatatgaaaagtcttccacatatcgttgctt

SEQ ID NO: 19692 - DNA, 201 bp, Bos taurus
ttgttttaagacctatccatattattttagccacttaaatattaaaaatgcaatgcagtgtaggcattaaatgataagataaaacattaaatgacaatagggataaaatatttaaaataagtgatactaatgataaaagataaaacatttcctctatcaaaaaatttgtagttcttagaatcaaacacgaggattccaaaa

SEQ ID NO: 19693 - DNA, 201 bp, Bos taurus
gaaagcttcctatgttcattcagggcaggacgagaaggagagttaatctctggatataaataatattataatggtttgtttctctgaaaattgtatggatcgttcaaaaaaacgctcatttacttattcactcaggcatttattgattacagtgcatcaggcttttattgcaggcatttgacatctgagagcttactgtct

SEQ ID NO: 19694 - DNA, 201 bp, Bos taurus
acagtggaagatgattggctcacatgaggcctggtttatttaggggcacactgaacactagaatgaaaaataaagataagcattactgtattaatggtaaaagaggacacggcgttttaaaaccacatgtacattctcaaaattaacttgaataggctttgactttcttgaaatgacaaaatatagagctctctaacagga

SEQ ID NO: 19695 - DNA, 201 bp, Bos taurus
tgttactacagcttcagttttttaaagtctttatctcttaaattatttaaaaaatggatacgtattttaatgggaaagataatagcatttggtaaaaatgaatgatctcatatttgcttgtcaacccatctcttatctcactcatcatgggaaccagtattaagagccccatgtacatcctcttgttcctttggcccttct

SEQ ID NO: 19696 - DNA, 201 bp, Bos taurus
taaaactgtttatggggttttcatggcaagaagctggaatgggttgccattttatcctccagtggaccacactttgtcagaactctccactgtgaccggtccatcctgagtggccctgcttggcatgcctcatagcttcattgaattgtgcaaacccttcaccaagacaaggcagcgacccatgaaaggggtttggatgtt

SEQ ID NO: 19697 - DNA, 201 bp, Bos taurus
aaaaactgaaactaataactgattgattattataaacaatgtcagttaaaaaacattgtgtgagcttttattttccttagaagaaaagcctatgtattcatctcatatcaaaccccttttgaaaggagtacaatttctacttaggtcatgtaccatctttgggttcatttgatattgatataaatagaagcttgcaaccat

SEQ ID NO: 19698 - DNA, 201 bp, Bos taurus
ccttagtgggtgttgaaggagcagttttggttttattataggatcctacgggtgtctgatctattgatgaccttgtggaaagagaccacagtgccaacaatctgcatgagtgaatggatgagtctgtgagtgtgtgtatgtctgtgtgtgtatgatgcttatatacaaaaatttgaacatatggtagaatgatgcaagagt

SEQ ID NO: 19699 - DNA, 201 bp, Bos taurus
gctaattatcttggagaaggcgcactgcccggtttttggccttgcatggttgaccttggaacagtcatggtgctgttgggtataatgctaacgtatcacaatgagcataccatgagactcaaggtctactggaagttgaatcttctgtcgtcttggacccagtatgttctaaccagttttcgtggtatcccattcttctga

SEQ ID NO: 19700 - DNA, 201 bp, Bos taurus
tggtggtatcaggaggtgcagccttgagaggtgactgggtcgtgacagaggagccctcatgaatatgattagtgcccatataaaagaggccctgtagagtgcatcccctctaacatctgaggaaacagcaagaagatggtcgtctgtgaaccaagcagttggccctgaccagacactgaatctgccagactcttgatcttg

SEQ ID NO: 19701 - DNA, 201 bp, Bos taurus
ttatgaactttttggctacccccaatatataatctggaattttctgataattgaaccatggaaaaggaatgtttttctggtatttcagatacactcagtattgttggaataatgatgttaggaaatgaggagagttttaaaaaatagatatttgtaagttgcacagcgtgaaaaataagataaacaagaaattgcttagtt

SEQ ID NO: 19702 - DNA, 201 bp, Bos taurus
tgagctgaggagtggagttaaaagacagtagatttatggaagctatgtcacaatgaggaacaaaccagaggtgagaattggtcaaaagaaagggaagactcggctattaaccattctaagacttacaggaaagagaggaaatgattgcttgatggaaaggtaatatctgagggaaaactttcagtttatatttgttgaatt

SEQ ID NO: 19703 - DNA, 201 bp, Bos taurus
ctgaagccatgattatagttgctttagttgatccaaacgtcagttgaattcataatagctcctaagccataaactggtctctgggtatccctacattcatcgactggtgagtcatctacatttatattgactacaggatgattgtaccctcacagggcaggtaactgcttccatattttgccctgggctacccctatgagt

SEQ ID NO: 19704 - DNA, 201 bp, Bos taurus
aaagctttggggaaagaaaccagacgtgcagactgacaccagcttgtaaaggactcttacagctttgcccaagaattggtcttcatcctgaagaaaatgggaatctgtcgaggcttagatgtaggcaaggagtgaaatctgatttgtgtttgagagatgtctttgtgccgctgtgaggatggatagcaggatgcaggaaga

SEQ ID NO: 19705 - DNA, 201 bp, Bos taurus
cgttttttgaatgttgaattttgagccagcttattcactctactctttcacacttatcaagagactctttagttcttcttggctttaagctcttagagtcatatcatgtgtgtatctaaagttgttgatatttctcctggcaatcttgattctagcttgtggtttacccagcctggcatttcacctgaggtactctgcaaa

SEQ ID NO: 19706 - DNA, 201 bp, Bos taurus
actaaagaccaagggactagtgattaaaaaaagacgactagcctctaactcatgtttattagttggattgcgatgcacctgaacgatggtggagagaatacaggagatagtgttggggagttggctccaccaggagtatgttggcatagttatatgaagaagggctttgggacaggacagcaagcaagtacctagagagaa

SEQ ID NO: 19707 - DNA, 201 bp, Bos taurus
taacgtgttagttccaggacagccctgctccggcgcaacaacatgtaggtgccagtgttgcaatgcctcaagctaggcaactaactggccagggacacagactcacccattagcagacaggctgccttatgattccctaagccaacagcaacctctagacatggccctgcccaccagagggctcaggactctgcttcaccc

SEQ ID NO: 19708 - DNA, 201 bp, Bos taurus
gttatcgtctgccttttagtccaccctcagcattatgtctctacttttctcttctccacactcacattccagcctctgaggctggccctgacctgagatagccaccctttcttactctctttcttccctccggcatctgtagtttaagccccagacgtcagccccagcctgggctggccacatgctgccacatctcactga

SEQ ID NO: 19709 - DNA, 201 bp, Bos taurus
ttgatgttacacaagaaaaaatttatatcccaaaacttaataagagattttaaacaaaatgatttatctataaaataaaaattctcaagctatattccaaatacatttggtagaacatcaaaatcatggatattttgaacagcatgcctagtgtccacaaagggatgtgtgtacagaatgttgctgacactaataaaagaa

SEQ ID NO: 19710 - DNA, 201 bp, Bos taurus
gtcagctatggggaatgtgtcaataggaaatgattgaaagagtttctgtgtgacaaagtgggccagattaaagcaaagtctcacaagttttagtggtcaacgtaggcagcaggatctagtaacattttctaaccaggtcaaagagtaaatagcattgtctgggaaattcagatcagcagagaaggtgaaacaaaaagaaca

SEQ ID NO: 19711 - DNA, 201 bp, Bos taurus
tcctacattcaggaaacttgatcaactttagctttattattttcattataaatacgatggcagtgctttatccatatggctatatctcttgggacattgatgtgttcttttgcagataaaacatgagacattaattaaatgccatctttctccaaagcataagtaaactgcacatgataactcgattatctcagttaagca

SEQ ID NO: 19712 - DNA, 201 bp, Bos taurus
tcagttttctcacctgaaagacagcagaggcacttcctaactcaaggaggctttctatgaggtgaatggaatcacgcatctgccgcacttagtccagtgctgggctcagtagatactgccatcactctcaggggactgcgtgcttgtacagatttcagcaagtcagccgagcaagggtgaatgtcattttttagtagcatg

SEQ ID NO: 19713 - DNA, 201 bp, Bos taurus
ggaaagtttggcactctgttagatgaaaaattgaagggtaagacaccttttaaaaggtataattttatttggtaattgtaaatgtttcttggagacagacatcttctatcaacaacttacaggcatagtgattcactacggcctcacttaagtgagacagtgctgagactttcatgagttatgccatcacagcttggtggt

SEQ ID NO: 19714 - DNA, 201 bp, Bos taurus
aatatcctgatattcacaaatataatttaaagatgattaaagttacgtctaatattttgcacattccttcttttaaaagtggtgttttattattatggtgttgtttcaatcttgtgaggtttccctggtacaaaaaaattatcatcatcatacttaggattctccaagtagttggcttagaaatgatacattcatttacct

SEQ ID NO: 19715 - DNA, 201 bp, Bos taurus
actttacagtagaaggttgatcttcactattaattagttcaaggagagaaatcacatatcacccccaaaagttgacctgaccaggtcagggaacagttcttctgggaatcatacagcatttttaagtctcttcataatggcatcagtggtgtcttggtttgcttctttcagctcctgtttttctatgccctcgaaactagt

SEQ ID NO: 19716 - DNA, 201 bp, Bos taurus
agggccacacggaatcctgctcttgccccttgcagccaagtccccgtgcagagagcagtgtccctggaacaccaaccaggaagatctctgcctctgaattcgatcggccgcttagacccatcgttatcaaggattctgagggaactgtgagcttcctctctgactcagacaagaaggaacagatgcctctaacctccccac

SEQ ID NO: 19717 - DNA, 201 bp, Bos taurus
gatgttagcatcataaagtgccctgacaaagaatccttcctactgaaagatatgacaaatcttcttgtccctgttggcttccagaccttttctctcctgtaacgctcatggatctctaaacagagtctcttactttaccaatctgcgtgtgctatgcttgttttcctttactgtctgtctttgacaagtcactcctcccac

SEQ ID NO: 19718 - DNA, 201 bp, Bos taurus
cttctctgccttgttttcatgtctgagaactgggaacccagatatctacttaatgagagggttgtaaggataaaatgagttcatgtatggaaagggcctgccacatagttcctgctcaataaacattcacctccttccctccactctgctaggagacctttctgtgactctgagaattgtcctctggtagctcttttctat

SEQ ID NO: 19719 - DNA, 201 bp, Bos taurus
ttattcttttatttattttttctgaattaaatgaagaaagaaatgttcttctgccactgaaatccaatatttgagtttggtatttagtgcattagctttttccttttcattcagtatgttttgtttttccctcttcattctggggtcaatttcttctgtaaatgaaaacattcccgtccatttcatcacccatctcctacc

SEQ ID NO: 19720 - DNA, 201 bp, Bos taurus
tttatctttaatatttctacagtgatctttgaaagttggggttcacctacagttcaaccagccagccaaatactaaaaacatttgaatatctttcaaaaatgactaaacatgtcactaggaggatatttactgggaattataaagctattaaatttctgatcattcttaataatattagactagtttttcttttgctattt

SEQ ID NO: 19721 - DNA, 201 bp, Bos taurus
cctttgttatactagcatatatgcctatctgttgtttctgatagattaatacaatttataggtattactttattttttgaaaatactaatttaaaatatgcaattatttgttggaagaggtctcctccctccatccaaaatcagtgactcaactagagtttgtttttgcctcctgtaacagttcagaggtagacatggggt

SEQ ID NO: 19722 - DNA, 201 bp, Bos taurus
gtctcagaacagaggaagaagcccccaaagagacatgatcagcactgtatccacccttgggcttctaattcctcccccttctcccagatgagctcacacatcccctggctttcattaccaatgatgctcccccaaattgcaagtgtttatttggaattcaaacctctttcctctgagctccagcatttcaaattgaactac

SEQ ID NO: 19723 - DNA, 201 bp, Bos taurus
acccattcccttggctgccagcctcctccatgccccatggggtcaagtgtggagcgtgctctgaatgactcacagaaagggctcctgtaccagtcaatcctgctcaatctctgttgcttgcctcttgaagtatcatttccctctccttccctctcctgggccttggcttcctctgtaacaccttacctgcaaatttatttc

SEQ ID NO: 19724 - DNA, 201 bp, Bos taurus
taatgtgcctctttaaacaattaatttactagaggtgtttatgcaccaccaaaagtcatttctttactgttaagattttggaacatcctggaataccttacaatattagatgagatagtcaatagttggacagaggagcctagagggttacagtccatggggttgcaaagagtcagatatgacttagtgacttaacagtaa

SEQ ID NO: 19725 - DNA, 201 bp, Bos taurus
aaaggaaaacaaaacaaaacaaaacagaggaagcatctactccttttattctttcttctttattttactcccttctatatgcaggtgctttcctaaaccacgaggatgagagagacacgccaggaatgacagagcagtgaactggaaatattgtggtccttgtgcacacacgccttagatgactttcctctgaacccatat

SEQ ID NO: 19726 - DNA, 201 bp, Bos taurus
ttttggccttaccatttttagagccagtgctcttgatctcttcaatgatcttcaagagatttgctagtgccaacatgacactcttttaccaaaatacaactatcctggaaggacatagtttttgaaactctacccttttccatcaaattcttactgtcctcagatcagcttctcagctacttgacagaaggattcatgtga

SEQ ID NO: 19727 - DNA, 201 bp, Bos taurus
cagagggacaaaacccagctccacccaccagtgtgaaggcaccaatccctcacacaaggaagcctacatagcctcttggaccagcctcagccaacaggaagcagagaccagaaggaagagaaccacagacaccagaagaaagaagacctcaatcctggagcctctggaatggagactatatgcagaaaaagagacaaaata

SEQ ID NO: 19728 - DNA, 201 bp, Bos taurus
gctattattttttgaaatattgatttatttggctgtgttgggtcttagttacggcacgtgggatatttgtcatgtcatgtggggtttttccttgtggtcactgactctctagttgtggtgcttgagctccagagcatgtgggcttcagtagttgtggtgggaggcttagttgctgtgaaacatgtgggatcttagttaccc

SEQ ID NO: 19729 - DNA, 201 bp, Bos taurus
aaaaagtgatacaaaaaaattactaataagtttcttgatgtctgaaatgagcagcttcaactttaacttatttagtatggagactgaattcaccttctactgatgaattaggagcatttacaaatgcatggctagacacaggatgctaaattaaaatgactagactgcaaaaaacaaagctggcaaagccaacgctatttt

SEQ ID NO: 19730 - DNA, 201 bp, Bos taurus
aacacaatgacatggaaagagaagcctcaattgtttgaattttttcaaaaaaacttccttccaggctaaaatgcttcttacagatgcactaaataagtaacgtattaacattgtaaccaatgaaggggtttgttagaactgtccctagggttacatatttcttgaagaaagcaagaatatacattgcaacttaaaataata

SEQ ID NO: 19731 - DNA, 201 bp, Bos taurus
agtaatttctaccaaatgaagatgaccacagttggactcaacgtcaacttgggtaaagtcagcaggagttccctgggctgcacgcatgcttatactttgttcccagtttgtctccaggcatactgatatagattgtgccagcatcaaggacaagccttcaggaaggcctgtggagcagatgcacacaggatatttcacttc

SEQ ID NO: 19732 - DNA, 201 bp, Bos taurus
ggaaatgaatctctgtgtatttgaattagtacattcatttccacttaaaaattctatattttgtcatgtggaagaaatgttagttgaagctaaaaattcacattatctgagaaaccgtttctgcaattaaataaatgatagtttaacaaatattaaatacatgtatttttttctcaacccagtttccacctttgtattgat

SEQ ID NO: 19733 - DNA, 201 bp, Bos taurus
agaagaaacaggaaacacttgtgtatttgaaagaagcattgacacctatgatgcttggaattagattctatgacatgtaagaacaatggatccagaaaacgtttatgaaacttttattgcaacatgttttcaccttgtcagtttaaatttttaatgcacactgacatcaaccacttgctctattgtatacatacctcataa

SEQ ID NO: 19734 - DNA, 201 bp, Bos taurus
gatatgttaaatatatcagtccaacagtgttactctatgcaaagtagagtttattctcctgtgctcaaataaattacagaagcattagaaaactgtattggaatattgcttacatttctgtgaacaaatggtttattttaatatgggacaggcagaattagtgaagacatattggcaattttcatagacataagacacaca

SEQ ID NO: 19735 - DNA, 201 bp, Bos taurus
ctgccatgtattttgtttctaacatgttaacattctttcagtcattaactcttgagccagcaatttgtttttaagctcaggggaggcctgggaacctagtttttctacaaacaaaaagcagatggaggacaagaggaggagtctgtcctgggaaggccacataggattctgcttgtttacgttatttagaattgacattct

SEQ ID NO: 19736 - DNA, 201 bp, Bos taurus
caaatcaggtagcgcagcatccagataattaatgagcaagaaataaaatttcaatcaatgagactgtccttcttttgtctccatggcctctctcccatgacatcttacctaattgtgcccccttcatgaaccaaatgaggaaatgaacgaaaactaaggaagaagaggaaatgattttttattctctcaaaagaatatgaa

SEQ ID NO: 19737 - DNA, 201 bp, Bos taurus
gagtatatataagaaattgttgaacatatgtatctaatttaaaggacacacagtaagaaacattaatcagccacccacaatctttcaaaatacatatatctatactctctgtagaaaaatatagtatacatacaaaatgcatagaaaatataaactttgattttccctactcccattggcataaacaatatgagctattat

SEQ ID NO: 19738 - DNA, 201 bp, Bos taurus
agatgactgattcatcgcagtccccataattgtccttcttcctatgctgctgggattcttcatgctacagtggtaagccaatctgcactgctagaactcatcatccagatactagaaactttcactaagttcacataaacaaaagatatgatttttttttaatttggtgatcatctttttatctttttccagttcctacca

SEQ ID NO: 19739 - DNA, 201 bp, Bos taurus
ggaagtaggcaactctagttaaagattgcatcacattcccaaaagtgagattaggattgcagtgtattgtgcagtaaaatggagtgtgtatctctaccttagacaggtttcaagcagtaccaagctggggatgggactggcgacctgagagcaatagtataaaggctttctaataaaattttgttccatagaatattcaca

SEQ ID NO: 19740 - DNA, 201 bp, Bos taurus
tcaaaagaaaatattttgtaagatatataagatattcttagttttttggtaaaagcatgttgaaactttaaaaagccaatttgctttattaaatagtgagttctcccttagtaacagttagcaatacttgcgacattttagtgtttattctgtttgagtgacttaattgtaattgaagtcattttacagttaagcctcaaa

SEQ ID NO: 19741 - DNA, 201 bp, Bos taurus
gcatgtatctttttcacttagaagactttttaaaacacatatgctggggtctgtggttcagtagattgtcaaataggcctgagaatttgcatttttgacagatttacagaggatgcccttgctgttggaactgcactttgagaaccattgctttggactaggagttggttactatggccaatgagccaaatttggcctgtt

SEQ ID NO: 19742 - DNA, 201 bp, Bos taurus
acaaatacacttaaagtctactgaggccagcaaatatgtttttcttatcaagagttatcaccaatcattactacagcgagttgttcagagttgcactggtcgacatctgttgaatagtttgattaactttaattgatttgaacatagtattaattgaggttcaggtactgtgctggatgtttttgatactttagccactca

SEQ ID NO: 19743 - DNA, 201 bp, Bos taurus
atgcagtatcacctgattcactttaacttcagaactgaatgtggcatttctctttaagtattgttgctttataattttctgtcaactatttttttttcttttggggggccagaaggataaatgccttttcctaagtggtctctgagtttattctcaaattacttagcaaacatttcacactttaagattatcttttaaata

SEQ ID NO: 19744 - DNA, 201 bp, Bos taurus
ctatttgtttacaaaactgtagaggtctattatagaatgatcaatgatatctatttttttaattactacaaacaattctgatgattagatataaaaatatctgagtacttctgagtactgacaaaatttgttcttgacaaggtttattcttttggatttctgttctcctatttcactaaactgtgttctattctgctattg

SEQ ID NO: 19745 - DNA, 201 bp, Bos taurus
ctgacattcacttaatatgatctgagttgtaacacatgtctttctcttgaggttgctgtgaaagttacataggataatatgtacagaggccctctaatagtgaatgaagtattatacaattttagtgctgctgtgctgtgcttagttgctcagtcgtgtctgattctgtgtgactccatggactgtagtcggccaagctcc

SEQ ID NO: 19746 - DNA, 201 bp, Bos taurus
ttagaatttattgctttctgagatgtttgcctttccttattaatttatgacaatgagtgccattctgagagagacagagaagacatatcccagtggcttattcagcaaaatgctagaagagaacactttttaaagttagacaaggtaaaataggctggaaaaatttattttttttttacaggaatcctttcaaacttctaa

SEQ ID NO: 19747 - DNA, 201 bp, Bos taurus
gtaaaatttaattacaaaattttaaaatggtgttttattaaatgtattactcatgttataagaaagattaagaaaaacaaagcatttatgcagatttgccctcagttttctagaaatgttgcttttattttgcatttggttttgggtggttctttgttttgtatttgtgaagttggctgtctagaaatgacaagctttgtc

SEQ ID NO: 19748 - DNA, 201 bp, Bos taurus
tataatcattcatatcgattatacttcatataaataattttgaatcatgtgtatataggacacaatgaagtgaactgagaaattaaaaatgcttctgcttatatatcctatatacattttctccaactggtgtgaccttgtttgactcttcacattaggtttgctttgagaagtcattttccaaaattcaccagtctagta

SEQ ID NO: 19749 - DNA, 201 bp, Bos taurus
caacttttcgtggactccctctaacgatgtgatggattgattaagaccaaatcctatcctctctgtgtttattggagaaatggcttttctcccagccttgcgcagaaaacccgctatctgctgttctctggggcatgtttaaaggagttcttctctatcgactgagcacccaccatgtgtcagttaatgtacatgcaaagt

SEQ ID NO: 19750 - DNA, 201 bp, Bos taurus
gacatcatctgcactgcaaataacacaacagaagtgcttttcttgagctccagtgaaggtttggacaacaaggccatggtgcgcttgaaaagtttcaccattggcctcactcattttggctgccaaagaatgctttatttcctatccaattgccaaaaagtgctatcatttgaggcttaggagattcggcttgtgggaaac

SEQ ID NO: 19751 - DNA, 201 bp, Bos taurus
gagacctgtacaatccagtacctttaaaagaagttctctgagtcctttctcactgtactgtgctttccttctctgcattaaaatgcctgcggtatctcaggagcaatgttgacaccatgtgaattccattatcatgctgtaatgctataataatatagataagtatagtctatgcaatgcttgattgaaactccctgtgtt

SEQ ID NO: 19752 - DNA, 201 bp, Bos taurus
gtacttttttgagtacatatgttatataatattaacatctactccagaagagaataagaatttgaattccttactttctagtatcatttttgtcccaagatgatattttaattctataggaataacagacctaagaactctatttgtgccactcttggcatttctgtttttttagaaatctttctaattactgggtgtcag

SEQ ID NO: 19753 - DNA, 201 bp, Bos taurus
gcatagcagagagaagatagccagagagaaataagtcttttcactgagaaaaagaaaatcagtataaaactttttctgtgaaaaaggcctcagcaacaactgcattaaagtgacccccagcatcagaacactttttccatggtgggggaatcccaagattagaggaaggcagttctgacctcccattatggtagacctgtt

SEQ ID NO: 19754 - DNA, 201 bp, Bos taurus
gagagcaatttaagtattaattctttcttttccatgtggaactgtacttcagagtaacaattagctccaactgacaagggaaagctctttttgacagaattccaattaataaatgcaaaatgactgaatgcaaaaagattgatagaattgggaaagtcatcattttgcaacttgtaatggaaaatgtggttaaggcaagaa

SEQ ID NO: 19755 - DNA, 201 bp, Bos taurus
aggccaaccagaatcagaagtccaagaagcagaacaaaataagggtctggaatgagcagaagtatttctggaccccacattttcaacttcctgcatgcctcctttaaaccaccctccaccagaggccaatgaagtgcctgttgtgctgtgaggtgggaaggttgccaagggcgtggacttgtgcagctgacattgagaaga

SEQ ID NO: 19756 - DNA, 201 bp, Bos taurus
ctgtgtagaggcatcttttgtggtatctgccaagcccatggcctccttttctggacctgagggaacaccccatgtcatagtgcttgaggagagaaagtcaatagttacaaggatgagaaggattaagcgaagaggacttccagcctaagacatattctctctgttccaaagagcagtgatagataatctgtttgaggagat

SEQ ID NO: 19757 - DNA, 201 bp, Bos taurus
ggattgaaaatcactagactagattctataattctttcatgctctgaatttctgactttattatttgaatagatactatgaatcaaagctgcttttaagcgatgatattatgacttaaaagagaaaggaaacttgtaattttattatatggggtagctatagttcacaaagattttcaagtgtctattataaaaatcataa

SEQ ID NO: 19758 - DNA, 201 bp, Bos taurus
ttagtcaactgagaattggtgaggtcctcctctaattaatgtcttcccaccgatgtttgccctaatcttcccttttattacatttattacaatgcttcagcgggatatctgtgtggcaaggaagatctattaaataaggttactgtcggctagtgaaatagcaataaaggtcctaattctgtatttgtttctttgttaatt

SEQ ID NO: 19759 - DNA, 201 bp, Bos taurus
tttgaagcaaattttttactttctccacttctttctccagagaatctggaaactaatgaaaaagagaatgcatccttaaggagaaatgcatactgtcaaaacactgctctctggacttcctttgcaggtacttctgaggttagtgaggttagtgggctttcctagtggctcagatggtaaaaaaaaaaaaatccacctgca

SEQ ID NO: 19760 - DNA, 201 bp, Bos taurus
tcagaggatgctgattagagaatttgaattactctgtcttacttttaactgtataccttgggaagagttgcatctctagggttcaacttctttatccataaaatggtctgaaattaacagcctctcagacagcaccgaggggccctgtctctggtattcatacctttggtagtcccctctccttgaatgtgggctggactg

SEQ ID NO: 19761 - DNA, 201 bp, Bos taurus
ggaagcaggaagacctgctgatttaaccccaacttccctttctgtaatccacagtaaatagggaggatgtgagcaggctaactgttttaatcaggcctggatcctttgaaatctgtttcatatacagctttaagaactcaggttatgaacatcctgatgtaaaatcagatggcagttcttccaaaatgtgggccctaaaga

SEQ ID NO: 19762 - DNA, 201 bp, Bos taurus
gagcattgccaaacccatagggtgaatcatatgattaaaaaaatgtatagtattaaggaaatgtatcctaaaagcagaggtgttttaaaatgcattttgatattgctaatacttttttttttccgaatagctaataattcagagctctgagcatgaaaaagcataagatttagccagatctctagaatatgggtgaaaaag

SEQ ID NO: 19763 - DNA, 201 bp, Bos taurus
cttgggtcttgaagatcccctgggggaggaaatggcaatccacttcagtattcttgcccagaaaatcccatggacagaggggcctggtgggctatagaccgcagggtcaacagagaattggacatgagcgtgttggataaaacctaaaagatgatgctgtgaaagtgctgcactcaatatgccagcaaatttggaacactc

SEQ ID NO: 19764 - DNA, 201 bp, Bos taurus
gcagctcccccatctcacaaaaatcttgactagtgaaaaagaaaagtagaggtccgaaagggaagccattaccccagatagagacatttttataagaagatcactgattgcttactcacgtcaatacaagactgtaaaaaaagacatttgtaatttccaggcactgaggtgctgagggagtagagtggttcccctagggac

SEQ ID NO: 19765 - DNA, 201 bp, Bos taurus
tttaaatattctttccagaacaaaacagtaagatttcattttcttatttcatttcttagcccatccaacaaatttggtattgaaatctatgcaaaggtactgaaggggacactgttcaagtgcctatggaaaaaacaatgatgaacaaagagagcgcttgccctcacaggctttactgtgggaggtgcattttccatcttt

SEQ ID NO: 19766 - DNA, 201 bp, Bos taurus
ccctgaaatggtacttcctcatctgaaaagtgagaattaattctggcttgattcacctgtctcacaagtttgtgagaatgagcgataactctcaccatgctcagaacactttttgtgtttcttggctcctatttaataaatcaatcccaaagaaatgaggtcagtacctcctattacatttctctattttttgacaagcat

SEQ ID NO: 19767 - DNA, 201 bp, Bos taurus
cacggtttcttcttcagcataggaagtcatctcatttaaaatttcaagtgacttgactacagtaatagagctcttaggatacaaatcagacagaagtagggaaagataggtaggaatccatctctcctttgagcctggcacagattagcacaacaaccagattcctaacaggtttttctagatttcactccccactccacc

SEQ ID NO: 19768 - DNA, 201 bp, Bos taurus
tgaaaattgtttccaatcattttgtcaataaaaaagttctgtactccccaattgtgacttacataactatatatagatagtccaaagcaaaaatgtcaaccataccgtccttttatctattttttaaaagtaccaatctcaatgtttattttgtactcaaaggatagctttcgatgcaaataattccaaaagcatgagaac

SEQ ID NO: 19769 - DNA, 201 bp, Bos taurus
attaaagcagtgaagggggaaataaagttctaggaattaaaacaggactgcagttttaataagaatgttcaaggaaggccttttatgtgtatgtttagtcactcagtcctttaggatagactagttggaatattcattggaaggactgaggcagaaactccaatactttggccatctgatgcaaagaactgactcactaga

SEQ ID NO: 19770 - DNA, 201 bp, Bos taurus
agcatgcttatttacatagttatctgtgtggctgtcattttgacttaaatctgggaacattttatgtctgaattggatttaatcttgtaaacctgaaatccggtttccattccattgtgaacaatcatatgcttttcatagtgttttcatttctggttttagtctccagcgctgagataaacctattatccacagaacatt

SEQ ID NO: 19771 - DNA, 201 bp, Bos taurus
actgaccctcagatggttatgtattttaaggagaaaattttatgaacccagtttcttgcatttttccatacttaaaagagcactaaaaacattagctaagatacctgttccttgaaaaagcagtaactttttaccaagatatgttcttcattgcacatatataccggcctccccattcacctttctggaacagtcttcaga

SEQ ID NO: 19772 - DNA, 201 bp, Bos taurus
gtgttgatattgtaggttacggggcgcctggttatagcagagtgaaggttagagcctgtgaggttcagaattaagttttcagagcccaggttctttctacatctattgtgttaacagggacaagaacaaaaaaaaacttaaaaaaaatacctcagtgagactgtcctgttaactttgaaactgaatgtcattttaaacaaa

SEQ ID NO: 19773 - DNA, 201 bp, Bos taurus
aagtacgtcatttagaggcctccacactgatggaattctagtagtgacctgagaatactcctcttccctattctgcctccaggcccaaggctttggcttttaacaattaagagtcacaaaggactttgtgcccaataagaatacatattattttcaagctcatatggaagagtcacaatgtaatgaccataattgaggcct

SEQ ID NO: 19774 - DNA, 201 bp, Bos taurus
ttttccaaacttagaaaatgagtctatatgttcttatactttccttgtaatatactctttcattttaatagtattcaaagtctatccaataggcctggactcaacttgaataaaaatatatagagtttcacatgaataggtaaatagtattttcattaaaaatgagcacatataaagacccaatttttttcctccccatcc

SEQ ID NO: 19775 - DNA, 201 bp, Bos taurus
tccttttttctctgtgtagagtcaaccaaggtcagagttccttgctttatcccctcacttgactaagtctccagaagcaaaattgtcctcaatgctaaatatgtgccttattctgtacaaacttcaaaaaacttgagacttgactcttctttgtagctcagaggcctgcagaagcccaaaaggacttgacccaaaagaggc

SEQ ID NO: 19776 - DNA, 201 bp, Bos taurus
aaatttcaaataatactggagaatggtgtggctgggatgatttgactgtatagctgtgtctgggtagcttcgggggccaaggctttgtggttagaaggaaatggggattaatagataacttgggacaacacctctgctcaatgattcatcatcagatgagctttgaataactgatccattaattggttatttttgttgaaa

SEQ ID NO: 19777 - DNA, 201 bp, Bos taurus
acaaagactcagattagtgtgacctacctagtattctggacatcaggggagaaaaggattagggacgagggaaggctgggcagaaggaaaggggagaggaggaggaggaaagaaagagaactgtatttaactgtggttagcactttatattcttagggcaaattctgagtatccccaagcctgtaaataacaggataatgt

SEQ ID NO: 19778 - DNA, 201 bp, Bos taurus
tattaacccattattaaacccattattaaagccatttcctacttgtacccattattaaaatgaaattgaattataatactacataccatttagcttgaatataacagatgatgatgctttattgtatctacatatgaaaaaatctctatggtacaaaaccagaactagtctctgctgttagccgtcaggatgccattatac

SEQ ID NO: 19779 - DNA, 201 bp, Bos taurus
gagttagaaaacagaaaaatagttctaaaataatctatatcattaatatcaaatttgaaaaactattacctagcataacttttaaaatgataaaggcacaaacacattagaaatcaaaaaggacagaataaaacaaagcaattttaaaagttctattttacccaactatgtgcaaatatatttgaaatcttgatacaagtg

SEQ ID NO: 19780 - DNA, 201 bp, Bos taurus
caattaaagaaatagaatgctgagctatgaaaatgttcctcctctaaaaatacctaaaatggcatttaaacttcaactattatcctttacctgtttaatcagacttctgagagtaaggaaaatccataggacctgataaagggggaaagggactaaaaagcagtgtaatgatctcactgacaccacagctgcctggagggt

SEQ ID NO: 19781 - DNA, 201 bp, Bos taurus
ttatttttgttggtgtcacattactgatccaagtacttcccatttcactaaaagcaagtaaaggggaatgagttactttacactcaaagaacaaaggcaggaacaaaaaaagacccatggccccaggatagaaactgggacaaacagctggacaactacttttattccacccttcattactccctgaacaaaaatcagcaa

SEQ ID NO: 19782 - DNA, 201 bp, Bos taurus
atgtgctggtgatagaacaccaggctgagtgatgccaacctcgtgcctagccctgtctcctctgatttaaaggtaatgatgtccctaggatttccttactgctttcctgtgtctcattactactcctggggaaggggaatcatggctgtattcctgatgagtccttcaagctaatcccatcttcactgtagccagtaaaaa

SEQ ID NO: 19783 - DNA, 201 bp, Bos taurus
ggaaatagctggtgtaaagagtgagtgttaaagcaagtttggcaggtgtcagtcatttctatatgctgaatcttaaaattttatcagatgaatcagactgtggctcatgcataactgcttttattttccctacattttttttttttttttgcctttagtttcaaagatattctttatttcactttttttggtggggggaag

SEQ ID NO: 19784 - DNA, 201 bp, Bos taurus
ccaaaactactggctactgaccaatagaaacataatttctaagctttctgaaggatgactatttgtgtatcttattatcaaaatagctaaatactggacttagatggggaaactaagtttgtaccccatttacataactgcagtttcaccaaaactgtgctacatatacagctgccattcgactgaaattagaatgacatt

SEQ ID NO: 19785 - DNA, 201 bp, Bos taurus
ctatcatatatctcctgttagaatctgcttctcagtgactactggtttatatcttaattatttcaatactttttgaaggctttgctgagacaaatactctatacacttgcttagttgaataaattagcaaaacccaaggtaagacatagatgcctgaagttcagtctggaaaacttttaatccattaaaagtcaccataat

SEQ ID NO: 19786 - DNA, 201 bp, Bos taurus
tgagtacatttctttcttagtgtccccctggttgaccgcgaggacacagggtttgatagagtcaagggcttctggccaccaaggaggacttctgctctgcgacaaaggtacatgatccttggcctgcgcaagcactctttaacaagagaccagtatcactcctctccacttcattctaacagcatatccttgagcagaaag

SEQ ID NO: 19787 - DNA, 201 bp, Bos taurus
gggtggggacaatggtttcttccgtgccacatccccagtgcctgcagtaatgtttattatattgtgggcattcaataaataattctttagtgaatgcatggttaaataagaggcctacaatgttatctatggaaggcaagatattaaaacaacagttgtgttaggtgacagatggaaattgggaaactatattctacctct

SEQ ID NO: 19788 - DNA, 201 bp, Bos taurus
acagaacaataaagggttgtttactgttctttctctttctggattatatccatagttttcttggtttcttttgaaatcatttatacaaattaattttatacggccccaaaccaatgctatacaattttgaatgcttccagaggcagtcatttttttcccttaaaaaaggctttgctgcagtaatataacaatgctgccatt

SEQ ID NO: 19789 - DNA, 201 bp, Bos taurus
cctgtttcacgttaaaaaatctaaaaatgtatcatgaattaataggcaaaccgcagtgaacatataaaaccatgtattaaaatgtgaactgctttacgaaggtacacacaaactcacaatttcagacaaatattatcaatactttttagtgaagggctatgatacactatgattttcttcttacactatcatatatttttt

SEQ ID NO: 19790 - DNA, 201 bp, Bos taurus
agtaaataggatctgtctgtaagtttaggacctgaggttctaagagcccatcacgatctatgtccagcctggccctccactctcctgtcgtctagaccccaagggagtgatccagaacagaggatgttctggtgtcacctgtctggtgtctctgctccctcctgtccaggttagtcatccaagttctgaaactggcctctt

SEQ ID NO: 19791 - DNA, 201 bp, Bos taurus
tagaatgtcaaaatcaaaaaaaggtattttcaaagttatgatttcactttcataaatatatggatattttagagcgtacgtaatgcatgggcacatattatttgtgcaaatacaaagcaaatgccaaaccccaaatctttatagtcattattctggtgaatagcactggatagaggggccagcagttttcatttttatttc

SEQ ID NO: 19792 - DNA, 201 bp, Bos taurus
agaaagaaaatattaataatgggaaaatatcattaatgtaaaatgagttttgtaagaaaaaataaaacatgcaacaaaaataggaagtctaagattaaatgatagaaatacgtccaaacacataaaggatcacaattaaatgtgaacggcctgaatatttcagctgaggaattaagattttcagactttcacatgaactgt

SEQ ID NO: 19793 - DNA, 201 bp, Bos taurus
atcttgcacaaaggtaacatttttctcaaaaataaaatttcacaaatagtcttgagtcaagctttttatttttcttcacaattttagagggaaatattgctaaaattattaagcatttcctgtcttactaaacaaagataataatatctctggtacttaaaagtcattgttaaaagctgcagttataatatgaccactgaa

SEQ ID NO: 19794 - DNA, 201 bp, Bos taurus
tgattatgcaaagatccttgtgtgtgaatgtatatgtgtgtgtgtgtaattatatataagtgaaatgaatgacaacagtgatacaaggaatgtaaggaaggatttaggaatatgttgttattatagggtatttgcagtagctatgaagaggtacagtgttatttgaaagtagacttggattagttgtaaatgtttgctgca

SEQ ID NO: 19795 - DNA, 201 bp, Bos taurus
ttgtattcatatgtgtattctgcgtgtgtgtcagtgtttgttttgtataaagttgatggaactaaactgaatgactttaaactcccagtaataccttccatggctttctatttattctactttggcaccgaaccctgttgctcattattgtgtccttcttctgtgtaaaactatttttcggattccctcaggcatagctat

SEQ ID NO: 19796 - DNA, 201 bp, Bos taurus
taaaaggggagtagaaaaatgaatgtgactcttcagttgtgtttctcatagttaaatacatatatttcagtatctttaaaagagtcaaagccataacgcagatgactattccaaaaattttaaactttgctagagaaagataaattagcgtaggtatttctgctcgttgttatttgcctcctcccgactgcccctgaagta

SEQ ID NO: 19797 - DNA, 201 bp, Bos taurus
ctttgattgcctatttgtaaagtgagtattagttaaatggggggtgatcggtgtattcttttttgactaaaggacagataatttaatataaaaattatgtgaagaaatgtctttatattttaccctggctcatggtcaatattcaattcacttaaatattgttagaaaaatctttcaaaatcatttttttgttgttgctat

SEQ ID NO: 19798 - DNA, 201 bp, Bos taurus
tggtagtcaacctaatctttaggtacgctcattactggtttgccttctctcatgtgagcttatcttgtattatatttttcacggtattttgtgtggatatcatttgacttcttaataattgaatctccatattaatgcccaaagcctccactccccagaatgctgggtaaatctaattcagatgattcaactgacacaatg

SEQ ID NO: 19799 - DNA, 201 bp, Bos taurus
actacccgggatggggaccatgggtgggcacatgggcatagaaaatgtgtgcgcatctacagctgagtaatgaacttgaaagaattgtgtgtggacataggttgattttttttttttttttgtattaacttacaagtttaggattgaagattaagaggcacacattatgtttttcaggtttgctattttaaatgcacagat

SEQ ID NO: 19800 - DNA, 201 bp, Bos taurus
tagaattgtgttttgggggtgaggtgttgctgtggtgaaaatttctggaataagattgggttgtagaagagctgttgtgcttcgtggtggccctgatacaatttaatagatactggcaagacttttgggtagacaaaacttttcctgtatttaatgatctctagtcggggagtatactctgtttgaataaggttgtttaaa

SEQ ID NO: 19801 - DNA, 201 bp, Bos taurus
caacatggactgttggatccatgaatcttcttgaatcttttaatgtctccttatcagaaagtgtccatattttcaaccttacataccatatcaaccccttaaaataccccttctttatcatctttactataaaatattattccagtctgccagaaaatccatggcaatgtgcttccacaaagcccagaggattcaggcatg

SEQ ID NO: 19802 - DNA, 201 bp, Bos taurus
tcatgagcagatgtaagttcctaatatgactcctgcagcagtccttgtgatcaaccatctccaatgcctgtcagtgtctgtattccttatgggccccttataagacctcactcatttgtggcttaccaaaaccccactatttttatttaaattgagcagtctggccccagcctggggatcccaaaacactgcacccatgga

SEQ ID NO: 19803 - DNA, 201 bp, Bos taurus
tactggtggttggatggtgccaggttttgtattcaagcggtttcctttgtgggagttctcactaattgatacttcctagggttagttctctggtagtcttggatattggaatcagtgctcctactccaaaggctcaggcttgatctctgatcaggaatgaagatcccataagtggtttgttatggtattaagtgagattaa

SEQ ID NO: 19804 - DNA, 201 bp, Bos taurus
tgtgcttttgattattacagttgagagaaataaatgattttaaaaggcagatttatggtggctctattgccaagaatttaggcttgtagcaattgttgaattttttaatctattgtctactaatatattccaaatagacaataaatttacatatatagttagacacacacacatctatctatctatatctatatacgtata

SEQ ID NO: 19805 - DNA, 201 bp, Bos taurus
tctgcattcaaaccctggctctgtgtgactttgggcaaattatttaaggtctctgggctttagcttccattatatgaaatgataatattgttagtatagtagtgagtataaagcccttagaacaatgcatggcacatagtgtcccatcagttcagttgagttcagttcagtcgctcggtcttgtccaactttttgcaaccc

SEQ ID NO: 19806 - DNA, 201 bp, Bos taurus
agggagatccaggagacagagcaaagctgtaaaatatcaaataattcagaaccagtgcttagtgacggaatcaaatgtttttcaagatatacagttcttccaaataaagtattgtctatatgatcttattaaaggaaaaccatgctaaatttttttattaaagaaaaaccataaatcagttgccttattggatactcccat

SEQ ID NO: 19807 - DNA, 201 bp, Bos taurus
tttgggctgttttggaccaaaccagggctttccacaattcttgataagtcttgttcccaattgcaggctggggcttgacttctgacagggacacaaagctcctgctctactgctactgtattcaagctgtgtctcaggcatatgttgtggctgattgccaaaatgttactgttttctcaggctgactttgtttcaagtgaa

SEQ ID NO: 19808 - DNA, 201 bp, Bos taurus
tggatgtgcctggtagtttgtattcaagaacccttccttcctccttgaggctgactgtgtgtgtgggtgagcaagtcaataaaggcttcatgctgctctctgctcctcagatttagggccactcagactattgtacagggttcttcatgctgtgaatgacggctcaatgtagaacttgattttagatctcagactacttgt

SEQ ID NO: 19809 - DNA, 201 bp, Bos taurus
agtgatctaaaaagagactgtggccatatgatacaaaagataatccccctaccttgatttagtgctagtattggtgggcatatttttagtattagcatccgcaactcaagttctcctaaggcccgaatgagaggctccagcactccctattgggatgattttatggaacagaaatttctgatttaatctattattttcaac

SEQ ID NO: 19810 - DNA, 201 bp, Bos taurus
ccctgggtgtatgtatatatagtgtgtgtatatatatatatatacacgcacacatatgcatagtatatatacactccacatctttatctatttgtcaatcggtgggcacttaagttgctttgataccttggctattacaaataatgctacagtaagtcttggtgttcatgtatctttttgaattaattgttttctttgagt

SEQ ID NO: 19811 - DNA, 201 bp, Bos taurus
tttctctgtactcaatcataaacccgagcctgggtcaggagctcacagccgctcatgaagtttcagatatttgtgtgggagtgaagtttacttcctcctaggatcctgcaaaggagaaggcagtggcaccccactccagtactcttgcctggagaatcccatgggcagaggagcctggtgggctgcagtccatggggtcgc

SEQ ID NO: 19812 - DNA, 201 bp, Bos taurus
gctgcggcggccccatgtagatgcctaaacctcacaggcaccccaccgtgcagagcaaccccccatacagctgcttatcttagcactgagttccatctcataggccagcttacatttatacacgtagtagtactaaaaaataaaattcaaagttccataaatgaataattcagcaaactcattctgtctttaatatctgga

SEQ ID NO: 19813 - DNA, 201 bp, Bos taurus
ttaaacaatggtgaaaagatgaagacctgaggcagtacatccctccctcctgtagggattctgtcggtggaatcacacctccgtggggcccttgttgcagtggtcgtctctggtgctgattcagtgagggggtccttttccactggtctttgaggtctttgtgggacaggacctgaatgaggtttcattccaggtcttgac

SEQ ID NO: 19814 - DNA, 201 bp, Bos taurus
cctagacaagcaggagattggcttacctgtcatcaagttttcaagaaagatttttgctactgagcggagctcaaggagggagggctgtgtgggccccaggcgtttcctgtacagcggcagagctaatgacgctgcaaattctgttagtctgtttgtattgaatgaggggccctcccgcttgttccaagaaggcaaggtgct

SEQ ID NO: 19815 - DNA, 201 bp, Bos taurus
cttcctgccagggcagaaatgtgggtgcagctttgctctctgagcctggcaggtggtaaaggggatggtgccttggcccttttgaagtttccccaaggtccctctgccttgcagttcccttcctctgggtgggcatccctgttctaggtggccacccagtacccctgcccagacctggtgtctccgagcttcctcagagat

SEQ ID NO: 19816 - DNA, 201 bp, Bos taurus
agtttctctcagagaatcaaccaatctagttgagattgcttgctctccatgttggctgggcacaccaacatcctggaatttctttttcatcatcttgatggatatcttcttctccttcctgtattagatactctattacctatgttcattcacattcagttttttagtttcagtggaggcatcccccagcagctttctgag

SEQ ID NO: 19817 - DNA, 201 bp, Bos taurus
ttgcaggaacaccaatgtccacctcctgtggcccccctgtaagaaactgtccactatggtcaattcaacttctaaaaagatgtgaggagagagaatcaaacgtgttttgaggcctttgaaccacaggtattttgctgtcatacttggtgtctctattgagcatctgttctgcacaatctgaggaatatgaatctgttgtca

SEQ ID NO: 19818 - DNA, 201 bp, Bos taurus
gactcaaggccccaaacgatggtacttatctacagtttcttgcagacaaagaatacaaatagcaacaacattaaagtattctttgtcatcaaaggctgcaagggttccagagagatcaggagtgagctctaatggtcttctctccataaggccatatcaggacacgctttctgtcttagatcaggaactgctaacagatgt

SEQ ID NO: 19819 - DNA, 201 bp, Bos taurus
ccctgaatagacagcttctctagctttaggcagataatagagaaaacaagtaactggcaagcatgctgtttctatgcaaactagccaatccagggctcataagctaatctcctctgggcctcacacacttgtagctacttctgctctaatcaccctagggcctggtaccagagaactaaagacagtaccctataccccaga

SEQ ID NO: 19820 - DNA, 201 bp, Bos taurus
ctacactttgagaaagattagtttaaaatgtaaggtccccatatgatcttctttgtttttttgtcttgatatttcaagccctagaacaaattcagtccagaggccagtggagaacatgtccaaggctagggaagcacagtaaatagggcttgtgggtcatgtattgaacacagatgatggaagccctaactatttggaagt

SEQ ID NO: 19821 - DNA, 201 bp, Bos taurus
attactgactggatattggcgcttagtgccgtaatgtttcattttcaccgattctgacattgatgttgacctagtcattcctagagccattgatattcacctgttcatgttcacgttcaatagttctcttaaagaacaggaggtataactacaaaataatatatcttttcacccaaagattttcagagtcccaaattttgt

SEQ ID NO: 19822 - DNA, 201 bp, Bos taurus
gaagtgatggagcttttactttattctctggaatatttgtgtttggagtccaaagagtccatataaggagcctggctacttcttaagtctgactacttgttaagtcaacattctgggaggatgcaaagccatgtggtggggccgtatttaggacctacagccagcagtcctcatctttcagttattccctcccaggcacca

SEQ ID NO: 19823 - DNA, 201 bp, Bos taurus
tgaatcaggctgaggtatagagccaatagctatgagccaggccatggggaaagaccatctctcttttgtacagggcacatgaggtactaagatccatacttggaactactggtaactctgtgggccaccatgaaggtatagctcatacgaattattcggatcagaggaaagaatttctgacagttgaagagaaaaagaaaa

SEQ ID NO: 19824 - DNA, 201 bp, Bos taurus
tacatggttgttattgcaacagctgagatcacttacaacacagtgaatgcatatcacaatgcacccactcagtcaggggccacttttgctctgtaaatacgtataagctccacctgaaaagcccttgctgctaccttatggctgtgtctcagctgggtcagtgggccaactagggcaggagagagtgaagcgtgtctgctg

SEQ ID NO: 19825 - DNA, 201 bp, Bos taurus
aaatgataagataccattgtcatacatcactcagtatagaaattgttaatgcctcatttatcatttattattaatatgatcttattaatatactatgactatattatttaataaaatgttatgactactacgctctctattttaccaataggaatagcaagttttgatagcattaacttcttgtgaaagttaacatagata

SEQ ID NO: 19826 - DNA, 201 bp, Bos taurus
acatagaaaccctatctgcattgccatatgcttgaggacccacactctggtttccttccagctgcctctgtccatgaactgaggcatccctgggcctgccgggatgtgtgcactcagaccccatacaccttctggaccatgatattgaacaaatcctatgtgctggacttttgtatccaaatggcccttagtctgtccaca

SEQ ID NO: 19827 - DNA, 201 bp, Bos taurus
gggaataaactagttgacttctgacatatttataagagatatgtactcatttcacttggccatcaagaaatttagtaaagaatcactaagcttgaaagcatcagtgaaaatagagaaaattaaagtaaaagctatcatccactcagtaatctagctctctttcacctcattattattgctcttttatatttcctgtcagtt

SEQ ID NO: 19828 - DNA, 201 bp, Bos taurus
agcaaatctcttaaccttgtcctggtttcttttccaccaaattaagataataacttattttgagaatgttatggaataatatacatatggttccacagatcacagttcccagatcatggtatgtagtctgcaatgttggttcccttccttattagcttattcctttcatccctggacagtgtcagcacatagagtgttaaa

SEQ ID NO: 19829 - DNA, 201 bp, Bos taurus
caagaatctgatcagcatgcaaaaattcacaggtgaatggagacactggaaaatgtgaatagtacatggcagtctggactctataaactctagaaaccaatcaagtgtaactgatttaaaagactcagtctggtttgaaagaaacttctggaaagagaaacttcattgagcaggaaggagacaagaaaaaggaaaaagaag

SEQ ID NO: 19830 - DNA, 201 bp, Bos taurus
gagctctccatgaatgggagtaatgtgttattagtcattacaagacttgccttaattatggaaacattgtcagctctcaccaagtaaatgatgaatgaatgaacgaatgaatgaacaaatgaaattgtctacccttatccataaattactctttctgaaatcctagccacaatgttcctgtatctttttatgactccatgt

SEQ ID NO: 19831 - DNA, 201 bp, Bos taurus
ttttagaatttattgtattcttaaagattgcaaaagtatagggcataaagaactgagaaatatatcaatccttagttaagagttttttgccagatgatcctacctgaggtaaagttttctgaagtgagaatatgtttcacctctgtggtaacttataactaataccgaacacaaaatcccaggaagtaatgtggtttttat

SEQ ID NO: 19832 - DNA, 201 bp, Bos taurus
tgttaacatcgcctcaaattagaaatccatgagctgtttgcatagtgtatggtagtagaagtacagttctgaacaattattatgtcccatactgtgtgctatttgttagggagttgagaagacagtttcacccttcgaggaagacagaaccatagaattatgatttgcattctgaaatataacagtggacataggtatagt

SEQ ID NO: 19833 - DNA, 201 bp, Bos taurus
ttagaaagttgcagatattttatgtgagagattgatgtcttaaacctgatactattatattttagctattttccccaaattttttgtgccccccaaaatatagatggaattcaaattgtgtttcttgtcttgcaagaatcaagtattgcccaggtggaaaacaaaatctagcagagtattgtaattatagacatgaaatgc

SEQ ID NO: 19834 - DNA, 201 bp, Bos taurus
cagtgattggttccagttaatccaacttttttgctaaactgcatatttcaggagagctaactatagttctacatcagactgacccttattatttcttctgttcactacaaatatggtgatttctgtgataatcaaaaatgttcaatattttattttcttgctttatcatctctatttatgagaggactatattctttattt

SEQ ID NO: 19835 - DNA, 201 bp, Bos taurus
gaactatataattttaatttagttttatcccatggggaagatttttcacatttgagttacatactgtatagaaaaaagtaacaccagtatttttaaaaccgatacagcccagaacatgattacaaaggaaaagcaaaaacatatcacacctttcaatgcagttttagctagctgtatttcactagaggaaaacagaaattt

SEQ ID NO: 19836 - DNA, 201 bp, Bos taurus
agaaatgaaattaatgagggttttattgttgttactttgtatttcaaaactttagagaaaagtaatcactcttttcatggaaataactggagaactttgagcattttagttgtatagaatcatacagtaccacctggattctttgtaaggtcaggcaaatcagctcatcattatcctttcagccctttaatcttgtctgcc

SEQ ID NO: 19837 - DNA, 201 bp, Bos taurus
caacacagaaatatcaaaatcctagttataggtaacccagcacaccgaagagagtcttagctccatcctgccaaaactgccttatgcccatgctcgaagtaggcccaataactcagaaatgcccttcattaccaaaattctgccttcttggcatgttgcctgcccatgttcccctccagcctccctcccatctccctgatc

SEQ ID NO: 19838 - DNA, 201 bp, Bos taurus
tttctcagcgcatctcactgtacagaaacaagaaactagtctgttttgaatacaagtatgaaagacccaaaagcaagtcaatgaggtagaaaggaggatatagtatatgcggttaatataagtatcggatgagtcaatttaataacctcttttatcaataaaaatttctatgcttcccaggtggcagtagtgaaacataag

SEQ ID NO: 19839 - DNA, 201 bp, Bos taurus
tcctttcattcaaaatgcacactgataactaagttgacagtttctatttatagcagtaattccttagtcatcatacagcaaatactataaccaagtaaagatgctttccattccaagtggaaaatgtgtactttttttttggggggggggggggggcgcgggttaaaacatttccaaaatcttggctggaaataagaagaa

SEQ ID NO: 19840 - DNA, 201 bp, Bos taurus
gacaagtgtaatgatgaagttatgtctaaggcatcatgaaagcccaagagaattgtgatcaatgtggttttccaggagaggtgggcaacagcaaatcttagttcttagataagctaagatttgaattcaatttggtagtgattattagccaggataggcaaggctaagccatggaaaacaccaccacagatatttctgtta

SEQ ID NO: 19841 - DNA, 201 bp, Bos taurus
ctctattaccatctgaaccaccaggaagcccctctctattactacgagtactaaatatagacagacagaaataataacccaaagtccaacagacttagtaaagaaagaaggaaaagagagaagcaatggaattgctagaagccctctgagtacctggggcctcctctgctgaggcttggctcaaggggcactgagaaattc

SEQ ID NO: 19842 - DNA, 201 bp, Bos taurus
gatgtatctattaaactaagggtaggatatgacagaaggaaacccaccatggcgctgccatttactaaaaggatggtttcaggcaagttacctaatccttttgtgctttacttggctatataaagtactgaataagactaccatgtacttcacaggaaagctgctgtgttatatgagttaatatacatacatcagtagaac

SEQ ID NO: 19843 - DNA, 201 bp, Bos taurus
tctctgtgatggaaaaaagtttcttaaacttttattaatgaccttccttaatcaagtgcaaagacaacaggcattttcattatcatatttctctttgatagatctcactgccatcttaaactcatcatgttgaaataaaatacacctttctcttcaaaatacagaatcccaagtttgttactttgattctagtagctgttc

SEQ ID NO: 19844 - DNA, 201 bp, Bos taurus
aacacagtaaacatgggtcaaaatgttaatactaaacaacttaattatttctttcctcagaataagagcttcttggcaaaatgattgcagcatcaaggaacgctctggattaaatgggtcctggacactgattccaacttgccgcctacattccctcagtcttgggcctcattttgtgcatgaaattctgtagtagctgtg

SEQ ID NO: 19845 - DNA, 201 bp, Bos taurus
gagggtggagaggggcccaccacaagggacctacatataaaatgcctggcacctgggaaagtgctccagagactctcccaaatggaccaaatagattacctccccttctacagccctgaaggaggcctggactccctcattaatatagtctttggctgagcaaccaggcctcctagccccaccctccagtccttgcacata

SEQ ID NO: 19846 - DNA, 201 bp, Bos taurus
gaaatcttcatttattatcagattttgacagcggcagtcagaatgcttgatggggggaaaaataagaacaacaacataaaagagccttggccattttagctacacaaagagttgagttataacattaaaaaatattcaacgataaagtcatgggtgagttgagtgccaggaaaaatcttgcttttgaaataatgtgtattc

SEQ ID NO: 19847 - DNA, 201 bp, Bos taurus
tcaaaactgtagaatccaaatactgcacaatttaagggacgattctggagtccagaatggaagataaagccaaaagccatgaatttgaaaaaaatatagtcttgaaaaaggagatgcaaggaaaagtcagggcaaggacagctagaaggcctggggtcactagtgggtattctgagagatgtgtacgaaccaaagaatttt

SEQ ID NO: 19848 - DNA, 201 bp, Bos taurus
tcctagttctcaggcctttgcatgtggactggatatttgttggctttcctaggtctcccgctttagacagtagattctgggacttgtcagccactgtaatttcatgaggccccagtttcttaaaataaatctcattctctgtgtgtgtgtatgtatatatacatatacacatatatgtatgtatatatgtatataaaatat

SEQ ID NO: 19849 - DNA, 201 bp, Bos taurus
tatttcattcagttattagatcctttaagtttattgaacatctatgtgagagactatactaggtactgggactacagtaagggggaaaaaaggccctatctttagggagtgtataggtaaggaaagtgtataggtctgttccatgtcttgtttggagtcctatcctgacaacaccatccttggatgattttattggggcca

SEQ ID NO: 19850 - DNA, 201 bp, Bos taurus
gaaattttattaagtttttacatagttctggagattcaaaacaaacttcatttattcataaatgtagtagaataaccaaacactggattattttgttaatgatgtaactaatgtagagtactttaaaaggtgaggaaatatacttaacttccaattgctgtttataatagtcaaagatgtttaattttttaaatgacacaa

SEQ ID NO: 19851 - DNA, 201 bp, Bos taurus
attgagccttcaaatgtggactgtaaagggcatactgatgctattatagagagaactgggaaagcataaaaataatgctgaatggtaatgcagaaatgtacagaagacattctgagtttaataagcaaattctagctagcattttctagaatatattggatgaagataaacttttatagaaatattattgataaataaaat

SEQ ID NO: 19852 - DNA, 201 bp, Bos taurus
agggcaaacatctaattgccaaatgtatgttattattatcctgtcaattaccctctgtctctttgaagatccctaccccattccattcagttcaggatgatgtataagcctcaactgcctgacttgcccttgtgtctcatatttttatggggctcccatacgtatgaaattaaactcttttttatcctattaatctgtctt

SEQ ID NO: 19853 - DNA, 201 bp, Bos taurus
tcttctgctgtcctttcctacagaaaaatggaaaataaacaaaaaatcataataaggactaaaagttgattcaggtaatacctttagaatttgatagtctggcaatttctgtgataactgttgcctagttagaccaacttcccacaataactctctaggaggtagtgactgattgaagtacaatgatttgttttattaaat

SEQ ID NO: 19854 - DNA, 201 bp, Bos taurus
ggtatacacatcttttgtccagtgaaacatagtacttacttggatttttattttctaagcatgctatgaaattgtactatctcacttattttctcttcagcgctttctttgttaatgttagaattagtaataaaatgtgaaaaataagagtgtcttactgctgcgccttagtgaatcaaactaagacattgggcacatgga

SEQ ID NO: 19855 - DNA, 201 bp, Bos taurus
gtgatatctatgccatggtctaaggtccctgctttgtgtatcaaaattatagaacagcactgcccaaggaaatataatggtagccacatatatgatttttaactttctaatatgcacttaaacaatcttcttcaaagatagaattcattttagtaatttattttattaaaatggacatatccacaatgttactatttcagc

SEQ ID NO: 19856 - DNA, 201 bp, Bos taurus
gggattttctatgtccatctcatgcgtgatctttcctttgcagatagaagtttatgtgttggaattgagaatattcagtgttggatataactagttgaagccaatattattgagtcctatatagtagaacttacatagtagtacaaagtgtcagaatttatattaaataaggttaaaaagaaaacactttaacacaggtgt

SEQ ID NO: 19857 - DNA, 201 bp, Bos taurus
gcagtggttaaaactaatgtacagtcagtatgagaagcagcagtctaagaattacctgcagaatctcctgaacaagcatttcttctgtaataaatacatacgtagctccaagcctatttctccaggcatcttcacttatccctgaatataaggtttcctacaggcaggcctgcttatcttttgcttatctcaccttacttt

SEQ ID NO: 19858 - DNA, 201 bp, Bos taurus
acttagtgtaaaggaaaatacatagccaaatagtggagacagacaaacagattttaattatcaaacggaaaatattaagaaaaaaagtcagctgaatgtattatggagcttgcaggaagaatgcataggtcaggttgggagcaacagtgaaaataattttattattgcttcatttaatataaaatcttttatatagataag

SEQ ID NO: 19859 - DNA, 201 bp, Bos taurus
gagagttcaataattctgactctaataattcagggtttaccaaaatgtgataaagatcaagataatactgatcttggagggaatgagaaagaaaattcttcgcaaacttacaagtaagactggtcttcccaaactcaatctccacacaaactagaatgaacatgaaataaccaatgcttacatctacataataagcagatt

SEQ ID NO: 19860 - DNA, 201 bp, Bos taurus
agatggcatccaagtactgcgtttcggactcttttgttgactatgatggccactccatttcttctaagggattcctgcctagagtagtggacagaatggtcatctgattaaattcatccattccagtccattttagttcactgattccttaaatgttgatgtttacccatggtatctcctgtttgaccacttccaatttgc

SEQ ID NO: 19861 - DNA, 201 bp, Bos taurus
ataactgattctgcagaacttcttctgacctacactctagtttttgagctgtgctgtttctactaactttctaatgagatttaatctcaatcattacatcccatgttctagatgttctctttgtttagtgttttctgcttttttctgaatttcattggtcatctttgagggtcttatgcttttaccaattacttttctttc

SEQ ID NO: 19862 - DNA, 201 bp, Bos taurus
tgctaaggaaaattgaagaatccaatctaagaattttggaattaacagatgcttttaatcacagtaaaaatatcctattaaagcagagaggaatataaattatgagactaagccctggaataaagcatcaaataccacagccacataaatcattcttttacatttacatcttctttgaaccagactattcagatttagcct

SEQ ID NO: 19863 - DNA, 201 bp, Bos taurus
atatatacatatttattttacaatataaatactgaatataaacaaaataatatagtcacacaatgaagttttgtgcaggctgaaccaagcctagaatgtgaaagattgtactgaatatttaaataatgtacacacaacatattatctgcctctgcaaagagaatacactaagctccatgaaacaactgaacttcagggcct

SEQ ID NO: 19864 - DNA, 201 bp, Bos taurus
ggcaaaatattcctaacatatgtatataatgctctcttgtcttcggttcctaggccaggattcttatgcatatgtttcaaaatctaatcactatgcctacgtcactggatgttcaacagtaacactataatgatggtgacttgtttgacttttgagcacttttaagacaaaaggcctggaatttacaagaataagtgattt

SEQ ID NO: 19865 - DNA, 201 bp, Bos taurus
agaattcccaggcctgttgccagcctactggtgagtagactgggaactgccatcacaggctgaaggtctgtggtggttacgactccgatatctaccagctggtgggtggcctggctatattttcactctggagtcactttttaagttctaggtcattagtcttccattttctttataaaaaaaagaaaaagaaacactttt

SEQ ID NO: 19866 - DNA, 201 bp, Bos taurus
tatttcactatttttccagtaattttttttccactcaatgggatggagaagtttccagtatgcaacaccacttacaaattacatccattatcatatacatattattacattgctattactttttctttcctcaataattgaagaaaatcattactattatgctctagaatgtagagatttttttttttttttggaagcaag

SEQ ID NO: 19867 - DNA, 201 bp, Bos taurus
agtaactatggtgtatttttatctgttatattaacagtaaaatactagagagagatgggggagtgacagagaaaaagggatgaaggagggaaagctgaggatgggagagaaagagagagaaggaatgtactaagacccttcataacaaggataacagcttaaaatactttctgaagcaaatttatcccaggaagagtagat

SEQ ID NO: 19868 - DNA, 201 bp, Bos taurus
atctgacatttcttaacagggcaggggaaaggctcctctgatgattcctgctcaccatgacaaccacaaatctgcagatcacaggtgaggagggtagcctatctctgaacaaagcaatctgtgtgggaagtgagttgaggagagagctgagaagagcagtggaagagatgaggaatgggttggaaagaggatgcagagaca

SEQ ID NO: 19869 - DNA, 201 bp, Bos taurus
atagtcattgaaacagttaagaaatagaagttactccataaatgtttcttgagaaaaataaaatcagcctatatgtaattttatataactttaaatcccataaaaagaattttatggaatttcacttaaagagtgcttaaaatacaggaaatgaaaaatatgaaacaggatggcagaattaaatcctagttataatttaaa

SEQ ID NO: 19870 - DNA, 201 bp, Bos taurus
aatttgccttagtaaatgtcaatagacacatctccaaagagtaagttcaaaagactatttaaatatggacagtaaagactttttttttataactctgaaacacagtcatttaaaaataagcctatgtttgtattaagctaagcctgaaagatgatgctgtgaaagtgttacattcaatatgccagtaaatttggaaaactc

SEQ ID NO: 19871 - DNA, 201 bp, Bos taurus
agttaatctgacctagacacaaaagaaaattatgtacctcagatgagcagctaagcataaagtaatacaataacaatttctgttatagaactgtttacaggacagttaacatttcttccttgcagtgaaacctgatttgtattcctatcctgaatggcttaaaagtaagaactaatgttaaaagaggatcatctcatccat

SEQ ID NO: 19872 - DNA, 201 bp, Bos taurus
gttagagaactagaacaactttagcacagttagcactggttatcaagattacacaagcttaggtaaatagatggatgaacaaaacaaaaggcaagactatcgagtaatttgcatatgaacatgaatccagagccaagtttaaaaataaaagataagcctgtcaagggaaacaaagagtttgattcaaccactattaactgg

SEQ ID NO: 19873 - DNA, 201 bp, Bos taurus
attgcaccctgtctgaattcctgacccaaaaaatcatggaatatgaatgtttgctgtttaaagccattaagtgttaggaaaacgtgttgtacagaaatagctaagcaatatattcataaagaacacatataactaatgacatataaattttgttgcccctagacatgtttttattgaaagtattacctcagtaatatagaa

SEQ ID NO: 19874 - DNA, 201 bp, Bos taurus
ttaccctcctgtttcaccttcatcaagaggatctttagttcctcttcatgttgccattaaagtggtatcatctgcatatctgaggttgctgattttctccgagatttagtgattccaacttgtgattcatccagcctggcagttcatatgatgtactctgaatagaagttaaataagcagggtgacaatatataactttgg

SEQ ID NO: 19875 - DNA, 201 bp, Bos taurus
gagtgggaaaccactggaaaatgctagaaaatgaacataacacaatttaatttagatattaaaggatcattccagtggccatgaagacaacagactataagtgaacataaaaagaagtagggagaaagttgggaggctgttgcaataatccagtcaagtaggtgggccggaaatatagtagtagtgtggagggtgcaaact

SEQ ID NO: 19876 - DNA, 201 bp, Bos taurus
cttgtatttgccaatgtgatcactgaacttgaacgaatcatatacattgttctaacttttattattcaaaatgctggatattgtaattcataaatcagaacaatttttagaatccagggggaaaaggcatgactgatacatattttagtaataaaagtctctgttgtaatacagtatcagattgaaattacttcagattac

SEQ ID NO: 19877 - DNA, 201 bp, Bos taurus
cacctctctaggttgtcaaagagcagatttgagccccctgtgtcatacagcaaattcccactggccatctgtaatgtgaatgtttgtgtaaagtgtatggtaatgtgtatgtttcagagttactctctcaattcgtcccaccctttccttcccatggtctgtgttcaagtctgttctctatgtctgtgtctctactgttct

SEQ ID NO: 19878 - DNA, 201 bp, Bos taurus
attttatcttttttaagtggaatgcacccatgttcactcatgtttatatcatctatgattaccttcttcacagtaacaataacagttcagtaacagttccttgtatttcagtgaatggttcacagttcacagtgaacaataacagttccctgtaacaatgcactgagttgtcaagacatacctatggcctgtgtgtatgcg

SEQ ID NO: 19879 - DNA, 201 bp, Bos taurus
aagtaatacatgatcaccgcttctgtgtaataaagaacatttgctactcaggcatctttaactttttggcgacatctgctgtacaaatgggaaaatgctgcggaatcattctgaacccagagatagtctagaaattattttgtttttaacttaaacactacagccttttttattctttccttcagtataagcaggcctctt

SEQ ID NO: 19880 - DNA, 201 bp, Bos taurus
gagaatgttaggtaattagaataggaagaaaggagtccagaatggtggtggctaaaaaacaaagaagggaaaagtctgcaaaaatagaacaaaccaaggttcaaggacaagagtgaaaatctcaggcaaaaccaacagccctcctggctagataaatttacatagggcaggctggggatgggtggttggcggagggacata

SEQ ID NO: 19881 - DNA, 201 bp, Bos taurus
gtgcttgtaaaaatctagtaaaatttagcacattttcctgtggaaagagttcagtaaccactaaacacaaatatttctggaatttaagattctgggctttctttcttttcctgatttgttcctttagagcttttcatcttataatttcccatcagatttgtgtgcccccatatgcttgtacatacagatatatgtttattt

SEQ ID NO: 19882 - DNA, 201 bp, Bos taurus
atcctgctatcagtttcccttcatcattgagccttgagtgtaattttctgccctgttctaatctcctcttgaagtacctgatggtggaaagaatagacttttaccatttcagaattcaagcacagcactcctaagaccaaaacattaaagtttgttagacttaaacttttaaaaattatgtattaataatatagtttcata

SEQ ID NO: 19883 - DNA, 201 bp, Bos taurus
ttggcctaagggcattttcaaacaattacggatcgtgaagattttctaatctgaattctacactttgcctatcaagaaactgaggctctgagaactttactggctccttctaaggcctgttactggttttagtggaatccctgagcagctgatgactggagaataagagatgtccacttctgagcagttttcccatggtcc

SEQ ID NO: 19884 - DNA, 201 bp, Bos taurus
tcctctattccagagtttccataatagctgctccttcttacccaggtgaagccttggaaaacagtgtcctgtctcaaaacggacaagaacttacattatctgtaaatcatgttaaaataaagagtattaaagttgccaaaagaaaactctcaggcctaataataatgaccttggactttcctcccaccaaccgtctaagac

SEQ ID NO: 19885 - DNA, 201 bp, Bos taurus
ttaattactattgtaattagagtctattgtaattaaagtctattgactttagagcagtaggtctcagttcaggaccagatgactaatcctgggctttaatcctcacatacaaagcctgaaaacacttatacactatgaaccatgtttgagaatcgtttctttttaaagccataaatctaagtttaccatgtatgttttcag

SEQ ID NO: 19886 - DNA, 201 bp, Bos taurus
agaccagtaacaacaacaaaggagactgaatcaataatcaatctctccaacaaagaaaagtccaagaccttatggttttactggtaaattctacaaatatctaaagaacaaatgtcaatcattctcaaacccttccaaaaaactgaagaggtgggaacacttccaaactcattttatgtcaccattactcttacatcaaag

SEQ ID NO: 19887 - DNA, 201 bp, Bos taurus
tatccttaggtttttgtgcattttttatcttctcatggcactctccatgtgatccgagctatctccccagctagcaggcacttttctgccatagttctggctataaaactgcataggttttgaggggcctgccttgtttttcccataagccctgctatttctattgggcaattttgcagtgtaagaatttttggaaattcg

SEQ ID NO: 19888 - DNA, 201 bp, Bos taurus
gactgactagatacacagtcctaaaaaaaaattatatttactcactttccaaaagaaggactgagttcttttaaatcttccaatgatggctcctggtccaaaagtttcttaaacagagccagtgggaaagggaggtagacaacattaaaattatatagggagagtccacacagcatcccaaagaggaaatacatcttcttc

SEQ ID NO: 19889 - DNA, 201 bp, Bos taurus
ggatcagctggaaggacatttgagaagagggaggcattttgcacttccgttgctttcccctgtcatcctcttccaagacctacttctgcctaatcctcacgcttctgagttcaaagcccatctccatgctcctcagcaggacagcccttagataggaataacgggaagtatacggtatatcatgtatcatttagcttgatt

SEQ ID NO: 19890 - DNA, 201 bp, Bos taurus
atctaaatgagacttagaaaagaggaatgagttcagaacattaggtatttccaacaagttataagtgtatacacttttgaaattacagattcacagacaatggcagtttttaatgctgcatgcatttttttgtttatccacttgtataaaactaggtatttgtacattcatttcattctactgacaataaaagtattgaat

SEQ ID NO: 19891 - DNA, 201 bp, Bos taurus
aagtgtctaataaaggtttgttgaatgaatggatgaatgagaggcccaaacaagccagtgagatcttctgttagtttcctcactattagcagagtggtcacgatggcgacgttacagaatcggtagaaggaactttatgtgtctttggtaaatcttcttaagtgtgagcagatacctaggtatcctgctcaacccaggcac

SEQ ID NO: 19892 - DNA, 201 bp, Bos taurus
tttctttcctggaagatgccctctgtggttttaggaggcaatttcattgccaaacagatcaggaacatcaggcttctgcataatctagtgatgtttttagggtttcctttcccacactcatatcctcttaattttaaagcatctgtggataagaatggtttagaaacctactaatttcactttgtacatgatgaaattatt

SEQ ID NO: 19893 - DNA, 201 bp, Bos taurus
taaccccctgagcatcccagcttgtaccatataatgacctagataccaatttttcttcttttttcctttgtggaatgtcatgactcttgaattgataatggccatgatttaaatgttcttggtttccatgagtatcttgcagtaggatttaaaaaatattttttatagagttattttgaggatgattctgcagttttttat

SEQ ID NO: 19894 - DNA, 201 bp, Bos taurus
caattctaccaagactctgtctgcccttgctcacaataatatttatattttcagaaatgctatagaagattttgattcttgcatcatttagaacttacacagtataaatgtgagaagacataaatggggcagaattgaagaatgaaaggcctgagagaggctttgccaatctgcatggtcgacttcccataatttgaccca

SEQ ID NO: 19895 - DNA, 201 bp, Bos taurus
tgttctttccaccttacaaaggtgccctaagtcagagcacatttttaaagtcataaattgctgtgcagaggtaaacagtgattcctaggtttacttccttgtttcaggtgtttggagtctggggctcaaggagatgaaggataagccactaagtgctgagagaatgttgtatgtccctgaccctcccagtgaaggtgcatc

SEQ ID NO: 19896 - DNA, 201 bp, Bos taurus
cagatgttgtgccccattctgatctaattttttggttctttgctatttttacctctgcttttttgtactattttctgaaatttcttcaacttatcccccagcacatttcatatttaattttggctctcctatttttctaatacttttttctgattgctcatcttttatagcactgtgttaattttcatggatgcaatatat

SEQ ID NO: 19897 - DNA, 201 bp, Bos taurus
ctatacagaactattcacccctatattttcagtttacaatttccttccttggaaataataaggggctctcatttgcatctgtgagtcactatgaggactgtatcatagtgaatctaatttttaagaaagaatactttgttgccagacacataaaaatcacacgtatttctacttggcctgtttctagcaagttttgttttt

SEQ ID NO: 19898 - DNA, 201 bp, Bos taurus
agcatctctggaaattatatatgctgtttagagctggagtaaagttgaggtagggttaaaataaaaccctttgctttggaaattaaaaaaaattttttcttggtcttaagtcctttcctaaagaatgtatatatacaaggaacagtcttaaatatactggcaactggatctgttggttggaacagacttcctgttggatgg

SEQ ID NO: 19899 - DNA, 201 bp, Bos taurus
aagaaaaagtttctagtgtaggtgatatataacttgtgtttcaaaatattgaatgcaacaacagtaggcagacaaacaggtaaggggataattgaccaaaggatcaacttatacaaaaacctgaaggtatttttaaaactttagtatatgcagaaagccagcattgaatctgtgcaatacaaaatttagatgcagaaatga

SEQ ID NO: 19900 - DNA, 201 bp, Bos taurus
tgacctgcagaaatggtggcaaggttcctgcaattcaaaatagaaaagagagcattgtagacccacagagccaatcttcaaactgacatgttacaaatgggtttgttaatgcatttctaaaatgcccatattcttaataatatcggttatttattattaaatcttggtaatgaataaagaagaaaaatcaaatcataggta

SEQ ID NO: 19901 - DNA, 201 bp, Bos taurus
aaaaatagaagtctgaatgatatttggtctggttccatgaagattgattgagacctcaaattgtctgggtttattaatataataaaatgtattcccagagatttaagtagattcactccttcagtcaaacagaaactaccttttaaaaaagaaaacataatttaaaagcaatatatttatccaagtctccactgctgcata

SEQ ID NO: 19902 - DNA, 201 bp, Bos taurus
tggaatgttgtttgaaaagcatggagataaagcaaaagcaagtggtgagtttggcagggatgaataggtatcgctgttaggtcattggacactaagtctcttttttggacacttctgggactggaggtacagtatgatgatttggaagtcattctctttcagtagaccacatcttttaattcagtcttttgccaatataaa

SEQ ID NO: 19903 - DNA, 201 bp, Bos taurus
tttcctcgttttctatcctttttattctgacagaagaattattgtaaaaacactctgattcaatattgctcaaacatgagtaatgtaagctacaattttacaggaaaattacacctgtgaacttctgccattgaattacttttagcataatgttaatgtttccatgtctatagtatataattttcttgtgcttatatctct

SEQ ID NO: 19904 - DNA, 201 bp, Bos taurus
gagtcaatgaaagtccaatgctaccttaatgtaaaattcttgttatgaaataaaacatcaggagaatgggcttagtgattttgcctaatggagtatacgcagaagaagtttgatgaaattacacatcataacatatggttttattttgtttaaacttctggttttaactttttctttgttcttattaaagattagcaatct

SEQ ID NO: 19905 - DNA, 201 bp, Bos taurus
ttcatagatatgacactacactgataaaagacatttatctgttgatgacaggagagggacagaaaagaaatggtaataaaagttttcataggtcacagtcttattgtggggaagaggcttgtgtaactaaatgaagctatgagtcatgctgggcagggccacccaaaatggatgggttgtagtgaagagttctgacaaaac

SEQ ID NO: 19906 - DNA, 201 bp, Bos taurus
tggtcatgtacaccatagtttctcaaccttgaaactattacattttagaccagatagttgttcgctgtgaaggctgccctatatgctttcctttctttgccctgcacacctgtattgcccctgcccaactgtggcaaacagaaatgcctccaaacattgcaaaataccaccagtgcggcaaaaggactcttgactgagact

SEQ ID NO: 19907 - DNA, 201 bp, Bos taurus
tatggtgaacctgagacaaagactttttctcacaaaccagtcagaagcagccctggcctggagggctgattatcatacacaagttacatcatctgttcatcttggctgtccctcagatgctctagatgttttggaggtgtctctttggctagaatttattgtttcacccattaaggtattttattaccagcaagtctgcca

SEQ ID NO: 19908 - DNA, 201 bp, Bos taurus
agcattaccttctcctggaagcccagtgcactgattactccctcctgagggcttccctggcttcccatgtgttcctctgtaagaacatttatcaccttgtattgttattatttgtttatgagcctgtctccactgtagactttgaacttcttgagtttgagagctctgtcttaaccaccactacatctcaaagtttgattt

SEQ ID NO: 19909 - DNA, 201 bp, Bos taurus
tgaagatattgtgaaaggagataatatcaaggagtttgagagaagatcccagaaattaatgatagagaaatgggaaaataagagataaggtaaacaggtgaaaaacacttaatacatagcaaaataacaagttaccactgtggacaacagggacttaatcccactgcatattctggaagactgtattccgcatacctcacg

SEQ ID NO: 19910 - DNA, 201 bp, Bos taurus
attcttactcatccttcaaaaaccaaatgaattgctgattttttgtgacacttttatttgttctttcagagctttatttttagttctaaacaatatctttaatatctagaatttttgcctgttccctctagagtttcatgagggtataaaccatatcttattcagttccatatctcaacacttaggacagtatattaaaag

SEQ ID NO: 19911 - DNA, 201 bp, Bos taurus
atctttctttctcatttccaaagaacacttgtgatccgaggttaatctatccagtgtaatgtttgtttgaaatcctcaaggtcattttatatcaaggtggaagagtaaaagttgcttgtggaaatcaatccaggtggcagagtaagaggacgtgacactcacctattcctagaactacatcagaagtattggatgtatttg

SEQ ID NO: 19912 - DNA, 201 bp, Bos taurus
tactgttactactgaaattacttctactaccaccactgcttatcaatcattggaaactcacaatgtgctatgctttagtatattcattcaaaaaatatgtgtctaatccttgctatgtacagaacattgtgttaagtcttgaacacactttaacacggatttgcttttttcagtactgagcactttccataattaagttgt

SEQ ID NO: 19913 - DNA, 201 bp, Bos taurus
gtgtctgagtcaggatagtggagaacagagctgccaagctggcttgtgataaaactcacttgcatttatcataacagaaaatttgttgaggtttccttaaatagctctcagctgtctaggtgctgcttttttggtggattagcttccgcaagacagggtgcttcaaaagacagaagagctagaaatagtctatggtatagc

SEQ ID NO: 19914 - DNA, 201 bp, Bos taurus
atgaattgtatggccttcactatcttttgagaaaataaataaatattaaaattcatttaaaattgctaataagtgttcagattggtaccctttgaacttcgtcacatgcggagaccaggccatgaggagtcaaagtttttattaatgttagttctttaaaaacctgaatctttatgacaatgcttagattttattttttct

SEQ ID NO: 19915 - DNA, 201 bp, Bos taurus
ttctttccaggaatacttctctactttcacccccttaccccaaatacccctacaattgtaggattttggtgctattttatttatctcttcaatttcctatgttcaccaatagattaataattcatgagagcagggtctgtccctcctaatcactcaatacctagcctcatgactggccctttatcactctctgtccagaag

SEQ ID NO: 19916 - DNA, 201 bp, Bos taurus
cgaccttgactttgtagccaaagctttgtaacctactagttcagtattgttatcaattccagaagtaggaagggtcttttcccacagccctcccccacatcgtatctctgttaggatctctgttagggcctcctgacaccttggctcactgtggagagaattttcccagcaggcagaggtagagccagttacacaccaggt

SEQ ID NO: 19917 - DNA, 201 bp, Bos taurus
atgacatttcattcctttgccagcctatgaaggaaaagtgggaggttaaaaaaaaaaaaagggaggtcaatatgaatttactccaagtcaactgtaatctatatcctgtcttcctaatacatctcataacaaaagcttgttgtatcagtatattccaaacgtttgtaagttatttagaacttggaacatgttttcccatag

SEQ ID NO: 19918 - DNA, 201 bp, Bos taurus
aaaattgccatgggtctttgaaaacctgtggctctttggctctttgccttaattaggttgggtacaggaatttttgccaaacctgaggtcttgagtgtcatggacaagcatccttttgcatacttggatcttttcactgcagaggtcccgctgctccctatggatgctttgaggacctttggccctttcctcatgtgaaat

SEQ ID NO: 19919 - DNA, 201 bp, Bos taurus
tttttatacagatatataaatgaccatgaatgaccctattcagttgctccaaggactccaaatctactgggagaaacaagcaatgaatagcagttataatgccatatagtaagtgcttctctggagtacacataggagatgcaaagcccattccaggaacggtatggagtggttggctggagccatctgaggcaggaaggt

SEQ ID NO: 19920 - DNA, 201 bp, Bos taurus
ttcagtgccaaaaatgtcacccttaatatatccgtatgtctctggtcttcttatgctggtctcttttgaaacagcttcccatttcttcttaacagttcatctgcactactttccctaagacccagatgctttccccttgctaaagcatttcctgatctatatgtcatatcattcttattatcacttattatttcatttcct

SEQ ID NO: 19921 - DNA, 201 bp, Bos taurus
gttgtcctgttccttgaactacattttcttattactaagctaatagagctgggtttagttctcttgctttattctatacctcataaatctcctaaattgctttgagatatttttagactatgatatgccttaagtagaattttcaagcatacatcttacttagtcagctttggggcttctaaacgatatattttatagtct

SEQ ID NO: 19922 - DNA, 201 bp, Bos taurus
cgggtacctatgatagactcatgtcttcactaatagctgttgttgcattggggccaacccatggaccactgctggcttcttggtccacacctttactgagacactgccaggttctcctcttatttttcagcgatttttcttggttacattgtgagatgacacactgagtttcctggcccagaatagtcatttcagtagcgc

SEQ ID NO: 19923 - DNA, 201 bp, Bos taurus
agcaggaaaaaatcagaagctctttaccacaagtgattttttccctgcagtaatgttaaaaaaagaaatgcagcctgtagacagggatttggagaggaaaggagaacacagccaagggcagggtgtgttttgtgctcccaactcttccaaccaagcaaaggtcccgcctccacatttcttcctgcagggatcagaatttgg

SEQ ID NO: 19924 - DNA, 201 bp, Bos taurus
agtttcccagccagggatcaaacttcggccctggcagtgaaggctctgagtctcaaccactgaaccaccagggaattccctagatagaatgattattaaccccagtttccagattaagaaatgcagcaacaaaattcaagctggaagctctttcttacaagcacaaattttgtatacccttttctaataatttcaaatatt

SEQ ID NO: 19925 - DNA, 201 bp, Bos taurus
atgagtacaactttttctttagagtcatcatgcagtgtttctttctgtatcttatatcacttagcattctgctctccagatttatctatattgtcacaaatggcaggatattctttaaggctgaatattagtccatcatattctacattttctctatccattcattaactaatagacacttaagttgtttctgtaccttga

SEQ ID NO: 19926 - DNA, 201 bp, Bos taurus
cagggaattcatacataggtcagttaatccatgacatttcctggctacaataattggggaaacagtgggcagtggctttagatgaaccaggtagattaaccgctgcagttttattccgcagttggggaagaaccaactattgatgtggataacatggggggagggtaggcagatatgaaatgtggcgctggtagtgtcatt

SEQ ID NO: 19927 - DNA, 201 bp, Bos taurus
cagaaaacaattggtaatgccttcattttaatgagaaagttcttctgatactgcagagttatggggctaaaaaacagtagaaggtaagcaagacataccagttcgttcatgcaaataaaaatcacccaacctggccagcatctctctttcctatagacctgcctcttgcagagagtaaaggcaggtggatgatgctgtggt

SEQ ID NO: 19928 - DNA, 201 bp, Bos taurus
gacttgcaatttcttggctgactacagtttatttctcaaacaatttaacttgtataatctcctgagaaatatctgagggtgtagaatacatgggaaaatggtctgttttgcttagaaatatgtttttaaattttaagtggttaggtaatgtacatacagaaaacttctgaagttttattcattctcataaacttacaggtt

SEQ ID NO: 19929 - DNA, 201 bp, Bos taurus
tttcggtttgcagtccctccacccactacctagattctctttttctgagatatgtttagatgttggagagaatcacatgattttctccagaaatcatccttggccaaatcgagttattttaaatcatttacccacagcagatattgcagaaactctcagagcatgtgcagcctgcactgaccagatctctccaccctttac

SEQ ID NO: 19930 - DNA, 201 bp, Bos taurus
cctccatttttctaatttcccaatgtacaaatatttgtgttatccttcacttttacctctatctcacaatccaaataatttccaagtcacatcaattctatatgtgtcataaatgtctctcaaatctgcctctttctcttcattctttgctggtaatatgtcagttccagttttcactgtatctgacttaaaactgtgcca

SEQ ID NO: 19931 - DNA, 201 bp, Bos taurus
aatgtttttcttcttcaaaaatgaaaaacttaaagattgatgttagaccaaaacactgttttaaagtatcttaacagcaccaacaaaaatttatctggggcgaatattatcccgagatctttccgataagtgactatccttgattatatattttatttgcataaagaatattcttggcactgagttccacataatgcttcc

SEQ ID NO: 19932 - DNA, 201 bp, Bos taurus
gctgaccacagactatgctctgacttccatgtaagacccaggccctgccaacacaggctaacaggagaaaaccacagcataaagctgataagccaaaggggacaccagcagggtcagggccaagcagcattaaaccagcctcctggaaggaagggaatcgcaaggaaacttgaaacttgcccatcttgactttggcacaag

SEQ ID NO: 19933 - DNA, 201 bp, Bos taurus
gtgacagaaagaggacacaggctcttagggaataagtcccttggccctggagatttttcaccctttggggaggagagcttggttggtgccctctaaaacgcagactcagggacttgcctggtggtccagcagttaagactcctggcttctactgcaggaggcacaggttcaatccctggttggggaagtaagattgcatat

SEQ ID NO: 19934 - DNA, 201 bp, Bos taurus
ccactatttccctccaacaactggcaggcaggttgtggcccctgtcaaacatgcattgtcattccaagttcattttcagcatgtgagtgggttggccaactctgaactccaatttgacacatgtctgcagccaaggtctatgtcagtaaaaattccagagatatacctgccttgccctgggtcagctgggccctatgaact

SEQ ID NO: 19935 - DNA, 201 bp, Bos taurus
ctttttcatccttggagaaagtttctacactattaatgggaatctaaattgatcttctaaccttcctagatgtctaggaacaagctttttgtagaaggatagtgattatagaacctttctcaattttgctagtcagacaccttgaagaaatcaattagtaggcaaattattaactaattgagcatttagagtgttcttact

SEQ ID NO: 19936 - DNA, 201 bp, Bos taurus
cctgagagtattttaaaaattacatatcattacataaataaaggcataggcttaaccttgtgactttgtaatttcaaatgaaataaataagatatagagacctacattctaattctggttttacaactgcatctggttagtcaactactgaaatttgtttttataaaattgcattcactcatattttattgtaactctaag

SEQ ID NO: 19937 - DNA, 201 bp, Bos taurus
tctctttccagagagtcccaccaattacactgcagtgaaaatgagaatgaaatgggcttcagtaaaatttcagggaggctcatattcttccagattcctccttctaaccaatacatgcacaaatgtatttctaagaaaaaatactcatgttatgtctcatatatatattttttttaatcctgatgtgatgtgtaaggcctt

SEQ ID NO: 19938 - DNA, 201 bp, Bos taurus
gagtttgctcagactcatgtccactgagttagtgatgccatccaatcatctcatcctctgtcagcttcttctcctcctcccctcagtctttagtgattatcttagtgatggtctagtggtagttcatggggatcacaaggagtcagacacgatttattgactgaacaacaagtaatagtaaattctttttttaatgctggt

SEQ ID NO: 19939 - DNA, 201 bp, Bos taurus
atcttctagttgactgatggttattctatgtggcaagaaacactgcaaaagttaagtgcaggtgtaattgaaaaagaaaaaccccagtaaataaataaagcttcctggagtcttcaatttttatcaaccaacaagaaaattatctaagactggtgtcattatgtagtttgtaagaaagaaaatctgaaaatatggaggtgc

SEQ ID NO: 19940 - DNA, 201 bp, Bos taurus
aacacacagttgatacgatagtgactattcacttatgcctgcatatagatgtaatttaacatactaacatgtgatttggttttacaatgggtatgaaatactgttacccagagagagaagatttagaagggtggatggatctgaaatttagggttttgtaaataggaataaggtccatggaaacaagagcttaaagtaaca

SEQ ID NO: 19941 - DNA, 201 bp, Bos taurus
aagggaatcgctaatgggactggacagaatccaaaagcagatattaggataatagtgagtccctgacctaggttacggtgttaattctggagggcagacttgtggtacattttcaatagctttgtggggctgctgtcacggtcacatatgcctcaactatatatggttcctagcccccccctccccacgacatactttttt

SEQ ID NO: 19942 - DNA, 201 bp, Bos taurus
gaagtgctaaagttaccaagtttctctcctttcttagttgaatactatctacaacaaacttaattttattttttaaatattttcagtaaaattttgaatacgttcaaataacaacactaaggcagagtggggtcaacttgaagttgctcacaggccttgcttcaattttaagcaatttagattaacaaaggctatttccca

SEQ ID NO: 19943 - DNA, 201 bp, Bos taurus
aatgtaaagcagggtgacatcccggcatcctttgcggaggtagcaggccacgccctcctgaccctactgcacaatgaataatgcaaaagagggaaatgttattgttcaataaatcattctcctgcactaggaagctggggcagaatttgcctcacaagcctcaagactcaatgactctggatgtcaaatggaggcaactga

SEQ ID NO: 19944 - DNA, 201 bp, Bos taurus
tgtgtggtattttaacctcctaccagggatcgaacccacaccccttgcactggaaggcaaaatcttaaccactggaccgccaaggaagtctcatagatctggttcttaataggagactccttctccctctttgatgctgctgactgaaaaggggaggaggaacaggaggaagaaagaagagaagaaaaaggggaagaaacg

SEQ ID NO: 19945 - DNA, 201 bp, Bos taurus
atagcttgttttatgtgactgtttactataagtttctaatgttgtataaataaaaaacttgaaaatcttactttttaaagccaactatacatggcagaggggtctagtctgatagataagcttataatgtccactgaaacaagaaaaagaaatttaattgaaaatctattccaacccatctctatatctccaaaagaaaag

SEQ ID NO: 19946 - DNA, 201 bp, Bos taurus
tgttaagtctggagagcttaagtttggacagctgttcctctctttgtctcctttcctgtttcctgtgttctaagggatgccttatagtaaacctattccagcttggtggggcctggatttccatcagcgacgtttagaatcaccataaaaggaattccctgggagcctagtgaactaaggtcccgcaagctgtgtcagttc

SEQ ID NO: 19947 - DNA, 201 bp, Bos taurus
tggcataccagtcattaggaggcaaactggggattgctaagtgagagaatgatttccaaatgcattgaagtttttgggtccacaaattctgcctaagctatgaacagctcatcatttcctcaaagcatattacagagtaggtcctcctaagtgggtccactagcctgccctagacttcccagatggttcagcgggtaaaaa

SEQ ID NO: 19948 - DNA, 201 bp, Bos taurus
aagaaaaagaaacaggagcattagaacaagacagagcatctgtaaggtggcacaatctggagcccccatgtgaggcatcctgaggtctgggcagtgaatatccctcacccaatttgcggagatggcaatggaaccagcctggggtcaagtggttgatttttctacatccacagctcaggaaagttttaatgtatctttgca

SEQ ID NO: 19949 - DNA, 201 bp, Bos taurus
cagactgctcttactagatgaccaactaaaatagctggaagacaatactttagaaatggatagttgtaagattataaaaatgcaaaaaatcccttttttttgtcttctccccaacactgagtgtcttcgcaaatgtcacccactcagaaaacatttcctctccatttaagatttggttgcattccgggttgtgtgctccct

SEQ ID NO: 19950 - DNA, 201 bp, Bos taurus
tttatcatctgagccaccagggaagcccataaaaggttcaggaaaccggtatttctcattctcctcagctctgtgttgtagatgcaaaatttcagaagtcgggggcttcctgcctccactcagagggtaaccctctgtcaagagcaggtttgagtaacctctatgacttgttttctgtagtggctgtaccaacttgcattc

SEQ ID NO: 19951 - DNA, 201 bp, Bos taurus
atacatccctgtgcttcagggcttaactaaattcctatcttcttcagaactctttcactgataatctcagaccacagagatgttcactgtggttgcctgttgtccctacagagcaagactggaagcctttggagaccggaagctccaagagaccagttccatcctttctgacgtctgatccagtcctcagaactatattcc

SEQ ID NO: 19952 - DNA, 201 bp, Bos taurus
gagaccttgagacacaaagtttcaggtggcatgtgttttaaaaactgttggtatccttggctaggtaccgttcacagaaagttcaagttctcagtggtgccgagatgcatttgagaccagattctcaatggcctcctaatctattcttgtacactgaacttggatgttccagtttaatttcaatttaatttcaattcatca

SEQ ID NO: 19953 - DNA, 201 bp, Bos taurus
tgcagggtacgggccactctgggcagcaccaacacagactcagacacccagaccttcctctcactttcccttctcttctctctcttctgctccaggagtgcggagtctggggaaatcctgaacgagctcatcaggatgcagctgctgggcggctcaatcctacttaatgtctatgtcagcacatccctcgcctcttttaag

SEQ ID NO: 19954 - DNA, 201 bp, Bos taurus
ttaatgattggattacaatgttaagtatatttttagttggaaaataattttaaaataatcactttgcaaagttgtacatttaaactggaaaaatttgatactgttttctaatgatactgcattttctcttcctactgatcaaaatgccaaaagcacattaaaactgttctatggaaaccaatgggtatgtgtattgtttct

SEQ ID NO: 19955 - DNA, 201 bp, Bos taurus
aaacaattaaaatgatacaatgtacccacaaaatcatcccatttggcctccattggagaagaaagtgctttagattaaagaatagaccatcccatcaccatgttccatcacatcacatcacagttaaaatatggagaacaacagagtaagaacatatcactgaacacttgcatcacatcatgcttgacatgattcgacatt

SEQ ID NO: 19956 - DNA, 201 bp, Bos taurus
tcctcctcatgacctacccatatgcatatttcaccttataaatgtctctccaatctgtgctctgctttcttgtattccaaaagggcctttataaataccaattcttcacattgacttctcctttcccccttcactccattaacttctcttcaaccagtaaagattgccaaaaaaaaaaaaaaaaagattgccctggaatct

SEQ ID NO: 19957 - DNA, 201 bp, Bos taurus
agtggaaatgaacatctttggaaaactgctgtgtcactggcacctctcgagttcttaatattctttgttttatgtatctctgccctaaacatatgaggcaggggttttattataaagtgactcttagtgttttctttcatatcgcatccttaactatggttgcactagcattcagaacgtgatctgtttgccaccagaatt

SEQ ID NO: 19958 - DNA, 201 bp, Bos taurus
ggaatctcagaaatgactcttcaaaacaatagaatcttaaagcaagtattgggaagtcaggctctgctacagattaaaaactggaattgacatgctgtgtctccatatcaactctttaatatcatttaatgatcagtttaattcctactgtttggttaagtttggcatcattcctgcttttgctaatatttcctttggtgc

SEQ ID NO: 19959 - DNA, 201 bp, Bos taurus
gtatcaggaatcttaagtaaatttaatttaaaatgtaataagaagacacttgtgttgtttaataacaaaataattcattaacagggcctgctttttcaatttgtgtataaaactctttataacttgacttttaaggtaaatgacaacacgtattttacaaattggaagaatttaagtatacccagggaattctgagtatgt

SEQ ID NO: 19960 - DNA, 201 bp, Bos taurus
aagcttcagcgcatcctctacagtgtgagctagttgtgtggttcaggcatcattggaacacctgacgcatgtaccttcttccatttttccatacctgtgcttcctttaatcaacatcatcagtagaatgggagctatcaatttaaatgcccaaactaaagaaaaacatcattttgaatgatataatttgcaacaaggctta

SEQ ID NO: 19961 - DNA, 201 bp, Bos taurus
aagtaaataaactatttcgagaaaaaataaacttaaatgtaaatatcataagatttcaaaaggtggtaggttattagcacatagcctttgctatcagtagagcttcagcttaaatactgaaaaggaagttattcaccttttgaaattaaaaattcacttataaactatgaataactgaaccaattttataaaattgttgtg

SEQ ID NO: 19962 - DNA, 201 bp, Bos taurus
tccaacctggggatcttgcaaagggactgagaacctccagggaatttgactttggaggccagtaggattttattacaaatcttccacaggactggggaaatagactctatcaggacacaagcaaaatcttgtgtcctgtacaaacaggacctaggagaaaggagcagtgattcccaaaacagatagagccaaacttgcttg

SEQ ID NO: 19963 - DNA, 201 bp, Bos taurus
aaatactaaaaactactgagaaaaagacagcattagtcatggtctgccatttagcaactaaacacagaagcctcatgtgtgttgcatgggttgatatttacattggcttgtttttacagctcagagcatccttatataaaagacttgaatatttttgtataattctaataactatgtttattattaatatatcctgtgagt

SEQ ID NO: 19964 - DNA, 201 bp, Bos taurus
ttcccctttctgccttacctaactatatttaatgaatggagctggcatatctttgtcattacatagggaatagagtttgtgccaaaacctatggcttagaatttaaaagttaaattgcatgaatatttatgaatacactgttcaatatacaatttctaaaatatttgaatgattgagatttagtgttcaaattgatagagt

SEQ ID NO: 19965 - DNA, 201 bp, Bos taurus
tggtaaactatacactgtgagaaaactccacttttattatctcaaaacttctgtaaattgtgttattttaaagagtgaaagaggcagcgacaaattcggtacacctcttggttgggaaaacaaagattcagtggactcaaacattggaaaaaaagagaaatttaagtctcttggtcacctgtgatgttattaggagatgct

SEQ ID NO: 19966 - DNA, 201 bp, Bos taurus
caaaatctgccccctaagagaggtactggatagggagggtaaaactatgcacattcatgttcctttttctatgcaagacattacccaatgtacggagcaattgggttcatgttctgagaatccccaaaaatgtagggatgaatttgagcaccttagccttaacttctccctcacctggatatactggccatcctcacccaa

SEQ ID NO: 19967 - DNA, 201 bp, Bos taurus
gctactaagcataaaaaaagtaatttatccagaagtctagtgaaaggaagcagagagtagaaatattttaagaaaaatctttatatcaacaatttctaaagcaatgccagtatactaactgaaggagggtttgctatattgtgtggactaggactgtgtgctacctgccaggctgtaaatgaccagctagttctggtttga

SEQ ID NO: 19968 - DNA, 201 bp, Bos taurus
acgtaaagtaacaaatgcaaaactttttaaatggtagtaatataactggccagcaagcagaggccaccacatggggacacacatcttattctggatggcatattttgaggccagcaactctgagaatgcttattttctactgcttcagaggatgtttgctagaaaccttttttttttctttgtaacagttggtaaaataaa

SEQ ID NO: 19969 - DNA, 201 bp, Bos taurus
attgttgggtccttccatctggagagccatttccccaggtctgcttggaaaattcataccaaaagcagtaacaggaaatgtgcagagggttttctgtgtgcccagcacagtgtaagtaagcttaataatccctattttcttaattcattccacacaaaggaacacagttcaaaattgttaatattcatatttaaatgataa

SEQ ID NO: 19970 - DNA, 201 bp, Bos taurus
agatgcagtttctttccatcttgcagttccagtttcccctaagatcttggcatgctttcaattcctcaaggagataaggaaagaaaaataaacagcactatagaaaaatatgaattagtcctggaaatggcaggtatctctaggccttacatcacattagccagatggtcacatgcctatgtttaatttcaagggaggtgg

SEQ ID NO: 19971 - DNA, 201 bp, Bos taurus
aaacttgtgtcaactaatattacacttgcatgatcatagggcacacgaaatattagaaaagcaagatggggccagattatataaggatttatatgccagtttacaaaaaaaacaaaaaaaaaaaaccagactttaacttatgcgccatggcaggttattgtacatttttcagctttagaaagactaatctgacagcaacag

SEQ ID NO: 19972 - DNA, 201 bp, Bos taurus
ataggtgtggttttttggagctcataggaagcagtgcaggtaccataacaggaaattaagagctttctagaattcaaaatttctctctcaaaccccagctggtgtctcctgttaccagttctaaatgccaaagaaaggaattctgattgactcagtttgaatcgtctgcctggtgcattggtcaaagcctcgggtacagac

SEQ ID NO: 19973 - DNA, 201 bp, Bos taurus
ggaaatagcaacctattctagtattcttgcctaggaaatcccatggacagaggagcctggtgagctgcagtccataaggtcactaaaagtcagatatgaccgagcaactgagcattgatacaaaagataatgtacatggaatttaatgattctataagttacacaaattttgtaatgcctttctggggtggttaagtgatc

SEQ ID NO: 19974 - DNA, 201 bp, Bos taurus
aaactgactcttcttacaggaagcatgctcgatttgttattttttaaaaaattatcttgctttaatataatgctgccacaatgtctttatcagggaaatagccatttccattttccattgtaaaattaaaatatgaaatgcaatatgacagttacctgataagggaaagttattatgcttctttgtggcatatccaagtaa

SEQ ID NO: 19975 - DNA, 201 bp, Bos taurus
agatgtacacaagaagcaggtcatgttaggtaggtcctggcgaatgcagtggagctgaagtaagataattgttattagtgaagttgatgaacaaagagaatggcagattatgaagataaccgtaggcaagttgatctcagaaaagcacctgacatcctcacacagttggatatctttttaacacatatgagaggccactga

SEQ ID NO: 19976 - DNA, 201 bp, Bos taurus
aatacaagagaaaaaaatgttaataggataagtaccaaaaaggattaagtgatgctaaatagcaaagaggattagttattatcctgcctttacaggcacctaaatttcatgtggccaagtagataggaaatagaaaaccaatgctacaaaatgggacctttttcttctctttgcaataagcttatattaaaatcagtttta

SEQ ID NO: 19977 - DNA, 201 bp, Bos taurus
tctctatctagtagcagtgattttggagcccagaaaaataaagtctgatgcattaaaaaatgaaggataaaaatgaagaatacaattctcaacaaactggacataaagaaaacaaacttcattaaaataaaggtcttacatgacaggtgaaaaagtgaaagtgactcagtcatgaccaactctttgcaacctcatggactg

SEQ ID NO: 19978 - DNA, 201 bp, Bos taurus
gctgattaacagatgaccagaatacttaatatgttagaaaaagaacatctctcttagttggaaaaaaaaattgaaattgcacagttactggacagagatacaaataaactaggaaagtaggggagtgtagagtcctaaggtgtgacaataccaataaacagagaaccaaaatgaataaggaatactagtctgaattaaaag

SEQ ID NO: 19979 - DNA, 201 bp, Bos taurus
ttatatttgctcccttgtattgccttgaattccttttcaaagatcagttaactatacttacaagggtttattttagtattttctgttctgttgttttgttgttgtttatttgctaagtcgtgttggcctcttttgcaaccccatggagtgtggagccaccaggctcttctgtccatgaaattctccagtcaagaatactgg

SEQ ID NO: 19980 - DNA, 201 bp, Bos taurus
tggctattaaagacaatctagtaacaggacaatttatgaagagtggttgataagctctgttcctgtgtgtaatgaaggtagaagaaatagctattcaccactattaatttaagcattgagcacttgatatcagagtttgactataagtaatacatcatggattctaaaggtgtttctcaataggattttcatgcaaccagt

SEQ ID NO: 19981 - DNA, 201 bp, Bos taurus
tcaaccatcaggtggtagcctgaggtttgggtaaaacagtgaagatgattgcattcccttgtccatggccattggctcaggtaatttcaatttaatcttatctgtatgtgacattacctgaaggtagatacccctgaagggtggttcagtcaatgaaaacctcagaatggtttttaatggttgtgactgaaagcaatttct

SEQ ID NO: 19982 - DNA, 201 bp, Bos taurus
aaaagtatcttagataatgtctatctattttgtccatcactgtaattaagtaaatatagcgatatctgatgtgtaagacaggctaaatccatatttgtaaattaattttcaagggaataaaaaataattgagctgtgaatagcaattttagctgcatattgctgagaggtaatagacataattgctacataagaaaatggc

SEQ ID NO: 19983 - DNA, 201 bp, Bos taurus
gcaaggcatatagtcattttaaatctgctcagcttaatgttgtgtaatcattaaaagcaaacaaataagcacaaactaatactatacataggcttgcatatataaaagaacctccagatagtgtgctaattaagaaaaacttacctaagattctcccccaaagaagagactgaatgaaagcctaggagacgagtttattag

SEQ ID NO: 19984 - DNA, 201 bp, Bos taurus
agaagaggatgaggaagagaggaaaaagtaaaggaggaaagaaaggccaacagctaccaaaacaataacaaaatttaatttgattaataaaaagactattcctaaggggagctaaaagaaaaagagctggaaagagctggcagagttagaaaaagtgtccacaaccatttactttagaatttcaaacaaatcttcattagt

SEQ ID NO: 19985 - DNA, 201 bp, Bos taurus
gtgtaatgtgtccagatataatgccacttgataacattctaaattttatctttaattgttctgtttcacacactcatcttgtgaaacaggtgatgagctttgtgagaacagaggagtatttgtagcaatagattgtttagtgctaaagagaatgtactttagaactgaatcttggtttttcaacttaaaaactatgtaact

SEQ ID NO: 19986 - DNA, 201 bp, Bos taurus
ttgataggtgctgaggtttccctactttatgcttatccacacggtaaacatgtgtttgcatcacttttaccagaggtatggcctgaaaaaaatatttacactgatttttctcaatccttcctatatattatgtttctcttcacccctccccatccatcaagcagctgtccctattaccaacatattaaaaatacaaaataa

SEQ ID NO: 19987 - DNA, 201 bp, Bos taurus
gtcatccaaaaaggcaaaactgtcttaagtggataaagtgatgtttatatgcagttaaaacaagcaatcactcagggtttgaacagttttaaaagtcaaagcacagcatagatgaacagtgaatatgtggtcctgatggggcatcacttggacatcttagtctctgaaagtgtctccccagtgtctagggtcttcaacaac

SEQ ID NO: 19988 - DNA, 201 bp, Bos taurus
taaatttatatttcagttgagtttggaattatatctctccactgagaagagagagttttagtgtgtggatttaaaataaacttttctttaccaaaaatatgtagtgaacttcactggtagaaatgagaaacaatagagagcttagttataatatatagcatgctagaggcaggctcagatcatagaattatagacggttag

SEQ ID NO: 19989 - DNA, 201 bp, Bos taurus
caggacctgggctcaaatcttgtttctagtgggtagcacaacttctatgttgagctgcctcctgttgcatagtaacctgaaacatccccaaccacctgtcaggggatattggtcttttattaggcattgttttggaggagttcattatgttttggcagatttcaaataccacagaaattattcaagacattaactttcttt

SEQ ID NO: 19990 - DNA, 201 bp, Bos taurus
gatgtcattttcagcattgtctttgaatgctcttttttggttttctttgttttagaaaatgtcatgtaccatgagctgcagctttgctctagttttacttcctgtcatagtcacagttgacagagctggtctctttcccaccagtctgagttcaactatactgctgacttcctcacagagtgtggaaaatttattgcaaag

SEQ ID NO: 19991 - DNA, 201 bp, Bos taurus
cagggagtctagtaaaatcccacacaatcttgactacaaggattgttatgaaaatataactctaattcagtttattaaacataaaagttatcttatgtggaattaaatttggcactgcctttccataaaccatgccagatacagatagaacttccttaggtttgttcatttctcatcagctaagaagttaaactaatctta

SEQ ID NO: 19992 - DNA, 201 bp, Bos taurus
agattatagataagaatattttaaaatttgagtttcttctaacctcaggagtctatagattaaaatatttgcttgacctttaatacaagcaggaacccaataattccagcaataattacaaaaatattactacctcccgtttattaagcatttattttcctgtttatcttacttgagaccttttcaattgttttcttttgt

SEQ ID NO: 19993 - DNA, 201 bp, Bos taurus
ggggtgaggtggttaagtgtcacagaggactgagtctgactgaactcagggatagggaatgactaaaacagcaacagaaagcagcatgaatagaacaaaaagaatctcttaggtctttcatattctgcttatgtagtgtaaaaggtaataggaagtctcttcatccacatcctaacacaaggtctcagtatttcagaaatg

SEQ ID NO: 19994 - DNA, 201 bp, Bos taurus
acaactcttccaaatgagtccaagcatttagtttcagccaagtcgtttcataataatacagttgtaaatgttttgtcatcaccttacattatttagtaaggtaaacttgagagagatatctttgaatacctattatctaagaatgcatgtcactaattgatttatttctgcttagatgcattcccaacagttactcttctt

SEQ ID NO: 19995 - DNA, 201 bp, Bos taurus
caatgctcttgccaagtttgttaatgtcacccatgttgctgagttcaatggtcaactctaagatcttcaagtctttatcagtagtgtctgactcagcagactgattgctcctctaccctagaacacattcttcagcttggtcccaaggactatactttccttgtttccacttccatcattggtccttctcagtatccttcc

SEQ ID NO: 19996 - DNA, 201 bp, Bos taurus
aacgaatttccatctgtttagctctggctggcattgtatctacctgtatctcttttttactctaatcagatataattgctatcaggggaaaaactttgttatctttccaatgagtcatattttctgggttaacccttcacaaggagcaattctaagtcacacagctggcagcctaagtgatcagtagttagacattcagtt

SEQ ID NO: 19997 - DNA, 201 bp, Bos taurus
caggtttgggcaatgattgtgcaatgttagccaaatatttgcataaactctgttggatccattttattatttatgcttttttaattttcctttttacctacaacccaaagatcattttgcattcttaaaatcctgtatagtgttagatactggatggaatattctcttcccacaaatattgtgatcatccgccctctatca

SEQ ID NO: 19998 - DNA, 201 bp, Bos taurus
tataaaaatgcataccaaggacaagagtcaaaaaataagacaaaatattgtcattaaattggaaggaacaaagagtttaaaagttgatcattaaacagatcacccttagagagtctcagtaaaataagcactcagggatccatgttagaaaaatagatttaatagagtggaagaaatagaagctgtgttataatattatat

SEQ ID NO: 19999 - DNA, 201 bp, Bos taurus
gtgtaattatctaatgtctagcgaaactatgtgttcattttagagtctcacaatcaaaatttgaaatggaaagggccctgtggaagggtatggtaaagttgttatctattgggagagctagacatgacgcctaggatggggagaaagaagtaggagatttcagagtctgtaaaaagaaacagaaacataatgttttttaaa

SEQ ID NO: 20000 - DNA, 201 bp, Bos taurus
aatcactagatggagtccaaaaatcttagtcaatttgttttcacaatttgggttatacttctctgtaaagtaagaacaactttaagaaccatttaacatacattaaatggttatgaggatgaaatgacatgacacattctgaagcacagaatacgagccagaactgagtaaagaaccatagttgggatttttttcctgtga

SEQ ID NO: 20001 - DNA, 201 bp, Bos taurus
ttccctgcaaacgcaactttgagaaatggcccagagagccaacgttttgcgttcttggaatacccaaagagaatgtgcagggacattcaggcctatggtagattgcttctctcagcataggctgcaaagccattgaaaacctggctttcttgggcatgccactgtctcggattaccaaataaagcaggtaaggaggaagat

SEQ ID NO: 20002 - DNA, 201 bp, Bos taurus
accttattctccaacaaagatgacaccagcaaacaggcttacatcaatcgtatagccactaattcagtaaaattattgtacctttctttcagtgtttcctccaaaaaccccagagaaatactcattcatcccagatgacttggtttattttctttcccctaaactactattaaatgtagtgtctttgttggccatggcctg

SEQ ID NO: 20003 - DNA, 201 bp, Bos taurus
ccaattgttttaaaatgaggtggtttctagtatctgctaataggagcaataaatttttaaaaatcattatcattatgaactcatgaattgtagtttattgaaataaaagtccttactgaggctcaaattttcccatctttggcaagtgagatccttttcagattgggtcttgtgtctgttcacaatatgacccttgtaatc

SEQ ID NO: 20004 - DNA, 201 bp, Bos taurus
gctccagcaaagggcagccgccactccttacctctgacgcggggtagcttgtctcagccactgcccccaacctctggcccggggtagctcctctcagccacgctcctgccctgagcacaagtatctctttaagtatctctcttcagttcagttcagtcgctcagacatgtccgactctttgcaaccccatgaatcgcagca

SEQ ID NO: 20005 - DNA, 201 bp, Bos taurus
cgcctctctttgttccttggctacatcatcttgccctgacctcagcttgggatgctcttctgtcatccttccttggccagatctttcttattatttaggtcttggcttaaagtatatctcctctaagaaacctgatttgaccacttaatctaaagaggccatttagactaacttgctgttcgttcccttcatcctatttta

SEQ ID NO: 20006 - DNA, 201 bp, Bos taurus
cagaagagcctggtgtactgaagtctatgacgtccccaagagtcagacatgacttagtgactgaacaacaacagatgaagataagaatgaggccacatttctgttacaagaaagaactacttacactaactccatgaactggacttcaccaaaaccagctgtagctggcctggcagagataatgctatgctgtgtggagcc

SEQ ID NO: 20007 - DNA, 201 bp, Bos taurus
tcatttaagcccttaggccagttataaggaaatctatttcaaacttgctattacagataattaatactttatgctgaatcactctgtatcagaattcataatctgtgaccatacagccctttgctttacatgccatctccattactttttaaaatttttttattgaagaacaattagtatacaatattatataagttacaa

SEQ ID NO: 20008 - DNA, 201 bp, Bos taurus
taattctttattattggcatataggaatgctgtttatttgtccataaaattgctttttctgaaatgcgaaacataaaattaccactcaaaacctacaaaaatagaaaaggtatacactttactcaataatgtccaaaacagccagaaaagatttgcatcactatgaaaggcgacagagaaactatggcattttcttccttg

SEQ ID NO: 20009 - DNA, 201 bp, Bos taurus
gggaatcccacaatgtttttctaggtcttaaatcaaaagagcagtggctgtaatcattccaaggtaatgggggaggtatctgcgtgttccgtctggctacctataataccctatgggttgagactttcctggtggtacaatgaataagaatcggtctgccaaagcaggggacaggggtttgatctccagtctgggaagatt

SEQ ID NO: 20010 - DNA, 201 bp, Bos taurus
agaattctttataattttgtctaattctattatgtggcttaattttttaaatgctttgaaaagcattttttacttttttaaatgctctttttaaaaattgtgttaaataactcatataaaactttacaccttgtgtatttttaagcagacaatttcagtggtgttaagtacattcacattgttgtacaatcaataccacca

SEQ ID NO: 20011 - DNA, 201 bp, Bos taurus
ctgggactggaaagccagggatggagactgactgctaactggcccagaatttctttttgagatgatggaatgttctggaattagatcatgatgatggttgcacaacattgtaatgtactaaaacacactgaattgtacattttaaaatcgtgaattttatttcagtagaaaaaattatgagaataaaagagttaaataact

SEQ ID NO: 20012 - DNA, 201 bp, Bos taurus
ataatcaggccttgaactcaggaaggttggtacaaaggattgtactcttaactattacattattgtcatgtaattttgaaagaatgataaatcataactataggaagatactgtttacattttggagtggtaaatagtctaatcaatcttggaaattaaaaacttgggccctgccaaagtcaccataaataaaactaaaag

SEQ ID NO: 20013 - DNA, 201 bp, Bos taurus
aggagttaaaaaaaaaacctgctaggaatgttttctatttcaataaaattttcatacatgcaatatgaatttggggccattttcttcaaaaaactaaactcctgtcattctaattatcatattctcttcagatcaagaaacgcaaccttttgttcctccttctatccttgaagaaacagggaatggccataagaaaatgac

SEQ ID NO: 20014 - DNA, 201 bp, Bos taurus
gaaatgggggtgacaaactcttctgaggttgaagggccacatgctctaggactcagttagtcccacaatcttacctgtgcctccctgctccttgcccccagcacgggggcaacactggccccttttaagtccttcagcatgcccagcttcctccagccttaggaactgcataaatgctataccttcagcaccacatcacat

SEQ ID NO: 20015 - DNA, 201 bp, Bos taurus
tcactccaaaacaggagagggttacaaatgtgacaaggccctctaggaagctgaggattgaaaagtgtcaattggattaggagtgagggccactgttgagtttgacagtaggtgctaattaactgctcacattatcacttcctgagtttagctctttgtgtgaaccagcaggctgccatgcacatggcgtctctcaggccc

SEQ ID NO: 20016 - DNA, 201 bp, Bos taurus
atcttgttattgtgaatagtgctgctatgaacacggggcgcatgtgtatttttgaattatcatcttgtctggatgcatatgctttttttgatactttgttaggcatgttccttgtagctactacatggctgaactttgcttttctgccacaactgacagtttctgctttttaaaggttatgtttagcttatcacatctaat

SEQ ID NO: 20017 - DNA, 201 bp, Bos taurus
tttgcatcacaatcagaagtacacacttcaaagcacagttttataaacggcaggtatggcaacatgggacactggatggggagtttctagtgttatgttatatccagtgaagagtcaaagttatgcctgatgcatttcattaagaggacccctctccctctcatcaaagtattttcaactgggcctccctctaccactcag

SEQ ID NO: 20018 - DNA, 201 bp, Bos taurus
tgggtctgaactttgttttttaagggagaaacatcctctcctgattaaaatatttataaatccttcatcttcccctcacatgcccaaattctctctccttctccaaatcctctgaaatgtgtccctagcctgctttggagctggctcttatttttaattatttacactttgaatctttactctaagaaaaaaggctaatgg

SEQ ID NO: 20019 - DNA, 201 bp, Bos taurus
agccctaacattctttgctttcaagtttgggcatttagtgcctaaatacagtgtaatagggatatctatggtcaaatgattaagcaacggtgcaacaacgttcagagaatgtgtccagctgccatgccagcagtcgatccaaccacacaccttccttatttgattattatttcacagtgagcagctgcagaggagaagaca

SEQ ID NO: 20020 - DNA, 201 bp, Bos taurus
cctgtcctgggtacaccagtggtcttccaagtgtgggccccagaccagcagaatcagcatctcctgggaagctgttagaagtacagactttcatcaggctacaccacaggcctgcgggatcagaagccctgccgtggggccggccctgtgtgctgtaacatgcccgcaggctactgacgcgcactgaggtgcacgatgatt

SEQ ID NO: 20021 - DNA, 201 bp, Bos taurus
taaaattctgtgagtaatttttctatccatacctgtaagattttgttttaattaattaatttattacaggtagtccttattggttttcttttcaatataatagtgtgtacaagtcaatcccaaactctgaggaggctctacaaatagctgaggaaagaagagaggcaaaaagcaaggggaaaagggaaaggtacacccaac

SEQ ID NO: 20022 - DNA, 201 bp, Bos taurus
gggctcacctgaagacaagactctggacccagagacatctgcgtgcgtggactttgtttcttacctggatgaagatgttgagttagatgttggagtcgcacgtgtggagtggcaccaaccattgacccattacaaacacattaatgaatgttagggttgtttagaggtggagaggtggagactatatctgagccatggttg

SEQ ID NO: 20023 - DNA, 201 bp, Bos taurus
aaaaaagctctaaccagaaaaaaaaaaagtacttcctggtataggagaaggcagacaagagtttctctttttatttcactaaccagcttttggccatatttgggctgtggtagttagaacttcatggtagaaacagaaataggaacctgggacagaagaaggcagttctgaaggccttgttcccaccctctccatgccaat

SEQ ID NO: 20024 - DNA, 201 bp, Bos taurus
aaccattctgatagggagaagatgctgagggcccagcacattaattcctttatcgccacaaacaaattcattcctacatgaatcaaggccttcattttttcagcagggatagtgacattgtccgtgttttcttcactgtccaccaaggagagagagaattatcacagcaggccctgttgatttagaaaataccttggctga

SEQ ID NO: 20025 - DNA, 201 bp, Bos taurus
ccctgctactgacttcaagagaagcaagcatgatgtgctatagaaagtggtcaattctgcctgggaactgggggacgggtctgttagggaagtgccacccaactagggtactgaaggatgagtaggagctcctcgagtggggaaaagggagggtatgtccttcgactggagggacagcagaaattaagggaagaccagaag

SEQ ID NO: 20026 - DNA, 201 bp, Bos taurus
tgcttctccaagcacagacctgagggtgggaggagagagctgctggacacctggtgaagacgaggaagagcggatggatggcctatgggctggagcacagcgagggtgggagctggcaggggcggcactggtggggtggaaggagagccaagttggccaaggctggggctatggacttggttctaaatgtgatcgagtctg

SEQ ID NO: 20027 - DNA, 201 bp, Bos taurus
gagagcagggtcttgacagtatttctgtggttgccatttcttgccgtgagagaggatgttccctgggtatatctgatctgaaactaaccccataataaactagtatttgcttttgtcatttgctcagtgtctctgccccactgctataaattctaataaatcaatcctaaaaaacaaattgacaaaggatgtgactagaaa

SEQ ID NO: 20028 - DNA, 201 bp, Bos taurus
gcttaaagccaccagaaaatgtttttaaaaatggaagaaaacctatctgttttacagtttaaaccagcaaaagattcacactggacattttcacttggaagaaaagaacaaacgtcacctgctaattacctctaatcatatttctagagactgacagtgatagatgaggagatgtccattttttatttcttcagtttgagg

SEQ ID NO: 20029 - DNA, 201 bp, Bos taurus
agagcttccgaatttgagatggaattcataaaaatggaatacgaacctatatttcgtgacattcccaatagagtctcccaccacatcactgtgcaatataagcacctgtacaactatcaatagcacatgggttaagaagctagaactagctgtcatctggatcaaggaccagtggaaaggatttctagcataccttgagct

SEQ ID NO: 20030 - DNA, 201 bp, Bos taurus
ttcaccaccaattcatcatctccaattgattcatcatcattagatgatgatgatgaattcccttctgtatgatctcaggtggccttggcctgcaaaggctcggagtgaggcttgggttcctagacagagattgggctaggtcacagtggtgaaagcatcagatcctagccactagaccagtggtcagtgacaagggaactg

SEQ ID NO: 20031 - DNA, 201 bp, Bos taurus
cttcttctgcaaccacagtgaaagtctaaaagcattttgttcatgaacacttaagtttccaaactttctttggctttccattgtccctaggaaaaatctagtgttttatgtggcttaaaaggctcaggtatctgctgacttctgcagcttcatctctctacattctgctttctgcatttttcttcttattcttctaaggct

SEQ ID NO: 20032 - DNA, 201 bp, Bos taurus
gatatttttattttataaacttaaaagtgtattttgcaagatttgatcttcctccctcttactcttcatgggaaaaaatttttattcagggtctctccttcctatattttattactctttctatttctagtttttacacttgtaaaacacagttggacttaacctactgttaattataaaattgtacattgatttgcattt

SEQ ID NO: 20033 - DNA, 201 bp, Bos taurus
agaaataagtgtaagaataaaagacttggtattgttactgactcagctctcttcagtacctctctatgtgttgaaagtgaaacttctaaatttgtagtagtttgtttctcaccatgagtgttaggctagtcttcctgagcagagatgcgtgttccagaggcaagtgatgaaatgattcaaaaccctgtggtaagtgcggtg

SEQ ID NO: 20034 - DNA, 201 bp, Bos taurus
tgtacctggtggcttccagggtctgtttatgggatggagattgggcctgagcttctgtggtgggaactccttggacttgttagtccaagtctgaactgctagactaacggagaatgtcaggccccagggaatattaatcagagtgaggtatcccagaagtccacatctcaataccaagacctggctctgcccagcttactg

SEQ ID NO: 20035 - DNA, 201 bp, Bos taurus
ctggaccaggcactgctgagagtagggatgcaagaaatagaggaagtgctcagaggtactagggatgaccttgtcacctggattctatctaggccccctgtgtggtatgtcctgccagtgcttatctggccataaacaaataccatgccattgaaaccctgaaatagtgagtctactgaggctctcacattttcatcacgt

SEQ ID NO: 20036 - DNA, 201 bp, Bos taurus
ccagagaggtggccactgtggcccatctcataacaggacctacaagaacctcacttggagtgaccaaggagcatggaaccagagtgaagggagcctatgatgggaggcagtgccaggccatactcattgaggtcccacaggcactggcagcccctctttggaaactgctctgcttctttgcactctgggcctatgatggga

SEQ ID NO: 20037 - DNA, 201 bp, Bos taurus
attccagtggtttctaaatctatatatgtatataaatatcaggttttcccagcagctcctcttagtttgtcaagagcatatttaacacatacaaaactcagttcaaactctatcccatacaatttgtctgttccacatttttaaatggtgactatccatgcatttgcataggtataaaacctacgagctattcattttcat

SEQ ID NO: 20038 - DNA, 201 bp, Bos taurus
atgcttgtgacaagcatatacagtgtctggaagaatagagttttttcccctctttaaaaaaatccatgaggataggaaattctggcataagtaatataagacttatatgacaattcatcagcagtataatgatctctactttttctgtacatcaactttggcacttagaattcttctgtctgaatccaagagaaagaaaga

SEQ ID NO: 20039 - DNA, 201 bp, Bos taurus
tttatcgactaatttattcattcttttaacatgcaattattgaatatccaatgtttgacagtgacaccaggattgaagccattaacctaaccttgaatttgaaaaaaaagaaaagaaagatacatatgatcgtagaatgatactgttttaggtcttatcaataatctacagatactattttatgcagccaagtttgaaaaa

SEQ ID NO: 20040 - DNA, 201 bp, Bos taurus
cattttatgaatttgttaaactacaatttatcttctatcctcattttctcaacaacctaaaacttttgaacactcattcctttccaaatttaatcaaaatctgtgggaaatgttagcacaatcaaaataaacatattactttaaatttggtgtctccttagctctctgattcactgtatctatgttttaagctcttggcct

SEQ ID NO: 20041 - DNA, 201 bp, Bos taurus
aatcctgatttttatcaggatataaagattaagagtgtccaaatattcactgtcaattatttgttaaaatctattaagaatcgagtattatactaggtacagtaggtgatttcaaaattaagaaactttcctagatcttatagatctcagaaacaaactgagtaaaatttcaggcttgtaaccatttaatttcagagctct

SEQ ID NO: 20042 - DNA, 201 bp, Bos taurus
tctctgataaagcaggtaactgtagacattttgactgatgttgtgactgtcttctgagttattgctttctttttacttaaccattgtgatttccccgaacaacattctttaaaacaacggaggtataaactactccttaaaattagtggttaatattttataaggtatagcatttagttgcttgttttatttttctgtaga

SEQ ID NO: 20043 - DNA, 201 bp, Bos taurus
ataacaataataataataataaagtttgaaatacagtacaaattacccaaatgtgacacaaagtgagcagatgctgctggaaagatgtcaccaagggacttgtgtcatgcaaggttgccataaaccttcaaatttgtaaataacgcaacatctgcaaagtataataaagcaaagcacagtaaaatgaaataagcctatgct

SEQ ID NO: 20044 - DNA, 201 bp, Bos taurus
agcgagagaagtggtcaagagtatggcatggtaagaaagttctgtgataatcgggaatattgctgtttgctttcttttcaacgttcacaaccaacaaatacagctatatggcttaattattccctagggtctcacagtcctaaatgctaaattaaattatgacagccttttgttttcagctcagaatggtttctcagaaac

SEQ ID NO: 20045 - DNA, 201 bp, Bos taurus
caactctgggggacctcagaaggctgagtcaggagagaggggaggctggatgctccactgactcatgcctcttccagaacatcagccccatcacagctgccgaacgaggaggagatgctgaatatcatagctttcaagcagaggcctgatacaagaagcttgccctgcctccacctgagacaagaacttctcaaaggctca

SEQ ID NO: 20046 - DNA, 201 bp, Bos taurus
gctccatctcagaggcaaaaatgtttcaacctttaactattttctgtaacagttttccctcttattccagcaaaatgtacatattcttattttccagttactttatttcaaatgttatctacagatttcctgctctgagggtataggtctcttacaactcaaccctactgtctatctcatcagtcctatttaattttatca

SEQ ID NO: 20047 - DNA, 201 bp, Bos taurus
gatagataagatttaaaaataggaaatgattgtgaaggttgttctcgattagggaaatctgagattgatggtgtatgcaaaattgtgagttgaactccacggaaaatagtgaggtaaatgcagctgaggtctaattccatcaaaattctgggtctagatcttcttcatttttcttctgtttgccaggcaaactccatggta

SEQ ID NO: 20048 - DNA, 201 bp, Bos taurus
agaaattcagaacacagattcttgttttgaaatcttaaggtttccaattagaattctggtttcaaagaggttactttcacgttctttttctttaatctaatggagtctaacatttcacagactaaatgggcattcttaaactaacctggcataatttaaatcattttgaacatttgttaacttgaaaagtaagattaatat

SEQ ID NO: 20049 - DNA, 201 bp, Bos taurus
aactttatacctaatcattttttaaaaaattatataccataaaactagtcatttaaagggttcatatcacaaatattatagtcagttcagtccttcagtcgcatctgactctttgtgacccatggactatagcactgagggattctctgtccatcaccaacttccaaagcttactcaaactcatatccatcaaatcggtga

SEQ ID NO: 20050 - DNA, 201 bp, Bos taurus
cctaagatattccaatctaaaatggcctaccaccaaagcagctgcactccgttaaatttacatggtttacatgggaaggaaaggaaagaaaaggagtaagcaagcaaaaaggaaaagatggaaggaagacaagaaagaaggaagggaaggagggagagagggagggaaggaaaaagggagggaaagaagggaggaaaacca

SEQ ID NO: 20051 - DNA, 201 bp, Bos taurus
cttaggaaacaaaaaaatacattttgcatattcttgtcctaaggaacctatgtgtatattagcaccagtacatcttttttgttaaatcaagagcataagagagtaaatttgtgatttggattccacagtctcttgctgtctcaagggcatctttctttcagttatcctttccctccactctaatattaagttattctctcc

SEQ ID NO: 20052 - DNA, 201 bp, Bos taurus
caggtgctgagatttttaaattgtacagtctcagttttgtatggtgagagtctcctgcagttcatggccttggaacacaaggtcacactccagttgtcatgttagtgtcctgtgtgcccatgtgacttccttagatgactcccattggtagaaacctacagctctcaatgtttttgttcacccagaagatcacttcattcc

SEQ ID NO: 20053 - DNA, 201 bp, Bos taurus
taagtaagtcctctcttaccttgtatacttctattgtacctttccagactttagtcacaccctttcagaataaagacactcagttttcacaaatgaaaatgatcttggaaagagctagaaggtggggcataaaattgtttcctttttcagaccccaccccctcaaaaaacaaccccaacaaaaagagaaacagtatgatct

SEQ ID NO: 20054 - DNA, 201 bp, Bos taurus
atattaatttgggggcctttttctccccaaggagaaaggaacaagggaaaaatttattctgagggggtcccttttataaatgcacatttagggttcaaaattgtgaggccttttgtttgttatggattaagcttccattattttttaaaaatgtctgtcgttggataagctggtaggagcacttgtgtgtcgtcaattatt

SEQ ID NO: 20055 - DNA, 201 bp, Bos taurus
gaacccacttttgttgttgcttctgtggtgcgacaccatcatggccaccaatctgggtcaaggtcccaacccagtcactttggggtcctaggggttcccagacagtcctcaagcacatgctttgggccaacaggccaattgttcagcacccacacctcccaaccatcatgcgtttgaatgtgcacacactaccacctagca

SEQ ID NO: 20056 - DNA, 201 bp, Bos taurus
agttttcctgtatttaggaagcttatgctaccatgtatccccactgagtaagtcagttttcctctattttaactgccacaaaggcatcctttgtacaacacgccagtatatactttagttccacaattgagaagactctcaaacttgcctctgttcttttcttaatggctggacaaatgtctaagaaataaagcttagcag

SEQ ID NO: 20057 - DNA, 201 bp, Bos taurus
aaaatatatataaattttcaattttcagatgactgtaactgacttttacacttattcatcatgcagacaatatcactggataagcccaagatatgaaggcgtgcaagactctgcagaaacttaacatagtaccttggaagttattttataaaatcattcaaagcagttgttttcatgcattagccttttactcataaaaga

SEQ ID NO: 20058 - DNA, 201 bp, Bos taurus
ataagtatagcttacaacagtaagactaaatttttaatgtagagattatacaaacatttgattgtatgagaagccaccttgggaattgataacatttttttaaatgatgtatctattgcataaaaccagattggattgataatgccccttttggcagaatcacagaatcctgattgagtaataaaatgatggtcttgtatg

SEQ ID NO: 20059 - DNA, 201 bp, Bos taurus
gtggaaaatcagagttacttcttttccttggctagctcaacttttatttttctctactcctcccaaagcaaatatcatttctatggcttcttttcaggcctaaataaattgtggagaggagggaaaagaggtttatggagaaggtaaggagaaagcagaaagaaaagaggaaaaaaactctggaaggaaagagaaagagtt

SEQ ID NO: 20060 - DNA, 201 bp, Bos taurus
ttttgttgtgtggaagagtaaccaaagcctgagttacatagctcattttccagggctggtttttccaccactttatcctggagttagggaaatagtacttagagaaagaggttccattcaacattctttggctcctaggcaatgctctgggccacccccattcatggatgactttcacctcaacatcaaagtagtgcttct

SEQ ID NO: 20061 - DNA, 201 bp, Bos taurus
gtaattttgaatacttacagggaaccaaaacccgtaactacagttaaaggcaggtgtgactttgtatattcactggcaactggttaaccttgaaaacaattccaagcaagagaaaactctaaattcttagaaaactctaaagcatacctatatcccagctttgactcaggcttttcacaattataactcaaccagatttct

SEQ ID NO: 20062 - DNA, 201 bp, Bos taurus
ggtcttagaagacagagaaaccgagaagaaaggcatcaccttttcagtgcaccaagcaacattaatgccactcgacaggagggagcagggggcctgtctccgcgtggagaaggaagagaggaaatggaaacccaccaggagccacccaccacgtttaactggtcctgcgccagtatctttgcagctgtcactccgggaagg

SEQ ID NO: 20063 - DNA, 201 bp, Bos taurus
gagaactgtatggagcacaacttctacatcagctttggtcctgatgaacatctgccttgttcaaggtcctgttactgtggccctgtttctggcacagaactcctaaaactcttgatgagtacaataaaaagtgtcttttgttatgctaatgacatgacttttggaaagtacaggataggggccggttgccagaggacccaa

SEQ ID NO: 20064 - DNA, 201 bp, Bos taurus
tgatttttcctaatatggcctgtgtcctctctcaccatcaccctttgctcctctttatcattttaattgcatttctctgaaccttgtccaattccaaactctttttctcaaggaacaaggccaggaacagcatatacattccaggtaggaacaccggatagctctggacatgttttcagtctggcttcttgtaaccttccc

SEQ ID NO: 20065 - DNA, 201 bp, Bos taurus
caaagagttggacacgactgagcaacttttactttctttcacttttcatgaccagtgaaggcaagctgccactcaaatgtcacaattttaacaccaagacgttgccaaaagagcagtaagaaaggtaccaagtcagacccaaggtctggggaaattttcattgacttctaccttcaaaacccaagttcgttgactctaaga

SEQ ID NO: 20066 - DNA, 201 bp, Bos taurus
ttaccaccccagccagttttgggccactgtacagcaaaggacacgtgttgcttctctacaatcatcactaccagcatgaattccttctgcagcctcagtatcctcagcacctccactttcttaggccctatcacttgtctctaccaagcaacagtattaggtgagttgtggtctcaccaagtagagaatttctctttactt

SEQ ID NO: 20067 - DNA, 201 bp, Bos taurus
tgcacactgtctctctccatgccagcttgttgtctcgacaaatttattttcaatggcggtaggacatatgcttataatttcaggagtggagccacttgagataaggtggaacttgtcactggaaaatgagctccagggaagttgtttcctggccccgtatttcaagataggcttgttattctgctaaaagcgcccgaatca

SEQ ID NO: 20068 - DNA, 201 bp, Bos taurus
cttagttttctgaatgttaagctttaagcttatcattattaaaagtaactttggaggaggcataattttaatatttaagaaaaagaaaaaagagtatttcctatatgtgtcagtactgttaagcactttcatttctttaacaaattaaaaaagctcaaataaagctatcttaaataataaaggaaatgaattcatataatt

SEQ ID NO: 20069 - DNA, 201 bp, Bos taurus
gcacctcccccacccccccataacacataacttagactctgtttcttgttttcaggccctgagccagctacactgtcttgtcaccaccattatcagcagaaaggaggagacaggcacagggtggcggcctggctgacccaagactgaggttagaatcagctgaagtcaggcagaaactgggagttagcaattttagagggg

SEQ ID NO: 20070 - DNA, 201 bp, Bos taurus
cagaaagaaatggctttgaaatagtatataatctgtgttctatttagataatataaagtttaattttattgacaatattttatttttgatgctagtaaaatttagtaatggtgattttcaagttccctacaagagtacgaaagggccttgcagatttaagtaacatgatttatgtatgatgcttcgtcaagtgtctgggat

SEQ ID NO: 20071 - DNA, 201 bp, Bos taurus
cgcagcgcgctcgggttgcgcgctgtagcgcgggggcgacggcggcgcgggctggcgggcaggcaggcggtctatggagtaatgacaaacacatttggcctcgagtgaagaagtcgtcgtcgcctcgcattccagcaactgggatttgaggaatttcgaactgcgctccaaggggccctcattgtgcgcggtggtctccac

SEQ ID NO: 20072 - DNA, 201 bp, Bos taurus
tatatataatttaaagttatgctaaggttttagcatttttgtctttagtttaacagtataaatgaaagcaatcctgtttaatttactttctcagtgacatcgcaataggactctgtattatggttttagtgaaattagtagaaaagtgtaaacattatttgagttagctctcagacccagcgtttaacttaaagttgactg

SEQ ID NO: 20073 - DNA, 201 bp, Bos taurus
gagttaggaccaggccctctatttctttcctgcacccctcctccccaacccctttgtgtctagaagagcactgaacacgcagtaggtgatgttttgaaacgttgattgatggggagttgggggtgttcacttgggccatctgcaggtgggctggggaggaggggatggcgtcccatggcttgcatctatgtgtctggtagg

SEQ ID NO: 20074 - DNA, 201 bp, Bos taurus
ttctcaggccttctggctcagactgaattataccaccagctttcctgggtctccagcttgcaaatggcagactgtgggatttctcagcctccataattgcaaaggccaattcctcataataaatcattctttctctttctgtctgtctcaatattatatatatttatatgtatgtgtatgtgtgtgtgctcagtcacttgg

SEQ ID NO: 20075 - DNA, 201 bp, Bos taurus
gcctgtttggttaaaaggatgtaattagttgttggtcacatccttatgaaaccatcacgtgaagtaaagataaaggcagcttcactatgctagggtttctgcctagctttgttcaggattatcatcatctcaaagtagacattctctctttttcactctatattaattaatttacttgggggacgcatagttgaattcctg

SEQ ID NO: 20076 - DNA, 201 bp, Bos taurus
tagaaactctttttaaaaggacatattcaaagagaagcatgtaaaaggaaagcagtcctaaggggggggaaagcatttattcaagttggttttgaaagcaattatagtaattaaagtcctaacaatgtaaaacacaaattgaacaccattcagagcgccatctagatatttatttttggggcaccgaatggtttaaatgta

SEQ ID NO: 20077 - DNA, 201 bp, Bos taurus
gaattattaattatggggacaaaagcatcagttacacaaatcccacagacctggggttgcaggcaatctattttacattaaaataatatgctgacccaaagtcccttggggtatctgcaattaagccaagttttctgccactttatagcaaggaacatttttcctccaatattcaataacataaccctcatttccattgag

SEQ ID NO: 20078 - DNA, 201 bp, Bos taurus
gccgggctattctctcctgcgctgtggagactgaagctcctgaagaaggaagggggtagaaggatgctgcctggtgaatgctgcttggataccagcaagaattgaagcttggcttcttttcaccctttaaaatgtggatgggctcacgtcttacctgcctgctatgctcaggaatgactctcaccactggacagccccgtc

SEQ ID NO: 20079 - DNA, 201 bp, Bos taurus
gttgggtcatgggtggtgatccatgagccagacgagaccccatccatctctgacacccatcgtgcaggggtgggtgaggcgtgaagagtctggtgggaggtgtcatatttaggatggtggccttttagtcaagtagttgcacagggaagaatttttaacatcttacataaaattgagcactgtatttcattaaagctagct

SEQ ID NO: 20080 - DNA, 201 bp, Bos taurus
atagagtatgccaactcacaactcagtgaagttagtaggtttttttttagattttagttgaagtggtgaagagatattgtattgatttatgcttgctacatctttacacattcaaagataatcatttatgcttcctctaaatcttctttttgcctgggcaatgacttctttaatagactttttatattttttattatgtaa

SEQ ID NO: 20081 - DNA, 201 bp, Bos taurus
ctgatagtattttgaaatacccaaagggaagtcattgtatacagcaatccctactgaagaattcctagtaaaactaatggcagtgatggaatttactctttctctacttcgaatgttcactaactggaaaagtttaaaatgtggacgagtactataaaggtcaaacaatgttacttatgacaaaacaaaagattccttctg

SEQ ID NO: 20082 - DNA, 201 bp, Bos taurus
ttccttctgccttgaggagttttggtgagtcagatatgagctcatctgtctaatatataagcacatagaagacaatcttctcatgggccctgaaagcattgcattgaaggcaacccaactgcctctggatggtccagagtgactgccctacctaggactgtgagctgcctggccacacaatgtcttttcttagtcttcctg

SEQ ID NO: 20083 - DNA, 201 bp, Bos taurus
aggccttgttactttgaaatgtgtaccttaagaggcgtgactcaatccaacagtgttggaggtgactcatcacacagaccgagctccaaaaaaaacacattggccaccaatctccacacatcatcccacgatgcctgttcctttattttattttattttttattttaattcaggagctaatcccaaacagcttcctctctt

SEQ ID NO: 20084 - DNA, 201 bp, Bos taurus
agcaaaatactccgtaggtctgtagattatctgtaaaccaactgacaggtatccaatgcagaccacgcggagacgtttcttcgcccctatcgctgccctcggatgatgctgtgaaaagtaaaagttcatcaggtgctgaccgggttcatgatagacctgcactgtgaattcctgaaagaccaattgcaatttatcattcct

SEQ ID NO: 20085 - DNA, 201 bp, Bos taurus
gatgctttgaagaccagggaaggccaggtgatgtccaggcaacttgcagagtcagaaagattttaagttgattcaaatagagaataggtaaagagacctcaaaaaaacccgtggtgggccctcgtaccataccaggtattgcagcaaaccaacattgtctttcaagtaaaattaactctgttaattgcaatttatgttgct

SEQ ID NO: 20086 - DNA, 201 bp, Bos taurus
tgtcagtatgctgagattttcaagtaggaagagctatttttcccccaaatcagagaaatggcatcacaatatgggccctccccttctaggcttcttcagagttgacaacttccaacaagctttagtgagagttgctcagtcatgtccaactttttgtgaccccatggatatatagtccatggaattctccaggccagaata

SEQ ID NO: 20087 - DNA, 201 bp, Bos taurus
aagactagtctgtgattgcgctccctcccggcgcatgcgtagtcagtgaccccctgcgggctccgactgccggcgcttttcgttcgtccctcccctcactatccctttccccggtgcgtctcggtgcgcatgcgatgtgctccgttaggcagctcggagctgcgatggggatcccgggcgccggaggagactcctgctccc

SEQ ID NO: 20088 - DNA, 201 bp, Bos taurus
ccaattttttaatgatacatttctacttgacattgtgatagaaactgtcttctttgatcacttaatcaaatgctaatcacataaaatgcacttttcaaaagacccccatgaactcagaatctctgaaaatgttacttgatattaagttaaatcactgagtatacctagataagaacagcagggttaagaaaaaacaatgaa

SEQ ID NO: 20089 - DNA, 201 bp, Bos taurus
ctcttttgctctttcatccctggctagctcctactgtcccatcaggcctctgatttgatgacttcctccaagtagtcccactggccctcataacaccttaacataaccccactacagcccttagcatacagtgttgtaataacccattttcctccatttggccactagactaagcttctcacctgtgtaccctggaggaag

SEQ ID NO: 20090 - DNA, 201 bp, Bos taurus
agcgagaagttgagagtgagggttgggaggtgggcaggactcaccgaggagctgcaaaccaaaataagaaatctagggagcagaaggagaaaagagagtgagctggagccaagacctcaggccaagtggaactggaggaaatgtcatcattggtaaaggaggacttggagaagaaactgtttaagccactctcacagaatc

SEQ ID NO: 20091 - DNA, 201 bp, Bos taurus
ttagtagtgggtaattattttgtgattcactggtttgtggtttttttttttaatacaacactaatatattggtgatactagttcagattttttaaatggtttgaatctgtgtattatactttggtaaagatactgataaaaatattgggacaataggcttttggaaacagaaatgctaactcatcctaaaggttaattgtt

SEQ ID NO: 20092 - DNA, 201 bp, Bos taurus
cagttatatagaatatgtttcagaaatatagagcagaaacctgaaagagaagcctcagtttacttctagatttctccttaatgttacctgcatacagccagctctttcctggtgagttatctttactcacaacattttaaacaccaaatgagactttgtttttgttttttttttctcctcctaacatccaaatacatggta

SEQ ID NO: 20093 - DNA, 201 bp, Bos taurus
tattataaacatattaactgtttccatctcaagaggtattttattgaagtgtactatgctttataatagtatttttaaaaacttcttttaccctttctgtagattttatcattttgaatatgtctttgaaagttactcttccgagttgccatgcttattgaatattttctctataagcactagtaccccatacgacagttt

SEQ ID NO: 20094 - DNA, 201 bp, Bos taurus
agggcagggctgggggagggagagtgggcctttggacagacgtccaccaccctccccaaacccaggtgctgacatctgaaataaactttccgttccaccagtctggcctgtttgttggcttttgagtggggagcatctggacaccaccaccatttggtaacatgggagaaatccccaggaagaatctgtcaggagaagaga

SEQ ID NO: 20095 - DNA, 201 bp, Bos taurus
aaagctctatctcatctcatttgtccccaggccaaacctttagaaattacacatcttcaagccaaacgctttctgtcctttagattcctgcaagagttaggaaaggcccatgggatcctcagaattataaatcataaacagccaaaagcacagtgagaggagacatgaagttcatgccccaagagtgaatcctgctgtaca

SEQ ID NO: 20096 - DNA, 201 bp, Bos taurus
accacctcactgcccaaggccatagtcctgccctcagaactaacctaggcacttccttcaaattccagcacatcttgactagctcccgttcttggttcttactggccatactgctacacattttatagactcagaaaggaaagttggccttagtcacttctcttcagatggagaagaggaaagggcagtgatggccaaaga

SEQ ID NO: 20097 - DNA, 201 bp, Bos taurus
ttttctcctatgagcaacccttcctcaaggcagtgaggccagagcccactgtgatggacggaagggaaaggagccctaagagagaaaaaggaagaaatccatatttgaaaatattatttggccacatattttatttgcatggaggctcatttctgttaatgtattttaggctgtctgatagcgtgactggttttcttatgt

SEQ ID NO: 20098 - DNA, 201 bp, Bos taurus
cacaaggaaaatgacttagggaagtggaattagaaggaaatgtgtctttctcttggtcatgttatcttttcaacagaagccttgaccattctgaaatggatattgacagtaaattgttactgggaggtgatggtcaaaaggaaacttaggcggtttttaacaccatctgtcatcatgactcaaaaggaaatgccagccaca

SEQ ID NO: 20099 - DNA, 201 bp, Bos taurus
ggccaaagactcaggctgtacaccaagccagagggagaatgctggcagtttagaggtgcatgcagtgggtacactaagacatagtccagcagggtcctccatacccaggcctgcaggcagcaccagcatatcaaacagtctgaaagctatgggcagaaaggggaaattggtagggctagttgggcttcacattgttgaaca

SEQ ID NO: 20100 - DNA, 201 bp, Bos taurus
taccaactaactgttagtgaatgaagcaatttacaagcaaattggaaccctgtaatttgaatacaacatgacaagcggcataatatagaaatgcatactagaaggtgaaaatttcctctcacatgtgcactgtacaaaatagtcctggctaatatttgactactagttttagtaaaaacactggcctgggcattcttgaat

SEQ ID NO: 20101 - DNA, 201 bp, Bos taurus
ttagaggcccacctacccatgaatgctcccaccaaggccctacactcatcttggtcctcctcaactccttgccttttttctgtaaggcatggtcctcttacttccttgtggcctgtgacactagtttataataaactcttaagagaatataaatgcaaaaggacttcccaggtggcacagtagaatctgcctgccaatgca

SEQ ID NO: 20102 - DNA, 201 bp, Bos taurus
ggacaactggtaattggtcattttattgaaaaagtcaattaaagcagggaaacaataacaaaaaatacatatcctaagcattttctcttaaaacagaaaacaggattgccaatctttttgatgtatgacacaaggcacatggccaggggtaatactacttacactaagagaacctcccttgcagctaggtatgaccacatg

SEQ ID NO: 20103 - DNA, 201 bp, Bos taurus
tttatgattgagagttttgttaatgtcatttgtttctgttgaggtttgctgtggtctctaggataaaatttgagttcttcatgctgtttaggcctctttatctttccatgggccttttccctcaatctgaaatgattgtgctgcctgtcccatgcctcctcaaaaacgggtaatagggagaaggtgttttttacttttttt

SEQ ID NO: 20104 - DNA, 201 bp, Bos taurus
gctctgtggctgttcagcagtggagaggggccaggtattggtagtgatggtctcctgggatgacttgtgggctctggctgctgccaggccctgctgggacaggtgaccctgcaacaaagaaatggcgtgttttgagtcgctgtggctttggaccttggcagatgtgggattggcaccccagcagcctgcctatagcctcta

SEQ ID NO: 20105 - DNA, 201 bp, Bos taurus
tatcatgaggttggaaaaagagtagtgtaacgatgtcacagaattcagctggtggctaaaattcagctagtgggaaaagggacaaaagtagttttttctacaagactagttcagtttataacttaacaactctttgggtaaataaaaattcttgctctggctgttttgtttggttgtgatgagcaaaatccaatcgacgag

SEQ ID NO: 20106 - DNA, 201 bp, Bos taurus
tataaacaggaagaaactaagaatgtagaagagggctcctcactgaggctaagatttagaactcagaccagaatgaatcatacagtttgtaggccccatgcaaaatgtccattcaggtatgacctaaatcaaaacacttatgattatatagtgggggtgacaaatagattcaagtgattagatctgttagacagaggcctg

SEQ ID NO: 20107 - DNA, 201 bp, Bos taurus
tttttctcatgtctaaagactattgtgacattatttcttagtacaagtctatggccaaaaaaagaaatcatagattctgctgacatcctatttattcttatgattttatgacttcaaataaaaatctgccgctgtcagtgtttcatcctttttttttttttttctcagcttctctgagtactgggtaggcttctatctccc

SEQ ID NO: 20108 - DNA, 201 bp, Bos taurus
tgcagtttaatttttgcctttgctgtatttgacattttgaggatctgtgaaggacctgggtggtatttcctgcaaatctgaaaggctatttatatcttgcatcaagtacagaaacagtgatagtgaaaccattgttctctcttctatttacagcctggtctgcctacagtaccattaaagatgaggagtatcaaggtgggc

SEQ ID NO: 20109 - DNA, 201 bp, Bos taurus
attcagtgatattgtcgttggtttcagtgggtatattacaaatctaataaatgccaatttgagcatttaatcaatagttattggacatctattggatactactatactaaaggcatatagataataccatggggcattttacaagattgtaaagtgtattttatttgcttttaaatgcttgcactaaaataggagagagtg

SEQ ID NO: 20110 - DNA, 201 bp, Bos taurus
gcaaagaaagtcacaagactagatttaagagttgtgtaaacagacacattgcaaaaatgcctgtataaagggagaggtggaatcattatggccttttgttataaacaattggacatacaaaggcatgaaaagtatttgcatgttgagacttgatacctccatcaaatccttcagctatcattctggaggatgagatctatg

SEQ ID NO: 20111 - DNA, 201 bp, Bos taurus
ctgcgattcatggggtcgcaaagagttggacacgactgagtgactgaactgaactgaactgaaatgcaattaaacactactgaattattttctaataattaggccaaagaattgccagtgtaaaaatattccagtgaatatttcaaaataagataaagcatatgcttctagtcatctttttagatgctctgagaaccgtct

SEQ ID NO: 20112 - DNA, 201 bp, Bos taurus
ttcatgggcttttcataactataatataacatttctcatttataaaaacatgactgaaataaactcacatcccatgtagtgggattaaatgtccagtatatccaagaacttcagggcaagccctactacctcagttgtttgcctcatgcaactcaaaaatcccagattgttctatggaagtttgcttatggtaaattagag

SEQ ID NO: 20113 - DNA, 201 bp, Bos taurus
tggtccctggtggtttagtagctaagattcagcattctttctgacacagcctgacgtctctctggctgagaatcaaaatcctgcttcaagtctctgcaagcctaggcctctgagatcaggatttcctttggcttttatgcttcatcttcatatcaacttgtcagagaaaataaaaattacagagatatctagtaacaggag

SEQ ID NO: 20114 - DNA, 201 bp, Bos taurus
cactgtggagacaaatcccctggcagtggcacttctgagatcacactgtgaagcagcagcaatgaggcgatgatgtagaagcaatatgcgtgagaaaatcactgcttttaaaaatataacttctttaaggatatcatctattttgttctctatggcttctatgtttagattcatatgtttagtgtaattttctaaataagg

SEQ ID NO: 20115 - DNA, 201 bp, Bos taurus
tgaatgactcaactgaattgacttagaagatgatataaaatatgggggaaaatgaaactagattagtggagtttgctggatgacaagctgatttaaaaaatggtctctgagcatatgagagttgaatgaagatttgaaggagatggccttctagataggaggagaaaggacacagcaagcagagggagcagccagggcaga

SEQ ID NO: 20116 - DNA, 201 bp, Bos taurus
catactgaacatgtaggcaagagctcaaagctgttttcttgttttagaaatgccttcaaattgatgtgcacaacatcctcaaaaaaaaaaaagtttctgagtccatgacctgttcttcaaatgtatgcttgaaaggaacttattctgatgtgatatgtaagtgctacattatatgaagtcatggaaagataccccatcaca

SEQ ID NO: 20117 - DNA, 201 bp, Bos taurus
taaataggacacatttagatgtaagaattaaaaacctgaatggaaaattaagagtccttaatgcatttagattccagaaggccaagaaaaagctagaaaaaccatgttagggaaggaggacatttgaatgtcaaaattaggttgtctgtatctcaatttattttttcatggaaaagtatcttattaacagctcatagtatc

SEQ ID NO: 20118 - DNA, 201 bp, Bos taurus
ttacctttccatatctttctaaagaaagaccacaccccttatactgtccttcttaatttaaatacagtttttctctaatgctacctccaaattcccagacatagggaataacctctggcacctttgaagatttattttataaattactttctatcaactgatacagtattggcaggcaactttttgtaacaaattataccc

SEQ ID NO: 20119 - DNA, 201 bp, Bos taurus
gtggatgggctcaacccctggtcagggaactgagatcctgcaagccacatgccccggcaataaaaagaagaatatctgttttttcacctttctcctaatagacaagtattctatgttacctactttccgatggtttcttctccagaaacatttttttctttcttctccatattactccttgcctccaggggcacatatgac

SEQ ID NO: 20120 - DNA, 201 bp, Bos taurus
attggttttggcaacagattactggtgatcaaaaaaatcattgttagtaaatcagtgttaacaaaaaccagaacaaagtaagtagaagagaaaatggacattattttttaaacaagataaaattgaatacacatattattattttgatccttcctggaaacaccactgtatgggagaaatggattttacaagccatcaacc

SEQ ID NO: 20121 - DNA, 201 bp, Bos taurus
ccttattgtctttcaacagcttgactctggaagttacagggatcatttggggagttgactcctgcttatgttccaccaaaaagcctgtggtcttgggccaattgttacacctgtccatgttctaattcttcatttataaattgtgacatagtagctctttacttaagtaattattgtatgcattaaacatgaattcacatg

SEQ ID NO: 20122 - DNA, 201 bp, Bos taurus
tgtctggccttttatcaatttctattgattaacgagtccaagaaggctggtaggtaatagctctacatttattgactgctgaacaaaatcacttaacctcacagagcaagtatccttgtttatgaaatggagataataatagggtttgtttattcataaattggccccaatgcataaggacaaggagaaagcaaagggaga

SEQ ID NO: 20123 - DNA, 201 bp, Bos taurus
acatttcttctctggtctttttttgttttttctccccacttctgacatgacccctccaaaagcaggtactctaaaatatttaatatatgttcttaacttatatgtatctttgtaaaataagtaatgacaatttgcatgtttgtatgtttacaaataatgctaaggccttgcattattttttcctatttgatatgttcagca

SEQ ID NO: 20124 - DNA, 201 bp, Bos taurus
ctaaaaaaaaaaaaaaaaaattcttcctcttacccatagtttgaggctgtctttagcataaaagatatggttgtaattagagtgatgtacagcacaagtatcaaattatgattattagtggataagggattcgcatgtagtattttttgtgttgttaaaaatgaaaattatatgaactgtctttgatagaacataatagaa

SEQ ID NO: 20125 - DNA, 201 bp, Bos taurus
cttagaatcatgtattttgagtcccccaactatcttcttcagtattgtgttgtgtatcataggaattttgcctttccatataaactttagagtttgttgacatctataaagtgcttagtagtatggcggtttagtcactaagtcacgtccagctctttgtgaccccatagacggcagcccaccagccttctctctccatgg

SEQ ID NO: 20126 - DNA, 201 bp, Bos taurus
agcgatttaccctttgcatattaagacatagaaatgtaatgaccaactgtcagatcaatcagcacagatttaaatattcaatattgaaattccaaacagtcctggttaaactctcaaattcatacttcaaaagactatttaaaataacacaatcagcataatatggggcaacattataaccagatttatcaatcagttaaa

SEQ ID NO: 20127 - DNA, 201 bp, Bos taurus
ccattgttgggttagtgttattccttaactgttctccttaccctgccactccttctctgatccatcatcaacaacaccacaggaataacttaaatgattatgttacccttggccaaaaatcttcagtgattctcattgatcttgagaataaacaatgcagaatcaatttgctctaatgaaaataatcataatgctttgtaa

SEQ ID NO: 20128 - DNA, 201 bp, Bos taurus
aatttaattaactaagcaccttctgtaggaatctcatgaagtataaagggagatacttggcaagattcatgactcaagcaatttggattaagaatgatagcaatacaataacattaaaatttcattcttaattttaacacaaatcttgataagaagcatatttttcaatgaggcatgaaaatgacaccacccttatagcag

SEQ ID NO: 20129 - DNA, 201 bp, Bos taurus
agaacaaatcactgatgacagctagacagtgattcagaaattgcatacatctctcaacccgcactctggtttgtctaatctcgctttgctcttggttccaaatttgtgattctttacagtaacttcacacttcccttaaaacttcactttgcttgctctggtttgctgctaatagactctagcattttggacactagtttt

SEQ ID NO: 20130 - DNA, 201 bp, Bos taurus
gatgctacagcaagctcagataaatgctctgctctgcttctgtccttcctccctctccaggggctgacgcaggctttgtgagggtcaaggtactctcttcttttcttcctcctttctgttgaaatacttgacataattgggaatgatatgtttactctttttgttcaatatcagtttaaactgatatttaagttagtgcat

SEQ ID NO: 20131 - DNA, 201 bp, Bos taurus
ccatgtgtagagtcatctcttgtgtgttggaagaggatgtttttactataagcaggtatagacaagggtttatttatgggctcacaatctgttccattgggcttgcattgtagctcagctggtaaagaatttgcctgtaatgtgggagacctgggcttgatccctgtgttgcgaagatcccctggaaaagggaaaggctac

SEQ ID NO: 20132 - DNA, 201 bp, Bos taurus
gaattttgtttatgtggtttatagagttactttcttggatttttaattcttgtttgtcttgttggtgtgggaatgccttctaagagttctccagccacatgtggtatagtcttacctggcttcaccacacagaacttatggccctgaggctgcactgccatatgaactttcctacagtccctagcaacaaagatatatgtg

SEQ ID NO: 20133 - DNA, 201 bp, Bos taurus
tttatatcatcagcagcagcaacaacaacattgttatcattattttctttgttactataacactagtcacattagcagtttgtactaaaatatttaataattctgtccagatactgactatatatgatagatggactgcttctaaattgctgcagtccaggcgttctctgttctggtctgtgtgtcaaaatatagtgaaaa

SEQ ID NO: 20134 - DNA, 201 bp, Bos taurus
agaagatgagatgagatgtcccagctggtgcaggaatctaggaaaaaagggcaaattccttcttccttcacattttgttctatttaggcccacaatggattgaataatgtctacttacctacattctttgagattggactgaaaactgaccttttccagtcctgtggccaagactgagttttccaaatttgctggcatatt

SEQ ID NO: 20135 - DNA, 201 bp, Bos taurus
aaaagatttaatgcgtggaacatgctgaaatctaaaaggccttatctcatgcttagctaattattttgacaggggtctaactgatgtgcacttttccatgcaaatgagtttgtggcaaacaggatgactgccatctccataaaaattccataactaattcttatctccacagagagattaagcagtgaaagttagcaatta

SEQ ID NO: 20136 - DNA, 201 bp, Bos taurus
gtttcctaaatcggaaataaatactgtcctaatctgctttagcttatatatatatatatatatatatatatatatatatatatatatatatatatatatataataccttacacggagttgcttaaacaacagagatttatttccttgcatctctaagctccccatcaagatactggctgactcacttcctggtgagagctt

SEQ ID NO: 20137 - DNA, 201 bp, Bos taurus
tcccagtggggtcctcctgaagaagcagtaagttttatggatcttccacagcccctctagctaccctttgcatatgttatcagcgatagattagagaaacatgctttttctcatcctcatcctctttctcatccttagttttggttttctgcaactcctctacttttactgtctgaaatcctattgaaaccaaagtagtct

SEQ ID NO: 20138 - DNA, 201 bp, Bos taurus
tgaaaagatattttctggagagaactgaccactggaattacttatttctccttcttaccctatacttttctgaatccccagggtaccatacttctaggggcattcagtaggaaaccatgaaattgaaggacaaatagaacaggggaaatctgaataatgagagacataagaccagcgataagaagaagaggaaggagttca

SEQ ID NO: 20139 - DNA, 201 bp, Bos taurus
tggcagtatctcccatcttcatttccaccctacagaggacaacccaccagtatatttcagacatgctggtaacttacttatcagtgcatagctcagtggtggtaaacgttctctgagctctgtcagtcatatgtaattgaaaacttgctgactgagtaaaattctttgaatctgctccaaattttctatattaacacttta

SEQ ID NO: 20140 - DNA, 201 bp, Bos taurus
taccctccatgcatagacgcaagactttttctgcctgtggcagatctgccccagtgagagttgagcgtgaaggtagcacagctgcttagcctgtgggacacagactgccttcaccataggaattatgaccctatcaaagtatttttttttcccagactcttgtagccagagatcagaaggcctctttagctagtctttttc

SEQ ID NO: 20141 - DNA, 201 bp, Bos taurus
attataatacagaatagctttaagcagaggcctctgggtgttctgcttacactagtagagatacaggtaaattataatctcccttgctgcagaattcatacgttaaacagtagtcatttctataacacaagtattggaattaaaatgagatttcacaacatgatcatttttggtatatcaggtttattatactgtgtggtg

SEQ ID NO: 20142 - DNA, 201 bp, Bos taurus
tgcagggcctggtttggatggaacccctgcagagcaccctggagcctgagtggtgtagaccaggaaagcacatgttgtgagctggagaaaacccagtgtgatctatactctgtgagcactccccacacataccagggatatttgttttcattgttctccctccccacaaaacaactgaacaagtgagcctaaataagtgac

SEQ ID NO: 20143 - DNA, 201 bp, Bos taurus
tctgcaaagtccctttttccatataaagtaacatttatagattctgaggattaggatttatatatttataacaattagattctctacacgtttcagtttataaagttctggctttcaagagaaatacctctgactaataaggcacaaggattcttaatggagaaaaatatacttttgaaacagtcataattttataaaggt

SEQ ID NO: 20144 - DNA, 201 bp, Bos taurus
aaatactgtcctttgaatttctctgaaactccaggttgtgcatccaaaaccaaataattcattatactaaataaattttattgtctatgatatatgaactaaggtgtatttatgagtctgtgtttaaaacacatttcagcatgtatttttcaaaacattatacttagagattataatttatcttaaaatcagggcaagata

SEQ ID NO: 20145 - DNA, 201 bp, Bos taurus
actttacccttaaagaagcatagaattttttcttgaaaaaagtcatgatattgcagctctttagccagatactatgacccataatatagggtttaactggtgacaaaccggtgtacgaagatatacatgaatacgggattgcttgcttttattcatgtcaggcaagtaagaagagacagactcagtttatacaacatacac

SEQ ID NO: 20146 - DNA, 201 bp, Bos taurus
atggtttaacccccagagttcctgaatgtgattttatttggaaatagtctttgcagatgatcaaagtaacatgaagtcactagctgttctaagtagtttaatcatgtccaactctttgcaacctcatggactgtagcccaccaggctcctctgtccatggggattcttcaggcaagaatgctggggtaggttgccatgccc

SEQ ID NO: 20147 - DNA, 201 bp, Bos taurus
aaaacaatatatcaatattttctcaaagacaataaaaattctcactctctagcatcctttatcaaaattaatcagtaaccataataattctataggatttattttctttattatgcctttgattacttaattacctgtacctttaccatttttctactttgtattcagtttctcctctctctacctttgtggaagctccta

SEQ ID NO: 20148 - DNA, 201 bp, Bos taurus
ctcacactggcagactaccatatccagttctcacgaactttatgaagtgaggcaggagaaacccacatgttgtctgttttggagtcaatgaggctgctaggaaaattggtccatcaggaaatactttctaagaagagatctgttggcaaaggttttcttttatattaagacaaaacgtaactctttgtagcttaaaaacat

SEQ ID NO: 20149 - DNA, 201 bp, Bos taurus
aatattagcttttatttttattgtgttctgaaaatattacattagcacttccttgtatcttctaaacagttttaaataaagttatctgaaaaagtatcaatactctctaatggctgaaaacaggaaaaatatcttttcccaatccttcacacctttttgtttctatgtccttttccatgtaaatttagattgtccattcac

SEQ ID NO: 20150 - DNA, 201 bp, Bos taurus
acatattccgcatgcccactagtgccagtgagtgagtggaactctacacagatccagataatttaattgggacaataatactatgaagtaagtgctattaataattccattttatacgtacaaggtgcctaagttcttacaagcagccagaaagaaagaatctggaagttcagcatgggtgtatctggtaacacagctaag

SEQ ID NO: 20151 - DNA, 201 bp, Bos taurus
gttaaacttttgataagccaccattccattttctacagcaaatgtaccagttttcattctcaccagcaatatacaatccattttgagttattttttttttttgtgagtggtataaaatatgggttcagtttcatttttttatatatgaatatccagttaccccaagcatcatttattgaagagattgtcttttctaaaccg

SEQ ID NO: 20152 - DNA, 201 bp, Bos taurus
attcaagacaggtgtttgtttcttttagcacttaaagaataccactccattgtattcacatttccatttctgctgaaagaatatttgctatcctgatattactcctttgaagataatgcacactcttctctggctgcttttagaatattcaatttgtttgatttccagcagtcttactgttgtatatctttaggtatagtt

SEQ ID NO: 20153 - DNA, 201 bp, Bos taurus
aggaggtctatataactgaatttcatggacgaacaagaatatattcttttttatgggaaattcttataccttggagtccaattgcaagggactgcatttcaactcttattactggggaaaaaataaaagatggattactctctgatctaacaaaactcaaatggctagcagattgagctctgatacctttgctccattttc

SEQ ID NO: 20154 - DNA, 201 bp, Bos taurus
tggcccaatgggtcccaaaagaaaactctctgaactttttcatctcctccattattcaagtcagtaggcagaggacaatagccaaaaccatgaagccacacatctaggaccttggccaggtgcataaaagtgagcatacggtgtgcaattaatcatggagagtttttccagagttctatacagtactactacaactaccaa

SEQ ID NO: 20155 - DNA, 201 bp, Bos taurus
acagtatttttaactatagtcaccatttggtacattatattcccaggacttaataactggaaatttttaccttttgaccctcttcactcatctgccatcccttacctctggcaactaccagtttcttatcagtgggttttgtttttgctttagattctacatataagtgaaatcacactgcattcatctttctctacctaa

SEQ ID NO: 20156 - DNA, 201 bp, Bos taurus
aagaatatactatggggcaaagatagcctcttgaatacatggtgctgggaaaactggacagctacatgcaaacgaatgaaaaattagaaaactacctgacgccatacacaaagataaactcaaaatggcttaaagacctaaatttaagaccagaaactgtaaaactcttagaggaaaacataggtaaaacactcgatgaca

SEQ ID NO: 20157 - DNA, 201 bp, Bos taurus
ggcccagaccactggccgttgaatgactaatcagtgttgtgcattggtccactccctggatgactctcggcaccaggccctctgggagggctacatggacaccctcccaccctccttggctgcctcctgtgtctctatcatgactggggccaccaccacacactgacaataaagttgccatgactttggaaaaaaaaaaga

SEQ ID NO: 20158 - DNA, 201 bp, Bos taurus
tcattatgaccttccttcttaaaattgtttttgctacatcccatagattttgtagaactgtgttttcattttcaattgcttgtggtgttttctttttttttaattattattgttgactaaccagtagattaaaatgtgctaaattgtaagaattcacaagtattcatgacataaaatatatttttcaaaggtcatatttct

SEQ ID NO: 20159 - DNA, 201 bp, Bos taurus
ctcctcagttacaactaacttccattggccaaagagatcagtaggacctcagaagcctttattgccaagtacctcaatggccctagccaacactggagaaggcaatggcaccccactccagtactcttgcctggaaaatcccatggactgggggcctggaaggctgcagtgcatggggtcgctaagagttgcacacaactg

SEQ ID NO: 20160 - DNA, 201 bp, Bos taurus
accaagtaaatcaaaatgattgaccaaaggaaactcagaagtgctgcataaaagtaattcaaactgtaatgagggcacgactcagcaactctctcactctttgagtccacccacgtgtccaacccctggtactgtcctttttttcctcttaataaatactttttacttgcttcactactttgcgtctttatgaaaattctt

SEQ ID NO: 20161 - DNA, 201 bp, Bos taurus
ttcagggaatgagagttgcatgtaagctaagccatgtaacaaagacaagtttacaaactggacttagaaacaactcagacttggataagtacacctccatttcatactattatcaagcatctaaatgagcagagaaaatgatgtgcttgaaatgagatcaggaaaatgttgtgccggtgagtgagcaggggggctgcctgg

SEQ ID NO: 20162 - DNA, 201 bp, Bos taurus
acttaggatttaccaaaacaaatctgatgggacattttcagtttggcctcccagaggtcttcaaattgtagtctcattcagtaatgaattcctcacaagcgcatttgtcccagcacaccccggcccccaccagccctcacagaactcctcacacaggagtgtggtgacggaggggctgtgtgtcaggagtgcctcattaca

SEQ ID NO: 20163 - DNA, 201 bp, Bos taurus
ggcaattatacagtttacagtaaagaagtgagatttaggaatggaacgctggggtgtgtttaagacggtgtttgtccggactactgaggaacacccaaacctgttctcaatccaacactcctgagaagatcaggatgagaaatgtgtacatagataatcaaaggtcaggtaactcttacagactgagacttcggctgcaaa

SEQ ID NO: 20164 - DNA, 201 bp, Bos taurus
caattcaagattcttgacttttgcaatggaaaaatttttttttctgtttttcagtctttgcattgattccgtttgatttcataatggagtggagtaaaaatagattttacccaccactgttaactgaatcctttgctgcattttaaaggtattaaaaaaaagtcaaattgattgtgatacctgatttgctttcccttgaga

SEQ ID NO: 20165 - DNA, 201 bp, Bos taurus
agttattagaccttgcagattttgtattagctgaagagaatgctagcctttgaggtgagatagatataagctcagtttagaataaagctatagtcacacattacttaatggcctttatctgaataccaaaaagttggggggaagacttccacatttctagttcatttttaaaaatctatttttaattagaggataattacc

SEQ ID NO: 20166 - DNA, 201 bp, Bos taurus
gctatttattacattaatataagtaaaactttctatactgatattctaacaaatgccctgagaatataactcctttagattcagtaagcctggggaaaacaaaataaaacaaaattcttgcaactatgcaaaccagaggctgcttaatttggtaaacaacaaaggtacctgagtatgcagcaccgattgacttcagaaatt

SEQ ID NO: 20167 - DNA, 201 bp, Bos taurus
attgttccagtttagcatataaagataactatgtatgtaggggaattataggctcatactacccaggagaaatttgagtaattttacaaagtgaaggaaagtatgatctctttattaataaacatgattgaattgctcaactgctgatttttccatgtgtaattggcaaagtgcaaaaaggagaacctcccatcttattaa

SEQ ID NO: 20168 - DNA, 201 bp, Bos taurus
gcttgtagtggaaaagacaatcaaaaggtgagaaaagacatgagcaggaaataagaaggaagatgcagagattatgaacacatggattcatagatattttcataataaaaagaagcatcttagattcaatcactgctttgtagaaagttatgtagcaaatactaaatgtagtattttcaggcttttgcagaagctttcctt

SEQ ID NO: 20169 - DNA, 201 bp, Bos taurus
agtatgtgatgagaacttcaaaatttggaattgtgtctaactgctccatctcttaagcgggtggaaactctgagatggctcaatctcagcttccttttgtgagatggtataattttgcctcccctcttatcatataggctttcttctgctacccctgcctgctttgcaacatcctagctttatcatcatgtgggcttgggc

SEQ ID NO: 20170 - DNA, 201 bp, Bos taurus
gtcattttaagatttattaaagaagttgagtaatctccaagcaaaccaatatgttatttgttgcacaagaatagtgactaagttttctctttgcttcaacggcaaagaaaacctgaaaataagctctgaatgtctatgctaataacttagcaatatgactttgtatcttcaatatcatcaaggtaagctttacagcagttt

SEQ ID NO: 20171 - DNA, 201 bp, Bos taurus
tactggaaaaaccataactttgactatacagaccttggtcagccaaatgcttagtatttggcacaaccctgactattgactggacataataagaacctagatagtgacaaagtagggtcactagagtggggtctagaccagtggttttccacatatggtctggagacacttaggagatcttgaaacactgccagggtgact

SEQ ID NO: 20172 - DNA, 201 bp, Bos taurus
tcacactgtattacagttccgattcacagatctgtttttatgtgagagtagagaattgtgtgtctccattacttggcatggccctgggattatttcttggttgttgaataaatgaaatgcctgacaaaagtaaattcctcatttaggtaattctaacaaaaaaaatgatactctaaaatgaatcatattgtgttgtcttag

SEQ ID NO: 20173 - DNA, 201 bp, Bos taurus
cggctcacccactccccctactgggtcgcacctggcggttcatttccctcccccagggaagtcgaagaggttgggagggcacctggagaggtccgagatgtggggcctgcgggcggccctgggggaggccggctgtgaactcttggagcccactgggcgagaatcagagccccggaccgctctggaattccagcttctctt

SEQ ID NO: 20174 - DNA, 201 bp, Bos taurus
tagctaccaattggtttagcaactaaaaacaaggaataattttttgctgagtgagtgaatgaatgaatggcctgtcctactgagatttctatgttagcttctccttcagtggatggtttaggggtggtattgcctgaagactagttgggacacagctcagagtgactgacaaacaacaaaagcaaagtaatgaatgaattt

SEQ ID NO: 20175 - DNA, 201 bp, Bos taurus
cagtcctggtataacccagcctagcaccggacatggatggccactgccctttctgaagcactgtttccacttgccctctgagacgcctctctcttggttcgtcacctacctggccggctgctgcttcctggtgcctgtggccttacttcgccccctcacctttccacactggatcacccccaggccaacactgccttccta

SEQ ID NO: 20176 - DNA, 201 bp, Bos taurus
actgctgctcttctcctggaaaatatgaacacaaagaccccatctgaaatctagagcacccctctaaactggagcaggtgtgttaaaaatatcaccacaacactgagtcttagtatgggatgacagtctcaggagctggaatttggggtgggaactgacttctttgaaacaatgatttctggattctcattttgagctctc

SEQ ID NO: 20177 - DNA, 201 bp, Bos taurus
cagaaaaaatggtcttaaagtcatcactcggtttcctttgccacattaattcaatgaagcaataatgacagagaatcagaaacgcgctgatgtgtatcaacagaagattaaataattatggtacagacaaaaaaatatcaacagctaacaaagatacattagatgaaaaaaaaaggcctagctttgaatcagctacttcca

SEQ ID NO: 20178 - DNA, 201 bp, Bos taurus
tctcacactgtacggactatacctgcccattctttatgaactgtacatccaaagtcaagttgcgtaagaaacttccaaaaacataatccagattccggccatggtaaatgtggcctttggagtcctgagccacaatactggtgcagaatctgggaaaagggaaaagtttaacatgagtgaacaacaaaaacaagaaaaagg

SEQ ID NO: 20179 - DNA, 201 bp, Bos taurus
tttttctctttttcaagagtgcatctcgtagcgccagctggaagataaaggaaaaatgatgtaaacatgatctagagaagaagaccactggaccagtgtttaaagtgaacctgtaaatatcctcagaaagtttcacagtccccaaaagaaaataaatggaatattaagtaaaagattatgaagaataaacctaaatataaa

SEQ ID NO: 20180 - DNA, 201 bp, Bos taurus
atagtggcattgagaaaaagatgtagtagaggtatgtaaaaacactgttttcctttatcactattcttcaaaacaagttttgaaaaatctgtgcacatcaaaggtaatttaaaggccctttcccttaccattagaaatctaggtgtaaaggtatgaagaacagtgaaacgagtcaaagactcggatctggctctatactgc

SEQ ID NO: 20181 - DNA, 201 bp, Bos taurus
ctcatctgctctagggagtagtgcagaaggagccctttgaaaagcatccagatttatgtataaaagacttgtttgttaattttagagcaattggtctgagtggcaaaggcctgctgaagtattctcctgggaaggaggctaatgggtgctttcatcatgccctcgctctgccttgctaaaacccacaggtgccactatttc

SEQ ID NO: 20182 - DNA, 201 bp, Bos taurus
caaaggctggtgtagaaacaggggcctaatcagagtctgttactgggagcagtccaagaggaaagagaacaggaagggggttatggtggatgctgagcaaagtggcctgattgatgcctcttagagggctgggggctacggcacaggccactggagggtggggcgccccatcatttcctggaagggcctttggaggaccgt

SEQ ID NO: 20183 - DNA, 201 bp, Bos taurus
tctaaaggctgatccatccattattaaagagacttggcctctgagcatcagattactgcttttcttgtaaaacagcttagtggcaacaaaatccatttcacctgtagacactgggttattttttttctttttaactgagcctttctattttgttttgtttcttgcttaaagatgagctgtaaataagtccatggaactttt

SEQ ID NO: 20184 - DNA, 201 bp, Bos taurus
cttttccccaggcctagaacagtgcctgactcttggtacatgctcaaaaaatatctgtgaacagaagtttctgacttccaggagtttaaaacccagaagaggggacagagcatggccagaaatacctatgacaaaggcagagctgtggcttgtctccaggcaggcagaaatggtgtggaggagaaagagagagattctatc

SEQ ID NO: 20185 - DNA, 201 bp, Bos taurus
gcccagactctcctgaagctatgttttatttggcccacagaatggtggtgctttttttacttgaattcattttcaacattgaaaactggaaattttcatgcgaaaattccagatggccttttttttttttaagaagttggagctcaaggaacagtgagcccactttctgcaaggcccaggcacttactccaatcccccagg

SEQ ID NO: 20186 - DNA, 201 bp, Bos taurus
ccctgctcttttgtgctctccctcgcttaccccggccaaccccaggatacactgaactgtgtgtgtgtggtgtctttgctgcagatgaaggatttgggagaagagtacttggccggtcgcgaaggtgtccagctcttcggattgttgaacctctacctagagcaggaacagagattccagcctcgagaaaaagggctgagc

SEQ ID NO: 20187 - DNA, 201 bp, Bos taurus
caggttagactcaaatcccactgtcaacctcagtagtcaccagagtttcctgaaaacaaagctatatcaagtcatatcatttcaaatgtttctggttttagtgctataatagataactgtgatgtctgcatgctgctgttgctgctgctaagttgcttcaatcctgcccgactttgtgcaaccccataggcggcagcccac

SEQ ID NO: 20188 - DNA, 201 bp, Bos taurus
aagagaatcaaatagtaaatcccataattctaccatcacatattgctattattatcatttgcatcagtttgatagggccaccgtaacaaaataccacaggcggagtggcgtaaataacagaagttaattttctcagagtcctggaggttcgaagtccaagatcaaggtgctggcagggttgttttttctgaggcctctctc

SEQ ID NO: 20189 - DNA, 201 bp, Bos taurus
attcatgcatacctatgtatgacacagtacagagtaatgccacaataaaattaaaataaaactggaattctggagaaattctagctgctctcaaaagtgggtacatccaacttccttccaaagtgcacagtatggaaatagagagaaagtaaagaaacatgataaacactatatcaagcaggtagtacagtcaacatcaag

SEQ ID NO: 20190 - DNA, 201 bp, Bos taurus
gagtttctgactttgaaggaagctataaatatctaaaatggaaaagtaaagtaccaggtagataaaagatcccgctcttaccctgacaatgactgaaatacaacaaagaaattaaaagaaaacgtgccaagtacttaaccttaagacaaaagatttcacagtcaagaagctaaaaatacggctaaaaagtcatcataattt

SEQ ID NO: 20191 - DNA, 201 bp, Bos taurus
aacttgccccaactcacacagctagaaagtgataatactgggattcaaatctaagaagttttgttccagagcaccactgcttaagcaaaattgctctattatttctctttaatgagaatgtcattaagtcttaaatattcagaggcttggagttcccatttcagagggtgcatttttgtggtttttacaagtctcaagcta

SEQ ID NO: 20192 - DNA, 201 bp, Bos taurus
ttgagactaagtttggatggggtgccaagccccttacactcatctcaaccaaaacatttctgctttgtctgcttatatattgcagttccacaaaagacttttttataaaattctaaaggtgggaaaaatactagattagaatgaggtccattacagctctcaatttgataagcttctcacttaatttatttggagatgata

SEQ ID NO: 20193 - DNA, 201 bp, Bos taurus
aagctttctgtcagtttcacaaacacagtttatttttctagagttttccctccccaccccataataattattcttgagtcattatgccatctaatgctaagaaggttctgtttgtttctaacatcggagtgaaatttttgtatccctttaatagtattcctagatttcttcttggctatatttctgagaagctgagtgtac

SEQ ID NO: 20194 - DNA, 201 bp, Bos taurus
agcatagactttagcagagactaagctctcagtatagctattgttgtgttactgtcatcatgcgagatgagagacaaatcaagcattaaaagatacctatgttttatagatacaaagatagatattactgttagtttatgcagatgcttgcaaggattagcatttgaaatgaagttcttggaaacccccgttttgcatcat

SEQ ID NO: 20195 - DNA, 201 bp, Bos taurus
acacttttagaaatcttttatgttatttttgaaagggacctaagatgaaatacctagactaaaaggaaatatataaggtacaaagttctagttagagttatgagcctgcgcagaaatagaaatgatagatgtgtgaaaaggagaaagagtgatgtgtgagttcagaacttttaatcagtggattccacacttcagcatttc

SEQ ID NO: 20196 - DNA, 201 bp, Bos taurus
cctcctctactctggtgtgcagcaggcagagccctttcctcctctctgcttagcttattttaggttgtggtacttcatatcagcattgagagaaggtacatgtgtattcttatcactggttctgaggagtttgggtacatttgttttaatatgtgtagactgtgcagtaaacattttctttttttttaagcaaaattactt

SEQ ID NO: 20197 - DNA, 201 bp, Bos taurus
tttcgttcagttttcttttaaacagactacaggcaacttttttgcacacctgacataaagaagtgctgccaaaagggctggttgtgtttaggagccatcattggctctttgcacttagatgatctttgtattctctttttctctgtctttcacagctgcaactgtcatgcattcccccggctcatttggaattctctgagc

SEQ ID NO: 20198 - DNA, 201 bp, Bos taurus
ccttggagaatacaaccattctggttaccatggtaattgtatatgggacccctattctattttctatgactggtcatttatttggattgttatgtttttacattttttcaatgtattcagtacatactgtgtccttttaaaaatttcatatttggaaatatttttgaacttatacaaaagttgcaagaaaagcacaagctc

SEQ ID NO: 20199 - DNA, 201 bp, Bos taurus
aattgttcttcctgtattgtctttctgaaacatgcaaaacttactatgttgctgctttgctgatttaaaaaaagttactgatgtcttccctttgcctaccgaagtcactgcaatctggcctgactctagacttccagcctcttcccctgtacatttataactctgtccacatggaatttctctccattctctgcacacccc

SEQ ID NO: 20200 - DNA, 201 bp, Bos taurus
caagtactcatccaggcaaacatttggtgcatgatttgtttttgatacagttgtaatgaaattccattcttctctatggaacaacaggccagatctttagtgcattgctgcctggtgcccagtgggcagcgagtgcctgattgccagtaccactttttagcgcgtgttcatctgcaggatattaaacagattgccgtcctt

SEQ ID NO: 20201 - DNA, 201 bp, Bos taurus
tgactttgggaagctataccatcttgaagtccttgttgttttgaccctttgctagatgtgatccttgcacatctaataccactcctctttagatctaaagtcattgatcacttagaacactgacaatctctctaagtggactgccctacagaaggatcaataactccatcccacatggtcctagcttcttgccattcctag

SEQ ID NO: 20202 - DNA, 201 bp, Bos taurus
agcaaaatgaatggtaggttggctcaagacctgagtccgggcccttagctagcagaggggcggagggtggggagcgttggggtcactctggcgcctgggcaagccttccctcctttggggttccttgtagagagcttctgagatatagtctggggtgaagctgggacagctaggtgaggatgaatcgggacacgctaggct

SEQ ID NO: 20203 - DNA, 201 bp, Bos taurus
aaaaaataagcaaaatttttaggttctatatgataaatacttaaattgcaaaataatggctaccattctccactttgtcgtgtatccatgtccctttgcaatgatactttgcatctgctcccatcaagagaagtcactctgcctgcctctgaaactgagctgctttgtgacctgctttgggcaacatgtggtgatggtggt

SEQ ID NO: 20204 - DNA, 201 bp, Bos taurus
cttaaaattcttcctaagatgaacatctcataattccatctttaaagagctgtaaaatattaagaaccatacaactcaactctcctttttctttccttcaggtactctctttgagatattttatgcctgaaattaaagaggttgagatatatgaaaggtggagacagtggtaaacaggatgtgtttcctttgtacaacaca

SEQ ID NO: 20205 - DNA, 201 bp, Bos taurus
ttgcagttgtctatctgcgtttcttatctctcctacttgactgtaaacacctggagggcatggttcacatctgattgtctctgctgagtctctcacagcaatcgctgaaagtccaaatcctagggacagagagcgttatgacttattacctagcagaattgtacttgaggttctgaaattctataggaagaatctgaaatg

SEQ ID NO: 20206 - DNA, 201 bp, Bos taurus
ctttttcttagaaagaaacaccaaaagccatattgttttcaatcaaaaacaaaaagagaattaatggcttgacctcaatttcacacctgcattaacaattcaaaaagaacaatttggcaatcttctataagtagaagagcctatcactggcctgattcaattatagttaaaccaaggccaagtcaataaaaataaaagcat

SEQ ID NO: 20207 - DNA, 201 bp, Bos taurus
tgtggcacccggtctatgccacagcctggcctaaccagccttcaaggacagagcatcaaacaaaccataagtcctttggagtctagagaggagtgcaaacgtgtgaactgcatctatagcatggccaccattgcccacgattggggaaatagagggtgcacagagatgaggtcccccaacccaaagtggggcaagtcacgg

SEQ ID NO: 20208 - DNA, 201 bp, Bos taurus
tcaggcccgctgggctgtggtcacctgaaaccagggatgcagagatgggacccaaaacaaatacccagaatgctcttcctcagagaccactggactagccgcctcctggcagtcaaggccagcctcagctccaccatctcgggagattcccaccatcaggaaaaacagcccctccctctcctctcccctccccctcacttg

SEQ ID NO: 20209 - DNA, 201 bp, Bos taurus
ctcatggaccactgaggactttgggttggggtgcctgggagggggccaggcaagtgcagtgaccaggacagacttcagcgaggaatggcctgggaccctgggctggctggctgactcagctcagattcgcataagtgaaaaacagatactcatagaaggctgggtcgcaatctgaatatacccgtaaggacagcctgccgt

SEQ ID NO: 20210 - DNA, 201 bp, Bos taurus
atggtggcatctgagcagaactgacactgctgatcagggaatgtgtgccaacaggtaaatattttccccatggatatatcaatgatgagtatacacagctagagcaattgtctaacacaggaactcatgctaagtggatcttcaacaaggaaagcaatgtgttttttactgcttttattttgcatttttataattctatgc

SEQ ID NO: 20211 - DNA, 201 bp, Bos taurus
aatatttgtagtatattgtattcatgatatgatatgaaggatttgttttgaaagggtgcatattttaaattttctacctctgggattatcttttctacatattttgagattcctcattctcatatatatccagtttaacatttgaacatgtctgttgcctatataaccatttggatatagagtgttcaaaaatcactagat

SEQ ID NO: 20212 - DNA, 201 bp, Bos taurus
ccagtgtagtagtttctaagtaaaaacttggaatgtgaaagttggaaaaattaaaatgaggtgaactcaggaaggcattttactatagaaataccctaaacgtccacagtaaattgtggaaaccctttattccactagaggtttaacaagcatgtcctcctcaaaatgcctgtttattcttgtattaaaaataaacacttc

SEQ ID NO: 20213 - DNA, 201 bp, Bos taurus
ctaccagagtagccctaaagacatgagactcagaggcaattgaggcttacatactattctaagctaagaaggaggtagggtgtgggccctcaaagtggagaaagacaagtcgtaggatgaagaagagagtaaatgtttactctgacgtgcagataagtccttctgttattaaaaagttatctctggtaattactcttttgc

SEQ ID NO: 20214 - DNA, 201 bp, Bos taurus
tacaacaacctaatttgaaactattaatctctctgtttacaaatgacaaagctatttgtttctgctccagaagagagcagagttgggaaagaaaatgcatgtgagtcttgattaaccaagtgtttattacttgagaaacttgctgatcattgtggtacccacagcaagcagttgccttaccagtggaaaagatgcactaat

SEQ ID NO: 20215 - DNA, 201 bp, Bos taurus
ccagtttttcttttgagttttgtatctgagacacggctaaaaattttaaatgaaggctaaaagatctgtattcacgtctgtctttgtttatgtgtgtgtgcgtgtatattatttttgtgtaatattttaaaaagagttatatttagttgagttaaagaaaagtaatgtttatataaattaaattttcctaaacttctcaga

SEQ ID NO: 20216 - DNA, 201 bp, Bos taurus
tgggcttgcagccaccaaaagtggcagtttgtctacccaacactttatttagcttcctgctagcacgggtctttagtcgagataaaggggaagggagaaggggaaggaccgacttaattccaggcagaagccgctctctgggaccgccttcccctcccgcccccaaccaaccacaggataatcagcccatttttttgttcc

SEQ ID NO: 20217 - DNA, 201 bp, Bos taurus
gtaaagatgtagagaaatgtcatggaatccaagaaggaagtgtatcctggatccttaggactcaggaagcccattttctagatctgaaataccttaggaaccagagcagcttgcagtctcgccatttctttctctttctccatctctatctctttcatttctttgaggataatggggtcttttgtctccacttcccttggt

SEQ ID NO: 20218 - DNA, 201 bp, Bos taurus
cttcattcactcttctgatcagggaagggtcctccccagggctccacgtgaatacagtgggcttggaacaaacctccccacagagcagccacaggacagagacaaaacccatttggcggtggaagtgccttgatgcccccaaagggaaaaatgatgaaacatagtccttccaacgttattttaccacaatgtttctgcctt

SEQ ID NO: 20219 - DNA, 201 bp, Bos taurus
ctccctcacttcttctctcacaagatatccattagataacattcacttatttggaatgtttctaagtcacaagtttggatattgaagctacaacatccaccattgtctgctcttttggggggagggtgcggggggagggagcagaggtgggaagggcaatgaagcccaggtggggagagaatcaagattctgggaatggaa

SEQ ID NO: 20220 - DNA, 201 bp, Bos taurus
tagtactcaatgtgccatcagaagcagttccacttaataacctgtactgaacataaggtttaaataccattgtttaaaaaaaaaaaatcaaatactatacgacgacaatggccttgaactacattaagcagtttgaatctaactaaacaaaaatatcataagctacaatcattctcaaaactattaagaatactatgaaaa

SEQ ID NO: 20221 - DNA, 201 bp, Bos taurus
ccaaactcccctgagggtagcgcaaccttgcttctaaccttagcaccctcagctttcacactaccaaagcaatgtagctccctacactacatttatacacaggccatgcttctatgctttcatgtaaagtattacctcaatccacgcacagccaaggcccaaaccacctttaaggttaagacctttcagaacagcagcgtt

SEQ ID NO: 20222 - DNA, 201 bp, Bos taurus
cttggtactattttacagggccacttgagacaatttagcctgctagtgctctagtttcctgtatggtgttgtatcaaagaaaacaggcaacctcaccttctgagagatgtgccgaagggagtggcatagatttaaactccaaactcatagacaagttttatgattcctattctagtctgacacagccagaaatgatcctct

SEQ ID NO: 20223 - DNA, 201 bp, Bos taurus
attttgataaaacattcaataatattattttacattgggttaatccagtctgtgttattcttttgataatcctacatagatactgtctgaaaggtttgtcggtctaaataatctatgacttttcttttcctggattatgggataagcatatttcacatgaaatacctttgtttccatgatttcatagcatcttgtttttaa

SEQ ID NO: 20224 - DNA, 201 bp, Bos taurus
agcaaaatgcaatggaaggaagtgcgccagttctgagcaggcctccagaggtcctgtgtgctcaggttctctcttttggaggcttgctcagatgcccagatgaccaagcatggactggcctgccggaatatgagagccgtgttgggcgggactctgccaagtcagccagcccagctgaggccatccgaaactaaccagctc

SEQ ID NO: 20225 - DNA, 201 bp, Bos taurus
ttagcaacttatatgatgttggccatcaaccaattgcaaaaaatgctagaaaggccccggaggtctccttaaccccaagggtagagggggctggaagggggagtgggtctgagaaggagttataggtggtaggaggcttagcatatcactatttatccagcagtatggaaacatttcgagattcaggaaagggttgtaaac

SEQ ID NO: 20226 - DNA, 201 bp, Bos taurus
tcctccttggcactttggagaagaaatcactatgcaatcagcacgtatgaaaatcaggcaatgcatgcattagcgtctggccagtgagggaggggtggtaagtttcaatccttgcattggctagagatgctgttaatcccatcctcctgacatctctgcaaatgccttgaggtagcaggagggaatgagtcaggagacaat

SEQ ID NO: 20227 - DNA, 201 bp, Bos taurus
gaatcatgaacagaaagtatgtatgttgttcacttcatacattctgttcaggagaatcatgagcagaaagtgaatgtatgttgttcacttcatacattcaagggacaaaacaaatctgtcttccagtttcacgttgcctccattcacatggaataattgaggtacaatagagttgtatttgactcaaacacactttttttc

SEQ ID NO: 20228 - DNA, 201 bp, Bos taurus
cccagcagtgaaagcaccagctcctaaccgctggaccacagggaattcccaggagcaagtctcttgaaacaaagacactactagccaagacttgtaaacgaggccagcatgagttttggtttggcctaaggttaatgagggagaaggaaatggcaacccactccagtgttcttccctggagaatcccaggggcgggggagc

SEQ ID NO: 20229 - DNA, 201 bp, Bos taurus
ttgtgtctttctgatagtaagtcttttcccttagcaacttcctcatattgtcaaactcatgctgaattctcaatgtacaaaaattagtcatggagagatcatctagagattgaacttaaagccccgttcctttctacgaagagtcttggaccagttgatctaaatcagcgagaggtacttctctggagactcagtaaccca

SEQ ID NO: 20230 - DNA, 201 bp, Bos taurus
ggaaaaaaaaaaagattccaaacagggaatattgttaggcttaattttttttcctcctttgtttgttttgcctatttgaaggggtaatatgataaacattaaacaataaatcatgagtatgtaaattgcattattttagaagggactcaattagtatttttttaatgcaaaagggttgtaaaaagtgctcaataaaattaa

SEQ ID NO: 20231 - DNA, 201 bp, Bos taurus
tcctaaattccaacaggaaaaaaaaatgtctaagaaaatgcatatcaaccagcccgagaccagacccttaaacaagtcaggcgaaggaaaaatgagtacatctactataatcagaaataagactcctaactttatggaccacttgaaggaaaatgatgttcatggccagaagtcatgataaatgttgaaagagatactttc

SEQ ID NO: 20232 - DNA, 201 bp, Bos taurus
cttttgctctggggatctgctaacatttgcaatcatttcttgactctaatctggcttgcctctgctactgagtatgttgccatatcatgccaggatataatgtgttaagtactaacttaatgctaaaatagttaaaattaatttatcttttataagaattcaaaagaagataggacagcagcagaaatccagatgttaaaa

SEQ ID NO: 20233 - DNA, 201 bp, Bos taurus
tgacggcatcagaacttgagagagatgaagttgccacgtgtggtttcaggtcagcaacgtttttaggagggtagacggggggagtagaaacagaatgatatgcgtgcctgtgaagaagaaagaagggtaattgggtatttaatttcaatcatagtctctgttcattttcttcatcttctattactttaatgttgggaaatt

SEQ ID NO: 20234 - DNA, 201 bp, Bos taurus
atattatgcgcacatcttgcgcctccaaattctcggaaaattccttggaggagggagacaaaacaacaacacaggttaacttaaaacattctaagtcagacgaactcaaatctgattcatgtgtagaaagagtaacttaaaagaaggcacataaaacctacccagcaattttaccgcttaaagtaaaatacaaaatctcct

SEQ ID NO: 20235 - DNA, 201 bp, Bos taurus
ttcttttagttagcattaggaaggataagagaatacaaatgcttttactcaattatctttatgtggaaatcttttatctactgtagataaatttagacatacattaagagtagatctataaaaactggtaactcttgtttaaaaaaattagcacagaatcagttttaatatatattcaagtatctataaggaatatgacat

SEQ ID NO: 20236 - DNA, 201 bp, Bos taurus
atgctacagtatttttttagtctaaagcccaaaatctggtcataaatctatctattctcagacgtttttaagacataaaggccccaaattataaacaaaactcttagctcaacatcctcataatgcaaaatcataagagcttaagtttaaaacttcctctttgacataatcaatggaatagaactcttctaagcaaaaaac

SEQ ID NO: 20237 - DNA, 201 bp, Bos taurus
tccccatccaccaagggctcctgtaaggtcatattcagcaaaaggtcaagtctttccatgtcaagtgaattattgaacacgtgtggtactaaagggctagcgggctgaaaatactctgctgtttttcttaattagttgtggtggtttaggtttcttaaagcaggtcgtttatatcatggaaattcaggatggctcacacac

SEQ ID NO: 20238 - DNA, 201 bp, Bos taurus
tctgttcacttcttcctgatatactttcctctccttctttccctaggagtaaacactagcctggattttgtgattatcagtgtcatatgtgatggaggtccctgtctgcttccaaatcaaagcccagtagaaagtggctttagctctgctcactgctttgcatctcaagtccatagaaattacatcagacacctgttaggc

SEQ ID NO: 20239 - DNA, 201 bp, Bos taurus
agtatcttgcttgtttgggaagaacagtggtttgcattgcctcagacgtaacacattatttcaaagcaaaggcgataaggcctcatcttgtgaaccctacggaataagatgagggaaattgcaggcagccgttttgacttttcgcctctagtggacttcccacatggccaccatgtaaatcaaattgcattgttttgggaa

SEQ ID NO: 20240 - DNA, 201 bp, Bos taurus
attcatgctcacaggctcagagaaaagagattgtttagatgtgcaggccttgttaaccatgagcaaagtgaaatgagttggcatgacaacctgcaaacatactctagcaaaatagtaacagtaaaaaagtaaataattaaaaacaaaggaaggaagatgaaaacaaatgaaactagcctgtcaaatatagattgaaaaaat

SEQ ID NO: 20241 - DNA, 201 bp, Bos taurus
acatttgcataaacaataaatttcattcttttacaacatgttgtgggtgaataaatgacactgtaaatcccaaattaaacctgcagcaaattatagaagttatttttatcattcttaagactgtctttccattagaaagggacataataattttattatactacatactctgtgaaagaccataaacttttaatagactta

SEQ ID NO: 20242 - DNA, 201 bp, Bos taurus
aatatcgtcctggatgcagatgcaatcatgggagatttgtaaggcaaaagcaaggatggtaatcttctatcacctctcagttggcaggcctggtctcaaggagacctgaaattttcttctgaagcagtgaaaattcatgccatgcaccagattcctgggtgaggggagcatttgaagcagaggcattactggtctccaggg

SEQ ID NO: 20243 - DNA, 201 bp, Bos taurus
ttaatacagaatgacatctactgctttatttcatactgcagtataaatttaacccccaatttttagattcagtagatttggatagattcgtaagaaaggttaggaagagaagacaaacatcactttctccttcagtattcaacttttagtattgaggttgtttgggtttttccataagatcataggggaaaacccaaaaga

SEQ ID NO: 20244 - DNA, 201 bp, Bos taurus
taagtaccaaccgttctttcaatgaccatctctcgaggacttagatattctatattaggccataggtttacagagatattgaataagaaatagtctttgccctcaaagggaaaatagtaatgtaagtatcagtaatggagagacagacaaaaagcaattaataataataataatgaaaatacgaggatagtaggtctgtac

SEQ ID NO: 20245 - DNA, 201 bp, Bos taurus
aaatttgctttaaaacaattttaaggcaagttaacaaatatttgcattgtctaccaagtgcccagtcatatgggtaagcccaaggtgggtccctgccccaaagagaaggcaggctagcatgatggtcagcctacacacacgacacaattcaggagctgtctgctactaggtgcgtagagaaagtctcacacttcagcctta

SEQ ID NO: 20246 - DNA, 201 bp, Bos taurus
gatttccttccttcggcctatctctttcattttagtttacataaaagaaaatatatacacatgaatattaactttgaggaaattctagaaattctgcactacttgagggtggccagagaggaaagagattgaaatacccttctccagatccagaatatcttcaggagttggatcttctcaactctggggaaaaaactggta

SEQ ID NO: 20247 - DNA, 201 bp, Bos taurus
gcccactgagagcccaaatcctctttgataactcctgctggccatgctaccactgctctccaaatctttattacctgagtgatcctgcaccgaatccttatattttggcctaattttcccatttatgaaatggactaaattatatgactcctatctgtaactgtgtgaatagcgtcctagaaaatatatgcttaaatctta

SEQ ID NO: 20248 - DNA, 201 bp, Bos taurus
aagaagcgccaacttttgggcatgagagagctgcaatccctgcctccagctgggttcaggttaggaagggtcttggactggggtcagaacagttggacttcgagtcctaccttggccagctattctgtctttctctctcccagcctcagtttctcctccaggaaatggacatcataaataggcaggtgatacagcaactga

SEQ ID NO: 20249 - DNA, 201 bp, Bos taurus
cttttagtgataccaacatgaccatgtaaactgcctcaaaattttgttttgtattaagtgtgtgttcaaagagtatttgtaaaaccaaggcttttaaatacgtgtagaggcataccagagataccagagagttaatgtggctttggttccaggccatcaagataaagtgtgttccatgaattttttggtttgtcagtgcat

SEQ ID NO: 20250 - DNA, 201 bp, Bos taurus
agtgcagtgtacaaatacagtggaaagagaacacaggcccaggaatccaaacatccaggctaattctagtccgttcttgcctgtgcaaccttaggcaagtattccaacctttctgggccttggcctcctcgtttggcaaaagagagttataactccttccttgtcagccttgctgatttgggttgagagtctacaagagga

SEQ ID NO: 20251 - DNA, 201 bp, Bos taurus
gcattagggttcaagagggagagacaaccgaggcccctaagttgtttaggtcaaccttttcaaattgatcagtgcgactttctgttgggacttgcttttgctccgcccttggctcccatctcaacaagtttggcttccagatcactttgagaatctactatatctcagaactttctcactagaaaatgcacaccagtaaaa

SEQ ID NO: 20252 - DNA, 201 bp, Bos taurus
agaaggctaccaggatatggcaagtttccagtctttttgtaggtggtggtcacctggatatatacactggcaaaaactcatcaagctgagctgaacatctgagatttctatatggaatatatgtatgttacctcaattaaagattaaaaagaaattaactatttgaacctccccccagaggaccatgtacatctgtgtatc

SEQ ID NO: 20253 - DNA, 201 bp, Bos taurus
cgtgggtgagagtgagtgaaggggagaaaagagaggatgttggtccagccaacaaggcagagttagaagggtggcctcgtgggcaagtctggccaggccaagagcccagggggagagatagctcctaaactgttttgaatccacttctggtctcaaagccagagttcctgcagctgctctgtacttccgcctgtctggccc

SEQ ID NO: 20254 - DNA, 201 bp, Bos taurus
tgtgcagcagcgtagccaacggtaagcactgatgatgacagtgatcatctgacggtggccgtgctcagtcagtgcttctcttcatctggcctttgctccatgctgtgaggcatacagcgtgtgagtggttatgacagtgcactcggtctctccctgatgcctggaggcctcatgcccctgccgccccccaccctcccgggt

SEQ ID NO: 20255 - DNA, 201 bp, Bos taurus
tgccagcagtattaaacatcagcactcacgtattcctttaagcagggctggctcttaatgaccaggaggcactgtaaggccactaactacgacagaaggcacttgctacagcctcctggggcttgcttcttttatcttaacctgacaatgactacaaaacactctaacctatggtgggttgaattctggccccatacacat

SEQ ID NO: 20256 - DNA, 201 bp, Bos taurus
ctgactcttgtccaattgctcccacacctaggtccctttccactctcccctcacctctctgagccctgaagctggtcctcctgagctgcaccaatgagacacctgggttttcaggcttccacttgggtttgaccaatgagaggcgcctatgcaggctggagggccagcagaaagaacagccagaatatttcttcccagctc

SEQ ID NO: 20257 - DNA, 201 bp, Bos taurus
aactgacccttttagagcaagaccacctgttctgtttgtcctgattcctgttcacttcagctctgtgggcaaagacctcgctgaaaggacaagtctatccgagtgagaccttgatgttagacatacttctcaggttctttttagcagcccagcatccagacagaattttcacttgggaaagtgaaagcgttagtcactcag

SEQ ID NO: 20258 - DNA, 201 bp, Bos taurus
aggagccaagacttggcccagtgggagccagtatagggtgatgagaagaggcacctgagagagatgactttgccgtaatgccgaggaggaagactagagctgggggccagtttaaaaagaagaacagcatcaacagcagacttcagaggcatcccagagccaaagtcatgaaatctaacccaatcaagtatcggtactcct

SEQ ID NO: 20259 - DNA, 201 bp, Bos taurus
agaagccagataatgggttttatttcacaggcaagagatctactggtctgacattacaatggattccctttcccaataaaactcaaagacaccaaaaaaaaacaaaaaacaaaaaacccaaataacagaaaaactacctcattggacaaaattaccattctccttattttttttttttaaatgcattttagataatataga

SEQ ID NO: 20260 - DNA, 201 bp, Bos taurus
gttgtgtgtggcagggcgcatggagtggagtggggtgtcacaggccccctggagtggatggcatgcttgggggggatgggtagctgcaggggcatgacaggaatgctgctgctcagagcagaggcctcaagggaggcagaaacaatccagtgcttcccatagtctgggtcgctgattcaatctgggtctgcaccaagggct

SEQ ID NO: 20261 - DNA, 201 bp, Bos taurus
ataatgagaggccagtccaagtttacatagtaaatagcaaaactggatcttgagcctcggatttctgaatgtaagagaaatgtatttttcgctacataccggtttaattgattggccaccatatgttaagtgtctggatacttccctgatggtccagtgaaattcaccgtgtaatgcagaggatgtgggttctctccctgg

SEQ ID NO: 20262 - DNA, 201 bp, Bos taurus
ttgactcggcaggatctgaggattctaatagtatcttcaggggctggattccctctccttttctcagctagaattttctctgggcaaacttcattctctggtatgtgttctccatttgggaaaacatggcaaatggtagctctggggttaagttatttttatatttcctgtagaaaagagcagaccacatttctaataatt

SEQ ID NO: 20263 - DNA, 201 bp, Bos taurus
cagcagtttattcaaattagatttctgttgtacaaacatgaaattctgctaagtttcattttctgtctcagtgagtttttttgagtcactttgggcatttgttttatgtgattttagcgctaaactctttaaatcaacgcgtcttcaatcttgccttgttttctcaaattgtgtattaaatttgtgaggaggggtgcttgg

SEQ ID NO: 20264 - DNA, 201 bp, Bos taurus
tgactttaagtaagagagatttctcctaggttatctgggtgggtctcactaactcagttaacaagtgttaacggcagagctgaggcttcccttaagaaaatattcaacttgcagggtatttctagctcctgtctgagagttccagcctgccctggtcacttgtcctacagatttgaggcttgcttacccagccgccacaat

SEQ ID NO: 20265 - DNA, 201 bp, Bos taurus
gttatttatgaagtcttactggtataataatattatatagcctttttcaagtttgaaaacttttttactgcatgagggataaaagaattattttctctctttctctgtttttactcactccaagggcaagtcatatttgcattcaagttgaatttttttctcatctctaagttcactgaggatgtggcccataaatcctag

SEQ ID NO: 20266 - DNA, 201 bp, Bos taurus
ccaccagggaagcccaaaagaaatcaaaagaacataaagataaatagtggagcttgcttgcttttcaccccatttattctgttggtgacttttcaatggtgattttttttttccttaccctgtatatttttatgtcagactctgatttctgaagctttatttttagtcctcataaggaacagcattgattttcatgctatg

SEQ ID NO: 20267 - DNA, 201 bp, Bos taurus
ccaaggaattctcagaatgctttctagttaatgacaagttctggtccactttcttcaaaagacacctccaaaccacacctcccactgacaaaaaaaaaaagggggggggggagaagaagaagaaagaagcactatgtaattaaatgattcattcaagagagctgcatctccagaggagggatgtcatctgttatctgcaga

SEQ ID NO: 20268 - DNA, 201 bp, Bos taurus
ggttttccttcctacattatgctacaagatttaaatataaaaacttcatttgtgagcactcttttacttattagtctcacagatctaatgaaaagtgtctcactgcagaaaaagtggcattttcgatacataattgcaaaaagcataggcagacttggcttaggcaccaaaactaaggtggagcgtggtggtgccgggggc

SEQ ID NO: 20269 - DNA, 201 bp, Bos taurus
ctgcttgaggattcaaaagaaatgtaaatgagtagttggaaaaatttaagtgccagagaaagaaaatatgtggaagaacttattctattttatgggtgttgatatgaatgccaggtgcctcttcataaccagatagcctactgccttaaggtgttttaaatagctttaaagggatttattttcacatcaatatgatattga

SEQ ID NO: 20270 - DNA, 201 bp, Bos taurus
aatgtgccaaatggtttgtttacaaaagaatcattcttcatcaagaacctaaatcaaatcctctgactccagtatggtaaaacaaactacctttccccccgcaaactacctcccccccaaaagataaataaagctattttaccaaagcatttcagattttattcccattttcatgatacaaaaacatccagataaactcaa

SEQ ID NO: 20271 - DNA, 201 bp, Bos taurus
ctgtgtgtcttcaacacgaagggcagtgtcttcacctggatccttgggaataagggaaaaggaggaggaaaaggaagtgatggggagaagaagactacagaagttatgaatgaataaagaattattcattctttctaataatgcaaagaatttttcagtctgtcagaggaagtgcaatctactgctgttaaaactttaaaa

SEQ ID NO: 20272 - DNA, 201 bp, Bos taurus
cagaggagtggtgggtgcattttgggaaacattttctgcatgaggacccaagagacatttgtctaccaagtagtctggccattaaccagcctgtgaaggggctattaaattctgatccttgatgttcttagtgtgacaaatgtacttgtcccccaggacctggatgcttgggcctaggagctcaaagggatacatttgctg

SEQ ID NO: 20273 - DNA, 201 bp, Bos taurus
tttccatttcctctgaatcctgcgagcgttttctcaggatgtccagcactgtggcaatcaccagcatgggctatggccagaaaacttctctatttttaaatgacacacacacattattatgccccatcacattgtttcagtgatcaactttaaagggccctggcttacctcctcctggaataataaagcagtcacaggagg

SEQ ID NO: 20274 - DNA, 201 bp, Bos taurus
gagcaagagaatgctccggttccttcagcccctcataaaggcaccaatcccatcatgggagctccacatcccatggcctcatttaaattcaatgatttccataaagccacacctccaaacaccatgacattgaaggttaggacttggacataaggatgcacgtattaggccatagcaaaggcgcattgccgccatactgca

SEQ ID NO: 20275 - DNA, 201 bp, Bos taurus
ttggaaaacctgtgctgtgcgtacttcagagaaagtaatgtgtgatctagagcagatgctctcagactccttaagtcagatgaataaaatgagcagcagctccaccatggaagtgtgagggttctgggagactgggaggtgagcacttagagtagtcgtctggatgtccccagatattaaccaagtccacactattgaaca

SEQ ID NO: 20276 - DNA, 201 bp, Bos taurus
gaatccggatgtgtctgcatgctgagtgagggaagagaaggataagcgagatgccaattcatctgtaacatgtgtcaagatcttcagattctcagacacttgcaccactattcatttttgacctttgaattattattgactcaagctttgcctattggattgtttgattgtccagtttctttttcggctcttagtgtcctt

SEQ ID NO: 20277 - DNA, 201 bp, Bos taurus
tggactttcccctaaaatcactgagactctaattcagactaatggtgtgcccaaattacccatctcagtaggtttgcttgattccctgcagatgtttctcatttcagtttccagaaacatcgctgctgggtgatttatttgctgaaatgcatgatcactctcttgcttttctgctgatgaatgatttattatcatccatta

SEQ ID NO: 20278 - DNA, 201 bp, Bos taurus
tttgaaccatcacctatgagaaaattacaacacttactgctctatatctaaattttctcttgagagttttcagggtgcatagatcctgcaacagagttgtattctaggctttaccatttccttctgaactctgagcactgaattcattttttcccccatgtggttgcttgctttcaatttaaggaagatctttctccccta

SEQ ID NO: 20279 - DNA, 201 bp, Bos taurus
actcccttgtcacagaggagttattacctgtcgtggcaaatagtagggccaggtccttcctgaagggagtatgaggatgctattgggtagtggaggggggggaggtgaacagcttgcatggcctgggttaccggtgggctccataagaaaatgtctgagcacagttcctcccaagagagcaaacaagtgcgtaagtatgat

SEQ ID NO: 20280 - DNA, 201 bp, Bos taurus
catcttttaatttcatggctgcagtcaccatctgcagtgattttatcttaggggttcataaatgactggaggaatatatgaacaaataaatgggaagtttagggtttcctgtgtctacagtctctttgctcttcagcaaagaatcatacagcaagataatgcatcttgctcttcttcctgttcttcacaaggccttgccca

SEQ ID NO: 20281 - DNA, 201 bp, Bos taurus
tcaaggcaagcttttccacccttggaaatcatataaatatgttatgatcttaatttttaagtatgatctataatttactttggaaaagagaataaaagataatgaagtgataattgctttggataaaatataaatgccacggatttttccaaggtcaagattttcccaattgtttgtttttctgcaacttatttcagtcct

SEQ ID NO: 20282 - DNA, 201 bp, Bos taurus
atattttcaaaattactcaacccaagaatcattttctcttacagcactgattgataagaaacatatctcagatggccccttaatcactcaaaatgactccaatactactccacctacctgactttgcttatacttttcttccctacttggttctgagttttttcctctgtgccctgactttagacccttgatttagaggcc

SEQ ID NO: 20283 - DNA, 201 bp, Bos taurus
aaaacactttagaggcaaatatgtcaccatttgacaaagcttttttttctttttttgattgtgccagggcttacaggatcttatttcccaaccgtggattgaaattgttggtaaaagcccagagttctaaccactggacaatcaaggaattttcactggtaaagatttgggaaactctcatatcatttcttttcacgctat

SEQ ID NO: 20284 - DNA, 201 bp, Bos taurus
cctatgtctataatatctgttgaagcataaacatccatggagaatatatggtactattctcgaccccaagagtgccatatgctgtgagcactcactaataaacaggaacaatcagatacttaacagaaacgagtagatatgaaaacacgtcatcacaacctccaaatatgctcgttcatgtacacacacgaacagtcacaa

SEQ ID NO: 20285 - DNA, 201 bp, Bos taurus
gataaagaaagactgatttctagaaagtgcatttgaaaatgcactggctctagtctgcatactttatttgtgacagtaaatattcctctcttaggtttaaatcaacttgttggatttctgtcccttgagccccaggtattcacaatctcaactaaagtataaaccttgcatcagagacctgggcttgttaacacaaagatc

SEQ ID NO: 20286 - DNA, 201 bp, Bos taurus
gctctgaagcttggaagatccagcataactattttcaggcaggagaaagtcagcaggcaggaagcctcaaggttctgaggcagtccctctggaatccaaagatagaaggactgagaaggaggagaagggggtttcaagagaggatgggactcctaagtcacccttccaggtagattctgccagagaaggacaggttaaatg

SEQ ID NO: 20287 - DNA, 201 bp, Bos taurus
ccatttgaaagtgactttaaaagtaaatttaaatgaaaagaaaataaaaactaatacatgctgtaacatggatgaactttgagaacataacagaagtgaaagaagctaatcacaaagaaacatattgtataattgtatttataagaagtacccagaatcagttctgaatattcactgcaaggactgatgctgaagctccaa

SEQ ID NO: 20288 - DNA, 201 bp, Bos taurus
tgtcatcactttacgtcaacacactaaatgcctaacctgtgctgttaccctttaacaggagccaaaggtgacaaggaagaatataggccacaccacaaacgacgtaagtgtctaaatatagcgtagttcagttccttagactatctttggaaaagacattgtttagataatgctaagactacagtttgctccagtagtgat

SEQ ID NO: 20289 - DNA, 201 bp, Bos taurus
aaccaggtcttaacatcattttttctctctcccagtcttggttgaagtagtatgccttttagaaatgggcctaaacctgtataacatggtggtgaggagatctacagctttttgcttcaacatccatgaccttggattttttaaagatcactatagctgggaatagtactgctctgtcttgtaatgcttaatgtcatattt

SEQ ID NO: 20290 - DNA, 201 bp, Bos taurus
agatccacatgcacacggtggggagggccctgagttagaccaaatacggactcggagaccaacaaagcaagattgactggccagaggaagccaggaagaactgcccccatataaatgatttaaatttccccaaagccttgactctctctaagcctggccctgtgtgtctatccacatgtacttttctgctcctaataaaca

SEQ ID NO: 20291 - DNA, 201 bp, Bos taurus
aatgcttcctcttcatttcttcctcttcccccttttcctttcttattttttatttttctctgcctctgccccctttcttccttcttcccaactcatgagcaagtgataagaagcggagtataagtaattctggaacttccctggtggtccagtggctcagactccacgctcccaatgcaggggacccaggtttgacccctg

SEQ ID NO: 20292 - DNA, 201 bp, Bos taurus
ataacagagtggcagccccctctgctccgaggtcttatctactctgatggcccagatgggctagatgccagtccatcacattgaggccacctgtattccacgaccaccctctgagtgactgtttcccaagacaacctgggacttggcttgagcacccccccaccccccctgctgcacacagacctctgctccttggccatc

SEQ ID NO: 20293 - DNA, 201 bp, Bos taurus
attctcattggcactagctcactcttccagaaaagagcccaagcaaacgctacacaggacgcgattcttgagaaaacctccgggaccagtctggcccttgactttccccagcaccagctcacacccatccacaccagggattctatttcactgttagaccacctatagccaagtctgcgcctggggcaggctggcctgtca

SEQ ID NO: 20294 - DNA, 201 bp, Bos taurus
gtagactgcccagcacagtgagtgacaccggggagagaggatcgattcatgtcatcatttccctccacgaccttatttacggccgggcgcactgccaacatgcatccgcgtgatttgaaggagacagtgctggctctgtctgataaagggggaacacgcaggtgctggatataatacagcgccctgactctaggggacgtt

SEQ ID NO: 20295 - DNA, 201 bp, Bos taurus
aatatgtttgaaattagctccatatacttttcccgagtaacaagaacatcacgtgctttgctgacttgaaaggaccctgaatctggagaagccggggctttagctgtcccatcagtgttttgacctaaggtgacacatgtgacatctctgtgtttcattttctcccctgtagagcattacactagattaccctggtgtcct

SEQ ID NO: 20296 - DNA, 201 bp, Bos taurus
taatggcacttagggcaaaaattacatactgattcagagcggttttagagtaaaagctttgggaagtctgagtgctttaagtggagattctgcatactggcgtgatccaaaggccccgtgccacgtttctttcatttcctcaatgcattcaactctgcttctttttagatttcatggtaaagttctaggtagtgactttga

SEQ ID NO: 20297 - DNA, 201 bp, Bos taurus
ttgtcaaaaaaaagagttaaaactgaatgataccacacacgtcgctcgagagcactggaaataggaattctcatatgctgagatcacttctcagggtctgcaagccccgacgcatgaagtggacagatgtctgcatccccgcccgctcagcacataccgccctcctggacataccgccctcctggacagacttgcccttca

SEQ ID NO: 20298 - DNA, 201 bp, Bos taurus
aaccattgctcaccattgtatagatttctagaaaatttatatgcaaacacaggtccttatgtatataaaagatttcagaaaaaaaagctttattttaaaatgtaagagtccttacaattcttcagatttaataatcgatggttacaagaacactgggtttttgctctatgatttaccccatgttgctctcaagaagggatt

SEQ ID NO: 20299 - DNA, 201 bp, Bos taurus
tgtgagacacagacgtcctggagagcgagcaccaggaagggacagaaggaagtaacgagaggagattcaaagagagcaacagggtcaggagaagagtgccagggaaaatcagattccctcggcctcccctccagttcaccctctacagaggccgcatgcacatttccctatcatccaattattaagattataacactgacc

SEQ ID NO: 20300 - DNA, 201 bp, Bos taurus
gagccttttattcaaagctccctcaactaccagatgcccacccccacatctgcgctgatctgccagaccctccatcaggacccactgcaaggtgggaggacggcggagggtcttcacttcctctggttaagcctcccccttatgcaaccattgcacactcccctgtactttattccggctccttgatgctttagtctgcag

SEQ ID NO: 20301 - DNA, 201 bp, Bos taurus
agcacgtttgccgtcgccacaggctcaagtctgaggacttgatgaaggcaacggggaggctctgacatggatttcttggaggtggagacctcggtgcacccgcggggtcctgttggccagcacactctctgctccttatgcaaagccagggcaaaaggtgaacggctaacatgtcctaaagggcagtcctgctgtaatgcc

SEQ ID NO: 20302 - DNA, 201 bp, Bos taurus
ctcctgcacgtcgatgctggcaacccactggaggaaggagaaaacaggtttggtcaagaagcagtcaggcatgacagattcatgctggagttggagacaggttagaggcttaagcgaaaacccactagcgaaaggacctagcaattgacctctagcatccttgcaaggctttccggctttggccagcataccccttcctga

SEQ ID NO: 20303 - DNA, 201 bp, Bos taurus
cctggcgtgctgcgattcatggggccgcaaagagtcggacacgactgagcgactgatctgatctgatctgatctgggcaggtgacttcacttcactgagccgtttcctctctgtgactgaggaaggcctaattcctgcctccaactagaggcaggaaaaaatggtaatgcagtgtggatgttgccaagcacactgcttgca

SEQ ID NO: 20304 - DNA, 201 bp, Bos taurus
accagtgccctcgtaagggccctgtgccctgagtgctgggaggtcaagggcccacgtcctgtcgggcttgcctggctgggaaccacctccccattgtgtactgacaagaacagtgccgagctgggccggcccaagacctggaggtaaacggagaaaatttgggtttgcccagacttcccaggggtgggacctgctcttctg

SEQ ID NO: 20305 - DNA, 201 bp, Bos taurus
gaagtcagtttgtattattggactgtttggtgccatttactattttaacttaacgaggatgtagttgcatattacaaggacacaaaagtggcctggaccatgggacctgttcttagctcctccactaattacgtggcaagcctggcaagagctgggggttaagggcagaggtgctggactgtgggcagtgccagtcacgtc

SEQ ID NO: 20306 - DNA, 201 bp, Bos taurus
ctcctccgcccatgccatccccagggcagaggcaggctggccagtgatgccagagaagggagaaacacagaaggagccctgggcttgggatgtttctgaatcagagacagcaaaaaggggcctgactgacagtggccaccacaggggctatggtcttctaaaaaaaaaaaaaaaaaaaagtgtgcatgtgcgtgcatgtgt

SEQ ID NO: 20307 - DNA, 201 bp, Bos taurus
tggctgcggggagacagttcactccaggacaggcatgttttcaagaaaaagaaaaacacaggcagggagccatcctgggaactaattagatccggaaggcggcccctggggctgcaaagcagccccttgtgggtggtgggtggggcttgggggtgtgggcgagaggccgcagaggggcccctgggaccgtgcacccactct

SEQ ID NO: 20308 - DNA, 201 bp, Bos taurus
ccacagcctcagcctgggccgtggggacaggaaggcttcgctggggtcctctctggacacacaggtttcccaactgcccggcatccttggtagctgcagagtccagggcccgctcaggggctccatctagctctgcacacagctccagagagagatgggccgccctgagttcttggaggctggctgtgcctccaccctgcc

SEQ ID NO: 20309 - DNA, 201 bp, Bos taurus
gaactttacaccttcacccacagtccgcttcccaggtcacactctctcccgtgctgggtacactgagaattgcatactcagcctggggccacgtgccctttggaggggacccaggctccgacagggtctgaggctccctcgtctctttggaccaggtttggccgccccacctggcaggcaggcccaccaagcgctgagact

SEQ ID NO: 20310 - DNA, 201 bp, Bos taurus
cgctctgcatggtgctgaagaaagtcctcgccactgccatggtctcccattccacccaggaactcagtctcctctgaaagccgtgtggctacgggcttatgtccatggatttccctgggccaacacacacaccacgtcacctggacatggctggcctgatagaagagcagacacactcccggagctatgagggcgctgccc

SEQ ID NO: 20311 - DNA, 201 bp, Bos taurus
catgcggcctccagggctggcagggcgacggcaggggtgaggacggggaggtgccgggggacagggcagacctagtgcagggccagacaagccctcgagatggcaaggtcggctgcgctgggtgggggtcagtccacagcatagccccacggagaggggcccctcagactcaggcgaaagagggctggagggcaaacctgg

SEQ ID NO: 20312 - DNA, 201 bp, Bos taurus
ttctgctttggcctccagaaagctcaccaacctaacacaaaagaacatatttcacggtgaataattcagctactgaacaaagccgcgtggacggcctgcatggcacgcagaggaggacggccaggccagggccgcaggtggaagccggggaggctctgaggcagccccacgccacacggcaggaagatgcctgcttccaac

SEQ ID NO: 20313 - DNA, 201 bp, Bos taurus
caaattgctggccctgaaaccacacgctgagcagcaagaatccgtggcaagtcttgtctgtggtttactgagtggcgggctcacgttcagggaccagaggtaatggggtggggcctctgaatgtggacggctctggaaagacctctgccttgaaacctctgtgagtcctcttttacaaagaaattccacagcattgcatag

SEQ ID NO: 20314 - DNA, 201 bp, Bos taurus
aaaaacctgtttgtatcagcattattcatgatggccaaggtagaaacaacccagacgtccaccacctgatggatggattaacaaaacgtggtccatcctcatggtggaatacgattcggccttaaaaaggaatgaagtgctgacacatgctgctacacagagtcagcttgcacacgtgctaagtgaaagaagccagacatg

SEQ ID NO: 20315 - DNA, 201 bp, Bos taurus
gccagggcgtgcgcgggggccggagggcttgtctcggtggagagcaccatgaccaggggctggaaacgacagaaatctctcctctcaaaggttggagacccgagatctgaacctggcggggccacgctccctccggaggctctgggcaggggtccttcctgcattttccagcctccggtgactctaggagtcccctggcct

SEQ ID NO: 20316 - DNA, 201 bp, Bos taurus
ttcaggatgtcagccaccatgagcacccaggggtccgagtccaggctggcgagctggatgatctccgtgagtgcgcccttcatctgcgagacagcacaggtgcgtctgggcccaccccgtgctgcccgcgcgggtctgagggcaggcgccgagctgggcctctgagcgcctcgccttctcacaccttctcacacgtgggcc

SEQ ID NO: 20317 - DNA, 201 bp, Bos taurus
ctggccgaaccctcccctgctctagtttgcgttggggaggggaggggggtgcaggctggcagcgacaaccacagcagcacctgagtggaccccgtcacccaagcgagcttttccagaaacgcctcaagccctacaaggggtcaatcggctgccacattcacacccgctgcccacctcagtcccatgagtgacagacgccct

SEQ ID NO: 20318 - DNA, 201 bp, Bos taurus
cagcgacgcaggagacagacagcagcagggctggatgcccagactctatttgtccaaaatataaattacagtcaccttcaaggggtagattacacacgaacgggtgcagagctcacacagactcagactcgtttacacgcagagcactcgtccacccgaacgacagtgacagttcccatcagtcggtgcggctgcaaagca

SEQ ID NO: 20319 - DNA, 201 bp, Bos taurus
aacaaatacttattggcctctgtcccttacaaaacataaaggctagtctgttggtagctacacacagaggctgtccagtagaggtggccaggtaaggttcttgagatgtgggcttgctggcagagttcaaagctgaggcaagggagtggaggaaccagccccagagcaagtagagatgaaggagacactgggacttggaca

SEQ ID NO: 20320 - DNA, 201 bp, Bos taurus
taagggttccaaataatatggtcgaaaaagataaatttggttttctaaaaactcagtgacaaaaaagaagattaaagcagcagaacctttgattgggtttttgtctttgtcggtctttttatttttcagaagtgcctttaatgtttggcttcgtcgggttttttttaaatacttacatgtgttagtcattcagtcgtgtcc

SEQ ID NO: 20321 - DNA, 201 bp, Bos taurus
ggtcagaacgctggtgggaggtggactcgggcactgaaaaagaggccttgcatacagatgggctgacctgtctgattgtgttaagagtacttgttacacttctgtaacctgaatactcaaggccattaaccggtggagggaagttaggggggtgtgtgttgtgtgtaggggacagctcagcttgtcctttattcagctggg

SEQ ID NO: 20322 - DNA, 201 bp, Bos taurus
gctcctgctagtaggagacgagctgtgtccaccaagcggacggccgggtgcgggcagcaagcctcttcctcggcctcagccctccttcttcctggccttttattctctctcttcctagtgagaaggcagagaaagaccacactgtggggagactggctccacgcgccagcaaggccaaaacaccaaaggggcgggtaaggg

SEQ ID NO: 20323 - DNA, 201 bp, Bos taurus
ccagctctgttgctgcagcctgcctgagaggggccagggaagtgataagtgaaaatccatcacaacttctggaaataactcaaaggacacactcgactgcagaaataccagcaggactcggccaagctcagcaatgttgtcaggagaatgattccatttcagcaggtactgtccttgtggaaagaggtctttggaggatag

SEQ ID NO: 20324 - DNA, 201 bp, Bos taurus
acccgtgaaatggccacctctgtgccagccaggccgagctcaatccattgcaatcatggagatggctggtatctggtgcgagggtggggcctagctttagtgtgtgctgcctgcaccgctcaggagccttctccctgtgtccatgctcaggtccttgttcagtgatggtcaggaggcccactgggaggcatctgtgggggc

SEQ ID NO: 20325 - DNA, 201 bp, Bos taurus
caaacagtattacaagttgccatatggagcaaactaatctctctaccagttgagtcccaacaagacataaaaaggccatcagcaccgtgtttggtgtacatcacacaacttttttttttatctttcacaccaggacttcccaagtactaaatatagggttgaaagaaaattattttcatcctgcattccttctgacaacat

SEQ ID NO: 20326 - DNA, 201 bp, Bos taurus
aaaggataaggctcaattctaattttttctcctttcttcactggcaacatattaaactgttattcttggtgtacagctttcaggacaatgtgaaaacctcccatttaattctttgtcctttcctccattttatgggaggggtttcaaatttatctcccaagttaaaaaaataaaggactattcttccactttatcatgtag

SEQ ID NO: 20327 - DNA, 201 bp, Bos taurus
actggcctttgccctggaagccccctcctggacaaccctgctgtctccgcggtggcctcaggcctgagcattccactcaacaggccaggagccttgaagcgaccctaccctgccagagatctcagtcgagggtgagactgcgtgtgtccttgataaccatgctgcctcctgcaggtggtcggagtgttggcctggctgggg

SEQ ID NO: 20328 - DNA, 201 bp, Bos taurus
caataactatatcacaatccccagatcctactcagactttaccaactgttccacttttggccttttctgattattttgctaagttttaaattatagaaagaattctgttgttcatctcttggacaacattggatggacaatggattgcactcgattttagcaattatgaacaatgctgttaagaatattcttgtcctgaac

SEQ ID NO: 20329 - DNA, 201 bp, Bos taurus
attgcatgatcagtacctaatgtggcctataacaattaaaaatggcctgtcctggaacagacgcacaggcaacctgacatgaaaccacacaccaagacaggcacccagggaacagcagaaatttagggtagatgcagggaggaagctgctggcccatgccaccatggcccctgcccgttcatggtgagaagcagcagagct

SEQ ID NO: 20330 - DNA, 201 bp, Bos taurus
tcttaccttttcgggagatggatccccatcctgtagcccagcaagaaaggttccaaagagtcaagtctgggggtgcaatacagatgggaagcacagagtcagaaaaaacaatgcgggttttcagctgcaccagagcgatgtcacctccaacaggatgatacaattcatatgtggggtgtatgatcaccctattcacctcaa

SEQ ID NO: 20331 - DNA, 201 bp, Bos taurus
ccaaaggagaactggatctcagtagtgctgggtgccacaaatcacacaaaagagtaaatttgaattagtagctagcatgttgaggaccttggcaagaacagtttctgttaatcagagtgaacagaagccacattattctaggttagatggaagatgtgaacttcaggaagttaaaaaggggaaaaaagtttgtatttcagt

SEQ ID NO: 20332 - DNA, 201 bp, Bos taurus
tggaggaggagaagggggccccctctgaggaggtggcagagatgccaacagaggcttgaacaaagcgcagacaaaggtgaccatgggtgggtgttcggtggggcaggaggggcagaggccctgggcctggtgagctggatgtgttggaggaccgaggcagttgtaactggagtgggtgcaagcggggagacggggctaggc

SEQ ID NO: 20333 - DNA, 201 bp, Bos taurus
tgctggggaagggtgctagcagtcatggccccacaggagcggttagtgttgcctggcttgaagggagacctgcgtccttcctggcaggtgcaccctgaccttggtctctcctcaggccaaggccttcaccctctgcctctggccctgcacgtgggggtgagaatggggtgaaggctgatactcgacacgacggaacaatgg

SEQ ID NO: 20334 - DNA, 201 bp, Bos taurus
acagctttgttgcgggacgtgaggcaggaggtgctgtgcttggcacacctttctccgtctcatggctggagggcgggaggaacagagagtcacagcacacacaggcctagagtggccggtgacataattagagatgaggtgaggcccaggccagatctcctgggggtgctgttagagctcgttccagcgtgttccctgacc

SEQ ID NO: 20335 - DNA, 201 bp, Bos taurus
ctggctctggctctgcacagagtaaagttctgtatgtgcataaagccaagactttgtctcaaaccagaatgtgctctggccaacaaccttccccgcggcatctcgtgccaggacagctctccctcctccgctccaagcaggcggcaggagtgcgagggggtgtgcagactttaaccactgcagcttcactaggccacttca

SEQ ID NO: 20336 - DNA, 201 bp, Bos taurus
ggaagcgtttggacgtcggcgtacacgattcattctctggtttcagggtcctggagcaggtcaggcccacgtgggtttcgagggctggcctcacagcatcacactgccctctctgggtgtcgctgccccagtttttaagatgctgtgtacctccctggaaggtcccaaggacactgcctccacgcctggctccaaggaggg

SEQ ID NO: 20337 - DNA, 201 bp, Bos taurus
caaggaacctgaggttcaaagaactgcagcgagtcaggagttatcctcaggtcagctccctgggaaggagcctcagatggaggtgaagggccccctctcttctcagactccagaagagtcttcacttggcactcagggccccttccccagtgaaaccctgagagagacaggtaatgtgactagatattacttttctctgaa

SEQ ID NO: 20338 - DNA, 201 bp, Bos taurus
gcagctgtgacccttgactgggtttccggcagccattcgccatggtgactgtgtgtaaacagtcgtcggctctcggaaacccatcctctgttgactcatcggcaaggccagagttcatcacccttgaagtagttttgacatcatacccggattgtgacatcttgaaaaacaagactgcttctcctggtcccagatcagact

SEQ ID NO: 20339 - DNA, 201 bp, Bos taurus
acccctccagcaggttatgcctccccggccagcaggtctgtgggaggtccccaagtgcccacatccctgtcaagtgtggtgaggtggccttgcttcctccttgttgccatggagagactccacaaggttccccagaactctctggaagggcgaagccttttccacaacccttagaagtctcgattcctggagagggaggcc

SEQ ID NO: 20340 - DNA, 201 bp, Bos taurus
gcgggcggaggggcgggacgttgccagggccgcgggcggaggggcgggacattgccagggttgcaggcggcaggggcggggcgttggcggtacctggatgtagggccttggaacttggctctcttccagcaaaatgtaaatacgacagcttctccctctacccattccctaggcattaagcccttcgggagggagtgtggc

SEQ ID NO: 20341 - DNA, 201 bp, Bos taurus
cacacagaaattgccagggggctgctactcagcaactcatgtctcggatgctcttctctgtcttgatctcagaagagggccagcagcaactggccttcacgtgggaaggatcccaccattctttttctgcactgctaagggatccgtgaactcagtcgtaatctgctcagaagcgacgtggcctcgaggcagatccccagg

SEQ ID NO: 20342 - DNA, 201 bp, Bos taurus
gtgtcggggattcagagtggactcagctcctaccctgtgccagggaagaaaggcctgggcatggatagcccctgccccatggagcagagctggggcctaggcaagtccaaggaaggaggcagggaaaggtccatcagccaaaaaatatatcctgtgcacttcctgggtgccaccctgatgggaagaggccagggccacagt

SEQ ID NO: 20343 - DNA, 201 bp, Bos taurus
ttcttaaccctttcttaactctttctcaaccctgggcctcgcagaagaaccatcctcaaagtcccaaccactcacatttactgagtaactactgtgtacctctgtgtactgggcccagcagaggttgggcagcatacgaattctggaaaattcatgccttttgaaaattaatccctatgcctttccagcctgcctaaggga

SEQ ID NO: 20344 - DNA, 201 bp, Bos taurus
gggccaagatggggggcggattccaccttgtatcccgggttgccagcccatccctggccctggaggcagggctactaaggcacccagttaggcctgacccctccctctttcggcagacccagctagcctggaggaattcaagagaaggatcctggattcccagcgggcccctgccagcaacgtcttggtctcagccaggtg

SEQ ID NO: 20345 - DNA, 201 bp, Bos taurus
tcctgactgcagtgggttagctcacatgatcagaggccaccaggaggtagagaagagaagttagtctagctccagcctctgagactgcaggaagagattctacatggcaggcccggcacacacagccctcagccttccccaagagacggacagacacatatcatctcttgctgccttgtgaggaagacatggtctctgctc

SEQ ID NO: 20346 - DNA, 201 bp, Bos taurus
ccatgagtgaagaatctgttccaggcctccctcctaggctggtaactgcacatctctcttcatctttattttgtcttcccttcactcccatctgtttccaaattttcctttcttatgacacaagtcctattggactgggaccgatgctttgtcattgtttagtcactcagttgtgtcctaccctttgtaaccccatggact

SEQ ID NO: 20347 - DNA, 201 bp, Bos taurus
actatggttatggctatggctatggccaggataacaccaccaactatgggtatggtatggccacttcaaactcttgggaaatgcctaactctgacacaaacgcaaaccctagtgccatgggtagtgccagtgctgattccgttttgtccagaattaaccaacgcttagatatggtgccgcatttggagacggacatgatac

SEQ ID NO: 20348 - DNA, 201 bp, Bos taurus
tttatgtaatgtatatttactcagctactgttcctaactaaactaagtctggggtgttgaggagtatgcatgataataataaatgcctcaaggcactcacagtctagagaggatagtaggtatataattaaacaaaaattacaaattattgcaagagaaacacttctttatatgtgggaatatttttaaatgattcattaa

SEQ ID NO: 20349 - DNA, 201 bp, Bos taurus
atgagtacactgcacttattatccaggacgccagaaccagacatccacagagccatgggttcatgatgactgtgtagtgcaaagggtggcagatggccacgtaacgatcataggccatcacagccaggaggaagtcatctaatgctccaaagagaatgtaaaaatacatctgagtgatgcagccttcataggttatgactt

SEQ ID NO: 20350 - DNA, 201 bp, Bos taurus
tatagcatttaaaaaaacatacatttcttgatacaaaaaggccagttagagttccttctgagctatgatactactaaatgatttctcaactttggccctactgacatttgagactgtgtcattctctgctgtgggggctgtcacatgcattatacgatgttgagtaacatatctggcctaattatcagtagaaatagcaat

SEQ ID NO: 20351 - DNA, 201 bp, Bos taurus
tctggtgggcccactaagtaagaggccgagcagcttccccagggtctagctagggaagacagggcagaggggctagcaatccccgatgttgccgggacacgccgggccgcgaggccagcagtgagcagggctgtggaagcagggtgcaaaggggtggttactgcttatgggtagcgtgggtgagaggatgccagagccaga

SEQ ID NO: 20352 - DNA, 201 bp, Bos taurus
taggctctgctcctctctgtgaagctgggcccctccttagaccaggggttctcaactcaggaagattctgcccccacgaggacacagccatgtccagagatctttctggccatcacacctagtaaggaggtttgctactggcatctagtgggcagaggccagggctgccgctccaacaccccacagggcacaagatggccc

SEQ ID NO: 20353 - DNA, 201 bp, Bos taurus
gccaccccgccccctccaggcacctgctaaggcggcagcacagcagtggcgggttgtgtttctttaacccctggggcctgttgacacagattagtatcgctggtcaggggtcaatagggaaggctcttgaggtcaagacctgaacaactggagttgtaatgagccacgtggggaagaggcccaggcagaggagagggccga

SEQ ID NO: 20354 - DNA, 201 bp, Bos taurus
ctggttggacagatcccaatacccacgccttaggcctaagtgatgagctacggaaggtgggatgggacctgcaaccttctggcacttttgatctgtgacagaactatttcctggccttggatcgcctctgctgtcttctggggttcctcctgcaatgggattcttgattctgtttcaaggtggagcaagtacagatgagac

SEQ ID NO: 20355 - DNA, 201 bp, Bos taurus
atgtgggtgagttatatactttgttcatcttgaaataggctgggacctgggatgtaagactttgatgcagggcttgcacttggacaaatgtctcctccagcaataaagtatgaagaaaatataatgggctaaaaataactgagtgtttttgtgcctgtgctcagttgctcagttgtgtctatttgtgaccccatggattgt

SEQ ID NO: 20356 - DNA, 201 bp, Bos taurus
gaacagtgagggccaaggcgtgcctaagccacatggctgtgtcaacatatatctcataggatctgaacaggatccccctcccctccaagttccatcccttatgatcttcccaagaccccaaggcccagggatgtcatctcaatatggagagaaacgtggatcagcttatttgtcaccattcattctttcactcactttaaa

SEQ ID NO: 20357 - DNA, 201 bp, Bos taurus
tgagctccaggagttggtgatggacagggaggcctggcgtactgcaattcatggggtcgcaaagagtcagacatgactgagcaactgaactgaactgaaggatagcttctcttattttggccaattttaatgaaacttcacatggggttacaagagttaaacatgatttagcaactaaatcaccaccaaacagatgaatct

SEQ ID NO: 20358 - DNA, 201 bp, Bos taurus
acatgtgtttctccctcactgctccaaggaataaacccaatttgttaaactggtggtctttgggtacagggaattaatagcagtaaaattctcaaaaggtcccaaaccaccaattttctccctgtcccccaaagtgacccctgaagcctgtgcccacaccacatacacttgataatcctccttgaggattctgaccacaag

SEQ ID NO: 20359 - DNA, 201 bp, Bos taurus
tgcagaatcacagagaaataaaaaactgcataaatataaggagtgtgggaaaacctatacttcctatagacagagaacataggaaatctcatagttaagacggccttttccatgagaaaaatgtggaaaattatttcaaagttctttgcatcttaacactcacaatcaaattcaccctggaacaaaaccatgtaaatgtga

SEQ ID NO: 20360 - DNA, 201 bp, Bos taurus
ggaaatgaagctttcaacaaaatatgaatgaactcatactacccttttatcgatttggaacactcccccctcccccatgccggaaagcagtgtgcacacttgaggtcttctctccgtaagccggccaaggtcgacaggttccaagagccttggaagagatgacctcactctctcactctcgagggctggggttttaaacgc

SEQ ID NO: 20361 - DNA, 201 bp, Bos taurus
taacttttgacagatgccaccgggaaattgccccagccctggcactgctttgatgggggtgaaacagaagcacgcctctgtactagtccttggggggagcgggactgagggcaggtcaaatgcacaaccacgtgttttgagaacaagatccatattgctccccactccccacctgggggcagcatcagacccacaggttaa

SEQ ID NO: 20362 - DNA, 201 bp, Bos taurus
gggccaggtctggggtcagcgtcatctgcctggcacccagtctccagcctggcatgggagtcgcccgggtgagatgttgtgagaaagagtgctgattgctatcatccaaccccaggccagtcagcgtgggcatgggcctggctgttagccaagtggggctccagaccacaagaaggttaacttgggtggccttcttgagcc

SEQ ID NO: 20363 - DNA, 201 bp, Bos taurus
aaagttcattcagtttaaaaagtaaagctaaaagacacagttttatatttttaccaagaactttattgaacatcataatcacagtttgtttcactaccttcggccattttcaggcaacttcataattccatcttcccaaaacttatcttttttggcaaagaactgttccaggtgccttttatagtcttccagggaattgaa

SEQ ID NO: 20364 - DNA, 201 bp, Bos taurus
cagctccttgttagacccttgcctgggggtggggagatttcgtcagggctcaaggatcaagggctgttggtcggggtctgctgaagttagcaagatggggaagggagtttccctgtttggggtgggggcaccttgtcagcatttcaacgctttggtttgtttacagggtgctggatgtctgggttgtcgccttggcccacc

SEQ ID NO: 20365 - DNA, 201 bp, Bos taurus
cagcagcagcagcagccttataatggtccgcctctggcctcactgctccctcatccctccaaagctccagtcatcctaaactaacccaagtcacctgtaacgggcactgttggtggccttgtccagccacctttagctgctggagcacccatcccccagtttcggtttctgtgggtgttgcctgctaacagctcacagctt

SEQ ID NO: 20366 - DNA, 201 bp, Bos taurus
tcctttgcttggctctgtgtcaaagggaactgcatttcccaggtgcctttgcacccttcctcccagctagttctaaccaatgggaggcccaggcaggagaccagagggtggaaggaagagagaagccagggtatttctccttctcttgttctgcctctccagcagcaaatacacctcctccatggcctcagctccctgaag

SEQ ID NO: 20367 - DNA, 201 bp, Bos taurus
tttttagggtgcaaggtgggttcttgcaaaccagtccgctccttctgtgcagcagggtgcaggtccccactgcatctggctgggtgaagaaacttggacgacttccttggtctccatcaggggtccccagatgcttgggtatccagcgtgagaagggggcttgtgctttcaagggtcaggctccaggcgctgtgagaggac

SEQ ID NO: 20368 - DNA, 201 bp, Bos taurus
ctttcacttagccacgtgcatttaagcccctccgcgtctcatcatggccgggtagctcatttctttttagcactgaatcacattccattgtttgaatgttccacacttttgtttctttttacctgctgaaggatgtctgagttgcttccaagctttggcaattatgaacaaagcttccataagcattcacgtgcaggtttt

SEQ ID NO: 20369 - DNA, 201 bp, Bos taurus
caaagccacactgattgtaaatggggagattgcaatgccatagtcggatttccgagggaggaaatgaagaccagcccaggaagggtgtatatgggtcaggagtgtaggccttctctggcccaacagcaggatttgaacactgacttagcatgccctttcttccaccagccgccccaaagggcgggcctggtgtgagtcagc

SEQ ID NO: 20370 - DNA, 201 bp, Bos taurus
ccatttggggcactgcaaccaggctggtgaggagcagagggtgtggggggatcccgtgttgctggaagggtcctgattgtgatgctggccgagattaaactgggtgtggggaggtggaatttcagatgggagcagtggaagtgttgggggactcccaaaaccctgtcaggatggatgaaggccaggtttacaggggatgga

SEQ ID NO: 20371 - DNA, 201 bp, Bos taurus
accacatccatctccccccacatttagccttcagagaatgacggtttgattgtgcagagctaagaataaccccaactgtaaagtaccctggaactgcaggtaggtgagaggcagagcctgtaggaaggaggcggggaaaagggcaggtctcatccacacatgccccccaccccggtgccaaagctctccactctgtagctt

SEQ ID NO: 20372 - DNA, 201 bp, Bos taurus
gctgaggtctttgacatcctccccctgaggctgttatctttgactctgggactggaggggaactggggctggaggttaggggattgggccctcaagttttgggggtctcttttgggatttaaggaggaagaggggactaatggctggggtttcagaagggcccccagtttgcaaaattgcaatgctttatatgtttctggg

SEQ ID NO: 20373 - DNA, 201 bp, Bos taurus
gagtcacctgctgtcactgcccatctagtgtgccagataagggtgcgtgcctcagcacccacttagagctgtcctccccttgagcctaccctcgatgatccgcgaacctgggtgtgtggcctctccggctgcagcctgaccagtctgggggctgtttgcctttggccttcaggcctgtttgcctgtcagcctgcctttctc

SEQ ID NO: 20374 - DNA, 201 bp, Bos taurus
aaccccagggtgctctgagccagctgtgaccacagagctggcagccatgctccaggacagggcagaactaggagaaacgaggagccttggatccctgaaacgactgcatggaacagggctgcccgggagtccagctcaggactgttaagtgcctgagaaatcaacatgtgcctgaggtctctaaatccagcgagtctcctt

SEQ ID NO: 20375 - DNA, 201 bp, Bos taurus
tcacccttaatcctgtacacattaagcagtcctttaattcccccttcccagcccctggcaaccactaatccactttctgtctctgtggatttgcctgttcaggatatttcatatcaatggaataatcgactatgccatcttctgtatctggcttctctcactgagcatcatttttccaggatcatctgcatggtggtgcat

SEQ ID NO: 20376 - DNA, 201 bp, Bos taurus
gctctgctctgagctccttacacggcccgtgggccagggcctgggcctcccggggcagccatcattcctggcacagaggagaaaccgcctcggggagaccggatccaatgtccccatgcgggcctctaactaccaggccctttgggcaactcagcaaggggacacgtggtgtttggtgcccacctgggaggacagggggca

SEQ ID NO: 20377 - DNA, 201 bp, Bos taurus
tgtcgtcccagggtggggactgtgacggcttctcgactttcgacgtccccatcttcactgaagagttcttggaccaaaacaaaggtgagcgctgaccagcggttcttgaagcaagcgttgaaccaagagggcatcgaggcgggaggcagtgggtgccttcctctcttgccctcgcagcccagactgctgagatgtggggct

SEQ ID NO: 20378 - DNA, 201 bp, Bos taurus
cctgggccttctggattggaaatgtagaatcttagcctttggaccaccagggaagtccctagcattctgttctttctacccccaaagctcctccagacagtgggcctgggccagcctgggcctctcctgaaccttcgtttaggtatccgctgtggtctcctggcttcctgacttgcctatatccattcccactaccggcaa

SEQ ID NO: 20379 - DNA, 201 bp, Bos taurus
tccaggttccagcctcgatctggcctgtcctcccaggtcctacccttcagctgttgccactctcgccttctaacttctttgggttgttgagtatcaatctggctataaaaggcaattctggcctaaggaaaagtggaaaagaggaaaggggtggccagctgcctgagtcgagaccaacttctgcttgcagcctggcgtctg

SEQ ID NO: 20380 - DNA, 201 bp, Bos taurus
ttgaggccagaagaggccagggtccattggtgtctcccagctgcctggctctgcctcttctcactcccagcagaaacaccttacacaacccacatagctacgtcttatgtccaggccagccttttggctcttccttccacatgttatttctgaggccactaagaagggatggttcttggggttacggacagtaagggatgg

SEQ ID NO: 20381 - DNA, 201 bp, Bos taurus
aattgtgattaaacagttacatgtcgtgtagtctggtttagaagcaaagttgctatgacactttgcaccataaagagtggatttttcagtttcttgttaaccatttctctttgattatttactgtgtggaaaggatacacgaatgaaagatatcacagattgctttctatgttgtccaaaattttgttgcttattgataat

SEQ ID NO: 20382 - DNA, 201 bp, Bos taurus
ggggcaaagtaaacctgaatggaagtgatgagtgctcatctgcagcaactcagctgtgagttgcctgcatgctggcccaaggcagaaacaggcccctgacatccacacaggggtattctcctgcccagggcagttctttctccttcagctcattaacactcttttgctggcagaaacctcttccccttcgtctcaaggcct

SEQ ID NO: 20383 - DNA, 201 bp, Bos taurus
actcaggtgcttgcttccaggctgtaatgttacgctctctcggtcttcagactcttaccttctcttggtcaagtgtgtggcagctactaccttgagcggcatgggagtctggccctgacaggctgcattggctttcctgcttccatagtggctgacctctgctctaggaactctggtttctcccattaatttataatttag

SEQ ID NO: 20384 - DNA, 201 bp, Bos taurus
ttttgtttcccacttctcagtatcattttccacaaatttggttacatgcatctacttctctttttgagtcttttcatggtattcccctttatagaattatccataatcctcttccatttttcgttcggaatgctattcatgtttcagtgacgtatccttgtgctccttctactgtgtaactcccagtcatacagaacccac

SEQ ID NO: 20385 - DNA, 201 bp, Bos taurus
gaaactttcatcatgatggtatgaggaggaaaatggtttcagaaacagaaaatatcactcaacaacatggaccagacaagcaacaaggatatactgtgtagcacagggaatacagctttattctgtagtaactttaaactgagtttaagttataaaaacactacttttttttggaatcactattttgtacgcctgaaacta

SEQ ID NO: 20386 - DNA, 201 bp, Bos taurus
ctcaatgcctttgattttgtttaattaccaatgaaaaagtagatactcattctttgttatctccctgctgtcttacaatgacatttactttgatatcatgtaattctgaaagtatcatcagtacagtagtcatcattactgtaacacactatctgacaatattctacttattttgtttccctgaactgtcaccagagacgt

SEQ ID NO: 20387 - DNA, 201 bp, Bos taurus
tttacctcctaaaataacagtctcccttgaatggctttctattctagaaaaccatcacccactactttcccaggttagtactgctatgttgaggcctcacgtgtccatgtaaagtggaatttgctgggtaggtattgagagagatgcatattaaccctctatagtgtcatactggggccttgtaactccaggaaacctcta

SEQ ID NO: 20388 - DNA, 201 bp, Bos taurus
aggctcctccatccatgggattttccaggcaagagtactggactggggtgccattgccttctccgagtttacatctctaaatcagtccaaaaaagagttacgggcaagactcaaaccctatatacttcccaaggcatgtggcatctttctgctctaattagatactatatcatgtatgaattaatggtttattgtgtcttg

SEQ ID NO: 20389 - DNA, 201 bp, Bos taurus
aaaaaaaatttatttttgcttaatttcactgtacaatcatgaaatcattgagactggctttatgttaaattcatgaccaattttagcaaaagagttaagcagacaagctctggaatcagatatcctggcttcacagttagcctctgctgttttcaagctttgtcaaattaacatttcaccatttggttttgtcataataaa

SEQ ID NO: 20390 - DNA, 201 bp, Bos taurus
ctaatcacaccagcacctccaaaaatctttaaagcctaaatctctctttctcaactaatgaaatataacttcgctttagaaaaaaaaaaaagactattaaatttattccactgagataaatctgaaggaaaactgacttaccttcctcagtcaaatgtaactgctaatatgccctcctgaaaaacaacactgaaaactgcc

SEQ ID NO: 20391 - DNA, 201 bp, Bos taurus
ttatgcttggagagttttttgtctctgaatctgtatccccaaagcagaaatccccaactcactccctttcagccatgtatgtgatgcaggctctgccatatagatacagccttataagacctggaaatagacaatgtgcagaagcagtcaaaaccttctaataggctggcagagaagaccagtcttcaccagtcttcagtg

SEQ ID NO: 20392 - DNA, 201 bp, Bos taurus
ctggaggctgcagctttgagatcagggtgccagcattgttgagttctgctgacagctctctgtaaggtggcagaaggccattatcctcacatgacaaagagtgtaagagagatttctgggatctcttttttaagatcaacaatctcattcacgagggctccaccctcaggacctaatcacattctggaggtctcatctcct

SEQ ID NO: 20393 - DNA, 201 bp, Bos taurus
aatgatattagagaagaatcagcaactgcagaatatgatttttttcaaatataaatgaaacattgaccaatataggccttaggccatgaaataagcctcagttgaaatcatacccagaacaactgacccctggaaaacaggcatgtgagctgcgtgggccacttgtatgtggatttttttcaaggctaaatacttcactac

SEQ ID NO: 20394 - DNA, 201 bp, Bos taurus
agagttccttggactggaaggagataaaaccagtcaatcctaaaggaaatcagtcctgaatgttctttggaaggactgatgctgaagctgaagttccaacactttggccagctgacatgacgtatcaactcattagaaaaaaccctgatgctgaaaaagattgaaggcaggagaaggggatgacagaggatgagaaggtta

SEQ ID NO: 20395 - DNA, 201 bp, Bos taurus
acatgcttatgtttagttatgtttggtgatttaagcattttttctgcatatttgattagatttcatgtgatgaaaaaacaatttagtatgtttatcatgatgttttcttttaagtatgtatatggatttttatcattgaaaccttctacttctctccctggaaaacattttaaagattattaaatctagttttcagccttt

SEQ ID NO: 20396 - DNA, 201 bp, Bos taurus
taatatgactttctatttactttctgttcacactcaatgatatattatttgtttggaatgataaacagccaatactttaaaagtactatgtgtcagtaatgtaagatactgaaagagaaatatactgaacaaataacatagcacctcaatatatttattctcatgacatctagggacctttatcaaggtttctagatgaat

SEQ ID NO: 20397 - DNA, 201 bp, Bos taurus
actgagacagagagagtccaagaaagagggcaaagcagaaatcgggacagtgtgggacgggaacgaaagacaagcctgcagtcatgtcagaagaagcaagggagtatgtctgtaccccgtgaccaggttattatattatctcattttaatcaccatgacaactctatgaaataagaaacattatccccattttgcacactg

SEQ ID NO: 20398 - DNA, 201 bp, Bos taurus
gacacacagtataaagaacgtattttactgtattcaccaaaacgcaagatttcctggcttctgtctctccagtcacccatcaaaagctgaaaaggcccttgcttcacctacattcatttttgatgttgcctaaaatataaaccatgatagctagttgcctcataatggctcgtgaacagaattcaccaagctagaaagaga

SEQ ID NO: 20399 - DNA, 201 bp, Bos taurus
gaattatcagaattatatatgccagtactgatgtgcattaaaaactacacttcctgacactgttatagaatctttgtttttgtattgcaagttgtttcatatttttcatattgggataggactaaaattttataaacattttccttcaaaatataagaatataacttatagccattttaatatatgtttaaacactgaaaa

SEQ ID NO: 20400 - DNA, 201 bp, Bos taurus
tccaatagcaacagcatcaattctttagaatacataccaaaaatgatttttaaaggagaaatattctatcactgacattgtttagagttacaagtgtctgatgtaataacaagtaaatgatcttttagtcatttacactactgctttaaattatctactatttaaaatgcactccttcactacctgtaaccaaggcaacag

SEQ ID NO: 20401 - DNA, 201 bp, Bos taurus
gctagaatccccaatataatgttgaaatgaagtggtgactgtgaacatctctgtatattcccaatcttagaaggaaagcattcagtatttcaccattaagaatgaagtaggttttttataaacatgttttttctgcttaaggaagttctcttcggtttgttgaaaggttttattatgaatgatgatttgctttgtcaaatg

SEQ ID NO: 20402 - DNA, 201 bp, Bos taurus
tctttaagtatattcaaagtgtcttctcagttcacagcagaattaaatcagaaagcaataacagaaagatctctggaacatacccaaacattcagaagctgtgtaaacccatttctagtatccatggattgaagaagaaattaaaggggaaactagaaagcattttgaattgaacaaaaatgaaaacagtatcaaatttta

SEQ ID NO: 20403 - DNA, 201 bp, Bos taurus
ctagttttgaactgtcttagcagaactcaagtgggaccctgtaacttatgaatgttttgaagataaaaacatcccctcatttacagaccttcatggttcaatgatctccatagtcaggaacttcgttcagctttcatattcagaatgtgtaaatgcaggatgttaccccattatttcattgcttcccccaacgttagtatt

SEQ ID NO: 20404 - DNA, 201 bp, Bos taurus
atttctcactggatggtttagaagtatctaaatctgattttttactatactccacacttagtaccacatcctttacaccaggagatttctcttgcgatgacagtaattcttctgtagacataaaaatattcaaaatgttttctaaatctttcaatcaaagagggcatcacgatgtaacatcaatttaatgacaattttaag

SEQ ID NO: 20405 - DNA, 201 bp, Bos taurus
ccctgaagaaataaaaagtcttatggggtcataaaaaatagaattacaaaaatcaatagtttatagggatggctttccgttcacgaagtgtaactacttatgcaagaccccaaaaggtcttttctagatagacatcctccccaagtctcctgtttttctctccctctccctcttttatactctgcccactccacccccttt

SEQ ID NO: 20406 - DNA, 201 bp, Bos taurus
taaagaaggtgaatttgttttctcactggaacattttatgaatcaacagtattgatgtgtaggaataggcatagttcgagatcattataacttggtcttatacaccactgccgaagtcttccaactcatcttgatggaatagattagagaatgcaaaaaatctctctctaagctgtaagatgtaaaaataagatattacaa

SEQ ID NO: 20407 - DNA, 201 bp, Bos taurus
ctatagctgtaattttcataaactaaagttaaaatgaactttaaggttttaaaattatagaattttagtactagaaggaaatcgacggtttgatcaactgattctaaaagttctctgggtcttggatccacttaataatctgataaaagctacatttcctctctttagaaagataaaatccatggtataattttggtattc

SEQ ID NO: 20408 - DNA, 201 bp, Bos taurus
aggttaggttacaagccagactcacagaataaaatggaaaacttctacgtctatgcattagacgcatcagtcatctattctctgaatatcctttacacctcgttataacaccactgtgcgtgtgtgtgcgctaagttgcttcagtcgtgtctgactctgtgacatgccataaaccgtagcctgctaggctaatgttagaac

SEQ ID NO: 20409 - DNA, 201 bp, Bos taurus
tcccagttctgatcccaaaaataacttctataaatgttcactgaccaaatagcggctgtaaaggaaaaagactggaatgtcaaaatgtgtcatgttcgaataaagatacatgttgtctcttaagaactacttccaacgacactcttaaactggacaaattctgccaatccaggacacatgctatccctcaaatttgctcga

SEQ ID NO: 20410 - DNA, 201 bp, Bos taurus
aaggtctatgtaaaataaatatggagacttactgcaactgtaattaaccgtggaattgaggtcagaatcgctaaaacatactaccaatattctctttgcaatatgaagcaatgtcacttggaagagatggtgtggtctgtatgtagtgggatggacgtggggaaggagttcacagaaggttgagacgatcctctgtagact

SEQ ID NO: 20411 - DNA, 201 bp, Bos taurus
caggcctgggatgaaacccagtgttaatttacatcctattcttaattgtcaattaaaaactggatttagaaatttctcatttgctgatgattaatgtgtcaagaggtgcaggctcataaatggagctcagaaatgtaaaaggataaacttagaaacaaatatgtgaacttcttagaaatcatcctcttggagtaaagaggt

SEQ ID NO: 20412 - DNA, 201 bp, Bos taurus
tactcaaagtgaaattgaaaacttgactcaaggtcctaaggtgccggtgtcagatctcaagtcaactctaccatcacccggccgtggttcagcacaccagatcccaccgtgcagttcacagacaacttcctacacagtgtctccttcacacgacagggccacacaacagattgggttgtcaccacttcacagatgcagaaa

SEQ ID NO: 20413 - DNA, 201 bp, Bos taurus
tgccactcccatcactcttggcctctgttttccaaaattctacccatctctcaagggtctcaaatcccattatctcctggaatcttgggagactcacctcatcctcctctaaacccttgccgtctagatcattctggaagacataatccaccaaccacttattgctccagcagatcgaaagcgcctgcaatgccggggcct

SEQ ID NO: 20414 - DNA, 201 bp, Bos taurus
ttgacaaagtgcctatcggtatgaaatttgatctaatgataaacaagattatcatacacatgcctgagtcctgaattcagagacaggtaacatgagttggatgtaaggttccacactcatgtctaataaggaataaaaactatttcaaacaaagacctgtatatggaaaggtccactaaatggaagataggtaacctgagt

SEQ ID NO: 20415 - DNA, 201 bp, Bos taurus
taaggaaagtttcctaatgaatacactcattaaatgttggagtgggaatgtatatagtaggctatgaagtctcctactgtagaggcctttgaaaatatttaaaaaatcaaatagaatgggacttccctggtggtacagtgaatagaaatccacctgccaatgcagggaacacacatttgatccctggcctgggaagaacat

SEQ ID NO: 20416 - DNA, 201 bp, Bos taurus
gagttccagggcttgctgatagatacgtggtgattaacaattctcattgtgcccgtgtgccttgtgccctctctttgttgttctgcagttgggtatcaaaactgtgctatctatgttctttgaagactaagcaggttggacgtgcgattcagatgaaaaacaattactctgtgttagcttgcttttggcaagagtgtatta

SEQ ID NO: 20417 - DNA, 201 bp, Bos taurus
gcttgcctaacttgggagttggaggtggcaggtgggatgtttagccttgttctctctctcattcatgggacctcatattcagacttctgatattaactctgaattaggtaatacttgcaagcacagtgacacagtgagaaatgctaagaatgtactcattgtacaattttaaatgtttggcccattaacagtccatgctgt

SEQ ID NO: 20418 - DNA, 201 bp, Bos taurus
tccatgttctgcctacttgcagatgagacctggcaatcctgcttctagcctgaatagatctatattttaattacttccatattctaaatcctatctagggcctcttgccaggaccctagatcttttcataaaggaaagttttgttaaagttaattctcttttgtacatttgttttcctttgtgtttctctgggcgcaccac

SEQ ID NO: 20419 - DNA, 201 bp, Bos taurus
tttctttgaaggttagtgttttttgtgttctaaaggatctttacttatcctagggtcataaagacattctcctttgctttagaatatgtggctgttagggctggcctttaatccatattacactaacttttgtgtatgatttcaggagtggtatgtaagaatttccagtagtttcagctctttatgttgaaaagactctcc

SEQ ID NO: 20420 - DNA, 201 bp, Bos taurus
agactaagtgctatctttcaatatttcccacaaactttatttgtgaattaggcaaggtgttcaaaaaaggaagaacttgacaataaagataaaattttatgcacatcttgtgcacagatgtctgggggttcactttcaggagatgtcctatgctatgttatgacctttttcagatgtttacttgctaggaggatttcaaag

SEQ ID NO: 20421 - DNA, 201 bp, Bos taurus
caaacggctctgctctatgggcaagtgaaactgagattaatatgcgttgaaaaataaaatgcccttaccacatttttgtctgacctttgcacagttaagtaaaaatatttcctcactgggagtttttggcttcatgtcaggtttgcagaagggtaaaaaaaaaaaaaaagtccttgcagcataaggaggaagagattctgg

SEQ ID NO: 20422 - DNA, 201 bp, Bos taurus
tcttgatgcatgatgatgtcacagagccctcatggaagtctgaaacccgaaacatcagacttctttgtgtgaaaaagaaatatatttggtttaatcacatgtaattttttgtaagtggccaaagctatttgaaatttatatttcctcagacaacaaactagagcctgcaactgtttgtttggaaactctttttgctcaatt

SEQ ID NO: 20423 - DNA, 201 bp, Bos taurus
cagcactgctcttcagaggtgggccctctaacacaagcgggcataacagttctgaactgggacaggcgtttccaccaccagcgctgcccaaccgctgcctatcagtagcggccaagaagatgcagaagcttgcactagctctgacaactctcacaaggaagaaaggaagttgagccgattctccccaagtttatcccccaa

SEQ ID NO: 20424 - DNA, 201 bp, Bos taurus
aagtaggaagtaacaatagaattgtaaagacacctgagaaattcagagccatagcagtaggactatggctgctgtgtcttcagttggcctccggtccactcgccactttggaatcatcctatctgatgaacatgatgccaccgatgagataacaatgtgatgctcttcagagtatcctttagagaagtcccacactgggca

SEQ ID NO: 20425 - DNA, 201 bp, Bos taurus
ctgggagatagtggaggacagggaagcctggcatgctgcagtccacggggtcacaaagagtcagatgcaacttatcaactgaacaactataaccgtacacggtgtaaacagcaaagcctacatatagtatgaaaaagtatgagttttagcaaaaaagatctgattttaaactgtagtactgctacatactagcagtgtgtc

SEQ ID NO: 20426 - DNA, 201 bp, Bos taurus
agtagaagactgggccctcaggtctttgtgtgataaggtagcctgctgaggagacattgtgcttccagaaacattgtgcttccagcgactgtcataaacatggtctcacagttcccgaggaggccggcatttttgttgctgtatataaccgaagatggcaagttggttatttccatactagtttttttttttctttccgac

SEQ ID NO: 20427 - DNA, 201 bp, Bos taurus
ttgctggcccttcagacccaggttgtcatactcaaggcggtgaaaaggaatctgagcagcatagttgctcgaattcttgaggcttattttcaacaggcccatccagtccaccctgctgctgcctgctattctctagttggtcaggacagctggttccgggtcctctctttcctctttacaggcccgtaggctgaccagtac

SEQ ID NO: 20428 - DNA, 201 bp, Bos taurus
attgcaaaattagaaatgatggtcccttcaagtttaaccatttatgacagggaatgttttcaagattacccacttgtattttaaagacaatcactttcctcttctctgtaaaatgcaaaaatgcttttttaaaaaattaagataaaattaccatttctacatctcattgacgaaaagagagcaagacagcgtgttctaatt

SEQ ID NO: 20429 - DNA, 201 bp, Bos taurus
aagcggggaactgcggcggccgcggcggcagcagtccgggtgtgtgaaaggttttacccaggcggcaaaaggtcctctggcggcgggctcctgtctgcctgcagacaggccgggccgggtggactggcggccccgggccggggagcctggcgcgctgcaggccgaccgccgagcgggatcctggtgtccggggctgtggga

SEQ ID NO: 20430 - DNA, 201 bp, Bos taurus
tcctcttctcagctttttaaaaacattacatatacataaaaatttaaacatgcatttaagtcaaataactgtgatgaaattaataacaacagcatgactacggaagtgcagaagctttgagtcaatgacccaaccagcagcaagggtataatttaaaggcagaaatttccagtgcatgcaccgttagccacagtgaacctg

SEQ ID NO: 20431 - DNA, 201 bp, Bos taurus
gtgtgtctgatatcagtgtaatgttgggatcctgttatcataggtttgtgagatatacatacagaaattcataaagagatcaattgtacaaatgaaccaaagtaatatgattctataaaaaggagcagttcaagctaccattgggtgacggagttttcctcaaagagggggctttgtacaaggggcagaggaaaatgaagc

SEQ ID NO: 20432 - DNA, 201 bp, Bos taurus
acactgccttgcctacagagaggatccatgagaaaacttttgttgtgggtggtgggtgaatttgggtgatgaacaagatgcagggtgcattaagcagtgagttgtaaatgcacttggatgtggatctcacatatggatcacacatgactcattctttgatccgtttcaagtagatttagagggctcagggcagatttttta

SEQ ID NO: 20433 - DNA, 201 bp, Bos taurus
aaatttgaggtttataggaaccctcttactcatatgtaggaacatcaaaagaaaatgctgtcgtagtttaagactcaaataatcccttgacatgcaatccattttccctgtatctcacacagggcgtacaccatcaggtcgccggcgagtggtcccaattctgcggggactgaatggcatctattgtcgtcttggaggaag

SEQ ID NO: 20434 - DNA, 201 bp, Bos taurus
taattaaaagattgcaaattctcaaataatacatacaacagtggtgtccaaaaacatcatcatgaagggagaaatgtcttttgttctttcagtggcccaggatccacttacccattgtcagataattaccccatcaattttcctaaactgagatccctcctctctccccctgcctcagctgattctcaggccacacactat

SEQ ID NO: 20435 - DNA, 201 bp, Bos taurus
acagttgagtgtatctctatgaggaagcccaggtggaaacagaataagccttcagctgacccagtggattgtgaaataatactatgtatatcatttgaggcgccaggttttgggatgatctgttatatagcaatagttaacagatacggtactattttttcattacctaccttctaaaactgtccatatataatcattcct

SEQ ID NO: 20436 - DNA, 201 bp, Bos taurus
tagtgagtagtcttgaatcactgttaacctaaatatatttttacttaagtttttatagttaatttttaatggcagatcaatactttaaataatattaagggtaataaatgccttcttatcttgttcgtgatccccaaaaggcaatgcactatagtcagtatccctgaaaacagtacaatttgtagtctacctggcaattct

SEQ ID NO: 20437 - DNA, 201 bp, Bos taurus
ctcctatgctctgaaatacactttgttcttttaatagaatttgcttcacttgatataatttaaccttacaaaatcttttaaattgagcatagattttaaaataattttctgaagtaactgctcccatgaaaaaatgtggcagggaaaggaacaaagtctgttgtgaagatttgtggcacgtttctttcatagagtgaatta

SEQ ID NO: 20438 - DNA, 201 bp, Bos taurus
ataattaatttagcaaatatactgagtgtgtgctatatatcaagcactattcttagaagataattaaatagtgatcaagactaagttggtcaaagaaaccgggaggcattctacttgagttaataacacaaaggaagtgactgacagttgaagaatacaaagaaggctcctatccttgagaaacttgaagcctagatggcc

SEQ ID NO: 20439 - DNA, 201 bp, Bos taurus
tggaagtctgggccacttcggtgctactgtttgagtcagaaccaacaatagccatcacgcccacctggactccaggcccctgaccctctctgcatccctcaatcaagtccttgccgccctagatctgttccatgctgtagtttggggtgagaaaggcttgggggcctcactcagcttggggtgagtcacatggtaatgtgg

SEQ ID NO: 20440 - DNA, 201 bp, Bos taurus
gatcacaaagagtcagacactaatgagtgagagacactttcactttcaaatacacacacaaaatggagtattattcaaccataaaataacaaaattttgcgatattcaacaacatggatcaatcgacagggtattatgataagtgaaataagtcagacagagaaagacaaatactctatgttatcacttatgtatggaatt

SEQ ID NO: 20441 - DNA, 201 bp, Bos taurus
cagcctttgttaaaatattttctagctgagtctactctagagcttaaatctacccagcagcatctgcctcagtaatacaaatgcctgggcttcattttgtccagcaggtacctttcttttactacattatagcttagtatttgctctatgctctccattctcttaagggttaaagaaagtccctttcagttttcccgtctt

SEQ ID NO: 20442 - DNA, 201 bp, Bos taurus
ataaggctgtcctcaggagaaaaatatcagacaaaactcattttcaaaagcagacagagttgcaagtttagactgaatttaaaggagtgaactgaagtatgtgattttccttttttgttaccaaaggaattttttcaaaccaatagaaagaactaggtaagttattcactacagtactccatattttttaatgaatatggc

SEQ ID NO: 20443 - DNA, 201 bp, Bos taurus
tatgtatattagttgaaatgttaccgtttactgcactatgcagcatttcaaatggcttagctaatgtataggatattacatggccagctttaccatgaacgaatgaaaagacaaggacttatgggaagttgtattttagagagtactatgaaataatgacccacaaggagatccaaccagtccattctgaaggagatcggc

SEQ ID NO: 20444 - DNA, 201 bp, Bos taurus
atgctaaagctctgggaaattaaaaatagcaaatattcttttattactagcctcaaaaattcctactgaaagcatttggatctgctttcttcacagatatctggtaatcatattatatatgtagattgagattgaatgaaatacatttccaaacagtttaatactgaaacattaagcacaaaatattgcatatgtattgta

SEQ ID NO: 20445 - DNA, 201 bp, Bos taurus
tctattattacaaaagaatgtgtaattctcacttccatagtacactgttcaatccaaaagtaaaaagtgctatagcctatatgctatgttatacaacacagacaataaatcaacaaatattgaacaatattttctatttaaactggtcccttcattaggtggcaaaggaagtggggagatgagggacaggagttgatcttt

SEQ ID NO: 20446 - DNA, 201 bp, Bos taurus
gaaattcccaaggaaagataaaatattttttatttctatagtcttaaacttgtacacagtactaggcgtataactgtactcaatatatcttttcttgcatgaagtcattaatgaggtagaataggaacctagtcttttctatccagtgtgctgttctcttttgtttttaagctgtgctaaacacatgatacagttatcaat

SEQ ID NO: 20447 - DNA, 201 bp, Bos taurus
catggaaactccaatagatgggaagggataaagaacaacataaatatgtggataactgtaaaagaccacttttctctatttctttaaaatacatataactgtataaagcaaaaattataacaatttattctgaggcttataacctatgtaaatgaatttcataggacacagcataaaatttagtagaaaataaatgaaaaa

SEQ ID NO: 20448 - DNA, 201 bp, Bos taurus
ccaggggatcttcctgacccagggatcgaacccacatctcttgcactggcaggcagattctttaccactagccccaactgagaagtcccatttatattatgcttcatagttatttatactatttttttgagcatgtcagtgctttcaaatgtgtgaatttatttaattctcactctaatcctgtaagtatgataattcatt

SEQ ID NO: 20449 - DNA, 201 bp, Bos taurus
ctgctctagaacacctgaaatgttcctaccaccaccatccaacagaaacataaaatacctttcactttcaagagggcaataatgagatgatgttgttgaactgagaagtctatgttgttttaaatatagtttttattagtctaaaagaaattaatgctgttagtaggaaaattataaagttcagataagtatgcaataaaa

SEQ ID NO: 20450 - DNA, 201 bp, Bos taurus
agtcttttttatacatggtccattgaaatcaaaatttaaacaaggtccacatgttgcaattggctgatgtgtctgttagtctacaacagctctccctccttttttggcactgatttattaaagaaactaagtaatttatcctgtagaattttccacagaagtctattgactatattcctgtgatgttatttaagatgctcc

SEQ ID NO: 20451 - DNA, 201 bp, Bos taurus
ggtcttgatatgagtcaggtagtcctaaagataaagtatccatgcatttattcatcttctccctcctttttttctttcttccttcctccttccctccctctttccaattattattttttgagtaactatcacatacataacagcttctaaaacctggagatgcagtagtaaagaagtaaaccctcatagggtccctcctct

SEQ ID NO: 20452 - DNA, 201 bp, Bos taurus
aggataggaaaattcaggcctcaatgatttctccttcagagagaaaaaaaatgaggttttgcagagagaaggatgataaaaagaccttgacatttttcaatgcattcctgttttggagttggccctttgtttccagtgttcccttattcttttgatggttgtgcagtctgtactgatatccactgtgtcacccttgatatt

SEQ ID NO: 20453 - DNA, 201 bp, Bos taurus
agaattctatagctgaaggatggagtgaacttacacacccccaacctgctgccactcccaccacttctgcccctcacacattggtcactacacgtgcttatggttctcactccatatggggagggcattcccttttcccacatgtgtccatgaacatttcaagcttctagaacttgacagctgaaaagaacatttcaagtc

SEQ ID NO: 20454 - DNA, 201 bp, Bos taurus
gcatttaatcctttaagtggcatctttacctcctaagaggaaatggcttttttcagctttatgttatccacggggagaacactgaggccatgtaaggtggttctgtgtataaattcattgtgggcagggggtggtaggtgatggggtggactgaacccaagaaatgaaagaaaggaaagtatacaggcccacttgggctaa

SEQ ID NO: 20455 - DNA, 201 bp, Bos taurus
aggatagaaaggaccctctcctgccctatccagtggagaatcattttcctcagatttgaaaaaaattaaggatactgcctaaaatatcctctatctactctgtatcagtggatgaaatttttaatctctataataatgtacacaactaaggctaaaatatgttttcaatgtgatttatttttcttccttttgcatcccttt

SEQ ID NO: 20456 - DNA, 201 bp, Bos taurus
acattcaacaactcctgtcagtctaccaaattaactcctactactcagtgttatttcccttaagatatcaaccccctttggcaacttcagtcataaaaacgatgtggtaatcagacatctaagatagttcctccatactcaaccatagtggtaataaaaatagtttagtctctcagtcgtgtatggctccttctgacctca

SEQ ID NO: 20457 - DNA, 201 bp, Bos taurus
ccacccagggattgagcccgagtctcatgtgtctcctgcattgcaggtggattcttcactactgagctaccggggaaggcccctgattcaagtcaaggctgcagcaaatgttgtgctactggaggagcgcatattccagtttttgtttgtggggccatgagtgcctttcacaggaagtatactgggttctgtttcagggat

SEQ ID NO: 20458 - DNA, 201 bp, Bos taurus
taaaatataatttaacacctctttttggtcttatttttaatcactgcttaacaaaaagtatctcctgcataaatgaagggaccctagtattggtcacaatgtcaacttggttcagttctctcaaagcccaggttactgcttcccccaaagaataatgtaaacacttataagctcttgcctcctaagagttaagcagcttct

SEQ ID NO: 20459 - DNA, 201 bp, Bos taurus
tgaatggtctgctcaggaatcactggatgagtgttttttcttataatccatttggagatgaatttatcagtggtaactaaaagtattctgtggaaagtacttcaatttttgttttttttaaataagtggagattattccctaaattggtgaaggcagtatgagtcaaagtgtcttttctaagacagatattttttagaatt

SEQ ID NO: 20460 - DNA, 201 bp, Bos taurus
attggggttacaaagagtcggacatgactataactttcacattcacaagttgggaaaaaaagtttaagggatatatcatgaaaaatctcattatctggcccctgcattcaatatggagacaaatagaatgaaccagaggaaaagttccccttaaaatgaagatcagagcagaaaattttgcatttagaatacatcctacaa

SEQ ID NO: 20461 - DNA, 201 bp, Bos taurus
aaagctacccagtccagtattttggcctgttgaattccatggagtgtataatccatgggtttgcaaacagtcagacacgtctgagtgacttttactttcataggtgtgaaaattactgtcttattcccagtgttcattttctaagtttttgttaagtaaaaaatgttagtaatctagtgtcttcaagtttcctattttcaa

SEQ ID NO: 20462 - DNA, 201 bp, Bos taurus
gtataagcaaattcaaaggagtcttatttctgtccctggacatctggctccaaagagcaaaggcttaggaacaacaccattcatgacgggcaagcaaaatgacaggattagcaggagcccttgggcccacagtatgaaattaaatgagggataatggatctgaagtcttggatgccaacaaagagaacacaaaatgataga

SEQ ID NO: 20463 - DNA, 201 bp, Bos taurus
agtgattggtcaggagccaattgtgaatggaggaggttttttaactgcaaccttgaagctacccacggaatcctgacttgccgcaagctggaaggggcccaaaacagaagatatttcagtcagtacacagcttcacagagtcccagggtgggagtggggagaataccactgtgtcttttagacaagatcttggccaggcct

SEQ ID NO: 20464 - DNA, 201 bp, Bos taurus
ctctttcttctcacgtgacatattattggctggcttagcaaaagaacttgtgttacatctgccattgtcgtttgcaatcccaaccaattgtgaactaaccgtgagatgctcgtaaatacttcacaatactgacgaacacaggagtctcagggctggctaagataagttttaaatatcaaccgaatcaatcatgtgaagact

SEQ ID NO: 20465 - DNA, 201 bp, Bos taurus
tcatgtaatgacacccccaaaaaacaacagctacatcttgaagcatcataccatctcatcagcttattaatactcaaaaattacatcattatcatagctacaggcaagaatatttttggcagtaattaaagagtcatgattccatccctggatattatcccaaatcagctcttctgtttttcttctcagggactcccttgc

SEQ ID NO: 20466 - DNA, 201 bp, Bos taurus
ctttgttcttttattgttttgacgtgtgtttttatgcctttcaagggacttccacatctatgaggccatctcatactgatgacattcctgcgagatagacagacaggtattattgtaactcggtcactctcctgccgttggtcatggttcttgatggaagccaccatgtcccacagcagggaaagcaaccccatcattttc

SEQ ID NO: 20467 - DNA, 201 bp, Bos taurus
cgatggtcaggtgggtgtgaggcaaaccgcatcctcactggatttcccctgttcccgcccacgatcattggacctgtcattggtggatcatgatttgaagcgccatgaaccccttctgtcatcctggcccgggttcagttctgaagtcctgggcagttgggtggatgccaccaaacccccataaccacattcccagtgaaa

SEQ ID NO: 20468 - DNA, 201 bp, Bos taurus
gaataattccttagtataagtgtgccccacctgtttcatgggacatgcttacactaaaacattattacttacctgaagctgaaattaaccaagagttctgcatattgatttgcgaccttggcaattctattgaagaggctgctgataatttgttcagtaagtatataagatttaatctctagtctacatctgccctttaac

SEQ ID NO: 20469 - DNA, 201 bp, Bos taurus
ttccaacactagggcaaggggtgggcgctggcagattccagctcttaggaccccaagtacagacagccccatgcagaggaggaaagcgttcttggtccccctgggccttgattgccatagtctggccctcggatgatttatacaggccacacaaatattttttattccaattatcctaatttaaggacattttagaaaact

SEQ ID NO: 20470 - DNA, 201 bp, Bos taurus
ctaattggaaagcatattaatggtaacagagctaactgatgcccttcataaaagatgatcttccacatgggtggcttaggattaagaaccacattactgatcatgctctcagtttggtcttggtttgaaatggagagcacttacatttatgcagcaggaactagatatgagataggttctgaagtatatgaagtacattag

SEQ ID NO: 20471 - DNA, 201 bp, Bos taurus
ctgccgtctatgaggttgcacagagtcggacacgactgaagcgacttagcagaagcagctactatgtattgcaacacacagtatcctagatatgatttcagagcttttaagactactaccctaaggcttccctggtggctcagttgataaggaatccacctgcaatgcaggagacccaggttctattcatgggtcaggaag

SEQ ID NO: 20472 - DNA, 201 bp, Bos taurus
actttgtatccctttaacatagaatatctgaaatccgtatgtctctggtctaggtgccttatagaataccatgcaactgaagcattaagacacaatattacgtttttgaactcttaggaaagggagatatttccctgaatacattctggtgactgctttcatcaattaactgtacctgaccctccctgagaaaaagtcagg

SEQ ID NO: 20473 - DNA, 201 bp, Bos taurus
tcccgtgggggtagatggggttcagtcattccagaggtgtccagatgttcccgcaccccgtgtccctgcagtggcagccaacacggccccaatgttcgcgtccaacatgtcaacggtgagcctgcctgaagatctgccagtgggtgagtacaagttcctgtgcccatatcgtgccaaaccctcacccataagagggcccgg

SEQ ID NO: 20474 - DNA, 201 bp, Bos taurus
agtcaatcatatcccaccccactcccaaagccattgagatatatccctgatgaatgggcagcctcagatccatgaatccttcagccagcccaggtctgagtgctcaatttctcataactctgtgttaaggatgcaaagtgacacctgagacagctggataaaggatgaaataaggggcctgataagtgggatggatggctg

SEQ ID NO: 20475 - DNA, 201 bp, Bos taurus
caagaatgccacaatctccacacttgaacagaactctatgggcatgtatcacagcattttccacacaacattctaattattgctttacctatttatttcccccagtcaactctcaatcacttcagtattccatattcttggcataaaattgacacaagatataaatgtatatttaatgaatcaattagtttcttattctca

SEQ ID NO: 20476 - DNA, 201 bp, Bos taurus
gggaggcaggtatctgagccagttctccatatccaccttatgcccaaagcttccgacatctgtctgcccctcccgtcccatcaccctaacctcggcctagtggttccgttcccctcctcaagttgtctcccccgtcccaggggaagcgcgatgaggcacatctgacctcagcagtccccagctccggaacccctaccgtgg

SEQ ID NO: 20477 - DNA, 201 bp, Bos taurus
tactctgcctgaattgtaacagaagccctgtgtaaggcaggtgttatcattcccatcttacagaggaggaagctaggtccagtgaggggaaggcattgcctcaggccaggcagccagaagtgggaactggagcccagatggcagggacttaaattctgtgtggacacagaaacctataccacactaagccctggcagtggt

SEQ ID NO: 20478 - DNA, 201 bp, Bos taurus
acatgaggtgcctctcgggcagccaggcccttcacgctacagaggtcaccttacccctgggtgaccacatggaaccgtctgtaagcagagcccaggctgggagccagggcctccatcagctgagaggtccgaatttcagcctaaaacacatagacccctgagcctgcagaattcccttccaacctccccccgcccacatag

SEQ ID NO: 20479 - DNA, 201 bp, Bos taurus
cctgaggcctgagcaactcttggctgcgtgcacctagcttctctcctgctctgccagctctgtcccaggcacagactcccattgcagctattcagttgctttgtttagggcccttaccctccttgcactggttgctagtgcccctcagagctcccctcacctgcatcagccaactcaaatcttaaggaccatcaccctcca

SEQ ID NO: 20480 - DNA, 201 bp, Bos taurus
tccgtcctcttattttgcagtctccgcccccacccctactctctcctgagaataagaaggtccaccttgaacccttggacaccagtacattacaatcctgacacagtttccttaatgagctgtgaacccctgccctatattaaacatccttaggacagcttcctatctaggtccagacatgaatttgaaacaactgcatgg

SEQ ID NO: 20481 - DNA, 201 bp, Bos taurus
gaatccccttcatgaaactcatatcttcatgaaaaatcattatgaaaactatgtagcaacacagaaaaatgtttatgatacaataaataatgtttacatcggtgtaaaaatgtagccatggaatggcagcaactaccaaaacatctacccacttgggtatatggataatggtgatttactttttaaaaagttttttccaca

SEQ ID NO: 20482 - DNA, 201 bp, Bos taurus
aagttaagaccaaagaaaattcacaaaactgctcttctgaaattcatcagtcttaggatatacccatctgtaactaagctctcttccttttttcagaactatacacaatacgagacaggcaaaaaaggattcctttcttaatgtaagtgaattttagatttctctggcacagagaattctctcaagaaagctgaatcagag

SEQ ID NO: 20483 - DNA, 201 bp, Bos taurus
gaacaatagagaaagaccccagagaggctggcccgttaagagcctgatgcactgagcaaaagacaaggccccaggaggaggggattttaagtgcctcatgtaccaaacagcagagaaggaccccagccagagaaggacgctttaagtccctgaatgggccgagcaacagagaaggatcagccaaagaggccctctgatttc

SEQ ID NO: 20484 - DNA, 201 bp, Bos taurus
cataagtttgagcatgctccagagatggtgaaggataggcaagcctggcgtgctgcagtccatggggtcacaaagagtcagacaagagtgagtgactgaacaacaacaaaaacattcaaacaatggccatgccactcctatactgcagtgctgtatttacagaaagaaagaaagaaagaaaaaagctttgtgttctgatga

SEQ ID NO: 20485 - DNA, 201 bp, Bos taurus
agtatatagctcccttgctaagattagcaagtggtacactctctgtcccccttttgatgtctatatcagaagcgttctctgtcccttactttaataaaaccctgctatacaaaagctcttgagtgatcaagcctgattcctggtccagaagctaaatcttcttcggaaatcttgaatccaacatccttaaccataagctat

SEQ ID NO: 20486 - DNA, 201 bp, Bos taurus
gccagccagggctgtagcagaggccagaaggacaagggaaaataggaagaagtcatatggtgaatagctgaacagacccaaaaggatgaagtctgatagcaaggtgtggttccagatgtccatggccttgaccctgagggaaaaataaatgagtaaacatcaaaacgaaataacttacctggcatctccatcatatacgta

SEQ ID NO: 20487 - DNA, 201 bp, Bos taurus
agatgcttaatagatctggacatcttactggacgaagaaccaaaaaattttcaagagtaaagcaatgttttacagaccagagtaaaaagtgaaactgcctctttaattatcagaatatataaagtctgatactggtgaagtaacaggacaattgacaaaagtaacaaaaaagaagtgcgggatcaggcacgtatgtgtgaa

SEQ ID NO: 20488 - DNA, 201 bp, Bos taurus
atcttgggaactccccccaacccccaaccccattcttgacatgttgccttgtgctcacagcaccatcacctccactgggcctccactgggtttggaattactggattcaagttctctggagaattattctcctactttctgccaggatgagggatgggtggggcccatgtgtgcggagttgggagggaactgtgctccttt

SEQ ID NO: 20489 - DNA, 201 bp, Bos taurus
agctggatatgtcccaacccagagcaaaggaaccagtagttggaacagctctggtgacagactacttcttttctgaacttctatgtcccaggcccaggctacgtaaaatgaagaacaatggtggggaggtgttggggcagtttaaggctggtgcctcgttacatgtcacagaggccaactttgccaacagtactcaggcag

SEQ ID NO: 20490 - DNA, 201 bp, Bos taurus
tctttggtctcctttcccaggggagactgtactttggcacttggaaaggtttaggcaaatgtgagaatgtgggactgtcattgtggccaaggatatacatgtaatctcatcaggctaagctgtgttgagtgacagcaatgtcaataggctgttatcctgggctgttcctattgtacatatcaagggtctcttcccacttct

SEQ ID NO: 20491 - DNA, 201 bp, Bos taurus
aaaaaaaaaaaaaaaacctttctgaacttgattctttcaagaattcttccaagtgaggtccaaaattattctttatctaggaaaaattaaagataggcctaaagtgtgagtttctaccaggaaacagtgtgctttcaaattgtcagggcagtgctgaaaggataaaggggccaattttaaaggggcttccactgacaagca

SEQ ID NO: 20492 - DNA, 201 bp, Bos taurus
tgctgatgtcctaaatgtctagttatttacaagcatatggctttccattcctgtgtattaagggtcctagagtcttggtcaggtatagactcagtacttacataagagggaaattaagtcggggagtggggaggagtctgtcacttgtacccccttacacttgggcaaactgaaagggagtaaggacagtggtcaactcct

SEQ ID NO: 20493 - DNA, 201 bp, Bos taurus
ctcattttatggttaagtaatcagccatgaaaaggaactcattagaagtcagttctaatgtgtgaatgaacctagagcctgtataacaatacagagtggagtaaatgaggaaaaaaacaaacattgtgtattaatatttatatatggaatctggaaagagagtattgatgaacctgtttgcagggcagcagaggagatgca

SEQ ID NO: 20494 - DNA, 201 bp, Bos taurus
taggtggcagtgaaattttagaatatatattgccaagctttcttgaggaagattttgatattctgctgactttcatgttcacttcaagagggtgtctacttagggtagacaccttgagacaccaagttaggcattgagttattttgagtaaagtatccaagatgtgaccattgaagaccatggctttgctcttaattggca

SEQ ID NO: 20495 - DNA, 201 bp, Bos taurus
cttgatttcttttttctttgtacttgcagggatgtgagaatgtcagtggttgtgaagaagtatgttacactgtcattaatcataggccctatcggagaccctccctgaactccaacgatgatggttatgagaacatcgcaaagagagtgagaccattaagagaaaggccagaaacagaatatgcccttctcaggagacctt

SEQ ID NO: 20496 - DNA, 201 bp, Bos taurus
aggatgtgtcagagtatttcaattttgtagttacaagactgggatagagttcataaaaatcaagaagagggccatgtgtggatttgacccctagttatgacattacaagtccatgttctcagcctcatgcttttgattaagcgatgttcaaatagatagcagagccatatatgtttgagacatctctaatttgagggaagg

SEQ ID NO: 20497 - DNA, 201 bp, Bos taurus
acccagggatcgaacctgagtctccagcattgcagatagattcttttaccttctgagccaccagggaagcccaaatcaggaaaagaacaacactcttactctagcaactcttatagcaaaggtggcgtggatcatgctggagggcagataaaaactaatcagaataagtcagtcttctctgtctctctttgaaagacactg

SEQ ID NO: 20498 - DNA, 201 bp, Bos taurus
tctttgattcatggccctaacattccaggttcctatgcagtactgttctttgcagcattggattttaccttcatcaccagacgcttccatatctgagcattgtttctgctttggcccagccgtttccttctttctggggctattagtagttcttccctgctctcccccagtaacatattggacatcttctaacctggggga

SEQ ID NO: 20499 - DNA, 201 bp, Bos taurus
tgtttttctcttgctgagggctaccttattgagccccatattataaaattaattgctctgtgccaagtttttcttgatgagtggtaccaaaacattacagtatcttttgaaaactccatagaaatattattaccaaaaactgatcactgaatttctaccagtgcttggcatttggtaaagcctactggctgttatcattaa

SEQ ID NO: 20500 - DNA, 201 bp, Bos taurus
ataatatttgatttcctttgtttgccaggtcaatctaccatactttattattgttggacagttttcactttgctcatgggagtatatgtgtatgtgagtatgtcattaatttaattattatttgcctggttttgtaactgccatttgtccggggttcatctttggtttctcattcttggatatttgttttaatctcactta

SEQ ID NO: 20501 - DNA, 201 bp, Bos taurus
agccaagagcaatccttctgcacctgctaaagtcaagaaaaagaagctctgtatcccacatgcaatgaaggagatagacttgtttccaaatagaaaatcacaggccattttgggtacaatgttggaaatgtaggtcaggtccacgagggagagctgactgagtagaaaatacatgggtttctgaagatgggtgtcgagaaa

SEQ ID NO: 20502 - DNA, 201 bp, Bos taurus
taatgagtgggtttaatagcttttggtgtgagggctgttttttactatggattcttgctcctcttttctaagtatatgctggccattgtcctcttgataaaaggtgtcactcatgttgtggtgaccaaagcctgcactggatatggagcagggcctcctcttttttctgtggttgtcacttccctgtcagaagcagaggct

SEQ ID NO: 20503 - DNA, 201 bp, Bos taurus
gggtcgccgaaaagcttttgctacctgttcttcccacctcatggtggtgggaatgtattatggagctgccatgttcatatatatgcggcctgtgtctgaccgatcccctacccaggacaagatggtatcagccttctacaccatcctcactcccatgctgaatcccctcatctacagcctccgaaacaaggaagtggccag

SEQ ID NO: 20504 - DNA, 201 bp, Bos taurus
catatttttcaaagagtatgattgttcatactctttacttgtaatgatatttctactggggtgctgatcttttgcttatttattcattatattctttatgaaatagttatctgaactcactgtcattaatctgaacccatttatcattgatttttattatttatctccagtatctgttttgatatttatttctgtgttgct

SEQ ID NO: 20505 - DNA, 201 bp, Bos taurus
agataaaataaatgttttacaagatggttttatgggttaaccaagtacttacattgacctttctaacagaaagattttaaaaggccagcaatactgttctttaattcaacatcagctcacgagcttttctcatgtgacagaatctacactggctccttcatgctcatgaagaagcagggccagggctctgacatacagagt

SEQ ID NO: 20506 - DNA, 201 bp, Bos taurus
aagcacagcatctctttcattggctgtggaatccaaatgtttttctgcctgagtctaggtggtgctgagtgtctccttctgaccttcatgtcgtatgaccaatttgtggctatttgtaatcccctgcaatacacagtcatcatgaattctaaggtctgtttgctcatagcagtagcatcatggactgggggtgctctaaat

SEQ ID NO: 20507 - DNA, 201 bp, Bos taurus
cctgcagccgctggtgatgggtgacacgcatgcttcctgcctgactggaaagggcactggtgtgagcagagagaaagtcgggcctcagcagacagcatgtagagtctggttcccgggagcagccaagacccagaaggtgctggcttattaaaatagcagcctgcttcttcccacagacgtctgggaacgagcagcccatcc

SEQ ID NO: 20508 - DNA, 201 bp, Bos taurus
ggagcccaggaggaaagtggtggcccaggatgagtgagtgctacagtgggaagagcaatgccgagtacagtgaggcaccttcctccactgtccgcgccagtacaggggcccaggacagcaagctgaccggctcaggtgtcctgctgacaggctgacctggtactgtggtttcactctccacatgtccttgccacgcttagg

SEQ ID NO: 20509 - DNA, 201 bp, Bos taurus
cctcagctttctgtgtgtccccagggaagttactacccagctctgccttggtttccttcaaagttggatgcccagaggcccatccaactctgatatttttagatcctgcagtcatcacttttcctgctgtgtatcagtttgatgtatcagtgtgatgcttttggagcattcaggtccgcgtcaggcctgagccccagcctg

SEQ ID NO: 20510 - DNA, 201 bp, Bos taurus
agactctcccagagggctgcccgcccgacagcccctgacttgccccattgatcccgaaacagagactgaggcccagaggtgatctatgggccctaatggatgatgcagtccttggggaaggggatggacgagtggtggaggagacccctctcctgtgtagagggggaaactgaggctccacaggtcaataaaggtggatcc

SEQ ID NO: 20511 - DNA, 201 bp, Bos taurus
ctctatctctccaccatgctctaagcacttcaactgcctcccatacttgtgtttttatttttatttggcggcggagggactggaggggcacacggtggccacgttaccgccgtgtctgctcccggaggattaactcctttctcctcccattgcagaagccctaatgcactcctgttaaactggcaggaatctcagaagtga

SEQ ID NO: 20512 - DNA, 201 bp, Bos taurus
gtccacacagccgctgggctggtgggagcccgaggtcctgattagagtggcttcctggaggaggcagtgctggccaccgctggacaatcagcctgaggccggagcttggaggaacaaagtccaaggaccgcaaacactcctgtgaagccctgacccgagagacacagggcacccaggccagacctcggcccggagcagatg

SEQ ID NO: 20513 - DNA, 201 bp, Bos taurus
ttggccttcccttgaccctgatgtgtgggcggagcctggccccacagtgctcctaggcttccttccaccccctgccagcctaagtggctcctaacccctcagtgcatcacctataaggcctgcacacaggcacaaagaataagaaattcactccccagctcctaattccttccctgcctgggggtctggctgtgtcaggct

SEQ ID NO: 20514 - DNA, 201 bp, Bos taurus
tgtgaccatggcagccaatgagagtcagccctgagacttcagctctgagcttacagaggactccactcctggctggggctgggtggctgcagggaggtgaatctggggccaaggttaaagcacctgtagacatttcagtgcctaggatccccacaaaatgatttaatgtctggggcggggaggggggggtggagaaaaacg

SEQ ID NO: 20515 - DNA, 201 bp, Bos taurus
caaaaaatatcagaaatgtatgtgaatccaaatgtagacaacaaagaggtgaaaggttgatgtctggatgtacgaaagtcaaggatgatgttagtgcttacgatgagtgtgtctaactagaggatttatttctcacgattccctactaattaatgattgaaactgtgcacacttgaaaatcgattctgggacaggggtaaa

SEQ ID NO: 20516 - DNA, 201 bp, Bos taurus
aatccttccggctctgagttgcttccaacaggaccaccatcacctgcttggggttggctgtgacccacctgccccccacccctcgaccccggcctttcctattccttctgatgatgattccagtgacatttccagcctggatccctctcccagaccagatgcatctgtctatctactgcctcaccatttcaccttggggac

SEQ ID NO: 20517 - DNA, 201 bp, Bos taurus
gcacgggtcgacgtcaacgcgcgctcgcacggcggctatacgccgctgcatttggcggcgctgcacggccacgaggatgcggccgtgctcttggtagtccacttgggtgcgcaggtgcacgtgcgcgaccacagcggacggcgcgcttaccagtacctgcagtcgggcgcctcgtatgctctgcgtcgcctacttggcgac

SEQ ID NO: 20518 - DNA, 201 bp, Bos taurus
agacaagagaaattactatttccagatataaggaccctggaaagttggagaaaaaggagaaacaaaggaagaaaccccagacaagtaaacagaggaaggtatcagaaaacaggatgatgtctaatcatgaatcgcaaacgagagacttcagatccaagtcttgtaactattattttaaaatcaaccaccctatccctccaa

SEQ ID NO: 20519 - DNA, 201 bp, Bos taurus
acccccacacccctgacttgctctgtgggcagttgtatgaggaggcacatgtgagcagggctggcttcctagagaccctgctgtgggtggcccaggaaacgtccagagaagcaggaataactctaagtgtaagtcacatccaaatgtgcaagaatccaccttcctagttggcctgtatatatgtgccaagaatcaggctgg

SEQ ID NO: 20520 - DNA, 201 bp, Bos taurus
atgtggattcagtaataatagaatagtaaccatcgtgtattgacatctgctatatgtcagatactagacttgacctttatatatctggttaatgtctagattgttgattattccctggggctaggaagaactggaaatttaagtgatctcctgctttgggcaattaaaaaaattgtggtaaaattacttaacacaaaactt

SEQ ID NO: 20521 - DNA, 201 bp, Bos taurus
tcaagagcacagtgatgcaactgaggagggaggccaagatgatgtaaagctgcctttatgacagagatgcagacgtttcaggaaggaggcactgcacaaagtgagatagaggtacagggccccaggcccccagagtccccacagggacatggagctgtgggggaaactggtagtgggcttgactttattgcacagtaacca

SEQ ID NO: 20522 - DNA, 201 bp, Bos taurus
aagtcctttcacagcacagcagccaacaaattgggaagcattgttcctaaaggcaaggggtgggccatgagttgtaactccaactctgttagaggccagcgatgtttgtctgcttcttgcctctgctgatgacatttgggggaaaaacaagtatggaagggaggacaagtcacaagatagcttttataaaatgcctattat

SEQ ID NO: 20523 - DNA, 201 bp, Bos taurus
aatgtgcctgtgggaaagatcaccgtgggtagggtgaccaccttcaactcttccccaggctcagccctggactaggagcacacgaggttgtagatggaagtttgtgggaccctctgaacctgggtggtcagagataatgcagtacaggctagggctggaggctctggtccatgcaggctccgtgccacccactgctcttct

SEQ ID NO: 20524 - DNA, 201 bp, Bos taurus
aagcaccactcaccccaagctgagaagcggtacccagtgattcacgcacaaccaacccacctgctccccctgggtgcctagggctgatgggtctgacccatggatggaacgccttgaatccagagccagttgccagagaagcagaaaaccctctgacaggcggtttgtggccacctggggccctcccgggtctgtttgcca

SEQ ID NO: 20525 - DNA, 201 bp, Bos taurus
ttaaaaggaaagctgtgaatgatagcggagagctccagaccctccaaggccttcatgcaaatgtctcgctgctctctcagcaccggaaatctgggccaaaatgtaatcattgctcaatttttttttttttaaatgttgtcacccagctgctttgagaggctgtgctctggtccaggtggtgtgactgtgtgtgcagagggg

SEQ ID NO: 20526 - DNA, 201 bp, Bos taurus
ctagagatttgcctactgaaaccagtgccccatgtggccaattggtctctcaaaagcagtaccatccactaatgcgtataacacatctggggatctgcacatcctcaatctctagctcctaacaagtggctgtctgatttgggaaccatctgcatatccctaaggaagcaaggtgtcaaggacttgccatggaatcagcac

SEQ ID NO: 20527 - DNA, 201 bp, Bos taurus
gccaatgcatactgttgacccatgctgccacacctatagtcttggtgagccctgaaaaggagcaacttgccatattataaaatgtttctgtctttcaaacatggaatgaaacccagcaggccaaactgtttcctctcttcgcagcctctaggaataccctcttcccctccctgacatttttaatataaaaatacaatgtca

SEQ ID NO: 20528 - DNA, 201 bp, Bos taurus
gtactgtctgtagattctctgaccatcatcatgactcaatgtcctgtctattgtatcacttactggcttattgtggaaaaaaattttttttattgtaacactcttgagttttcttgctttatttcacaagctcgtccaagatttactgaaaactttgccgcaaatgttcaccaagaccttggagactcagagtgccttggg

SEQ ID NO: 20529 - DNA, 201 bp, Bos taurus
tgccgggtttcttcacctccgagtgaacggcaacggggcccggtggcaggggaggagcattgaggaccagcccaggtgggaggaattagagcggccaaggatgccctcactcaagatggcggcgcaaatctcgcgcttggtcccgacaagcagcgcgcccgtttacgctgcatatgcggccctgcgctctggggggcgggt

SEQ ID NO: 20530 - DNA, 201 bp, Bos taurus
ccagcatatttgatatttgatcacagaattttttttttttaatatactgcattaaaccttggctcagagcacaacttaagaatttaggaatttaatctttaaggaaatgaccacactgtctgttaagcacagtcaggaaccaatgtctcctattaattctaggcctttttttttttttttttttactagtataccatattg

SEQ ID NO: 20531 - DNA, 201 bp, Bos taurus
aatgatattttaaaaatttcacctgatgaaaatgttttcttggacgttatgaatggctccaaagaactttaaaagcccaaccagtgatgctggccaggcacttagagattagtagttgttacgtcttggtttggtatgcctagtggtgtctaatcatgttgtgtgcttgggaaccatgaaagaattttcttttcaagtctt

SEQ ID NO: 20532 - DNA, 201 bp, Bos taurus
ccgcagtcactttattgcatgtggcacgtctagatggaaaggctttgcaggaattttgctttatgggtaataaaggcctttatgtgcctataatgtggacgtgggtccaaagaggattctgccctgctttctaccaaggggcttggcggagactcctgtgggggctggagctgctggccctgctttgagtagactagaccc

SEQ ID NO: 20533 - DNA, 201 bp, Bos taurus
actaatcagtttcagcaaatagggaatggtatacatggagtctgtaaactgtgagcatcagctgtgtatggcagcgaacccacacttctggcccagcccagctgacggggattgctcaaggatgggaggtggcagcagagcccttgagccacaggcaactcagatgaccccagggccagctgccggcccggcccgagcaca

SEQ ID NO: 20534 - DNA, 201 bp, Bos taurus
cacaagagactttgcagatgtaataaagttcaggatttggagatgaggttacatggctgggtccagtgtaatcataaggccccttgtaagtaagggaggaaggcaggagtgtcagagacagaaggggtgggatgacagaaacagaggtcagagaaaggcagagaggagttggaaagtgctacacggccagctttgcagatg

SEQ ID NO: 20535 - DNA, 201 bp, Bos taurus
ccaggccctcattaaaagagagacagagagagaaagagacagagaaacccacagtagtgccctaagcccatccctgtggtaagaagatcgtttgaaattacggtttctcgggaaagtggaggtggcctgtttcctcttcctgcccagagtactggtgcaggctctcccctagagaaggcacagtggccgttggtgggggta

SEQ ID NO: 20536 - DNA, 201 bp, Bos taurus
ctgtgtggtagggacagttggcacttggaagggagctcagtgccaggccctgagcataggcatagtgttgttgcttgactgacatgttctaggaggccctaagtcacagcttgtttggggattgtcatgccctcactggaggacctggctcagatttgggagaagattcctacaagggggccgtcccctcacatccatcag

SEQ ID NO: 20537 - DNA, 201 bp, Bos taurus
tgaaggacaggggagcctggagtgctgtggtccaaggggtcacaaagagttgaacatgatttagcaatctgggaagatcctcactggaggccaaatcttaatccatcagtctttgtttgcaaatgttagtgagcaggagagttagagagcagcagagagctcaataaaaattcagagtcctgggccccccatcccagaggt

SEQ ID NO: 20538 - DNA, 201 bp, Bos taurus
ttggcctggcttaccctctcgtcatgtgcccccaccccaccctagccttcccttcctttccggagaaactcaatccccaaggcctagttcccatagcagtattgcagtcctttgtcttcctcaccggctgaaacgggtccgtgctggtcttcttggccttcagcacttgtgctgggtctcagagcttcctcctgtgtgtga

SEQ ID NO: 20539 - DNA, 201 bp, Bos taurus
acttgtgccctgtggtttgaatggaagcaaccttatagctctggccatggttgctcagatgaggtctgatgcccctgccaaactgcaaataagctggatgcggagaagccaatacttttctgaggaggactggcatgaaattctaccccggataattcattctgggtgatggcagatatggtagtttctcttaagaaatct

SEQ ID NO: 20540 - DNA, 201 bp, Bos taurus
gaatgagtggtggtttgccttctgtctcctgtggatgtggccaggaaggctctggaagagccaagcagtcctggctcaggaggaagttcacagtttctgggggctttaggaatggttctgcagctcctatgctgacctttttctcagaataaggcccagtgaaggggaggggagggtacctggtggtgaagaaatacttcc

SEQ ID NO: 20541 - DNA, 201 bp, Bos taurus
aaggccgctctgtgacctcatattgtgtgtctcacctttccttgaccccctatagtctataaattcattattcttcttactgtttccagaactaagcacttggcctaaggcctactaggtatttgccatgtgtaaattgaaaccaagtcttatttcgtagaaactaggattaggttctctgatagctcagttggtaaagaa

SEQ ID NO: 20542 - DNA, 201 bp, Bos taurus
ctggctgagaaggggtagaatgcagaaaaaagttgattttcaaatggccaggctactatcaacatctgctttcccacctgtctgcacactcccttacattagacctggctccagacctggccctggctccctcacatcggacctgactgtagaaactggacagaaagcccttcatctcttattctctgccctttgctgctt

SEQ ID NO: 20543 - DNA, 201 bp, Bos taurus
atctcctatgggagaaaagtgcttgccttttaaggtgcctcttatagcccccgaaaaaggcaggagaggaggattaatgctccagaaataggggccctgatgggtgcctcccatacacttggttccttccttgggaaaagacacttctgtgtggagaaaaccataaaaccacatttaaatcacactctgcccagaggtggg

SEQ ID NO: 20544 - DNA, 201 bp, Bos taurus
tcagtaatgctcacattcacatcagagcccctctccctcctgagagcctgctctcctaacagaagtctcaaggagcccaaaggcctgcaggaaggaccaggcagagccctgagagatcattatgcttctgatactgtctcctccctgctgagtcttaatggggaaggctaacggggtctgcttagctgtgtgcacacatgt

SEQ ID NO: 20545 - DNA, 201 bp, Bos taurus
aataaggattccacgtctgttttcaggggccaagctgaataaaggtcctctaatttgcataacaaagccagtggaaggtcctgggcaggaaaccccaaagtaaaggggccaagtttcctgagggggcctgagaaaaacatggccctctccccaggacctccttcaagctggaatcaaaccagcaatctaaagataagctca

SEQ ID NO: 20546 - DNA, 201 bp, Bos taurus
ttcgctcgcttatgggaaacccaaatgaactttctggccaacccaataccttggcggttgacatcaggagggtgaccacacaccctgtgcacaacaccttagagaaactggggaccccaggccagacagggtcatagactgagcccatgtgaacaatgaactcggaaaggaagtcctatgagggcacttgggatggctggt

SEQ ID NO: 20547 - DNA, 201 bp, Bos taurus
ggaccacggccaaagtactcattcgaggccaggtggaaggagtaggacagggctctgcgaggtggaggcgagtgcccgcctaggacctggcatggtgagcgcagctctcctactgaggcctggaggagccactggaggtctcatagtttctgtgcacacaggtggcatctgggttatacccatccctggtttaggtgtcac

SEQ ID NO: 20548 - DNA, 201 bp, Bos taurus
catgggtctcaaagaatcagatgagacttagtaactgaacaacagaagataacagaagagccactctgttcccagaggcattccttgagaggacaggccttggggcaagccccctgctcattcaagaacaaatctcctacaggctggtctagaaacttctgctgttttccttttaaacagcatatgtttcaaagtggatac

SEQ ID NO: 20549 - DNA, 201 bp, Bos taurus
cagagcagtggtgcttaagagagagtgattttgcccctaggggacggtggccgatgtctggacacagtttgattgaaacagatgggggagtggggaggggctactgacatttaatggggagaggccaggaatgtagctaaacatcctaactgcacaggacagcctctcacaggaagtttccagcccaaatagttaacagtg

SEQ ID NO: 20550 - DNA, 201 bp, Bos taurus
ttggtcctgccttgtccatcccatccagccaaaacagcccatctgcaagatgcactgcatttcctaggaaggagggcctttgagttacaacccattactcatacttggaggagtcaagaggaagagcttttaccataactgggtttcacagagagtgcagagggtgagcactgtggtggccaggaaccctcagcacagcac

SEQ ID NO: 20551 - DNA, 201 bp, Bos taurus
gaaaagcactaaattccttaacttgagatatttagttttccttaattaacagcactcttttgatgttctgattatctgaacatcgttgtaaaaccttctatgtatcctgatttcccatgttatggagcagtctctcagaattgtctgagattctgtgtctgggcttaagtcctcagttttgtctgccaaataagatgtaac

SEQ ID NO: 20552 - DNA, 201 bp, Bos taurus
aatggaatctactccaattcatgtaaggcttctcagaggaagagagccaggctgagacccaaaaggatgacgagtagttaaccaggtaacaggccaggccaggaaagaggtccagacacaggcaagggaataggaaggctgtaggtgggtcagcagaccctgcaggtggcaggctccctaaatggaggggtggaggcagga

SEQ ID NO: 20553 - DNA, 201 bp, Bos taurus
attgggggttagctagctatatggaccagaattcccaaagccaaagatcttggaaaataagaaaggataccaaatggcctgtagtgttccctaccaacaacgataacaacttccccattcgagcttcccttgactaatggaagcagtttgctcttgattctgccagaataccaacccccacccccaccattctggccagcc

SEQ ID NO: 20554 - DNA, 201 bp, Bos taurus
tgagtatatcaagggctgaagtgattaacatctgctgcatgcctataatccatgtgaaacaaactaacgggatatttttggcttctttttcttccctttcgtgcctagacaactcttattcttattcagaactcagtttagaagttcaaagtcattcattcattcatttaattaacaaatattttaaaagagaaattaaga

SEQ ID NO: 20555 - DNA, 201 bp, Bos taurus
cttttaaaatattggctataccttaaaaataaataaaaatgctccaactgtgatcaggtgtgcagacttgaggtggcaaaaggagcacatgatattggcactgcaattcctcatatgtcattggctaacttgccaaaggtgagattacgaagggatcttcattcaagagaacaaatatgtaactttaagatttctgagtgg

SEQ ID NO: 20556 - DNA, 201 bp, Bos taurus
tatacaagtgtaattactctgttttccaattcatgttgtatttgtgtttgtacacacttatatttgcatgaaataaaaatgagggaaagagtcagtgttcatagcccctgagggaatttcaactgtcataaaatcccaacgacagagaagctgagagatcacactgagctatgcctcatgtgaagtgtgtgtgtgtgtgtg

SEQ ID NO: 20557 - DNA, 201 bp, Bos taurus
ccccaggccagcctgcagggaggattagggctggcagcccaattgtcccctgatgccccctccccatttgtctaatccgagtgtatatgtgtaccttgatggggtgccagtgggagcttggtggccagggacctggggtgttcagtgccaggcctgctggcagccacctttaccacggagcagctttgaggatttatttct

SEQ ID NO: 20558 - DNA, 201 bp, Bos taurus
ggcccagggtggtcgggtcccccactaagggaagagtgtttcctgacctgggtcaggggagtggctctgatgctgtagaggggtggggcagggagtatcaagcaggccctgggccctgacatgcagttggcaggtggctggcctcttctaaggcctgaaggctggctctggcaggagatgagtgggtggctgcagttgaga

SEQ ID NO: 20559 - DNA, 201 bp, Bos taurus
aggcccacccctgccctggttcttcactccttctcagtctccctcagctcactgccctccactctgggctgatgtgtaatgtcgtaaatgctaaatcccaatctggggaggaggcgagctgacggcctgtgggtgagtgggctgcagtgcatacagccctcttcctttcctccctgcagcaacctccccttggtctcctcg

SEQ ID NO: 20560 - DNA, 201 bp, Bos taurus
tgtgaatcattttgtaaagcaaataatcaatctaaccaaccaatgtctgccagcttatctatctcagagaattttcacataaaagttttgcttaaagttaactatttctgcctgtggaagggatcacaatgtgtttctgaaatgattacctttcaggggcagaggagccaggccaggtttctacaggatgagtacaaatta

SEQ ID NO: 20561 - DNA, 201 bp, Bos taurus
ttctaaacccacccagagggagggagcctgggcaaagatgacatgcatgcacacacacaagcctatgcacaccctgaaaaatatacacatacatgagcaggaaaaaacaacaacaatatcaatgtattggccagagttccctttgaataatgggattattctattcttctcattatactcctgtgtattttctacaatgaa

SEQ ID NO: 20562 - DNA, 201 bp, Bos taurus
gtacatattccaataagtaagtgggaaggattaattcacaggaaacaagtaagacaaaaatccccatttcacacacatccttccaaactcaaaatttggagggaaattacttttacttttggcgtaaattatactaacaacacctcagatcctgaaaagaaagttccaagaacaagtgtcaaagactacacaggggaaaat

SEQ ID NO: 20563 - DNA, 201 bp, Bos taurus
gttttatcccagtttttatagtttgtgataggagggtaaggccaatcccagctactgctcaatggctaagactgaattcttagaattaaaaaaaaattaacattgatattaggcctttaagagtggattattattattttatttatttatttttggttgctctgggtcttcagtgctgcacgggctttttctctagttgag

SEQ ID NO: 20564 - DNA, 201 bp, Bos taurus
tttcaaaaaagaaatgaaagtagacctctggatttggactttatgcatttcttttcctttctggttaaggaactctaataatgaagggacttccttccccgttatatttcaggaaaaccagtgcagccagttaagcgagagcttctccggcatagggactacaaggtggacctggaatccaaactcgggaagacaattgtc

SEQ ID NO: 20565 - DNA, 201 bp, Bos taurus
gactcttaggtttctgtctctgcctctgcccgtacttctctctcccagtttctctcctgcggggtccttcttaccagaactgcctctcgccccagcatcaattctggcctctctctgcctctctgcggcagagccccctccccaagatagggcccgggtgctgcacctcccgtcctgactcagagtccagtttcccggtga

SEQ ID NO: 20566 - DNA, 201 bp, Bos taurus
acaagatatcaattaatcacaaaaatgacaagcaagatcaacactcctatggtgcactccccactccctgcgcatgatcaaaggactttgcaaacactcagtgggcacagcaggcccaagaggtgagggaagttgtcgaccccatcttacggataaggaaacggaatctcagagaaatgaggtaagatgctggctcaccca

SEQ ID NO: 20567 - DNA, 201 bp, Bos taurus
aacctggagtgaatgcagttctgattggaggaatgtggggtatgggtgctattgcctgggctctgatccctatgactggactgggttcactcacaacccaacctttccacagagggggccccggtgctataggagatagaacagatcagaggcttgaatcctgcctctgccacttattgactctgggaccttgggttctgc

SEQ ID NO: 20568 - DNA, 201 bp, Bos taurus
ggaagatagcagacgtcaatactggggtcagggcagtcagtggtcagagctgactagccctggaactggcattgggagctgccctggcccgtccttagaaactaggagtccagcaggtctaactgggattgggctgccgatgacacgagcagccttgcccagaccacttcccacacgtctgttcagtctcccagtgtgtat

SEQ ID NO: 20569 - DNA, 201 bp, Bos taurus
caggatatccaatggaagagactagctggtgatgttgggaaagagaacaaggataaggctgataatagctgacatttatcaattcctttctgtgtgcaggagtaagcacttcatgtgtgcttgcccagtgaatcttcacatcagcgctgttaggaagggacccgtattatcccatttcacagacaaggaattaaggctcaa

SEQ ID NO: 20570 - DNA, 201 bp, Bos taurus
gaatgctgagctgtttcttgtctgataagggctggggtccttggtcttgggccaacagagtgagggtatattggggccactgctctctgtccagtgtggcattggttagcagcatgtatgtgttaccattggtccttttcagcctgaagtggcccagctcttggctcagccaacagtggaccagaccattgtttcctgagt

SEQ ID NO: 20571 - DNA, 201 bp, Bos taurus
ttcattggtaaggacaattttaattttagctgcaacagctcatatttttatttcccctgctgggataggagaaaacctaatatattcccaagctgaacttcaattatctgcattttgaacactgcaccaccatagttccagtgctaagtttctgaattctttttgaaagggcttctctaatgcactatggaaatttgtttc

SEQ ID NO: 20572 - DNA, 201 bp, Bos taurus
ttggggttcagcgttggtgtccagggtcttgcttgaatgccctcttctccccgcttgtaacagttctcatactgacaacttgagcttccccactcaactgagtgtttctgaaccctgaaattctttgtgtaattagcctctgattgctaaagattatcccatgtagagaatggaaccaaagcagttgtaaaatgagagctg

SEQ ID NO: 20573 - DNA, 201 bp, Bos taurus
agctaaatattataatgaatgatctcatactatcattttctttggacctgagtcgtgcttgtcccagtggtacccagagctacctcccaggcccctgctgttttcattcaggccagtacctgcaggtagtgttaaggggacaaggagagcaaaaattagtcccttgacacaacctggccgctcagcttcttcaaggaggct

SEQ ID NO: 20574 - DNA, 201 bp, Bos taurus
aatgtgagtgagcctcatccaataaattgcggacttgactagaacagaaaagactgggtgggaagggacgccctctgcccggctgcaggagcagggccaccactttctttctgagaagaaaacaggggctcttctggcgtctccagcctgctagctttggaaatggagtttacagcatcagttctcctgattcttgggcct

SEQ ID NO: 20575 - DNA, 201 bp, Bos taurus
tgttttaattatttattaattccacaaaacattattatagacttcttatttatcaggtgttgggtttacagtgatgaaagagatagatgctatttttacccacatagagcttactgtcagtggtgataccatggtgtcatcccttatcttcatcagcaacctcatttatttgtgttttcagttgacttttttcaaccttat

SEQ ID NO: 20576 - DNA, 201 bp, Bos taurus
gactatggctagggaggaggcccaagccacctggacagactgtccagggaatgttctgggtttgccacagccaggcacagagtgcagttcacactatgatcctaggccctggatacctaaaattctgccagggctgcccctcaagcttacatgcttgggcccccagcctcccacaaaatggattttgcatgttactcttga

SEQ ID NO: 20577 - DNA, 201 bp, Bos taurus
gaatccagctctgtagcttgtagggtaggagacaggtcagtgtacacagaatccaaggctgtgccccccttgttctctgactgtgaccatgaatgggccacgattcttctctgtctctttgctcaggcttccatgaaggcttctttcctcttctttgaaatcttaaggaaaccatcctctagctaaatctggccctcattc

SEQ ID NO: 20578 - DNA, 201 bp, Bos taurus
agctgaagaatcatggtggtagtcatctctcagcatctctgcatttgtttattttaaagagatatctcacaaatgtatgtgatacatgggtattttctctcaaatgttttccggaaggagccataaaccatatggaaaataatagaaacaaaagacttctttttgatgcattgaatcagtgtagtctcttgaggagtggtg

SEQ ID NO: 20579 - DNA, 201 bp, Bos taurus
caactagagtgtaaacagtaaagttagggaaccctgtttgtcttgttctctgctagtacggtagcaggcacatactaggagtgcggtacttgatgttcccttgtaatccgttttcctctgtttgaaaccgcccctctctcctcccagcgctggcttcttcatgctcctaaaacaaagtctatcttatggcttttaagatgc

SEQ ID NO: 20580 - DNA, 201 bp, Bos taurus
ttcatgcctacgttattattattagccccattttatggatgaagaaatttgactcaggtcaggtaattttcctaaagaaagagatacaaccagaaaatagctgtatctggataccaaatgaggtaacactccagatgccactgttaaccactatgctaaacatacaatgatacaatattatacctttaataaagagctggt

SEQ ID NO: 20581 - DNA, 201 bp, Bos taurus
ttcatagtatatcaattaggaagtgtaaagaacatgaaattatgtgcagaggtaggtacatgggagggttttgggtctaggcctgcaatggcacacttcatttttgctcattccctgtaccactcattggtagatctcagccatgagtcacacgtagcagcaaaaggaagctgctaaatgcctggccaggaagaagaggag

SEQ ID NO: 20582 - DNA, 201 bp, Bos taurus
ctataaaactcctcctttcaaagtgaatcctcaactaaaaatcatcctcttccgattgcctttatctatacttcccagagtgtatataaggtgctgaatgttcaatgctgcatgcttcattgggccaacagaacctgtgaaatcaatctgttcagttaccaaatgacaaatacttgatgatggaatggtttcactcatttc

SEQ ID NO: 20583 - DNA, 201 bp, Bos taurus
cctggagcctctactcagcatttgcaattcatccttcagtttctgccttgaatcctaattagtgctatagtttatcagctccttgagggcagcagctgtgttttattataactggcttcctaaacgtgttaatcacctcaggtctcttcttgtactgacagccctttaatgactttaaagtgaacttaaaataaattcaag

SEQ ID NO: 20584 - DNA, 201 bp, Bos taurus
ttccagagagacatttataaatatgacatttataaatccataggccaagatgagagcaatgtttcattacagctcttagtttcctacattattttgtcacgtatttgttaattcaacccagcatttagtcattttgtgcaaaatagatttaggatctaaatccttatttacaaatagatttaggatctatactttttttca

SEQ ID NO: 20585 - DNA, 201 bp, Bos taurus
aaaaagagccacaaacgagtgctccttttagacagctgctatatttaaaccagagtttattaatccttatatagtctgtttctcaagtgcttcagaaaaggggtataaattgtatggagcatacagtggactctgattttgcacattttggcaagaagagaaggtcttagcttctgtacatatctctcctgcaagaaagaa

SEQ ID NO: 20586 - DNA, 201 bp, Bos taurus
ctagaaaaaggactattctttcaatagaaactttgcttttattcctcttctcgaggattttgaagatagtgaagaacatttcctaaacagttgcatctttatttgatttgaaattttaatgcagtttgttactctccaggaataatttaagacaaataatttagattttagttttaaaataattacaccggatcccccctc

SEQ ID NO: 20587 - DNA, 201 bp, Bos taurus
tattgacccataactggctacccgtctgatgcacaggggcagtcgtgaagaacttggtagctgttgtagctattctgttttactgaagaaagccatgactattaactatttcttagactgtcaaatgtgggaaaggaaaaagggaccatattgaagaaagagtagcatgtctttaggctctagaatgtggggaagcttctt

SEQ ID NO: 20588 - DNA, 201 bp, Bos taurus
tggaactgtcacggcgcctaaggtggtgggtgtgtcgcttagctaacgtattacagtgaacacataatgaggcttacagtctactggcaaatttcccaccgtcttgggcctagtttgttctgtcgcatcctgtttttctcagtggctctgtcctcctcttaatttcgttagtcattgtgccctgctcccttcttccttctc

SEQ ID NO: 20589 - DNA, 201 bp, Bos taurus
aggtttctcacgaggcaggtcaggtggtctggtattctcatctctttcagaattttccacagtttattgtgatccatacagtcaaaggctttagtagtaccgaaaggataggagagaaaccttcttgtcccaaagttagtctctggacttcctaggaagttgtcaggcaggaaaagcagcagttgatatgtatcttgtcat

SEQ ID NO: 20590 - DNA, 201 bp, Bos taurus
gcgttttgcttacacaatgcttaaaaggaatcttgagtcctaaaaggaatcttataaggagtgttctattattatccactgttattgatgaaagacctgacgtaaattaagtaacttgtgcaaggtcacaaaattagtattttgaagagctggaatgaaatctaggagtttggatccagaatatgttttcttaaccactgt

SEQ ID NO: 20591 - DNA, 201 bp, Bos taurus
tttgtgtgaagttcatagtatcctctcatagaactagtttattatcttttctacctccataatctatagccatttatgcaaattagaagaataggatgttggtttttccaaaaaaccttaattcattgtataatcagaattagtcttttggttcataagatcttattagaaaaggtagatacacaaatcttttattattga

SEQ ID NO: 20592 - DNA, 201 bp, Bos taurus
agaatactggagtggattaaactatccacataatctaaagaggcccaccaggcaatgtgctttcttcatggcaagagatgagagatgcagtgatttatttcttacttaagagagaatggccctccaccatcaagaccccttgaattctaaatgttacagatgtgagtggcctctacaccacaatagagcatctttcacact

SEQ ID NO: 20593 - DNA, 201 bp, Bos taurus
aactcctgcaattagttgaataaaataaaagagatggaattacatttgctctccaggtttgtaaagccctatccattgaacagaactgagaggagttacatagagatgtaaacacatacattaatttaggtattgccagggctactgtgttgttcaactccactgtacagccttcacgtaatgcttgtggctcagggtggt

SEQ ID NO: 20594 - DNA, 201 bp, Bos taurus
taatatccaatcacatggatgtgtaaaataacagctactgaggcaactgcccgtttcatatcattcaggctacattccataaaatgatgcgtgagaggccgttccaaatctaatgccaaggaaacaaaaaattttgctaccccttaccaacatctattcctcctgactaaaagactaacagatccatcacctttctctttg

SEQ ID NO: 20595 - DNA, 201 bp, Bos taurus
atacatcttaaaatattctttcctctggtatctacttcattcccattgtccctttcccccacatagttaggaaaacttttattctagcctggctgcttgtatgaatgtctcttgcccttcccaaactatcctcatacttctttgctgtctgcctcttcccttttcccaggttcattagcaatagcaaagaaccaaatggaa

SEQ ID NO: 20596 - DNA, 201 bp, Bos taurus
aacatggatgcacctagagatgatcatactaagtgaagtcaaaaagagaaaaacaaataccatatgatatcacttacatgtggaatctaaaatacggcacgaatttatctacaaaacaggaacaaagaacagacttgtgtttgccaaggggaagaggggtggagaaaggatggattaggaggttgggattagcagatgcaa

SEQ ID NO: 20597 - DNA, 201 bp, Bos taurus
atcaaagtgtagcctgagaccacatatgagccctacctgggaattggttagaaatgcaatttctcagcctccccaaagacttaagaaccagaactcctgcggaaggagtccaacaatccattttaacaaggtgactgtgtgatcctggggcttcccttgtggctcagctggtaaagaatccacctgcaatgcgagagacct

SEQ ID NO: 20598 - DNA, 201 bp, Bos taurus
gttgtttcgatgcctcttaggaaaggttgtctgcccatgtgtcccttcatactatgaagagattatggaacaagggaaagtgcttgttcagcccttgacacgcaaagagcatccccacctatctcattccagacgccactgcatagcttttggctgagcagggaccagctcacatatggttctcttcaatctcaatatctt

SEQ ID NO: 20599 - DNA, 201 bp, Bos taurus
aagaagcagccatgggatcaaggagatccaactcaagaaaaactaaggaaatcctaagtaacagtggaggaacatcccagatgacattcgtgcatgcctacagtaagcaaccagtctggatgactgcaacaggctggaaggctctgggagaactttctctaagatgtaaacaatagcacactgatgtgtttcaaagtatag

SEQ ID NO: 20600 - DNA, 201 bp, Bos taurus
ccaggcactcccagcagcagacaccggttttccgcggcgggcggcggcgtggttaaaaaaaaaaaaaaaaaagtgtcgcggcccctttaagagccacagcgccttctctaagataccatcttgcaccaggagttcacgtaagctctctacctaccttgctaaatccctcctcatttactgggtacgaccggcgggcgggcc

SEQ ID NO: 20601 - DNA, 201 bp, Bos taurus
cttatctatataccagtgctccagggaacctttgcaggccattctacctgttctcggttcaacttctcctctctgttctgaactcttcagttcccttcctattgctttcaggccaaattcctaagtctctgtttgcccctgtcatagtgagacctgaattgaatgaactgtctgcttcatcttggtttatctctggttagt

SEQ ID NO: 20602 - DNA, 201 bp, Bos taurus
tataaaattggtagttgatgggatttttacataaatctatttgagtgactctgaagtctgaagtgaaactgaaactgtgtgacaaaagaaacaactattacagaactaagagtgacttacaaaggtaaagttttctagaatatttattttgttactctgaaatccacatagtattgtgtgcctgctcaatacgctctgttt

SEQ ID NO: 20603 - DNA, 201 bp, Bos taurus
agatcccctctttctatgactataaaacaaatcaattacgtgattgttttttctactatagattaaggacattacattcatcagtgacacactacatttttaagtatattaattttatcacttcctaggtaagaggagaaacttgttcttcacaagcctttgctgacctcattcatgcaaacagcatttattgaatgttct

SEQ ID NO: 20604 - DNA, 201 bp, Bos taurus
aagtcttcctccacatcagacatgaagagaaacctgagcttggtgaggggatggagaactgatgagagtggagtggggatggaaggcctcccttgggggcggctatttgagctgagagccgaatgtagggaggtcagcagccacgcggcgccctagagaagagcactccaggcagagcaaacagcaagtgtaaaggccctg

SEQ ID NO: 20605 - DNA, 201 bp, Bos taurus
ttatgtcagtgtggacttgggaccactctcttctttttaaaatgtatgatgcaacatatataagctgttcacacaactcaacatcaaaaaaaaagcctgattaaaaaatgggcagaactaaacagacatttttcaaaagaataaatgcagatggccaacaggcacatgagaagatgctcaacattgctaattatcagggaa

SEQ ID NO: 20606 - DNA, 201 bp, Bos taurus
aaattgaaactcagattaagactttaattagctaaaatatagcctatcttcagagtaaaaaaaatcatctctattgtgtctccttctaaatacagaatttctccaataagaaataatttgtctcctatcacctgaaattttttttccttttaaagaatgtatttttctactattaaaaatttatacattatcaatgaaaac

SEQ ID NO: 20607 - DNA, 201 bp, Bos taurus
ttttccctttttaaaatattcctctccaagtaaaagatagccccttcaaggcaaaaataatagtgatacaatttttaaatcctatttcttccatactaaaatgtgggaggaaatggatgtcactttgcttatttttccccatggctcgtacctctaggaaggatttcccatagaggtatttgtcaaatgattaatacctcc

SEQ ID NO: 20608 - DNA, 201 bp, Bos taurus
cacaagagagtcagacatgacttagcgactaaacaacaacaaatcaggacatctacagttgtaattatattttcttggaatacactttctggcactcatggacaacaaaggcctcttgcagacagcccactgctagctgctggccaaagccagctacaaaaggccagtattttgtatatccagacatcccagtgcctcata

SEQ ID NO: 20609 - DNA, 201 bp, Bos taurus
gtcccatcctctagacaaagtaccccatgactctgaatgaaggagatgtaactagcttttggtgtggaggctatcaattagcgagaagagttgcatttgtatcatatcctaaaatagagactcttagtaaaaaatatggctttcaattctacaaacatttattttttactttgccacaaaaaaagattcgatagtctgaga

SEQ ID NO: 20610 - DNA, 201 bp, Bos taurus
taggcctaaaatgttttcgtctagtttctgaacgttggctctaatttttgctcttgggtctgagcagcagcagagtttaatctactttcttacaacagtccttcatcattaaatattttctcctttgtggtaaacatcctgatttattcaaaattacctcaaaagccatgtgttttaaagcccctctccatctttgttgct

SEQ ID NO: 20611 - DNA, 201 bp, Bos taurus
aaacccaagtctctcacattgcaggtggattctttaccatctgagctgccttgttcttttctctctctttctctgtctacctaccatttcccaaattcttttctctggcgcagagtgctagaaagagtattagatgggaagcaagaatgccttgggtctgcacattgctcaaccaccaacctaactctctggtcctttctt

SEQ ID NO: 20612 - DNA, 201 bp, Bos taurus
caagaataacagcacagccctacacacattaggtccttagtactgtacatacagtgagctctgccttctatgcggctttctgtcaaaattctgaccatttttcatgactcagattaagtattttctatttcttaaagattttccccatttattccatagatgtaatagctctaatatctattatttctcaattataccatt

SEQ ID NO: 20613 - DNA, 201 bp, Bos taurus
ctttacagaaaaaatagtggaaatattggttttagtcattggggttgttgttaactctgcctcagctacacattcctgtggcttttattgcaatcctattgtgctatggattctacaatcaattagtctttcagtcaaggctttaaattcttagatgaccagactaagccttcagtagtacacaagccagaatatacattg

SEQ ID NO: 20614 - DNA, 201 bp, Bos taurus
cagaaatgtatcagcttatgtgaaatggtgatgcgtgaactttggatacctgtctgttttgtgtatttagaattaactctagctggagaatgctgaaatatgtgcttcttctctaatataccaaagtttatggtgcttaagagatcctgttagatgttcactgaatacaagatagtttagtctgtctacatggtcataaga

SEQ ID NO: 20615 - DNA, 201 bp, Bos taurus
tctttgacagctcctctaattctaaaattctttaaaaaatgctgttctgtgaagttttccctcattcccttaaccaaatcagcttctttctcactcatatccccagtctacattgtccatacttccattatcatttatcatatggcattactattgcaatttatcactttgtttattttatttcagcttatcatgttattt

SEQ ID NO: 20616 - DNA, 201 bp, Bos taurus
ttcctaaatcagtatttatgtaattactggttaactgacagtctcccaaataaaacgtaagttctgtgaaggcaagagcttggtccttactcatactctcacactttttcccatggcagggggacagagacatttaagagaaaaaaatgaaagaaaaatcagttgtggttttaatcacaattgcactaagtttttaaagga

SEQ ID NO: 20617 - DNA, 201 bp, Bos taurus
aagtgttcagcatagatgatggccctagaaatgtgagcttttattattatctgcttgatatggctagataatgaagtacatattaaaaggtggttaaaacctgagactgaaaagacagatggccagagaccagatcacaaaaggtagtagagactatgctagagagttcaggctttcatcaaagagttggaatgcactgga

SEQ ID NO: 20618 - DNA, 201 bp, Bos taurus
gatgttttaaaaattttgcacctaatcatcacttcttccacaaagcttccaagatgttctgcaaatctaatttagagatcttcactgtttcattgtatctaggcatattttacactgatgcttagcccactgtttaaaatcttccatttgtctttcttctatgctagacagtaaactacttgaaggaaataactgtgtctc

SEQ ID NO: 20619 - DNA, 201 bp, Bos taurus
tccccagcaagagcctcctgctcgcagacccttccttggactcacctgcctttatttcccccttgtttcctcaagtgtgtggctgtggcctagcccagtcaggcttcttcttcaagaaccaggagtacatctgcacgcaggactaccagcagctctacggcacccgctgcgacagctgccgggacttcatcacaggcgagg

SEQ ID NO: 20620 - DNA, 201 bp, Bos taurus
cctctgcccaggccaggagccaatgcctccgtttccaggggcagtcaaggaaacgtgagtggaggcagggtaggattctaagagtgggcttgtgctctgggactgggtggccaaggccactcttccacccaggatccagccttgaaaatgtcaagtttgtgtttctgggttgcagattgacactggggaatatcttgtgtt

SEQ ID NO: 20621 - DNA, 201 bp, Bos taurus
tgagtctgcaggcaggccagcgggtgactgtgctggaggcccaggacaagaaggggaacccagaatggagcctcgtggaagtaaacggacagaggggctacgtgccttccagcttcctggccagggccccaagtccagctccgtggggctggagtttgccttcttagagtgccctcctttaagtctatgttccaggagggt

SEQ ID NO: 20622 - DNA, 201 bp, Bos taurus
agtctgtgggccctgggcagagcctgggtacgacactagtccctgctctgccagtccacgtggtggtcatgagggtctcccaagaccatggttcctggcccctacttcagagactaggatataagctctgtgaagtcagggactgtgtctggtttgttcaccatggaacctcctttgcctaacatagggcctaccatgctg

SEQ ID NO: 20623 - DNA, 201 bp, Bos taurus
ccctttttccctctcaagcctcatctctcgccatcttcctgtctcaaacctaacactccagctactccaaactgcacacaccatgttgctcccaacctccgagctcgagttgttggcccgtgttgttttctccaccatgttgcttcctggtccctacctgccttacccctatttattttaaaactcaactcataccaaaac

SEQ ID NO: 20624 - DNA, 201 bp, Bos taurus
cactacatccccacgggattcatgagacgattatttctactttccagattcgacaacttcagagatcagaggcccgggatgagactgcccaggaaataaccggttaaggtgggaactcacatcagaccaacttattacccgacccttccaaactacggtgtgctgccggttaaggtagttgtggtcgtggcgcggggccta

SEQ ID NO: 20625 - DNA, 201 bp, Bos taurus
ggaagaagtccatgcatcataggatattctcacgagagtgaagagacaacctagagaatggcagaaaatgtttgcgaaccataggcctgcaatgggtttaggatctggaatatctaaaggatgccaacaccaccattcacagtggtccaaaaacctgaacaggcctttctctcaagaaaacatacaaatggccaacggcac

SEQ ID NO: 20626 - DNA, 201 bp, Bos taurus
ggactgcagcactccaggcttccctattcctcaccatctcctggagtttgcccaatgagtgcaactgtctggtgggcaaaatctctacagatcaacaagtcctcactccagtctatgaacaggctttccggacagacggcaactcttaaaaggtggtagaagaagggggttcctccatctccctctctctctcttcttgcc

SEQ ID NO: 20627 - DNA, 201 bp, Bos taurus
acactagcctttctgctcctttgggaaagggagtggccacagtcccttctctctgcctggagatccagagggaagaggcctgtggggctgccaggttattggtggattagggcttcctttaaaagcttcctcccattattgccaaaggattataagcatcttcagacaattgcatccatccttccacaattatacctgcct

SEQ ID NO: 20628 - DNA, 201 bp, Bos taurus
ctttctgcctgttgctggattctcacctgcacgggtctgtctcttccacctctgccttccggacactgtttcctctccgctgcttcagagacctctgcctcggcctccacactatctcctctcccgggttctgctggatgaggactcagcccgccactgctggctgacgcttttcttctgcccctctgctcagctgccttc

SEQ ID NO: 20629 - DNA, 201 bp, Bos taurus
gcctgcagggaggtcgtgcagagtagaagagaagatataggtgacatggtctaacctggtggttcaaggggctcagtacatcaacagctctctcttcaacgttcaatgttcggggctgcgcttaggcccaggacccatcgaaagctgggctactgactttaggcaagtaaaatggaaccaatttacaaatttccatttata

SEQ ID NO: 20630 - DNA, 201 bp, Bos taurus
cacagagttgtatgttgtcttccctcctccacttctctcaagcctagaggtagaaaaatctcctttcttgcttccccgcttggagacaaaagcaaaacaatgcctgcatgtggctttggatgaaaggaacaggagagaaagcgtgaatgaaaggcttgtctgagatcgttagaagttgaagggtcagagactcataacagg

SEQ ID NO: 20631 - DNA, 201 bp, Bos taurus
ggtcttgtgaactgtcatggcgcctctgggtgtgtcatttcatttgctgattgaggatcaaggtctagtcttgtctgccatcttggtcccatttggccacaccccctcccccacccatgactatcttctgattagtcagtggtgaggtaatgggatggttctagggaacttgactctcagccttaagataccatcctcctc

SEQ ID NO: 20632 - DNA, 201 bp, Bos taurus
tctcctgaagatagacttgcatctgcattctccctgcctcccctcccccgccacctcccatctcttaccatcaaaaccttttttccaagaccttgttcaagagcttttttttcctccttaagagaaaagatgtcttaagatgtcttaggagaggttaattcattaccctgggggggttggtctgtccagaatttgaagtaa

SEQ ID NO: 20633 - DNA, 201 bp, Bos taurus
gcttattacccaagaagccctagacactggaatgtgctggaggggagaaggagagatcttggtgacagtggagtttggcaattcagcgtagtttggtgcaatgcatttcatttgctattaaactgccctgcttatgttttttttgcctatgtcatattccatttttatccctgaaaatatttatatataatgagcatacca

SEQ ID NO: 20634 - DNA, 201 bp, Bos taurus
cagtgcctgtgtgtgtctcctgacttgggtaccaagatatctaagatagagtgggaggtgatggattttgcatgagaaccagcttggggtaaggccacagtgtttaaatctcactgaataacagaccctttttttaaacaaatgaactcttgattggaaagtcaaaatacacaacaggtaaagggattctgttctgaatga

SEQ ID NO: 20635 - DNA, 201 bp, Bos taurus
cacatacctttgtgccttgggacctccttccgtgtctctgtcaaactctgcctgcaaaagaggatctttcattagtctttattcttgagcatgactgccagcctgtggttccctctccccgaaggatttgcattttaacatctcttggggaaaatattcattgttaaagaaagaattaatgataggtgaggaagggacttc

SEQ ID NO: 20636 - DNA, 201 bp, Bos taurus
ctgatggtaacagtcattggatgtttgccataggctcatccacagactgttggagtggcaagaaaccatgggtcttgtctagctcaaaccccatcctttacgtataaggcagctgaggtccagagaggtctcttgactctgatatcttctccattcctgttccaaggccatcatcttcaaggtgaccttgaaaggagaggg

SEQ ID NO: 20637 - DNA, 201 bp, Bos taurus
gggaagaaacaaactcctcccatgaggccaataatgatgacactcaagattgtggatggcgagcttgttccaaaggtaccgttgggcatgcaggctgcctcgcagtaaatcacgctgcaccaggcctcgcagcacattactggctggcttggtgtgttctctgggggaacaaggacaacagatccaggaagtgaaaagcag

SEQ ID NO: 20638 - DNA, 201 bp, Bos taurus
accagtttctgatatttacttacttacaagcacccccctgtccaggcctgagactttgttcacgggccaagcaggtatgtcagactccatcttctgtgagatctggctctccccagagagtactgggccctttacactaacctgtgtcctcaggttgctcttcgggaattcttcaatatgtcagcatcccagatggggttg

SEQ ID NO: 20639 - DNA, 201 bp, Bos taurus
gaggaaacttgggaaagaaggaatccatgttttgcttatagctaagaatattaaaggtactgagatgcaaatccaggccctctgattcagcaacctttccgtcactctccaacatagtgtatgatgtccttaatgagcagcattaaagtggcctaaaagcagaacatgatgccccatgaatgccctttggctggctttcag

SEQ ID NO: 20640 - DNA, 201 bp, Bos taurus
gttagaggtttgaggagtttggaacctatgtttataggccaaagattgaggcaacagtggaaagctgggaaggagtgaggagaatatcagattaatggggtaggaatttataacatgaataggttctaatctattaggggatggaggcagacagaagtggagctcataaagagagctctaactagcctggagggagactgg

SEQ ID NO: 20641 - DNA, 201 bp, Bos taurus
ccagaggtcttcaactaattatcagtcttctaaagtacagagaggaatcttaactaaacaatttcttataagtactaaccctcaccatctggcctagacggtatcaacccttttctgctacagcatacacaacacgtggtgttccaatgagtgacggtttcccatgggcacaatcgcaccttgatatggcctcagaaacct

SEQ ID NO: 20642 - DNA, 201 bp, Bos taurus
tactggacacataaggaggccaatgtaagcagggagtgatgccatcttagttacatgacagaagatctcttggactacacctggataaggaagtgtcagggttacaagagtgcctccagagtggccaggaaactgctacaatagacccagcatggatgatggtcgttttcaaagcacagttccctctctgaaagcaatgaa

SEQ ID NO: 20643 - DNA, 201 bp, Bos taurus
ctttaccatgttggcaatagatccttgtgtgcaatcttaggactgtgaaaatcctcagaatcagaatccattttttccctccatattttatctttctacaaattcctttttatacctaatggtttgccagccttctgggaaactaattttattggcaaaagtctggactgaataaaagacatcttttaggttataaataaa

SEQ ID NO: 20644 - DNA, 201 bp, Bos taurus
ttagatatacaaatataataatttgatcagagttaagatctctgagacaaaagggaacagtcaagagcatagtggattacagtaagaaaatccatcttgatttgttaatgtattagagggctcattgatataagaggtgttaaggggtagagaatgccatacaaagaagagactggttagacagatgagtgctggacttcc

SEQ ID NO: 20645 - DNA, 201 bp, Bos taurus
tgggccccagggccaaggtgaagagaggctctaggaagctgagaggaacccaaagtcaaagtatatgcaacacggacacatgactcaggggcttaacacggctagtcctggcaaggcccttggcagtctggtcccccaccaccacctccaactctggcacacccgtctcagttgtactggcttttctggactttctctaag

SEQ ID NO: 20646 - DNA, 201 bp, Bos taurus
ggtggtggccacatgtccacagctctctcccagttctcctttctctccattggcaacctttatgatagccatggggctccctgactcaaaaacagaagagaaactctcatcctaagagggccttgagttgctggtctggaaaaatcccttctccctctatgggattctacttctcatctctgcaataaaaggaatcattct

SEQ ID NO: 20647 - DNA, 201 bp, Bos taurus
aaatcaagacaataggttaaggggaacagatgaaggggggagctcatcaccataacaacaagcccaacaactctgaaagatggaattttgtttttcttttcgcctgtcattcttcctggtactgtcactctccttgctcctgttggaagacaagttgtgagttcttcactcccaccagcaagctgcctggctctgggaagt

SEQ ID NO: 20648 - DNA, 201 bp, Bos taurus
tagggaggacggtacccaataaataaataaataagaaaggactgtccccggaagggaagggtgtcaagtgaatacaggcatggaggtgccgatgaaaagagcctgggccttgttcactcagctgtcgttctcagtcagagtccgctcccaggaagactgctgctgaccagaggcgagccgaccactgggagctggcagctc

SEQ ID NO: 20649 - DNA, 201 bp, Bos taurus
gacaaggaaaccccagaacagtgggcagggctccccttgccctgcctttctgcaatgctgccttggggtgcttgccacagtaggtttgatgaggcctaggggagctaggaggaaagagaaagaaagagactcaaacccaactctatgaagctaaaaagtcaccagggcctttttctcccttaaggtttgaggtctccctcc

SEQ ID NO: 20650 - DNA, 201 bp, Bos taurus
taatgcacagctctgagatctgcactgactatcagcccctctgactgtgaactcgggtggcacacacttgtgcactattctcctctctgtctcccaagcaccgtctgcacttagtgctttatctgtgtccttcctgagccccaagcctctggggctggggctggccgcatagctggcagtgtgaaggggtggacagaacag

SEQ ID NO: 20651 - DNA, 201 bp, Bos taurus
tagaaaatgggaggagaagaggcatgggcttcataaagctctcaatctggacagccatggactcctgcatcaacaatctggtacctaaagctcctcccaacatccttgtctggcctctgcttccacagtaccagcacatgggggctcagtactgccctagacaacccttttactccctagtcagcactgcctgtgataaga

SEQ ID NO: 20652 - DNA, 201 bp, Bos taurus
agaactttggctgcatcataagctgaagtggcccctaaatagctaagatacaaaagaaaaatcaaacataaaaagactgcctactcctgctccccagaggatcgaatcatttctttctgtccactctgacttgcatggcttcctatggtcctagctgtgtctctgtctgaggctgtccctgagaaggctgaggctagcatg

SEQ ID NO: 20653 - DNA, 201 bp, Bos taurus
accaaatgaggccagtggtactaggaacaagaagggaatgtcagcatcagtctcataagggctttagtacaaggataggcaggtggtctttctcctgtgatgtcaagaagctcttatttattcattcatatgacagacacacatttgtgtaaaatattatgcaagtatttacacataaatatttatgtgtaaatacttatg

SEQ ID NO: 20654 - DNA, 201 bp, Bos taurus
gtttatttttatgcccactttatactcagcattttggaatacttccccaatcttcaagaaacatactgtgttgagatgctcaaaaaccttttaaacttcagctgtctttccttttactcataaaagatgtgccaaggtcttatgggctttaaaaaattaaagcctaaacaattccaaaggatttctataaatgcaaatgct

SEQ ID NO: 20655 - DNA, 201 bp, Bos taurus
ggtccagaggtggaaacttaggaattggacttggcagagaaagccactcccttcccagatcagatgattgcttcttttggcctctcattacttcccaccaattacaagattgttccaacattatagacaatagttttaagttccttatttttggccatgcagcatggcttatgggatcttagttccctgaccagggtttga

SEQ ID NO: 20656 - DNA, 201 bp, Bos taurus
aggacagttgggttggaaaaagatattagggggcctaagtttaagcaagcacactttgatttccgtaacagttttggttgggatggcccccattccaccatgtcaatccaaggcatgctatttctctaatgatgatcaaagtctttcctgatatgtaatgttaattcactatctttgaattaattcactcttttttttcta

SEQ ID NO: 20657 - DNA, 201 bp, Bos taurus
caacctcatcccttgaagaaagaaaatgcttttctgttagaaaaaactgatgtcagacattgtgaatcaaagaattaccagggcaacaaccctttacaagatgagttatataatacaaaactgaacaatttaaactctagagcaaaagagaaaacaatgatcagaatgaaatctaaacaatatattctctacctactttct

SEQ ID NO: 20658 - DNA, 201 bp, Bos taurus
gtctattcttgcctcttttgtcattgattaattaaccaaaagtatatgattctgaattctccatcctcttccattgatctgtgtgtctattgagccagtaccataatattttgattaccatagctttgtaatatagtctgaagttggggagtgtgatttctccacctctgttctctttctgaatatttttttggccttctg

SEQ ID NO: 20659 - DNA, 201 bp, Bos taurus
gaaggaaatggcggcccactctagtgttcttgcctggagagtcccagggatgtcggacgctggtgggctgccatctatggggtcacatagagtcggacacaactgaagtgacttttgaagaacaaaactccaagccaaaacttgtacttgctaatctttgcaagatcaactttctaacacatataagaatactatcaaacc

SEQ ID NO: 20660 - DNA, 201 bp, Bos taurus
gagaagacaaaaagctttccccacccttaaccctgatggattggacacagctgcatggaatgctgcatcattgaggcttctgggccctttatctggattcagtgagaaagagtgccatgacttattatcaatcactatcaccaatatcaatggaagggacagcagaggcccatgtagcaggtatctaccatccttgacact

SEQ ID NO: 20661 - DNA, 201 bp, Bos taurus
taagatctcctctcagaatagagcagcataactgtttaaaaagtgtttttagttgtaaagaagttcaggcatagtaagatatgtatctgtctgaaaatatgtatttgtctgggttggctaaaagtttatttgggtttttcgaaaaacccaaatggatgttttggccaaccaaatatatagcccacttctccatcttctgtc

SEQ ID NO: 20662 - DNA, 201 bp, Bos taurus
tagtgccagactactgttggcaggcagagctgggtccttgagtctggctgcagggctcagggatcctacagctagtatcagatcactgagggtgggataatgaggagggggctggttcctagcacacatttgggtatgaggcctggggtatcctgaagcttttttttggcctgctagtggaaagggccagggcccagctgg

SEQ ID NO: 20663 - DNA, 201 bp, Bos taurus
gtggccattatgttttctaaatcaaaccaaaaatgtaaatgctagggccacaagaacactaatgagggaaaaataccacagagtatttgaagtaggcatccttttccaaagttcaactatttattattactatatgcatatactttcagtataaaagagctagaaatctagttgtaaaatatattcaaactattaaaaata

SEQ ID NO: 20664 - DNA, 201 bp, Bos taurus
ttgcccatgattttcctgccatttggtatattatctgcatagccacatataatgctatttaaaaatagaaatatggaaagatactctttttcttatattactggataaatgtagtcacttctatgtggccttaaaggccctgcctattttgacttaattccaaactttctagggtcatcttctgctagattctggcttcag

SEQ ID NO: 20665 - DNA, 201 bp, Bos taurus
ggacccaaggaataaactcactactaaaaaattaacctgctgtctaaaatgccacttccaacttctaagcgaaagtgacagggtctgcagagtttttattgtataatgaaacaattgttaaacttccccatgcaattctgatgcaaacgatataatgctgggggaataggtattgtctcaatcaaatcaagtctaatttct

SEQ ID NO: 20666 - DNA, 201 bp, Bos taurus
ggtgcacaccaggccccagggttttcaatgtggcttaacagcaattatatgaatgttaggaaggggggaagtgttaaagtccctacatttacattttttcttggttttacctcttaaagggatagaatacatctcctaaccaagtaagccacgaaaaacccaccccaagagggacacaggatatcctgagaaagcaagcca

SEQ ID NO: 20667 - DNA, 201 bp, Bos taurus
catgaagaagctggatgagaaccagaccttgaattacaaataggatttgaagaataatgaaactaatgagtggcaagtggctgaagaggaggcagagtccctcctaccacccagtgtagtgacaaggccgtgcttaaaactttctttgggcaaaagcgcagccttttttaaaatgaggagagagacctgtacttgtttctg

SEQ ID NO: 20668 - DNA, 201 bp, Bos taurus
gaaatgttatgcaaattttaagaaactagaaattcagcacagatgagggataagggagaattgtttggaaaaagtggtatgttgaaagcaaaagcgaaagccactcagttgtgtctaactctttgcaaccccatggactatatagtccatggaattctctagaccagaatacaggagagggtagccttttccttctccagg

SEQ ID NO: 20669 - DNA, 201 bp, Bos taurus
gcagggatttctgggccttgagacatttgcatttggtatcttgactgctgacctgccagcagctgctaaaccatgatatgctctctctgaaactcaatgggcaggcagcaaataagtcaacctggccttcccagtttttgtgtcataattcgtattttattccttgtgtagacagaaaatagccagagcacctgctcttag

SEQ ID NO: 20670 - DNA, 201 bp, Bos taurus
ggcctaataggatgtgagaagtctgctgtggatagttcttgaataggttcttattgctaaaaaagagtcacacagaaagaaatagttgcctcttttttaccggatagtatcacaatggcagctgtggcaccaggtgatgtgaaaggagctcatgtagagggtggagagtgcaaagatgctctagaatgtcataattcaggt

SEQ ID NO: 20671 - DNA, 201 bp, Bos taurus
agatgcttccctcattccctccactactgttggactccagaaccttcttgcactctgctgccagcttgattttgatcatattacaaacttccttaaagcatagggaatggtatccagtcacttgggataaataataatggaaaaggatattttaaaaaattgcatatatgtgtataactgggtcacttggctgtatagcag

SEQ ID NO: 20672 - DNA, 201 bp, Bos taurus
tcagcattgtgggcttatttagctaaggtaccaaggatcagagcaaggggagcactgtaattcagagaattacattggaaaagtccagaaggtggttatatgtcactcttattcagtgttgttccctcaacctggttcagacagtgaggatatggttcttaagtggtcagcaaaagctgttagacactaacgttaaaagcc

SEQ ID NO: 20673 - DNA, 201 bp, Bos taurus
aagaagagtaataaataaaaataaataattaaaaaagagcaataaataagtaatgtaataaaacttacatttctcccttattttgcacagggacagactcgataggaaaactctgcatttttgaaaattttacttcgctcatctgtttgctttttatgatttttagaatcactgtcttttttaattggagtatgattgctt

SEQ ID NO: 20674 - DNA, 201 bp, Bos taurus
gtggggttggaggtgtttggaggaatcaatgaaactcacatagtctttcctaaggtggagagagtaccatgctattatacaccctttgtacacacccaacccttttttcctcctcttagaacatatctgcactaggtattttcctttttggaagccaaggactcctctaattatttccttatacatctcagaatatatata

SEQ ID NO: 20675 - DNA, 201 bp, Bos taurus
ttgaaatggaaatggtgttctgggttgtaaaattaaaagataccccttctagggtggttatatggcatgtgttcttttggccaggaatcaaaagtagtcattggatacaaaatctcattctcaataaccataaaaactgaaaagcactgaatttaacaagaattatgtaaggcctataggaataaattcaataagaagttt

SEQ ID NO: 20676 - DNA, 201 bp, Bos taurus
atccactgggtgacttctataccaaatcatagaagcagcctggatggcatggctcatctgtatggtggggtagacgaggctggaatgaacagcctatttttggggggcctgggagggaggatcattgattgtctactcacagggtagaaaatgctctagggaaacttgaagatgaaggaaacttctattccaaaaacatca

SEQ ID NO: 20677 - DNA, 201 bp, Bos taurus
tgttgtctagagacgagaacatgcacagcccagactaaacccatccattctgcttccctggcaagcactcctactctggatcccttcctgatgcaatccacaggcactctcctcatttctctccgcatgaaaaacactattctaagcccatcctactcctccacgagtttctcctatagcttccgagtctaaacagtttct

SEQ ID NO: 20678 - DNA, 201 bp, Bos taurus
cagagaaaataataaatatggaggatatgcaattcatacatgaagagtccaaatgcaaaagcatatatattcaagatacaataaaattctctttgaaatacagaaaagataatgagatgtagactaaaagattatcccacataatgacacagtgttctagtgatatgatgagacattactgaacatcaaaaataaagaatg

SEQ ID NO: 20679 - DNA, 201 bp, Bos taurus
acttaaatgtaagatacaaaccaataaaactccaaaaagaacatatagaagaaaaattccttgcaattggtcttgggcaatgattttttatggatatgaagctaaaaacatgaacaaagaaagcaaaatcaccaagtgggattacatcaaatgaaacagcttctgcacagcaaaagaaacaacaaaatgaaaaggcaatct

SEQ ID NO: 20680 - DNA, 201 bp, Bos taurus
accctgatgctaagaaagattgaaggcaggaggagaaggggataacagaggatgagatagttggatggcatcactaactcagtggacgtgtgtttgagcacgctcttggagatggtgaaagacaggcctggcatgttggggtctcaggccacggggtcgcaaagggtcagacacaactgagcaactgaacaacaataaatc

SEQ ID NO: 20681 - DNA, 201 bp, Bos taurus
aaatgttattaaattgttaatactgagttattttcaaaagcatgggcaagtttaaactattgcctgtaaactattaagggatgataactcctcctcctccctccctactctccatccccagctagtgataccaggaaacgggtgcaagtcagaaattgatcagacttataagatatgagtactcctggatgagaactgtag

SEQ ID NO: 20682 - DNA, 201 bp, Bos taurus
ccttctccaagggttctttctgaccaagggaacttggatctcgtgcattgcaggcagattctttaccatctaagccaccaaggaagcctgatacttgttacagatgccattaactaaaaatagtttcctcataatatacatatgagaggatatattgtttactacactgtaatgatactcattttcaatctgctttgcaat

SEQ ID NO: 20683 - DNA, 201 bp, Bos taurus
gcagtttttggcacgaatacttgctgttatgtgctcttgttgcatcgtcagcgggtactttaggttggcttattatcagtgatgccagcctcgaacctttaaagtggtgaccaacatattttacctttgttaaggctcacttagttttaaattaaccaataatctgtaggatgattctttggcaaggtgtgaatattttac

SEQ ID NO: 20684 - DNA, 201 bp, Bos taurus
ttacactatcaaattccattatatccaacacacccgaaacctctattctctcacctttgattacccaagtgaacgttccatcaccatagacttaaaggcctgttagggtttgacatcttggcttttaaaaacaactttaaaaaaatacccttgaagattaaggaaaacctaaaacttggggatggaggcctgaataccctc

SEQ ID NO: 20685 - DNA, 201 bp, Bos taurus
cacacacacacattccataagatattatggaaaaacccaaatggactgtttggccaaccctatggatggattcccaagtaggatatgttggcccactaatagtttggtttcttttctaacatacactgcttcagtgtgtgttcattgtttacttagaaaggtggttgagttggcagttggaaggggaaaagagggatggcc

SEQ ID NO: 20686 - DNA, 201 bp, Bos taurus
gaggcttttattcacagtgtaatattctacattccatcagtagtttgggaattggagggactgactgactcgtactgtgtgtgaagttggaacaaaatagacttaactatggtctttcagttgtgtctgttttagccgcagtcatctttaggtgtcctggtaattttgtaaacccaccatgaagttttccatgtcacagtt

SEQ ID NO: 20687 - DNA, 201 bp, Bos taurus
agaagacagtgcctcagggtttggccttgtctttctgcaggagagctggtggaataaaggagagctcagtagattcatatgtgagaagtacttaaaaacagtgttaattttcccctaagtcactgtttacaaaactagtagaataaataagagaaaaatatcaatttatcattctcaaaactatattcttaaaaatgactg

SEQ ID NO: 20688 - DNA, 201 bp, Bos taurus
acactggagtgggttgccatttccttctcctagtggttgccaaaggccagagcctgtcagacctacgaacgaggggctataagaccctgtgaccacagacagacatccaagtcctctccagggcccctatgtgctctgaggggtcaccagtataatgccagggttggtgtgagaaggaccacaaagctttctgaagtgtgt

SEQ ID NO: 20689 - DNA, 201 bp, Bos taurus
ttatctcattgaaggaaaaaatatgtgatatagtctaggaaatatgctggcagattatgagaagtccaaatgttttacaatatgctgaacaaaatcatctcgattttttttaaagtagggtttattcatcaataaatgtataaaagcaaataaacaaaaaggaatacttgttcctcacattaatgtagaatgtttccattt

SEQ ID NO: 20690 - DNA, 201 bp, Bos taurus
ggctgacctagactggcccgtgagtgtccaggagtctcttgtggaggcgtgggatggcagtggcccactgtagggtctgaggcaccgagtgcctcagtgtgtacacaggatctttgaaggagttcaccattatcttcatacctccaccatagtttggcctcaggtcaaacaacagggagggaacatacccttcaacagaaa

SEQ ID NO: 20691 - DNA, 201 bp, Bos taurus
tcaaacacactctttctgaggtagcaaaagtaattgtttaacaattctgctgtattgagtcctcatttatttatatccttaaaaaggcaagtatatttctttattttgaaaatcctggaaacaacacattttgggttggttttttgttttttttttttcctcagtaagtttttccctttaaaataattttagacttaggaa

SEQ ID NO: 20692 - DNA, 201 bp, Bos taurus
tgacctatgttttctacatcgtacgtgtagcattctctcaggaggtagaaggtaataggagccgtgtttctccagaaaataagacagaagcagaatggtacctaattaaaatgtttacaacatttcccatgagatataagccactgacattttccagactgcaagccaagaaatgcttaggattatacagatgtactttgc

SEQ ID NO: 20693 - DNA, 201 bp, Bos taurus
cactgcttcctggctactgggatttgctgcataagaagtctacaattctacaaagaacctggttccctatagaactcctctttttttctggctctaaccaatagactctaggaggaaaaaggcagagtagctgttaggaaaaaaaaaaaattgaggagatttcagaaatgggagggatcccttgttccgaaatcttacata

SEQ ID NO: 20694 - DNA, 201 bp, Bos taurus
cacagctaaagaattcttaaaatgagtgtaaactaattgagtaaacatgctaattatgctaattaaaatacattcatactaaagtgtaaatgacttctaactcttccattaaagaaaaataaaacagggacaacagcaggctgcaccagaagagatggtggaatatagagaaaaaaaagctaaagacccagaagataaatt

SEQ ID NO: 20695 - DNA, 201 bp, Bos taurus
gatttttctagcctctaaatattcttctgatcttatgcaacagaacataaacaaactatagccctgaggacagaacaaccaatggctggttccagtggaaattgacaagtgttttgtgtctgccgtggcttgacgatacagtttttagtcacagactgaaaatgattgtagctaacactgtcctccttcaagtgaaaacag

SEQ ID NO: 20696 - DNA, 201 bp, Bos taurus
tattctcatcttgtctttcaaatggccaaagttgagagtttataccaattccatgaattgagatgtgagaaagtagtactatagtagctccttggtagctttcacagactgttattgcctctccaattgccattttgccctccatttttgctcacagatccctactcttttttagtgcagaaatacgtccagcagaatgga

SEQ ID NO: 20697 - DNA, 201 bp, Bos taurus
gaggggtctgtgatgaattgaagaacatttgacccaacctcgatcgttgctattgtataagaataagggtacaagtatgccattatttttttttaaagagtaaccagacatcctgatttttgtgtgaacccttatttcttaaatgttgacagctaacttatatattaagtaactatataagagtaaactaaaacatatctc

SEQ ID NO: 20698 - DNA, 201 bp, Bos taurus
ctttcttttgttgcatagctcatagtttttgctttcctatataaactcaggacccaccttgaagtctctctgtgtgaacataggtgagagtgcatggccaggataaatgcaaaggagcaacatttaaatgatacatcctactcagagcacaatgtttttctctccagggccttgatttggcagcaaagaaaggaagattta

SEQ ID NO: 20699 - DNA, 201 bp, Bos taurus
cagactcttcaaagcagcaggggtaaggatgttcatttacttaagcagtaggttctaccattagcgtttgtgattggtgttaattagaactgtgtgtgcatatctctctgccacagagcccacattttcaaaatcctagttacaatcaagctattaatgaattaagtacccatatttgtttgtgttcttttttaatctaat

SEQ ID NO: 20700 - DNA, 201 bp, Bos taurus
caccactcagtcacctggaaagccccagctgttctttcctgtctcgctttgctcagagtggatactcagctcttttaagtacaacatacaggtctctgccgttcttgcttgctggcttgcaaacataggaccaaccatagtttttctccaaccacggtgacggctccatgtaccttcacagtcacactggcttccttttct

SEQ ID NO: 20701 - DNA, 201 bp, Bos taurus
accataggaaagaactggtttatgttagatgctcaccaagtatttggtgtattatctcagtttctgatgctatcattaaataagataaacttggccaaggcaaatgtaatttcctctacttggattatcagttcagttcagttgctcagccatgtccgactctttgcgaccccatgtgtcgcagcacgccaggcctccctg

SEQ ID NO: 20702 - DNA, 201 bp, Bos taurus
ttttgtacctaatactaaaaagagatgataatgaaacttttgaaagaaggccatatggacttactaagtaccttagctatattattctgaataactttgagactccttaagagaagcatttttttaaaagattttttgatgtggatcattctctaagtctttattaaatttgttatggtattgctgttttgtgttttggct

SEQ ID NO: 20703 - DNA, 201 bp, Bos taurus
ctgctctctgttgaactaatttaggcaagtttatgctatccagtttgcactccacacagctgctgaaaaatggccaagttctggggcccaccttggcttcgtaaaggatggagcatacctcactgacctcataaacttcacgtatgagatgtttcactttgaataagggactcaaactgactttggaccatagttcagtga

SEQ ID NO: 20704 - DNA, 201 bp, Bos taurus
ctttagaatcaaactgctttgaccatctaaaaagggatgcacttttgttttagtttgacagaacatagttttcttccacagtcaacccaactgtgaggaacatatcagaaattaaactagactaagttaaactaaattaatggaatgcctctactgagttttttaagtgaattgatgaaagaagtttgttccttaacataa

SEQ ID NO: 20705 - DNA, 201 bp, Bos taurus
atcatcatcatcgtatctgtttgccatttgtaatagtgttgatgatagtttgacaattagaacagttattctgttccatttgaatgttacctaatatcctggcttttttaaaaaaaagtatggctagcattttcacaatattcaaaatactttagaagcccacaatatgcagttcgacaaaacgatttctcatttccaacc

SEQ ID NO: 20706 - DNA, 201 bp, Bos taurus
ccaataactaatattatcaacgttgtatttaaaatgcaagctgtgtgatagctgtattcagccagggggaaaagacccggatgcatttggttcagatgggcaacctgggctttgggcactcagtgatgccaagtgactcacccgggggaccgtctcttgtagcaggtttctctccagggatgtgtatccccaaccctgaga

SEQ ID NO: 20707 - DNA, 201 bp, Bos taurus
tcactctatgctttgaagtggcctctagcacatggcgggggagaggggaaatcagaggatgtaatcagctaaatccagtttgacgaaacatgatcagagatcaggcttagagattgaaaaagggaggtttggaggagaaaatgcaggaatacaggtaaagagctcccctctggaggtgttcagaaacaagctctaagtcgt

SEQ ID NO: 20708 - DNA, 201 bp, Bos taurus
aggtcccagtggttaagattccacctgccaatgcaggggacatgggttcgatccctagtctgggaagattccacatgccccagagcaactgggcctgcgcgccacaagtaccaaacctgctctctgagcccacgagttgcaactacttaaacttgcacacccagaacctgtgctcctcaacaagagaggccaccacattgg

SEQ ID NO: 20709 - DNA, 201 bp, Bos taurus
gggtcatcagcggtgcccaccctcggcgcctgcgcagactgaggctcactgtcaccatgacagcgaccgccgggggccctggtaagcggggttccccaggttcggagtctgagaccgtgctccacactgttggcttgcagtgagtggacattttctccggcccggtgccgtagttgggggccctttgagactcctctggtg

SEQ ID NO: 20710 - DNA, 201 bp, Bos taurus
atgtgaaacatctgaaaagagctcacatgagacagtgatcacaaaaaaaacccttcttttagcgtttttcatatacaaatgggtttaataaagcaaagagacttatagaaatgagctggaacataatctaaaatataaaaactactctgtaactgtcattcaagaagaggtaatagtatcaatcatgtaaaaacacctctg

SEQ ID NO: 20711 - DNA, 201 bp, Bos taurus
gtaaattttcttgcatgactgtttggcactctgtgctttggagggatccaggtcgtcttctgtccatgtgctctagtagtttagggctgaagatagacacggtgataggcatgtatgcaaacagtgttcagatagcagaataaaacatttacgtcaacacatacgtggataacaaagggttttacaaatttcctctagatt

SEQ ID NO: 20712 - DNA, 201 bp, Bos taurus
ggcaagggtccttctcgctctgcatggtggggaaggggggtcattgtggtctctagataatctctgatttattctctgtctccctcttggttggggctgaggtagcctcaccagctgaaatcagactgggtttttctcacttccatttgttgccatctttaagatgctgtctgtgagatggtgtctacctccttctctgga

SEQ ID NO: 20713 - DNA, 201 bp, Bos taurus
cagcacacttccaaacttttcaaaaacatattaaaagcattcataattctgtaattactcccttagagtcaagttttcctttaattagcaattacacacacacagactaaataacaggtcgaagataccacattggaactacttccaaacaagaatcggaggatgtttgagttacagagcctcaggagttgcatgcggaca

SEQ ID NO: 20714 - DNA, 201 bp, Bos taurus
gaatttctgactcacctctttgatgtcaaaggaggtgtattttgcattgtaattagagctctactaagttatagcttcccttaggaagagattgtatgaccaacactcaggtattaaaaatacaaaatagaacagttaccctcatttgatggattatatgcagtacacacaatttagctctaacttttctctaaacatcct

SEQ ID NO: 20715 - DNA, 201 bp, Bos taurus
ccaagattttcattctgaggagaaatgagggaattgttagcagctgaatcctctttgaaagagcaagccacacagatttatagagctttaggggatcgtacgaggagcaaaacaattgtcactcaggtcccctttcctggcagcccctcaaagcttaccaagtgagaacaagagtgcccagctgccctgaacagccagaga

SEQ ID NO: 20716 - DNA, 201 bp, Bos taurus
aaggaaagttgtactatttacaaaaataaagtcagagaagcagatttagaagggataaacagctttgtttcgaaaatgttttgaattgctgggaggccatccaagtgggtcttaagagggtgtgatgctcttgtaatgtgtcagcttggttgatacattgcaagcttggccatcctacattttttagaattcttagtttct

SEQ ID NO: 20717 - DNA, 201 bp, Bos taurus
tgtactgcaatactcttaggcattatggtggcaaatattgtgatgactacaagatgcattaactaagattatacatgtcaggttgaactctttcttcaatatatcaccttggtgactccaaggttattaaaactgctgagaccaggagtgttaacagttggtgatagggtttcagggataattctgttattgttgactgaa

SEQ ID NO: 20718 - DNA, 201 bp, Bos taurus
agatattcgcactggcgtgttcatgttaactttaaatatacaaagtaaaaatctgagctttcaccatatgtgactgtgtaggccctccctggttattgtttatcattttaaccaaccatttggatcagacttcaggtttctgctccttctgtgggccaccaatcattcctttatctccctagaatgagttccttaagctgc

SEQ ID NO: 20719 - DNA, 201 bp, Bos taurus
attcaaagctgcaaggtttcttaccatattttaacacttcctatagatggcacttgaatcattgttcttatttttcctgactgcacaaagaacctccctttgtgcagatattgtgctctatattctttagttccagcgccatttaggaaatacttcatagctcccagacagcgagatataactttcagtagccaaggacta

SEQ ID NO: 20720 - DNA, 201 bp, Bos taurus
aagagtccaaaagaaaaataaaaaaacactaagggaaacacttatccccagaaagatactgcagttattgttgtctggggcaagatccttttctgcccccaacaaaatagtgtgtgctgacaattaagctaagagtagattccttttcagcctttgaaagcaagagttggtcaccagcagtaagaaaactagtataatgac

SEQ ID NO: 20721 - DNA, 201 bp, Bos taurus
ggatttacgaaagataaattatgaaagataattcacatatagaaagacaattcacacataaacatcttccccctgtccttctataacctagaaatgaaagataaggttactgatacctagagagtaaggatatgagaggaaagtactgaatatagtttttgaattatatgtaaaattatgtaggtgtttgactcttggaaa

SEQ ID NO: 20722 - DNA, 201 bp, Bos taurus
tttaaacagtttttcaagttagagtatcagagatgttgctaagtgccagagatagtcactagaatctctttgatagataattgtgcctagaaaaagataagtaaactgttttctaactaaagtaggagtgcatgtgtgatagagagagaggaatgttgtacaatgatcttttttggtcttgaattactcaaaacacatttc

SEQ ID NO: 20723 - DNA, 201 bp, Bos taurus
cctctgctactggtaaccaggtagagcccaattctctagaatgtttccatataaaattatttcagtaaggctttatttgtcttaatcagatatgtggccatcaagataagacagccattccaagatacttataaagccaaaaccagggaatatggaagaaggcttgagggaggggtaatcaagaggatgatacaactcaaa

SEQ ID NO: 20724 - DNA, 201 bp, Bos taurus
tcagtgtaggttgcagcagatgagaaacacaggacctgagataagtgtgaaaagagggacaggttctggggatataaaagggaaaggaaagtatgccctcgacagaaagccatgaactaaagctttgaagtgagacagagcgcagcatgtgtgacttggaagagcagtgactatttgtctcctagggagaagaaacacggg

SEQ ID NO: 20725 - DNA, 201 bp, Bos taurus
tgatgttttcaaaaaacatcttgcattttacttggaaatttgattggtaggttaggggtataactatatttgtgttttataaataaactttttggtattagcttcattaaaaaatctataagtgtgtcttccaagatttcataataggtattctttcttttctagtgagaaaaattatttttttccttccatgtataccaa

SEQ ID NO: 20726 - DNA, 201 bp, Bos taurus
tgaccaaattcctggtgactagttcactagctaggtccttcaggggagtcagatcagcacaaaagaaacatgtcacttttaaatacagttgataacggtacctatccacctccttaaactcttctgttgaaattagttctaaaaagacaacatgccaatcctgaaatgctcccagttgctgcagaatatcatatgttttta

SEQ ID NO: 20727 - DNA, 201 bp, Bos taurus
taatttgttttttccctgagtacaagactgacattagcataaatctctttccttctttttctatataaatgcagagaaaaggttaacccaatgatcttagcttttttttcaatataaaatatcagtaaaaaaaaatggaggtctgtactacatctcaaaaataatagatatttgcatctatgtgaaaggaacaagaattac

SEQ ID NO: 20728 - DNA, 201 bp, Bos taurus
gcattagaagacagagaaaagtggagagtttgggtcatcccccaaaagagcatccactgaatgctgtgtatagatttttttttaaattgaaaatatcaccgtgaggaatattgctgcagtatcgtgaaactttatgcaagataaccactgaatgttctactcctattggttgacctgaggaattattgcacatacacatat

SEQ ID NO: 20729 - DNA, 201 bp, Bos taurus
attagaacctatattctcatgaaggaatttctggctgtattctgttgtgctgtgaaaacatatacacaagacacgaccccggataggcaggggtagcagtatatcttgggtctgtgcttttctatgcttctgtttaaaatcatctcaggtatatttttccctgagggaggaaaaaaaggtgatctgtatcactaggtgata

SEQ ID NO: 20730 - DNA, 201 bp, Bos taurus
tctgtgagtagaaaccaggacgtgaagccacacttgccttgggaatggattgtttctggtccagcttgggactgaggactgcgtgtgaaaaggagatctcagggtcttctgtctttcagaggattgatgagaagggtagtttataaactcacccggaactttgagtccatgtgaaagtctagacaggtttcattcatgttg

SEQ ID NO: 20731 - DNA, 201 bp, Bos taurus
gaatatcattgataaatggcaattgctgaaagtgcactcttacattggtacagttaaaatgaaaacccaacaacccctaacagctttcacaagtgcctcagttgtatacagatcatgcctcatgctgtgacaatcaggcataacgcactataaatgtgaaaggaataagcctggaaatttaccccagactgatctgtgatt

SEQ ID NO: 20732 - DNA, 201 bp, Bos taurus
aggtatttttagtcaactatatatgcaagcattttattaaatgttggaatttgaactgaggcatagttttagtcattaggaagctcatagtccaattgagggagtgagatttaaaaagctgatggtcatctaccatccactttataataataaaacctctgattttccgctgggcatttggtctttcagatcacaaactat

SEQ ID NO: 20733 - DNA, 201 bp, Bos taurus
cctacatctctccctgggaacaatacgaagacaagggccaacttctggatgtttgacctgtgcttgacttaacgctctgatgttgcctcttgatattcttaatagttttttaacaagaggccccacatttttatttcgtcctgggtcccacaaattttgtaagtggtcctagtaaggagattggctatggatggaggaaca

SEQ ID NO: 20734 - DNA, 201 bp, Bos taurus
gcacaataaaactctctttttcgcacaataaacagaccaagacagcttcaggttcctgggtggagataagattcggccccatgcagtcaatcaaggaccctggcagaaggtttttctgtatcttccacaaataaatttccaggtcatggtgagcatcaacatccagccagtgcaaaagaaatgagcacattgggcctttct

SEQ ID NO: 20735 - DNA, 201 bp, Bos taurus
gtgttattcactctaatagagaaaagagattgtgtcagtaatttctaaaaagaattttatcaactggaaataatgtgtgtctttccaagggcaggtgagaggtcagttatgagtgtggatccctctttaagagtaaattagagaaatattatctaaatgaggactacaccagtaactgaagggggcagactagcaatagct

SEQ ID NO: 20736 - DNA, 201 bp, Bos taurus
tatacccacttcattcaaaagcaatcagctagagccttattatttccattttatgaacagaagtatcaaagaacccttgctcccccagtcaagtcagtaagtgctggcaaattaccaaaatctaaatttaataaaattgtattagtcactttccaaggtgtcacctcagagtaatgctgagatcaaaaccgtgatttgaac

SEQ ID NO: 20737 - DNA, 201 bp, Bos taurus
tatcctagagtccagtgtgaaaactccctgctctggtcaggctgactaacttgctgcttcaattgcttcttcccattaatttcctaaaggtacagttcctaggtggtttttatcaccagaaagaattatctctttagcaaatgactaaaagattgcaagtacagggtatttttgtttttattcccaaatgttcagccattt

SEQ ID NO: 20738 - DNA, 201 bp, Bos taurus
cagcacgggtcttgagatgtcattattcccacgttatgataaggcactcacttatgctgctttacaggagaaagaaccaaagtttaaaaagccagagccattgatttatattacactactgtaacactcttaaatagaatcttattttaaaagacaggacctggaagagaaaaagctttaccggcttaatccacgatcatg

SEQ ID NO: 20739 - DNA, 201 bp, Bos taurus
tagtttacttttgtctttatattctggaatggatcccattcagattacatccttcaagaattacatcagccccagttcaaagttgttcacctccaaaccagataaatccacacattactttctaagtgagggcattcaccagactagtgtaatactgtcttccatgtcctgggacggctggaaattatcttagttccctga

SEQ ID NO: 20740 - DNA, 201 bp, Bos taurus
ttaaaaactatacataaaaataagcaattcaagactgctatttcaaagggttgtattacttatcaaaaagattaaaagtattaaggttatttaaaaaggagaaacagccatagcctttgaagtgccttatctgtgacattaactgatggcagtctataatcatatatttatactatggagcttattgaactttcttcttca

SEQ ID NO: 20741 - DNA, 201 bp, Bos taurus
atttccattttaagttactgtatccagtatgagcagtatcattcaggaactgtcatgggccaggatagttactcttttcatgggctataccatctaaatcctggatggtatcatgatgtttgtaatttactttaaagtaattgagcgcggataatgtgacactatgtgtgaatatatatgtgtgttgatttaggctatgtc

SEQ ID NO: 20742 - DNA, 201 bp, Bos taurus
agaatgcagaacacaaatgaaagaaggacgaatgaaagagaagtgacacttcagaccagtagaaaattcctgatttgaagaaagactcatagattgagcaggctcagcttaatgaaaagacatcactataaagagaggctgctatttaaatagacttcaacattaggtagagaattccaagcaaaaggaaagatcatagag

SEQ ID NO: 20743 - DNA, 201 bp, Bos taurus
ctgctcttcacaagctgaaaaatctttagaaggcagtgagtccatacaggcacaggaggtgccgttgaaacggagactgcccaccggtgaaggttctgagtgcggttcacaaataccctttccaccctggcgctgatgcttatgactctgctacttccaggcccttcagtacccgtggagtgggtgctgccctaaggacta

SEQ ID NO: 20744 - DNA, 201 bp, Bos taurus
gataagaaggaaaatctttgtcacttttaattagaagtcttcttaaatattttgttcatgtacagtctgattttgcaggcttagttaataaatcctgctcatgtgttgaatttgctaatttttttcccaaaaaagtgaataaactaatttgtaatatgataggtcaggaaactatctttagtgatatggcaaaatatgact

SEQ ID NO: 20745 - DNA, 201 bp, Bos taurus
atgttacacgtaagtcctatttgtccactctatgtcatcagtgttctgagcaaaagccttcacaaactctgtggaggaagccactgttttaaaggcctttgaattcctttactctgaattttctcctcgtaaatgttattaccttaaagtgggatcctgttgataaattcacctggagtagagctcttcacagctctgacg

SEQ ID NO: 20746 - DNA, 201 bp, Bos taurus
gaacgttcttcaaattcctgtagttcggctggctggaagctttggggcagtaaaggtttattggaaagcaacagtggacagtgctggcctggaagactttgagccgtctcatgggattcttgaatttgcagatagacaggtatgttagtcacagacatattagcagtttttggttgtacttcagacattttataggcatct

SEQ ID NO: 20747 - DNA, 201 bp, Bos taurus
ccaggagcacaggccctgctgaggggagcttacattccagttattaaagacgctgcactggtcaaacagagcacgcagtcaggctgaaggtcactctcccgtgtgtcccgcctgctgtcaggccaagttcagctgtctcagcagtttagtctgggggagcccatcagatttctcaagtgtgtgtcagcatttgaggggctc

SEQ ID NO: 20748 - DNA, 201 bp, Bos taurus
agtttgtcattagatccaagtcacattggtaagattactttggccaccaacatataaatactgtcaatgtagatggttttgggggggcagcctccttctccctagatcatacacatggccattcacccagcagattgcctttctttctaagcacaatggtttctctttctttttcctgtaagggcttgatccaaggttgtt

SEQ ID NO: 20749 - DNA, 201 bp, Bos taurus
atcaacatgtgggcttctcaggggtgccgagtgtcctgacccatttcaactgttctccctacagtgaaagatgtgctctcatgagagggagagagcaccacggggcctttttatgactttcatctccaaagtcacacaccacaacttctgctttatactgttggttagaagcaatttattaaatccatcctcaaggagagg

SEQ ID NO: 20750 - DNA, 201 bp, Bos taurus
agggttcagggttgttagtttttataggggtgggtaattttatagtctaatgagtgggaggaatattccagctattttgaggaaggaatggggatttcccagaattgggccactgtccactttttgacctttatgattggccttggaacagtcatggtgcccatgggtgtgtcatttagcttgctgatgtgttacaatgag

SEQ ID NO: 20751 - DNA, 201 bp, Bos taurus
ggtgcctcaattcttcctagaaaataaaaattcaaataatcacacacatcaatgtaaaattaaatctgtcaggaagattgcaagtgggaatgatgtgaggatatgtaataagaagatctgatgtagggaaagttgctgcgagaagtgatgcttaaaccgacatttaacgacatgtaaaaactggcagtgaacattagctag

SEQ ID NO: 20752 - DNA, 201 bp, Bos taurus
aaaacccaatctggtaaatatcttgacagtgagactaactctgtgattgaaacttgcctctaccctagaatacaattgtttcttaagaacttatgactactgaagatttattcattttagaagattttgtcctggctctccatcatactgtgctatccctaaaattctaggttgttcctctagctgcatacagatagggct

SEQ ID NO: 20753 - DNA, 201 bp, Bos taurus
caccctggcagctctctactgccctcaactgccaccagtagacaaccatcacgtcactcagtgggacccgatttacactgggcccttgccttcttctaaaaacagcttttgcacttgcttagatctaaaagtccattatacaacttcttatttagatgaagtagtgggaaaaacaaacagaattcacagatcatttgctct

SEQ ID NO: 20754 - DNA, 201 bp, Bos taurus
agggaaactcgggagaggctaattgttgaatctgattttaaatgacgatggaaagatgctacatattgccctagaagagaaaggttgggtgagtaggaatatttataacttggcgacaggggagatacaagcacaatgttgttaagtgtagctttagaacatgttggaattggctgtggtctgggggggactatggagagc

SEQ ID NO: 20755 - DNA, 201 bp, Bos taurus
gtgtatagagagtgttgggctagggtctggtctacacaggaaatggtcaagctcttttaggagagcttcctgtacagaggacacttgcactagtggtagcagtgacagagggtggcaggtcttcctggaatgctctcagtctgatatcacctcagatgtcatcagtataggaagtagctcaaccactcactctgcagtcta

SEQ ID NO: 20756 - DNA, 201 bp, Bos taurus
gcagatgctgcatgtagaactgttcagaccttttagatctcaataccacatgcaatgttcatttattcttgttattcttgcttaaatctgtcttcctcctcctttggcacggttcactcctgagcgtgtggtttatgtgattgtgcagtggtatgtgtgtctgttttccagcagttaattctatttctggaaactcaatcc

SEQ ID NO: 20757 - DNA, 201 bp, Bos taurus
ctagaatttctaaaaaaaaaaaaaagtaaagctattttacccctaatcatagacaagcattaaagatcttaaaacatgactgtgatcaggcaattttttttctggcatacttttaagtgaatactagtgtctgcacaatttagaatgaagacctgatgttctaatacatcccatatagtctcattttgaaagccatcagct

SEQ ID NO: 20758 - DNA, 201 bp, Bos taurus
ttcagaacatttataacatgctaagtatggcagcagccctgggccttcagagacacctctgtttttaattctctctcctacgttttgttgactttatatcgtttaatgaggactaagatcctcattggtttaactcttaggacgattccaaggatctttttctttggaatgagtaggaagaaataaaacaatttgcatcaa

SEQ ID NO: 20759 - DNA, 201 bp, Bos taurus
taaagggacaaacacatttttattatttctgaatgtatatgatctaagatgtatattatgtattatttctgcttccttcacatctgtttattcacaattacgtaacatttaggaactgaagtttacaagtgctacttgatttccaaaacaggcaggacccattgatcagacttttaaagccattcttttccaaaacaaaaa

SEQ ID NO: 20760 - DNA, 201 bp, Bos taurus
ttggccaccagctagctgaggtcacaatgaagagactgcaacaaagccttgcaggtaaaccttcaatattagggaaagcaaggacttatctcccatacccgtctctggcctctcctccaaggtttttaggtgcctgcaggcacacacaggcactcacccccagtgacctgtgcctttacctcctcacctcagggtttaaag

SEQ ID NO: 20761 - DNA, 201 bp, Bos taurus
ggtcataagttttgcagctactgtctgggactcttagagtacttacttgctctttgaatgctccctcttggaacctagcacatgctccaggtagatagccgctctggtagatagccctggctgaatccccagccaagagctagcattaactgccagccttgtgaatgaactactttgggtgtccagcttggggagttccaa

SEQ ID NO: 20762 - DNA, 201 bp, Bos taurus
tatacatagaaaaataaggaagctgaacaatccacaattaaagaggtattcactgaaacatatggaaaagtctttgataatttctcttcactccaacaagtagcagtaaatggattaatggcccttagctggaagcgcatgtctgtgatcagaactgaaggtataaactgttgcatacaacacactcagaggattatactc

SEQ ID NO: 20763 - DNA, 201 bp, Bos taurus
cttttcaattgcgtaaagcatgcatttcagtagatgtagtagcttactcacatgtgtgcactgatcagtactcagccaaaaactcaagattaatgcactatagatctccagagcatttttctttttgcttctgtgcagctctctccttccaacatactgctgcacaaatgtgaggaaatcctagccaggaaagcctcccta

SEQ ID NO: 20764 - DNA, 201 bp, Bos taurus
gaaggccatcttgttgtacttgactttatcaggcaatatgtaagacagtgtcaaaaatcatatagcatcagttctcccgattaaaattccacttgggttttttataagggattcaagcttattttaaaatttatacggaggagtctagtacgcatagctaagcacaccttaaaaaaggacttctcctgccagatattaaga

SEQ ID NO: 20765 - DNA, 201 bp, Bos taurus
atccagagttgccacaatatatgatctaaagtatctacttttcaacaagatattataagatatgcaaggagggaaaaagtggccaatagaaactgggtatatctagatattgaatttaaacacagtctttaaagcagaattataaataaattcaatgaaccaaaggtgaccacacttaaaaaacaaaacgaaagtaaggca

SEQ ID NO: 20766 - DNA, 201 bp, Bos taurus
tgctgcatggctgctcactgaatgcctgaagggcccgattcagagcttcctcagctgaggagaggagttgttgtaacagattacaactgctaagttccacaatgttcttcactgtcagcaaagggcaggagatctgagagaggaagagcaataaaggatgaatgctgtcaccttcctccttgcagaaaagagggagtcaaa

SEQ ID NO: 20767 - DNA, 201 bp, Bos taurus
cacctccagggtgtggcctgtgctgtctccagggcccacctgcaagactgagccagctgccctctgcgatttcatttggtatcacatccttgctgggcttacttcctttctggccctgcactcccaaccttctatttgctttcctgagcaaatttcctaataagtcacattcataagaatgagtcctctcaaggtcagctt

SEQ ID NO: 20768 - DNA, 201 bp, Bos taurus
ctgtaggatttatttccctgttcaccgactgttgactgggaactgtctgtggcagctgcagagtggaccaggttttgcaggttccctggacctggaggcactttagataaactgcagaatccttgccacagacccggagccttgggatgcaggcatggaagccccttttaactagtttttttttatcctttgaccaccaga

SEQ ID NO: 20769 - DNA, 201 bp, Bos taurus
attgattacaaatggaggtcaggccttctggcatgagatatttttgctaatttatttcttaacacattaacacgtttctttgctcctgagtcttatttagtaaagcttctgattgggccgatgaaccagagcttgctcatttgagtttgagcagagtctgatgctttcccatatttccgtcaactaagtttaataaaatcc

SEQ ID NO: 20770 - DNA, 201 bp, Bos taurus
tctcctgcattggcaggcagtttctttaccagtgagtagtgtagaaaaaatgagaagaaaattgctcacggtagatatggtagttaagaaattttaaaacgtctttaaactttgggtggagagatatgtttgaatcaaagttaactagctaggataaggatgactgtacttaggactccaagttttgttgaattttctaaa

SEQ ID NO: 20771 - DNA, 201 bp, Bos taurus
cacaattcagtgatatgtccaggaaaagcaactgtcgttgccaagctcctgggttttctgccttcagcctggctctctgctcgcttgcctggcccagtggtcagtcaccagttctgagagcttggtgcactctgtgtcctggtggtgaccggagctggactcactacacacgtgcttctctaggactgccttctgaaggta

SEQ ID NO: 20772 - DNA, 201 bp, Bos taurus
tgagcatctggatttgctcttccctaatcagatatctttccagctcctccaagtaggtcggcctcactcagcctgtcttgcttagctgccgtggccatcataactgagataccagagactaaaccgcaactccacaggtggtcccagggctcctggagtgatgctgggctctctagcaactgcacatcttttccagctatg

SEQ ID NO: 20773 - DNA, 201 bp, Bos taurus
catgttggaacactggtaacccaggcccagtcatttcctactctcataatttgtcttcttttccctcttcttttaaaaattctatcaggtgcataacaaagtagcaaactattttacagtgattgtgagttccatgaactttcaacaattttagccctgttctgtcacttgtacttttcttcatgggaagttgaacatgta

SEQ ID NO: 20774 - DNA, 201 bp, Bos taurus
atgcagccccaagggggcttgggagtggctgagagcaccgatgaactctaagaagcttgaacccatgttaggatctcaggcagtagcagaagtcgtgggcgtaacatccaatttctaaagggtaggaaagacaatttaaatagctgatgccagcagagaatagagaatgcctattgaccagacacatgcacaccctgtcaa

SEQ ID NO: 20775 - DNA, 201 bp, Bos taurus
gctcccctcctgaagttacttgctaattacaacttgcgtcacctccaaactcaaagtctgagcaagaggcccctgtcatgggcctgaattccagcttgcagggaagtctgcatagttggctatgttttacgtttttttttttttttttttttaacttttttaactttaacttggcatgagaagaggctcctactcttacca

SEQ ID NO: 20776 - DNA, 201 bp, Bos taurus
gaggtgctcccctttctgctctgggccatgggaggatacaagtgtgacttgactatctgcatcccagaagagggctctcaccagaacctgagcatgttggcaccctggtcttggacttctggcctgtagtagtcctgtgggaaatgaatgtctggtgtttcagttcactcagttgtgtccaactctttgtgaccccatgga

SEQ ID NO: 20777 - DNA, 201 bp, Bos taurus
gtgaagtatggcccatatagcaaatataaaaacacaatgtaaaaagtgctaaaaagcattgctgtcaaggtgctgtgaagcagtgcaagtttgagggaagtgggatgaggttaagatgggcctgtttttctgggaataaacattagtaaaatgagtcccttaaaggagatctgtaaccagtcagttcaaggccggactctc

SEQ ID NO: 20778 - DNA, 201 bp, Bos taurus
cagagaaggcattctctttgtgggtttggtttctgaatcctcagcttgtgaaagaggctgtacagggagaaattaatacatgtaaactgttctaagagttcgaactctagggagaaagatggcccacagataggagggctaaatcagcaaggagacttttgacatacaaattgaatgcctccctgatggggaggggtagtg

SEQ ID NO: 20779 - DNA, 201 bp, Bos taurus
aaagcagatgaaggatcgaggcccaaaactctgctgaaaccaggaagagcaaactaatcatcatacccagaagcctgccaaagaagggtgggaaaaccaatgctctctttggacaggactgaggccgctgattccagggcagaggtcgtttgctctcagccctagtttgaaacaacatgtagacagaaggtagaagagaac

SEQ ID NO: 20780 - DNA, 201 bp, Bos taurus
caccagccctgccaccagctgtccagtgtcacagacccatttctccatggtcccacaatctttactcttcctctcctcacccatctatactcttgactaaatggttttgctgctgagcttggtcagaggaccacaataatagtgtcccctcctcagcccctaccataacctctcctctgctaggggaatgtacccatagaa

SEQ ID NO: 20781 - DNA, 201 bp, Bos taurus
cggtgcagccatggctccttggacatggggtagttcctcccggccaccgcccctgacctcgggtgtggggtagcttctctcgccacgcttctgcatggtctgtcgcagccaggctgggccaaaaagaaaaaaagattaatataaagtagtcttatgggttaaacattcttttcagaattttgaccctagaatataatacct

SEQ ID NO: 20782 - DNA, 201 bp, Bos taurus
ccaatacagagccacgggttcaatccctggttagggaactaagatcccacacgtcacagggtgctgccttctaaagaaaaaaaaaaaggtattaccattaataattattgggggaatgctcttagaaattaaaagatttttgctcagaagctactagttcaatttctgatactttgttcacagacatgcacagtaaaaatg

SEQ ID NO: 20783 - DNA, 201 bp, Bos taurus
acacacaggccttggggactgctcactcttgctctagacatcccccagaacttggcatgtctctgctgtccgtggcatcgtgcctcaagcatctgcattcggtgcacaaggccaagtccatcaggagctcgaggaagctaatggcttgtcattagccgctggcatcccgtgtgaaagggctggtctgtggctttgtgtgct

SEQ ID NO: 20784 - DNA, 201 bp, Bos taurus
gctgtcaagcctgtcattcaggtggtggggggcatttgctggtatgactccgagtccaagtctcagcaagcgacttgcagagtttgtgtgtacggcctgcaagctctggtcagtgtcaccaacacctcggtttcatcctgacagcaagccatcagcacaaagaatgccacacaaaccaggccctgatgctaattgtccccc

SEQ ID NO: 20785 - DNA, 201 bp, Bos taurus
ggttttggatttgagccttggcggctcacaagtatataacaactttaactaatgtcacagtggtttagccctgtgccataacccttaagttaaagctcaattttatttttatttgggaaaagagggaataaacttacaaaacatatttatgtacaaccagactctattcctgtatcttcctataaacataccaagaaaaca

SEQ ID NO: 20786 - DNA, 201 bp, Bos taurus
ccgtgagatctttgaacactgaagggtctgatagaaggctcagggtgcttctgaacgttcaccaagtataattctcccttcacctgacaagtgatagggcagataaagtgcgtttgtttcttctggagtcatggttcatcagagcctttactatgttgccccaagagaactctgttccctgtccagagagggaaggaaaaa

SEQ ID NO: 20787 - DNA, 201 bp, Bos taurus
tggcttgtggccaatcttctgcctctgtcttcatgtttccttttcttatttgtgtgttgtatctccttctgcctctttcttataaggatgcttgtgactgcatgtgggcccactcagaggatccaggatcatctacccatctgttcagttcagttcagctcaattcagttgctcagtcgtgtctgactctttgcgacccca

SEQ ID NO: 20788 - DNA, 201 bp, Bos taurus
ttctctatgatccaatgaatatttgcaatttgatatctggttcctcttccttttttaaaccctgctgtacatctggaagttctcagttcacatactgctgaagtgtaccttgaaggatttttgagcattatcttgctggcttgtgaaatgagtacaactgtatggtatcttgaacattccttggcattgcccttctttggg

SEQ ID NO: 20789 - DNA, 201 bp, Bos taurus
acaaaatagaagttgccagggattaggccaatagagagtaagctggtaaggaaggaaatcaccttttgagaggcaatttttaagtgaaacctaagtaggtgctgtctggggaggccttacaaatagctgtgaaaagaagagaagcaaaaagcaaaggagaaaaggaaagatataaacatctgaatgcagggttccaaagaa

SEQ ID NO: 20790 - DNA, 201 bp, Bos taurus
aaaccttcacattgctttgctctaatgagatgagggaaataaagagtgtttccttcactctataaagtcacaagtctgctaaatggtagaggtggatgtcattctggaaacccaagcctagagctgcttcgtcttctgtaacatatttcttggtgttagtccaaactgtggtgcatacagatttagcactggtttccttag

SEQ ID NO: 20791 - DNA, 201 bp, Bos taurus
aacagcttacacagcactatggtggggacactctttattgtattttggagggttctcaagttctcaccaatattcaggccggtgcggttcgcctctgagcccctattttagttactgttgccttccttttgccccatatgtcattatttggggccttagttaaatcttctggacaaatattaccatatttacaacctcata

SEQ ID NO: 20792 - DNA, 201 bp, Bos taurus
cccacttgatgccaacagtatcctccaccaaaatgtatccagaccttgcagaaattccccaggtgctttgggcaggggagtggggggtgggtgcaagtcgtagagagagtagggccccggaaaccacctgagttgagagctggtgctctaaaccttccctgagcacttttcatccagaatctgcttgaacacatctagcaa

SEQ ID NO: 20793 - DNA, 201 bp, Bos taurus
cattttgattggtggccaaacctttgtggttctaatctaagggataaagaggtgagcaaaggctaaaaggaatttaggaggcattaatgtactttgggtagggaaagtgaacgcaatgtagaatggggagagaaatgagccactaagtttagagtattagttattcagtctgtgtaaataaaaagcagactctaaggcagt

SEQ ID NO: 20794 - DNA, 201 bp, Bos taurus
tcctagtttttgactgagggccagaaagctaagtggagtccaccataaaacagggagttcctgagcagtccagctgttaggcctcagagctttcactgccgtggcataggttcaatccctggtcggggaactaagataccacaagccttcttgtgtggccaaaacacaaacaaaacataacgtaccaacagtacaggggat

SEQ ID NO: 20795 - DNA, 201 bp, Bos taurus
gtatttctggtctttacccacaaatctatctgtggagcaaatcatcattataggtaaccttaagataaaaagtgtctaaatttcattctaaataacaaatccacatagctgagaactcatgctttgaaatctttcaatagttatcttcagaaagcttaacttcagttatacaacaaactttgccctaacttgaaactgagg

SEQ ID NO: 20796 - DNA, 201 bp, Bos taurus
ggaaagactttgtgtatataagtttgcatagggaatgtgtgtgttggatatttgttgttttctttgccttttttgcccccttgggaatggcctttcctcaccccctgtagctcagtagagaccaccagtgacaaggtctctctagcatggttatatgggtgggcctgggacttagagtggaaacttaatgtcccatcccct

SEQ ID NO: 20797 - DNA, 201 bp, Bos taurus
tttatttgattcaaggaaaaaaaaaaaaaaaaggattgggacaagaacatcaggtaaggttttaaagaggagttgagagggcatttagaaataaagcactattgtagtcagagctcagagaagagagtatcatccttcactttccaggaaagaaggtaaggaggtaatatggtccatgggcaaaattagtgggagtttaag

SEQ ID NO: 20798 - DNA, 201 bp, Bos taurus
ggaaatggcaacctgcttccagtattcttgcctgagaaatcccatagacagaggaacctggtggtctatagtccatggggtcacaaaagagtcagcaggacttagggactaaacaacagtgtctgaccaggaaagaacataattccaggccaatggaatttggagtttttcttgaaggagtttaagtgtggtggggataag

SEQ ID NO: 20799 - DNA, 201 bp, Bos taurus
gaccatattttttacttcatgtataacttttttttggatactaaatgcatgttgttgatcataagaaactttttcaattttgcttgtcatgcaaaggagaaggggaaccatattttttatttcatgtattttttttattcgataaattttagtataagataaacccagtagttcatagagaaagaagatgcagtggttagc

SEQ ID NO: 20800 - DNA, 201 bp, Bos taurus
atctacttaaaactggtcaacattatggaatgcatttgtgtccacaccccactcccaaccaccccaccaatttcatatgttggagttttagccccctggtttgactgtatttgaagatggagctgtggaaggtggttagttttaatgccccatcatggcattagtttctgtacaagaagagaacattgatagagatgactc

SEQ ID NO: 20801 - DNA, 201 bp, Bos taurus
tctcttctttcacgctcatcaagagttcttacttcctcttcactttctgccactagggtggtatcatctgcatatctgaggttgttaaggttatttctgctagcggtattgattccagcttgtgattcatccagcctggcatttcacatgatgtactctgcatagaatttaaataagcagggtgacaatatacagctttgg

SEQ ID NO: 20802 - DNA, 201 bp, Bos taurus
catctctaagctccaaatccaccaggccgtggtgtaaacaaaacaaacaaaaagcactctcccccaaatcaagaatgatcctttaatcaacaagttccaagggcctgcttcccacaggtcacttttaaagaaattccagtcttttgctctaatttcacccttcagtagtcataaaacctgcagaaaaatttatgagttcac

SEQ ID NO: 20803 - DNA, 201 bp, Bos taurus
ctgaatgttgctgctttactcctttatcaaagatcagttgaatacactgggtgggtccttcatctgctccattgagctgtttgtctgttcttttaccagtgtcacatcgtcttgattactaaagcttcgtagtgagccttgaagtctggtagcttcacttctccaactttgttcttcttcgatattgtgttggctattctg

SEQ ID NO: 20804 - DNA, 201 bp, Bos taurus
atgcctttcaaaacacttgtaaaataaattgattataatatctttaaccttcaaaattacttaaatacatctcctgatcttttgtgtacatagaatgacatgctgaatgtgctttgcagtatgcagttttgcaggtgcgagttcattgggaatttctgctagcaaaacaaaaatcacaagatcatggtgctaccaacactc

SEQ ID NO: 20805 - DNA, 201 bp, Bos taurus
tggatccacatttagaagggcctgctttacaaagtacgggctgataatgttttccaatcaacaaagcccttgaaactgttcagcttgttagacatctgctattgaagagtgtatccagctctgaaaacaagatgcaaggaaatgcagtcctcattttctccagcagttagttgctcaaaggactatagccatttcaagagg

SEQ ID NO: 20806 - DNA, 201 bp, Bos taurus
tgaaaccatatccacaatggccatctggctctattctggatatccgaaccaccgttactccattttgttcttttctttaatagttaaaacagatatacaatgtatttttgacaggccataaaacaggctattctggttaacataaattcaagtaaaattaggtagaatctagaataacttcctcatgcctcagtatatgaa

SEQ ID NO: 20807 - DNA, 201 bp, Bos taurus
gccaccagggaaaccctgtaatcaactatactcttgtaaaaaaaatagtattaatagtaattaaaaggaaaagatgcagggccatctgaggtgtgggagctgtggggaaagataactggaaataagaagagggtgaagtaattattgttctgtgcaggtgcaactaagttacaggttagcatgttctgggggtggggtttt

SEQ ID NO: 20808 - DNA, 201 bp, Bos taurus
aacaaagtagaattggtaacaaaactactaaataaatcacccaggcatggcaatgttctgggattgcttatatttatctttgttcctcattccatttttacttcctagtggaacactcaatatcccaatcacaggattgccatctttcaaacacctcttgtatataccaaatctaaaataagaacctaaataagtaaattc

SEQ ID NO: 20809 - DNA, 201 bp, Bos taurus
agaacaccaaacattctcatgacttttttagttattatttttagggtaagtcacttaggaagttttgttttatcgtaccctttcctgtgatgtctctagcgctctgagaacctagttctgttattgttgcctgagttgcacagaatccctcactaacaggtggtactcaagcctgacttcactgagttcaatctagatttt

SEQ ID NO: 20810 - DNA, 201 bp, Bos taurus
cccttgcgatagacagagagaaacgtgctcaagtctcagacgacggaggcagaagtgacgatgaccagacccagatctcttgaagatatgcttcggactcggagtcaacgggcctgtggaaggctggcacgtggagaaagaggcaaagaagagtcactaaggaggaggctgggaacttccacctgagcaactgggtagacg

SEQ ID NO: 20811 - DNA, 201 bp, Bos taurus
agtctaaagggtttctttgcagagataaatgtctccagagagactgatgagtcaaggagtctgttaataggataagtaaatgtaacctttcacctagttactgctattacctaagtcataactacgtagttttagcaaattgtttgaactcgttccagttacttaataaaacagagcatattggtcccattcttttctagt

SEQ ID NO: 20812 - DNA, 201 bp, Bos taurus
ctgcaactatggagtgtgtaccagtgttttggaataatcctgctgagaatgcaggaaaaatacaagcaatggacagagtgttaagttttctgttgtgggttggggaggcaagcctactccattcctgctgacaggactctggctcagaaataattattgacaacatcccttttgtatcaaatacaatgaataatttttttt

SEQ ID NO: 20813 - DNA, 201 bp, Bos taurus
aatatgtgactgtttccaatataaagctataccaggagcattttgacaactcagctgaagactttccttcagtcatgttggcctttgagggcaggaggaggaggggacgacagaggatgagatggttggatgccatcactgactcaatagacatgggtttgggtggactccgggagttggtgatggacagggaggcctcgc

SEQ ID NO: 20814 - DNA, 201 bp, Bos taurus
acattgataaagggatttaaaccaaagggccatccacaaagcagggtcagataagaaaccccacaggtagaaagaaagagtgtgttaaggataaggtccccgagactgagcttaggggcctgacagatagagagagtgggatgtaaggggatgtgaaatcaaatgtgcctattcagcggctgatcagaaaatgacagatgg

SEQ ID NO: 20815 - DNA, 201 bp, Bos taurus
aaacacttcctgctggaaaagccgcttcatctgacataggtgtttatcttctgtgtactctgagagaacaaaactggatgtagttttgcttccaacaggcatcatgacagaaattttcaaaactgtgtgtcctttgttttatatacagctttcacaatgtttcagtctttctgcctattcctcttcttgataattgtatcc

SEQ ID NO: 20816 - DNA, 201 bp, Bos taurus
catcagcaaatgttcatgatggaacagtgtgaagtcaggaggctttgcccacgttggaggaggaggacatggcctggcgttttccatcgctgggcctctcaggggttccagtgctccagagggtcctccaggagggggagacctggtctaccttccctggagacaaggacactgggccgggccctccctagggcagtggct

SEQ ID NO: 20817 - DNA, 201 bp, Bos taurus
ggggtgccattgccttctccgtctttctgggtctagacctttccattctctggcttggcaagctgcaaggttgctgtcctcatctgggtaaccagagcttgattgcaaacatgccgttgtttcctttcacaagaagaggaaaggagaacactaatacagaagtgggcagtgttttgagttggagatgattcagaagttaag

SEQ ID NO: 20818 - DNA, 201 bp, Bos taurus
ccatgacattttccaggcaaggatactggagtgggttgccatttccttatccagcaaataggatagatttatttaaattactacttaaagagaatatttcaattaaagaaagcaaatgtaccataaatacatataaaatattcatatttataataaaacataattttttgcagtaaatgtatatataatactcaaaattgt

SEQ ID NO: 20819 - DNA, 201 bp, Bos taurus
atgattgctggagagaaagacatagtgaagtgggtaggtcctacaggaaaagggcagacttaataactgtgattccagggggcacagctcttctgccgaagctataatttccctagatgatgacattagaagtttattcagctgagaaagtgatggccttgggaaacttctctaaagagataccttgagttttattctcct

SEQ ID NO: 20820 - DNA, 201 bp, Bos taurus
cttttggattcaacaagattattattttcttttgttttaaatggggtgagtcaagaaagagctccatctgctttcccatcaacacaattttcaatgtagaattcagccatgccttgtaacaatagtattttattggtatcagtttcctgctaaaatataagtgtttggacattgtagacataccggtggagttatcccagt

SEQ ID NO: 20821 - DNA, 201 bp, Bos taurus
tgttaaagttgtggggcataaaaatagagcttgaatagggactgattcactagattattttaacccaaaggctttcctccaatttacaaaggaatcagcatggtgctgaagcccactgtttaaataaaatatactgactgccaaaggaagaaaagactcttaagtcacagacacactttcaaagcctcaaaagactctgtc

SEQ ID NO: 20822 - DNA, 201 bp, Bos taurus
tagctcagttttgtctttgtaaattacttttgtaagtcttcttagaaaagtttctaatttctagttcatttttgcaataacctgcatttccatcaatagcttttcttcattttttctgtattttaatttcctccttttgaacttagtgtctgtttagacagatgaggtctgtttcattgttccttcaggggaattttcttg

SEQ ID NO: 20823 - DNA, 201 bp, Bos taurus
gtgtgcactggcttatttaggcaatgttcaatccttactatatagtctcatttcctactgagattttccgtttcctgtagattcttacttctcttccaattggagaagaccctttaatatttcttgtagggcaagcttagtattgctgaattttttcaatttttacttgtttgagaaattatttctattatacatgacaat

SEQ ID NO: 20824 - DNA, 201 bp, Bos taurus
aatccaaccacctcttgcctagtctcagtaaaatatccaaatcctccgaatacatttccttttgcttaatgaggtgcccgggggtgacaacaaaggtttcaggcaggggagggatatgtaccagccgtggtctgctggtgtaggaggccactgaagtattacccccccaaaaaaaattgccatcaaagaatcatagctaca

SEQ ID NO: 20825 - DNA, 201 bp, Bos taurus
attccttattttatagacacaaaagctatacttttcaactgtatctggtattggcacacagtattcatagcatatattctgaaataaaatcaatctcatacataaaattatacagttttgaggtaatataacatattggctagaaacagctcatcaacttcatatcattttgtttcctttcaataatgtatttctttcata

SEQ ID NO: 20826 - DNA, 201 bp, Bos taurus
cagggccaacagctaggggaggatccatttccacctttatgtggttatcagaatgcaattcctccttggctgttagagtcagggttagggttccctcctgtctgttggccatgtggacctcccgactaaggtgaccttgtcttatgggcctccccactaaggggacctgcttatgtaaagtaatgacagagtgacactcca

SEQ ID NO: 20827 - DNA, 201 bp, Bos taurus
atatcaaatgcagataaaaatactaaagaattagacttccatctcttaaaataattgtagactattattataaaaaacatacttcaaatcaaatcttctgatatggaaactgaggaagttgaggctagaaaggaaaaatcatccctgggagttaagggaaaacatctggttctgcacttcccctctgccactaaccagcct

SEQ ID NO: 20828 - DNA, 201 bp, Bos taurus
aacagacagccacagtaagagttgtcaaattctataggacgaaatgttctataattcagggtttagcattctatgagtctctacagtcatatatctttatattggcatgtctagcgcctaatcatatgactcaaatgcaatgtatttcaggcatacactttccattacagtgtaaaattatactgacaatttacttttaat

SEQ ID NO: 20829 - DNA, 201 bp, Bos taurus
cacagactgttccaattcttgggcatgtgccccaaggtcacagcggataggaactaaccactggggggcttccccaagtccaccccatgggcccttgatgtagagttgtgtcttccaagtaacctcaggcagccaggagcccattcagttcagttcagttcagtcgctcagtcgtgtccgactctttgcgaccccatgaat

SEQ ID NO: 20830 - DNA, 201 bp, Bos taurus
ttattctataaatgtaccgtttgccagtctgcaaatgctgcttcactggcatttaatgcctaagggtacatgtccagtttctaacaggagaaacaaagagcgcaaacatataagtctgtctcataagtacaagctgcttctaaacgtttatagtataaagggcaaaatcatgtactgttcactccaaaagagtctataatt

SEQ ID NO: 20831 - DNA, 201 bp, Bos taurus
cttggaaattttttttacaaataaaaaggtagaaaatctccaaaattaatatggcagcattttaaaatattcttgtaatgaggaacatttggaaaaaacacttaaatgaaaccataaaagtaaaaggattaaatctaacagaacttttaattaaaaagaaatcattcaagagaaaagtcgtttattctacatagaacctaa

SEQ ID NO: 20832 - DNA, 201 bp, Bos taurus
ttggcatatagctctaacttgagtacaaacactcagtgctgatttggaatttcaattttcaaagatctaaaaataataatacatatttgaattacctaaaatgtcacttaagtctaacatattgttagcaatggaaatttagagctgtgcaatgtcttctttgactatctacacaggaaataggacatttttgtaacttct

SEQ ID NO: 20833 - DNA, 201 bp, Bos taurus
ctaaatttaactatcactaaagaaataatttaaaagagtgatttctaatacatattgaaaacgcatatttaagtttagcctgatttatttccccatgaaattttaagaaacaaagtttctgatataattttttttacctattcatctttatgatatctactactaaaaagactgagattgtcatgtctggaataaaatgct

SEQ ID NO: 20834 - DNA, 201 bp, Bos taurus
aagctaaatggcacagccagaggagccatgacagctccaaggccctgacaaaagaccaaggaggaggtggtgggccaattcccggaaacctccacccttttccaggaataactgcaataatccctccactcattagcatatgaaactacccagactacaaaaactaccttgccacattttgtgtctgcactagccctctgc

SEQ ID NO: 20835 - DNA, 201 bp, Bos taurus
atatcaggtacattgctaaaatagactgagaatatgagtgcctaggctttcatcttgaagaaatttaatgacaagttggaaaatgaatgccaagcaaagataaataagcagtcagaaagaaagaagtccaggtgtttctgttcgaggcacctctcttagatggaatacttcagaaggagaagtgatcaacatgttgaaaag

SEQ ID NO: 20836 - DNA, 201 bp, Bos taurus
caaagagatatttctaccagtctatgcaattaatcagatatggttgaaaagtattttcagtagttaacaaaggttgctctatactgtattagtattatgaaaataggattagaagaattcatatccacttgcactccacattaataatgccttcaactgactgaaactagccccaaaaatctgcaattaagtgtcattagt

SEQ ID NO: 20837 - DNA, 201 bp, Bos taurus
atgtagtgcacagagatgaacttgatacttaaaaaaaattattttgaccatgatgcacagcatatgggatcttatttccccaataaggaatcaaatatgtggaccctgcactggaagttcagtgcctaaccactgtacaccatggaagtctctcaagatgcttcttcatggaaggacttgctgacctagcagccgagcatg

SEQ ID NO: 20838 - DNA, 201 bp, Bos taurus
ttgcagaggtagggggaatatcatcccactacttttacagggaacacattagccccttgaaagtgtgggtgacagaattccataaatgatctttttgctttcagagccaatcccatgttcctcttgaataaaaatacactctgtattttcttttcccaccttcatttctgtagctcgtgagttaggcagaacataactggt

SEQ ID NO: 20839 - DNA, 201 bp, Bos taurus
cccactaggctcccaaagtataaatcacccccatcctcctcccttgatcgccatcatcacccagggatagccccagggccctagggccactgggataatcctcatggtgtagtgacaaaataccgaatacgggttcaccaaaattttgtgtgagtttttccttaccaccttatggagaaactcaaactttttggccaaccc

SEQ ID NO: 20840 - DNA, 201 bp, Bos taurus
agactcctctgtccatgggattcttcaggcaagaatactggagtgggttgccctgccctcctgcaggggatcttcccgacccagggattgaactcgcttcttgtatgtcccctgcactggcaaacagtttgtttaccagtagctacacagcgaagcaaagacagcctggcatgctgtaaagtttgtccctttcagttgcta

SEQ ID NO: 20841 - DNA, 201 bp, Bos taurus
agcattacagcttaaaagagatctaatactatctgaacaactatttctcaaacatggtgtgtccataacccaatttttgaactaataatttgacagaaatagtgttgttgttaaacattaatattcctgattaccaaatgaaatttataccatgttctaaggcagtgagttttgttataaaacagtaatggggctctgaac

SEQ ID NO: 20842 - DNA, 201 bp, Bos taurus
gtgcacaccaggagccaggagaaaggagcagggtcccaagaagagactgagtcttgagtgtctacaagcctctggtggagacacgagtggacagttggcctcaggccaaacaacagggagagaacacagtcccacccatcaaacaaattcatgtcatattacatgacgatttagatggtattgaaagaaagcaaaataaac

SEQ ID NO: 20843 - DNA, 201 bp, Bos taurus
tagtgacttgtatcatgtagtttctgtactggtgtttttcagttaaatgaagtatctactttctgattttcataacaggttatatatttagagaaatcaattgtaaaaactacagcagaatgaatttcatagcagtatctctgtggctcttatgagtcaaaatttccaatttaccaaatctcagagttattgggccttttt

SEQ ID NO: 20844 - DNA, 201 bp, Bos taurus
ctattcaaaaaagagaaatcccaggttaaccttaccacggcaatatcaggagatagaagagccccgacctcatgagtgagggacatgtgagactcagaagtgttccacaatttgttgaatgcttgttgtcaacctcctgaaactcttttaatagttttgaaccaaaggtccacattttcattgtgcattgggttccataaa

SEQ ID NO: 20845 - DNA, 201 bp, Bos taurus
tgcattatgggggatgtaaaatgaatcagatggtggattctgccctcaaagaacttaaagggctatgaactatcaattctcattatgagggttcagagaaggtgaaatgacttctggctgagattaatttgagaaagtgtgtggaactgggtgtggagaaaagcaaacagctccttccctgtagcagaagcacacagagca

SEQ ID NO: 20846 - DNA, 201 bp, Bos taurus
acttttcagtggagaatggtggaggaaaaggcaaagtgaccttcctgctcctgccattttcccaaactcctttggcttaaactattcaatatgccaggggtccgtattttggggtagaactccatcaagacagacttggggaaaaaattgtattattttgaatatcatttatttaatatttcaagagcaattcaaatatga

SEQ ID NO: 20847 - DNA, 201 bp, Bos taurus
ctgctgtacaagcagtaaagaaatatttatattattccttacctactgctgtataagcagaaaaattaatatttgtattaaagcttgatgataacctattagaatcattaccatctaactctgaaatatggcctgacttttccaaaaaactggggtggggtgtccaagatctacatggcgtggagctaatctctattagtt

SEQ ID NO: 20848 - DNA, 201 bp, Bos taurus
ttacaaatgtacccacaaagcaacttctgaacccaagaatacctaagaacaacatataaaaggtctataaaattcagaattcagaatcagagttacgaacactccctgaccagtctattataacattaatttgttgctcatccagttacatttaaattctcagtacttaaactgtaatataacacttttcattccttttct

SEQ ID NO: 20849 - DNA, 201 bp, Bos taurus
aggtggtcatgagcactgagatgatggccaggaaggaggaagaacaggatggtggtgatactcggaatccatcacctctgaataaccaggacttaacccaacttctccagccctatgatgtgtccaacaatggacctaatgggaagccacttgcctttaaccaccatgtagatgtagtcaacaaaggttttcatttgcttc

SEQ ID NO: 20850 - DNA, 201 bp, Bos taurus
agcccagtgggatgcagtgcctagggttgcaaagagctggacatgaatgaatgacttcactttcactggagacacagctccatcacaggccacaaactcaccagtcttgagtgaggaaacagaggataatttaacaagatgtacattcagttcaggtcagttgctcagtcatgtctgactcttttgacctcatggactgca

SEQ ID NO: 20851 - DNA, 201 bp, Bos taurus
tgaatggaaatcagaattattgggccatatatcctcaaaggcagaaggagtgccattattaaaagactcttctccatactgtggactttaggcaagctcaagttatgattaaagtcatatgcattatgtgcgttaagtggaggaggccaccagggtaaaatcggcaagcatgcagcaggccaagttcactcagtgctcaca

SEQ ID NO: 20852 - DNA, 201 bp, Bos taurus
ttccagtcagatttggaaatacagtcaacttctgaatcacaattaatatcttagtaaaacagataaaacttccatgacatatacagtaattctttgataagcggagcacaatcttactagctaatttgcaccttcccaccctgatgtcctctgcctctcctcggccacatcatccatttacacctcacatgcacaccttgt

SEQ ID NO: 20853 - DNA, 201 bp, Bos taurus
gcggctgggtcggcctcctgtgaacccggaggggtccaggagcaacgaggcatcacgtccacgacctcagccatgaagcagggcaacggagaggtgagatgagaagaaaccaagcgtgggccagagacaaggccgggatccgcggccatgacggaggagggcggagagggacgccccctccccaacctacgaagacccctt

SEQ ID NO: 20854 - DNA, 201 bp, Bos taurus
ataaattctatttacataaaaaaacagaacatttgctcagatatcagcagtggcttatctgcctctgtgttagggattgtgggtaacatgattcctcccacttgtgctttctgtttccaggctttctctagcgaggacgtactgactttgtaatttgaaaagacaaaataaagaaatataaggattcttcgcctctcaccc

SEQ ID NO: 20855 - DNA, 201 bp, Bos taurus
ttttgctttgcttacctggaatttctaattttttctattggtcattatattacttgaacagtaagaaaaatacaaattttggtttctaccaaagaaagactcagtctgtcagtagggaagtttaattagtgagtggagaataatgcaaaaaactagtcataatgtggtaatccggtcttggacatattcactggatactgt

SEQ ID NO: 20856 - DNA, 201 bp, Bos taurus
ccaggtccttaataaagacatttctgggatataaagctaacaaaaaaaatgactaagacctatccagtcttcaaaataatttgtatacatttcaaagcaatgaaaaagcatacaacaattaccaattttctaaagcaaatattctaagaaagggaaataccttctagcttcagtagggtgaattaaacaactttttaaaag

SEQ ID NO: 20857 - DNA, 201 bp, Bos taurus
tgggaggactgagttcagtgtgggatattcacagcctgaggtgtcctgaacttcttgttgagatgagtagccacagtttaggatgtccttctgaagctggagatgaagacttggaagtggccagtgtaattaaagaggaagagaaaaaaaaaatgaagaaagtagggtaatttgaaagatagaagaacaaaggagtagaca

SEQ ID NO: 20858 - DNA, 201 bp, Bos taurus
aaataagatatcaatgcatgaaaaaaagatcaattctactttattgctaaaaaaataggatttgtcaatttacagataggcctttgtgcctgttgaagatagaagcactgctttacatcctgtttgtccagcaggaatgcaaacagtcatgaaggtgaaatatccagagtgtttacatggccctttcatagaaagtcgcct

SEQ ID NO: 20859 - DNA, 201 bp, Bos taurus
gttttttttcccctaatttttttgtcttccttattagattgagaacggctgtaagaaggagtatccattaatctttagtaggccttaaagttctttgaatcctgctgtcccctgtgtcctttcctgatgtgtcaggaggtcttctgtggggcggctgcacgagtctttgtctgtgtcctgagaggcccaccaggaagcccc

SEQ ID NO: 20860 - DNA, 201 bp, Bos taurus
acacgggctcaggctgtggttgggcgactctccgtgttcctatgccaggtgcggccggcctcctgctcgaccaagagtgcggcctgagaggctcccacacgtcaccggacctcagcagctgtgcggtctgactgacagctgtgtctggtggaagaagtggggacagggcactggggggacacagtccatatggactgtctc

SEQ ID NO: 20861 - DNA, 201 bp, Bos taurus
acccttgagatacatcctccaaaactggtcaagattcaagcccaccgagccaccaaggaggagactcacttcttttgtaatacagtctggccccaatagcaccttttggatggggagttcagttcagttcagtcgcttagtcatgtccgactctctgcgaccccgtggatggagaatcctggcccctaaatgggactgtta

SEQ ID NO: 20862 - DNA, 201 bp, Bos taurus
ctggttgggaagatggtgatggccatttggaccagtgtgatgtgatatctcattgtagttttggtctgcatttctgtaagaattagtgatgggcatcttttcatattgttggccatgtgtcttctttggagacatgtctatctagatctttcacccattttgtgattggttttttttttatattgagtttcataagctggt

SEQ ID NO: 20863 - DNA, 201 bp, Bos taurus
ccatcttgttcaaatataatactattttaattactctaactttataccaagtcttgagacatttacattttgatataaattttgcaatccatttcatcataatttttaaattctgggattttaagtgaaatcatattgaacctatagctcaacttggaggaaactgacattttaacaatagtgagttcctattatataaag

SEQ ID NO: 20864 - DNA, 201 bp, Bos taurus
taattaggttgcctccacatagattaatgataattaggatacattttcttctaccccatagtacgtggcacagtgctctgcaagggtataccttttgttaaatatgcacacagttacttgctatttagacctgctaagcccagtacctgagctcactttacttggcagctgatggttgctcttcaaagtagatgcgaagga

SEQ ID NO: 20865 - DNA, 201 bp, Bos taurus
ccagatctgatcggctcctaagcctcctgagaatttaatcattttgccccattttctgttgccattttatagtttcatcggaaacgcacttgctctgcatcgcacagttacaggcaacacatgtataacgtcttctgaaagagcagcgggctgaatacaaaggcgctggggtgagagcgctctgggttcaaacccagacag

SEQ ID NO: 20866 - DNA, 201 bp, Bos taurus
aaaatgacagttactgcttctttgtcttagaaaaaaatgttgcacacttttttctttaaagtaaatattttcagttctgttttgtgccaggcgttgtgctcggcatcagaatgcagtgggtacagtggtgagtaaacagctgtagtgcctgttctaaatatagtgattcatttagtgatgaagattgggaaaaaatacatg

SEQ ID NO: 20867 - DNA, 201 bp, Bos taurus
agctgaaacgttattagccttagcatttcctttgactgtcacccagcatattacatattcattttccctctgggctctgagatattgaaggggtttacatagcatttgcttctgctactgagaccggtgttgaagtaagaagcgcattgaactgttggaacctggaacagtttctgtgtttgccggtatcttgaccagctt

SEQ ID NO: 20868 - DNA, 201 bp, Bos taurus
attttgcccacagacccaggccaccatgggatctaattaacaagcgtggtcttgaccaacatgtgagaattagggtgcacgtgcgtgctaacattgccagagaggcctttggaaggagagagaagccacaccaagtggcaaaagcggtggtttggtggcgcacgggcggggagctgcgtccggcctaggagaactagacca

SEQ ID NO: 20869 - DNA, 201 bp, Bos taurus
gagtgaaacttggacaggaggaggggtccaaatgcctcttcttagtggttctggggcctgagacttaggggcctcgctgtgtctccgcacagtgcttaggtaggactttggctttgcaggcttggagcacagcgggccgctgcagagacggacatcgtggtgctggccagccaaggcctgccccaggcccacagggaggga

SEQ ID NO: 20870 - DNA, 201 bp, Bos taurus
tttctttccattcctagtgtaattctgtggaagacactggcctccaagtcccgaaagaccccaacccagccttggaaattgcacctctccccttgggccaccatcacagttaaaatgacttgaagtgctccagtggaagtttagaaattcagtctttagggaaagaggagcagacacttcccttggcaggtccttatttgt

SEQ ID NO: 20871 - DNA, 201 bp, Bos taurus
acctcttgtccatgtccagagttcaccaggccctttccctccatcgaccagacttcctactcctcagtcttgctttggctgggcctcgcactgggcagaactctattctagcccatgaagaaggcaagtgaacctttctgcacatgtcaagattatagattggaagacacaggatcgcttgtgatggcctgcctgttcacc

SEQ ID NO: 20872 - DNA, 201 bp, Bos taurus
acgatgtgtctttaaatctttgtcataccacatctctgcttgtgtgagaaagctgtaacagagttggagaaatctgtggtccagggagcatcagacacgtccaggctatttgggaactggcagacctcccagtggagagatttaacacatttattgagggcaggggactatacctctatatcaaagggatgtatattcggt

SEQ ID NO: 20873 - DNA, 201 bp, Bos taurus
tgagcagcccagctatggttaacgtaaaggcttcggcaacaggaagctctgggttttaattcatgttaatcctgactctccattactagtcaagtaacttgtctgaatcgttgagtagctgtaataatttgtttactagctgagtaactatgtaaggccatttgctgcctctgagtttcctttctgtggctgagagaattc

SEQ ID NO: 20874 - DNA, 201 bp, Bos taurus
cctatgagacacagagaacacaagtagtttgaatgtgggggtacttgaaactacagcatggctctgcattaatgtcttccaatttgatagtcctcaggaacgcctgaaaatctgactagcttcctggattgtcatatttttcaatatgactttaactaatattagctgtctttttttgcttgagattgaaaaagaatattt

SEQ ID NO: 20875 - DNA, 201 bp, Bos taurus
agagcagaggttttgaagactggcaatgctcaccttcgggaggattcagcagttatttgcatggtaacagtcttaaagaactggccacagttctgcccagtgctgttactgcaacacacaccatgggcattcattgcctctgacaggagttagagcccgtggaatatcttcaagacactgctgtcacggtgatgcacagca

SEQ ID NO: 20876 - DNA, 201 bp, Bos taurus
tcatcatggagagattgggaagtgattatattaatgatgttactgaataacacagtacccctaaacaagcagcttaaagcaacaaacacccatcatttccatttttctaggtcagggatttgggcctggcctttggctcagggtctctcaacgggccgctgatcaagacgctggcagagtctgcagaaagttcctgcaggg

SEQ ID NO: 20877 - DNA, 201 bp, Bos taurus
tctggcatgggaggagaaggagcttctagaaaatctggctttgaaggccagcagggtttaaccacaggaattccacaggattggaggaaacagaaactccacacttggagggcacacaaaggtctcataagcatctagatgcagggaaaaaagcagtgacctcctaatagtctgggatagacctagcagctaacaatggag

SEQ ID NO: 20878 - DNA, 201 bp, Bos taurus
caaatcgctctagaactctcagcctggacgcctgacaaccctcacgtggcagacactctgaatgcgtgtgtaggcacatacgttttgaaacttgtgaatgtcttgatgaacaaaaacaatcaatactttttttttttttttcaaatcatgtacattgtgtggctagagactattcaattaagtcaaaaattctctttaaca

SEQ ID NO: 20879 - DNA, 201 bp, Bos taurus
agctgtcctcaggcaattttctgagtagtgctgtttaggaaggaaatagatacaagtggtgggcattgcttgaaaatagtaaaataatcagaaaaaccaacagctaccaagagctaagaattcactgaaccctgtgagaaaccccactaagacatggaggaacagtcagggaggtggtttctttgcaaagtttgggcattt

SEQ ID NO: 20880 - DNA, 201 bp, Bos taurus
atgacctgggggagcaaacttgttattacacttgggtagcgtcaatgggtgcaaatacttccttgagaaaaaaaatccaagttaaatgccattaggcctcatagattgaaatggtactctccgaaagtgaaagtgagagttgctcagtcgtgtccgactctttgagaccccatggactctacagcccatggaattctccag

SEQ ID NO: 20881 - DNA, 201 bp, Bos taurus
acaatccatctgattttcacaatgcttcaagaaaagcttatattttctaggaggacaactttacaacagtttccaggaaaagtgcttaattaacactgacgagttttaacctcctcaagtaaggccccacctttcacagagcataccttcatcaagagaagacaaaagaaagaagaaacagcaacaaaaggctatttcaaa

SEQ ID NO: 20882 - DNA, 201 bp, Bos taurus
atatatttgctttaaaataattttcatagagtaaaatgttagtatttaagtaaaaaacttactcagtagccacttaaaactactattctttgatccagtaatcgtccaacaaaatgttttgagcgcatgctcccaaactgtgtatacttatatacctataaattcaacacatatgttgctaaaccaatatgtgatgttctt

SEQ ID NO: 20883 - DNA, 201 bp, Bos taurus
actgcaggcaggttctgtagcggggctggagtgggaccagatgagcggtgtgcaggggctacgtgagcaaaggccgagaatccgggccctcgtggcagctatccgcgctcacatggagcccacactgtaagtcaggcagacagacttcagcagccaccagtcccaaaagcaaaccaagctggcccttgcacagcaaggacc

SEQ ID NO: 20884 - DNA, 201 bp, Bos taurus
atacccctccagggggcacgactcatggctttgtttacacaagaactctttctgggttggtccagaaccaacttgcacaaccatgagtggccttcctgataagaaaccctccttgtctgttaaatatacatgaattcttatgagcttctccatccatcccttagaaaagaagtgcttcactcactagaatttcttttctat

SEQ ID NO: 20885 - DNA, 201 bp, Bos taurus
ctggggaaggcagatgcataagaggagccgtgagcacagccacggagcctttggggagcacagtagcagtctcttttgtcacttgccagtcagcttcacacgagctctcctgctgtctgtgcctgagatagattctctgccccaagacaactgtgatgctgagacagggtttaggaaaatgtgtaaagccaccttgttcca

SEQ ID NO: 20886 - DNA, 201 bp, Bos taurus
gtatcatctgatgttttcactcaatttgtgacatttctaatctcagacaagtattttcattcaagactaatgctttacctgctccttgtaaagacactgcactattgctgcatatttactaatgattgttcacaattattatttttctaaaatttcacataagaatcattattacattcattaatgcaaaaattcttaatt

SEQ ID NO: 20887 - DNA, 201 bp, Bos taurus
cttggttccccgacgagggactgaacccacacccacagcagtggatgcgcacagtcccaaccactggagcaccagggcattacctatcacagaattttaagggaaacggacagcccgcggcttgagaatctattaagagcgccaagtctaaccactgacgtgcttacctaccatgagttcatctatagtcgctgcaccttc

SEQ ID NO: 20888 - DNA, 201 bp, Bos taurus
tatcacagaattttaaaggaaacggacagcccgcggcttgagaatctattaagagcgccaagtctaaccactgacgtgcttacctaccatgagttcatctgtagtcgctgcaccttccagccccccggctgccccgaggccatgggtgaggtgttgaaagggcctgacccaagggcagaagaaggctttctgagaagcacc

SEQ ID NO: 20889 - DNA, 201 bp, Bos taurus
aaaattctgcatgtcttacaataaacaaaactaaaagcatagaaactgggaaagtgtataaatatttaatgtaaccagaaaagtgaaataaatccaaaccgctttttaaggtatcaaatttggaggtgacctttaagctgggacttgagagataagtaggtgttggtcaagcaaaagtaagggaagagtccttcaaggaga

SEQ ID NO: 20890 - DNA, 201 bp, Bos taurus
tctttaaagaggtaattaagttaaaatgtggtgtcatgttggatttcccctgtgcgtcagcctttaaagaattccttggccaatgcaggaggtgggtcccctctctgggtcaggaccatcctgtggagtaggaaatggcaacccactccactattcttgcttggagaattccatggccagaagagcctggaatgctacagt

SEQ ID NO: 20891 - DNA, 201 bp, Bos taurus
ccttgggattttcttttttagtgttctgtttctttgtcaattttctccggacatttatttgtacactgggagctttggatttcggttcacataggcattttctttcatccatgtaaaatatcatcttgttgggtttagcctatttatccagtctgtgttttccaacagtgccatggcctttctctttatgctgactaacat

SEQ ID NO: 20892 - DNA, 201 bp, Bos taurus
gccttctacagagaaggagggaaatatccaactatagccctttgcagtcacttggtctcccctgagaggagaggggactgaggaacacatgtgaagttcatagcccaggcacacaggctgaccaaccataggatgtagagggttcccctctacccacactcaccaccatgttacccaaaggaatatttacatcagctcctt

SEQ ID NO: 20893 - DNA, 201 bp, Bos taurus
ctaaggtcttgagataattcactgatgtgatgatgggtgagtatctcccagagaccttggcacttgtggatgctggatctggtgctgtgacagcaatgattgggggaaacactgattgctgtttaggaaacatggttccccaagaactgatagaaagtagaacattgttctcagggtgacaacaaagatataaataaatgg

SEQ ID NO: 20894 - DNA, 201 bp, Bos taurus
tggcactgtaatgacatctgtaactgcctgtgaaaaggtaacacaactcacaggttaaatttgagcacaaacaaattcaaatgagtaatgttttgcacagagaacaacaaacagttttctgcaaatgtgtgctatttctagagaggtggaagagacaggcgttgaatatttcttttgccatctatattaggttatggtcca

SEQ ID NO: 20895 - DNA, 201 bp, Bos taurus
aagggctatagaggaaatatataaaggaatggaaaaggagaatgccaatgggagaaacccaaacaagacttccatacactagttcagaaccagagaccctcgtttgatttgatgctctttaagtgagttgcagaggttttggagaagccttcatgaatgccagatgaaatcacctgtgccttacaacacttcctagtccag

SEQ ID NO: 20896 - DNA, 201 bp, Bos taurus
tgaatggcatctccaaaacctattttttgacatcctcaaaactgattgtcctttaaaatgacctgagaagctacagcctctaaggactggcacaaacctggcaaaaatcactctcagaaacagtgacaaagacagctcactggcagtgagttattaagtgaggtagaactgagagccgtaaggtcagaccccgccccccac

SEQ ID NO: 20897 - DNA, 201 bp, Bos taurus
aatcaaagtcctgtccagcaccatttgcaacacactgactgactggggtccctccgtgggagaactccatccagtgtgaaaaaccctggggccaaggagacgcatcattagcagggaaaatatctatcgttgagggcactcacggagatgcagcccattcaaatgaagataaacagggccaaacaaaagaattacaggaga

SEQ ID NO: 20898 - DNA, 201 bp, Bos taurus
ctaaaagccaatgatcaaggccctgattgttcctatgcatctaaaaagaggagaggaaagggaaaagacagaaaataaagagaaacccatttttccctttaaagcatttcatttcctataggcctgatggttaagacatgatctgagctcaggattgctatctttttttattttcctctatcactgccttgatacatcttt

SEQ ID NO: 20899 - DNA, 201 bp, Bos taurus
ttgctgcgtcttcacctgggggaagggtgaatgagtgctctgctgcctttttcataagggcactagtcccattcatacacactgcacacttatgacctcatcacctccaaaggcctcacctccaaacaccatcatactgggggttgggtttcgacatttgaattttggaggatgccaaaattcaatccacagcagtgaggc

SEQ ID NO: 20900 - DNA, 201 bp, Bos taurus
tgggccacagtccatggggtcacaaagagtcagatatgactttgcaaataaacaacaataagattctttaaaaacacctgacaggttaggaaagagatcagaggaaaagagcattaaggcccctccatgtggcttctctacgggacctttgcccctcctggcctggggactgagtgctcacagggaagctcagagctctga

SEQ ID NO: 20901 - DNA, 201 bp, Bos taurus
atgcttcacaccagctttcaaccctatgtttcatcctgaactcataaggaactgcttacagtttgttgaaccaactatgcactttccctctccttggaacatcttctgccaaattcttgaaaatctgttaaagttgggctcaagagtcttctttgttacaaagtctctcctttaaacagtttccattataacttccttatc

SEQ ID NO: 20902 - DNA, 201 bp, Bos taurus
acataagtaatcaaggtgattagagattgctctaagttctcaagagaaaatagccaggatgacgaaacaaaataaatgagagcagccacgctggatggcatggttgatgaagactttctaagacactgaaatgtgagctgagtgggatcaaaggcaaggatgtctcgggcagaaggaacatcttcaggccaccaacacagc

SEQ ID NO: 20903 - DNA, 201 bp, Bos taurus
gaccagtgtggccttaagatttcatatgccaaacattgctgctctcaccattgcagtagaagcaatgacccatccatacccacacaaaacttctagctcacggggggtgctggcccagcagcccttcctcacctcccctccagcacctctgaccaggggcagatatcacagatcttcatcaagacccctgtcatccagagg

SEQ ID NO: 20904 - DNA, 201 bp, Bos taurus
ccctgggaagacccctcccccggaaaccactgaagtaccttccgtgcagggaccactgcaagtgccagagactccagggaggccaaccccattacccaccaatttactgggcacccagagacttccctcatggtccagtggctaagtctctgtggttccaatgcagggggcctgggttcaagacctgatcagggaactaga

SEQ ID NO: 20905 - DNA, 201 bp, Bos taurus
tgaagattaagtgttgcgtatcaacatacccagttcgtgtctgccccccaccaccccgcccccgttcccaattcatatgttgaagccctaggccccagtgcgacagtgttggaaggcagggcctttggagatgattagatgttgtgatcatgggaatagagctttttggtgggattattgtccttacagaggaacagagac

SEQ ID NO: 20906 - DNA, 201 bp, Bos taurus
acccgagcactatgggaggaggttggccctgcccagcgaaggccacgttcagagtgcctcaccacctcagcagggatccactggcccaaagtaaagtcacgtgcactctggtatgagctctgaatcatgtgaccaacatataagcacaagcctgcccagggcaacggtgctgaggatccctgggcctgggtaggaggacac

SEQ ID NO: 20907 - DNA, 201 bp, Bos taurus
acacacagattatgacagaacacaaaggaatagtcaagaattttcaagcgtacgttaagcccccctccccacccctccacaactttatttggatgttactctcatcatgttatgcaagctctcctcatctatcttgctgaagaggaagagccttaggcatttggggaggaattttagaagctgtaccaggaagatggaaat

SEQ ID NO: 20908 - DNA, 201 bp, Bos taurus
tcttgggcctccgagctgacacgcagggacaggagagctgtccaggggtcgctgggaggacacacctccctcttaggccaatcggagcacactttctcttaaaagtcatatgttctcttcacctgaaattggaagacttttttcactccctgggctgttaggagtgccatggcccctgcatccagttgctaggagacctaa

SEQ ID NO: 20909 - DNA, 201 bp, Bos taurus
aggatacaagggtcaggtgatggaacatagatgctatgtggttgtgaaacattttaagtcagatgagaaggtcaggtagccttttaaatgacctcatcctcgacctcaggccttcttatcaagtagcatatgtagaaaaagaaataagacagatatatttggctatttctttggcggtccaggggctaagactctgcattc

SEQ ID NO: 20910 - DNA, 201 bp, Bos taurus
gtagcagtgagcaagaaaatagcaaacccaaccattgttttatttatatgttttatcagaggatttactagagccccacaaaatctatttaattaaactcacttatgtgatagcaagataaataagtattgttttatgctgtttcacgttatagcttcttctgctttctctgtcttttggtgggctctccttctggaaagt

SEQ ID NO: 20911 - DNA, 201 bp, Bos taurus
ccttcttgccgaatacagtgcctagcacagattcacattcccagagggagttatcaagagcatcctgattccaaaagagctctgacttggggaagaaaaaatacagtgtttgtccttagtggccagttctgcccaaaccacccctggggtgcagggcagagaggcgcaacagaaaaaaagacagctctcacagggggagct

SEQ ID NO: 20912 - DNA, 201 bp, Bos taurus
caccagagaaaccctgcgtcaaggccccacaccccccctccacccagattgccttcctgctcctggggaagctcactcacttttccgtttgtgttcttacaaggccgtgggatcctctcctgaaaggcatcttcaaagaagtcaggatgaaagaaacccaccccttccagccatctgggattaggcaggctgaagcgtgca

SEQ ID NO: 20913 - DNA, 201 bp, Bos taurus
tagttggtttcactaggtggttccaaaatagtaacagcatttaaccttctcttatgtatttcaaaaacttccatcctactgggttaaacctgttctctaagctttcacatattccccctcattcattccacctttaacaaacgacctgccactcctaatgtccacatcatatcctgtgaaatcaccaatttcttggtgtga

SEQ ID NO: 20914 - DNA, 201 bp, Bos taurus
ctggactacgagggacaggccctccccacttttctttgtctttctcctttgtcttctctctcacagtttctgctgtgtgaaaaatggttgcatccagagcggatatattttctttccctgcacggcctccataaatcttgtgtctgtgcatgactccttctcagtgctgggtttttgattccacgcccccaggtagaatac

SEQ ID NO: 20915 - DNA, 201 bp, Bos taurus
tggtgtggcctgtcttggtgtctggtacagggattttttcggtgtcactcctgtgttccagggttttctcagtggtgaccagcacacgaatacttgttagttgttcttgagggagagcgaaggcctataggaatggcctatgtcaccagcttggtgatgccactgtcctctgttgtctcttcttataagaacacacacaca

SEQ ID NO: 20916 - DNA, 201 bp, Bos taurus
ctggagaattccatgggcagagaagcctggtggcctaaagtccacagggctgcaaaaagttggacacgactgagcaactacagggaatgatttatgaaaacatgtaaagggataaattattatgaagttagaaaagatgaagcagtcttttcccttccttcctgagaagtcctgtattaacatggcccatactggtttgcc

SEQ ID NO: 20917 - DNA, 201 bp, Bos taurus
agcccagaaaggcaggagatgatcactttcagggcttctcaggttgctctgctttctctgttactctgcaaatctatgaaattatcttctgggcctggtatccagtgttacctagcactctagtttttccaggactcaggaggacatagttgggggctttaaactcattgatggacatgggggaaaaaaaaaaaggaagga

SEQ ID NO: 20918 - DNA, 201 bp, Bos taurus
cctcgacgggcacctctccctgctgtaacaaccaaaactgtctccagacgctgcaaagtcttgggggtgggtggaggggtgggagtcgtcatgactggtcgcaagccatggtctcaggccaaaaagcaaaacaatcaaacacaaagctatgtagacctgaacaggaaataaagtattgagttggccaaaaagttcacttgg

SEQ ID NO: 20919 - DNA, 201 bp, Bos taurus
tcaaggtggaagaatgtcacattaagtgaaataaatccctaagtttgttctgacaaagaatccagttatcccaatgaagacccatgtaactttcttacctggtcttttcattcgggaaaacataagtcttgctttacatcaatgaaaaaccatggtgatatgtgtttgaactttaaaagcaatgtctactagtttacattc

SEQ ID NO: 20920 - DNA, 201 bp, Bos taurus
ctagactgttgaatttagtggtataaccatgctccaaatattcctcactgtctgtaggatctatagtgcaacctctctttcattcctaaaactcttcatcagtttaactaagagtttatcgattttatttatatttcaaagaatcgacttttgaccatgttgattttccttattgtttgtttcttattatattgattttga

SEQ ID NO: 20921 - DNA, 201 bp, Bos taurus
ggcttggccagtaaaaaggccacaggggtcagagatgaggtgagtcttctgaggatctcctgttagtgaagcctttggtcactgggatccagccttctaccggccatctgctgctgctcaagcattcccaggaggaatcagatctccaaccccctcagtgtgattatgttaacaaaccagacttggttcccttcacccact

SEQ ID NO: 20922 - DNA, 201 bp, Bos taurus
gttattttcattttaatgtgtacaggatctgtagtgatgtcctctatttcatgttgatgaattgggacctctctgtaatttttctcagagtacatgcagaatacaacatgagaaatactgggctggatgaagcacaagctggaatcaagattgccaggagaaatatcaataacctcaaacattcagatgacaccacactta

SEQ ID NO: 20923 - DNA, 201 bp, Bos taurus
aacaacaactccaccagacagtggagtattatttgaagggttaagcatttcggcaagacctagagatggtgaaattcctccatttatgagacagatttcaataagaaggccaactactacagatgagagatctttgcggaaaattcaagaacaggatatcattaattttaggcgaactctctatcgtgctggtgctcgagt

SEQ ID NO: 20924 - DNA, 201 bp, Bos taurus
tccgcctccgcgctggacgctcgcctcggcagatttctcgcgcttcacggctgtatttaggaagagcggagccgagctcagcggagcccagcagagcgcaagcgaagcagggggtcgcggggagcggagccgcaggcatgacggcagagcagcggcggaatttgcacgccttccgcgactatgtcaggaagatcctggacc

SEQ ID NO: 20925 - DNA, 201 bp, Bos taurus
tgtgtttataggcaatagagggctgtaaggaagctgctcagctcttagctaaggtgggaggaggcaccaagaggttcagtttggagaggaaaggccttcaatactaggcttcaggaagattcatcatcgagaggtgtgaaaagaagcctgtgcatgaagaagccaggcatggggagggtctccacccacctctcccagctc

SEQ ID NO: 20926 - DNA, 201 bp, Bos taurus
cttgtttaaatacttcttgatatagacactcattaatgatattcctctttcctcaagcacctgttcctggtaaaaacaagggctatattgatttgctgcaatttatcttctcccaggatttttgtcttgacagtgtgagaagattaattggaattaatggcatttgcacagctaattaaagtcactcttcctaaagtcaaa

SEQ ID NO: 20927 - DNA, 201 bp, Bos taurus
agttttcttctttttgattggcaaattggtaggcgacatgagtatgtctcaagacactagtttgaattggggcaaatatacattctaatgattttgttactgtgttacaaactgtgctacactctcatgaaaaagttctgaggtgttaaagggcgtccctggtgactagtggtaaagaatccacctgccaatgcaggagac

SEQ ID NO: 20928 - DNA, 201 bp, Bos taurus
gcaacaccttacacatgaagatatgatttaaacagatacctacatggccggattttccatatatttaactattattcacgctggactctctaaagtggccctcattgaatagtttttttttttttttttttaactccaacctaattctgcatgcatgaatagatgatgatgatgtgatgatggttgacacattaccttgac

SEQ ID NO: 20929 - DNA, 201 bp, Bos taurus
actatagtgcagaacaagaaatggaagtaaatatcaccagtttcgctttagtatttccttgttaacattaactgatatcaatcgggatggggttgggggaggtcttctatatgggtcatttaggtaggtaaacatatgttgtcatctgccctgtacttaagtaggaaacagacatttaatttggccagcacactctgctag

SEQ ID NO: 20930 - DNA, 201 bp, Bos taurus
ttatggcttatgcagatttttactttatgaataatgctgctaacgatacatgtcttgtggtgcatgcatggattaatttctctagggaatacacttagccatataattgcaagatcatggtatatgcctactgcatgggaatgaagttttgattctaacaatctgcaagttattgtacaccctgtttgttaatggcatgga

SEQ ID NO: 20931 - DNA, 201 bp, Bos taurus
ttccttagaagatacaagctgccaaaacatacacaagaagaaataaacaatctgaataggcctgtatctattagtgatacaaccagtcattatcacctctcttgatgtattgccgtttttatttataatatataattttagcttatcacagtcacagtcaagtgatattatgccactccacatagactgtaagaaccttaa

SEQ ID NO: 20932 - DNA, 201 bp, Bos taurus
aattttttaaatataaaggttaggtgctttccaacttctgtttaggatgttagcaagcaagaaagagcattactcccacatctataacaacaaccacagcgttcaactcactatataatctaaaatgtcacagcttttccagaactcattagattcatggttacaggacaaccaactcaaccaaaatccaaggatgacaag

SEQ ID NO: 20933 - DNA, 201 bp, Bos taurus
gactctttctggagagaggtcattatctgatgtctttggtcatttgctacgttagaagtttagatcaatttcatctgattctttctgtttaccctttcttgagggttatttttggggttctctcagaaccctcacagcctgtccttgtaacattgtagtatctaagattgctatactgtctgatatttatgttttttgtga

SEQ ID NO: 20934 - DNA, 201 bp, Bos taurus
ctgcattggcaggagaatattttcaccactgtgccacctgggaagccccaaagactgcagcaaaagtgttggctggcctgagctcttaatctggaggctcagttggggtagatctacatctatgctcactcagttggctgacagagtcattttcttgtagttgttggactgagggccctggctttttgctggctgtaactg

SEQ ID NO: 20935 - DNA, 201 bp, Bos taurus
gtcatatttttagatatgatcataagaaaatgacttgtgatattccaggatcacctccctactccactgaaacattaaaatatgtttcaattaactaaacggtagattttatttgatagctttcacattccatatatatttgtaattattcgataaacactttagacattaaaaaatattttaagtgacttaatgatataa

SEQ ID NO: 20936 - DNA, 201 bp, Bos taurus
gaccccgaatccatccagcagtcagccaacagtaacccatgggggccactggggttctgtagtcagcttcccatgaccaagtggtaccaaccagtagccaatagccttcacacacggcagggcctagcaacaaaccaaaccaggaataagtcaagcctaccagactgctgacatagtctgctcaccacaacaggactcaga

SEQ ID NO: 20937 - DNA, 201 bp, Bos taurus
aatttctagaaaaaagaaccaaagcaaggaaatgactacagatttattcataatgaaattaagaaaaggatttcttaaacttgtactagaaagtaaaatgaatggatttggatattaaagtgccattagcacttgacaactgataaaatcaacccttttattaaacaccttctaaatccaagtactagtgagctagataac

SEQ ID NO: 20938 - DNA, 201 bp, Bos taurus
actctttgctttctgtggcctcgtctttttctggccctccctggcttaactttctcccaatttccttcagttgccctcctcttcccatgctgctgctgctgcttccctcactcaggccagccagagacccttttagacagcagtatggctccaggatcttgtgtcataggatgttgcagatttgccatctagtaatggccc

SEQ ID NO: 20939 - DNA, 201 bp, Bos taurus
gcgagaatgttcagaaatgactcaaaccttaagtaaaagcctctactagatggtttttaaaattttgttggccattatgaatccatatcaagtttttttagatgtattttagggtttttgccttcttattggagcatagcatttttatgcacatataccttcacatccaattagtagctctaatcagaacagacaggtaaa

SEQ ID NO: 20940 - DNA, 201 bp, Bos taurus
cccccaggcaggaagacttcaccattcttaatggtcccataacaataaagcattcagcctgccccagatgcttttcaaaagacagcagaaattctcctcccacgttggagggaaaactccactacggcttatattacctctcactgtaagtaaaactacttaacaaaatacagaaaacaactacctgaggaccctgaaaag

SEQ ID NO: 20941 - DNA, 201 bp, Bos taurus
taaaaacaaatttctcccattaaagagatggagaaactgatttgcaaaataagccgctggcctggactacacgtgtggccacatgtctgtaagtgcacacgtgtgtgcctgcacatatgaacatttgagtggatacatacgcttgccacccacaagagaaactgccttcattctgttagagctgcgagttacccagtctgt

SEQ ID NO: 20942 - DNA, 201 bp, Bos taurus
ctcacaatctcccacagtaacacaccataggaccatctgcagaagggatgaaagagaaaacagtaatcagcgcacgcgttggccagtcagcgttctgcccgcaaagctggggcaactgactctaggtcagaagagggcaagttccatgtctttttcctaggattgggtcttacacagagcatgtgtttatctcccctttgg

SEQ ID NO: 20943 - DNA, 201 bp, Bos taurus
gtctttgagtagtttttttttgtttgtttgtttttaagtatctttgcatgcagagagagctccttttgtgatggatgccctggccatgatttgccttttgatagttagatgcataagctattcccgaccgttttgggtttggcacttctgtgctacccttcctctcatgcttcatgcctagctgcatttaacttgacaggc

SEQ ID NO: 20944 - DNA, 201 bp, Bos taurus
tgaagccataaaagtgtttatacttcttgtgtaacaaggccatctttccccagtctctcagaaaataaactttagggtcaaccttgtcatttgtttctattcttaattatcttagtgtggccagtcctataatgacaatgacagtcaaaggtactatttatcaaaactcttaatataagtcaggaactctcctaggtggta

SEQ ID NO: 20945 - DNA, 201 bp, Bos taurus
catacactaaggttcttgcttaattaccagcgtgtttctcagaagagctttctatctgccaatttactatcttggtagcatgtgaaatgggcttcccaggtggcgctagtggtaaagaacccacctgccaatccaggcgatgtaagagacatggatttgatcccagagcggggaaggaggagaccatggcaaccctatcca

SEQ ID NO: 20946 - DNA, 201 bp, Bos taurus
aaattaatggactattacacatatgacgcaggtaactaagtagaaaattttgaagaaaattatataagaaaaatattcatggactgggataatcaacaatataaagatgccagtctcttcaaattgatgcaaaaacttaatgtaattcctatcaaaacacccataagttttctgtagacagacatgctaattctgaaacat

SEQ ID NO: 20947 - DNA, 201 bp, Bos taurus
ttccatattataaaatctaaagatttgctaaattgctgtcctcatagtctctttaataatgtcattttatttctctactacaattttaatagtcttattatggaggttagccaatatctttgccatattgaatgaaaaatcttaatataattgtgttaaaatatttataaaaacagattttaagaaaaggagcactactta

SEQ ID NO: 20948 - DNA, 201 bp, Bos taurus
agactcacattttttaatcccttgctttgtgaagtaatgtagtactatattaaatgggttacatatagtacttaatcactctaatattttcagtaaagcttataacccttagtttacagattataaacaacctgaggggtataaatagtaggccaattaccaagagtcacttaaatgtgtactacaatgagtttttgtagc

SEQ ID NO: 20949 - DNA, 201 bp, Bos taurus
gaaagtagcatcagtcaatcccaaagtgatatcccagagcatcacacaattagaaccttgagttccagggttgcccttgggggccatactgccagtcagtcggtactggggctgcacagaagagacacagtttcccaggtagcagttcccatctggcccagggcagttctccaaataagtgggcagctgtgaattcttgcc

SEQ ID NO: 20950 - DNA, 201 bp, Bos taurus
aagacttttttcactaactgtaatcgatatggcttcctaaagagaataataagacacttaggtcacactatgtgcaaagttactcgtctactctctgaaggggttctggttttcatttagaaaataattggatgaccataaaagcaatatatcatcaagaaaaattctaccagtaaccaggtggttaattaacagcaaatc

SEQ ID NO: 20951 - DNA, 201 bp, Bos taurus
caattgctgtagtaaaggaagccttaagcatcttcctgctgcacctttgggtgacagatgctgatgtaggttgaatgtagaggcaggtgttctgtggcctgtttccacctttacattatttcagattctgtgttactgagtagagcagtcttcctttaaaattttaggtcccatttcttggcctcttgccttgtctattgg

SEQ ID NO: 20952 - DNA, 201 bp, Bos taurus
acatgggatcccagtaacaactcttctcttgcatccagaaagtttaaagattctcagggtcggaagggacatttcccaaatgctcccagtctctcttctccatatactcatattcagccttcactcaagctgtacttaggttcttcaagatgccctcttttagcagtgttataaacactaaaattgttttaaaaacatgca

SEQ ID NO: 20953 - DNA, 201 bp, Bos taurus
gtcatgagcaccagatggcagcatgtgtgtcttagcagatgggtgacctgagagcataatcttggcttaagaaacatcccttcagaaaagaggtcctcatctcatgagtgtgtgacagttgtaagtgctgtttgggaaatgatggataatgattcagtaagttgatttaggtaagttgaatacagtagaacctggaatgct

SEQ ID NO: 20954 - DNA, 201 bp, Bos taurus
tgttttaaaagtacacatatgaaaaatgatagaagttaaaaaaatgagggttgaaaatatgatgatttaacaaagtcacaaaacacagcaacagattatgggctaggtcactgcactgtcctgaactgtccatttcttgagcaacatctgctcccatatattttaaatgatcccaaatctccactgtgacttacaagaact

SEQ ID NO: 20955 - DNA, 201 bp, Bos taurus
cagagattactctgggaaaaaattggtcaagaacaaataggctgaaatttggatatgctactgcttccaaggacaaagaagtaaccatctgtaacacacaactttatttagcaatgaagaacttgctcctaagaggaaaacacctcttgagctaaagcaaatagacccctccactagaagaggggatttggcctctcactt

SEQ ID NO: 20956 - DNA, 201 bp, Bos taurus
cttctcaattcttagaacctataacattcctgtatacatcaagcatctctgagaccagactctgctgtgcagcatttcccaaacttgacagtgactttttccccccagaaacatttaaccagattattgttctgccaaaaatcggttacagaattagcatagcaattttcctggtccacgtaggttgatttctcagccgtg

SEQ ID NO: 20957 - DNA, 201 bp, Bos taurus
ctactcctgtactagaattcaccagacaacctctgtgaaagtcaatgtgtttttattgataagccaaaatacagcattcatatatcaaatattgcgagtcaaggagcaaacatctgaaatgctttcctaggaaataagagaagcttgacatagaaataaagtttattttcttttttccatagaatgagctacaacagatca

SEQ ID NO: 20958 - DNA, 201 bp, Bos taurus
tttgtcctacagcacattcatttcacttctaattgataagtctccttgttggtcagagttcaattcttcctagagcccagaataacttctctacctgatgaagtctttggtcactatttatgctctctgttgtcaaagtcacaatgtacttgcttccatttaccacatttgttctctcttctcttcagtttccatgctgag

SEQ ID NO: 20959 - DNA, 201 bp, Bos taurus
tagtgattggcaaagtcagaatactaataacccagacaaatcatttgatttctactgtcttaaattgcaaactgatagttttcgtctaaacctcatatcttcttaaagcattaactttggacctttacatccctcacagcatgcaggatattgattatccacacattttttttttgttgtacagttgctaagttgtatcta

SEQ ID NO: 20960 - DNA, 201 bp, Bos taurus
gccacaatgcacacactgcaggctccacctgttccctgttagcttccctggaaaactcaacactctacccaccgggtcccacctggccccggctctccggcgtatttaaaagaggagaacatttcctcacagggacttgggtgaagagaacagctcccccatcgcaggctgccggccttgggcggaatcagagaaagcaat

SEQ ID NO: 20961 - DNA, 201 bp, Bos taurus
atatttggccttttgaaatttgtatttgccctaagattcatgtataagttcattgctatactttttaaaacaaataaataaaatcaatctaatttctctctgacagtaactaaataaattatgtcatcgcagttctatgaaattcattgtacttagtgaataattatgtatagactgagactagcgaatcaccaagataaa

SEQ ID NO: 20962 - DNA, 201 bp, Bos taurus
acctaatagtcttctggagagcacttcagaatagaaaacacccaggggccagcttatcctcggctctgagctactgagcaatctcaagaatacagaaactactctggaagatgtttaaagtcaaaacaccttaaaacttaaattaggtgaacttcaacaattgcctttgttttctttagttgtagcatgggcaaacagaaa

SEQ ID NO: 20963 - DNA, 201 bp, Bos taurus
gtcggggaaagggtctatctccgagccttgcgagcgggtgcccagcccttggcggggcgttcagccccggaccgaggccggcgagcctgcagagcttagcgaagtcaggcagccaccgagtgtcagagactggcgacgctgcgggactccgcggcctccaggagactgggaggtgacagcaaggcccgatccactcagtgg

SEQ ID NO: 20964 - DNA, 201 bp, Bos taurus
ttaattatggcccagagtacccatgtcctctctccctttctctgacttttttctcaggcatccatacctgagttgatgacctgaaaagtttaaactctcacatgaatggccccaatttaatcactatgttccccattcccaagtccctgtctgcccactgcctttactgaagctatccacgtaggcaggaaaacagattca

SEQ ID NO: 20965 - DNA, 201 bp, Bos taurus
aaacttgttatttaatttctcttaggctacatttcctaatttgtacagagaagccactaatatctacactgtaaatattacagtgggatgagtaaaaaccgataaaaatatcccaagagctaaaagtaacatatcacaaatatgatatttggggttgtccagatatttgagttatagtcttaaaaatataagattttaaaa

SEQ ID NO: 20966 - DNA, 201 bp, Bos taurus
ttgcatccaaaaacttatagtaacgaagtagagatttgtaacctatgtaaattctgtaattacttgatttctattttaggagtacataggataatattgccattattttaagttagagaaatattcattttatatttgttgtataaagagttaaaatataaaaatggtaggttcattttaaatagccatttatttctcgtt

SEQ ID NO: 20967 - DNA, 201 bp, Bos taurus
aagcctgacctcagtggcccattatcctcaaataccagctggatcttgatgtttttttctgcttcaaaaccctcactgacctcccatctgaaatccttacgtagtctacacggccctgcctccctcttccccctcctcacctctccagcatggccctctttcccatcacacttaagccaggcttcctggatgtcaagtatt

SEQ ID NO: 20968 - DNA, 201 bp, Bos taurus
ctgggcagctacctaagggagccatggcccattaaaggagcccctcagaatggtaaagactggttcaaaccttctacatggttaagcatgccacccgcccatgcctggtgctgtaggatatggtatctctgaggtcctctcagacaatggctgctattaattctgtgggagagtgtccagaaggcacttgggaggctgctt

SEQ ID NO: 20969 - DNA, 201 bp, Bos taurus
tgccttctggaggccccacgggacagtatatttcttgcctttttcagcttctagaggctgtccacattcttcatgtggtgatgcccttccatcttcagagacagcaatggccatttaagtctttctcacattgtatcactcttgacactgactctcctgcctctgccttccacatttatgaactcttgtgattacctccgg

SEQ ID NO: 20970 - DNA, 201 bp, Bos taurus
atctgcttaagcttttcacaaagtgaataaataggaaaagggtacaaccaaaagatatttatcacctggtttttttttaatcgaaatgttatccctggtaaaggaaggtgaaggtaggagtgagttgaggatgattttctaaggcaaacctcagtggcaggcagtcatgtgaaaccagagggttacatggacttccttcca

SEQ ID NO: 20971 - DNA, 201 bp, Bos taurus
aagaaaactagctgaaacccagttttatctccaaacgaatagatgcaaagatataatgtctgaaatatccctttgcttaagaaaactagctgaaacccagttttatttccaaacgaatagatgcaaagatataatgtctgaaaaaactggttcctcaggatgtttaatggtatcacagagcttatcgctgtggaagaggag

SEQ ID NO: 20972 - DNA, 201 bp, Bos taurus
actgaggtgccctcaggaagttgattatgaagataaattgacccaatgttaataagaatttaagcctagaaaattgacattgaatttaagtaaatctgtttagtgtttctgcctccatgttcttctaggcatagattttcagccttcataaagaactttgcaaatctactactacacctttagtgagatttttaagttaca

SEQ ID NO: 20973 - DNA, 201 bp, Bos taurus
tgaggaccagtagtatcctaccgttgtgcaggatgctgggtgggaataagaaatgcagacttgctcctgctctggggaatcagttcctccccatctaaggtactctcagttagaaagtcctgatggaggatgtgtgtggggaagaggtgtttaaaactaaaaagcaagaccttgatcttgaaaagtacagactacaggaaa

SEQ ID NO: 20974 - DNA, 201 bp, Bos taurus
agtgttattaattgcataataaaaaagcaggtagtaaatctccccaggctttaattgctctgtgtgaacttatctgtaggcaataaaggctgattctcacagctgagatctgggagccaaggcagctgaagagattggtgtagctacactgaccccgacctcctctctcctccaggtggaaatggcaccacaggtagctca

SEQ ID NO: 20975 - DNA, 201 bp, Bos taurus
ttacagtaagatgaaaaatgaaagtagaaatccgaacccttcaggagctctgcaatgttgctgtcaccagtgtccctgctttagttttccacaggatggaggctttaggaactggacaaggtagatggtaattgttgccagtatttttatcctcagggttctgtgtactttggtttctaaaattcatctgtctctgagccc

SEQ ID NO: 20976 - DNA, 201 bp, Bos taurus
ccaatcctggtaaagccagtcgtctcatcgcggccactgtgctccactttgtgccgaacgctctcccatcatcccacagcaaccgtctcctagccaccgtgggattcggccgtgtgagggacgccccagcagggtcccacagcgaatagtctctgaaacaccgcgctctgtgtgcgcaacgcccactcccccgcatttccc

SEQ ID NO: 20977 - DNA, 201 bp, Bos taurus
gttgggccagcatctccattccccgtgccccaccgatccagctgccctggatccgctggtcgatgtgttgggcaaactgctcgctcacgtggccagctctaaggaaaggcagcttcagcagggcaccggcacagccattctgcagcgccagcaagaaggctgcccgtggcccaaacagctcagagctcgccttctgcagat

SEQ ID NO: 20978 - DNA, 201 bp, Bos taurus
aaaggtttacagccaactgctgcctagaggggccttcttcatccacggatatacagtcttccaaggcagtagaagacagtatctgcagaagtggcatcacgagcagcaacgaggactttgggatcttctgactctcagcagaagaaaggagcttcagagctggtcatccaaacaacaattcacagttttcaaaattaatac

SEQ ID NO: 20979 - DNA, 201 bp, Bos taurus
gtttgatcatttctttatagactcgtttaacttgaattttctatcccctttctttcttgtgaattggagttagatctataagttttattccatttaggttgaatatttttagcaagacacttccatagctattgcttgttgtgtttcacatcaggaggcgcttagtgttgattatcccagtattagtgatacagagcttta

SEQ ID NO: 20980 - DNA, 201 bp, Bos taurus
aagttcgtaattgcacttgataaatgagtaacctttggatagctttcctgtaggtgtttgcagtgactttggaatcctaagtttgtaacttttttccagctgcatttccaaggttctgctttgtcagaggaactgctgtttatctggtaaagagtaatttatttaattgatgagatttttatttgtatacaatcaacaata

SEQ ID NO: 20981 - DNA, 201 bp, Bos taurus
cttttcttggggtcccagtggcttcacctctcctggaagtggctgggggatctgtggttctcctggcctctgagactccagacctctcttctcagccttgggagttaatttctttttgtgctgttttttcttttcctttcttcctcccttccctccattcccttcaacttcatctgacatagttcttcgaaagttgaggta

SEQ ID NO: 20982 - DNA, 201 bp, Bos taurus
ccaaaagtggaactgagaaggtcaatgttggaaggagaaatctgtgtccatgccctttttaagaaaggaagaaattaggggccaaaaagcactagttcttagttgcagatccgttgagactgaagatcttttccttgacttatcaatcaagatggcggacaagaattcagaggtacgttaaagtcaggtgatgaccttgct

SEQ ID NO: 20983 - DNA, 201 bp, Bos taurus
taaaatgacttaggccaaaaatggcttctcttatgtcaagaaagtcatgtctgattttctttctctggggacccactaccctacctgttaacaaaactagccatctgtgggcctctagaatttgtaggcacagggcttcccatgggcatgctaggtgggaattaggctgagaaccaccaccttaattgttaaatgggcatg

SEQ ID NO: 20984 - DNA, 201 bp, Bos taurus
tgtccaagacccacaactagaaagtaaaagggccagattcatcctttaactcttcagctgtgctgccttagtgaagacctttctataggtatctgtgcccgtgtttctcaccagccagatggcctgctttttttccccataggttgtggccaatgccaaaggggctatgactggggcaaaagatgctgtgacgactactgt

SEQ ID NO: 20985 - DNA, 201 bp, Bos taurus
tgattagagaaaggattggcctcttgtcaaattatccttgtaggtgaagttggtgaaagatggattagatgatagtataatgaggtggattcctagctcattgaacaagcaggcccattagagtgttgactgatggctttttgcctgcttggaacagtatcactagcaccatgccacaggactctgtcatcagctctgtcc

SEQ ID NO: 20986 - DNA, 201 bp, Bos taurus
gggctggcctcatggggaagggcagggctctggctaaaaaccaaactgctcaggtttgaatcctgggtgaccttgggcttctctgggcctctgtctacccgtaagtcagtggagataatcatagggttcatgtgaggattgaaatgtggtagtgatctttagatgggggccctgatgagggtgtacacccaggatttcggc

SEQ ID NO: 20987 - DNA, 201 bp, Bos taurus
cgggaggagctggctaccaagtgtgggccatcaagctgctgccacaatcaagcaggggagagctaaggaggtgcagctgggcaacctgctatcactctcttggggccttctaaccctagaaactgagaggaagggttctagatggagggtgattctaggagaaagacagttcctctctttaaaaggacatttttaaaaaag

SEQ ID NO: 20988 - DNA, 201 bp, Bos taurus
aaaacacttaagaactccacggtctgaaattggaagacttagaaacaaatgagaacctcaaggtcaagactattaaatgcctacaaagtgacctgatggagaaaattgattctctgcttgtacttgttccactatccattccttttcaactacatatgaacaatttgggcacatgtatttttacattcccagcaatgacaa

SEQ ID NO: 20989 - DNA, 201 bp, Bos taurus
gaatagaaagtctggttttctatagtttctccaaaagaaagggcattataattctacagttctgccagagatgaggtctgatgtttttgttgtaaaagacctggaacctgttatttagcaaaataaccaggagacgttccctcatgataccaaagaataaggctgactttcagaaatttaaagtgatcaaattttcagttt

SEQ ID NO: 20990 - DNA, 201 bp, Bos taurus
gctgggagacataagactgaatacttaatcaattacagtggccatccagaaaaaacatagagaaaagtttagttgactagtaaaggcagaagactggataccttcagagtatctgttttgttttattttgtttcttcatatcaggctcagaaaggttctaatttctatcttgtacaaaatgtgcatggttcctattttcaa

SEQ ID NO: 20991 - DNA, 201 bp, Bos taurus
tttaagttgctttactgtccaggcctattcttgtactgattaaaaatttccattgtctataacataaagatatttggctggtcttagaattacctggagcatcattcccattgtggggcccactggtgagaaagaacaggtcatgcatattcagagatctaacaccagagctgagcccagggcccttgtggggaaagagct

SEQ ID NO: 20992 - DNA, 201 bp, Bos taurus
ggaggacaggcagtgagcgatcaggtaccatggaaggctggacccaggtagcccaagagctgatgacactgcagagaacgccacagaggaggaagagaggatcttccgccttctgggtaccatattgcagaaagccgagagagtcatgtttgtggaatagttctgtgtactagaaggatggcaataatctttatgggcttc

SEQ ID NO: 20993 - DNA, 201 bp, Bos taurus
tgctaggcccaatctcctgaagaggctatatgttctattgtaatatcatgaatctgtttcagggactccaaattctgagataaggatgcccttttttttttcctaatttcaaagacacggccaagaaatcacaaggctctgtcttaaattcatgcttaggaaagaaataacacatgagtcctactctgaagttggatgata

SEQ ID NO: 20994 - DNA, 201 bp, Bos taurus
atgaactcaaaattaagcattcatttttaagccaaggtgaggacagtagctctatttcagcaatacagagaaggctttcagcattccaaacaaagaaagggagcaggaagactgagttctcctacagaccacagcctgcaagcatcttaacctgctgaaattacctaggtggcccactcataaggtgctttactctggaac

SEQ ID NO: 20995 - DNA, 201 bp, Bos taurus
tcattataaaactcactgccagtaccactggcagcttctcactcttccagggagtacttgaaagtttatttgtggaaggggactaaagctggccaatttcacgcaaaagcccatccatgcaggcagtggctaagctggagagagatttggcagtcagcaggggtggtacctgctctaggccctttgcctctgctgtgcctg

SEQ ID NO: 20996 - DNA, 201 bp, Bos taurus
agaaagcacagaggccatggccacagcctggaagcatggggcagcagagccacggtcagtaaagaacaaaagacaacacatggacaagaacatttcctccgggccaaaaaaagtcatcaggaatttggattgcattgaaaacaccaaattcagaattaaccatatttaaaactttaagtgactgagttagcttgaagcagt

SEQ ID NO: 20997 - DNA, 201 bp, Bos taurus
tctctgagccacttgttaaaatcatcagtgaatgtggtgggtggtgagtgatagaaagggaacatggagagaggcagcagacatgggagccccaagtctcgttgtgggagggttggttacaagagcacagaagaggaaacaggaggacgctgacctttcttctctcaagaagcagttctcagcagtgcctctcacccaggg

SEQ ID NO: 20998 - DNA, 201 bp, Bos taurus
aggagataaccaaacactgctaaagaagcaaagctttggcgtcactgtgcttgaatgccttgggaggtcatgagcctgcctagaccttagcccctgcagtcaagatttctggtttacttgatgcaagcacctagctgacacatggcagctagagaaaggagcaaccttcatcttctcacagcctccagtgatactcctcca

SEQ ID NO: 20999 - DNA, 201 bp, Bos taurus
ggccccagagaaagccaaaccacccataaagtcacacttgtacccaatcagtagcaacccgcagtgccccagttgatcctgccaggcaaagcctctctggtaggaagctgaaagtgtcctacccatctcatttcttaggctatgttttctggtcatgattcttccactctgttctattttgctggggtggaaagaaggtat

SEQ ID NO: 21000 - DNA, 201 bp, Bos taurus
tcagaagagaaagggagacttgctatttcctgacatctgtattttagtttttgtcattagatgtccatgaagtggcctgtatgttctcacaaaagcctcagtgaagtttggggaggtgtgttctcttctttgtagcctcactgaagcagtgagcagactcaaccacaaggcctgaggatcagaaggaagggtgactttagg

SEQ ID NO: 21001 - DNA, 201 bp, Bos taurus
accgtagactgagacaattccatgaggactgaatgatctgatctataaaagataattgtgtacctctgagtctctggaacctggccaaagcctaagaatcactgatcagggactgataacgggcacattaaactaaacaaaggcgagttcaagaacatgaagattgaggaagaagtccttatgaggttttgatttggtgac

SEQ ID NO: 21002 - DNA, 201 bp, Bos taurus
gtgtacaggagtgcagtgaggcccgatgccagcatggagcctttctccgactcttcatggtacctcaccacaagcatcactctgcccaccaccctggacccgcccagagcactgccagaagcagcctctgcggagcctcgtctgcgcggagcaggctgaggtgaggatgttcacagcccgcccaccttctggaggctggac

SEQ ID NO: 21003 - DNA, 201 bp, Bos taurus
gaccacgtgggggcagaagtacagaccagaggtctaaacactccttataaagactttgaaacaaaacctggtattctcccttcccccaccacccttagctttggtggttccttgtactgctgctgctgctaagtcgcttcagtcgtgtccgactctgtgcgaccccatagacggcagcccaccaggctcccccgtccctgg

SEQ ID NO: 21004 - DNA, 201 bp, Bos taurus
ccatatagttactcaaaaggcaacataaataagcaaactggaccttgcaggatttgggacaaacaggaaatggttcacctcattctccttggaagcaccatgccactaacattattaactctcataccaaaaccataccttccaacactttcatgacactaaattatttactaattggttttgtcaccttttaagtaagct

SEQ ID NO: 21005 - DNA, 201 bp, Bos taurus
agctcaaagccataaatgacagtctgtatatcaccccattcaaaatgggagaatttacaagcaaagagaaataacacaataatttaaaatgaattcttaccaaataagagttttttaaatggtgataaaaaagaaaaaaaagttataaacatatatgaaaaagaacaggggtttttgagagaagacaaaattttaaaaaag

SEQ ID NO: 21006 - DNA, 201 bp, Bos taurus
gtcaacttttataacaatatattcatgtaaattttacataatttaaaaagtgatataattttaaaatattctgttcttccagaggaactctaggatacaccctcaaatattaagaacaataaagtctggggcaagggcttcaggcagaagggcaaagaactttttttttacacacctttgaatttttgtaaaatgtatcac

SEQ ID NO: 21007 - DNA, 201 bp, Bos taurus
gggaaatcaaagtatgagtaaaaagcaaaagcttataagcgaaatctaaatactgcagtgtttcataggttggtacatccacataaactatttcccaggaaatgtctgttttcatggagcccattccaaggggataaaagtatctacgtgactagagatcaagctttgtgatccacaagcgaactccaatttgaagtgggt

SEQ ID NO: 21008 - DNA, 201 bp, Bos taurus
tttgataggaaatattctaagagtaatttttccccagttcttcttttgtaccctagggagagttactgtagcccaactcactgggcccccctccccgctcccctgtgtgtcatcgtggggtgggatcagcatcgttctgtgtgtgacacgacacagatgcggcgtctctgcgtttctccatggcccatttcctgctcactc

SEQ ID NO: 21009 - DNA, 201 bp, Bos taurus
aagataaaagaagcgaagtaggaaaactaaaaaatattggttatttagatataatggatgtcagcatttagagaacttccacaagcatatgtttgtagacgtgtatttaacagtttgaaaagtagactatactccgtatagccatagcatagttttgtgaatgaatttggctacttagaggctccagtgtattttgaacag

SEQ ID NO: 21010 - DNA, 201 bp, Bos taurus
tctgttcagaggtgaggcacagcattctctctggctgccttactcaggacattattctttacgtgggacaaggagaaagtgacttatttttccatggtgttatttttctgtgaaagtggattagaacagcaagcagtaagactaccaaaatacatcttatataatcatttcaccatagcactgaatatactccaccagtaa

SEQ ID NO: 21011 - DNA, 201 bp, Bos taurus
gtagatacggattcagatactgactatcagttattgatgcaggaccctggataacctatgaactgcctatctcattcctctgaaagcattttattagatgtaaagcaccaaagagatattaagtaatagtatgatcttacaacagaagtgacaggtgtgtcctattttgtctctagatatgctctttctaatactgcattc

SEQ ID NO: 21012 - DNA, 201 bp, Bos taurus
caatgggttttaccactcccccactagaccccgtcttacagaaccctctccctagccagctggtgttctctgggctaaagactgtccaacccgttcctccgttttatagaagtttactcactccaggggaaatggtgagtcctccgacctccctcccaaccagtcccatcattccaaccagtggtaccatagagcagcacc

SEQ ID NO: 21013 - DNA, 201 bp, Bos taurus
gcactgacagcagcagtcctacaaggggccccttggaataagtcctcttgtaggtcaccactaacactaccatagagcctgtagaccccagggttgagtcaccttaggccagacaactaacagggagagagcacaaccccatccgtcatcaaataatttgattaaagctttattgagtaaggccctgcccaccagagcaag

SEQ ID NO: 21014 - DNA, 201 bp, Bos taurus
atgggagatgcaagacaaatgttgcctccatggctttgggtgctgtgtctcagcttcaagctttgatccatcaggacaaacattcccaccaggcgggccaattaataagatggctttacacccagcctctcacaacatagaggagttctttgccctcagcttctccagggctgctatttaacaattctctaggccaaagga

SEQ ID NO: 21015 - DNA, 201 bp, Bos taurus
ccttagtctgtgaccttagtcttagacctgtgctccttagtctgtctcaactgtgcttgcttctgggggtctgagcactccctttgaagcagtccctctacgcctggaagcagccatacaacaactgatagctcttactctcttattgggtgatgcctcccatagggcctctggctcccagaaagtaggcagaaaagatac

SEQ ID NO: 21016 - DNA, 201 bp, Bos taurus
aatggggcttacaagaatcttctttaatgactcacctagaaggcccaacattttgccttttctcccttcctttagatgtctcctggcatacggatgtgatagctgccatcttgggccacaaggtgaccttgagaacgctaggatgctgaaacagaaagatagacactgaattcctctatggcctaccactgggcttccttg

SEQ ID NO: 21017 - DNA, 201 bp, Bos taurus
cccatcaagaaaagggaccagcaagtagaaggcctcagaaatggaactgcacctgccgcatccaagttaaaccaaaaggccagtactgctattacgtatccattgctatattctcagtgaatgaggtggagagctctgggagaaggaagctggagagtcaagaccagactgtgaagagcccatggccaacacaagtcagct

SEQ ID NO: 21018 - DNA, 201 bp, Bos taurus
gagaaattgaggaaaattttaaaagattatacttgcagtcatgtagcaaattgccagatagtggtcaaaagtgaatgcagtatgacaaattagaaggaacggtagcagactactcaagagctgatggcagcttagattagggtcctggcagagaaaagggtgtgtgggagtataagcactgaaggatgttgaaggggtgca

SEQ ID NO: 21019 - DNA, 201 bp, Bos taurus
aggtctgtcttcaccacctaccacctgattaaacctctctgactctctaacactcagtgggaataaagtgcctcctagttacattgctgtaaagataacacgggagtaccagtgatggacagggaagcctggcgtgctgcagtccatggggtcgcaaagagtgggacacaactgagcaactgaactatacttgttaaacaa

SEQ ID NO: 21020 - DNA, 201 bp, Bos taurus
aagagtacatactctatgattcctttcctataaagtacaaaaaggaggcaaaataaattaatgtcctgctattaaaaatcaggatagcagtcatctatgtggaagactttgataattttccattccatgacccaggtgctggttataagtcatacacatagctaggcacatttctttacatatattatactctgtggttcc

SEQ ID NO: 21021 - DNA, 201 bp, Bos taurus
attttgattaataaagatatgtttgagcctaattataatgatttaaaattcacagtctgaaaccacaattatttttgtaccaatctaataattagtgctagctaactataccacagatgaatcataaaagtttattcacaagtgcaatttatgtacagtaatatttcaatgaaatcttattaaagtttatgatacatctat

SEQ ID NO: 21022 - DNA, 201 bp, Bos taurus
acttgtgaaataaactttactcaagggagaacaagaagggcagtcatttcttaaaagactccaaatgaaacagccaatgagctaaaagcaggagccaacagtggtgtaggaggggacccatgggattcggtttcttttactagtctgatgcaaagcagttcccagtggaaatctcagactgcagagctaagctcagtagtt

SEQ ID NO: 21023 - DNA, 201 bp, Bos taurus
tctctatgctatacagaagcttcctactagctatctgttttacacatgtagtgtatgaatgtcaatgctgctttctcaataggccccaccttctctttccccttctgtgtccacaagtctgttctgtacatctgcatttctattcctgccctgcaaatactttcataagtaccacttttctagattccctatatatgcatt

SEQ ID NO: 21024 - DNA, 201 bp, Bos taurus
aagagagaaagactgatttctgtttaggaattggctcatgcaattgtggagtctgacacattccaaaatctacgaggcaggccagcagcctgaagattacggaaggagttgatgttacagtcttgagtccaaaggcagtttggaggcagaattccttcctcttcaagagacttcagtctttttttttttttttttttttta

SEQ ID NO: 21025 - DNA, 201 bp, Bos taurus
aagttatttctcgtcatgtgaagttgtccttgggaatgtatctgcttgtctttcagctgggatttagtgttctgctagtctgtggcctccctgctcacccgcgctgcccagtaggaagttggaataatgcagagcaagctggttggttccattccagagtcttctgttagtgagctttcctgatcgggcccattttggctc

SEQ ID NO: 21026 - DNA, 201 bp, Bos taurus
actaaatgacagaatccaaaagaatgcctttaattatagtcttaaaatcttggccatgtgtcagatgagcattgattttctaccaccattaggtcaaaaattatatcccttagtgacagatgatgtgtgtaatatttattacaaaactggatattcccagggatcccaactgagacagagccttatcattcagtatttccc

SEQ ID NO: 21027 - DNA, 201 bp, Bos taurus
tgtatatttaatggtctctaggattcatgtcaactgctccttattccacagacaaatcagctaggtggtgattctgccccagggcccattcagtcatcaacgggagattttctctctctgggtcaagtccatcgtaaccttccagcaatgttttgctggaaggaataaggatttgctggtaggaataaggattcaggccat

SEQ ID NO: 21028 - DNA, 201 bp, Bos taurus
tcatctcagatctccaggcttgccttccccgtgctggtgctttgcctgaacagtacagtggatgcatgaatacggaaacaccaacatcggttgtactgagcgccacgcactgatctgtagcaaagagaaatttgaaggctccttttgtttcctagtggaatcttgtgttttactctatgagagtgaaactctttccttgtc

SEQ ID NO: 21029 - DNA, 201 bp, Bos taurus
ttcagttgatgaaagagtggattttctagtttgaagttgaggaaagtttgacttgcgacacttgaggagtctgttagtccgtgtgctgtgacagagaaaacgatcagttgaagtgttcaaagcaaagttttccagcctttcttccttccatccttgtgtcagaggaataattttagaaatctcagagaactagtggttatg

SEQ ID NO: 21030 - DNA, 201 bp, Bos taurus
tgatgtacagttgatttacaatgttgtgttagtttctgctgtacaggaaaatgattcgggtatatatatgcgtgcacccttttttatatgcttttccgttgtagtttctcataagatattgaatatagttctctctgctatgcagtaggaccttgtttattcattctctatataatattggtatctgctaaccccaatctc

SEQ ID NO: 21031 - DNA, 201 bp, Bos taurus
aatcttaaatttctattcacatatatttagcaaattctcttacttcgtggcttaattgcaaggtatttacccttggagcagtccagtgtacccataaaaataggagttgatcattatggaaattggccatggaaatacgccgaaggtgttttaaggacatgtttttagtgtctcctctaggaaacctgtatttccacttcc

SEQ ID NO: 21032 - DNA, 201 bp, Bos taurus
ccactgaaatttacaaacgattcattgaaggcagggacaaagagaagtgctcaattccagtgaaagaaccccatccatgagagtttatctcaactgctcatgcttaaattccagatgtgggaagctactgaatttttctgtcaatatatataatttttgaaatatggcctatgggtggatattaaatacttgaaccaactg

SEQ ID NO: 21033 - DNA, 201 bp, Bos taurus
ttggatggcatatcactgcactcccttcctgctttataaatgaatggaaagaacagggtgccccacagagtacctgccaacttgagctaataagctctccgcagttacataccttcccactttagaattcctccttatgatttgctccttgattctgatatggaaggatctttgtacataggcaaaagcatttgcactgga

SEQ ID NO: 21034 - DNA, 201 bp, Bos taurus
tcaaggccatggggccacagcattctctttggaaaagataatatttactagtttgtgcttattgtgtgatgcaactttactacaggaattactattgtccaccagtccctgggaaatctccctaatcagcaatgttaaatgtagttgccctggagagtgaagaacaaggaccaggagacctgtagccaaaagtctcatcct

SEQ ID NO: 21035 - DNA, 201 bp, Bos taurus
aaagaagacattatctaaaacaaggattcaaatctgatgggtaaaacagacatacttctcacctgggagagcacagtagaattcttcccggtgatgggaccggtactggtttgcagtagggcagtaggttagaacctagagccagagaataaagttgtcctcgaggaaccatctggagggaatgtctactggacaatatga

SEQ ID NO: 21036 - DNA, 201 bp, Bos taurus
ggctttttaagagaatatttggtggttaatttgtacctgagcaataaagttgctttaaaaaaaaaaaatccacaaaatgacatggaaaatgaaacagttcattgtttagggaatttaatagacacccaatctaacggagtaagatttttaagcttattatttctccatttttcttctgcccccgtatcctcttgtagatga

SEQ ID NO: 21037 - DNA, 201 bp, Bos taurus
atctcagttctaagttttacgaatcaaaatttcttaagagatttgtttggctcccatgaaacagaatatcagagtgaaactagcagctgagttcaactctgttctcattccttttacctattatctccagtaattaaagaaaaatacagaatagtgcagaaaataatttacaggtaattttgtacccactacactaaggta

SEQ ID NO: 21038 - DNA, 201 bp, Bos taurus
cagagtcttgaattgtctttaaaatcccttcaaaatgtaagtctagtctctatgttactataagggtctaattaatcaactagaacaaaggaaataatagctttgtacccaaggcagtgaatgatatggtggattatgctttcatgaggctatttttctgagcctgaatttgaaaatcaaaataccaactgcatagcaata

SEQ ID NO: 21039 - DNA, 201 bp, Bos taurus
gacactccagttctgaactaaggtcccaggaggccttgcaggtttctactcatcctcttcaacccttgcttttgccatgagagagactgccatggtagagtagagttcagtcttgtagcttaggccatcttagagcattaagcctccaactaacctgtgagcggaatgctgacgcaggaacaaaactcagctgagatcaga

SEQ ID NO: 21040 - DNA, 201 bp, Bos taurus
tttgcatgaaaagtcttctggcttccttataccctcatcctccacacccttgcataacctgcttttcttcctctacaaataaaagaatacaatgtcttagagtgttgagaggaacctcagatgcccacagaaaggagagagttttaaaaaataggggacaaaaagaaaaacttgaccagctaaacagtatgccctaaacaa

SEQ ID NO: 21041 - DNA, 201 bp, Bos taurus
tgtccaggtggttttagccatcttatgatcctacttttccccctgaagtgtctgggtttttcaagttgttaaagcttttcttatcccattgctccttgctatgaacaactaaggtactcaggccccattttagaagtgaaaaaacataatttcacaataattcccaatgaaaagaagtaggaatcaaatctagtttttttc

SEQ ID NO: 21042 - DNA, 201 bp, Bos taurus
cacttgctagtgatacagtgcttcaggggaaagaataaggtagcaagaaagagctcttcagtattaaagcattccaagcacggaatcccactcccaccaactcacagagttcaaacactgagtaactagggcaaggttattcccagcttaaatgtacaggttacaagagagtatctctgaaaggaagtggacttcacgacg

SEQ ID NO: 21043 - DNA, 201 bp, Bos taurus
aagctgaaagaggatagtgtaaaagctggcttaaaactcaaaactcaactcagtccatggggttgcaaagagctggatacaactgagcacctgaacaagatgaccattctagttggccttgtcttctgtcctaggtgtacaatgcccatgagtagggctgtgtgttctgagcttatttcctagtttccttcctaaccttag

SEQ ID NO: 21044 - DNA, 201 bp, Bos taurus
tcgatatttgttgacccggatgtgctgtgtgactctctattactgttttagatgaaaatacgtaatgagcacaagtttttaggatctaacaaggaggcacaacaagacaaatgctgcaatgtgttctattctcaggacacccgctctagtctaatcaccccaatcatcttccttggcatcagctcaatggtctttgccaat

SEQ ID NO: 21045 - DNA, 201 bp, Bos taurus
gtcactagaggctgcatctgaaaagtattctgaaaaggaggacaaatacgaagaaattaaacttctctccggcaaactgaaagaggctgagacccgtgccgaatttgcagagagaacagttgcaaaactggaaaagacaattgatgacctggaagaaaaactggcccaggccaaagaagagaatgtgggcttacatcagac

SEQ ID NO: 21046 - DNA, 201 bp, Bos taurus
gatgactaataatatgttggacattatgaatgacaggatgtgaatagtagaatcagccctattacatggcttagggcaacagatttataagaagaaagttataacacagctactgttgcctactgttgtttagggctaaactcagggctgaaaataaaggctaaaattagcttttactgtgacaatttggtgtctaaacaa

SEQ ID NO: 21047 - DNA, 201 bp, Bos taurus
cagagttggacacaatctagcgactggataacaacagtcagaatatctacttgtggagagaaggagaaaaaaaaaggagggtgacaaagggagagttttgcgtgaggtacaatcataagaaaacttcacagggaccagtagaggatgctggaactcggatggccatcaaagttatcaacaatttgagccaaaggtcaagtc

SEQ ID NO: 21048 - DNA, 201 bp, Bos taurus
gaatttgatgttgtctgttcaatactgcccagtgtaatttttgctttgagaatactcaaataatctggcttaaaattttttattataaaatatgtgcatagtaacacatgcccagagtgaaaatcacttggataaacttttgcataaataattatacttgtattgccatacttataaggaaaaacaaaagaaaaagcatgg

SEQ ID NO: 21049 - DNA, 201 bp, Bos taurus
cttgctaaggaagtggaaaaagtgcacttttttttttttttaaaataacaaatctttaaaaatattccttttagggaaaggaaacaattatcataatgtcgccttttttttgctaattctattcatcacttcatgggaaatagatgcggaaacagtggaaacagtgtcagactttatttctttgggctccaagatcactgc

SEQ ID NO: 21050 - DNA, 201 bp, Bos taurus
gtttatcagagaatgggactcaatctttctttaaagaggatgataaatgtgttacattctatcagtaattactctgcaggaccaagagactttactatgtgcaggcaacccaaataattggacttagaagtcacaagttggatgcacttgtgttaaatatatattagatttgtgtgaaagtaattacagttccagactctg

SEQ ID NO: 21051 - DNA, 201 bp, Bos taurus
atatttatttatcctaaacataaatattaaaatacaagaggacaatccctggtaggcacttgtcttgacatacaagtattctttgtaattgtcattgtactgcaaagatctgaactctgatatatttttactgtggatattcttgagcagcacaaataaaacctgatcctttatttattaattaaagtattggaatataca

SEQ ID NO: 21052 - DNA, 201 bp, Bos taurus
ttggccacctgatgtgaagaactgactcactgggaaagatcccgatgctgagaaagattgagggcataagaagaggtggtgacggaggatgagatggttggacagattcactgagtcaatggccatgagtatgagcaaactcagggaaatagtgaaggacagggaagcctggcatactgcagttcatcgggtcaaaaagag

SEQ ID NO: 21053 - DNA, 201 bp, Bos taurus
catagcacctaaacaacagtttagaataatcagcaattattatacaataatttttgaaagtcaggaatctgggtatggcatggtataactgggtaactccgagtcagagtttctaaaaaagactgtgatgaaggcatttatcaaagtttacatcatctcatagctctactctgggaggattcacctgcaagttcatccacg

SEQ ID NO: 21054 - DNA, 201 bp, Bos taurus
attcgtgctatagggagggaggaacactgcaaaggaatatcactggggtgtgtggggaggcctcgcagtgttttggccacactgggtcttcccctactcatagagtgtgtgctttcccagtctacactgctcaggctccaggttgctctgcaggggaactgtgtaaagtgggccatgggttgtgtgcacttcctaggtcta

SEQ ID NO: 21055 - DNA, 201 bp, Bos taurus
cacaaaattaggctaaatccttatatctgtatctgagttttcatcttctgtttttttttctttcctcacctaacattcatatgcacacaagctgagaaaagcaaccttttagttgggaaaatgttcagagatctggaaaagaaagattgtagatcttgatgcaggattcatgctgatgtgtttaagaaagatttcttaaca

SEQ ID NO: 21056 - DNA, 201 bp, Bos taurus
accataaattttggattttaaaaatacagaaatgtattccctcatagttttaaaagtcataagtctaaaatcagtatctcttggccaaaatcatggggtttccagagccacgtgtcctccagaaggtctatgcaagaacccatttttaacctcttccagatgttgatgactgccatcattctttggcttgtcattgtataa

SEQ ID NO: 21057 - DNA, 201 bp, Bos taurus
taggatggactggttggatctccttgcatagactaggtggccataaattttcttaatctaaaattttaagtgaaaccaggtataccattccttttctaacgttagagaccaggccatattggaaagagactaggagaagtcagtggaagaacttagctgtagctctcaaaagattaaaccaaaatagtctataaaagatat

SEQ ID NO: 21058 - DNA, 201 bp, Bos taurus
ttacatggattcagcaagaaatgcttagaaattaagcatcctactagtttctgttcctgagaatcaggaaacgtgagatattcaagcttcatgtttctgggttgtttgtttgtttttccttctatatggcacttccaggaagctgttctggtatgatgaatttccttaaggaaaaactttttataaatgaaagtagaaagt

SEQ ID NO: 21059 - DNA, 201 bp, Bos taurus
cattgcatatatgcacacaggataattgagaagtaggctttctcagatatgtttgtcaaggaatacctctctgagaaaaaaaaaattaaacagttactcagataatgagaaatgctgagtctcaagaagtttgtttttaacaacattctagaaataagaacaatacacataaagtccctgaagcaaaacaagtttggtttg

SEQ ID NO: 21060 - DNA, 201 bp, Bos taurus
acttttaaaatatgaacacatttatgcagttaacatgaacaagggactatgctaactcctctattatataattaaacccccacaacaaattataatgtaggtgtaaattcttccagtgcagaaactgaatcacagagatggaaattcactttcttgaagtcacatacctaagaaacaatacagtcagtattcacaacccag

SEQ ID NO: 21061 - DNA, 201 bp, Bos taurus
tttctgcctcccttcccctcatccccacattttaaactccagttacaacacacttaattccacaacatcccctagtatccatgcaatctgaagtcactataacattaaacaactggtcctctgccaatcattattcatctgtcccatcctagatgtggcaatatcccaaaaagatttaaaatacaatcgtgtcacatgtcc

SEQ ID NO: 21062 - DNA, 201 bp, Bos taurus
tacactgtgaaagctcaccagttaatgattttttaagacaatgtgaatttttgagaatttatctagtctgccagaaccaaactattttcaaaggtttttggcttaaacaaaaacaaacaaacctataacagtgattggaggccattcaacattcttatatcttatgggtatttctttactgaggaaaataaaaaggacaaa

SEQ ID NO: 21063 - DNA, 201 bp, Bos taurus
ccacaatttgcttacatttatcacaaggctttttttttttttttttttcagatctttcctattgcatgtcatggtgcaataagaaaatatctggttgaggcagaaatcatttagttgaaagaaatagaaatcacttaccttagttcaacttcatttgttcatgagatgtcttagaattctagtagtaagacattttagcca

SEQ ID NO: 21064 - DNA, 201 bp, Bos taurus
tgttataaactaatttgaaataaggtagttgatttgttagactgtctttaaggaaggctcatgtgacctgaaggactattgttgtgaaccttggtgagactcagtgaaatctacagcaaatgatgtgcttccaacgacagcttgacttatttctcagatgattcagaaactcttacctcaacactggtgaactcacatggc

SEQ ID NO: 21065 - DNA, 201 bp, Bos taurus
gtaaatagagtaatagaaaaaggacagtatctattatgtaatcaaatacgaatagattgttggaaaggtttatatccagtatctcaaaatgcttgaacaagcaatacattcaattacatatgctcttggaattataagccacattctcacacatatatagctattactacttgtgatccatatttcattactttaacctta

SEQ ID NO: 21066 - DNA, 201 bp, Bos taurus
atatgcagaaagaattgactctgccttttgtaccaatgttaacacaggagcatataatgaaaaatcaattataacataaaatctcgtaataggtgttcaaatgttcgctcatcaaataagagcacaaaactatgtctgaatgctgactgtattctatatcactagactatgaatattttttatttcctcaaagtaggaaca

SEQ ID NO: 21067 - DNA, 201 bp, Bos taurus
acccttccaaccatgagtttactttattttctaggcatatgccaaatgaaattcatgtgcttttcattcaattcagtatatatatgatatccaagagtgagttttataggcttacaattcagacctttatctgctatgactttttatattagattatggaagtacctaggggctaatgcaatgaatgtgtctaaagatttg

SEQ ID NO: 21068 - DNA, 201 bp, Bos taurus
tgtgcttggctgtttatttttatttgtaagaatgtacttcagtgaataaatcagaaaaaaaagaggtcccaagccatgtttgaaaaaactagacattaagcatttatttcatatcaataaggtagtatattaacctttctgttcacagttcatttcttcttttgaatactgcacttgtatggctgactcaactagagaaac

SEQ ID NO: 21069 - DNA, 201 bp, Bos taurus
acttttagtgtgtagttgatgaggtgctagcccagtgtacagtatactctttccttatcatctcttcttttaaaatatggtctatgtggtttcagtgtgtctctgattttcagattgtaattacttatattttcatgttacatgtgggggatatacaaataccgctccacaaggtgggagtgagaagggagatgatcacct

SEQ ID NO: 21070 - DNA, 201 bp, Bos taurus
tgttttttagagctctgtgatatcttagaggtgataagtctctcttgccctcttttgtataacagagaaactaaatgaaatccataaaagctcaataaatgtccatgtttagtgtgtgccaaaagtgagattataattcaagtattctcattttaaactgtgcgctttctttctggactcttaaattcttcaggtgttcac

SEQ ID NO: 21071 - DNA, 201 bp, Bos taurus
cctaccaggctcctccgcccatgggattttccaggcaagagtactggagtggggtgccattgccttctctgattacctatataaatgcttataaatgagacaaatgtcatctcttttatatacatctgaatatttgccatcaaatcttatataatttggattctactgctgcaatgctctgctggccctcaggaagcatgt

SEQ ID NO: 21072 - DNA, 201 bp, Bos taurus
actggatgtttctctctggaatagattctgaactgggcccctcaattacagtaccggtatccttagggcaggcaaaatggaaatgtcctctaaagatggagaaatataataatacaaagtgaaaacagcaaacaatgaaacaaagtttattattaaaggtctgatatttcttcagacaaggtctacttaaaagctgagtac

SEQ ID NO: 21073 - DNA, 201 bp, Bos taurus
atagagactaaactgaagtctgagagggagactgataggcaaaggtttaaaatatatttttggcttcatttggtgaggcctcattttgtttagctaagtataatgattcagatccttgagctccaggagtaaatgggtttaaatattttttaattttttaaaatatgtttttggcctcattttgtgaggcctcattttgtt

SEQ ID NO: 21074 - DNA, 201 bp, Bos taurus
gttataaaacaactgaagggaagaagacagtaaaaccaaaatgtttaagtactcacacagtggctctttcaatagagatttttgctagttcctaagcatcaagtcatgtaaactctaccaagatattttgcagctgattatacagttataagtacctttttcagtgattgcaccaaaagtcctaatatgtactctctggat

SEQ ID NO: 21075 - DNA, 201 bp, Bos taurus
taatcatttcctttgatgtcataatatttatatacatacaaagaaacatgagaagcatcagtaatgttccagtcaggacactgatatagtaaattccctcgattctactgccaatgttactcttactgttttggttccgagatctaagccccacttctgggtagattacagatagtttgctaccctatacttggttcaata

SEQ ID NO: 21076 - DNA, 201 bp, Bos taurus
acagatgtcacagaaggaaatggatgtgtatgcaaatgtggccctagtgggtgatcataattgttttttgaaacagtgtattttaaaagaagatatgactggaattataggttcacactgtccctctgccatttgctttctgtgtatctctggactattcactttaattatatggctgtgtctttaaatgaaatatgcaaa

SEQ ID NO: 21077 - DNA, 201 bp, Bos taurus
ataaacaagtatgtttcatccactgaccctggagggtttagacaggaacagagtgtacacggaaggagtaactgtcatacaatggaatgcatgctttgttcaacaacaggaagaaagagctattgcactcaagagataatgataaatatatgtcttctgtaagagagaataggatcagaaaagacttccaaaaggaagcca

SEQ ID NO: 21078 - DNA, 201 bp, Bos taurus
gttagcaattttattctggagcatgaggaataaaagcgaactttcaacaggttcagattatttggaggctttaaaaacctacatgaattttctgtgtatgttaggcagatagaaagatattacagatggaattaaagtccaggtccaaagtaatgggcatgcttttatgctgagtgaatagaaacccttcaaatgaagttt

SEQ ID NO: 21079 - DNA, 201 bp, Bos taurus
gataccacaggagattttatgagaaaggtttaatcatacggtacatataaatatttgctataattcattatgcataatagagtgcattttatagcctaccgtttccagtaaaaatatagcaaagccatgaggttgtgaatggttttccagagggaatgatgtcagatattcaaggatgtatacattcaacacatatttatt

SEQ ID NO: 21080 - DNA, 201 bp, Bos taurus
ttatacagtattgtcatatgaaaattttattgaaattccttaatgaatagcctaacagatgaccactgataaccactgatgaccacttaggaatctaaagtttcctaaggtagctatgtgaggaaaaccaagtaattcagtgatgggtttgactaaagaggagtatttttgaacaaatatatatatatgtatatacacaca

SEQ ID NO: 21081 - DNA, 201 bp, Bos taurus
aagaatatgtcttcttcgtgttagcagtgatggaacacgcagagtctgtaagtgaaatgtgatggcgtccatcttattttctatggtattcttaaatacggtttttaccagaatgtggggatatggagctccatgcatcctaattgtttctcgtgagatgtaacttaaatgtagtaacaggctgtctactctttgaatgtt

SEQ ID NO: 21082 - DNA, 201 bp, Bos taurus
aggtgagacttacaacctcaagtggataatggaataaaatggacacaatgagtaagtgagggaagagatgtagaagactgttctagaattagtaactagtgatcaatttttataaatctttaagatctgtgaaggaagggaagaaaagactctcttataaaagatgcttttaatgaaacccctatttaagccttacacatc

SEQ ID NO: 21083 - DNA, 201 bp, Bos taurus
aactaccacagggccccacagacaggtggatggccaccccagaatcacccctgcaactttcaggctccccattagtggacagccaccccaggaccatatctgcaactttcaggccccacatatcagaagatgggcccacagcttcccattcccaggccttccttcccagcatcctggtactcataggagtttccacagtct

SEQ ID NO: 21084 - DNA, 201 bp, Bos taurus
gatactatgaagctgatgagctctcaacaattctgtgaggtgtcaaaatttgaaagtagaaccttcaaaacatgaatgaaagcagcaccttcaaacttctattcccaccacttctctgctgtttaccctcaatctcacatgataaggttaggtctcaacctctcaaggccttgctaaggtatataatactaaaaatttaat

SEQ ID NO: 21085 - DNA, 201 bp, Bos taurus
ttttcattactactgttttttgttttttggttttattttccctgtgcctacatttgtgggaaggggaatgctttagtttctaacaatcatttgagcaatgatatcgttctaacaatttgaaatttttatcttctttaaaccacgtaattgtgtactaaataaggtaggacaaaatgccttttcacttatatttttccaaat

SEQ ID NO: 21086 - DNA, 201 bp, Bos taurus
tctatttatgacatcatgtcataattcaatttatgacatcacaaattgtacaacatgcaacaaatatatcaaaacaacaatccacaggccaatatcactactaaatattagtataaaaattataaacaagacataatcaaatagaatgcagatggtgtcgaaagctagactgactaagaatggctattccaggattttaac

SEQ ID NO: 21087 - DNA, 201 bp, Bos taurus
tttctctggacccttttcaggttcctactgggcctttagacacagagtgcctcccgagcagaaggcacttccagtcctcggctcaccacaccaatttcttcgacagaaaaaaatggaaatgaaaacatatgagtgatgtctctcagcttgttttgtctttaatttggttagttctttcactaaaatctctaccttctcctt

SEQ ID NO: 21088 - DNA, 201 bp, Bos taurus
tagtttgttataccctgcctattaacagctcccaaagtatttttctgaaaccctacttgcagaaaggatagtataacaaaagggaggatgtccatctccacgattccagggattgatctggaggtactgaggcagattccactccccaggaacctgtagcagtggcctcaagagcatgccctccttccctctctctctttc

SEQ ID NO: 21089 - DNA, 201 bp, Bos taurus
cccatgtacagcaatgaagacccagtgcaacaaaaaataaaataaaaacattacagggggtcctttcccctcagagggaattaaccacaaggttaatgctattctgataaaagtcaagaccagcacactccatgatgccatgcacaatcacctcctgccagtccagggtcacctttttctaaacttctctactgtacttaa

SEQ ID NO: 21090 - DNA, 201 bp, Bos taurus
taaataatgacaaatggaaggaaaaaggaaattaaaagcaaaccaaaaaaaagcagttgtatccagatcatggagcccattaaaggcctgatgaaatggaatttggggccttatctcataggcaatggagatacttaaagggttttcagaggcatcaaagctatgcttcaggagaagtaatctataaccttcatattatta

SEQ ID NO: 21091 - DNA, 201 bp, Bos taurus
cccagtaaccggcatgcacgacagtgcagaaccccggtttctcatgacaaggttcaatccagctctaaatcatcattgctctgctcttcacctcagcctcgtatgcctctaattcttgtcaaaagggggcacatggctgtggtccttaggaaggaaggcataaataatgtggtctcctccctccaccctcaagactctcaa

SEQ ID NO: 21092 - DNA, 201 bp, Bos taurus
gtggtggtgtgtccaatagaagtgaaaaagtgaaaatatttaaaagatgaattctacaataaattataatcagtgtttttcccttccttttgaaattagaccaccaagtgagaaatctcactctttgtaaagtatcattttaagcattaacatgttttggactatcaacctaaataaagaggtaaattgaataaagaacct

SEQ ID NO: 21093 - DNA, 201 bp, Bos taurus
gtatgcatataccacattttgtttatccattcacccatcagtgaacatttgggttgcttggacctcttggttatagggaataatgctgctgtgaacactggtgtacaaatacctatttgagccctagcagttcttttggatgtatacccagacatgaaattattggatatatggtaattctatgtttaattttttgaggga

SEQ ID NO: 21094 - DNA, 201 bp, Bos taurus
ttagattatttaaattagaaatctgagattcatatttaagttagaaatctgagattcatacaggacatcttcctttcccttatacacaaatcaaaattcaatcccaaatattgatgttttatttcctaaatctctctttaatctgcttccctctatcttctctgtctccatccggttccttaatctctcacttagacaact

SEQ ID NO: 21095 - DNA, 201 bp, Bos taurus
aagtatcattcttcagcttctatattcatgactaaacattttcatactaaactttcatgcattccattgttattgaagtagaataattaatgtttataaaaaccattggctagaaccttagaagtactagttacaaaatatattttctttaacatacatacacatttgttattcatcatgttaatagtgtagcctcatatt

SEQ ID NO: 21096 - DNA, 201 bp, Bos taurus
aatgttctgaatcttttgtacttccgtctctatgtaaaatatcctaaggaaggaagataacttacttcccttctgctcaagtgtctgaaaaaggaagactattttatttctgaaggcacaactggatctctataaccatgttagatgctattccctttgtctgacagcattctgtgcactgctccataattaaccacttat

SEQ ID NO: 21097 - DNA, 201 bp, Bos taurus
ctgataaatgtgtgttagaaattactccacagaagaacacacagttctttctcatttccctttacagcttcctttgtatggatgggccattttattcaacaatccacaacaatttccagtgttttgctatgacaacactgtagcatttttacggggcccactgcgtaaaagaatacaaacaacttcagtattcttgccttg

SEQ ID NO: 21098 - DNA, 201 bp, Bos taurus
taggtattcagaataatactccaatctattcccttacctgcatcactattcaagcccttataatttctcactttcattatataagtatagcctttctaatttcaagccattctctactagacttggcgtgatctctccaataaaaatgataattttacttattcacagagtcttgagaacttttaaagtgcaaactttgta

SEQ ID NO: 21099 - DNA, 201 bp, Bos taurus
gattcctgggagtcaaccgtatgggtcttggtttcgctcccagtgcttagcctctgcctccttcactattcttttcgtgttagccattggggccagtctcctcctgctcagaccatagaagcacacgagaagtaccttttgagtttctgctgacaatactgaaatcagcaagggccaagtttgcagggatgagttggaagg

SEQ ID NO: 21100 - DNA, 201 bp, Bos taurus
gctacaaaaaagtgtgaagtactaatacatgccatagcatggatgaaccttgaaaactttaagctcagtgaaagaatccagacacaaaaggccacatactgtatgactccattcacatgaaaggtccagaataagcaagagacagaaagcagattagtggctgccaaaggatggggtgagtgatagggactgactgataat

SEQ ID NO: 21101 - DNA, 201 bp, Bos taurus
tcttggagcctgtacatcccatcacatgcatgattcggaaggaaggagacttcaggctccacagtttgaccagcaaccaaaccaagtggcctgctgactcagtgactttattggtagtaacccaattatcagcccagggtatttctgaactgtccttaagagtttgtattctgaattggggtctggagcactaggtaagag

SEQ ID NO: 21102 - DNA, 201 bp, Bos taurus
caaacacagagagtgatatggattatatccattccatagatatccaggccatttggctcttaggttgcatttatgtgtgaggatcttccctagttcagaactgctgctttgcctctttttgaggccttagaattgttcacagcagggtttgaacttaggtgccagtctagtgtaggtttttcccccttaaacaaactttga

SEQ ID NO: 21103 - DNA, 201 bp, Bos taurus
aatctgcatctatactgaatgcaatctgcatcaatagggaccacatgaggatgactcttgcattagttacagtgactcaaaagattatagaagtttctttctactttatctaatagcccagaggtggatgggctgtctagggtgggtagactgctttctacctcaggaaataatccagagacccaggtgggctggtctgcc

SEQ ID NO: 21104 - DNA, 201 bp, Bos taurus
gcggacttgaagtcttagttcaaacatctgtagttccacagctttccaggatggccactggctcccctgccccactcagcatccactactgccctgtgccttcggcagggaccttgaacattggtatggtgacgtcaaggtcagatacgaatgccccatgtgctcaatcatgagtgatgctttgggcacctttgaaggcct

SEQ ID NO: 21105 - DNA, 201 bp, Bos taurus
gaggataggtatccatttttgtgcaggaagaaaatctataattttatctatttttcatgtgttcttttaaaatggtacttttatgtatatgttttgtgatatacctggcatggacgttagcatgggtatataatttacataaaaacaaatgtacatttatgatgggcatgctcagtagtgttctactgagggagtgtagca

SEQ ID NO: 21106 - DNA, 201 bp, Bos taurus
atttaaaagtagaatgtaaggggagagactgaaggaacttgacatgtttgttgataagtggaaaatgggtctgtgggcagtggagaaaggaaagtaccttggttagatatgaaacaagatataacacatgctaaggatccaaaaaaagtagaacagagtcaactagcctccttaatttgttcatggtagggcaatgccgaa

SEQ ID NO: 21107 - DNA, 201 bp, Bos taurus
gggggcattaagggatttgcatatatgtatttgcagtcttagtagtactgatgaacatttcttaaaagtttatttctcaattttattttttgccctgcctcgtaaggcaagtattcccttttgctcttcagcatctaccatttcagtaaacaagttgaatttttacacctcatctagcaaccaggtcagaagtatcccagg

SEQ ID NO: 21108 - DNA, 201 bp, Bos taurus
agactctctgggtccagttttcttgcatcttttaaatataaatttcataatgcaacagattattgcctaatggcttttctgtgcgccaagatgaaagtatcaattttgtttagtctgtagttaaaaagtagaatttggggttttggtgttattactgttagaggtactgtacagtcacaccccacattttaagttctgatt

SEQ ID NO: 21109 - DNA, 201 bp, Bos taurus
ataatgggtataactttcaggaatgggatgaaatactgcatggatggggtccacaggaaggcaaaagtcaacctgaagggatttcaataaaggcagggagcgaatttacttgttgatctaagaaacccaatattgacgtgattaaattataacgtcaggagcattcttgggaagggggtctttagttgatagcaaggaaag

SEQ ID NO: 21110 - DNA, 201 bp, Bos taurus
tttccagagggagcttgttagttaacttggcaagtgtgttaagtagaagtgtgttattttctcaattgaaagcaactgagagaataatgcgagctatgtggtattctaactatgatgtgccttgatgatttgatgtactgtgttgataagctcatcacactcccttcccatcaccttccttaaggtaggtttctggtctga

SEQ ID NO: 21111 - DNA, 201 bp, Bos taurus
gcgatttcaacaaaacttttttttaaatcaagagcgaaaaaattaagcaatgtttacagtagacataaatcttatacaattcaaaaagcattttttttttcagatcatagagcataaaatggaaaaatgtctatgtaggtgaagtctaactactgtacatttatcacctattaaagttgcttatatgtaccacagtgtaaa

SEQ ID NO: 21112 - DNA, 201 bp, Bos taurus
cttatttcaagagatgaactgtagagtctggccaaagaatccctagaaaaatataggactgcacattgctgaagggagatccaagaggaaggagaggacaaagtggtttgctgtaccccaaaacattgtcttccgtccaactgagggctaactcatcaactcaaaggcattctaagacacaatgtaatattaaattaaagg

SEQ ID NO: 21113 - DNA, 201 bp, Bos taurus
tggttgacctcctggcaactaaggggccagactggatatattagttcactctcaatgaaatgcaggttccccaagcacatcctccaaagctcagctacagcccagataccttccaagggccctccttgccctctctgccctccccaggcaaaagaaaccgcttgtcctcttctgctcccatagcaaccggtctgtaccatg

SEQ ID NO: 21114 - DNA, 201 bp, Bos taurus
tgctcaggttttgaaagtgaaacagctaccttcctatctgctatgcaatctgatgagtttaatttttttttaagaagagatttgagtgagctcagaggccaaaagaagaaaaggagatttgatgactggagaagctgactgctcactgatttacccctggaatctgaaagttcttaatgttgaggtccttatcttggccat

SEQ ID NO: 21115 - DNA, 201 bp, Bos taurus
atgtttattactaaataaatggagcctgttttaaacaggccactggaattgaaagcttttttgcaaaattgctcttgtacttttttaaatcagaaaaggcgtattaaagacaaatggcccattttgacttgatttgagaaaaggataagttgataaataataaacattaacaatgttgtttttctctgccgagagagattt

SEQ ID NO: 21116 - DNA, 201 bp, Bos taurus
cagggaataagggtaagtcaggtgaatgccccatcattatgtgtaaagccgacctccctcatttgtcagatgaagtagtcaactgttttctaatgacttgatagaggccattacctggtgaatagggagttgctgtagaagtctcctactccatgggttactgggtgagggatgtgctatgttaatgacagacatgggaag

SEQ ID NO: 21117 - DNA, 201 bp, Bos taurus
ccgggcctaggaatgggaatcacttcccattgtcaacagcctcaagacatgacaccgtcatttctggctttcacgaaattttgccttcccttttgtaaataggccattctttctagtcccttctcgaatcctccaatttgagtgtttcacttttcttttcttctcagactcttagcaaatacgtttaatgtcaatagaaag

SEQ ID NO: 21118 - DNA, 201 bp, Bos taurus
agactcttcaatggcctattgcaaagaaaccttttaacaccgtgtttctaaaatggatttgtcttcagaattctatatttgtataatacctcctaaaatcttgtgaaatgtggggcccaccaaacctaacctgcataatactgatctacaaaaagagactggccatgctgtcaaagcctcatttctaaatattaatacaag

SEQ ID NO: 21119 - DNA, 201 bp, Bos taurus
tgtccatgtggcttatacactcctctctgcttgctctccgtcatctccgcggccaccacacccaccagcagagccaatgtttactgagtggccgtgtggggagtggttaagggctctgaagtcagacttgggcaacctgcttagcctttccaaagcctttcctaagctaaccccaatggggttagtaattgcacccacttc

SEQ ID NO: 21120 - DNA, 201 bp, Bos taurus
ttgggtgactggatcaagttctgatgcagaggctgttcagacctaaaaagtcaagtcttcctctcccagtttttttttccttgccaaatgggcatatttacattcacttagctttagcactcgtcctgttccagaagcgaggcccagtcttttgccaatattttccaggaaaccaccatgtcttttatcacttttgcaaat

SEQ ID NO: 21121 - DNA, 201 bp, Bos taurus
agtctctctgcttatctgaaaaaacagttctttgacttgccagctgtggccagaactctgctaccatgtccttggaggccacctccccactccttgccccaaaagcttccccagtccaatcagctcaagataagcaggacaaaataggaaacctcttctatgaggcccagggctgctctctacccgtgtttgtatcagatg

SEQ ID NO: 21122 - DNA, 201 bp, Bos taurus
aggcacattaggtaggaaaaatgggaccagctttcgctgtcatttaggctgtggtttttttcctagcctatatcagcctatatcaggctcccagatgagcaaagtatagtagaagctgcattttcctttcatttttgctgaagaaaggtggatgattttgtcagtgaggaagtagatcaagtgccagcagccctctgagac

SEQ ID NO: 21123 - DNA, 201 bp, Bos taurus
tggcacagacaaagccagccgtctttagaatgggaaaaatgaacaaaattcaacaattttaaagcgtgatttccctaattgggtggtccagaagccaaattttctcctcacccctgaatatagaatccgaactgtagcctcaaaaatacttttctctagaaagtacgtcattgttcagtcactaagtcatgtctgactctg

SEQ ID NO: 21124 - DNA, 201 bp, Bos taurus
tgccgtggactgtagtgttttctgggaaattcaaagaacaagagaattgttggtcagctgctctgatggtagcgaagctaagagagggttcttagggaggatgggggactgtttgttgattcccatggtttcaggataagtgatatgtgaccagttgagggcactgaactagagataaagctgctgtgtggtcatcactga

SEQ ID NO: 21125 - DNA, 201 bp, Bos taurus
cagaaaggccctgccagactttatcaggatcccagaggaagctatggcagtgatgctgaggaggaggaataccggcagcagctgtcagaacactcaaggcgcggttattacggccagccttcccgataccgggacacggaattataaggcccgagttttgactcctgtgtgctccgcggcgttcccttggagcagcactcc

SEQ ID NO: 21126 - DNA, 201 bp, Bos taurus
catctccaggtaccctttcctggagttggaatttcctaagccatctgactgaaatcaaattcaggttcgcaacaggccacataaatagtatcggtcaaagaaagagtgtcaaaatgcattttcccctcacccggtctgcagtttcctcatcttgggataatatgttagcatggccacagttattattcttgctgcaagcaa

SEQ ID NO: 21127 - DNA, 201 bp, Bos taurus
ccaggacacagggaacacaaggtggtggacagttccactgaatcccccgtcactgaggagaagacaggcaccccagatgcactgcccatctggccagcctttctcctgtgcttcgtggggagatacatcattacttaatattcagaaaccaccctctcccaaataggactcaaggcctagctacagcaatacataacctgt

SEQ ID NO: 21128 - DNA, 201 bp, Bos taurus
cgataacattcagtagcaattactgcatcaaattaagatgtatttcttgattgcctctgtaaattagacgcaagatatacaaagatgtatgagatatgatatttgctcctcagagagcttatagaattaagttatatgaatgataattccagggtatacattgctccctgtctgcaactcccaatggccaaattaagtgac

SEQ ID NO: 21129 - DNA, 201 bp, Bos taurus
tcctgtgccagacatcaatacgagtcacttggagaatacctatgtgaatcctaaatcactcagtcagtgattctgttctgagagttctcccttgactggactgaagaaatagagggatggaatggtagccagctggtgttcccatcaatgactggggatgaaacattgtattgcctccatttctccttttgaaaacctaaa

SEQ ID NO: 21130 - DNA, 201 bp, Bos taurus
tttgcatcccagtgcacagtactagtgaacagaagcctgtgtggacccttgccttcattttgtcctgctctcaaaattatgttgtctaggcactgaaatcaggaaaataatttatttgaagatgtcaaaatagaggactgtgaacacagactacccttgtaatttttatatcatgaaagaataaaaaaatactaatctaaa

SEQ ID NO: 21131 - DNA, 201 bp, Bos taurus
ctctaaaggcatagccaatcctgcctgggtatgtatcatttatctgagggctagaaattctattttccagacttgcggttcaaattacctgcatacttaccatcatccactagagggccccagctacattatgtaaagagaggctctgtgcttcttgcctttctagtcctttctttgtacccagacaagcaaggaaatact

SEQ ID NO: 21132 - DNA, 201 bp, Bos taurus
acagtcttacttactcatggccccagttttgggaacccattgatggatgatggattagacaaggataaagacacttgacataaatataccaagtctgttgcgcacaaatgagctgggcctatcttattctcaaacaatttgaattctggaaatggggaacagattaggttatttgaagataagccaatttttttttgtttt

SEQ ID NO: 21133 - DNA, 201 bp, Bos taurus
ttagaatcctgtgggagaccatacttcagtacactcactgcctgggaacccagaaagtgctcaattttgtcctcatccagggagggtgtcagaaatcaaacacaggtcatctgctctcccccgctgccttctgccccttttctgccttctcatcttttattcattttctaggttaaccaagttgggaactgatgaaaagcc

SEQ ID NO: 21134 - DNA, 201 bp, Bos taurus
aatctatgcctatctttgtgtatccaagaatatatagcaaaatggtcctctgccatagaaaaggctgcaaagatacagtaaaataaaaattaggcccattgaccaaccagcaatctgtttaaaaaattccttgctagctcagaagcaacagcattttgaagtaaaattggaggccaatgtaaaataaaaataatgaaattg

SEQ ID NO: 21135 - DNA, 201 bp, Bos taurus
ttttaaatttagattgtcagcatcccattgtatattcccatcaactagacaaaggaattttggcaaaccagctcagattttaatagtgacatcaagttttattttaaaattctagaaacaatacttagcctatcattttatattttaggttttattttccatataattttttccctcaggtactggctgtatttcctctta

SEQ ID NO: 21136 - DNA, 201 bp, Bos taurus
atgtcttgggtctttaaagcacatttacctgagaacaagagcgaggaagaaaattgttttggaggtattaccttggggtagcagcagcaaatcctatgtaaaccagagttcaagtcgggtctctaccacctacctgctcaaagcccatgggtgagacatttaacctctctgagccccagtttctgtatttgtagaatgaga

SEQ ID NO: 21137 - DNA, 201 bp, Bos taurus
tctaatcagacaaatatattacaaaatttccacctcagactttctcatggaagaactaagaaattatgtattacctttaacttgttctttttattgaaacagtggactttctgattctcctcaacatatgtttattgaccatcaactccataacttgcagctggcccctttcagagcaacatcaaggatgaccttgcctct

SEQ ID NO: 21138 - DNA, 201 bp, Bos taurus
attcattggtttgattgtcagggcttccatgacagttcattctcctgggacactgatacggggctctgctaatgcaagggggaggtcaaggcctccttggcaacagggaatgagttatcagggggttgtggaaagaaattctcttcaattcaacctggaagtagatctggacataatggcctcatttgactcctctaagtt

SEQ ID NO: 21139 - DNA, 201 bp, Bos taurus
actgtggcctgccaggctcctctccataaaagatgtggtaaactatggaaagaatattgttgcttgaggaaaaaagaggaagaagcacagtaattataataatagctaaccactggccaggcattgtagtaactgtaatagggaggaatttttgtgttctgttatgttaaccactaaagggacgttgcctgtaagtttaaa

SEQ ID NO: 21140 - DNA, 201 bp, Bos taurus
aagcaaaatctattcatgttagcccaccagtttatgatactttatttctccccatttctgaaagggacaggaagaaagaaacatcttgtgaggtgttgagagccaattaagtttgaaatggcatgctagtaaaatctcaagtgaccaatgttaatctaagtaaaaatgagtccaattacacacagaaagggatttctgcca

SEQ ID NO: 21141 - DNA, 201 bp, Bos taurus
aagaccactgtcaaagtgtatccaagcacttaagaaactttcaaaagtaacatctcaaatgtgctccaaaaagtcagtatttctcccactctgacctcttcatcttgccaacacgcataaataaaaataggcagctgaccatgtcactaacttcaccatgaaactgtgtacaaggccatgtgtccttgtcttttaaagtaa

SEQ ID NO: 21142 - DNA, 201 bp, Bos taurus
tgggctatagtccatagcgttgccaagagtcaaacacaactgaaatgacttagcagcagagcctagtatagtttcttacttgtagcaggtattcaataaacgcttactaccaggatagagtaagatatatgaggttctgtttaagattccttctaactttactgtttgggaaaaacttacaggcaaagtagtgaaagatgc

SEQ ID NO: 21143 - DNA, 201 bp, Bos taurus
agagaaggaatccttactgtttgctgacccgtctgactgatcttgaaatcaatgaggtaaggtcattcaggacaatcttgcaaactgcttagcaaagcattgaagctcttctgtggcttggacccaattaaacacaaacttgaattttccagcatcttctatcactctctcggcccatgcatctcctagactctagctgga

SEQ ID NO: 21144 - DNA, 201 bp, Bos taurus
ctgtttttcataatggaatttttcattttccaattatctttgtaattttaccacatacatctagtctgtctattggttatttacaacttttacaatttcacagagatgttgacaaaatttatagaatataaggatggtgaagttgtagcatgcataacacgttggaacgagaacttaagttagaccaaaactgaaaaactt

SEQ ID NO: 21145 - DNA, 201 bp, Bos taurus
ggggggaaagttagacacgttaactcactgagtatatattctggagtcattccggtgatttcctgtgtcacagagacagagagtcacaagatacatttcccagatttccttagacctaggtttgtcgttgagattacaccaatcagaagcacctgcagacaacacagaattgagaacggcataattatataacttcatagc

SEQ ID NO: 21146 - DNA, 201 bp, Bos taurus
atagatttgaggagatgcttaatggccttgtatagccaactaaagaaaaattaaatcatcttgtagaccagaagccaatgaaagtgtttaaaaaagaaaagaacatgatcaggttgtttattggaaaggttacaggctaagaaaggatgaaagaggatccatcctgagacacagacaaacagagaagtttctgaaatagtc

SEQ ID NO: 21147 - DNA, 201 bp, Bos taurus
atctgttagtaattacatacaagaatgaacattttcatagtaaaagtatatccctcctccttgctcctctttgtagtagtataaatctagagaactgagatctcttctactgatgtaactaaaatatatgcaagtggaaacatatagcaattttaatgtatgttttgctacattactttcaactaaaagtaatcttttaaa

SEQ ID NO: 21148 - DNA, 201 bp, Bos taurus
tcaccacttcaggaaagaccaatccaacttcccaaattcagtgcctaaatgtattttccagaagaactttttctggccactgaagccctctttagtacccatttaatagaccacagaagtaccacctacctacctccagttcagttcagtcactcagtcgtgtccaactctttgcgagcccatgaactgcagcatgccagg

SEQ ID NO: 21149 - DNA, 201 bp, Bos taurus
aatctacagttatagaaatcagtatcatggtaggggctggagactgcctggaaagaagcatgagaaaactttctggggtgatgccaatgttttctatcgtaatctatatgagtgtgtatatatgtatactcatacatatcatatatatttgtcatactcatatatatgtcaaaattcatcagtctgtatgcttatatatat

SEQ ID NO: 21150 - DNA, 201 bp, Bos taurus
ctccagtcctcatccacttggaactagtcattttacaattatttatggaagtgttcccaaaacttataagccaagcactgataaattaggatccaggcatagagagcaatatggtttactgcaagtcagagattttaagtagctaattcagtcttgtaagctcaccatgtatgggggcaaaacatctagtcttacttcact

SEQ ID NO: 21151 - DNA, 201 bp, Bos taurus
gagggctccacaattttgtaaggtgccatcactttgaatgaattaagagattacttatttaattgaaggagtctgtttagtcagtctattaagtaagtgtcgtatactaataaaatgggactgaacctggagtttaactgtgaaattaatttatccttgttatgcatgactctcattggcctagataactaagaattacac

SEQ ID NO: 21152 - DNA, 201 bp, Bos taurus
tctcaagaattttcatcaaatataataataactttcatttttacaactttgatcagtaaaagaaatgaaaaccttaagtttctgtgtctgctatccatatcctcagttcctcctagaaaagacttgttcattgattggatgttggaggggggtaatctggtgaggaaaagtcagatagataatagatgatagagtcttctc

SEQ ID NO: 21153 - DNA, 201 bp, Bos taurus
agtaatcaattgcagatctttagtgaagcaaaaatcatcaaatcagagaactatgtattccctagtctcccatccgtaatcttccctttggctagctgaacacaatgacccggagccaaaggactacctttcttagtcttccttatagactccctttggccgcctgaccaagttagggccaatgaactaaaagcagtggga

SEQ ID NO: 21154 - DNA, 201 bp, Bos taurus
gaggctcttgttaagtatagcatttctagcccttccccttaaagtattatctagtgggcttggaaattaatgtattcaataacttgaatggttcctatcatcagagaagtctcagacctgatgttagaggaacttttgaaggcaagtgtggctgaagcctaaaggttacggggttgttggatgagagcaggacatgtccat

SEQ ID NO: 21155 - DNA, 201 bp, Bos taurus
ctggagctctgtaactgtctgaccatgaatctcgatcaccacgtgtcacctgccatgattctctctgctgcccagactgtcagaccactcctgtagtgttcctgacttgctcttcacctctgcacctcatgtctccagctgacgggtgaaactgcttgctgccttatgtcttgctgtttggaaagtaagagaagggggtct

SEQ ID NO: 21156 - DNA, 201 bp, Bos taurus
cacctcagtcatgctgctgcctcccgggactttgcagatgagttttattggctagattttcagtgtttagagcttatagtttgtttctttttctttttctagcttgtagtttgtttctctttcttcttatttttggttcaatgtctgtctttgggtctttgtataaaagagactttatagctcttacagtcccaccagttt

SEQ ID NO: 21157 - DNA, 201 bp, Bos taurus
acttccctcagtgccaagtttctttagaaaacactggagattcctaaaatgtatcaaagctttggaaaattgctctcataactgacaagaaacacaaatgtgctcaggcacccacgtgtgcatccatcatttgacaacatcttattcaaaactgtctcaagacccaggaatgaaaatagcaatggctctcctaccagatcg

SEQ ID NO: 21158 - DNA, 201 bp, Bos taurus
actggagcagttacaattattttttaaaaaaagaattgctgcttaaatgtaataagtagcttcctgattattatatagatgaaaaggacatagtagatgttaatcctggggactgttagttattccttgagagcctaacactttcaaattattatgtaatgaattgaagttggaaaaagcaataatatgaaaggtctttga

SEQ ID NO: 21159 - DNA, 201 bp, Bos taurus
ctctaggcacatgacagtaaaactgctaaaattcacagaggaaaaagtatgtatcagagaaaaagaaatatattcctgtcaaaggaactacaataaaactgagccctaatctcatctaaaatgatgaaagtcaaaagacactgaaattccagtttcaaagtgctgatataaaaaaaaatgccgatattgaattcttccctg

SEQ ID NO: 21160 - DNA, 201 bp, Bos taurus
atgggagaacatcaaaatcacagggccatgcagaggcatgaagaaggatttttaataacacacagtcttggtcccatctgctatagtctcatcaggtagacctgaaatggggcccaggcctgtgttttcagcaagctctccaagtgaagatgatgcccactgaaatttaagaaccatggctgtatgatacgttactactag

SEQ ID NO: 21161 - DNA, 201 bp, Bos taurus
tttgtgcaagtgtggaatttctgctgacagttgcaaatgtctttcttgaggcctacactacaggcactgctgtagaaaccaatgttcaaacatggtctgccaaagaagaaggttagttattggctaaaatattccatatctgttactgaagtgctataataacacttagcttgattatccttctagatgatgaggataaca

SEQ ID NO: 21162 - DNA, 201 bp, Bos taurus
caaatattatttggatgttagaggagcagtgggttgtcatatataaaaaaatgtcagtagccttcaaaatactctgtttaaatagaatatgtaggaaatatattaattcttgtggcatctagaaagcagaattctgcatttcttttgtaagccagacttggttcttcaaaatatcacatcaaattattgtaaattttcatt

SEQ ID NO: 21163 - DNA, 201 bp, Bos taurus
caaatggtgattaaacctcattattaaaaagaagtcccttaaataacaagatatacatgaaaaaaaaaaagaacttctttggttcaaaagccatatacttgtaacccagggaacatttgaaatttatgaataggtaacttatctccatatgggatatttgttcatcaactttttatcaatcttatatacaaaagaaatgct

SEQ ID NO: 21164 - DNA, 201 bp, Bos taurus
tagacttgccagtccttggcaaagacctatccgagaccaggaggaacactgggccacttcaaccggcccggacagaggttgctcagacacaagagtggccggtgacttagaggaggtttctcccttactaggatgatttcccctgagccgattcgcccccacccccaaactcagagggccaggagttcacttagcctgcaa

SEQ ID NO: 21165 - DNA, 201 bp, Bos taurus
atgtatttcatgaggtgcagattacaaggtacatttaaactcacttcagcaaactgagttctcgaccacacacttgtgggtctggtgctgaagaaatgaccctccatttcacagatggggatgctgaagcccagtgaaatggagatacacacaaggtcccacacccaaggactcccagcggttctgacctctggtcctctg

SEQ ID NO: 21166 - DNA, 201 bp, Bos taurus
gagtttcaagccaacttcttaattccattccaaattcctctccgggtggcctccaggcatctctaccatgtttggaacactcccccgaagccctttctccagccactgagagaagtgctgtggccttgggcctttctgaagagccgtcattcctcatagcgggtggctgtgtgctgtgcttctctctctcaaggccctcct

SEQ ID NO: 21167 - DNA, 201 bp, Bos taurus
ctaagtaagtgtaattgcaagggtccttataagtgtaatacaagggtaaagaaagaagaaggcaatgttatgatggaagcaggtggaaaaaagtctatgaaatgcaaggccacaagccaaggaatgaagataccctttagaatttggcagaagcaagacagtaagttctctcctagagtctgcagaagaaaccagctgtac

SEQ ID NO: 21168 - DNA, 201 bp, Bos taurus
agtaaaaagcctaccaagatgtggctctaagtgtgtggaaagaggatagcagaaaacaaaacaatagaaaagataaatcttaagccaatcaagggtcaatgagaaaattttaaccctctaagaagagcaacatccaagtgaaaacctcagaaattgtcaaggccctaccacaatattgtgctttttttcctttatagattt

SEQ ID NO: 21169 - DNA, 201 bp, Bos taurus
gttgacctgaacagatggcttcttcactcaatagtgaggtatctgggttgagataactgaaggatgaaatcagatgtgattattaattacaggcccaattcagtctctccagcatggtggtttaagagtagtcagactctatatagtgactcagggatcaaagaacaagaaagcaaggcagaagttacatggccttttatg

SEQ ID NO: 21170 - DNA, 201 bp, Bos taurus
tgctgattattagacaataccgtaagtaaggagacagtgtaaaacaaggggaggtctttgattttctgaacctttcagtgatttgaatatacacaaggacaaaagcaaagacatatttataatgaaatgccaaagagccttgtatgcacatatgagggtactctgactggccctttcaagccctgttatttagtatatgca

SEQ ID NO: 21171 - DNA, 201 bp, Bos taurus
caaacggtaatactgtgctaagaaataaaggtttacccagccagatctacatactaaatctagttctagccatatggtctattggaaattacataaatgccgtaaggcctattttttttttttttttttctgatctgaaaatgatagttataatacactcatcttaaaagggttggatgagcttatatatttaaagcactt

SEQ ID NO: 21172 - DNA, 201 bp, Bos taurus
tactttgtggccatgtctgtgaacctgcaactttctcttgatgggtgtaataaatccatgtaatgttctgcctttaagataaagtccagactccttaaccaagaaccaaggtctgtggggccctggggtctacatatctctcacctcacatctcactcttctccttagctgtcccctgcaatcctcttgcaacctaggtga

SEQ ID NO: 21173 - DNA, 201 bp, Bos taurus
ttcccttggtccactggtcctgcctggctgaccagcgctcactttggacagcaaccatgctaagcatcacttgactcacctggcaggagaacacaggccacgaccacgtgctctcaccctgttgatagtcactcaagaagtcagatggttcagactctgctgtacaagccctttagtggcttctgctagaagaagcagagg

SEQ ID NO: 21174 - DNA, 201 bp, Bos taurus
attctccctgtgtggcctgcctcctttccttgccctccccattattccttgtcagacccttgttgtcatgccaggacagctatgctagcctcgaagctcatcaccttgtctacagccttggccttctctgctcctttatctgggcttacaggagctctgggtatacttctgtatctatctgtattgtgtcattctttaagg

SEQ ID NO: 21175 - DNA, 201 bp, Bos taurus
ttttttacattcatatatagtaacacttaccgtagcccactctggaaaaatcataaaattacctacagggatgctcagtatcctcacttctctatttcttaagttatttctgctgcaacacttacttcaatccaacttatatattttgttttatggtgctttgaagtactccacatatcttctgggttaaagattctctgc

SEQ ID NO: 21176 - DNA, 201 bp, Bos taurus
gtcccagataggaactagcagcagagctgagctctcacttacctctccccagggaaggaaattctcagctgggatcttagctctttggcccacagggaaggagagttcccacagggctgccttcagtccagagaaaaagcacaagcaagtgtttttaccgaagtcgctctggctgatctcacagcaggcctagacaggctg

SEQ ID NO: 21177 - DNA, 201 bp, Bos taurus
agcacgcaaggcatccctgtccttccctatctcctggaatttgctcaaacttacagccatcctgttacttgatctttacgtactaaattctattttttattaaaggttttctgttttaagtggactaaattaaactttctatatacatcacagagcctctttatacgtgagctttctttcccctgtccaaacttttgcaat

SEQ ID NO: 21178 - DNA, 201 bp, Bos taurus
ttctattcccataagcatcattgtgaaaaatctagagttcccaacattagtgtaaagactactcaacttgatgattatattcctctaactagtagatagcatagatagcagaatcatctcatttacctaaaatatttggcaaaataaattggaagatgttgctacaaatgagtcggtattcatccaaatacgagctttatc

SEQ ID NO: 21179 - DNA, 201 bp, Bos taurus
accacatatttcttaccaggaacatgaagagataataaaccactgtccacagtgaagtcatttacattctaagctttccaagaaattcaagagtggttcattgaggctcatagcaggctggaggtaaggtttcagaatctccacttgtaaaagtttactctatcaagaacaaaatgagaaatctgtggaatctgaaatcta

SEQ ID NO: 21180 - DNA, 201 bp, Bos taurus
agacccaggaaaatcattgagttacctggatgttattattcaggttttctattgtcttgtctttttatactacggttttctaaatactaaaataaaataatacagatagtaaaatccaaactttagtgcttcatccccaaatctcgtattttgaaagcatattgattgtttctgcttattcctgaccttaactcatttcct

SEQ ID NO: 21181 - DNA, 201 bp, Bos taurus
agagcaacaggtgttgtcaagggaagaaagaaataaaaggtttacagattttcaagttttcttatgttagatcaaaagctggcaaacttctcctgtaaatggccagagagtaaaaatttagactatgtggaacagttatacagtcttcatctcaactactcaactttgatattgaagcacaaaagaagccataaacctagg

SEQ ID NO: 21182 - DNA, 201 bp, Bos taurus
ttaaactcttaagagagtaatacaaaaacacagataatttgagaattttttaaacaaaactagtctcagcatgaagaagttggaaaaaaaaaaaaggataacatactgctggcttgatgatggtactgaggaagaaaacaagaacaaggagaaaatatatgaaaagagttggcagaaatgttcacctcacagactgatctc

SEQ ID NO: 21183 - DNA, 201 bp, Bos taurus
gcattccagctccaaggcccataagcttttcactctgtctcaagatatatgcatcttgtacacacttaaaacacagttttacatttattagcttgtatccgaaagtaaactttaaggcaaaactaaaacatactggttttgagtcaatttcataggtttacttacacaaagagctttcccctctcaaaatattaaggttaa

SEQ ID NO: 21184 - DNA, 201 bp, Bos taurus
gaattaaatgaggtaatgtgtctgccagctcctggcatgcagaaggcaccccctcccctcttgattcttcctctgagatttgaaggaacaaaaaagaggaactaagagatattttgaggtggaggtgagggttgataaagcagccaggaaagtcatccccttgaccatcaccctccagcgaagtagaagagattatttgcc

SEQ ID NO: 21185 - DNA, 201 bp, Bos taurus
cttctgaggtatctctccttggcttgacaggtgccttctcactgtgtcctcatatggtcttttccctgtatccttatctctttttcttttaaggccactagtcatgttggattagggcccactcatatgacctcatttaccttagttacctctttcaaggccctgtctctaaatacatgagtcacattctcatacactgag

SEQ ID NO: 21186 - DNA, 201 bp, Bos taurus
ctaggatgtctggctctaggtgagtgataacaccatcatgattatcttgcagggtaacaagtaatatcccaaatcggtagcagccttctttactgggcccgaggccaaagtggtctttctgatacttgtcccactttgagtctcaacttctacaccagtatgtgtggaataatacagagaaaaccacaaatgacagaggaa

SEQ ID NO: 21187 - DNA, 201 bp, Bos taurus
tgtagcagtcttctgtctctgggctttccatttatacattttcatgatgtgaacaatgcagtacaccaaaagtcgtggctcttgctatcacaagaaggcagtgatgctagttgtgtttggacatttaaatcttgactgctgtcttaatcctgaagtgtcttgttatcagtgactacaaaagcacatagaatggtattttca

SEQ ID NO: 21188 - DNA, 201 bp, Bos taurus
aatgttgttctgctaatgtgtacctcctgcccagtatttcttattaataaggcactaaataaggggcaatcggtgtttccattgccaaaagaaaacgtctcttttaattaatcaatgtaaatgggcttttactggaaaatagaagggaagtgtttctagaactcaggatataatgttacatcagggaataccatgccctct

SEQ ID NO: 21189 - DNA, 201 bp, Bos taurus
gcttcttctttatttgccctttattccttcagcacagaaatgtgtcagcctttaggggtgttttggaatacccctccccttagcttagcaaaataaagccgatcattattaaggaatcataggtcaggagtcataggtcagatgcagcgaggaagggtttctgcatgtagtttctggctcaggatactgggctcctaactc

SEQ ID NO: 21190 - DNA, 201 bp, Bos taurus
agcctagtaccacttgctcgtggcttatacacagagcttccatcttggtttagtaaacggtctttctcctttgagaagagcttgaaaggcaaattgccagttctagtctatcaggctggggacatggtttaaagctaatactgggcaccaagaccaaatcagggcacccagaccttgcaccttacggagaaaagaggggtg

SEQ ID NO: 21191 - DNA, 201 bp, Bos taurus
aggtcacctttagactcacaagcacttcattatcccaaggaaagatatgagacctaaaagggcctcaaggaattgttgacttaaaatgtcattctttgaaaaaccctagattgatgccagtgacatggctgtagtggacatgaagagacaggctgaacatagcagaagagttgggtgctggtgatgactttgcccaaatcc

SEQ ID NO: 21192 - DNA, 201 bp, Bos taurus
ctccagaagaacaggggcccagcattaggaacctggatttctggcccaaactcatcacactcattgtgtcaatcatagaggaagataagaattcctacactctcgttctgaaccagtaagtatcacctcacttggcttttctgtttggtggttggtttgtccacctgtctaacagcctctttctttcctgtctctgtgtgt

SEQ ID NO: 21193 - DNA, 201 bp, Bos taurus
aaaggaatttataaatagacttgtctgaaaatgcagaggctatcttaagagatagtgatttcttcgtcactggaagtatttaagcaaggtggccaggattactggggaatgattgctctgagtgggagaatgaaccatttatctcccggtgcttttccaattgtggaattctgtaattttcagaaccaaagtgaccctgag

SEQ ID NO: 21194 - DNA, 201 bp, Bos taurus
gtactcaggagttatacagagaactaataacaaaatatcaaggtgataaattctgtttctctttggtcttgtgatgccacagtgaattattttaaagctcgctattaccagtgattgtgtagaattgttattcatttgcagttctcaatacacaaagtctgcttctaactcattttcagttagatatggattgtgtcctaa

SEQ ID NO: 21195 - DNA, 201 bp, Bos taurus
cagcatcaatgacgaataaatttctatttctactttccaaaagtgctggggacctagcaaactaatgattgctgggccagaaagagagaagccttgtacttggtttagaatacactattgcctttgttctaacggagcagcggaatatatcctttcattgacactgctttatcaggcctttagatggagcaagtgggtgag

SEQ ID NO: 21196 - DNA, 201 bp, Bos taurus
gccaaaaaggaaaaaagaatttagttttcaagaatttaaatgggagaatgtggagataagcacttaggtagcagtggggaggcacacagagcctcagacacccctggcccccaggccttcccactgggtgcacttcttccaactgccaggatctttgcagctttttattggcaggcagtgagaagctgcgggaaatcagtg

SEQ ID NO: 21197 - DNA, 201 bp, Bos taurus
ctgcctccccccagggacctgggggcacagtgctttacataagcaggagtgcttgctgcaaggggaggacactcaagccagaaaggtctaaagtcggagaaaaaattgaggcttgcctgagagggctggaagcaagagatgtgggagttatgaaagtgaaataaaagggaaagacagttttaggcacaacgttattgataa

SEQ ID NO: 21198 - DNA, 201 bp, Bos taurus
ccagaagatgcaggagggagtgctcacttgagcatcattaaaagttcaagtggcttcctccctccaccctgcaccccatggggtgcattaaaccccaggattcattaaaccctctgcccccagagcccaatttggttgaagggaatgtttgatcttttcatccagaggaggtctgaactaagggtttggggcctccctgag

SEQ ID NO: 21199 - DNA, 201 bp, Bos taurus
ctatatgaaacttttccagattctttaagaaggttaaatctctccctctttggttctcctgcagcactttgtttattctgctaggataacacttacctaattgagtcttatagcaggcccctgacacacacctttatgattcctgctcgttattaactgtataaggcagagtatgaggagaatgtttaaatggggagggca

SEQ ID NO: 21200 - DNA, 201 bp, Bos taurus
ggatcttaaaccactgatcattagactgagtccctttttataataaaatattacttgtttactacatggatatctggatttttatctttactgtgaactttaaaattttttcaacttgtctatccacctcccagccaacttcttattttgaaaaatttcaagctccttgaaaagttggaagactgagatagtgaatacctt

SEQ ID NO: 21201 - DNA, 201 bp, Bos taurus
gaattgttcacttccgagacaaagcagagctaaaattctgccgttgcaaattctggtgcatatatctttttcttctcattctggcctgatgagatgattagacttagcaatataaatgaaataatcatctgaaaaagagagaaagatgggaattccctggcagtccagtgcttaggactcagtgctttcactgcggtggcc

SEQ ID NO: 21202 - DNA, 201 bp, Bos taurus
ttaagagcatctgtaccagatatttctaacattgtagaatttgggaggaaaacactgaagacattcttaactatttttctccttcttcccctcttatatattttaggggttaaaaactacttcccctccccacaacaaataagcaaaactgatcagagcaagaattttagatgatagttttcattccctacatttttctga

SEQ ID NO: 21203 - DNA, 201 bp, Bos taurus
tggacttgagtttgagtgaactccgggagttggtgatggacagggaggcctggcgtgctgcgattcatggggtcgcaaagagtcagacgtgactgagcgactgaactgaagcttcaagacatggccaaaaatttgattaagtttagtaggagggtgtgatttttggcatatgtattacctgtaacatttgttgtcatttta

SEQ ID NO: 21204 - DNA, 201 bp, Bos taurus
ttaagttccacagcagaccagtcattcattttctttatttttttctggactttctagttcattccattagcctttatatctctgtacttcattgtaaatatttttaaataaacattttaaaatgctccagttgtaatagtaatcctcttgctatagaatttacttcattttatcttaagttttccatgcaatatattgggt

SEQ ID NO: 21205 - DNA, 201 bp, Bos taurus
gggtgggtgggtgtggcctcagacatgtcatgccctctgcctgggtgatattttgggctttacagctagtgctgcaaagcacaggatgtgttagatctcaacaactagctgtgagctggcctgaacgccaaagctttcatggcattgtgggtatgaggtcgctaggggaactgatttagtatctaaggaggttaaagaaaa

SEQ ID NO: 21206 - DNA, 201 bp, Bos taurus
gatttgagttctagatttgcgcaagtctttctctgcccttggcctcagtttcctcctgaagggagtgcgtgtgcactggctgatctctgagcatcctttccaaccatgagtgtctgaatctctgcgttactgagttaaagtgaaacccgtgtgattcaaatccaccctgattaggagcctgcttttgtagtgagcccacac

SEQ ID NO: 21207 - DNA, 201 bp, Bos taurus
aggaataatgggagctgacaagccgatctaatgcttatatgtaaatacaaagaacacagaatagccaagataatcctgaacaaaactagagcatttacaccacccagatttaaagatttactacaaagcttcagtaattatgacagcgtggtactgaaacaaagacaaagagaccagtataatcgagtcctgtaataggtc

SEQ ID NO: 21208 - DNA, 201 bp, Bos taurus
gaccattaactagccaagggaaatacagcagttttgtttaaatgaattctcagtcagtcacaacacattttaaactccctagtcattaagaattacataatggatttgaaatatcataggctacaaatctgaaaggtctatacttaaatcctcccttaatcaacattaaacatgaaaagcaggaggaacccatgattccta

SEQ ID NO: 21209 - DNA, 201 bp, Bos taurus
ctcattttcatttgaggaaactgaggcccagggatagtgagggtctagctgaggtggcagatggaggcactaaatctcctgattactagacttatgctgtcctgttctgccacttaataacaggcccactaagacatcacaaaaagggccaacttggatgtgctctgctcctaggcatgtcccaagttgagaggaagagca

SEQ ID NO: 21210 - DNA, 201 bp, Bos taurus
ctgaatgtgcgaaaccaccatatggcacagacattattttgatctgcatttttcgatgaagcaactgaggctcaaagaggctaagccacttgcacgtcattacagatcaagtgactggcaaagcagggagactaatatcaccagcttccattccacagactgttatgcttcttctgtgtgatgaacaacttccaaaattca

SEQ ID NO: 21211 - DNA, 201 bp, Bos taurus
gggctgggctggctgcaacactctcggaagagaaaaacagattcctcagaccctaccctgagagtctcatttagttaagctgtgtggaacccagaaatccaagtttttaagtagctccccaagtttacagcatattcttatgctaggaatatcaggtgatcattgaactggattgtttctccagttttctgttgcctgaat

SEQ ID NO: 21212 - DNA, 201 bp, Bos taurus
gaatgtggaccctgggagatggagacacagtctctgtgggatcataggtgacagccccaggactggtggactcccacagagcccttgtggcagccgggccaccctggcaccagttctctgcacaatacagatgttctgctcaacaagactttcactgggagcataatcagtggctgaggcagcccctggagaggcgagtgc

SEQ ID NO: 21213 - DNA, 201 bp, Bos taurus
ggcgctttgccgcgcaagaaataacgggaccgaattgctctgatacctaacttagccctgagttacctggagaaccccatccatcgtgggcagtgactctgtggatgatgggaagagctatagactgggaaccaggggatctggtactttctgttcctgggtctttgtttccccaccaagacccagaggcggttgtatgaa

SEQ ID NO: 21214 - DNA, 201 bp, Bos taurus
tctttgtccgatttacttcatgtagtacaatcatcgctaggtccattctcgctgcaatttgccaacacatcttcatagaaagctgactttcagaacagaccggtggcaaaagatctgagggtcaatttctcacaggtgagaagcacggcacaggccttgtttacaaacccagaaagacctgctgggatttttctctgctct

SEQ ID NO: 21215 - DNA, 201 bp, Bos taurus
ttcaattctttttgtaaaagagttaaaagagatagatgtgatatagaaaaggagtgcggtcgcttttccccacctctccccacccctgcaagaagtgtggcggatacctgtctcccctcttggagcatttacacatgttcacatattaatcctatatctctgctgcctgcttttttcactaagtaatatattgtggagctc

SEQ ID NO: 21216 - DNA, 201 bp, Bos taurus
gcccaaggaaagaccttcagtcagaggcccttggagctgcatatgagcaatgcactaaagaatcccaggggcaagacagatacttctcagtctggttgtccgctccatgctggccccaggcttattagcactgtctctccacttccttttaaacaccagcccctcctgccctacctccagtgtgtgttttgttaggaagca

SEQ ID NO: 21217 - DNA, 201 bp, Bos taurus
tattaacataaagaggtaaaatgatcaaagacagcacacacttggtcagtgcagcagaaactggggaagaacaaggggcatctggagctaagtgctccccgaaggaaatgtcttccgaaatgcagtctcattctccagtgccatctcaagtgcatatgaaataggagctgaccaagggttgtcctataggcgtctttgaaa

SEQ ID NO: 21218 - DNA, 201 bp, Bos taurus
ataaggcacagttgtgaacccattggcaaaagttagcaagtctgacaaaaccaagtgcggagaagatgtggggaaacaaaaattctcaaacataactggtatgaatgtaaattggagtacctacttgagagaacagcttcagcccagcagtttcagaaattctggtacatgtaccaagagatatatatgagaaaattcatt

SEQ ID NO: 21219 - DNA, 201 bp, Bos taurus
acacatgacttctttccctcagtgttgataataactcctgttcctggtgagttaaaagttctttatttatcaagaaagatttcagagatgaagcaaggaagctaagaaagtaaagtgagagtttatttgaacaagaatatgctctgagacagaaagtaggcagacaggtcaggagccactgccctgggtttctttagcaag

SEQ ID NO: 21220 - DNA, 201 bp, Bos taurus
tggagccagggtgtccaggacactgtagcacatacggccatctgtgtcacaatggagggaggtgcagagaaaagcgcagagggatcacgtgtgactgcaccgtctctgcatatgacgggccattctgcgagaacggtgagtgtgcccaaggaacagggaaaggctggagcatgagaagtccatgaagatgcctctggtatt

SEQ ID NO: 21221 - DNA, 201 bp, Bos taurus
gatgggactttgtttagtattttaaatctttatttcaaaattattctcaaattcatcctctatttctctttctaggatattaactgctattagctgcttccaatggtggtcttatttcagaaatgcagtttttattttgttaattataaccatttagctttctatttatgtgtttaacagagcgatgccctgtagtgaagg

SEQ ID NO: 21222 - DNA, 201 bp, Bos taurus
gtggattctccagggaggaaactaagagtcacaatgaagaaagggccaatcttcatttctcaagctgatgagaggcaaaactaagccatccatggtctagaggctctagctctttgcgcttggccatttgcttagctgatttgagaacagcgtcaggtgttctaagagccagtgacccaacctgtgtgagtgtatatacca

SEQ ID NO: 21223 - DNA, 201 bp, Bos taurus
cctgtacaccacaccctcaactccaataaaggcaaagagctgggtccttgccccttctctccactcaagatctggctgggtggcccctgatgtgctctgtaccctctagtacctagaagcagtaaactttgtgttttcaaagttccctaataattattgttgatcctaatgatcatccttcagtcataataaggaccacaa

SEQ ID NO: 21224 - DNA, 201 bp, Bos taurus
gaaatacatagatagatctgcctatgcatgtatgtccaagttgtaaaacaagtgatttgaatgtgtttagcccccctgtaatggtagagaaattagacaatctaaaacaaattcagttctatttatcctgattcaaacaaaaagcatttagtatctatcaatactcatatatgtaaggtacctaagcaagtccttaagtgt

SEQ ID NO: 21225 - DNA, 201 bp, Bos taurus
gaaattcatgagtcaccagatggccccctcgctgacacgaatgggtcttgcaaaatgaatgggtaccatgtccccggtggcccccaaaatagctgttattcagcctgtgaggggagctacaggtgtagttaccacagaatgttcagttccagtatccaccataaaagtcattgattggccccctactttcatcatgaccgt

SEQ ID NO: 21226 - DNA, 201 bp, Bos taurus
taggactcctaaaaacaggtgtactcaataggaaatttttttaaaacctttaaattttttaaaaggcaaaagatgttcattacagtggtacccataatagtataaattagaagcaaagtaagtgtccaaaactgaggcaatggttaagtgaattgtggttcaacaaatcaataaaatcaacctagcctctaaaaagtgtag

SEQ ID NO: 21227 - DNA, 201 bp, Bos taurus
atctacatccatgtctatattcatatttgcctatatgtttaccagatgccaggtgcagagtaaggagaagacagaagagggaggtagggtagggtgttctgaggaggcctctttctgatactgtgatattcaagagttgacaacagtaaggaaataagccaagagaaacatcttgaggaccacagcattctaagcttttgt

SEQ ID NO: 21228 - DNA, 201 bp, Bos taurus
caatagcctggaaatggccacttcctctgtcatttactgtctgggacagcctcaccaggcagtctgaggatgagagcttcgccaagtactctccagatcaccagggccaagggggtgggggacccagacccttggaggttaaggggtttgatcaaggtcattgtgaattgtggtgctggagaagactcttaagagtccctt

SEQ ID NO: 21229 - DNA, 201 bp, Bos taurus
agtctgtatactagtccccttaaatctatatcttagtattagactacacatgcataggttgaaacaaagacaggctagtcaaaggataattcaggaaatcactgaccttaacacagtctggaggtgttagagtttgaccatgtggagaggagagtcctcactgagcactcagggcttcctgtggaaactccagagatgtcc

SEQ ID NO: 21230 - DNA, 201 bp, Bos taurus
aaatgtgctgggcctatccaggcactgatgagcagactggtccagaggaggtgagggctgtgggtgagcagagagaaaagtcagggtggagagttagacttcgtcaagccaagggggcctcagatgctggctgaggcattcggacctgaataagcgggagccattgaaggataatgaacagaggttattaaaacaaaatat

SEQ ID NO: 21231 - DNA, 201 bp, Bos taurus
caaggccaaggttagataagatgaccttcactttctttctagcaatgagcattccttgtttgcccactggagccccagagaactctgctcctgggactaccctaaagggtttctggtcacatgtctttccttccggagtatttcttgtcccatgttgccaacacttggattctttgctggactgctgctgaggccctgggg

SEQ ID NO: 21232 - DNA, 201 bp, Bos taurus
gttgccagctttgctaagaggctgtgaacaccagcagcagagcttggagaagcgaactgacagaggataaaatgtctgaggtggatccgggtggtccacaggacagcgaccttggaggaggccaatatcacattttatactgttcaaagcctgtcccctctgctgggaaatagcagtgggaaaaggatgcaaggtctggac

SEQ ID NO: 21233 - DNA, 201 bp, Bos taurus
aaaaaaagtctctctttccattaacctcctcagtcaggtgcttttttcttggtaagaagcatgacaataagcttgctaatggctcagaacttgccctagtatggggtcacattcagtggggtctgccctcccaggaaggcagatttgggagagttaccagttgggtttcacttctttggacgcaaagggaaatcatgagga

SEQ ID NO: 21234 - DNA, 201 bp, Bos taurus
cctattcctgacatgacctgtgacacattactgcctgaaatctaaggcttaccagtgaaccttccctatgtgatggatgcttattttttcttactaaagtcaggttattgagctaaactcaataaaaaacctgaacatccaaacacagagaatggataaagaagatgtacatatatactatggcatttactcagccactaa

SEQ ID NO: 21235 - DNA, 201 bp, Bos taurus
cctgaacacacccctcctcaagcaacaaaatacaaagaagctgtatggtactaaaaataactgtgtgcctgccttccgtagggtaaattctggacaaaaggtacaaagataccaaaaaacccaactgctacttttgaaatgcctgaagcaaggtcagagggtcaggagcaaaagctgggttctgtacatgcaatcaacacc

SEQ ID NO: 21236 - DNA, 201 bp, Bos taurus
gcatgtccgttggcagggctagcaacgttataaaaattggataaataggtctgtagtacgtcaaaggtcacagttatgaagacaacagtgtatcaagtctgatggcccatcaaaatcagcactgagagcttggtaatcctagttgggaataccatcagaagagtggcttgctgccaggggcaagttgagataaacggttca

SEQ ID NO: 21237 - DNA, 201 bp, Bos taurus
cccttctttccttctcccttcttcctccctccctcctctgtcctcacttccttctgcactttcatcttttcacattttcccctgttggcttcctttccctcccttttcttcatttttccttcccttcttctgccacatgccttctaaactccagtctaaggagcagcatcaggttgatggataagaatggccagagcttag

SEQ ID NO: 21238 - DNA, 201 bp, Bos taurus
tgtataatcccctccccttgagtgtgggtgggatatgtgaccttcttctaccaaaagaatatggccaaagtatgtgatgtcacttttatatggaaaaggtcatatgttgtcattgttataattatattagatcacattgtattaatataagatgccagagaagactcttgagagtcccttggacatcagggagatcaaacc

SEQ ID NO: 21239 - DNA, 201 bp, Bos taurus
gtgggctacagtccacggggcctcaaagagtcggacatggctgagcaactaacacttttgctttcatttgtacagaaaacttgctgtgcccccagtgcacctgccctctgcctctggctggccctacactgctatccctctgccaacaatatctgcctggctggccatgaaaacatcacatgagttgctagcagactcccc

SEQ ID NO: 21240 - DNA, 201 bp, Bos taurus
ctaggggtgggagaggcgagaggccctgtcacccagcctgtgcagagggtcactcagctcaagcctgcagctgtctgctcagcattagcaccaattgtactaacagggaaatgtctccatgctggcccacgggccctcacccaggaagggagagagctgagcatgctggctggagggggaatggcagacatgtctcctgag

SEQ ID NO: 21241 - DNA, 201 bp, Bos taurus
cggttgacaggaaactagccttgtatttgccctgggagcagcagttctgtactcactaattcaatgttcacagcgatagacactgcctaccttctcagcaagaaccaactgtacacccatacataacagcacaaaaacagggttaccctgtccagttctagtttcaaaaagaaaggaaggcttgaaccctcctataaataa

SEQ ID NO: 21242 - DNA, 201 bp, Bos taurus
gaaattttgaaggcttctgaagatgtcccagtttctttttagatctgccggagataagtgtttctgatttaccatctctgcagtcttagctggacccagcgaggcctctttcctgcttcatcctggccaccctcgtgactgggaaccagctctgaggctggcactaggatgcttggggtttatttctctgaaataaattaa

SEQ ID NO: 21243 - DNA, 201 bp, Bos taurus
atggccccagcaaaacaatcaaatcagatctatgcttgtaagccctctgaaaggaagtgcctaggagaccctttcaatgagacaaaaggacttgtgagaaacttgagggtattggcccacagcgaatgacatgctcaaaaaaatatatggacaaaattctgaagacatagggtgaatcccaccaaaattcctaggaaatgc

SEQ ID NO: 21244 - DNA, 201 bp, Bos taurus
tagcttctgaggtttgttggccatcactgacatcccatggcacatagaaacatcatcccaatctctgccttcattttcacatggagctctccctatatgtgtgggcctgtgtccaaatgtccctttggttaggactcatcctaatgaccccatttcaacttaattatctctgcaaagaccttgtatccaaatgtcacattc

SEQ ID NO: 21245 - DNA, 201 bp, Bos taurus
gcccagagcaagcctgaaacctcaggcctaagtgacaccccttcctggtcacatgtgtggcactcctgtcccacctgccacgtcagcaggatgggaaccacctggccggtgttatcccattgtgcaaatgaggacaatgagatgggagagagacagtgatctacccaaatcactggatggttagcagcagatctcaggcta

SEQ ID NO: 21246 - DNA, 201 bp, Bos taurus
gtgaaagtggccacgagccgctggcagaccagactgcagggaagctcttggggaaggaggagagggtgcctggctcgctggcgatactgggcagcgaggtggaccagatgaagaatgtcctgggcccgcagtggggtaggcagtgaggttcgtgggtaccagccagcctgtagggactctgcatctgcttccttggaagtc

SEQ ID NO: 21247 - DNA, 201 bp, Bos taurus
tggacgattcagtactgagctgtcacagtctggtctggcttaagattcaaattgctccagtgatgaacttggcagggggcctatcagcttgttcctgataaccgaatggtatcactagagctgagcaggtcatagtattcacagcttagtagttcaggcctacagttcttatctgtacataaaacagaggaagaagattaa

SEQ ID NO: 21248 - DNA, 201 bp, Bos taurus
tctggctttccagactcttgaactgcccctgactagaaccctatcagggtcccctcagagttccaaagcctgacttatatatactttatctcctcaaggggaagatacagatggttgtttgcatcatcatgggtacacgtgatgatctctacggggccattaaaaagctgtgctgtgtgcagactcctgtaccctcacagg

SEQ ID NO: 21249 - DNA, 201 bp, Bos taurus
gaatgacaggccagttaaaaggaaattccttccaaaacatgacgttaaccatgtgcattttaaggagaggaaaacaactgattcaataaaggaggacattgttttttcttccttaaaataaaggattaggtctttaattatagattctcataaggaaggaaaaaattctctttgatctactgtatcctcccagaataggac

SEQ ID NO: 21250 - DNA, 201 bp, Bos taurus
tgaccacttgccatcaccgggcactcaggaccactcacagcaagtgagcgactgggcagcagacctgtccagaggctgggggttggatcagatggcccattaggtcccttataactctataattccacacagaggactcaccacaccaatgcctcttggctctgcagacccacactggtccacggagagtctagggggcct

SEQ ID NO: 21251 - DNA, 201 bp, Bos taurus
cgggtttctaggggctaactatgtgtctgtggacaagttggggtgaggcagtaggctgggagctaagattcaggaggacccttctccatgtgaggaatggatctggaatgcagagatgagctcccccgctttccattcctccatggccagccatcaccaatgactccgggactcttggggcttccctgccagcctgctcca

SEQ ID NO: 21252 - DNA, 201 bp, Bos taurus
ctgataccttcgggtaaggtctgaactagctttttttttttttttctcaaaggttcattgaggcaaggatttgattgattgattgagtttttggccaccctagccatgtgggatcctagttgcctgaccagggatcgaacccacgccccctgcacttgaagtacggagtcacttggccactagggaagtccctgaaactag

SEQ ID NO: 21253 - DNA, 201 bp, Bos taurus
gccatgacagagacagagggtaggtcctgccctccagggggtccagacatcctgctcaaaagagaagggtgtcacctgggtggtgatatttggttcaatttctgggacgatgtttgccctgccagtctaacagtgagccagaggcggaggaaaaaaataaagattgtgtcgcgtggatttctcattaggtaactgtcaaat

SEQ ID NO: 21254 - DNA, 201 bp, Bos taurus
agcatgggctctaggtgcgagcacctcagtagttgtggcgtacgggctcagtggttatggcacatgggcttagttgccctgccacatgtaggatgttccctgaccgggggttaaacccgtttcccctgccttggcagacagattcttaaccactgaaccatcagggaagtcccctggatctttttaacttctgttttacct

SEQ ID NO: 21255 - DNA, 201 bp, Bos taurus
atcccccttcaaaagccagaagatgactctggtccacccgcagttgaggaggaggttttcagaagccctctgaacaagccacccatgtgttgcctggccttgggcaccccatcctgctgtggagcaggactgatggcagccttcccactcccaggactagtcgaagacctgtgccaggctggggactctggtggggccagc

SEQ ID NO: 21256 - DNA, 201 bp, Bos taurus
ggaagaccagataacttcccaagagtagcccagggcggatgatctaacttggagagaggtagttccatgtttgttgggatggcctggtcctgtcatgggtactagggtggagatgccagggcttggcagacagtcaggaccaaggacttaggaaggccctctggttcactggaggtccagcgtcctcatcctgtgactcac

SEQ ID NO: 21257 - DNA, 201 bp, Bos taurus
gatgataatcaaaagcttaaaaagactgttgtaaagattgagtgaataatataaatgaaaccaactgccggtgggtgttagggccctgagtttctcctctgtttaaccgtgtacaaacgtcttgagctgtgtgtactaaggatttggctcagaggtatcactcctgtgttcccttgtgcaaggccattgtatctgttaagc

SEQ ID NO: 21258 - DNA, 201 bp, Bos taurus
gctgcagttcacggtgtcgcaaagagtcagacacaactgagcaactgaactgaactgaagagttctaactcctaagaactgcttaggagtaaggaactccttgagtggggctgctggccagtcatgtagattacgtgttaatttcttaatagtcatcaggtctgcaaagtaggagaggctagtgctagaactttctgccct

SEQ ID NO: 21259 - DNA, 201 bp, Bos taurus
aagaaaaaaagaaaggctcacctttggcccactgaagtcctaatttcagatccaatttcctgggccctagggtttcaggcaattaagctgggcctgtgacgggaggaagcaaaagctactgatgtctgcatgggaaggaagcaggtctgactgagaccagcttatgaggacggccccagagggactaactcagaaagcgct

SEQ ID NO: 21260 - DNA, 201 bp, Bos taurus
gcatcagtttaaactaaaaccaaggtcaccttgctgaggcaggcagcacaattgagtcttatttgagcaaagtctattccttctcttgtctcatgtgaaagagtaacacctaccattaatgtaagtagtattctaccatgccatctacaaatgcccttaagtcctggctagttggcaacagattttattagatttttctta

SEQ ID NO: 21261 - DNA, 201 bp, Bos taurus
gcacgcatctcttagtcaagatggatgttactgaaaagctgtctggtagaacatcccttgtcataactctcctttggcctccaaggaacctttctatacatgtgtggtcagggaggtctcctgactttgataatgagaaatatggggtctgggtggggcccagcctcattgccttaattgtcctgctgttctcatctcgga

SEQ ID NO: 21262 - DNA, 201 bp, Bos taurus
tgcagcacgccaggcctccctgtccatcaccaactcccagagttcactcagactcacgtccatcgagtcagtgatgccatccagccatctcattctctgtcgtcgcttaaaacaaagacaggccactatgtacctattagaatgaccaaaatagaacagtgacaacaccaaatagtggcaaggatgtggagaacagaaagt

SEQ ID NO: 21263 - DNA, 201 bp, Bos taurus
tttattttttaaaaactctgagacatccagcaatcaataaaagtagaaccaattatctttttatttcctctcatgttcaggaaatgaatcagcagccccaacagtgagaggctgttctgtttattatgagtcaacaacgcaagcagtgaaatgtctgagagagttgtggggatttaagctgccaaactctcgtttaaaatg

SEQ ID NO: 21264 - DNA, 201 bp, Bos taurus
acagtgaatgtagttcattgcaagaaaaaaaaacaactgataggccccctttaggtaaactggagacacaagaaaaacagcattatatattttatgagcacataccaattcagggccatgtatcaaagtccttggagcatgtgtccatggggagaaaatgagagcaagaatttaatgataaagaagagaaaaatctaaaga

SEQ ID NO: 21265 - DNA, 201 bp, Bos taurus
atattgattctgaaagaatgaacatttaataatactgagccttgcaattcatgaacatattatcatcccatttatggaggtcagaaatatttaatctcactcagcaatattatgtattgtagtttttagcatagcagtcttgactatcttatgttcaacttattcctaattattgcatatttatactattataaatagatt

SEQ ID NO: 21266 - DNA, 201 bp, Bos taurus
agcaaacaaaatccagctgaagcccttagtgggtaaactaaggatttatccttagtgtatatctatagagataagcaaggccagatagtcacctttctttggttgattttatgtctggtgggggaagagtctgttctgactgtggagagacatgtggccagtttccacttggtctgagtgattcacaaatgttgctctgca

SEQ ID NO: 21267 - DNA, 201 bp, Bos taurus
tgtcaccgggtgttgagaacccacaaggggaaaaagagtggaaatttctatcacaaacatatatagatccatagagagtttacaatgtcaggcttgttcacctcctaatgatgcccctgattttcatactggacaaaaggagctgttgactagtgtgattatagtcaccagatcctcatttctatgtctgtaatccattta

SEQ ID NO: 21268 - DNA, 201 bp, Bos taurus
ctgcctctaagggttctttttctgctgcagtgatgctgcagaaaagcgctttaaaacattccctgcttacaaatgcactcagttgaatctggaaatcccaacaagggactctaatctccagcaaatattctattcttgacaactaattccaccgaagaattttttttcttagatctaatgggatttaacatcttttgtgat

SEQ ID NO: 21269 - DNA, 201 bp, Bos taurus
gatcggggagaatgaaccactcacgtcagtcttgaataaagtgatagcaaccaaagaagtgaatcacaaaggacaaggtactcggccctgtgtaccaagcagggagggggctctggtggggctcgggagtggtggcgctcagagctgagtccttggactctggccctttcattatctttctctgatataaaacagaccctg

SEQ ID NO: 21270 - DNA, 201 bp, Bos taurus
gctgtccacctgaaaccatcataacattgttaattgactatatttcaatacaaaataaaaagttaaaaaaaaaagaatcctgcaaaggaaaagaaactatccttggtttataagcagaagggaagctagactgcagtgaagtagaaatttctagaagaaatagttactatagttacgacttcttcctcagaagccaggttc

SEQ ID NO: 21271 - DNA, 201 bp, Bos taurus
acagggaaagaatgttgactgaatgatataattcctaagacaagagtatccaaaaaaagcagtatgttttttaatgcttcctttacttttcgtatatgaatgttgttctctttctccatcagaaaatagaggaacaatgattttgactggggaacctttaatttgtttaaagcagatttcaaaatgggccagactcctagg

SEQ ID NO: 21272 - DNA, 201 bp, Bos taurus
taggatatgttttatttcatcccttttcctgcatttactcatattaatgtcaccgcattcactggtaatagtcaagcttggaaatagcccgcatagccacataaatactagcctgaaacacaccgcctgccatgcattatgaagaaagcagggaatggaatccagtggaagtaacagtttcttttggagttcttactaaat

SEQ ID NO: 21273 - DNA, 201 bp, Bos taurus
tgaagaagaccatgaaagggcggcagctgagtccatgagatagagcaagatttggagtcacatagatttgggtttgattctcggctctgctgctcattacccagatttcttactctgtcagaatggtgttctacaagatgagacgaatgatacctccgtcttagagttataatgaaacttgatattgtcataattgttatc

SEQ ID NO: 21274 - DNA, 201 bp, Bos taurus
aggaagcaactaataaatgctggctactattatcttattccataggagtgccttgggtttcacatagtacagcttgtatttacttaatacaagatggacagattagctgtcattattcttctattttttgtgcgaaatttcatgagtttttttcttcaaaataaattgaagaatgattttatatttcccacaagaaatata

SEQ ID NO: 21275 - DNA, 201 bp, Bos taurus
catgagggaggaaataaaaatctagttggattcacatggcttgttcacacattccagaattcacccccaagtggctctgaattttttagaacacataagcactgactgtgactttgaatttcaggacccagtttgtggcttcacacacagatttttctcctttcacccaatattcctgggccactggcagtactcagtact

SEQ ID NO: 21276 - DNA, 201 bp, Bos taurus
agagaactagcccagttctacaagacatgctggtcccacgatgaaaacaccaaagcagctccttgtagggaaatggctagagacagaaggctacagggctgtttgctctcactttgtggactctgtggcacatgaaccacgctgactcccaaggtgctacagcttgcttacctctgaatccgtttccattgccactggagc

SEQ ID NO: 21277 - DNA, 201 bp, Bos taurus
aggtcatggagtatcagagatttaaggccctttctcttcctcagagtttctgactctacaaactggatgacatgtgggtttgccccagacattaggagaactgaaagaacataccaggcttttggccctttccttcccaaaaagtgtgactacaaaattgtgcaaaaatctttttacaaaacccagaacatggaagcaacc

SEQ ID NO: 21278 - DNA, 201 bp, Bos taurus
cacagactgtagatctattttctgtctctacacccacccacttcgtatttgctacgcccctctgtgtctctcccggccataatgcgccccaccatcactattgtgggagcagtaagtgagaatctcgtttcaatctctgctcccagtattccaccacggccggtggttagaccgaagctctagtgtccccgcgcctcttat

SEQ ID NO: 21279 - DNA, 201 bp, Bos taurus
tccactccactctccccattggcccctctccagccatgaggctgggagagcaggtttagacttgaaacatagggctttgtggccagcatctggttcttctgaaagactgtaccctgtgttcagtccctccgttagcagagcccacctggcaggctgggggcctcttcatggggagggaccctcttgagacggaggctaggt

SEQ ID NO: 21280 - DNA, 201 bp, Bos taurus
gtctaggtttagttttcttgcacccgaccactgcagcttcatgagcccctccctaacgtaaattcatggatatggtaaattcaaagagggcaaggcatggggccaggagtctgtcctatgaactctctagccgtgtgttaggaggagatactggtgggatcctgggcagtttctggggaatgtttcctcagatgtgtgaat

SEQ ID NO: 21281 - DNA, 201 bp, Bos taurus
agtcacggcctccgccaccgattgctcatcacagacagacagacaagtaaggattctttagctgcttcccaaagggccatgtctgttcggagatgccaccaaggagtaaattgccctgggctgcactagtcattggcacctcattgggtctggccttggggtgttgcattcagatatatgatgtttgactgagatgctgga

SEQ ID NO: 21282 - DNA, 201 bp, Bos taurus
aactattctgtggttaagagaattccggggtaggggcccaggtttaaaccctggtcagggaactaagatcccacaaactgtgcaaaatgatacctcccccaaaaaaactattctattattaaaattaaaaaaggaatgagatgagagtgaggatttgttactatcctagccactccagccactaagcccagatatccaccc

SEQ ID NO: 21283 - DNA, 201 bp, Bos taurus
tgggttgggaaaacccgctggaggaagacataatgaccagaggagcctggcaggctgcaacgaggagcatggagtcgcaaagaggcaggcacgactgagtgcctgagcacgctccagtccttttaccatgaatttgcccttctcagctccttattttggttcaagtctcggctggttggattttgtccttgcctagttttt

SEQ ID NO: 21284 - DNA, 201 bp, Bos taurus
gccaggcacaaggtagtgacagaaaggttgtgcctgaataggggtggtgctattggggaaggatgggatgcagaggggatgggattagagatggagatattgctgggatgggggccccagaagagaggggctggaatctgagtacattagaagagagatacttgagatcttgggttggagattttacaacaggctgagatc

SEQ ID NO: 21285 - DNA, 201 bp, Bos taurus
tttatactaacaggcaaagggccaaatgggccttactttgattccttttatagtctattagcataaggccctgagcacaggaatggggatggggcaatgcacaggaaaataagcctttgctcacatcttgatcctcggtccataccacattttttcatttatggacatcacattatcaatgtgcttatatatgcagacagt

SEQ ID NO: 21286 - DNA, 201 bp, Bos taurus
gccctctctgtgagaccatatttgtcactttcttctctccctccccaccccacctgccttctgtgctacatgaacagataattcgccttcattttttcatccttccttttagaggtaggagttggacaatgaaatagtctgtactataccaacacctcctgctgagattgcatgtacagatggattacacgcccatgagaa

SEQ ID NO: 21287 - DNA, 201 bp, Bos taurus
ctctcaatactatacactacaattatatgtgtgtctctcacttcactccttctactaaattcaatagcttggaccatgtctctatctttgtactgcatgcctagcaatttttgactattcaaaaaaatatttggtgagtgagtgacaggatagaaaatgccatcccacactttagctattatgaaaacctttaggctaaaa

SEQ ID NO: 21288 - DNA, 201 bp, Bos taurus
gaactgtcatgcccagagtgaaaagctcctagagatgagttctgttcagaattacagaggtttacatcggagtctcagtttgcttaagagttcccagaatgatgctgacctctttttaaaagaggtaacagaagaggaagcactatagctgttgcgtttttttttgctgctgcttttttgatgttgtaatttgtttggcta

SEQ ID NO: 21289 - DNA, 201 bp, Bos taurus
tgctttggcttttcagcgttgttcagaagaacaatatctcccagttggggattttcaacagaagcaaaggtgtttccgggtgttaattggtgcctgaaaagtgacccttaaaatacctgtttatctgcttctttttaaattggagtcctacgtgctataataggtggcccataattacttcttagcccattgttttttttc

SEQ ID NO: 21290 - DNA, 201 bp, Bos taurus
atggtctcatccacgcccttgcccacctctctgctaacagcccccccaaagtatagtgtcccttccaggctctggtgcaggtgtgtacgaagcttcctgcctcatctccatctttatctgaatgtttggtgtcatctgaatttcaaacaggcctcaaaatgaagtcattctgttccttgctccaacctgattcctagattt

SEQ ID NO: 21291 - DNA, 201 bp, Bos taurus
tggtttcagttgctctgccctatgagagcagcgttccaccgagtgcctgggaggatgagaataaaggtcaactatttgacacgaagacctagaaagacttgcctgggtttcatagtgggttcctgaattgaaagggaactgagatgctatttaagaaactgaaggagaataatggtctaggatcttgacaggactagacag

SEQ ID NO: 21292 - DNA, 201 bp, Bos taurus
caggtggtaggagagaggacagtgggagcttgtacacagtttgactcatctaatgtgaaaggaagaaaagaagctgcatttaattgaggtctagctgcttaaaggagaactaattcccttctattcccatgttctaggctatgtccctattttaaaatggtgctttccccaaactgtagaataataaattcaaatgtactc

SEQ ID NO: 21293 - DNA, 201 bp, Bos taurus
ggataccttcactgtataaagaattctagttggcagtttcattctttcaacattttaaagatgtcattctactgtctcctggcttctactgtctctaccgagaagctagtgatgacctaattgttgctttattgctcctctgaaggtgataatttcctctcatttgggctgcttttgaaacttgaagtcacatatattagt

SEQ ID NO: 21294 - DNA, 201 bp, Bos taurus
gtagacagctttggccaacacagtatcaaccaggagaccaaagcagaggaggactcacaccataccaagaccagctggaagtttctccaaggcctttgccaggaggatgggtgtcagaggttaacacccagagccccgtcacaccctctttctgaacctctgcatgttccacaaaggccagcggtgcctagcaaatacttc

SEQ ID NO: 21295 - DNA, 201 bp, Bos taurus
accccattgaccaaaatagaccaaaggactctcttctctggaagagctctgacaaaggaaatcctaggggaaacgagatgactctttcctatattatcatatctttcttcatgtctattcctatatagaatacttttctgggtatctaggattttgaagtgcaatgaaataacttgttagcttgcccattaacttgctaaa

SEQ ID NO: 21296 - DNA, 201 bp, Bos taurus
caggtgttctggggggaaagcctgaataagcaattgaaataaagtgtgatctgtaagcagatttaccattgtaaacagaaccttgtaaacagaaccttcagtatctctcataaaacacatcccatgaaagcattttccctaaggaaaaacaagaagagtgggactgaatgacatctcttgttctgaagcctctttgtccta

SEQ ID NO: 21297 - DNA, 201 bp, Bos taurus
tgactgggatgaaattctagatggttctcctgggcatcaatttagaagttttctttaaaatcttgtgagaagagatgcctcacggcaactttataagggtggttggtgtctggcgaatgtctctcaaggattttccaaaccagctcagatttcagaaaggacagactgaagggataggaaattttgtaaccactgttaact

SEQ ID NO: 21298 - DNA, 201 bp, Bos taurus
ccgagctgctggaggggaaatggacaaagagcggggtgggcaggggagctggggcggggggccggggccgcgggaacccgcacccacttacaaactggcccgaaggcgcacccaatgcgttccactgatgttgctttggcagaattgtgttgtatggacactgctcccttccaggaagactggaaaatatcgctttttctt

SEQ ID NO: 21299 - DNA, 201 bp, Bos taurus
atgtggatgttgtcctagctgacctctttaatgaaagtcctgaattcacccaacattcctctgattgcagggttgggaaaatgccttttggtaaaatcatagagtggtaaacatcaagagactttgggtccatataaacccatctctctactcgaggacatagacttcttggtgacagagctagggctaaagtacttagag

SEQ ID NO: 21300 - DNA, 201 bp, Bos taurus
tgttttataccaacatgtttgcagagtataaacatcacagtgcaaactcttgcacccaagaaccctgtgctgctagtggacaatctttggaaaagtttgaatttgtaaactgataatacatataattccatgggctccatatggttcctgttatgctgagggaactatacacatttgccttgccccaggatgaaaagataa

SEQ ID NO: 21301 - DNA, 201 bp, Bos taurus
aatatgaagtactagctgacaaagtggacaggatgtatgtaaagagaaaaatgtgacctacagacttcatgacagctctgcagctggagaaaatgcctcatatcctttgtcttttcatttttctaaaatgcgggctgttagggtaaattttttttctttgaggcctgagttaggggaatgagcactttccaggaaagtatg

SEQ ID NO: 21302 - DNA, 201 bp, Bos taurus
gtgcggatccttcaacgttcagtttacacgtgattctcattacacagtccccaagggctgtgaaaacattttcttgagctgcccccaaacatccacaactgtgaattggtcagtgccaattggaaaagcactgtttgtttaaactgcatcccgggtagttccctggcccgatccctgcttgggctccccacagctctgtcg

SEQ ID NO: 21303 - DNA, 201 bp, Bos taurus
ttggggaagaagagagaaaaggaggaggggagcctcagaccaatgtatacttttttttttttttttttgcgaaatgcacacccagtgcaaattacacagtgaagttagctgaggggcataatttgttacacaaataaacactatttggttcagtctgtggccactgaagttataatgaaaatctaaaaacaactgtaatgc

SEQ ID NO: 21304 - DNA, 201 bp, Bos taurus
agttggatttatgaaaagattccgatttctgggattttcacaaagaaattgaacaaaggtggtaaaatagtgcaaggagccatcaggttatgccacatgcgagtttcaggtgtctctgtgcttgtaagtgctcagccatcaaaatttacacaaaacagctttcagccagaaaagttctttgggatacaggatgcaaatgtg

SEQ ID NO: 21305 - DNA, 201 bp, Bos taurus
tggcctggggagtagcttgctgaggttggagcaaccaaacaagggacagacccctctgagcctccatgggatatcctgagggtctcctgcaactgtggctgtctggggcaggaggccccaatctccagtcccctgacaaggtcaccgttcataaaatgtgtgagttgctcctgacatgacaccctctctttgtaaaggcat

SEQ ID NO: 21306 - DNA, 201 bp, Bos taurus
ggattctggagacttgaggtggtggaggagaaggtcaggcagaattggcgtggagctgtcatgtcaatagacagtcttcccacagagggacaacccaaccatccctaaaagttctcacaggacatttggcagcatctccagtaactcagccaatattactcactactgtaccaacctagtgtgcaaaaaaatatatataaa

SEQ ID NO: 21307 - DNA, 201 bp, Bos taurus
aggaatgcgctagtgactataatgttatgaaagctacttgaagtccttgacacttgagtgtgcccggccacaagagtgcacagaggttgggagagcatccggtggagagctcgacaactcacgcttcacttcagcacttcatgtgggatgcagtatgggactggagtagttaggctgggggagggcctttgagcctctcta

SEQ ID NO: 21308 - DNA, 201 bp, Bos taurus
atgttttctcatctgggtgtccagctgtttcactgacacttgttgaaaaccttccacatttaacttccttggcatctctgtcaaaaaccagttgattacacgaaaatatctagatacgattctgttccactggtctatccttttgccagtacctcactgtcttgaatttgattactgtagcttaaagtcttgaaatcaatc

SEQ ID NO: 21309 - DNA, 201 bp, Bos taurus
tctacatccaaatacatacaagggaaaaaaacttacaacaaggtgctaggaggggcgtacttgtgatataatcaaatcccatacccctcaagtaggggactcagaaactgaagaacaattacattgcagaagctcctccacaggagtgaaagctctgagtgccatgtcaggctccccaccctagggtcctggcactggaca

SEQ ID NO: 21310 - DNA, 201 bp, Bos taurus
caaaacatgaaatacttggatataaatttaacaaaatataaccaagaaatatatactataaactgtaaaatactgatgaaagatgttaaagacttagacacggacagctacactgtgcttacaaattagaacactcaacactgaacactaaattgtccccaaattgatctatagattccaatcaaaatcatttcaaacaat

SEQ ID NO: 21311 - DNA, 201 bp, Bos taurus
agcccagctgctttctgaataatccctggaacaactgtctctgtgggcgctggaggtcccaaggccttctcatttcttccgacttctcttactcgactctcctctagtctgacagtagcaggacaccgtgtcctcctagtgaaggggatctaacttcaactactttccactcaaggaatcaatcaaaatgtttccttctct

SEQ ID NO: 21312 - DNA, 201 bp, Bos taurus
ttctcatgaggacagaccatctaatgctgtggcatcagccaaaatttggatgtggaaacctgtcctcttccacctctacccaggctccatgctacctttggttctgatgagagttccacccagggaacacctgaaggtggaggacctgggctggaatgtcatggtgtatgtttcactcagcatctcagaaacactatgggg

SEQ ID NO: 21313 - DNA, 201 bp, Bos taurus
gctatgttctgtgctacagtttgttcctttgtgtgatccagggatgaggtgggagagaaatgagctgattatcgagggcacagatgaatccaccagtgcagagaagacgagactcctggatcaactgcactgtggggataagcgggtgggactgtggcccggcaggccctctggaaacttaatactgcctgggacggaagg

SEQ ID NO: 21314 - DNA, 201 bp, Bos taurus
aaattacccctgggctcatccaggagcaagcctcctgaggccaaaaatgggacaacttcttgaggaaacatattaatcttgaattttttattttcctctaaagcagggatccttacttttttcagtgccatgaactacaatggcagtctatagatggctacagcctccttctccaaataatgtttttaaatgcaagaaata

SEQ ID NO: 21315 - DNA, 201 bp, Bos taurus
acagtcaagagggttggaaaaagcagagagaataaggaacgagaaggatggaaaatctactgtgactaatcttaaattctccagggcctttacacattattaagagcttagaatttcagcattttgctttttcctttaaaagtgtgacttaaaagcttattaattgtgtgcatggggagaagacagtttggggattcttct

SEQ ID NO: 21316 - DNA, 201 bp, Bos taurus
agcacctataaaagaacgtgaaaatcagaatgcttttcagtttaagtcacacaccaaatctagttcttaaaatatttagccatcttcatctttagtgcctttaatttaagaagcaatactcaacttaaaaggtgctctgtaattacctcctttaccaataaataagatattcttaaaaagaaaacaaagtatctcatttta

SEQ ID NO: 21317 - DNA, 201 bp, Bos taurus
caatcatattacacgtatgtatcaaagtaacacattgcatagctttaatttatacagtgttgtaaggaatatttgttcaattttaaacatagagtttatggtagaagtttttagtcatgcagtatcagcttaacttctggagaccaaggtcagctttctggggtgttaaccatgaagctccagtaaacactctggatactg

SEQ ID NO: 21318 - DNA, 201 bp, Bos taurus
ataaatcagtataacccctttggaaaagtctttaaaagtgagagacaatgaagcatggtccttgagtcaaatctggccattaccagttttttgtacagccaaagagctaagaatggttttgacaggactgacagaccatgtggcttacgaagtctaaaataagtactatctggccctttacatagtttgccaactctagta

SEQ ID NO: 21319 - DNA, 201 bp, Bos taurus
atgatacccagaggcatctgagtcagacactcagggtgtaactttggagtttgttcagtggccaaaattttcagaatagcggatgttttcatattcaattcgagtcatggatattgcgctgatacggtctgtgcaacttagatcctactcttaggcatgcagagaagtaagacatagtctaaagtgaaaacaaaagacact

SEQ ID NO: 21320 - DNA, 201 bp, Bos taurus
agcctccacacccggaaccacttggggcacgcagagcagtcggttaaactttaacccaccttgcggccagcatcgcctggtcctcggacagcattccagccggttggggtgtatctttttgtatgtgagggaagggaagaaccagtgcggaaatgcaaatgcactgtcgtttagtgacccatattgcgaaaaccagcaaaa

SEQ ID NO: 21321 - DNA, 201 bp, Bos taurus
aaatctaatggaggagaaagagctgcttcatggaactccatggtcatgaggtcacatagaggccatggacctttggaggagctgctgtgggcctacatcttggaggggcatgggatggactcccatcacactataccatattcaccatgtggcagttctcactccaagtctggtgaggcctctgtgacagtctgggggctc

SEQ ID NO: 21322 - DNA, 201 bp, Bos taurus
agttccttccttttttctgtctctgttgtgtggatgaaccacatttacgtcatggattcttgggttactttccccttgggctattgtgaaatagccaagtgaatagcactgatgaatagtgctcctgtgaacacggttgtgcaaaaatcttttgggagtccctgttttcagtcctttgggatacggacccaggagtgggat

SEQ ID NO: 21323 - DNA, 201 bp, Bos taurus
gacgcggctttggcttcaagtcagccctcatcagacaccagcggacacattcaggagagaagccatatgtgtgcagggactgtggtcgtggctttagccagaagtctcacctccacaggcataggaaaaccaagtctggccatcacctcctgccacaggaactgttctcttgacatttcctttccttccctatgagtgtct

SEQ ID NO: 21324 - DNA, 201 bp, Bos taurus
ttctggtaccatctcttttcagatgtgtgcacacaccccaaggccacagtcttgcttgtcctgatgtggctttgcacatttatgttgatcatgtgatctcctcagttaaccactggactggcatggccatgtgggtctgggctaccaccatgatctctggaaatcacagaagacctcctagggtaactgaacatggggagg

SEQ ID NO: 21325 - DNA, 201 bp, Bos taurus
tcctcattatttgcagattctgtattttcaagtttacttataacctaaaatgtgtttgtaacccccaaatcaattctcacagcattcatagacatgcctacagcagtcaaaattttgatttgctgattcacatgttccctgatgagcttgtacaaaacaacactctgtctaatgccccagctcatactgtaaacaaatgtc

SEQ ID NO: 21326 - DNA, 201 bp, Bos taurus
cggacacgattgaagcaacttagcagcagcagtagcagcagtccccaccagaaagagccctgtgtctactgctgatctgaatgggagcagaggagagaaataaccaaaatatgaatgggaagctccctctggggcactaggtgaataagccataacgcacagccctacctcaatgcttgcctggaaatctcagacccaaaa

SEQ ID NO: 21327 - DNA, 201 bp, Bos taurus
caacagtgtgtgaaacttcatccccagcaaagcatgcagtggggagtgttgatgggagtgggggtcccttcagagttagacgagagaattgctgggtgtcggggcctccacaggaagtggttcagctaaaacagcagcagtggctaatgtgatcagccctcactggtcagaatgcatcgtaagactgagcatagtttagag

SEQ ID NO: 21328 - DNA, 201 bp, Bos taurus
gtgaattttagatattcgaagttgtttccatgacaattagttgtaggaatgtgggatcatttttcaaaagagattctagatcatataaaagaatagagacgtacttagcctccaagttctctaattctacaggagaacataattttagatggcatttgaaattatttacataatacatgctttattatgcgctatgaagaa

SEQ ID NO: 21329 - DNA, 201 bp, Bos taurus
tgcttccctttttaaaaggtaaggtccaaagcactgcaggttgttcctattgtttcaaatggaatagtcctagattcaagactgggtgggctttagccctatatttctctgcagaatctactcttcctggagtctggtaggaacgggctctgaactaaggcactgaatcttgctcctgacagagtgtgtaaaataaaccca

SEQ ID NO: 21330 - DNA, 201 bp, Bos taurus
aaaagctgggaaacattccaaagggttggcctgtgtcactggagcacctttttttcttggctggatttgcattttcagagccttagagttttggcctggcaaccctccagggtggcggtcacaataatgtagacctgtcagagacatctacacagcccagccactctcatcagtggggacatgtgagaggagaagagcacc

SEQ ID NO: 21331 - DNA, 201 bp, Bos taurus
taggtaagaatcacctggtaggcctaagcagatatagcttatgcaaactcagagggctgtggagggctgagaatgtgcccacaggacaggactctgctggaacttctgctggcccggcctggaactttgtgtcgccttctagacctcgggtgctacaggggtttagaggagctcagaagggagtggcagtcgctggcttgc

SEQ ID NO: 21332 - DNA, 201 bp, Bos taurus
gtattggagtttcagcttcaacatcagtccttccaatggacacccaggactgccccatgcatcatgcacacatatgtctgaggcatccttggaggatctctgggatggcccagtaggcaatccctggcaacactgctctctctggagaagtagtgctcttatgagcatggtgtgttttggagggatgggtacctgtcagat

SEQ ID NO: 21333 - DNA, 201 bp, Bos taurus
tcaccacatagtccttcaggtccatcgtctccccccgcatcctcatctgtgtgcatccatcccagctgtgctgtctctcctcatgtgcatgaaggcctcctgccaccgcgtgccctcgttggacttcctgcgagagagggaccgaccaggctgcggggctaggcaccctggcctcctccacccccgcgacgtccaccacag

SEQ ID NO: 21334 - DNA, 201 bp, Bos taurus
gcaaagagtcagacacgactgaagtgactgagcacgcacacataccttgaaagcatgtagaacagagcctggaaaatgtcaggcccccttttgcttttggcggctgttcagttgctcagtcgtgtcggattctttgtgaccctgtggattgcagcacaccaggcctccttgtccttcactctctccccgagtttgcccaag

SEQ ID NO: 21335 - DNA, 201 bp, Bos taurus
agttgagtcttagtgcttagaattgccacatttggtgatgacactttacttgccctaggaaataagcaaacaacttgctccaaggccataggatacctcaagattcattcagtaagactctctttaactacaatgaggtatctcctcacactgtttagaatggccatcatcaaaaaaagtctacaaacagtaaatactgta

SEQ ID NO: 21336 - DNA, 201 bp, Bos taurus
ccatgagcagaggagcctggcgggctacagttcacagggtcatgaaatagttggacacgacttagagactaaacaacaacaactagactataatccccatgagggtagcagtcttgttcagtgttgttatttgccaccatctagaataggtcctggcacataagtggtgttcaataagcaatggttaactgaatacataaa

SEQ ID NO: 21337 - DNA, 201 bp, Bos taurus
tgacttgtccaacttggaggccaaaaaaccccacgtagtgttctcctgcttctcttggaatgctcactctttcttgggacccagtggtgagctctgagacgcccaggacagaggccacacactggacccttggtggacagtcccaaacaagcccacctcgattaccacctgcagctttctgagtcctcctagctgagtgtc

SEQ ID NO: 21338 - DNA, 201 bp, Bos taurus
gtgtgttggttgggtttccgttggttattctgtgtatacacactagccaacaccctgaaacttaaggtccaagatgtaggctctcttgggctccagtgggaaacattaccatgaaattacttccattccacaaaaatccactcacatcatgactgaaaaagctgatgaagacacgagttttacctttcctgttctcattct

SEQ ID NO: 21339 - DNA, 201 bp, Bos taurus
tgtctgaatatgtcacctcagggtgagtgttcttgaatgccagcactggatctcattcagcactctgtcacctccacagggcctggcaggctagtcactgattgcttgctgactgaacagatgactgtcttctctctcctccttttctaggtctggaatgaggcttcaaggaccaaggaactgtggaggtgagtgaaggaa

SEQ ID NO: 21340 - DNA, 201 bp, Bos taurus
tacttttgagaataccgtggtataacagaggaccaggaacaccagttacaattttctgtggcatattatgcatggttcaattaaaatgtcctgtcaaacaacaacctgagaattaacatagctaatgtccctcctgaagtacatgaattctgatagtaggtttaatgtgatacctatacagttagggtattctgggaagaa

SEQ ID NO: 21341 - DNA, 201 bp, Bos taurus
ttttctggaaatagttcttaaaacatggatattgggaaatatgaattatcttgaatctaacacctagtaaatacatttaatgaggtagcttagttatggtctctgaatctagaccccaccttaaggctttctgcttcacctgtatttctgaaagttctgcttatccctcagccctcggttaaactacttctatctggtatt

SEQ ID NO: 21342 - DNA, 201 bp, Bos taurus
cttagcatatcagatggacattgagttggatctaagcatcatgcaaaatagctagatgtgttgctaaccattctctcatcaacgtaagatagattaatagcttgctaaatgcaacaggatttaatgtgagtaggcatagcaatgacctggcttaattatgatattgttggatacagtgaagacatcctaatataccatcag

SEQ ID NO: 21343 - DNA, 201 bp, Bos taurus
atactagatatttcaaccatttagagtaacagaaaaaaaaatatgaattctgtctatcctagagatgacaagaactgtccaaaaattcttcaaggtgaatatgacctatatttaagatgtgcagctgtactctaggcaggaagcagatatgtgaggacagggagtcagagcgcaactcaaacctcccccttccctgcctcc

SEQ ID NO: 21344 - DNA, 201 bp, Bos taurus
catcctctgtcgtccccttttcctcctgccttcaatctttcccagcatcagggtcttttcaaatgagtcagctctttgcatcaggtggccaaagtataatccatattaattaatggtatataagggcatgtgagtttgatccctggtttgggaagatctcctaaagagggaaatggaaacccactacagtattcttgcctg

SEQ ID NO: 21345 - DNA, 201 bp, Bos taurus
gcaagggaaaagaacttgaatattgcagcaaaactaggccatctattcacttcaacaggaatcgatcgcttataatttatctgcagagctccctgagaaaggagagggaaagccacagtatcattatcatcatcgtacaattacttatgtgttaaatgggtaataaagcatgatgatatgcattgtaaagtagaatggtag

SEQ ID NO: 21346 - DNA, 201 bp, Bos taurus
ggcatggaaatccaatccagtattcttgcctggagaataccatggacagaggagcctgccaggctataaagagttggacaggactgaagtgactgagcatacacacactcaatcagtatatattttgaattatttatgtgtactgattaattgttgcttttgttgttcagttgcccagttgtgtctgtctctttgtgaccc

SEQ ID NO: 21347 - DNA, 201 bp, Bos taurus
ccatgtacatacaccttagggatacctctttctgttaacttggctctcccaacaataggcagctgctgcctcatacccaagataagatatgggatgattggattatttctctaagctctcttattgtgctcttagatttcatcaggtcttgcattagtttactgctgctatataacaagctaccttaacttagaggtatat

SEQ ID NO: 21348 - DNA, 201 bp, Bos taurus
ataattagtaagtttaataaatatggctttatgaaatataaactattcaagataaatatgtcaaataattatggtgttaaattgtttccagctcccctcccacccaatccttggtaattagaaaatagaatgagcataaaaatggcaaagtatgcattactactgaaagctagggaaactttccactcaaattttagaaaa

SEQ ID NO: 21349 - DNA, 201 bp, Bos taurus
attagataccacaattcagggatggccagcctgcctacatgctctgggagcagctgcacttccctctcaggaaagtaaataatttacttttggagcacccactgtcattcgttcaccacctgactttaaggacttactttctcacaaatccatgacccttctatttccttcccacatccaactaattcatgtcacccttct

SEQ ID NO: 21350 - DNA, 201 bp, Bos taurus
cagatgacaactatccatatgatagattaggctgcaatcagtataccaagaaagccagttcatcaaaaattagtcaaatgttgctaaagtcttaatatatcccatgacttacttgcatactgaggtcttctgaactaaggcaaatgcaattcacttccaaattgctctccattgttttcttttgtactctggaacagattg

SEQ ID NO: 21351 - DNA, 201 bp, Bos taurus
attttgaatcaacagagaatttggggtctgcaaacatggcaagctacatacaagcccctgcactgcaagggaaggagagcacttttatggaaggaagagggaattgtgagggctgcagtccacaaagagcccttggtttttcattggcccagttcttgcaaaagaaaaggagtctgtcttcttcctcttgggctctgcttt

SEQ ID NO: 21352 - DNA, 201 bp, Bos taurus
tttataatctctcataaccctgttccaattctgtgatgtagttattaggatcatcacttaaaatgggacagaagctggggctcagcttagttgcctaaggcttcaaagccaatagttgctgggatcataacttgaagccatatttcataaactctgaaacttacatgttgttgcttaattcctacattgtaatgcttctct

SEQ ID NO: 21353 - DNA, 201 bp, Bos taurus
ttgttttttgcacatgtctaatgattcagattcttactctgacattcttggtaaaagagataggcctcgatttgaagtaagttgtgaattaatgctttctcgtcagaggtagataaaagacttctggtaaccctgactgattttaacattgaaggcagccccaccctccaattcattgtgcaatggggaagtggtttgctg

SEQ ID NO: 21354 - DNA, 201 bp, Bos taurus
aatgcaatcattctgttgagtgaggggactggtccactgtggaaagtgaatgcaatctcctgttgcttgatttttatatccactgtgagtcagaacacttgtatacccttggtcatatcagcagtgcttctgctttttttccccctgcagtctcagttttggtgtatctggatgtcttgtcacatcatagaagaacaatct

SEQ ID NO: 21355 - DNA, 201 bp, Bos taurus
ttacatacttatttattcaacaaatacttatgtttcatgcctgcaatgtataatgaaggcagatgttgttcctgttgtccctgcatgtaaaggccatcatattctaaatcagtgcttttcaaatttgaatgcacatatgaaccacccgaggatcttaaagtgtggattaaatatagattctgaatcactgggtctgcagta

SEQ ID NO: 21356 - DNA, 201 bp, Bos taurus
acagaggggaggcaggtttctttgggaaggggagcctgcccacctcccaaagtcaacagtatggaggaacacatcatgggagttggaggagtggccacaacagagataaaaaaaaaaaaaaagtctgtaggatggctggcttgtttaactttttaaacttccctcctttcccccattaaatctacctgcagagtgggtgtc

SEQ ID NO: 21357 - DNA, 201 bp, Bos taurus
gaatgatggaggtgggttggatgagacagcgtggggaaagggccgaactaagagctaaggggcgcctggacttgctggtgcatcagtgggaaaatccgagggctatttaaggagaaaatgggccttgtgacggcttgttatggaggctgtgaagactagtaacacttcctcccctcctgggggagtaaggctggaaccaga

SEQ ID NO: 21358 - DNA, 201 bp, Bos taurus
aggtcctcaaaaataagaggaacagttataaacatcagtgcagaatggttaagcttggctgtcttcataagaaaagagctcgaggggcggtccttagatcggttcacttaacaaacattagagatgttcacactgaattaagatcaacagtgtccaggtgtgtcgagaatgtcctctcttgtcacctttgggatgatgtga

SEQ ID NO: 21359 - DNA, 201 bp, Bos taurus
aaagctcttactcaccctttaggccacaacttaccatttatttctgatagtcactttccgtaaccaccgctctcgaccctggactgtgtcctgtcactgtgcagggtgtttccatggcagggctctacaggaagcctgccttccctgccatggcacttgttttaattgcacggtattgtaattgccttggtgattgtttgt

SEQ ID NO: 21360 - DNA, 201 bp, Bos taurus
ctagggatatttgggagacatttattatttattgaaataaaggatttcagaggcaaaaacttgaaatttaaatcctggttcagagtcttcattagccatgcgccttgagcatattaactgaacctctcttggtctcataggttttaaaaaaaaaggattataacacctaccttattgacttattagaatttagaagtatac

SEQ ID NO: 21361 - DNA, 201 bp, Bos taurus
atcttcgcttcctaggtctcatgcccttgtgtaatcccctcttcttgagtatgactcagttctagtgacttccttctattcgatagactgtggcaaaaatagcagtatgtcactttcactataggattacaaaagattgtgatggtcatcttgttaacacactcttcccgggccctctcatttgcccactctggtgaagtc

SEQ ID NO: 21362 - DNA, 201 bp, Bos taurus
cttccacgaaggccgaaacagtgtagctggcattcagttgaatgaatgactgagggaacgaaaagctcataaaactgttatgaaaatcagaatgaacaccgcaggaaccttgtgaaccatgaataggtgggcctgggcaaggggctgttactgtgattgccatgagcacagtcccctggtcttcgtagcagtgttcccata

SEQ ID NO: 21363 - DNA, 201 bp, Bos taurus
gttctctgcatatgtgtgtgtgatttggcacttattattttcatttattttaaagcatcatgatcttaaatttgagaatatttgtcagcgattaaaaacttgaagttttaaacactaattcgaaagtggtaaagactgcaaaattagccaaagctagaaataaactgaaatcactcaccaagaaagccgtgaccttacctt

SEQ ID NO: 21364 - DNA, 201 bp, Bos taurus
aatgctatattggcttattacatcacaatagaaacaatgaggatattttgaacacatgttctagatcacatgtgtgttcattatgaagaataacttagctgacttaggacatgtagccaaagagatatgtatctctaccaggaagtcatccctgggaagaaaactggtaagaaacagtcaaatgaacagagaacatcagtc

SEQ ID NO: 21365 - DNA, 201 bp, Bos taurus
tgtgaccttttaaatagtcatggagttgaaccatgatgcattaaagggtattgtttttactgtcccactgtaaacagctctaaaattgaacatatagacactggacaccaaagagttcagaactctaattttaagaggagggcaacatgtaaggtgagctccacattcatcctaggtttctgcctgggagtattttttaaa

SEQ ID NO: 21366 - DNA, 201 bp, Bos taurus
tacggtcctgcccaccagagggccatgactcagctcaacccataagagggcaagcaaaggccatgccctccaggaagcctgcactaacttctagtccagcatcactcaccaggaagcagacaacaaaggcaagaaaactacgatcccacagctgtggaaccagcccacttagagcaagcagaccccaccctgggaccactt

SEQ ID NO: 21367 - DNA, 201 bp, Bos taurus
agtaaattaaaaaataataaaggaagggcaaagtgtttaaaaaaaacaactggaaagcaatatgttggctagcccaaactcccatcgtgtaaacacacagattgtttctaccaaagtaatcagtagaagtgagcactcttacacaacaaaattgctttcgaggaagaaaggtgctgactgtctgcacagataagtattctc

SEQ ID NO: 21368 - DNA, 201 bp, Bos taurus
tggtccaggaccactgagctgctctgaatgctttctatgttgactccctgggactgagacccaggatttaaaggggagaacgtctagggtaaacacacaacggccagacagtggctagaatttttcctcaggctttccgagtctcttgcagaacaccaagaggccagcaacaggcatgtggcctgagtcagcggccttctc

SEQ ID NO: 21369 - DNA, 201 bp, Bos taurus
ctctatcattatgtggggctcatgggaggaatattagtgacaggcctcctccttgatgagaaagtcaggggcccctcagcctagagttacagcctttttatgagcagaggctgtccagggttggcacaggagttcagaaaaagctagaggacccattgatctctgatgcctataaaactgtagcagccatacttgcatgga

SEQ ID NO: 21370 - DNA, 201 bp, Bos taurus
gggcatggttttcaaagaatactgaaatatccagagcagtccagctgatacttgtttaccagggtagcaagaagacaaggccaaagtaaaaagggttctgaacttgcgggtcctgcgctttgtggaccctcgaattctgggctcacataagggccctagaacactggtgggaggaaaaatggactaacctgaaggagcttc

SEQ ID NO: 21371 - DNA, 201 bp, Bos taurus
cttccaattcaccactgggcagacttatcacggagaaagagaaactgaggcctgctgagatgggcaccagccatctctgtgatctttcagacacgttcatcctttatcaattatttttcaacaaatacatcctggattgcatttctgaatgtcaactctggttgtagccagcattaattctggcctgtgagtcatttggat

SEQ ID NO: 21372 - DNA, 201 bp, Bos taurus
gccttccttgactcacggctgattttcttcctcataatggacaacttaaagattcatatgattgctaatgaaaataagaccacaaacttgcttcagggataagactgtcttcatctttgtatggttagcacatagtaggtgctcattagacgacactgaatggatgaatagtaatactgatttatggaattcaattagcac

SEQ ID NO: 21373 - DNA, 201 bp, Bos taurus
gggagcagggcctgagctccctgggcaggtgggagcctccccaaagcaggtgttcagaacacaagccctcagatgcaaggggagtctgtggccacatcaatgggacctctaagctgccaggaagcaaaggtgattggtggggaagggctccaaggatgaggaccccactccttacccaggcattaggtagcgtacagctca

SEQ ID NO: 21374 - DNA, 201 bp, Bos taurus
aatgagccacaactggcattttaagcgaagaaaagagaaagcttaagggtgctttgcacttactactgtttcaagaaatgtctgcttcagtaatttacatgtatctgtgtaatatattacaaagcaaaatatatatgtggggttgtgataaaaaaaaattcccactggttaaaaacacacacacacataatccatcatgac

SEQ ID NO: 21375 - DNA, 201 bp, Bos taurus
tgcaaagcatgtgagatcctagttccctggccagagatcaaacccactctccccattggagagccaaacctttatcgctggatcaccagggcagtctttaacacaaagcgctggccatgattatcctatgatggtctcgggagttactgtaatgtgtggggtcgtgtgttcctagactgaaggactccaaaatgatgttgt

SEQ ID NO: 21376 - DNA, 201 bp, Bos taurus
tgtttctttttccttgtgttgttctatcagatcccttggagctgcagaacctcaggaattactatttaatgatatattgaggggctgccctaccctctcccttgggccccaccccctgccacctcttctcaggagcagaaaccatggagccccagccccataagagctgtagtccatgagcctgtagccagtgaccactgg

SEQ ID NO: 21377 - DNA, 201 bp, Bos taurus
ctctcatgatgttagagaccagaagtccaaaatcaaggtgttgtcaatgctctgctctctctctctgatgtctttgggggtagatccttcctggcctctcgcggcttctggtaccccaggtctttcttggtttgtagctgcatcactctagcctctgtctccatcttcatgtggccttcttctctgtgtatatgtctctct

SEQ ID NO: 21378 - DNA, 201 bp, Bos taurus
gcctcaggacagcatggccaccgctgggattccattccctcaccagactcctggcttggttgggggttagccagaaagcaggcctctatcaggacagaaaatcaaggctggctaagcaaatggtacatcataaaccactcctatgctccacggcacctgaacttaagacccaaattctgtatggtctggccaatccacctc

SEQ ID NO: 21379 - DNA, 201 bp, Bos taurus
agtagcatcgtgtggcccagggacacagaggctgctcggatgcctggagagcaaagtgttctatgcttcgtgatttctggactaactctggatctggtcatggccatagactagatacagatggactccccatctttcgaaagaggaaacaatcctcaggacttgcctgaagtgtttggttctgttttgaaggaaaatgtg

SEQ ID NO: 21380 - DNA, 201 bp, Bos taurus
tggggcaactattgatcaggagaaaaataagaagggtaatttactctatgagagaaagaaaatgtatcaagtttagaagtagacagagagttgaactgataaagtgttttatatatcagaaggtgaaatgaggagaaaacgcaatgacttatattgcttctttgggagtaggatgatggttaccatgacttgggtagattt

SEQ ID NO: 21381 - DNA, 201 bp, Bos taurus
tccactgtgattctggttctgagattcaaacagatgcagcatatataacatatatttagggtagcacttaacttacagggactacaactcccagaacacaatgctggacatctcctgccccctccccacatctacactcaaaacatcctaagtattttccaggaatctcagtctctaactggatacagatgtatacatgtg

SEQ ID NO: 21382 - DNA, 201 bp, Bos taurus
gcaaaactgtcatttcttctggggctagcaggacttttcatacatagagcctgaggctcaacaaataagatgcaggcaaccctgaagtacagatgtatctctggaaaagcaaaggccacttagaataaaatttacagtctgttattagagctaacagctgctaaaccttataacaatatccttatgccatgtcttagaaat

SEQ ID NO: 21383 - DNA, 201 bp, Bos taurus
taagtttaaacatgattcaaaaaccaccaaattgagtagttaacatactaaaaataagatgactacttttcatattactggagaaaacagagaaaaatacaggggagggggaacaaactatgtgaagaatgacaattttgtgaaatttaaatatttgtgaaatttatatagataaaactataaatgatttccctttcttat

SEQ ID NO: 21384 - DNA, 201 bp, Bos taurus
tcctgctacagtgttccttattccataattcacaaggccagtgtggggatgtgccacttgttgacagtatctattccaaatactacttgcaaaccgagggcaaatccatgggtgctttcagagtctccatatgtggactttgaagtgaatctcaatcacctgagactcacaggcagactcactgacatctatattgcagtg

SEQ ID NO: 21385 - DNA, 201 bp, Bos taurus
gagtgaactcggggagttggtgatggacagggaggcctggcgtgctgcgattcatggggttgcaaagagtcggacatgactgagagactgatctgatctgctaagtatcttgcccagggccacatttgtaactgctaggccacgggggtcacatagggttttattatcagcccattagtattttacaatgcatgcattttc

SEQ ID NO: 21386 - DNA, 201 bp, Bos taurus
tttgaaggccctgtctccaaacatgtgaactagagcccacttataggatcttgcttactcttattacctcattaaagctctgtctccagaagtgattagttagggcctggggttggggcttcaacatatgaattttgggagaacacaattcagctcaaaacagtgtaaggataaagtgtggtggacacacacaaggaggta

SEQ ID NO: 21387 - DNA, 201 bp, Bos taurus
tgttttggcttcgggggtaattgcttaagttatttaatatttgttgacacaatccacccagaagattgttctgatttattgaacatgttttcacctaagcagtttagccacaggaggtaatagatcttaaacctcattccttgcctgggctctattatagtatgaagtgaaccaatgagtgataagtctccctgattcttc

SEQ ID NO: 21388 - DNA, 201 bp, Bos taurus
ctgcttttgtgacctctgatagtttcacagaacgtaattataacagcatttaataacgttattgagcgtgtctttctagacacaaacttcttcagcaaaacgaattcaactatcatgtcatcttcatgacagtcattataggattgaaataagttcaaaatatctctctgggagagtcttctgctgggctgtctctatact

SEQ ID NO: 21389 - DNA, 201 bp, Bos taurus
gcataagttgtttatatattttggagattaatcccttgtcagtcacttcatttgcaaatattttctcccattctgtggaatttctttttatttttagttttcttaggtgtgtaaaagtatctaagtttaattagattccatttatttttgtttttattttcatcactctgggaggtggctcagaaaagatcttgctgtgat

SEQ ID NO: 21390 - DNA, 201 bp, Bos taurus
agttgcatttaaatattcaaggtcacggagctagaagagagtggggctgggatttgaacttggatctgtcccaccttagagcacgttctcgtcatcaccacgactgctgcaaactggcatcgacccgctccccactgtttgagcgtttatttgcatcaggcactgtgggttgcgtttcttatacaaaacgcagtttcaggc

SEQ ID NO: 21391 - DNA, 201 bp, Bos taurus
ttattcttttttccagagtcaaacatagcctgttttgcaccttccacttgcatgtgctttaaaaaaaagaaaatccaaccgagtaaattagaatatctaattgactttattaagagattcatgaatgggacagcatttcatttagcagacagaaacgccatctgaggagctgtgcagaatggagtatttttaaaggtataa

SEQ ID NO: 21392 - DNA, 201 bp, Bos taurus
ataaaatgcaataattaaaattatgccccatgaggttccctcccctctttttagctccttgttatggtccccactaggagcctgtgatttactagtaactgcaacattctggacaaccattagatgataaacactgtatcaaattcataaattatcatatggccatctcagaatgaagttcacaaatataaattcctaaaa

SEQ ID NO: 21393 - DNA, 201 bp, Bos taurus
ccagggaagtccctaaccttcacttctaatatccttaacctcctcaattttgattccattcccagcaggttcttcttggggtggggacctctctgagaagatcatcatagagggtgagtctcaaaagttcatagaagcaagaatgctccagttcttctagtccccatcatcaaccccttgtactcagccaattaaaacagg

SEQ ID NO: 21394 - DNA, 201 bp, Bos taurus
gtccccaacgctcactaaaaattgtacttggatttaatttgaattgagaaccacatttgagtcctgtatttctaatctctgcacctgattttgacttaaactgacttctaacactgacatatcttccaagggaacctaagccaagagcatcagctccacatcaccctcccctcaggaggacatggaaaaacacaaagtcac

SEQ ID NO: 21395 - DNA, 201 bp, Bos taurus
caatggcctgcctatcagccacccaggagctcaagccaagttcgcccttgacctctcacctaagtcctaaatctcctcttctccatccccacagtcaccactcagtctaggccacatatcttatttgtgctttgccacagtgctgtcaaaatgcttctataaactgaaattccaaataaaaatcttaactttgtactgtat

SEQ ID NO: 21396 - DNA, 201 bp, Bos taurus
attttcagagcagtgagaggagagctaaggcaaggggatgaggactgagatgaggcaagtgatattcacgtaaggaagtcaatggtgacctctgagcgaacagtttcaataagtggtagaagcagaaaaagcggtccaagagtgaatggtaagaatctggaagcaaaaggaatacatgccgctgctattaaagctccagtg

SEQ ID NO: 21397 - DNA, 201 bp, Bos taurus
tctggctgtaagacttctcctagctgtgacaccaaggtgcatgccacatatcatctccactgcagcacccagaggtggggccttggagatgccagggtccatgtgagcactgtaggaaggagcaggggcaggtcttggagtcaggcagccctggcctgagtcgacagcgaagctaactccagttctgtctggttccacaga

SEQ ID NO: 21398 - DNA, 201 bp, Bos taurus
agtagcctgccctagtgcccgcccgtagaggcttctcgagtcctctctgcttcttcctttgctggccactgtcccctgctgtgtcctctcttctccatctcagggcttctgtttcttcgtggcctctgcctcctcatgtctacggctcctgtgagcgtacgccttcggtagccccagactttctctttcttcgtgtatctc

SEQ ID NO: 21399 - DNA, 201 bp, Bos taurus
ttgaccttggaccctctcggatctgtttcctcgttagtaaaatacggagatcataacagtactaacctccagaatgaatgcgtgctggccaaaaccgctacggtaagcaagggttctgtaccatatattgggggagggtctccttttatggacgcgccggagtggcctgaagtgttagtcctgtctgactctttgcgaccc

SEQ ID NO: 21400 - DNA, 201 bp, Bos taurus
cagttggtcatcttttttcttcttagaagagtgggagtgatgacttctgtgctctttacatatggaagctaaaaccgaaagcccccacctggtggcttttgtcagtcttgttctctggtgtcataacggtgctggaggacttggtgccctttggtttcctgggtgatggggacacagtgaggggcctgggcatgtcataac

SEQ ID NO: 21401 - DNA, 201 bp, Bos taurus
tgggggtggtggcgggggggttaagtaaaccaagtgatttcatgagtcagtgcccgaggcaggcagtgaggtgtgccgtgggagccctgagtatgttgacgtggtcctttaaattagagagaacatcagctgttccaaactgcttcatccttttgaaaactgtaatgcctctccaaaaggtgggccttaaagagacggagt

SEQ ID NO: 21402 - DNA, 201 bp, Bos taurus
cgcctctctctgagtgctagctggtccaccaaggtgggggcgctgggcggggaggactgcagagcgtgtgctttggtgcctgcgatgtgatgcagcatgtggatggccttggatgggcccccgcgctgcgccgggcactgcgtctgcaccgcgtgctgaccgcctggagcccgtctacctggtggaggcccactgtccacg

SEQ ID NO: 21403 - DNA, 201 bp, Bos taurus
tgtcagagactaggcagccattcggttgaggcggccacatcctagcgggcttgctcacggggattttagagtagcatctgttggactcacaatcttccccattgccctctgtcctggcctgggaaaatccctcctggtcgtccttacagtgggggcttgcagtggtagaaagttaagtgaagagttccccctgctgtctga

SEQ ID NO: 21404 - DNA, 201 bp, Bos taurus
ccctggggaggggtagataacttagaagtctctgtgctcggtctcatctgcttcctactgatgttccaggcacactcgggcttcttgtcacattctcctcgccctttcacagcttcatatccttcctgtccctggaggcccctgccagcctggatccatcctctgggaaagcctatccagacctctcaggtccagcatctt

SEQ ID NO: 21405 - DNA, 201 bp, Bos taurus
actcatttattcacgtacttagcgaagatttgaagactgatgctgcacatagcactatgctgtcaccacgaacacaatggttttaggcagatagatggtagatatgtagatatcgatatggctatagatatggctgtggatgtggatataaagagagacagagataatgactggacccttgcaaagctcagaatccggaaa

SEQ ID NO: 21406 - DNA, 201 bp, Bos taurus
cttttatggaaaggagactaggagggaaggagaggggactgaatcatctgtgtgggtatttgaccaagaaaacagaagtactttagataaatgaaagaaacgtctagaacagaacgctattcttgttgtttcccactctggctggggagctgccgacagaactgcctcacagggtatcagacaaacgtaagggcaggtatc

SEQ ID NO: 21407 - DNA, 201 bp, Bos taurus
atcattttggcaacacctgaggcagatcacatttttcttcctgcttacaggaaagtgaattttattgtgcacagccagtaaagcatggagctgcttacatgggtgttcttaaaggttctagaaattctcaccccttgtccttcccaacatccataaattccttcttggactgtgtcaggaagagagaggagccaagaaaca

SEQ ID NO: 21408 - DNA, 201 bp, Bos taurus
gatgtggcttttctggaggtagaaagagagatttcaccatcagtgtctttccgattgctcttctcccagcatatagaagctggtggcccagactcctggggtattttattttttttggctgccaacaacagctcagcaagtgccagttgtgaggatggacctggtggaatgcatggggcttggagtcttcggaggccaggg

SEQ ID NO: 21409 - DNA, 201 bp, Bos taurus
ttataactttttccccttcccttttcagtagctggtaggggtgggaggacttgacgaggtccaagacaaactgtgaatggccttaatttccagtggtccttgcagagtgctgacagacatctgacatgcgagctagattggagacgctgctcgctggggccaggagccaaccctcttttcagaggaaatctccatagatgg

SEQ ID NO: 21410 - DNA, 201 bp, Bos taurus
tggaacaggaagcaggaaatgtactcaggaagtaaatcataaaagacatgagtcccaggctaagtaaattagactttccccataaattatgagagagccatgagagacaggtggctagaacatcaccatacaccatccccaaactattgttgaccactcagatttctccttcatttagatttgctgactacatagagctat

SEQ ID NO: 21411 - DNA, 201 bp, Bos taurus
ccaccaggctcctctgtccatgggatcctccaggcaagaatactggagtgggttaccatgcccttccccaggggggaaccttctgtgctacacataaagccgggccctgaaacaatgctcaatctatgtaattaggggacaaagatcttcctgtaagtcaagtaaagtggcaggagagctcatcttctgcctgtgctcaca

SEQ ID NO: 21412 - DNA, 201 bp, Bos taurus
gagtggctgtgtgactctgagcctccatttctgcttaaaccaggggagcccgcttctagcagtctccgtttctgacgggattttgcctctgattgcattcgaagagaggctgtccctcctgaaatccagaagacccactacctgtgggtcttcccagtttcccgtttggactgaacgatctccggggccatctccatgtaa

SEQ ID NO: 21413 - DNA, 201 bp, Bos taurus
tcaccatttcttagaaaaaataactgcattttatgcttacagtagtggggcctgggagactctgagtctcatcctctcatgctttacctctagaggcattgcttccccacctacactttggcctgagtaactggaatagatcctgattttcaagctgtgttcactgaaatgcttaagagggggaagagtaaagataaggaa

SEQ ID NO: 21414 - DNA, 201 bp, Bos taurus
ggcaggctgtgtgtgtcaataacatacgacccgtcagagaaaagcctgcctctccgtgtttcacttttacttgtgacatttcccatcaggccagcttccccgtggcagtcagtatgtctcctagagctagcatgggctgcggagaagtgctcatctctcagctgctttggcaaagcttcactaaatactggggcctgagaa

SEQ ID NO: 21415 - DNA, 201 bp, Bos taurus
ccagccgcataagagctgactctcgagactgatgagttaagcctttctcatccccaccatattcccagtccttgtccttggccattggttccgggtggggcgcgatgactgcgcttctccagcagagggcagtgttgccatgccagccaagactcagggctccgggaaaccggaaggaggcccggactaagccgacgcggt

SEQ ID NO: 21416 - DNA, 201 bp, Bos taurus
gggatctataaagagctaattccaaaagatgagataagtacagtaccagaaacaaagacgaaggggaaaccaagattcaaagatcacaacacagaaaatatgacgactaatctgggttctgtgggaagaaatttgggtccacagagtgaggggtcaattctaggctgaggggtcagcacattgaaaatgcatgtaattata

SEQ ID NO: 21417 - DNA, 201 bp, Bos taurus
tgtgttggagaaagatgctgtggggtctcatggttatctacatagatttgcagtcaattcagttcgtttcacgtttgttctctgcagtgaaggtatcacatagttctgtgcttctctagaccatttgaaccaataaacgtactttccttctacaaaggtggaggtttggtggtagttttatagctatatgtgctaaaagga

SEQ ID NO: 21418 - DNA, 201 bp, Bos taurus
ttgaggttaagtttaaatgaagattaccagagtactgatgacataacagtagatataggccttgttaactttggaaattgcccattgatggtgaaacaaataaacaaaaaaaacccaaaataaacagaaaccctctacactgacacatttttttagtttctgctgaaagtggctccatttgaatgcatgctcagagggaca

SEQ ID NO: 21419 - DNA, 201 bp, Bos taurus
gaagctccattgctctttcctggaacaaagatgatggaatggcacactacctctggggctccctaaggccctctatctaactctctgcagtgaccatggcaggagggacctgtgcagcccctaaatgagaccctcccagccaagcagtgctgacactacttcgttatgaagatgcatgggttggctgctagctaatgaatg

SEQ ID NO: 21420 - DNA, 201 bp, Bos taurus
tttgtggcccttaataaccctccagctgtggaaggttttccgttccaaagttttcaacgtgcattttaagatgtgtactgtgagagtgtaactttggagcggcatgtcctgaaccccaacctaaagaaacagcacttcttttctttctaacattcttctctgccgtgatgtcttccttgcctcttctcttccagaacatgc

SEQ ID NO: 21421 - DNA, 201 bp, Bos taurus
gtttttattttattcagttgtatgaattctttagatattttgaatagaagggccttatcagatatatcatttgcaaatatcttctccattcagtaagctggttgttttgttttgttgatggtttccttcaccatgcaaaagcttttcagttgtagtacaagacttttttgatacatttttatttcattgctgcaggatggg

SEQ ID NO: 21422 - DNA, 201 bp, Bos taurus
aggcaaatgaagtttaagctgcagaacccctaggggttgcattagcaatatgatcatgtttttcgttttttctttccttcagattttccaaaggaaaacattgcattttatcattgaccaagactgccgtcactttttgcatggactctcccctcaccgggcttcccaggtggggcaagttaaagtcactcagtcatgtca

SEQ ID NO: 21423 - DNA, 201 bp, Bos taurus
ccacagaattctaaagaaccccttggttagggcaaacagaaatttcacaaaattattacaaaacatataggaagaaatgaccagcataacagttcctaggcttagaaactgcccttggcctggcaccaacagactgtgtggcatcaggaatggtcagctgaccctccagccccctgtgcaaccttcccacactgccccgaa

SEQ ID NO: 21424 - DNA, 201 bp, Bos taurus
tcagtggaaagccacatatttgtatgatagaataaccatccaagtcaatgtgtatttattgaatgttttctatgtgttcagtcttcctaggccccatgggaaaaagaggagggagggtataaatgtagcataaagcatgaccactgatttctctatagatatgaccgggctattctttaagctggtctccaagatagaggg

SEQ ID NO: 21425 - DNA, 201 bp, Bos taurus
gcagtttattcattctttaactatttatggagctctgcactgtgccaggcacattagtcaatgaatcagtccttagcatcatcatcaccttcatctgagccgctgacacatgctgcacccttcacactgactttcttttattatcagaatgatccatgacttgggtactgttaacacctgcattctcagaataggaaacag

SEQ ID NO: 21426 - DNA, 201 bp, Bos taurus
gtgacagatgtgaggctagagagacagggccacatcccgcgggctctcatagatcgtgataaatatttcatttattacagacccatagattaaccttttagatagatcactctggccacaatgtagtgatggaagaggaagggaagagagcttatagacaaatcagctagaagctgttatagtagtctgatgagtgtgtga

SEQ ID NO: 21427 - DNA, 201 bp, Bos taurus
tgattgacgtgttcttatacagaggttcatttagattcacagtatttagtttttggcaagaagaaggtagtgtccataggcacttccttttgcgtcaccaggacacacatcatcatgcctgtttgtgtcttttgtgactttgggttaatcagtagattcagatattgtcagccatagtggaaaaggtttttaaaaaattgg

SEQ ID NO: 21428 - DNA, 201 bp, Bos taurus
catcctaccagccaagtatcccttctctcaagacacgaattcttggaagagtcatttgggtcagactgtggtggagctagggcctctttagggggttgtggatgggacagacagtcctgctgggacctcatggggattgaggagagaggcagacactccaaagagacagggaagggactgctacaaaagatgcgagaggaa

SEQ ID NO: 21429 - DNA, 201 bp, Bos taurus
tgaaccaggacagcgtctgggaggccgatggggaaatgagtgtgaatggggagcgcggaggggcttaagcatccctgctctggcctcagccctgactctgaagtgtcccagagggttctggaagctctcaggaggggtacctagaagatgaggcgggtgattaggcagataccgagatggaggtgaggccggaagcacccc

SEQ ID NO: 21430 - DNA, 201 bp, Bos taurus
gggcgctgcacagcaagaaaagtcacagcaatgagaagcccttgccccaacgctagggagcagccccactgggcacacttggggaaagcccgctcagccacgaaggccccgtggagccaaacacacaaatgacagtttttttaatgtttatattaaaagtctttttaaaaatcggacaccgtcgacattctcattaaatca

SEQ ID NO: 21431 - DNA, 201 bp, Bos taurus
atgtacaaaaaggaaaaaaggcctggtgtaatcaggtaagtaaagagaaggcgcccgtagtaaatgtttgctaggtgtctgtatgggggtgtggagagagatgggggccattatgggttcatctaagtttcctcgagtagcttggtagaggggttttgcatggagggcaaaatttgggacccatattcagaagaagtttaa

SEQ ID NO: 21432 - DNA, 201 bp, Bos taurus
gcaggagcctcgtgtggggaaatcctgttggcctgggaaccaggcggccttactaccagccatgcagcttgagatggcctccttggccatccggggcctctgtttcctgctctgtgcaataaggggacgctagatagctggtaggattggggtgcaggttaaagcgaactgtgaaaacacacgctgtgtttccgagggccc

SEQ ID NO: 21433 - DNA, 201 bp, Bos taurus
tgacatcaagtagagttgtttaataagaattttagcttgtgctgcttttcttctgagcaaaatattgttaatacatgttaagactagttttacaagcttctcagcagtaatgtgatttgggcctttttttttagcacacaaatttttaacttttaaacatagtcctgtagttaggggctccttcattattaaaggcagaat

SEQ ID NO: 21434 - DNA, 201 bp, Bos taurus
agatcctatcacccttttattcacaatgctctggtccctttccatttcacacaaaggagaaaactaaagttctcctggcctatgagactgaacctagcttgccccctgtacctttctatttttacctgctcttctccccctttttgctaatctggccacatagacttgcccccatttttctgttctttcaccatcctgggc

SEQ ID NO: 21435 - DNA, 201 bp, Bos taurus
agccagagatcctggagtgtgaagtcaagtggcccttaggaagcatcgctacgaacaaaactagtggaagtgatgggaattccagcttagctagttaaaactctgaaaatgatgctgttaaaatatcatttaatatgctagcaaatttggaaaactcagcagtggccacagaattggaaaagtcagtttttgttctattcc

SEQ ID NO: 21436 - DNA, 201 bp, Bos taurus
atatctcaaaactacaagcacaatccaattacccatggtagagaagcattcattttctgcacctcaaacttataagatcttctgtgagctgggcgggggaattcagtgtgaatcctggcccacctgttttgctaccagcagacttatatcccatctgtaggtggcagtaagtcattaccggttttgctactctgcccagtg

SEQ ID NO: 21437 - DNA, 201 bp, Bos taurus
ttcaacatcaactgcctcaaagtcattccttcaaacaacaactaggaatgacaacaggaaagactgaaaagcagtgtgcattgccaacaaaatctatactgaaaatcactaaacatggagattggaacacagtcctagatcaaatcctaaatgaattttagtagaagttcgtgaaataatgtttaaagcacaagaatacat

SEQ ID NO: 21438 - DNA, 201 bp, Bos taurus
ttccatagatagttttgcctctaaagaaccatgcatttggatggctcagtagttgtccttgaattgtcaggattcatccaccatttcttattcactgagagcatgcatttggatggaagaagccaactttaattcatgaacttgtctatttttagcctataatgttatcttgttttaaaaagtgctcaaaaatgtattttg

SEQ ID NO: 21439 - DNA, 201 bp, Bos taurus
ttcatggtcagtactttgcttaaagtctgcaatggccaccttttggccttgcacgtttgctgaaatataatcttccaaacagcattcctttgctgactcaacccactctgcttgtcaggactgtgcacagtcttaactgatggagagaggcatagtctgcatcctagggggcggggggagatggggatccttatttctctc

SEQ ID NO: 21440 - DNA, 201 bp, Bos taurus
gcaaatagttataatgactgatgtataatgtgtgagggtagtctgggtaatgttggtgaaaaagtataaaataatgcaaggctaagaacattttatagttctggataataacttttgtaatagctaatacactgaaaatgtattcatcagttgcatctctaaggtcatggcactggcaaattgcatgtatgcatgcttcgt

SEQ ID NO: 21441 - DNA, 201 bp, Bos taurus
ggtttcagaatttgctttccacaaccgcagcaggaacaggaaaaatgctcactttgaacctggtccctcaccaagctcaacttccttttaaccaaagtctggatggggcaatgatcacctgtattctctgcaagtgatgtgactgcttacaaaattctctttgtgacatcgatggtatggaagtgaaattgtgtcccaagc

SEQ ID NO: 21442 - DNA, 201 bp, Bos taurus
cgagtgaggttccttagcatcacacaggaaagaattcaattaaatgactcatccacaagcaccatgacagttccaaggcctgtcataaaagaccaaaaaacggatggtgtcccagctcctggaaatccccgccccttcacttcactatgacttggttcatttaattgaaccaagtcatagtaaagtgaaagaaggtttatc

SEQ ID NO: 21443 - DNA, 201 bp, Bos taurus
acttaaataattatgatgaatttgtcatcttagtattttcagcctgctatgtaattagtaatttcatggagataagcttggtttcagttttatgatgaatgtcaggtatttattatattaaaagagtgttcattatttcttcacatatgcttaacagtaaggcatcctacttcctataaagtgattcagaggttctctttt

SEQ ID NO: 21444 - DNA, 201 bp, Bos taurus
cttctgtgtattcttgccacctcttcttattatcttctgcttctgttatttcaataccatttcaaaggaaccacaaatgcaagacagcgcacgagtggccgagaggagctatccacatccaaggtcaaggagacgacctagaagagctaccctgtcagggaacatttaattttaaggaatcctttatgttgctttctgttt

SEQ ID NO: 21445 - DNA, 201 bp, Bos taurus
tgggcatgacttagcaactgaactacaccagcaatcacacaatctgcagttgaattcaacccaaggtaatggtgccagtgatatggcagaatcaagaatatggaagaatctgatataggaaggctggctatatgctattcacagattttccactgtactgactgccatgttcaagggtcaactgcatttgaattttgcacc

SEQ ID NO: 21446 - DNA, 201 bp, Bos taurus
tctcctctctcacatcctctcggtccatctctccacggtcaacaccagccctcaccctggaatttctccacaatccctaaactccagctcccagctgctgcgcctgccagaggacctgtgttcctgtacagggtatccttgctgtatggttgcagcaaggactgtctgattctcattccatttaagttgccacagatcagc

SEQ ID NO: 21447 - DNA, 201 bp, Bos taurus
tttgggaaaataatgtgcatatgaaaataaacaactttaaataatgatgaccatcatttcatagaatatcttgtatgtctctataatttttttgtcatctatacattaaataaagtcagtcagaaaagagatcttatggggaaaaagcctaaagcttaatatttgactcatattttatcattttttgcccttgttatctaa

SEQ ID NO: 21448 - DNA, 201 bp, Bos taurus
gagatatttgccatagtccccgattttgcaactagaactattctgcaaaaagcaggggaaatggatagaggtcccctatgtccaaattttttcaactaaatacatgaagggactatgccttaagtatgggattaatctataccctaaaaatgaacttactaggcaaatggaattagacctcatataactaagagaaggaag

SEQ ID NO: 21449 - DNA, 201 bp, Bos taurus
aggcatattttatagacttagacacattccaagtccacctgaagagaaaaacttaaattcgttacaaagctatcaaacatcagaagtcaagggatacttcatttctgttctatttttgacaactgtatgcaatcttattatcagttttcatgttcccaaatttagaatttgcttgccttgttaaggctctttcttctttta

SEQ ID NO: 21450 - DNA, 201 bp, Bos taurus
tgtagcttgttgacctgggcagagacaaaacaggttagacaattgataatgcatgaaacagtcataagcagaatcaatatggtgtaacacagactagtaggggcattagccaattctaaattcccatgaccaggatggctcaagtccctccttgttcagggatcagaagatttatctcttgcctgttttgtagtacagtcc

SEQ ID NO: 21451 - DNA, 201 bp, Bos taurus
ttctgttttgctttgttatgccacctatcagtagctcagactcaaactgacatagaacaacaggaatcaacaagaaagtctctaaaaatcaagggcattctatttgcatttgtagtgaattctgatctcaggaattgctccaaaacttatatttttttttatctctatctcagtcccactcacctcttcccccctttaata

SEQ ID NO: 21452 - DNA, 201 bp, Bos taurus
tggaaaatatggagtttgaaagtaaggacagggtgccagttccaaggaaacattcaaacacattgcatcatttgactcggactctggcacgtccctccagtgctagaagaagaatatttcttgagtagccattgttccacaaagactgggatacacagtgagcaaacctgatcctagtccaaagcctcaagccaaccatcc

SEQ ID NO: 21453 - DNA, 201 bp, Bos taurus
aaagttgaggaaagataagaaagagaaaaaaagaaactgagcccttttagggctctttaggtgaagaaggtcaatctgaggatgctgcagaagcatgtcccagcgtgggaaaggaaaagagtggagtttgacataacggaactaaggatagaatgcattcaaagaaggggatggttaactgtgcatgataataataagcaa

SEQ ID NO: 21454 - DNA, 201 bp, Bos taurus
tgacaagtattactggcatgaaatatttatggattatgtcaaataatgatgcttatggtttttttttttttttttttcagtcgctttttaagtccctttaattcttggaagagaagttgctaaattttacttccagatagttataataaatgtgataaactatccacactttctaaatgttgccttgaaaaaaagaataaa

SEQ ID NO: 21455 - DNA, 201 bp, Bos taurus
ttagtgagtaactctatctggggctgggaatgaagactgtagaattgggtgctttgggtgcatgtaaatcacttaaaggagaatgtggtattgcagcatggtcacactacattacaggatacttctgagaatagcactacagcatggagagaacacccagaacatattcacgggactgaagaaaagccacatagtcagcat

SEQ ID NO: 21456 - DNA, 201 bp, Bos taurus
gttatctatagtctagattggactattgcttaaatgtgattcagaacttgtgtaagatttaaaagagatccaaaacagaaatgtcaaaaactccctagatttgcactgctcaatactgtagctactaactacatgaagctacttgagttttagtgaaagtgaataaaattaaaaatctacccctttccctcaatcacattt

SEQ ID NO: 21457 - DNA, 201 bp, Bos taurus
gatgtgtagtacataaatatgaatttaaaaaatggaggtgagcaaaaattaaaaaaaaacaaactagaagttaacactatttattttcaaaatacatttggtacaacaacaataattaaacttccataaatgccaagatttttgtctctcttttttttaacttccaggtacaatgtctaacatgtaacagatgtttaatat

SEQ ID NO: 21458 - DNA, 201 bp, Bos taurus
gaagtcaagcctccagacagctttcgttggaagtcccatctgcagaaccctgagaaaatgcatttctgtcattaagtcactagtacttgacattttgtatagtaatgctagaaaactaaaacaccatctaatgaaggcaggaggataccataaataaaaataatcacaaaaatatggttctctaccatggtaaatattgat

SEQ ID NO: 21459 - DNA, 201 bp, Bos taurus
agaatcatgctgtccccagtaaaagagaaaatgtacgttaagaagcttctgcccctaaggtttagagtctgttgaagacagaggctgaaccaagagagtcatgtacctccttgacccactataagctcaagctgaataataagccaacagcaatctgctgggatccagtgggaatagagtgagcatgtcacctctggtgca

SEQ ID NO: 21460 - DNA, 201 bp, Bos taurus
tgtcagccctgaaatgataggatcaacctctcttccttggatgaagaacttgatgctgatctactttcacttaatgaataacagatggccatgatattgtccatttgataaacttatgggttgtaggtgtgtgagagtctctgtattaaaaactaataactgtatggaaagaactgtctagacatttttctgctatcatca

SEQ ID NO: 21461 - DNA, 201 bp, Bos taurus
aacaggccatatataacaaacctatcgttaatatcatactcaatggtgaaaagtgggaaacatatcctctaaggtcaggaacaagacagggacatccacttttgccaattttgtggccaaagcaattacagaagaataaataaaaggaatccaaattggaaaagaggaattaacactgtcagtgtttgcagatgacatgat

SEQ ID NO: 21462 - DNA, 201 bp, Bos taurus
gagataattttagaaacatttcagtgcttaaagaaaaaaatccaagaagcctattagaacagtcacatattctcattgtgcatcaggcaataaagtatacgtttcattgtttatgaaaagcctctccagttgtgtcttgttggagagcacacatttatttacatattatttatgttgtctaaatgttcacagctgtcaccc

SEQ ID NO: 21463 - DNA, 201 bp, Bos taurus
gtactggagtggagtgccattgccttctccattgtatagctattgctattgtaaataatgctgcaataaacagagtggtgcgtgtctttttaaattagagttttcatgttctttggacaaatacctcaaagtgaaatacttaggttacatggtaactttattcttaaatttttgaggaataatcatactaattttcatact

SEQ ID NO: 21464 - DNA, 201 bp, Bos taurus
ggcattctaagtagggggacctcttgttactttgtaagtgatgctgcacagaggggaatgttctttgctcctgaaaagccctatttcacatgaatgagttttcactggccatgtttatataatttctacctccatctcaaaaagagtggaattgcttctatttcctgtattttgcatccttccttctcccaaacactctca

SEQ ID NO: 21465 - DNA, 201 bp, Bos taurus
gaatgggtggcatatccagtgcaaacaatatgacattatggcacacgtaacctgaatagaaaatttctgagttatcactagtttagaggcaggcctggaggtcaacctggtagcacatatcttcatagtaccccagtctgcttctactgggggatcagcgttctttctgattggccaacacagtgtctgcatcttagatta

SEQ ID NO: 21466 - DNA, 201 bp, Bos taurus
cttttgagaacaccagtcctgtagagtcaggcccctcttctgatttcatttaaccttaattacctcctaagacccagttttccaatacaatcatatattgagggttaaaggccaaatatatgagttggggaggaatacaattctgcctgtaacagtggtcaaatttaacatcagggataatagagaaattgacaacatttg

SEQ ID NO: 21467 - DNA, 201 bp, Bos taurus
tagtcaacttgcctttctacctgctcatcctgtagcaccatctcctcaaagcttcactctcagctggcactgaagggtagaccctctcactatgacccaggttttctcaaccttggccctagttacattttatcttcagtagtctgggagatgctgagggacagggaggcctggcattctacagtcctggggtcacaaaga

SEQ ID NO: 21468 - DNA, 201 bp, Bos taurus
gaataagctagatcgggttccctaatgcccagatgttgtaaaatccatctggtctgcagcacagagggaagggaggctgaacactgtaatcctggggcctatgaacaaaataagacctggagggtttgttgttgttgttcagttcccacttcgtgtctgttctttgtgacccgatgggctgcagcaggccaggcttccctg

SEQ ID NO: 21469 - DNA, 201 bp, Bos taurus
agattttaaatattctcaacacacacacacacaaatgataattatgtagtgtgatggaagtattcactgactttattcataatatagaagtggatgaagtcatcagtttgtacacatgaaacttatacaatagtacatgttagatgctgctgctaagtcgcttcagtcgtgtccgactctgtgcggtcaggtatgtcgcag

SEQ ID NO: 21470 - DNA, 201 bp, Bos taurus
ctcctctagccatgctttgtatcagcacggaaaacagaaaaatagcacatctctaggggatgtggctatagggcaaccactgattccaagaccccggggtttgtattgtttttctgacactaatcagagaactgcctttggcgtttacatgcaccctgtttctctgtggtcactatccccgacctgatggaggttgatcag

SEQ ID NO: 21471 - DNA, 201 bp, Bos taurus
gtgctcaggccatgctcctgctgtggatcctgggccgtgctatgagtagcaagaactggaggatttcacagttcctgaaggttttcctctagctttctgtcctgttaccaaggcccaccccctgaaaccatctttctccccatctaccttaccctcccagctcttctccttgtcagttccctcttaatctgtgaattatca

SEQ ID NO: 21472 - DNA, 201 bp, Bos taurus
aagacaaaaaccttctaagcaaaagggttatctgcatagctgaccttacgtgcacttttataatgtgaccttgttcaggatgggaaggtgggataggactcaggatggaaatgccatcaaaatatgtgatttcctcctgcctacgttcatcaacaaggcagttttactgagcttctgaaaataagcaaacattctttttgt

SEQ ID NO: 21473 - DNA, 201 bp, Bos taurus
tattaaaattctgttacagcaaagagatacaaagcagagccatccaggagaacagacgcattcagccaggtctggagggccccagatctgtgaagctcccattgttctctccccagggagtcaggaatacatttcccacccaggaagcctgtgtgttaacacagagacaaggggccatggctcagtgtctcgcatttgttg

SEQ ID NO: 21474 - DNA, 201 bp, Bos taurus
aaatcgtattttgtacttaggtctccctgaggcttatgttactgtgttgtataagcatctgttactaatagggttagctggagccagctcactttcttttctgggaagcagaaggtaaaacctaaacatttactgaatcaactgattaatagggcagatgtttttgacatttaaatagatgtctgtctgttgtgctttaga

SEQ ID NO: 21475 - DNA, 201 bp, Bos taurus
gtgggactgtggaagaggctggctgtgaaagtgcagtgtgaaacctggcataatgctaaagttcgcaatttacacgttattttcctcaattcaggccttacttctcttcctagtcagaggcagatgagtttttcatgccatgcaaagtgacgtcaggcaaaacctcctgtgttctagggcctgtttagagtgagtggcagc

SEQ ID NO: 21476 - DNA, 201 bp, Bos taurus
tcaggcccagagaactgttacaaatacgggtctccagcgccatctagtggacaggaagtggggggtgatggcgcacagacaccgggttctaaaatgtgaatgcagggttctgggtgtggcccggtcttcctattccttttggagtgtcttggccattctccgagcaggatgaaacctgagaaggatggcaggagcccctgc

SEQ ID NO: 21477 - DNA, 201 bp, Bos taurus
ttaatggagagtgttgaatgtatttgttttggaatatgatatgaaattttgaattgtagagtctcctattctcatattttaggattctttttcttttttttccctaatttctatcggaacacttgttctgattcatgtgttgagttcaattcacagacaaatcatcctgtgtaatgtcatctttttcattcctccatagcc

SEQ ID NO: 21478 - DNA, 201 bp, Bos taurus
cataatagctgatggtggaaatagaatagtcgatggtagagggggaagtgatctaacatgaagagctgaatatttgtgctgaaacctcataggggcttactaggtggtgctagtggtaatgaacccacttgtcaatgcagaagacatgagacacgagtttggtccctgcatcaggaagatcccctggaggagggcatggca

SEQ ID NO: 21479 - DNA, 201 bp, Bos taurus
tcaaagaaaatgttcatcgcaaaaagaggctgaatttttatgatatagctctgaatttttttcatcttcatcatatatcaattttttttccaggcagacaaatttcagatgttttatgtaagatcaaactacaaaaccaaatataagcataatcctataaaatcctttaattgtactcagatgatacataattttagttct

SEQ ID NO: 21480 - DNA, 201 bp, Bos taurus
gaagattggagccaggtcttcaaaccatctaaagtactctgctcactatttttatggagagcttttaattgagaatagaagaaacgaaactgtgtccccaaaagcttaagtggaagcaagatgtacaaaatagtgaggaagcagaaaggtcagagtgaggctagtgaatgaaatggaataatgtgacgtaggtagaaaaag

SEQ ID NO: 21481 - DNA, 201 bp, Bos taurus
tcactgtggcaacactggcctaatatctccacataacactcgcacagcacgaaaattctaacctctgtcatcctatcaacactgcacttctccttttctcaatgtgattgcagcccaagtcagggccccactggtgggttttgatatcgcagttcatggggctgctgcctggagccatcctagaaattcctcctttttacc

SEQ ID NO: 21482 - DNA, 201 bp, Bos taurus
ctcaagctcccagggtctgtagcaaccatccgacccatgggcacccattcataaacctccttgttgttcgtataaagcaagagctctctttcaagtaagagatggactaaaagaggccattgtgaactcatacaactcaacgttaaaaaaaaaaaaaaaagccctattaaaaagtaggcagaagaactgactggacatttt

SEQ ID NO: 21483 - DNA, 201 bp, Bos taurus
actgactcgatggacgtgagtctgagtgaactccgggagttggtgagggacaggtagtcctggcatgctgtgattcatggggtcgcaaagagtcggacacgatctgatctgggaaatatagaacaaagttacatgtagttccactatatgtaataatgtttaagtacataaaataaggtttttagttggagtttcaatatc

SEQ ID NO: 21484 - DNA, 201 bp, Bos taurus
actggggcacgtgtccgtcccctggtgcctctggaacctaggtgctcatgtccactcccaggtggtgtggtcctcaggccactgggaagacaggccgggtatgaccaggtatgacgagaactgtgatactccgagctgtcagtcagcgccccagaaggggaagagggggaagaggggacattggtatagacgtacagctgg

SEQ ID NO: 21485 - DNA, 201 bp, Bos taurus
ttcacattatatgccaaatagctctaagtctctcaataatgaacctcaggtacttcaactggacccagcattccctctgcatatcaccataaagaaccccaggtatttacactgaacccagcattcccctcacgtctagtgatgaagaaccccaagtaccctctattccccacccccatgtctcatggtaaagaaccctgt

SEQ ID NO: 21486 - DNA, 201 bp, Bos taurus
tgagatgtgggcagaggtctttccaggccagagagcaggcaatgcaaaggttcttgagaccaagggagctcggcgtgtaccaggaagagacacatggtcactgtggccagagctcagtgagctcggtgtggtaggtgatggacagatggccactcccaggggccgtgggggccacatgaggccatctagttgcctgagatg

SEQ ID NO: 21487 - DNA, 201 bp, Bos taurus
cgggaaaagcagcccaggaagaggtagtctcctgaggtgatgacccaccagctcggaggggtgggaggaggcggggaggaaaagtgaatgcttgaaggccaggggtctgtctaaatgtttcctggttctttcacaccagaagggcagaggtgctgacttggaattatcctggccgttattatcctggtattatcagcggac

SEQ ID NO: 21488 - DNA, 201 bp, Bos taurus
accagaaccagtatactttttcacagacagaaatgtcccctatccctctttcgtttggatcttgatttctgttagtgagtcctgttactgaggcctaactcccttcaatatcagcaccctttaccaagcgacatcccttagctgttctggttgcctcgatatttttcagtttactcccaactaaagagccttttggagaag

SEQ ID NO: 21489 - DNA, 201 bp, Bos taurus
tcatttaaaggtctatgtaaagtcacaggtgccatagcagccaatgctttccataactcaggctgcatgggacctgttccattgaagctcactaaaggaggaacccactcattagcatgccacttagtaattactaaaggcatagggagaaatgaattattccatgtggacctataaggttctacataaatcaagccccgt

SEQ ID NO: 21490 - DNA, 201 bp, Bos taurus
actcatggtcagtcaccattctttaaagatctgtaggtacgtaaaccattatggtgttggaagaagttgtaaatatgggaaaacttacagtatgaaggtaaggtaaacaggattcctgaaaggatgccctaagtgccactagtcaggcaagcctcataattaccagtagctaatatgtaacatgctgatggccatgttagt

SEQ ID NO: 21491 - DNA, 201 bp, Bos taurus
ctatatttggggttggctaaggctgattcatattaagtgctcaataaatgctggatgaacttaattatattaagaaatagaactgaatgttaccagagaaagttttagcctgatatgactttggttaagattcttcatcgctttggaccgccttctatctcataaagatatgaagagtttgaaattaacagtctctaaaat

SEQ ID NO: 21492 - DNA, 201 bp, Bos taurus
gcacatattgaatatattatgggccatattctcattcttttcccttcttttgatatgtaagaggatacttttccttcctttgagtctgaatcctttaacacactgatggttcattctttggccgctcatgaacataaaaactggttctcctcttgctgcttttccagagacagtctctttaatcttaccctatatgtgatg

SEQ ID NO: 21493 - DNA, 201 bp, Bos taurus
ctaattgttcaagcacaataaccactgaagcctcaggttggaagtgactttaaatctaaactgacagtcttattgttaggagcattttctaaaatcaacttatgtaccataacatctttgcttttcaattttaaatgcttataggatatacattaaaagccaaacttacttctgttagtaaactttgtctatgagggttgt

SEQ ID NO: 21494 - DNA, 201 bp, Bos taurus
ggcccacatgctggggtggggccgaaaccaaagctgagtcccacttgggccaaaaccaaagcacagcccccacaaaaggactgtgcgactaaagaagtctatttagctatataagctgaggatgaaatctaagtattctcctcagtaaaacctgcatttgtggaatatctgaatggacgataagtgctcccacagtttagc

SEQ ID NO: 21495 - DNA, 201 bp, Bos taurus
gctaagcccagagggccctcaagagggagaacaatacttgcaatccagcagctgccagctgacatcattctctacaataaacaagaacttaaggatgtgaataatcaagaagtaggatgctggccccagatagctgagatgcacatgaaagaaattatttcagtgcacccagacacttgcatcttcccatacatagaagag

SEQ ID NO: 21496 - DNA, 201 bp, Bos taurus
aaaaaaagcttaaattgaatgccccaacactgatgtgataagcaagtcttattagtttctgttttacacagaaatgtggctttaggctgaccaagggaatggaggaaccagagcctgaaaggaaggcacagatttgaggaggaaataggaacagaggctatatattatccacttgtaatcttcaaaggtacagaatcaagt

SEQ ID NO: 21497 - DNA, 201 bp, Bos taurus
tcaatcaaacaatcctggattgaattcaagagtgaaaatgaagaacagcagtataattctaaaacagatcttgatttttgtataatcaaacatcaacatatttgattttattctgtattttctcaaccagatttagttgaaaaagtctgccatgcctctaaattgacacatctagtctcccagattttttgcaaatattta

SEQ ID NO: 21498 - DNA, 201 bp, Bos taurus
cccagggttagtcggcctcctttaagctaccggggatggagacgagagcgcggaggggaatgccgcagcgcggtccctgaattcaccgccctcagtagagaaggaggccgggtggccaatataacctcttctccctgtttgatctgacatctctaaatttgtctttccccacaccgggctcgatagcctccgaatttgtct

SEQ ID NO: 21499 - DNA, 201 bp, Bos taurus
atcttattacttggccaatttaacctgctttgaacctggccaaaaatattccttttcaccagatgttaaatattgggtagttcctaaaaggaccagtagacttgtggaacaagtttatggccttggctctccccaggttggttaggaatacgcagagttggtttcttttgaggtcaaggtcccctatgtgtagccttggaa

SEQ ID NO: 21500 - DNA, 201 bp, Bos taurus
cactggaatcatgtgaagccttttaaaaagtactgattcctgtcttccacttccagtggttatttatttggtgtgggtgtggcctgaccatttgcagccaggtttgcaaattacttccctaagagaacctggctcttccctgaagaccccacttctctaagggccctcagaagaagtgggtaagtttctctcccactctcc

SEQ ID NO: 21501 - DNA, 201 bp, Bos taurus
gcttgcgctggcaggcagaccatctttgtttttcattagtgtgtgttgtcgtcacagtaactgcaagcctccaaatacaggcccgggctgtcatttcctcatgtacttaggctgccacactgaaatagcattatgaactcagcaatgcctcttcctttcctgttgtgctgtggtgcctcagtcaaagaagcaggccctaaa

SEQ ID NO: 21502 - DNA, 201 bp, Bos taurus
aaaggcaggctattgatcacaattacaacccacttcagttgtgcacttaagtcatgttacttggagtgatgcaacaatggatgatccattattgtgaactaccaattatggttgcctacatcacctaagaaacagaaagtagctgtacagtatccatttgacactaacaacagtgttacttttagcccccttttgggggct

SEQ ID NO: 21503 - DNA, 201 bp, Bos taurus
tttacagtcttgttttagtaacttactaagtgaaaaattttttcctttttcagtttggtaattctattatcaccacacctctaaaacgtcgcaaagtgatttctcaagaaactttagttgctcctgtatctttaagctgccaaagttcctctgataccgtagttttaaactgtcgaagtatacgagtaggaacactattcc

SEQ ID NO: 21504 - DNA, 201 bp, Bos taurus
ggacattgaaacagccttggtttcagcgcgcctccatctctgctgcgttttggtggagccctttattgtgctaatggaatattttacagaggggtgtgctgtgtgtgctcattcacttcagtcaggtctgactctctgcgacgacaccatggactgcagcccgccaggctcctctgtccttggggattctccaggcaagga

SEQ ID NO: 21505 - DNA, 201 bp, Bos taurus
catgttccatatctgcagctggctggccttcagactaaagccctgaacacgcggcatttaagggtcaacctttccttttcccagtctacattgctagtctcgtcttttgtcggccagcagtctccctctcacactcttgccatacccctggtcttgtgtgcgtttctcttcctcttgcagccttccccctcggtcctcagg

SEQ ID NO: 21506 - DNA, 201 bp, Bos taurus
ttgtgtattcagcatgtaccgtgaggtataaaattaaggttaaaaagatgttttgagcctaatattcttttactcaataataggtctttaattatagatagttctcctgtagtattttacttggccctatttatttgtttccattcacaactgacattttgtagctgtttattttctccttcgcgttgactgtgcgtgctc

SEQ ID NO: 21507 - DNA, 201 bp, Bos taurus
tgtggtgtagggggctgggtgctcctagatcctccccaagttttagaatgaattgtatgcaatataagagcagaacccatggacctattgagcctggaccaagacaggcctggtgtatacattcttagcatatagaaatggcatgctggggaaggccagtagacattctgtgcataagccttgtggaaggatgaaatagaa

SEQ ID NO: 21508 - DNA, 201 bp, Bos taurus
tacttgtaagttatcccagagagtaatctctcagtgtgatggtgagaagcagcaatgtgccttactggatgcctttggatattaaatgaggattaactctgtttctcagaacagtaccaattatttggaaaagaaatcaagggcctagagtaaaatgaaacagacacttttcaccagactccaactaaattctcttacaaa

SEQ ID NO: 21509 - DNA, 201 bp, Bos taurus
acatgttccttaagatatttcacatccttaagtagactgtggggtctcagagggcttatatactatatgccctatgtcttatgtctcttttgcattcctgcaccttcttgcccaggtacccaacaaaaggccgtctgtgtccagtggatttgaaatttattttcttccttgagacatggataataatgtagaggtcttatc

SEQ ID NO: 21510 - DNA, 201 bp, Bos taurus
tgatacccagctttggagatctagatccttgaaggctacatttttcaactggctacttcagctcttttagctcttcatctaggattgctggacagttatccctttctaacctaattaaagtcagtgaaattgtaattcactggacatgtaaaatgccttatcacctttgaatatccaactatagatgcccaagtatttctc

SEQ ID NO: 21511 - DNA, 201 bp, Bos taurus
atctgggagataaagtttgatcactgaagagctgatatcttgaagaaatgtcaatacctaattaagaaaagtgaaaacatcatttgaaattaagattttttctttgtgccaaattttatttgcacaccctttgttttggaaaattagggtttgtgagagagtggggagtattcgtactgctaataaaaggtaagggagccc

SEQ ID NO: 21512 - DNA, 201 bp, Bos taurus
actgttagctgcttcagttttcaaaaacaaaatttgagtagttcatataatctggagagagaaataaatcagattcccttacttaaatattatgttgtaatagcctggtgctgagaacagtcctttgttcaacagaactgactgaaacctttctatcacttggcagagatcacaccaggactcaccgtctcagcaattgta

SEQ ID NO: 21513 - DNA, 201 bp, Bos taurus
agctctttatatggttgctgttgatggtgtaacaaaaaagaaagttcaccaaagtaaattttaaaaatatactaagctttactgaatgattcatggacccggaagcctcccatctaatgagtagaggggaactgcaatggtccacagaaagggaaaggttttcagaggcaggacaaagaggtaataaacaaaaaacacaat

SEQ ID NO: 21514 - DNA, 201 bp, Bos taurus
tgtttctatttcttcctgatgaaaagaaagtattcgtcatcacccagagttgtgaacaaactaattcaaggagggtaaaatgcagatactttctgacatatgaaggatcatcttaattacaggttgcctgctttctcattcaaattgaaaagttgaatggaatggtatgaatcacttattatacttgtttattactagact

SEQ ID NO: 21515 - DNA, 201 bp, Bos taurus
aatcaataataataaaaaaataccacacagtttagtaatagagtaagaaagtgatttgttaattagcctttggatatagttcctgtcagcatagggtaaatagtacttctacagccacaaggctacagataaagccaacattattgctggcataagagagagatgggaagaacctgagaactcagcttattgctaagcaaa

SEQ ID NO: 21516 - DNA, 201 bp, Bos taurus
ataaaggctttcccagacaaatagaagccaaaggagttcatcaccactagacatgccttacaagaaatggtgaagggagtttttctactgaattgaaaaggcaaaagtacacaaaactttaagtaaggtcataaattgacagacggaactagaaaactgctactctatatcagaaaaggttgttaattacaacataaagat

SEQ ID NO: 21517 - DNA, 201 bp, Bos taurus
taataataattattataataacatcttgaatttatatagcacctttagcactactgtctcatcagtcagctgctatttctttgatggtcttcctcttgatacttacataaaaaatggagagatggagagaacagaacccttgaattataaatattactttataggatcatttagttgaatacggcgatgcccagaatacat

SEQ ID NO: 21518 - DNA, 201 bp, Bos taurus
tctgaactttaatttttccctggagttaacacagttggaaagaagttaatattcaaatttggaagtgccctataatgttgatattttattactggggtgaattaatgctgtcattttatacttaactgcagaacctctaatgcagctagctggaattctgagtggaaatgaatgaacttaaatcttgtgaaaagaacagcc

SEQ ID NO: 21519 - DNA, 201 bp, Bos taurus
aaaaagaaattgaaatacttccaaaagcaattttctcacttaaaacctgaaaagctctgcttttctccattcaacaagttaaaagaaaacagtaacaaacccaaagagattctttgaacgccagatatactgaaggatgaggttctaaagataaaaggtaataagcttacatatgctcagacttttccctatcaccacttt

SEQ ID NO: 21520 - DNA, 201 bp, Bos taurus
gaaagaagaatgcagaaggtgagaaaagtttctaggtaaaagaaacagaaacttgtggtctgacaaagaaattctttatagactaaaaaattgacattcataggatttatttaacctaatactcaagaataaattcaacaaactctttttaaaacttggcttaaaacagaatcttttagccagattacaaaacaactcctc

SEQ ID NO: 21521 - DNA, 201 bp, Bos taurus
cccagcaatgtcacagaaaagattctggggcagagaccatctgtcatgcaagatagttggcaatattaaagcatcttgccccaggcctggtgtcaagtatgtatatgaatatgaagtgaactgagtggaatcacaatgttcttaaccatggttattgcatctactcataggtatactttggcctaataagaagcttgttaa

SEQ ID NO: 21522 - DNA, 201 bp, Bos taurus
tcgtgagtaactgaagccacagaaagcaaagccgtggataatggggaccactgggcacattctcaactattcccacatctgtgaagttgatgtcataatagcactattttattgagacattttgaagatggactgacataatagctataaagtatctagtgactgatacaggccaagtgcccaggagatgtacctgtagtt

SEQ ID NO: 21523 - DNA, 201 bp, Bos taurus
catttattttatacagagtagtttgtacctcttaataccctacccttatcttgccctcccacttccctctatcctaggtaaccactaattttttctctgttagtctgtttctgtgaacataatttttaaatgaagtttttacatacattaaaagccatgaaataccttaaaaatcttttatttctccccttaaatatcagt

SEQ ID NO: 21524 - DNA, 201 bp, Bos taurus
agacaaccagatggcttcagggaaaattgtaccctcgatacatgcctaaaacagcagtgtaagatgtaactggctgacaatcttggttttggttagggccgcttttttattcacggtatgctgggaactcaggggatgaggtcagtctctacccttaagactcttatgatggccagacatagtatttccctctgtcgtcaa

SEQ ID NO: 21525 - DNA, 201 bp, Bos taurus
gctaataaggaactggcaactaaaatttaggaaaatggagcctctgttacaccaagctttgggagtctcacacggacagagggattagcaagtttcggaccctgtgactctctaaatgccatcttggcacacagaggtcacatgttgtacatatttttaggaaatttgaaccattctaaaagtgaaattaattttacaatg

SEQ ID NO: 21526 - DNA, 201 bp, Bos taurus
gtaattcatgtttctcagaaaggcgtggatttcttttaagccagcaaattctggtttgaacagaaatcatggcctcttggggctttcagccttcctccatcgccctcttcctcggttgaagatcactttgagtcttgccaaactcccttctgcacatcctgggtactggaattctgtgtcaggggacagcacgacgtgcga

SEQ ID NO: 21527 - DNA, 201 bp, Bos taurus
atgtcccattaatttctggacaatgagtaaggggccataaagggcagattggtgactggaaaagtagagagaacgtctttcctggttcttctcagacctccctgggtcttagggccccaactctcttacagtcccgtcttggcccttgtacctcaaacactggggtttccagggctctttgctcacacaagtgctgttctt

SEQ ID NO: 21528 - DNA, 201 bp, Bos taurus
taactttctttttataatcgatctgtaagtattaaagcatacagtaattttccgtatttttaaataaactattttgagtactggctttatgtattatcaagtgttatatcttagttatctttgggaataactataacatgctatcgggcttccctagtggctcagattataaagaatctgcctataatgtgggagacctgg

SEQ ID NO: 21529 - DNA, 201 bp, Bos taurus
tacagcttattttagaatattagtacttctgcaactaattagccaccatctatggactattgcttgcttcttatttattctaatatggccaaagagtgtagttagcaaatgtaaagatggctcaaggcaaaatttaatatacaaacataaaataagcttcatgcaaagctctgaatgggaactgaggaaacagaagttttt

SEQ ID NO: 21530 - DNA, 201 bp, Bos taurus
cagttttgggagccctcatttacttttggaggccagaaatcgttgatggctgtgatgtttcttgtttgttgatataacaagagatattttcatttcacaagccctgtcttgagaaaatctgatgactgacatctacacaaccatcaccagtgaaactctgaggagaggaggtagactaagtttctagaccatctttttctc

SEQ ID NO: 21531 - DNA, 201 bp, Bos taurus
catgacatggaagacttaattttcaaagattttttttttttagatcttgaaacaaaattcaaatcataaaaattttacataacactttgaatgtttttttccaatatatacagacaaatattcagagttgagatgttttagtaccatgctcactcattattcttcccttttcatattgatagttcttttttttgaagtaag

SEQ ID NO: 21532 - DNA, 201 bp, Bos taurus
tggacctgcccatgaacaagcagtaagcagaagccaaattcctatgtggctcccaagggacaggcaggaactattccttctgattatttattgatgagccaactccaaaggtagtagcctgtttcactgaatagggcatcttcacaatttggtcttcatcttgaatggcagccaaggaattcctaccaggagttaccaaga

SEQ ID NO: 21533 - DNA, 201 bp, Bos taurus
gatattttgaaagaaactttcaataaaaacacattttaaagtcagttcttttaggtttgtaaaaatagatgttcagttgtagggaggtaacatatcttaagactcacagaacaaagcaattgtgcgttcaaaccagagctttgtagaatcatgcttttgagtttcactgttactattcctattaagaatgctacagtagaa

SEQ ID NO: 21534 - DNA, 201 bp, Bos taurus
gatattgaatggacatcaaacacaaatactactatgaatataggcatccactacccaagcactcagaaagcataagggcataatggaaaagcagcaatacagtaataacatgtctttttgagtatcccagatttctagcacatatctgagtgccgcttcatgtgaaaatgaaaactagagagagacctacctgggatacgg

SEQ ID NO: 21535 - DNA, 201 bp, Bos taurus
tataacaaataaataatagaaaaattaaagtttaaaaaagtttgtggttagtttaaaaactgaattattaggtgtggctagagtaggccactgtgtctgcgtgtgtaagagagtcagagaaggcaaagcctaagaagcagaaagggtgataatgttgcaaggaaatagaagtttggggtcttgtcaaactaagaatttgtt

SEQ ID NO: 21536 - DNA, 201 bp, Bos taurus
gcattactctgtagaaagcttggatgtttggcatcattgcctttgcttggaacttcagctaagactatgaactatgggaaattcttacttaatatccttccacaacaatttaaggaagcaattatatttggggtaataagaaacattccattacccattaatttttgatttatcagtatatggtgtatccaaaggcatagg

SEQ ID NO: 21537 - DNA, 201 bp, Bos taurus
atggccctccatgtcttctgaaagtacatgccagtcagagagaacacagaataaaatgcacagaaccagggaaaaacaaaacttgtttgaaaagtggtaggtactgcatggacagtagtttggaaaacgaaatcataaagttcgacaggggtccagttgtggacagggaaatgagaacatttacttgcatacttcaagtca

SEQ ID NO: 21538 - DNA, 201 bp, Bos taurus
cttaaagagacaaacaagcctttccattctatggtaggagagctgccaggaatattctgccacagtactcatgactgtgatcttgttctttcatcagccagatgaaaatacataaaatcctgggaaaatcaggacattaaaaaccaataggaccactgtctattgagaagtcacaaccaaacagagatctgcccccttatt

SEQ ID NO: 21539 - DNA, 201 bp, Bos taurus
cctatccctctattgtcctttacaccatctctctcctgtactgataatcactagtttgttctctgtacctgtgtgtgtttcttttacattatgttcactattttattttgagattccacatataaatgatatcttacagtatttgtctttcttcgtcaaacttatttcactttcactttaggataataccctgcaggtcca

SEQ ID NO: 21540 - DNA, 201 bp, Bos taurus
ggaggtgtgggtcggcggggctccccagagggacgggggcactggaaggtcccctttggtgtaaagtctctgacagtaaccctgctatagagcccatagaccacagggctgggtcacctcaggcaaaactaccagggagggaatgcaagcccactcatcggcagataactggattaaagctttactgagtaggccctgccc

SEQ ID NO: 21541 - DNA, 201 bp, Bos taurus
aatttttagtttgtgagtattttccaaaatgaaacactgttatgtaagcaattttcacacagaggcacaaaggaatacttccaatgggaaaaacaattttactgtttctttctcctaacatttttatccattaatatgtttacatggtatatacatatttaacacatgtctaacagcatttttctgaaaaacaggtaaaca

SEQ ID NO: 21542 - DNA, 201 bp, Bos taurus
accacacaaagcaaagatccagcttctagcttctctctgctgggaatggcacatcacaagatctcttagaagacatcggagccttcttaaagatgcataatagagaaatcttaaggacatatgggagaacaggggagggggacaggaggatcctcacacacttggcacaaatggaagagaaagcaggaaaaagagctatgc

SEQ ID NO: 21543 - DNA, 201 bp, Bos taurus
tctttaaacaaaatactcgttaggtggtctcagagcctcagtgacactcatagtatgaagttttcgccatttaaaagtgctgacgttgataaaacacagtgaaagaattcactgcacaacactgttttcactttgtcaggcactctgtagtggcttaagcaagatttgaaattgtcatagtaatgtaaataggcatatcat

SEQ ID NO: 21544 - DNA, 201 bp, Bos taurus
caagaattctataatgccacagtaaaatagtctgtttacattctgagggctataaatatatagtttagaaatgaagtacagcagacattaaaaggtaggcgcaattactgatggttgaggtatttcaagattgcagagagcaattaggaatagttatgggacttgagggaagagaataacttagagaaatggaaagggaag

SEQ ID NO: 21545 - DNA, 201 bp, Bos taurus
tttaccaaagaatattccttattaataatgttaaatagcatggggaatttctttttattaaggaaattgtaaattatttctgttattattactatttttaagataggaataataactaggaagacatttgtggaaactctttttgtcttagttcttaattacattctctgggttgaagcctgatgaagttttgtgttttcc

SEQ ID NO: 21546 - DNA, 201 bp, Bos taurus
aggtgagtatagaagatgtgtctaatgtttaattaatattgtgtctaatatttaataactatggatatagctatccttaattttccaaaataggaacaccattctgtgtcctgtggtaaaatcatacacatagtagaggtccttaccctgaccagaaacttcagcaggctagattgaggagcagattttaaaactattcaa

SEQ ID NO: 21547 - DNA, 201 bp, Bos taurus
caatcatcagttgaattttaggacaatgaccacagtaagtgtctatgctttgtggaaacctgaagggcttacagataataggattatggctctactttcattctctgtgaacttcttctggggcaaatgcagaggcaaagtctctttttcactctctgggcctgtctcactgaccgtagacaatttgctgaactttggacc

SEQ ID NO: 21548 - DNA, 201 bp, Bos taurus
acatgatttaatctcttggaaaaaggggaggatcttaccttgtcagaacacaatgctgacagatcaatatttgaacaaaagagcaaggtaagcacatatgtgtgaggagaggttagaatggtttgattagatcactaacagcatctatcagagataccaattagggagtagaactctgtgagatattaagatggggaatct

SEQ ID NO: 21549 - DNA, 201 bp, Bos taurus
gatgttatcttctccaagagatgattcatttttgttttaggcaaacaggctgaaggcagataactaatccaatcaggaattgaatcttttctaaattcttcaggagggttagtctagtctgtttctcccttgctttcaaagagcagcccagtagaagtttcatctggcagcttggattatatgtcagatctttttcttcag

SEQ ID NO: 21550 - DNA, 201 bp, Bos taurus
aaatctaatcatggtttgaccaataaatgcagtgataatagtcactgtaaatggattaaaaacaagacggaactaaaataagactatgtgtttgtatgataggaaagattaatgatagtaatagagagcgaagcaccataagtttattataaacatagaaaagtggagatagcaatatttttaacctacagttaagtcaat

SEQ ID NO: 21551 - DNA, 201 bp, Bos taurus
ccttgctcattgcaacttcttgaaaatagtttgcatttgtatctgctgcccctactccccttcactcctcatcaagggtgtttcccttgcaaccttactgtgtccctactgctggtggaaactgcacccattgggtctcttcccagttgccaaattcaatgaactcttggtgcttctaagattcagcatttacttttgttg

SEQ ID NO: 21552 - DNA, 201 bp, Bos taurus
gaagaaggtaaacactaaggccagagaatattatgataatcataacccaccatacaatgtgattctctttcctactctaccagccacacacgtgccctctcaactaaccactgacaacatcagggctttttgctagttttaattcctccttgatttataggagattagtatctcataatatatatccataacagtcacttt

SEQ ID NO: 21553 - DNA, 201 bp, Bos taurus
ctagtccagcattctccccttttccatcttatcttcttattctatcctgctctctctttcttttcccatctcccttctctgtcctgtggagttaggggctatgaggaacagactgagatctgaaatgccagcaaccatggattcaaattccaaaatgctaacttacacgctttgtgttaagtgcagtgtttgggtagtgtt

SEQ ID NO: 21554 - DNA, 201 bp, Bos taurus
atcttgttgggtttcttaactaccttttaaaagaagccacatgccaagaaccatcttcaagccatagaatcagaatgagtgagagctaaatggaaccttaaatatcatccatctggatccaccagtttctgaggaaactgaagtctgggtctcagtaagccactagcagatcccatatcatctggctctggggacattttc

SEQ ID NO: 21555 - DNA, 201 bp, Bos taurus
agccagggatctggcaagcgctgttctattactaacagcataagtctgcttcagggcaagccagacactccaggactttgactaccattttcatctaagtggaaaagacatggttcacaaaatgtttcacataataggttcagtacgtttatggtccacatagatatatgtaaatatcacacctatgaacagtacactctg

SEQ ID NO: 21556 - DNA, 201 bp, Bos taurus
agggacagtgcagtcacagagcagctggcttcaggaaatgctccgcacagggcccagcactgatgatgcaaccagcaggggccaaggtttgtgaggcctccgtaggcaatttctaattctggtctcgtttgacccttcagctgtaaccaacactactaaccagatgttttccagccttcttgacacctcccctcctggtct

SEQ ID NO: 21557 - DNA, 201 bp, Bos taurus
ataacaagaagtgaagtaactgcccagataataacagtttgaaaaataggaggcaatggaagcacagtgcaaaacggtttacttggacccgaatgtacagacccgggttcttcactaagcaagacatccgcagccgtcctagcttcgttaatctgactccccaataaataaaacagtcgcgtcctaaaaggccacgaagcc

SEQ ID NO: 21558 - DNA, 201 bp, Bos taurus
cagttgtttctcacatgaattctctccatccaggaacatattttccaagacctggttagtcagtggggtgatgtttagttgaccaggatcaactggctgagtcattgtgtccacagtcatttcgtgactggtgaatttaatgaagctgatggaaaccaggatccattcagactctaagtctttgagggtaataccaatctc

SEQ ID NO: 21559 - DNA, 201 bp, Bos taurus
ttaatgtcacatattacctttcttttttatattacaatattaagaaaatatatctatgaaattctaatttcctggggatgacagcatttggattcaagttgtctcttgatcatgttacttagcctttctaaagtttgctcctaaattgctccctatatccaactttaaaattcaaaagggtttaaagtgagaaaatattat

SEQ ID NO: 21560 - DNA, 201 bp, Bos taurus
aagggccaaagggcagaagccagaaagaataaggccttgaaagacgagtggggtgtccctgggaaaagtcatgggaccacagtgcaggcagagagcccaaactgagctgccgtcgaggcctgagcaaacagtgcatggggaaacagcaagcgctcgcatggaacccgaaaaggagaaccgctttatctgggtcagccctga

SEQ ID NO: 21561 - DNA, 201 bp, Bos taurus
gcccagaggtttgcatcttcccatacatagaatgcgaaattgcttaacgtgacacctgatctttgatgttcagactgcctgctccctttgttgcaaagttttatgtggcctgactcctctgctcctgcctccttgcagcagttttctcagagctactgagatgctgtctcctaggcttggagtcctaaacgttcccaccaa

SEQ ID NO: 21562 - DNA, 201 bp, Bos taurus
cacaccggacctgggcattcagtgggcagcaggaggctgccaaggaggcataaagtgaaccccgctagaggacctggggaggacactgcagtgataatttctactttaggagctttgcccagggctgacctgcttaaggtgcaaacataaataaatcatatacaataaagactctgttgccaagagctgcagggcagaaaa

SEQ ID NO: 21563 - DNA, 201 bp, Bos taurus
tttacagctaacacaactcgtttatgtgtctggccttgtcttttatagatgacgtttggaatctctgctgtacccgctgtattccacagcactacaactccgctctgttctcctccatttgtggcccgttatcttacaatgctttggagcttaagcctgcactagagatggcaaaggatctctcctggataattcctcttc

SEQ ID NO: 21564 - DNA, 201 bp, Bos taurus
taaggctgaattgcatcagtcatgctctcctcttgtgacaagtcctttgaggaagttctaagactccttcaatccaggaaagaattcatttgatcaatcccttcattgtaagaattcctctctgatgagtagttttatttttgaaaactaaaagaaaccattaagtcatgaaaatgaatctctagtgataaagcttctagt

SEQ ID NO: 21565 - DNA, 201 bp, Bos taurus
ttttctgggagataagaggcaagcactggttgtttcctgagtcctgacgaaagcagtgtttggatttcacaggctctggcaatgtggccttgaggacttagggactaagtgatcacagggtcatatttatggcagtgcacacttgtggagcactgccatgctgctctgtgctctgggtgtcagtcattgtccactctctgt

SEQ ID NO: 21566 - DNA, 201 bp, Bos taurus
ttacagacaagccagcaaatatctgagtctaaagagatatgttatgcagaagctggtgtattaacttctgttgcacaaaatgtcttcactcctctgtattctttgtcctaaaaattaatatcaccattcacccatgttattcaagctaaaaagttaggagtcattttgacctaaagtggtatgcacccctgactggacctt

SEQ ID NO: 21567 - DNA, 201 bp, Bos taurus
gctgcgattcatggggtcgcaaagagtcggacacaactgagcaactgaactgaactgaaaattaagtttattattatcaatatatgaattgatgtcaatacaggccaattatgtgagattggatttaaaacatgcaggtaaaaagtaacacaggacatcactttttcttttaattacatatgattaagaaaatggttttaa

SEQ ID NO: 21568 - DNA, 201 bp, Bos taurus
gtgtggaggcctcatgcctgctcctgccaaccccacagccccagcaaccattactctccaaaatcctaggttcttgtgggtgtgtgctcagttgcatccagctctgcggccccatggactgcagcccaccaggttcctctgcccatggaattttctaggcaagagtactggagtgggttgccatgccctcttccaggagat

SEQ ID NO: 21569 - DNA, 201 bp, Bos taurus
atgataaccgtactgtatcacacatcaagctccagtgtaattgcctgccttctcctgtttttcctgtcccttagtgtgcatgggcttccctgataactcaattggtaaagaatccacctgcaatgcaggagaccccagtttgattcctgggttgggaagatcccctggagaagggaaaggctacccattccagtattctgg

SEQ ID NO: 21570 - DNA, 201 bp, Bos taurus
agatcagctttatataagaatttgcaaaagtattacatggggtaacagagaacacaggtagtggagtgaggtgcagagagctggggtgagaatcaacaagcgctgtctgggataacttgaaatcaagctgcttaaaatgtcaaggacctcctgggagcaccctatggttacaattaactctggaggggagaaagctaaggc

SEQ ID NO: 21571 - DNA, 201 bp, Bos taurus
acatgtatccacgtactctgtattttctctccaagcttagaagctattatggtggcaaccttgacccacagttctcatttgaggtgtttttctttaccttctgagtatgtaaactctttcaattttcattttctttttgaatcatgtgcttctggtactccagagcttaatgagtgtggactctgtccagagctacagtca

SEQ ID NO: 21572 - DNA, 201 bp, Bos taurus
tggctcctttgaacaagaagccaattatcaacttaggttccaaatcctatacagctgttccctcaccttgagctagctgacttcactgttaacttgaaaagtttgatgtgtttgtgtctgtgtgtgcacagctcaaatttacatttccaattaaaacaatgtccggacacccataaaatttaggtaaaagaaaaggtaatt

SEQ ID NO: 21573 - DNA, 201 bp, Bos taurus
gaatgttagcaatgctagaacaccatgaccaaggtcagtctgtcaaggaatattgctcagtgccaaggtccccagtttagaagagggggtaaggacaggcagttcctagttttttctgctttaggtcagtgttgccccaagtgattctgatacacttccagaaaaatttctcattagattcagatatctgctagacagaga

SEQ ID NO: 21574 - DNA, 201 bp, Bos taurus
atacttcttaagggattacattgtgattagtgatttatgaaaattgtctaattgtttcttttgaggtaggtgctattatttctatcttattatttctatcggattggaaaatggaggctcataggaatgaaacagtttcctggtgttactcacagtcataggagaagcagggtgcactctcacggtagaaacaaggaagtc

SEQ ID NO: 21575 - DNA, 201 bp, Bos taurus
tttatattacatatgtaatgattgtttttgattactgtctttaaaattacaagtttccctacagtcatttttagttgtctgccacatttgagtacaaggcactagcaacaggactggggtttgttgactgaagatatctcaacatgcagtctcttgttcagttgatgcaaatttggaggcagagtctgtttcctgatattc

SEQ ID NO: 21576 - DNA, 201 bp, Bos taurus
atagaataaggaatatagatgtaggagcataaacattttgagagaaaaagaggtcactgaacgagtgaccacagcaaacaaaaaatagaacactcatttgtaaaagttaaaaaaaaatgttcctctttgttaccttgtatccacaaaatgcatgttttaaagcaaaaacccacatggaataaaaatatagtgaattttaaa

SEQ ID NO: 21577 - DNA, 201 bp, Bos taurus
aatctatttttttggatatgttgcattatgagttcttagcaaaccatctttgcagtcccataattaacctcatttgtttatgttatatggaataacctgcataataatagcttgtgaatcatttttcattgatatttataagtaattttgatgttaaggtatgtattgtatgtgtgtgggtagttctcttgagtaaatact

SEQ ID NO: 21578 - DNA, 201 bp, Bos taurus
tccagacaaatttctctgtatcttcagaatctcaatccagcaactataagtgcaccagatatgaaaaaaatgcccccaaaatatgtagtaaagagaaagccagctgtaagcacgcatagcatagtgtagatttagagcacaggctctacattcagagagactgagtcttccttttcacttagtgttgagtcttgggtgatg

SEQ ID NO: 21579 - DNA, 201 bp, Bos taurus
aagttttgtctgattgactctcagtagattttggagtggttgtgaatgatgcaaagctggaaactgccagctttacttcattcacttcatccacttcatttacttcatctaatggcattagatggtagaggttgaagtcaggcagcaggtgtggacagtcagtcagatggacgagtttccacagtgtctccctcataaagt

SEQ ID NO: 21580 - DNA, 201 bp, Bos taurus
tatgcttttaaaggatagaatcacagtacgtttattgtcactctatataacccttatgactatttaattctaatttttaatctaaaagaacatgagtagaaatggttatctgtagtatcccctttctcactgtagagcctgttaaactctaatcattttctgaagacatttgtcaagacaaaagtgcaacacagcattggt

SEQ ID NO: 21581 - DNA, 201 bp, Bos taurus
atcttcctgaaacaatcattatattgctgcttcttccagataaatctgtcctgaggctccaacaatcatgataaatataacactttctaatttaatgctactttgattactagcattgcaacattatttttttccaatgttttattcttccctagggttttagatctttatagagcagactagcaccaaagcaccatttac

SEQ ID NO: 21582 - DNA, 201 bp, Bos taurus
ccaggaactgacatttgcttgtgacccttgggctgttttcaagggcacactcttgcctgaggggctagtgtcaatttaaagcccctgccagccacttggccgaacaaaatggatactgagtcagtaacaccgtgaagtagcttatctaatcacaccacatgcatccagcagcagctgcatccactttcccataaataaggt

SEQ ID NO: 21583 - DNA, 201 bp, Bos taurus
agaattaaggagagttccttaaacttgatgcagatttgattctaaataattatcttaaagcctgaaggtgcaaaggagcaatatatctatcaaggaaagtttgtgcctctataattcctcaatcaaaatccatggctgaatctgttctacaaccttaatttgttattcaaatagtcaagactgttatttcacttactaaaa

SEQ ID NO: 21584 - DNA, 201 bp, Bos taurus
tttctcaggaaagttgccacatttggggcctacaggtaaaccatctgtaaacagggggctacttgaaatattcattgtcttggaggcatctaccaagtgaacttaagtagctcatatggagtggaagcaacgttgctcatagactctggaatcctggcttctcagaccctgtttagtggttgcctcaccttgaacaagcca

SEQ ID NO: 21585 - DNA, 201 bp, Bos taurus
tttcctgcataggcaggcgggttctttaccactagtgcagcctgggaatccccttatataggagagggggtcaataaatattaatcccattcctcaggcccctcccccttgtcaacctctgctgacattgtctttaacaaatatatttttgtatatattttctcctctgatggagatatattctacattattaggggccac

SEQ ID NO: 21586 - DNA, 201 bp, Bos taurus
tatagtttcatatgataaagctaaatatatatttccaaatctactgtttttatataaatgctgccaacaacagatgacttgtcaaaacagttttaaagggctatgttcatagtattttttataaatctaatgaaccaaagtcattatactcttctattcttaaacttagggagtttgtatctgcttctgacatgttgaatt

SEQ ID NO: 21587 - DNA, 201 bp, Bos taurus
aaaactattttcctaatataccacagaaatctacatcttctccatgtattcactgacataggaccatgaaagtgtgttgtttttatgagtttgaagtatagtcattaattgatggtcctgcgtttttgaagctcagtggcatactgtttttccaaaggagactttttttcatgaatgacataaaggtaaaccaccatttaa

SEQ ID NO: 21588 - DNA, 201 bp, Bos taurus
aatccaaatcatcctaaatgtctggattgtggtaaactagacaaaaacagaaagaggtggtcaagtggagaaaagcctgtgctctgctgcagatctatagtcaggctccaggatgctatgaggagggcttgctcagctctgaatcttacattcaggcggtgtgtgggggatggggagacagaggaagctgggggtcactca

SEQ ID NO: 21589 - DNA, 201 bp, Bos taurus
ccacctcaaccagaccagctacaactgtgtctggtttatctatgaaggttctgagtaagattttacttgaaattatttttttcttgaaaactagaaactagatgatcttaatgagtcctgtaaaccaaatcttcaaaataatcttcaaaagttttcccccaaattaacttctccttcagttctcttaggctaatgataacc

SEQ ID NO: 21590 - DNA, 201 bp, Bos taurus
gaagggttgattgtatttagattagagttaatcaagcaaagctgcagctctccagaagtgagctggaggattcatctttgaaatttaactcaaatcatttaaaatgaaaaaaaaaaaaaaaaggtgattaaaatttcccttttttccctccaatcctcctaagtccctaaagaaatttaagagtatcatcagattgacagc

SEQ ID NO: 21591 - DNA, 201 bp, Bos taurus
aaataaaagcctggagattgagcatcagtcttctgagaatggtctaaaagattttactaagcattccatgacaaacaaaactgttgctatagctttcaaacgcatccttttgtgtgcagtacagtttgtcgaagttaagtaaatatgactcctggttacatgtagacctctttaatatctccaacacttttgaccactttt

SEQ ID NO: 21592 - DNA, 201 bp, Bos taurus
ggtggccatggttcaaagcctttcacggtgcagtgcacaggcagtcaagcagttggttggagctgcagtctctgaagacttgactaaggctgggaatctacctccaagctcactcactggcctcagtgccttgctcacagctggccagagacttcctgaagttccttgtcacataggtccctgtagtgctctaatcaccac

SEQ ID NO: 21593 - DNA, 201 bp, Bos taurus
catgacacagcctgtttggggcccgggtcagaggagtgatgtatccagtgaaataggggtgactgtattcccaccatgaaataactgctgtgtcctgatcacatgatgtttgttcaaagtggcctcagctatccagagtcgccaactttctggatgagatgaaaattcccgggggtcactaaggacatctgtatcatttct

SEQ ID NO: 21594 - DNA, 201 bp, Bos taurus
ttgatgaacagtcttctgtgacctggccctcccagggagaaaagcagctcttggaggcagctggggaaaacatcaaaacattgttgaagaaggtgtactttggcccgtagagagcctcagtaatgaaaggcacaccgttgggagcgaaggtaaatgagttttgatcaggatgttcatgccctgcgttaaaattcctccagc

SEQ ID NO: 21595 - DNA, 201 bp, Bos taurus
aagtaaaaggtgaatcaataaaaacgttaaataaaacagaaccaactgccaaagaaaaaccagacacacatgggaaataacagtttctatgaaaccacaattgcggtcttgtgcatcctgcccagcaggatgctggcttgaggggtgaaatggaggaagcccacccctcaagactgctctgtgtcttgatgtcacaggttc

SEQ ID NO: 21596 - DNA, 201 bp, Bos taurus
cttgtcgctgttgagtgaaaaatgaatgagtggataaattttatgctggtagactgtagttataactttgtcaccagttcttgtgtgaacctgaaaaaaaccacttaaacttactgaggaagatgagtattttctgtcataggcatcattgataatttaaagaaatgatggattcatgtcccagaaaaatgcatatactca

SEQ ID NO: 21597 - DNA, 201 bp, Bos taurus
tttatttggtaatttaggttgcaaaaaatgagggttggatactttaatgaagctgctattgggtgggagggttgcccagtagacagggcagaatcctaagtgtcaagcactatactccacatgcagcccattgtcttttcctgcaggtgcctttgtcataacgatgagtcttcagaattttcagattttatataaatgttt

SEQ ID NO: 21598 - DNA, 201 bp, Bos taurus
atattaaagtttgaaatcaccactctaaatttgtggcacatggaccatagaaattgggtttctagccttcctcagttgtcattttaattttgtttctgttttcttccttagcttgaatttttttcagtaatgatgaccacagacttctaatacctaggtgtcttttacttgctgttaaagcttattatctcctaaaagccc

SEQ ID NO: 21599 - DNA, 201 bp, Bos taurus
aggactgaaaggatctagaaaatgaaggttttttgttttacatatagagaggaagccatatagcactaaaaacatgcatgcttaaattatacacattaataaagagaaaaagaagcggggagtcccataaagttctagggactcttctgaagagtatgatacctctgggcttcctgcaaagaagggcttagggactagaca

SEQ ID NO: 21600 - DNA, 201 bp, Bos taurus
tcctggcatggttgggtcagggatgcagtcagagcctaacagatagaaaataatgtctcttcacacttcttgcagaatttttaacagagaaagcaaattcgaaaatgactgtcctggaattatggcagatttcaagctaactcgttatatgcagtttactgaagctttccatatgcctgcaggcaagtcagtatgtaagga

SEQ ID NO: 21601 - DNA, 201 bp, Bos taurus
tcagtaggccttccaaacgagtttccccctttcatcctctcccctccaccacgtctcccatcagtaacatttcagatcctcttagcacttttattagtccgctgggcctcttcctgaaggtcacattaagatgttaatagtggtttagtgggtttccctgcccaggagtctttaaaaaaacaaacatataaacttttcaat

SEQ ID NO: 21602 - DNA, 201 bp, Bos taurus
tgaggacaatagtggctgtggaatcaatcattcaattttcaaggacaattaaagatgaaaattaattatccaaaataccagaaagatattaatagtcccttatgggcaaaaatggagttgtaagtaggataatcatatgttatagcttgcctgtcatcctgatagaattagaaatggtggcctttttgtatcctcatttga

SEQ ID NO: 21603 - DNA, 201 bp, Bos taurus
tgtcatatgctgagttccattttatagccataaatgattgtggaatgctgaaatcacagttgtttattagttaatatgtttggctaaggtaaagaaatcactcaaagtcaagtcaataacatatgaatcataaaccataggtttaaagccaaaaggattctagaaaacaaaagcttagagaagcagatgtttaatatttca

SEQ ID NO: 21604 - DNA, 201 bp, Bos taurus
atgttaaattttagtttaaccttagtttggatatttcaaagtcttgtgtgtgtgtatttatatctatgtaaatgtaaaatttatataaatgtatctctcacagctgacagatcacactgatggttgtgaattttactgagcacactcagagggcaaacttctttcaaaatcggggtgttgaggtgtgcacatcagtatttt

SEQ ID NO: 21605 - DNA, 201 bp, Bos taurus
atgaattactggtgggaaaatattttggcatgctatacaggaaaaacttggtaaaaattagtgaatagataagcctaaactatgaacaataatcccactcttagatatataccctaaataaatcctcaatcataaggacagctttacatggattttattgcaataaacccttgtaaagaatataaatatttattaatatgg

SEQ ID NO: 21606 - DNA, 201 bp, Bos taurus
tgaatacagaccgtccagacaaaggccaaatccacagaggagcagtcgctcatggagtcagaattcagatgggaactggggctgtggcagaaatctgcccggtggaaactgtggccacagaacggacttctagaaagagatggaattacggagactccgattatgctagaaatgcaatccaaagcccagggagatggcaaa

SEQ ID NO: 21607 - DNA, 201 bp, Bos taurus
gaagctgctcgctacaacccacacctcctctgaggccacagagagcaaggatgtggcagcccaggaggggcggagaacaggagacagcagtggtggaacgcacatcagacggccccagacatagtcaagaaagtgggcctgaggtggaagttttctctcatgaacatcagaccacaacgcctcagctcactccccgagcct

SEQ ID NO: 21608 - DNA, 201 bp, Bos taurus
aaggagatagttagaaaaataaatagatttccaaaaatgaaaagtttataactgaaattataaactcaatggacaggtttacagcagaaaagtcatagcaggagaattagagaactagaagctgaacaaattatctagaatgaagcaaagaggtacaaaggggtgggaggaagcagtaaagaaactgagtcatagaaaata

SEQ ID NO: 21609 - DNA, 201 bp, Bos taurus
ctactgtatggccagcctattggatgttgccacccaggaacgtggatcttcagcaactgagagaagaatgaagagatagcttcaaatccacctccaggctaaagtccctggcagtgtgaaggccctaacagagctttttacccatcctcgggcttcccaggtggtgctagtggtaaagaacccatctgtgaatgcaggaga

SEQ ID NO: 21610 - DNA, 201 bp, Bos taurus
cttgcctgggaaatcccatgaacagaggagcctggtgggctacagtccatggggtcgcaaagagttggacacgaatgagcgactaaaccacctcaagtcatcctagtcagagatcacatttgtctgtctgtttcatacagtcctcctttggccagactgttctgataagcctgccgctctgccctcctatattgctagctt

SEQ ID NO: 21611 - DNA, 201 bp, Bos taurus
aaagtaaaattaggacttaaaaagtgtgttcagaagtgagcttggcatatttcagggtaagtgttaattctagtttcttacagtttcctttaaaatgtaggacttgcctatcaaaggaccatgattactgaccattggcaattttcactcattcatttatttgttcattcatccagcaaatcaacagatacataaagtggt

SEQ ID NO: 21612 - DNA, 201 bp, Bos taurus
cggaatggtcattaatcagttttacagacaaaaactaaagctgagaacagatgggacttttattatagatcggtcagccagaacagtttacaccaaaccagtagggaactgagcttttaaaattctgtgtctctgctgcattattatacccctccatttccccatccttattatacccacagatatagattgtgcttggac

SEQ ID NO: 21613 - DNA, 201 bp, Bos taurus
acagggcgctcagtcctacagctgcaaggaattgagttctgactcatcaattcagctcagaagagaacctcaggatccgaggaagatacctaatagttattggcctcataagaaccagagcacaaaacccagtcacatcacgcccagatgtttctcaaacagaactgggagttaataaaggagttttaagttgcataaaca

SEQ ID NO: 21614 - DNA, 201 bp, Bos taurus
atgttccatccttaggaaggaagagggacatcagtttcctttgtggtttgtaattagttgtcactgatttaactgaaatgacatatgatgaatcttaatagcttcaatatgaatacagtattatttgggccacaggtattgctacaaatgttgtagtatgataaatattgagccattatgaagactcatattacagtgtaa

SEQ ID NO: 21615 - DNA, 201 bp, Bos taurus
gaagaacctgcatgcttaattttgaaggtgaaagagaaagggagcaaaggcatgttactggttagtatttagaaggttgccatttaggtaaatctgtatgtttaatgtttgtatatgcagaaaccatttctgcaaggaaacgccaaaagctggaaactgggctccagggaggaaaactgaggctgagaggtaggaaagtag

SEQ ID NO: 21616 - DNA, 201 bp, Bos taurus
gctacagtccatgaggtgacaaagaattagacacgacttagtgactaaacgataagatcaagcacaactatagatgcatttgccctttgacccagtcaccccacttctagaattatacctcaaagatattagaaaaactactgggtgatatatgcataaaactattcacttagtccaatgtgtaatagccaagactgaaac

SEQ ID NO: 21617 - DNA, 201 bp, Bos taurus
aaatattccctaatgaaaatgtgttaacattccaagttattttcatgattcttaaagttttatcatacttgggcaagtttgatgatcctatttgaatataatcatcctacacatacgagccacgaaaacattaataattgtcactgtttacaaaaagagggagggaagaggaacatcattaggagaaaaatgactaaaagg

SEQ ID NO: 21618 - DNA, 201 bp, Bos taurus
agattcgtcaagcgaacgttctttcccgtttactgtcaagcccgtcgctctgcagaagcagaggcaagggtgggagtgacatctgcgagcagagcaaacacacgtgagcagtgggaaggagctgcggtgcacggggtcttacggcctcagcgagcagagtccattctgcggcttagtgtggtccagggtgctcccctcctg

SEQ ID NO: 21619 - DNA, 201 bp, Bos taurus
ctcccagcaacttcctcgagatagatgtgagcaacccgcagacagtgggggtcggccggggccgcttcaccacctacgagatcagggtcaaggtgaggccgtcttttcccactacggagagactcctgtggtcctggctgtccgccgcggaccctggagcgcagaccttcaaacggccacggccgcccaggcggggccccc

SEQ ID NO: 21620 - DNA, 201 bp, Bos taurus
acctactcactcactgttcctcatgcattctggtgatatactataactaatcatatatatttatatcatttgggtctataaaaaagattatttgtgataatttaataatcatgcaacttcaaatgttaggttttaattttgaggatcatttctacattttactccttttctttggattagccagctattttatgagggcca

SEQ ID NO: 21621 - DNA, 201 bp, Bos taurus
cactagaaggccttttcccactttgaggttatttaaaaattttctcctatgatttcttctaggaccgtcaggattttgttttatatatttaagcgtcatttatctatttgaaatttattttggtgtaagatgtgaggcttagaggcttccctggtggctcaaaggtagagaatccacctgccaatgcaggagatgagggtt

SEQ ID NO: 21622 - DNA, 201 bp, Bos taurus
aaatctccatctgcaaaatgggcgcaatgtagattgcggtcttttaagagctaacatcgctttgcaaaaggcccctaacaaacccctcaccggccctcctcgcagctcccgctttgtccccacgccgccctatcctgagagaccctagtttccaaactgtggaggagccgattcggaacttaaagaaacattcttatcaaa

SEQ ID NO: 21623 - DNA, 201 bp, Bos taurus
tagggaatagaaaaaatttcatggcatggcatgaagttgcacatgacttacgagaaggcttcagaaaagaatatttggtgaacaaataatggcccatagatgctcactgcagatgaactgtaacttgatcagccaattttttttttttttttaatgtttgtgttgttcttgactgggccatggtctaaaaataactcctgt

SEQ ID NO: 21624 - DNA, 201 bp, Bos taurus
atggttcctgtttttcttgttgaccaatcagtatatatctttctttttaaattaatttatcctttttaattttaaatagatttcaaagaaggaaagtaactttttttgtagccaggggtaggaaaatttattgccagttgaaggtcaacagcctaagcagtagtagattgggggtatttgcttactaaagtaatgctcttc

SEQ ID NO: 21625 - DNA, 201 bp, Bos taurus
tatatcatgaatattgtaatatatgtaaattatagcattaaatgcaaactactttggcattgcagtttttttgcaactaaaaataagttgtcttctgtctcaatcagatttctcagtatctctaacatttgaaactaaattttcatgtaccataaaattactgttacaattagactttgttaaaggaaatactgcccagta

SEQ ID NO: 21626 - DNA, 201 bp, Bos taurus
ggaggtggggatttgactgagccacagtgaggttgactgagtgaagttctaattagaatggaagaaaaatgatggagccatgagtctggccatggggagaggacatcaggttaaaaccatgagaatcaacatgttgtagagtctagccttgtgggtggtggatccgcctggcttcacagggcagagatggggtggactgga

SEQ ID NO: 21627 - DNA, 201 bp, Bos taurus
atgctatttcatacttaatagactacagaataatataaacttagcttttatatgcagtggaaaagcaaaaagactcatatgactagcagacgttggttcacgagttttaaggaaagaagccatctccatgacataaaagtgcaagatgaagcagcaagtgctgatgtagaagctgcagcaagttgtccgaagatctcgtta

SEQ ID NO: 21628 - DNA, 201 bp, Bos taurus
gcaggagggacagcaccgggcctgtaggaagtgacagcatcaggcatacttggaggagggaagcatgtctgaggtttctctgtgacacatctccttgggactcacaaataaatggggccagaggttaagaatggggcaaggagggaggtggggtagcacaaggatctttgtggaaatatgtatcttgattgtggtggttga

SEQ ID NO: 21629 - DNA, 201 bp, Bos taurus
attaagatggaaagatatataaatagcacttgataaaattacaaaaacttgtatttaaatttaattttctctgcaactgcagttagcattgtttttttccccccactggtctctgacatactatttttgagagagaaaaaaaaaatgtttttgctaccatggcaacaatatccttctcttgctttccatcacaaaccatag

SEQ ID NO: 21630 - DNA, 201 bp, Bos taurus
tttccaacacgattcctttcccactgtgcttatgtgtcgcatgtgtacttgcctctgtgtgagtgaaatggcttggcagcagggaggggagggccagcccgcctctagcctgccgtgggcggcaactccataggttttcactggaactcatgtaaagttttagatactggccactgccagctcagaagataattataataa

SEQ ID NO: 21631 - DNA, 201 bp, Bos taurus
gatattctaattctatgtcccatgtttgtcaaagtttttttcatttttttaatctccttgtgttttatgcttagaatttttaaattttagatttgctttttacatatatctgacagttaactagtcctctccagttatattcttctgatatttaagcccacgcattaaattttaaatttcagtgactggacctgggttctg

SEQ ID NO: 21632 - DNA, 201 bp, Bos taurus
taatgtgcttgaaatttttaattcatgaagtctgtaaactattatatcacttggaatgggggcagagtttacatggcctgcacagtctcgttgagatgaccggatcaggcagagattagtaagaagggacatgtcagcacaaacaaattttacagaaagtttgagacagaggtgttggccagcctggtaaaagtattaatt

SEQ ID NO: 21633 - DNA, 201 bp, Bos taurus
ttgttaggtctctacagtgtttgttttgtcctctttagtcagcacatacaaaacacctgaatataacctatttctaaagaacagttgtatactgagttgagtatcattaatgactgttatttgccttgaggaattttctgtctcccacccatacatggaacttgtttgattttaataacaactttatggatgaatggcatg

SEQ ID NO: 21634 - DNA, 201 bp, Bos taurus
gcatttactataaaatcaatgtagataaataaattaaggatttattatcttgtacttgattatttgtttcatctcagctcagcaggaaacagattagttataataccttttacttatttttcctcccatttcgaatcacttttcttggcaaacatttcagtaacttttatgcaagcatgtttgaaatggatacatgttgtg

SEQ ID NO: 21635 - DNA, 201 bp, Bos taurus
tgggttttcaatatgcattacaatattcaagatgctgggcagaggcagcagtccacgcggtcgcgaagagtcggacaggactgagcgactgaactcaaccggacctctctctctcttcccacaaacccctcacgtacaactgagatctctggatactcatatgtatctctggtactagcttgttgttctttggtacttgtt

SEQ ID NO: 21636 - DNA, 201 bp, Bos taurus
ttatatagtaagttaatgacaaggctggagttacaactttgaacttctatcaacctagtaaaccatgccttgctattgatagagccaactgtcgaccaaaatttctgctccccttccacagtacagacatgctaggtaagcaattacctagccaatttagcaatccagctgtggttatttgactatttctagcaggtttgg

SEQ ID NO: 21637 - DNA, 201 bp, Bos taurus
tataatatttctcttaggattggctgcatgtgtacatattttgggttaataataaaaagctaatagaaagttagaaaataaagtctgagatctcagatcattcactgaagggctgaaggcttccaagtctcccacttggtttcacttgggctttgtgccattggctaggattatatatgtttgaatatatatactaaaaaa

SEQ ID NO: 21638 - DNA, 201 bp, Bos taurus
atatttaatagtacactactaaaaatgccttctatttctcattttagtaacactactaggctagtgcagtacattttaaaggaagtgctaaacttttaatgcaattagaaaataatgactaaagggtttgtcattgaaaatgtgattattttactgcacagaaaacaaagcagccacaacacttctggtatttggaaatca

SEQ ID NO: 21639 - DNA, 201 bp, Bos taurus
aatatcaatgtgtaaagtgaaagggcataagccagtagtaagaatttctaggctaaaatgtgaagtttctaaatctcaaaaacatctcaaggcagaaaagtaactgcggcccactaacccaacctgctctgctgtgtgccttaggctgcacacccagaataagtacttttttcaaatctctaacaaggcatcaccagagtt

SEQ ID NO: 21640 - DNA, 201 bp, Bos taurus
tacagggaaccttttctataagaccctgtaagtaaatataaacattgaaatacaataatattagggtcaagagtgaagccattcaaagtatgctttaatactagttttgagttacatgggtcagacatttggatcttaatatattactttacaggataattgctatctaaactttgtaaaatatttcaaattaatataatg

SEQ ID NO: 21641 - DNA, 201 bp, Bos taurus
tgaactcttaaagatctgcacacagttccaaaatgatcagtcctctatattgatacaaagctataaggttagcattgggaaaactgtattaaatttgtctctgttaattcagacatctgaattccttagcacaatttttaatagttttaagtttaataataacttaccatgttaaaaacccaaaatacttatttacttgca

SEQ ID NO: 21642 - DNA, 201 bp, Bos taurus
gcaaattatcaaagaccaaaatatgttgagcaataaggcctggggcagaagagaaggaaaaatcaacacgaagcagagaattaggaagttccaataaagatagttgcttccatttccatctctcctctgtcacctaagtctagactttgaaaattgcctattagtggtctaccatccccagtatcctactttaagctacta

SEQ ID NO: 21643 - DNA, 201 bp, Bos taurus
ttcaatttgatgtggcttcagtattaccatttaactttagtaaattaactaagtagcttcagattcatagtattttgcaccttagatatgaatgccttaacctgtttcattatagtttgccaattaatgttatattgaaatacagatgctaaattttgtggttgatacagtttatttcaaagtgatcatgatatctctaat

SEQ ID NO: 21644 - DNA, 201 bp, Bos taurus
tttgtgtactttactgtacagtactgtatagagtacagtagaacagtatctttatttcaagcccaggatgtccagaagcaagcacaaaagcagcagtgacatagctggtacttttcaaggtactgtaccgaaagagtaaaaatgttttctttcttatttgtttgttttttattatttgtgtgaaaagtattatgaacatat

SEQ ID NO: 21645 - DNA, 201 bp, Bos taurus
aaatggcaatccactccagtattcttgcctggagaattccatgaacagaggagcctggtgggctacactccatggggtcgcaaagagtcagacatggctgagaaacactacaacactacaacaaaacatgactcctgtcctcaatgaaggcaatatataggaagtcttttgagctaggaatcttccaagggggtccaggac

SEQ ID NO: 21646 - DNA, 201 bp, Bos taurus
attctgggatacagctttaaaggtattctcttctatcaaaatcctatttaaaagtataaagtcaccccctaatcaaaagcaaaaatattttctaaaataccgcctgatttctactgagaatacatttgcttctgtagcatcttaaataaagtggggtgcttttcttaacttataaaactgtgtacatttgctacctccctg

SEQ ID NO: 21647 - DNA, 201 bp, Bos taurus
attttgtttataattcatgccgtactaaaactggtaactccttgtttctgatctgcttcagcaaatggtcacagaagcagagctagaagctagtgagcccatcctcggctgccatctcaaacccagcccccaccacccactcgcctttgcacagccctcttcaaatcctgatgagctgagcccatcaaaagtctccagtgt

SEQ ID NO: 21648 - DNA, 201 bp, Bos taurus
gtagtatttttcaggaagttaagtagaacatgatacattctttgaccatggtgcagtaaaactagaaggacactagacatttgctggttgactgaaataacgaacaggtaacaaaaaataaaagtacaaaaccaactctggatattttattgtatcaaagagaacatttaaaatacagttacatattatctaggaaatggt

SEQ ID NO: 21649 - DNA, 201 bp, Bos taurus
aagcgcaaagcacgcgtggttctctgaatccactgctgtggtgttctctgcacttccttctgtgcgcactcctgtttgatctccactgctttgaggtggaagtcttcccatttaatttgtgactttgggcttcagctatgtcctggttgctctgagaatgaactttgcatttctgctttctgttctttttgcccttggata

SEQ ID NO: 21650 - DNA, 201 bp, Bos taurus
cagagattagaagagaccaggtactagttctcatcccagaaggttggagactgctccatgttttctgcttctgagttcatcatggcccacttcatgactctcgggaataggcccaagcagaacaattctggggtggtagtttgtttcctctcctgatcaaggtagcagagcagagaggggagatgtaacattagcagctca

SEQ ID NO: 21651 - DNA, 201 bp, Bos taurus
aagaaaagccaaagttctctttaaatctgcaggccagattcaaagtctcagctcaaagcagccaggcaggaggagctcccgcttcttctcgcttattctcagaagaattggccttttgttttgtttagaccttcaactgattggatgaggtccacccacattagagagagcaatctgctttgatcagtttactgatccaaa

SEQ ID NO: 21652 - DNA, 201 bp, Bos taurus
acaagagttaagacagagatagtgtgaagaaatgacaacaagcctggtgtagaatctttgcggaatgaatgagatgactgggaggttgatagttgactgcgccagtagaagttctggttggtatagctgatagcaggcttccttggtggctcagatggtaaagaatctgcctgcaatgcaggagacccaggttcaattcct

SEQ ID NO: 21653 - DNA, 201 bp, Bos taurus
ttcagtccagaaagggctaaaacttgctgcccattggtttctcaaagtgaacaataaggaaatcatttggaagggaaaaagtttccagttttctttgccaatcagtgtcatagtaataaaattcagatagctaatatattttaaaagcacagagttagtaatgctgacataatctaatgaatctgctaaatgattaataat

SEQ ID NO: 21654 - DNA, 201 bp, Bos taurus
atgtcaatgtaccagtctttcaaatactttttctaagaacctgtgtatcctcaccttcttctaatttgatgtgcatttctgtataaacacttctaaatagcttacaggccaatccctcagatatctataatggatttgacattctttgaacatgtgtattctcatactattaattagtttgtatatttttgagatgatgat

SEQ ID NO: 21655 - DNA, 201 bp, Bos taurus
acaccaccgggataatatgtgcatgagggtcaaatttttaaaacattctcttttttgtctgcagggttaagagaagaaaacaaggaaaagataatgcctcgtgtttatatactcattgtttgtcaaataagaatattcttcctcaaatgaagaagaatccttttgaactttaccaactcaagcatgtagcttaatgattat

SEQ ID NO: 21656 - DNA, 201 bp, Bos taurus
tgaatacaaattttaaattaagtttttctttatgtttaatatgaataataattcgttgcctatggtaaggggctttgtttttcctccttttcctgcctcttttattttggctcctcctcaaaagtgaaagtgaaagtcacttagtcgtgtccgactgtttgtgaccccatggtctatagagtccgagaaggcgatagcagc

SEQ ID NO: 21657 - DNA, 201 bp, Bos taurus
tttccataggaaaagtgagtaaatgacaaatcaaaacttgaggcagtattgaattcacgttttactgatttttggagaagaatgattttattattttttatcatgtgaaaatgattatgggtctttttggaccaaaagactaataatgttgtatctagcacagttttatattccagcttaatgtctatgtctgctctaaac

SEQ ID NO: 21658 - DNA, 201 bp, Bos taurus
atcgttatgagattccgagtggcagagcctctggcctgtcaacatttcttgaatactgtagggagggggagcaagttaatgttcttcctctcagcagcccagccacccccacactctccctcatagcaactcagggaatgcggattccagtgcctgtgacagtgtggccatcctagcccccccatctcttgctccaccggc

SEQ ID NO: 21659 - DNA, 201 bp, Bos taurus
attcttgcctggagaatcccgtggacagaggagcctggagggatacagcctatggggtcataaagagtcagaaatcattgaagtgacttagcacacatgcgcacacacatatatatgctgaacaagaaattagaggcagctttgtattttatacatttctggttttccttaactttaatattacttttattttcaaaactt

SEQ ID NO: 21660 - DNA, 201 bp, Bos taurus
taagtgtattggtaattttttcaatttggacaagtacaatcttcagttctgaaaaactttcttggtaaaaaaatattttttatgttcttgaagtgaagtcacacagtcatgtccgactctttgcaaccccatggactgcagcctaccaggctcctccgtccatgggattctccaggcaagagtactggagtggggtgccat

SEQ ID NO: 21661 - DNA, 201 bp, Bos taurus
gtcaaatgaataaatatatattagccatgagtttaaaaaatagctcaattgtccagatgtattcaatctggcttactcaaattagctccactattttactgtcacctgggaattgactatgcaggtccactgctttcctgaaattttcgcatcagtaaaaattctacattattctgataagaatgtggatagtatagaaaa

SEQ ID NO: 21662 - DNA, 201 bp, Bos taurus
gggatgggattggagagcattgacctctaaacataatcagtatttgtgatttcaattcagttataacactacatggatcactataaaaatttgtataaagttgggaaatctattcccaggagtttcatatatagttactataacaactaccttgagcctaaaggattaaagtaattcaaagtatattaatccctcctgagc

SEQ ID NO: 21663 - DNA, 201 bp, Bos taurus
aagtaacatcatcaatagttaagatttataaaaatagactcacctcctaagaagtatcagcaatacccaaagcatcagtaggcagagaaaagtataaaatgaagtgtttacagagatctttcaataactggcaagtaatacagttagggagggcctttgagtacctagtttgcagtgacatttatggttgttagtgctttt

SEQ ID NO: 21664 - DNA, 201 bp, Bos taurus
tttcaggaattttatggacttaagaagctcaaagcaccttgcgtgtatcaactgaagctgtgcctatatgacatcaggaaaaaataaattagcaaataattggattaatataaaagtgaaaaatactatgttaaaatagaaaccagtcccatatttccccttgactttataatattctgcactactgagggagacttgctc

SEQ ID NO: 21665 - DNA, 201 bp, Bos taurus
gtgtaactacttatccaacctaatcctcatactgtagccagctactaaatattccaaaagatatttgcggggctttgtcacaaatagtaagaattaatttcactgtccctaagatttagtgatctaggaggaattatgattaatggggaaatgaggttaatagtcaactcatggtcttctaaatcttaatactgattgata

SEQ ID NO: 21666 - DNA, 201 bp, Bos taurus
ctcagggtatgaaaaaaaattgccaaaagaggagagactctgaaaagcctttgttaatatatagaatattataatttactaatagagaaaagcactattacatacttaagaatgcaagttaaattataccagatgagtggtgtctttactcagctcttcattgactcatttcccaagttcttattgtgaaataatttactg

SEQ ID NO: 21667 - DNA, 201 bp, Bos taurus
acaagtctgcctctaggagtcctcaatgaggagactaggaaaaaaacttacgtgacaatgtattttaactaaaacctttgcaaattgatgtatcacagtacttggaatgagtggagaataatttggaaataattgcttgtaaacattttaaatttccttctgtcattcagtgattagtttctcagcgcctttccctggtca

SEQ ID NO: 21668 - DNA, 201 bp, Bos taurus
cgagttggtagacttgccacacacagtattcaaggttactgattttcaacagcactaacaaaatgctattacaggggaaatatcgtatgcactggatggacaaccacaaaaaaggtgaaaagtgacccacagcagttagctcagtaagaatataaaaataaatatgttttaaaagctaaggcaatgaggtaaaattccctg

SEQ ID NO: 21669 - DNA, 201 bp, Bos taurus
atattcttgaaatacaaaacttgaaatctcagatcttagacctggagatctgctttgggctcaactgtatgtaaagagatttttattttgtttgccaattagaatacctgatctgaatcctagcatgattcttaaaactatatgggtagagtaatgataaagtaaataacagtaatatcaaataatgaaaaataatatatc

SEQ ID NO: 21670 - DNA, 201 bp, Bos taurus
gtcaataaagacaaaattggtggttcctttgtaaatacaaattgaatttcctaatactttaaagaaacactgtccagaagaaaaggaaaatgcagtaaagaggaatttaaacatgattaaccagaccttcaaataacccaattgttcttccctcttttttatacttgggatatgtggtgaatagtaaattaataattgagt

SEQ ID NO: 21671 - DNA, 201 bp, Bos taurus
gcatttaataaggatttcagaatatgtcagattcaaagttggtgtacatgagaatatggaaggagttgaacctacacagcaggatagtaagattgggtggcatgctgggctcaaagggatgagttttgtggagttccagatggaagttattaatataattgtggtacccagaagtatcaacatctcatatttcaaattatg

SEQ ID NO: 21672 - DNA, 201 bp, Bos taurus
tgtgaaatttgccttatctagttttacttgaattaatctgtggcaattttgcattttatggatatatatgtatttaatcaattttgggttgtgttaggtcgttagaataggaaaaacgaatctagaatggcagcagctaaaagacaagtaagggaaaagcctgcaaaaatagaacaaaggaagatccgaggaccagtgtga

SEQ ID NO: 21673 - DNA, 201 bp, Bos taurus
cgtgtagaagtaaattttaggagaatttggccatatagttctaaatggcaattctaaattccttggttgatacattgagattattcttgaatgactacatgctggtccatgaaacagtgaagcccaaaatgagttaaatgcaagaaataaaatatcttgcgttttacttgtgttctgctgcttgttttgattttggaacta

SEQ ID NO: 21674 - DNA, 201 bp, Bos taurus
ggatgaaattaagaattttcttgttcactattggggaaaatatggatctcatcctcgtagtttctatgatacactaaaggatggggaaagaaaaagcaaacaaacatgagtccttggcaaggttgatatagcaggatatgaaatcaaacactgaagaatctttttaggacactataaaatgttaaacttacaataaacttc

SEQ ID NO: 21675 - DNA, 201 bp, Bos taurus
tattgttaaagctgagctaagaatagatagatgacagctgatatccaataccttcctgaaaagcactcaatattgaaaaggggaatccttataggacccagtagtcccataactatgcaatacatagcccattacttagttaatcagagatatctctaagatactggatttctgattgcagatttagcacattaactctga

SEQ ID NO: 21676 - DNA, 201 bp, Bos taurus
gcaccatctcccagtccccatttttaaaaatcctatttctagtatgttcctcacaacagagttggcagacaaggtcaagatcagatctaacctgacttctggagagcacctataaggagcaggggacatgaacctttgccagatagaaatcactaacccaaggggaaaactctccccctaaaatggcctcacagttgggtt

SEQ ID NO: 21677 - DNA, 201 bp, Bos taurus
tcgagcccatcatttaattaaactggtatttgcattcataaagcagaaataaccaagggcaagggcatttcctcctatgtgtggcctacttctataatggagatgtgcacatctgtcaagtttgttgaaactgaagccatgtgtcctctgatgtcggatggtgttctggacacactgctttagcctgtctacagagcagtg

SEQ ID NO: 21678 - DNA, 201 bp, Bos taurus
caaacataaggaatttcccttctagcagcttccgatcttgatgtggaatataaaagaagagtatttaaaacaaaaattaatgatgcagataattagattacagaattagggaggacaaaaatcctggtagcttgataataatcataaataaaatgtaagacaagaagtaatattgttaacttgattgaaggattggacttg

SEQ ID NO: 21679 - DNA, 201 bp, Bos taurus
aactcttaaaaacaaggggcttaaaaacccttcttgcatcaccaaaaacactaattctacaaagagaaagcagatgccagtagacacagagttctcagaacagcagggcagagacacagaagtatcagaatagaagggcagagaacagctggaaactactcctagagagcagttttcaaaatatattaaggggaagcacag

SEQ ID NO: 21680 - DNA, 201 bp, Bos taurus
tcaaaaacacatgatgaaaatcaaaaaggagtacctaggccagttgaataggaggctgtcacagtaaccaaagaaggaaaatttcctgagtcagttgatcgtagaattaaatgtcacaggaggtcaacagaatggaggcaagaataaagtccaaggatttaacaatttcaagccgtgagacacaattctgatagacaactt

SEQ ID NO: 21681 - DNA, 201 bp, Bos taurus
gcactccatggaggtttcagaatcctttttgaattaccattactgctttgtattttcagcattggcaaactggaatccagagcagtgaccaatagattcagatatcacttagttgcgaacaaagtctaacatgatttctacaataaatctggatccaggcttcttagagtctgttctctatataaatgaactaacccattt

SEQ ID NO: 21682 - DNA, 201 bp, Bos taurus
aacatcacattgtcagagaacacaaggaggcttgagaaacagtggatagaatccttgcttatacttttcaaatactgtagttcatttaaaagatctatgggatacaggaacgtaagttcaaagctgtgtttgacgctctgtatcaggaacctgaaagtttcacagcagagctatagaacacctgcatagccagcagcctgg

SEQ ID NO: 21683 - DNA, 201 bp, Bos taurus
gaaggggacaggtaatgattgattttttgaggacttgagagaaattatgatcaaaagcataggaaggataattagctttgaaggatggaaatatttcatttaactgatagtagtgggaaatgatagggattggagaagatacggagattattagcttggtaaaagattttttgctatattaactctgataaactgtgtttt

SEQ ID NO: 21684 - DNA, 201 bp, Bos taurus
gaaagtttttggcaatataaaataaggaaaataaggcttaagagagaacagctactgatgggaggtataggtaatgtttcctagtaggaaaatatattatcataagaagaaacacttaccataaaacatttcagtggggagcagttggaattatgtccccttccattgtgttgacataatgtgaaaacagccagtcaaatc

SEQ ID NO: 21685 - DNA, 201 bp, Bos taurus
tcatatcatatttcaggggcccttgttggggcagaggggtgggtgggtgagtattcacagagcaggtattggacaaaagacaccaaacaatcccaaccaaaatggaccttcctctctcggccttgcaaagtgtctggactggggaagttcttttccaccaaaccatgtttcttggctctcagcttaagacaaagtacaaca

SEQ ID NO: 21686 - DNA, 201 bp, Bos taurus
tggacaataaaattcattattaaatagtaagaaatgagaatatatatgtatatttctatatgtgcactagcaagtatgctcagtcaacttcttgcgaccctgtgtactgtaacctgccagtttcctctgtccatggaattttccagctaagaatactaaagtgggttgccgttacctactctagggaatctttccgaccca

SEQ ID NO: 21687 - DNA, 201 bp, Bos taurus
ctatgacaaactcattgttaagcaacttgcctctctcatttcacagaactctcatgtcatgaaaatgtcacgaggacttacaggagaaagagcagactacccgttaaacagtagtgggtggatttggatcagacaagtgaaaaggggccagcagatgaggagatctgggcaaggggtttgtaccaagtgcacaggatagat

SEQ ID NO: 21688 - DNA, 201 bp, Bos taurus
aataatgattcatgtatatctgtgttcctgtactgctgaggtcttctgaacagctcacaattattgggagctatagaaactgtctcccagaaaatagagatacccagagacatttcaggatagtcaagtgttattttcatgagtcaacttaagtttcctttctggaggcatttcctcactttccagggtaacagatcactc

SEQ ID NO: 21689 - DNA, 201 bp, Bos taurus
acaatatttcttaggtgactgtgccagcaaaggaggttgtctaaaattttggtgcctgacttgtctgccctggaattgattcttccattcttcttaaacttctgagaagtgaccaagaatagagtgtggctttcactggtctccaatgcccttcaccttccaacagacaaaatagcctttaatccagggaaaatcaaagta

SEQ ID NO: 21690 - DNA, 201 bp, Bos taurus
aaaccgtaagaaaccctcaggaaaaaagaaagcaatgggtgaaggccctaatgcagaatgagcactaagccattgggaaggtctgctcatggctcttagaaagccacgtggctttagcaggccatgttagagtttgttttctaattaccacacatgcatgagtatttggaccatattatctctgagctccattagatctca

SEQ ID NO: 21691 - DNA, 201 bp, Bos taurus
gaatctcagtgcactttgctagttgatgatgggaaggtaactaacttctgatgccagagtattcatgcaagttctcgcccatttctccaactggctctcattgccactttgcatttatcccagaatgcccaactcttcctcactgtattcctgtggaaacctttgtgagcccagttcaattgtccatgactgccatgtaaa

SEQ ID NO: 21692 - DNA, 201 bp, Bos taurus
tttatggaaaactgtaacaaattgttagttttaaagatggcctcaaattatttgactcttctcacgctaagacattaagtgaggtcagattccctgaacattgaatagagcctggccttagaaaattacttgcatactgtagaaagaatgatgcatgattttccaaggctatgtcagaagaagccatgaaaattctgcctc

SEQ ID NO: 21693 - DNA, 201 bp, Bos taurus
gctgtgtacctacgaaattagtatgttgaagtgttaactcctagtaactcagaatgtgcctatatttagggataagatcttttaaagtaagatgaggtcatggggtgggccctagtacaatatgactggtgtcccataagaaaaggaatttaggacacaggccatgcagactgaaggaagaacaagtgaggaccaggccag

SEQ ID NO: 21694 - DNA, 201 bp, Bos taurus
ctgcgttattttgtaaatattgtgaaagtgcttttgtttcttttcacctcgtctagtttctggtacatcttcaaggcctcggttccaacactgaaggtgtataagcaaacagcctgcaatgcaaacaagcaagtcagcaggattctgtgaataagcacacagatggcatcactgggccccatattttgtgtaaaagcactt

SEQ ID NO: 21695 - DNA, 201 bp, Bos taurus
gggtccacctgagccatgctggctgtctgcactggagatctacagacagagcatgatctgccgagtgaagacttctagtctttggaatcagatttctccttgggacaccctgagtctccccagaaattccaagtgaattttgaaaaatgaaaggaccatatgcttgcacactctgatctggcatcctgggagtttctattt

SEQ ID NO: 21696 - DNA, 201 bp, Bos taurus
ctgtgtttttccagacttctttcctttcgtcaaccaattccaaattgacaagcagtactctggactgctgacatcccacaaattggtggaattcagaaatgataactttgttatcattttataggacagtgatctcctagttgcttatttttctcccttcaaattacattcatcagctcttacaagaacagatacctctgt

SEQ ID NO: 21697 - DNA, 201 bp, Bos taurus
ccctccatgctcctgactaagagactagagtccttaacttggaccaaaccacacttgcattcacagtctcattggtgaaatgaaaattaacccccaaagcagtaaagggaatagatttcttctagttccttcttattaaaagtttaaggccttttttcatatttcaatttactgtgatcattgaaacttacagatgctctt

SEQ ID NO: 21698 - DNA, 201 bp, Bos taurus
gacatcaggcaagtgagatgtgtattgagaggcatggcaaggtgaggtagccagagtaccggctgatcaccagcctgtgacaagcgtgccaggaggccaaagtcacagggaaacccaggagcgttgatgtttgggagtgggaattcttttttctttgaatttgctgctagaagttatatttctcatacaatgcttaaatga

SEQ ID NO: 21699 - DNA, 201 bp, Bos taurus
tcaatctccaagtctccctaaccatctggggagtgcagtggcctgtcaactctgaaagaggcttgggggaaagtgaccattagtaggaaagctctgtgaccgaaggcattatttataattcctagaaacataacaaagaagaaaggggaagatgaaaatagaaagagggcctgtcaccctcatcgtcttttctccaagttc

SEQ ID NO: 21700 - DNA, 201 bp, Bos taurus
tcataaacacagaatacaactgatgggccaagcgagagcgagggcataattcgtaagccataggaattatgaattagttttctgaaaaatgggtgctctgaccttttaagagccttctctcgttgaccagatatctcgctgagttgaggatccttatcacgcattttttcacctgtcgttttaactttctattttatgctt

SEQ ID NO: 21701 - DNA, 201 bp, Bos taurus
aaagaaactgatccatcttcattttattatttttgatggcaagttttatgtaagcttggccacttaatctataaaaatgactcttgacccttctgtagaaaaaacaggaacaacagcaaaataataacacttattggttactgaaataaatctgaactgcttcctctttttagcttctacactgctgtgaggaaagagtct

SEQ ID NO: 21702 - DNA, 201 bp, Bos taurus
aactcatcttggcggtcaatacattgagtgcctgtgtacttttctgtgttttaaaatatctctacaaataattaaaaggttcaaataacaaaagagcaaatggaagagtctgttgtaggaattgcccaaagactacctttttttgtttgattccacagaccttattctatctctaaatcaaaatgctgcatatgaaatagg

SEQ ID NO: 21703 - DNA, 201 bp, Bos taurus
ataaactgagaagagatgaagacatttataagcactgaaatatttttgtggttgtatgtaatttaatgtgatgcacctgttttatattttgagaaacttactcttctgttttaaaaaattgatacgcaactgtgcttttctaacaagaaccatactagtctgttttttgtctacctctctctcaccaatctcccatgtctg

SEQ ID NO: 21704 - DNA, 201 bp, Bos taurus
cattaaaattatctgggaggcttttaaaaacattaatgtccaggttccattctgcccagatcagcacctctgagatggggcctggatattgggttttaaagtattttatttattttaaagtctttgttgaatttgttacaatattgcttctgttttatgggttttggccaacaggcatgtaagatcttagctccctgaaca

SEQ ID NO: 21705 - DNA, 201 bp, Bos taurus
tactcatgtttaagaaatgcccttttggcctaagctgagtatgattttagctacttatgatctaaagagtccaaaccaatatctgtgcctttaagaaaagacagaaattaaacagatggagaagagtggggaggaaattctaggcagagcaggagttaagccaaggtttggaggccaaaatgccatgctctgttctgacag

SEQ ID NO: 21706 - DNA, 201 bp, Bos taurus
ttcaataataaggtacacttttgatggctatcatggtttaaaatgagagagaaatatcttaaaagataacattccatgatgggacaaacatatttatcttgtatatcatgactttaagtcaacagatataggagagaaaggtttgtgaaaaatccatggaactaagaataactgggccaatattttcagtctgcatgatat

SEQ ID NO: 21707 - DNA, 201 bp, Bos taurus
ctttagctttgctccattttgatctttgtaaattatcttaaagattatatgtaccttcctttggctgtgttaagtgtgttgaaatgacttttggtcaaatgtaataaaattctacctgatcgcagcttacttatcttgcctgtctaatccatcttgcacttcctgcctactctacagaaggtgccagtgtggtgatctgtg

SEQ ID NO: 21708 - DNA, 201 bp, Bos taurus
actgcttgctcttctgggcaaatggctcttctatcagaacagattacttccctgggctaagaggttgcttgcagcttaccagcagttcatttatcaatacttgcttcaggacaatctattatgttacagtttgcccgatctcaaccagattcctgcattggaaaacatttctcctaccacttgaactcagactccaagatg

SEQ ID NO: 21709 - DNA, 201 bp, Bos taurus
actgtgtgtactttgaacatatccaggtggatctaaatgttttctgatactgcatacttgttttcttaagtagaggtgtgtaaaatagggccttctaaccgtagacttgacagctagaaaaatcaagtagaaggacttctctggtggtccagtggctaagactcctgactcctaatacagggggcctgggtttgatccctg

SEQ ID NO: 21710 - DNA, 201 bp, Bos taurus
tcccctccttccctctgactcatggccattgtacctattttgtaaaaaagaaagaaaaaaaaagcctaaataacctctttcttgccccacccaccagtgggcacaaatcatattttcaaaaaagttatagccaactcctctaaatttgctctaatcatcctattattcaaagcctttgttttgtgaatcatttaactctta

SEQ ID NO: 21711 - DNA, 201 bp, Bos taurus
aggactcagtgcttttaccatgggcttggttttgatccttggttgtggaactaagatcccccagaccacacagcatggccaaataaataaataaaacattttagagataggtcaaagacagactcagtgacaaatagtagataagttcagctaaaattaatcctttgtccaaaaactttgggaaacattgtttggatgagc

SEQ ID NO: 21712 - DNA, 201 bp, Bos taurus
ccctgggaaagagattcaaatgaagaagaggatgttatggttgacaattaaatggatgaaatgctctgtgctatttgaccccaaatgaaaaaagaaaacaacaccaccagagagtgggtcagcccccgattcaggaaacacagcgagagaatgtactcctgctgagcttactgataaagctgccaagttccaacaaaaggc

SEQ ID NO: 21713 - DNA, 201 bp, Bos taurus
tggaattatggtcaattcaaaagctaaggatcttaaaacttctgaacaatgcatgtcagaaaacctactggttcccactgaccccttggaggcataatctataaaagcatcaggaggtgcttcagcttaagagactggcatgggtgattcaaggtctggggaggagggagcaacctaccctaaaaggcaggtttcgtagcc

SEQ ID NO: 21714 - DNA, 201 bp, Bos taurus
cagtggccataatgtttctaagacaaaggcggtatttccatgccacagagtccagttgctatctataataccctatgagtcaatggtaattgccatgtttggagtgaatgggccaagggcattccttttattttcatatgtaaaagggggatctgatttgcattgcccaagttcaggtaggttcatcaaactttcctttaa

SEQ ID NO: 21715 - DNA, 201 bp, Bos taurus
actttgtgaaactcagagacagtacaataaacatggtaatagaagggacaccaggatgtgaaaggccctaggagaacctgtcctaatcttggttgccaggaaaggttccccagaggatgtgttgtttagggggattgtaggatgctcagaatttaaggtacagatgggctgaagaaggaagcaggtatttcatgagtagga

SEQ ID NO: 21716 - DNA, 201 bp, Bos taurus
tgatttcatgcctgcctttgattaactgcgaattaacaggtctccatcttctcagtaattcaaaggttacctgaatgggaaaacagtaatgaggtccataaataattaacttaaaatatttattgcaacaagtattaccaaagtgtacgaggtaaaaaagtgtatgatggtctccctccaccctatccttttttctaattg

SEQ ID NO: 21717 - DNA, 201 bp, Bos taurus
tctattccccttcctacccttttcctccttagcaaccacaagtctgttctctatgtctgtgagtctgtttctgtttcttggatgagttaatttttgttgtattttagatcccacatataagtgatattgtatgatatttgtctttctcttcctgacttacttcacttagaatgatcacctccaggttcatccatgttgctg

SEQ ID NO: 21718 - DNA, 201 bp, Bos taurus
atccctgaggatttatgctttctcatcatttctgacatctgaggaattcccttactctctagccaacttatccatgcattaaaatcatgattctatgtttcaaatagcagctttatttgtgcagtacttggaggggtttctacattgcttgaaagataagtctataatgtaatttgggaaccaaaaaaagttggagtaatc

SEQ ID NO: 21719 - DNA, 201 bp, Bos taurus
cctggtgaaatggctggtggctgctgccagtccttggtgttccttgcttttatctgcatcatttcaggctctgtcttgttgtcatatggccttatcttccgtatgcttctttgttcctatgagttttcttctttccttataaggacatcaccagttagattttgggcctatcttccttggtggttcaaatgataaaaaatc

SEQ ID NO: 21720 - DNA, 201 bp, Bos taurus
tgcccaacgtagcataccacttttactctgtgggcacttagcaaatcctcgttgactaattggcaacaattcctggtctacttgtgggaaaacggggaggtaaaacaaattaaccaggccaccgtgcttcctcagtcacccgagggaagagttattagtggctacacacagtcactgaaaatagacatctggtcagaaaaa

SEQ ID NO: 21721 - DNA, 201 bp, Bos taurus
atcattagtgaattcatctaattcacactctatatctgttcacgtatctgttaaatcctattaactgtatgctcaaaatggatccgaaatgttctctctccgtcttttaaatgctgttttcagcagctaaatgtgcatcatccatggactctctgggcatcttatttgtatgaagagggtgttaggagctctacacttgcc

SEQ ID NO: 21722 - DNA, 201 bp, Bos taurus
ggtgatacaagatcatatggcaatttctacttttagtctgttaaggaacctccatactatcctccataatggctgcaccaattttcattcccaccaacagtgtagaattgagcattttaaaagataagttgaatagatttgtgaggagttgcaaggaactttaagcagagcattaacatgtcagaagaccgaagaataact

SEQ ID NO: 21723 - DNA, 201 bp, Bos taurus
gatagtcataccactgagttttcattgtgcagagttcaactctttgactaatgctcacccagctgcagagagggaggatcaaaagctataatgagatgaacatagcttatgatattttaaaagattattatatattatgaagctttggtggaaggagaggttgaatctagagccctaaaaagatctggcacccattctatg

SEQ ID NO: 21724 - DNA, 201 bp, Bos taurus
ctccagtactcttgcctggaaaatcccatggatggaggagcctggtaggctacagtccatggggtcacaaagagtcagacatgactgagatattcacttcgctacttccaattacttccaagggttaagaataaagagaaaaaaaaaaagaagcaccagtgtgagaagacggtggtatgtgaaatacagagggcctgggca

SEQ ID NO: 21725 - DNA, 201 bp, Bos taurus
gtttcctatattaatatggaaacttgaaatcagaaaatatacccattatagaaataaatagtacatataaaacaggccttgaagaaacaatgctaactaagtaaatgttagaataattcattggctaatacatttgccatatagagcccacttttataacacagcataaactccagagctaactcctactaggataatttt

SEQ ID NO: 21726 - DNA, 201 bp, Bos taurus
taaagacctggttttcatcttatggctgaaagtgattttgatctctatccacatctccttttatagataactgaggcctggaagagcttaatgaattctcgaagcacacacgattaactgggttataagaattaaagagttagaattaagaactgggcctcccgaccttaaaaagtttttctacatcaagcaaaaataact

SEQ ID NO: 21727 - DNA, 201 bp, Bos taurus
aggggatcactgcagttactcaaggaaagggtgacgatggtattaactatggggatggctgaggaaatggaaaaaatggcccttatctttgccaccttcagtgtccctagcacagcaagtggcatgaagtgtgccttccatacacagattttcaggtaagaaaaatagaaatgagagttagggaggccagccagtcatagg

SEQ ID NO: 21728 - DNA, 201 bp, Bos taurus
caacaagctaagggactgaatggctgacttgcaagttgagaaacaccaacttgaaagtctaaattcacagaaatcttctagcactgataattttcaagaacaagtaagacagtgggagacagaaacggggaggggaagaaagaacatatttttccactcataacccggcagcggctagcttgtcactttccctgttcaatc

SEQ ID NO: 21729 - DNA, 201 bp, Bos taurus
gtcctgggccctatggttggggggggggggcatgtcctgggatggttgtgggctcaggaaataataggcagctggtctgctgataggtgggctgtgtccctgtccagctggctgcttggcctggcacattcccaaactgctgctgactggctggtgggcagggccagaacctggtgctaataagctagaaggaggattcca

SEQ ID NO: 21730 - DNA, 201 bp, Bos taurus
attatatatttgatttttgtttattttaaagtaaatattgaattttagaatagtttcagattcatataaaagcttcaaagataagacagagagttcccatgtaccctgtactcagcttcctcctttaatatcttgcttcactgtggtacatttgtcagaacttgaaagtaaatgtttgttgttgttgttcagtcactcagt

SEQ ID NO: 21731 - DNA, 201 bp, Bos taurus
aatctcttttaacagtgatttccctttaatatctattcacattgtttctctcttttgagtgtcaaagatgagcgcttgcataatgcatggggactttgacaggcacaacatcaattatttcttacactgatttggtagctaaacaataaaagtgaaatgtaccctttagatgaaaatttgccctgaattttttgtggacag

SEQ ID NO: 21732 - DNA, 201 bp, Bos taurus
aggcaagctgaaaagacttcatactgtatgattccaactatatgatgacgtctggaaaaggcaaaactacgaagatgaaaaacgattaatggttgtcaggggttagaagggaaggaaggatgaatagacagagcacagaagatttttagtgcagtgagacagttctttataatactacactatggatatatgtcattatat

SEQ ID NO: 21733 - DNA, 201 bp, Bos taurus
ttttgatcaagagggaaaaacagaatacaaccgctcaacaatttgttaagaataatcttctaattccttggtcaacatttttctaaaatgtcaatctttggcatcccttgggtaacctttaggaatcatggattctccccctatgcttaattatcttcacatttttccttaggtttgctctaaattttgtgatttattcta

SEQ ID NO: 21734 - DNA, 201 bp, Bos taurus
tgcagccatgccttgggcacactcagacctccagggagggtggagttggggatgaagtagaacattgggttctgagaggccaggaacctcacacctcactggtgcctctgatggactttgaggttgaaggcactatagtcaggctgtataggctcaggaagaggggggaggaagaggggtcctgtgaggcctgtggtgcag

SEQ ID NO: 21735 - DNA, 201 bp, Bos taurus
gctagggccagggtgatcacagggaaagaacaagtggtgtcagaaagtaagaaagtgctcagtaaacatggggtcattaaaacaagatgcacaagtcaaattgaaacactggccaaatctgggataatctgagaacaaaataataaatggtaatgttttaggtcaggcagctgtaacaaaatacgatagactaagtggctt

SEQ ID NO: 21736 - DNA, 201 bp, Bos taurus
gttatccagctgtggcagagaaatggggccttgattttgactttgttaattaaacacagagaagagaaaagagaatttgctccaagagattttagatagtacttggaatttgagctaaattttgaaagataaaatcacccaagtgccagcttccgtttttccatatgtaatttccagagccaaattagtgtttggaacact

SEQ ID NO: 21737 - DNA, 201 bp, Bos taurus
tctggaggttttagtattgccaacgagtagaaaatgtttccatagaatttcattaactaagtagagtcagagtgactcaagacatgtctggagtttagacgtctttgatggaaacttcgtaggctgcgttttcctctttccccactctgactttacaagccagagcccacatacttggaaacagtaactgggcgattacta

SEQ ID NO: 21738 - DNA, 201 bp, Bos taurus
cttttagttaatcctttttttctttccttttaaagaagaattttatttttttcttgaaacactgtatgcttctaatgtgtttagatgtggatttatttctatcgtttctacattttacatggtgtgctttcaatatcagaactcatatctttttatctagtagttaccacatcaatagccctttagtcagtaatcctgatt

SEQ ID NO: 21739 - DNA, 201 bp, Bos taurus
ctgataatggtactttcttcattctagggcctcaaagtgaacacgggctgcagctagtagatttctgtctttataaacacagcttaactctctagtataagtaactatcaggcccagtaatatactctattgcattatttcttaataatcttttttcaaaaatatcaaagaacaaattggtatgacatcaaactttaaaat

SEQ ID NO: 21740 - DNA, 201 bp, Bos taurus
cacacccaggttctccatgttggccaagtgaataaattgcccatgttgctggtttacaattagtttattcatgaatattaagtattgcctctaattgttttgttcctaccaatcctgaaccaggcctatggtgagctgccacagcacccagacagctctgggtagcatctggtagcaagaaaaacaagggctgaggaaaca

SEQ ID NO: 21741 - DNA, 201 bp, Bos taurus
ctgcctcccaaatctacagcaatgacaacacgcattgtattcgaaattacctgaacaagaatcttggaacattatgggttttgcaacagttctttgcagtcgctttgaaacatcatgatgattggcggttttgtctaaaaggcttttgtttttagccttttaaaaagtgaaggtgtgtatatattttccttctctactatg

SEQ ID NO: 21742 - DNA, 201 bp, Bos taurus
aggctatttctgtatcttggctattgtgaataaccctttgctgaacatgggaatgcagatatctcttcttgatcctgatttcagttcttgttgatacatattcagaagtgcaattgctggatcatatgatagttctcttttcaattttttgataaataacctgattttttaaatggaaaaaatattgaatagacgtttctc

SEQ ID NO: 21743 - DNA, 201 bp, Bos taurus
ttactgctcgtggacattctctagttgctgcgagcggggtctactctttgttgctgtgccaggcttttcattgaggtgacttctcttgttctggagcacaagctctaggctcatgggcctcattacttgtgacgggtgggctctagaattcaggctcagtagttgtggcttatgggcttagctgcttcaccgcaggtggga

SEQ ID NO: 21744 - DNA, 201 bp, Bos taurus
actgagctatgagggaaaccttgctttccttttattatgtcttgtgtggatcaacatcttttttcaacatactgtattcttttgaatacaaaagcttacagtattccaatctgttaggtatgtctttaatgtgatccttttgaactgtagtttctcatcaacctctttcttatcaatcctacctgccttctgtttttcaga

SEQ ID NO: 21745 - DNA, 201 bp, Bos taurus
ctgcagcaacctctccccgctctcagtttccaccgacagtggctcttctctttccatcactgctccgaaaggcaggcatcaccgcaacaggaccccaggatgccccggattccgagtagaggctctggctgctgcccagcaggagaagggcaccctctgcgcgcccccagctacctggctgctctgcggcgtgtgcactgg

SEQ ID NO: 21746 - DNA, 201 bp, Bos taurus
gctgggcctcagtttccaattctgtaatatggaaatcattacccctcatgtgattgcttggagaaataaagagcttccaatgaatgaataaagtacctggcacagtttatggccagtgcagaggaccaaacagatgacagataaaacataatgaaagacttaagatatcataatcttgttgtaatgaaactgtgcaatgag

SEQ ID NO: 21747 - DNA, 201 bp, Bos taurus
gttatgcttcctttgaggcaacaagtacagggcagtgaggtaaaaaaaaaaaaaaaaagaataactaacagctttcaagaaaacaatctaaaataagcacctgtgtagtgattataaaaatatacagatttcctttccttctactggtaatgtcaaagcccacacaatttgtgatgtgtctgcatgtgatgctcatctagc

SEQ ID NO: 21748 - DNA, 201 bp, Bos taurus
ttgctgctttttcagtttttagggaaacattcttaatgaattttatagaactctgataaaagggttttttaaatactctcaagttttaaactgcttcattatatacaagaagtctgagggtagctgtagcgtttcatatgctttctgagagaaatagactgttttcttggctactggaaatgtttcttatgaaatgaaacc

SEQ ID NO: 21749 - DNA, 201 bp, Bos taurus
aggcatgtgggatcttaacttctgaccagggatcgaacccacacccatacattgaaaagcaaagtcttaaccactggactgccaggggagtcccaattgtgtgatgtaatgtcgattataatctggctggtcatctttggttgaggaatggtgcagacataaacaaatacaagtgaacttcggtggatgactaaagcatgg

SEQ ID NO: 21750 - DNA, 201 bp, Bos taurus
gaggctcagagaaataaattttccaatatcacacaggtagcaagtatctgagctaagtttatccaaggtctaccttgttctaatgttgctgaagctgaagttccaatactttggccacatgatatgaagagctgactcattggaaaagaccctgattctgggaaagattgaaggcaggaggagaaggggacagcaaaggat

SEQ ID NO: 21751 - DNA, 201 bp, Bos taurus
tgtgaaacatcaagtacatctaatggaccaattaaagtgataaaccatcacagcctgttcactgttatatccaaataagccattctaagaacaagtacagttaattgcaaatgaaaattccccctaaattctggatgtcagaaagactggggcagctatcagctcagctcatgaaaaggccatgagaaatccccaaaagta

SEQ ID NO: 21752 - DNA, 201 bp, Bos taurus
ggcaaagattagaaagaaaggttggctcatgctcctgactgggtcagccatccagaaatgaggcagagagtgtgtaaggcaagaggagggcttagattaggaaaagtacaaacagaaaagtcaacttctggttgagttcctaaggccgagtagaattaaacaggtgaaaagcaacaaggggaattattcaagagaaagtac

SEQ ID NO: 21753 - DNA, 201 bp, Bos taurus
tcagtgttcttgcctgggaaatcccatggacagaggagcctgctgggctagtccacagggccccaaaggaatcaaacactacttagggactaaaccacaatcctacatttaggaaaaaattgtaacaacttaccttctgtgttgttatcatcagaaaaggtaatacaaagttcatcagacttttcagttgtaacagcccat

SEQ ID NO: 21754 - DNA, 201 bp, Bos taurus
gcattaggattttgttctttttactcctgagttggattctattttatgaatgtaaaacaatttatctgttcaacatttaaggtcatttgggttgttacccgtttggggtgattacgaataaaattgctataaatattcacttatggatttgtgtctgtgtgtgtgtgaatatgtgttttagtttcttttgggtaaatacct

SEQ ID NO: 21755 - DNA, 201 bp, Bos taurus
ggcctccatgccaaagcactcactaattctgtgtgatgagtgaggctggcagcagccgtgtgttccccagggacctataccaaggtgcaaacatattgagatgggatgattgctggagcaggcctgcttttccagcccctcggttcatgaggggaatccaaggcagcctgccccgtgagcattgctaattatgttggcttc

SEQ ID NO: 21756 - DNA, 201 bp, Bos taurus
aaggaaatgttttaatcctgaatctgatcatttcatgcgactcctttctttaccctataattccaccagactttttagcatctgtggtaaatcgttctttgcctctcagatccattctctccttcttcctggatacacatgtcacacctgaaccccagttggagtccatatttcctagcttgcttgtgaccttgtgatcaa

SEQ ID NO: 21757 - DNA, 201 bp, Bos taurus
ttccatggagagagggacataggctgacagcagccaggcccaaggggggctgcattgggcgcagaaggggagccaggcctctgcctgcacggacaagatccacttcatccccaaaaggtttttggctccagtatggaggcaatgcttggagtgtgtcctggcctgaggtcctctttcacagtctgggacgcgcgcgtcctc

SEQ ID NO: 21758 - DNA, 201 bp, Bos taurus
tattcagggacgggtccatgtgaactgggaaagcgtgtacaaaattaaatcattttctctgtgggcacgtgttcaacttctggccacctccgatgcttccgaagttagcgattcatttccttgattctgccagcttgtcgctgtcagcatagggcccctctgtacatggtagagtatcctcaaccacagatttactgctac

SEQ ID NO: 21759 - DNA, 201 bp, Bos taurus
ttattcatatttaaatctttgaaagattgttttgagaaatagatatctaatgaagataccactgtgcctggctcacagagaccactcaataaacattatggatttactaatagaacatttgcaatgagccaggtactattctaggtgctagaattacagtggggaatgaaggaaaatctttgtcttagtgtctttaatact

SEQ ID NO: 21760 - DNA, 201 bp, Bos taurus
agcacctcggccagcgagcgggcaccagcacccgtcggccagagcacacccccgaggagcccccaacgcagcgctgccgggcccccgcctgcgaccactttggcaatgccaagtgcaatggctactgcaatgagtgctttcagttcaagcagatgtacggctaacccaacccagggggtcaaccccagacccggaggggcc

SEQ ID NO: 21761 - DNA, 201 bp, Bos taurus
caggaatgttagaaatctcatcttttcccaaatttctcaattttcacaactctgaacttaacaaaatctattattttggcctttagtttattatttctggattatattcaaggccctctgatactgttgccagccgccctttccaacctgtattatctctcttactcagcatggatcttccactccgtttagccatctgta

SEQ ID NO: 21762 - DNA, 201 bp, Bos taurus
gccttgttcttttcttcatttcactcatgataaatgtcagttggtccaaccagacctgcaagcgtccacagtctggccgtgggaaccattcttctgtagcataactcaaccaagaatttgcacagtttcctgtgcagtgatgggaaccccacgatgggtaccaggatgttactagctttccacggcccattctggagacct

SEQ ID NO: 21763 - DNA, 201 bp, Bos taurus
tcttaaacacacttgtggttctaggagtcactcagtcgtgtccaactctttgtgaccccaaggacagcagcccaccaggctcctctgcccatgggattcttcaggcaagaatgctggctatagaacacacagaatacttattaggcagatgtgagcagacacaggttatgtgattctgcttaatgagagcactaatatttc

SEQ ID NO: 21764 - DNA, 201 bp, Bos taurus
tccttgtgttctacatcagtgatgcttttcccctaaagacgaaatcgtgtaatcttaccctgtggctttcacagtctctaaagtcaatgactctttcggtttatgctgaaaatataaaagagataaaatgaggctgctctgatttaagtgagggtggagaagcctggtaaaattaagtaacatttcatttgttgtgccagt

SEQ ID NO: 21765 - DNA, 201 bp, Bos taurus
ggcaaaattcagccaagggagctggcccattgctttaaaccagctgaggctactggagtgaggaaaccccattctaaggagcttctccacttttccttccggaaactccttccttcttcatgggccagtctctttgctggtttgactctggtttgactcctgtggggtgtctgttctttggttacttcctgccagagatgg

SEQ ID NO: 21766 - DNA, 201 bp, Bos taurus
agcaaaacatgtaattttttctacttaatatactttatcttgcaaatataagtcattttgaaaataacgtaataggatgtctgcttcaatgtacttgattaatcaatctttctttaacttagcctcaaattgaaattttctgtacagatgtctaccatatagaaacaaaaatacatttgaacgaaaaaattatgaaaatcc

SEQ ID NO: 21767 - DNA, 201 bp, Bos taurus
tcatgggcaactcttgtgatttctggtcagatagaacagatgtcacaggaaagctcccagagaggttctgggaaggagtaaggtggaaaagagggcttcccgtgtgattcagacagtaaagaaactgcctgcaatgcaggagacctgggttcgatacctgggatgggaagatcctctggagaagggaagggctacccactc

SEQ ID NO: 21768 - DNA, 201 bp, Bos taurus
actcaaattcacttcagctgatgggttgccttagaaatccatttcaactaaatacactaaaataagaattagttgaactcttagggaggaaaagatgtgaagttctttcctgtttttaccttgtcaatttgatcaaatttgtaccaaccatataaacaaataactcaaactcagaattcaatattaaagacttgggtggct

SEQ ID NO: 21769 - DNA, 201 bp, Bos taurus
ctatgctttatattctttcttatatgcttatgacacataattcctatcctcttatctgagtttttgttaaatatttagacttatttgtctcaccaacttcctcagttcaacccccacatttaaacaaggcatggtggtagagtacaagaacatgggctttggattgcctggtttcagatcttggtaagcagccgtaaactt

SEQ ID NO: 21770 - DNA, 201 bp, Bos taurus
atgtgagaaccttaagtgcctcccagtgcccactgttactttgaacactgtgcatacttaagaggagaacattttgccaaggcctatctgtagtgctacaaattataacagcctgccccctttccggataagagcattctctacaatgttgtgagttcaagaacgactgcgtgtttgcacgcatacttgaattatgggagg

SEQ ID NO: 21771 - DNA, 201 bp, Bos taurus
ttcttaattgtatgttctgatttatccgaagtggatagaaaaacaaattatttctgctaaattatacttaggaggatagtacttgaaagcattctaaaagttagaaacaagaaagatattaagaggaagtttaaagaaaagtgaagaacttaaaaaggaagtgttaaatgttaatcatatcactgtttagaataataagaa

SEQ ID NO: 21772 - DNA, 201 bp, Bos taurus
aactgaaggtcgcacattttggccaacagtctgtatctgaagcagttcactgatggagagagagatttatttttcagtttcaagtttatgacatgaagtacttgtttcatagacagtatttacctggttcttttttttttcctgtctttaattcttggatcccagataccaagaacaaagtgaataacacagttaaatcag

SEQ ID NO: 21773 - DNA, 201 bp, Bos taurus
ttttaattgaggaaaaaatatatatcatacacatacacactactcccttccctacactcctcccttcatctcccctccatcaaaaaaaacccaaaaaacaaaaaaccccccaaaaaacccaacccataaaaaaaccccaaacaaatgaaaaacccaagcctctgctgtttagaagtctataagaactgctggttaaaggtc

SEQ ID NO: 21774 - DNA, 201 bp, Bos taurus
ccttagattttacctaatttatgctttctgttccaggattccattgaggctattgaattgataacagtatttttaaagggccagttaagtgccagatccattcatgccattacttcatttacttttcatacatcgtatttagataggcattacagttgacccttgactagcactggtttgaactgcaagagttcatttaca

SEQ ID NO: 21775 - DNA, 201 bp, Bos taurus
gctgtatttcattactggatactaactcttgaaattgtcttgattatattattgtattgtggctttgatgagacgattttttgagggctcttcttaacccatgaatatgaattaaaagggaaaaagggaggatacaaagggaagacctgagtgacttaaatttatactcagcttgatccacttgctgaactgattattatt

SEQ ID NO: 21776 - DNA, 201 bp, Bos taurus
gaatgaaactgtaaaagaccacaataagatctaaaaaaaagaaaagtatgattggaatccatgaaagagaaataatagataatgtggcaggtacaatattagaagacataataactcataactattcatcaagctgctgatttgagaatctctatgagtctcataaaaaataaatacaaaggaaattacacttaagtacac

SEQ ID NO: 21777 - DNA, 201 bp, Bos taurus
acttcatgtgagcaactgctagaagttatttgcaatccccattcctaaaatgcatcattaggaggaaagtaaagaatctagagatacccaacgtaatacagattactctaatatttttaaatgcaactagagtggtgtggagtacactgaatttttaaaattataatagatataatttgcacataaataattatttaattg

SEQ ID NO: 21778 - DNA, 201 bp, Bos taurus
aagaactcccttggtttgtagttggccacatttcccttgaatcatcatatggaaaacagagagagagctctagtatctttcttctaacaagatcactaattccatcatggggcccaacttcatgacttcatctaaacttaattacctcccttccaaaggccatactctaaataccatcagattgagggttagagcttcaac

SEQ ID NO: 21779 - DNA, 201 bp, Bos taurus
ttaccagctgagccacaagggaagcgttggctgtagtcctacacaaaattatatatttttaaataacttcttcaactgaagtttcttccacatatcccccaaaataaatgttttccaattctttctttgaacatgcttttcattttctctatatatgtgtttggaaatatcactaataatcatttaagactatcaacagac

SEQ ID NO: 21780 - DNA, 201 bp, Bos taurus
caagcctttaaaattctactcaatggacagaagcatgataggacttttcagttcttcttcctcatctgcatgataacggatgcatgaacctttcttacagcatgtaaatggaagtggcatctgaggagctgggcttcagcagtcaacgcagatcacaacagtgaaatctgtgctcagagcagaacacagaatataacttac

SEQ ID NO: 21781 - DNA, 201 bp, Bos taurus
gccaccgtccctgacctcagacgtggggtaactcctctcgtcgccgcccctgacctcagatgctgggtatctcctctcggccaccccgcctgacctcagacgttgggtagttcctctccaccgttcctgcgccgtcgcagtctggcactctcggccgctgcccctgacctcggtcgttgggtaactcctcttggccgctgc

SEQ ID NO: 21782 - DNA, 201 bp, Bos taurus
agaagtgtaagtatagtaataagaaatatccatcaaaactaagttcaaatagttgagcatactccagaatagaagccgtcaaaacaaaactttgtcactatatccaaggaactgaaaaagaaagaaagacccctaggttaagggccagaaatagtagcaggcagtgaagtcagtcagatcgatgaagtccaacaagatagg

SEQ ID NO: 21783 - DNA, 201 bp, Bos taurus
aaatttttagatgtcagtacttgacatctatagtacagaaattgcattttttacctgtttaaacttcagataaaaagtagtaaatgtcaacctaaaaatgcgtgaagggatacatttctgtaaccttagagcaaacaaaaattttctaaattcctagagcaaggaagaattttttgtgagaagaaaaactaaaggttattt

SEQ ID NO: 21784 - DNA, 201 bp, Bos taurus
tgttaatgttgtgtatgtattttgaagtacgtgtgtgtgtgtgtgtttctcagtttctgggtatttgagtggtgaatctttgccatgcctaacagtgagcgttggatatttagcagtgaatcaagtagccatacgccctgactttatggaaattgtctgcatctatatcctatatgtgtccagaaggggaacatattatgt

SEQ ID NO: 21785 - DNA, 201 bp, Bos taurus
caatacagctaccagaatagtaatatcttgctatatatttttttaaagtaatacatctatttctgcaagtagaagttatcactgtttgattagcccacttccagttagcattttcatttgaatttcgcagaaacttgcttgttcaaaaactttggtagataactatgcacagactgtcttctaaatactcagaattgtcaa

SEQ ID NO: 21786 - DNA, 201 bp, Bos taurus
agttaaggccaaaatatgagtggggagaatagataagtagtctctaaatgagattaggtttaacatttaagagtaagaaaagatctaaggatgtcccagagtctaggaggacaggccagttggcatcttccaagatcatagtccaaagagaatagaccaggattgacaggaaggatggactagatagaaggagttcgtcca

SEQ ID NO: 21787 - DNA, 201 bp, Bos taurus
cctaatacctttggcccaattgggtctgccttcttgggctccacatcaagagggtgacgcaagctgggtcacacatctctgagcaatttcagaataaactattgtaatcaacatagtccctggaccccagaccttctgtcatcaatcagatacagattaaactggcaggatgctcacgtgtcagaagaaaaaattaacaca

SEQ ID NO: 21788 - DNA, 201 bp, Bos taurus
ctgtaagcacctgaaaaacctataaaaatggctccatttaaagtaaatattctgaaggccacaacacattgaagttcatcaggtctgctctgaattatatgtaatagcaggaaaagctgtatcaaaccatagagaacagagtgcaaaccttatttgaaacctcatcaaatctttatgtatatgcatgcatgctcagccatg

SEQ ID NO: 21789 - DNA, 201 bp, Bos taurus
ctatgctctatccttaacaaaacacattttaaaaagcagtcatgtaattcataggccaagcaaaatgtctctatccctacggtagttaatatagtagttacaggtgtatctgcctccttatgctaaaatagctactaaaaagtccataaagggattcctgaaacttaacttcagcaccatttgcacaactgcttcactaag

SEQ ID NO: 21790 - DNA, 201 bp, Bos taurus
atgtggcctagtttacagaactcagatggaaatgttcgctggtgccctctagttgatcaccgttaagcagctttgaagaaacacacacatcactctcttcatagaaggatggcaaagttcctaattcgtaacagttgagtagttaactcctaacataagatgtgggataatgaaacattaaatctagagtctgttttattt

SEQ ID NO: 21791 - DNA, 201 bp, Bos taurus
tttttaaaaaacttattgagcaatttaaacctctgttaaatcagtttttgctccctccattttgaagctcaactatggtagttcacatttaagatcattacgccttcttagtgaattgatccatttatcatgatttatttttggtaatattgcttatcttgaaaccttcttttgatattaatatagctattccatctttct

SEQ ID NO: 21792 - DNA, 201 bp, Bos taurus
tcactgctgagtttttatcttcatgggagttgggttggcctcaaagtgtccgaatgtggcttggcattatagattttctctgaaaaatgcattccaaaatatttctgatagatgtggcctgtgttcagttctacaggtaaaaacctagctgggaaagaaaattaatattttctgcagcattttcaagcagtgctctttact

SEQ ID NO: 21793 - DNA, 201 bp, Bos taurus
gaccaaaggagaaagtggatagaagtaaaccatcctgactgcaggatcctgctgagcctgtgtcctgaccccacctcttagatcctcggaggtacaggatatggtcttcctgagtgtggttcttacacattttcttcatttccgtgagccatgcttttttttttcctctcaacttgaccagagtaaatgtttttccctaca

SEQ ID NO: 21794 - DNA, 201 bp, Bos taurus
tatgcttataagcgttctctgacttgtcttatacaaatcatatgtgttacgttatatagttgtacactggtaacgaatacctgtggatttttagtacatttctggccagtcttttacaactgttttaccaataattaaccaatacatttaaattgggcatggggaaagcaacacactttcatctagcttttccaaagtatt

SEQ ID NO: 21795 - DNA, 201 bp, Bos taurus
cactccttgaagccagtgcctgacagttaaggagagagaaggtacttgtcggtctgtgctcctgtggctgcactttctggaagatgttcctgctcgtcctcattcgctccctcccatgtagaagcagcgggaaattcctaaagcataggagaagtgttaaatccaaaatgtggtacatcctggaaacactgttcctctggt

SEQ ID NO: 21796 - DNA, 201 bp, Bos taurus
gagatgtttgtccaggtgcaagcgctggtcccaggccccaggtttcaggtcccagcctatgtccgtgagggtggtagcctgaggtagaaggagtgaagaatgggtgggtttttccaggctctaaggcattcattctctacctgacgcctgtgggcacagtggaaggggcaagccagctctcagtctgctgaggcgggtgga

SEQ ID NO: 21797 - DNA, 201 bp, Bos taurus
aaggtgcagaataaacagaggcctcctttgcagtgatttcttagccagtccagtggataacctgtcccagtgaactagagtccttaaggactgagctacccgtgttaaacctaaaggtggccttaactgcaaaggatctgaggttaagagtcacaaagcggaacttttttttccccctctttagattttgacattaggtat

SEQ ID NO: 21798 - DNA, 201 bp, Bos taurus
aaacttcaatttactaaaggtactctcactccctgatgatataatggctttgtttttattgaatgctatatgtgccaggttctgctataaaaactttatttcagttaactcacttaattctcaaaggttatgcagtttaaatgctactattatcccagttttactgatgaggacactaaggccagaacattcaaatgactt

SEQ ID NO: 21799 - DNA, 201 bp, Bos taurus
ggtgtatttaggtaatggggttatttaaaaccttaatagttctttattcctgttaattgtgagaagaagaggtgctcaagaaccataggccctgaagttttaattctttagtaataattaaagagatttaaaaaatctgcttcccataaatgaatatgattctggcctgcttctgatgtctttccaggaaaaattcagttg

SEQ ID NO: 21800 - DNA, 201 bp, Bos taurus
ttgtttgaggctgcagctggtgaatggacctctgaatgggggtgagggggatgaaaaagaattcacacagggatgtgttgctttctctcctgagttattaataatagtttagcaaaatcatcatgtttcggagatttggtttcatttgcaaactttgtaatatccttacctacactcaccatgtttcctgtcttttttatg

SEQ ID NO: 21801 - DNA, 201 bp, Bos taurus
ttcttaattctttttaaattttgctgctctgtttgacttgagttcttgacttccatctcaatgatttgttcttctgccttatccggtctgctagtgaacccctttaatgtatttttcaattcagttataacttttgttttgaacttgcttatgtttttatctctttgttgaagttctcactgtgttcatccatcctgagtt

SEQ ID NO: 21802 - DNA, 201 bp, Bos taurus
attatgctgttgcctatccctttgccctttactgagattgccaatcaaaagcattcctttctcatgccttcaattcccttgacgtgcttgctttgtcatagctgtcaagccccatccctggttaatctaagtctctacctattttctagcagtccccatgcagagaccttggctggaaaaaaacacatccttcattccttg

SEQ ID NO: 21803 - DNA, 201 bp, Bos taurus
agttacacactgagtttactattgacttattttcatgaatatgtgtatggtagccaactaattattttagggggctgcaaacattcacatggttccttaagtttcaatttatgtctattcaccagtacccataaagcaaacagtacagtgcatttcatattcctgaacggcttcctgacatgttttagctatattatgtaa

SEQ ID NO: 21804 - DNA, 201 bp, Bos taurus
aaatgaagacagtttggattggaattccaaagccgcctgttttctgtttgtcacaataatgttttgcttgtgaattaatttcatttagactacattttattttttgctttgaaaagataataaccagaaagagtttaaagcacttcatttctattaagtaataaaccatttgtgatatacctagaaatatgtacttgaaca

SEQ ID NO: 21805 - DNA, 201 bp, Bos taurus
caagcacctctttaaaaaaatttatgtcaaaatggtgttcagtggtccatcacattgaatcaacacacctttatggagaacattatttagcacaccctagtggggcatatttctcttggtctttgaacttgaaaaccttttcttgttgatctttaatatgggtcattgaacagattctgttttacctgattagataaatgg

SEQ ID NO: 21806 - DNA, 201 bp, Bos taurus
gttgttcaggagatgtcgtgaaagattttccagcaaaactttacttttccttctcttttttactgagaagttctatttgaaacatcccaagctaagattagaaccagattgccatttgcatgcataatgttgctcaacctgaaaaccttgaatcagtatctggctgtgtcccactgcttccccatcactgtctgttctgta

SEQ ID NO: 21807 - DNA, 201 bp, Bos taurus
tatagttctatggctctgtcatttattaggcacttctctttgtcaagcactctgaagaacaaatttgaattttactcctgtcctcttcaaggttataattgaaaatagtgtacagtgccaagaaatggggtaaaaatgacaatgaaaattctagatggttctttatgtttttttctgacaccatctagaatgcatgtgaca

SEQ ID NO: 21808 - DNA, 201 bp, Bos taurus
ttggcattttatgttccaaatagctacatcccttgtatgagtcatgcagatagatagatcttttaaattgcttttaagcaattttgataatttgcctttcactgtcaaaataatgactgacgttaataattctgagtgattcagttaaaggaaaagagaacagaaaagtgtgtgccaaataattttgtgctatgatttttg

SEQ ID NO: 21809 - DNA, 201 bp, Bos taurus
taatatcttagatgctattggtatttagtcacttactctttcaaatcccctttcagcttcaagctcttaaataatgcgctttttatatatgcactggattttaccactctagcagaagtttaatccatttcaaagctaccccatgggaatgagtgctgagaatcatgttgcttgattctgaaagtaaaagtatgaaataga

SEQ ID NO: 21810 - DNA, 201 bp, Bos taurus
tccagtctcagatgacccatttacatggctcatcaagatttctgtctgcctctggtcagtttcctctccctgtccccatgtttatcacagattttaactcttctgttcaagctcctttttctgcacttgccctttcctcttctggttggtaaagctgctgtctgcatcccaaagataattgaagttgaagtgggataaact

SEQ ID NO: 21811 - DNA, 201 bp, Bos taurus
cacaaaagactgccagtttggagttaggcccacagcaagcaagagccttgtatcaagtccagtgtgcagtgtgaatgccttgccactgagctgtgtgatctgtcaggccatatagtggggtaatagatatttgtggtggaaaaatgcagcatgtagaatttatgccaagttcttctgggaaaagtgacagcacatgttcac

SEQ ID NO: 21812 - DNA, 201 bp, Bos taurus
tctaatgactaagataggcctcggcacatagtttatgcttaatcttgttgaataaacatacgaaagaatggtttagaataaaatgtgaaatggatatctcagagttgaactgaacactgggccaatacccatcttttcagttctctttgttattatccttagtgtacaatggggaaaataataatattttatgtaattttt

SEQ ID NO: 21813 - DNA, 201 bp, Bos taurus
acataaaccaatgcttgaaggcatgaatattttctcccttgtttatttttgcttttctagataacaatccatctctgattttatatcactccagataaaacttaatttatttctgggtaatgtaacctgtgaaatgatagcatgaagctgctaatgatacctcaggaagacatgataatgatttctcccaggtgtttgtct

SEQ ID NO: 21814 - DNA, 201 bp, Bos taurus
gaaacttactaaccatttaaaacggttctaaaagctttgaaattgagagtttcagtcatgtaatacagacttcactagatattccactttgattatggccatattgaaattgcatttatgaaagtgaaagttacttagtcgtggctgactctttgtaaccccatgaactatacagtccatagaattctctaggccagaata

SEQ ID NO: 21815 - DNA, 201 bp, Bos taurus
catagatgtctgttaaaattttctttgaggttggaatgacagtcaatacaaccagaacccagaagtctgtgcatgcaaaggccttgcattctctcctcccccaagcatgatacagtgacaacccatctccctaaaacccagggcaagaaacttctaggccatcaatttatcacaatcaacaatttgttcattttttttact

SEQ ID NO: 21816 - DNA, 201 bp, Bos taurus
aaagggaaacaacagatggtaaagtatttctgtttcatttggactcaagaacctatgttgaaaccatcagtattttggcctaagtttgggtcagatgaagattggatcttccaattgcctatagaatttgttaatgacaagagtctggttgcccaggaagaaatagattatgttctttgttggagaaaggggccaatggtt

SEQ ID NO: 21817 - DNA, 201 bp, Bos taurus
ggtgctggaaaatctatttcttggcctgcctcaggctcttggctttttgccccacattcctgcaaaccttgctctcttttatccttcaagtttcaacacaaatgtcctgatgttaggaggccttccctggccactttatgtaaaattgcaacactctcccccttagggttttctctcctcttctttgctttacttttctcc

SEQ ID NO: 21818 - DNA, 201 bp, Bos taurus
atttaaacttaatctaacaattgcaatatcagcatccccatgaattgtagcttgtccatatatacagaaatagtagtatatgtcaatatcaccatttggttagacacttgttgaaggcataaagatcatgatctactgaaaaactgcagttttcttattttctgaataaattgtctatttggttcatatcttcaccattta

SEQ ID NO: 21819 - DNA, 201 bp, Bos taurus
gaatgagatccctgatggtgaacaagatggacctaggttagtagcaaccagagaacccaggtaaactgaactcagtcttctctgtgtacctgctcagtcattaagtcgtgtccgactctttgcaaccctgtggactgtatctcaccaggctcctccatccatgggatttcccaggcaagaatactgaagtgggttgccact

SEQ ID NO: 21820 - DNA, 201 bp, Bos taurus
aatggcaacctactccaatgtctttgcctggaaaattacatggacagagaagcctggcggggtacagtccattcatgtctcaaagagtcagacaccccccaacacacacacataccatcttatggaaaagcccaaaccaacttttcagccagcacagtgttaaaacagaccaaattctctaccctcatgtagctcacatta

SEQ ID NO: 21821 - DNA, 201 bp, Bos taurus
ggctctggagcctaggcatgtaaggacgaataggtgaataaagggaagatgtgtctgttggcttggaaagtggtctctgattcctaaatattatgaatatactgagaggccctactttattttttaggctggatattttcaagctcttgtttctcaaggtgtatggctgtcggcattcacatgcccaacgtattttcatat

SEQ ID NO: 21822 - DNA, 201 bp, Bos taurus
ctcctttttcaaacttggttaaaaattagaagtggtctcctgggccatctggactctctcagatctcagctttctcaatttagaggatggctgtgatgaagttaaacagtggaggtaaagtcacctggctctgttgtgtgctgattccacatacacatgctggattatctctaaggcctgcagtggttcaagtggtggggt

SEQ ID NO: 21823 - DNA, 201 bp, Bos taurus
tgacttccccaagggctgtcagctgagcagggacacttgactggagctgcagctcatcctcaaacctggatggattccacagggctcagagcctgcctggccttccacactctggcaccttgaggtcctcggcacttcagagatagcttctagcttttagattatctttaaactgttgctgacatattgctttgaaaaatt

SEQ ID NO: 21824 - DNA, 201 bp, Bos taurus
tcaccctgtgacagcctgaaattgcactttttgaatcactccctgataactgttggttgacttcacatttgcccttttcccaccaacatccggtcagaattgggtagagagtagccgccacactggtttgttctggttgttgagataatatcagactgtctgaggatagtccttctgtgatgactcagccggtgcttcctc

SEQ ID NO: 21825 - DNA, 201 bp, Bos taurus
cttcctcagattctgccattcccactccaagcccaggtggaggtcctggcctctgtggttgtcacagtggcaagagggtgagaatcacgatggcaagatgcgggactcggggtttaaattctggccattgtacttagccggcgagttgtgtaacctatctaagtttcagtttccccttctataaaatgggataaaaatatc

SEQ ID NO: 21826 - DNA, 201 bp, Bos taurus
ccgcacaagatgctctctttgctttggtggctttactggggggtactttgggtttcagccaaacagtcagccaaaaccagcccccaaatggaccttcccatgggggcactgtgcccaggttatcatccagattcaggctaccctggaaatgggcatcttgccggggaccctgggtgtcctttcccatctgacccatctcag

SEQ ID NO: 21827 - DNA, 201 bp, Bos taurus
ctatcattaggataatttaagtgcactttccagtgtttttcaacattcactttttccctacctatccggcttcacttttcttggtaatttctttttctttataattcttctgtcttttgctattttattgtccccaatattcttcataatttatttcatttgaaatttgtatctattgttcaaattgtgctttttaatact

SEQ ID NO: 21828 - DNA, 201 bp, Bos taurus
ttagaaagctgctgggtttagtgtgatgatgcaaaggcacaaggtcagacagacaagtcaatggaacagaaacagatgctggtgtaaaaagtgctgtggtataatttagagaccattacaaagaaagagtaaataaaggtgtcatatagttggctaaattttcagagaaaaaaatggaatctcatgttatattatagggct

SEQ ID NO: 21829 - DNA, 201 bp, Bos taurus
cctgggttgggagtagcacccagtactcctggcttgaggccaacacctctggggccctctccaacaccctcttctcgtttcacaggtgtttacttctacccctatcatgaattggccaggcagcaaaaggggtgcacttagaggaacgcttcagagcactatcgagggttgcactaagtcccaaggaagtggtgggtggtt

SEQ ID NO: 21830 - DNA, 201 bp, Bos taurus
gtgcagtatgatggagagatgagctttgatgtctgatagtcatttagcctttagcaagttctaggctctctgtttcccatctgtcatatggataatacctaccttgtaaagtagatatgaggattaagtgagatcttatataaagcattaatatatggtccacatatatgatgagcttgcttgactcctcctttacccagt

SEQ ID NO: 21831 - DNA, 201 bp, Bos taurus
actgtgggaagcattggacttgcagctgaatgagtgagtctgcaggattggaagagggaccctacctagggactcttgcattaaaccaagattttatttcgaatagtgtgacctaccaacttttaaaaatctctcttttctttcttgtttaacattataatttcattttcctgctagatctgaaccattgcaaaaaaaaaa

SEQ ID NO: 21832 - DNA, 201 bp, Bos taurus
tggggtgggagaggttaaagatccaggactagtctaatctctctttggtaatttgtcatttagatggtcttcctgtgaaagatgagggacaggaactgtgcgggagggcaagaaaagatggtgtgcttcagagaatccttttaacctcaaggacacccgaggagcattgagtctcgggcattaaaacaagcaaaattactc

SEQ ID NO: 21833 - DNA, 201 bp, Bos taurus
ttactgcacaagcatttgtcactttcataacatgaaaatacaataaatagagaaatgataaactgaaaggatttgagaaaatgttttgtgagggccagttagttgcacaggagtcagaatacgtgtatggcaggtagacttaagtgggtagagtcatcttgtccttcctggctgcctcgtagtgttttaacacctggactc

SEQ ID NO: 21834 - DNA, 201 bp, Bos taurus
tcaacacttgttttttacactgtactggcgcctaattctccttggggaaaggtgacttgatctttcatgagatgaaagcacatacgatatagatttctagccaatactccagaacgttgcctaaacactctaattctcctaagtgtttgggaattaaagtcattaatctttttcttttcttttttggttttgaatcacagg

SEQ ID NO: 21835 - DNA, 201 bp, Bos taurus
caaatgaacaaaatgtacaggaatcctttcagcaactttaactttctgaggcttggccaagattcttgaaaaggcgcttcctcttttgggtcttggctccctcttatcttaatcccctttggcctgaggtagatctttgtctgctgagtggatgggccaatagaaatagaaaatgaagcttttataccttcccagaaaagt

SEQ ID NO: 21836 - DNA, 201 bp, Bos taurus
gtgccccaaagacgtttttgttgcttgctgacagttagtagtgtctgtttaaaacacatggttttattgggccttaaaaatatctttcagtttcgttctcatcaggacaagagaagagctgaggaaggtggattgcggctcactattttgttggaagatttcaacttcattccacctctctccagatgagtgctctttgca

SEQ ID NO: 21837 - DNA, 201 bp, Bos taurus
gtaagcttagggtctttctactctgttgtctttgccaaacctcaggataggaacattttaagtttcttgatttgtattgtcaattaccctccagaaagatagtctaaaattacattaatcctagcagccaacaagagagcatatttgcctggacactggatacttctaggctattattctccctattcttcttatttaata

SEQ ID NO: 21838 - DNA, 201 bp, Bos taurus
tacacttatcagttgtcaagaatcaaagaatttgatgaagttgattgtctgtgtggcactacccttcatgagaaagagcagaagtcctcctgtgttccctccaaaagggacaatatgcttctggagaagccctttccttactgagaaagcttggaaatcttctattaatttttcacctatatcttcctttgaaatatatcc

SEQ ID NO: 21839 - DNA, 201 bp, Bos taurus
atcattgtctgtagctaagacttaaatatggcccctatggtgtgctacatgccatttaagtactttacataaaaactcatttacctttaactgagaactttatgacaattgcttcaatattggtgtgggttaaattcggagagactgttattcgatgtaatacacgtcttctggggaatataccctgtattgcactcatct

SEQ ID NO: 21840 - DNA, 201 bp, Bos taurus
ccacctgttttggcctctagtgtctcccttcctttataaaatttgtggtgactcaaaataagacagtgtcagtaagaattaatacatggtgaaatgagagattggagtccggttttggtttgggccagaataacactgactgaagtgagatattttcttctggaacaggagacatatctgctgatgacaagtgacttcttg

SEQ ID NO: 21841 - DNA, 201 bp, Bos taurus
tatacttcttgccttaccatgtgtggttttggctaggattgtgaaaaattagagaatttatgggtttaggaatttgcctttattcacctgatttaatcttcatcaaatctatatctgtcctaaagaagattacacttttggaggagattatgtgctcatacatatgcaaacatatgtatacaacatatgtctatattgcta

SEQ ID NO: 21842 - DNA, 201 bp, Bos taurus
ttttcttccactcacaatttgttttgccctccctctcctctttctttgaccttgacctcctttcccacactggtcactgaggactctagtctatcattttcccctttggtctcccacgccaatttatgtgtactaataatcaactaaacgtcagtggttctaacacctttcctctcccacataccgaaatatgcctgatat

SEQ ID NO: 21843 - DNA, 201 bp, Bos taurus
ctgattgctttttattcctctttcctagatgaggtagaatagaagtaagatgagaaaacttagactgtatgtttttgtgagtgagagatgagagagaaaattttttagtttcatacttataaggtctaaaattaaatagcatacataattcaaactttaactatttttttcacttagcagtataaaattcttaacaccttt

SEQ ID NO: 21844 - DNA, 201 bp, Bos taurus
agatttacacacagcagtataatcactcaagaaatcaaaaaaaaagaaaagagaaaaacatctgtccctaggctactgttgcctgttcagcctctgattttgaaaatttggcctccaacctgttaagtaaatcagtcacttacttaccaatgtaagcaagtaaatttccaaataatggtgccggcatcccccaaatcatgg

SEQ ID NO: 21845 - DNA, 201 bp, Bos taurus
caggcgccaagtcttccgagttccctaagggacagggtggaaaacaaagctgaaagtttgcttgatgccgtatcacagaaggccttacataacaggataaggaggagggttttgtgtagttatttttgtgctcacaatctataaaatactgcaaatataccatgagaatttattttatggaaaagaggatcaagaagatgg

SEQ ID NO: 21846 - DNA, 201 bp, Bos taurus
atcaacaatcatagatgaaagaactaaaatgacccaacgtcgatgacttgggaagtctctcttcgctatatgtttagattgaagtcttgagtttttatgtctggaccaaaacaccatcacatcgcatcattttccagttcagaatatttgaacttttctttcactgtacagcttgaggaaataaacatcctctcaaacgga

SEQ ID NO: 21847 - DNA, 201 bp, Bos taurus
cagctaaggccagtgttcacaaaagggagttctccttgttctgtatccagaaccagaaccagtggcccatctgtttgctggtttcgggatcttaatagcagttccttactttaggttcaatagattctatctgcccttttctttccaaaactttccagtgtttttgttttttcctccctctcttgcttctaattctactca

SEQ ID NO: 21848 - DNA, 201 bp, Bos taurus
agtaggatgacctactgtctgagaagccagaaccctggaggtggtggagtgcgctcttggaactcgtgaccttgggcccttagttcagtgaaaatagaggagttcgtttcatgagcatattgaacttacacagcagtggcaggatgtagaacttggctggcctgtgatgcttgtccttgcaccactatctcacatacacac

SEQ ID NO: 21849 - DNA, 201 bp, Bos taurus
ctgagccaccagggaggcccaagctctacatcagtacacaaggcaactgccagaaagcttttgctttcctggttcttgtttcattaagctagcctgaattggcttgagtcagaattcacagcaactgaggaaatatatacagtttaccaccaagtgtactttgcagttaaataacagctcaggtcaaggtgtcaacaggaa

SEQ ID NO: 21850 - DNA, 201 bp, Bos taurus
gagcctggcccggctcctgtctgggaagagatctggcctgcgggcaggccctgacctctcagctttctgtctggggcaggcagggatgtgatgctgtaacccaattcacacgacaagcggaaaggcctgaggaggaggagaaaggttttcttcatgttttctccacaccatgtctccctcgtggtcctgaatttccaggat

SEQ ID NO: 21851 - DNA, 201 bp, Bos taurus
tgagtttttaacaatggtaaaatagtctagtctgtttttatgggctcaatgaactaatagctggaaacaatgagactgtgcctggccatgtcatgtagacatcagcatgtagatgttagttaagcaagtaagagaaatttctcccactctgtccttggccacccagtttctctcccaaagtaatcactgtcccttgtgtct

SEQ ID NO: 21852 - DNA, 201 bp, Bos taurus
cccagtgtcttcagactgctgttggatctaccatatccatctatcatgctatcccctccctcccctaaatcatccaattgtggattatctgggtgagcccagtgtgaccccaaaggcctttaacagtggaaaagggaactgaaaaccagagaaagcacatgacaaggacttagtcgaatgttgttaactttgaagatggag

SEQ ID NO: 21853 - DNA, 201 bp, Bos taurus
agtgggaaaacgagccatatagaacagcagggattgcctatacacttttgctatctgacaaactaaattttaagaccgtagaggcaatagacatactgctgttctctctggacagtttttatttgggagacttgtcaagtcaatgaacatattggataaatcaagtgaaaaatgaatcacccaaaaagtacccaactcttt

SEQ ID NO: 21854 - DNA, 201 bp, Bos taurus
gaaagcagaaaattttctaagtaacccagctagtgagagttttgtaagttcttcaaattctgaaaaataaatatgatatatctttaaaaacttcccatctgttagaaactactgtttttcaggaaaaaaagaacatagacaaaccatgtttacattagtcaattagaaacaaaagaaatagttgacatatgtaaactttct

SEQ ID NO: 21855 - DNA, 201 bp, Bos taurus
gtctgatgaagtcctcagctggccttccacactttgcttctatgacttctaaagatttcagtctctcagtaggaactctagggggaaaaaaaggcatttcaggaggccaagggattcattagagcattttctcgggactgagccaccatgcacagtgaggtaccaatgcccggggctttggggaatcctggcttcaagcag

SEQ ID NO: 21856 - DNA, 201 bp, Bos taurus
aagggattgtgtaagtggggaaatctgaatacgttctagttggtattaacgccagtatcctggaaatgtagaccacatcatagcatacattacactgttttactcagtctcttagcctgattagaccaattttttttctagaattaataaaaggtctgccctcacatgggtttcaagtttgaatttatgctacttaattgg

SEQ ID NO: 21857 - DNA, 201 bp, Bos taurus
ggtgagaaaagggaacataaaggaactaaggtaagatgccaagcccactgcctggctgattgtaacaaacactgggcctgcccaagtgtgcattccttccgggcgccccactgcggttcatactgaccacataaagtgaccttgagggtcccaaggaaatggtgtgagggccattgatgaagcaagaagctcagattccct

SEQ ID NO: 21858 - DNA, 201 bp, Bos taurus
ccggtagactggaaggacattctgttacacgtcacacacagtgcctttgagtatttaaagcactgggcgtcaagtcaggggccaaggcccaaaatttctcttctgaaggaagtttgcagccaaatttagctggggtagaagtctgttacaggaagtttaggtctcaggccagcaggaattgaatggtctccatcttcttaa

SEQ ID NO: 21859 - DNA, 201 bp, Bos taurus
gtattatccgcccggctcccagctccccagccggcctgcctctcccctctcctggcacatttacagctcccgatgtcagcaagtgctgggcactcatgtggtcagtgtcaacaacacaccaggaaatcagggctccgggcagcccagcgatgctggctttcggctgcctctggaagcgaagcgagctctcctccacgctgc

SEQ ID NO: 21860 - DNA, 201 bp, Bos taurus
agtgctaatggttctttcagttaaaagactgctgcccttgctcattaacatacacaagtcgggtatttttaaatccttcgttacttcaccatacccagggctgctgctgcaatggccaggaatacccaaatcccacggaatcttgggcaaaagatgtcagctcaagcccagctgtgggtctcagctacctacaaggattcg

SEQ ID NO: 21861 - DNA, 201 bp, Bos taurus
agacgcgttcagggtggtatggccatagacaagccttaatatttcttagactgtccatctggaaaacgtgctgtgctgatgcccttcgagcctctccagctacagaagtacctgcaaggccagacgattctttaaggaggaggccaggtgccatctcagctttttacctggtatttctcaggaaagctgtccttacctcat

SEQ ID NO: 21862 - DNA, 201 bp, Bos taurus
cctaaccactggaccaccagagaaatccctggagaaagaaaatcttgacatgagatcatctggaattatctggctgggccctgaatcctgacaagtgtccttagaggagaggggcagagggaggtttgagaccgaaggcagagggtacaaaggagacgtggaggccctgtggccgcagagtcagcgagtggagcgttgcga

SEQ ID NO: 21863 - DNA, 201 bp, Bos taurus
gagcaggggcctctctcgagttgtggtgctcgggcttctcattgtagtggcttctcttgttgcagagcatgggctcgaggacttcagcagtttcggtatgcgggctccaggcacaggcccaatagttgtggttcaagggcttagtggctgcagagcatgtaggatcttcccagaacacggatcaaacctgtatctcctgca

SEQ ID NO: 21864 - DNA, 201 bp, Bos taurus
tccacatgtggccattagcctggttaaaattttgctggtttttccttaactcctgtttatggtggattcctgttctccctgccatttggtaggaatgaaagctactcttggccttttttttctttggggatgggcttgacacatttatacttctttgcatcctcagctccctgatatattttaaaaactgtgcttttgtag

SEQ ID NO: 21865 - DNA, 201 bp, Bos taurus
tgtaaaggcaggtgaggcaggaatgcaccgggcattttcagaactccccacgaagaagaggaagtggcttccttccgcttggttcagtataaccacctcccgtcatccctctgcccaatgctaatggcagccagccgagccggaggtgctgctgctgttgctcagtcgctcagctgtgtccaactccctgcaactccatgg

SEQ ID NO: 21866 - DNA, 201 bp, Bos taurus
gagcgactgaactgaactgagccttataagatggttgagaaaatttttttctagtaagataatgtctccagcccataatagatactcattaaaggcctctgtggaattctttttttttttttttccaagattttcttttttatgtagactgtttttaaagtttttattgaatctgttacaacactgctttgatttttaggc

SEQ ID NO: 21867 - DNA, 201 bp, Bos taurus
gactgctcctctagtgttctaggatggcccagacaagagtccacagtctgctctgaaagcacagggtccgtgggggaagtaccctcttcctccagtaaccagatttgggggggccccccattcctttccagcctttgtcataggtgtctggaaggccctggagccctgatgaaccaggtggtacacagactggcagcattg

SEQ ID NO: 21868 - DNA, 201 bp, Bos taurus
cagcctgatttgtgtggaaacaaagatggctttacagagaaagtgggacgtgagtttcaggccccacacttgcctggcccattgcgaagttcctgtgccattttttaaattcttcagttcagttcagttcagtcgctcagtcaggtctgactctttgctaccccatgaatcgcagctcgccaggcctccctgtccatcacc

SEQ ID NO: 21869 - DNA, 201 bp, Bos taurus
gttccttccttccccaacttggcttcttccttcccctctcctccctcgcttccttccttccctctttcctttatacctttgcagtgggaggtatttaacccctatgtctgcttaggaatttcatgaactaggtatttgcagcatctgtgctcgccaccccacctccgcccccctcctctcctggggcatactctccttctc

SEQ ID NO: 21870 - DNA, 201 bp, Bos taurus
attcacatcaaagctcttactcattgcaaaacctcagggaaggtgtttaatttctttgtgcctgaatttctcatgtttaaaacgtgaataggatgactatgctcagaggactgctgtaaagagtaaatcataaaatacaggaatgttttttgacacctagtggctctttaataggtagtatattgttagctattattgttc

SEQ ID NO: 21871 - DNA, 201 bp, Bos taurus
ggtagctgggcgctgggcgggctgggcccccgtcagaactcctccccgcggtttctgcttggcggcttagtgtgcgtgcctcagagaggatactggggttgtcacagtagcgatgggggggaccggcccctgagacccctagcctggtggggccagggcaagtctgcaagggaggagtcctagatggaggctgggacccgt

SEQ ID NO: 21872 - DNA, 201 bp, Bos taurus
ataggacaccgttgatgccagccttgctctagaacctaccatgactctagcttattggttagcataagatttgaggagttaatagataaaggagcttgtctagagcctgctttcaccacctttatgcttgtgttctccaatgtggccatgcacaaaggtagtttactttggaacacaccttttatctttgtttattccaag

SEQ ID NO: 21873 - DNA, 201 bp, Bos taurus
tcgttcctattaatatttagctcctataatatttccttggcctccagatttataggttagaatcttcatgactgtagctttgttccccgtttcccatttctgacccttctatcctcaggcccccggcctctgttccttggtcaggctctgcagagctgtgcagctcggacttaaaaggcttgctcctgtcactcaagacac

SEQ ID NO: 21874 - DNA, 201 bp, Bos taurus
catcctgcttctctcacacaagtggagagatgcatccgaccgtcccttctacactcgctgctaggttcaccattagagaacttaaaaccatagtgtgctcatgagcactcaatggcctgagttaacgaagtgaaaggctcagcacagtactgaggccactatgtaacatcagcaaacgacatttccctcctggtgtgtctg

SEQ ID NO: 21875 - DNA, 201 bp, Bos taurus
acatcatctattataaaagcattttattatgcttattattatttatttttcttccacagctctgaagttctgtgttaaaagagcaggagaacatcaaatgccatctcaggaccccttactgtagtcaagagaaacatcaaaactataaagcacacgtttgtccttctctgggaatagataaaatattgttcttctaggcgt

SEQ ID NO: 21876 - DNA, 201 bp, Bos taurus
aactgcccccaagaccttggaagcaagaagtggagatgtccctcagcaaagtcctcacaggttcaaggagagtttctagcttccagggcccctggttatccgcttgtgacccactctcttcacttttctgatgataaaaatgagaactccaagcggtaaagcaaggtggtctctggagctctgcgaggcgccctcacaggt

SEQ ID NO: 21877 - DNA, 201 bp, Bos taurus
gtcaggaccggcctcacgtttagttcaacactgcttctacaccagtagtctaatttgagaaacaagttcaagcgcactaatgaatccatctcattgtagattccaaaaaacacattgtaagcccactgttaccatttcccttagaagtattagcctggcagaaaaaattacactcagagagaaagctgtgaactggaatca

SEQ ID NO: 21878 - DNA, 201 bp, Bos taurus
caacaaagttgcaggattaagaggtgtgcagtaggtagcctgtttcaagctaagccatggatactacttgtctaggctgcaaacagcatcgtccttcaactgggccacttctttggattaagctgatccggcctcatccagggtgtccaatgcttgcaacacccacttgacagaaagggaaagggactttgcttagctaat

SEQ ID NO: 21879 - DNA, 201 bp, Bos taurus
agggcttgcacacagaagctgtcagagtggtcacaaagcataagctttcccagcccatctgaaagtaagaaagatgagtgtggaagaactctcttgggcccggaaacacgctctgcggaaagagatggacaggaaactctggatcacgcccttctgtattcctgggcattaagtgggggctccttgtgtctctggcagcct

SEQ ID NO: 21880 - DNA, 201 bp, Bos taurus
tattatggagagacagtttgccagcaaactgctgtatttaacccaatttgagttgctggaagaacccagaaggttgccttgtggaggatggatggtgattaagaatgctgtggagggcgagaggtggaacttgaaagcagaatatacatcacgaaagcacaaataaatttaatgagagaccagggtgtgaaatatcaacaa

SEQ ID NO: 21881 - DNA, 201 bp, Bos taurus
cgagggatcaggtgtgtttgtgggctttgcaaagaccctagcacgactggagagctgagtgcaggaaagactgaagccctttaaacggatggagtactcactattcaataacttaccttgtacgtcatccaaagattgaatgagattcaacaagaaggaaatgggtctcctctgttctccgtgaggtgacgcgtgaacaac

SEQ ID NO: 21882 - DNA, 201 bp, Bos taurus
agcaggccactccaaagaaacagatcctcctctgctttttaacaaaggacagtgctgataagtttatctcaaatactgttagagacttcagacaaatactgtgtgagagcaaacaggcccaggcttgcttgcaggaggattagagaacagtcttgaatgacattgttcttcaggttcctctgggtctagaaagctgtgagt

SEQ ID NO: 21883 - DNA, 201 bp, Bos taurus
tccagggggactcctgagactcgatcccacctttgcgtatgtcgagcctccttcctcatgacctttgccacgggcggagcgcctcacgccggcccccgacaagtggggactgacccagtcctcaaccacgtgtggaaagaactccgctctcttgtgcctcccaccggccttcccatagcaccagctgaatcatcccatgtc

SEQ ID NO: 21884 - DNA, 201 bp, Bos taurus
ctgagtcccacctgtgctatctccttagcaccccgtgtgcggcgaatctcttcctctccatcactacggccttggttcaggcgatctctcttccttggtcctcttccagaacaactgtgtttgttctcaattgctgctgtaataaattgggaaagttagtggcctaaaacagctccaacttattatcttacagctcagtgg

SEQ ID NO: 21885 - DNA, 201 bp, Bos taurus
ctgtgggtcacagggtcatttctgttttgtaaataagttcatttatatcatattttaggttctacatataagtgataccatatatttctcttgctctgcctgacttacttccttaatatgataacttctaggtccatctacgttgctgaaataacaattgttgttcagtcactaagccgtatccaactctttgagactcca

SEQ ID NO: 21886 - DNA, 201 bp, Bos taurus
tgtggagttgagcagaagggactccactttggggctgttatctcttcactaacaagctctcaaatttctctctgtgtttggagaaataggcctttttaatctataagactgaatagatagctgcaatctatgtgcacgtgtcctggggcaggtgggctgctgggccaccacttcagctcttccttccccgggtttccaatc

SEQ ID NO: 21887 - DNA, 201 bp, Bos taurus
acggacctttgttgacaaagtaatgtctttgctttttaatatgctgtctaggttggtcaaaactttccttccaaggagtaagcatcttttaatttcatggctccattgaacaaaattcaatatactttcatgataaaaccatctagcaaactaaaaatagaagggaatttcctcaatttgctaaaaccaaatatgaagata

SEQ ID NO: 21888 - DNA, 201 bp, Bos taurus
ggggcccagaagctgtgcacttagttcgtaggctatgtgcctttactaaggtaaatactgactcccctgggctaggactgaaccgtagagtatttatgctctatcatatttcaacactggccactgtagtctcccccagcagaactaaccatgagttagtacttttatttctaaatgacattatgatggtcttcctatatt

SEQ ID NO: 21889 - DNA, 201 bp, Bos taurus
agcctgacagggttttgcacaagaacaaggtgggccatgttttggaacctgtaggagagtacccacactgtctttgcagaagacactggaaagcaggtgctggggttctgctgaatctgtgagcgtccgaaggtccttaagtcatgtcacctgagcccaggatccccctcctgggtctgtgcttcccagctggcaagactc

SEQ ID NO: 21890 - DNA, 201 bp, Bos taurus
ctccgagtgtcctatagttttcagtctgcaggttttccaacttcttccaactccttaaatttattcctaagcatttcttcttcattatgtcattgtaaacgggattgttccatttatgtatttttcagatatttcctttttagtgtatagaaacacaactaattcctgcatgttgattttgggttctgcagctttccaaat

SEQ ID NO: 21891 - DNA, 201 bp, Bos taurus
attagagtccacccaaattactttcttttattgtaattacctgtctaaagacactctccaaataaggtcgtgttctgagtcactgggggtgaggatttcagtgtataaattcttaaggcacacaattcagaccacaacaggggccatgtatctaaagagtttatttatttctattgcctttaaaactgatctgtacatccc

SEQ ID NO: 21892 - DNA, 201 bp, Bos taurus
gcctctttcatttccacacacatcaggggctctagctggtctgaaatctgaaaacagaaatgatgtactctctccacttagcagttccctggctggagaaaggcgttaacggtagctgggagggagaaacagcggttctaatgcaccatgaccgactcctcacctcccaggggaacattacgacgagcacggcaggagaaa

SEQ ID NO: 21893 - DNA, 201 bp, Bos taurus
aaaccctttctaaactgcaggcctggaataggtgttaattcagcctgcaaatatttatgagcacttcatatactggccacctacccatatgaggatcacagctcttcataagaatagagttctctagagtattcagaaggaatttccattgtcagtcatgccatcttttttcctaggcctattaaattcatgtgattgctg

SEQ ID NO: 21894 - DNA, 201 bp, Bos taurus
acattcaggctccatgtcctcagccatctccaccttccacctgcagctgctgaggctgggagttgctctggaaacagacaaacattccaaggccctcctccggggctcctctgttgccaggcaaccggggcacagtcccagccaagggatctctcctctgaacctctcttatgcctctggccttcttgaacagggagtact

SEQ ID NO: 21895 - DNA, 201 bp, Bos taurus
aatactttcaaaatctgaaaaatgtttcattatgcaagggataacagtgtaataggagctggacaaccactcccttacacaacttacagtccagcagaggtggtgggcttaaatactttcaaaatctaaaaaatgtttcattatgcaaagggtaacagtgtaataggagctggacaaccactcccttacacaacttacagt

SEQ ID NO: 21896 - DNA, 201 bp, Bos taurus
cgcctggttcccaagtgctgagccggcggcctgggggagccggcggcctgggggagccggcttcccgcgcctcccgcggcccgccccgggggcgccttaccccctgcgagtgcaggtagtccatggtcttggtgatggtgcacagcactgcgctggcctcccgctccgagaagtaccgctgccgcaggatgcggtccagca

SEQ ID NO: 21897 - DNA, 201 bp, Bos taurus
ctccggcccctctccttgcccctccccctggtctgcgcacgccattcctctgcgcatgtctgtgccctggtcacctttctcataaggacgcaactcatccgggatcagggcccactctaacgatgtctctgtcatctaatcacgtctgtggaggccgcttctgcaaacacggtcacattctgagccccgggcagtcagggt

SEQ ID NO: 21898 - DNA, 201 bp, Bos taurus
tgtgaagccagcacttccagacccgcccacaggagggccacactgaccgggcaccatgtcacctgcacaggatgtgaaccttcatctggagacactgatagcctcacaggctaattcaggggccccatgacaggtaggggctcccccggtgcctcagtggtaaaaacccgcctgccaatgcagcagacacaggaggctggg

SEQ ID NO: 21899 - DNA, 201 bp, Bos taurus
gttgtcatttccttctccaggggaatcttcctggcccagggatggaacccaggtctcctgccctggcaggcagagtctttaccgagcatttatttggccatagcttaaacagggaactcagtctaaatgctatcttgctttctaaaaatatagctagtcattaaagtactgtgcctctcccttggggctgattttggcctg

SEQ ID NO: 21900 - DNA, 201 bp, Bos taurus
gaggggaggccgttttccctgctgccctgtcacttcctgtttgccctgggtgcctcctcagtgctgcctaagctgtgctgagtgggcgtctgtaagctccgtgggagctggcctgctaactggtgtgccccgcggtccctggagcggcgttgagtctgcagactgtgctcagtacgaggccagggcggcaggagcaggctc

SEQ ID NO: 21901 - DNA, 201 bp, Bos taurus
atgagtttgagcaagctcctggagttggcgatggacagggaggcctggcgtgctgcagtccgtggggtcgcaaagagatgagcacgactgagtgactgaattgaactgaaccaaggtctatggcctgaaccacaggggttgaagggatttggttgcctggtgctgaaatgagcttgtggatgagcaactttatggaaggca

SEQ ID NO: 21902 - DNA, 201 bp, Bos taurus
tggatgcggacaatgacgatgctgtggtcctgggcggacacccctgcccattgaactgcactgacgctcccgctgcagacgggcctcccctgggagcctccgctggtcacctgccccctccatcctgccccaggggagggggtggtcctgcttccctagccccgtaaggggcattcccccaaacccgggccacttctgtgc

SEQ ID NO: 21903 - DNA, 201 bp, Bos taurus
cggccgaggagaacgtggagcaggtgcctccagggtttcctggggctgcgtgaccctgggcgagttactaggcgtctctgttcctcagtaagaagcgaataactcgggcctcggctggcactatgtcatggcttcccctccctctccttgcgtcaccacagaccctcgggactgtcaccatcagctagctctttccttgaa

SEQ ID NO: 21904 - DNA, 201 bp, Bos taurus
gaaaaaaccagattggccttaagaaaagagtttccaagtcaacaccctcctgcggcatccagatctcaacagaagggcctggtggttccaggccaagcacgcctgccctgagacccccacgggaatggcacgtgggtcctcgtgcagagcagcactttgccgagaaggaggtgggccgggggttggggggagcaggatgtg

SEQ ID NO: 21905 - DNA, 201 bp, Bos taurus
tcagccaaagggagtttccattcattcacattcatgctggggttggggttagcgttgcccctttgaaatctcgggacagatgggccctcagggtcagatgcgtgtgcacctcggagttctgtgcatccaggcttaattctagacttgctttgatcctgcttgaacgggatactcaggctttgtgcgttttagtggccagat

SEQ ID NO: 21906 - DNA, 201 bp, Bos taurus
ccctccccgccagcggctcaggccggagcccgtgtttccgtcccatcctgagagtttgacccatcgctgttcacacggtgatgctctgacgtccagaccacgagggcccgccgtccgcagtctgagcgccttgtccccttccccccgtcctccccgcaggcaccagcgtgagctttcagaacatgcgcctgggctgcaagt

SEQ ID NO: 21907 - DNA, 201 bp, Bos taurus
agcacttgttatgattttactcagaaaagctgtttaatatccataattagaaagcagtgagtctatgtccctgagggtggggctctgaggggccccccacgtcctcctctgcgccttttctacaaatgtcttagtgaccgtcgtgggctgggtgatgtccctgccacaccccagaatctggccaggttagagactgggtct

SEQ ID NO: 21908 - DNA, 201 bp, Bos taurus
agttttgaatacaaatttaatttctgtgataggttatctattcctcactgagtaagctctggatgtatagctctttcaggagggttttttaaaatttcgttgatttattgaatttagtggcataaagttggttgtaaggtctcttgctgcagatttagcgtctacagagtctgcggtgcttttgcgtctgccgtctgccgt

SEQ ID NO: 21909 - DNA, 201 bp, Bos taurus
aatatgcacaataaaatgtttaaaccccactttgattagtttgtcaggtgactagattattgcagtgatttaggtttttactctagagactcaaataaattagtgtgttagctttaaagagttactgaaagcaagtctgaaatgtaatcatttctccacacttgcctgaccgtgaactaaagtcccctgtctacacccgaa

SEQ ID NO: 21910 - DNA, 201 bp, Bos taurus
acttgttattggaagaaaatcaagccttaagttaaaaagttttagaagtacctctaggagtatttaaatccctttccctataaatcaagtatgctttcttggtggtaaaagaatgaaaattagcaacttctagcattcagactatataatcagactgttagtatacagaatatgtaacttttagtgtagaaaatataaggc

SEQ ID NO: 21911 - DNA, 201 bp, Bos taurus
aagatatgaatcttacaaattcatttaaaagtaacaataaactctgtatttacctgtggtcctcatttgtagctatcaagctggatacattccgtaatatcccacctccactttcaataatggctaaagtattggtctggctgcgataagtgagagtgccaaccaaaaatgcaagcgcaccatccacagcacatatgtcag

SEQ ID NO: 21912 - DNA, 201 bp, Bos taurus
ctcatggcaaagaagtgaggccttgtgccaaaagtcagaagcaagagactatgagtgagccatttagaagtgaatcctccagtctagtcaaacctccagatgactgcaggcctgactaacagcttaactaactttatgagagactgtgagccatataaccaattatgacattcctgaatttctaccccagagaaactctga

SEQ ID NO: 21913 - DNA, 201 bp, Bos taurus
attagtctccacattgcacctgatcatttcttttagggcactgaacatatttctcaattatctattcattgcttcttcaccattcagttcactaaactgaattccaccagggagggaagatgtttaacttactccatgcctagcaccatgcctggcatgagtgatcactcaatatgtgtgctgtttttaggaatgtccagt

SEQ ID NO: 21914 - DNA, 201 bp, Bos taurus
ggtagcaaacatggcagagaaggccagcaagacacaggctgaaatgtatttagtgggtttgacatccaaaagaaattggtgtcctttgtgggaaccaggtgtagtagattgatggtgtctggccttggctcaagaaaaggaggggcgaggaggtaaagatgcagaaggccagaacaccggtattctttctagtgagaagga

SEQ ID NO: 21915 - DNA, 201 bp, Bos taurus
agagtcgaacacaactgagcgactgaactgatctgagctgatgttcccagaactgctccatatttgtggtggttaaaggattgtaaagagtgattatatatagagaaataagagcactgaattctatttctgaggtcagattatcttctttctgccttattagactatggcctccaagtctaaagatgtagttcagtgata

SEQ ID NO: 21916 - DNA, 201 bp, Bos taurus
aggagcctggagagcatgtggcagtggattctagggtgctggaacaagggatttgaacaagggtgggagagatgagacatacagctcagatggccaaatgcattgctatgggcttaccatcaaagagctaggatctgaatgtgctggttcaagaagtggaaccctgagagacttaccctctgcaggcctaccaaatctaag

SEQ ID NO: 21917 - DNA, 201 bp, Bos taurus
gtcaccgagtattcttctgccgggcctgttcacctaagactatactctgttgtgtcactttttacccattgtgtgggctcataaagtacgttgtagttggtgctgcttttggccccaacatagggatgctggcaatcagccccggtgcctttcacatttcgtttttcacaagaccaccagcacagatccacaggagtaaga

SEQ ID NO: 21918 - DNA, 201 bp, Bos taurus
ataagcattgtctcactggagaagcccccagaatgaaaatatattcacatagctgttttgatacctgttcaccacacagttcctgagggcagtggaatgctgggtcctcctaggccaacctggaggggcttccgtaagactaggcagactgagactaggcagtcctatccagaaaggcagagcagggacttcacagcggtg

SEQ ID NO: 21919 - DNA, 201 bp, Bos taurus
acctacccaactttcagtcacaaaagctatagtacttcatgacccaggcaccctgcactaacattgattcctccaacactgcctgctgtcttctgactgcctgccctcacagtgctgacccgctacctgttagggaggtagaataggaaaaaggagtccaaaatgacggtggctaaaagacaaggaagggaaaagcccatg

SEQ ID NO: 21920 - DNA, 201 bp, Bos taurus
cttggctcatggccgcttcctcacatcgcatcgccctcttgctttcactgttacatctcctcttggttctaatcctcctgcttccctcttacaaggactcttgtgaatacactggcccacccagataatcccacataaactccccacctcaagagcctcaacttaatcacatttgcacagttccttttatcacatgaggtc

SEQ ID NO: 21921 - DNA, 201 bp, Bos taurus
tatgacacaaatgaacttatttacaaaacagaaataaattcaccaacagagagaacagactgatggtggccaaggaggagggcctgggagagagatggggtgggcggctgtggttagaagatgtaagcttttatatggagagtggataaacaacaaggccctactgtatagcacagggaactatattcaacatcctgtgac

SEQ ID NO: 21922 - DNA, 201 bp, Bos taurus
gaatatcctgttatcagaggaaaggggaaatggatgaaggatgctgggcagcaaaacctagtcaacaaaaatacgtttaacaaaactatcgggtcacctgcatcaacttacattgttggaagtgggtcagtcagcactttgctggaagtctccaagcccaggctttagaggttttcacggaggtttcactacataggcaca

SEQ ID NO: 21923 - DNA, 201 bp, Bos taurus
agagacatttggcatccagccaagggcctctgaattcttgacgtgttgggatgagccaggatggaaccagggtgtcttcactggtagaaaggaggcctgcaggggctgaggaactctcttgcggagcagggaaggctggtaacccgcaaagccttgagcaaacagggtctcaactctggacgcatttattgggcccccgtt

SEQ ID NO: 21924 - DNA, 201 bp, Bos taurus
ctgagtcgaaggtgcttttgctgtttcgataagtgaggcagaatactaaactgtaccaatttgcaggtttcaccaacaatccatgtcactcaggattttaaactgagatttagagatttgttcagttgatagcaggatcagagattgtaaaaaaaaaatgcaccaagggaaaaaaaaatgcaccaagagaagcagtgaagg

SEQ ID NO: 21925 - DNA, 201 bp, Bos taurus
ggattttcctgtgttgttattgttcacatgatcgagatgttggcttcaggtatagctagatctagattctcaaacaatgttatgatttctttcaatatgattcaagtcttctttctctatggattatctcagaggatttggcccacaatggtcaccagcagcaatttattccccagccactccagaataacttacaagaaa

SEQ ID NO: 21926 - DNA, 201 bp, Bos taurus
gtcaggggtaaaccatgaagggcctctaatcttcatgcgaagtcagggagctggggcttctgacagctccacatgggcccccagaggtctacatcctcacagtggaacttgagaacattatgtggcaaaaaagactgtatatgtgattaagttaaggacattaggatggggaagttatcttgggttactgcagagggccct

SEQ ID NO: 21927 - DNA, 201 bp, Bos taurus
ccccaacccctgaaactcacatttgaaaccaatccccaacatgatgctgttagggaggtggggcttgtgcggggtgattaggccatgtgagcagaacccttagcgttgggataaggtcccttaccaaagagagagccagccctccctttcaacctgggaggttgtgaggttatagtgaggagatggccctcagtgaggaag

SEQ ID NO: 21928 - DNA, 201 bp, Bos taurus
ccactggaagagaaaccacttccccaaagccacacgcctgccagcagtggggccaggacgcgtccccggtgctgcctgctgcgtgccgttggtggggcccactaggcgtctggtgaggtctagttcccctggggacctccctgtaggtagcacccctgaaagaatgaggtgttatttgggcctcacagagtcttaaccata

SEQ ID NO: 21929 - DNA, 201 bp, Bos taurus
atgtgggcggtaattcatcatggcggccacaggaaaccaatataggtgcctgggagggatgccccgaaggatggagcagctgcacgtggcctcttcgcacagctttggctgctcatagggtggtgactactttctgtgatggagcttcctgagagcaagtgtcccaggcctatgagatcaaggcagaagctgcaaggtttc

SEQ ID NO: 21930 - DNA, 201 bp, Bos taurus
gaaatggcaaaaaatggctgtcaggggctgaaattaggagaaaggttgactacagatggtcttggaaattcggagggtggtagaacctgttccaggtcttgattgtgatgtgtggtatatttgtgaaaacttgcagaactatacctctacaagggtgatcagctgggcagaattgacgttcccagagctgattcctagcaa

SEQ ID NO: 21931 - DNA, 201 bp, Bos taurus
caaaacaggaaattgccagcgttcttcctgctggacagtgacttatattataaatgacatttttttattcttctttaattcaaagtaaagcagcagtgaccgagaaggtaccatgtgccaagtgttggcttttgatgttattttgtttaatccccctccaacagcatttttattccccatcttacaggtaatgcagttgag

SEQ ID NO: 21932 - DNA, 201 bp, Bos taurus
actctggcctggagaattccatggactatacagtccatggggtcgcaaagagtcagacacaactgaacgactttcacttcacttcacttttatgaaataaggggcaggggccgctttaaacaatactcacctccagccatgaagggctccatctcatactctaaccctcactgaggctgctttgtgcttccactgccctgg

SEQ ID NO: 21933 - DNA, 201 bp, Bos taurus
ggcgctgtcaggcagggacctgatgcagtgattggtccacatagaaaacatgaggcacaactgagattccccttcatttaaataaatacagagcagcaagaacaatcaaaagagggtcatttggggagttaaaataattgtaaaaagcggcacctaataaatacatttttcccttttgttttccagatattctacccggaa

SEQ ID NO: 21934 - DNA, 201 bp, Bos taurus
cggcagacgtactcttcgtgtgtgtgcttccgttcaagatcagctactacttctccggaagcgactggaggttcgggtctgccatgtgccgcttcgtcacagcggccttctacgggaacatgtacgcctccatcatgctcatgacggccatcagcgtcgaccgcttcctggccgtggtgtaccccatccagtccctctcct

SEQ ID NO: 21935 - DNA, 201 bp, Bos taurus
actccgggagttggtgatggacagggaggcctggcgtgttgcaattcatggggtcgcaaagagtcggacacgactgagcgactaaactgaactgaactgaccatttcatggtgtagatgtactttgtagttttacatctgtattacttcctgatttttgtcttcacaaagccagctaagatcgtgtttcctggcttctgct

SEQ ID NO: 21936 - DNA, 201 bp, Bos taurus
acgttaatttacaagctgattttgtccaaaatcacaagtatcctatatctgaatcttttaaatgctacaaatgcctttaaaagtagaaacatatatactgaattattgaaatgattacaacactattgtatttatacttatgctattataaagtacttgcacactttatttctcctttctcactatacttttatgagtatt

SEQ ID NO: 21937 - DNA, 201 bp, Bos taurus
cctggaaaacaatattttcagttgatctgaagccagggtccctacaggattaggtgtttgcctctgtctgcccacctgcctgctccttccttcaaccggttgactggccacagcaaagggcagaagggattgtgcttctacagagtgcagacccccaagaagtcagagctggaagcgtccggttgcccactcctcacgggc

SEQ ID NO: 21938 - DNA, 201 bp, Bos taurus
atgtatttcattagaggtagtttccttttcagcatttttggacttctgctgtgttttttttttcgtttgtttgtaaggaaagcatttgttaaatcagcacattggggttgtgtgtgtatgtgcttggttggcagtggggcaggggacacaggggcttaaagaaaacgcttttggaagcagatgtcaaagtgtgtttatgtc

SEQ ID NO: 21939 - DNA, 201 bp, Bos taurus
gtgcaggtagtcaaccatcacaatctacccctttgggcacatctgcaggcttcttatgcacatcttcatacagaatccacaaccatgatctgcattataattaatgaagcagcacatctgaccaggtccaccaggtctgatgtagaaccattttcaagatcttcagggaattgaagataccctaaggagaaagtatggcta

SEQ ID NO: 21940 - DNA, 201 bp, Bos taurus
caagaggagtcaaggtctcacagtgattagtgtgacagttatcgctacatacctttttttttggctgtgctgtgtagcttctgggatcttaattcctcaatgagggatcaaaccaggccccgtgcaatggaagcaaggaatcctaaccaagggactgtcggggaattccccctcatttgcacttttaattcctatccattt

SEQ ID NO: 21941 - DNA, 201 bp, Bos taurus
ttagtaaatgtgcacccagcactgttgcagaattataaatggtctggaatagaggccattgttcgctgaattctatttcagtatctgaacatgctatcaccgtgtaaaacagatttctttattacatgcaagaaaatcataatctctttatttggggacttaagaagataaatacttaaacagtaaaacaactgcttaaca

SEQ ID NO: 21942 - DNA, 201 bp, Bos taurus
atgtgctccacgcctctagaattatctgatgccattgtagtgacgtgctgggcaaactaaccagacatcacattggccattagtatcccaaccacttatacagaggtggacagagcactgctctcaccaacctgactttttctctcatctttccttggctcttggcctcctgccagtagcttttcttcagatagctaatgt

SEQ ID NO: 21943 - DNA, 201 bp, Bos taurus
aatcagaggttagattattgagtaatgaggcacccacagtcacacaaagtcagtgacagggagcctgggtggttatgcggctttctttgggtggacacacagagggtagtgaattctgacctaagtgaagatctgggacattgtgttacaggctgcaaccctcccccacttgccccagcagagactcatgaaggcaggtat

SEQ ID NO: 21944 - DNA, 201 bp, Bos taurus
accttccttgccttttctagcagctagattgcattcctttcattccttggctcttggcccttctttaatcttcaaggccagaagcataacatcttcaaaactctccgctctgactttactttgccttcttccaatctatgacaaactccctcggcctcactcctacatggacgtttgtgattacattcggttggccaaaaa

SEQ ID NO: 21945 - DNA, 201 bp, Bos taurus
ccagggaaaatagtgtcaaaaggcaaggagtgaggggaagagtaccctgtctccagggttagcaagcctggcagaggggctgcacctccatctcagagagcggccagtctcagctccagaaagctcagcatgtagagctaaacatctggcttgacagcagggaacatgctgttaatggcagttcagaggaatttctgtgtt

SEQ ID NO: 21946 - DNA, 201 bp, Bos taurus
aaaaggctggcctgaggggccaagagcatgcagcccgtaagttctagaaagatcaaatgtgtctgacagtgggctgctgggggcacagggacagcctcaacggaggccagccatcaaccatcctggtaacctggctctttgaatggcactgctttttcccgggcatttgaagtactagacgaacaccattaacattttctg

SEQ ID NO: 21947 - DNA, 201 bp, Bos taurus
aaactggtgagtgttcatgagccatttcttcattgtcccttcaaaggtttgtcctggacacagtcctgcttgactggcaggtgaatccgttcacaaaccaatgagccatcaccccagctccaactatgcagccacccgttgcttcaccgtcaccacatctgtgagctctttctttagttgccattaaaatgacccctttca

SEQ ID NO: 21948 - DNA, 201 bp, Bos taurus
atatttcttagtcctcagttgacagcatcggccatgtattgcttcagaataggtgagacttaagggtaataacttctgataattgtaccagaactacctaagcagaaatacacgaggccgggtattgtgatggtgggttatgaaaggtacccttgcgcctgatgattgtgggactggtgggcagtgggcaaggtgtggctc

SEQ ID NO: 21949 - DNA, 201 bp, Bos taurus
tatgagagtttagagaatgcagttaatagaagtgctttagccaaaatgatagaatatcacattcagcctcaaatgaatggacttaattcaagtctcaacatagtatatggcagtccatccttgtgaaaatcatgctgtggctggtttggaatgggcttactgggtgacctacctggacagctggaaacctctcctggaaat

SEQ ID NO: 21950 - DNA, 201 bp, Bos taurus
agctacccagatatactgtgtaattctgtactttggcagatttaacccattcctccctagaagaaattagagagattgaaataagtaattgctttcctgtaatgtaagaaaatacacctgcttcaggtgtattgagcagttctagctctgccacagttaactaatttttgtgcttttggccaagtaattctacctcgctgg

SEQ ID NO: 21951 - DNA, 201 bp, Bos taurus
tgcaccggccctgagcaccctgtctcaaggacattcttttgaatctgatgggcagtgagggggcatttgtacattgcagaggtcacaaagtgtcagtggtacattcacaaacagtacgtgtggccgtcccagtagttccaagctgctggggggcactggtctctgagatacaaacgccgcacattgcgcctctgcttcaga

SEQ ID NO: 21952 - DNA, 201 bp, Bos taurus
gctattgcttttgatgagagaatctttacacacaggtttatttgtatctatttaatagcagtttttttttttttttttgctgcagttcctctggagagtccatatttgctagattgaattttagaaccctagcacagttgattgcacaaccaggctgaagtattgttccagagaaccacacagaaagccgaaaccttcagg

SEQ ID NO: 21953 - DNA, 201 bp, Bos taurus
gaaatactggagaactgtaaacgcacaaaggcacacttaggtcccacaaaggtagcagattgttttgttgacactgtatctcccatcacatccatgcttttcatggcattccttgtgtcgtttattactgaccaggaatagacagctggatttgatccaggaggcacatgtgggatcccaaggcagaaattcactactagg

SEQ ID NO: 21954 - DNA, 201 bp, Bos taurus
aaggaagggagagaaccagcaaaaaccagttttggtgtaagcaggctgctaacccctggcaatacgactcagggcagggcctctgtcgacactgggcactttccctgagccagagagtgagttcacgtggaagctttccacaaaggcacataccagttcttgttccatttatgtgcaaactccacaagcaagaggagctgg

SEQ ID NO: 21955 - DNA, 201 bp, Bos taurus
catgtaaaaaggaagtggtactaatacatcttcacttacctcagttacttatgaactgcttgtggttaatgtgatgggaaatgtacatatattctttgcctggatagcttactggaatcgaattactatgttccttcaattctgtaattcacatactccctttttttttttacctttgtaaaaccaggatgcttttgccac

SEQ ID NO: 21956 - DNA, 201 bp, Bos taurus
actctgattttttttcaagttgcttaaaaatgattttatacaattaaattgaggtgttttgatttataattcaataagttccagattaatactgaagatatatatctaattttgttctcacctgaaactccgctaagacaatagtaaagggattttcttaaaatagataaacctataaatgtgagtagaatgggaaatgat

SEQ ID NO: 21957 - DNA, 201 bp, Bos taurus
gtctttgtcttacacatcaatgtatattcacatctcctggcacatattaactactaactatgaagtacttgtttaatgaggaaatgaatgaacacttataccaagttggcagcttatgtttcagcctttctgcctcttagtgggaatcatctagggatggccaactggctatatcattaaaatcagcctgttttggcaaag

SEQ ID NO: 21958 - DNA, 201 bp, Bos taurus
gttaattctagcaaaaatagcttttgagaactaaaagtgtgagttccattttcaaggaaaaaattctttggggagcactggcagttaagttccacatcatctcaagggccgcattgttaacgcaaaagacaaagctcaaccagtaagttcaaagctctccatccctagtctacagagccaacccaagaaccataggccagt

SEQ ID NO: 21959 - DNA, 201 bp, Bos taurus
cctgagtccctgctccacactccctaagcccatcaatgcaggtatcttcaaagcaaggctctctggaaccaaatatatattgtacaattcatcttttatttctacttgtcctgcagctcaccagaaaatggtggagatttataagaaaagggcacacagacctgtggggttatgtgagcctgaccatgtcagattctgagg

SEQ ID NO: 21960 - DNA, 201 bp, Bos taurus
ttcatcagccacagctgattggaccagacacagacatctgcctcaaactggactttttcccagggtttagaatgggatcacagaaccatgagtgaatatatgaatttaagagttagaggactcgctcagccatgcgcagtggtaaaagacaacatgcagagacagaaaaatgaagcagacaagctgggggaagcagaagag

SEQ ID NO: 21961 - DNA, 201 bp, Bos taurus
catccgtctttgtcatcacaatccgggtgtctgccctgtgtgctgggtaccttgcagagccagcagaccagccccaggcatgccctctgggtacttagaccgaagaggggactgtagagactacccgaactagacagtggagataaaagaggggcagatcaggtaaaggtaagcatttcatgtgtctaactgaaaccttgt

SEQ ID NO: 21962 - DNA, 201 bp, Bos taurus
cttggaacgtcagacattggcacctaagtggaaagaagaatctaaaggtcagttgcactggtgtggtcagagcagctggccttggcctaaagggaggcgcgctctcagaactacagcttctgaagaggcgtggtgtcttcagttagctgccttctctaggccctgtctggggataataatctcccttgggggccctctcct

SEQ ID NO: 21963 - DNA, 201 bp, Bos taurus
ctcatgttcacactaggtaacacacaggtcttggtttctttattaattacaggcagctgttgaaatcagtctccccaacttttcaccatcaagaagccttgttggtgtcccctgtctgcaaagctctctcaatttgagagacactgctgtccccacgcgctggtgtccaaggccagtcacgtactgaacaggtgcaatttg

SEQ ID NO: 21964 - DNA, 201 bp, Bos taurus
gatggcctgctggaaagagtaaggcaggttcttcttggcttgatgaaatgcctgggaagaaaccagccccaactcatggtgtgatccggaagcacttcctgctgcctttggccactgaatgaatagggaggagccgcttcttatcccaccctctaggaggcacctggagcatggagaaataaagggttgggctttggaatc

SEQ ID NO: 21965 - DNA, 201 bp, Bos taurus
ttatcaagagatactgagattgagaaagagagaggagacagaactgactggaacttttagaggaattcacttttgtgattgtggaagcctgttaaggccaaaagcttcagggtaggctggcaggctggagacccatgaaagagttgcactataagtccaaaggcagtccgctggaagaagaattctactgctggtaaggcc

SEQ ID NO: 21966 - DNA, 201 bp, Bos taurus
gacagatgtcttcatggagagctcactccttgcccagccgacgaggaggagtcactagaaggacttctgctctggtgagcagagtgtgtatgcaggcagccgggcctggccgctctgcatttcagactcgtgttgtttgtgggtcttgtccagaaagaatcctgaaagaattcactgtaaggccaacctggaaatggacct

SEQ ID NO: 21967 - DNA, 201 bp, Bos taurus
aaaagataataataatgacaataataataggtttatacccatcttatagtcaagcaaactgcagctcgggcaaatgactcggccacgaccacatcagtaattgggagatctggaattggagcccagatcgtcctgtcatagaagcccaggctgcttgctgccttcctgccagagcctccagagtaggagttgtggggaggc

SEQ ID NO: 21968 - DNA, 201 bp, Bos taurus
agggcacccggcgctctgcacaggtttattggatacctcctgttggtccacccggcctagaactttgcacagccattttgggtttgaaaactggcccccccaaaagggggatctctccgagggagcgagggagtgaccgcgaggccctgcagaaagcaggagggcggtgctttcccggagatgttccacctggcgtcggcc

SEQ ID NO: 21969 - DNA, 201 bp, Bos taurus
ctctgggcatggggaggggcctgaggggggccacagggagacgatggatcctggctcatgaccactcaccttgcctggtgccccactgccttttatgcaccggtggccctgaccttcccctgcagacccaggcccacggggtcttcccatcctcagtgtaccctctgcacttgactgcagaccaagcaggctgtgaggaat

SEQ ID NO: 21970 - DNA, 201 bp, Bos taurus
cctccccctggaaggaagtgtatgtcatccaacctggctctcctgcgctcccacagagccagcgcctgggccaggaagggccaggctggggcagaccctaagtcctgagtgagcagtgctgtgacctggcacttccttctgaactttctctctaggggtccccgacccaggacatctgtgactgagaccttcacaggtggc

SEQ ID NO: 21971 - DNA, 201 bp, Bos taurus
cctaagctgaaggcccggtggtgaggattggagatttcagggagtggagccaggcgcaaaggactatcaggaaacaagcaactctctggagctggagccctgtgggtgcagggacaatggagggaccagcccagtgttgctttttggaaaagcgatagcttggttttctgaaggctgatgttgtgtgggtccgcacacacc

SEQ ID NO: 21972 - DNA, 201 bp, Bos taurus
aaagctcagattctcctgcctcaaatacaggcctctctcccctaagctaggtccaactggtaggcaagagtttctgagaaaccctaaaagatacaaccatcattcttgaagacatgctccctccactgtttgccactctcgcttcaccaacccaaatcttgaccatcccgtgaagacaactgttaagacctgctttcgtct

SEQ ID NO: 21973 - DNA, 201 bp, Bos taurus
cagaaagaaggatacaagaatgttatggctttgtttgacactgtttgaaatgaggtttaatgaataaaggtttcaaagcctaagcaataatgttgaatcaataggggagatcctggccagaaattcagggttaaacaaaaaactagcctttttttttttttttttactaagtttccaagtaagaacttcttagtattgcta

SEQ ID NO: 21974 - DNA, 201 bp, Bos taurus
agagtcctaactgaggagcagggcccagacgggtaagacaggactgaaaaccacttactcaggtgaaactacagagtgattttctgtcagcagttactcagttgggatttttcccagggccctaaagctcttcccatacatttctgaagtgacacaggacttccgttgatcatggtaggaacctggcctttttgcctacac

SEQ ID NO: 21975 - DNA, 201 bp, Bos taurus
aagagagaagaattaggcagattttataatcaggacaagaaagaattttaaaaaaccatacatctttatagatcatgactattgaaatgaaaatgtaaatagaggcaaagttgattttttcacataggaagcaggagaggaaaatcaactgaacctctaccaaactggacagaatttctcagtcacttgtaaaatatcttc

SEQ ID NO: 21976 - DNA, 201 bp, Bos taurus
acagcagtggttatatggtgcttacacataattatctcatttacatccagcactttccagacacattttgtatggttttttcccaaacatgaatttaagacatgtaagaggaaatgcctctctagaaaacagatgtatacaagttcttaccccaagaagaactgctgcaaaacttgagaaaaagttttcctaaagagtttt

SEQ ID NO: 21977 - DNA, 201 bp, Bos taurus
gtgaaaggatgcctggtgtatttaggaggcactgcctgtgatcagtgtggtatggacagtgcgggagggttgagatgaggttgcaaaggcaggtaggctcaatcatggagggccctagcttgaggatatgagcagtggggagaatgtagagttagtaagaaggtgatggattagatgtggggaagaaggaaaggagtggtc

SEQ ID NO: 21978 - DNA, 201 bp, Bos taurus
aaatcaagaggtcccctgacaactgacataaagtctgaagggcattcctgtagacagaggagcaggtttttctgaaggcccacctcagattgcttgtcttgaatgtctgtgtgacagtgcctttggttagagtgagccctgtactctttctgctactttacccaccggcctgtcctccctagaggtcatttgaatgatgtc

SEQ ID NO: 21979 - DNA, 201 bp, Bos taurus
gattcagacgagcctcccactttttctaccttttgaccctttagctgttctttgcctcaggtagcggggggcatggagggactgtgacatcccagagatacacatggcctctgagtccaggggttgcaattcagtgacttctgggctgcatctgatctatagatagattgtgtggcctgtggtgtgacagcacaaggcaga

SEQ ID NO: 21980 - DNA, 201 bp, Bos taurus
tttggctgactaccagcgggccagaggctagacattaggcggttgctgctaagtaggaggccaggggccaggagaggccagctgaaaggcagcagtactgatggacgtgaggagaaggggcaaagagcattttctggaggggatcataattggaaagaagctcaggttctgcctctaattagactggccttgccttgtcca

SEQ ID NO: 21981 - DNA, 201 bp, Bos taurus
agagaggacaactagaccgctgactgataaggagacagagcttcaactggaaggcatggtccctgtggggattcagcctccaaacgcattggccagagctattctcgagtcttccacggtgccaagtcgctctgcctctagcatgggggtacaactgcctggaaggattctggggatgtccctgcaccactgggcctgggc

SEQ ID NO: 21982 - DNA, 201 bp, Bos taurus
agaacctgagcggggctctcagggtggccccgggtgagagtgtcacaccccaacttgaccctaaactcctggaggatggcgtggtcgcatctccatgccccctctggtgcctggcccccggccctcactcagttgctgagcagcggagtcagtcagcgatgagtactcacctttgcgttgtcaacttaaaaaacaatgcac

SEQ ID NO: 21983 - DNA, 201 bp, Bos taurus
tttgagcagaagcatatttattttttcctgtggggaattggtgtacagctcacttcaaattaagtaaaaccaaagagcagttaagaggccctgccttcccgggtcaaggaggaacgaccaagcaaagtggtactgatgctctactggctgctgggcatgtctgttctgggctggcccaggtttgagtggcaagggagatgc

SEQ ID NO: 21984 - DNA, 201 bp, Bos taurus
caagaaacactgtcaaactcattctatgaagtgacaattaccctgatatcaaaacagacaaagatatcatacacaaaaaaagaaaatcacaggccaatatcaccaatgttaccttactaattatgatgtttaagtaggaggatgtccttatttgtactaaatgcacactaaagaattagggggagttgaggcaccaggttg

SEQ ID NO: 21985 - DNA, 201 bp, Bos taurus
ctctcaacacacagaggcatatgcacacacacacacatatgtacacacacacggccagcttctttttccctcttacacatccttgcaggtcctttgacctgtgctgcttctgtatctagaccgtggcccccactgtgcttccagatcctcagagagagctgagactcttgggcgatgactttcagtgctaacagcctccct

SEQ ID NO: 21986 - DNA, 201 bp, Bos taurus
tgcgatctagctccctgaccagggactgaacccgggcccctgcattgggagcacggaatgcactggaccaccggggaagtccctcaagaagtgcttctgatggaggaggtcttctatggcctattgaagccagacccttgcttggcttcatgagaggtaaaggtttctggttgctggggttctctgaccctcctccatgaa

SEQ ID NO: 21987 - DNA, 201 bp, Bos taurus
gccatggctggggttggggaggggcctggctgttaggacctgtgacgtgttccccagggggtgcaggcagggcaggcagtgagcgagccttggaccatgatggcctttacttgtgcctctattcgataccgtgcgttcagaccctaccaaagccttttcactctctcatggtcccaggtggtttcagctgtgtgtgtgtgt

SEQ ID NO: 21988 - DNA, 201 bp, Bos taurus
tgctctaggacttaggcagtaggtcagaactgagggaggttgattttgctgtctctgttttagtgtatgacaatacagtaaatcaatacaataacttatacagattggaaatacgagatccggtactttcagaggactgagtctgacacacgcagtgcagtgtgtgtgtgacctgtatgaaatgcacatcaagagcgaggt

SEQ ID NO: 21989 - DNA, 201 bp, Bos taurus
aaagatgaagtagctctggggagaggtgactgaacaatggtatgaagggtaaattggttcacttttcaaaatgccagggccatcctagaacttggattcatataaaaggtatattcagagcatctgttaggtgctaggcacttgggacatctgtgcatttgatagggaaatgaggttgaggttgtaggactttctggccca

SEQ ID NO: 21990 - DNA, 201 bp, Bos taurus
cccctttctgtgacttccttacctttacacttttcccaaactcccagcgagcatgtacgtcattgcaaccttgacccttcctgggagggaggagagcttctgatccccattgggtttgagggcctgtgtggggtctcctttgcgagtgaggattcatctttgaaggcagactttcctggtggctcagatgataaagaatct

SEQ ID NO: 21991 - DNA, 201 bp, Bos taurus
gaaatttgtggtgacccagagggccaggaccgagagggaactcagagttgctgacccaatctctccttgtccaggtggaaggatccaggacaagagaggtccacggtggccaccaagagggcgagaactccaatccagcctcctgggctctttctactcctccaagcttcctccattagtttattaatagaacaagggagt

SEQ ID NO: 21992 - DNA, 201 bp, Bos taurus
acctatgaagtcaggtgcttactggatttggtgcctggagtcgtcctacccctgggatagagcatgcttctcagatggaccgtggggcccaaaacagcctgcatttctcacagcttccccggtggaatctgggctacctgtgctcatatcccattttgagtggggagggtcttggccactggggagggtggggctgcagtt

SEQ ID NO: 21993 - DNA, 201 bp, Bos taurus
tcttgaatgaataagtgtgtttaggacttaatccctatctttaaatctagcaaagtatcttcagtagaatggtggatgaaggatttcaaccttaccttagcgttataaccagcagagaaaccttctctgcagagaaaccttctctgctgtgcatacctatagctcagcagtacatatgtaacagcagggcgttaagcaaac

SEQ ID NO: 21994 - DNA, 201 bp, Bos taurus
ggaatgcgttgttggagaagagtagaaaagaataaggagaggagaagaggagaggagatgagttgaagttattattgtgtggacatggaagttattgctgctagaactaggtgtggaaccaagggccagagtattcaatggtgaccatcgttatctccttccaatctcagccatgcatcctatgcccgtatcacagagatg

SEQ ID NO: 21995 - DNA, 201 bp, Bos taurus
tgttaggggactgcagaactataaagaagacaaccatgcagtatgtgccttgatggaaatcagagaaggtgaagaaacaggccatccatataaaaataagatgttaaaattctgcaagagtttttgaggggtttagggggctgtgtgagtgtgtattggccaaatatttttcaaatgttttataatggttgtgagattctt

SEQ ID NO: 21996 - DNA, 201 bp, Bos taurus
agtacgtttggaatgtattacaatcatgcctgaagagaaggccctccaagtgagattgaatggaagttcttcctgtcgtcacagaacacctactgggccccgaagtgctgttctaggaaccaagaatataaaaaataattccttgagaaaagtctttactcttctgtagtgtcctgttatggggaggaaaggaaagcacca

SEQ ID NO: 21997 - DNA, 201 bp, Bos taurus
ccactccaatattcttgcctggagaatcccatggacagaggagcatggagggctacagtccatggggtcgcaagagttgggtatgacttagcgactaaacctccactgaggacaaagcaaaatcctgagagcagcctctttgtgaaaacaaaacagtgattttggttttatacattagttgagtatgaatgaatggtagtg

SEQ ID NO: 21998 - DNA, 201 bp, Bos taurus
gagatgagggtgggaaggtatactgcagtgcttctccaactttgagtgcactgcagccaccaggacagcttgcttaacgtgagtgctgggccccacccaagtttctgattcagccagcctgagccaacacatctaccagcttccaggggatgctaatgctgctggcccaaggaccacactctgagaattactgccacaatt

SEQ ID NO: 21999 - DNA, 201 bp, Bos taurus
ctgccgtcacatctccttctctgactctcaccctcctgcctctttcttattaaggacccttctggttacattgagcttggccagataaatctttccacctcaaaacccaggatagcttaattatatctgcaaaatcccttttgccacattaaacaaacacatcccagttccagggattaggacccagacaccttcagaggg

SEQ ID NO: 22000 - DNA, 201 bp, Bos taurus
attttatcaatggtttcctttgctatgcaaaagcttttaagtttaattaggtctcatttatctgttttggcttttgtttctttttgccttaggcaacaatccaaaacaatactgctatgattcatgtcaaagagtgttctgcttatgttctaagatttttatgctttccggacttatatttggatctttaaaccattttga

SEQ ID NO: 22001 - DNA, 201 bp, Bos taurus
tggcatttttttctggcttaaagagtgttctgcccttgacttcattttcttctcattctatctaactctcctttgacattctcatattctacactggatgcaactctcacctggacactgcaatctatcttcaacctgtacctctccggtaagtatcaaatctacatctctattgagcagctccactgaatatcccaaagt

SEQ ID NO: 22002 - DNA, 201 bp, Bos taurus
ctctgagctactggtgccagtgccctgggggcagagcctggctaggggcccattcctgtctgaccatttgggaaccgaccactccaaccagaaaggacaggacagaggaccccttcaggggcccagaaagtggtccagcagggcctggccctgctatggaaagtgaggactctgaaggacggtgactgcccactcccgcta

SEQ ID NO: 22003 - DNA, 201 bp, Bos taurus
gcttccacggggcccagccccttggttgttctctctcctgtttcttcattctcttcttttgccaaccaaataccccccaagcaatcggatgttaaaacaagcacacaacaatggccgacagtgacacctctttgactttcctccagttctagccaccatttttttatccctatagactgatgcagtccccttcttagctgc

SEQ ID NO: 22004 - DNA, 201 bp, Bos taurus
aggtgcctactgagcgtaatttactgtcttcttatcaatgggcacgtgggtagtttcctaactaaatgttgctatttctgaatgctgctggcacaaaaacgtctcaaacatgcatagataccaatggaaaagcaacttggaaagcaacttatcaatttacaagtaaatttcacacacaaataaaaattatgtatatttctc

SEQ ID NO: 22005 - DNA, 201 bp, Bos taurus
ttacaggatcccaggcaatgttgaggccactggtccaggggccacacgtggagcagctaggtcacagcagacagtgcagcagagacgctctctagtgtccggatacctggcggtgtggccttggacaaatccctcaacctctctgagtctgttttcttatgtacaaaatgagacctttaatcccatctcacaggattccaa

SEQ ID NO: 22006 - DNA, 201 bp, Bos taurus
agttggcggtgacagcagcaacactgcaaacacacaggcccagccaggcccaggcgtctgtggagccgccaacaggctgaagctgccacaggaagagcgcaagagggaggtgagcgaggccgatttccaccaactcttctgagcattcctgttcgtccttccaggggcaagtttctgggttgcagtttccttactacgcct

SEQ ID NO: 22007 - DNA, 201 bp, Bos taurus
actgggtcttctgcattgtaggcagattctttaccaactgagccaccagcagttgggataaaattcgaagataaaagcctgggatttgaagtttgctatgtgtgagtttcagagacggcaatggcaccccactccagtactcttgcctggaaaatcccatggatggaggagcctggtaggttgcagtccatggggtcgcta

SEQ ID NO: 22008 - DNA, 201 bp, Bos taurus
aaaactcctagcctcgtctctggcccacagaagtctgcggcaccttagctattaccgtctgtaactgatggagaacgggtcagagaacaggtgcaggggcgggatgtgccaaggcaaaggcctgacccccatcaccctgcaggctggaggtccaagcctgacccagccccgtctcctcccaggctggagttgagtcctgga

SEQ ID NO: 22009 - DNA, 201 bp, Bos taurus
taatcctgggcaccacgctcctgctccacatcacagcagtctactggttcttaactctggctgcaccttagagtcacttaaggaagttttaataatagcagttcccctggccccatccctagaagtctgacgcagctagatgagatcactgctaaatagctgatgtgtgtaccccaggggcttgagcctaccttacaagtt

SEQ ID NO: 22010 - DNA, 201 bp, Bos taurus
gacagaggagcctggccagccacagtccatgggtcacaaagagtcagacacgactgaaatgacttagcataaagcacggctttgcagagctgtactagacgtgctcaacctttggccaaagaaacatcagaatgttctcatcagacaatgatcatctgtgaccatgatgatgtcaccaactagacttgggttggtgtcccc

SEQ ID NO: 22011 - DNA, 201 bp, Bos taurus
agcaggaaggagagggtaaaagcaccgcccccgcgcccccccacccctaagtctggggacagcctggggctggcaggcagcccagaccctcctgaagcccccagggctggaggggcggggagagcgcccgagttttcgggagttttcagacttgcgctgtttatgaaagcctttctgagcaagtttgagctaagctgagag

SEQ ID NO: 22012 - DNA, 201 bp, Bos taurus
tgtaaattctcatgctgccaggttcgttgcaggtagtggctctagaatggagatgtttcacgggaagggtactcactgtccctgactctactgggtcagtgccggctccacttgccctggggtagcacccagatgccagccttatgcagaaaatcccagaatctcaaagtcattgggatctctctttattgaggtatttaa

SEQ ID NO: 22013 - DNA, 201 bp, Bos taurus
actagaaatagagctactgtatgagcctgcaatcccactcccaagcgtatatccagagaaaaacataatctgaaaggacacatgcgcccaaatgttcatcgcaatgttcactgcattgtttgtaatagccaagacggggaagcaaccaaaatgtgcattgacaaggaatggatatagaagatgtgtgacatacctacaatg

SEQ ID NO: 22014 - DNA, 201 bp, Bos taurus
tgtattttttaaactgaagttattacagcatgtttgcatgctgataggaatgatccaggagagagtaaaatacatgattctggaaagagaggagtaattgcaggagcaaaattcctgagtgggtaagaaaggacagagaagctagtacacaagtcagggagatacccaggaacacaccacatccatttctacaggagagaa

SEQ ID NO: 22015 - DNA, 201 bp, Bos taurus
atctgtagccaatgtacctataatcgtgtacacgcagctctatgagcagcagggaacaaaagggagtaaacaaacaaaaaaatcaagctaaagatggcgtcgggcggccttgaaaaagcctcgcagtcgtgtccctccctaaagaggcccctcccctccctgacttgttgcgtgattgtggattgcggccagtaaagtccc

SEQ ID NO: 22016 - DNA, 201 bp, Bos taurus
tgcacaggattcctgcgccgacacccctgttcctctcgcgttcggcgctccgccctccaggaaagtagatccggccaggcagacaaaagtttgggagagaggttgagtcggtgctgagtgtgagcgaggggggcgggggccggagagagtgggggctgccgcgcgagtctacgcgtgaacagatagacctgcggacgggac

SEQ ID NO: 22017 - DNA, 201 bp, Bos taurus
gaggagtctgtcaggctatagaccatggggtcccaagagatggacacaacttaatggttaaaccaacagcaaaatgttaacaactggggaaaggaagaacctttgtttttgcttttgctaattttacatgttttctctgtctgataagaactagcaattctcagaagtgacagaaggggtagtgtgagttgtcatcaacac

SEQ ID NO: 22018 - DNA, 201 bp, Bos taurus
tgagtggcagtagggatggggctgcaaggatggctgagggctgtgggccagaggtgctctttggatgctatgggatgtgagctgggccgtctccctgacatggtgctcccataaccttcctgcagacagctggaagtgtgcctcggggaggtggagaactcgcagctgtttgtggggatcctgggctcccgctatggctat

SEQ ID NO: 22019 - DNA, 201 bp, Bos taurus
cattttcgtggtgtatgtgtttgaagaattgaagaacaggaagatagttgagaaaagtttagttactagagcagaccttagagttaagaggaatgaggaagaagtataaacaaaggtaggtttaggggccccggaacaaatattttgctactctttggtttctctttttctgcctaatttctaaatgttaagttcgaggta

SEQ ID NO: 22020 - DNA, 201 bp, Bos taurus
acaaattacttcaggattcacaggcaaacagcttggtgggactgttacctgggcagaggtgagcatgactcctgctggatttcttggaggaatggcactggtggagaccaaggacaaaaatgactgagctgagccgacaggaagatgagactattcccaaatctgcacccaagacctaagtcagtgagtctacatctgtgt

SEQ ID NO: 22021 - DNA, 201 bp, Bos taurus
cattttatctacagctgctacacagctaatgattcacctaggtcatttatttatatttaaaactaactcctgtacattttctgtcagagcctgctcgacatttgtgtataccataaagccctgattctgctatagatctggtaggcaaaagtgctcttttcttttttatttttttccctgtgtctttcctacttccacctt

SEQ ID NO: 22022 - DNA, 201 bp, Bos taurus
ttaagatgcaataataaggattggatttacttttccttctaacgtaacttaacataaaatacacaaaacaatagttctcagaaccctggacatcaggcatcgaaggacaacaatggtccctaagagggaaaacattgagtcctacaattgcccagctttttgctgtcagggatttttctgggatgcagagatatacttctg

SEQ ID NO: 22023 - DNA, 201 bp, Bos taurus
agactgaatctctacatctgtcttagttttcatattgctatccaagctcctgagagattatgaaaattatttttaaattatgtccctccctcaatcctgatagagtattagattagtggggatttagaaaaattttgatccaatgcagtcatttaaaagatagggaaacgaaatgttgctatgatgattatttttagaata

SEQ ID NO: 22024 - DNA, 201 bp, Bos taurus
tcagattttctctctttactgatggttgttggaaagaaggacttataaatgtaaccatctaagcagttaaacttggaaagcatatttgtcacagagaactacaggtgttcacttaggttaaaataaaatgtttgtaattagaatgaaaatgtgttcactaaaaccataaaactactcactactcctgtgctaagtaaaccc

SEQ ID NO: 22025 - DNA, 201 bp, Bos taurus
ggctcctattccagctgctgctgaaggatttatttctcttctttgagcatctcatgaggtggtttagctattcttcaacagcaggaagaacagatactcagaatttagtttagaggcaagggataaaaattgatgtcaaagaggttcaaattaggatgttgccagtattcttcaagagaatattcacccaggaaaatcaag

SEQ ID NO: 22026 - DNA, 201 bp, Bos taurus
tatggtgaaatccagatgattttgattaaatgtcttcacactccatagattttgattaaatgtcttcacactccactcatttctacctccttttaaaccatcagtgagtgagtaagaattgacagacaaaattcccagagatgatgctctaaaaatatccagtccagataacaagaagaaaaaattgaacttgatctatta

SEQ ID NO: 22027 - DNA, 201 bp, Bos taurus
tatttgtttgtgtaaaaggaaaaacttccaattggtaaaagcaaaataattgactgtatagacctggtgatctttattagcagaatagaggccgctctgtgggactgggtgtgatggggttccagtgtccttccagacccgagactctgaggggaagggtggttctgtggggaccagcctggcctccgtgggtaccaggaa

SEQ ID NO: 22028 - DNA, 201 bp, Bos taurus
cccgctgttgaaccagagcttctccctctttggtcctctctacagtccagcccacagccagcatggttttcagggactctctggcaggccagcgataaatttccttctcctggaagaacattggagcagaagagctgtgtagggcaggctccagcactccggctggcctgcctcctggaaaagacgttggagcccacagcg

SEQ ID NO: 22029 - DNA, 201 bp, Bos taurus
ttaagaaattcgtggtaatttatcactgtctaataatcaatatgcttctatatatacctgtttatgcactttcaagatcttccttaatacactagaaaattgtgccatgaaaccagaggagggaaaggatataccaaaaggatcccctaagtgctttttaaataaacggagaaaggacagcccaatacagtgtcacaggaa

SEQ ID NO: 22030 - DNA, 201 bp, Bos taurus
gagcaatgcaagggtatctattgccatgtactaagttaaaggactcatgattttgaagatggcatagtttaacctagattggaatagtcaggaaggccaatgaggagccgaaacttgagtggagttttaaatcacaaggagagacaaaaaccagagggtcttgcaggtgggaggccagcaaaggcagatgaaggaagagga

SEQ ID NO: 22031 - DNA, 201 bp, Bos taurus
gatttccattcctacacttccctgaaagctatgctgccttgctcatcacatgggtttgttcctatggcataaaatcacacataaactcagtagaaaactgttgatggtgcttaaggttctgcacaggggcagctgctccatctctggagttctctcctgcctcctctgctctctgaacagtaagcagcagcaagcagctgc

SEQ ID NO: 22032 - DNA, 201 bp, Bos taurus
aaaattcaatactatataaacaataggcattatgcaaatatgcattgaatttaaatgagtttaatttgaattccaatacttagaatggtatgtgacagcaatcataaaaatcgtttgtttatattctaaataaacacccaccaatcaacagtttggcatggtcaggtgaggaaaataagtataaaaacatttactaaatat

SEQ ID NO: 22033 - DNA, 201 bp, Bos taurus
gatactgaagctgagtagtggaggcatcttcctttggcagctccttcctcctatgcatttctgaggcccttgctttctggtgacttttctccttccaagatcattctcttgcaaaggttttaactgaatttcacttgcatagcaatgtcgaggtggaagagacacactgtgtgttcgctttggctgcagacatgaccctat

SEQ ID NO: 22034 - DNA, 201 bp, Bos taurus
cacacagaggacattcagtttctctgatgactgaccttgaactcactgaagggccagttcaacagatggtcaccctttcacaagacctctccatatgattgctcagaaccattcccttttctttggccccagccttctgctgggatcttcacagcactttaggatccagtcattagaatcatgtgaattccttggcaggaa

SEQ ID NO: 22035 - DNA, 201 bp, Bos taurus
ccctcctatagaaatatgacctcaagtgacctcaggaatgatttgaatagatactgaagtcttagaccagactttttagcagactgaactctcagtgattctgtttattaaatctaatgtgttgttttcctccatgtggtttttttttttttttaagtctttttgcatattggacttaaagatattttaaaatatttatct

SEQ ID NO: 22036 - DNA, 201 bp, Bos taurus
tgtttaatttcttaagttcctaggctcaaccagatgatctcatttcagtgctgcttccacctctgaactttattttactttttcagttttaagctcctcacgtggaagaggagaaacctcagcggaatacttggcattggccctaaattaacctctccattgacttcttcctctccccaactcctcccccaggtcctaagg

SEQ ID NO: 22037 - DNA, 201 bp, Bos taurus
aaagtatggccaaaccaccttgggaactggcagggaaattctcagtccatgagtcagagaaacttcattccaactggccccttggtacagagttcattgccccctcctcctggatgaggtctcatttgtgttgaagcagaagtcagagttctctcttggccacagctgaacctcaaatatgttgggagtcctggcaccagg

SEQ ID NO: 22038 - DNA, 201 bp, Bos taurus
gtgatggcttacatactcagtcctcaggctggtccacagggagggagaaaaagaaagctgggcataattgctgtcaccaccatgtcccctcatataccaacaccacctcacgtgggcttagttctatgctttcgagaatgtcttccagagagaactatctggttaaatgccatgtaggaaacatgtaacattgacaccgtc

SEQ ID NO: 22039 - DNA, 201 bp, Bos taurus
ttctactaggttattgccacactcagatcatgtattaaccactattttggaacatttatcatgttagcgtagatcatatttctggcattccacaagtgaggatataaggtcaaacacttcaaaatgctgtgtctggccactggtacagcatagaagagccccaaattaacatgttcaggtacaacaaattctcttgctgct

SEQ ID NO: 22040 - DNA, 201 bp, Bos taurus
agaaaaagtcaattcttccatatgaaataatatatattaatatgaaatgtaggaaaagaaacatcatggtttgaatgctgcctgcagaaaagactgtattgatctacattaaattatctagaatcaaatagtgaaaagaacaaagtggtgctcatttaatcttcattctgacacaaaccggcaagctgaaaagtactttac

SEQ ID NO: 22041 - DNA, 201 bp, Bos taurus
aaaatccttgaaactgtgtccatcttgaatgtctaatatatacaatgaaaatgatattaatacatccatggtctggagggagacctaaaagagcccctgatgcaaagtgtctgacatactgaagacttaaagtaagtagtagctatcattatttttaaatccactggtttcaaaacaacccattccaatttgttcagataa

SEQ ID NO: 22042 - DNA, 201 bp, Bos taurus
tggctggagatagctgactatctctgctcagcaactctagtgagagaggtatcttctttctgggtctgtgctgaaagagccgtttctgtcagaggtaagctttcttattgcagtggactaacaaaaccatgtggtggctctttagatctctgctttcgtttcattgtccaagtaagtcatatatgtcaactacaaattggc

SEQ ID NO: 22043 - DNA, 201 bp, Bos taurus
aaaaaaaaaaaaagaaagaaagcaagaaatcaaaatgaatatttaggttgcccagatgcagatccactaagaacaaggaaaagactttagaccaaaatcaagttttcgtgggtagacactgttttcatgggtagacacctccaacattctcctagacatcactctgactgctgaatacgatttggtcatgcctcagtggag

SEQ ID NO: 22044 - DNA, 201 bp, Bos taurus
acataattccagtcaaacaaacataccccacaatgcccttttgcatgactttgtgattgcatgatccagtgcccatattctccttgttttggcccattttctttaaccttcccttcttctaaattattctaatgaaatgattcatcaagagtctagactgaagaaaacaagtattacatttgaagctaaagtcatgtttag

SEQ ID NO: 22045 - DNA, 201 bp, Bos taurus
ctcattattggcaaggcttaattccactctggaaaaagataagttgtcaagtctttgaggggtgcactcactcattaaagccaccaggggattgcttagcaccctggatgaggtcatccactaaatgggccccggtgggcctcactaattaacgcacagcgcccaagtgaacagttaagtcacttgcccctccctgaagag

SEQ ID NO: 22046 - DNA, 201 bp, Bos taurus
agttgtatatattatacatacattatatactgtaaattacctatctatttccctactgtaagaatgcactgaagaattattcactaattaaaatgctactctgatgaatacttttgtgcaaagcattccccacattttggattatatttgaagatttcagtaaacaactgagtaaaaggtgtgggcactgtagcgtttagg

SEQ ID NO: 22047 - DNA, 201 bp, Bos taurus
tgtaagagataaaatgaaagtccagaaaatgagggatttgtgatcactgaaggctaaagttgtttgttatcctgagattagacagacatttaaatattagttttcatagtcaatatacccagatccttgaactggaaaccctggttatgtttagaaagcgaagggtaattttctcagcatccttcaaaattgaattgtttt

SEQ ID NO: 22048 - DNA, 201 bp, Bos taurus
ctttcaccatgtgtaggacactggaaaaaaaaaaaaaagtagggggtgggggagagtcatccatgaaccaggaggcaggaccttgtctgtgtgtgcgctctgctgtgtccgactcttcgcgaccccaccagggactgtagcccacctggctcctctctccaaagaattttccaggcatgagtaatggagcgggttgccatt

SEQ ID NO: 22049 - DNA, 201 bp, Bos taurus
aataccagagtgggttgccatttccttctccatttgatatctcttacaaagcgcaacaacaatgactcaaaaaaaaatctaaaatgagagttctcaaaggatctctattctactggttcaatgcaaaagttcaaatatgccagtgggcttatttgtggactatgccggatgattacagagcctttgtcgatgagaaatgac

SEQ ID NO: 22050 - DNA, 201 bp, Bos taurus
aacatgaaacagctagaggaaaattttaaagcagaggtcagcatactgtattctgtaggccaaacctggccccatggcctgtttatataaggaaaattgtattggaacacagccatgtccatttctttgcataattgtctatgactgcttcagtgctacaacagcatcggcgaatgattctgacagagaccatatggcccg

SEQ ID NO: 22051 - DNA, 201 bp, Bos taurus
caataaaagaaaaatactgtgaaattataatagaagactaaactctttgtactctttgctatatcctggtgtcatctgtaagataaattgtccaaactctgtatctcaatttcctctacatatgaaaatatctcaagtatcaaagattgacagtctttttttctagcaagcaaaagccccacaagaagtccagtggatgat

SEQ ID NO: 22052 - DNA, 201 bp, Bos taurus
cagatcatttctctctttagttcacaggtcctcagaatgagagagaggaaatgtacttattcctgttagtgaacagctaagttgctcccaaatttctcacttaaagaagctatcagatagtaaatgttctttgtggtaatttattatgcagccatagctagccaatatctaagcagaaaaggaagatgattagaatgaaag

SEQ ID NO: 22053 - DNA, 201 bp, Bos taurus
tattactttattcggtttgacagtctctaggtccatccacattgcttcaaatggcattatttcgttctttttatggctaagcagaatttcattgtatatatgtaccacatcttatttatccattcctctgttgatgaacatttaggttgcttctatgtcttggctaatgtaaatactgctacagtgaacttggggtacatg

SEQ ID NO: 22054 - DNA, 201 bp, Bos taurus
gagtatttaattactgacactattgagaactgctggtacatggagttgtagtatggttttagaacgctctgtagattagacatccatctattacctgtacctctcattatatggactcctttgaaggccactgaaatgccactgaaaacaccttctctgagaggtttataagcaggcttagggaatagattcagtcctgat

SEQ ID NO: 22055 - DNA, 201 bp, Bos taurus
atgatagaagcttgaagccacccttgtttgacattatgcatgccccatggggaaatccatttgattcaggttcctgagagatatgatttccaagactatccccctgtacttgaagtatgacaagattaatttcctgccaatgccctgccttgagtcataatatcatctaatattcatggagcacttaatacattccaagtc

SEQ ID NO: 22056 - DNA, 201 bp, Bos taurus
atttcaattctaacagatgattgcaacttatcctatgattgctttatatatggctctttgtttacttatggattgtgacagccaacaggaaagttgtatggccctcagcaaaaacacagttctcaggagaattaccaggacaactgggcttctcagtgaggtggctgagggcctcaagaatcagccaaggcacatgtgtgg

SEQ ID NO: 22057 - DNA, 201 bp, Bos taurus
ttcttagtttccatgatgatctcttttgtttccattctggaatgctgaattcttttgaatagttaagcttccaaattagatcgtcacctcatttgtgacaagccttcatgaattttccaatagttataaagagtcaaaaagaagtagacaatatttcacaaaggcctgcactagttcccggctgggtggggacatcgcaga

SEQ ID NO: 22058 - DNA, 201 bp, Bos taurus
acccttttagtgtctcctaatttcaatctgatacacaaacccaacaactcaattccttagttgatattgttgggccctttatagccaattaaaatcagtccttcttactatggtagttaagggcccccacaacctgatctccgtctattctggtgatcctcaagctgcggggcagggggtggcagtggagcgtatctgtag

SEQ ID NO: 22059 - DNA, 201 bp, Bos taurus
ccgtcatcacttctctcgtggactcgtttgtcaaagtgaagtgaaagtggagatggagggatggaggccttgatgggtgccccacctcaagtctctgtgaaccgagctaattggctaagcttggagacaagagcagagtgtttggaaaatggcaccaagaactaccgaaagtctggacctttgtgctcgccacaccaggac

SEQ ID NO: 22060 - DNA, 201 bp, Bos taurus
atatcttttaaaggacattattttaaaaaaaatctacaaccgtgattttctaaaaatcattggataggctaaaaaagaaaaacagaaaaaaaactgtaaagcagacttcatcaatatttttaaactttacttatccaaagccaccactaagaaaatagacaaaccacaggctgagagaaaaatatgacacataaatatgac

SEQ ID NO: 22061 - DNA, 201 bp, Bos taurus
tgcacaccctagagcctgtgctctgcaacaagagaagctactgcaatgaaaagcctgcccaccacaactagagttgcccctgctacggcaactagaaaaaccctgtgtgtagcaatgaagacccagcacagtcaaaaataaaaaactaaaattaaaaataatgatgaaaaattcgtattccctgtaataagttcacacaat

SEQ ID NO: 22062 - DNA, 201 bp, Bos taurus
acagtgcctcctattcaccaaggactgtgacaggtgttcaaaatatttttattttggaatcatcatgacaatccaaaggctaagtttattggccccaaatcgaagttaaaggaagtgaggattaaaatgttaaaaaaaaaaatctgttcaaggtcaaagtacagaaagtggagaattgcaagttcacacaaatgggtctga

SEQ ID NO: 22063 - DNA, 201 bp, Bos taurus
tgaaactgtctaaggcagggcggccacctaaaaacacaggaagatctttaacttctacgaagaacactcttacgggccctggaagtacctttccagatgtgaaacctgatctggaagatgtagatggtgttctctttgtttcctttgaatcaaaggtaagattgtcattttcagctttctttctaaggccaaataatcatc

SEQ ID NO: 22064 - DNA, 201 bp, Bos taurus
cactgctgccacaaacagtctcatatatgattcctggtgtgcctgtgtacaagttactctcaggtatacacttgatcctgaaagtctttactgatggccccgtggcaaagtgctgttctctggtctgattctctttctacctcagagttctgagttcaacactctccactaaggcctctttccctgtgtattagttaggat

SEQ ID NO: 22065 - DNA, 201 bp, Bos taurus
tctagtctagtgaggcctaaaccaatcctcacatgctcctgttatacaaatttctttagaacaaatttatccacagaggccagataccctaggatcggtatgtgaaagacttttaaatgctggacagcatataatgccatctggccctgatatagtcactgtgatgaattgttggtggattcgaggttaaagtttgctctt

SEQ ID NO: 22066 - DNA, 201 bp, Bos taurus
gatattacctgggaacttattgggctctacctcagacctactgaatccaaattctaggggtggcatccattaagctttttaaatagccctccaggtgatacgatacattctaaaatccagaaccaccactttacaaattttctactatatgtagacagtggggaaacatagtcataagtataggttgggggaaggatcagt

SEQ ID NO: 22067 - DNA, 201 bp, Bos taurus
acttgatgtttcctgtggccaccttctctgtccgcaagatttacatgtgatgtgactatggatgtctgttgctgctttcagacctgcctcccatggatccaactgaattctggcctgcctgtgtgtgagctcacatgtgtgtcagttaacttccaagaccagcttcctctgagttttttaagttattgtaggattgagaag

SEQ ID NO: 22068 - DNA, 201 bp, Bos taurus
gccggccagcccccgtccaccttctctggctcacctccttcggccgagtgtctgccagaagcgccacgtttcttggccttagtagcagctgtaggggaaccggcacctgaaagtcatccttccacagggagagcagcatgagcaggagcctccgagcctgccccctctccagctggtgctgtgccggaggccccaggatgg

SEQ ID NO: 22069 - DNA, 201 bp, Bos taurus
cattaaaaagtcacctacatttacaggaagttggtttaaaaaatatgaaaatattattttcctttgctgtgaggattgtcagtgtaggatgagcaataagtatcaggaaatagatatagttaagatatttctgagatttggcctgagctcgtgtgcacagtataaagatattagcaaaattttgttcttcttttgatgctt

SEQ ID NO: 22070 - DNA, 201 bp, Bos taurus
gaagcctattgatctacttggtttcatctgctgcaacatgcacaacttctaatatctctgccttctttcctccaatatgtctttgcttcatttcccctgggatttccatttcccaaaaagtttgctataaaaatgacctgtaatacatccatttcagcacttttccatctgttcactaaaatccattcttcatagctcaaa

SEQ ID NO: 22071 - DNA, 201 bp, Bos taurus
cagatggttcagcattgcatagggagagctgtgaagccaggtgtaatgccaggtgatgcttcctaggatcacagtgggggtaggagcgaatgaagcattgccatcagtctgaatcttttatgtctaggctaattcagggactcataagatttgcagggctctctgcaagttgggaagatgggaatctgactataatttagt

SEQ ID NO: 22072 - DNA, 201 bp, Bos taurus
atatgtgtgtgtatgatgtgtatgtgtgtgtgtatgcacacacaaacatatatatatgtttgtatatatacactgaacttagcggaaatttttgaagccacaggaacaagaatgaaagatagaaggttagttaagatgcttgagtgcaggctagataggatgtgcagctttggatagaatgtttgctgtggaaagaactag

SEQ ID NO: 22073 - DNA, 201 bp, Bos taurus
taagatcctataaaaaataaaagtccatttcagatacaagaaaataaaattaagacttaaacaactacttatttgaattaaaatagaaatactgccataaattagtttgtctgtcctgtttcaaaacatatatgtatgaattagggattttagtggccctggaattattcaatttttttagattaatcaaggactgaaagt

SEQ ID NO: 22074 - DNA, 201 bp, Bos taurus
caaaaatttgaatgcctcttcaagttttatttataattacctttgataagtaaaaccacaaaaacagaaggaaagagatgttctgttgttacagagtttctaaaatgttggacaaatagtgaaatgtttttaataatatatattttctttaaaattacacttgagcttgctaagtggtttaatgtatgcaatagagcatta

SEQ ID NO: 22075 - DNA, 201 bp, Bos taurus
agtagcttgtcttgtaggggttggtgaacttggtctgcttcttctaatattgtctttcctctgtctttactcccaggagataggataaagaaaagaaagagattttgattttgagtgtgtatgacagtttagttaattccttgagttgtaatgtgggcagcaacacattgaaggtagttaagctgaggtccttttcatggt

SEQ ID NO: 22076 - DNA, 201 bp, Bos taurus
tttggctggtgttaaatattaaaatatgatattgactgaaacaattgataatatctaaagaaaaaattgctagcacataagctaaaattctgtatgagcaatgttagtaagtggattaaatattggtaaatgcatctctcttgctgaagtcataggaaatcatgtcttcctgtgacaatatcagcctttgatttctcattt

SEQ ID NO: 22077 - DNA, 201 bp, Bos taurus
agagaagcattcatatccgtcttggtaatacgggcatctgtcatttaggaaacctgagagaaaagagcttcattgtctattatttaacaggccaaaaaaatgtaaaataaagagtctagcatattcagagaatataaattaatgttattggagaaaaggaatgatgatactctttatatatattcttggtttatgtatcac

SEQ ID NO: 22078 - DNA, 201 bp, Bos taurus
caacgaaggaaagaggaatcgtaaacatcatcaattgatactaacaattttttttcagatgcacactcttggatgtaacagaataattatcagctataaacagtatggtgactttaaagcaattgaaatctgatgagaaatcatagctagaaatgatagcacagattaggaactaatccagacacaaggaaaaaaatttgc

SEQ ID NO: 22079 - DNA, 201 bp, Bos taurus
ttaagacttcttccatgtactccgttatactccatctagctacaacaagatcagcaaaggcctgtgtggcctttagcaacttgcacatgaaacgttaggagaaaaaagtatatatagtagttgtcttccttccattaaactgatacttctatttcctctttcttgttcttcagtactgtaaaaacaggacaatactaatcc

SEQ ID NO: 22080 - DNA, 201 bp, Bos taurus
taaactggaaagagaggagggcacagtgaacaggatctgacctcagatggagaaagcacaggtagaaaggtgagatctcttctctgaggcctatatatgcatgaaggagatccaaccagtccatcctaaaggagatcagtcctgaatattcattggaaggactgttgctgaaggtgaaacgccaatactttggccacctga

SEQ ID NO: 22081 - DNA, 201 bp, Bos taurus
ttttttttttttcccctcctaccctctcttataaatggaaagcattgtcagttgaaattgagagatgaatcaggtccctgtttaaacatcaatagaaatataaggattccagattatatcatttatcttctcatttaataagatgttaatcaaatactatgaacttcagaaaaagatttaattaaaaattcctggtttttt

SEQ ID NO: 22082 - DNA, 201 bp, Bos taurus
tgcattggcaggtggattctttaccactgaggcacctgtctgaaatccaaaaagatcctgaatgctggaacacatttggtttaatattttcaaataatggatgatggacttataataaactaatattaaaactatcaaatgttttttaaaagactacagtatttgtgaattcaggaatcctacaaattaactcaagagaac

SEQ ID NO: 22083 - DNA, 201 bp, Bos taurus
ggacggactgacagttgctggcaaagctttcatcagttaccactagtgtgacagtttctcccagcagccagcagactgcaactccctctatcaaagcatgccatttgattactggagaattattccatttttcctaccattacttctattcagctgctacaagttcaactgcactaatttacccaaagctctgaccagcca

SEQ ID NO: 22084 - DNA, 201 bp, Bos taurus
agggccattaccaattcccagccctaatgctcaatagggatgtgtcaaactgccagatttgtgctatccagacacagccaagctctggtttcccctggaacgaaaacaggccccatatgggctccgagttacatgtaggataaacatctccccttcccatttggaaaaaagcactgctttagacttccctagcagctcaga

SEQ ID NO: 22085 - DNA, 201 bp, Bos taurus
tgttcctgctgcagaccctgggcacccaggttccagctataggagctatgaaaacccaagccacactagagtatccaactgctgtggctttatcttttgtgggcaggcctcctccatcagtaccacaacctctgcccccaaacagaaagcggggaagaagccaaagagaggagcttaggacagtggtgaggaatgtattga

SEQ ID NO: 22086 - DNA, 201 bp, Bos taurus
aagaaggtacagaggcctccatgggcaggccagcccacatcaacatctctcctgccccaaatccctttctagtgaaaaggctcggtcatgtgatatgcagcgtgagtgctgaggaaactttctgggccagtgtggtcacattcacatcagtgcccagcttaaccactgctcaggggtcccacccactcaggtctcagcccc

SEQ ID NO: 22087 - DNA, 201 bp, Bos taurus
aaatgaatatttgctttttgttctggtctattaaagttttaactatttaatgtttaaccccttaatatctgagctgtgatatgatttaaaatatagtttcaaaatggctaacctattttcaaataatattttcaacattttggagtaattttcacttcctcctttgtaattctttattcagcattcattgaagtctgagtt

SEQ ID NO: 22088 - DNA, 201 bp, Bos taurus
ggccttgtgcaggccaaggaagcccattcagggacagaagcgggcatgagagaattaggcatgtgccatgttgtattatttgttcaaaatattttctgccgtcttctacaaggcccttctctggcacctctctattggaagagtgtatttcctacagcacggatgtcgatcttggccacatggtttgttttagccaatgga

SEQ ID NO: 22089 - DNA, 201 bp, Bos taurus
ggaataaataacttagaaccaagaattgaagtacttttacttttggggttccctttcccttttattgtagggccaaggcagggtcacatagcatttattcgagttattcaaatattgtagtcttttctatttgagtatctccactccacctgccatgtgcggtgaaaaaaacccatgaatattgggatcaggtggatacag

SEQ ID NO: 22090 - DNA, 201 bp, Bos taurus
acccctggctcatctggctccaacgcagacctcggcaggggaccctggagctggtcagtggacagtccctctgagtgacatgtctcacctcaggcacatgcctggccatctctctgctttctgccttgggactttctccaaagtctgcttggtccacatggacgtgatgtagaagtgtgggagtgttaacgccttagggga

SEQ ID NO: 22091 - DNA, 201 bp, Bos taurus
tggggcctaattttgaaacttaatagttgagggtactggaattctccagttctcccctgctaaccatcctgtcctctggccttgttcctctcatgggtgattctagagagggatttacacaaagaaaaaaaataatgaacaacaaggtaaaacaacaaggtaatactatctcgttacccgaaccaatgtccccactgtcaa

SEQ ID NO: 22092 - DNA, 201 bp, Bos taurus
catgagttctctggctgccagaggtggaggccaggtcgtgctaaaggcaatggaaagtgaactcaaaggagagttgtaaagatggcagaagagctctcattgcgggatctaggcagtgctatcagtggactcaggtaaaccttagcccctgcttcagctactatacgtccatttttcctctttcatgcccacccacagcca

SEQ ID NO: 22093 - DNA, 201 bp, Bos taurus
aagtgaaatattagggaattggaattagagcatctgtatgaaattaagaatacatataccatagtattttttcccttagcttactgaatatgaagttaaatcttataaaaagcacctaagaaacaaaagaaacttgaaaagggtctagtatttctaataataggctgcttctattacaagttagttatctacgttaaatct

SEQ ID NO: 22094 - DNA, 201 bp, Bos taurus
acctgagctggcttttagggcctttttagctggtgtgcagccaggcctccacacatacctgggctgcattttgatgacttaggtttactaaaaaattctttggggccatttacaagggaccctcttgaatcacagagtggatttaaagcattccagagcagaaaagcacagcagtaaagtcagctacagagtcccacctta

SEQ ID NO: 22095 - DNA, 201 bp, Bos taurus
acagcagagtattcacacatactctgagttcctgatcctctggttcaaccatggtgttgcctccacccttattctagaggcttgttgcgcctcttttcttcgattgtgctataagacagaaatagacccacaccacacattcctcctcattcagcctcttccttcaatggtccaattctgataacaaaactctgccccttg

SEQ ID NO: 22096 - DNA, 201 bp, Bos taurus
ggaggagactgccaacattcttgacctagttcagtcaattggcaagtggatcagagagaagtcttaatatattgtgaataagctcttcttatttcaaaaaagatccctgggaagacatcataaaagcctttcgatttaccttctcatggaggtctgctatagttaagagtctgtctacagcattttaaaaaggaagcaaat

SEQ ID NO: 22097 - DNA, 201 bp, Bos taurus
aattggtaccatcccagaaaagcctcatggaaatagtacacagtggattgattgcttccttggttcattctcttccctcttggccccagagtgctttcgactggtgtggcttccacaccagccctcattcgtcttagctctccctgtagctgcacagaccgtaaaaatcactattcgtttgtgaaaatggccaacctatgc

SEQ ID NO: 22098 - DNA, 201 bp, Bos taurus
gctagagaatcagagattgaagattaaaggcaaaaataactggtaccaatcacatcttgccagactcactgaggtaacttaggcctccccacatgcagccgcccagagtaatctggctcatggagctctttatcagcctctccggtccacacgcaactgcctgactggtaaggccctggggagtcaaggccacccggctat

SEQ ID NO: 22099 - DNA, 201 bp, Bos taurus
gccacaactactgaagcccttgcaccctagagcccatgctccgcaataaaagaagccaccgcgatgagaagccctcacgcaactagagagtagcccctgctcaggacaactagagaaaatccagttaaggaccaaaggcccagtatggccaaaaagaaagaggaaaaaagggaatgggtcttggactctcttaagcccctg

SEQ ID NO: 22100 - DNA, 201 bp, Bos taurus
tctctagctaatatctcctccatccacactctccgctccagcgtggggagctcctcagagtcccagacgagcagcccatatcctccgccaggtggtgcccattcccctcgcgccacaaagaagcccatgatgcaggtagccaatcaggacaatcgcagccgtggtcgctcctgcggggatgaggggtatctctcggcctct

SEQ ID NO: 22101 - DNA, 201 bp, Bos taurus
ttggagaaaatcactactataaagatgggtggaatacagtaaattggcaagagattgatgttttttatcttcaatatactgaagtaataggccctgaagtctgcttggtggcacagagctgtgatctggatatgtttgtaattccaacagactctggctgttcagacacgtggccataggcagacgacatttttaaaatta

SEQ ID NO: 22102 - DNA, 201 bp, Bos taurus
ataaaagctcaatgctagaaataactcaaatttcttcagttagtgaaaaaacaaattttggtatatccatacaatgaaataatactcaacaataagacaagaagaagaaagaaactgctaatacatgcaacaacaagaacaagtttcaaagatgtcattctgagaggaagaagctgaacacacaagaataaattctatatg

SEQ ID NO: 22103 - DNA, 201 bp, Bos taurus
gtaggtagtataaaaggaagagagataagtgaaacccagttatcttttgagtaacagcatttttcctattctggaattttaaagcattgttttagagttggacttttatgtagccaaatatataaaattgatctaaaataatttcactacactgacttaataattgaatttggcccaggcttgtaggaatcctgtgggcat

SEQ ID NO: 22104 - DNA, 201 bp, Bos taurus
tgtcatcagcttagagactgtgacagatcgttttttaggctaaaatgttttatttttcatagctgttgaggctgtatgttattacgaagacctattgtaaaagactttgccctctgaggggacagggcatgggagcttaagatgatttttgttgattacctctgctacttctgatgatttttcaaaagaagattgaaaaaa

SEQ ID NO: 22105 - DNA, 201 bp, Bos taurus
tcctctcctcttttgtgtctgcttgaggcccagagttaacattcccccaagtgctaagctcctgggggcgggttgcagagaccaagggcagccagagccgtgctcaggccctggggtcccagagagaagattaggcctgtctgtcgtgtgtttgtactgagctgtcagctctgaaggcagggccatatctgctctcctatt

SEQ ID NO: 22106 - DNA, 201 bp, Bos taurus
gaaagcgtttctctcactctgccctcaggccacttcccagccttctctggaaactcattgtgtggacacatctagaacataccacgggccatcaagactcatctctggctttcatgctctatatgcacagtctactcttgtttccatccgtttctggttcctctggtcagcagaggccaaagttgtaaggagtttatctta

SEQ ID NO: 22107 - DNA, 201 bp, Bos taurus
atctgcttaggccttcctgtggctgaggcctctccctggagtgagatcaaagagccagggggagccaaggacaaggaggaccttccacatccagggtctcggtcccaaaggccctggaactctctgctgaaatgacctgaccccatttctagggccattaatgaactcttatacagatccatcctaccaaaggagggccct

SEQ ID NO: 22108 - DNA, 201 bp, Bos taurus
ctgctcagcatgtaaagttagaatgaagactccccatcacgcacgtggccacctctgccctcagctgtgaacctggatccatcctaagggctcactgcccaccacccggccagcactgtgtgtgcattcacaaacttgtccccagagacatcaagctgctaacttactgacaatctaccccctgtcatatttatctgaatc

SEQ ID NO: 22109 - DNA, 201 bp, Bos taurus
ggactcggagactcagacagttcttgtctacatgagacgcctgactaccctggaggctggcacggcatcctgccttgccattagcatgccggcctgatgccgatcaaatgacagcagggacaaccctcaggactgagcaatgggaattagatgatgctttcttggcctcagcccataaccgccaatcagaagccgacataa

SEQ ID NO: 22110 - DNA, 201 bp, Bos taurus
ctggtttggtaacaacagcttgggacagtgattcccagagagaagtgagtcccagctcactgtcagaagagcttccaggccacatagtggggaggacatgaacagagcagccatctctccagattgaaaaaacagagctgcagattcagaggggcccaggtagctaggatgtggagtgcaaagcacagagaggagagagaa

SEQ ID NO: 22111 - DNA, 201 bp, Bos taurus
tttcattccagccaagctaaaatgatttctgctttaaaagatctagaacgtaaaaaattgacaagtcgaaagagtggctggtctgatggcggccactactcctagtgctcgaaccttctcacagggaaggcacccatgtgtgcacacactggtgtgccatcaccctggggcctctgtcgtggttctccacccccaaaggga

SEQ ID NO: 22112 - DNA, 201 bp, Bos taurus
aaagaaactctcaagagagctgctatattatctggtaaaccaacacctgccttgggatgtggttatggaaactggaaggaaaggccttgacagacagccaatcatgggtcagctgggttgttaaagggcacacctgcagtgggggctggagctgccaaccatgcaggagcctgggaaggtgggaaggcccatgtgtggggg

SEQ ID NO: 22113 - DNA, 201 bp, Bos taurus
tttacctctcttaccatcttccttcatcctcagttcctctttctatcttctcataatatggtcgtatcataatttttggccaattatgagtcaaaatttatattactgtgacaaaataattactgttcactggatgggtcagataatatactgtgattatatttcctctgcaccagccttttgtttttctttcttaaattt

SEQ ID NO: 22114 - DNA, 201 bp, Bos taurus
tgtatattttggcagatagtgcccgatttagttgtaataattcacagcactgcttcggggcttccatgttgctccaggcaaaaccctgtattataaattacagcacacaaagctgaatttgacctaccagttgatgcataatcaactgacttaattctgaatattaactacacattgtggcctaaaggttttatgctctct

SEQ ID NO: 22115 - DNA, 201 bp, Bos taurus
aagtccagccacatgtcttggaaagactcttgagaagagcatctcctgtcaagggagactaggtatccagcttacttaggagcagttatgacatcctctcggtgtgattgtggtaccagatggtaccagaaggtgacatgacacataagggaccactgactccaaatctgcccccttcacatccactatacatagcccttg

SEQ ID NO: 22116 - DNA, 201 bp, Bos taurus
gcggttccccaccttgtctgggcagaagaatgacccaggagcactgagaaacaacagtgcttggtcctcactacagaggctctcatgtagttggaacccaatcatagtttgtttccttttttttttaattgtcaccagctgaatctaatgtgttaccaggcttgagagccactgtcttttccaatgtttatctcaagactc

SEQ ID NO: 22117 - DNA, 201 bp, Bos taurus
catcactgaaaatctgttggagaaactcagaaagacaacccctgctcttgaggattcttggttcctgagacccactgggacctgggagggtggggttcacatgggatccaagtagatgctcaggttccagcatctcccctcctttagcttctatcggagcaacccagcttttcctagtattgcagacctggcttctgagtc

SEQ ID NO: 22118 - DNA, 201 bp, Bos taurus
ctccaggattttttccttttgtgattctctggctagaaagccatgttcaagtttggccttctgctgttagtcttgctgagttgctttatgaaaagctggacgtgtgcagcccctccacccttcactcttcaggggacagagagtgtgctgaatcggcatttgaggcaggcaagagcctcccccactgcctccaacgtgcat

SEQ ID NO: 22119 - DNA, 201 bp, Bos taurus
gagcccccgtgacactctgcctcgttctctggtggttacagcactttccatgctgtgtatattgcctgtacccagcatgtgagtgccttgtggtcaggaaccttgtctcagggcctagtccaggacctggtacatatgggccttgccaactcaatgcagatctgaactgaagcaagttgataatgggagattgcaaacctg

SEQ ID NO: 22120 - DNA, 201 bp, Bos taurus
tacagctgagatcgcagtgggatgtttttccttcctaccttgcttctgcattacttaggagtggtttataggatcagaggctacaactccaacacactgatgcacctttccctgggacatgaaagctgagagagaaagttggcacatgaagcagaatgtggctttaagctttcaggatgctaaaatgtggtacccagcctt

SEQ ID NO: 22121 - DNA, 201 bp, Bos taurus
agacagagccaatatttcagggaaaaaagtggaaattggtgtgggcttatgcctcaaccagaccctgtgccaatagcttggaaaaagctctcctgtgtttagagacaaatgtacatcaataataatcacaatgtgtgatggactttatgatctaagcactttcagagccttttgaagattcaggacttatgtattgctggg

SEQ ID NO: 22122 - DNA, 201 bp, Bos taurus
gtctgagcaaattgtcctttccatctctgtttaacagacacaaaggctagcacatagaaggtcttccatcagtgtctacttgaactacaacaaatcctgagacatcactgccctaatgggagagagagctgaggaatcacatggtgttatagagctgatgggactctaggtacagaggccctctgcctcctagagcctctt

SEQ ID NO: 22123 - DNA, 201 bp, Bos taurus
actgtgttattttttattggagtatagttgatttacaatgttatgttagtttcaggtatacagcatagtgattcagttattttttccctaattatattcattataagttactataggagactgagtgtaattccctgtgctatatagtaaatcttttttacttatctcttttatgtgtagtagtttgttaatccaaaactc

SEQ ID NO: 22124 - DNA, 201 bp, Bos taurus
gaacaaattgggtgaaggctgtcttctccctagagggcaggagggagacagaccctgtgattcttttattatcctggtcacatatgcatatgacatagaggtggtggcctcagacattcaaggcaatgcatcagttgtgcctggaagatcctcacactagatttggacttagcctcatgctttctgatattgggaagaaag

SEQ ID NO: 22125 - DNA, 201 bp, Bos taurus
agattgcttattaaaaatgattttataatgaagttgcctcaaatagcagctcttttcctggttgtccttgaagctgtggtgaagaatctcagagacaactatctagggttttcctccttgttaaaaacttctctctcaccactgttactcttgatttttaaggagacaaagtctaactgacacaagtccctctccagttga

SEQ ID NO: 22126 - DNA, 201 bp, Bos taurus
ctgaatgctagatacaaggaagctttgctgttacagtaagacaggcccattgactgcccactgcatggtattatccacccatcacggaagcctggctaaaaatcccgaaggccaagtttgttaaacaaaatggttatttggtaaggcctgcaaaagggccaagggtggaaggacacacaccagttgaagcacaggatttgt

SEQ ID NO: 22127 - DNA, 201 bp, Bos taurus
agaatttcttaaaatttttataccaaatttttgtaccacaaccatagtcctagttgtgatatgactgactcagcacttaacccactaggtagtaaagcatgaagattttaaattttgttttaatttctttgagatacatgacctaggctgtatcttttgaccatgtcatgaatggcctttgtgatgccactgtaatttttg

SEQ ID NO: 22128 - DNA, 201 bp, Bos taurus
gcgtgctgcgattcatggggtcgcaaagagtcggacacgactgagcaactgatctgatctgatctgatgccttctttggaaaaatacctatatttcttagattgtagtcccttactccatctccaaagtacattattcacatttttgcttttgttgttacattgtgtccttaatcacatttacaagccattgatgggtaat

SEQ ID NO: 22129 - DNA, 201 bp, Bos taurus
gcaggcgcagggctgtagggcactgcttgttgaatttcaggtcctcagccattagtttttcgtttcatgaattctcttaccagcaagcgccttctggaactgtaggggagccaaggtttcccccttccatccttgtaagagtcacagctcacacatgtgtggcccctggggtgcttggaggtcattccataaagaccacaa

SEQ ID NO: 22130 - DNA, 201 bp, Bos taurus
agtgatgtgtttgaggttaatggttcctggactttaaggactggagtttctttttcaaaggggttttgccttcaaatatggaaaacaggccctttgtggcatgtgtgcttttcctggtacaaagactgaatttgtaaacatctgtttatgaaaagttgcatttctcaacatcatggcatgatcttctaaaccaatacataa

SEQ ID NO: 22131 - DNA, 201 bp, Bos taurus
gttgggaggaccgttggctctgttctcagatttgtttttttacctttaaagtgctcagatctaggtcataagcttgtttacacatatttcaggttttgtaaagggccttcttaaaaaaaaaagataccactttcctaggatttaggtccatctaaaaaataagaaaattgtttttattccataaaaattcatatttatgtt

SEQ ID NO: 22132 - DNA, 201 bp, Bos taurus
tgtttggaagacactactttgggaaagattccctagcatactgcttgcttggtgcaagaaatcctccctgtgatctttagcttggttatcttttggctcaatcctgactaagaggtgaacccagttttctgggaacaatttgagaagtactgttataaagctgttcacccaggacaattttaccaaactctaaggattttt

SEQ ID NO: 22133 - DNA, 201 bp, Bos taurus
aacaagattaactgccttttcttttcttaaattttcacaaaatcaagagggcatattacaatgggcagagtgtgcagcaaaaatatagtgattaaaacaacacttatcaacagtccacaaatcaaaagaggaaattcaagctttctaaaggaatacaaacacaattgctcaattcatcaataggatgtttcctttccagag

SEQ ID NO: 22134 - DNA, 201 bp, Bos taurus
gtcttaaaactcatgcagtagaaaatatacaaattcagacatgtttgtgttatgttactgtgttcaattttagttatagtagatgtgtaggattttgatacagtgaagtcatgctgtcaaaattagagggttttataattttggaagtttatagccctaataattttgtttaaaaaatttccaattgagaaatttaaactt

SEQ ID NO: 22135 - DNA, 201 bp, Bos taurus
gtgaccccatggactgcagcctaccaggctcctccatccataggattttccaggcaagagtactggagtggggtgccattgccttctccaaaattacaagtttagatgttcttgtactctatcccatgtttcagtgaagaaaagtcctgataacttcctttagaaagagggcacatctgcatactgatgccttgggtgagg

SEQ ID NO: 22136 - DNA, 201 bp, Bos taurus
tagccgagggtactgggccatgattttttacttaaaaggaaaataagattaatggagaggtttttaaaaattcacttatcagaagcgagggaagttatactagtgattttaagcagaagaatgaacaaggtgcagcagttggtcctttagaatagtgataccacattcataggaatttttaaaagggcactagctaaaata

SEQ ID NO: 22137 - DNA, 201 bp, Bos taurus
gtagatgcaaagccttttactgtatggctgagcaaggcctccatcagtccgtattaacaataactatgtggcaggtgagcagaggggcttgagggaatgggaggcttgatcagaaagaactggatctcagagcccttgacatatgttaaccgcggactgtgacaagcgtggcggctttcttcttctgtggtctcagtacac

SEQ ID NO: 22138 - DNA, 201 bp, Bos taurus
gaagagtctaaatcccaaatcaggtcacgtccactcttgctgaaatatgttgatggcttttcctgtgctcttgaggcaaagacaacaaacctctgacccctgtccacagggctaacatggtctacctaccttcccaacgctatcacatcccacgcttctcctcactcaacccatccttccactggccttttcatgtttcct

SEQ ID NO: 22139 - DNA, 201 bp, Bos taurus
gctgacaggctgcttctcttgggggactagcaggggaaggaaaacttctaggcctgctatgctctaaatctcgattattatgaagagctccacttcagaacaaaaggcccattccattaaatgacgtcatcttgcattctgaacctttacaatctatgtatggccttatttttgtgggagcatccgacaagggacttgttt

SEQ ID NO: 22140 - DNA, 201 bp, Bos taurus
ccaagattggcatgttaagtaaccctgcctgctttttccagagctgtgtgagcgatgcagtactaacctagctcttctgctttctttggtaaaggtaacatgcattttacagatgactaaagaaagaatggaccagcagcaaactgggacatctgaaacattatggtgaagtttctagtttgggaagtaagatctacaaat

SEQ ID NO: 22141 - DNA, 201 bp, Bos taurus
agaggaagatcacaagaagtaatgagtctgtaggcagtgtgggggatgacgataactttgaccccctatctgaatgattagctgagattacttccctcctccttctttaaagtttcatggccaagcagaaccttcagagttggttttcagggatgctgagtctaccatctgtacagatggctggcattctaattaaagcca

SEQ ID NO: 22142 - DNA, 201 bp, Bos taurus
tcaaattccttacatgcctctggacgctaattattagtatttctaatactacaggcagtactataatagtgcaggtcaattagacttgcacactggcaccgtctctgactctcccttctctccactattctgtccccacacttgatactccccatgtgtctcctgaagcagcccttccattcctaccaccaccgttccatt

SEQ ID NO: 22143 - DNA, 201 bp, Bos taurus
agttagtaacagatatatgggtctgtttctggactctcgatttcattccattgatctaaggtctgtcctcatgccagtaccaccctgttttgataactgtagctttgcagtaattttctaagcagaaagtatgaggcctccaacctggtctttctttttcaagattgtttcagctgtttggggccccttgctgtaccatat

SEQ ID NO: 22144 - DNA, 201 bp, Bos taurus
tataaaaatgcatgaagcactggtctagggggtcaggaattctcccaactattccttcctgctctcagctctgagccttcttgttcgggtccaaagtatcgcagcatttgtcttgttgctatactgttgaataattttgtattgtctgactggtatcttcagaatgatctgtcagtcagatggactcccattccagttcat

SEQ ID NO: 22145 - DNA, 201 bp, Bos taurus
cagccactgaaccactagggaggtccctctgacagtctcttgggattaatagtagcagataactcccacccagctgtggtaagtagtgtgatatacatggaactggccactcagcatcctttcctcttcatttcagtggacttacctgttacacagaggctagaaagctaaacactgtgtttctcagactcttgcatttag

SEQ ID NO: 22146 - DNA, 201 bp, Bos taurus
ggaagagagaaagaatggagttcctggcaataaaaagaaacaaaattagcaagatgtcagttcctatcgaagaaataaaaagaaaataaagaaggagaaagagaaggaatctgttttacttcccatccatatgtcttttcctggaataattttgtctgtcttcctctctcctatgcctcaccttccattccacctcagtct

SEQ ID NO: 22147 - DNA, 201 bp, Bos taurus
aatagcttcctggctgaatttctcttatatctgttttcttaacattagggctagttcctaaggtgagagccccttggtaagaaaatacttaaatgccatggcaggacaagagcagaaagacccctctagaaataggagtgcccaaataggaatcctcggagaaggcaatggcaccccaccccagtactcttgcctggaaaa

SEQ ID NO: 22148 - DNA, 201 bp, Bos taurus
tggcttgatggtggacaacattgtttattaccggaacgacagtcaatgaatgttctttgttgacaaagataataaagtttaaagatactcttaggcatttgtgcatgttttttttttcccattatcgcccttgacattttaagcagttattttaaattccatgcctaataattcttacatctgtgttgtatctgatactgg

SEQ ID NO: 22149 - DNA, 201 bp, Bos taurus
aataacatgtcattatcttaaacttctagtttttcctttttttttccatatcaaagtaacattttaagggaaactcacatgcaaaatctgttacgtgtctacttgagattgaggatatggaggaaacagttaagtcctcatacttcaatctcattaagttattgaagatctgataatattttcaagatccagttttcattt

SEQ ID NO: 22150 - DNA, 201 bp, Bos taurus
ttcttttgagttgatgttagagctagcttgaatttcccaggcagtgtgaagtcagtcattgcattccataattagtcatttgctttgtaatcatttatcaggaacacactactaaatcattcagaacattcaccaaccttggcaccatgtaaatttggagtgtcatatctatgttggatggaagagagaactatttggaag

SEQ ID NO: 22151 - DNA, 201 bp, Bos taurus
gctgagtgtattattaagcacctttgaaatagctactttcttagaactgattcttaaaacagtgaattgaggtggaggcttgactgagcagaaggtatgacactcatgatccaaaaatgtacaaacaggctcctacaacagacccatatggtaaacacccaccagaagacagctctgtgtgtgggatcagacatatggagg

SEQ ID NO: 22152 - DNA, 201 bp, Bos taurus
tcactactttaaaaccatcaattgcttgtcacacattcagtagcatagagaaatttaagcccattaaggtgacttgcctgaccaacggcaacctgacccctactataacttctgtctctactctccaacaccttccatgctcttgccactgagactacttataatttctaaacatatctaatgccccatgtcttctgatca

SEQ ID NO: 22153 - DNA, 201 bp, Bos taurus
aagaatgtagcaaaagtgcaggctgtcagtttcaagcctggcctaaggttgccttgctgcttcaacttgttttcttagaatcctgtctttgccatatgaataaccttcatctggccagctggatgaaaagtgacatatagcccactcccctctgttgcccagataatagtcagacacccacagacatgtgagaaccagccc

SEQ ID NO: 22154 - DNA, 201 bp, Bos taurus
tcctaattcagtcccaaggccaatgacacatattttaggtttttcattgcagcagactgaatgttcgtgccctctcctccaaattcctacctagaaacctactgcccaaattgatggcctttggaggatggccttattaaggtttaggcccaaactggcacagtgttagttttgccatgctcttttagttaagcagtcaca

SEQ ID NO: 22155 - DNA, 201 bp, Bos taurus
atatgtatgtgtgtgtgtatatatatatatatatacacacatagcatctcccattatccacatcccccaccagagtgatactgtgttttctataaaaactgtgatagatatatgccattatacatttacccaaacccacagaatgtatgacactgagagtgaactctaatctagactatggactatgggtgataatgatgt

SEQ ID NO: 22156 - DNA, 201 bp, Bos taurus
ttcatctcctataccagaccaaaacaaaatttctgggggaattttacctgtttgggcaagactaaggatgagatattgttcatgggcaagttctgattatgatcatggtgcctagaacagagttcagcacaaaataatagacacaataaatactgattcgtaatatttatatacactaatggagggaattgggacacagtt

SEQ ID NO: 22157 - DNA, 201 bp, Bos taurus
ttggaaggctggaaaggtcatctggaagatgagggaattataagtagcagaccgaagagcagattgaggataagaaaggtgaacctaattttcaaagttattcaactctcaaccttgccagtgcatatatataccaggttccccttccagccccccatccgtactccaggcttttctcccctaatagcctcaaaagggaga

SEQ ID NO: 22158 - DNA, 201 bp, Bos taurus
agctacaaaagaatgcttgatatatgtggaatttatttctctgtcttttgttactacaagtataaatatgttaatttctatgtgtagagggtggcatgggcggaccaagcttcctaggaatacctgtttaaatggtgttaaattctgactagagctgggcagttggagaggttaaatgatgttatttcaccttgtactcaa

SEQ ID NO: 22159 - DNA, 201 bp, Bos taurus
aggcagattagtcttgttggacattagagtcttaaaattatgccatgtttccaattgctgtttttcaacagaagatttcctctcctctaacacatgggtttaatcaaatttcagtttccaatttactaaaatgttaattgtcacaaaaacctaccctgaccttaagaatactagcttttcatgatcctttctggtacgtta

SEQ ID NO: 22160 - DNA, 201 bp, Bos taurus
ataaggcatgcagacctgctgcttcagaggttctagagtctactcagaacatctggagctgtgacactagtttatatttcaaggaggttgtggggtaggcgtctgataagcttcccatggtccctgtcaggaactgagggttttcagaatctgtcctacgtctagctggagatctttggatggcttcagggccatctaagg

SEQ ID NO: 22161 - DNA, 201 bp, Bos taurus
gagaatgaaataaaattcatcagacaggttttctgaatgggaagagtttccagatgttaaacaaagagatttgtaagacgtgattttgaggccgttttactattcctatacatcactagccagcacatggttttcagtagcacactgatttgtttctaaaaacaaatctagattttcctattcctggattgagaatcagga

SEQ ID NO: 22162 - DNA, 201 bp, Bos taurus
agaaaataattttcattcatttgcatcaagaatgtgaaatattgggcaaattcaatctgaatgaagccatcttacattttaaaacttgctgcccctttgcatttccccctatagctgggtgtttttgtctcagaaggttgggttcctgcttagaaggaaggaaaccaatggctcaaccaaacctcatagtcctgacatgct

SEQ ID NO: 22163 - DNA, 201 bp, Bos taurus
ttggcagtcttagaaccagtgctactagcctgcctgtcgtcaccatggaaaccacatagtcttctagggagaaggagaaaaactgcctccctatcagctggtcccaggatctcaaagcagaaagcccatgtatagccttactcctcttctcctaagtgaccctccccagagcacaggagccgcctacccattcttttccac

SEQ ID NO: 22164 - DNA, 201 bp, Bos taurus
ctccctgctgaaaacccatggctcaccttcctaatgctattactcggagtcctgagcacgaccttgtgactggccaccttggcaggtttgggcagtggcaaggggtgggggaggcgggggcagcattaccaggcctccaccccaggccagtccctggtgggcaggccctttcccattctttaactctctttttgtgacaaa

SEQ ID NO: 22165 - DNA, 201 bp, Bos taurus
ttagagcttcaacaagatgtgccgcctataagggacggactattacttggccagagaaaaccccactgagagatggggatgttattcccctggaagccacagggatggaaattgaaggatcctatgctccagagactcagccagacagaggaagaccacagggcccatgatgtccccctctggactgaagaaaaataaacg

SEQ ID NO: 22166 - DNA, 201 bp, Bos taurus
caagaaaaacatagttctaatcaatggtttccattttgaacatgcaaataattcacttcacaagtccatggataaaatattgcaggagaaacattttgtaatgtgttggtttatcagtcaggttaatagcagttcactttcaaacactcaatacttcaaccctttatgtaacaaaacttctaaaattcatttagctctttt

SEQ ID NO: 22167 - DNA, 201 bp, Bos taurus
ctgagattcatgtttctatatcttataaatgtttaaagcgaagccagaaatccagatataacacatggatgttcccaggccctcaggccaaccagtgtgcatccctccctgctttcacccttgctcttgtacctccagctcactggtgaccccagcagtgaagagaagcctgtactccatggtagcactcagcacgggcca

SEQ ID NO: 22168 - DNA, 201 bp, Bos taurus
tttaaaaccattcttgtggttattgatacaagtactttttagaaaagtcccttaaacttcagtagaaaaaataaaatgcattcaaaagttaaaatacacacgtgtgcacatgcccataatgttcatctctctccataagaccaacaaaatgtttaaaaattttaacatttcacatacactactcaaaataccagtttacct

SEQ ID NO: 22169 - DNA, 201 bp, Bos taurus
ttttgtttcatttaccatctcataaaaattagcaaaggacaaaatgttaaacactattaagtccacaaataattgttttctgtgatttctgaatgtgaaatagatcccctccagtacatcatcccatttcagtttacaaacagtttttaaaccctcagagcactttgaagaaaaacctcctttctcttttcttctctcctg

SEQ ID NO: 22170 - DNA, 201 bp, Bos taurus
tctgggtttctgttctggatcacagtgttatcttcttcagaacattcaggtttcactggaacattccagtttcacttgaacttagaggtccagttgtgtccggtgtcagatgggcaaggctcccactcgatcccagtgtgactcaccagagtcttctggtgtgctgaagtctaatttgctattaagcttatcgccgaatta

SEQ ID NO: 22171 - DNA, 201 bp, Bos taurus
tccaggtctttaataatccaggtatgtagaatctcttccaaatgtcacagtcctgccaaggatgttttgccagagcttaggatggaaattggtgacctgagagtcaggttgatgtagatggcaatattgcactatcttggctcaggggacaggagggcaggggaggagatgggagtagaggaggagggcaatgttggtaaa

SEQ ID NO: 22172 - DNA, 201 bp, Bos taurus
tcactgtaagtgtaaagtgttccctggtgaacaaaatcaagtcataggaaaaacaccttttcctaaagcgctttgcacgaggaattgctggaacttgcgtatatccttacaagtcgttttccatggtgattgcggagcctttaaatgggagccctggtgtgactccccctggggggatgcctccttttctgttaccacttt

SEQ ID NO: 22173 - DNA, 201 bp, Bos taurus
ttactcttgcatgaaggtctatgtagtcatgagctccaggctcaacacctgctggcagactggggaccacctcctctccttcatcacatggcctctgacatcatcatatgaggaaaggttaggctcagctcccggtgagtctgtagtaacagctgctattgccatgggcccatggatgctttcagcttactcattccatca

SEQ ID NO: 22174 - DNA, 201 bp, Bos taurus
tccacctccatttagtctcacaaaggtctcttcctacatggttagcacccttttgactttcagctcttattctggagaatacattcaagggctccatcccgctcagttgtccttcatctcttttataggctggttttgtgaagtgccagggcagttttgttagtcactaacctttctttagggagaaagtcactttatggg

SEQ ID NO: 22175 - DNA, 201 bp, Bos taurus
ctcttcggccagctctgctgtggagagctctggggatcactgagtagaatgtcaggattcaagtgacctcaaagccctattgtgaccaagtgtcccttggtgtgaattggatgctcacactcaggcctgtgaccacaggaaaaggcccggaccctcccaccctagacaattgtggaggctttgcaaactagcatggtcatg

SEQ ID NO: 22176 - DNA, 201 bp, Bos taurus
gtgaatattgtgtaatacttaagtaactgtagctgggaatatggatgattaggatgttttctgaatgtttaaagttttaattcttaaatatttagttctacgatcaatttcaagttactttttgtgtatagtatttgattaagaacctttttgtttttcaagcacaatttaatataaagatcatcctgttttcattgaatt

SEQ ID NO: 22177 - DNA, 201 bp, Bos taurus
cactggagcaagatgggccatactgggtacttggcatgggtctgggcatatactgaagtagttctggcatgccagtcagaactccaaatcagtcctgatccgccaatgctaggaatggccaccctcaccctgttcaggtcctatccagctccatcccccttgattgtacattttcttctttggaaacagcagcctttgccc

SEQ ID NO: 22178 - DNA, 201 bp, Bos taurus
gatttcagaggccatagaaaagtaatgttatcaaaatttggtgagacctggagcatgaataaagggcttttttcccactcaagctgttagaaactaagcctggtttatggaacggaagagattacaagaagcaaagccatgttttctttaaaacaagtcttatatagcaaagcatctacctgtctgtgtgatatttgcatg

SEQ ID NO: 22179 - DNA, 201 bp, Bos taurus
aatctctatatcttacaagtttgcttacatagttcttttgatttttgtgaagatttagaaacaaagaaataagggtggccaacaaagaaaaatttcattccattggagcttagagtatgtgtattggtggggagaggacacagcaagtagtgataaatgggcaacaggcactgaatataaggcatagaaagaggcctgaac

SEQ ID NO: 22180 - DNA, 201 bp, Bos taurus
ctccatggactgcagcctaccaggctcctccgtccatgggattttccaggcaagagtactggagtggggtgccattgccttctcccctgtataaagctagaactcttgaaaggctgtctcagtgcagtggggctggagatgagctccactcatcagctcagggagcactcccacaagaaacagcaggtccaggcctgtctc

SEQ ID NO: 22181 - DNA, 201 bp, Bos taurus
ctcagttatgagcttagtcagccttaaggtggaagaagtggagcgaatgtgcagtgctttgcaaagtactctagttggctctctagtggcctgggtccctgaggctgcctgttaatttacatgcaaactgagcacatgtctgcaggacagcagatggaatagtcaacaaccatcatccaccaaattattaaggccatgtct

SEQ ID NO: 22182 - DNA, 201 bp, Bos taurus
tccaccaactgtggttgtgtgatctgggaagttactcagactcagtgtgtctcagctgtcctcaactgcaaaatgtcctcatcgataaaatgcgggtaaggatatggtgctgggtggcaactcctaaggttgctgttacaagctgacgcgtataaagcacctggcatgtgacagatgctcaaccgagctggagctctgaac

SEQ ID NO: 22183 - DNA, 201 bp, Bos taurus
aaggagccagtcagacagcctcaaacaagatgccccagctattcccactggctgggccactttccactgtcactgtctgtgggagcagtccttcctctgcgtcatgctgtggcatcctttccccaagcaggtcatctttagtacagcacatggtcagtcaaccagcagaggcaaaagctttgtgtaagaaatatgcacaaa

SEQ ID NO: 22184 - DNA, 201 bp, Bos taurus
aagagggggaaggatcttggtggggaaggggacaggcttgagtgggatggtttcgtcagagggaaattcttcatccagcagctctgggtaatgggcctcaagtaacggaagctggtttagtctcttacctgttttgttgagggagacagaagacagatttaggagagagagtggaggatgctgcccccttattctggcccc

SEQ ID NO: 22185 - DNA, 201 bp, Bos taurus
tttgactaatctttgcctgtggataagggtggtatgaggcctattttggtggtgaggaccactccacttgcatcagatcccatagacattgccccagtctatgtaattctcatcaggccatgacaacagcaccaaaggggctaactagcatttgaattgtgtttggtctaaagtttccaaagactcatcaatgctattagg

SEQ ID NO: 22186 - DNA, 201 bp, Bos taurus
ctttttcagagatatgctatttcccttttctcaatactaaataacttttgccaaaagtattcattgaactttccagtggcgtatctgtgcttggatctgagctgttcactaatcttgacattatatcctctattgcgaggctagaagctgaaagcagtttgttactgttgacctttatgctcttgtaatttagtttctttt

SEQ ID NO: 22187 - DNA, 201 bp, Bos taurus
ccacgtccaaggtcatgcgtgtggttgctgttgggcctctgtctcttaccctgttagtctcgtcatggggctgtttcttaacttgccacctggcttcctccagcacaggccatccaaggaagagagagtgatccttcaaaatgggagcaacagtttttaagtaacctaaacttggaattgatagcacaccactctggtcat

SEQ ID NO: 22188 - DNA, 201 bp, Bos taurus
ccagctcagggcctacaccctgcttcaagctcagtttaggagaacagatttaatacttgcctccttctagcaaggtgctcctggaaggggttttcatatccggcagggccagagggtgaatatgacaacggagagagagagaggagatctatttatcaccatgttgtcactttaagggaaaacaagctttattcccacttg

SEQ ID NO: 22189 - DNA, 201 bp, Bos taurus
tggggaatggaaaaagctaactccaggcttctgtgctggagatgagaggctgacagatagatatctgcagacatattaatgtaaggactgagacaagagacaactaaagaacactggtgaagtagtatgcaatgggccatatggcttaatcattttggagttagtgactgagaatcttggagttacagaattccttcagct

SEQ ID NO: 22190 - DNA, 201 bp, Bos taurus
ctacctattcttagggtttttgtgtaaggatccattcagaataattcactgtggagtcttttgcttctcagtagtatggcatttggggaacataaatgagtgatccagagcagctaaagtgctttggtttgactaaggagctttgggaactaatattgcaacatttgagcttgactttgcaaattccttctggacatgacc

SEQ ID NO: 22191 - DNA, 201 bp, Bos taurus
agttttaatgcttctatttctcactatcagttcccttcggggactgaagtctttgttcttgttcggtgcagtgtaatttcactgggccttctcttgaccctgatgcttcattggcatagtaggtctgcctccattggtttcttgttagagctagatgatgaaaatgggaatagtttgcatcatcttgattctaaatgcaga

SEQ ID NO: 22192 - DNA, 201 bp, Bos taurus
caaatccctgtttttctgttcccttttgaactcccacccccagtcgacattgcccggctgctcctgttgccacctgctctgttggtcctggacaaagtcttatgtgttaaatcttttcctcaaatgctgctcctctacctcaccttaactgagtcctagtttttccccaggatgctctttttccatctgtttagttcatga

SEQ ID NO: 22193 - DNA, 201 bp, Bos taurus
tccctcaccctatttatcttggcctaaaagtagcttcttccaggaagtcttctctgaacaccttgcttagccccagccaagactaggtacccttcctttggggcttccctagccccttgccaatccccgtatagagcatgctacacatgtatgagtgtctgtttccttgtctggcaagccactctattacaagtttcatga

SEQ ID NO: 22194 - DNA, 201 bp, Bos taurus
agactcagcttccaaaattcccttcaaaagtaccttgccctctatttcttagttaaggaatagtactattacttatgcacgccagaaaccaagagggtagtcttccctcttcattctccacaagcccctccctctgaatcaacactcagctaaaatcttgctgattctacctttaaagtgtccgctggtcccctcctcctt

SEQ ID NO: 22195 - DNA, 201 bp, Bos taurus
cttcagaagtatgtgaaaggagcttcccaagttcacattgcaccagagtcaaaggaacagagcatgggaagttaggaaagcacgtgctgggttcaggactatgaatgaaaccatctctgaaaccttgggcatgtgtattaaaactgtcctcttttgaggaaaaaaaaaaggcattctattttgagtctgattctcattttg

SEQ ID NO: 22196 - DNA, 201 bp, Bos taurus
tgaaaagaccatgttttgtgcctttactgagtactgtggttcccagtgaacagagatgttataagaaggagtattatgttcctaatggatagctgtttctaatttatcctagttctacctgtgagataggtagtatgctttatcttaactgatcagatgtttaaatagtattagtttttcttggaaagttctgaggaatga

SEQ ID NO: 22197 - DNA, 201 bp, Bos taurus
tggcaatttggttacactgaagggaagctgcaaagtgcttcttttatgcaaaaaagtagaagttttcaacttaataagaaaaaaaaatcatatactgagactgctgagatcagtagtaaaagcaaattttctgtccatgaaattgcaaagatgaaaaaagaaatttgtgctagttttgctgtcatacttcaaacaagtgtg

SEQ ID NO: 22198 - DNA, 201 bp, Bos taurus
acctttgctttgtgagtcctcctggcttcttgctggttcaggagcctttcagaagtaattacttgtggcaggtcaatgggttcaagcttctaaaagtccaacattgagagcagtcagcattcctcatgccaggagatgatgaaacataaaagcccgaacttaagctatcttaacactctgcacgtgttcccgagagcacac

SEQ ID NO: 22199 - DNA, 201 bp, Bos taurus
atatcccgtttaaagcaacaagttattcacagttgcatgtttatgtttataaatctatttatatggctctagatagctctagtttctggtttctcttctatctctttctgaagagagataattgtgtctcaaagtattactttgcctcaaagcaatctccaggcaatgtttgcctcccctgtatgaagtgattcagcccac

SEQ ID NO: 22200 - DNA, 201 bp, Bos taurus
acctgcagatggccatcttctctgtgtatctcttcacactgtcttccctctgcatgggtctacttctgtatcaaatttcccctttttcaaggacagcagtaatattgggttagggggcccattctattccagtatgacctcatcttaactaattgaatttatctgctgcaaacctattttccaagcaagatcacaatttga

SEQ ID NO: 22201 - DNA, 201 bp, Bos taurus
cactggtcgaattcacagtctacattaccagatggaaatttgtctcccttccaagtccagtgagcagggctgggcatcccagaaggaaaactggtgtctcctctcctttgctcccttcagcttcaagccaatcagcagcagccagtcagccctccaggtggccaaaggcattccctttccaaaggaaataaactggcctca

SEQ ID NO: 22202 - DNA, 201 bp, Bos taurus
atctttctctaataatcttttcttaaagtgtcttctgagattttaatggtttttatactcattaacaaaattaaggctctttaggttttgtcattatatatgaatatagttatacaagtatgaatgggcatacttaattaaaaaaaaaaacctttacaatataaattagagaattccctggtggtccatggttaggactcg

SEQ ID NO: 22203 - DNA, 201 bp, Bos taurus
caatgataactatatcaatcaactctttatagcctacttttcctgaacaaagatatatttttcttttctatttttcacaaggtgttaccttagaaataagcatcaagtgaggaagtatttctaccattgggatagtttaatgggatttcttggtaagccttgtaagtatttttatttcccttgattgtatttcttaatact

SEQ ID NO: 22204 - DNA, 201 bp, Bos taurus
aattgttaatatatgcattgatgatttgttgcccggtaactatgatttttgaagtgacaaactcatttcaatatttgccttttaattaaaatgggtattttggcattttaaaattcatttttgaaggaaccccctactgagctgcagcatctcaggcacagcaggcgtatactaccatttttaaaaagccagctaacgatt

SEQ ID NO: 22205 - DNA, 201 bp, Bos taurus
catttcttgtttaaggtgaggagaggatgatagtctgctcatggtggcctatttcctattacatgacaaagttatgggtaaactgtgtctgttcagaaaccttcctattcagaaatggattcttcacagaatagcattcataaagatgggataagactaaatttagaaattgcggagtaagatgattgttttcttataatt

SEQ ID NO: 22206 - DNA, 201 bp, Bos taurus
catctgtttgtgtgaaattcctatgcactttatagtttgaactccaggttaagtttctccttaaattcagtttctccgttaagttcttctgaattcctatcgtcctttcagcacttattgtctggtttaagaagttgagcctagttgggtgcctttgctttctaatggtttcatatgcgtaaggctcttccgtgaaactgt

SEQ ID NO: 22207 - DNA, 201 bp, Bos taurus
gtcagttgttttatttgctattattttagaggtcctgagacagagcagctagctacgctgcactctaattcctgacccgtggaaactgtgaaataatacacgttgttttaagttactcggtttgcagggtagtttgttatgcagcaatgtgtagctgatacatcaaaagagaggaaatggaatatatatcaggataaatat

SEQ ID NO: 22208 - DNA, 201 bp, Bos taurus
aaaatcaaatatagtgatataataaattcaataaaatgcacatacttaaaacaagatgaaaacaaaagtagaagaaacagcttcaaaaagcttggggtttctctgactttaatttatagctctttaggttgtggtagatatagaaggccagtaagtatcttaaatttcttacacaattctaaaatgttagaaagggtgtct

SEQ ID NO: 22209 - DNA, 201 bp, Bos taurus
aaggatcaatcggtagcatatgctgagggccaatcagttaattcaagtggttagaggtttgcacataaacctcttcagcagttatactttgggggttgtcatctatcagccaatggccctcatcttgtggcttttctgaattctcctgtctgttttttctgagccaattccagattgcaaggggtttaccaaagatttact

SEQ ID NO: 22210 - DNA, 201 bp, Bos taurus
ggcacattagctgaaaaaataagatgttaataaaaaacattaacggcccaaatgccatctccgcaagctgcttcacaggaagttgtgtgagtacatccagtgggacagtagacaaaccacacttgatagcttacctcctctagaaaaggatagaaatggggaaggctctggggtgggtgaagaaaaaggagtcccagatag

SEQ ID NO: 22211 - DNA, 201 bp, Bos taurus
agagccaaggaaacttcatttagacccagtatctaccttctcagcatcactttctttttcccaatagtggatcccactctcttcccagctaacagaggccgaagaaaagcatactggccacattagtatctcttgtggtctaataatgggaccctccctatacctgttcctctgccctcctgctttccgtatttactttac

SEQ ID NO: 22212 - DNA, 201 bp, Bos taurus
ccaagttctccaccactcagcccttctcccatcccatactaatttcacacagtcctcctttcccggcctgaatcctgcagtcaaattgtttagtaccctatctcctccttagattccccctttcttcctcatttgcttaatgctgattctcaggcacagaggactccagggcctttgtctacctgtatccttctctagctg

SEQ ID NO: 22213 - DNA, 201 bp, Bos taurus
gtggaatcagccttttttctatatggaatgagctctccacatgaaagagcacttctgttataaaatgaagggggaagagaggcttcacccaggccaggtctacctggtacctgtttcaaagcatgatgaaagcccccatctgcccctcctctatggcaacattggggcacgttgtccttcagatcaaacttgggctgtgtg

SEQ ID NO: 22214 - DNA, 201 bp, Bos taurus
gaaatactgcatgttgatgataattagcagttggcctttaaaaataagttccaacagcttaaagagttgtagatataaaaataacctaatttaggtttcaattcctctgattaagcatgtgaaagtacgttttaaaatctgtcacattgaaaagactactgctctgtgctcttctgtatttttgtctctttgggttgaata

SEQ ID NO: 22215 - DNA, 201 bp, Bos taurus
acagctgcctcttgctctctaaagttcggggccctcaccacctccacccacaacacctgggatcttagtggtgattcaaatgcacatgtctctttcaggtgggttgaaaacatcgttgcaggcctgtcctccaacctcgcccgctctgtatgtccccctggcagtgcacacagcacatgctggtttgttgactctggaaac

SEQ ID NO: 22216 - DNA, 201 bp, Bos taurus
acttggaacatgtatctccctgccagtgatcctgggatgagttgagtgtaaataaatataagtatctattcatcagagactgtttatctttttctggcccctcattcaaagcagccacagttttctgaaagagctactcagaccatactccaaagcagagaattatttggttcagagtggggaatgctgaggccacagtct

SEQ ID NO: 22217 - DNA, 201 bp, Bos taurus
tacttcatataataaatgcatatcagtttagaattatgatatatttttaatgtatcaaaccttttatcattttctagtgaccttatttaccactagcatatcaacttttcttcttaaagatctatttggtgtgatagtaaaatggacatatcaactttttatttttttggcttacatggctgaaaggtggttttacacccg

SEQ ID NO: 22218 - DNA, 201 bp, Bos taurus
attgaggcagagaatagagggcctgtaattcggagtaatgtgtggaaaggctgtaagagagtggacagcgaaggttgtttggcctagataataatcgcagtgggtatagtgtaggccaagtgggttcctgacccacattacaagtttattttaccaatgaacttttacttctcagtgaaacattagaatttcagggagtta

SEQ ID NO: 22219 - DNA, 201 bp, Bos taurus
ggttttatctgcctgtcaattgacgttaccagaagattttgagaaagagaaagagactagtaggaagtaagtgtggcatgttaaaatagagggcagaagaacaagtctggaagctgggagttccacaactccaaccgttgtggaataagccagtcaagacctagtcataaatcatgccagtgacagtgatggaaaagagag

SEQ ID NO: 22220 - DNA, 201 bp, Bos taurus
ttcctgaggccatcactaccacccccctgttggagtctgggactgtgaaggcagaaacatcttgtgcccttttcctggctacaaagtagaatagcagagaaagagagccagataaacctcagggcctaggctcagctcagatgttcctctcctagaggcatttcagtccatgcccctgcatttaggtagaacaggatggcc

SEQ ID NO: 22221 - DNA, 201 bp, Bos taurus
cttttctctgattcagagtcctttcctggcccctccccagctcatcacaggtactggctcccacctctctacagggcagggccactctgcccgcgacgcttattgctcattcgatacctgagaccgtccaatcacagttctcttcccccaggagactgccagctccctgagggtaggtcggcctcctgtgttcaaagccta

SEQ ID NO: 22222 - DNA, 201 bp, Bos taurus
cttttggcctctattaactggtttcaatggttaagattcttgccaagtctaaacaaaaaattgaatctcacatctaattcctagctttcttcctcccttctagtcttgggccacactcagctgggacttatagaggggaagttatagccttcaatttctctatatttcctctacctacatttcagtatttgggggggagaa

SEQ ID NO: 22223 - DNA, 201 bp, Bos taurus
aggaacatttatcaactaaaaacttgagcttttgctttctttcccccactttgtcttcatttaaaaattttttcttggctttttatggttacttcagttgctgttcttaactttgtagtgttaaatgatcgatggtctgaccactgaaaggaattactttaattttattttgacattgactccatgatagttctacaagcc

SEQ ID NO: 22224 - DNA, 201 bp, Bos taurus
actacagttgaaagctttatgtcccaaggcattctcaggccctggagtagttcttaaatattgctactctgcaagtaaggatgaggacatctttttgagatctcagggccattcatcaaccaaattattattcctctattcccagtagtacctaacccaaataaacatctgctgccaattatatctgaagttatttgtttc

SEQ ID NO: 22225 - DNA, 201 bp, Bos taurus
aacttccacctgccaattcactttttaaaaatgattttttgagaacaaatcttaagtaaagtgataatcaccataaacttcccagaaataattaaattttgatcacaagcattcaaaacattttcacacattctctcagcaatcagtaataagtcaatagtacatacaaaatttctgcattacacactgcaatacctttaa

SEQ ID NO: 22226 - DNA, 201 bp, Bos taurus
ttacctgtaatcctagactctttccctgatctctgtttcgaacacattgctcacactagccattttattggtcccagttttacatgataatctattgaattagttcatttatggctcattcctcagcttttctgcctgcttccaaataataaccaaatcctgttgctgtttccttctccattaactccaaaagacagtttt

SEQ ID NO: 22227 - DNA, 201 bp, Bos taurus
gaatcagctataaatacacatatctcccctccctcttgaaccaccctccagcacccacccccatcccactcctctaggccatcacagagtgcagacgagcttcttttgctgtacagcatgttcccactagccatctatttcacatgtggtatggtaatgtatatatgtcaatcctagtctcacagtttgtcccggccaccc

SEQ ID NO: 22228 - DNA, 201 bp, Bos taurus
cttattaattacaacatacatgttcatactttaaaatgaaaaaatagagaaataccaaaattaaaaagtaaagatcatcatacataatctgacaccctacgagataattaacaaaaatgtactgtatctcctttcacactttttattgcatagacaaataatctttttctctaaaataacagactcaggttcaaaatattt

SEQ ID NO: 22229 - DNA, 201 bp, Bos taurus
aatgaatattttctaagactaagtagtcctaggtttctgctgtttttcttccctttgtggtgtgatacatatttggttagaatgtattataattgagtgtctttgtgatgaaatgtgtactttatttgcattcattcttaaatggtttctcctccatcttttctattgagaatatctggtgaattaagtaagtaggattcc

SEQ ID NO: 22230 - DNA, 201 bp, Bos taurus
aataagtaaaaaatcacaggaaactctaggactgaaggatgacaaaaatgtaaaaaaacatgacttcatgagtcaggaatagtagtaattttatgtgggaacatttgaataactttgtacttacctatttgagaaaagaatgggtagacatctcatgaatcccagttaagctttatttagaaagttactatgttattttta

SEQ ID NO: 22231 - DNA, 201 bp, Bos taurus
aaatgacagtgatctatggtatgaataggtcactgtgtccttgcccaatcccctactttcttgcatacatactgcttttttccttaggataaaggcctgcgaatgacattgctgcctcaaagatcacacaccttctctaaaccttatgattgccaaatttcctccccaaggccatccctaaagcatgctacctctgtctgc

SEQ ID NO: 22232 - DNA, 201 bp, Bos taurus
tggacacttccccggcctgtaatagctcagctctagggtaaacatttgccctaccaaattgacagccatcccagggtcactgtgtttacgctggaggcggccaaaggccatggcctgagggctgtccagggcaggaggggaaaaggaactgtgttccacatgtacggcttgccccttcacctctgctgtcttctcggaacc

SEQ ID NO: 22233 - DNA, 201 bp, Bos taurus
taggctctcaggcagaggtaatcccactctgggggccttggagctgagacagggctttgtttcaggatagaccccaagtcactgtcctcaaggatggcaattcaccaaatgccttaggccgctgtgggaggcgggagggaggggtccctgacagtgacagaacgctgggccctccttcttaggactggccctggaagcccg

SEQ ID NO: 22234 - DNA, 201 bp, Bos taurus
ctgaattaaatataaaaattgctgaaaaatgaagcaaagactggcccggcgctctcctaacatctcatctttttccaagcctagcttgcctgccttgctagattccactttgcaggcaggccatgcgacttaggttctggccaatagaatgtaaaggcccttccaagtgtgagcctaatcctgcccatcctctaggctctc

SEQ ID NO: 22235 - DNA, 201 bp, Bos taurus
cagagaggcagaagggcagggcaagtggtacccagtgacactcaggcaagcgagtgaactaagcaagacgtggggcacggttggactgtttccttcactcgggccaaatcatttaatgatgttcacaggagccagagagggaggggttgttattccagtcttccatttcaaaaacaggggctcagagagatgaatcacttg

SEQ ID NO: 22236 - DNA, 201 bp, Bos taurus
aactttgctttcagaaccctgccaccttggagacaagcccaggatagtattaatctctggcagaagaatagaggtcacatggatgaatcaagtgccgtttgtcccagctcggggccatcatagatcacctttcatctactgaccccagacacgtgagagtccagccatgatagggacagctgccgcccccaccttgagggg

SEQ ID NO: 22237 - DNA, 201 bp, Bos taurus
ctaagaatgttgaactctttgtcttgttgttgttggatatgtttcttggttaagtgttcaattatatcttttgttggtttgaaaaaagttcaaatcaactcgatttgggaagttcttctcttagaattgcctggtgattccagaagggttcataaatgtaagtcttcctttattcatacatctggattattggctaaatct

SEQ ID NO: 22238 - DNA, 201 bp, Bos taurus
tttttttcctatgtaaactcttcatttgcaaagttaatacttgttcctaacaaattctaacaatatagatgtattttcagtgaaattgcctatcgtaactaatctcacctaggtaacccatcccatagagtctgctggctgagtcaggcacacaggagagtattttgtttttatttattgttagtgttaaaagtttttcaa

SEQ ID NO: 22239 - DNA, 201 bp, Bos taurus
atcctggtgtattcgcgtgattcaacaacaacctttcaaccacacactgctcacaacgcaccgcccccctccccccaaaaggagaaagttcaggcaaagcaaaaggcctacctcttgaccaaccatgagataaccaccatgaaattaccaccacgagtcaaagtgttagctgttctttgcaaccccatagactgtagccca

SEQ ID NO: 22240 - DNA, 201 bp, Bos taurus
gggtgttccatgaatgtgcatgaagtgaatgaatgaatgaatgagtcatcacacctgccctctacaatgggcccatagggcccctttctctatttttctttgacctgcttagttaaaaatcttctatcaggaagcttgggaaaagaaacacagatacacaattagaaaaacgtctaattaaggggtggccccagattgacc

SEQ ID NO: 22241 - DNA, 201 bp, Bos taurus
actgcaattgccatctgtctctgttttgctaactcattagttcggacaccacattgtgttaatccccacttcccctggctatgagcttgatccagatctctaggagatagtggaactgcttagcctgactctcctgtcagctggctactgccttccacagtgggcagcttgccaggcctgcacctttccagaagactcttt

SEQ ID NO: 22242 - DNA, 201 bp, Bos taurus
cacccatgaagtcatctgaaatcctgtcttgtgtttccttcttgtcctttgccctttatttcactggaggaaggctttagggaaatagtaagaatgctgcggtaacagagggaattaatttgaccctgctctgaagaaacagtgtgttgattcccactagcaatagtttctccacccttcagaacagggcaagggatgtgg

SEQ ID NO: 22243 - DNA, 201 bp, Bos taurus
aggtggctgctggtcagcttcacacctggactcaagtgttcaccctagagtctcagcgcacagagtcacagatgcagcactgagcaaagtaacaaaaatccttgccctgtgtgacagacactcggtggatgtaaaaatgagacaactgagtgagtgaaggagcaagtgaggaaccgatacaaagtgcgaggatccaggaag

SEQ ID NO: 22244 - DNA, 201 bp, Bos taurus
ctatctctaggcccttagtttcctcatctgtcagatgagacttgaactacgggatctctgaggtcgctctcagctcaaaccacctttgaccctgttgatcattcctgccagagtgaggtggccccaagccaggactcatgatctgatggtgctggcattaaaaagaataaggccagagggtgaggcatacaaaaaccagac

SEQ ID NO: 22245 - DNA, 201 bp, Bos taurus
ccttcctcagtctcccctgcactcagctgattcagggccactgtttcagctctagaccccgtggatgctgggtcaatgggaaagcagagctgagacctctagagggagcaggcctgtgtttccttggcgcccttcttcacaaaggtgtgtcacgggtgaagggtctaacctcggaggagggtaggaccatcagaagtgatg

SEQ ID NO: 22246 - DNA, 201 bp, Bos taurus
agggccccttgggccccacttacctatctgtggcctctttggactccagctaattagcagccacaggaaggcctgtggagggggtactcaggcctgccactgcagagccctgccattagagcgatcgataccatggttgaggggggaagcagctaagaggagggggcctggaaaggctcctgagctgcataaataactcat

SEQ ID NO: 22247 - DNA, 201 bp, Bos taurus
tagcaaacgtgtattttgcatattttggttaaaatatatcattaagattaatgtgactaagaaaaatctaaaatgacctctgtggccgcattgtatttctgggggacagtattgtgctcggtgtttgcttcccatccattccttcctcccctttctatttttttgcacctgcttctctttgcctgggccctcaccttcctc

SEQ ID NO: 22248 - DNA, 201 bp, Bos taurus
gttcctcgcgtatatactgtcattgaatgctaaaccacttaactattacatgtagtatttgtatagaaatatttatatatatgtatgtataattttattttttaatacaaggttttccaagaggagagccagggcctggctgctactgctgctgctaagtcgcttcagtcgtgtccgactctgtgcgaccccatagacagc

SEQ ID NO: 22249 - DNA, 201 bp, Bos taurus
gtcttgcctgttttttgatttgtgttacatgacgattagaatcaggagtgccggcggtgggggtcttcactgagcctggcccagtgctgtgtgttgtggacgctcagcagctgttagttgaaagagtgactgggatgcactgcctttgtcatcacctttctgctcttctttggtctgagtgtggaattgtacggaagaata

SEQ ID NO: 22250 - DNA, 201 bp, Bos taurus
gtaaccaggccacaggcactcctgccatctcgacgggactctgcctctgggggatggccccttttgatgaaaaattggccccatttcctccactgagaatgtgcattcagactttcaaagagatgttccaggttgctgtagggaacagagttgtgaggtcatggcagtgcgtcagggccatgccagaccatgtacaagacg

SEQ ID NO: 22251 - DNA, 201 bp, Bos taurus
tgaacacatgttcctgagccagccttgcctgcagcaagccaaagcatcagctgtgtatattcctgatggtgaagtggccagacaaggatcccctgtgtactcacccgggcaagggtgggtctgagacaacagccaagagtgatgagtccagatttctgagctgagcattaaggagtctatttggcccttgccaaatcccct

SEQ ID NO: 22252 - DNA, 201 bp, Bos taurus
tggaaaaccttagcatgaagtacaagtccttcaagatctggcccctagaacttctctaaactcatctctctgaactttaccctcagtctttagtcatttggaagagctcttgtccactttaggcctttgcatactgatcccttcagggcttccctgaccactcagcaataaagaatctgcctgcaatgcaggagactgatg

SEQ ID NO: 22253 - DNA, 201 bp, Bos taurus
agtttgagcaagctttgagagatggtgaaggacagtgaagcctggcgtgttgcagtccatggggtcacagagagttggacgtggccgagtgactgaactgatgctagaggaaatcttgccctaaaaattgaggggctctttttgcatacgtgtgtgtgtgtgctaagtcacttcagtcatgtccaactctttgcaacccta

SEQ ID NO: 22254 - DNA, 201 bp, Bos taurus
tttcatacctgtgaatatgatgctggatgataataaaagtggccagttttgagtaagaatgcaaggcaagaaaaggtcttggttcttgcttgcccattgaaaacccaaagccataattagagctgtcaagtatggcacagctgatgtctttgaccctgttggaaactggtggtagtggtagatatgatgtgaaatctatga

SEQ ID NO: 22255 - DNA, 201 bp, Bos taurus
atttcacttttatgccaaccaacctgagaaatgatgccaagctaatcaggcatcctgtggccccctccttcacactgcctttaaaatcctatttctgaatgtccttggggagctgggactcgttcaccttctcccttggcacacattatccctccaataaaaactattgcttgcctaaaaatcttttgggaacaatattca

SEQ ID NO: 22256 - DNA, 201 bp, Bos taurus
tttattgttccatcatgagcttgagttgatttaatattctattctggcttcctgcccttaacttgctgtatttatacagccctctccaaagcttggtgttcattctgaagcagatcctagctgctaaactcttctatgtccttttcattccaggcggttaccagggctacatgtgagaagaatgagggtggcactgaagct

SEQ ID NO: 22257 - DNA, 201 bp, Bos taurus
cattttctctcccagttatcacccaaccttaatgaggatgataaagaaaaggtgacaagaacaaagaaccctatgaggcaggaatgctagataagcagtccgggagaagataaaaattcccttcacataggctgcctgtaatattggaatctccttaccttcactacccagtaactatttcagtcttactcatctttcaag

SEQ ID NO: 22258 - DNA, 201 bp, Bos taurus
agatacttcagctctacacctcacacataaataaaattgttctcagtgtaaggaataaagaaagaggttgtccctcctcatatgttatgcgaggccagagctttggcctctggctgttttaatggtcttctctcacatctaaaggtctgggctccttaagtgcatgcatgtacccagttatcgatttcaaagctcactcaa

SEQ ID NO: 22259 - DNA, 201 bp, Bos taurus
cctgttttttggttggtttgttttgttgtttttttaaacgtctcagaaatgttttacttgtttcttcattgaataaacccacctcccccgccccccgccccgccatgaaatcacaaatatcctttcaactctaaatacttgttacctctcatttctgtcagaaatacctgttatctcagttacagcattcagtgcttcacc

SEQ ID NO: 22260 - DNA, 201 bp, Bos taurus
gagtaggacacaactgagcaactttgactttcactctccagagcgtagtagaaacctcttctgacacaccgcttgagcaccgcggtctggcctctgtctccgaagtcatctctaggagtcctggaaacagcatggatgctgagctgttttttcacattggagaggggggttcagtggctgaagaaatggttcacgctgcca

SEQ ID NO: 22261 - DNA, 201 bp, Bos taurus
gagtccgagctgcaccgtgcccggcgcgcgcgcgcgcgcgcacctcggagtctgaatctgcacaactctccgccaggcgcctgtgcgagaggccgggagacccgcgccccggtccgggtagctgcgcccactcagccgctctcgtttccacccggctgacccttccccttcagtcacctgggtgagcgctttgcacgctgt

SEQ ID NO: 22262 - DNA, 201 bp, Bos taurus
gaaaatcatcaggcaagctgaagaaagagactgggtatggctggctgtccgtcctgcactgtgaaacccgttctcccaggaggcccccgcttgagtcagtccagttcagtcactcagttgtgtccgactctttgcgaccccatgaactgcagcacaccaggcctccctgtctatcactaactcccggagtttactcaaaag

SEQ ID NO: 22263 - DNA, 201 bp, Bos taurus
tatggcctttttggtcctagaaatattcaaaataacctttattatcaagtagcataattattagttaaaaaagtaacattgcttttgattaaacagacttgctttggtggccatgtgattttatggatttctgatgaactttgtgtttgctggtctggttgctccttcttggtaccctcatctttgtgcatgaatttctgg

SEQ ID NO: 22264 - DNA, 201 bp, Bos taurus
gtgaccacaggcaacgtgcttaacctttttacgcctcaaaactcaaatgtacaattgaggatgtgctaaaccactgtgctttgtggtttggtgaagcaccatggtgtctgtcaagaaacttgtgctcaacgttgcaaattcacactaagcactggagccaggtcagtactcgaagttgctgggtgtccctctgggatccca

SEQ ID NO: 22265 - DNA, 201 bp, Bos taurus
agaaccccaaaccttgcaaagtagctttagggcccctgtgttgttcagagtggggttagtgaagcagggaaccttgcttgaggcctgacttgtacgtgacggaattgagatttcttttttttttttggcttgtacagactttatttcaggataagcagatggccatgactgataaaatttttaacagaaaaattctactta

SEQ ID NO: 22266 - DNA, 201 bp, Bos taurus
ctttactaaaaatatgggttgtaaactgtgagccacaatccagttagtgaatcttttatttagatgtgtttggttttggcaattgcatatttatttttaggtgtatttattaaatgctaatccaaagtgtccttctctcttttagagaaagcatgggattatggcagtcacagagtcccagtgatacaagttccattcagt

SEQ ID NO: 22267 - DNA, 201 bp, Bos taurus
aaattagaactggtgaaaattctctcttctgtaaatttatcagggtggggatattcactggaaaaggaaatcccttggccaaacccaaaggtgccaaaaacgatggagagcagtttttttaatagatctgagatctgggctggtaggcaggagctctatgtgacagttctggaaccttgggcaggtggagcgagatggcct

SEQ ID NO: 22268 - DNA, 201 bp, Bos taurus
gattcatacttttagggaaaaatagtttagataatcactactaggctgcattttaaaaaaatgtttgtgcatataccctaatgttgattatagcacttttaacaacagccgggacatggaagtaacctaaatgttcatggatggaggaatgggtaaagaagatgtggtacatttttacaatagaatatcactcagccataa

SEQ ID NO: 22269 - DNA, 201 bp, Bos taurus
atggagaacagtgtgaggagcaggaaagcagttcgggggttgcctcaccacgaggactcgtgtagtttttttcagtctggcctcacctgtggtgagcaggatggtctcctagcacctcagctgtaagtgttctgctttacagccaatagccttctgggcactcatgatttaagagtgttgctgggtatccttcggggccct

SEQ ID NO: 22270 - DNA, 201 bp, Bos taurus
tatcctgcatttattatattagagagtaggattattttctctaaagattcttaaaagccattaaaataatatcttattccaaatcaaatggagctacttattgccagaattttgtacctttttcaatgattaaagaaagcaagcaagatttatagacaatgcaattttcatgacacatcaaaaaatgtgttcttatagctg

SEQ ID NO: 22271 - DNA, 201 bp, Bos taurus
tgtctgcactcctggtccccttccccgggcttcctttcagcattcacagtgaggggttataggatatttccccaacctgcacagcgcagagcaggccaactagaggctgctggctctggcttgctttcaagaggcttcgagtggggtgtgttccccggtgagagcgccctctggcctggagctctctgtgaggctcctagc

SEQ ID NO: 22272 - DNA, 201 bp, Bos taurus
ctgctgaggccttcctgtgtggtctgcctccagtctccagccagtggccaagaccttgacacctcaaagtctcctggggctggactcttgacatccccactgtgtgtgcatctcccagaaagggccagcatcatctggaggttggggggcggcatggaggggtgggctccacctccaaggattgacaagagcagccagaga

SEQ ID NO: 22273 - DNA, 201 bp, Bos taurus
attctaccataaaaaggaaaaacatgctacaatatggttagacattgaaaacatgttaagttaaagaccccagacacaaaaggccacgtatattgtctgattccatttatatgacatattcaaaccaagggaattcatagatacagaaagcagattcatggttcccagggcctgggggagggaagaatgagaagtgactgt

SEQ ID NO: 22274 - DNA, 201 bp, Bos taurus
gatggccatgcacaagctcagagtatctgcagaggctgcttcggtcgtatagtccagggaccagtggattttgtcacacttatgctatgcatattgcactaccatgggccctattcattctgaagacttcccccacagctcagcacttaaaacgcatatttactgagcatggagagtgtaggcttcggccagaaagtgcaa

SEQ ID NO: 22275 - DNA, 201 bp, Bos taurus
attttcttccactccagtgtcctcaaaagagttccattacttgagaggtcaggaattctcctcccatgtcttctaactaccagtggtgcctttgacatataacctcacagtgctgcctgcagctcctctagcaggaaagagaaatgtttctatgtagggatgatccacaaagcaaattcttttagacgggtcatttttagc

SEQ ID NO: 22276 - DNA, 201 bp, Bos taurus
atttcaatgtattcagtattggcttggcctccattccattttgatatagactggcaccacagctgaatatattgatttctcatgcattagcttttctttcctaatcctctgtcagttctctgatccatgagcgagagaaaaagagtataacaggtaagattgcttttttaaagttgttttaaatgctttacatgactgaga

SEQ ID NO: 22277 - DNA, 201 bp, Bos taurus
tcatctttcactgcttattactgatttttgccacctttttttttttggtcatctgttcagacgtttcattctcccaagttcagacgtttctggggaaaatacaaaagcacaactgcaggtagtctggaccttctattatttttctcattcttttactgaacttcactgcttaaccacaaacactgcacttttcattgttct

SEQ ID NO: 22278 - DNA, 201 bp, Bos taurus
tctaacccctcctaaggtcaagcagataccatgtggctcaagactcccaccgtggatcagattgttaatgtgacccaaggcctcctgtaaacagaaacagtcttaataggcaggctgttccagggacttaaaggttatctcctaggagccaggccaaatctttctatggtgtatgcaggttttggacacccctgacctgct

SEQ ID NO: 22279 - DNA, 201 bp, Bos taurus
aagaggtgtatttggccctgacgtgccaatgacggggaaatggtaggatgcccgtggaggcacgtggcaaggtggccaagaaccggtggcccagagtcaatggctaactaatggaggggttcaaatctcccctctattgctgaccaggcgtgtgaccctaggcaagggtctctcctttctgatcctcccctggcccagctg

SEQ ID NO: 22280 - DNA, 201 bp, Bos taurus
ccagataccaaataactacagctttgcaggccatatagtctgtgtcatctactcaagtctgccttgctgtacaaaagcagccagacaatatgtaaacaaacggacatggatttgtaacaatacaactttataaaagggttttggaaggacaattcattatattgaaatattagatctgtttggaattgctcctgaattctt

SEQ ID NO: 22281 - DNA, 201 bp, Bos taurus
actttctcccacccactgtagatattcctcaaataattctccattggtgttctctttgcattatcactcttggagaaataatcaacacaaactattaccctgattaggagcattttctaattgtactcttaactcttcctctcttacttaaatttctatatttgggtgcactgatactgcctcaattgcattaatttaaag

SEQ ID NO: 22282 - DNA, 201 bp, Bos taurus
ttagagaactgaaacagtttaatcatccgttatagagttccaggaaacagcctcctgtgcagccactgcacaacttatcatatctggccaagaacagtcgcggtgttaggcatcagcaggtgaagaagaatgaaagggttaaatccaaacatctgagacggtgtcctgaactggcctcccaaagatggttctcagaggaca

SEQ ID NO: 22283 - DNA, 201 bp, Bos taurus
agtcacgaaacttatcttggctccagaccacgcctgatctcgtcgtgtctccgggcgcgccccagtcgccctgagacaaaactccagcagccgtccgcgcctcctcatttagagtacggacggaggctgtgcgtctggaatgacagtgaccgtgatgctggagccggccggccgctgccgctgggacgagcgcgtgcatat

SEQ ID NO: 22284 - DNA, 201 bp, Bos taurus
ttagactaaatatagtcatcaagtcacaagggaagaaagaaacaaagaagaaacagaaaagaactacaaagacaaccagaatatggccaaaaaaatggcaataagtacacacctatcattacttcatttttgttttcctggcagcactatgagatttgcaggaccttactttccttatcacggatcaaacccggggccaca

SEQ ID NO: 22285 - DNA, 201 bp, Bos taurus
ccaaacataaacgattattggtttatagggtcgttaatcgagtaatcctaactatcctgtatcacattttttacagtgtgattttttgttttgattgtgccgggcctttgttgccgtgcacgggcccttggttgcagcagaggcttctctagttttggtgcccgggcttagttgccccgtggttcttagttccccgaccag

SEQ ID NO: 22286 - DNA, 201 bp, Bos taurus
aaaataaggtttctatttcaccatcatcactacctctgacatttctagagggcactactgtgtgacaaggatggtgctgagcaccctacaccaggatcccgttaaatcctcaaaataaggtgggtatgacgacactctcccttctcagagaggcactcgaagagttgaggtcatggcagtacagaggccacgccaggactg

SEQ ID NO: 22287 - DNA, 201 bp, Bos taurus
agaaaaatgtcagacttgccaagatgtggggaaagagggtttggggttcaaaaaaaaaaaaagaacaagtgcaaaggccttgaggcagggacctgaggccggaacaaatgattcttggagaggtagaaagagggtcaatgtggttagaggacagtagcagagaaatccttagagaggcaggctggggccatgatgagagca

SEQ ID NO: 22288 - DNA, 201 bp, Bos taurus
atgatattaatacttcatttcccatccttaccacagtcttccagaagtagaagttgggtaacaaaaggagtgggaagctcttgagtcagtggcaagaaatgattcagtttgtgaaagaggcatattttcataagcaaacattggccaagattttgttcagctttgttttcagcctttctttgtagctgaagaactgaactc

SEQ ID NO: 22289 - DNA, 201 bp, Bos taurus
tcttctataaatctagttaaatagataaccatttaacacatggatttaaaccaaactaactagggttttatgtgctcctttttgctagaaggagctgctcatacagttaaggaaggttgctgccccaactagtacccaggtttgagcctccagaataaacctgttacacaaatgcaagacagtcgtgtttcccttcatgtt

SEQ ID NO: 22290 - DNA, 201 bp, Bos taurus
ctgtgctttcaaccactgtgttaggctgcgactcccagctggctctgagcagaaatgttaggacagggctggagaggatgaaagagggaaaatggccaggcgctggtctcagatgtgatgtgggtgggggacaagggtggaaccatggtagctgctcagatgtcatgatggtaccattcattgagctgtggaaccggggtt

SEQ ID NO: 22291 - DNA, 201 bp, Bos taurus
ggcagttgcctcatctccctgggcctttacttctttaggattgcaagcctcttcagcagctttgaggaaaccataaaggcattcagcaccatgtgagtctcgtgatagagaatggtgggccagtgcaacagtacatgtttattttaaggaaattacctttatccttctcaagacatgggaggcagctcaggaactgaaaaa

SEQ ID NO: 22292 - DNA, 201 bp, Bos taurus
ccaaaataaaaataaaatgatgttgcttggctgctggtcagcaatttaatgtgaaagcaaaacaccctcccctttcatggacactgtattatatatgcaggcgtgaggtttacacaagtgatttcattaccttttacagcttttctgccttgttcatttctttattttcacaccttttagtgcttcctgcttcctttatcc

SEQ ID NO: 22293 - DNA, 201 bp, Bos taurus
tggtcaccactttctcaggaacctactagctatgagccacaggggaaggaagccccagaatgaacattaagaagacccgctctcctctggaagggcagagtggttccctgtgccaagcagttatttgtcccctaacctcccctcagcgtccagagtttctgtctctctgggctggaacaaacgagaaccccgattgcccaa

SEQ ID NO: 22294 - DNA, 201 bp, Bos taurus
atcttcacagtagcattgattactcttactctgaaagtgtggccttgatgtttatgcagggtcttgtatatctgtgttgcaactcttgtgactcatttgcaattctgtacaattaattttctaatgctgagtaaacatttggactctttctccatctgtcttccttgtgaagacctctgtgcaggttccgtcaccagcaaa

SEQ ID NO: 22295 - DNA, 201 bp, Bos taurus
ggggaggaggacgaaggatggtggcaggagagcctgggagccggggaggctcctcggactacagcaccttacagttggcgcccaccacctcctggccaccatcacagcctgggaagggatggaatggagatttcctgtctgttttttcaggaagaaagagaagtcccccagagagcacactttctgctatctttgatgccc

SEQ ID NO: 22296 - DNA, 201 bp, Bos taurus
gacgtcccatgtcccgtgacgacgcccccttttcctcccagcccctcctctccttccctttgtgtgtcccagctgccctggtgagaggggccaaggagactgtcctccttaggaacaatctcccctttctctctggggtgtaagtgatacaggagaagaggaagcaatttgtaactaatcggctgtgatgtggaacagagc

SEQ ID NO: 22297 - DNA, 201 bp, Bos taurus
ccaactcctttgggtcttgttgccttcgtagactccatggacgcagcgacgagagcgatcagcaggagtctctgcacaaactcttgacatccgggggcctaagcgaggatttccgttcccattatgctcaactccagtccaacatcattgaggcaattaacgagctgctggtggaactgggtgagtcctgatccttaggtg

SEQ ID NO: 22298 - DNA, 201 bp, Bos taurus
tggatctgcctctaatataaattatgccccagagaaaaagctttattggcagtctcatattccccatattaaataaatttagagacaattctctctttttcatttccaataatctatgccgccccaaagtaggaaaatgccctaccttatgactcattatatgatttgccccttccttggggcctggggttttactttctt

SEQ ID NO: 22299 - DNA, 201 bp, Bos taurus
gaaaacagccacataacattgtgattaagttcatatttttaaagagattcatcctgaagtatgaaagactgaaacaccatgatactcagactttagtttaaaacgactcagcataaaatgagaagggagaagcagttaagatgaaataagtgtgacacgattccgataatctgggtaatgtgtacacatggtggacagact

SEQ ID NO: 22300 - DNA, 201 bp, Bos taurus
gcacatacaagtcagatgtttcataaaaggtttagatgacctgataatatgttttcaaaacccagagagtgagtgagagaaagagagagagagaccctgatgcaacctcaagttaaaaacaaggaaagaaaagtacttttgtagattggaatcgataaggagtaaggaggatacctattcgctctgttctaattttaacct

SEQ ID NO: 22301 - DNA, 201 bp, Bos taurus
actgtatggttcatggggttgcaaagacaggactgagtgactttcacttttctattcccatgcctaagattgagtcgctgctccctctgctggccacgcaagggcatgacagtcattgactaagtagataaacagcatgtcagtatggtgattcagtggctaagactgtgctctcaatgcagggggcccaggtttgatacc

SEQ ID NO: 22302 - DNA, 201 bp, Bos taurus
gccagccacagaagaaccttcacagtcctcaggtactattcctgttgttcagtgtactttaaaaaaatagactaatttattttccgctgccctgagtcttcgttgctgaacaaaggccactttctagttgtggtgtgtgggcttctcactgtggtggcttctcttattgcggagcacaggctctagagggtgggctcagta

SEQ ID NO: 22303 - DNA, 201 bp, Bos taurus
gaggcctggcgtgctgcgattcatggggttgcaaagagttggacacgactgagggactgaactgaactgaactccttttagagactagagcagagggcagaggggcctgccctttggaaagggcgcagtgatgccagaagaaagtaatttctttctctctcctacagatagtcactgactgtgtatcaggtgaggtatgag

SEQ ID NO: 22304 - DNA, 201 bp, Bos taurus
agggaaaaaggaaggagggaggggaggaaggagttctgatagtcttaaagtttgtctacttcaggtaaaaattccttatggccccctcagatgttggcctattgtttatccccagggaggtaggaagaacaaggctgtaggaacccaggctgactggcttgatctggtggcctctagaagtttaaagtaccattagtatgg

SEQ ID NO: 22305 - DNA, 201 bp, Bos taurus
agtggcagcagcaggcagtcggcatcacagggcagacaggtgttgggctctgctggtaactgggcagctcccgacctctccagcagcagttgtcgcggctgcagcatgaaggcagtcagtctctgcctcctggcatgtgaaaggtttcagtgaggtgtaaggcacagagaacatttagcaccctgcctggcacctactatt

SEQ ID NO: 22306 - DNA, 201 bp, Bos taurus
ttgactgtgagacaccgaggtctgagtagcacccactggaattcaaagcaagcaggttcctcatggcccttaccacatggccttacaccgctgagcactcgtgcacgtacctactgttgcactgcaaaaattccttcctctttgctaaaaacctctacttactaaagaaacttctttttgtgagttggagactgcttttgt

SEQ ID NO: 22307 - DNA, 201 bp, Bos taurus
ggaggcctcagctggcccccgaggatgctatagaactgaaatgacctttcagatttgtgagtcatggtgggggggctagggcacagtttacatacttcctttctgccaacctgtccttggatatgggctgcctgggacaagaatgtaaccttgagtaatggggccgtcgctagaaagggctgagggtagcagtggaggtag

SEQ ID NO: 22308 - DNA, 201 bp, Bos taurus
cctgaagcctgttcctctcctctgatcccggtttccatacaagccttcctgctgctggtgacaggaccggctccttcggacagcaggtttatagcgttcatcttcaccacgacagtcagaggcagtggtcccagggtttactttacctttcccctctcggggagaattatttgcatttttgcagaaggtgccggttggtcc

SEQ ID NO: 22309 - DNA, 201 bp, Bos taurus
ggttggtgtgcttagaggggtcagcgtactgcagcctgtggcccaaatccagcccgccacctgcctgtgtaaagtttactggaacatggccacgtacctttatttacatactgcctatggctaccttggggctacaggagcagaactcagttgtgacagagaccacgtggcctgcaaagcctgaattatttactctctagc

SEQ ID NO: 22310 - DNA, 201 bp, Bos taurus
caccgggctcacaaccacctataccctggaaagaaggaccctgctccattgttgtctgtgcctgatgctttcctggggctccttaggcaccaagttagctgtgtccccaggctcgggaccttagcctctgggcaccaacttctggggtccagatgtgaccatcacctggctgatgaggaggggcacatggtgaaacttggg

SEQ ID NO: 22311 - DNA, 201 bp, Bos taurus
gtggtcagctgccacagggccctgcatgctggtggacggccacctcgggattacccctgcaattttccattcccttccatatttcttgacatctcagtgcgcatgggagttaccttggcctcctgactggctcttcagtggttgggccgcaccctacaggccaacaaaccttgtagttgcccagcctggggactgaagaca

SEQ ID NO: 22312 - DNA, 201 bp, Bos taurus
cagggaccaagaccagggtagaggccaacagatagagaccgtgtaaaacaagaggtgctgacgaatggtcaggctccttgtttgtacaggacagacatgtaggggcaaggggttaggaggaggccacatattatctgagtccgtttatatataggaaatgtccacaatagggaatccattcagacagaaaacagatttgag

SEQ ID NO: 22313 - DNA, 201 bp, Bos taurus
ctggtcaagggcagttcccaggagaaggctgtagtccttagaagctagagatggccaggcacaccaggggtgtgggggccaatggatctgagcaggacacgagcaccatctactacagagaggggctatgaggcagggtccggtgggggcctcagtctctgcgcctccttgtgggtctctctggaatttgatggtggattt

SEQ ID NO: 22314 - DNA, 201 bp, Bos taurus
ttcctcgtctgtaaaatgggattcgtgttggtaattgtgaggatgaagtcaacgtaactcttgcctgtaaaggatgggaacagggcctggcacatagcatgcgtgcaaagcctgccctgttaactatcagatctttgctattgaacccttgctctggctgccgtgtgggggccttgcaggatgacttgagaaggatcagag

SEQ ID NO: 22315 - DNA, 201 bp, Bos taurus
agtggtaacatcttacataactgtatgtaccgtacgtaactgtttgtagctgtatgacataacatatatgggttatataacataactatatatatttaccagcaagatatcacaaccaggaaactggcattgacaaacttcaaccatatgcaggttttacaagttgtacttcctagtgtgtgtatgttcatgtgggttcta

SEQ ID NO: 22316 - DNA, 201 bp, Bos taurus
attagaatgtagacacctttgagggccactattctgcttaccataggacctccatgtcccatcccagcagagattcagtggtcccataactggttggatcattgggtcttttcaagtaggacaaagattcaggcaccattgggcacaacagtaacattcttcaaaccccctaagagcacaccacatgttaattgtttgctt

SEQ ID NO: 22317 - DNA, 201 bp, Bos taurus
tcctttcaaacaatgtaacttcagatctgaaaattcctgacgagtggaaaacaatactactttaatttccatttcaccaagatatctgaaacacagggagaggttaacttacccacaaccactgagcaaccaggccaagatgacaggcggtgatcctaatccctggctaaattctctttctgctgaatcgtaacccaggtg

SEQ ID NO: 22318 - DNA, 201 bp, Bos taurus
tggaggcctgcaaactggtgggcgtagtgcccgtctcctacttcatccggaacatggaggagtcctacataaacctcaaccaccatgggctgggccccaacggaaccaaggctattgctatagccctggtggtgagcatgccagtgcgggcacatgaagcctggcagagttggggcctgacagggtggtgggcccaagagt

SEQ ID NO: 22319 - DNA, 201 bp, Bos taurus
ctgggtccaatgaccggtctgggtggctgtgctttccggcacttcccaggaagaggacccattttgccaagctgttttaggggctggagagagaggccttcaccaacgaataagctcagtacaagagctgtttactgaagcaccttccaaagaggacgggctggtcctgcaggtgttcattgttagagaggggtcagcagc

SEQ ID NO: 22320 - DNA, 201 bp, Bos taurus
ccccaccttggagcagaaaggggaggtcttaagggtacccacttaacagccccaaacctcaatactcttgtttttaaagtgaggtgaaaatacaagcttatcattcttttttgtaaagttggtgaagcttgtcaagtgcctagccaggtgcctgggttagaaaccactcagtaaatattagatactatgcattgctggggg

SEQ ID NO: 22321 - DNA, 201 bp, Bos taurus
cccagttgagctctccagcggcttcaggctgaaactctcagcgatgaccatgaccccctgccttagactccaacctggaggaccctgctgatctagacatcagtttgtgcctgatgcacacaagtgggacagcctggacctaggaggagccaaggtttaggctgagtcaaggttttataagaagtgatcagagggaggaga

SEQ ID NO: 22322 - DNA, 201 bp, Bos taurus
gtagcggccccgcagggagctcctggagcctcgctccacgtctccagctgggacggggtctgcgtgagcaaagggcagagtgtttggctatgaattcagagaacaaaaaggcctacctgaaggcaagaagatgaaccaggtaacaagctggtggctttccccccacggggcatttggaaatgtctagtggcctccaactag

SEQ ID NO: 22323 - DNA, 201 bp, Bos taurus
ttccatttggtcagacgggggcgccatgttaaagtattcagtactgaccccagcaccatcatgctgagaaaggaaagcagaattttccattaagtttgaacccatgctatacagcagtagtccttattgacagtaattgactgtcatgctatacagcagacagtccttattgactcctggtcttcctaaaagagtaacaca

SEQ ID NO: 22324 - DNA, 201 bp, Bos taurus
gtgccagtccccctttggtcacttactcacccattaggctagaaaaatacctgcttctaggtgccacccacctggcaggtgagacctttcaatccccaagactcctcctgcagtccaggccctgctgctgggtaactggctggacgatggacaagtacccacccccccaaatacacacccacacacatatgcatgacgctg

SEQ ID NO: 22325 - DNA, 201 bp, Bos taurus
caatgtacaaagtaaggaatacaaaagggagcagacattttgtcttcaatggccattagtgctaactactcagaacttaggcttcaaaaaatatagcaagtatctaaaacctgcttacaaggcctcctggtggctcagatggcaaagaacctgcctacaatgtgcgagacccaggttcaatctctggaagatcctctagaa

SEQ ID NO: 22326 - DNA, 201 bp, Bos taurus
acttgcgggtgtactgccattaaggagaataactttcctgttaaagataaacacttggaagaccactgttactaccactacagacttcacacttaaaatatatgtcctgaaacaaggcccttgagagttctccgcccaaaaatgtatgcaacatgaagtttagggtatatttatcaggggtgggagacacccttgtcataa

SEQ ID NO: 22327 - DNA, 201 bp, Bos taurus
cctcaaaaacattaaacataccatatgatccaacagtttcacatctacgtacatacctgaaagaactgaaagcatagtttaagagttattggctgacagcagcattattcacaacaactgcaacatggaagcaactggagtgtacactgacaggtgtatggctatgcaaaatgtggtatatatacatacaacggaatatta

SEQ ID NO: 22328 - DNA, 201 bp, Bos taurus
agggataggagtatctgttattcactatggaccctaagaccacgcctgaatttatactaaggcgatgactcgggatgtgggcctgtcaagctagaaagtgttatcaggcagggagaccgagttcaatcatgaccaaatcaatcacgctcaaggggcgaaactccaattacaaccgcgaacactaggcctcgggggagcttc

SEQ ID NO: 22329 - DNA, 201 bp, Bos taurus
ctgtgcccctgttcacacaacctctgccatcctgaagttaaacatacagtgggattgcctggggtctctgttctggaaacgttacctttgcagaaccttccgtatcttattttagggaccgactcatcaggcggtctccttagcaaacacacagggaaagaggcgtttgcagctttgattaaatcctagccgaaaacttgg

SEQ ID NO: 22330 - DNA, 201 bp, Bos taurus
cgtactctcggtctctgcggttttcctttgactgttgaatcatagttagttgcatcacttcactggtctccccagtcctaactctgtctctctctgtaacggaaggccttgcgactcaaagttgaatctgtattcttgtgaaatgcagactctgattcagcaggtctggtggggcctgagaccctgcaggtgcaacaagcc

SEQ ID NO: 22331 - DNA, 201 bp, Bos taurus
ccccgtcagagctggtgtcggccagtgccacagcagagcccccctaactgcatcaaactgcgagtcactaaccgctttgggcctcggtccccttttgttgctgtttagtggctcagtcgtgcccgactctttgcgaccccacggactgcagcacaccaggcctccctgtccttctctgcctcccagagcctgctcaaactc

SEQ ID NO: 22332 - DNA, 201 bp, Bos taurus
tgcaaatacttgatgtgaaaaatgagcaacagcacccccttccctccattcaataaaagtaaagcctcttttacagagtgcacgaacagtatttgcactttgctcatgcggtctccgtggggtcgtgtgtgtcatttggcttcatgacagaggctcataaagtgtcagtgctactcattcgtcaccagatattactgacca

SEQ ID NO: 22333 - DNA, 201 bp, Bos taurus
taatctctcctttttcttctggcactttccatccttctaaaaataattttcttcagagtactattcttcaccaagaagcttcttggaagacgagtcacccctcaccagctccacatcctcagaactattttttaactcttttagcttagcttctgccactccagctgccccaaaggactgtgtgcaaggctcccagttccc

SEQ ID NO: 22334 - DNA, 201 bp, Bos taurus
gacataatccccattttacgggtaagggtggagtcagtatgtgagagaatcaggcatgtttgaccttcaagtagagttcctagtgtaataagtggtggacttagctctttcattaaacttttgatagatttaggataaaggtagtcaagaaaattgctcatggaattagtgtgaattgaattcatgagaatcacagaatcc

SEQ ID NO: 22335 - DNA, 201 bp, Bos taurus
ctgtgcactttgcagggagtctagcttgttttgaaattagcctagcttgcctgcatctgggaaggactctggcagagaaggccctgcatgcaggagctgagagggagcatttcttacctccagacccacaggacacaggttatccctgccccccaccgggaagtgaggcagaaatgactcttggccatcagccacagtttt

SEQ ID NO: 22336 - DNA, 201 bp, Bos taurus
agagtccaattactttaataaaaagagcatctgaattagaacctggccaccaggtccatttctggtactgattagaaagccgtaactcctctgtggacactcatgtcttgatctgtcaaatgaggattgttatcactgtcacaccaaacataccctaccaaggagcccttctaacgtagaaagacaaattggatagcaaca

SEQ ID NO: 22337 - DNA, 201 bp, Bos taurus
ccagtgcgtttctcaagggcactgtaggacattgttgatggcgctagtctgtacctttgcctacacccctgggatgatcccgaaaaaatctgcctggcccgttgtgggcctcctgtcgagctgacccagcctgtgttctttgcagatggtgagtgccctcattcagactgtaggtagtcttgaggcttggagctgtagccg

SEQ ID NO: 22338 - DNA, 201 bp, Bos taurus
taagggatcagatttaggtcactgctccttagacttgactctgcacaccaggcatgtgggcatcttgtggaaatgcagatactgattcaggaggtctggcatgaggcctgaggttctatattcctaacgggctccccagggatgctgatgttgctggtgggtggatatatgttgagctgtgaagttttagtgatattagag

SEQ ID NO: 22339 - DNA, 201 bp, Bos taurus
gagctgagaagtgaaaccctccccatggccaagggctgtggacctccctttgcccctgagaatccctttctccattgctgccatcctaccagcgacaacctgggtgtgggcaatgaatggcccctttcctcgattctgtatccacagctgagacggctgcagaagttacgatgctcccggtggatttggaatcatgggtgg

SEQ ID NO: 22340 - DNA, 201 bp, Bos taurus
gccttaaaagctgtttactttgcagttccatcctgcttgtagcctcattgcattttcttctctaattagtagatatatgcatcatctcttggccatagggcgagtcctcgttgggtagtttcctagggaagaagctcatggcatcgctctgattctgggtgtgcggcctgtcttctcacacattctcaccccaccacactt

SEQ ID NO: 22341 - DNA, 201 bp, Bos taurus
ggaacagaggaaaattggatttccaagtaaagtcacaaggagttatgatagtagtacttatagaaagtagttgaatgagtgcccagcaatgactaggcttctcccttacctgtcactggagtttagctatgaaaccgttaggtatcatttcagggggctccaaagaggtccagtcctttatgtctcaaggctgaaagaatt

SEQ ID NO: 22342 - DNA, 201 bp, Bos taurus
tgtgtccactggagtagcactgttaatttccttcaagaagttttcctttgccctcaccatttgcataactatttggtgcaagaggcctagctttcatcctattttggcttttgccatgccttccttgttcaactgaatcatttctaacctttgattttaagtgagagacatgtgacttttcctttcacttgaacacttaga

SEQ ID NO: 22343 - DNA, 201 bp, Bos taurus
ccatgacagtgtctaaacctgttgctgtttggcttaatgaaaggccagacatgaaggaagggtcaacataattttgagaaaggatttgtggaatatttcaacatgtattgtgagcaatgttgttttggttacaaagaggatagcactttcacctctggaagtgaacaggaactttttcaatttgctccctaatggatatat

SEQ ID NO: 22344 - DNA, 201 bp, Bos taurus
acattttctgcaacaaaacaagtggcatatgatactgtgaaattcctggcactggccatccaggctctccatgtgtcccacttggttctagataagaaaataaaggatgggattctgcccagtggtggccatgagcacaggtgcacaatttggaaaaatgagaccaagtctattaaaaaaaaaatcaaacttaagtcaaac

SEQ ID NO: 22345 - DNA, 201 bp, Bos taurus
caatatataataaaccatctatgaaataaatacattgcagggctatttctaaaatctatatcccttactttgtattcccttgtggccccttctgtaatgctgagattttgtttttcatacttttttcatctgttatttaccctccccttctcctcctggagctcttggcctccaggaatttcttacagacgttacgtcccc

SEQ ID NO: 22346 - DNA, 201 bp, Bos taurus
tcagggagtgttattaaatgataagggggcttgctttctggttgtatattgtgggaggctgagaaacaatgagcgttgtgacactttagaggccgtgtgcgtgctgattaggggaaccccgtatgggagagcaggtcacgtggcagggctgcctctgagatgccgccgcccttccctggagggttattaatgggccttcac

SEQ ID NO: 22347 - DNA, 201 bp, Bos taurus
tttgtgtttctactgtttctaatacctttggcaaatagcccagtacaacaacaccataatgatagtgagggtgccttagctttgttcctgaccttagtaggagtgattctggtgtttccttaataaccatgaggctgacttttggaaatatacccatccttatagttatctaacattgaaccatccagtttttggtttctc

SEQ ID NO: 22348 - DNA, 201 bp, Bos taurus
tcattagactgtggaagtttgagcaacagtggaatggatttcatttaaatcttaaagcttaaaatttctgtggaaagtcatctcaactagaactcttcccgattgagccataatatccagtttctatcacttaacttacttttgattacatgtattatttaagtgactgaatcagctcatatgcacaaagaaaatctttta

SEQ ID NO: 22349 - DNA, 201 bp, Bos taurus
aaggtcaaagaccttagttgccatggcccaagagcagtgttggctggccaagaatattaggaatcacctaggcacactttgacctcggtggagtctttgacgttgagttacgattatgccactaaactcaaggcagggaaggcagaaggcacttgtatgggtcattagccatagagggcagggagtgtctggatttctgct

SEQ ID NO: 22350 - DNA, 201 bp, Bos taurus
gatcaaaccctggtctcctgcatcgcagccagattcttgaccatttgagctacagggaaatccttatttttatcaattcttaatttattatgcattcttcgtattcattcactctttaggaatttatcaaagtcctagatgacctctgaagtactttagttacccattctctagtatgtatttagaatatttaagactaaa

SEQ ID NO: 22351 - DNA, 201 bp, Bos taurus
tgcagagcctgcatcggacttaattttgttctctgcaaggttcctgttcctgtgatggcgtatgggtccacaatctctaggaaccattcctcggtaagagtcaagatcaaccttggccaagccctcgccctgcagtgtccccacctcacacagtgcagctgccctgcagggtccttgctgtaaacgcaaaagacttgaatg

SEQ ID NO: 22352 - DNA, 201 bp, Bos taurus
tttgtttttgaggaaccctgagtgataaagatattggcacgaggcatagtcccaatcaaacatagtccattagagttaatttggtcattttgtaggctgcagtgagtgttgaactgtttgttaatgtgaaatggatagttagtgatccatgataagaactggcatatgactaatcaaggcattgctggtgactgatggtga

SEQ ID NO: 22353 - DNA, 201 bp, Bos taurus
atctaatcagtaggtttacgcacagttaaaatttaaaaaatgagcaatgacccaccactgttaatttggaacagtcaaactaacctcaccaaaggctgcttcaatggaaaaagtgggaaactctttccacggtacacactggctttactggctgtggtcttaagtcaaagcacagaatgaaccttggccagtagcgtgagg

SEQ ID NO: 22354 - DNA, 201 bp, Bos taurus
cttcccaagccaccggactctatccagcaccatgaggggctacgggcatacgaatgtgggaactgcagcacacatctgagtcttgctgccccacagacagcgactcttcagccacctcttgaacctagagggattcacactgtctttgagaagacaagaccgaaggagagggcctgaactttttctctgagtgggctcttc

SEQ ID NO: 22355 - DNA, 201 bp, Bos taurus
cacttactagactcagaaaaagtgatgaattaaggtgaagccaaaagagaaatacaacatttacagagctatttatctatagccctcttgtacataactcaacatattaaatttttgatgatgaccactgctatcaactatttttaataatataaatgagtcaaaagtacaggattatattaataaaacagcatgaggtgg

SEQ ID NO: 22356 - DNA, 201 bp, Bos taurus
tttggtggaatttgaaaggtaaattatgcaaactcaaatgtagctttcatttgggtttttcataagctattctcaattgttttaccccagtgttgaactatttaaaatatatattctggaccaacaaaaactaatacaattagtgagaaagagcaaaggtccccttgaatactgacaactttttcgaaatgaatgtgcttt

SEQ ID NO: 22357 - DNA, 201 bp, Bos taurus
gtcatctttgtttgcacaatattactatgcactcagtagctgcccaataaatattaattgataacgatggaaaagggctttataaacagatggtctagtataaatttgctgaaaatgtgaataaaaacattccactcttcaagaaaagcataaagtagaaattaaacaagtcctgcactcagaaaacctcagtctattatc

SEQ ID NO: 22358 - DNA, 201 bp, Bos taurus
tagggaattctctggtggcccaatgtttaagacttcacactctcactgcctagggaccaagttcaatttctcctccgggaattaaacccccctcccccccaccagccatatggcatggccaaaatcgaacaaacaaataagaatattcattttatcccagaattctggggtatctttccggcttccatccccatgtgaatt

SEQ ID NO: 22359 - DNA, 201 bp, Bos taurus
cttatagtccactctactgttatgagtcaagggctttgttcatcagttctcgttgacactgcacactgccttcctgggagagtggctggcctggatttcatagcaagtgagcttgtattccatcctgcaaagttctcttcataccagaccacacatatggctcaaggagagctatttactctctttttagagtccgagaaa

SEQ ID NO: 22360 - DNA, 201 bp, Bos taurus
caaagaattcagtagtcctaataaacttatgaatatattacgttgcccttctgttaacagattatgatgttatacaaggcacaccagtttactgcaaattcgaaggcaatgtctgaagtttattttctgcctttgaatctcttaattcttgtttttttggggagaaaattatttgcttttcatcgagtattatttttgttg

SEQ ID NO: 22361 - DNA, 201 bp, Bos taurus
ggcaggactccagactaggtccatgaagtaaacgagggtcttaattaaatccaaagctattcacaccatgagggttttcacttagtttttttctgacatggtttcaggaaaggtgtcagtttatatttgattgattcagaaagagctgaaaagccatatcccgattttgccttcactgcaaatgaatgatgcctagaatag

SEQ ID NO: 22362 - DNA, 201 bp, Bos taurus
tagtaaaagcgagggcaagaagataaaactgaatcattagaattaaaaacaataactgtgggaaaaaataatcctgtttgaagtctttgaagaaaaaattgtaacacagtggactgattctcattcattctaaatacctaaatagacaggaaaaacttggtagcaatgcattgtttcaaaagatataaagttccaactcaa

SEQ ID NO: 22363 - DNA, 201 bp, Bos taurus
actctcaaaatgggtcatttaatttccatttaagaactgtcaagactaaccagagctgcagacagtgcacctccatggccaacaggtgggtaatggcagcctcaggggcaggtggtgacgtctaagttatacagactgagaaatccagttagtgttattcactcagttctgtccgactctttgtgaccccatggactgtgg

SEQ ID NO: 22364 - DNA, 201 bp, Bos taurus
cgagctccccaagggcaggaatcccctcctttcagcccatctgttaggacctgctcaaaagcccaccaggccccaggattagcaggccttacagactggatgatgcaatagacgtctctggacattcctggaaaacaaggacgagctgcctggggattatatttgggcaaggaaggaagcagaaaacagcgggcctgagag

SEQ ID NO: 22365 - DNA, 201 bp, Bos taurus
cacttgctgaagctttcagtcttgaagggacataaggtcccgcagagaaaaactgcagtttgctcaaacccaggtttgatatttagggcatccgatattaaaacaaaatgcacacctacatctagatggacttcatggtgacctgttctccagaaccccaaactgaatgccaactgtgaggcattttctcaggctggttgg

SEQ ID NO: 22366 - DNA, 201 bp, Bos taurus
tactttggccacctggtgtgaagagcggagaattggaaaagaccctgatgtatatgggcattaaggaaggttcaggaaagtggtaggggctatttgcctccgctggatggaaaaatattagttcagatataaaggactcagaccgagagtcacctcaggacacattctgaagcagtctgttgcagcacacttccagacagc

SEQ ID NO: 22367 - DNA, 201 bp, Bos taurus
ccttgacagtgaacaaaaaactgcccaaggttcagatttacaaacacgagttttgccagggctgttgtgatgaatgcaattaacaaacaccacacaaggctcgccttccccttttaaagtactattgcatgctaccgcctgttaagtaatttagatgatctaggatgttaataacgaaggtctgtgctctgaaacaagacg

SEQ ID NO: 22368 - DNA, 201 bp, Bos taurus
gagcctgacaagcctggcactcacaggcctgcaatcaaagaaagggatgaatacaaatggcccgaagtcaagtcacaaaacgatgcctcaggcctttgccaaatggaaagagatttctcaccactcgaggagaggagtgaagtcctctgcagagaagctagagacaggccccaacccaagcacactgcagcctcatttcat

SEQ ID NO: 22369 - DNA, 201 bp, Bos taurus
tgggccactagcagcccctgggccacatgccccaagtcccaggcatatgcacagacaggcacagcagcacagcgcatattgggcgtaataaacccacccccactcccggcctcttccccccaacccagtctccccactccagagaaagtaacagaaggagactctctggagtaaattgtcacagtcaagatgcacaaaact

SEQ ID NO: 22370 - DNA, 201 bp, Bos taurus
aaattttgccttgctgtctacaacaacacactgccttactacaaatggtctcccaaagacaatttgtaggtcatagctgtgagatttctctttttcgtgtgctagtaacaatttcaattgcttccagctcaacatctggaagcacatttggcttcatagttggaaaataaattagcatcccagatcatgagtgagggactg

SEQ ID NO: 22371 - DNA, 201 bp, Bos taurus
ttacctccaatcttaaaggacaaggaaagtcagcaagctgagagatttgggagagtctaaggctgacagctgggttatgtatgacactaatgtgcagtgcatagtcttgactctttgctcaagcatacctagaagagaagagcgatgctagcaaataagactctgaaaatagcctccgagagctttattaattacctctct

SEQ ID NO: 22372 - DNA, 201 bp, Bos taurus
attagccagagaaaacagggaagatatttgaggcagaaggaataatatatacagttgtataaaacagtaaaaccacctaggacatttaaatattctgttacgttggaagtaaaggttgcatccattaattttaaaaggcatattgtgtgcttccacacactgggagacaagctaaacaaaatagatatggctgctccacac

SEQ ID NO: 22373 - DNA, 201 bp, Bos taurus
gaaatggagaacagaatgggttcagagttcctggaaatgaactactgcttatagccatatccagactggagcccatgttcttgtgtctcccaggcccttggtctttcttatgtatcatgttgactttcatttttgaccgaagaattttagtagcaaccatggattttattatcgcggctacatagctgctgaactaggccc

SEQ ID NO: 22374 - DNA, 201 bp, Bos taurus
aacaatgttctgacacaatgcaggaaccctgaaagacgcatcactgcatcaacattctgcagcgtgctgtgaatttgaatttttgttattacacatgttttagcattagccttcttaatgaatccaatgaataacaaataaatgctaagaaagaaaagtgcctgccacttaaggaacaatccattatatttattccagttt

SEQ ID NO: 22375 - DNA, 201 bp, Bos taurus
atagctgaagcaagacatatattagaaactcagggactctgggataaaaaaactgtcagcagtgttaggaacacatacagatgaatgttttgtgtgattccgtttccataacaaattgtctctttaacattgcattgttctatatttcattagattctatttttgaaagtaagcttgcaagtggagaaatactgtctacct

SEQ ID NO: 22376 - DNA, 201 bp, Bos taurus
cagtgaaacttccaagactagaacatgtggattaagactggtacattctatcagcctctttctgctactggaatttgcaatttatggaactcaaaaggtggagaaatccaggcaaaagtccatggctaagaggaagaaaaatcagctgaacttggagggatgacataagtctgagtaaatcaaaagataaattcagcgcaa

SEQ ID NO: 22377 - DNA, 201 bp, Bos taurus
tcttgagagccacataacaaatcatgccaaggcgaagaggctaaaaacagaaaacatttatgatctcacactttatgagagtgagggagcatctttgctgagttactctggctcagtccttcctgaagctgcgggaagattggccaaggctggtggggagctgcagggcgccctcgctgcctctccagtttaataggggtg

SEQ ID NO: 22378 - DNA, 201 bp, Bos taurus
agtggggaaaactgggtagtttttctaacaattagtaattcatgccttttcagggatggagccaaagacaaacattagaacaagagagtctcctagtgctttttttttttttttttttttttaggaaattacaagggttttaggagctctctctgtgcctggaactgagggcagaaaccaattatctcatactgatatata

SEQ ID NO: 22379 - DNA, 201 bp, Bos taurus
ttacacatgatctcaaaaattttccctcagatacgctttttcccagaagtctgctggaggagatactccactaaaataaagaagttagataagaaattaatagtatggcatctggaaaactaaagatctcacatatagaaaaaggaaaaagaatcttcagggtgatggcaaagagatatcccaagaagacatcctttcagc

SEQ ID NO: 22380 - DNA, 201 bp, Bos taurus
tatttatgggcatgctggaatctggccagggcttttccccttggtaaaatgacaacgtcttaattaggaatgtttggtctgtggcaagagttgccagagagccgtccattgttctaatgcacagacatccatcaccagcctgcaaccaaagcccacagcgcagtgggagaagcacaaggctggaagacatcggaattactt

SEQ ID NO: 22381 - DNA, 201 bp, Bos taurus
caggatggttaaatccctcacctccttcaagtcttcactgaaatatcactatttttattaagaccatcttgaccatgctatttaaaattatatcctcctttactcttgatcccctgaattcttttttccaccttttcatccatcatacttatcaacttatagaacttatttatttgaaatattttattgtctgtcttatcc

SEQ ID NO: 22382 - DNA, 201 bp, Bos taurus
gtttaatctaggactaattttttcccactacttggcacaatccttataagtaccctacccaaagctgtgtccttcatgaagtttttctgtctgacctgtggggacatgcaccattgccctgcctatgtctaatatgtgctttattgtggtgatttggtacctaatacacaatatttctgagcagtgtgcctatactttatt

SEQ ID NO: 22383 - DNA, 201 bp, Bos taurus
gtgcctctgcatggggaaacaacacttgttcccatatatgtgtacttgtccaaacacaaatgaagagatacatggtttttcccacattcattttgcccacctatcctcagaaaaaagcctgtattttgacaatattaaccactacccattctctccacatggtttaagctctaataaacattcatatagttatcactgaaa

SEQ ID NO: 22384 - DNA, 201 bp, Bos taurus
aggtcatataaaaagcaacagaaaagttacataaacaaagcagcttggtcagagagagagaaatttatttgtccctcccatgcttcagtcgggcttcccaggcggtgcaaagatacagaatccttctgccaatgcgggagacacaagagatgcagatttgatccctgcatcagaaagatcccctggaggaggagatggcaa

SEQ ID NO: 22385 - DNA, 201 bp, Bos taurus
ttttaaagtttgacttcatatccaagatgaaatttcatctaaagtgcatcagaactcaggcagtccggcagcttctatgggaaaggccagctgccatgcagaccctatgtagctcctcttcctgggaagaaagactccactttgacatcgtgagggataatttctgatgtctccctgcctaataaatacagcagaacttag

SEQ ID NO: 22386 - DNA, 201 bp, Bos taurus
aaatatgtattaaaactttcccccttatcgcatatgtgttgcaaattaatagttagcaacttctctcatgcctggaattaaaatatatatcaaagagactcggtattgaaatagcagaacgtctagccaaatgccctgctatcaatatgaaatactgtttctgggagtatgttcaggctgtgaagatatttatgaaggaga

SEQ ID NO: 22387 - DNA, 201 bp, Bos taurus
atcccagttttattatctctattttacagaggaataatctggcctgcctgggttaagctgtttataaactatttagaattttactaatatattttatcattcttatattcttgggagggcctgtggatcgctttgttttaactctctgctggttcttttgatccctcactttttcctgtgtgcgttgtcgctcagtcgtgt

SEQ ID NO: 22388 - DNA, 201 bp, Bos taurus
tctttcttaccatatttgggtgtttgaaaggagtctactccttgttccaaacagaaataattgacatgcacaaaaaaagcagcatcattgaagacctccccaaaagtttggagtttagttctgcgtggtttattttcattcttgttttactcaagctggtttgctattccataagcatatgtaccatatgcgaccgaagac

SEQ ID NO: 22389 - DNA, 201 bp, Bos taurus
taagaaaccccttaaaggaagggtttgatttttaatggcttccctttacaatttcctcaccgtgtttaagagggaaaagctttgactagtacctgatagcgtttgcctttgcagttctgtagtagtaccaacacggctctggctttaaagataagccaaaggactcactggattcttgagcaatgataaggaaagaaaaac

SEQ ID NO: 22390 - DNA, 201 bp, Bos taurus
tcctacatgctgcaatgaaaagatttcacatgccacaatgcagacccggcacagacaaataaataaaataaagattttttttttaaaaaattctctttccgatctgctagggctgagatgtttgtttcatttgcaaatggagctgtcaagtaggttccttgagaggaatcttgagttcaggattgagtataggtggttgca

SEQ ID NO: 22391 - DNA, 201 bp, Bos taurus
atggtgaatactctttggaggatataccgtttaaggccatgtgacacttccacctcctaaatctgatgggacaactggtaatggtagaaacatctagcccgcagtctggctactagaatagataggccgaatacctagttacagaaaaatgaaaaactctcactctttcataaatgcttatgacataaaatgtcaggctat

SEQ ID NO: 22392 - DNA, 201 bp, Bos taurus
cttttgttttctgaaaagtgactgtcccctaatctcagcagtcaggcagggatgatctacttaatgttgatctcctgagccggagtgctccagattcttttgttcctcttttggggccactgcgcctgcagttcactctcaggagagcctgtcaattatgtggtttttctggtaactagcacttggggcctgaaacatttg

SEQ ID NO: 22393 - DNA, 201 bp, Bos taurus
cccctctgagctgaaattgaactcaaatagtgatcattgtcccttcttcaacaaaactccccaaaaaaggaattcagaaaaataaaatctacataattgtgtgttgcaaagattaatgggaaaatacagtaagcatatcatcaaaccaaaagtactgaggtaagggaaaataaagcaattaaaacaaataaataataacat

SEQ ID NO: 22394 - DNA, 201 bp, Bos taurus
cttgggacagatatgacccatggcattatagtgtctaacacttaaaatatatataataactgattatttttcatctcagagaatcccatagcttgctgtagggctgtcatcttattctgatatgcaagaatctctagaagaagtatgaactctagacaagaaaatgaaaggtagtttcaaagcagaggactttttaaaaga

SEQ ID NO: 22395 - DNA, 201 bp, Bos taurus
tttaattttcttgtccatatcgtgtggcgtgtgagatcttagtttcctgactagggactgaacatgcaacccttgcattggaagcacagggccttcaccactgcactgccagggaaatccaccctctccacagttacacatcaaagtcccaacccacagcgtgactcatctggagacagggcccttacatgtgtgttgtga

SEQ ID NO: 22396 - DNA, 201 bp, Bos taurus
cgggggagcctggtgggctgccgtctatggggtcgcacagagtcagacacgactgaagcaacttagcagcagcaggcagcttcaagcctatttttctgaatctaagttttccattctatgagcctaatgtagccactgtaaccagctttctctgaagtttaaataaagtgcccagcacagtgactgaaactaaagaagggc

SEQ ID NO: 22397 - DNA, 201 bp, Bos taurus
ggctgtaaaaaaaggccattagagagagtacacagactcaacttcaccgcatctggtgggcaaactcctgtttgagcaaaaggaaggcagaatacccatccgggcccgttttcaactgagagcaactacgtcagctgtcctgaagctccccacgtgaagattatctgtcctttggatccttttgtattattcggggtagat

SEQ ID NO: 22398 - DNA, 201 bp, Bos taurus
gaatctgggaacatctatcctccggtggatttcctctatttataataactcgggttcggcaagattcaagtgttcttctctgaatggcttttaaaggctcagtctctcttagttcgaaatggagatggggaaggaaggagtcggttggggacgtctgagtgtgcgctctgagtggccctttgggggccgacgctgacagcg

SEQ ID NO: 22399 - DNA, 201 bp, Bos taurus
atgccgatatcctctgtctgtggtgaagcctgggaatgtggatgctcccggtactggagatcactaactgatcatctttagaacttttcctaagccagagtctcagtggttttatagttgtctggctaaagtcacttgtgaatttctgaaagtatttttttctatatattctgccacctaggaaatgtcgctccatttaac

SEQ ID NO: 22400 - DNA, 201 bp, Bos taurus
aggccacatcccaaaagccaggaacagggtgggcatgaaggggctttgtggtaggggcaatgacaaaaggtatcagggctgaggagaggcgcaatgcagatgagggcctccgtggtatcctgaaagggtaagtaacagagctggggaatgtgactggccttttgtcatggccactgacagtcgatgtgaccttgacttctg

SEQ ID NO: 22401 - DNA, 201 bp, Bos taurus
aacactgtgaggtataataaacataatattctttacccaccaaaaataaaatctaaggaagagtagaaaatgaatgaaagcctgaatgaaaattcatggcgaattcaaggcaaatgaaaattcatgatcttttgttcatacaacttaggtatctgtctacagagatttatgatacagaaatagacgagaaatatgaagaaa

SEQ ID NO: 22402 - DNA, 201 bp, Bos taurus
tggctacccaatgtagaattctctgaaatcttgtctagctttgagggttgacttccgtttgaccttgctagtcttctcctctttgagtatccttaaggatgtgttaaatgttttctgacattatagcacatggtcagttcatttgaattctttctccacttaggtctctttattttttctgtgtaaaacctggtggtgact

SEQ ID NO: 22403 - DNA, 201 bp, Bos taurus
ttacgactaaagtttttatcctgttctcagacttcatagtgccctggaaaggatgaagacaggaagcctgagaaactgagtggccacaaaacagtaaggacccagatctactctgaaaacagccctgtggattgcccagttctaagtttcctactaagacctctgtggccatggatagtaagtcagctcaattgtctctct

SEQ ID NO: 22404 - DNA, 201 bp, Bos taurus
catgcagaacgagcaagaaatcagtgttggttgtggaaagtcactgggtttaaggattctttgttactatggcatagctgtacatcctgcctgaaaaagatggtaaggcatgctctattacctttacagggttgggttgaaaaatcaaatacagacatgtaattggaagcttttagtcaatgtgaaacatctagcttcttc

SEQ ID NO: 22405 - DNA, 201 bp, Bos taurus
cacagcgtaggaagtatctttactcctcagaaaccatttggcctgactctaattaatacttcacctaatcttctagtaatgctactaattgttcacaaactggcaatttaatcaacactctactaacaggcaaagttgtgggttttttatcccctctccactttttttttgtgctctgacacagtgtgaacttaggcatgt

SEQ ID NO: 22406 - DNA, 201 bp, Bos taurus
cctcctataaggtaggcagcaatccggtcatggtttcaggcatcaggttaaaacttgaagagtctatagccacaaatggtatgttttctgcatgatttgttggtcttctttgtcacggagtctgaagaggcagacaaaccacttttttatgaggatatctcttccttattgggggctttaaataataacagattccctaat

SEQ ID NO: 22407 - DNA, 201 bp, Bos taurus
ttgagaatctgaggctaaatactagggcataactaggtctcatgacaaatggagtaagaaaagtttgacatcaaggcccacactagtgtagaatccttgcaggacattctaatctgaagagtctattggagaattcagatatgcctgatctacagattgcaggcccattagaagtgggcaaagggttaatgtgaagcatat

SEQ ID NO: 22408 - DNA, 201 bp, Bos taurus
cacacacagagacacagatacagaaaaagacaggtattggccccaaacccatggtttggagccctaggacacctcagtcttttctcttaaggctttcaaccgactggacaaggcccccgcatcatgaagagtaatctgctttacttgaagtctactgatttaaatcttattaacttttaaaaagcaccttcataatatcta

SEQ ID NO: 22409 - DNA, 201 bp, Bos taurus
aaacaaagaatatatttcactgaataaaaatagttggggaagtttttgcattaagtcacttagcaaccaaaattgaaggcctagtgtaactcaaatataatggcaaattttagcgtactaaaacagggtaagatatagcaattgggaagaattttcagttgcttctaattacaaagatcttaccaaccaatagaaactttt

SEQ ID NO: 22410 - DNA, 201 bp, Bos taurus
atagatgtaggaacaacgtcatattttggcattcactacaactggtgacactgatagattgatcctgatcattattccttgggaacattgaccaagaaccggcaatgttacaatttcatagattatttgaatttctattgtgcttgatatttttcagaatattttatttgccctatatgagaccattttcaaaaaaaacac

SEQ ID NO: 22411 - DNA, 201 bp, Bos taurus
atatgaagaacatatatttttaagagtttctcatttgcacactcaaattccatgatcccctccttcagctaaggtggacataccgatagacacgtgttagttaccaaaccacaaagtctaccaactgccctagcatgtctgtctgcagagggctgcatcgggaacacgttcagggccatatccagtctcctctgtcaaccc

SEQ ID NO: 22412 - DNA, 201 bp, Bos taurus
tggtagacattaaacaagatgctgtggaatttaaaaaaaaaatacataaaacgtctacacttgaagaatttaaaatacaggaagggaggcagacacatgcgtatacaattacaatatgcaatgagaaatatttgattagaattgaagctacatggttctataggtgaatggtgaattcagagaagaaaggcattgacattg

SEQ ID NO: 22413 - DNA, 201 bp, Bos taurus
ctggataggaattgggatggtcaggatctcggagccagcgggggagccccacaaagcccaaaagaggcttctgatgaacagggccagttttgcatccctcatctctgatgggacactctgagtcgctacctgctctgtgtgctgtaacaaatgggaggcggggctgcccctggggttgctgtgtgtgctctgctggaacag

SEQ ID NO: 22414 - DNA, 201 bp, Bos taurus
ccaacgtatgccagactctaaacattagaagctcaaagaaaataaagacatgctattcactgttcttattgttaggttataccctgttttgcagtaaattctccccaaatgtttaaagagaaactatttttactatgtcttatgatttaatggataaggaaagtgatcagctgagaaattcatttattgcatgtatcagag

SEQ ID NO: 22415 - DNA, 201 bp, Bos taurus
ttccaccacaactgcaaaatcccaggtatttttacacatttcttcttctcttgaaaccatcacaatacttggaacatagtaggtgatcaataaaatattgataaagccaattgaatcaaatgaattgaatgggacatggttgggaaaatgacatataaccaatgtatacgaatattataattcagcaaaattaccacagta

SEQ ID NO: 22416 - DNA, 201 bp, Bos taurus
tgtatagtgagaaggaagaacatctgaaagagaactatagagacccccagagagattatccactctgtaggtgttcagtagtttaacccacaacattattgtttttaaatatttgccatgtcaaatcttgaactgtaccactatatgagattaatagtctcaaggcaaataagcctctggttttcagaaagtttgtaccaa

SEQ ID NO: 22417 - DNA, 201 bp, Bos taurus
agatagatgtgtgaacaggaggggaagaacaggcaaatttcttcttgggaaagaaggttctgggaccatctatcttagaatgtctaagttctctggcatcacaatactttttttatttctttattattcatctccagagaggctcttccagatacttctaactttcctccattctttactggcccctttcacagaaattga

SEQ ID NO: 22418 - DNA, 201 bp, Bos taurus
tctctgcagtcgtccgtgccctgccagcctcacagggctgctgcaagaattaaaagaaaacccttattgtgaagagcaagaaaactatgaaaaatgacatgaaatgtcaaggtatctgtaatttcctgtggttccagcaagtccctgtttgttcacctttaaaaataaacatttatttatatttgaaccttatttgacatt

SEQ ID NO: 22419 - DNA, 201 bp, Bos taurus
cattctgcctttttaggttaaaacatttcaagctaactacctagttatacaaatatggcagtactcgttcttaataatcacatatttttgttctttttccggagttatactttcttttacttttcctatgaaaagcccaagatgactgatatatttgacaagcctagaactggtagaattttcaattatggcctgagtgtg

SEQ ID NO: 22420 - DNA, 201 bp, Bos taurus
accattgtcagcatcagtactgttgtaagtaatctagcaataaataatgaaagactaatgctagctaacagctaccaaaagcttaactctgtgcctggtactgccatgtcaagtttataaggatcatctcagttaagcatcacaggatcccttaaaaggaagaggaactatcgttatcctaactttccaaattcagcattc

SEQ ID NO: 22421 - DNA, 201 bp, Bos taurus
ctgggcacggagcgggcagctggagtgtggctttcaaacctcggtccctcctgccaaacactcagagagaacagagcagggaaaacatagagcagaggcccgagcagatgtgagctcagaagccagctgtcgtctttgctgggatggggaagcagcgaggaggaggggaccggcttccggcgtccacggcctcaagcctgg

SEQ ID NO: 22422 - DNA, 201 bp, Bos taurus
gggtggcttaccccacatgaacttatctcccacagttctggaggctcagaagtccaagatcagggtgccaccgtggtcaggttctgacttgcaaatggccatcttctcaccgtgcctcacatggcagggactagagagagcaagccctactgtctctcataagggcactaatcctgtctcagaggctccaccctcatgacc

SEQ ID NO: 22423 - DNA, 201 bp, Bos taurus
ttccatttcttggtccacatggacactcttgctggaagggaagaggaaacctagtgggaagaatgcagaccctcattcatcctagaatgaggcacaaacccgtccttttactcccatgtccttgagcagagtcaaatggccacacctattgcaagagagcttggggaatggcatctttactctgaggagcccccaggcccc

SEQ ID NO: 22424 - DNA, 201 bp, Bos taurus
ccttctttctgtctcaactatccattgtcttccagccacagtgcagtggagagatgaatgtaatctggggaaaaaatagaatcttgccacatgtcctatgaaaaacagtcttcccatgaaggagaggctcacaaagctcactgtatccctccagccagaaaatccccttttggcataacttcaggtcacatcccaatagtc

SEQ ID NO: 22425 - DNA, 201 bp, Bos taurus
gaattcctgccatgtgccatgcactctgtccccgtgcatgcaagtaaaaccaataaaaataggaaccagacctgtccctggccagcccacgaccagtagtcgcactgggttagcctgggcgcgttcttggcttcagctaagaatggaagtcacttggccttgctcagtcctgcagccagaaactcacccttgacctcacag

SEQ ID NO: 22426 - DNA, 201 bp, Bos taurus
tgaagtctttatggcgctgtccgtggtacccagccctggtctcaccattgaaggaaagtttttacctaatgacatcccagtgattaaaaacatcaccttgtagagaagaaatgactattcttgtagctattataagtgaaataaaaataattatggctgatttgcattgttgtacgacaaaaccaaacacagcattgtaaa

SEQ ID NO: 22427 - DNA, 201 bp, Bos taurus
aaccgaatctgtgccaggccacatctgcccctccacccccactcctggtgaaaaggcgaacagacagaaagcagcttgctggaggctctggagagctgggtgctcgccaggaggtgggaatgccagtccttcctgatgcctcctcagttagggtgttgccatcctactgacacttgtcctctgccacctgtagcttaaaag

SEQ ID NO: 22428 - DNA, 201 bp, Bos taurus
cgattagctcatttttaagcttaaaacaggccttttaagtaaaggtttttttttttttttaatatcagagtgttagttcaaaaatactacatatttaaacattggccttctctctgtcatgccagctttattttctgaagaaaattcaatttatttcttttttccagtttggtagccaaagggttaaagatggggaccact

SEQ ID NO: 22429 - DNA, 201 bp, Bos taurus
tgcaacctgtttttgatagtgtttgctataggtcagaattggtagcctttcctgtaaacagtcaaatggtaaatgttttaggctttccaggccacgcagcatctgttgcaactgtggcgccactggaaagtgctgcagacagtatttagatgaatgggcatcgctttgtcccagtcagccattattaacagaaaaaggggg

SEQ ID NO: 22430 - DNA, 201 bp, Bos taurus
atgctattatttcaggaatcaattttttatgtagcttaatagaagtcagtaaccttctagatgggtaacttgccacaattcactccacaaagtctggtaagttaagactgagtcccatccttcttatatgagaatgcattatttgcctgtcaagaggactttggttattacttcctttgatggggcccttcacatactctt

SEQ ID NO: 22431 - DNA, 201 bp, Bos taurus
actagcacttaaatggcaagaggaagagaaaaaaaataatgctttcacctagccctgtgttatctgtaacgggcatgttttaagactcccgttaggcccatctgatctcaaacacaaactgtctcatggtgtaaatgagccagcatcacatttcccatttctatcttggccacttagcctggcagggagaaattcgccttt

SEQ ID NO: 22432 - DNA, 201 bp, Bos taurus
gacatttgcacttcagcgacccctgggtaacaggaagttactaaatgctttttttttccgagtagcggggacatgattggacttgcattttaaagattaaccaggcccctgggcttccaaggtgacacagcggtaaagaacccacctgccaatccaggagacgcaggttcgatccctgggttgggatgatcccctggagaa

SEQ ID NO: 22433 - DNA, 201 bp, Bos taurus
tcctgtttgattttggttttcaaaagcagaacaatttttacatcattatataaaggccttccactatttaaaatgtcggtgctaaattaattttatacccacaaggcacactgcatctgaccacactggattctatccacttaataacatgagagaagatcttggacaagaatttagtgaaaggaacagtaaaaacaaaaa

SEQ ID NO: 22434 - DNA, 201 bp, Bos taurus
aatcttaacaccaaggatctagaaatccgatttgtacagaaccgtgaggcaaaatgaagtcaggttcctgcagaagacaaagtattttcttagaaacatatcattttggtactggcctttcctaaccttaagtctgaccttggcatacaaaggcaacccacggcaagtttccccaaataatccaggagtcctcaaatatta

SEQ ID NO: 22435 - DNA, 201 bp, Bos taurus
ctgccgagacgcgcattcacctgtggtctctgtccctcaggtgacccgttctctgctgtgctcactgcgaagcttttgggcttactggccttatatctcatactcttctttgggatggctgctcccaaatgacatcttctaactgtgttggagaagactcttgagagtccctaggacagcaaggagatccaaccagtccat

SEQ ID NO: 22436 - DNA, 201 bp, Bos taurus
agcggcctgccgggcggtgggcacaggagaaagaggccgtgttcctgctccgcgcagggcagccccgctcagagacaaacaggcccatcacctgccccggtgaccgcagaagaacctttgacacctcatctgatatttgcatgtcccaccacgcaacactaccccgatgtgaagtaattgactcaacaaggccgaactgca

SEQ ID NO: 22437 - DNA, 201 bp, Bos taurus
ggcgatactcttgtccctgacatccccctggggccctcggggcccttcaccaaaagtaccccgaccagaagccgcgctttcacaggacactcactctaacggcactgctgaaaggcccggccatccgctcttccctagaagcccgcggccttctcactgccttctgaagtcctgctcaggcctcccgccggctctcaggag

SEQ ID NO: 22438 - DNA, 201 bp, Bos taurus
ttcatcagcgctccagtcattaaaccatcaggagcagggagaggacttcacactcgtttaaaaaaaaaaaaagagcatgctagtatgtagtgacctaagcatggaaatcacacatttaaaaatagctctcaaaagcatttatagaatgaagtctctaaaacctgcctaggaagtagaaatgattattattataacctcacc

SEQ ID NO: 22439 - DNA, 201 bp, Bos taurus
ctttcactttcactttcattcctattttgaagaggagaaaattgaggtttccagggatacatgtccaaagtcattcaggtaattacaggcagtcagaatctgaatccaaatctacaggacgccaatgcccatctttccagatatcagattagtatttctcgaagagtctggaaaattcaatcaagagaaactctgttccca

SEQ ID NO: 22440 - DNA, 201 bp, Bos taurus
tttacaaaacctattttgaaacaaatttctaggaatcttcggaaagatggaatgaggtgaaatgcttcccacactcccttgttcctatgtgaactctgagccccatgcaagcaccattttcccactccaggtgtagacttcaattaaactgtaggaaacaaaaagatttgctttactgcgaagcctgtcccctttccattt

SEQ ID NO: 22441 - DNA, 201 bp, Bos taurus
cagggctcgtgtcccctaagaggccagatggcagatgctgagctgctctcaggacgagatgctctcaggacagactgatccagagagactgagcttaaggcaaacatggccacacccccactccctgcatgaaggtacaatcaatgaaaaaactttgcacccaaagaaatcatttcgtcatcaaccagctacaaagtggta

SEQ ID NO: 22442 - DNA, 201 bp, Bos taurus
aaggtcagaggtgtgaggcctcgtatcaaggccacagacacggagccccacgccaaggtcatctccagatcggactgagctccatagcaactgttgccataagcccccttgatccaaactggccagctccctgaccttaaccaatcacctgatgccacccttccagctggaatcttctttgtctcgaggctataaaggttg

SEQ ID NO: 22443 - DNA, 201 bp, Bos taurus
ttttccccatttgaattgtctctacttgcttttaaattaaggaaatatcatcattatgggacattatcttttgaaataacagagtttatctccaagcttttctttgtatagtctattatgtcctttgaagaatacagatgtagaagaaaatgattttttaaaaaatctgactcattcaaaattgcttactttctcctttta

SEQ ID NO: 22444 - DNA, 201 bp, Bos taurus
agaggacgtgtcccttctcgtccctgcgcctggcgcagagaaggtgctagatgccatgagacggtcacctgaggcaggatggtcaccttgctccagaagcacccagaaaggcagcagtcagggagctgggctggagttaacgggatgaagagggggaagggggtccccggcctcaggcagtctcttctccgcactgagcgt

SEQ ID NO: 22445 - DNA, 201 bp, Bos taurus
gaccccgcaaaccactccctcaccccaagccctggttctccagggagaggagcctggtgcctgggaaacaagctgggcaagctggtgctggcctcctgggtagcgcgggctcccctgccttcgtgaatcggctctttcatgtggaaattgcatgagggctaacaggacagaggtcctgcgaacccacacgattcctgcccc

SEQ ID NO: 22446 - DNA, 201 bp, Bos taurus
tgggccccggggtctccagcccacggcccgggggccgggccccaccccgctccggctaacaccgtttcagccccgctgcccttttggtctcacctgtctcggggtcgctgaagtctggcaaagtaattgtattaagctgtcgtctgtcagcaatggttctatctaagaggctgctcccacgtccagaatcactgcaaaaca

SEQ ID NO: 22447 - DNA, 201 bp, Bos taurus
cccagctggctctatgacgaggctgtgctgggcacttgggagttccacacgtctatgtgtgtgatttgtaaagaacaaagttcttgaaatgttttgtgctcgagtctttcctgtttagcatgatacaaagagtcctttaggcttgggttttctctcctataagctgttaaaaatgtcagaactccactatgtattttattg

SEQ ID NO: 22448 - DNA, 201 bp, Bos taurus
cggatggggatggtgtataaaggctgggttttgtttttgggctgcgctgcaccgcagagttgcccaaccaggtatcaaatccatatgtaaaggctctttttaatccagctctttctacctatgtaaatttgcatagtttctcctccaaatagtcagcttgctcttgagcaggagggattattgcataacctaagaacatgt

SEQ ID NO: 22449 - DNA, 201 bp, Bos taurus
atgacttctggcttgattgattaggcagataacttgtgatcaagaatagagtaggggcttccctggtggaccagtggtaaagactgtgtttccaatgcagcgggtgtgggtttgatcccacgtgtcacacagtgcggcagaaaaaaaccaagaatagagtagcaaaaatacaaaaggaatagggctgagataggaaagggg

SEQ ID NO: 22450 - DNA, 201 bp, Bos taurus
taaataaaataatttcagttaccctccatcttaaacacagtgttctgtgtaaatattaaaagatatgatatcctagagaatatttactataaaacaaatacggtttgtagttttgtttttagatttcaacggaataccattgagttggtttgttgtgtccctgctgcgtttcaggttgtcttgtgtgggagtaaaacagtg

SEQ ID NO: 22451 - DNA, 201 bp, Bos taurus
gtgtggggagtgctcgcagtgtctgggccacactgggtttgcccccgctcacggcgcgtgtgcttttctggtctacgctgatcaggctccaggttgtgcaggggaagtctaaagcaggccctgggttgtgtgcactccccaggtctaagctgctcagcttcaggttctcgggtactccacaaaggcacagactctgttggg

SEQ ID NO: 22452 - DNA, 201 bp, Bos taurus
tagggccaaaaaaaccatttccatcattcgtactactcatgagagataacactatcaaaaggccatgtttgtagatttccagaagtttgctctcgtaagagaatataaaaaagaagtaattgaaaaatgcacttttctgtgtcttcactgctttttaaaaaagtgtttttaaaatagattttcttagggaatagatcagat

SEQ ID NO: 22453 - DNA, 201 bp, Bos taurus
agtgcaagggcctgggcctcggagccaaacccacgattatcaggttgattctacttccgtcggtcccccccatacactggctcaataaaaaatgtggagccgaggtaggagacggtgggcctctgccctggacacctggtgtttgtcaagtggagtaaaactgaacctctgttctcactcagacactccaaggacaaagct

SEQ ID NO: 22454 - DNA, 201 bp, Bos taurus
ggggaaggggccacggagaacaaaggagcttccccccagcacccatgagagggtgaccacaggagcctggcttgggatgggtgacttccagcgcctaccctggccgtacctgtggattctgccagggatggaacatctggcctgacatgaagaaaggggatagctctgcatacctttggacgctgagagtacttgagtaac

SEQ ID NO: 22455 - DNA, 201 bp, Bos taurus
gagtggaggtttggttaccacagagaggattgctaagtgacaaagatattgggagaaggaaatgggagagacaggaaagggtgtgcatgtgggaatgaagttccttggtcttgagtaaagacacctagctcctgccctggaggatggttttcctgcaaacccttagtccacagtgcagggtatacactgaaacactatata

SEQ ID NO: 22456 - DNA, 201 bp, Bos taurus
accagagactggatggggtgggggacctctgagagcaacaggctgcctggccattagcccggctccactcccatctgccatccccaggcgctggccgtgtggggtttctggggagagggaagtgggcaagtgaagtgatgtgggaaagtgggtggcgcagaattgcagcactagctcccaggtcctgagaaaagcagatcc

SEQ ID NO: 22457 - DNA, 201 bp, Bos taurus
gtcataccagaagcagctggtatgatggatgggtgcctctttatcaccttacttcagcaggaatgtagggtttcctgactcccagagctgttttaaacaatgatggcccaggacatccccaggtggtctagtggttaagacctcaccttccaatgcagggggtgcaggttcgatctgtggttgggaagctaagataccaca

SEQ ID NO: 22458 - DNA, 201 bp, Bos taurus
atctcggatcttcccagcatacccatgtgccccatggcactggccctgggttttacagtgagtcccagggaagtccagtaacaggctctagacctggaacgcagatgtatctgttggccagggcatgcctcatcccccactatcaacaaagcttgttcagcacagccatgtgactgcagacctgttccccacacacaccct

SEQ ID NO: 22459 - DNA, 201 bp, Bos taurus
tcccttcctgggcattcccaaagggcaatgccatcatctgggtcaggacaagcccatctcatttcttcctactgatgtatccctgcacatacttgaacattaaaaagaaaataatctggcagctgttttctttacaaaagccatttccaaaattaacaatttattatgcttgtgacaaaaataattcatctgctttgcaga

SEQ ID NO: 22460 - DNA, 201 bp, Bos taurus
agcctaaatccaaaggcagggcccctgagaccacagcccgaagcacgtggaatcaggactgtccctgcagcctcagattcggtggtctcagcgcttacaggggcctgggctctctccacccttgactgtctttagttcaacgtgaaattcacacattcttggtgttacagttctatgacttggtggttgttgttgtttctt

SEQ ID NO: 22461 - DNA, 201 bp, Bos taurus
ttagaaaaatacagtcatcctagacttaggaaacagcacatgagacttacttcaacaagctcctgatggctttgaatcaggccagtctctgctttccttcagtggtgcttagtcctgttacgtaggaaggtcaaacatctggtaaaccctccaactcaacacatctctacacaagtagcagccttccccagctccagtggc

SEQ ID NO: 22462 - DNA, 201 bp, Bos taurus
gtaggggccgatgaaacacattctgaagcctttttaaaactctgcattggaggaaattgattctctttatttaatgtctctttactcagcaggcagatggataagaccttggatcttgggcctaggtactgtaaacagaaggtttttgtgcagtgttgcttgtttgtctcaatacactccttaccttctccctgtttagag

SEQ ID NO: 22463 - DNA, 201 bp, Bos taurus
ctcttgaacccctgtggatgcatgatctttgtctgcccatccatccctccccagcatgacccctctgttcccctggcaagaaaaggcctttgggaacttccctcctgctgacgtgggtgtctgggggcagtgaagaccagccgattggacatcagtcttcagcctccgcagacacgccctcttctcctggccacgcccctc

SEQ ID NO: 22464 - DNA, 201 bp, Bos taurus
gcctcagggcgaggctccccccgcccagccttacctggcagctggggcagaggcagtggggactggtccggcacccacccggcggagtcccctcctgtcctttcagaggcccagtcacagctgaacaaggaggtacacactctcctccttccgccccgaccccaggcgactcccgcccgcacccctcacgtcacaggggca

SEQ ID NO: 22465 - DNA, 201 bp, Bos taurus
gggcgtcactcatgcctccgcattgccaagggccaggctcgcgtctgtgtcctggtcccaggcagtttctcagccgcattttatacgacagacccttccctggggccactccacaggccctgctccctcctaacaggccactcctcctcagcttcctttccctttcccaaaccccaaatcagagattcccactaagactgg

SEQ ID NO: 22466 - DNA, 201 bp, Bos taurus
tcaaaattagcagggcctgtttctttccaggcaggaagtcaatgcctccttatagagatcacagcctcacggacagacaacagacttatagggagtgaaaaccacccaggacctccgggatcctttgaaaaggggcattgatcaaaccacctaagtccccaaaggctctcttttatgtgattcaaatatcacttatcagtg

SEQ ID NO: 22467 - DNA, 201 bp, Bos taurus
tatcttttaaagcctgaggccctgagcagcatccaaccactcttcagtaaattcctaaaacatggattcattaggccctgccaggccctttgctacagccctcgtcttccaatttagaaacctaacagggagtatccgtttatgcaagacttacgagcagtaaatgaggccatcatccctattcacccactggtgccaaac

SEQ ID NO: 22468 - DNA, 201 bp, Bos taurus
taaccacaaccttcaaacaggctacagatccagaatttggggacaaggtcataagaatggtgacctctgagactgaagccagtaagtatcatcaaataatgaaatcagctgtgtgcaatagtgacgtacctgaagatgtaagcctgttgctaatgagagaaggacgcctccaaaatctcatcagacactaaaaaacaaata

SEQ ID NO: 22469 - DNA, 201 bp, Bos taurus
atgggccagacaagttcttactttctggaggctgttcagagggcagagactggaattgcaaatggggtttactgtttctaactttttgctgaacacgcttcatacttccacgtgcgtgacatggcttgagggtaatcccaggcctgggtgagagctggtgcagtcgttagagcctcattccatggataagatcaaggacaa

SEQ ID NO: 22470 - DNA, 201 bp, Bos taurus
aaatatcccgccatgagtggccagctgtctccccccacccacttgtggccatgggtggcaagacgttgccatggagaaccaggcgtccccagtgtatagccgagtgttgccccctgagtggccaagtatccagctgggggtggctgagtgttaggctatgtagggctgaaaatccaccacaggcagtccagtattcccctg

SEQ ID NO: 22471 - DNA, 201 bp, Bos taurus
agctttccttaaagcatgtagaaatgaacaggattcaactctggaataaaattaattagagtattttactttaagtgatcgatcttaataactttaagttgtatgtctagaaaagcagaagtgacactagatatgcacttagtcatttaatgtgttaacagttattaaggtataaattacaaaaaggaacccaagcaagtc

SEQ ID NO: 22472 - DNA, 201 bp, Bos taurus
gtatggaattaatgtttgaaagaataagttgtcctttccaacataaacattttcctcaatccagttttctgacccacaggcttacacaaaagtgacacacgtgtaataatgttctgcaatactccaactacttccaagaaaaccagtaaatgaagtgctcacactcctgacgggtctgccaatgggatggtaacaatcctt

SEQ ID NO: 22473 - DNA, 201 bp, Bos taurus
aaagcagtgctgagaaaaaaaaaagaagacaagaaatcaatgaaatctagtaatgtcagcaaaaattactgtagagtaaggatgggaaaaactccatagatcagaaagaaagaaaaatggcaaacttttcaaaataaatgtttttcagaatttcagaaactaaccagacttttagcaatccagaagtagtgtttatttttt

SEQ ID NO: 22474 - DNA, 201 bp, Bos taurus
attttcagcacctaaatgataacggttgtagctttcttgagtatgacagctttttggatggagagagagaagcatagaggagtgggccagatcgcctgaatagggaaattttgggaactcacttatgttcactaagattttagtgatgagagcaaatgttagtaagttcttttggccacaaagagcgttcatttcacttcc

SEQ ID NO: 22475 - DNA, 201 bp, Bos taurus
taactcactggaaggttcagagtgggcaggtgaatgcaatggtgcaggatgggagcagagtagtcagggaggcttcctggtggaagaagaccttgaatttccaaggccaagtcctattagcaaagcaaaatgtatgcagaaatgggtcttagatctcctacgggttgggcccaatgagattatgggcacaggggtgtggca

SEQ ID NO: 22476 - DNA, 201 bp, Bos taurus
cagtttcagttcaggctccagatgagggcacgcacagcaccaaggcacaggttagactgccaccccgtcaacaggtttaatctcgagttcctcctcctaataccaactgggtctattattaatgacagtctgactacacaggaaaaccacacatgacctggatccaaacatcacctcccatttctgggttggctctggctg

SEQ ID NO: 22477 - DNA, 201 bp, Bos taurus
catccctcgcgggccttaaaccagctgacggcagatggtggccgggatgagcccaagggccaactgtgcacagcagtgggccccagaccgtgggtgtgggcggacagaccacgcggggtccctggcttgaactctgagtcctagggatgatcggccagggaagacaccgtcctggctgcctgggtcttcacttcctgcgcg

SEQ ID NO: 22478 - DNA, 201 bp, Bos taurus
ttggcttcaggggtgttcaggttcccacatccacgtgaagccccttcctctgactgtatccctggccagtctcatccaaggacagagccacctgaggccaggagtcagccagccgtgctctcctcagcaggttttacatgagacctagcacctcccctttcaggctgccctctgctcccagtcacccccggggcagactgg

SEQ ID NO: 22479 - DNA, 201 bp, Bos taurus
ttctgtaagactgtttgggtcactaacataatgcgtctagctctctttcctaggtgtcttttagggtttagaattacagcccttcccacacccccagagccggccttcctgcctgtagacatgttggtgggttgctccataatgatgcccaggtagctggtgccccacgggcttgccttcccttccctccactctcctctt

SEQ ID NO: 22480 - DNA, 201 bp, Bos taurus
ctccacatggactttcctccctttccccttctccttctgaaagtccacttctccaggatgcctttcacaggcgcctctgccctaaaggtctcttcccctacccttggtgttgctcagtcgcttctttgtgtccgactcttttgtgaccccatggattgtagcccccaggctcctctgtccttgggatttcccaggcaagaa

SEQ ID NO: 22481 - DNA, 201 bp, Bos taurus
atatagctggaaagtactgcagatattttagtgctcttgtatatctggggagataaaaattgtgagtccagcactcttcaagctctagtaaacacccacattttcagctgagagtctggagtacatactaaatgtagttcaatcagagacagtcttacgaagtctgtaacataggataacattaatcctctctgaaggaag

SEQ ID NO: 22482 - DNA, 201 bp, Bos taurus
gtgagtgtccaggagtctctggcggaagcgtgggtcggtggtggcctgctgcagggctaggggcactgagtgtagcagtgtgcgcatggaacagtttaaggaggtccccatagcttcatggcctccaccaaggtttggctccaggtaaaataatggggagggaatacagccccacccttcaacagaaaattggattgaaga

SEQ ID NO: 22483 - DNA, 201 bp, Bos taurus
gagagtcagtgccaatggagcactggggctggggggccaaggtcaaaaaaggatggggcgtggggatggaaactctccaagagtggatggctgagtgtgaggtgtgaggggacaacgtttcaacaacagaggcagcctgcaccgaggtagaggggcagatgtgccttgcgcagctttggaaacagggtggactgggttcct

SEQ ID NO: 22484 - DNA, 201 bp, Bos taurus
atgtgccattcacagtagggtttgcattcttatgagaccctaatgccactgctgatctgacaggaggcagagctaaggcagtaatgtgatctatggccagtggctgtaaatacagatgaaactttgcttgcttacctgccactcacctcctgctctgcagcctggttcctgacaggccatggatggataccagtccatagc

SEQ ID NO: 22485 - DNA, 201 bp, Bos taurus
agtaaataatatactcctggtaaaactcactaaacaacaaaatctaaacaaaaacaaaactcaccacaactcaactaaaacaatgatgaattctagtctgtattggtacatcctgaaattatatacagataatttctacttggtatttatctttaccactatcaagagattttatttttaaaagaatttgtctgaaaagga

SEQ ID NO: 22486 - DNA, 201 bp, Bos taurus
aggaggtgctctttggaggaggccccttccattctgtcattaacctcaaaccaggcaccaccccccaccaccccccggctctgccctgtgcatttcctgcccaagtacacctttcaggccttttgatcatgcaatgctttgcctgacctattgcttcttcccgcagattaaagaagtagaagagtaagaatcaacagatga

SEQ ID NO: 22487 - DNA, 201 bp, Bos taurus
agcctcacgtgcctgcaatattgttcatctgttccctgtgacctgtctggaaacaggcctggaagaaacctcattttctcttggaattctaggcagatttatgacctgggacggatatgttttggggttcattcctagttataataactcactcccttttttctcctccatctcaggtaaacacttatttcaccttcatcc

SEQ ID NO: 22488 - DNA, 201 bp, Bos taurus
ggaaatcccatggatggaggatcctggtgggttatagtccatggggtcacaagagtcaaacacgacttagcaactaaaccaccacccatcctcagttgaacctcatggccaatttcatagcagaaaaagagaagcagctgctatgtccaggctctgtatgggggtcacttgtgcatttactattcgatccaattcctagat

SEQ ID NO: 22489 - DNA, 201 bp, Bos taurus
ttttgacagatgtatgcagtgtcggttcttcagtgaaccagagggtgtaatttatctgcaggaccatggagcccaccctctttcttggtcttggctatggtgggggccccctcggtccttccttttctacccttgcctgttctgctcttttccctgcatagggggtgggtgggggcaagctccatgcatcaaatcactgga

SEQ ID NO: 22490 - DNA, 201 bp, Bos taurus
tgcagttgcaaaagtcagacatgtgtgagcaactgagcctgcacccatggctaaaaagaacagtgaggagaaatagaataaaagtttcccctggcccctcccaacctcatcttcattacagtcttagttgcgtcttaagactgacttttggaattgagctgttgacaggtggcagacagggtggccctagtggtgcatgag

SEQ ID NO: 22491 - DNA, 201 bp, Bos taurus
cttgtggcctgcctgcatcatctcctctgagcctttccttcctccccagcagcctccctgctcgcctgtcctccgcagggcgactcctgggaggaggagggatttggtccctgggctccttggccttctgtttgtctcccctctttcccttaccttctctattcgcttggtccttaggaaaaaaagagaagccaaaatgtg

SEQ ID NO: 22492 - DNA, 201 bp, Bos taurus
atatgggaagaagtttaggtttttataagttgccaaaccagaatagtgatgatgaaatctgccattaattttgcattgtcaaaatacttgatgatgtatatgaacgtctcaacattctgggatgaccactgctctgatttttgtgcacaaatacaagacaactgaaggtatgcacaacaaccagttttcctcgtctctcag

SEQ ID NO: 22493 - DNA, 201 bp, Bos taurus
attacttaatgaccaatcagatatggttcattggtagtaagtgtagaaacatgttgtctgaagatgtagtttaattagtatcctcctaaaaacatgtcccttgtgaccattggatgtaatcattattttatgtatttaactgtgaaattcatatttactcagcaggccaagagaacagcgttttacttctcaaagctgttt

SEQ ID NO: 22494 - DNA, 201 bp, Bos taurus
ttggactaataactctttccttcagaacttctctgactttatcattacttttgacctttccccttccagcgtaacagccctaaagacttcagctacactcggtgtggcaatcagttccagctttcttgttttttgctgggttctggtctcacaataaacctagaattgccctgtcacaagctacaaatttctcttccattt

SEQ ID NO: 22495 - DNA, 201 bp, Bos taurus
gagcaattttcactttcatgaaacaaacaaacaaacaaaatttagctaaagccatctttacttgagctctgtgctaaaagatgattcagcattttggccacgattgataacttgttctcaaggaggcttcctccctttgcaagatgctcttctagcaccgggagcatgagagacggcccactgtccctcatcccatccctt

SEQ ID NO: 22496 - DNA, 201 bp, Bos taurus
aagctcactgtataaatgcatgttctttactgaggccatccgggagaaataacttccccacatgcttcactgaggtctgtgcccagtcaaccgaagacccgctggagcaagggaggccaatttaggagaatcaaactcttaagaagatcaaccaacttcccttaatagaccttcattctttttacactttctgcctattaa

SEQ ID NO: 22497 - DNA, 201 bp, Bos taurus
ggaaaagccttggcacccagtgaaggggctgcaggggcctgctgcaatggatgcatgaagggacagtgttggcaagacagacagacagaagtgagggaaggaaggtgggaaggtggccagagcaagtgaaaggaagcttccactgggaaagtgggagagggctgctttagctgcttcatttttttaagacttttttttttt

SEQ ID NO: 22498 - DNA, 201 bp, Bos taurus
agcatttcagaaactcaattctcccccagagagcgcctggggccctggctagccccgcccccactccatacccagaggcacagagagcgaggctccccggagaggcaggaggcttgtcttacgtaaaagacctggcccgaaaaagagctcggatttgggggcactgctgagagagaaagtgggcagactggtcgaggccta

SEQ ID NO: 22499 - DNA, 201 bp, Bos taurus
tgagtaggccaagaggagacgtgtaaggaagacacggacaggtatggggtaagcagggcttggaaagaggtgagatgcacagagaaagtgtaaggaagggcggggccaagtgaggaagttgagaagaggagagctggacacacggttttcagccccgggtggggactaggtagaaggtctgaccactggggagaagggggc

SEQ ID NO: 22500 - DNA, 201 bp, Bos taurus
gcagcagggtgagaactctattgagtactttagcaatcattccttgtcagtttgagccaaacagtaacaaaggagggaactggaggccaaagcaaggtgtttttcctgtaagaagctaatgggctgctgtggaatctgggacaagctaaatggtgcaggcagcatagatgttgccagaacctgatgttaaagcctaaatct

SEQ ID NO: 22501 - DNA, 201 bp, Bos taurus
agaacaagcctgcgtggatgcaacctggaagtgttcaaaagtgacttttgcttcatgctaaggtctctgtccaaagggggcatttgtactctgctaggcacaaagttccaaagaatagcaaggagagataagaaagccttcctcatgatcagtgcaaagaaataggggaaaacaatagagtgggaaagactagagatctct

SEQ ID NO: 22502 - DNA, 201 bp, Bos taurus
actgaattttaggggactgaaaagcctcaagtggacagaactgtttgaaatatgtgaaaataaagatacggcgcttctgccaggagttgtacgtgctgttcgtcctcactcttcttcctcatcccagcttcccatccatcctctccgtgtgctgttcttgatgcctgtgtttgaaaacctctctctcttcctcgggtgctt

SEQ ID NO: 22503 - DNA, 201 bp, Bos taurus
gtttactgtccttaagcagcacattgcctggacagggatcataggatttaattattaaatctgtgactggctaattgcatagatgctagggttgggtggcctagataggccaactgactccctaaaatgtgagtttttttttttcatttcactgtctggaacagaagaaaatggctgtggttttatgtgagttgcatcctg

SEQ ID NO: 22504 - DNA, 201 bp, Bos taurus
taagtaattcagagtgtggaagagagggtcaagtaatgtggagatgcctccagaaggattagagaacaggccagtgtcccaaggccactggcaaacataggcaccaatagactcactgtctgattagattgtatattgttgtagaatctttagtgaaaggcttttcaggacaaattagcctgtcttgcattctctaggcct

SEQ ID NO: 22505 - DNA, 201 bp, Bos taurus
tctcatgcacataccaggacatggagttgcctgggatgggaggaggttgaatcccagattcttgtgcatgcggcctggccctggggtcctggggcgcatgcccttccagctcctagcgactcccctggttgcaaccgcccagtgggcggtgccagggcaggtttcaggctataaagggctcttggctcccagggcctgagg

SEQ ID NO: 22506 - DNA, 201 bp, Bos taurus
cttgaatgccctggaatgtgaacttgttggggcctgtagtagcccctcagagattcaatataggttccagggagatctataccaagcaagaaagaagaccattactatgaccatgtggctggccgagatgataaaaaggatggctggggagcttgttggcgctaatgtctgggagctgggagaggtccttgctaccactaa

SEQ ID NO: 22507 - DNA, 201 bp, Bos taurus
attagtgaccagcaggctcaatcagatctctcttgggaattttgatcatataagtcaggcagtgaaaaggagaaacaaaggcaaaggaagtacaagagaactgcttacttccgaggtggggaagataccttctgcagccatgttgagccttcctgggtaccagatagcagtctgttcctccacctgggagccagacatgac

SEQ ID NO: 22508 - DNA, 201 bp, Bos taurus
agtgtggagttgcctgtgggcagtgtggttcaggtctagaatcttggccctgacttccagcatctccaaggtgggctgtgctggccaacatcgtttctacgtgtctcagtcactagccctggggaggagctcatcttctcttaagaagaggggtctctaggccaggctcctggaggggagggcagaaggctgagttacaga

SEQ ID NO: 22509 - DNA, 201 bp, Bos taurus
agaaatgttccaaggactccgacctgcacacatggtcacccacatagataaactacatttcccagaattccctcacagctggatgtggccagcattccaaatgataacctatacaatcagttcagttcagtcactcagttgtgtccaactctttgcgaccccatgaatcgcagcacaccaggcctccctgtccatcaccaa

SEQ ID NO: 22510 - DNA, 201 bp, Bos taurus
gagaaaccgaccagcgaaacttggttccggaagggggcgctctcgcgtgtgttactccaggcgtccctggcaaaactcctgcaccggtatcagtgcctctgcgattccgtgcctgtccaatactatcctgtccaaatcatgagcatatgtaagacctgcattgtcccacctcctccattaagtcttccctgatcatttttg

SEQ ID NO: 22511 - DNA, 201 bp, Bos taurus
tacctggcatgtcagcgttcgctcagcctttataaagttggctagcctcaccgtgagccatctgtattgaccggtgagcagtcaacagtgggccccaggcatcgccgctctgtggctgtcaccagcacttcactctggtttgaggtctgacagactttctgctgattggctggcctcatttctgatctgattactgatttc

SEQ ID NO: 22512 - DNA, 201 bp, Bos taurus
gtcttttaattactaaagtgaagtcctgctatgtctgatgggggtggggaggggtctaggctatcactaagacatcagaaagacctggattctggagtatttattgcctggagtttccccccagggcaaagggaataggatccattcccagcatctccttgttgctccccacacagcagttttgggaggctcctgaggtcc

SEQ ID NO: 22513 - DNA, 201 bp, Bos taurus
tcctttgggcccagttttaaagaatccaggctaacccaggtttagaggctgcagagggctgaaggtcaaagagattaacacacccttgttggactgggtgattgtgcgcttggccagtctccaccaacacacttgcaaacatcttttaattttttttatcatgtattttatcataaattgtgccacttatatattcatata

SEQ ID NO: 22514 - DNA, 201 bp, Bos taurus
ccggatacccccagagcaacaggtattggtttttactttccagggaatttgcatatgtttcccaaattttaggttgtgtagaatgatctacacatgaaacgtgttccagaatctcctttgttctgactatgatttctttcaaatcactcagcaccaccacacatgtgacaacacgcttagtgctgatttctgtgggtggaa

SEQ ID NO: 22515 - DNA, 201 bp, Bos taurus
tgcccttgtttcccaggccctccttcccataagggcgctgtggaatagatcaggatgttcgtggtttcaccatctaggtctacagaaggcatttctgctgcgttgccagaggcaaacatagaccttccccattcacaaaaagtgtcttgcaagtggctgcatgcaggacacctgcactccatcgggtagtagaaagcaatg

SEQ ID NO: 22516 - DNA, 201 bp, Bos taurus
catgaagagagagtccacctccaacctctctctccctcttctgcccccatcagtttggaaaaaattgctagcttgggaaagattaacaaccttctgtgactgcactgaattccccttctccctttgagctccttagactgagttctcctaaaggattagggttttctggaaaactgcttgcctaaatgtaaacaagagaaa

SEQ ID NO: 22517 - DNA, 201 bp, Bos taurus
tgtctaaggtatggtgatgtaatgacacaagtaagcatgcagaccttatttttaaatgttgaaggcaacctttctatttcttcaggattcaatgactcacagtggttcaaggtcagaagaagaagaagctgcttgtgcctgccatgctcttggacctgagatgtctagacttcttgtgaggttcactgacattcttatatc

SEQ ID NO: 22518 - DNA, 201 bp, Bos taurus
tattcctcactcatcttaattcctctgatttaggagcagacatttgccatgttacaaggatgtcaggatggcaaaagtctgacaatgagaagttaatttccgctgcagtagcatggactttatacataacataatcttcaagattcttttgctgttgccttcacatgtgagcaaactgggcacttccctgatgctcgagtt

SEQ ID NO: 22519 - DNA, 201 bp, Bos taurus
ttgtgtatgttgatgttcatatcatgtttaaaactatattttttagatttatcagactttaaatcatcttaaaaatataagcgattataatgttgtattctccccaaaagtgagatattatttctgtctttatcccaatttgttgattattaactgttttgtgtttgatggattgatataattagttgataaaatcaatat

SEQ ID NO: 22520 - DNA, 201 bp, Bos taurus
agatggttgacaggacaacagatctagtctcaacggttatctgtggtttagtcctggttatcttttaaagactgatatattccagcaaagaattcttgccacagttacattcttatgtgcgtggctgttagcacccaatatttatgatacttgaaggtaggaatttttttttgtaatggacagtgagattattgggaatga

SEQ ID NO: 22521 - DNA, 201 bp, Bos taurus
ctgagtgacaaacacacctatccttattcacgtgttaatgtgtccctgcctggttctcaggctcctctgtgactccttctacagaccgccactcccctgcctgctctacccacacagacctaaggacagttgtacttttattcctcctcacctgtcacaccttagtttctggccaaatttttttaagtttatttttcaagg

SEQ ID NO: 22522 - DNA, 201 bp, Bos taurus
aaaccacctttcctacccctggtctgtggaaacactgtcttccatgaagaaattggtccctggtgccgaaaagttttgggaccactgatttagagggaaatggttttgaaaataatgagaaagctcctttttggtggtgagagagaaatataccctttaaaatgatcgtctgtcctgtgattctaagaggaatgtagaact

SEQ ID NO: 22523 - DNA, 201 bp, Bos taurus
tttctagctgtctgtgtgtgatgtgtgtgtgtaaggtggagatttgattataatttttaattagtccaacttcaggtttacatatctcgaaggacaactatcagttcttggcaattaatgtttgtatatcacctcgagaaccttgaggaagagagatggtatataaatggataatatggtaatgaaaatattacagtcact

SEQ ID NO: 22524 - DNA, 201 bp, Bos taurus
caatgcccaaagtcagggcggcggctgagaggagctaccccatgcccaagctcaggggccgcagccaagaagagcaccacaacccaatggtaaggagcagcggctgctctctgctggagtgcatgtaagagaaggtaagagaaacctgaggtaagataaatgctgggctggaggaagcacatgctggaatcaagattgctg

SEQ ID NO: 22525 - DNA, 201 bp, Bos taurus
cttgttaatcagtttttcagaaaatcagttgtttaactctagataaactgacattgttccatttaatactcaattatatcaaatataaaggttaaacgatggatatactttctggagaaggcaacggcaacccactccagtattcttgcctggaaaatcccgtggacggaggagcctggtaggctgcagtccatgggttgc

SEQ ID NO: 22526 - DNA, 201 bp, Bos taurus
tcaggaccaatggtaattagtaaaaggaatctttaaatgtcttctataagcactgttgtgggaatgttgcaggttacacatggaaaaattataaacttgccatataattcatacaactgtcagcccatggggagctcatatttaaaccaatttaaaataaatcagtaattacctttcatgagctaatgaatcaaacatttt

SEQ ID NO: 22527 - DNA, 201 bp, Bos taurus
ttctgagtagtaaagaggttgtttatgcgaactcaaccaagccagtgtaaagtcccatctgattctgaaggccattgcctctcaccatctcattatgaccaaatggctgggctctctggttcagatagcattgccttctgcatgtggtggggctttactagcctatcttttatggctagatattgggaaacagaatcttca

SEQ ID NO: 22528 - DNA, 201 bp, Bos taurus
acaataattaactgcagagaattataacatatgttaaaataaaatgactagaatgatatcaaatggtcatccagtctatctatacagaagtcagaagtatcggttgcataggaaccaaagtaccaatatttataaaactgttttagttaggggggacaagtatgcctttcatagcctgtatttgtaatgtttatttacata

SEQ ID NO: 22529 - DNA, 201 bp, Bos taurus
agaaattctaggttgctgcaaggtataaaataaaaatatctgacttagattggtcaagaaattttctctgaggaggtgacatttatattttatttactctgtgattgctattattgatgaaagttagatctagttatttgactgccacagttgttgatcttaaacaaatagactgccaattatttctccagcaaaagtggt

SEQ ID NO: 22530 - DNA, 201 bp, Bos taurus
gttacaattataaacattaacagagtctaagaaaagtatttttacaagatattgtgctgtgtagtcattagttctggacctgaagaaaggccaattctccggtaagatacattgttgcacaagacttaaggaaagcaggagggagaatgttcacctccttcttaaagggccctaagctttaactttcccacaatcagttat

SEQ ID NO: 22531 - DNA, 201 bp, Bos taurus
ctccgaacttcttatccactggaccctatatatgctcacctgcctgggcggccaggacttgacttcatctctctctcacatgcattgttgtaacaaccatatgtatcttatctaattgccttcccaatgtcggctgctcttggcttgcctagccctgccagtgcccaagtttaactctgatattgctctccattttacact

SEQ ID NO: 22532 - DNA, 201 bp, Bos taurus
aacttggttgtggcccatgacctaagtaacattttaacatgtttaggtacattttcaaatattcctggacaggctagatgaatattttttacatatactccgttcttccaaatctccaaaccaatatataaagtatattgaaatacaaacttaacaactctcagttcagagtatgactctgaatcatagtgcatttctttg

SEQ ID NO: 22533 - DNA, 201 bp, Bos taurus
ttcaacatcatggtccatttaacttttggaatcatgtgctaccaaaaagcttgactaaaataatgttttgtaaacgagactctactttgaatgtagctaagtccattataagtggatttacttaaagctggtaaaaagaatctatacttgctaatgcaaagttgtcaacatagagcatatgcccaatcacaattcttgtga

SEQ ID NO: 22534 - DNA, 201 bp, Bos taurus
tgcccaaaatctaaaggcaaagactaaagaaatttcactttggagaagagaagtaaaaaagttcacatgtctggaagagaagtctcacagtgttgagtagtaggcatgatagactatcaacaataaagttgaaatgagagtttttattccttatactctttttaattagataaaatttatccatttgtgactgtttttcca

SEQ ID NO: 22535 - DNA, 201 bp, Bos taurus
taaacaaagaccctgaagaattgtcctgtatcagtgatttaaggcacctctttaccgtgcttctcttcattagagaggatgctcataccctttttctctgggtgtgtatttctgcctagcttctatcctaaataaactatttctctgtgtgctctcctattcactgtactgggtctaataataaatgctgaacctgttttt

SEQ ID NO: 22536 - DNA, 201 bp, Bos taurus
accctagaatagctcaagccatgtagatagtgaaggaaaattcatttaaaggcaattatgtttcctctcattttgttttactttttcatgctgtcagccctggaagtgtaaagagcttctaaatggctggtgctggtaagtagtcaaatatttagaagccaagggtctttaatcacctaagtgctttacaatgaatactga

SEQ ID NO: 22537 - DNA, 201 bp, Bos taurus
ggtatgatttgccgtgatgatatatttatcagaagcagtttatttttctactacaaaatgctctttgatatcattaacctacagaaataactgtggaaagtaaagcaaggccattcaaatggtgaggtaacaaagaatttgttttccactcctgaagtctgcatgaattaatgcagcaaataacagtcctccagaatccag

SEQ ID NO: 22538 - DNA, 201 bp, Bos taurus
ctgggctgtgtgagcaggggtaggaaactgctgtgatccccacactctgaacttccagtttcaggcctaccttaaaaaaacacgggggaaagaaaagagatggaattataagttttatcctccatccttctttccatctccagactctgctctccatccaaaaataagacttcttcccctctaaacaaagttcaattttgt

SEQ ID NO: 22539 - DNA, 201 bp, Bos taurus
gggctgagagagaggccagagcctcaggtgctgttgatacaagtctttcctaagcatatccacgaagctactaccgtatcattcttgatctagtgccacacataaacagcaacccctgggccctgggctatgttctctgaacagcaccaggattgttctgcacaatgctctgattgtctgtggggcagggcagctggagag

SEQ ID NO: 22540 - DNA, 201 bp, Bos taurus
tgttttaagttttgacaactgcatgagaaagtactccagagttatattattcttgttcattttcaagatgtgtaaaatgttttaaatttttatatattatgtaatatataattattctaatctcccaaatagaaaagacagccttgatacttgaagtgggggcaaagaacctctcacactagatgaagtggctgagatgtg

SEQ ID NO: 22541 - DNA, 201 bp, Bos taurus
atcaattcaaggccaatcctgttttaatctgttgagaccttagccagtaaatcctctaggactagatgtgctggaaaggtcctgcaaagtgatatttgttatattaaaagcacccttggcctgccttacgatgcatagtgattggtttccaaaccttaaactggtctcattaaatgggaaatttttttaaatttaaattat

SEQ ID NO: 22542 - DNA, 201 bp, Bos taurus
ccagttttttcacggtgcagtcaacacaggcttctcacacaagcgggaaaggacagtggcgaggccaggagcgatgtgtttctgctcggcgctccacggcagggcctcgctgaatggcttgttgtttcagagggagcctagaaccagaaagcagacaaacagaagcccacacaaatgtaaatgttgtataaaatcagatac

SEQ ID NO: 22543 - DNA, 201 bp, Bos taurus
ctgagctggggtcaactgaagtctgtcagattcagccacatttgtgtctattttccttgctcccagaggtcatctcagtctcctcatacccctacttctggttcctttatatctgtctccatctctggctttgggccctgtgttggagacctggaagtcagttgacggggaggaagtcatttgcagtttgacagctactcc

SEQ ID NO: 22544 - DNA, 201 bp, Bos taurus
ttaagtttaacagggttcttctttttccgttttctttttaaagagtagtcagaatgtcttgacgtctaaggagcttcacaaatgctggggcatcaaaatggtttcatcaaaatgttatgggtctaaatattaataaataaaccacctaagtcaaatgaagtggctcaaatagtaaagtgtttgcctgcaatgagggaaacc

SEQ ID NO: 22545 - DNA, 201 bp, Bos taurus
gaatgcaaagttattcccactccaacatgaaagttctctgggcttttcgatcttgtcacatttgaaagccatgtgctccagtagaatggcccctggactgccctcagggtacccgtgttccggtccagctctgcccagaagatgtgtaacattaggcaaagtgcttaacctcttcgaatcctagtctctctgcctgtaata

SEQ ID NO: 22546 - DNA, 201 bp, Bos taurus
gtctgtttaaaagcacccacatgaatacacacacacagaaaagcctgaaaacgttacccttttgctttcctctatattttctgtagtactgtttttgtgcgttttttatactcttctaccagcaatatctattatttcggtaataaggaaaaaacggtctatgttatattttaaaaacacaaggcttaaaggaaacagcgt

SEQ ID NO: 22547 - DNA, 201 bp, Bos taurus
tttttgagaaacccaagttaattaccttatcagtgatttcattcaggatttggctaatcattttaatttaatttcatgattaatttccagttaaacactgcgggcaataaaactaaacagctgacagtctataattcttacatcacatcaggaggggtgcagtgttaactgcttccacttttggtgatgctgaacctttaa

SEQ ID NO: 22548 - DNA, 201 bp, Bos taurus
aaaaaaaggaaagaaaacctacaacaattccctgatgtgtacagctggttcttctgcactcagcataacctgggctgtggaaagaagcatttacttactttggtataaaaatcagattatcttgtttcttaaatttctcctttaacaagaggcagtgctttttaaaaaatctagaatatcttctttacacaacaatgttat

SEQ ID NO: 22549 - DNA, 201 bp, Bos taurus
gcctaactcttccagcaaaccccttggcactccactgcagtgacaaagtgatacccgcaaggcccagcagcacagctggtgggctcttcctctctatccagtatatgacttctgcctctcaaggtgagcccagatgcattgtctgttgccccattagcctcttgtcttccatccaaacagctcttgctttccttaaggact

SEQ ID NO: 22550 - DNA, 201 bp, Bos taurus
tccttgagcagctgagcaacaggaatggcctgtgcaggagccatgctctgccagcaggtgtcatctttgcctcatggtttctgctctcatctattttcctcaggattgtttttgaaggccaggaatagaataaatttgcaagtcaatggagttcaactccaaattttaaagtctcctacaagagacacaaatcaacagtgc

SEQ ID NO: 22551 - DNA, 201 bp, Bos taurus
cgctgacggtcccaaatggccaaacaactcattttcccgagcaaactccagggctgtaaagagcattatgataaaatggcttttcatgtaactgtgcttctagtagagaaatatgcacctcaggccaaaatgaggattaaggcttgtctagaagttacattttaatggaaattaatatgctgacaattttagttcttacat

SEQ ID NO: 22552 - DNA, 201 bp, Bos taurus
cattacagtaaagcctgcttgaattgatgctttttagtactttctttttttctttttaaatgtagttgaacacacaaagtcatagctgaaggaactgatactttcaatgcctagtattgaggcattatgtaataggagaagtatgtgtctgctgtgtagctgatatgcctcataatggggagaggggctccgagagtgcag

SEQ ID NO: 22553 - DNA, 201 bp, Bos taurus
tagttcagtactctcaaacagatattatgacttaattattttcaaaacaggaagttcccctttacctacagggaacccttttgttttggtgccctctgttgtgttttcccctgacctttctttctgcctaccaccctgagtctttcagtttatcttcccaaggtttagtagagtgggcaggtacagtgtaggtggttagaa

SEQ ID NO: 22554 - DNA, 201 bp, Bos taurus
tcagagcaataatccaagagagagaaacggggaactttcataacatagcctcagaagtcaagcaccatcatatccagtacccaagtagttatgcaggtcatcccaattcagtgtgggaggggattatttataagtgtgactatcagaagcaagaatctttgggtaacgtcttgatatttagaatattaaaagtattccagt

SEQ ID NO: 22555 - DNA, 201 bp, Bos taurus
ccctctgcttcatcattacctgtgtgagagtcacattctgttgccagtatcaaatatgacataataataataaaaggaaaaaccaggtggccaggcttttttgagcatatggaaacaagattcttccatgattttgccagtgcccacaggctcgccagcacctaacattagaggtggatggaacagcgcagtcatcgaggc

SEQ ID NO: 22556 - DNA, 201 bp, Bos taurus
ctgaactttttcctaaaggaccacaactaaagcaatatttcaaataacttcttccccattataggtcatttggaaatagttacaaaagtgatgctcaaatgcatactgaacgtctcactccctctgtaatattaggaccaagaataccagtcactttcctactatatatacagataagcagcaatactaaatatggcctca

SEQ ID NO: 22557 - DNA, 201 bp, Bos taurus
ctggccacagcgtgacgtcactagtgggcggcgcctcgcgtccctgggagatcagagtggtggttcccaggaacaccaggcgacggtcgcagagtgcatgcctttgcccagggctcgaggccctggcggttcatcacctgcagctcttcactaataggaggacctggggcaacttcgtggtgctggacacctcacatggta

SEQ ID NO: 22558 - DNA, 201 bp, Bos taurus
tggtgggggaaacaggaacagtagcagaaaacacacttaatgtaactggaaggtaaatgaaaatgacatcaagtggcatgtagaatttaactgtaaaaacgtaaaataacaactagaaagttaaagtgttagtcactcagtcgtgtccaactctttttgaccccgtggactgtagcccaccaggcccctctgtccatagaa

SEQ ID NO: 22559 - DNA, 201 bp, Bos taurus
ccccagccgagtggggcctgcggggtggggcgtgagctacggtgaagctgcccccattgtgtggttggaccgacagggatcccacccctctcttcgagtccctgggcctttcgtttcggaaaggggtgtgtatttgtgtactttgttcccgaacatgaagataaggactgcccagagcatgcaatgtatagtaaacagact

SEQ ID NO: 22560 - DNA, 201 bp, Bos taurus
aggtatcacttctaaagttgtttacttacccaaacctgccaaaggaaggcttataacaatgctgttagagaagtgggtaccttctggccacgtagccaaatggcaaaaatggaaaactaaaaggcatctgtcttagttcctttagatttatgatccttgaataatatttttataacaaccttgcctcactccaaaatgggc

SEQ ID NO: 22561 - DNA, 201 bp, Bos taurus
atgtaatgaacctggaactagccagcagaacttcagttttctagattacttacccgtttgggtttctttccagctcatttaaaagtgtgtgatcacagtattcaaagactaaatgcattttcctctttctcctgaacacctcaatgaggttcacaagatttggatgttttaattgctgcaaaggaattgaaatacaaaagt

SEQ ID NO: 22562 - DNA, 201 bp, Bos taurus
gtcagtagtgcctggcaccatagtaatcccacaaagtattatttactgttgttttgagtacatttttataatgttttaaaggggaacagtcatgaggatccggtcccatcacttcatggcaaatagatggggaaataatggaaacagtgagactttattttggggggctccaaaatcactggagatgatgactgcagccat

SEQ ID NO: 22563 - DNA, 201 bp, Bos taurus
agcgtgccaaaagcatactttttgggggggttgccaaagccaaaagttatgcattctcagcttcgattttcatataaaaactgagagtgtgttaattgtactattgtttctgaaaactgggagttgatcttccacaaggatagtagtagtagcagaaaacatgcatgacactaagtcaactccgtcacatccgaccctttg

SEQ ID NO: 22564 - DNA, 201 bp, Bos taurus
ttcacccactgtaaaagtcttcccagggccagctctgaagagatatgtctgtattggtttccttccaatccctcctgtcaagcaatgaaggatggtagagaaaggccaaaatcctcttttaattttgtatcttctgtcacagcaacatattttatttactaacagttgattttattgacttcaacccacagaattgctttg

SEQ ID NO: 22565 - DNA, 201 bp, Bos taurus
gaattcctttaaaatctctttggcaaagtcacccatgccacatttgagagtcccagctattagtagttcatggtcacacaatgcacattttaacagctacggctgtcagcttgggctggtaggcccgtgcatttatccaggtctattccttaaaccatatgggataagtccaaccctgttcctcatgacattcgtcaggca

SEQ ID NO: 22566 - DNA, 201 bp, Bos taurus
atctatgatgagggaatcacccaggtgttccctagggtgccagttcacctggccattcgtacgcatccttttagcacatgacgaagaggaaacacaattacagctgccaggtgaaagaatccggtctcctcctctctactttcaagaggcaacagaaaatgcccccggggcaaagatatgatagatgggatattcttatct

SEQ ID NO: 22567 - DNA, 201 bp, Bos taurus
tgggggcactgtactacaggctggaggggtggacaacaggaggaagataaacattcctgaaatgaaaagcttaccatagaatatggctgtgtcctaagacgcagcaggccaggatggttgttagcaagcaatgagtccagttcaaagagtaaaagcaacatttaacagaggtggtagatcattaaaggtctaggtagaccc

SEQ ID NO: 22568 - DNA, 201 bp, Bos taurus
gtttaccaggaccaaatagagttgaactaacccaaaggggcagagcagatttcatagaacataagcaagagataggacataactagagaaagaggaaagacagtacaatataaaggaggccaaggagtgcagttaagatctgaatacatggtgggaggccaaataagagagaaggagccatgggtgagatgaggccagtgg

SEQ ID NO: 22569 - DNA, 201 bp, Bos taurus
caggagccaaccctcgacagcttacaaagagatgaagcaaaggaaacagtgcctttcctggagcccttccttgtggccctattcttctcctggtcactcatccatgaacaattcacattatccgtgaattctcccctattcttcatagcctgtctaaggcctgtgggtttttcagtaaggaaaactgccattattaaacaa

SEQ ID NO: 22570 - DNA, 201 bp, Bos taurus
caaatgctgaagagattctatttccctttgttagtaatgccagcatttgaccttgagtgtgtgtagatgggcaaatggctgtaattctgagtctaaaataaattttctttgattcatattttaattggtaatggaatagttatctttatttctaatctgctttcttttttttctcttccttttgctttaagaagagaaact

SEQ ID NO: 22571 - DNA, 201 bp, Bos taurus
attcattaatacccacatgaacatttactgaatactatttaggatggtttaatcttacttcttacagcaattcttttgtagtgtcaactttatttgtgatattgagggaaaggtataatataaaataaagtggtactatatagcaactaatccttgacagttgaatacgcatgccctctttctgacttccccatttaagac

SEQ ID NO: 22572 - DNA, 201 bp, Bos taurus
tgaaataagataagactgttgaaagataaataattttcttggaatagcagaggcatgcatgaaactaacaacacagattataaattttttgaggcattaaaatatatttaatagatagcaagggtttccctagtggctcaaatggtaaagaatctgcctgcaatgcaggagaccttggtttgatccctgggtcaggaagat

SEQ ID NO: 22573 - DNA, 201 bp, Bos taurus
gttctatttgccaatctggtcagtgattttgaacattacaactgtcaacatccctgtttccatggccacactttatatactttgtcatacatgtttccaagaaagtttaattggggatatggatgcccagtaataatgtcttgtatttaatatttgcttttttttttaagtaaaagctcttagcacaatttcttgctatta

SEQ ID NO: 22574 - DNA, 201 bp, Bos taurus
tctttgcataaccattttattatgtttttaagatagtttacctttgaaatatcctagctattcttaacttgatgattttagagagaagtaatacttagtaggagttgagcactctgaatgggtaagtttctttttaataatgcagtacttaatactgcccatgggcagtttgatgtctcactgccaggttgcaccagagct

SEQ ID NO: 22575 - DNA, 201 bp, Bos taurus
taggtgacaatgggtaactaatatttgaaagatataattaggaaatactacagtgttttccaagattttttttttgtatcaccatacaaatatgtgttatgctttagactatgcttttcctcttattttaattaaacacatatttatggaaatcttgatttggaaacagcactcttaatagtctaaggaaatatgacattg

SEQ ID NO: 22576 - DNA, 201 bp, Bos taurus
gcttaagtcagagagagagagattaatttgaactccacaaatggcaaatcttgaagactgcagagaaaattatctgctggtataaatcttattaagtctagctgtttatgatgttttactttctaattattcactttaatgctttatctcctatgatttttttcaacatttgttcagtaaagcttgtagactcagactttg

SEQ ID NO: 22577 - DNA, 201 bp, Bos taurus
agtgggatttgagttgtactctgaagttcaaattacctgcttctctggcctacaacactctaaccctactgtggtgataaaaattcctcctatagtaattcctgagtgttggtctctgcttttaatgcttttgcatatcgctgcaggagagcctacattttaagaccttacaacctctttctaagtgagtttttcaaatat

SEQ ID NO: 22578 - DNA, 201 bp, Bos taurus
ttagataacagtagattagcaaaataaagaatgaagtcagtaatataaaagatccctaaatcaaatgcatcattctgattctgttaaggctgagaagacagcattaaaccttcacggaaaacatagcatttaattgaggctcagaaagaaggttaagtttgtctgatgcactgaacaaatgttttgaggaggtataacttc

SEQ ID NO: 22579 - DNA, 201 bp, Bos taurus
tctaggtgttagaatcttaatttcatttctcctcttctaagtttttggcctttgcagattcttagagagttgcctccatctgttaatatattttttgtaggtatggggcataatatagttgggctagatgctcttgcaagtatcaaaaacaaataccaaacttttaaacagcacctttaagttcttgttttgatgtctcat

SEQ ID NO: 22580 - DNA, 201 bp, Bos taurus
attgcctcacaaattgaatatacatatacaattgtatataattcacaggatggcaatacaaattgtataaatatttcacagggcaccatgtgaagtgaaatctataatttcctcctaaacacactcatattgcatgtctactgtagtgaatctctcctattcataatgaaagagaaaaaaatcacaaaggaattaatggga

SEQ ID NO: 22581 - DNA, 201 bp, Bos taurus
tgccttctacatctgtataatttcagtccccaatatatcctttcagtagggacaatgatggccattgtggttttattgatactctggtaattatttttccgttgaagattccttatttacctgagtattaagaggcctaatggtttggacatcggtttgaaggaccaggagttttgttgctattgctactatttagggttt

SEQ ID NO: 22582 - DNA, 201 bp, Bos taurus
tcacccagctctcttttgttttcagcagccccctgacttctaagaatgactgattgcctcaacaccctaagtcaaaaaaggcagaaaccagtccctggaatagctcttcataaagtcattagacagaagctccagctgtttacgtcaccagagagaagccaggagttgcatgttttctcctgtttattctgtgcttagctg

SEQ ID NO: 22583 - DNA, 201 bp, Bos taurus
caatgcatgttgtaagtaaactcatattagttaaggcaaagttagtaagaataattatcaggatttctataacctacaaacctggccattttgaataatcatgttttccaatccagttggtttattaaaaatttatttttcccgtggtcaggtctttcatattttggcaagtgtcagtttttccctttcattatgtaggtt

SEQ ID NO: 22584 - DNA, 201 bp, Bos taurus
aagtcttaccaataaaccaagttattttaacttcctctaaaaggactcatcttacatatcgttttattgcttttctttgtctttcttgtagtggaatgctggttgagctggaaacaacccttaaattatatagttcagtggttttcaatatgaactctgcaaagtctccatgattttcacagacatcttctctgcctccca

SEQ ID NO: 22585 - DNA, 201 bp, Bos taurus
agaactgaagagaccttctgtgcaaatgtacacgagtacatttggataaaattctgactagatgctccttgccaaactcaaccatgaaacctacaagccattggattaggaaatgttgtgattctctcgtccccagtgttctcaactagtcagagaaacccatccaaaagtaagggccatcctacatagattttggttagg

SEQ ID NO: 22586 - DNA, 201 bp, Bos taurus
actttatctcaaacctctttaaatatcttgcctcctaccaggtgccctacacaaaatagactaccaacaaatttgcacatgacggatatgacccctggccgctttactactcagtgtcttttccccaaatgtctctaagaacaatggaaaaagtagggggaaatctatactaaccaagcagcatcacttcctccaaagtgt

SEQ ID NO: 22587 - DNA, 201 bp, Bos taurus
tggcatcacgttttttcccactgagaatatgaacagtttgattatcccttcagtttctgagaggtttgatttcattcccatcctcaggtatagcctcagtgcagtcttagagagagagcattagttttaattcagacttcaggatgttctgatccatctcccaatctgtctgagaatcctcagatacctacggagaactca

SEQ ID NO: 22588 - DNA, 201 bp, Bos taurus
cgggggcagggtacatgtgtatacctgtggccaattcatgttgatgtatgacagaagccatcacaatattgtaaagtaattatcctctaattaaattttttaaaagagtggcctttttatattagaaaaaagaatggtgatcattttaagatgtatagaaatatcaaaacactatattgtgcaccaagaactaatatagtg

SEQ ID NO: 22589 - DNA, 201 bp, Bos taurus
aatagacaacatttataaactactatatgttaggtatttttaccagtattatctcaattaatccacagtttcattaagtaggtgctattgtttagtctcccttacagatgaaaaacagagacagagagtaatctgaccatcaatggcaagtctttcaaatgccacaacacttattcctaactagttcacagacctccacca

SEQ ID NO: 22590 - DNA, 201 bp, Bos taurus
cttacagtctgtggattggtagagtgctctgattcagcctgtggctcagatacagatcaattccacatgctactcattggggggccaccagctccctgaggctggctcatctcattatggatggaagaagcataagaaaaagctagtagaaatttcccatgacccttaaggccttcactcaaaactggatactgtccaatc

SEQ ID NO: 22591 - DNA, 201 bp, Bos taurus
cctacaagtggagactttgaaaaagaaactcctgtctcttcacctcttcctttaagtgccttctcagtgaaggatgctgcagtaccagatgtctgggacaatacccaggccatttcatcagatttctgccattattggatgcagatgattaatagttctgcttgcctggccccgacatgtccactgttaacagaggccttc

SEQ ID NO: 22592 - DNA, 201 bp, Bos taurus
aaaacaaaactcctaaacttctttttaaagaaaaattgtaataaattaaattatagggttagtataagaaatgtaacattcttcagtgcagtaataatacgcttcagtttatcagatacatgaaaaaaacgattttttaacataatattagaacttaccatttctcatctcatatatactcttgctttcttaaaggaatag

SEQ ID NO: 22593 - DNA, 201 bp, Bos taurus
taggatggctcaacttgtaaagcaagctgtgagttcccaaacctgcagcagtgggtaacaggctgtgaaaaacccaaaaggttatatcctccaatgcccttttcagatttggccccggaggagccttgtagacaaagaaagatggcccagagggtggagccaagagtctgaggtttttagaacactctcctctctgaggta

SEQ ID NO: 22594 - DNA, 201 bp, Bos taurus
tcgttaccagctgagccattgggggacgttcttacaggagccttggcctcagtgaaacacttgacgggcactgtcctctctcttgggacccggccatatttgaacaaggctcagccacacaggtggaatcattgcagaggcaggaccagggtgggggcagccaagtgacagggtggccaccattcccacgccccagggagc

SEQ ID NO: 22595 - DNA, 201 bp, Bos taurus
gggcaatgcaaagaacttaagcacctagggtcaatgaacctcctccctagagcgcttgcattaaagcagccccattccaatggcttcctccagatccagaatcttcagagaaagaatctgatcagcccaatttagttcagttactccctccatacccaccaactatgatgggggagtcacctggtacagaacctatactgt

SEQ ID NO: 22596 - DNA, 201 bp, Bos taurus
agtcctagcagggagggtcagtctgcccgttttggagctttgttgtttcaaagggcactctaatatcctcagggaactcatgactgatgactccactaccgactggtaggtggcctattgtggtggaagatcagctatcaacaccaactgagtacctactgtgtacctaatagaagacagtctctaaactcatgggctagt

SEQ ID NO: 22597 - DNA, 201 bp, Bos taurus
aactggggcttacctctgttgtctcacctgtaatgaaagaccaggaccacgagtcagttccctgccagcactacaggctaccattctgggagaaacagaccctaagactgaagaggttcctggcaccaatgggttacatcagctcctctgggaatgctgctgcaaggtacagttgacagctggcaaatccaacagtctggt

SEQ ID NO: 22598 - DNA, 201 bp, Bos taurus
gaactgaactgaagatagacaaccaactagttctttgggaaataatatagttgggtctgtatccaaatacttgtactaaataaatttaagatggagaaaataattaaatgttaagaaaaaagaaaccataaaaatggcagaagaaaacaggaaaatgttttacaattttcaggcaaaaacagactaagaatgaacacaaag

SEQ ID NO: 22599 - DNA, 201 bp, Bos taurus
accagtgacttaaagtcaacaaaaattatacaccagtattgagttcctttggccaagtaaaccagtttgttgattctgagagatggatgtacagaccaggtgattgacactgctggcctgcagcagaggaggtgtccagtactgggatgatctgctccaggtcttgcaagctaatcattaaatacacagattcctttcctt

SEQ ID NO: 22600 - DNA, 201 bp, Bos taurus
cccccctcaggcctgttgtgttttgggaggaggatttctcttggagggagctgaacagaaggtgaagctttctgaggaacctttctatgtctccccacaggtggatatggcctcccaggtaccttggtttaagcagctggctcacttcaagatgccctggacatctcacaaggactcctgtgagcagggcattcagaacct

SEQ ID NO: 22601 - DNA, 201 bp, Bos taurus
agaggtctgtgggagccactgtggtagaagggaaggcttggagggagcaccctgaaccagcaagtctttcagtcttagcatctcactggaaatgacaagcaatggatttgattaaacgtcagatgcctctggcgccaacattttacaaactggaaagtatgcggggtgtgtaagtaaagaatttcatagaatattaagcat

SEQ ID NO: 22602 - DNA, 201 bp, Bos taurus
aacagtttgaaaaattacttaactgttttttgtgtgtgtaaaaaaaaaaaaaaaaagtgtaaaactggtgatatctactctttcctcccaggatttttggggaatgttagaacttgcataggaaactgtgaaaaattattgttgcttttcataatcaagtctaaacctcatgaatttgggttcttctccagtctctccttg

SEQ ID NO: 22603 - DNA, 201 bp, Bos taurus
aacatataaatgttttattttgttagagtattagcaaattctgagatttattttccttttttgttttaaataaattgtacctggtgaaaataataaagcaatggattcataaaggcaaaaataaatagattatagaacatactgtttagacaaaaacctataaagcaaattttaatcttcccttataatccttatccttcc

SEQ ID NO: 22604 - DNA, 201 bp, Bos taurus
cattgagggtcctctttgggaggatgaattctattaaaccttattttggcaaattgtatagaagcaacgaccacatgaacccatcactagggctccttgtaggcctggggaggggcctgtgggggggaggggggtctcaatatttaggcatcattagcttgacagtgggagaaggcaatggcaccccactccagtagttct

SEQ ID NO: 22605 - DNA, 201 bp, Bos taurus
gaaagaagaccactgtctatgaccaggaagccctcagaagacactttctgctagcactttgatcttggacttcctacttcttgaaccataagaaataaatgcctgttgtttagaagccaccaagtctatggtattttactacttcagcccaaacacagctctacttagccttagatctcatctcattgtcacctcctcaag

SEQ ID NO: 22606 - DNA, 201 bp, Bos taurus
gcggcctggcctttgcttccactcccactacgcagccactgaagctggggtggaattttaaggctgcatctgaattttttcctggagaaggggagtgggttgaaagatgggaacaggccctttggaaaggacccaaagccaaatcctgagagaaaaggcagagacggcgcagggagaggggtctacggccagtttctttag

SEQ ID NO: 22607 - DNA, 201 bp, Bos taurus
catgcttctagttgctgcgttcccttcaagtggcctgagtaaaactctcagtttcagtgactactggcagaggggaggggtgacaagtcattgagaaccccgtttgatgaaggccgggacagggaatggttgtattcacctggcaacgtctgtgcaaaagttatgtacagttggtgcggtaggtctattggagtgtggagt

SEQ ID NO: 22608 - DNA, 201 bp, Bos taurus
ctagtgtgttgtgtgccctcagaagaggccccagcggccccacggacggaaatgttaaacacagagtctctgtgtttatctcaccccgtcgtcatgcagcatgactaaggcctgcctgcaattctaccctgggtgtgctcagggaatcacagcctctccatgacaatatttactccactgttgcctgggggagctctaaat

SEQ ID NO: 22609 - DNA, 201 bp, Bos taurus
tggcctaacctggccagctccatgcaggtgggagacacacagctgtccccatcatatgattctagagccgtgctcagtgcacttcctggaaagggctaggcagtatatgttttaggctttgcgggccacttggaaactacttagactgctcctgcagcacccaaggacaatgggtgaatgaacaggtatgctccaggagaa

SEQ ID NO: 22610 - DNA, 201 bp, Bos taurus
tcaactcatggtacagtgtggctaccaactgaccagaacagggttcccgtcagacaactacatgctaagtcccttctaccatctagttttaactttcagtaatgtctccacatgtggggaaggcagtcacccttaaacttagcttctttggatttctcctgtttgcagtgcctgcctctctgccctgaattccccctcaag

SEQ ID NO: 22611 - DNA, 201 bp, Bos taurus
tcataaaaaaaaaaaaacactatggggggatgtgggagggttaaagggtgggcagagggttagagtctttcattaaaaatgagcttacttctctgccaaataaatatacacaaacagccaccagattttgaccatgcacttcacagacattaccacttatttgtttaaacctattaatagggctttctgttacttaaagcc

SEQ ID NO: 22612 - DNA, 201 bp, Bos taurus
caaaacacaaaaacagctcctgctgtttattttgatgaggccaagtatcttaaccccacttctatactctaagccccacttctttttataaactgaatttaaaagctattataaaggcctccccagaaattcttatttcatcttaccttgaatatattttctcataattagtcctcaatagaaatgaaaaatgacgttttt

SEQ ID NO: 22613 - DNA, 201 bp, Bos taurus
agtgttcccatgttgcctctgggtttccaaggaccgccttccagggctgccccagccagacccccttttcctgatctaggcctttccctcctaacttccatacttcagaacatactcatactgtgtccctttactcgtccaggtttttggtaggcaaacggtgaattagtctgacactgattaatgtcaccttgttgaaga

SEQ ID NO: 22614 - DNA, 201 bp, Bos taurus
tccctccagatctgttccctctttccattttagtagatattggactttccgataaagaggatcctgctactgaaagactgaaatctaccacttggaataactcgccctagacgtagaaaagaccgtaggagctataagtctggctctcaggcttccaatgggggaaatgccacaacggagcagctggaggaaccagttcag

SEQ ID NO: 22615 - DNA, 201 bp, Bos taurus
aggagaatcagagcctctggtgagggtgtcctgagtggaggaggggcctgtggggggcgtgagggcaggagacttctgtgtgagtgacttcagtgtgcagtgaggcagggcatgaaatgcatgaagacaggagaaggaggattcctgcttaggaggatttacagccatgacaaaggcctagagatagtgatgagaattgga

SEQ ID NO: 22616 - DNA, 201 bp, Bos taurus
gaaggagagagcttcctctgaaggggctcgtccagcctgtcggcttcttgctgaaaactgacatggtctgcatggggatcctactccttaccagacaatgtgcggcctcatcaggattaaggcaggtggaaacagttcagcagataccccgccagggagtctcgcccttgtcaccaccaccccactccctggctcgtgggt

SEQ ID NO: 22617 - DNA, 201 bp, Bos taurus
ggtttaaaggtcctgctctcaccagggccaggctagaccgtgcagcgcctaacacaatggggtgggggaggcagtgaggtaacacaagcctgtgctggggttgggtgtagccaaggccaaatacttcatgtaggtgcaacctgcataactgcacacggagagcttggttctcctgcagctcatcctccacgtttgtgccaa

SEQ ID NO: 22618 - DNA, 201 bp, Bos taurus
cccccagagagttccagatgctgccaggcctcttaacaggtagacccagacctggcatagttagtatcacttctttgtatccagttgtccaaagtaagccacaaggccagcccaggctcaaggggagggaagcagattttgtcttttgataggaggagcatgcccctcatggaaggagtaccaatggggccatctttggag

SEQ ID NO: 22619 - DNA, 201 bp, Bos taurus
tagaatttactcatcttgcataactaaactttgtagccctgaccaacatctctgcatttcctttgtcccctagcccctggtggccaccattctactctttgtatgacttggacgatttagattccacatataagtgagatcatgcaatatttgtctttttgcatttggcttgtttcacttagcataatgtcctccagggcc

SEQ ID NO: 22620 - DNA, 201 bp, Bos taurus
tggtgaaaggaagaaggaatatttcatccaacattgtgttggaaagaaagctttccaagatgctccatgtgtattttttaactctctttactttttggccaccgtggatcttagttgcggcgtgtaagatctttcattgcaggcacgtggactctctagttgcagcatgtgggctcagtagttgtggtgcgtgggtttagt

SEQ ID NO: 22621 - DNA, 201 bp, Bos taurus
ccagggaccccaggatgggcctatcgggtatcctaatcattgagcagtgcaggcctgggtgaggtgggggcaaaatctgggcatactccaaggggccttggggaggaggcactgatgtctgattagaaccacaacaagtggaaaagtagaaggaggggggacaaaaccaaacaggccacacagcccaaccctcagatcaca

SEQ ID NO: 22622 - DNA, 201 bp, Bos taurus
tttgcagccgagcagccagcacagggcctagctcattcctggcattcagaaaattttcaatgaatgactgagtttgcaattcaaaagggcccacaaagataacatcttttaaggagtctgtccagctaacaaagacacccttttctcatagaactgaccctagacaccaactggactggagatggacatctgatctgagct

SEQ ID NO: 22623 - DNA, 201 bp, Bos taurus
tccagcctcatttcaaaacgtgaaagaggagtgggtgccagaacttaaagaatacgcaccaaatgtaccctttttattaataggaactcaggtatgtatgttttgattttacccattcaagaataacctttctggcctgcctcgtgatgttgctcttagatgatggccccaaggtttagcaaatgagatacgtgtttaatc

SEQ ID NO: 22624 - DNA, 201 bp, Bos taurus
gttactacctcccaccatcaggtgccactcactgccctgagcctcgcgcaggcgcagcctgtggggcggagacccaaggcctcacagccaatcgcagaaggggaggggcggaccaagaagccagccccgccttctcgctcgcgtttattcctcccgctgctttccaggtgcaggataggcggggcgaagagccgtggggcc

SEQ ID NO: 22625 - DNA, 201 bp, Bos taurus
tggggaagcggcctctgtccttttcagctgcgagactgaaaagctagattgtggagctccaagctgccaggtgtcctgccttgtggcaaaaggtaacattcggagataaatgaaaaagacaggccaagggagcagtcctgaccaggttctggccacttttaagatccagggtggtcgttaacttgacatctcatagaacag

SEQ ID NO: 22626 - DNA, 201 bp, Bos taurus
gtgagggggagaggttctattggaataaggccaaaaagcaaccaagttcttggtaatatagtaactttgagtccaaattatcccctcttcaaaggagaccagataaaggccaagaaccatacatttggggctcaccccattctggcttgctgtgccaggtttccaaccttgagaccacaacaaaagccaaatctgcaaaca

SEQ ID NO: 22627 - DNA, 201 bp, Bos taurus
agtttgagtccacgtgcatttattgagcatctactgaatgcaaggcattgaagagtgatatagagggaggtacagtctcagctttctttaggcctttactactcaaagcatggtccacccacctgcagtatgggtattatctgggagctgttaagaatgcaaaatctgggacgtctctggtgatccagtggctgactctgc

SEQ ID NO: 22628 - DNA, 201 bp, Bos taurus
aggggaaggtcaccttacgagggctggtgccgacgccggggcagaagggccagtggggcaggccagcgtgctgcttggtgagggccaccctgcagccagattgccttctttgtcctccagcctctactgcccgaaggataacattgaggaagccctgctgctgctcctcatcagcgagtccatggtgagtgccaaggctct

SEQ ID NO: 22629 - DNA, 201 bp, Bos taurus
tgagctgttggtgccaaaaggtctgctgagggacttgagtgaggtcaggcaatcacccacccagctggttgcctgtcagaaaaaagtgaaggttcccatctcccaggcccctcagagtctctgctctcacacgggcccctcaggctggtgctctgtgtgaagcagggcctctcggtggcctttctctggtgagtgtggaca

SEQ ID NO: 22630 - DNA, 201 bp, Bos taurus
ctcggccgtacacagcactcccagggctctaaccttccatttttggtgcttaattttggtgtctggcagcctgtcgtcttgccttcctgccctcctccctatgggccctgttccatcatgcacagctcggggtccagatcccaaggccatgcagtcagagcagcttggcccagagccctgctggacatgctgagcactgct

SEQ ID NO: 22631 - DNA, 201 bp, Bos taurus
aaagtttagatacaaattttaagtcgtatttttcttagtcaaatattagatatcaaactgactactgtgaaaattaaaaagcaacacctgtaaaacttaaaaacaatttaaagagtatacttgtgtatgaaactataaagaaacgttcttaaatactgaacctacaaaagattcacaaagtataaaatgagagcaattttg

SEQ ID NO: 22632 - DNA, 201 bp, Bos taurus
taaatgattgctaacaaaagcgttaacaaaccttaatgaagcctactgtaaaacaactatactccaataaaaattaattaaaacaaaaatagtagcctacataaatctccattggatttgtacccaatatcagcatcaagtgacttgaagcttttaagtttgggactcttttttttccctcctttgaggtgcccttcaggg

SEQ ID NO: 22633 - DNA, 201 bp, Bos taurus
aaagaggcaaacatctagctatacaggaggcaagggagctggagtctaactgcatttcttaaagccttaaaaccagtactctgggatttagccttgtcctacactcagccttcacaggtaccgtgctactaattcctgagttgtgggagggggaggggtgtgtgtggcgtggactggcctgatttggcttgttccttgtag

SEQ ID NO: 22634 - DNA, 201 bp, Bos taurus
ttgggcaattgtctttttgattaaaattaactgaaaggaaccaaaaggtaagctatttgttccctagctttcaaagagataaatattctattagaagagaagagtaaggcccagtagaactaagggcctcttaacccaactgaccaggagcagaataagtaaacccaacctgtgctgcaagtagggaggaggtttaattga

SEQ ID NO: 22635 - DNA, 201 bp, Bos taurus
cttattttaacattgaagttaaactttttttgaggtaattgagaagatgttgtgggaagcatatttagcgaatgttctaaatcaaacaaagtcagatgtagataaaatcctttcgcaaagaagtaatttcatgttggactattcaaactaatttggcttaacaaattcctataagaatttgtattcaaagaacaattttcc

SEQ ID NO: 22636 - DNA, 201 bp, Bos taurus
gcttttttgataatccaacggatgttggcaatttgatctctggttcctctgccttttctaaatccagcttgaatatctggaagttcatcgttcacggactattgcctgacttggagaattttaaacacgtccttctactccgccatttttcaagttgggcagcagccaccgtctctccagggatcaggaccatctgtgcag

SEQ ID NO: 22637 - DNA, 201 bp, Bos taurus
ttatactgagtcctgagactgtgtgtgtgtaaccctttggtgtcagctacgctgcgctggtgtatttgtacgcacgtgctctgtgttgtgcttgttgatagttgcagaaggggattgctgcagaagatttatctttcaaatccctgctggtgatggtgatacagatgtaaccatgaataaaaattcatcaagctgtataat

SEQ ID NO: 22638 - DNA, 201 bp, Bos taurus
gttaacatttaaatcagagggaaaatctgaaataattccagagaatggaagtagtttccccacagttgatatttatgctttattcaattttgaggagcaggtgcttggtgggtgttacaagggtggaaggactttggaaagtaggatatgacggagacccaaacctcacctcttaggctgtgttagatttccgtttccagc

SEQ ID NO: 22639 - DNA, 201 bp, Bos taurus
aatgagcagtttatagttttgttctatgcagcattgaccctggaagttgttcccagctcttaaaaggctggagatagcaacttggttgatgaaggctaagaaaccatctggcagggccacactgacaaggaataggctgtcttgggacagaagagaagcttctgttctcagctaagggccactttctcagacactgtggtg

SEQ ID NO: 22640 - DNA, 201 bp, Bos taurus
tgggcccttcagccatgaaggctatgagagttgcaggaggaggaatttactgttagcagagattgtcaatgaagagctgggggttggagtcacccatgtggaagggaagagcaggggcaaataaaaacagaggaaagtcactcctggtggtagaaatgaagacgagcaagcaacaatagaaggagaggtgctgatacagtg

SEQ ID NO: 22641 - DNA, 201 bp, Bos taurus
aaagaaatacaaggtcacttacactaatatgccttttaaaggatttaaacaggggagaaatatattgctagataaagataaatgtgtttcatttttcttcaaaattctaccttgcaaggataaacaaaatgaggaaaaaggcagcagaatggacattagcctgtattttcttctcagatagtagagaatacaaatttcaga

SEQ ID NO: 22642 - DNA, 201 bp, Bos taurus
taaaataagcatgttgggtaagagacataagggaagaaaaatattctttgagcaaagaccctacagaaagtgtacagcagtatggagggtgggggtagtgtagggtgagaatcaatgatataatcttgatttaaataagacagagcaagtaaaatgaacagaagccactgcacctaaatgcagaacttcatttacatagaa

SEQ ID NO: 22643 - DNA, 201 bp, Bos taurus
agcctcctgactatgagaaataaattcttgttatttaagccgttcattctatgttatttttaaaatcatagtctgaactaagatgggcagtaaattgtaatgttcttgtctttgtcagttcaggttgttctaacaaagtaccatggactgggtgacttgtatacaacagaaatttacttctcacagttgtgaagggttgaa

SEQ ID NO: 22644 - DNA, 201 bp, Bos taurus
caaaatgcctggtttccgccccaattgcttatttccctgtccccaaggctacaaggcacagaagcaaatttactctcgacaatctatgaagccaatactttatagaaatctagaaagtacttccaaatgtattttttgtgcatccctgttcaaatggttggctacagagttcagaaattaatgacaagcattattgcctta

SEQ ID NO: 22645 - DNA, 201 bp, Bos taurus
tgtctacctggtctaccctgtgaaggggtagatctataattggaattctctcttaacacctttgtttttcatgctattctaaagctcctgtggatccaagtatctgctacaggaaaagaatcatgtcaaatcgttatggtactaatggtacagagaatagcatgacaaagatgtactgaggcattctcttatttgggactg

SEQ ID NO: 22646 - DNA, 201 bp, Bos taurus
gtcacttaaaataactttttgctgtgtggttgaggcaccaagttgatgcattgcttggttcattttatctttgattcttataaactgttgtttggctttagatttttcctatatttgggtaaagtatttatgtgtttctcaacaaaagtattaagtaaaatattttctgtgaagtttggtttctgtccctgattccttcaa

SEQ ID NO: 22647 - DNA, 201 bp, Bos taurus
ctatactctgttcagcagtttcctttgctcactgtgttccctcattgtgtcaaaaacaccctcactgccttctttctttccgcttaggcctgtgttgttggcacacaacctgactctcaaaactgtcattctataacacatataatccttgtttaattctggtcttatctagtttagtggtgggtagacagtaaatagttt

SEQ ID NO: 22648 - DNA, 201 bp, Bos taurus
gatgtctatctcttgccttgagttaatgctgatggcattttactaggtgcagctttaaatgatggagtagaataaccaaggccttttgagaaactggagtagcacactaattatccttgtatacagccatcatcagtgatccaatctcgtattagtaaaggtcataagaagaaaaaaagagttgcaaaagacacttaatag

SEQ ID NO: 22649 - DNA, 201 bp, Bos taurus
acaaagtacatattaatacatctctggtcaataatgtgtcagctgaatccacctgctctggcaagtaaagttagagatttcattcctgaacctaagctgacaggaatgggaatatccctaagcaacaaatgatccattcttctatgactcagtaacagttgttcataaataatcacttctcaattttttaacctgtctttg

SEQ ID NO: 22650 - DNA, 201 bp, Bos taurus
gaatttcttcctgatatcctgacatgattaaaaatgcaattattctaatcaagttacaaaagtaagcatcatttgtggtgcccaccaagtcctagtaataacttttcctctgagaacatatcctcccaacctcccactattggtacatcccagaaaaataaaaaatagcaaaactagggttgtcctacagagttctgcttc

SEQ ID NO: 22651 - DNA, 201 bp, Bos taurus
agtagtcactggatgtcagcattgtttcactaaaatctgtttaccagtattatttttgactgggaaatttataattcttaagtataccaaaatcaccctacattgttttgatcttagagacaaagggaaaaagtcatgtgagcaaaggcaaaagcctcttaaaaaaaagtatgattgattatctttcagtagctaaatttc

SEQ ID NO: 22652 - DNA, 201 bp, Bos taurus
atcacatattttgctgtgactatttatagaggatcccctggttctttactggggttacattgttatagatacttaccttaggcctatgaggcatttaaaaaatcatgggggtctttaatagatgatataaacccttttgactatttttcctctactatttccaatttggaaagtatttggagatgtcatgttctctgcata

SEQ ID NO: 22653 - DNA, 201 bp, Bos taurus
tctcaaattaagatctgtcataactaagataggaagaaccttggaaggaggacattctggggatttttagttttaatgaacttggcatattgagctagtcagaaagatgttcattgggaatactggatgatcccatattgatccagcaaagccacactttcggtatcaaattattcaggtacattcagtactcataaactt

SEQ ID NO: 22654 - DNA, 201 bp, Bos taurus
tctacctaccagcactcaacccctggccacattttgagcccactggtgcacactctgttggctatttctacccattcattagcatggatccagatcaaaggcaaacacaaatcctggaatgattctggggctgtttgggcaggcagttttgtaggttaaggtccccagtgcatgatttggaagatgaggagtaggtccccc

SEQ ID NO: 22655 - DNA, 201 bp, Bos taurus
tttgacccagaactgggcaggggttacacaaggtaaaatgagtatcaaagactcattgtgggggtaattcatgagaggcacagtccttgctcttgttcagatgactgaatatcaaactgacatataccatctcacatacattatttactatgtcctcaatggaagcaattttaaaagaaagtataatgatatacaattgta

SEQ ID NO: 22656 - DNA, 201 bp, Bos taurus
catctgggaactccctccacggagtataggagagtgacagagtgacagttccagtgtctggaacacagaggaaaggaccaaatgaacatcactcatctgttactgtacaaggccttacactgctagttatccagtcatgtgcttacatcttgctctctaattagtctgtaagttccctgagggcaagagtacttcattaac

SEQ ID NO: 22657 - DNA, 201 bp, Bos taurus
catggactgtagtgcaccaggcacctctgtccatggaattctccaggcaaaagtatggagtgggtagctattctcttctccagaggatctttccaacccagggattgaaattaggtctccggcattacaggggaattctttactttctaggccatgagggaagcccaaagcctacatggttaactctgaatttagcatttt

SEQ ID NO: 22658 - DNA, 201 bp, Bos taurus
cataacttcacagaaggaaagtaacccaactctaaagaaaaaagtgtttcttgaaacctgaacatttgagtcacaacaagtatctgacccagttctgcaggcatgaattcttgctgccagcaaaaacagtagactgaaagcagtcatttggactgctgtagaaaaaaaaatcattactcaacaacacaatcacattcccga

SEQ ID NO: 22659 - DNA, 201 bp, Bos taurus
aaggaaccaagtctgccgacactttggttctagacttctaacctccagaactataagaactacaaattaattcctactgtataagtcacccagcctgtggcagtttgttatgctggccctagtaaactaagataaaaaccttgtcccagttacctaattatctcgttccctcatctgtaaagcaaataaagacacaactga

SEQ ID NO: 22660 - DNA, 201 bp, Bos taurus
tcgcccctagaacttttgggccccacacgttagtagacagccacctcaggataacccctgcaatttggggaccccacttgttagtggatggtcagacaggcatcacacccacaacttgtggggcccccatgctaatggacaagcaccacaactttccctttcctgtcctgtgtttcctgacatctccatactcacaggagt

SEQ ID NO: 22661 - DNA, 201 bp, Bos taurus
tcaatcctacttttaacatttcagatcaactgttgcttgtctctgtcctcctgctcctgtctggatgggttgccacctggactgtcatcccagaactttagtacctctagtagttttaggtatgacattgcttgtttcccagctttcatgttttcttcttttttgttaggtccatcattttactgggacccattcttcatt

SEQ ID NO: 22662 - DNA, 201 bp, Bos taurus
gcttatcatatagttggaatctttcaaagtttgaaactttgttttgaaagcctcggggcatcattgctggatggtaagcaggagaaagataaaatcagctcgggcctttccccatgtctattgtctaggaggatggggaggcgggaattaccaacttgaagctcaaggagccctgatgagattccactccccagtctgtcc

SEQ ID NO: 22663 - DNA, 201 bp, Bos taurus
atgaattaacagagttccaggcccagttaagagtcataacaacttgtatttccagaaaacctaaactagaaatcatttcccagtgtgagaatagagccaccaaaagggccagatctgaggtaaatatacaatcaattacattcctctatgtatgaaacagggagaaggcgagggcaccccactccagtactgttgcctgga

SEQ ID NO: 22664 - DNA, 201 bp, Bos taurus
attctcatgggtgaacatccactgaggttgggccacttactctgcagctcagaaagcagtagcctccccctctgccctcagacagttcagcctaatcactcagatgcacttctaccatcaacactggaaaattctctcagggttattttcagggaaaggagagagaaggctttcatgttttcctgagactactgtggggga

SEQ ID NO: 22665 - DNA, 201 bp, Bos taurus
cttgtgtattttctttgtcaggcctctctatccggagtgtgtgctggaaagcagaccgcctcctagcagggacccaggacagcgagatatttgaagtaatcgtgcgagaacgggacaaaccgatgctgatcctgcagggtcactgtgagggggagctctgggctctggccctgcaccccaagaagccactggccgtgacgg

SEQ ID NO: 22666 - DNA, 201 bp, Bos taurus
acaaggcacagttcaagtactcagcagccgtgcgtggccagtggtgaccatgctggacagtgcaggtttagatattcttcttccacttaccctttggaaatgatctcttctggccgtcctcctgccactccaaccgttccttctcagggccccatgtctgcttcctcttccagcccctcatatgctattggtgcttaggat

SEQ ID NO: 22667 - DNA, 201 bp, Bos taurus
actaaaatgttatagttcatcaaactagcaaacattaaaaaaaacaggtaatatccagtgttggaatttcagtttgacctaccaagaaaaaaagaagacagagaattcaaataaataaaattataaaggaaagaggagacattacaagtgataccacagaaatacaaaggatcctaagagactactatgaacaactgtgct

SEQ ID NO: 22668 - DNA, 201 bp, Bos taurus
ctgatgccttcagttccttccctagaccgcactctatggtgctttatttcagcaattcttttgtgggttacatttatcaatatttaccataccagaaaataaaacagaaaatttcacatttgtttacttattgactcattaaaaaacaaaataaacccattacatgcttataaacaccaaaccaaaaaaaattttattgag

SEQ ID NO: 22669 - DNA, 201 bp, Bos taurus
atctatttgtaggacttaaaatgtaataacttttgtctattaaatagaagattttttgctttatcatttgccttttaatgtttgtggtacttttgatatacagtttaaattgttagcttttaaaaattaaatatatcattcatacaaatgaacatgtaaataccctacatatactgtttgaagaataataaaaataaaaca

SEQ ID NO: 22670 - DNA, 201 bp, Bos taurus
aacagtgttggctacctgtagtaggaggcagctaatgagttttagcattattatttaatattacaattgtagtcatcactacaccctttcttctaaatctgttgtgttgtttcttcttttgttaactttgctaagaacttcccaaatatgattgtaagctgactgcagggcacgaagatgaggtgataactgctgctgctg

SEQ ID NO: 22671 - DNA, 201 bp, Bos taurus
tagcagcacccacggcccctccccaatagatcctagttgcatttccaaactgcgataatcaaaaacgtgtcagatattgccaaactgcctttgactgagagcaactggcctagaccaaagctgttatcttagtcttctcaggcttccataaaaagtaccacagtgtgggtggcttagacaacagaaatgtacattctcata

SEQ ID NO: 22672 - DNA, 201 bp, Bos taurus
cataggtagtaggctcgtaattgttggaggagtcagagaagaggggaattaggcacaaagagtgaaagtacaaagcaaaacttaaacctatattcattttttggaggcctacgtcttaattgacataattgaaaaaaaaatctgagattgtgcaaataacaataggccagtttctctagaaaataaaatgtaaggcaataa

SEQ ID NO: 22673 - DNA, 201 bp, Bos taurus
ctcatttcctaaatcccagcagcctttgtgacttgctttggctattagtaagtggcagaagttatgttgtgcaagttctgtgtcttggcctcattaggactctcatgtttctgtttttctattgtattgttctctgtcattgccacaagtaggacaaggccaggctagtccatcagtcccagcagaggatgaatatcaggt

SEQ ID NO: 22674 - DNA, 201 bp, Bos taurus
cttagtaaagagggattgaaaatattatatttttattaaattaaataaaattcttatcaatccatctaatgtaacaaacagaaattaaatagcaaagcatggattagtcacaccataagttcagtcatcaagtaagtcagttgtaggtgtaacatatttaacttaaaataatccttccaaagccgctgtgtatacaagccc

SEQ ID NO: 22675 - DNA, 201 bp, Bos taurus
gattagagatctcatcaagaaaattggagataccaagggaacatgtcaggaaaggatgggcacgataaaggatagaaactgtaagggcctaacagaagccaaagacattcagaagaggtggcaaaaatacacagaagaactatatagcacagggaactctacaatactctgcaatggcctatatgggaaataaatctaaaa

SEQ ID NO: 22676 - DNA, 201 bp, Bos taurus
atatgagattcaatagaaaaaaattaatcaagaattatcatcaaatcattatctttggcagaaactaaagtttaaatttgcactattcacattattaggtgtaatcctaatttacttttaataatagcattaaaagcttagcaaaaacagttatcagactgaatggaaaaaatgcaacatacataacgttccaatacaagc

SEQ ID NO: 22677 - DNA, 201 bp, Bos taurus
gttattagtgagcagcagtgaggggaggctgacttctcctggagtaaagccagttttcccacagctcctaggggaacatggctgtgatccagaggagaacgttccagcacaggtcagtgtttgattttgctcccagcaccattgactgatggcaaaagaggagacattgctgtgatgaggtaatgtgagtggggaaaccac

SEQ ID NO: 22678 - DNA, 201 bp, Bos taurus
tctatgatgagaagaagccaattttcattttctctgttcttgtttgaagaaccaaaactgttaaagggataaagctctcagaagtgcctgttccaggttacttgtctcaaattgctcatttaaaacaccattatagtacagcaaagccagttaatctactctgaagcttcctttttttatgaccgtagctacatttggtga

SEQ ID NO: 22679 - DNA, 201 bp, Bos taurus
cacacatggtgtaagaatatgggccaccaattctagttttagacatctgagttattttcaattaaaatattgttcaaggcctcaagttggatggaaaagtttatctggttgggcaactgaggacctagaagtacagcaaattgtaattaaagggtcaaggacatgccttgtagatcacattcaatttctctacatggccct

SEQ ID NO: 22680 - DNA, 201 bp, Bos taurus
ctcctccaggaagccttccccaaatatttaagtcctagacatttctcctttctgaaggaaaggagagtttggatagcttagggaccaatgcctgacgtgaacagcattttttcagactgctaacatacccgtgtaaataatttaacatttcccaattccagcatagatgaactggatgtgaataaggagtaaaaagaatgg

SEQ ID NO: 22681 - DNA, 201 bp, Bos taurus
actcctggccatctccccacaagggcttctattccaggaccccactggaaggcaggtgcccctcccccctcatgcaggatgagtggggagctgaatgggcatgcaagatggactgcctgcattattgatttaaaacggccagctgacagtacactgtgcctcctcctatttatttccacaaggtacatctttctctaaact

SEQ ID NO: 22682 - DNA, 201 bp, Bos taurus
gtagcaggcaggacacaaactcgggctgactgaagaacgtggagactttgtggtgattgatccttctgtatttttaccaatttacacaaagcaaagccagcagttctgaagtttcagagtaccaaagaatcaagtgggaagtgtagatgagaagggcatggtcttggctaaattatagattttcatgcaccactctagaaa

SEQ ID NO: 22683 - DNA, 201 bp, Bos taurus
tttttggggggctagcggggaaatatacgggagttgaggcctcggtgcagaagagaagtgttttcatttggctgcagcatttgatctttgaggcccaagaactggagaggggatcttggggcagaaagcaggcttttccctgctcaggagaaggacagggtcttctggccttgccattgtacttgagcctcagagtcccag

SEQ ID NO: 22684 - DNA, 201 bp, Bos taurus
tacagggaagaaaaaaagtaaatgtagtatgaaagagcacatagtggggaaaagagcttataaagaggagggtaatcgaagaatgcttcatgaggaaggtgggacttgaagtgaactttgaaaaatagatggaattaagatagcagaaaggacagcaagcatttgaggcaaaagtgaaagtgttagtcactcaatcatgtc

SEQ ID NO: 22685 - DNA, 201 bp, Bos taurus
actggaaccactttagcagttctaaaagagccagctctgatccatttccaagaatccacatctggtgatatatgggatgaggcaaactgatcaaagtacccgagtgccaacagtacagggaaaagcagagccaagtgaagagcaggctgtggcttgggggtaaaatgcagtgactaaaatgacaatggactgcacctcata

SEQ ID NO: 22686 - DNA, 201 bp, Bos taurus
catcccactggtgtcacactggccctatgcccactgcccttctaggggtaatgaccaggcagggagctgaggactctgtgcacaccccactctgggtgatctggtggccagcacagcacctgttctcactggctgcaaactgcagacaccacgggctgggtatgtggggtcagtgaagtctccgcgatggacctgccaagc

SEQ ID NO: 22687 - DNA, 201 bp, Bos taurus
gactcttttgcaaccccctggactgtagcctgccaggctcctctgtccgcgagatttcccaggcaagaatactggagtgggttgccatttccttctccagggagtcttcctgactgagggaataaacctgctctcgtgcactggcaggtggattctttaccactgagccaccagggaagcccaaaataaaataaataaata

SEQ ID NO: 22688 - DNA, 201 bp, Bos taurus
cacttctccacaatttcctactgcttattccttgccaaccatcagacctatgtaacatacatggcctgctcttgtggatgctagaattcaaggtgctgacggtcaaaggctttaagctttccattggatttgccacagatgaatcgtgtggtccattattttacagatatttaatgctatgcatgataaaattttactttt

SEQ ID NO: 22689 - DNA, 201 bp, Bos taurus
cacgcatccagccttttggtagtgccttgacctccctcatcattcaccctgtactccagctaaactgccctatcctcctgctccctgaatggatcctgcaggttccaacctcaggtgagggcctttgcatttgccattttctctcctgggacacttgttcccggggctccctctctccccgtctcagatctttgttcagtg

SEQ ID NO: 22690 - DNA, 201 bp, Bos taurus
acctgaaagttttctcttggccccattcattctttcatcctccatgcctgtgttcatactggtccatctatctaggctactctctccttttctttgtgtgaggaactcttgctcatccttttaggcctgactcaaacatcatacaacttgaccctcagtctccagagcaaatcttgtcacccctcttagctgctcctttca

SEQ ID NO: 22691 - DNA, 201 bp, Bos taurus
gatctctaagcactaatgcagggaaggcagtcgggcatggatcagacaacagtgaagttcaggctgcagctacattcttcccttcccttctgccagtcctcggggttattcagcccacgtggactccctgggtatggctttctttagggagagagggtttccattctgaagtcagttatatcctggccacctcgaaaatgt

SEQ ID NO: 22692 - DNA, 201 bp, Bos taurus
ccagttggactatttccctggccaccagagctaggcagtcaagggacatctctatgtgggctgagtgtaatttctagcattagtagggccacagccgtggcatggtgggatcaggtgtgcctactggcttaacagggaaagagggagtgccaaaatagtgcccaccagtgctgatactagcaaggccaaaagagaactcaa

SEQ ID NO: 22693 - DNA, 201 bp, Bos taurus
gagtcagacaacgcctgaagcaactgaacaacaacaagtctctctgtgtcttcttgctggaggtcctctttttattcctgaagggaaggatggaatgtagaacaacctatgaggcctaggagagcactgactcatggaaagtcgactcgtcagcagtgtgtgggggttggggtctcagagcctgtgaggccagggaaggac

SEQ ID NO: 22694 - DNA, 201 bp, Bos taurus
gggtggaggggggccatgaagtgggcattcccaccatgacggggacacggcagggagatgactgattcaggagactggaaacaggatttgggatgagaaattggagaggagatgggatgctggccttccaggggcctttcctgcaagctctccaaactggctggtctgtggtccctcccaactccacctgcaatcctcacc

SEQ ID NO: 22695 - DNA, 201 bp, Bos taurus
ggccaattcttaaccactgaactaccagggaagtccttctatttatacttataaaaggaagttagctctacaggcttaataaattcatgtgcaatttccgtggccaaagtactttattatagctgcagcatgcctcatgtcacatcacaacaaagctctcagagtctgttgttcctatttcatgatgctaagatcaatcat

SEQ ID NO: 22696 - DNA, 201 bp, Bos taurus
tctgcaaaccagtcaatcttaagggaaatcaaacctgagtattcattgcaaggattggtgctgaagtttaagctctagcaccttggccacttgatgcaaagggccagatcattgggaaagaacttgacgctgggaaagattgagggcaggaggacacggagttgacagatggttggatggcatcattgacccaatagacat

SEQ ID NO: 22697 - DNA, 201 bp, Bos taurus
caatggattttcaacattctaacaatcagcttcacatttaacataaggctatgagaattccaggagaagagccgacctgtgggattgaaaatgtttctaattgaccaggatgtgtgtttgtagtgggagcattttattttctttttcattcatgtacttatttttcatatctgaccattattctcggattgatcaggtcac

SEQ ID NO: 22698 - DNA, 201 bp, Bos taurus
taacagaagagaaaggggtgtccacaggcactgatgacattaaccttgccttgtggacgtgcaaactgttactaaggaggttatgtaatgtgcttaagatcacagagttcatatgaggtagaactatgtcttaaaccgtaagcccaaaacagcagtttttctcatagttttgcacatggcaggttctgtgtaagttttcaa

SEQ ID NO: 22699 - DNA, 201 bp, Bos taurus
cttactgagcgcctactaggtgtccagtgttgcacggatgctgaagagacagcaattaacaaaaagggctgtacttgaactggtggcagctcagacccacggtgctttaggataaaggacagatgaccctgtcttcatgctactcaagaagggccaacctgcaggggttagaagtgcaaatagatgaacatgagagccaaa

SEQ ID NO: 22700 - DNA, 201 bp, Bos taurus
tcatctattttctcatttcaaaataatttctttttggggtactttctaatctctactttcaacatggaaggcacaacagtctctgttttctccagatactctgggttcttgcttccttaatcactcccttctatctacagcaactacaatctcttccatttatccattttgctctgtcctcagattttcatttattcaaca

SEQ ID NO: 22701 - DNA, 201 bp, Bos taurus
ctaatctcataggcaatatgtccttcttactataccccgtagagactatagaaaacatagtttctgaatcttatgtcctaagtgccaccaggtaatcagctcttttaaaaatatcatctactctgaccgctttgtatcctcttaaaaaatatgccctgtttttgattcttaacaactcagggcattcccacagtgaatttc

SEQ ID NO: 22702 - DNA, 201 bp, Bos taurus
ccatggaccctctctattgactccctgttagcaccaagtcttaactttaatttaatctgagtttgttttcaatgcactaaggccactttcttgtctgtaagttcattgaatggatcaatactcctttttctttcccatctcctggcacatctcaaaatctgtcataccagccaccatgtgtaggcgctagctatacttcct

SEQ ID NO: 22703 - DNA, 201 bp, Bos taurus
actggacccttaataactgtgtcaatagagcagttccctgactcttttctgtttttctctaatatatctatttaaaaaaatactggatgcatttacataggtgccattgataatagcatgtgataatatgtttttcaaaaatgatgaaccttattgaaggatgacaggtaactttacctaattgtacacatatgacatcta

SEQ ID NO: 22704 - DNA, 201 bp, Bos taurus
cagagtacgcttgctatccaacatgcaaatatttttcctcattttctaaaatcattactacatttttcttatacataatgtaatttcccttaacaagagtagctctgcttttattcatctggttgctgtgatgatggaagtatttttcccttgggaggtcatttatatttaagtaggattaataggcttaacagaatctat

SEQ ID NO: 22705 - DNA, 201 bp, Bos taurus
aaccagggtgtgtctgggccaggaagtcttcgagtcaggacgaaggcaaggatctacacaaagaccccaaagcccctctgaactgtctgtctctggagggatcccactggggctttcttagaagggcctggggagtctgtgtattctcggccctactatgtgcacatgagctcatgactgggatcctagagaggatcacag

SEQ ID NO: 22706 - DNA, 201 bp, Bos taurus
acaaaccctctggagaacacaaactcaacttattagatgctaactgagcacctaatgtactcttggcaccaaccctgggcttacatcatctttgggggccaggacagaaagaaggctagcacttgggtgacatcagagtgagtgcctttgaggcatcactgcccccacctttgagctggccctagacagacagtaaataag

SEQ ID NO: 22707 - DNA, 201 bp, Bos taurus
gaatgaccaagaaaagaagggagtgtgaactggccccgcctcctctccagcatcaactatgcctcaatagccctgcggggtgctggcttccccagacacactgagaggtgttttggcctcgtgcctcggcaacactgcctgcctgcagcttggctgcccacccccccaccccccaatcccatcacgcctgcttcttcgcct

SEQ ID NO: 22708 - DNA, 201 bp, Bos taurus
atgctcctgggttatcggtgagtttttatagtttgtaaagggagaattgtgaccgagcagctggcacaggccctggccaccccaggctagcagctgagggaatgtgcagacactggtgaggaggctacgagcccagctgcagccctacaaggcatttcctttcttactgtgttctgcaaaaaatgcatgctcactgggaga

SEQ ID NO: 22709 - DNA, 201 bp, Bos taurus
gacctggttctcccgggcggcaccaagcgccgccgacccgaggggggcaaccaccccagctagaagaggcggcgcgggccgtaccaagagcaccgtcgagagggggtcagccaggcgcgcgcgggcggaggaacacagccgctcgcgccgccgctctaaagatatgggccgtaccacgcgggaagcgtgcgagggagcggg

SEQ ID NO: 22710 - DNA, 201 bp, Bos taurus
gttattgaagggatgtttcggtatactgatttaagggggaaagtcactttaataaatggatattgttgttgtttagttgccacattatgtctaactctgcgaacccatggactgtatgtagtcctccaggctcttttgtctgtgggatttcccaggcaagaatacgggttgttgttgttcagacaacagaatactgttgct

SEQ ID NO: 22711 - DNA, 201 bp, Bos taurus
agtgggacggagaaggacacctctgaatctcgcgtccccttgtctgagtcctttggcggggggtttgaaggagagagatagacaggtatctatctccgggaaatttccaagtgacagacggccaccctgacggtggcgatgacacctcctcggccttgcaggagagcgcagagtcatccggggtgaggcctgcgtgaagtc

SEQ ID NO: 22712 - DNA, 201 bp, Bos taurus
gcatctccccagtgccggaactcagcctaccacgtgtgaggccctccatctgattctggcagatagtgactacttatgcccagcaaacctgtgcatgtgtgcacacacagcagaggggcagacctggtgtccactgcctagcaacccagggtaagtcaccggatggggaggggacatgtgggctccctctgcccacctctg

SEQ ID NO: 22713 - DNA, 201 bp, Bos taurus
gtctcatttatctgcactaaaaattcttttaagtaaacatccctcaggtaacaggaacacaagtctgtatcaaatgtggagaacttttctagggtagttagtctaagccatggagcactagaattttagattcttcctaataatttaagcctctactgaaggcaattttttatgatatcaacacattctaggaattaagat

SEQ ID NO: 22714 - DNA, 201 bp, Bos taurus
actgatatatcagctgtggagtgtgagtaaaagaaacacatcaaggaagaatctttaccaaaaaaaaaaaaattatttgactgcactggttcttagttgcggcatgtaagatcttgttccactagcagggatcgaacccaggccccctatattggaagaacagagtcttagccactggaccaccaggaaagtctcaaggaa

SEQ ID NO: 22715 - DNA, 201 bp, Bos taurus
atagagagttttgcttgattttgagcacacggattcacaccgtctgtctttgctgtaaagacatgtcttctgtgcagttttagttattctctgggtccaatccaggttcccaattcaaaactatcaacagtcaaaacttgaggttacatgatgagtgctctccgctacaccatgacacttggaattcctcttcctagtgcc

SEQ ID NO: 22716 - DNA, 201 bp, Bos taurus
taattatggcctggcactccataacagaaatgctgaaggctcttgaaggagacaacacttctcattcaagtctactgtcaggctctgtgagttggaagcacgcaccacaaggtttcaggaggaaggactcacgctgaggctgagcctccaatattctggccccctgatgtgaagcgaagagtccacttattggaaaagacc

SEQ ID NO: 22717 - DNA, 201 bp, Bos taurus
gttccacttgcctagtccagccctgtatccccctgggggtggccaggcttgaggactaagtggactggcatctagataggccaggcagacaccccaaccccccacccccagaatgtgacccaggggttctggaaagaccctcttagcactctgagcctgctggcagagggggagacacggtcatgggagggcttccaacag

SEQ ID NO: 22718 - DNA, 201 bp, Bos taurus
ggaatgaagaagcaaaaacgagaagcctccactctccatcatgaaaataacagatgccagggcagtggcattcaaagactggtggggtctcaggggctggcttggggtcatggcagaggccagcagagagaaggtggctgagaatgctggtagcacgatgcatctcttgaatcagagtcacaagaatacccatagtttcct

SEQ ID NO: 22719 - DNA, 201 bp, Bos taurus
tctttgcatcctagacattttcttgaagaggggaagcagggaggtgttgaatgactagcagaagggcacacaggaagggcagtggcctggaaaattgttttcctactcactctctggtgaatggacactgattcccacctccccaccttggctgaccaaaccctgacacaaccctgcacaggcccagtgggctccatggat

SEQ ID NO: 22720 - DNA, 201 bp, Bos taurus
aggactgcagatattcagactcgatacctagacattagggatgaccctcacaggatacctgcagtgggtatgagtccgactcataagcagatggaatctatggtccttgcatttgacttgttttgctacaaacaaagcaaaatctcctatttctttaggcatgcatgttaaatcagcctggctactctgtatatttctgta

SEQ ID NO: 22721 - DNA, 201 bp, Bos taurus
cagagacggcaggtgctgtgagcatgctcaactgtaacatctgagattccaggcatatgtgctgagcagtgactgtcccagggcagcccctgaggtgtgcggaccatgtacctctctgtgtagattcagaacgctgatcgatggtgagcatcgtgctaccctctaataaaggcttttactaccactattactgactcctaa

SEQ ID NO: 22722 - DNA, 201 bp, Bos taurus
cttgatgcccaggccagatgccatgctaattaaactctctaagagtaagagacccaagcattagggttttatccaacgacctcttccccttgtgattccagtgtccaaccaagtccaaaggcctcagccacaagtccttgctgttcaaggtgtgctccatgagccagcagcattggcaccgccccgtccccgcaccccagg

SEQ ID NO: 22723 - DNA, 201 bp, Bos taurus
tccactctaaaccactttgtctttcaagattcttagggccatagagtttgcttcttagcaagctaagattgagaaactgtaatgtggagtttctgctcagcgagagcaatatgatgtttttaaaaaatgtcttaatagagctatgaaaatgtcagcacagtcacaaatgcttcctctcattcactcacatgggagatacag

SEQ ID NO: 22724 - DNA, 201 bp, Bos taurus
atcttattatcaagtgacatataacattcatataagatcactaaacttgcttgtggtagaatctggatgttctcaacatcttggaaaatattcactaagtgcatttttatttttctccactgtcactcctaccagcatatccagaataaatggaataataaaatttagtgtagtttatgtatcaaatgctgctgctgctgc

SEQ ID NO: 22725 - DNA, 201 bp, Bos taurus
caagataaaattttcaagaagacaacatgtatatacaacccgttccttggcacatttccttaataacagaagccaggaaagagttgaaaacatttctaaatcaggagtgaagagacactggcttaagttctggcatcacactgtccttgctgggtgacaaaaatgagtataactaaagtttataaaaattatgtaaaatta

SEQ ID NO: 22726 - DNA, 201 bp, Bos taurus
ccagtgcttccctgctggctcagctggtaaagaatctgcctgcaatgtgggagacctgggttcgatccctgggttgggaggatcccctggagaagggaacggctatgcactcaagtatcctggcctggagaattatatagactatgttgtccatggggtcacaaagtgtcggcgactgagcgactttcaccttcacacttt

SEQ ID NO: 22727 - DNA, 201 bp, Bos taurus
cacaaaagtacaaaagctgaaacgtgattcttttagaagttgatattagaaattgtagagtcacttctagcacagtatcttgcttatggccaactatggggcaatcctacattcagttcagttcagttcagttgctcagtcctgtccaactctttgtgaccccatgaattgcagcacaccaggcctccctctccatcacca

SEQ ID NO: 22728 - DNA, 201 bp, Bos taurus
ctggaaatttctcaggctgtgtttttgtaccttgctttggtctgtgtgtttgccttaccattctccttaatttcagttccttggataagtattgtggctgttccctctaatttggccagttcagagagctgccagctgggagctggcctggcctcagagtttgactgtggtcctcattactcaacagagcaacccacagaa

SEQ ID NO: 22729 - DNA, 201 bp, Bos taurus
ctagctgctggcaagcaggaaagcagaaatatcagttctataaccagcaggtactgacttctgccaacaacttcatgggcttagaagaggaccctgagctccagaaaggagctcagcctggccaacaccttgacttaagcctcggaatgccctgagaagagatgctcaacaactgacctacagaaacattgatgttgataa

SEQ ID NO: 22730 - DNA, 201 bp, Bos taurus
atagtctatcttttccttacttaactacccggtaaggcaagcagctgactgtatcacaattcacagaaggtaaatcatggttcagcactagaggtaggtaccagggctgcagtaatccaaggaaaaaaacagctagtaaacttcagaacactaaagctttattccactctaaaacatctcccactctgttgggaaatagcc

SEQ ID NO: 22731 - DNA, 201 bp, Bos taurus
agcctaaactctttctgctcctaggattatatatgttcgctatagaaactctcagcttttataagctcaaactaacagtagaacaccaggcacttgccatctagtaagttatttccacctcctctgaagctaattcttgctcatgtcagataaatggtctcatttgtcaataaaaccacaatttgccatggtatataatct

SEQ ID NO: 22732 - DNA, 201 bp, Bos taurus
acaataaagaggacaatgacaaatagaagtcaagattatggggtgattattacaggaaatatagaggatcctatgaaaaactttaagaacattcacacaatctgcctccagcttcacagtacctgagctcttactggttgcatgtgagtatgactctgagagacagcatgggtgtgtgtgtgtacagatgcatgtgtgtgc

SEQ ID NO: 22733 - DNA, 201 bp, Bos taurus
aaaatccaaggtgttttctcattaactatcctccatgattgcagaagaatttgacctgattgcaacagcattcccagtttggattgatcactgtctttttcgcagaatattctattctcctggattcaagattctgtactctgtttgctctctggtcacatttcaaggcatgcctttcctctctgattcatttctatccca

SEQ ID NO: 22734 - DNA, 201 bp, Bos taurus
ttttagtaaattatggtttactatgttctccctttatctctaaagttgcatgtaagtttctgagctcatgaaaggtgtctgagttcttggtgactactgatccattttggtatcacttgcagccttttgttttccttatcctcattcagcaagcaaaatacctctctggcatttagaagtcatttttaaaaaactgggctc

SEQ ID NO: 22735 - DNA, 201 bp, Bos taurus
taaatagaagagacagtttgacctatttagatgtattaaaagtttggtaagatgtaatgagactgattattttacttacagagagcagtccagttattctatggtcaccacatttcactgtatacctgatgaatttaatgccttctgtctagcagttctatctatacagtgagaaatagcgaaaagagaaaaccacaaaca

SEQ ID NO: 22736 - DNA, 201 bp, Bos taurus
aatcagagccacttttactaaaagcataaaacaattccaaaacttgcatatatttcaatataagcacctagcatagcaatattttaaacaacacccataatattatgcttttaataaagtaaacaaaaaaactctttggtgtcttatagtaaatccatagtccctttttcttgattatctcaatgtttttttttccctaac

SEQ ID NO: 22737 - DNA, 201 bp, Bos taurus
gatgatttatctctttcgtttatttgtacaaagagaatattttatcacagctctcattaccaccttcaccatgcccattactactacttgtctctaatgacaggctggtaatcaattatcataccctagctgctctcttgtgtgtgctgaatactccagctgccctagaacttcccacatgtctcctgattccctagcccc

SEQ ID NO: 22738 - DNA, 201 bp, Bos taurus
gactgagaagaataccattcttttcaagggcatatttatctgggaaaatcttctcttaagcaatttgaaaagaaagcttttcattcactgtcttcaaacacgctcagatctacttcatgtagaaaactcctcctctgcttgatttcaaagttctttctaaaaaagtccatctttctttctgtttcttactgccaaacttct

SEQ ID NO: 22739 - DNA, 201 bp, Bos taurus
attgagaagatattgaaaactagggcttgaaattcccgggtagcccagtgggaggaaacagtcttcacaggggcctgatgacagaagcagatcctgctgttactgcaccctcttcaccacataatgtggccagtcactgaaggacagaaggcaactaaatcagagattacatgttggctgtggggacagaaagggaggcta

SEQ ID NO: 22740 - DNA, 201 bp, Bos taurus
aaggcattgtccagtatcaaaagaaatttaaaaggcaattacttactggcaaaggtacttcctgactttagagacaaaacgttgacagaaccaatcaagacaaagtgttctggtagtgtaggccttcttattgtaaaaccaaaagactggtgttatcttttcccttcatggtttaggagttagcagctttatagataaggg

SEQ ID NO: 22741 - DNA, 201 bp, Bos taurus
tcccacttcataattcttaactgcccaacttcccagtcaaggttttcaaatatcttagatggtgatttagctagcagaagggaaaactagatgcaaagtgcgcagctttttatctcaaaatttgagaaatagcaatttatatataagtggagtcagttctcccttatctgggacagctataatcatctctcaccgcatcac

SEQ ID NO: 22742 - DNA, 201 bp, Bos taurus
aaagagggagaaaagcacctatgggaaaatatatgacttttagaaaagatatacggccctcaggagaacagatgggagaggtgatatagttttgtgacaatgtctaagagatttcttatccccttgcaacttctgtctgagtgaaagaagtcaatccttcctggtgcaaaagtcttagggagaagattgacagttgagtcc

SEQ ID NO: 22743 - DNA, 201 bp, Bos taurus
gcttcttggacagaaaggccacattgtcctgaaaatccagatgggtgaattctccaacctgatgatacagagtcagtgtcctcagaacatctgatgcagctggaccgtctggcccccaaagtccatgtcagtggctttatggtcacaggaaatgatgactgtggggtgaattcctacaagatagtgttttgggggggtttc

SEQ ID NO: 22744 - DNA, 201 bp, Bos taurus
attttatatagtgctttatcattctctcttgctctctatgtcatttattctccttaacattaaccttgatagccctttacttataagtgctgaagtgtgtgtttcttaaaaacaagaatgttttcttgcctagccaaggttcagtttaccaaatcaggaaattaaacattgataaaatactattacttaatttatggacct

SEQ ID NO: 22745 - DNA, 201 bp, Bos taurus
ttttgtaggaacattatccataaatctcaaaggttgcttgtcagctactaatgttcaggaagaactctgtgttaattacttacctgatatttctcatccttgtctccagaagttcataggtccaaattaagtggcaaaaatcttccagaagttgttcttacttcaataataagcttatgacttttcatcaagatgcctgta

SEQ ID NO: 22746 - DNA, 201 bp, Bos taurus
ctgccagagtccagagttcaggtgcgcgcgcggggggtttccagggtccggggaggggtgctggggctggctagagagggcctggttgggaagtggtctggtgtgggggcgggcttacaggctgggcagcccctctcagactccccctagcgctgggcccgggcctggcagagagaccaaaattaaaggaactagcttaga

SEQ ID NO: 22747 - DNA, 201 bp, Bos taurus
tgatgtagagccctcttgagtggaattcatgtcctcataacagaggcctagagagagctttcacctcttcaaacctgtgaggacacagaggtgggtgctggctgtgaaccaggatgaggggcctcaccagaacatggccatgctagtgcctcgacctgagacctccagatgatagaaaataaactcctgttgtttatgagc

SEQ ID NO: 22748 - DNA, 201 bp, Bos taurus
aaaactgcctaaaaagtgtcatatattttaggacatacctggtaatgcaaacctatagaaggcaaataaaattctgctttaaagcttcctggttgaaatagtatacattaatacataattttcctaatattgaaataattttttgaatatttttatctagaagaaaaacataaagttacacaaatatctttagcaaattct

SEQ ID NO: 22749 - DNA, 201 bp, Bos taurus
cttttcttttgaaaaatcctctaaaaacacaaacacagtctcttgtgtcttatgactttcagactttcttctccttctcctttgtaagtcatcctagcaagactagttaacaaaatacctgaattttaaaaggcattttaactacatatttgtaaaaattgtttccatagagaatgaggcaagagtttattttctacaatc

SEQ ID NO: 22750 - DNA, 201 bp, Bos taurus
aatcaacagattatccttttcattttcaaatttaaatttgtacttagccttttgaggttagctgttttttgttctttcttattcttttggtggagattaacttgcatttaaaggaagtagagaactatattggtgagtaaatgtagagaagcagttggaattcaagtagaccgaatggtattcagatgacatgatactggt

SEQ ID NO: 22751 - DNA, 201 bp, Bos taurus
taagatataaatttctctaatccttgctagcatcccctctttaaaactagcaagataaaacaactgtcatcaatcatatagtaagtttgaatcctgtcttcgaatcctgttttccattccttttctaagaatagagcagaatgagaaggaaacaaaatgtaaaagtaacaaagctgattttgcaacttaccaaaaaaaaaa

SEQ ID NO: 22752 - DNA, 201 bp, Bos taurus
actttcgaaaattcctttgcttgagtttcccagatttttgctcagaaattgctactatttattacaaatgtttaaaaaaattcttcatcttaatgcaaacgaccagagcagaaaaactgtgacgtggacaacaggttggaaagcccagatcacttagcttataaatgtttaatgtagtcctggaggacaactgtctgttag

SEQ ID NO: 22753 - DNA, 201 bp, Bos taurus
accatagtcaggttgtcttgaggacaagaatcagggctcagtgaggacccgtcaggccctaatgaggatgacaggtcccagtgaggcaaagagtctggccgtagtgaggaacagagtcaggtttcagagaagaccagagtcagtccatagagaggaccagagtcagggcacagtgaggcacaatgtcagtttccagtgagg

SEQ ID NO: 22754 - DNA, 201 bp, Bos taurus
ataatttgaaaataattatgtactcttaaatgagacgccactaaagaacagcagcacaacattaaagtagcatgtgacactctctaattttacctgctgtaattttaatttggggttcagagtcagggtggcaatgcctcttcaaaacattctgaccttggtaaaaaaaaaaaaatccaggcagaatatctaagagaaaaa

SEQ ID NO: 22755 - DNA, 201 bp, Bos taurus
cttaaaattcatgcgacctattttctcagctgaaagtgggagggatctgacagcaagttggtttgtgggtaaaagcatgacaccattggtccgggtctgttggcctgactaaccatagctgttacatgttcatattaattcatgtgacctattttctcagctgaaagtgggagggattctgacagcaagttggtttgtggg

SEQ ID NO: 22756 - DNA, 201 bp, Bos taurus
gaagacaaaggcctaaaatcaaagagttccagcagaaaggaaagaaatgaggcattttgccagctgaagccacgtacccaaagggaaaaggattgtaaggtgaaaggtgtttctcagagatgggcccaacgctgcttctgttttctcatagcctcaggctgggtctatcttttagggcattgtgacccagagtgactaact

SEQ ID NO: 22757 - DNA, 201 bp, Bos taurus
gcacttctaattccctttgagaacttttcctttgcattcacaacctggctatctgtttggtacaagaggcctagattttggcctatctcaacttttgacacgtcttcctctctgtgctcaatcattcgtaccttttgatttaaagtgagagatgtgtgactcttcctctcacttgaacacgcagaggccatggtagggtta

SEQ ID NO: 22758 - DNA, 201 bp, Bos taurus
gggaactaaaaatgtagctttgaatttcccccaacacacacacagaaggaagtgagccatcatcggaagcttagaggggagggccctggcccccagcagctgcagaaccctttgctcaagtctgcagagctgctggcaattagaggatctcccccaagtgggggaggggccctcgcctccttccctggtgctgcttttctg

SEQ ID NO: 22759 - DNA, 201 bp, Bos taurus
gccagaagtcagtcggggtcatttttggcacagtctttatgggagagaatattttatcctatagagtggtatttcccaaacttgttcaaaccagacccacaattatcaagacagtgatatctgtggagcaaactgacatgaatggatgcccttattggttgctggatgagttcactgggatctggggcttgccaggaccac

SEQ ID NO: 22760 - DNA, 201 bp, Bos taurus
cttcagaaataatcagccatcattaaatattcttttaaaattgtttttaaaaatttaatgttggagatcttcaaccccaacaagccaattaagtctaaaatgtctttattaaagcaacataaggttgtctaccacttgatctattaataaatgctcaataagtgtttcttgaatgaaaaatgacgcaaatggatcaccata

SEQ ID NO: 22761 - DNA, 201 bp, Bos taurus
cattgggttagtaataagattggtgatgagaattatactatcattctaagccagaattctgtttgagggtgactgccaaaggattgtccaagagttttcctttgactgtaaacacaaagatcagaggatttgtagtttttatgtgaaaagtctgatttgtttatgatgtatatcgtgtgtgttttgtttttcctgtcaggt

SEQ ID NO: 22762 - DNA, 201 bp, Bos taurus
ggcctggaacaccacgcccgtcaccacccgggagaacacagcctcctccccatgctctaccggttcactgcagggagccccggccacagaaccgaccctcagtgaacccagatttagaggcagaccgtgctcctgtgacctccaaccctcacagcactggagggcagggcaagacttacgggggcatctcgggagcctgct

SEQ ID NO: 22763 - DNA, 201 bp, Bos taurus
gtgccttacaacccaccccataaaatcaatcaagtagcagaagattttatatgcttctcatttattttccaaaatacattctgtgagtgccaactgtgtggtgggcctgggaaagagtggcaagtgcagtgtagaagggcaatacatttctctggacttcccttatgtgtttttaagggaattaagtgaactgaaagggaa

SEQ ID NO: 22764 - DNA, 201 bp, Bos taurus
aaattgatagcattctaggaaagtgcgtgcaaccccaggtttcttggagaaaagctttctgagggagtgtgtgcatactcttatggtaaaggattggatagtctgtcaattttaataaatcgattttgaatcggtctatggtaacattttctctattaaaaataatcaagctccattttgaggaatgagaacagttgaagg

SEQ ID NO: 22765 - DNA, 201 bp, Bos taurus
ccagggaagaaaggggtaacctctcttgggtggtcagagggagtgagtcaagaatgcgaaatcaccacggcagtgggacaattctggagaatgggaagagaaagcaggcctggaaaaataatgtgcatttgaggatctgtgagtggtttggataggccaggttgtgggtgcaccttgatgaggtgtggagtgtagagagtg

SEQ ID NO: 22766 - DNA, 201 bp, Bos taurus
aaacagtttcaaacacagagggagttgcaacaatagtgtggtgagcccacatacccgtcacctaaattcaccagatgttaactgacatttgccacattctctcttgcacacaaatgttcacagtatttgtaatagcacaaacctgtaaacaactcgatgtttatcaacaagtgagtggataaaaaattttggtatatgtac

SEQ ID NO: 22767 - DNA, 201 bp, Bos taurus
gatagtaaatgaagtagaatcagagaaggaaggctcagcaaagggtctcactgcttctgctacagggagcccagtagcaccttttagatggcatttcataccttcatcttgctcttttaacacaactacgatagattacataaatcaattatttttgtttgttgtgggctcctggaatcaaagtaaactgaatgataatta

SEQ ID NO: 22768 - DNA, 201 bp, Bos taurus
gggattttggagtgaggagacactgggccatggaatgagcattactgacagcaattttgtgactgtaacagtccagggtattgctggaaatcatcaagacggcaaatgaaaggccccagagaataccatggcagcaatgagcccacccacttcccaattctatcaagaactaccagagaaaagtgttctgcatccagcatc

SEQ ID NO: 22769 - DNA, 201 bp, Bos taurus
cgaagagagccaaatactttaagcaagttatgggatataacataggaacaataatatgtgtctggaaaaaggtctaaaattcatgagttacgcttaaaataacaaacccactgcaaacattatcctcaatggtgaaaaattgaaagcatttcctctaaagtcaggaacaagacaagggtgcccactttcaccattactatt

SEQ ID NO: 22770 - DNA, 201 bp, Bos taurus
atacattgtgcaaataataggtccttaaaagcacagaggacaaagatatggagatcttagcaaaggctctgagagaccatgggactttagatttgaaggacagttgagagatatcaatagggaaagaacacagcagataggagggtccttccaaacaaagctcagcaggaaaacttgatctagtgcattccatcatgaaga

SEQ ID NO: 22771 - DNA, 201 bp, Bos taurus
gtacagtgattcaccactctgctccattaaaaacaaaaaaaagcaatgatacataaacaaagagacaaacttgggctcaaaaaccaaataaaaatctctctgaatcagaaaagaatggagatgctaagcagttaatagggctgaagctacagattcactgggattgtgtcaaaagtatgttgctgctgctgctgctgctaa

SEQ ID NO: 22772 - DNA, 201 bp, Bos taurus
ctctgcttgggtgagggggctggacagctgcctgattcaaatgtcccctcctccaccccccaccccagctccagagggtggaggacttagatcacgggccagctgatgggataatgagtttatacaaagacagctctgaaaggacttaacgtttagcttgcaaatggatgtggccgtcacatcacactgtgccttcagtgc

SEQ ID NO: 22773 - DNA, 201 bp, Bos taurus
ccaatatagactctttttaaaatttcctaattaaatagttttgcagattagcctgtgtgtaattaggagaataggcccaatgttggattggccctgcctacgttagtgtagctcctctttaggaaatgcatcctttgcctaagcacagttttcttctgctaccacaatgacggcctcagatgtatatagctcagttcagtc

SEQ ID NO: 22774 - DNA, 201 bp, Bos taurus
gaagaaaaccaaaaggtatattctggacaccttaacacagaggtactagggaaatagtcatgtatagacccaggaaacttacctggaacctgctggccaatctcatcagctgatctcatagtaactaagcagtgagggcttccagagaaatcttgcaacaactccaggccaagggatgggtggatagatatgggtcatgtc

SEQ ID NO: 22775 - DNA, 201 bp, Bos taurus
tattcactcactgtcttcatcctgagtcctatagttgtccttggacaactccctctcccactcttctcagtgactaacccaaaccctcagctgcctcctcgcccccatcctcaccacaaccctcaaaagacaatcctgcttcctcattccataaaaccgagaccatctgccccgactacctttaaattcctatctccccat

SEQ ID NO: 22776 - DNA, 201 bp, Bos taurus
ggcacagatgaaggctgcttgattgagatcctggcctcccggacacccgaggagatccggcgcataaaccagacctaccagctgcgtatgtagcatcttccggggccttggtggaggccctgtcctctgagaagtagactggagtgggagtttacccactgaaacactgaccacgagggagcctcagctacaagctcctct

SEQ ID NO: 22777 - DNA, 201 bp, Bos taurus
tgcagcaacaacccacagcaggtagagaaagccacagagcagtgtcagcgcaatcacgctggagaacaaggcttctctaagcagactgtttctgggtgccagctgttggcaggctggagggaccaggcgaaggctgtctgatggactgctgggcgcagagctgtggcctgctcacgctgcagagcctttttgatacccagc

SEQ ID NO: 22778 - DNA, 201 bp, Bos taurus
ttcttagcctagaatcctcagagtcagccagtaccgcctctcagtcaccattcagctgtgggaaagctacctggcctctgtctcctctctcataacatgacagataggaccaacccaacacacattaatgagaattaaatgagatagtgtagcgagagcactggccaacccagagctagggcatatttaccgtgaggatta

SEQ ID NO: 22779 - DNA, 201 bp, Bos taurus
tgcagtgggttgagttaatcaagaacaagtgaccagggtcctcacagtgctaccaagaggctgctccttctctgctcacggccatagactgtgagacgtgacacgtaaactatgtgtgagatcctgaaagcgccaaagaaaaacaagacttgagctgtctgctggcaggaattctaggaaatacagcaggccaggaatggg

SEQ ID NO: 22780 - DNA, 201 bp, Bos taurus
ataatatcttcttattttccttctattgattctgtattacacagtgaaagtgaaagaagatctttaatgtaatcatcccaggacttcacccaaccaaatgcccttgggggaaagttcctgcctcctcagaacaaggtgacaaaagtaggatttattctttgtgtatctgatgaggtggatcttacctgctcagaaggctgg

SEQ ID NO: 22781 - DNA, 201 bp, Bos taurus
tctaaggtcgcgtgatccccccaacacctcgatgtgctgaacctggacagatgtccctgtaggacagacgtacctcctgtcttcccacagtgcaggaggccgccacatccctcttcagtggcggtggtcctcagtccagtagccttccggcatcttgtgttgctctgtgccttgttggactctagagagacgatccacgac

SEQ ID NO: 22782 - DNA, 201 bp, Bos taurus
ggggaaacaggtctgtgagaaggaggacttatccaggatcacacagctaagtagaggcgggcaggggccaagatccccagactcctgctattaggtcctcagtctcaagtatcccacaggctggggtcatggaaacagctttggactggatgctaggggaatctggcgctagacttgagtcactacttgatgatgtgacct

SEQ ID NO: 22783 - DNA, 201 bp, Bos taurus
acatggaagaacttggtggggtgaaggcagagtcaacagtttgctgccaagagtatggaattcaggaggatggcggggagtgactgaggccaggcagaaacggttttacagaaacaggaatcaacagagggaataaggaatcaataataatgttattattaatcatggttaacatggaccaaatgctcaccatgtgcaggg

SEQ ID NO: 22784 - DNA, 201 bp, Bos taurus
atctttttttatcagtgaagttacagcttttccgaaagctccacctagtagacactcactgccaccttgtgaaccaggtgctctggtggccatcttatccatcaagaagcccagggaaatcaagttttgcagctggacagccaaactggaattctaccaataagaaaaaagagcgaaaggctaggttcaggcaactcttgg

SEQ ID NO: 22785 - DNA, 201 bp, Bos taurus
tgtacttctgggccagtgaattctcacagagtctcagtgctagggaggcagtgttatctgctggtgaatgactttaccaagtgatagcacgtgaagtcctccagtggccctttcgtggtgatcttcggatttacctgactcagttttccaatttgcaagtcgattttcttctttcctgattctcccttttcctgctactcc

SEQ ID NO: 22786 - DNA, 201 bp, Bos taurus
cccctagctggtgcctggctatttctgtctctagagccctgactccttcttggactttaaggtgtgttgctttattcctggaaagatagaactgtggccccgggatggctgtttaatggtgaaaggggctgcaagatggctggaagtcttttctgtcctttgagttaaaatgggatgtaaggccaagggaaatggagagaa

SEQ ID NO: 22787 - DNA, 201 bp, Bos taurus
tgaccaggaggaggagtctgggccacttgtttgggcagtcttctttctgaatgtgctttagcctagttctgggtgttccagctccattttgtgatggcttttctagggcctactcaaccttatcacttgctaggtcccacactctccagttcactgtgagtagtttgggctctgtggttgcttcgcgtctcatggttagat

SEQ ID NO: 22788 - DNA, 201 bp, Bos taurus
cgccctgtcagacctgcagcgacagtggatccctcccgctttctcttcggcctcaccctttacaggttcaggggctcaggagaagagaagtggcctcatccgagaagagcatccaggtctgatgaaaagtcatctttccccccaggtggggctgcttgctaagccccaggcccaggtgcggttccttaagaccacccattt

SEQ ID NO: 22789 - DNA, 201 bp, Bos taurus
tttttcaagaacctacgacacatggaggagggaagcagagtgatgagtggtaggcatgtcttttgaaaatctttccacgagattctgatatcctctcccacccccaacatgagactctttagtttaggtctgaacacaagagaattgggttggaatggaggagtatatggtgttccgggagaaggcagaagttctagataa

SEQ ID NO: 22790 - DNA, 201 bp, Bos taurus
ctatcagcagcaaaaacatagctttatgttcaattttctcatctttatggtcttttctcagtgctttcactagcatttgcttaataataaaaagcacagatctgacattaactaaaatgtgggtttaaatgctttagcatatcagatactgttgagttttggaaacatagtactacatttaaataacttctatttttttat

SEQ ID NO: 22791 - DNA, 201 bp, Bos taurus
aataaaaaaagtcacatagaaaggtcagagtgcaatgacacttaatgtacagaatattccaacagttggtctgccttttcttcctggcctcctcgaacacactgttgggtaggaagggtcatcaaaatgcaatcctgggggaggttcaccaattaagataaatgtagtgttatggctcctgctggccactgttcatccccc

SEQ ID NO: 22792 - DNA, 201 bp, Bos taurus
tgaccacccattgatgaaaatcatctactgttaatgtactgctatttctcacttaggtctcttaatatttttttatacatttaggtgttcctatgttggatccataaatatttacatatgttatatcctgttgttggactgaccccttcatcattatataatgaccctgtcttttatcaaagactgtcttaaagcctattt

SEQ ID NO: 22793 - DNA, 201 bp, Bos taurus
atttggacagtgaaggcaaaatctgagctcagatctcaacctccagaaggaatggggtaggcggcagctcccctccccacatccaacacttggggtattcaggtttcaatgatggcaagaggaaccttaagaccttctgtaagaaggcaagcagaccccacactcttcccacttctggggccccaagtctaaagccaaatt

SEQ ID NO: 22794 - DNA, 201 bp, Bos taurus
acatgcagaaactactcgtgtggaggcttgatggaggggtccaagtgggaaggaagcccccactgcagtggtattgcttctgtcccgctgagtaggggcccagcctggctattcttcttggggatcttgaagccatgcaggctgacccacatcccagcgagccatgagcagtcagacgctccccaggccgtccttgattgc

SEQ ID NO: 22795 - DNA, 201 bp, Bos taurus
atcttttctctttaaaaacaggtaagaaagaaaacccagaaagacgttagggtctaggttaaggccatggtcaacagaaggccttggccacccagatccagatccactccagccccctggtgactcagccctgggcagacagtgaggagggaggaacgggcctgggaagcaagaaccgtgtaggctggggaagggctcagg

SEQ ID NO: 22796 - DNA, 201 bp, Bos taurus
gcctttccccagatggttgccccagccctgccctgcttctgcttctctccacttggtcagcagaggtgaactaacacagcagtcctctagcccagcagcccggggccaggcctcacatacatacacgaggagttctgagggtgcggaggcccttcctcaggctgagggccttggaataaagggagcagctgctggaaaata

SEQ ID NO: 22797 - DNA, 201 bp, Bos taurus
ttaatctctcaggggacaataaccctgatgggccttgacacacatcttggtgagttttgagtggtcaggggaacacagcttccaacggccttgcgagtctcacccatttggtacctggaggtaggaaggaaggggccttctgcaggagggcacagcaagcctcagggtgaaggaatttccactctgttttgagaatgcagt

SEQ ID NO: 22798 - DNA, 201 bp, Bos taurus
ctccagtattcttgcctggagaatcccatggacagaggaatctggcaggctactgtccatggggtcgcaagggtaagacatgacttagcgactaaactaccaccattaatccaggttggggactgacgattttaactgagagtcttcagtctagaggaccccagagaatcccctgagttcagtctagtctcctgatcccag

SEQ ID NO: 22799 - DNA, 201 bp, Bos taurus
gtcttgtggctatgaatgcgagggccgtagtgatgagtgtgccaggaatttcacccatgttctccacctagatgtttttctatagcgcttttatgatgccagtattgtcaccttgaaatcctgaagaaatcaaatattccagggagtgaaattcctacacttctgtcgtcattgtacgtaggatgatttaccttggtcatg

SEQ ID NO: 22800 - DNA, 201 bp, Bos taurus
catgactcttttagtcttagaaactagcttctgttctaaggaagcctggtttccccatcttgcacctggttctcagccccacatagctaggctccagcagctggccctaaagggaggtgcaaacacaggctccaacttgcagcttacccatgatctggacatgggctttggatcagctcagcctgcagggctttgtttaat

SEQ ID NO: 22801 - DNA, 201 bp, Bos taurus
gccttttcgtcttcttcccgtatttaattcagctgagaccataggacttagctgtctccaccaccatctgtgtgagcctggccccgtgccacatgttagaagtgatacaaaaacaaacatgagcgagacttactcttcctctctttgagttcactggccagagaaacagttctgtaggcagttcaacccattgcacaaaga

SEQ ID NO: 22802 - DNA, 201 bp, Bos taurus
tgatcccatttaattaagattttcagactctcattaaatagagtttgttttggtaatttcctgaaagagagcatttgatagctccacctttgccatggatgcacttacctactaccacctggtggtagcaaaaatattacaaaataaaggaaaagaggaaaaactgagactttcttatttcactgctcccaaggactggtc

SEQ ID NO: 22803 - DNA, 201 bp, Bos taurus
aaaaaagaaaaaagaaagaaaaaaaatattcagatcgtggatgggctggctttttagtcattgtgggctgctataacaacatcttgagactgggaggctttaaaaataaacatttatttctctcagtctggaggctgagaagccaagatcaaggtactggcagatccagctctgagtgagagctctctttccgacctgcag

SEQ ID NO: 22804 - DNA, 201 bp, Bos taurus
ctctggatacctctgagtatgtagctcagcctaggactccttggtccttctgcagagtattcattttcatctttcaccctgagtggagaaaggaagcctgtgatgccctgctgcgccatgccctctgggcctgtaggctccttctgtggccctctgtttccgtttttctctccaactgtctctttcccctctttggccccc

SEQ ID NO: 22805 - DNA, 201 bp, Bos taurus
acaattctgtctctgtctcataaaatgacagatcagtaaacgagcagaaaatccaatgaaataatgtttaatacctagtaaggtgactgggacagagaacactttgaggaagtgtctcccatctcctgaatcatctaccgttatccccgttttacagattgggaaacagcttccaacaggttaagtgagctgcccagggtc

SEQ ID NO: 22806 - DNA, 201 bp, Bos taurus
tccatctttcaagacacacacacacacaaacacacacacacatgtacttgtctgcctggtgaatccctacccatcttttgtctgcttattgaatccctacccaactttcaggacacacacacacacacatacacacatacacacatacacatgtacttgtctgcctggtgaattcctacccatctttcaagacacaggttg

SEQ ID NO: 22807 - DNA, 201 bp, Bos taurus
agattccattgctgggaaacgacgtggggtattatcagttagatagtttccaaggaggtcatggattttccgagctttaatgacaagtctgccttcactcatgcgccccccacctccccacactgtcctccctgggggaggcttctggggggaaccaagagggttgcagaggaaagcactttggaatcgggccaaacagct

SEQ ID NO: 22808 - DNA, 201 bp, Bos taurus
caaggggagcagatggccgaagtggaagcacagacaggggccattgtgggtcttgtttgggaagtggctccattttctaggagcagagtcgtgtatctaaagtgatacagggaggtgggcctccggtctggactttcttcggtgggacatggggaccagggaaaggtttcaagcagtcttgacaagattggaattccttcc

SEQ ID NO: 22809 - DNA, 201 bp, Bos taurus
ctgagctacttctgtgtgccctgggaggcccctggcctcatggagcttagattctaggcagctagagagggaaacatgaattcattttacaaatgcatgtgagataagaatatggaaacgtgtggccaggggatctttcctgggctcatttcaagactctatgattagcaggatcctgggaaaagcctgggtgactgcaat

SEQ ID NO: 22810 - DNA, 201 bp, Bos taurus
tgtttaaaaaaatgtagcctaagaaagtgaggcaaaaacggtatgaacaaggtgaacatgtttaccacagtacagagttcataaataccatcataaatcattgaacaaatgcttgggagcaagtcccagactaagtgaaattcgctggttccaacttttgaggaagaaactggagaaacaagtgaactacacaaaaccata

SEQ ID NO: 22811 - DNA, 201 bp, Bos taurus
cctgtcctcacctctcctcccctcaccaccaaacatacaggagaacacgctctctttgttgtgaagggaaggagaatatggagctgaaggtgagcatgaagaggaaggagcagagaaaggcagctcccatttgattaaatttacttgtttttcaacagtactgcatgtttaaagaagagggcccctgggtttaaaccctga

SEQ ID NO: 22812 - DNA, 201 bp, Bos taurus
aagctccctacagagaactccaccgccataaacagataaattgggcattccaaatctaaccatccttgagatgaggagtggcccatagaatgagtaggaagtattttcagactttcagttcaatattgtctttctcagaaggcatttgggtgtggctaaggcaggcctctcccaaaagcttccatccagagcccatctgaa

SEQ ID NO: 22813 - DNA, 201 bp, Bos taurus
ccttgattatcccagtgggagcagacgggagggctcactctgcctgagtgcctcaggacccctgcagtcctccagagagaggtgggtgggcccagcaggggactgacattgctttttgttggtgctgacacctggggtgagcatcccacaggtccctcagaccccaagctgtgtgaccctcaggcactgtccagctgaggc

SEQ ID NO: 22814 - DNA, 201 bp, Bos taurus
aaggcctcttcaaggcactaaagtcactttagctgatgaaaacctattatgttgggggaaaaaaaaatgggagggttggggttgaaataagagactatctggagaaattctggtgctcctggccagcctataatgcctcactcttcccaattgtatctacctggaaatgtcacaccaaaatccagccttgaccaggaagtg

SEQ ID NO: 22815 - DNA, 201 bp, Bos taurus
atttttgccagaattgtggcaacctaaaacagagaacacagtacttcaaaagactcttgagacatgctatgaaaagccagagccttcaggccaccctctccttgtccctattcctcccgagtagtccttagtaaccaaattctgtagcaagaaaaaaaaattttttttgactgtgccacacagcctgtgggacctcagttc

SEQ ID NO: 22816 - DNA, 201 bp, Bos taurus
ccaaaaacaattgcttgaacttatcactgtgagagattctggtaactaaggaatccctgaaagaggagtaagctgtgattcttggaaagctcagaacaccagaaaggcttaattgcaaagtattgaacaaaaggccacaaattttgctttcctaagaggagctgggaactagagatatcattgaatagtgcattgaaatgg

SEQ ID NO: 22817 - DNA, 201 bp, Bos taurus
ctgcactgggtctttgttgctgtgtgcaggctttctctagttgctgccagcgggagctgctttttgtttcgctgtgacggtttctcatttcggtggcctcttttgttgctcatgtggaatcttcctagaccaaggattgaacctgtgtcccctgctctggcaggtggattcctaaccattgggccactagagaagtctgtg

SEQ ID NO: 22818 - DNA, 201 bp, Bos taurus
agaagaaggttcagagaggcctccactgaggatggggtgggagtgatggacctgggctgtgagaaactctctgtgtcctcctggctcctgtggccacgacggagccaggttccatgacaggcagagctcccttgggtcttgccagtatgtgctgctcctctgagccctgtcccctgccctggcctagaaacgccgtgagcg

SEQ ID NO: 22819 - DNA, 201 bp, Bos taurus
gacaggagagaggactctgggtcaggccacagcagctgtgcaggagccattcttgggtgtggtgtaaagtaggagtctaggtttcctaaggacacttcaccggccttactccctaattaataacatttttttttaatgaatgtttattaagtgcctaccatgctccaggtatcatgttgaacattcgattcagattctctc

SEQ ID NO: 22820 - DNA, 201 bp, Bos taurus
gctgtatgccacaatctgagatgaaagcacaatttttaaaaatttgggtaaaattcacaaaacaaaaagtgaacccttttaaagtgcaaaattcagtagcgctcaatacattcacaatgttttgcaactaaagcagaaccccaaaggaaacccacatcctggtcatcaatcagtcactttctattcctgtccccccaccca

SEQ ID NO: 22821 - DNA, 201 bp, Bos taurus
gacccgcctggttcgggcgtgtctgatgccctaggagagcccccataggaggcttatgcctttccttgttgcagcatcatttgccaagacaggtgggaaaggcagggttgcgtctcaacagggggcctcccttcgcttcctcgtcagtgtgagctccccttccctcttctgttcctgccttgtctctcaaggcaccgcatc

SEQ ID NO: 22822 - DNA, 201 bp, Bos taurus
attgaagctgaaccctgctacttaatggctatgcaatttggcctctgtttcctgaatctgaaaaattcctaatgggaattaaacaatcagtttaaatttacggaccaatttaaacaataccccacaaaagcactatcaccacacaatttagtgtgcaatttaatgcaatcattataatgttttttttttctctcattttat

SEQ ID NO: 22823 - DNA, 201 bp, Bos taurus
cacctcaattcctttaatttcgtttaataaattattcagtttaatctgttaaattcaatctgatttaagaatcacatgaggaaacaaggtgatagaaaaatacctataatgcacttaatatatagaaagagtaaaaaaggaaatctataaaacactcttcttcctttgttactctggagtcaggcagaggtacagggccag

SEQ ID NO: 22824 - DNA, 201 bp, Bos taurus
catgagtatgtctgtaaccctcctctcttctcacctttgctagccctgaatactgctagccctagggtctggtttttttttttttttttaaagtaagtctataaggagaaacaaaataaaaatttgcattttctcgattgattagtaatgttaacatctattagccagttttatttcctctttggaaattgtctatttaaa

SEQ ID NO: 22825 - DNA, 201 bp, Bos taurus
ccccatccagacaacttccttggttcagggtctccccgaccggaacacttcttaagcccaagtcccgccccttccggttcagagccggaagtgccttggattttcgcctttcaaccttccggcctcgttaagtatctcagacctattttgctctggagtcttatttgtaagagtagctacgtcagcacgtttcggcgtgag

SEQ ID NO: 22826 - DNA, 201 bp, Bos taurus
tcagatacgactcagcaactaaacaacagcaatgcctgtattatacttgaatcaaagcaagggtgcacttaaaagttattttgtaatcatatttttctgttacatttttatgaatctgtaccaaccttatataataatgtagaaactatataacaggaaagcaaaaatgaaaaaataaaaacatcacccacataccaccat

SEQ ID NO: 22827 - DNA, 201 bp, Bos taurus
taaatcaatggggtggggctgctgccctggtcttgggctgaggagacaattggttctcaccaatcatcggggactcgatgaaactccatgtgttggtctgggggacgtaagactggaggacgcccgcagctcggcctgcctcgttcacgcccccaaacacatagatcttcccaccacacacggtggctgctgctgagtgca

SEQ ID NO: 22828 - DNA, 201 bp, Bos taurus
caggatggtgaaagtggggttcccaagggcctggtgggagcccaaggcagatgatctgggagcagccaggggtcaggggttttggagggaaggtggccccctcaaggagctagaacttggttagaatttccttagggaggtggacactgggaggagccttggtccttgggatgaggggaggacaagattgggtctggccgc

SEQ ID NO: 22829 - DNA, 201 bp, Bos taurus
gaaaaggaaattctgccaccatcacaaatctgaaggactgtcatggagaacaggagccagctttgctctgatgggcccagagggcagaccatggaagttataggaagacagctcttgaccatttaacatcataaaccatctagctgtgagtggccgcagcttagtccccagcggtggagggaaaattcttgcttctgctgg

SEQ ID NO: 22830 - DNA, 201 bp, Bos taurus
gagttgccgcctcagacgctggaataaccctgcatgactggccagctcctatcttattctccctctaaaacagaagatgcgctgatggctgtcagacttagagcccctctgccagccctggccggcactcagcactctgccaggggctgtgaggggtacagagatgctctcaagaagcccccatctgtaggggttggacca

SEQ ID NO: 22831 - DNA, 201 bp, Bos taurus
cttccctagttcaggctactgggatgtttgccctggattatgctacccatttcctaactgagctccttacctccagtcttgcccaaccccatttctatgatgcagtgacctttgcatagtgaaatctgcataaatctttgctttccattttcttcagcaccgagactgaccttgaatcactgtcttactgctggggacttc

SEQ ID NO: 22832 - DNA, 201 bp, Bos taurus
agctttgtactatagtctgaagtcagggagcatgattcctccagctccattcttctttctcatgagtgttttggctacttgagtattaggggtcttctgcatttccatacaaatttaaaatttttttgctctatttctgtgaaaaatactactggtagtttgatatggatttcaatgaatatactcaagttcagtgaatgt

SEQ ID NO: 22833 - DNA, 201 bp, Bos taurus
ccaattataatgttttcccagtggaaaaaggtgatttcttttctgattgctttttcaaatggttcccaggatagctttgtaaagagtgtgggtattggtgtgcaagtctgatcctagtgtcccaggaaggagtgaaaagagcctctgcaagcttgaggtctcctgaaaggatctgagtttccctgtgctctttgctgtatt

SEQ ID NO: 22834 - DNA, 201 bp, Bos taurus
tagctgctgaggcctccggactcaccttggctgggagagccctaaggtgggacctagactttggtgatggggaggctagatggaaaactggagactgaaaatgaaaagtggcccacatttaatgcagcacaggggatagacttctgccactctcttccagcccactgcctgttccttgactcccagggctcttaagtgaac

SEQ ID NO: 22835 - DNA, 201 bp, Bos taurus
taggattgtctgtggcctgaatgaggggtctgtccatggctaggcttggaaggatggctatctgtggctgaaataggggcctcagtcaatgaccaggactggggggatgttcaattcacagctgagtttcaatactcattctggggtgggaattagagtgtaggatgttgtgaagtcctattagggagatgcaagaaggaa

SEQ ID NO: 22836 - DNA, 201 bp, Bos taurus
ctccagagactttgcattcacactttcacttaaagatatcaaaagatagaattgtagaacatgcaacataaatgtggcttttgtggaaaaagaaaaaaaggaactgtgtggaatgcttatcagagggaaaagaccttggccctacatcataagcatagctaaaaaatgcacatttatatatcttaggttaaaataatatgt

SEQ ID NO: 22837 - DNA, 201 bp, Bos taurus
attttgagactatggcaaagcttcacatgtgaaccctcattgaattgttaacaataagtcctatggaacaataatataattatccatttattaatagaaagcaacagaaaggatgttaagtaacttggaaagtgtcacacaattaggaaatgacacaatcatgattagaacaattgagtttttgtctgcagtgtcttaatt

SEQ ID NO: 22838 - DNA, 201 bp, Bos taurus
ttcagaggaaagaattagctgaagaaaggtttcattagaattctaaatatgaggactttccattataaagacagcgcttctgaatctcatcttcctaagatctgtgaggagagaaatttgagacggactctgggcactctctgtggaatcttatgcagggagctcatttccacatgcacggataggaggcgtgtgcgaccc

SEQ ID NO: 22839 - DNA, 201 bp, Bos taurus
gatcatgtaggctttgttcatgatacttcctcagcacctagaaagaaactgcacaagagttcctcaataagatattaaaaataataattaatggaaggatcgatgggtgaataggtgagtgcacagatgaatagataaaggcatccctgaccagtcttcatatgtgaatacactgctttccatcactgcctttcttttttc

SEQ ID NO: 22840 - DNA, 201 bp, Bos taurus
tttgtgggaggtggtcaaagagaagcagaaataacatttcctgaatggttgctcttagtattgtcacagaaatgacatttcatataagggtagcacatttgaagaataaattataaataagattaaatgaaatagcagtgaggaaactcaggaggattagaacaccatagaaagaaaaatgctgggagagaaaatgaaaaa

SEQ ID NO: 22841 - DNA, 201 bp, Bos taurus
atcttcttgcatcaaacctgtgtctcctgcattggcaggcagattctttacctctgaaccaccagggaatccctagaacttttctgatttctattctttcgtccttatggatatccgcaccattacaattgcaaatgcaatgattactttttatttaccaattctcactgggctgtagttaagaaatagtttccagggaaa

SEQ ID NO: 22842 - DNA, 201 bp, Bos taurus
gattggcaggcatgtacaagctgagaagtagcatttcctctttcccagacttgttctgccctttatttgaaggcggcagcagttcaaactaaaattcttgcaagtaatagatcttaatgtggattcaattccatatcggtggcagatccgtacattatagataacaggtaagttataaaggacttcttggctgtctacagt

SEQ ID NO: 22843 - DNA, 201 bp, Bos taurus
tggtgggctgtaaacacagtctctactttccaggctgtgtgcttgacactgaggattagaggtaaatatgagagagccattactttaaggaaaatactttcgcagagggatgacagaagcaaggaagtataatacaatctgataaggactatgacagaggaggtaccagcaccatgaaagtacgaaagacgatggctacct

SEQ ID NO: 22844 - DNA, 201 bp, Bos taurus
gacctccacagaaaaaaaggcctccgcaatactatcagcgattcctgaaccaaacctggagggtacaccttctctgaaaatagcatttttcaggtcaaggacaccggcgcccacgcagaggccgagcagcgaacacctttaggaggccgggaggtcacagagctgaggggataccgacccggatcgaaggctgtgggccgg

SEQ ID NO: 22845 - DNA, 201 bp, Bos taurus
cacctttaacagaaacaagacttcaaataatttcctaatttccaaagccagtggacattttccatcccttgattccactggacccttcttaaaattctcaattctcttagcttctgtgaggccacttgttataccatatgatcaactcttacggtttggggatgtggtaaaaagaagatcattagagactcagagacttgc

SEQ ID NO: 22846 - DNA, 201 bp, Bos taurus
aaatgagttccctggcctcagacacctccccttctcagccttccccaccacccaccactgctgccagccagacataactccccccacccaacccctgtatcgcccagatttgcgatggccatttggatggctgacgtgaagcctccgctctcacacgttctctgtcctttctccagaaaggtcagttagcactgcatcctc

SEQ ID NO: 22847 - DNA, 201 bp, Bos taurus
ctcgttcaaatgaccaaatctgcttccctcacattggattacctccactacaatgcctagtgttttttgtttgtttgtttttcagatctaagaaacttaactgtcaataagtaaacaatttttccacagtggaatctcacaagagaaagtaaggttttattttttttttcttttggatcatttgtttagggctccattctt

SEQ ID NO: 22848 - DNA, 201 bp, Bos taurus
tccctcaattgtttatctacctttccttcttaccgatatcaaataagtcttcatgtgtcttaaaaattattgtagtttatcaaaaatttaccaagaacttatattatttcactgtttatgccctaaataatgtactttaagtaaaataggatcaggaaactaactcttaaaatataggcagatgtgcttcgtgagaaacct

SEQ ID NO: 22849 - DNA, 201 bp, Bos taurus
gacagaagcacgatctcagggtgagagcagcagaagcaccctcttccccgcctgtctgttccgggggcccctcctgttttgggccgtacccatcacccctcggcaggtcccagcttgacttggttcctggtgagttgataaatcgtggtgcctgtcaggctggaaatgctgatgctgtcccgaggcaccgacggggcccct

SEQ ID NO: 22850 - DNA, 201 bp, Bos taurus
tctgctctggggttccccagggccaggaacacttctcaggtgagcactatctctgcttccttcttgcctctctcacggggcctacctgaggctgcacacagagaggggcaaagaaagaaggagctggaagagcccagagcggcttctgccctggaatagagatggctgggcctggggaggaggatggctctggccctggct

SEQ ID NO: 22851 - DNA, 201 bp, Bos taurus
ctgtcctgcagtcctgagcctctccattcttgaccagtggtctgaaccccttatctgtggaacatgctggctcctggccatatggccactcgaatcaggcgcttgcctgcctgcctgcctatctccaccgacactcagcggcactagccatcagccacaatatatccagaagatttaagtgtgagttacctcattttgttc

SEQ ID NO: 22852 - DNA, 201 bp, Bos taurus
ccatcagtgtcaggtagattgatggcacatgtccatctcaagcctgtgtcccccttctatgctttgggttcctatgacatcagagcttcctgccccaatggcagtctacagggcctctctgggcctctttggggaggggggcagacctggttgctgagatgcatacccctagacttcagggagggccaaggggcagctgct

SEQ ID NO: 22853 - DNA, 201 bp, Bos taurus
tcacacaagtgtgcttatgcaaacacacacacacacacacacacacacacaaacacacacactcttgtcaatggagcaaaagcccagagtagaaagaagacaagaagggggcttgttcccctgatgacaacatgcaagtgcgtatccccaggatgtcagcttcccggtgagaagagacataacctgcttggccctactttt

SEQ ID NO: 22854 - DNA, 201 bp, Bos taurus
tgagtcaccatattgaatcaaagttacaaggttgatttctggaggcatgtgcagaattttacacttgtatgtgctattccttttaaaaccacttttatcttgcagaatgtagtgtggcaagttagcttacaaaacaatacgagtttgtcttatatctgctcaatcagtgtcaaacctcaaaaatcccaaataactgggaaa

SEQ ID NO: 22855 - DNA, 201 bp, Bos taurus
tcaaggtcatgtctattttacagagttgacatctttgggcagtgagatgattcagcccaacaaattcagtgctagaatcccaggattctggagacagtgtcatactgatgtgacaggtacttggttagaagttctgatagccaaacttgtaaaacccaacatgcatatttccctagcatcattttatattataacatagat

SEQ ID NO: 22856 - DNA, 201 bp, Bos taurus
atgaacttattctagaagattaacagtggtcttaatataagaataatactgttgtgcagaccccaggaacaaaccacttaaagaaacaaagatctcaagagatttccaagttaatattccaagagtctctaaacccaagtggtaacaaaattaagtggtccttgaataaaggcaggactggcaattgcattgtttcctact

SEQ ID NO: 22857 - DNA, 201 bp, Bos taurus
agatacaatcactcgtttactcatcttgctacctaattcatttggcaaatagtttttgaacacctgtattgttctaggcctgtgctaagcaacagattacaagagatgaataaacatcagtatatgacatcaggaatgtcaccaggacatagatgagaggcccagcgactggtcatattatataggatggcgtcatgatat

SEQ ID NO: 22858 - DNA, 201 bp, Bos taurus
tcatcttgtagaggtctcaaacttctgggctgcagacaggtgtctcctgttagatcagccacagcgttatattagaaagaaagtgcccaaaaaatgtcacgcgtttgaatcatcctgaaatcatgccccctgaccctggtccctggaaaaattgtcttccacaaagttggctccttgtgccatgaagatcagggaccactg

SEQ ID NO: 22859 - DNA, 201 bp, Bos taurus
gccttgagaaccccatgaacagtacaagtcatacacagtctctaagcttatatctcctcactggaaaattaataataaatgctcttcttatagagctgtggtgaggatcaatgaaagacatacatgaaaatgcttaactagatctagcacaggctaaaagcatctttggttaatataataatacatttttacttgtctagg

SEQ ID NO: 22860 - DNA, 201 bp, Bos taurus
ggtcagccatgcttgtgaattgctttggccaatgggctatgagcaaacatgactcatgcagaagtccaataggtgcttgtgacctggggcttgtcatcttggaggtggccatgctgtaagatcacctgaggtggccatgctgtaaggaagctgctctagaaagtcaatgtggaggaggactgacatgcctgacagccagca

SEQ ID NO: 22861 - DNA, 201 bp, Bos taurus
tgagtctcctctgttaaactgtgagctccttgaaggctaacattatgtggtattattcagctcagtaccacaaagcctggcccattacaggtgctctgtggctgctttaagaataaaagaatgagatggatggatggatggatggatggatggatggatagatggatgatggatacaaggatggaatacaggccttcaggc

SEQ ID NO: 22862 - DNA, 201 bp, Bos taurus
aattaatacttcaatacaattaaattttttcctagaaaaatgactaagtgtttgagtggttatttttggtagtaggaattgaaggtaaattttctttattaatcatcctttcttcttgaggggtggtctagtgtcatagttagaagtgtagactctgcagccaggcttcctaggtcaaaactttgacttgtctactttggt

SEQ ID NO: 22863 - DNA, 201 bp, Bos taurus
taatgaggtattattcttttctcttccaaattcttagtggattatttatgttttcttttgaaaattctcactcttaattggttcccaagatacttccagaagttcattttgtctcattaagcctcctgtcctggatgaggaacttggaaatagtttgtttcaaagtgaagtatgtttgctatttaagtttacatggggagc

SEQ ID NO: 22864 - DNA, 201 bp, Bos taurus
tctttctccgtggctatacatggcgcacatggattggacaggcaccattaagcagccatgccctgggcagttgtattcctagtaattgtcgtgtcactgtccacagcaaggttcactttcctctggatcctgacagagattggctctcataacaaaaaggggagttaagcctttttaaccctgcatctcaaaagagcagag

SEQ ID NO: 22865 - DNA, 201 bp, Bos taurus
ttcctatctggaaagtcctgccatccccccgagggtccctagacaaaaaaaaaaaaaaaccaaactggccagccgggccagctatctcctgcttcttccttgccagctgcctctctccctgccatttgttccacccaaaaccaattcggaccatttgctccagccagtcaggccccaaatgggacctcagaactttccctt

SEQ ID NO: 22866 - DNA, 201 bp, Bos taurus
ggagagatggcagagccagacgctggggtcggccgtaggggcaggagtggacacttttcttttgatcccactccagccgcatttcacagtcctttggggccagggtgagctgggtgttccagcagggccacatctctgtgcctgattcatctttggagagctggttattgtaccgtttgatcgcatctgcatgcgacccct

SEQ ID NO: 22867 - DNA, 201 bp, Bos taurus
tgctttaaagaaagaaaccaacacaaagctttgctcagctacttatgaatcaacccagttctgacttgcattattgatttgttgcgtgaccttgaggtccttcagcctaagtttttgcttctataacatggggagaaatacaagcataccttggagatgctgagggtccctcaccacaccaccacaataaagccaatatca

SEQ ID NO: 22868 - DNA, 201 bp, Bos taurus
cagaaaaaacagtgtttagataaacttttactttagagtgacaataatgaatccagcatatgaatacagacacggggcatgaggctgactaggcctggaatccaacacgagttcaaaacctgactctgcagcaactagcgatgtgactttgggcgggttagtcctgagctccagcccctcactgccacggaaatcacacca

SEQ ID NO: 22869 - DNA, 201 bp, Bos taurus
tgtgggggaaaagtagggccagagagccccaggcattttcagtcgaagcggagcagcctgtcatggaatggatttttccagagcagggctaagtaaatgaggaaggccgggccggagcctcgaaatgtctgggaaaagacgagagtccagcaaatagtggataaatctccaagggtgagaagaagttggagtctaattacg

SEQ ID NO: 22870 - DNA, 201 bp, Bos taurus
tttatcctgaactgattcacatttcagttggaactcagaaggggagagaagtgtgattgatttaccccttcaagtctaaacagcctttcctctgctgggtcttcctggatctgtctcccatgctgatggagtaatggttgaaaggccccctttcctcttttaaaagaagtgttgtccagacatgtttattctcccttttca

SEQ ID NO: 22871 - DNA, 201 bp, Bos taurus
cctaggccacatgctttactggtctataacaacatggattctgatcagcagagagaggaagagtgctgttacttctactgaaatgaaccctgtatttgtgtggcctatgcagggggggatactctttgagagaaaagttacctgtagcaacactcccaagagagatggcttagcttagtctgttgagacccaagaatcaat

SEQ ID NO: 22872 - DNA, 201 bp, Bos taurus
agatgcagaatcaagttaagaggagaagaaagcagttctgtcttgaatattatcgttaaatttaaaaaccctgggaaagaggatttacagttgcggcatttggcctctatgttacacactctccaattatggtgcagctcttctctggtggctcaggcagtaaagaatctgcctgcaataagggagcccaggttcaatccc

SEQ ID NO: 22873 - DNA, 201 bp, Bos taurus
agaacatgatgaaaatttagaatagattaggaggttgattaaataaaatatatcagctttttatgtcaaccctgtctctggaaaaaaaaaaaagacaaaacttgggctcatgcaattgtttgatagcacactgtctatctgcctgaaggagcaagcttccagagtacctgtctacagtggggagactactgagttccatta

SEQ ID NO: 22874 - DNA, 201 bp, Bos taurus
aaaaaccatatcatctcttacctaccatactgcaatagatcctcatttttcctccttccaagcttcccctttccacctgtctcacatccacgaggtggccgtgatctgcttaaaactgaaatatgaccatgtcatgtttcctattaaggtcctccagtgtcttcccattgtttatagactaacatccaagatcttcaggct

SEQ ID NO: 22875 - DNA, 201 bp, Bos taurus
cccattgcttttctcagtgattatttattgctataaaatactgctttgggatgggaagatcctcataaaggtagagaaaaagtaattcccttgtacttttctatattatccactgcatccctaaaatattacagagaacttctgaataagcaaaaatctgtctatattctaaaggcattgtggccttggaaattcagttgt

SEQ ID NO: 22876 - DNA, 201 bp, Bos taurus
actctacaggctgggttcatggtaagttgtgtccatagagaaatatgaccattcccctaaggcaggtttaccctgcaggcatgactggagccaatcgctccgtctggcccctcagaagaacttagatcccttagcccagagccaaatgggaaggttttgtgcagatgatattccagggagaaaacttcatttgtccatctt

SEQ ID NO: 22877 - DNA, 201 bp, Bos taurus
gcctttgtgaacctgaaacccaccacttaattctgagagccttggaagacagtagctcaaccatttgcacataggaagcaaagccaggaaaatcacatcaggccacttcgttgcttagtcccttacacttggaataccacctaaacttctgactggggcctgcgagacccagaatagccagccgcttcctcctgtcctgcc

SEQ ID NO: 22878 - DNA, 201 bp, Bos taurus
atttttgtggaaggaaaattcagactcactccagacccatactgtcctctcagctgcaggtgtgcgtagcaagactctgacaccgttaacttgagtatattcattaggacattaatacaattcggggagccacttcattcaggtcagagctgtgagtggcaccctcttctgtagaatcactccattgggtatgtatcaaca

SEQ ID NO: 22879 - DNA, 201 bp, Bos taurus
tatgctgaacacccctaaagagttgtgcccccaggacaccctctgtctgccctctcccccaacctcattctcctaatcccttcaggagatctacttgctgtctggcctggcaactcacttttcctgaatctcagtctcttcatttctgaatgggattaggccagattagaatcacctagaaaatgcttttaaaatgtagat

SEQ ID NO: 22880 - DNA, 201 bp, Bos taurus
ctgaaagcaaccttaacacaagtgatgattttattcagaggcaaaattaagttcttgtgggtactgaagaagcaagtgctaggcccagagcatccacacacggatatgttctcagagtttcagcttagagggaccaggtatgggatttacaaccagagggcctatcagtcattctcctctagacccctgggtgaagataga

SEQ ID NO: 22881 - DNA, 201 bp, Bos taurus
aattgtcgtagggccatgtccagacattcgagtatatagctgtttttaatgacatcatttctgttcatggggtctggaaggttattaatgtgagagagagggggagcgagtataagcactggatcagagatgtgtcctgtgtgactttctgtgggattgttctgagagttgaagaaaatttatgtaaggtgtctagcacag

SEQ ID NO: 22882 - DNA, 201 bp, Bos taurus
aaggatgaaggctgagaagtgcacctacctcctacatggccacgatggcttttgaaggggtttctgtgactgttttcagaccacaggtgctgtgtaccctgttctatcccagcagacgtgagaaggccaatggagccagatctgggtgagggcagactcagagccaagaagctggacagggcatcctctgatctggaaccc

SEQ ID NO: 22883 - DNA, 201 bp, Bos taurus
ttgatccctggttggggaactaacttctcatatggtgtggtgaggccaaaagtatttaaaaaccaatctgactggtgcccttgaatagaggagcttgggatgcagacccagaggaaaggccacgtgaggacacagggagatggctgtcgatgggccaagaaaggcctcggaaggagccaggcctgctgacaccttgacctc

SEQ ID NO: 22884 - DNA, 201 bp, Bos taurus
tcccctgcagcttgtccctggggtccacttctccactggtttcagcatccagcgaccagaagagtgcagagctcatggaaccacgctgtcacccccaaatgccgggtggacggtcctgcagggcacagagccaccctgcccccgctgctatgaaagaaagtgaagtcgctcagtcgtgtgcgactctttgcgaccccatgg

SEQ ID NO: 22885 - DNA, 201 bp, Bos taurus
aacccaattcaaaaaagccctctctcagacttccccagtagcagtggataagaatctgcctgccaatgcagggaacacaggttcgatccctggtccaagatgatcctaactgctgcagagcaactagaccatgagccatgactcctgagccagggctctagagctggaaaaccacaactgcttagcctgcccaaccactga

SEQ ID NO: 22886 - DNA, 201 bp, Bos taurus
gggacatgcagggcgctctcctgaggggccttagtggcaggaggagtaggtgggttcccctgtccagtgggagagcgctgggcaggccgcctgcaaggcgtgactgaagctgctcccctgggttcactcactttgggttattctcagtggggagggggcaggacccaagctcagtgaactgggtgtcagccaaggccactt

SEQ ID NO: 22887 - DNA, 201 bp, Bos taurus
ctcttccgtgagccaggctccgcagctctgggccccagtgtcacatggaagcctctgcacggggcacctgtcctcatgaaggaagtaacgttaagagcaccgattccaggaggccaaggacagagtttggaacggagcagtggctggcagaaaaattcaaatgtgttcggcaggaagctgatcactgccaaaaataactgg

SEQ ID NO: 22888 - DNA, 201 bp, Bos taurus
ccaccagaccccgggagccctcctcccagcccagaccctcggatgcccaccctccctccatccctgtagtctgtggatccgtgccctggggccacccacacggagcctgcttcccatcgtggcatctccagctctcatctccatggcaacactcaccacccccgcgtgcgaggccactgtgcacagctaacccaaggcctg

SEQ ID NO: 22889 - DNA, 201 bp, Bos taurus
gaggccttgcctgctgcattccatggggtggcaaagggtctgatacgactgaacgactgaactgatctgtattacagttattttctcctttaatattttattttttattggagtataattggtttacaatgttgtgttagtttctgctgtacgacacagtgaatcagctgtatgtttacatatatcccctccctctctagc

SEQ ID NO: 22890 - DNA, 201 bp, Bos taurus
gtaatggagtagtcttgtggtgtggaccgcgagcctctcccgcttttgcagcagtaacgactcttaatcgtgatgacagcagttcactaactctgcatttgtggtgtgatgggctgctagtgtagagtagctgagtactaataattatagctcacggattaattaaaaagctaatgtttaactttacccttcatttcctcc

SEQ ID NO: 22891 - DNA, 201 bp, Bos taurus
acccctgagccttgtctggaacccggctggccatgccccattttttgacaggtaacacaggaggaaatcaaccctgaatattcgttggaaggactgatgcggaagctaaagcaccaatatctgggcctcctgatgcaaagagtcgactcagtggaaaagaccgtgatgctgggaaagattgagggcaggaggagaagaggg

SEQ ID NO: 22892 - DNA, 201 bp, Bos taurus
ccaccgctccaggtcatcacagagcaccagcctgggctccctgtgctacagtgcaacttctcaccagctatccatcttacacttgacactgtatgtacaccgacgctactttctcccttagtctcactctctccctatttgcagggaaggaatggagaccagatgcagagaatgaacaaatatttctcatgtacctatctg

SEQ ID NO: 22893 - DNA, 201 bp, Bos taurus
catcagataaattataaatatattttaaatcaaagactggtcccacaagggcagcactctctgtgttactcattgctgtacctgggatacgcactataactactctcacactgaatatatatttgttgaatcaatatatgaagtctttcactagtactaatagcttgtagattctaattttttctgtgtagaacatacttt

SEQ ID NO: 22894 - DNA, 201 bp, Bos taurus
ggctggagcccactgaggttcttccctaccccaggagctggcctgcactgacgcctgcctgccggtcccctcaggggcttccctccacgcccacagcacatctgaacatcataccatggcctgcaatgcccatggggtccaccctgatcatctctgaccactgctacctcctcctgctctgtccgcatggacctccatgcc

SEQ ID NO: 22895 - DNA, 201 bp, Bos taurus
gccagaccgagcacctgcccagccccataccgcagctcaagtgcaagcgcacagtagcaggaaactggacttagctaaagctgggttttaccaggtgactatgaaagtgggagaaagggccacgttttagaaagaagaggactgacaacacaagggtggcagggaacactggaaaggaagtggggctgagggtcccgggag

SEQ ID NO: 22896 - DNA, 201 bp, Bos taurus
cctacaagcaggccagacaagtagatgttaagcttcccttttccagacatcactgtccactgagggagtagggagcatggacacagcatggtcccctcaagtcagcagacaggggccaggtcctgagcaggacccgagtcttcctgaactcctatgctattccccatttgcacagcatcccttgatacatctggtctgtac

SEQ ID NO: 22897 - DNA, 201 bp, Bos taurus
atgtggacaaccaaaaagatactcattttctcaagcaacttgatatcttataaatttattgaaggaaataggcaagaaaacagagatgtgtgcatagaaatgtttgagatactgaaaactggaaacgagcaacttattcaaagataaagatcaactcaactatagaaacatagcttctgtaccccagatggtggtatgaac

SEQ ID NO: 22898 - DNA, 201 bp, Bos taurus
ctgggtctcagaagctggtctgtggccccacagcctcagaatcacctggatacaatggttaaatgtacagtttccaggtctcacttcaaagacaccgaatcagtattatgggaagtgggcccagaagtccgtaattttgactgtgtgattttgtcatttatttcttacgtttgaaaaccagattcatgttttgtgaaatgt

SEQ ID NO: 22899 - DNA, 201 bp, Bos taurus
gtctatggggtcgcatagagtcagacacgactgaagcaacttagcagcagcagcatgattgagagagacagaaatctatttttataggcccctctgtcaaacggttatcatttggaattgttttacaaggatataatatctagacagacaatacttggcttaattctacatgctggtttgaaaaaaaaaaaaaggcatcta

SEQ ID NO: 22900 - DNA, 201 bp, Bos taurus
aaagagaacagaagatttctgcaatccaatctagttcagatgctgggggtcctcaaggaacaggtggcctggcccaggcttttgagggagcctcccaggccgttggttagtgaatgcctcaatactgtgttcatccttaacgtctgaatgcctctagtttgtgtacatatatcattgctcttaatcggtcttagtctaaaa

SEQ ID NO: 22901 - DNA, 201 bp, Bos taurus
tcttagaaagcatctccatattgagctcattgccaatttgagatcatatcttgctcacatgtgtttcatgaggatttaatgaattatatgaaaaagtgtgccatctagtcagcccaaaggtgttcatctgatgacagttacttctactgtgtctccctatttttccattcctctaccttaccattttcccctcctctagaa

SEQ ID NO: 22902 - DNA, 201 bp, Bos taurus
atgctactggagatcaggggagaaataactccagaaagaatgaagagacagagccaaagcaaaaacaactcccagttgtggatgtgatggaggtaaagtccgatgctgtaaacaacaatatttcttcagtcagttcagccgctcagtcatgtccaactctttgctactccatgaactgcagcacaccaggcttccctgttc

SEQ ID NO: 22903 - DNA, 201 bp, Bos taurus
aacgccagagccgggcagctgtgcttggccatgtgcacagagaagcaaaggcagccagtctactaagagaggagaaagaagcaggtgcaaagagaaaagcagagacgaggccatgtggccctggcgacacagaccgagtgacctcagttcccagggcttctagaccctgggcccagcccttctgagccccactgtcccttc

SEQ ID NO: 22904 - DNA, 201 bp, Bos taurus
ctcttcctggagagagcgtggtggtgtggaaggcagagccctctctctagattggggttcagggaagcgcctagcactcagattctctggccctctgtttcctgaaacccaagatcaagggtctgatgggaaatgggctggagcactcaccccaaagagaggccaagatttctgaacaggatgcagggagggaggaagtgg

SEQ ID NO: 22905 - DNA, 201 bp, Bos taurus
ggtcttcatcatggacaggaaagaacctcgaaatggacagagccacagccacagtgctagagtggccccaggcttaggcccctgcccgtcacggccctcaacttcccagattggggttagagagatacaggaatctgaatggaagcagaggaccccatatggctcccaagcgactgctgggaccactgcggtccagagagg

SEQ ID NO: 22906 - DNA, 201 bp, Bos taurus
cccattctacagaagggaactctgaggcccagaggggtgaaccatttgagtctctgctgacattggtctgagaccccagtagcagaggcagggctgaccacgccatcccagtggcccgttgtgttagcccctagaccagcccagcagttcctctgaggccccattcagccccatccgggcccccggggccccgaggctcac

SEQ ID NO: 22907 - DNA, 201 bp, Bos taurus
accttaacatttgtcaagctttcaataaaactcatttacacatccttcaaattgacatgaaggaaatgattattacttctactttgaagaaactgaatccaagctctctgataacttgctcagtcatgctctcttactagggggagagccctgagtctttttcaaagttattgattcagttcccctactcctgaacaaggc

SEQ ID NO: 22908 - DNA, 201 bp, Bos taurus
gcagtttctgaatgaacacatgaatgaaggagaggcaacagagcctagacatgaggagcacggggtccgaagccagtgtgtctgagctctcactcagcgctaccactcgccagctgtgtaaacttgcacgtttcacttcacctctctgcacctcagttttctcctctataaacagtgcctacatctcacacttgtgatgag

SEQ ID NO: 22909 - DNA, 201 bp, Bos taurus
acatggccaacattaaaatgtgtgactgtaagtctgctgggaaccgactatgtgtttatgtgtctgtatgtatctttgtacacaagcgtgctgtatgtgcaggcccatgcacatatgtgtgcctggaggtgtgcaccagtgtgtcaacacctgtagtctgtgtgtgaactcatgggtatgtgacatatgcagctgtgtgtt

SEQ ID NO: 22910 - DNA, 201 bp, Bos taurus
gactctgtggctggcagggttgccagggcccaccttggtctatgaatgagaatctgcatgccctcaggactgggctgtgggtcctgagaccttctagactatgaggcctggtggaaactcccaggaggagatgcaggaactgggcgtctgggcagtgctggggctccaaccttgggcccgggcctctccgccatgctcctg

SEQ ID NO: 22911 - DNA, 201 bp, Bos taurus
agagctgacaggattgagagtatttcttccacgtacccaggcctgcacacagagcacatggcactaggctacccctgagtatgttgactagggatacagatgggccacaaccagtactatgttaagaagcctaaacttaaagtatgattatatccagaattacagctcatctctggcacagaagtggtcaaacccattcca

SEQ ID NO: 22912 - DNA, 201 bp, Bos taurus
cgtaactaaatcaataaacacggtggtagcaatgtgtcagactgcaaggtccaggtatcagcaccaaacagtgatcacaccttagctgaatattgaaggagaggggtttttaattttttttttttttaactttttgagtaagtgtatatttacaaaattttatataaaatgtgcttttcctcccttatacactccactaaa

SEQ ID NO: 22913 - DNA, 201 bp, Bos taurus
ggacccccagttttgacttcctgagcagggcagggtcatgtccccccaaaacctcaggaggtgggaattcgtccactagatgccaatcttggtcaactgccttcacagatgcctcaggacctgagcaagccccaccctttcctccaacccttctccctcagagccaggaaggacacagagagaccagagctgggcgtccat

SEQ ID NO: 22914 - DNA, 201 bp, Bos taurus
atattaataatgcttcctcataaagctgttggacaataaaatgaactaatggatataagattgccctgtgaattataatgtactgtaaaattgttacaaaggcactcaaaacagagtataaattgaaaaataccaagtacaaataaatgttgaatgtgtttatgtgggggcaatgatgatggttttgaaatattcaatgaa

SEQ ID NO: 22915 - DNA, 201 bp, Bos taurus
ctcagtacaagttttacgtatgtcagtaaacgacgcacacagtggcctcacagagcccagccctgccacgggagaagctcctccacagtccctcacagatctgttttgctgcctggtttgtaggaagcctggtttctcttttactgccccaaacagtcactgaggcaagattcttaatcttatcccaaatttagggcaaac

SEQ ID NO: 22916 - DNA, 201 bp, Bos taurus
tccagggcaatgactcagcgctctcactgccacggcctgacttcaatctctggtcaggaactgaaatcctgctttaagtcactgcagaccgaggccacccgagatcaactccatgccagcagatccacaggagggggacggagccacttgtgtggctgagtgtgagagttcaggctcagaggccaggttggctggtgttga

SEQ ID NO: 22917 - DNA, 201 bp, Bos taurus
tgaaccaacaccgtttctctccaacctcaaagatctgaaagttaagaaacctgaatactcctggctagagaactgagccaccccttctgttgattctacattgggggccacgtgtcctgccccgaggggagaggcctctgctgatcgaggaagaacggaggtgctgggggtggggagcagttcagacggcctggctcgtgt

SEQ ID NO: 22918 - DNA, 201 bp, Bos taurus
ggggcaagaaagtcctttgaatactgtgagactgcatttcccaaaccgcacaattaagaggagattctgagccaacagatctgggacgaggccaggagttggtgattctgatacacggtcatggtaggaactgctgctttacagtagcatgtaaatgacaggccttccctgtcttgattcttacatgggtttattggcagc

SEQ ID NO: 22919 - DNA, 201 bp, Bos taurus
tttctgttctgctttatatatcagtgttttatacattgagttattaaatctcatttctgggtatgtaaataaagtctgcttatggatcaagtctagataaagtacagatatagataaagtactttcctggccttcaagacgaaatgggagattctgaatggtgataaatcactatatacatacagtatttacttttaagcc

SEQ ID NO: 22920 - DNA, 201 bp, Bos taurus
aatatgcagctaaagttcagtttaattctcagataaggttttcttggacacataccattttcttctcatgtaaataaaaatcagtctacttggtttttaatacttgccactttacaaaataaatcaaaatgttgcagagtacttatttcttttctttagtgcttttataaggcatttgtgttaccactaaatatatggatt

SEQ ID NO: 22921 - DNA, 201 bp, Bos taurus
ctggcagggtatctgggctcctgacatgcagtgagcccctgcattacccagcctgctttgcagctgagtggggcccacgtgactagttctggccaatgaatagagcagcacctgtcacttcaggtctgaggcagttaagacctcgtgtgtttgtcaccactttcctttcctgccctggtgaccttagaggccacacgtcca

SEQ ID NO: 22922 - DNA, 201 bp, Bos taurus
cagggccgtgagtgactggggtgtcagggctggctctcttgagagttgtttttggaactgcgaagatttcaggggagagcattcctggaggagggaacagttagtgcaaaggccctgaggtggaaatgaacttggctgagaccaaagactgaaaggccgatgtctggatggtgagggccccattagtgggaagacagtggg

SEQ ID NO: 22923 - DNA, 201 bp, Bos taurus
ttacattaaagagatgggcagaaatggagactgagaaccatcagccaggggcagacaggggaaggagttacttgtggtaacctggaggccagctgtggagggagcttcaagatggaccagggggtggcactgccagatgctggggagaaatccaagggtgaagggatgaagccctcttcaacaggcatacccagcaggcca

SEQ ID NO: 22924 - DNA, 201 bp, Bos taurus
gaggagctggcaggactccacactcctctcccgccttccctcgtgtggctgcctccagccagaccgacctcctggtcacccccacacaaggcctcctgctcctgctcctgtgctctctgtcctttctgcccgcttcaccccctttctgtgccctaaccccaccattttttgcctggccaacttgtatgcctccttcaaaca

SEQ ID NO: 22925 - DNA, 201 bp, Bos taurus
cagggctgtgtcctggcctggccgtctgggggcggcagaggcagaaacagggctcctattttccaggggtgtctctagggccctttgcttttttctacccgcccaacctcaggaaccagccctctctgtgcctgcagtaaccatggcagctggtcagaggtggaacaaagagagggccgttccgtgcagctctgatgtgct

SEQ ID NO: 22926 - DNA, 201 bp, Bos taurus
ttggggttttcaaacacacacacacacacacacacacacacacacgtcttttttttcctcccccaattcggagccttccctggcctgttacctgggctcacgtgagtcaagtccatctcctcttggctcctgagcacgttgtccttatcccccacccatctctgctcgggccattgctgtgtgcctcgtcttctaccagcc

SEQ ID NO: 22927 - DNA, 201 bp, Bos taurus
ccgggccccgtgcctgctgccataatggctggtgctctgctggtaatggattgagccaccacactgttctccttctaaaccagccctgcacacattcactacagacctcaggccctgagcctttggtacaaactcctggtctgctctggttcattcctgaaaacacttgattaccgctcccttcatttgcagtcccttcct

SEQ ID NO: 22928 - DNA, 201 bp, Bos taurus
gaaggttgagcccaggccgactcaaagggatggagacatacatgcacacatacacgcttcaaggcacacccatgcggatgtgcacacgggtacctagacacgctgagagagacggagaggcccctgcgggtcagccctgccccgtcaggaaggggaaggaggccagacggggacaggggagccccctctgacagcaatagg

SEQ ID NO: 22929 - DNA, 201 bp, Bos taurus
acaatttcgatctctttattgacattgttctcctgattttcttgaactctttgtccatagttttctttaacagtttgagcaggtccacagcagttgactttaacagatctaactagctcttaacaatatctggtattcctcaaggatagtttctaattttttttcccctgtgaatgtacctttttttcctttttgtgtgtg

SEQ ID NO: 22930 - DNA, 201 bp, Bos taurus
tgggctcttctgtggactaatctgcatgccctctggcagattctagattccaggagctgctggtcatggtcctgcctcgaggaggacccctaggcttgtggagggatgttgaaggctgacttgcccctggagactcattaggggtcaaagtgtcgttggaagttgggacagttggtgggatctgggaaaagaaaacacctg

SEQ ID NO: 22931 - DNA, 201 bp, Bos taurus
agcccagaactagacccagacaaatataggcaactgacctttgacaaatgcatgagggcagttagtggagaaagggtaatttcttgaacaaatagtactgaaacggttggaagtacttttgtgtgtttgaaaaaatgaacctgcaagactttaggccttccgtaaaaatgaaataaaaattgaccatagacctaaatgtaa

SEQ ID NO: 22932 - DNA, 201 bp, Bos taurus
ggcagccgggtcagagtaggtggggtcactgtgagaggtctttcacccctccccgacccccggccgtggtttcccatgcttgaacgttagtcctgtccgcgagagggcacaaacccgagtcactaggagccaagtaaactggatgcatcctaactgatctgaggaaacttcagatatttttcaggacctagccactgagct

SEQ ID NO: 22933 - DNA, 201 bp, Bos taurus
ggctaccgtgaggttgacccatgggtgagggattgaaaggcagggcccctcgtctcccggtcagctggtcttgggaaggcctaggggagtgtctgagcatcggcaaggctgtgaaattgccagaagcctccatccatctgattcaatgaaacagctgcctctgagctgagagtgggccagctggtcccctcctctcctggt

SEQ ID NO: 22934 - DNA, 201 bp, Bos taurus
ggtagatgaactgaggagctgtctaagccccagagcacagggcctggctcaggatcaccccacaaacactagtgtccccaccccaccttggcaagcttcatacattcatgcgttgtcctttggggccgggacgaggacgggtgactgtcagagccagactccaaagtgaggcctggggtgcatccttggctctgccacgca

SEQ ID NO: 22935 - DNA, 201 bp, Bos taurus
tctgtggctacactcgctccccctctcagcttgccggccctgcctgggagacacaggctctgtgttggacgcagcccttctgtgaggtctctggggcctcggttggtatcaaggtggtcccccgagctgcagctgcaccctgcgtccctccgatgcccccacacccacttctccactccccgggaagcggccgtgccagca

SEQ ID NO: 22936 - DNA, 201 bp, Bos taurus
tgttctactctgtcctcagtgcctttcccaacccctctgcttcagtacagcactgcagcctccaggccccctgatggaccctctgacgaaagggccctgcaggaatcagatggcacagaccctcatgtggaaagccaagtcctctctgtcctttggcatccagcccctgcagacgtggccggctaaagaccctgaagtaga

SEQ ID NO: 22937 - DNA, 201 bp, Bos taurus
gacctcctaggtgaggggctgacctggagaaagctggagagtgggggaggaagagaaaacttatgaatgaattcatgtggtaccaggggcctggggagaagtgttagacagtaaagaagcccaactttagtccagttttcctgtggctgctgcaccagcttgattaccttatgtgaccacttcagtggccatttgaggaag

SEQ ID NO: 22938 - DNA, 201 bp, Bos taurus
ggctgggcactgcccaactccatggatgtcattcacatagacaactctgatgacctctggacagtgcagtatggtggcctcagccctgttccaacaacagagctcttgtgcgttcactaatgtcccgtagcatatgctgcctgtaacccgcacccctgcagtgccctgtgtgaatacccagatcacgtctgaggcctattt

SEQ ID NO: 22939 - DNA, 201 bp, Bos taurus
catcctttcatttcaaatattagtcatttcagtgagacctcaggttagacagatctgtgagctgggatccagaatctacaagtgccccatcccaccctactctaactagtctgtattctcaactgcactgtaccaatcattcttttttcttttttaatctttatttacttggctgtacaggtcttagttgtggcacatggg

SEQ ID NO: 22940 - DNA, 201 bp, Bos taurus
gctggatcctgcgcagtcggcctcccgggagaacctcctggaagagcagggcagcatcgcgctgcggcaggaacagatcgacaaccagtaagagccttgcaggcggtggcggagggccggtggaagtctgcgcctgcgccgtgcgtttgtgaggggctgtggtggaggccgccctgagctgaggctccagggcgagcactc

SEQ ID NO: 22941 - DNA, 201 bp, Bos taurus
tgcgtgaccgctgtagccctcagggactcccacctgctcgcctgcccccaaggcgcactggctcgggggtcccatggcccagcgctgccttgtggacctaagtacaggctggcagcctcacccctcgtaccttcttcagcttggtgttcctggggagctgctgcacggccagggcgaagcccgcgctcagctgcagccggc

SEQ ID NO: 22942 - DNA, 201 bp, Bos taurus
ttcaaccatcctttggtaagtgcctggcctgggccaggaatggtaccaggagaacacggtccctggctaatagtctgggaagagaggcagacaggacaacgttgacacagaggccagcataatgctagaaatgtctcagaggcagcccagaggaaagaggcattagctgtggctgagtgtgcagggggtggtctgtgtgtg

SEQ ID NO: 22943 - DNA, 201 bp, Bos taurus
aaaggactgtatgagagaaagtgtgatttctgccatgtattttcttttcagacccaagttttgggagaatctaacgagtccgctatttggtacgctttcttctccctcggaaacatctgaggtgagtgctgaagggagggacagtggtggagaggccctgggagtgaaggctgggctgagactgggctgtggaaaatgtct

SEQ ID NO: 22944 - DNA, 201 bp, Bos taurus
ctctcctgccatgaatttgcccagaccctcagcgctcagcccagctcttccgctagctgtatgtcccttgcttgtgaaatctcccttaaccagcctgggcgagccctccaggagccccgtttggtgtggagccaccctcagggagctgccggtcatttagaggagccgtcaagagtccagaacaccagtctgctgagcacc

SEQ ID NO: 22945 - DNA, 201 bp, Bos taurus
ccacaaccctttgtgtgctgaggagggagagctgagtctgctttggcctagactttgaggccagctttccccagctcagatccaggcctctgggcattggaaggttgctgtgcttgtgtgactggctttgtccccagattggcagctgaccaaggaaaggagggacccagttttgagggagggccaagagtggaggagagg

SEQ ID NO: 22946 - DNA, 201 bp, Bos taurus
tgcactgagtgtcctaaccttcactcaaggcaggccctgggggacacctccaaatcctccaggaccagagtgtgtctgaccaggccagaccagctcaagggggatgatggatggaggaggacctcagccaccagtcacagccctggaagtcttggacacacacacacacatacccacacatgaaaccgctgtggaacctgg

SEQ ID NO: 22947 - DNA, 201 bp, Bos taurus
agcagattctttaccatctgagccagcaggggagcccctaatttgtccccaagtgcttgctttttttctccccatcctgtccgatgggtctggccctcttcaccctggagatgaatgcagtgtctgtcatgatcaagagcccccccaacaggaattcctctttgctggcccttaagtcacagaatcactgattctgatggc

SEQ ID NO: 22948 - DNA, 201 bp, Bos taurus
tttaggagctctgcacgtgctgactccttggcctggaagaacgactctcagacctttgcttgctgtctgtcagttctcaagctatggattttccctggccagtgtgactaagtaacccttgccccacatcaagctttaacgcatcactggttttacttattcaaggtgataaaatgctatctttaagtgatttacggcctt

SEQ ID NO: 22949 - DNA, 201 bp, Bos taurus
ggttttaggatcctgcgtggacgtgggcctggggggactggagacacatctgcctggggttctgtcccagaaccgctgcagcctggacagcgactggagttgctagccccttctgggccttggtttccctttctgtacggtgttcaggttgccggatggtgggacttgctttggggaagtgcctcccatccccatcctgga

SEQ ID NO: 22950 - DNA, 201 bp, Bos taurus
gacgactctccagaaaggagttctcgtattgttttttctcatggatgcttctctgggaagcttatctttgcattacccagatggcctcccactgtacagcgtgcaggataagtgagagccgcacctgtgtgtgtgcctgcacacatgtgccaggaagtctggaggccaggtgaaccgtggttgaccagcatgtgccattaa

SEQ ID NO: 22951 - DNA, 201 bp, Bos taurus
gctaccccaagtaagttcagaaactttcctggtctctgggtcccctgatgtcattgtcattctcctggcagtatcagagcttcagtaacaagggtagcaaaggaggaaaggtctggaaggcccacttaaaatctctcccccagagcagtgcggtctgttttgattttgttttttatttggggtttttaatgagatgtccta

SEQ ID NO: 22952 - DNA, 201 bp, Bos taurus
caacccctgctgtctgtgaccagctctggcagggggcctgctgcggtctgcaggcagcctccccttgtcatcctcaggaaaccctggtgccactctgtggacacagaaggccagcacagacggcaccgcgggaagcagcgccctcagagtggtggggccgccagtgtgctccaaggctgaagcagagaaccatggacccca

SEQ ID NO: 22953 - DNA, 201 bp, Bos taurus
ggcccatcacttgccttctctggacgtcagtttcctccatctgatggagataccaagagtgccctctgagaacaaccccgaggagtcgattcactgatactggtgcggcagagggcccggcacagactacgttcctggggcagtcctcactgctcggcccacaccctcatctggactttgcagaggtgaaatgatctgaag

SEQ ID NO: 22954 - DNA, 201 bp, Bos taurus
ctgagtgcagcggggcccacaggaggggaagaagagatcaagggctggagaaccccacccctcctccctgcacagagctcctctctgtctctgggacgcgacatcccggtagggaggcctggtgttctttcttgggccaggagtgaagctggccacgaggcagacataccgtgaggacacagccttgttactactgataac

SEQ ID NO: 22955 - DNA, 201 bp, Bos taurus
ctctgggacaggcgggagccactgcagggcttgaggcagaggcacgacgtgtctggactttcccactaaagcacgccctgagcgctggttgagactaagcaagagaagcagggagggccaccaagcccagggcaggtccagaatgagaacgtggaggtcagtcggctttaacaagggcttccgatccagtggtgacattct

SEQ ID NO: 22956 - DNA, 201 bp, Bos taurus
cccatagaacacccaacgaatgcccccttttttgcatatgtgaacacaagtgtgtctcttccttgaaaccaaaaaagcccagagaaggcaaaagtaaacgctggcctgttatcacctgtggcaatccccagacaagcccattaagcatgattatttcaagcgctggagcttgtcgaggtctcactggcctccaaggggagc

SEQ ID NO: 22957 - DNA, 201 bp, Bos taurus
tccctagttccttacagttgaaaattaaattcaccatttcagaattttggagacagttattagcacctggtttgtaacttttggccacgcgtggaccattttttatctgagcctgtccacacagcctcatcgacacctataattacagcttcatctcggccttcaacggttttgacattttgacttgtcagttgcagtatt

SEQ ID NO: 22958 - DNA, 201 bp, Bos taurus
aatacgttttgttttccaacaacaaactcctataaggaaaaaagcagtcgtatctggacaagcctgttagtcagtcatcagaggtctgcagcaatggtcgtggctgacagcctctgctgttcggccgtactataaaacccgtctcttctttgagcagctgtcctcctccaggaccctctcatcccagtctgagttcctctt

SEQ ID NO: 22959 - DNA, 201 bp, Bos taurus
atgtgaacctctggcagacaacattattggcctcttcatggatcacagccttgttgtggtaaaggagcttatgtaactaaatgaagccattagacatgctgtgcagggccacccaagatagacaggtctgagtcaagagttctgacaaaccatggtccactggagaaggaaatggcaacacactccagtattcttgccttg

SEQ ID NO: 22960 - DNA, 201 bp, Bos taurus
acctcacgtcagcagccacggttctgaaaggcagccaggctgcgggagccctgctccctgctccaccattcaaacctaaaggccagagggtcccttaacgtcccgcctcccaaagcccaccaaccctgcgccccacagtgcctggcaatctgctgggcttagaggcacagggctctgccggccagctctccctgttgggcc

SEQ ID NO: 22961 - DNA, 201 bp, Bos taurus
actaattccattaccaggaattgaacctgggccccttgcattgggagtgcagtcttagccactagccacctagtctttcttgtaaggacacttttcattcaatttaggccccatcccctaaatctcatctcaagagccttcgtttaattacatctgtaaagacccattttccaagtaaggtcatgctcacaagctctgggg

SEQ ID NO: 22962 - DNA, 201 bp, Bos taurus
aggagccaaccgagccctaggacggtctccccctgaagatgagggaggcgagggtatagctgagatcagagcatcccctggcagagccctctgcccactgcgatgctgggcagcctcttcccgcatgggccctccagtggctcagaaccccagtaactgacaggaggccgcatctcatcaaaggaaaaaaaaggattaaaa

SEQ ID NO: 22963 - DNA, 201 bp, Bos taurus
cgaggcatccgtgcactttgctgctcgctgccttctctgagtgtaatcaaacatcaagctaagtagcaaataaatctctcgatctcataagctgcacagcgagatcatgtaaatgcaaatgaaggacctggtttcaagctgtcgaggggggaggggaggacacgccggggccctatcactgtgaccgcctcgcacaccaag

SEQ ID NO: 22964 - DNA, 201 bp, Bos taurus
gccctgccgcctggagaggagccgtgctggaaaggggacagaaacaatgccgagatggccggggtctgagagcgacaccctgagtgagaaccccagaagtgcgtggagcttcagggttacctaagtgccagaaaccttccacgggccccaacaagatgtaagccgaggactctgatggtccagcgtgccctcccctgacgg

SEQ ID NO: 22965 - DNA, 201 bp, Bos taurus
cctggcccagatctggaactgtctcatggctccaggacgcttagttaccaggtacatggcacatggtgtctagcagatactcaaatgtctaaaacaatatgtgggcctcatattttgttctcaacaaatagcttcagatctacgtcccgccagcttttttcgtgtgtattgaaaccattttcttaaaactatatgttttta

SEQ ID NO: 22966 - DNA, 201 bp, Bos taurus
gtctgtcttagaagatgccaaaaaaacctttgaatgaaattcaacatcaacttcagacattttaaactctaaacactatactttaaaaaatttatttattctgcatttattcttgctgtaccgtgtgaggcatgtgggatcttatgcctcacataagttccccaaccagggatcaaactcatacccactgcaatggaagtg

SEQ ID NO: 22967 - DNA, 201 bp, Bos taurus
tggacacactctggcagagaaccatgcggaccagtgtgatgtccacgttcacgctgttatcactcagcgtgggtggggaccctagagtttgcatggcccctgtgatgatgagtccacagacacgatcaggctgtacaacaaagggacgcacaaggtgcctttctgccacgagcaaccgctgtgtctctagacccctggggc

SEQ ID NO: 22968 - DNA, 201 bp, Bos taurus
ccagcagaggtggacatgagccatctgcggaggcctctgccttttcagggtgatgaaacacccactgtctgatgagcctttacaatcggtcacacccgtttcctccccacagctggggaggcggctgaccctacatgcaaagatttcttctttccctcctggaccagatacgtccagacagtcacattccgactcggtctg

SEQ ID NO: 22969 - DNA, 201 bp, Bos taurus
ccccgaccccaccactgctgctctgggcctcagtcccctcgtctgacagaggggagaacttcaactctgacattaagtgaatgatgccactgtgtcactctagtgacagtcaggaccccggccaggcggcccccacaccgccgccccgcccccgccctgagcctgcacgggcctggccacggcaggaaggcgggctcagag

SEQ ID NO: 22970 - DNA, 201 bp, Bos taurus
tcggggatctagtgcctcagtgacaggctgccagcactctctcgggcagtggaagcaggaggtgtgggcacaggcaaggaggcccggattaggagacagacacttgcatgtgaaggcaagctggaaccataagccctcagacactgatggtcatggaaaggcctcagggataacccagcccagaccccaacttccttcccc

SEQ ID NO: 22971 - DNA, 201 bp, Bos taurus
gggcctcttctgtctccgaggctcagcagaactgtgctccttgacacgatcccatttcaaaggtgagaatgccgaggctccgaggcaaagcctcctgtcacagggggcccagcccagccgaggcagcccgaggctcgagcccgcatgcgccagggctcctcccttgcactacactgcccccccccctccccgcaggggcgc

SEQ ID NO: 22972 - DNA, 201 bp, Bos taurus
aggcctccaggggagacaaggtggcaggcctgcactccgcagccccttgccaaagcctctgttgaaacctggggaaaagcagtcagacagcagccttgcaggctgggccctgagcgggcagagtcagctgcaggctgcccagcttgccagccctcctctgcttgggtccctgggctgcagcagtcagcttcctggtggggc

SEQ ID NO: 22973 - DNA, 201 bp, Bos taurus
cggcaagcctggatggacaagggcccctcacaagtgtgacatccgaagtgggctggggaggaggggtggcgtgagtcactgcttctccaggctggactgcatggcctctgccctttggctgtgaccgcgtttccaaggagatgggggcacccctcccccccgccccatcccccaagaggatagagtggccgctgacaaaga

SEQ ID NO: 22974 - DNA, 201 bp, Bos taurus
cttcctgcacctctgaccccctctccagcctccatctgcgaaactcagggcagccagacccccaggagctaaggcagctgccccgtcagcccaacaggagcccagcagacctaaaaccacggccctaaagcttgcacttggccttgattaagcccttgcccaggtcctcagcggctccctgctgcagtcttcccaccacat

SEQ ID NO: 22975 - DNA, 201 bp, Bos taurus
gccatgcccgagcttgcacacagctgcacggggagctcaccacctcaagaagcagcctgtgcttgtaccatgggaacagtctctgactttgctgagtgtgaccttgcacccctgccccggggccctgtgggcactgctgtgctctgggcgctgagccttctgggcatttcgtctctgccccgtggcatctgtttctggccc

SEQ ID NO: 22976 - DNA, 201 bp, Bos taurus
ccttgcccacgaagctcagcctgtacctcctggaagggtgggcacaggagacagacccccacgaacctctgcaaccagcccattctggtttcctgtcataaaaattcaaacataaccactgtggggaccccttctggtctaggaagtgtagtcagccccaggggcctggagaaccagacggtcgcctcgccagtgagggac

SEQ ID NO: 22977 - DNA, 201 bp, Bos taurus
gttcaacaaggaggacagaaaagttcccaaatgaataggaaaaacgccgttaacccaggtcccaagaactgtgcttctggaaggcccccagcagagaactcccccctggagaactccctgtgctgatcctggagctggcaaactcgcccccatggggtacgggccccgcggggagagtcggtccggcgtgccccgggcagg

SEQ ID NO: 22978 - DNA, 201 bp, Bos taurus
gatgcacagagcatgcagagtaggccaccttttcagacaggcttctctgacttagcggtttgcgtccaagtttcttccatgtctttttttgtgcttaataatattccactgtctggaggggccagaggttatttgtccattcatcaactggagaacatcttgcttccttctaactttaggcaattacgaataaagctgcgc

SEQ ID NO: 22979 - DNA, 201 bp, Bos taurus
caaaaagtcactgctgcaagaaactcaccacatcgtctctgcccacccttggttcagagtaactcgtcaaatatggcacctgtttcacgcaaagatggcccagggtttcctcagacggatctgacacacggcggtgatggcaaaaccacggctctgcatctggctgactctcagccacggctgctgctcctcctccaattc

SEQ ID NO: 22980 - DNA, 201 bp, Bos taurus
tccatatcaataaatggaccaaacccaacttgtgggccacccgggatcccgaccacaccaggacccagtaccatgtctgacgtgtccctgccaagacgcagccccaaacccggccccgaggagacaggaacagactgagcacttttgacaagagcaccaacccatcctcttcacggtcaagtccaggaaaacaggccgatg

SEQ ID NO: 22981 - DNA, 201 bp, Bos taurus
ggaaacacaaggaagaaggggtcagcgcgtatgtgtggcttacacagcaggaactcacacaacatggcaaagcagctgtgctccaagttagaatatatacgggaagtacactgtgcatagagagagagagagaaagccaggccccaggaccgcagggtcagcgcccctgggaaatggcgtcaggggtgagctctgggccga

SEQ ID NO: 22982 - DNA, 201 bp, Bos taurus
tccctggctcactagttacagaggtctatgcagttgacaaagacacaggcatgaatgctgtcatagcctatagcatcatagggagaagagggcctaggcccgaatcctttagaattgaccctaaaactggcaacattactttggaagaggcattgctgcagacagattatgggctccatcgtttattggtgaaagtgagtg

SEQ ID NO: 22983 - DNA, 201 bp, Bos taurus
attctgtaatttgggagaactgttctctaaggaacatgtaaatggggaaatataattaatctttaatgtgagttaatgaatcacagtagccagaccagccgtgataatactatctgggaatactatctgactctgggaatccattccatcaatctaatgagaagtaaaagtaatttcactttttcctgtttaaacttcctt

SEQ ID NO: 22984 - DNA, 201 bp, Bos taurus
aatgaacatgcatctcattccatgaatttaaatttatttgatcattctttatgagaaagggttttctaaaatttttatcattaatatgtctctatatgatgaatcctccagaggacctggtttaagatatattcattcatctactctttttccattttctgattcattcacttcagctcaaattttgtcatttaattcttc

SEQ ID NO: 22985 - DNA, 201 bp, Bos taurus
gttggagggagggaggagggaatcctttggccaaaacaactgacaaaatttactactttgctttgaaggagtgcttcttaggaatctcttggagcctgttccctctccgttttcttcagttaggccacagttatttctgtagaatcttaataagtggagtgggcatagggtggggaaaagtggttatcagtgctaactgac

SEQ ID NO: 22986 - DNA, 201 bp, Bos taurus
ctgttttggagaagcagtgaagatttccaggaattgggccaccacccaatttttggtctttgatagtaggcattggaactgtcatggtgtctctaagtgtatcattttacttgctgaggtgttacaatgagtgtatactgaggctccaggagatagtgaaggatagggaagtctggcacgctgtagtcaatggggtcgcaa

SEQ ID NO: 22987 - DNA, 201 bp, Bos taurus
gccacgcccacacaggtctcggattcagggaggagacaggccacagtcactgctctgctaggatcctctgcccactcacccagcagctggtcatgggaggcaggtcttcatggccccttcagcattttctatgacattttatgcagcacaccgtctctgagagcaagtagtggaaggccagcaaatacatgggctctccgg

SEQ ID NO: 22988 - DNA, 201 bp, Bos taurus
tgccagactgtgctgtgacgtgaggtggtgtctgctgttatttaagctgcctggagctgggttttgctttgctgctgtaaacatcctgtaggccatccagatgtccttttgggtatgtggagtgtctctttaattccctctggaaatttctctttctaaccaagtcagttcagttcagttgctcagtcgtgtccgactcct

SEQ ID NO: 22989 - DNA, 201 bp, Bos taurus
ctgtcatttccttgactttatcacttccaaaaatctctgtttttctacccagtctcaacctcccattaccttggatagtaatataccacctctaaatatgattgcaaacttcctttcctgagcattatctaacctcatacttacttaatattcccactgtaagaattctgtcaccctttaagaactggacttccttggttg

SEQ ID NO: 22990 - DNA, 201 bp, Bos taurus
ttctaattaatataatgtgatttaattgttatagtagtggatcattttgtttctagtttatgtatatggagtttatatatagtttatgtatatacattaaatatattatcatttgcatttattgctaccactcatgctgatacaaataaaaaattactaaaaaactttactggtacttggaattagtgttttaatgtctga

SEQ ID NO: 22991 - DNA, 201 bp, Bos taurus
gattaatccttgagagtcagttctgttcctcagctgtccttgtttttgttactgtctccatatgctcacatggtatattctcataaatctgttagagtgaatttatgttattgtacctacttatcttcactaggttagccaacatgtgccttttgagttgctgagccttttctgctgtctatagaaatttatttatatgct

SEQ ID NO: 22992 - DNA, 201 bp, Bos taurus
ctgttaggattttttctcttaggatttctcgtccatttcctgcatcttctgccttcttcctcatttacactggcatctcttgttaccgtctgattactcagtgtacactttgcaattgccttgtctgcagtatgttctattgctcaggattcccacataattagtgcacagtattattctccagaaaataaaaatgaggct

SEQ ID NO: 22993 - DNA, 201 bp, Bos taurus
tctcttaaaatgctcagcacaggaaactccgcactctctctggagagccctcagtgcgggctgtcatagggacctgtgagggtgagaggaagacagagcacgccgtccctggaggcctccctcagcaccccagccccagccagacacaggcctcgggagccactcgggccccccgcccccgcccttatcaccatccccgcg

SEQ ID NO: 22994 - DNA, 201 bp, Bos taurus
ttgaacagtcgtccccccccccccgctttaaattcctaagggctttgaacacgaaggactttgaacaccgactctccaacagggataatgagatgtcttatggacaatgttttgaccacagttctatatcaaatgtaaaaccttctttatgtgattgtatctttattcagaaacatttgccttgcttttgttgtcaagtga

SEQ ID NO: 22995 - DNA, 201 bp, Bos taurus
ccggggtcggcatcgtctgagggcctgacgggaagcttttgctcgctggggtgtgcgtgtcacagacactcacctcaagttagcacactgccagctccacgagcaggtgaggggccaggccgcccctcccgtgacgttccccgtcgagaaagccccgtgtaactggatgactgaccacttaggggaccctgtctctctctt

SEQ ID NO: 22996 - DNA, 201 bp, Bos taurus
caaaatatgcttcaccattttgatcatgtggcctttggcaggaaagagtctacatgtgactctgggacaaagtcaaaatgctctaaacgaagtggccttcatttaaagctgtttggttaggcttggtgggcaaagactcagttccactaagccacagaaacttaggcctctagtgacgttcagtattccatcaacatttca

SEQ ID NO: 22997 - DNA, 201 bp, Bos taurus
tgtttctgaccatccagcagattaacacagacttgctcagagggtcactggcagaggtcttgagagcagcaagagccacttttccaggctctgcttatgtcgtatttttcctgtctcactggcctgagggagtcacatgcttggcccagagtcagcatattagtctgctcaggctgcctccacaaagcaccacagactggg

SEQ ID NO: 22998 - DNA, 201 bp, Bos taurus
cagataaagaaatagacattcagagaaattggcatagtgttttaaggccatacactgcttaacagtaagactgtaaggtttgtagtaaacaacattctgataagatgtgtaactattacaccttctcaggttctgaatttatctgtaggttatgttgaggtaaactgtcatatgtaattggaattaaaagcagaaatgcag

SEQ ID NO: 22999 - DNA, 201 bp, Bos taurus
gcatgatcttgtgggtgttgcttgaatcacttaacctttcagagcctcagattccttatttacaaaataggatgaaaatatttacctggtatgtttgttagggagattaatttgagcagtgtttacaaaatgccttgcgtatagtagatgctaaaagtgtagttctctcagcctccccactgtgtaaattaattcatgttg

SEQ ID NO: 23000 - DNA, 201 bp, Bos taurus
cccatctagcagtaccaagaaagtcaaggccaagagggtctggacataaatacccaagggatcaaccgatgagccctgtgtacaggaactcaaggtcacaaggacttggtaagtggggaaagagtgatctcttaccttttatagtttacagattgcttctgcgtgtgtttttggaaattgatgtttggaaaattctaggat

SEQ ID NO: 23001 - DNA, 201 bp, Bos taurus
gttcattgtatatccgcttaagaatattgtgccagagagagaataacagaacaaaagttgcatttttaaagtgaaagaaagctgcattttgaaggttcataactaatatcacttggcatagaagtagttaaagacacatttagaaaaatggtgatgaaccaaatatttgaattcgtgtgtaattatggttattccaataca

SEQ ID NO: 23002 - DNA, 201 bp, Bos taurus
atatgagaaataacatattaatcattcaacagttgctgcttaacccatactaagtaatttacggcaaaggtgaaagaggagaaatgactcaaaactgcaactgtaacctacaataaatattgagcaaatattacattctgtccttttcatcctttctttagtaggctatactctctatggtagctagttttggtggtaaat

SEQ ID NO: 23003 - DNA, 201 bp, Bos taurus
tttgttttaattcccaaatgtcgtattctttttcagaaggcaagtgtgtgataaattataaactcaaattatgtattaacatgtgcgggacactctggggatagaatagagatagtaataagtttgaataatttcttgatttgggtctaaaaacatgatgagtttggaaattaaaaataaaaacccaaactgtatatcaat

SEQ ID NO: 23004 - DNA, 201 bp, Bos taurus
acacttctttttataaaaggtgatgagattgttttttcaaaaaatacatagatatgtatttaatcatataatagacatctgaataagtccataaataaggaagtggtcaatgactggaacagtcagcataatttatttcagaatccaagatactaaaatagaaatttcctcccctaggttctagtttctcactctcttttt

SEQ ID NO: 23005 - DNA, 201 bp, Bos taurus
aaccccttccatcagatgaagagctgccctttttacttgacaaacatttgttctaatttggccttgcttgatttttcagtgcttttaagtccctctccccctctctatacccatcagcatctgttagtcagaagatcactctggctgacatttaccctgaatgtgcttgcttattaaaatatttcaatgttagacaagctt

SEQ ID NO: 23006 - DNA, 201 bp, Bos taurus
agagttcccattcagataaagcaagctttgaacaagaagtgaggaaacttgcttggaagagtgaagacagacgtatggctttctactctttatttacgtgtggccagttaaaatctctgttccctcatatgtaaagtggacttgatatatatctttgaaggtattaataattagaaattacataatgtttgtgaagtacat

SEQ ID NO: 23007 - DNA, 201 bp, Bos taurus
ctctaataaaaattaattttaaaaaatgcaatttaaaaatggacagagaaactgaatacacatgtttttttttagaagaaggaatccaaatggccaacaattacctaaaaaatgctcattagttatttgttgttgtttagttactcaagcatgtctgattcttttgtggccccatgaactgtagcctgtcaggttcctctg

SEQ ID NO: 23008 - DNA, 201 bp, Bos taurus
ataaactcttggaggggacaaacagaaacttgtgtacaccaggacccaggagaaaggagtattgagcccacaagagatggacccagacatatctgtgagtcttcaggagtctccagtggaggcctgggtcagcagtggcctgctgcaggtcgaggtcactgagtgcagcaggtgtgcatgggaccttttgaaggaggtcgc

SEQ ID NO: 23009 - DNA, 201 bp, Bos taurus
aaaaatagggaatgacaacttagaagatggtattaatgacttgatattaatgatggtattaattgctttagcaaatcaataaggtggaccttgttttgagctgatatgacatgcactagtaataatagaggatactgtgcatattttttgtttgtttagtcgctaagttgtatccaactctgtgaccacatgggctgtagc

SEQ ID NO: 23010 - DNA, 201 bp, Bos taurus
taattgatatgttccaagaagacagacagaatgagctgagaataaaaatgagaataccattggcagtcactcatttttaatgataagaagtttaggctggatgttttcatgaaaaacaaataacatggctattttggatcagtcagtttcttaaggatgagtatatctgcatttgagtgcatctgtgcatgtgtatatata

SEQ ID NO: 23011 - DNA, 201 bp, Bos taurus
acacatctcataaatggtatttgaatatgtgagcattagacatacattacatacaaatgataaccaatctagctattgtacaatgctaatttctggtgatctttcacaaggcattcttttttgctaccagattagctccttaaagaggtaaacccacaatgccacttgtaaagacactattgactgtcaggtatcacaagt

SEQ ID NO: 23012 - DNA, 201 bp, Bos taurus
tgtattctagcttcaacactatttgtcagataggataccataatctttcccttatgtgtgggtgtgtgtataaggagaaatggctgacaaatgtccccttcataaggttatgtgagagataattgaggataataattggaaaattcatttgttttttttctacatgaggctttctatgtaatgagtagaaagtattaagtg

SEQ ID NO: 23013 - DNA, 201 bp, Bos taurus
agtttggtggaagatgccatctctggggccgcgactgcagcagccccttaacttcccactctggctgtcacacacctgcctctctgcctcccctgggagaagggcctatattgcagcctgatagctctcctttggtattcactcaatcgtttgttctgtgagtgcttcaggcttcattcagcattagagccttgtgcggca

SEQ ID NO: 23014 - DNA, 201 bp, Bos taurus
atatttgttagtttattttcattgctttatctcctagttggtaccttgttttagctttgttttccagtttggattttggttagctttcttttggtagatacgatttttggtttcctttgtttgccaggtcaatctgttgtactttatttttgttggactgttttgattttgcttatgggtatatatgcatatgtgtgtatt

SEQ ID NO: 23015 - DNA, 201 bp, Bos taurus
ggttgaacttcaaaactgtttttaattaatcctgtgagttgcttttaaggcttgctcaaatatcactttcttaacctgatccaccagcaccttccactgatgacattccttattctcctttatccactgcatttatttcttagggctaccatcatgaattaccacagccagtcttaaaatcaatggggtttgcactctcat

SEQ ID NO: 23016 - DNA, 201 bp, Bos taurus
caataagaggtgtttactgttcagcagacagaaaactatgaaaagggaaagaaatgaataaatacttgagtaaagtgaaagacagtgttagtgatgaagcaactgctgctcaaggatctaatatcttaggcaagtattatacaaaaatgaagcaaaataggacaaagacaatggcaccccactacggtactctagcctgga

SEQ ID NO: 23017 - DNA, 201 bp, Bos taurus
ctatttatataatatttaagaggtcaaattttctgtattcatattttaaaattgcagtttttctatgacattttaaaaattatgccccataattatccactgtaagaatagtgctgtgtcttgcttggtttcaagtactgtgttctacaacagcaggaactagtttaacaattttcctaagacttcagctggtttcaaagt

SEQ ID NO: 23018 - DNA, 201 bp, Bos taurus
tttgctttctccccagaagaatgacactgaaagaaatatgcatcgccttgactgtacaggatgtgtaggaaatcttggccttgccagcttgttctttaagtaagagtcataaatatgaccaaagactcattagatcttttttggcagaagctaaagaaatacaaagaagcaaaatggctgtctggggaggccttacaaata

SEQ ID NO: 23019 - DNA, 201 bp, Bos taurus
aaagaaatagcagaaaaaacatacatctatgcagtacaacacagtaaggtgagacacgattcataattcaattatctattactaaaattgcatgtgtttagtatggggatgatttgtttttctatagctattccttcaaggttctatgacttttgtctcgcttttattttctttatatatggcactattctcttaggcaga

SEQ ID NO: 23020 - DNA, 201 bp, Bos taurus
tctgtaacaaaagaaaatattagagaatatataaaattggcttccaagtaatataaagaaattccaagagtataaggtaagtacactttaagaggaaccatagatcaaactgccaatatcacctggatcatcaaaaaagcgagagagctccggaaaagcatctatttctgctttattgactatgccaaagcctttgactgt

SEQ ID NO: 23021 - DNA, 201 bp, Bos taurus
cctgtccagctctttatgaccccatgggttatagcctgctactaggctcctctgtccatggaattctccagggaagaatattagaatgggttaccattcctttctcgaagggatccacccaatccagagatcgaacctaggtatctaggattgaaggcagattttttaccatctgagacaccagggaagcccctgttattc

SEQ ID NO: 23022 - DNA, 201 bp, Bos taurus
gggattctggaaaaagctcctgcaaagcttgacatcacagctaccacttcccacttagcctctgtcaccaaagggcttagaataaccttaactagcaccagtgcatagaatcagctttgaatctgtgaacacatgggctgtcaggaatatactgcgacatcagacaagtctgcggccaataaacgttccacttcccttctg

SEQ ID NO: 23023 - DNA, 201 bp, Bos taurus
ctgagcgactgagtacacgcacacacagatgttcataaaggtcactcccttcaccttgtcccagccaggcctgcaatgtggcctggggcattctctgctgacagcatgaacaattagtcagaaatcagtacagaacttgcagagcctgaggacctgggactgctcaggccactggctttctactatgggtagttgtctctt

SEQ ID NO: 23024 - DNA, 201 bp, Bos taurus
tcacttgaaaatgagaaatagattcagaagttatttgatataacagctttaagtatgtcctacttatcagttcccagatgtaaacctgtttatagatctagaatttcttgagtaaaaagaaggccaactcctctctagaacaaatccagcctcattaccaattcatcctgttcatttttccccagccttcttaaaaggggc

SEQ ID NO: 23025 - DNA, 201 bp, Bos taurus
ccgactccctcaccatcatcaaaggaaactgaagacctaagtaaatgaacaaatatttcatgttcctggaatcaacaccatcacactgtcaagatgaaaacgactgtgttttaaattccaggccccatggaggcaaaaccatgcgttctcacatctcttctgctccatccctcagctcccagctctgtgttcagctgacta

SEQ ID NO: 23026 - DNA, 201 bp, Bos taurus
tcaaaaattgtaagtaattttaccaaattaataaagcctttttagtgttggaattcagatttgtctcaactcacatgctatagcctccgttatattgcttattatcctattttcaagtacaaaatattatgagaataagataatgtagttatgcataaggattttctcacttacagaaaatattatgtgggtttgtattga

SEQ ID NO: 23027 - DNA, 201 bp, Bos taurus
aggtcagtcactacttaggctaccatcaagatttttccaacacaggagtgtcacatgtaaagaaaagtcttaactctcagtcttgggttgtctaatcaaaacgacactgagccaccagtgttgccagttggttctgtgatgaagctctgttggccctgttcaagatgaggaacagagtcacagcacaccagcacgtcattt

SEQ ID NO: 23028 - DNA, 201 bp, Bos taurus
ttatactttattaagctgtttataagataagattaagttttgctataattacctgccttttcctcctgtgtctaccataatattctttactgtttctactggatcatttgtgaatgtttccttttgtttgataaatttgtattttattgtacagactgatgtgatcatcatcctttgatttaattgcaagcctgtcttaaa

SEQ ID NO: 23029 - DNA, 201 bp, Bos taurus
gaagttgacatatgttaacatttctacgcagcattatctttctcttacgatccatcttttggccctgttaatggccacacttcctctttggcccaacactgcaccataggaaattagtataaagattaagagagtgggccttgcagccgcatagtttagcattagaatctatacccccttttttcttattaaggaggatgg

SEQ ID NO: 23030 - DNA, 201 bp, Bos taurus
gcctaagtgctctgttgctttgtgctttattttattatattgtagggaaacgtatatagcttcaattagtttcatactattaggcttgtgataaagaccaggttctgttctggttgccttacagttaatttatttaattttcatgatgacacactgagaaaggcactgttattagccccattttaaagatgaggaataaat

SEQ ID NO: 23031 - DNA, 201 bp, Bos taurus
tgctttttctgagggaaaatataagccaaagaacaatcaagtcacttgaaaagggacttttgtaaggcaacacaaatgtaaaggagagacgtcctttaacaaaagtcccataggaggataattctattactttatattaactcttcatatatttcagaagactattcaaaattttaaaaggttttgaaatacatttctaca

SEQ ID NO: 23032 - DNA, 201 bp, Bos taurus
tgctgaggcgatcattaacatcatgcatcagatcgttcttgttctccctgctacaaggcagctggcagggctgtgctttctggttggccctcatattggaatggaaccacgtgatgagtttttgctgataacctgagaatggaaatgaggtttggtcctcctggccagagtatcagctgtctggccacgattttctgggtc

SEQ ID NO: 23033 - DNA, 201 bp, Bos taurus
ctcttgtgatatgtatgattctgaaaattgacgaaattgactgaatcgcatgattaaaaatggacaaatcgaatggtatgtgcataaatattaccttgatactaaaaaagggaacaagctagtaagtgcaacaacttcgataaacttcaaaccgttatgttgagtgaatgaagccaaagataaactcatgtatactctatg

SEQ ID NO: 23034 - DNA, 201 bp, Bos taurus
tatgaagatgagctatgcctaaggctggctgcaaacagaatccctgagaagcacccccagtagagccctgcgaagtgatgccatggaccttacgtttatatcaacaacctgttcatggagaaacacacctttcaaagctgggaaatacatggagatggagtgatactgttaccctcagaacagttcactctgttgccaaga

SEQ ID NO: 23035 - DNA, 201 bp, Bos taurus
ttaacaaaaacaataataatacagaaaagctcaagtttcccctaattcctccatctcaggcttatccccaccaccagcatttcaagattgaaaaacctctgagctctgtattcctaaggaaaacctcactttcttatgcacttttaaaattaatagtttgaaatacattctctttatggatgtgatagaatagaaaaacaa

SEQ ID NO: 23036 - DNA, 201 bp, Bos taurus
tataccttgctgctctactttgatattttcctctctgctagcacagtgacttttattatacatagtagaggagtaataaatatttgaaaaccaacgactggttggtttagaaaagatctctgacatcagtgactacccaagatgattgaggctgtaattgacatgaaatgaccaaagatgagtatagaaaaatgatggcaa

SEQ ID NO: 23037 - DNA, 201 bp, Bos taurus
actttggtccattttcccccaaacacacccttgcagtatttttattttgttgtttgtcttaacttttcatcaaccttcaagtctcaactcaaattctatcctcattaagaaaactcccctgacaaccccaggcaaactacggttctccggcagccatggtgtctctgtagtttagacactcaattagggcagttgtcttgg

SEQ ID NO: 23038 - DNA, 201 bp, Bos taurus
accttgcatcatgggatagccacaagcagctgtggacacaggctgagattcctcaagtccaaggctcgtacacccacttccaagtccaagaaaaataaaggaagggctcctggcttcagagcaggtcggagttcccaggtggaaacacctggggccgtttccagggcaggtgagccctgcagccaggctccttcccggggt

SEQ ID NO: 23039 - DNA, 201 bp, Bos taurus
atgtatctttttatttttttctttttattatgaaaaatttcaaacaagctcaaaaatagaacagtaaaacaaccccctgtgcattcatcatgaattctcagtgttaatcaactcgattttacttgccctcctccaccttttcatactaactggattaatttaaacaaataaaaaaatgtcataattttcatatgtaaacat

SEQ ID NO: 23040 - DNA, 201 bp, Bos taurus
gcctctggcatgagtgtgttgctcccaaaacacaccacatgctgttctaattaggaagaagtctggaaatcatattccaagctgtgttagctttcacgaagatcacctacaaggtgttcaaagctgataacattctcaaagatgaaggccgaagcagggagtggggaaagaaaacaggacacgctggcctctgcatcagac

SEQ ID NO: 23041 - DNA, 201 bp, Bos taurus
gctgtgtatgtgcggccatgacctggtcacctggagatgaaaggggtcatcgaagggaactggagagaacatagcacagagtccagaaaccccaggttaacgtggggccctggggctgaactgcggggagctgggtggccgctatatttcctgtgtactgcccacgtctcctctgtctcctgcgatgtgactctaattctt

SEQ ID NO: 23042 - DNA, 201 bp, Bos taurus
gctgacagacagaaaaggcacatttttactttttcactatgtcaaatgatagacttgtcttttcctgagtccccacattattttagctgttttagcaaacaacatttgagtctctgggccagaagcttctatgaccgtggcatctgcaaataattgataacttaacgtgccccctcaagaggtaaggtcaattcaagcagt

SEQ ID NO: 23043 - DNA, 201 bp, Bos taurus
ctccattccatgagtgaccgctgcaggtgctcaaggccggtttcccaaagccggacacggcctcccatatcaacagtgacaacgccacctctgccccacttggccagcagtgcgtctgtgtccgagatagtagacagccatgtggtatatggtgagagagagtctgacctgaaaaagaatcacggcgttcaaccgattgaa

SEQ ID NO: 23044 - DNA, 201 bp, Bos taurus
gcttggaccttcagggtatctttaagtatttcattcgtttctgtccatatctactggacttcgagcttcttgaaccaacaagtggattttattcaactccgtcttcctggtgcctagcacagtctagaagccattaggcttgttgagggaaggaagagaaggaaagagggagatagaaacggaggggaaaggaaagaatta

SEQ ID NO: 23045 - DNA, 201 bp, Bos taurus
aatgttttttattttagttgttatcttagtaatgaaatatggactagagacgtgtctggctcattcattatcaactaaatgtcctagcaaaaataaacctgttttacctgccactctagaggacagctacatcatccactggtttgatttatcattgcttatgaaatgaagatagatgttactggctgaaaaggtacaaaa

SEQ ID NO: 23046 - DNA, 201 bp, Bos taurus
atggatgcatgggtggatgagtagaaggatgaatgagtagagggagggatgggtggatggatggatagatctgcctctccccagtaggccatggggaaaaacagtgtcctgggggtttggagtctaaggtttttggctccagttgagccactactggactttgagcaagtaactaaatctcccagtgtggcctgtttccta

SEQ ID NO: 23047 - DNA, 201 bp, Bos taurus
aaaagaagtctgtatctatgctgtggttgagtctccatggaaaatcgacaacctggacaacactcttcataattaagagtactggtccctacaaagaactccgagtttaaatgaggtgtagttaaaatccaagagtgtctgtacattatgaaatggtttaagggttgtgtattaagcaagggctgttttagttttactttt

SEQ ID NO: 23048 - DNA, 201 bp, Bos taurus
ttctcgtagtgcttgctggaaaaggccaacacccgtgtgttttattgatgcacggcagaacctcagtctaaaagcaccaggtctgcctcgtggcatttgctgagggtgttttaaacgcatagttccagagtcaagaacattgtctcttcgactcagtgaatgcattattaaaggacttttgctgtgcccagcacggggtgg

SEQ ID NO: 23049 - DNA, 201 bp, Bos taurus
taaccacgggagtaaaaccccctccttaattgttcagtgcatttggtctcccacacggtgcatgtaagaaatgaagagccaccattcagtgtaagccccaaccactctcttcgcagaggatggacaagcgctctatttcttgggaggctggaaaacccgaggaacagaggaacaggaggcagggcactcagaacacagtcc

SEQ ID NO: 23050 - DNA, 201 bp, Bos taurus
ccctcgttttcagttgctctggaccccacagccagccctgcctctaaaacttacgttcccagagggcaatgacttttctttatccatggctgtatgactgtagtacctcggcccctacttttgagttcagtaagtatctgttggatctggaatatggtgggtataataaagaaaaaagaccacagggtcccaaactaggat

SEQ ID NO: 23051 - DNA, 201 bp, Bos taurus
accaagatgtcaactacacttcagtaaaactttttaaaaactaaattggctataccattttaccaaaaaaaggaggcagactgttctagataaaagtatgcttattagacctaacaatcccatgtaatgagcggttcctacatttttgaggcaattgggaaaaatttaaatatggttgaggtattaaatgaaaggaattat

SEQ ID NO: 23052 - DNA, 201 bp, Bos taurus
gcctccgagccatcagcacatgctcaactgactcctagacttcattttaaaaacataagtcggagataaattgaagagttttaagacaacggcattaaccacaagcgtaaggcccttgtgggcatgcgacactgtgactgcaccagtagcatccccgtgaacctggccttggttagaaacgctgtgttcaaggttgtgcag

SEQ ID NO: 23053 - DNA, 201 bp, Bos taurus
aatctgtcatcagacaccctctggggataccataatgaacatccatggtctgtgtgttgaaggagctcacagtctactgaaagcaatttctgtacaataaggattgtgcataaatataagtcctttatctccaaattgttagagctctgtactagatataaacatgtcttgtgacagtgaagcttaacaaacaaaataata

SEQ ID NO: 23054 - DNA, 201 bp, Bos taurus
ttcagagtttgcctagcaacagtgggcagagaatcccgtgagaagagccacaggcgctgctccaataacaaagaacggccaaggcggaaataaaaaatagaagaaatccaggcgcaggctgagacggcgaaacttttctccagctcttcattgtgcaggagcctccaccactggggatccgtttggccctgtgtaggaggc

SEQ ID NO: 23055 - DNA, 201 bp, Bos taurus
gtcatgagttaaaactcagtttataagaaattatctaatatagagattcattggtgccctaattgttcctcgggtgtcctaagcaatagtatttgccttgaaagagaaggcataggaatgatacagagaaggtgaaactgaagtgtacattttggaagtccttggctcatttaaatgtcttctactttatccttccttcaa

SEQ ID NO: 23056 - DNA, 201 bp, Bos taurus
ttcaccaccttccccgcctcccaactctaggcagcccctaaggaactctgcgaaaactgaggggtctgtgtttgaaaaccgctcattcaaggagagtgacgtggcgagcgtgacaccgcaggaactttcattcattcctaacatttgcttagtgacttgatccaacaaaaacatatccacttattaactggaaatgctgta

SEQ ID NO: 23057 - DNA, 201 bp, Bos taurus
caccgttcaaagggggaagtcaagcatgttcgctgtcgtccaccagcctccctccccctccacattccactccaggaccactgctgacaaccgtaaaatcaaattcctggcctggaaaagctgctccttaaaggcagatgtgcaaacaggagtgttaggaggaaggcctatccctcgattcagaggctctggtctcaggat

SEQ ID NO: 23058 - DNA, 201 bp, Bos taurus
agatctttattgacagtgcagtgagggaggaacacaaacgtggtggcactgctgatggcaagtggaaagacaggcggccgggtgtgggtgctgtcagagcggaagtgtgtgagagcagagtcagcagctcggtgtttcagatgtcctgtactgtggacatttcacacattgagtcagagagttttagggccttcttttttc

SEQ ID NO: 23059 - DNA, 201 bp, Bos taurus
cgtagcagtcacacaccttgctgtcaggtgcttgaggtatccaggcttagtgggcaagataacagtttgctgagcacagaaaaggtattcactctatagccaaagtcatacaatgagaagacaaccactgctgaagtgactcctgaaaagtttttcagagaaataaaacatttcttcagtgtttctaatgttttgaagcat

SEQ ID NO: 23060 - DNA, 201 bp, Bos taurus
gctggcaggtgcccgcggcctgaggagctgatgaggttggcgaaagaggaggatgttggaggaaaggagcgcagaactgagaggcctccaccctggaaggttagctgtcagggtgttgaaatcaccaagaatactcgcaggagtagttttagaaaaaaatgatagcgttctgagacctgcaaaaagtgcccggccaggtga

SEQ ID NO: 23061 - DNA, 201 bp, Bos taurus
agcaattgtcagccacttcaaaaataggcacccctacctcacctgtgctgctaaagtctccttccctgcgcacacccacccctgggggcagggcctttcatgtttccattaatgactggtttagttcacgttctgaatgggaaggaaagcccgtgcaacactagataccagtgtgcatgggcatgggtacaagccctgacc

SEQ ID NO: 23062 - DNA, 201 bp, Bos taurus
aaccccacgtctcccgcattgcgggtagattcttcaccactgagccaccagggaagccctgagaaaaccacatctttgttcaacaggaaagaggagatgcttgaggtgaacctgaacccactgcacagcccaggccagttccagttgacccatgttccgaagcagtcatcccagctgacccaggaacctaggttccttgct

SEQ ID NO: 23063 - DNA, 201 bp, Bos taurus
gccttccaaaacagccgaattctcttttctttcacaacaggccttgacttgctcatcctaaccacaaccccatcattaccagccaaggctaatctgaaccacctttccttgggggccaagaaggctggtcttcaaagacctttgaaaaccttcaaagagatccagagcctgatcctacaaacctgccgcttagaaagcttc

SEQ ID NO: 23064 - DNA, 201 bp, Bos taurus
attttcctcgcttgtgaggccaaggggatctgccagcaagtgatgctgcctttagagtctctgtaccaacagctgggttagtgagatcaaaaggaaggggaactggagagcccttggagacaaatacagagaagcccaggtggcagagtggtaaagaatcagcctgccgatgttgaagacccgagacatgggtttgatctc

SEQ ID NO: 23065 - DNA, 201 bp, Bos taurus
cagcaccaataattatattattctaacacgactgtttccataataaccatgtcactgggagggagaggcaattccattacgtgagagtgggggaagggtacggagcaaagaaaacagcagatgtctggtagcccatgcacatcaaggactggaaaacaatctcttgctaggtttagcaaaaccttgtttatgcagtcatcc

SEQ ID NO: 23066 - DNA, 201 bp, Bos taurus
atgtgtttatcagtggatgtgctagctttcaggagttgatgtgtgtcttctcagaacagagttttctgttgcctgtggccttttattttctgtcagtgccctgccagctgtagctgtgaaaacacgtggacttaactttcacttgtcctggttggacgaagctccttcctgcatggacagtccgattggctctgtggcctt

SEQ ID NO: 23067 - DNA, 201 bp, Bos taurus
cccatttcagatttctgacctccagaactgggaacggatacatgtatgttgttttaagctgctgagttttggtagtttgttacagcagcagctagaaaccgatacagtcagcttcggaagaactttataatctccctattcctgttgggctatgagtgcccccagatgcttggactgaatgaaaagaagagaatctcacat

SEQ ID NO: 23068 - DNA, 201 bp, Bos taurus
ctacccttccccgcctctcactcaggcttgggttcccagatgggccctctgggagtcatctcccactcctggagtttgccttccacgtggcagggttttaagaagcgggaacctctcccggatgtctgggaaatgacaagcgaatttaatcagatcatcctggtgtgacattttgagtcgtcaagcgggggctggccttgc

SEQ ID NO: 23069 - DNA, 201 bp, Bos taurus
aacatttgtccctcaaaattctgcccctactctgccctctctagtgatatccaccccttgggaaagtcttcatgtctcactcataaggcaggccatgggtattgtccaattcagctcttgaaattaaaggaactttgtgtatgtgtgctgccccatgataagagcccaaaaagggtctcaggaggcccagcaagaggcaca

SEQ ID NO: 23070 - DNA, 201 bp, Bos taurus
caactaacacatttctgtgatgacccagatttcaacaatcaccagcatgtaggcctgtatagcccacaaagcctctctccccaaacaccagcctgcagtgggtaatgcaaaacatctactctggccactttaaatgcctaatatgcctcctctaatcctttggaatagatgctattgatccattttacagatagggaaact

SEQ ID NO: 23071 - DNA, 201 bp, Bos taurus
agttaatttcatattcttttattatcctggtttattgccctgtttaagtgatattctttatacttttacaaaattgactgtcaaaaaaattggtagcagacgtcatgaaaaaaatgagataaaagaaatttaagaactagtgattttaggatagtgtaatgttgacctctggaaaatgttgctatttaagaaatattgttg

SEQ ID NO: 23072 - DNA, 201 bp, Bos taurus
aacacacacgcacacacaaaggctgtaatagaacatagtcaagatgctgtgaagaacaagggaaggagaggtcaacagtatgtttggagagggaacaggagagggtaatattgcatctagacaagaaagaactgtgcagtccagggaatggctaggaaagggaggaggagaagatgagcatgaactagcagatttctgggt

SEQ ID NO: 23073 - DNA, 201 bp, Bos taurus
tttgactcacagtaccaagtctgtctcctccctcttgttccaacacaccttcttgtccctgagtgggcttctagccccaacctttcctggcttggcccaccctaccccactgtccccacaacaggataccttatatttacacaagtattaataaccttgcctggttgaccaggccaaccccttagtagtgactacttaaaa

SEQ ID NO: 23074 - DNA, 201 bp, Bos taurus
gtggtctttgacaaagcaacaaagtatgttgtatcaagtgtgaaagtctatgtatttttttttggagtccacagatctcctgaaatcacatgagcttctgcggacccaacatgaagaaccactatccaggagattaactagttgagttggcctcaaatagggcagtactgcccttatgatgtatgtgagaaatgtgaggag

SEQ ID NO: 23075 - DNA, 201 bp, Bos taurus
atgtggcggagatgggtgagggagcctttcagcagacgtgggcagaccacgaggctaaggagcagaaaggacccaaggaaagagacttgtgggggctgcagcctgtgacagccgacagctggtacctaccagctggtacctacatgttcctgggagcatcacaggagtcgaagaaaaagaccacaggttcatgagccacag

SEQ ID NO: 23076 - DNA, 201 bp, Bos taurus
ttaaaagtaggcttagtcttgtgtagtacacaataggccagagagttaacagggaagcagtgctcctcctgaggctgctggagagcagcggccctcattagccagaggtcccctttgggtaagatgactgccagggagagttgggactttgaagtctaagcctcttttgaagaattccccaccgttactaactgggaggtt

SEQ ID NO: 23077 - DNA, 201 bp, Bos taurus
agaacaccctgtgccgacgagagcagagactagagagaggcagctaccagctgaggaccaccgaaagcaggaagagatgaagatccttccctcgagacagcaagccccagccaccaccctgacttctggcctcaagcctgtgcaacaagaagtttctattgtttctgtcactgtctacagcagctttggaaatcagtgtag

SEQ ID NO: 23078 - DNA, 201 bp, Bos taurus
gggctggggagatggcacaggggatcagagcccagcaaagtgaggggctggaggctttgggtccccacctctgcaacatctcgtttccaattcttgccttcttagtgaggagcaggaaacagagaggagcttgctcccttctctgcgaaatgaataaaccacagtgtcaggtctgcctgaatttgggatttaatcctaata

SEQ ID NO: 23079 - DNA, 201 bp, Bos taurus
gcctctcagttccatgatgaaggggtggctgtgctggggtctccgctcagccgtctccagcgaaatacattcagaaggcgccgttggaaactgacccgcacggaatagcctgagtcctcaggccagagacatgctttcagacttgcttagttacttcaacttggttcccggggcaggcctttggttgtcattcccaggcat

SEQ ID NO: 23080 - DNA, 201 bp, Bos taurus
tgtccccaacccctgccacccacctgcagcaggaccctagctggagaccctcacagactcacttcagttttccagatgagatctgtgggccatgagcaggaggaactggagtgggggaggtgaaggacaatgttcttttcttaaaaaagcatctaccagcatcacactactgggcctgatgtcccctttaaccatcacttg

SEQ ID NO: 23081 - DNA, 201 bp, Bos taurus
ctgttgtcttggttttagacaattatgtgcaaaaccattgctgtgtaacttttgattcctgaattctaagctattgtgcgtttgtccactgtattctagtgagtggtaggcaattagaaatccaaggttgtggggtttattaaaatactgaatctgttatatattagattctgatttgttcagaaaaatgttgagctgcta

SEQ ID NO: 23082 - DNA, 201 bp, Bos taurus
ttctggaggccaggtcagaagttgcttgtctgatccctgccagcagctgggatggcttgcgggcagggacctggggagagtggtgtgattgtgctttgcaagttgtgtggccattgtgagatgcagtggtgtttgctgctatgactggagcaccaactggcagatctgggtgttaccacgtaaccatccttgggtggtgtg

SEQ ID NO: 23083 - DNA, 201 bp, Bos taurus
cagcccctagagaactgggatccgggacccctgatggctgcgcaaccgcccaagcatccttccagggccagtgtgcaatctgttacctggccttgaggtgtggggctgtgtgagcactgagggcagagcttggaggcaagggctgggctgtcagctctctgtgatgttgagcagaaccaggccaggaaagggcagtaggtt

SEQ ID NO: 23084 - DNA, 201 bp, Bos taurus
cctggctaatagtgccacccagagactggtacagggaatttatctccccacctgctccttcccactcactaaggggtgcacacccacctcaactccatcctgtttccctgcactcaagcacacattttgtgtcttccagtcttcagctgataacaataaaggcattctctttcttatgtagcaactttccttccacattat

SEQ ID NO: 23085 - DNA, 201 bp, Bos taurus
tcagcatcagggtcttttcaaatgagtcagctcttcacatcaggtggccaaagtaatagaggggaagaaataaagattagagaaaaaccacacacacacacaaaaaatcaatgaaaacaaaagtggcccttttgaaaagaccagcaaaattttgcaaatctttagctagactgaccaagaaaaagaaaactaaattactgt

SEQ ID NO: 23086 - DNA, 201 bp, Bos taurus
atactgttaattaagtcaatcacaggaccagctcagcaggtagtatgagaaccagtaagcatggctcactggggccaccagtgggacaggctgccatggtctgctggggagctgtggtgaccatccttgtagaaggatgaggctctcatcggagggcagccagtgaaagggttctctataagagcaacccccgaatcattt

SEQ ID NO: 23087 - DNA, 201 bp, Bos taurus
tgcatcacacttgacataatctccagcaggatgagctggggaaattctgtagtccagcaaattgaagttgaccccagagtcctgtaatttccatgtgactatgaagacaggagaggccaatgtgggcagagtgacgagggcttggggatggcgcttaaggaatctcattgagatgggtgttgacaggaacctcatgaagat

SEQ ID NO: 23088 - DNA, 201 bp, Bos taurus
ctgccattggcacctgccatctgcctctacagggatgagatcacgtgctgctgactttcagcaccccgagaggaggccagggtggagagcagaaatgaggcaaaactatacttgaggaagtactggcaagacaagtcttcagatagttaaatatcaggggccgatcctaattcttgtgtctcctcatatcttcatggtgat

SEQ ID NO: 23089 - DNA, 201 bp, Bos taurus
ccaagtgcccggccacactctagtcaccagacaccttccagatatgttctgtgcctccgaccaagccctcttcccctgcgatggctgctggcttcctcgctgactcacatcccatggcctagacacccctctggcctttcagcttccctcccggcctcatggaacgtgttcagatttgactcccttgaaccaccaagctca

SEQ ID NO: 23090 - DNA, 201 bp, Bos taurus
gagagttgcaaagagaaagtctaagattaacagagggtctttcactcagtgtttatttgcatatgaggaaattcctttaagctagggatacaggcagaggggattgaaactgaaaagcagtaagcctaacaaccaccagtgcacaaagaagtggaaacaatttgtgtttctacttaccaagtgaaaagaccttaatacata

SEQ ID NO: 23091 - DNA, 201 bp, Bos taurus
gtcacagccatctggtttccttctacctcctgctctttcactaaagctacaggaacaaacggagctgcctggagcaaatcaatttcccattatccttaatatgtgaagacgagacttctgacagcgatcgcagtctttgtctactgatatggttgaaaagtcatgtttacgtaacagaaaatgttttcacgtagaagggat

SEQ ID NO: 23092 - DNA, 201 bp, Bos taurus
cacccttttctctttttctttccattccacacctccccttcctctatcacacataatagtggaaatatcatgagcaatgaaggcagaaggaccttgttttaaattctgattctgtcatgtttgataagtgaccttgaagatattacttaatttccatgaaattgaattttataatcatttataaaatgggcatttaattca

SEQ ID NO: 23093 - DNA, 201 bp, Bos taurus
gtcaccatcatcagtgaagtcaaggccgtcacaggggattcactagaatgaccctgcccttgcccatgatgctcttggagtatgtttctaggatatgtttatgggaaagaacacatggcccaggggagctaaaaaaatcaaggctgtgaggttaagaagtccatgcaaaatagtgaagatgaatagtaaggattttatcaa

SEQ ID NO: 23094 - DNA, 201 bp, Bos taurus
ttacttcttccaaccactctccccaacaccctacattaaatatcttttccgtttcccttaactgtatgtctaggtgatattcatcaatttcctgcggtgcatgctggctccccagtagattccaaaccctgctccctctcctggtaggaagtcaggctgctgccagctgcccaactgatgagtcctattgtttatctgttt

SEQ ID NO: 23095 - DNA, 201 bp, Bos taurus
ccagagtccagaggcttaggaaaataagcaagtcaaacattagtaatcaacattattctaaattcatttaatgcaaacgatttgtcaaataaagtgaaaacagtctagctgtgcatagcttacaatctcttgaggaaaccagagaaagaaagccaggaagactttcccagaaataaatcaaagctttagcaatgatattca

SEQ ID NO: 23096 - DNA, 201 bp, Bos taurus
gctttagttgttatcattctgtagcagatgctatctatgtatgatttggaggtgatcttagctatggtgcacataaggttaatcgtatttactgtgttgtatactggaagtatccataagttactacccaggaatctctgctgaatcctgaacatcagtttccattcttcaggtccatgcagggcagcagacagaaccaaa

SEQ ID NO: 23097 - DNA, 201 bp, Bos taurus
ctgtctccccacagcctgctagcagagtggatggttgctctttctgtattttggcagtgcaatggtgagagaaatatactggaatatattaatttgcattcctctttttgtgagtaaaattgagcagatgtataagggtaactcgaattttgttttctgtgtggtgtctagtcatatcctttctctgtgatgtctagtcat

SEQ ID NO: 23098 - DNA, 201 bp, Bos taurus
taagcctccattaagatttagtggtaagaaggcactcttggcatttgtggatttgatagtcatgatttcagtgtttgggcctgttcctaatgattcatactgtaatgtgaaatttctgaggctcaactggaatggtgggcagtcaatctgtgcttttacagggcagccacatgccacagggttgacagagggcccttgctg

SEQ ID NO: 23099 - DNA, 201 bp, Bos taurus
tccatggggttacaaagagcaacccattgtgtgttgttcacacaacttagtgactgaacaacaacaacaatcaacaacgtgatctgtcctgcatctatcttctgaatgcttttcaccctatggctgaaggactgactctctcctgaggacactgctttcctgcagcccctcagtgggggtgttgcccctctcatagccgtt

SEQ ID NO: 23100 - DNA, 201 bp, Bos taurus
aacttgatcaaaaccaaaataaaatctggaagcaaatgtctcttgccgtaccgtcacagccgtttatacatattataggacactttgcacttcccagaggggaaggaattactcttcttcaaaatgatgctaacagttggctacattggaaccaaatggtgaatgtcttggaaatatgggaactcctatgtataagtaagt

SEQ ID NO: 23101 - DNA, 201 bp, Bos taurus
accaaagtaaagagcaattttaattaagcaaaaataatgagtttattcaaaataactgcaattcgggacaaatgattctattctggtgaactgtagacaagtcctggagaaggcaatggcaccccactccagtattcttgcctggaaaatcccatggacggaggagcctggtaggctgcagaccatggggttgcgaagagt

SEQ ID NO: 23102 - DNA, 201 bp, Bos taurus
ttgtgccagatacattcaatcctcattttatgtatccctcataataactattgttatcacttttcagatgaggaaactgaagcagtttgcttaagatcacgcagcttgtaagaggcagaaccaacattcacattgtgggtatcagcgccagagtctgggtcttgaccccttatccttagcatctcacttgggaaggacatg

SEQ ID NO: 23103 - DNA, 201 bp, Bos taurus
atagtatacaacagtcttttgtgctggatttgatgttaagctttggggcctcagtcttgctattactgatatcagcagatttttcttttaactgctatccgtgtggcattacattgtggatattccacaacttttatattcatttaccagtgggttccagtttggagctttatgaataaatctgatattaatgtttacata

SEQ ID NO: 23104 - DNA, 201 bp, Bos taurus
taaacactggcttatgatgtaaagtcagagatttgtttatatggcaaaattctcctatcatatataattaaacatttggggagaaaaaaagcaaacacataagtttactggctgtgagtggagaagagaggtatattagcactccaacagtattttcctatccatcagagtaccctctgcttttgtcatcaccaccaaatc

SEQ ID NO: 23105 - DNA, 201 bp, Bos taurus
ggaagtcctgtaacaaagtcgtgcataggaagtgtcctgcctctgactagaaagggctgtgttagtacccccaccagcttcactcactgggtgggagcagactgcaggaagcatggcctcaacaccaagaaggtggtggatctagaggagatattgcttcctgagcagaagatccaaccagcacatttccagccaccgcaa

SEQ ID NO: 23106 - DNA, 201 bp, Bos taurus
tttctgaaaggtacaattgagttatataataacatacaggatgaatttagatttttacatgtaaaatacatccacatccttactccttatggccttttttaaaaaaaaataagcaattctgtgttccctatcacccataggatgaaatccagaaaacttgtctggccatcagagttccttaacagtctgactgcaacctac

SEQ ID NO: 23107 - DNA, 201 bp, Bos taurus
gtgcatggcatgggtaggggctgcggctgtttggtctctgtgatcgtcagaagccagccggtgtagggagaaattgggtcatctgtagtgtgagaaagacgaatgtgcttcatttacagggagagaagctgcttgttttcccaacttgcctttttagaaagcaacttacaaatttgtgcttgtaaaaataacttcctaacc

SEQ ID NO: 23108 - DNA, 201 bp, Bos taurus
taacatcaagaaataaaccaatggaaaatcagacagtttagattatcatctgatatgacttttatggaaattaaaatctgtgtataataaaaattttactgctaagattatggaagatgaatgctttagacatgaaacgttatctaccatcttcataaaagaaaaatactaaagagaaacttgtctccttaaatagcatgt

SEQ ID NO: 23109 - DNA, 201 bp, Bos taurus
gccacctgttcaggaacagctgcttctggctgacgcagagcagacaggtcaccagtgggtacaaggcctgaggagagagaagaggaggccacaggatgatgtaattgcaatcactcaggtaacacaggctctctggaaccaccgtccatccatccagctcccctgtgtgccgtacaggccaggctctgtaacacacccacg

SEQ ID NO: 23110 - DNA, 201 bp, Bos taurus
gccaaaacgccaactctgactttgggggattagtcttgctcaagagacattgcttacttattaagattgagattagttggcaacaaggacagaggtgaacgagtagccagaggtggccacaaagtttatatcacatcatttgcagagtcgccaccttccatgtggggctcagcctgcctagagccccatgcttcatttgca

SEQ ID NO: 23111 - DNA, 201 bp, Bos taurus
tccattttcacatggacctaattcatgtagggaatcaggttaaaaggccataaaagcctggattatgaaatgtatgtgaggttgagacgtaattcatcactggagtggataaacccaaagaccatcctgaccaacgtcaaatccaggtcagcaactaagccaggcagaaatgctttcgctggccagttttggctaccatca

SEQ ID NO: 23112 - DNA, 201 bp, Bos taurus
gcccagtgtgacaaccacatggccagggccgtgaaacagactagtggttcttaaccaggggggtgcacctcagaatctcagggcgatcttttctaaaatacccatacccaggccttggtccctacagactgaattcagaggcaggctggaacctgggcatagacattttgttctgttttacgcacctttggtgaagcacca

SEQ ID NO: 23113 - DNA, 201 bp, Bos taurus
ggagaagggaatggctacccactccagtattctggcctgaagaattccatggactatatagtccatgggttcgcaaagagtcggacacaactgagcaactgtccctttcatgaggaatggggcctcatagaggaaagaacatgggcctcatctagacagggttgttgttcccatgggggaatggagaccccatgtatgtag

SEQ ID NO: 23114 - DNA, 201 bp, Bos taurus
gctcttgggtgacacaactagacttcaaagacaggtagcccagcttgcaagtcgaggcctgtacgctgtgaccccccacactgcagcttctgtttctatcaggcatcattaaggaggcagcacttggcttgtttctgtagatgaagtatgagacaagatttttttaagttttgataaatgaactgtttttctactttctaa

SEQ ID NO: 23115 - DNA, 201 bp, Bos taurus
aagctgagcaaggacaggttagcccccacattacaggagccaggatggattcggcaaaggtggtgctcagggagttatcctgctgatggctttgtcagggtgcagccctggcccctgcgccagggtctgagacccctggtctcctttacgctcacagcaatcctgccagtacacgcagtaactgcacggtttcctggggct

SEQ ID NO: 23116 - DNA, 201 bp, Bos taurus
ttcaactagggatcatcctataaagtgttctgaacataagcaggtaagaaaagtcctaaagcaaataagcatgggctgggggtgagttgtacattactcaatactgtgaagaataagaacttggggctgttcacagcaaggatgtggcagccccctccctactcccccgcctaactttcagggaacctcaagtcttgctct

SEQ ID NO: 23117 - DNA, 201 bp, Bos taurus
gcctagcgggcatgtcatcaggtggtactctctaaactgcctcaaccttttcctcgaagagacaaggtttgcccccagcagagatgaaggagtcggccacacacaatgctttgcactgtgtccagaagaaaaacactgtctttagtgtcaggcttgggatgaagaacaagtcaccaggtgataagcagggtttgtctgacc

SEQ ID NO: 23118 - DNA, 201 bp, Bos taurus
tgtgatttcacaaacttctggggtaggttctactataatcccccacttacagaccaggaaagtggtgtttacagaggttaagaacttgctcaaggccacatcgctagaagatttcaactggatatcaagggatgctagtctggtgagagggaaataggatgaaggagagaggccagtgagatccttgtatctgcccccaca

SEQ ID NO: 23119 - DNA, 201 bp, Bos taurus
ctctaacaaatgaaagtaacaaatctttggtttttatgtaacagatatttattttttaaatgttttagaaattatagggagctaaggcatttagctgaacgatgtgttgatagggacttctaaattttcttcaagcaaatcctggatataaatatggctggtggagattcccctgggaatccccctacatcctactgtact

SEQ ID NO: 23120 - DNA, 201 bp, Bos taurus
catccccgggcgtgcacttacttggcaaggactccatcctgatgggaaccttgtccccactcccccaccccctactctcccacccccatttcacctcccttggttatgcttcctttgtcctgaaacaacactctgtctctctccttaggagatgggttgccctggctcctcagagccagttattaaattttcaggtatttt

SEQ ID NO: 23121 - DNA, 201 bp, Bos taurus
cagcatcagaggacacttgaaatcagacaggagacaaggtctcaaatgatcccctagggtcagacgaagcaggtttgcccgttgggacaagccttggacgcgtggccagtgtggtggaccattcaaggcccaatcccgtgggagacctggaacttagcaggtgtgtagtccaccccccggggatacgtagtagaggactag

SEQ ID NO: 23122 - DNA, 201 bp, Bos taurus
ctgagaataataaactatattgaagggaccctgcccaaccctagggtgagcccacctcttagagggacccccatataaatatgctcaggctaggacaagcgggaatccccagggccggatccaaagccctatttttagaggtgaggagctgcattttgctgggctcaggcaccatctggtgtctactattacactgttaac

SEQ ID NO: 23123 - DNA, 201 bp, Bos taurus
gagaattccttctaaatcaacagccagtggtcaaagtaaacactgggctgaagattacttttgagaaactgcttacaacaactgcaaagtcattaacaaaacaaggagctggggtgcaaccacaatggaaggcctgaaggaatgtgttgaacaacgtcgcgtaagtcaagcatctgtggccaggatccagtgtttggcgag

SEQ ID NO: 23124 - DNA, 201 bp, Bos taurus
aggattcccaccagctgccccaccctctgcctccccacacttgttccggttagcattagcatctatgggggactgctgatggaggcgaggggaagggttcgggtcacaaaggcacaaggtacctttgtgcagagccttctcccacccttccctccccgggaagcagcaccgcacgtgggcagcacttaggggagcaagtgt

SEQ ID NO: 23125 - DNA, 201 bp, Bos taurus
cggcttggtgctatccggcagagacggggtaagagttaagcacacaacatggaatgaaacaaggcagtgatcttccagaggcaggccattcacaggacacccacagaggcgttgtgcctcgtaaccagccctccctcctaaccacctcaacctgttctctagaatgcaggaagaagaaattttaactacccatgggccctc

SEQ ID NO: 23126 - DNA, 201 bp, Bos taurus
ctgcagtccatggggtctcaaagaatcagacacaactgagcgactgaaccgaactgaactgtgctgggtctcgttgctgtgagggctttctctcgttgcaacgagcagggcctaactactcttcctgcagagcacaggctcaatagctgtgttgcatgggctttgttgctcatgggatcttctgggaccaggatcgaactt

SEQ ID NO: 23127 - DNA, 201 bp, Bos taurus
acatatgactgtgtgccaggatcgggccagggtctgtaatgtgctgtcttgtccaggtctcatcgtcatgctagaaagttattattattcccgttttgccgacaagaaacagcaggtccagcttcctgaaccaggtggcgtggtggcagagtgatggcagacaggagacaagcatgtgtaagttcccaaatctcaacagga

SEQ ID NO: 23128 - DNA, 201 bp, Bos taurus
agcctcttgtagtcatcaaaactgggctccagtgtcccactaaatttggaacttcctggggcagagtgattaattaccctctgcatctgctggccctgtagctgtgggctttcaagcatagaccccagccagcagcctcagcgtctcctgggaacctgttaaaaacgcagagtctcaggcctcaccccagacctactgact

SEQ ID NO: 23129 - DNA, 201 bp, Bos taurus
gttaatggctcggtgaatccggcagacagaaacgctagctcggttccgaggaaaagtttcctcctgcggagctccctcctcctcaggggatgcgttccccgctcaccgggccccaagtcagtactgcaaagagggtgagcaccgagcagaggcagctgctctgccgggccccacctccctcccgcactgcagccggacaag

SEQ ID NO: 23130 - DNA, 201 bp, Bos taurus
ctgtggccctgcacactcacactcgaataagactgagtttggatatgggtctgtaaaggggggattcagttacaatgaggccttcaaggggtcctaatgcaatctgtctggtgttcttaaaacacagagagaccccaggaccatggtgcacagaatgaccagctgaggacccagggaggaggcagccgtctgcaacccagg

SEQ ID NO: 23131 - DNA, 201 bp, Bos taurus
tctgtatgtgaattttccagggctcttctttgactattcaactgagatttggctgtaaatgaaaacctaataacagaatcctgaaattctagttagcttccatacacccttgcatctcagttcagttcttgcttctctaggcctcattataataattgttttaattggaatactcttctctgaggcttgctgctgctgcta

SEQ ID NO: 23132 - DNA, 201 bp, Bos taurus
actgccaggaattactgtcagaataaattaacactctctgagaaccaatgtcagtctctgcagtaggcagcatgcattggaggccaaggaaggcagaaacgcttgggaaaagggaaaatgaaaaagttttgaaaactctcccaaaatgcaagtttctgcaaatagagactttcgagagtacaggccgagattttggtaaac

SEQ ID NO: 23133 - DNA, 201 bp, Bos taurus
aagccagcctgaggccctcccccatggcatattagtttaggagtaaaaggaatgactggaaaaggaaatggtgaccccttccagtgttcttgccggggaagtcccatggacagaggccaggctacagccccccagggtcacaagagtgggacatgacttagtgactaaactgacactaccaaaaggagcggcagggaagcc

SEQ ID NO: 23134 - DNA, 201 bp, Bos taurus
ctccactgcaggagttatggccctatcagagtctttttttagcctctggtagctggtgatcagacggcctctttggccagtctttcactgaagctctgcccattcaggcatttggagttctcttatcttgggtccttctctgtggtttggcatatcaggcatatagaagggccccctggctggggtcctagtgtgtattgg

SEQ ID NO: 23135 - DNA, 201 bp, Bos taurus
attttatcttgtcatgcataggagtcattaagttgttttaggccatgagattgcatggaagtttttgcatttcaaaatataactttaaccttaggatacatgagaggattgagggccagggagaatactaaagaagccattgcaatgagactagtgagagaattgttggccaaatctaacacatagaggtgagagacaaaa

SEQ ID NO: 23136 - DNA, 201 bp, Bos taurus
ggtgaaaacagactactgctgggagacccatgagcaagcaacaggccctgctcccactgattcaggaaagcatagatagcaccagcccctaggacatccatgatcatgcagtgggccttaccttcagtgctccatgaaagtgcagagagtaccagttcctaggaagtctgcaagctgggcccaggacctactcttgctgtc

SEQ ID NO: 23137 - DNA, 201 bp, Bos taurus
ggggtcacaaagagttggacatgactgagcaactgaactgaactgaagtgaggtgttcaggggtttggggatacaagccatcaatccccttgcatggcccggcaataaacatttctctgcttcatacttttatgttttggtttgtttggcttcactgtacatcaggtaccagaacattcattccataacatgaggccctag

SEQ ID NO: 23138 - DNA, 201 bp, Bos taurus
ctgctcttccccagtagcatattggatactttctgatctggggagctcatcttctggtgtcatatctttttgtctttccatattgtccgtggggttctctgggcatcagtagtgaagttggttgccatttcctcctccagtggtccatgttttgtcagaattcttcactatgacccatctgtcttgggtggacctgcacag

SEQ ID NO: 23139 - DNA, 201 bp, Bos taurus
atgcagctgttgctttttcctttttacaggtgaagaatctgaaggctaacaaaatgggtaacttgcccaaagtcaggactctgggaaaagcacaggtccccagggctgactctgaagcacacatctttacctgtaaagcagtgcttcccagaaagcatgttcatttttactctcacttaaacatttattgtttcatttcca

SEQ ID NO: 23140 - DNA, 201 bp, Bos taurus
aacctgtgtgactgaaaaaaaaaaaaaaaaaaacctaacaaagtatctatgtatttctaacaagatattttaacatgacactttttactattaaattaataaagtcttattttactaaccacttaaaagatattgagtagctgaattaatcatttagccctcattttactcttccatactttttttttttccccaattagc

SEQ ID NO: 23141 - DNA, 201 bp, Bos taurus
aacacaaatcaggtactgtgtttcagtttaatattgctttaattgcaacaaaacagcttttgtggttgtcaaataaaaactgtaaatagggagtgtagttcaagccatcctgcctgagcagttcctaactgcagggtctaaaataaattaagggacagagagtgttctgggaggtaatgattgactatgacagagacgtgg

SEQ ID NO: 23142 - DNA, 201 bp, Bos taurus
gatcactgcatgaacaccttaagataaagacaaatgcactttgagacttatgtagcatttccaaaagtatgtgtgtgtactcaatctctttaatcatgtccaaatctttgtgacctcatgggctgtacccctccatcctgcactatccatgggattcttcaggcaagaatactggagtgggttgctatgcccttcttcaga

SEQ ID NO: 23143 - DNA, 201 bp, Bos taurus
aagcctaaggagaaaggactatcaaagaaattgaaggaaaatattcaagaaagatagcaaataaatgatgttgaatattccattaaacctgtgagaaaaatgatatatggagaacaagtaaaagtgataacccccatcatatattccctgggaggaaaaagttaagaaaaatggttaatgtgtgtcttagttcagattgct

SEQ ID NO: 23144 - DNA, 201 bp, Bos taurus
ggcttcctggtaaaacatgagacagcttaacctttccttttttcaaatttatagttttgaaggccatttagacttagaatatcaaaaatgtattcataatatactaacttgtttttgttgccttggagtttatagataacatattcaaacaagtgatgtcatgtttgagtaacagttaaaactcaggcttttttccattaa

SEQ ID NO: 23145 - DNA, 201 bp, Bos taurus
tagctcttggttggcaaaactgccccactggacattagttgttggttggcaaaacctcttccagaaaccaaaactcagaaagaatatatttcaactaaatttgaactgtatttttatcttctccccttgcctggaacaatggtatatttaatctaacatgggtttgttatttatttattagcttattaagagatatcaccc

SEQ ID NO: 23146 - DNA, 201 bp, Bos taurus
ccatactttttaaatcttttaccataaatgttcaacaaaagtatatttagtaggtttgacctaatataattcctcatcaattttctactttgtatgaagaacaattaaaggcctgaaaatttaccctattgctaagctaacaagttagtcagtatccaccagttctgttatactgcagataatagaacaacctttggtcat

SEQ ID NO: 23147 - DNA, 201 bp, Bos taurus
aaaagaaggtgaaaatatacaatgggaaaagtttcttaataaatgatgttgagaaaaccgtacatttacatgcaaaaaaatacaccttggacactttttttgcactatatataaagaatcaacccaaaacattctaaagtcttaaatgtaagtcataaaattgtagattaaaacatagtaagtcaactatttgacattggt

SEQ ID NO: 23148 - DNA, 201 bp, Bos taurus
tagtgattttgtgcttggataaaggggctttttcacagtagctctgactaaagggtttaggatgaaaaacattgatttctgggatatcccactgacaacttctataaggtgaaaccaaaactgcagaatcatctaacccaaatgttaggaaaatatgtattgaatgacatttaatcaatggagaaattctttagaacaaaa

SEQ ID NO: 23149 - DNA, 201 bp, Bos taurus
tgatcctgatcaacttatttaacaaggtagttaacctatgacagtaaattattgtttaaagtgaaactgcaaatagcagagcataattaatatttattaggaacattgaaagtggaaagtggaggaacaagatggcagaggattaggtgcacatggaatacatctctctccatggatacatcaggaatacaccttcagaca

SEQ ID NO: 23150 - DNA, 201 bp, Bos taurus
ctgtatgaatacagtgtgcacagttatgaaagcagccattaacctttaagccgtatccagctccttctgagcacaatcatttactcggagacatcaagttgacatcaactgagctgttatcatttcacagacctatgaaagtatttatttggcatttacagtctatggtctcttcacctgcggtttattttcctatggttc

SEQ ID NO: 23151 - DNA, 201 bp, Bos taurus
agtccctccttgctcaaggattaggagatctatctcccgtctactttggagtacaacccctgccaaactgaattggctttttagagctatcctgagaaatcttacccccagaaacttaatttgggatgttccttagaatggcactcatttgtagtcctgaataggtatctgagatctcccaggagctcacaagtggattga

SEQ ID NO: 23152 - DNA, 201 bp, Bos taurus
tccctttcatgtgttcatctaagtatgtcctttcagagaatttcctgactctgtggataagcagaaacgagattctcacttgaagtatcgcttttttgcaatagtgtctcattgaagcaataagaatccaagttcgtttttgtgtttgctttgtttctcctcattatttctgaataaaggaaatttcagattttgtaaaaa

SEQ ID NO: 23153 - DNA, 201 bp, Bos taurus
aaatattttttaattttcatacattagagatgtaacaattcaagcatgcaagtttcaaactgagtttcaatttttctacctgaacttgaaaattttatcagtgctatattcacatgaatttgtcaacatttaaactgctatgtattttttcatttattttagctatcattttattcaaattgctatgtgcatattcattat

SEQ ID NO: 23154 - DNA, 201 bp, Bos taurus
aacaatttaaaaagagttgtaattaatctgctttcacaaatgaaatactgaatattgaagattctatataattttatgctattcaactaaaacggggcaccacccatgctttgaaccacttgcagtgtgtgcgtacaaaagccatagatgtcttctagcttgttgtctggcccagggttgctgctcaacaaagggttttga

SEQ ID NO: 23155 - DNA, 201 bp, Bos taurus
gcctcccaatccacaatgaattgtggtgaaagtaaaaaaaaaaaaaaaaaaaaacacttttaatgctatcaatcaactaaaagtgcagtcatttgttaaagcaactaacctacattatcttgactaacaaatggtacacaaaggttttgattaattgtattattttcttttttgatatttaaataaaattggttattctct

SEQ ID NO: 23156 - DNA, 201 bp, Bos taurus
tctacatcacctaaatcgtcattgagttattacccagtgaaatcacattatggtgctccaatcatgattccacataactgccaaataacaccaacatccaccagtcccaaacagcttgatctgtcctatcctacttttgttaggtgtgaaaactcatagctaatacttcatacgattactgccagtcaaacttctccctgg

SEQ ID NO: 23157 - DNA, 201 bp, Bos taurus
tgctatggttttctaaaatgactgatttttgatcgagcctataaggacaaggaagtgtagttaacaaagtgatgttataaaatgtaacattccaaatgtagtaatatctggatagcagtcagattctagtacttcattctgtttcctactcacaagttgttcctgatgaattatttttaagtgtgactaaattattcatta

SEQ ID NO: 23158 - DNA, 201 bp, Bos taurus
cagacacgtgggtctctgtctttcatgagtcccatggcctttagcaaattatttctttggagtcttctttatctcaaaatttttatctacttaataattcgtaccttataaggccgatagtttgttactattattatcctgattttttaaatttaaattacttttgcaatcttaatgttttcctatctactttccctttga

SEQ ID NO: 23159 - DNA, 201 bp, Bos taurus
catactactactgatttcattcaagtggcttaagagttctctcctggactattaaaatcacaggataaatagccaccatatttacatttactttctattccccaggttgctgctgcagtgaaatttttaacatccaatctacacatgatacttgcttgtctccatcatccttcttttgacagaatattgtccacacaattt

SEQ ID NO: 23160 - DNA, 201 bp, Bos taurus
aatgacataaagattactacttcaatccttgagcaggaaatcagactcttcttcactaatataattggtaatgtatcagaaataataatatagctctatgtttagtaaaaataaccacatctgaagtgtttttgaatgactgaatgaatgagagatatgcattgttatagtatattcatagttataaaatttaatatcaaa

SEQ ID NO: 23161 - DNA, 201 bp, Bos taurus
tttccaggattctatcttctgttcttcacttggaaaataaagtttgtaaagactaaaatcctaaatatgactcaattcccaatagccaacagtttttgatatttgctccataaaatttctccataaaatttgatattttctccataactatttgacattttctccatttacttcataaatgtatatggcatttatttcttg

SEQ ID NO: 23162 - DNA, 201 bp, Bos taurus
cttcttttttgcttgactttgcctgttttctaatcacactgttttaagtccacagtcctaatcaagtccactttgtcacaacaataggactcagtctctgctttcagctgttctaggttcaggctttaaggagtggatttttcatgtctcagtttcatactgtttatcaatttcacttccctcaaaaatgctgttatttgt

SEQ ID NO: 23163 - DNA, 201 bp, Bos taurus
ccagtattcttgcctggaaaatcccatggatggaggaatccatggggtcagaaaagagtcagatatgactgagagacttcactgtgccaagaatggtgctgggcacttttcatgaattagctttttttcagtcttcatcacaaatcattttagatatatattatttgcctcctttagaaacaagaagactgaggctcagag

SEQ ID NO: 23164 - DNA, 201 bp, Bos taurus
ccctaagattggtgtttttgagctgatccagcgcctttcattgtaataatcggttttatgcttttcttccccaagactgagttcttttctggtcacaattcatctcttccttctcaggacctgacatagttttcttcttgtgcctttgatcaacatgaaccattgtttcaagttggagtagagaaagctggattttttcaa

SEQ ID NO: 23165 - DNA, 201 bp, Bos taurus
ctaaatatcttgacaatcgaggaataattaagaatggaaaattatggggccgataaaaataacacttaaaaaggaggtttaatagcataggaggatttttacattctattgaggcgggtataggatagaaaattctatatgaaggtgtgatttacatatagaatgtacataacaagcatgtttatatatgataagatcaaa

SEQ ID NO: 23166 - DNA, 201 bp, Bos taurus
ttttttccttcataatttgaatatactgctttattactttctccaatgtttttgctggaaagtcgagtgtcattctcatctttgatccttgatatgaaacgtgttttgtcctctctggaaaattgtaggataatctttttttatggcccccgttttctataatttcaccatgaggtatgtgattgtacatctgtttttgcc

SEQ ID NO: 23167 - DNA, 201 bp, Bos taurus
acttctgcctcagcatacagtgggattgctcaccacaaatggccatggtaatggaaataacaagatgtcctcaggtcccaccacttggtgtgaaaaattccaagggaatgtaaattacctaaatgatgaatcccaatcttttttacagctttcatgcttatgaaaagactgtggatttgtagcatgtaagagagggagatg

SEQ ID NO: 23168 - DNA, 201 bp, Bos taurus
caagaacaaaataggattggcctgtaaggccgaaggcaagagagtcagtgactgaaaatgttccattggctcaaatggccccaagccactaagatgccccgaaataggagagctgagaaagtctagttcgctaccacctccaccagagaaatgggccaaagtaaatgaaacttccctaatatttcatttctcttcatcagc

SEQ ID NO: 23169 - DNA, 201 bp, Bos taurus
ataggatgtcatgcaaaacagacactgcagggagcaagcttgatgaaccctttgcacttatgaagctgacattctggtggggaggatacagactataaactggcaaatatgaatatatgagattattacagacattatctaaaaaaattaacaaattgatattgtagaatatcctgatgcagcagtacttttgaaagtcag

SEQ ID NO: 23170 - DNA, 201 bp, Bos taurus
gttcggttttttgttttgtttctgtgtagaagcttttcagttcgatatgatcccacttgtctctttttgtttttgttgttgatgcttttggtatcacctccaagaaatcattgttaagttcaatatctagaagcttttaatgttgctttagttttaaaacatcccaatgtgctccttactgattttagtgcatttagattg

SEQ ID NO: 23171 - DNA, 201 bp, Bos taurus
cctccctaactgcctacaagaatttagatggagggcctattccctgagtagagctctcagcagagatatctgtaaggaatatagggtaggtatggtgagcgtgggcctatagatcacagcccattctgcatcccactgtccctgcatggcccattaaatatttgtttatcaaacctttctatcttcccaggtggctcagtg

SEQ ID NO: 23172 - DNA, 201 bp, Bos taurus
ttcttcagtattaagtacagtgaaaaaaaacaaaaacttgggaaatagcagaaacaatatactcagaagcaccagggaattacagatggcccactgacacaaaagagcagctctgggaaagacactcattcattctgaaaacatttattgtttcctgtgtgccagacactggatcaggcggaaggccatgacatagatatc

SEQ ID NO: 23173 - DNA, 201 bp, Bos taurus
aaagacaaagatatatatattttagaatgtatcctttagaatatatcctttcagaaaggatatctattttttaagcattgactctttttgtccttctactcctcctttctggacctttatcactttcattatttctatgtttaaatattgagaaagatcaacttcattttagtaaatgaagcttatatataaaaaaacacc

SEQ ID NO: 23174 - DNA, 201 bp, Bos taurus
acccctcaccatgtgcgccatggggagattagaaattaaggggatccttattggcacttcagtatgattcttctagaatgtataaacatctcttttggaaggatgtccttccctataaaataggataattctcactttggctgttcttcctaccttagatgagagagcagaagagcatcttttgccatagctctgtgtccc

SEQ ID NO: 23175 - DNA, 201 bp, Bos taurus
tctatttgatggccactcagtattaacatatgaaagatttaaatgctttttcataggatccatacgctcatggaacaaaagaccctaaaaccaaggctccccttccttagagcagcaggcagcactaaaaaaagtgttgcctcacctttcctgattaattctggacacctcctaaacccctactcctggattcagttcagt

SEQ ID NO: 23176 - DNA, 201 bp, Bos taurus
aaatacctcatgtgagagctgagctggatcatgttgagagaaattctcccaagaaactgttggaagaacaacacagaggggccagtctcaggaaccagggtacctggggaaatagagggtaacagtgatgatcagatgtggccaccagagcaggcaagcttgaagacaagcaaaatgcaacttggcaaccagccatgggga

SEQ ID NO: 23177 - DNA, 201 bp, Bos taurus
atttcagcaaccaactatatcaaagagggagagaagtctaggctgactttctttcccaaagtcactgccacagaccaggcttttactcttttttggcctagattttgaatgcattcacttaactgcagtttcccagtccccagcttctgtccaaacatactaggtggattggagcaaatcaaagcatgtcacttgccaggt

SEQ ID NO: 23178 - DNA, 201 bp, Bos taurus
aaagtttgttctggtctttctataagatcgtttggaaaaacctgaatgaacttcttggccaacacaacatgatctcagttttgttcctgttgttcagtcattaagtcatatctgactcttttgtgaccctgtggactctacctgccagactcctctgtccctggagttctttaggcaagaatactggagtggattgccatt

SEQ ID NO: 23179 - DNA, 201 bp, Bos taurus
tgggtggtatgacattattagcaggagaggcagatggtgtcactaatttggactgtctcccaaatggtgccttttggacctgctcgttgggttctgatcatattccgtacgtactgggtggccagcagcctcttcaggcagtgccaagatcgaggcagactcagcagtgagccaacaatggaagccctgttgctatggaat

SEQ ID NO: 23180 - DNA, 201 bp, Bos taurus
ttccattaaatcttattcttctagcaggctcttgtatcagctaattaacacaaaagttactgttctcatttttggaataccaacgagttgtcagaacacagccctgactgtgctgctaggttgggaaagacacagcataaacagcatcttctgccccatgagaaggtggatggggctgtttctgatcatgtctctatgttt

SEQ ID NO: 23181 - DNA, 201 bp, Bos taurus
actgtacacactttagtgcagacaaagtcttcccctgtgttactcacacatctctgctgttccagcctctggtttccttggtccactccttacaggatgttatctgaattaggatctcatcagccctctaggcagccctctggaatcattctcactcagccttcaaaataactagacagctatagcttctcactgttaagt

SEQ ID NO: 23182 - DNA, 201 bp, Bos taurus
cagtttcttggtcttgaaacagtaattcataagggttttctgttattgctgcttcagtttatattgcttactttacagactggtgctgcatgttattaaatgttccttttgtaagtgcctgtgactgtactaccagaggagatttggagggagtcacgattgcatcgaagcagaaggaaatgccattcacttttggatttt

SEQ ID NO: 23183 - DNA, 201 bp, Bos taurus
gccaccctttagtcagtgattccagatccaaaaattggctcaggtccaagaacagagcaaggaattatgacttactggattgactaccttcagcttcctgcccctcctcaggccctctcattatagaagttaaatggcacatccattttgtccctagacccccatactctattaagcctgctccacaacttctgaaaatgt

SEQ ID NO: 23184 - DNA, 201 bp, Bos taurus
gacaaaggaaattgtctatttaaagaagctctgaaatgaattatttttaatgcaaatagatattatgttgggattttgaaataaattttgagtaataatacggttcaaaaatccaaaggtattattttaagtcaactacacatcaacttttaaaaaatgaaaaaaattattgaaaaatccaaagatattaaatggtctaca

SEQ ID NO: 23185 - DNA, 201 bp, Bos taurus
agagccagcagtcatctgcccttgactgaagtcagggcccacgagcccagcaaagaagccctggtgagagggttcaccatgagaagaagaaagccaaggtagagctcagatggcacctggcgaagagggctggcaaggaagagaagccacggggacatagagaaacatggttagagaggctggagaagaaccaggacagcc

SEQ ID NO: 23186 - DNA, 201 bp, Bos taurus
cctgaggtctatgggttctaaggaagctcaagaccactgcatagccagccctcaactgttccagccaatctcagctcaggcaccagacttgggagtgacaccaccattgtggtgcttcccagcccagcgaaaccttcagagatttgcagccccagccactctgactgaactgcatgagcaatcttaagcaaatccagataa

SEQ ID NO: 23187 - DNA, 201 bp, Bos taurus
ctgttatagtctatacatttttttctgttaccttatgtcacttgtgaagtgaagcagccataaatcatttaaaatatattatccttctgtgtcagtcagctaagtcctctaggaggcggatgccaagataacattacaagggcaagaaatctgtgtgtgtgtgtggaggggggggtgcctatgacagagcaaggggtgggg

SEQ ID NO: 23188 - DNA, 201 bp, Bos taurus
tcagactttgttttcttaaagttgttgaaaccctggactgttctagacccagacagggcaggccctggtcattttcagtgtccatgtttaagagaaagccatgctctttgcttgatggaggatattggccgaaccctgagactttgctttctttaggatgtgttggttcctggtgtccattgttcgggctcttctccagga

SEQ ID NO: 23189 - DNA, 201 bp, Bos taurus
aacccactgaatctgagttctgcccagccaactcctaaattgtgctttcatgatggagcctgctccttccttgagcctcctgtttttctaactggaaaagtaaccatgctcctggccctgagtccctggaagatacacagttttactgacttctgtgaaagtgaaggaaaacattagtcactcagtcatgtccaactcttt

SEQ ID NO: 23190 - DNA, 201 bp, Bos taurus
tgtagtctttggtctaatgatcacctgagtgatcttcatgagttttttttttttttgcatgtctgtgcaaatcctttattaaagcaacagccaaaatacaagatggctcacattatttttttttcttttcttgctactgtatcaactttaatactaatcatttgtttatacctttaaattatttttaaaaggtaaacattt

SEQ ID NO: 23191 - DNA, 201 bp, Bos taurus
caatccatggggtcactaaaagtcgaacacactgagtgactaacatttcacttcattctgtttacagaatagaaagtttactttgactctcaaaatgggtgaagatttaactgaaagaaaattgagaatcagggattaagagatttgatcaggtagagaaaattagtaaattaaagtggtgttctggtctcaagttctcta

SEQ ID NO: 23192 - DNA, 201 bp, Bos taurus
aagtctcccacaagaaagtgtttaggccctaaggtaagtgtgaccttagcaattacagaaagattgccaggaggctggaattagtgaacatgaaacgatgcggttgaagaagcagacaagagataaactgtggttgtttcataatatattattaaaaatgtacatcatcaaatgaatggtgatatttcatcgaattcattt

SEQ ID NO: 23193 - DNA, 201 bp, Bos taurus
tgagttgaatcctctttactttgggaaagagcactaatgatcacctatttcagagtagcaataggacctcctagattccgtatgcttgtttatcaggccatggagaaattaatgctactgaagtccaccaagtaataacagtggatcagataagccacaagccatatgtcactactccaggggcctggcacaggtgggagc

SEQ ID NO: 23194 - DNA, 201 bp, Bos taurus
ttctttatattagtttcttacttcacttgcaagttcaagtcataaaatgaatagatgtggcttttattaagctttgaagatctgctgtgcttctatgtgagtatcacttcatctatagcatttgaattggaaaaaaatcttttgtgtgttttcaacaaccttttgtccacatagttaaatgcactgacagagccttttgac

SEQ ID NO: 23195 - DNA, 201 bp, Bos taurus
tccttttggtagaggaaactgattctcttttattgcaagaagaagcaagtctaactttaaacctagcaataatacattcatatttcttatttgcagttttcgtcattcagttagataacttaagggcaaaatctgagtattgaagacaaattatgcatgtaatcaaatctctctgattgcaaaaaaaaaaaaaaaaaggtc

SEQ ID NO: 23196 - DNA, 201 bp, Bos taurus
cctgcatagtaacatgtgaaaaagatatgagaaacgttagtctctattgcttatttaacaagttttattattcaaaacaatactaaaaacaatagttttcacttactgagtgacagctcaatgacatatcagttgcctaatttttctatgtgtctgactttgttagaaccttatttttaaaaactctatgaagtaaatatt

SEQ ID NO: 23197 - DNA, 201 bp, Bos taurus
ggtgtcagtaagtttggtttctccagaggcctctctccttgacttgtggacaactgcttccttgttatgtcctcacacggccacctcatataacaacatcagttctattggatcatggtcccactcttatgatagcatttaacattaattgcttacttaaaggccctatcggagaaggcaatggcaccacactccagtact

SEQ ID NO: 23198 - DNA, 201 bp, Bos taurus
cattctatgtataattgtttgcatctgctaatcccaaattcccaatccatccctcccctatatctcctcccctggcaaccacaactcttgaataagggtttctttaatggcccaaacagagatgagagttaagtgacacaaaattatgtctttctcaaattgactagatcattagattgattattctcttttgcttgtgaa

SEQ ID NO: 23199 - DNA, 201 bp, Bos taurus
ttctaatgtctcctgtaccaatgaagaatatgatttattggggtctagcaccattttacaaagatggcagtgatgtgtcatttgccgtgtttctataaaatacctttgccatgctagtgtgaattattgctcagttaccattgtttaccacctaattattgcgaagcacttccatccatcactgacaactcagtaaatgac

SEQ ID NO: 23200 - DNA, 201 bp, Bos taurus
tgtctgtcttctaggagctctttctcctcctggttagcaagatgctcccaccattttggtcatttagtattgcagctgcagataaccaaagggccaacaacgctatgagaccaccaagggctctgtgatggagaactctgccatccaaatagtccggctctgctgccaatgctgtccattctgtggttgcttaaggaagtc

SEQ ID NO: 23201 - DNA, 201 bp, Bos taurus
acaagaagatggggacattagaagacagccacagaaggtggaaagcaagtttccttgaattttcaaaacctccagctatggtagcagatgtagaaaacagatatataacaagctctcaatttcttgcagccgtaaacttattgtgaaatcaccgatttagaaagagggaggttttcactcttcaagactcactaaattact

SEQ ID NO: 23202 - DNA, 201 bp, Bos taurus
gagaacaagcatttgacaaaattcaatacacattcatgataaaaagtctcatcaaagtgggtatagaaggaatatatctcaacataataaaggccatttacgacaaaccataactaacatcaagtcaattcaattcagttcagtcactcagtcgtgtcagactgtttgcgaccccatgaagcgcagcacgccaggcctccc

SEQ ID NO: 23203 - DNA, 201 bp, Bos taurus
ttttggacaccagagatgttcatctcaataatcacactgatattcacacccgtgtggcccctcattcattcttggctggccctgtgactagatttttaccagtgatctatggtggaagtcaagctgcaggactttggaagctaaatcacaagaaagcttaggccaccatcctaaagaaatctgctttctttcctaggacaa

SEQ ID NO: 23204 - DNA, 201 bp, Bos taurus
caacaaacaacctgaatgactagggatgtgtctggccccaaggacttcagagactaaaataatgttgggtctgctcttgtcgctctgctcgtctctgttcattggccacattgcccctcttacagaagtgcttcctttgtttggtgaaagcaggaggtcatggccacaggctgtcttaggtcagcaacccccatggggaga

SEQ ID NO: 23205 - DNA, 201 bp, Bos taurus
ttgtacggagaaaatgtctagtttccctttactacagtgacccaatatgaagaaggaaaaaaaaagtggtatcactttgggaacaaaagtttcagtgcacgtcgacagcaagactcactgaatgaaagcagatggctaaaacatagtttgggatcgatgcatctatcctatagaaaagcgaggcatagtctttatgttacc

SEQ ID NO: 23206 - DNA, 201 bp, Bos taurus
ataacaaacagcaaaatgtcctggtgggttccagaagaatggcagaagtatgtccttggataccttcagtgagttgcctttttagtttccattacagggagttgaggtgctgaaaatgtggggataaagggtctagtaggacctaaccctggaagaaatgtgcactgtgcagaaattgtttttaaggcatccctattcttt

SEQ ID NO: 23207 - DNA, 201 bp, Bos taurus
atgggagttgttgagagaggtaaaaatccaagtctaacggaccacggtgctatgctgagaagttaaaaacaatacaaaaagtaccatgactaacacagtcagttgagttaacagtcttgtgatggaaaacagtagatcatcaattttattactgtaagtttctagttaaatgagcttttctcaatagcatgactgaacaat

SEQ ID NO: 23208 - DNA, 201 bp, Bos taurus
tccagtttccttttataaggtgtgatgataaaattagatattggcttcactggagcatatagagtctgggacactgagaaatttgctggtaggctttttattaaaaaggaaaaaaagaggtctacgttagataactagtgcgtttgcccttttcctctcagtcactgcttttagctcaatgcaaattgtgttttactgcat

SEQ ID NO: 23209 - DNA, 201 bp, Bos taurus
cccagtcagggaattagatcccacatgctgccactaaagatcctaagtgctgcaactaagacctggtgcagccaaataaataaattaattaattaaaaaagatcccatctcctataagccagagtactgatataatgtagttctaggcaagtaggtggggaaggaagttatgagggagaccttccctcctcttcttgccaa

SEQ ID NO: 23210 - DNA, 201 bp, Bos taurus
cttctcttgttgcagagcatggtctctagggtgcatgcacttaagtagctcccgggctctagagcgttggcttaattgttgtgtctcacgggtttagttgctctggagcatgtggagtcttcccggattagggatggaacctctctgggtctcctgctttggcaggtggacttttcactactgagccaccaaggaagccct

SEQ ID NO: 23211 - DNA, 201 bp, Bos taurus
ttcccttgttggttgaaggatgttcgtaggggctgttaattcttaggctattgtggctttggccagataaaatttacaggtaatgaaacgcaggtgtagatagctggaaatatagacaacagatattagaatggtaagtaaaaggggatttgagtgggcatcaagaccaattgtttctcacttcaaaatcttacagaaaag

SEQ ID NO: 23212 - DNA, 201 bp, Bos taurus
tagtcaagtatcacacaaaagcagaaatgagtgtgctccatgtcttcaccctcagccctagagctggatagggacttgactttgtatcagcaaggcctgcttggtagggagcaatgactacagtctgaggctaaatttattagattaaacagaacacattttcatacatagaaaataattgaatcgaggctacttaactct

SEQ ID NO: 23213 - DNA, 201 bp, Bos taurus
atatttggccccatgtaaatcaaaccataaatttaataagtaaattgttcacctgtaactgtgtttatatttatcatgaaagagaagtgatatgtgagtaccttaaaaaaagttttcttgatgttttgttatcctgtgcacactatcattaccaggagtggatccatcctcctacaaaatagaaaaccccaagtcaaggga

SEQ ID NO: 23214 - DNA, 201 bp, Bos taurus
tgtgtcaaacttctaatgtacaggagctaatactttgcattgttttaagccagtgaatttgtggaatttgtttagaaaaataaaacagatattttattacattcaagtaggatacctgccagggatgtttatagacaaaaggtaacaacaacagcaataaaaacataatcatctctacagatacaaaagaagtgtttgatg

SEQ ID NO: 23215 - DNA, 201 bp, Bos taurus
gaagacaaaacatttctttacatttacttatgggttcatatgtgtagtctacacttgattgctcccaaattatttgaaaagtctcaaaacaacattgaacgtgtttaaaaacacatgttgctgttaacgtcttttgggaaaacaactgtactaagtcaccttgtggtcatcaagaaccaagtcagcttaagtagtaataac

SEQ ID NO: 23216 - DNA, 201 bp, Bos taurus
aaatagtgttttttcctcaaattgtcttttgtaaaacttccacccaacatgtattaatgatgtctcctaaataaggtataccaggagagaaatgaaagcatagctccttgtaaaacaagtctgcctcattctctcccctagctagttagcttttttcctcacccttcatcttcttctgtgattctaaagagaataataaaa

SEQ ID NO: 23217 - DNA, 201 bp, Bos taurus
ataatatcatttatgtatacataatatcatttaaaataaagtctgatataaaatttacactgattgtcccaatcagaaatgtattcatttctcttctctatgctgactttacccagcaaagtctcacatactccatttgttttttttggtttatggtttttttggtatatgttttatccaggaaaattgtgtgttcctcta

SEQ ID NO: 23218 - DNA, 201 bp, Bos taurus
aaagctcaccaatcacaggaaaaaataaaaccctgtagcattaaacaccaatgttcctagactttcttcacatatgagggctacacttaagagaggcaatgcaactctcagttgaactcataaactgaattaagttcctatttgctacattattttgatatattagctaatccttttaaatatgattttgataaggcgtat

SEQ ID NO: 23219 - DNA, 201 bp, Bos taurus
atgccagtggtgctggtactgcagccagtacctcagatccctctgtattgccctggtccaagagagtccttctgcccaagttgcttcactaactgtcacaatcacatgaattcttggattaatttctactcattgtaacctaaagtgtctctctcagctttactcgcctggccctaaccacatagcaagtctttctctgga

SEQ ID NO: 23220 - DNA, 201 bp, Bos taurus
attagtttaagatatttatatgagtgtaagtaaattaagattggcttcaaaaggaaatagaaggttcagttcagttcagttcagtcactcagtcgtgtccggttagtctaagatagtaacactttctggtatgtaaagtgggattatagagtaagagatcaacacttagaagtaggtatttagcagagaggtaattttttc

SEQ ID NO: 23221 - DNA, 201 bp, Bos taurus
gatattcagcactttattagaaaataggttttgtgttagatgcttttgccaaattataggctaatctaagcgtgtaagtattctgagtgtgtttaacgtaggctaggctaagctatgatgttctggaagttacatgaattaagtgcatttttaacatatactattttcaactttcagcgggttaatcaggacataattcca

SEQ ID NO: 23222 - DNA, 201 bp, Bos taurus
taactgcaagcagaaaaagaagcagcagcagcacgtgttaatgcatagtcccatgtatcttctaaatgtgattcacctgtgtagattacgcatatacaacagcaactgaaaaggaatcaaaggaaggagtatgtgcatgagaatctatatacaaatatctttttcctttttacttttcagtttcaacaatagaataaagca

SEQ ID NO: 23223 - DNA, 201 bp, Bos taurus
ctcaaactaactgggccctaacaccccactgcaaaactgcccatataaattcaccaattcagcaataaccccaggccagtgtgtgccctgtactgtttcacttctctcccggctcacacttcataccacagtccctgccactcaccccttctaggacatccaaccaattccactagactccaacacccattctgcttaaat

SEQ ID NO: 23224 - DNA, 201 bp, Bos taurus
tagaaaatctgtcctgtcaaccgacagtgctgtaagaataccaaattgttatattaagccaatacattttgagataacttgccatacagaaagagcaaagcggcacacaatttgatgtgaagagagaagttctgctttaacaaaaataaataccacatggcattgactagcgccatgttgaggctgaaaatgtggaaggaa

SEQ ID NO: 23225 - DNA, 201 bp, Bos taurus
ccctaaataattgtgtaattcactactttagttcatgcaggtgtctgctgagatagtcatctcaccagagtgatttccttcctcactctatcacttcataattctgtactctccttatcctaatttattatttttttccatatacagaccatatttaacaaaaatatgaagataatgattataaaaattagaagataatat

SEQ ID NO: 23226 - DNA, 201 bp, Bos taurus
gatgtttggagcttgagtgaatggatatactatgtttctgaccaaattgagcatttccagggacttaaaagtcataattttcagtttgctaaaatgtggtgtcctggacagcatcaactccatcttgggtttagaaagtcatttcagcatagttgataatctgaagagaggtttgcatatatacatatgaagaatggaata

SEQ ID NO: 23227 - DNA, 201 bp, Bos taurus
tggtagaaaacactggtgcctaatagccatcagttcagaccacaaggctcctcactgtccatgtcttatctattgatgaatctcaaaatgagatatcaggcagcaacagaagtaaaatctgagattatgctattaatcaaaaactctccaacatatactttcaagttgaaagacaacagatattttccaacattgaactaa

SEQ ID NO: 23228 - DNA, 201 bp, Bos taurus
tcctactccaaggggcctatcttctcagcctagagattgaacctacctctcttgcatctcctgtttggcaggtagatttttttttttttttttaccagtaacaccacctggcctttactcatattggtgcttgatttgaatggattcatccagtttcttaccagtagtttcatatatcattagctctaggtaatgttcagt

SEQ ID NO: 23229 - DNA, 201 bp, Bos taurus
aaatgtcattttttttttctggttttctgctttgttgaactactttttgaatttgtggaagaacatcaacaaagtaggcagtccttgaagcaaaacaactgacaaatagctcctcttagcagctaacaaaggcaccgttgtgccaccatacagcagttggaaagtttcatgaagaagagaagtggagagccaaataattga

SEQ ID NO: 23230 - DNA, 201 bp, Bos taurus
ttcattcccctaattctatctttgctactcatttgcctacaaattacaaatttccttaatcagaattttgtcacctcacatttccttttaatatataacactgatgcctggtttctcacctaggctatgcatactttgaaatcaatctacgttttacacttcttcctagtaggttcacagtaaatattaattagttaattt

SEQ ID NO: 23231 - DNA, 201 bp, Bos taurus
cccaaatgtcactcagaggtagctgcctcttcaggcaacatggagttgggtgacagaggagctgttctcactctttggtcaattattacatagcatctatcactatacttgtcttacatattgtctctcttctccagagaggaaaaactgccttacgacagtgaccagacttatttatctttctgtgctgcattttgcttg

SEQ ID NO: 23232 - DNA, 201 bp, Bos taurus
tcagaaaaatgttctcagttttaccaacactgctgataacactggtttcaaacatactggggagaaaatgtgatcagagaaagctcagttcactctgcaaaataagcttaacattattcctaaaattcaacaggacttcaagttgaagccatgttgctttaacttgtcttatagttctttgtcctcatatgagcagtgagg

SEQ ID NO: 23233 - DNA, 201 bp, Bos taurus
atgagtactctgagttcatctttaatctttgtcataatctccctttatctcatttgagtcactgagtatgtttgtgaggagttcagttccttggcaccagaaagtctttcctacagcaggaaggaaaatggcaacaaaagtccaaaagagaaaatccatcctattaagagaaaatggctttaccagagcagtattaggtta

SEQ ID NO: 23234 - DNA, 201 bp, Bos taurus
atcctgaagtaccttagtttggttggcaaattatattgccatcttagatctaggccactttctgctacagagtcccctcattacaactttgtgactactatagaacaattgttcctctcctcagagcacttttcctcctcttcagtgtcactggaacattcagttattcagctcagccatagtgatactgactgaattctt

SEQ ID NO: 23235 - DNA, 201 bp, Bos taurus
taattgctctctattataatgccattctgataacaaaacttcattcaataattgaataataattttcaagtgcagtactcataaggggtagtgcagaaaacacacagacaatgcatgcttcctcaacttcaaggtgttcattagtgagaaagatactaaccaagcttactccattgaaagcagaattatgtaaatggtatg

SEQ ID NO: 23236 - DNA, 201 bp, Bos taurus
aaaagtaagatgatgtaagcattgatagagtgagaagagaaagggattatttggaagcacgggcaagagtgtgatctttgggcccaggcaaacttgaattcgaacacttttcatttctagggtaagttactcttaattcagttcagtttctcagtcgtgtctgactctgcgaccccatgaattgcagcacgccaggcctcc

SEQ ID NO: 23237 - DNA, 201 bp, Bos taurus
gaatattttatcagactgataatgtatatggaacaaagagaatgaaaatacccaagattgctcactggaaaaaggaaaaataaaaataatagtgaaagattttttaattctgtttaggtctagttctacctcagaacatctctccaccttttttgtgccacatttaagtgggaaagtgaagatgtatgtcagatttatttt

SEQ ID NO: 23238 - DNA, 201 bp, Bos taurus
aaatgtaaaagcctggaaagaaatgagtattcgctcatgaattacaaagtgccataagttatccttaaaacaggctaatttgtaagtatattcttggttaaaatgaagttggttgcctctcctaaaatatactagggttgtttaaaaaacgttcttcagttataattctgtattttatctcagtaatatgttcagctcgtg

SEQ ID NO: 23239 - DNA, 201 bp, Bos taurus
tatctcctaccatcatgtccatattacagaattacatagcaactttagttttctaaaaaataccttcatttccactaccttatgtgattgtagaacactccatgtacagtgaccgctgaaatgaaaaaaaaaaaaaaaaaaaatgatgataggcatatttaaacaattttccaaaaactacatctgtagtaattgggagag

SEQ ID NO: 23240 - DNA, 201 bp, Bos taurus
gaaggcagggtgctacaagatgagggaaacatcaatgtcaaagcatgggggtgagatggatggggtatttgggaattgcaattaaagtctgacttgagcattgagtttaagaataagaaatgatactgataaggcagaacttgttggcaggatccaagccattataaaatttcctgagtaaagacattaaaggaaatggtt

SEQ ID NO: 23241 - DNA, 201 bp, Bos taurus
ggtttgtaatattttttagtaaacaaattcatatgggtataaaaaataatacaccaattcatggctgtttactctttaaaaatgcttcattaaatctattaatatattccttcttcttatatttcaagatgtttgttacaaactaggttactagcattttgccaactcgctcaaaatgttgaatattttttcaaatatttg

SEQ ID NO: 23242 - DNA, 201 bp, Bos taurus
tgaagatatttatattcaggtaaattccattagtttaatactgcttttcaaaagaaaaggtttaagatgcatactgaaattaaacctgaaatactgcatatagagcaatgtttttttgtgagccacgttgtgtttgacatacaagttgcaaaacctggttggtcgatatatttttattcagttcaggcccaccagattatt

SEQ ID NO: 23243 - DNA, 201 bp, Bos taurus
acattgcaggtagattctttaccgtctgagtcaaagagacccatgttgatgatagagatctaaaagaagcctagatctttgatgaatcatagaaattgacattctcacattttaaaagtgatatcagtacagttcagttcactagttcagtcatgtccaactttgtttaccccatggactgcagcacaccaggcttcccta

SEQ ID NO: 23244 - DNA, 201 bp, Bos taurus
atgcatccactttaagtagcaatcaacccatattcttctaaagttttattaagatacagggtacactgctgacaaaatgcaaggggctttggttcagttcagttcagtcactaagttgtgtccggctctttgtgacccatggactgcagcacaccaggcttccctgttcatcaccaactcctggaccttactcaaactcat

SEQ ID NO: 23245 - DNA, 201 bp, Bos taurus
ccaacagccctacttgaagcacaatagggaattacagtcagctgaaaggcagcctaagttcagattgttaattagtgagagtaaaaaaattactaataaataagagaaaggaacaaagggatagatagaatggtgatagaagcaaatttcacctaatttctctgagttacccctcatttctatttaaacagttgaacaaat

SEQ ID NO: 23246 - DNA, 201 bp, Bos taurus
tgcatgtgtatctctttaatttgtgagaaatggattgtggcatatcctgaaatgaaatctcaagacatttattgtaagtaattattataatttcctcagaaggcgaagggaaaaaaaggactacagcagtttcatcagtctatgtcaagccagactatgaaacaagttgagttcatgttgtttattaattattaaaattca

SEQ ID NO: 23247 - DNA, 201 bp, Bos taurus
cactcaccttcttatgatcctgaaaatatattcagtaggactacaaatataatgacatacctagtgactgaatttggtgatggctaggattatgctctaggctgcagtgttgtgggtgctgggtgggttggggacgtgattaaattccttgagtagatctaaaagaattaaggagtcatgtgggaatttgagagagagaga

SEQ ID NO: 23248 - DNA, 201 bp, Bos taurus
acacaaaggtttaaatttgtttcctaactcttgttacctctgcataaatacttactgtgcagagataagaatgtgattgttttttctacacaataaatggagttcattgaatttaaatgacatgtttagattagtattttaaagtcctaattcataattttctaatgtggaagctaatgaggagacaaattcatgggtagt

SEQ ID NO: 23249 - DNA, 201 bp, Bos taurus
cacctggggatccagttaatttgcggcatagatggagcactaactttgcagtgttgagaagctagtgttgggcagctgcagccctgacaactctgcaggagctggggcccctctgaacctctcggttcttcccaggaccccatgacctggtgcggaggcctgcgggtaggtgcccccagcgcatgggagacttggtgggga

SEQ ID NO: 23250 - DNA, 201 bp, Bos taurus
atatgggctagtagttgtgtcttttgtttttttaatcagcatgtgctggcctcaaaaaattatatggaaagtgtcctcctccaagagtttttgaagaattcgcataatttcttcttaaatctttgttaaattgtagtagtgaagtcagctgggctttcattcttttattatgaggaagtttctgatttttcagatgcagaa

SEQ ID NO: 23251 - DNA, 201 bp, Bos taurus
aaaaatgcatattctcaatgaaattgctatttttgtactcaaaactcagcaaaaattgttttgagattttttttttctcatttcaaaatatttttcttatatatgttaattagaaattgaagcaaatacaagtcttagtttaagttcatgtgaaaattcaagatatttgttaaattccaacaaaatttataaagcagtcta

SEQ ID NO: 23252 - DNA, 201 bp, Bos taurus
caatgattgaacaaggagatacccaagggcctagctctctgtgtccactgaagcaccccttttatgggcagcctttgctctgaagcacccagcagcactaacagggccttttgggttgctttcatagtctgccaccttcatctggccttccctgttctttctgttttatttaaaattgttgcttcctttaaagcttttgca

SEQ ID NO: 23253 - DNA, 201 bp, Bos taurus
agaatgtttttaagatacattttaacctggagttaaaaaatgcttgaaatgtaattctgtttttataataccaaaataaaaattttatttgttatattaacatcacatattttagttaattacactaaaagtatagctgaagagaattttttttttcttttttggacaggggtggtagtggtgcttaaaactatgattatc

SEQ ID NO: 23254 - DNA, 201 bp, Bos taurus
ttgggtatagaggacagccattttgggggacttttgctacctacacctcttagcatttccacattgctgggtcctccagcatccattctgggatgtaggaggcagaaagaaatccgtagaatgtaataccatgtttttttttttttcaggttacatgaaccctagctggcctgccctagaagaagaaaaaaagttcaaaca

SEQ ID NO: 23255 - DNA, 201 bp, Bos taurus
cagaacatactcaggaagaaatggaatttatattattctaggcttattgcttggaaatggttttgaaaagccagaatccttctgtgtgtgcctctgggaaattctgtttctcagttacggtaggatttagaacagagttttttcactcagacattagggaaaagactagtgttctcattccatttctaatagaacaacaaa

SEQ ID NO: 23256 - DNA, 201 bp, Bos taurus
tatgagggctcctgtgtcatgtaagtcttatataaatgtgtatgcttttgtcctgttaatctgttttatgacagtttaattctcaaaccaggccaagaaagtctaagaggatttttccttacaatagaatatgcttaagactgatttaatgatcataaatatattgggcctttgtgatttaattcctattagcatctgctt

SEQ ID NO: 23257 - DNA, 201 bp, Bos taurus
cctctttgctcacgagattccaaattccattactatataactgttaccagaagtggaggtttggctgctcacccctcaaaagtcaataagaagcaaggccagtggaaaggaaagtgaaagtcactcagtcatgtctgactctttgtgaccccatggactacatagtccatggaattctccaggccagaatactggagtggg

SEQ ID NO: 23258 - DNA, 201 bp, Bos taurus
ccaattactctttagacattttagaagttagccttgagtggctgcagtgtaagttcatcctgacaagaaacttgatctatctgctaactccttccttgtatggcttctattgcttcactttcagccatgagaattgttaaataaactgtcgttactgacccttttaaagagctcatccattgcctggctgcgcattgatga

SEQ ID NO: 23259 - DNA, 201 bp, Bos taurus
agcaagacaaaggtcatgagagtcatcttaaaattctacctgtcccatctaccaattttttattcaatgatttatcgtgtgaccagttcttggaaaagctaagagtcaactatattgaagttaaaaatttagaacaattgactttcatgatggatatctgattagatgactataagattaacttcattatcaactgactta

SEQ ID NO: 23260 - DNA, 201 bp, Bos taurus
atgacttaaaacatatctataaattagatagtcattaaaagaaatcatctaggcatgagagatatcctttcctaggtcccatggtgtgaaagaatcttgtatgctaggatgactgaaatctatagttatggtcagtaataacgtctggcccaatttcttacaatatccatacaagaccatttcaaaggattaataaagtaa

SEQ ID NO: 23261 - DNA, 201 bp, Bos taurus
gaagcagtattgtatctgatggacttaattactctggaagcatgggtcataccatactgaatgtagaggtgacaaaaatgcttggttattaaaagtataatggcagaattgtatttcacatgcagaaagggaaaatattactatttataagcagatatatttttagtagtttgagatttattttccagttgaattaaatgc

SEQ ID NO: 23262 - DNA, 201 bp, Bos taurus
agagtaatttattcatcttttattttagaccatctgaccagattgtatattcattgccctttgctttggattaatcagctgtaaccaaggtgatataggacaatgtatggcaaaaaacaaaaacaaaacgtggccaccaaaagaattgtgcataagatactttagcattattttgaaggtaggcatctgaataaacttacc

SEQ ID NO: 23263 - DNA, 201 bp, Bos taurus
tacttcatttacaaacaaacacacagaaagtttctcaaaaatacttgttgaaacttgagttggatacataagtaaaatctaattgtctttcagatttactcatgtgatcacttcagtggtggtgctggtggtttagtagctcagttgtgtacaactctttgagacccatgcagcctgccaatctcctctgggatttcctct

SEQ ID NO: 23264 - DNA, 201 bp, Bos taurus
aggaattaggagtgtgggaaaaccacaatggtaagagggtgagtaactgaaaataaggatgaagaactgataggtgctatattgcatagagagttggcctatatgctgagtgggatggacattcactggaagattttgatagagaagtaatatggtttgatttgaatttttaaggttcactttgtttgtagggggctacac

SEQ ID NO: 23265 - DNA, 201 bp, Bos taurus
ttaggggcatggactcctgcctgttgttatttgaacttccacctcaatccacattctgaggcaaatacaaggacaccaaggaaatgagctgaaaatcactaatcagcaacacgagtggtatgtccaatgtaaaaccttacatagagggtaagtttctaatattaaatctcaaggaagaatacagaccaagtaatagttctg

SEQ ID NO: 23266 - DNA, 201 bp, Bos taurus
aaaagcgttgagatatgagctttaaaattggaattatctttaatggactcctctaaacccctgaacatgtaaagagattgatataacatgaatttcacaaccttgtgtcaactatgctttcctattgatagccatgttaatttgcctgacagtatttcagtgacttttattttggacgtttattatcctgtttttcttttt

SEQ ID NO: 23267 - DNA, 201 bp, Bos taurus
aattattatgtcatccaaggacacaataaccttattataaaacttattttcaatgtctattttacagatattctcacgattagaaaatttttcatgtttccgtgctaattcattatagcatcatcttttaacccaatcttaaaaatacctctttttctgatattttaaaatatattgtatctcaatatgtagcttcatttc

SEQ ID NO: 23268 - DNA, 201 bp, Bos taurus
gagatgggaaggataaaggctttttcaccccagcactgagcacaatactactttgccaagggtagaaacccactagttggtggactgatggaagaatgattgaggctacattaaatacttgtcatgcttcttcctgacattactattttgaggctaataatatgaagcacacataaatagaagaagaaaatgatattgatt

SEQ ID NO: 23269 - DNA, 201 bp, Bos taurus
atttatcaaataccacattcttggtgaggactcacatagacctatttgagatttcatcctgtttattctctatcctaactggctgcttttaaaaatatctccatattatttatcacaatttaacatactgtgtattatgcatatttattttctttgttttctacctctctcctcaagtaatgttaacccacacaaatgtat

SEQ ID NO: 23270 - DNA, 201 bp, Bos taurus
gaactataacaaggcttgaacttgtagccactatgacaaagacgagtataaacatttgacatctgccagaagtttactttgtcccacaagtaaaagataccttttgtgaggatttgttctctgtttacaaggctattggaaagattacaccatagttcttcctttgccagttatttataataactgaaatttaatatcatc

SEQ ID NO: 23271 - DNA, 201 bp, Bos taurus
taaattgctactgattcataaaatttagcatctatactgcaactggcaggattcataatatactacccaaactgtggcatcctggcataaagaaatttgaaaaatggcaggtacaggaaggattttctgatcttcccttgaaatagatcataaagccttcatgtgagaggtacccttcttattccccaggaaaggagcatc

SEQ ID NO: 23272 - DNA, 201 bp, Bos taurus
tttctacttagttttgatgctttaacaatgctattaatacttggatacccattctgtaggaactctctcccaaagaacttcatatgtgttaggcagtgatgagcttggattaaaattagtgttctgttttcttattttaatatacatcagtaatattttcattttagacattacaatttattttgcactgttaaatataca

SEQ ID NO: 23273 - DNA, 201 bp, Bos taurus
acatttaaatatatacagtgtcttctatatctaatgcacacctctcaagtaatagtattagctggcatttctgaaatttaatggtgagtttctatatgtcacgcactagactaagagctgttcattcttatttccaaaacaaaacacaatagccttatgacaaggattctctttttatcacctgtttagaggcaagaaaac

SEQ ID NO: 23274 - DNA, 201 bp, Bos taurus
aatcaataaactgaaatataatcaggttggagaacatgttgaagtacatcagtgcagggagagaaaagaagaaaatggccacatcagattgaattatttgggaaagttgaagggcaatgtagtttagcctctgctgtattacttagtatgggagaaatgagctccaccacagggcttgagggccaggggtctggacaacaa

SEQ ID NO: 23275 - DNA, 201 bp, Bos taurus
gagatgatcatgattactcaggtgggcccaatgtaatcacaaagttcctttataaacagaaggcaggaggcagaggaggaggtgcaaagagagctagcaaagcaaaaagaattggcctgaagaggttttggaggtgaaagaaaaaggttctgaggcaagaaatctaggttgcctctagaagctttaaagggcaaggaatgc

SEQ ID NO: 23276 - DNA, 201 bp, Bos taurus
tggaatagacacttgaagtccattctcttgttttcataagatttcatttgaacttatttgtgctacttgatctaaatccacaaagaaaggaaaaaaaaaaacttaaaaattcattcagcttcacattcatgaattggtgcaactgagcaaaggaatagtaacttgtgtaactgccttttccctccttattcatggctttta

SEQ ID NO: 23277 - DNA, 201 bp, Bos taurus
tcctgtatggccagttatatctaaccatatagttttgaatatattggagaatatatttctaagcaggacagaaacttggaaaactaaaaatatctgaggatcccatgtttgtaaaagaaaaaaaaaagaaacgtccttgaatattgagtaataaacttcttattgcttaatattggaaggatgactcagaaacactgaact

SEQ ID NO: 23278 - DNA, 201 bp, Bos taurus
gactacaacctggtgagtgtaatacacagaggagtgagaaaggaaaggtccccttggaagattgctgagttgatcagactggctgtgtagcagaaggtgcgtctcttgggatagcatgctcattaattttccactgtccatctttccccaactcaattttggtacccctctcaggggggtactgccttttgatcatttctc

SEQ ID NO: 23279 - DNA, 201 bp, Bos taurus
cttttctttcaattcttaataatttttatcttgaaatgtgtaaaaaataacagacaagtacagtgagaaacataaagaacccttgtggagtcttccctggggatccaggggttaagactcctcacttccactgcaggggtcacaggttcaatcctcggtcggggaactaagatactgcctcaaagaaaagacaagaaaaga

SEQ ID NO: 23280 - DNA, 201 bp, Bos taurus
cactgctaagctctcccatccccaaacaccccccttctttgaggttccatgctaatacctgctagctttcagtggttctctgcatgcagccaggccggtcatgggatgaaatgccactctacaagggagtttataattccagcacatctcgagtagcgggaacaaattctagttgtgtctatctccttggtaacttgaaca

SEQ ID NO: 23281 - DNA, 201 bp, Bos taurus
tcactcattttcatggacttctacatgggaatagaatatattacaacgtgatgtagttcagaaaatacctcacactcaaaacccttatcaaaagaaacaagttgtagtaccgtttctgttatatggggaaaaaaagaaaaaaataaaaagagagaaaccatttaagatatgcatttatgtgctttataactaggtcttccc

SEQ ID NO: 23282 - DNA, 201 bp, Bos taurus
ctatttgacaaaacactacgtaggaatatcatgcctcaaggtagaatagaataaaatcgcctcttaaaaaattagaatccttgttaattacttgtagttggtagagaccaaaagaagtgcacagagtcctgagagttaaatcatcattgtctaaagtagacttgatttttcttggaataatattataggctcttccacatc

SEQ ID NO: 23283 - DNA, 201 bp, Bos taurus
ggaaataagccacacttttctgaaatgaagagatcaagcaattattcagtaactattaagtgctgactttttaaaagcaaaaaactgaggctgggtcacatgaggaatatttaagaacctctgtatggtttagaaacctagaaagagtttctgccataagtagcttagaatcaattttagaactagggcaaatatacaaaa

SEQ ID NO: 23284 - DNA, 201 bp, Bos taurus
tcctggcctgggtctgctccctccatcctgcccacagtgatgccactccagacaagcagccttccctccctggtttgcaggtcccatgtcctgggtaatctagactcattctctggaccatcctgtcatccaacagcagcctctcctgaaatctgctcaggtctcttggcacacactgagcatctttggccctatacagcc

SEQ ID NO: 23285 - DNA, 201 bp, Bos taurus
attttctcgataaccttagccatactcccttccatagacatttcttcctaagtaacattagatggaaaatgaatgcaagtttggcctttattagtctctataacattcccagtcgcatccaggaagtaaatcttacttcatttgcactgaaaactctctcaatgtgaaaatgaaaaattacagggccccggtgaccacggg

SEQ ID NO: 23286 - DNA, 201 bp, Bos taurus
ctgcattggcaggcagactctttacccctgggccacttgggaagctcaggtgacccacaggtacattcaaacatggaaagcactggccccaactacagacgaatgaatggacagatgggggagaagaaacgtgacaagttaggaaggcttcttggaggaggcctctagcgatgaaagcagctgccatttgggaagaaatga

SEQ ID NO: 23287 - DNA, 201 bp, Bos taurus
cttgacttcaattgttttgcctttacatgtatgtttctagtttcttctttcttcctcccatttgcaagttaagtggaagacatgcttattgaactgagagagaaatcgttttttttttggttttttgctttttctccctcaacgtgacatcatgaactgcttttcattttggatgggtgggcattaagtagtctgtctaag

SEQ ID NO: 23288 - DNA, 201 bp, Bos taurus
ccatggggtcacaagagttgaacatgacttagcaaataaaccatcatactagtcacccatcagcctcgcctaagcctccagtccgggggccaggtagtgctaacaaagccagaaaggacagccctccaagtgacacttcacccgcataatcacctggactgtcggtggcaccaacctcccaaggaggccaatgttgtcctt

SEQ ID NO: 23289 - DNA, 201 bp, Bos taurus
gttggccaacacccactgcctgcagtgctcatgctctctccagcctgggtggttgcccctctgcttcattagagctgagctaaccgtatttattggcatcagcttttcattctcaaggataaacaccttggaatgagaatcaggaatctgggctttccagacttgctcttaatagcttggatgcagccaaagatcagcttc

SEQ ID NO: 23290 - DNA, 201 bp, Bos taurus
caatgatgtggctgctgctgaatcacagctgtggggggcggggggagagaaaaatctcatctttactttctggattcgtctttctctttgataatggcccgttttgagccataaagctattataatagtagggatcacgtctctgggatttttgcccatgccactcattcagatgtcattggaagagccaccctggtgctt

SEQ ID NO: 23291 - DNA, 201 bp, Bos taurus
ataacagaataatatatatatatataatagaataataatataataacagaataaaccagtctttgagaattttctgggaaagttagaaatgagtgaggaggtaacattttgaatacattcagattaaagcagaggcttcgtactgtctcaaggagggaggagtttaggggagttgattctgtctttgacagactttcagca

SEQ ID NO: 23292 - DNA, 201 bp, Bos taurus
tatgggtacagacagctgattcacacaaactaacacagcactgtaaaagcaactatatccaataaagactaattttaaaaaatgcagataacatgaccatcgggtttatctaccaggattaagtaacagaattcacgtgatgtgcttagcacagtgcttaggacacagtaagtcttgaataaatggaaggttttttaaaaa

SEQ ID NO: 23293 - DNA, 201 bp, Bos taurus
agcctgtgttagtgcttccagctcacactgtggccactgcccccgtgtccctcttcctcaccatggactgtcttcacctgcccattcctccctgagaggacctgtaacttcactgccatggcctgacctggaagcagaccctgagcagcagcactgtggccaactgatggctttctcttaactcagggtctccagatgtta

SEQ ID NO: 23294 - DNA, 201 bp, Bos taurus
atctgttccagaatgatgaattagctgggtgtgcaattctggattattgcttctgtgttaatccactgtcttatgatccgtttgttgttgctgttatgtccgctgtcaggctaattgttatttgtaaatagtctcgtcttttctctctggccgcttttaagaccctttggagttctgcagtttcacaaagcctaggtgtaa

SEQ ID NO: 23295 - DNA, 201 bp, Bos taurus
acagagaaagacaaatactttatgttgtcacttatatgtggaatctaaaaaaatgcaacaaactggtgaatataacaaagcagaaacagatttactgatatagagaacaaaccagtggttaccagtgagaagagggaaaagggttagggttagataggggtaagaggttaagaggtaagaggttaagagggtaagaggtta

SEQ ID NO: 23296 - DNA, 201 bp, Bos taurus
gcattggcaggtggattctttaccactgagccacgaaaaaaaacccaggcccagttctttaaactgtgctatttactgtaattcacccaccatacaattcgctcatgatttatgcagcaatcagtttctgaatattttcatcatctccaaaagaagtctcaaacgtgtttgcagcctctccccatccctccatccccagcc

SEQ ID NO: 23297 - DNA, 201 bp, Bos taurus
aaaaaagaaagctctctgtgtaatacatatatttatgcaaaaacaaagcgagtcataaagtgtatccagctgttttgtcactttccatttaaatacaattgttgggactgtgttaaattttttttcttgaaatttcctttcaaactctattttgaccaattgcttttatgttttataacattatgtgattttttaaaaacg

SEQ ID NO: 23298 - DNA, 201 bp, Bos taurus
ggcggaagaccagaggtcgtggatctggccccaagtgtccccccggccactcctcccccatgacacctgccactgttcaaagttttgtgaataaagtccacaacacccatggtggctcccagcagtattgattctgtttggaagaaatgggaagattaaagcaagtttattctgaaagaaagaaagaaaatgaagtcgttc

SEQ ID NO: 23299 - DNA, 201 bp, Bos taurus
tgggttgcccaggtatttggccaaacattattctgggtattcctctaagggtgtttttgggtgaggttaacacttaaatcagtagactgccctccctatacggtgggcctcgcccaatctgttaaaggccagaatagtacaaaaggctgaccctcaacctgagtaagaggggtagtcttcctgcctgccagctctgagctg

SEQ ID NO: 23300 - DNA, 201 bp, Bos taurus
tgccacgaggtatacaggtacctatacccaggaaaacacagaagctgctgtttaagacacaggcacaagtctcctcgtccccagccaagtgactgaggccagcagggtcccccgggggcagcaggggagcccagatggcaccctatgtccgcacgttcatcctctcaccagggcctgaggaggttgccccagtctctgcca

SEQ ID NO: 23301 - DNA, 201 bp, Bos taurus
tttccaggtaagagtactggagtggggtgccattgccttctccgagtcagaaaactgggcgttgttattccctgctctctcatctatttccagcgtgcaacagtcaagtaaattctagctccagagaaaatccctctggtctgacctgttccctccatgacctccttcagagaaaatttgtctggatgctcagagctttca

SEQ ID NO: 23302 - DNA, 201 bp, Bos taurus
gaaggtgcctggggctgtcctcagggcatgcatgccagggctgggagaggggctccacacggtactaagagtaaggtcagggagggctgggtcatctgccgcctcagctattcagccacagacgccttggcacacaggtgtcgcgcgttgagtcccctcgcccccaaagcacaccaccttgagctgctgctcccactggca

SEQ ID NO: 23303 - DNA, 201 bp, Bos taurus
tgtcgggggcgacctgtgctcagcatctccttgattccaaaccagattcagagtcgctggacaggaaactccagcagatggaagctgcggccagcgcccccgcccagtgccagcgccaggcgaggctctcgtgtcaccagctccaggttatgaatcgtgatttgccgaacagatgaatttgttcctgtcgctgggtgcaaa

SEQ ID NO: 23304 - DNA, 201 bp, Bos taurus
accgcactgcccaccccccaacttcagttttatacttcctgaggttattttcaatttgaggctctttttttaatatctgggcacatcctttatgggcctttctctttcctatctttcctctaattcttcctcacttgcttcttctcatttgtgaaatgaatgattgccatcatggctattaaatataagggtgctagtgtt

SEQ ID NO: 23305 - DNA, 201 bp, Bos taurus
cttgactagacggaccttttttggcaaagtaatttaggtttcattataatgagcttgaatggtaaattcatgaagtcaaaatagtctgagtaagaatattgtgtcatatcacatctctattgaactttgatactgtaaaacagtggcatggcacatgggcagtttgtcaaaatattaaattagtattggtcgcacgtaagt

SEQ ID NO: 23306 - DNA, 201 bp, Bos taurus
acggccagcgatggaggaagcagctggtgccgtgggcctcccatcaggaccagagaggggtgtgagcagcatctgccagctgcagctcttcacagggcccgaggatggttcagcatcccacggcctttcagaggagacagtaagagaagccaactcagagaagggcatccaagaaggtcctgagagcaagagggtctggga

SEQ ID NO: 23307 - DNA, 201 bp, Bos taurus
atattcacccttgacctaccccttctgagtcattattaagactgctgaactgggcgttttcctcatagtaaatattacatttcacttggcttcatcagccgattactcagataacctttttgggcagtctatacctcaaaggcagatgagaaaacaggggtcagataagcgagttgctcaaagttatagagtcccctaaca

SEQ ID NO: 23308 - DNA, 201 bp, Bos taurus
atgacagtctgttctgggtttgtggaaagatgaatgtgagaggccaaggaagcctttataaagtcaacagaggtggcagctcttccttcctaccatctgcggaaaaccaaactggccagagagaccatgagcgttatgagggaacatcccaagttcaatgccatttatggctcagttgtccaactgcttgtgagcccatag

SEQ ID NO: 23309 - DNA, 201 bp, Bos taurus
caccagggaagtccccagtcttcgactggaaggcctttgcatatagcaaatgtggtgtctagtttaatgtatgtagtttgtccagcacttacttgatacatagattttagaattggaaggggccttagggatcgcttgtattttgttttagtggctcttgggcagaggtctgatttgctgcagacgtgttcagtgacaatg

SEQ ID NO: 23310 - DNA, 201 bp, Bos taurus
cttgcaagtcctagccagttttgccaccattccacatggcttgtcttcaatggttctagggctcttagtatcctcactatctactccgccaaaatgtcacgtcttctaggaactccaggagggtccaatcagcctgtttgtgttttgatttttttcccacatctgatttttctttcattctatctggctttagcaatagct

SEQ ID NO: 23311 - DNA, 201 bp, Bos taurus
tgctacagatttcaaagaacttgtactcaaattcccatcttctgttttcatttgcttttctttctgcactatcgttttgcatcctaaaaataaataaaaggctccaattataaatgtggggcttcattaataaaacttcccactacaaaagaaaacaataacataccagaatcagtgatttagtatgaccaaaattccaga

SEQ ID NO: 23312 - DNA, 201 bp, Bos taurus
cttggatggccaaagatgaagagccctggtggagcctgtgggggacggatggagagccaaactcgtcagaggcagctacgaaagccaggaggactggagatcgtgaccaggcccagctcaacccaactgccactgcaagagcaagtcaacattgtaggaaaacaaaaaatgtttaaaaattagcacttaaaatggcttagg

SEQ ID NO: 23313 - DNA, 201 bp, Bos taurus
tttttgtaatgagcaaatttggaatatattaagatatgaagaaacttcttttcactgggcataataaatcaaattaccatgagaaaagagaatataaatttttttaatccacttagcttattttaccaaacatggtttcaagatggtcactagttttcccccctttacttgactgtgacatttgtctaattttaggggcaa

SEQ ID NO: 23314 - DNA, 201 bp, Bos taurus
atttaaaaccacattttcaggcatctggaaatgatcctgggaacacgcagacaatggaggaacagcagttgctgaggccaagtcctgggtgaatttggttgagaggcagggactccttcctgctcagcccctgattttgaagcggagggtctgcccggccgggcaccgctgagaccccgaggccctgcccgcgctgggaag

SEQ ID NO: 23315 - DNA, 201 bp, Bos taurus
agaggtgcagaagggatagaaacaaaagtccttgtcacgaccatacttggttcatctttatctttgtgtacttttccccctggctctttaataacattcaacacaaatttctttgtactaaggacatctggaattggtgaaatcgctgattttttgtgatgggtccgtagcctcatatctacatttttcacatcaagcttt

SEQ ID NO: 23316 - DNA, 201 bp, Bos taurus
ttcaatgaccaccatgatacacttctcttacaattcttcttggagtaaaatgagacaatgcatgtgaaaccactggggccagcatccggctcgtgacctgcattccgtccatgtcatctggggacactagaataaacgaccaactaacccacgcagcttcaggttcagatgtgtgtggcagaggcctccgccacattgtta

SEQ ID NO: 23317 - DNA, 201 bp, Bos taurus
ttggtaagaaaaacaagttcaatctataaattcaattaagtaattgataagaagttaattacgcagttcctatggtcaaaggctgtctcaaatcagaacttttggtgacataaattagcagaaatttccaacttaatattccagaacctccaattgtcagttgcattcaaaacatgtcccatttttgggagcaaatcagat

SEQ ID NO: 23318 - DNA, 201 bp, Bos taurus
gagctgcacatgactgaagcaacttagcatgcatacatgcatggacatgtaaaactcttccaagtgcattcagttccaattcacttctaatgttgttgccaggacttgtatatatgtttctataactcacacttattatccattgccctgcatgaaaatctcttatcatgccctaaatatcgacagtggccttttcaatgg

SEQ ID NO: 23319 - DNA, 201 bp, Bos taurus
catcgtcctctgaagctgtcacattgtgtgaggtgctaaatggagatgaaggtgggtgaacatattttcacagcaggttaagtacatagagttctgggaatagggagcatgcttaaaagaagccttggcaatctatcgatctgtctatccaggcatctattgttcccggattaccgtgtgtacccagaacacctgaaagga

SEQ ID NO: 23320 - DNA, 201 bp, Bos taurus
tatgtacatgtgaaagttgttattcaaaatgagaatggatgaccttaatttttagacatcaagtacatctgaaaatacgtcatgcattctcaacttcagttagcagttcagttgttctataactgtaattcttctctggttgttttgaagactaaagcctacagacgcagtcctgtaaaaatcattggggaaaatgtgttt

SEQ ID NO: 23321 - DNA, 201 bp, Bos taurus
gtgggctacagtccatggggtcacaaggagtcagacacgactgggcgaattaacactaggcactgtcctcctctgagttttttctgtaactatctcctcttctcttctgtttagtatgaatcttgttcagagactagtgaatctttggggacacccttgcctctcactgaataaatattttactttcagaattggatattt

SEQ ID NO: 23322 - DNA, 201 bp, Bos taurus
tctcacaattcagtacgtcacaagttccatataggccccaacaattaagtcaaaggtatgggcaggctcgctcctcctggaagagagagcttgtgcacttgctctcccagcttctcagggccacctgctccccgtgacgcccagcctcttcctccatcttgaaagtcagccatgttgagtctctcaccgcccttccgccat

SEQ ID NO: 23323 - DNA, 201 bp, Bos taurus
tactcagcctcatctgaccctaaaaggtccgatttaatccagaaaagaatgaccttgacgttatgagattctattatctctatttccccactttttggtgaaccttgtaaatgaatgccactcacttctattatattttaaaaagacttccaccaaggaaaagtgagtcagttgaggaaaaagaaaagaaaaaaacaagaa

SEQ ID NO: 23324 - DNA, 201 bp, Bos taurus
aacacgtaaataaacgtgttttccttttgacaaactaaagcttgtatctatcacaccacaggttttcccaaaacccactagccccacactcacttctgtaaatgtgaagtcagtttcccaccaaccggcagacctgcttcaggtcagccttatgaatggactctctatgccattcactcagccccttgcctttctggagca

SEQ ID NO: 23325 - DNA, 201 bp, Bos taurus
cagcttcaattacactgttttgcatccataaataagcaatatggtcatgttattgtaccacgggatattttgatcatcacattacaaaaatgaaaactcccccaggtcagaattgcctcatttcacagactccagagcactctgccttctagagaggtttgacaagtgattggaatttgttaattgatcgatcgttctgcc

SEQ ID NO: 23326 - DNA, 201 bp, Bos taurus
tccagaaggctgtggatcagccctagagaaatcagcctaaagcgccgccagcctccaggggcctctcgtcttgacgcaaaagcctggggccgcgaggggcgtggtttagccagcagagcaactccgcatccttcggggaagatgaccgaaaatgctgacgtcaccaccccagagacagctctatcagagataagcaaagag

SEQ ID NO: 23327 - DNA, 201 bp, Bos taurus
aatagcatcctgttgccaagagactctttcacctccgacacgtgctgccttaagatagcccatcctaatcaagtgtcagtctgggtacaagaaacttgcccggttttcttctgaaaatgttccagactctccccttggctctgtgaacacgtgggcattggggtcatctttaagtcatcaccttggttccaggaagtcccc

SEQ ID NO: 23328 - DNA, 201 bp, Bos taurus
tctgttcttccttttagaaggggactttcttttgtagtgacaagctctgtggggacccgcagaccaggtgagactatcagagagaggccagcacctggtcccagacacggggacaggagccttgagggaagatgctgacaaaaaagaagacattgacagaggaagttctctgagcactcaggagccggacaaggagcacag

SEQ ID NO: 23329 - DNA, 201 bp, Bos taurus
ttggaggcgggtggtggagaccagggggtaggctggggtgcaggtggtggctttccctgcatccgtccacaccgtgttccctccacgtgtgctgcgggtccgaagggccccgttggacaaggacactgctgtgagatgagttgaggtgttagagccctaaatttcagctcctccgaatgtgaccatatttagagaggccct

SEQ ID NO: 23330 - DNA, 201 bp, Bos taurus
tacagcgaagcatcgccatgtttgtgatcttattaacatacactcgtaacaccaagctccggtgacatgagtatgccgttgttaatgagaaaagagtcagaattacgtctgcaaacagttgtgctacatgctcagtcgtgtgcatcccctgcctgtcactaaagctaacagccaccaccaaccaaatcaggaagctgcttt

SEQ ID NO: 23331 - DNA, 201 bp, Bos taurus
ttttgcaattcttactagaaatggagcctttgtttacctttagggctgtgtatgtatttttttttttaatttttggtgtggctctttacacaaattgaaagcaatttgaggggaaaacagtgaagcctcctgaacacaggacttgggaacaaatcccctggtttgtttactgagccccagttgggcctatcagttctccgg

SEQ ID NO: 23332 - DNA, 201 bp, Bos taurus
gttgacctctcactgtttgctaagaattgaactctttcagttcagcggattcttggactggattatggattatttcgcctatttcctccagcaactcctatggggtagaatccctttaccaaagaggctaaatctgattgatgtggttggtacttagggaggagctggcacaggagaatgtggaccagtccgaggagtgag

SEQ ID NO: 23333 - DNA, 201 bp, Bos taurus
agttcagtcactcagtcgtgtccgactctttgcgaccccatggaccgcagcacgccaggcctccctgtccatcaccaactttcggagttacaacaagcgtatttcataaacttgtccttcaaccttttattatgatcagatccatcagccagaacaaaaatgatattttgaaattagtagctatgactgagagctgcaatt

SEQ ID NO: 23334 - DNA, 201 bp, Bos taurus
tcttgtttcagagtctgtgtgcaattagggaccctgcaacttataaactctgtaaattacctctgggattgcagcctcagtccagtgacgaagtgctttgcgtcacacaccacctgtatgctcatggaatgtccaccccagagagggatgtgcatgccacaaatggtgggagagcaggagagctattcctagagtataaaa

SEQ ID NO: 23335 - DNA, 201 bp, Bos taurus
aggactgggccagcaaccacaacctggtgaggaatgataaaggattagcgatgtgggaggcttcggaggaggagagatgaactccaatctgattttcagatggcccaggatagaaggaatcggggtattcagtggcattaggaagtattcttcaagaagaccgccaatgtttaaggactctggcactcaaaggaccccagg

SEQ ID NO: 23336 - DNA, 201 bp, Bos taurus
tgctttcttcctatttcagtttcctgaaaagagttttcctttagttttggaagcactgcaaacgtgagcgttttaatagctggccttacagagggctcagcgcagttcagagctgtgtaaattagacagacttcagggtgtggtggatgctgggccacatgaggcgtgtgtgtgttggtgagtgtgtgcgtgtccatgtgc

SEQ ID NO: 23337 - DNA, 201 bp, Bos taurus
ccaacaatagccacttgctggaagtcactatctagttaattgaattttcatggcggttcctttgaacctcaagttgcaagtgtatgtacttgaaggtgatcattagaaagacaggtgtccatttcctgggtggtctgagggattctgagatgattgttgatcccagttcttccaaacattcttctctatcatcatctgagg

SEQ ID NO: 23338 - DNA, 201 bp, Bos taurus
tagaactgctgagtcatctggtcattgtatttttagttttctgagaaattcccatactgttttccatatgggccacatcaatctatatattcccaccaacaatgtataggggttcccatttctccacgtcctcaccaacatttgttatctgtagactttttgataacagccattctgaccactgtgaggtgatacctcact

SEQ ID NO: 23339 - DNA, 201 bp, Bos taurus
cgataaagatcacctgcagacaaacccaagttcaagtgctgcctgaaccagagcggactccccacggctcccttggctcattgtctaaaacgctactgtgctaatcccctcggtttccagtggcctctcaagcccagacccttacaggcactgaaaatatttgttttcatgctcttgtgtgatgggcatgtttatttcaat

SEQ ID NO: 23340 - DNA, 201 bp, Bos taurus
cacaggcccccacatatcctgaaatgtggtttctacctgcttctcctttgatgccaggaatgccatccagtcccgggaggcctttgtcacctttctctccgggcaacccagggcttcctaagaaagagcggaacacccagttcccgtgaccgagaccttctctttccacccccggaccccgaactcgggaggaggctggcc

SEQ ID NO: 23341 - DNA, 201 bp, Bos taurus
aaggagagtccccaggcctggccactgcggatccttcccgctgcacagagaccgagaggtggacaggctcctgcaaagcgcccgactctctcctagtccatgttttttattaataagacaatcaggccttaagttactcagggagagcttgtggctgcaggggagagagtccttctcagagaacaccgtgccccgagattg

SEQ ID NO: 23342 - DNA, 201 bp, Bos taurus
tgcatacagaggaaaccgttatctgtggtaaaaatcctcaagcccgagtaggaaatgcgggtaaaaacacatcaggtcggcagtcaggcccaggccgcacgggctgtcggtgaaaccagggcagcgagcgccagcattccaggaggcgccgtggtgttctcagaccactgtgtgtacagggaagaccctcaccacgcggca

SEQ ID NO: 23343 - DNA, 201 bp, Bos taurus
ggcccctgactcaccgggctctgtgcccccttcttggtgccgtggagactgtcgcgggcgtgggagagtgggagggacttgagccctgcctcgttccttgtggccgctctcgcgctctgttctgtagattctctggttcacagtggtaagcggagcgccaggcctgctccatctgccaggacctgccctgcgtctgagacc

SEQ ID NO: 23344 - DNA, 201 bp, Bos taurus
aaccgagggctgaaaacaagcagtcctctctgtcctgtgcggctgggtctggctggagctgatgtgtcccggagtgaggtggttctggaataaaccagcatgcctggccgtgtttcgtcagacgggcaccgctgtgtccatgtctgatggcaggataccagcttatagactaggacgagggccccgggcatcagggagcag

SEQ ID NO: 23345 - DNA, 201 bp, Bos taurus
aagtgggcgctgacgtctccactccacagacgaggggccagggctggagaagcccaaaacctgctcggagccacacagctcggagctgcaggggagcctcgctccgaactgatggccccgtcccaatcgctccatcatggacacacatctgcgcacccgctgtgcccagcccctccctggtgtgagcgcatctcccgactc

SEQ ID NO: 23346 - DNA, 201 bp, Bos taurus
tgccagctgggggcaggtcaccgacggcctttgtccaggctggttttgcacatttgcccttaaagaatggttctggaacgtgtgtgcaaatctgggtggagcatcaagcaggcgacgcgtcaggcccagtccacaccgcctttccaggggcacgggagctgcccggcctggtgcccagcgcccagcacacccaccctcgtc

SEQ ID NO: 23347 - DNA, 201 bp, Bos taurus
gatggtctccagaataaagtaccgcgggagccagcatcctgtgtgcttttaataaagcagagagacggcccgggctccgacagcactttctgcatattcacatttggattgttgcatgtttaacgttaatgctgtctattttctgccttttaggtgcttaggcgattgtaacattttaacactgctctgaaataagtgctt

SEQ ID NO: 23348 - DNA, 201 bp, Bos taurus
tctgttatcttgttttgtgagtatgttatgcttcttctcgaacgtttgaaaccttggcctcggtcttcacaggctgacacctgacatggctttactatacgcagcaccaggactgagtcctaactttccttctcagcccagcttgggaagcaaaaatcctccacccaccctgttttccagcattgtttttgcctgtgttct

SEQ ID NO: 23349 - DNA, 201 bp, Bos taurus
caccgggcagccaggaacctgtctgtcggctggctttctggaaggttcccacctggtttatccccaaggcctccctctgtcttggcctcaacccacacctcgagatgctgagtgtgagtccatgggggtcgtctcaggggggacccgggatcggtacccggcccctggcagacacacagaaaatacaggtggaatggaagg

SEQ ID NO: 23350 - DNA, 201 bp, Bos taurus
gttgggaaaaacagtcaccctcgagtggctcctgagtgtgaactggcggctccttcaggtaaaccgtagtccatgccactcccccggccagttcacacttaagacagcccagcctgactccagttacacacgggggtctccagttcacacttgagacagcccggcctgactccccgttacagacgggggtctccgggggag

SEQ ID NO: 23351 - DNA, 201 bp, Bos taurus
gacaaaaccctcccaggtggaagagcccccaggcccctgttctccacgatagccatgcccggtgcctgcctccgcccccgtgcagcctgctgggttttgccgggaatgcagacagatgggcagctttggaatctgtgtggctccatgaacacgcaggccccctcacccatcagatgccccatgtcagcagagtgcccggct

SEQ ID NO: 23352 - DNA, 201 bp, Bos taurus
gcaaggaactgccaggctctgggaggccctggcttgtccacgaggctgtgtggtgggatgacagctccctgtgtacctgcaccccccgtaccccatgaaacaagcaagtgaccgggtaggccttgcttggagggggcatccgggccagggtggtgggtcaccagcagcaatggtgggaggtgaggaccccacggagctgcc

SEQ ID NO: 23353 - DNA, 201 bp, Bos taurus
gtccctgtagacacagccttgcttactttggcctcttgtcacatgaacttaagaacaccgtattctgtgtgtctgcacgtttgtgtataagcgggtcgtctgcagttcagtcccgggtggtctggatgatgtatgtgtttctgttaacacagggctgcacttgtgaccctgcccattttcaaagtgttgaataccttagga

SEQ ID NO: 23354 - DNA, 201 bp, Bos taurus
taaattaaaatgagaatccttgtacttacattttcatggaataattcttatctgtttctgtctagtgaataaaagaaattatgctgactcagtcttcccataccagaaaactgggtcaaactgaagagagcagttaccttatacaggcaatgtcctttttccatttttgtaaaccaatattgtgaaaacccagatttactc

SEQ ID NO: 23355 - DNA, 201 bp, Bos taurus
caccaagcaattactagtattttctagtcatgaaacatatattccccctatgtgtgagtactacagttctttgtctaacttttgtctgtagctttaatctcacactcttgggaacccaaacctgccaagcaactttatagctaaggctagtccacaagaagcagtgaccaaccttcttttgccatttctctggaataaaaa

SEQ ID NO: 23356 - DNA, 201 bp, Bos taurus
tatttgttattaaagtatggttgatttattatgttagtttcaggtgtacagcatattgattcagtatttttatagatcataccccaggatatgtaatttactttatagttattcattttcacatttcatcattttagtgagatatgattgtcatataacattgtattagcatttattactgctttatatcagcacgagttg

SEQ ID NO: 23357 - DNA, 201 bp, Bos taurus
cggataataaacttcagctaaaacaagctctttaccaacctctttcttctgtctcatcttactcatcttgtttagaggtttcttttgagagctctctctcgaaaatcttgtgcacaagaatccctgtctcaggctctacatctagagcacctaacctacaatcgggatctctgaagaatccacaaaagcaggaaagagaaa

SEQ ID NO: 23358 - DNA, 201 bp, Bos taurus
ctagcagatttctcctaggtccttttacccgttaaacttcagagttataaagaccagtcttgaggttaggaggaaaggtgacttgaggaaacaagggagaagatggagggaagacatgaatagtcattttctcctgaattacgtctccttgttttgtgttccttcctctaggtattttgttaagtcagccaaggtgtgtcc

SEQ ID NO: 23359 - DNA, 201 bp, Bos taurus
acaaataaacaaagctctaatatgcctagtggggttttgcttgacttccagatgatattaaaatcttacatagctgaaattaggagttggccctgagaaccaattcttagggttttatctgaaaagaatgtttttgacatagagacttgcttttgttatgttatggttgctatcatattctcaaggccagatttacacctt

SEQ ID NO: 23360 - DNA, 201 bp, Bos taurus
ttttatttcaacagaattaaaagtcaatgtaggataaaatgtaaattgcttgtcaagattttacatggaggcataaggctacatcgatgtcgtcgttgtcattcagtcgctaagtcatggctctttgcgacgccctcaactgcagcacaccatatagagacactccatcactatttccataagtttgctgaaactcacgtc

SEQ ID NO: 23361 - DNA, 201 bp, Bos taurus
gtgagagttgtctttactcaaagtatacttttgaatccatgctgctcttccaggatactcaattcattacattctgaataattttgtatactgatgtcttaggggcaataatgccattttaatgaaaaatggccccaattagcagtaatatgataagttgtcttatcattcacccactgtttcagttttctagtaaagctt

SEQ ID NO: 23362 - DNA, 201 bp, Bos taurus
cctcggacagtgctcgtgtgtcatatgtgcaaacacgtgacacgaaaaggcattaccgaccctgcgttcaaatagaaaaggaaggcacaccgacctgtttttgttccgtctcctctattttaagtaatgaggttcttgcctcggttgtgtggttgctcagtcgtgtttgaccctttctgaccccagcctgccaggctgtct

SEQ ID NO: 23363 - DNA, 201 bp, Bos taurus
cttatggagaagcagcagggtcagtcagaaggagaaagaagaaaagggaagatgtagacaagagccattactgtggcttctcctagaaggaatgggcgatttggggtcagcaggccaaggattggctggtttgaataatttcagtgggagctggggtgtaagtgttagccctgggtgatcagggcagggagtagaagggcc

SEQ ID NO: 23364 - DNA, 201 bp, Bos taurus
ttccaaaagtcaaaaattaaattcatgacttttatggaaaaccatcctcagcataagtttatatctttctttcacaacagagttaaataaagcataaacacactaacgtcattttagtttaataattaatctatctctttcatttctgattgctgtactgagttttaatagacttttacatacctggcttttatgtaaatg

SEQ ID NO: 23365 - DNA, 201 bp, Bos taurus
tgatccccagtacatatcgagttggccataaagtttgagttttttttgtaaggtgtctcaaaaaatgcaaatgaactttttggccagtccaatacatatcttcatcaataaagatgagaaaaatgagtggcagacagttaagtgacttgctcaatatcatactgttgataagtggcagggccttatagcccagataagtct

SEQ ID NO: 23366 - DNA, 201 bp, Bos taurus
aggtaaatggaaaacatcagacaccacactgagatttcacttatgcctgagtgggacagtgtaaaaacccaacctggggaggaactggccatggtcttgcatctgatcctcccatggtttgtcccctgaccctgagggtgcagctgtctgtgaaggtgacttgaccatcatggcagtgtgaccctcagggccctgtgggta

SEQ ID NO: 23367 - DNA, 201 bp, Bos taurus
aacagcttctgcaccgcaagcatgtgtcctccagcataatctgaatactgagatgacatgaaggcaggagataggacttctcacaatcaaagctgtaagcatgcagtgatccctgggcagaccctatggagggcacagagccttggaggaggagacaggtggccactgtcctatctactaggacattttgaggtttgaagg

SEQ ID NO: 23368 - DNA, 201 bp, Bos taurus
gtgatcctcttgaaaggttctgaggcatacagtgttcatattcctttgggttttgccttccacccacctgctctgacagacctttaattttggaccgctgcggttgaagcccgtggatgcacagtccccaaagccagcactaacttgtttgctttggagaggcctgacgaaaataggctgctttttaacgcaaatagctca

SEQ ID NO: 23369 - DNA, 201 bp, Bos taurus
gcggccccctgcaggggtgacaagcgggtggtctgtgtccctgactttcctgaaggtcttcctcataggaacgtgatggaaggctcaggagcagagcctctggccctagaggtaggcctcttgggtgcgtgtgggagctgagcgcctggagaagggggagcggggtgccgcctgtggaggggccacgtctgcaggccccgg

SEQ ID NO: 23370 - DNA, 201 bp, Bos taurus
ctccaggctgtttgtctttgactgatgactcatttggcataaactagccttattgaggtgaattcctcctgtaccaagtttaatacatgtcacgaaagatgggatgtgttggtgattatggaaaggtaggggggatgtggaattatatcttctgatgtcaggtggaagaatggggttgggtgggtgggggaaggagttgtc

SEQ ID NO: 23371 - DNA, 201 bp, Bos taurus
agcattctttggcattgcctttctttgggattggaatgtatgctgatgggtatttaaaattagcatagagtttagggtttgtgttattttccctgtttactatgtatttcttggctgtaatttctatagtcaggaaatacatagtattaataagtagggtgaaaaatccaaactctatgctattttcaaatacccatcaac

SEQ ID NO: 23372 - DNA, 201 bp, Bos taurus
gcccaggaggaacagggggaattctggtcccttctcaccctgcgcagtgtggctcccggtccagctcaaactcttgcgtccagactcttgtgagacctcacgtttgcataatcttgaaagagaatggatgtacttaaaacaaacaaaccaaaagtttgaagacgtttatcccttgaaagcaaagtggtctgttgtccttct

SEQ ID NO: 23373 - DNA, 201 bp, Bos taurus
ggcctatggtggcaaacagtgtagaaacccctgaatctcacaacagtaaccaaacatcagaaacttacttgggactccctgtctagtctgtgggcagtgtgtttaggaggccacaccactgcatcctataagtgtgatttttaccaggaagtgagcagtagtttattacaggctcatttttaaagttggaaaagcaggaag

SEQ ID NO: 23374 - DNA, 201 bp, Bos taurus
ggattctaatggaaatctatagaatgcacattcatcttgtttacctaagatgaaaacctgcagtcaaacagaatgtgttttgggattcgcctacaactgcggttgccatgacagcatctagcttagcatcactccaacaacaggatgacttagtgtattactctaggtgctcatgacagcatcctgttctacaatgatctg

SEQ ID NO: 23375 - DNA, 201 bp, Bos taurus
aggtagttaagtgtagtgggttttggtttttgttttattttcttttaaaattacactcggctattgttttttcaggagacacatcgaatttcagactcaagtctgccccctggtgttgaaaatagtaaaagcacctgaagctacttagttctgttcagttcggtttagtccctcagtggtgtctgactctttgtgacccca

SEQ ID NO: 23376 - DNA, 201 bp, Bos taurus
cattattcttaaaataaatgcccttatcatccttagaaacttctctagtggcccttcttataaaaataaaagtttgaccctgtcatgatgatagtagatttcctactatattctggctagcttaggtggtcacacagtgctgactttgatcctggcaatagctttgctttaactcaaaataccagatactgaaaagaaact

SEQ ID NO: 23377 - DNA, 201 bp, Bos taurus
gttataaatagaaggcagaattgaaatatttcagcacaaacttgtcactagtacttgagcatgtggcatattgataatacattattgttttgtttcatgtcacagggttactgaagaatatagtttgtagaaaatcacaactgctaacatttaatttagcaattaataatctgtaagatactattcaagacctttaaaatt

SEQ ID NO: 23378 - DNA, 201 bp, Bos taurus
ggcaaggatgtggctacaagtagtttatttgggaggtgacggaggaagtgcagcaagggagggggtactgaaatggggtgggaaaggcagtaagtatgtgtgcgtgagcctattattggtgtctcagtcttgcaggaagtgtgccccactgagcgacagggaagctggggtgtctctgcaccagctccagttcattgggtg

SEQ ID NO: 23379 - DNA, 201 bp, Bos taurus
attatatttttataagagaagatggcagaaaccacattggaaacagagaatcaaatctgtcatttggccatagcatccaaaagagaagagagatctaaaagcattccatacacacggagagcaccaagcaaggtttactatggattcatggtctacatcatctgagtctattcagcaatttcctccaacagaatgacaaag

SEQ ID NO: 23380 - DNA, 201 bp, Bos taurus
gcaaggtacagtcataatttcatgttctgggaactttggtggccttccaactggtttcattagaaccagaatccctggcaaatatggctggggctacattttctgggcacattagtcaggccctacagaagtgacacctgatggccagcagtggcctctgtgtctctcatattccctccaccttctatgacagaggtcaga

SEQ ID NO: 23381 - DNA, 201 bp, Bos taurus
tgagtcacatctgctcatatcccattggctaaggccaggtaatatggataaaatcagagtcaaagggcaggggagcaagctcagcctgtggaaggaagacactggaaagccacagggccaaaggcgtggataccagaagggctgaagaataggaagacagagcttttcaaaggactggcaatgctacattaacagctggga

SEQ ID NO: 23382 - DNA, 201 bp, Bos taurus
aacctgggcacagtaggcttggtgggaggcaagtgcccctgagaaagggtgaaggcaaatgcagtaacccagcaagtaacgcaaggccagggaggagcacgggagggaccaggcagggctggaggctggaggaaacgcacgcgctcctgcccttgtgtgggtggcctcagctttgaggctcatagtggctccaggacccca

SEQ ID NO: 23383 - DNA, 201 bp, Bos taurus
ctgctatcccatttattttcatcggaagccctggccatctttacacagacagacccattcttctcattctctggggattggagcagagggagatacatgatgtgggaatggggccaattggattccaccctggctgagagtgtaagtaactcagagagtgaggtgttgtatacctggatctactcctggagctgtggtggc

SEQ ID NO: 23384 - DNA, 201 bp, Bos taurus
taaaacgagacttttagcagatgaatagcctggatctcagtacttactgtaaccactgactcttatgaatgaatatttcttagggtcttcaaagcagacactggtacaatgcttgggatgcaagatatttgttagggtttgggaaaaaggagaagtcaatctaaaactgtgataaagccttagccaaccaggcatgggctc

SEQ ID NO: 23385 - DNA, 201 bp, Bos taurus
caccctattcctttatcaaagagcactggaggtggatgtctcttttcctaatttaatgtttctggggttcaggaagtaccatgtatagcactagagagccgtggggcctggacctaactcctccattctctggttgagtgaccataggattaacccaaggaggcttaaagtctacatttataaaacaggagtaataacagt

SEQ ID NO: 23386 - DNA, 201 bp, Bos taurus
agtgacacagtagtggcaaagtgatcacacatcattacatagtgcacacgtgattatttatgccttctcaaccacagtgtaagttacaagcaattattttcccgtctcctccatgtaattacactgtaatctgctgggacatgtaattgcatggacggcttctgcactgaattacgcagctctcagggaccatgtgagacc

SEQ ID NO: 23387 - DNA, 201 bp, Bos taurus
ctctctgagacttttccatcatagctggaacttcatgccaacgtttcttaaccatagagacccatttctcatcttgcaaaacgtgccagaacagaactcctactgacttgcagaatggttctgacacaggcagacccctgagagctcagagcatgatgagcaaagggaagactgtgtccatctcctgattctcagctctca

SEQ ID NO: 23388 - DNA, 201 bp, Bos taurus
ttttagatagttaaaatgagaaggtcttatggagaacctgtacttgtagagctgtagattattttgttcaaaggagatctcaaacagaagcaaaattgatcaaaactgtcataaaataaagaattcttataatgtagtaggtttgtgcaaataacagaagcttttcctgggcccagttcaggtcatgtggtgtcaagacca

SEQ ID NO: 23389 - DNA, 201 bp, Bos taurus
ttcacctggctagttctctttaattctctctttgaaatcatggaagtttgaagcctaaaaactgcattttgcagtctgcatggcctgcagagttccagctcctgtgtcacccatgagaaggttctgggagatgtctgacaggtggaagaaagggtccagaagcagaggcaggatgcaggccgaaggcagcagctggtgggc

SEQ ID NO: 23390 - DNA, 201 bp, Bos taurus
aataaaaccagtgcatgaatgaggcatattttgaggtatgcaaagaaagaaatagaaatatctggtcctacaaaataatttagtgttaaagttatatgcactttgggactatttattgcattcccttgtagttcagtcggtaaagagacccaggtttgattcctgggtcagaaggatcccctggagaaggaaatggcaacc

SEQ ID NO: 23391 - DNA, 201 bp, Bos taurus
tcccagcctccaggctcaggctgatctccactccaggcccagtggatcaggagatccactccctggtcctaggggaaactcctgtccagcctgtcctgtaactgttgctctctgttcatttcttcgtacctctgacccgaccccctagaatggcatacttacaataccacagaaatccatctgtgctcccaagttttggag

SEQ ID NO: 23392 - DNA, 201 bp, Bos taurus
tgggtcttccggaacatcgctagacggagtgtggtctgtggaccagagcatccgcatcattgccgtcactttgatgggaaaggggagtcttggccctactctttgaaacagaatcttctttaaaccaatccaggtgattggtttgcacactgaagcctcagaagcactgctctaggcccaggcaaatgccctgctttgtaa

SEQ ID NO: 23393 - DNA, 201 bp, Bos taurus
tgtttcttggcccaaatcctcgttggcaattcaacatgattaaagtgtctggagagcatcttcaagtagagcacctctggtgtcccattgtcatctggtctttgaatagatgtatttctcttggccctcttactcaaacttttgatcgtttataaaacactgccggttgagaaggtagcctcttggcggagattttgagag

SEQ ID NO: 23394 - DNA, 201 bp, Bos taurus
tttctagcttctccagccccctcaacactgccagtcaagaacttcacaaatgctccctgacatgttctttccactgatgttttggcctccctacctccccttctccactctcgatgatattcatgacacaggttaccctggtctaagttggtattccattttctttccaggcccactggttgaccaggcaccagttgccct

SEQ ID NO: 23395 - DNA, 201 bp, Bos taurus
aggaagcacactgatgcctgggagtggacagttgcttgctttaggggcatcagagaattcccagactagaaagactcatggggcataatttatgaaacacggtaagtatgaagtaattccaaatctgtaagcacctgcttgtagcagacacctgggatcagaagtgaggctgaaagaatgtgaactgggccaccagaggca

SEQ ID NO: 23396 - DNA, 201 bp, Bos taurus
gagggacaagcagaatcaccattttactcttcacatactccaaggaggacaccaatttgcatgacctgcccacgtccttaatgtgcgtcacccatctgccatagccagacctctttgtgtttttactcagagacttgtggccagggcattatttgcctggggggaatggctactgcccttcagtcagtaagtcctgattga

SEQ ID NO: 23397 - DNA, 201 bp, Bos taurus
gtgctaagtgggccatcttctcccctacctaactcggtatcatatactttgggtaagcatcagcccaagcagcaagacttactcctatttgggtaaaagtgtctctcacatatatatcaattaagagatggaagacatacatgaaagagcattaagaggaaaatatacaaccagactaaataaatgaaaagacacattaaa

SEQ ID NO: 23398 - DNA, 201 bp, Bos taurus
tgcccacattctcatcttcctttgagacacagaaggttctgactcacctctctattttgatcttccactgatcctaaatatacatccgaacactaagtcatgcatacatatgtataaatgctaagtcatcacaattcctattatctactcaaagctttaagtcagaatcatgacactgccaaacactgagcagctacagca

SEQ ID NO: 23399 - DNA, 201 bp, Bos taurus
agctgtatacacttaggatatgcactctttttggtaggtatgtcatactttaatattttaaactatactttgaaaagtagaaagagcaatggccttgaagtgaaaacctgatgctgccaccaactccttctgcaatactgaaaatgtccatttaattccttgggcctcagtttcctcatctgtaaaaggaaacctgatgaa

SEQ ID NO: 23400 - DNA, 201 bp, Bos taurus
tctgagaacagggccttcttgggagaaacaattgcaacacggctgagaggctgtgaggtcagggagggtcctgggtcacggagggttgtggtgggggggggttgtccaaatgtctgttcctggcctctgttccctcaggcagagtcttgcatggcggcacccctgcgagagtgggcaaatgagaaacttcaccatcactcc

SEQ ID NO: 23401 - DNA, 201 bp, Bos taurus
cttgaactcttcaaaagatgtcaaagtcaaaaaatataaagaaagttgagaaactgttcccatttaaaggcgacgaatgcatcccagggaatttcctggtggcccaggggttaagattctgtgctttcactgctaagggcccgggttcaatcctggtcagggaacaaagatcccacgagctgcgcagcatgtccaaaagta

SEQ ID NO: 23402 - DNA, 201 bp, Bos taurus
agttttcccttcctccgccctcatcctttttgtttcctgagctagatggcctcacgtaccacgtggtggaggggacgctgagcttctgtctggcctccagctaggatgccatcttccatttaccaagaaggcgaggtgggtctctgcctaccccaacctcctattttattgtcagtgacactgttctttaccaggacccta

SEQ ID NO: 23403 - DNA, 201 bp, Bos taurus
acagtcttaagtagtgtgtcctaagtccaaataactgagccagcccaaaactcaaatccttaaggggtcagacagatgagaggaatacagaagtattagcgtgtaaggcttaaggaagggcaggttctgctgcgaaaggaaatgcactgtgttcttcccaccacccacccccgccccagggaatccatagtgtgctgtcca

SEQ ID NO: 23404 - DNA, 201 bp, Bos taurus
cctctcagaggctcagttccggctctgctgtctcgggcatcctcttccccgtgagactggtccctctgcgttcacaggatggggccagcggtcttgtcctatctgttctgaagaatctctgcctccgcgctcccagttactttgaggacaatgatccttctgtctttctgtcctaaactgactggcctactcagttctgaa

SEQ ID NO: 23405 - DNA, 201 bp, Bos taurus
gagttggggctaaatttgtaagatatttgtgctcctggacccttgccagcccgaagtagctgtgttcctccagccgaggcctccccacccgtggatggtctgctccctctctagctcttgcttggtctctgagctggtaatggctcccctccatcactggcctgtggacttcactgtcctttagtgctgccctagcttctg

SEQ ID NO: 23406 - DNA, 201 bp, Bos taurus
taaaattgacactggacacagtaattgggaaaaaaagagacaaatcttaatttgtgtgtttagagacctcatagaaagtgcctaagatatggccaaagcaagcagcttttatgttttttttaaacaaagaaacaacacatttgagaggaattgacaggacaaaaaatttaggtttgggtgcttaattagtagagaattaaa

SEQ ID NO: 23407 - DNA, 201 bp, Bos taurus
tggacaagaattttagtaaactctgggagatagtgaaggacagggtagcctggcatgcttcattcatggggtcacaaagagtcggagacaacttagtgagggagcaacaaacctttgagtaggaaatacgaaatcctttctactgaagttgacttaaattctgcccctaacccatgaggatgagagaaaactattttacaa

SEQ ID NO: 23408 - DNA, 201 bp, Bos taurus
gactggcccaatagaaaaatggaaacaagacaatgaacaggagaaaaagaaacaaatttaattcatatgcacagaggtctcataggaacaggacttaagaagtggccaaaacaggcagcttttattccttttagagtaaggaacaataaatttgtgaagaaaggatggaacaaagaaatatgggctttttgagtgggttaa

SEQ ID NO: 23409 - DNA, 201 bp, Bos taurus
caggcatcttctgaaatgaagcaggtgagcactgcagagtggaggaggccagggtcctccagctgtatccagggctgccacgggcctgcctgagggtatgccagagtgctccaaaaacagaaaagagaatcattctgtcactttccaagatgtcaaagccagcctcctcaggtttccctaaactttcacagagagctttgg

SEQ ID NO: 23410 - DNA, 201 bp, Bos taurus
gcttcatttcagatgtgtagtgatggcatcgctcagttttttccagacacctggtcaacggccatcatttccctacattttcccatgtcattccggcctcgtcttggagctaacgtgtgcccaggatgcctagctttgatcatgctgtaacccatctgtgggcagttaaggatgcgcaccaagcacatccctttgactaaa

SEQ ID NO: 23411 - DNA, 201 bp, Bos taurus
tgtgtctgaaggcatgggaaatcccttatgaatgtcaacttgatcttccccatcgacccacttacagatgataaagagccagcatcttaagattcctctgcagcggaaggcctgtgccctctgtgaaccgacttttcttattaaatccattgaaatcagggctcaagacaccataagagaagaagtcataaatgacagaaa

SEQ ID NO: 23412 - DNA, 201 bp, Bos taurus
ttagcgactgaacaagaacaagatcacgctttatcttacttgtaattagtaacatatccactgcatgtctcctcctccagtgaggagtaacaggatggggatgcagctatgccatcatcatcaggggccctaaaggacaacctggctcccaagaagggactagaattttactgggacactcttttatctacactcaggaca

SEQ ID NO: 23413 - DNA, 201 bp, Bos taurus
tgctcgtgagcaataagcgttgtagcccccagagcaggccaggctgcctatatggtacaaggaagctttcataagatgatgcagaccccactctcagaccaagtagctcagtggctatcccaggccttcagaagctcccccttcaactctgtgcaatggtcacctgctgctccctcctcacgtgaaggccatccacctcag

SEQ ID NO: 23414 - DNA, 201 bp, Bos taurus
cagccttttagtgatcctgggtttagtttccttgttggtggctttatcgagaaaaaattaaagataaagcagtgaagggctatttgacagagaccagcaaatgattccctagatctgtgttctctttccttcagtagcatgttcctaaatcgtagcagcatacagaccactcagaatgaaggctcctgttgtaaacctgtg

SEQ ID NO: 23415 - DNA, 201 bp, Bos taurus
gtaaattcctttggctggtgctcacagcagtctgctgagctggctgtactgtggttcccatctcgaagactggtacttcattgcctcagtgacaacgttgcttctttacattagaaagaaaatgagggtttttcagtgttggtgactgaaaaccaaaaccaaaacaaaaaaaacccatgaagctgtgactaacatcatctg

SEQ ID NO: 23416 - DNA, 201 bp, Bos taurus
gaagacagcaagggtggaccgtgactgccaggcctgctcggtgttgaaaattcaagtttatgctcattgagataacgagctgttacgtactacgttggtacaatggccatctactataacaaatgcagctaggtgacagatttctttaaaaattcatggtactgaactgccatatgacccagcagtcccactgccggggat

SEQ ID NO: 23417 - DNA, 201 bp, Bos taurus
catgttctgcaaggaggcagttgggactttgcctgcccagcacctgtgcccggccccgcacaggctgctcaccccagtcccaaggcccccgtgtgcgtccaggcaccatgtagggcttcatcttgtttcctgtggttgagtgtatgcatttcctggcccaaacctacatgtgagcccactcagctggcgtcgccaccatgc

SEQ ID NO: 23418 - DNA, 201 bp, Bos taurus
tgcttccctgtacaccctacccctctagcatttattcacaggaatcccaggaatgggccaaaatcctattatctggcagggtgcactttggacagctgagaccccaaggagcatttacttgtttcctcttttgcagcctcacaacggccatcacagactgaccggaacagcccattgtatgtaaatccatccccacaacag

SEQ ID NO: 23419 - DNA, 201 bp, Bos taurus
ttttccagagagcaatgtaatgagaaattacctaggggcctagatgatctggttatgaaagcaggagcatgcaaaccagtgaaactaaacaaacagtaaatagatgggcagtgggaaacaaaatggtaattataaagcaaatgaatgttagctctctcttgaaacaagttttcacatgtgtcctacagaacatggagatgg

SEQ ID NO: 23420 - DNA, 201 bp, Bos taurus
ttcacaaagctgctcagatgggcctctttaggcctcagttttgccatctacacaacagggatgatgtctgcaccaaataagagttgtaaaggcgatgcacaccaggcccgccctcagactccactgtgagcgggggctcgaaacccaaaacttaacagctccacacctcccgccgtctgtacccacatctcctgcatggtg

SEQ ID NO: 23421 - DNA, 201 bp, Bos taurus
aaaaattcataaagcttaatgaaaggaaagtctgataaatatttgaagagaaaaattgttctttaatgacagtgttattagaggaatactgtttagcctggattattatgattaactgtcttggcattttactaatctgtttgtaaaatgatattgtctagtgtgtatttaaataataagaaaatgagtgaaaaattctca

SEQ ID NO: 23422 - DNA, 201 bp, Bos taurus
aaatgggcatgtggctagagaaagtcagttgaaagagtgtttttaagataaaagatattatggagtacatgctgatggaataatcctctagagcagatggattttactttcattgttgctactaaggccaaaagctatgataatgtataaatagcagttcagatacattagtctcaggaaccaaaggaacagaatactttg

SEQ ID NO: 23423 - DNA, 201 bp, Bos taurus
gcacagcttggtggagtcatcatagcttgactggaagtcatcatagctatgcccctgtctgagctgccactcaccagcagggtgagcttgggaaagccacgtttccttctgggcctcactgtctcagctctaaaatgtgggcgttggagctggatgggttggtggagatgacgtcggagagcaggtctcaaccagggtggt

SEQ ID NO: 23424 - DNA, 201 bp, Bos taurus
tattcttaaaattagaggaaaaatgaataggctcaaaataggaggcacagaacgtgaatgaaaaataattgttataacaaagtgcgagcgtaatgctttttgaagcatccccattgaagaaggatgttaatcctttcttaatttttcatggaactgttgtaagcatattacttagagaggtaaatctatgacactttttaa

SEQ ID NO: 23425 - DNA, 201 bp, Bos taurus
cttgtcatcagtattgtaatggtgaggtgtgattagaccatctcgcaccagaagttgagaatggtaattcccagagacgccatgagccacctactccagatagggatgctggtgtctgactgactgcctctcctcacaaacaatttctgctgccgttaaaggttccctcagggactctgccagctttactgctgcatgacc

SEQ ID NO: 23426 - DNA, 201 bp, Bos taurus
tagtctgctttgcggaaattaaaaaaaaaaaaattctcttaagaggacctcctattgggagttgatgctgtgattaaacagctatttcttgagccaggtatagtactaggtcgcagggagaccaagacatggatataaaaatccctgccttcagaatccttatttcaaagggacaagggcacctcttgtgagtaggccgat

SEQ ID NO: 23427 - DNA, 201 bp, Bos taurus
ctccatttcatccttgccaatggtgtcacctgctctgctgcaaatattttatccccaaaagacaagtctcttaaatgccaaaccaaatggaaacaaaggtaagaggacatatattcacatttagagtctggacatctgaatcaatacgtatggctcagagcattaacccactttattgacatagcagccttcttctgagct

SEQ ID NO: 23428 - DNA, 201 bp, Bos taurus
cctcacagaacatcctcttggcttgaactctggtttcttcttagccatagtgggacaaatttcaattaccaagtagataactatcacatttttcttggctctatgatttctctcttctgtatctgcaaggcatcaatccatattaccaccgatgagtttgtctcagaacatatcatgtaactgcagcaaagacaactctcc

SEQ ID NO: 23429 - DNA, 201 bp, Bos taurus
acatacagatttttatttctactagaaacacctgaagagtggactaagtgatttttccaccgtcagttcttgagtaagaaaaaataaccgatggccatgggggctcagtgaatagtttgagttcagtctagatattcttctgtgtgtcctgtgatattgtcctcgttcacttttggcccacagcagttttcttcttgcttc

SEQ ID NO: 23430 - DNA, 201 bp, Bos taurus
actctgcatattttggcagcttccctaagtgtactaataactcatgccaagtacagttggaatgcttcatgagtccagactcagaaagcaactgaatcaaacagtgttcatcttaaaatgatggctgatttgtggtgagtcaagaaacactggactatatatcttaaggtctggaagatccaaaggataagctaatgtgat

SEQ ID NO: 23431 - DNA, 201 bp, Bos taurus
ctacaggagaaatagacattaactattttctaaaatcttcatatgaataccttttctccagaaaaatctctcactctctgaactttcattgctcagtctcgaaattgatttgaataaaatagtatccctcacgatggtctttctgatgaaaaacagtgatcaatgattaattggtaagaaaaaaaccaacagctaggattt

SEQ ID NO: 23432 - DNA, 201 bp, Bos taurus
acattgacacattaagatgctctgagtgatactcacctcacattaatttatttttgttatgtctgtcagaatataagttttcattttgttagggtaaattttaagaagtagcatcactgggtcatatagcaaatgtatgtttggctttatgagaaactgtcaagccattttctaaagctgctgtaccattctgcatttcca

SEQ ID NO: 23433 - DNA, 201 bp, Bos taurus
tccaggagagagcgaaggacaggggagcctggctgcagtccatgggggtcacaaaaagtcagacatgattcagtaatcgaacaacaacagcaaaacttagatatatgtctcagatccttatttgagggaaatagcttcctgagcatggtaaccctcttctgaaggtctactagcagttaaccacttttgtgagaaacacat

SEQ ID NO: 23434 - DNA, 201 bp, Bos taurus
tgaagctctaactgtcaatgtgactgtatatggagatggggatatttaaagatacgattaaggttaaacaagaccataagggtggggcctaatctgataggaataatgtccttataagaatggaaaaatatttcagggatgtgcatgtacagagaaaaggccatgagaagacagaacaagaagatggccaactacagctca

SEQ ID NO: 23435 - DNA, 201 bp, Bos taurus
gtgccattaattttactatgtattaccaaattcttctcccaagtgttttctcaatttatatttccatgaaaaaaaactctttcttgcatgctctacccaataaaatatatgatcatattttaattttgttaaccaagtgggtatgaaataccaaaatattttattttatgtttttctaaaagttgtaatagatgtcagtta

SEQ ID NO: 23436 - DNA, 201 bp, Bos taurus
actaaatggactactatttgaaagaatactacattaatggtaaaacaattattctcaggaaagagaacatctgaataagactgggagaaaataaaagatagtggggtcagggaggaatttacgtctagattttaatgctgtctttgaatgtcttaatctttatatctagtttttaatgctgtctttgaatgccttagtctc

SEQ ID NO: 23437 - DNA, 201 bp, Bos taurus
gattatctcaagctttctctcacattttcaattcaagctttttctcacattttcaattctgtttaacacctgttttggccatctgctctcccagggtctgataccagggcaactgtgagcaggagttactcagagaagtgaaccgggtggccattcccaaggccctccttagctcatgactaaaagctagagaaggaagag

SEQ ID NO: 23438 - DNA, 201 bp, Bos taurus
cattctcttggtgcaggcagtcctttccctcctgatttctgcagttctttggagctccaggttagagcatcagcttgaaaagtggactgtgggatataaacagatacttctcagggtccatcagagggccagcctctccccagccctccctctgcatacccacaggaaaacaaaatgaactctcagctgggttttccccct

SEQ ID NO: 23439 - DNA, 201 bp, Bos taurus
aagaagctatttagagacatgcgggagagtcaagggagctctaagtgaagaactgaggtgggggccggaaaccccagcatgcttcccaggtcaggggcctcggatctgccccctaccccctcctcggtttggtagttcaccaggactcaaggttgctgtaatcacggctgtagtttattacagtgagggatccagcaggca

SEQ ID NO: 23440 - DNA, 201 bp, Bos taurus
cagctgctgggaaatgataagagctcaacatatgttagaagcaacaatcacacgcaaggggtataacttgtctttttactatgtgtgaactggaagtttaaaaggatgagtattagtttaatgtagaataacaaatattttttatcagaggataattgctttccaatggtgtgttagtttctgctgtacaacaatgtgaat

SEQ ID NO: 23441 - DNA, 201 bp, Bos taurus
tatgcttggtaacctggcgttctcagctagctgatgacaggagggtaacgaggtggatatgaaccagacaacaagtaaaaaaatgagtttctcaaactgaggtctgtaggcctttggaagtccaaggttattttattcaatcaattgaattaatactgtaactgagcagaaccccatggaggcgacaggcctctccccaca

SEQ ID NO: 23442 - DNA, 201 bp, Bos taurus
cttaaaattggccactatgcacacagagaacattagcactgtgacataatgggcatgtctgtgagcttgcttgtgatgctcacttcacagtgcacacctgtgtcaaatcatcacattgtgatgattaaacatacacaatttttatcttaaacatacacaatttttatctattttatgccaataaagctggaaaaaaatctt

SEQ ID NO: 23443 - DNA, 201 bp, Bos taurus
agcacccagggcccctccagctcctgcctctttagagcccaaggctgtgcttgtcccacccggggcactcatgctggcctcgctaccaggcaggggcagttggggatggttaaacctggagaagcactaggaccctcctctcagcctggcctaagcagagctgtgggctcctaacctaccctccttaacccgccccggaga

SEQ ID NO: 23444 - DNA, 201 bp, Bos taurus
ctccagctcggggcctccttgccatgccccaatcctcctttcagcacctgaaggagcaaactgttagctgataaatgatcaaaaagcttccagcaaaaacgggatttggacaaggagctcagaagcagcataaggtcccgcaggttcaagcttttgcctgcttcaccttcatctgctacttctccccgatgggaatcagat

SEQ ID NO: 23445 - DNA, 201 bp, Bos taurus
ttcctgcctgaagagcatctcgggatctctgtccctgtgcctttactttccgctgcaccagctcaggctgactatgatgtcattgaatatgtcccactctttttagactccgtcagcggctaaagtccacacatctcattctgtcctttgaggtccacctccatctaaatccaactgccatttctgctcttggctcccacc

SEQ ID NO: 23446 - DNA, 201 bp, Bos taurus
cctcacagcctcaagtcacccaatgccccacctcctgacaccattgctccaggcaggaaggtttcttcatatgaatgtgaatccaaacacttgtttgaaatggagtgtattgttgagagcaggcaggaagaagcgtgcccagagtgaggggtatggggggcaccccgggaggtgggggtggctactggcaaacctgaccct

SEQ ID NO: 23447 - DNA, 201 bp, Bos taurus
atcacacgtcttatcacagcccccaaggccaacagcaggggttccctcttaacttctgagccccttggaggaagggagtatgttgatcacaccacagagaatcactgaaaaagaaaagccacttctcccactgacgacaacactggtaataaggaagagctcagaagtcaagcagatgtcgattttgaaaaatctaaatat

SEQ ID NO: 23448 - DNA, 201 bp, Bos taurus
gtttgagtaagccccgggagttggtgatggacaaagaggcctggcgtgctgcagtgcatggggtcgcaaagagtcagacacccagttcagagcaactgaacggaactgatttcaacaaaataatgaatctgcctgtttgtctctcctcacatttgtgtttgtttctagaagattactggggagaaaaacttaatttatgag

SEQ ID NO: 23449 - DNA, 201 bp, Bos taurus
atccagaccatctctgaggagggtgccctgctagacgtggaggaccgtgtcatgtggactgttctgctcctacctgtggcctgactcatccatggcccccaatggacacacggtgcagagcaccaactgcccggactctataatgtggtgacttggcttctcagggctttgcctgctctttctttattctcagtggatcag

SEQ ID NO: 23450 - DNA, 201 bp, Bos taurus
atgggataagaatctgtgtgtggctctcctataccattagacactggcaggcacctctgttccttttaatccccagatataacaggatgcctctgactctagttacttccaactgccattcataaaactggtggccagacctctcagggggtggtggttctagtgcctttcagactgtcagagcccacttgcccttccctc

SEQ ID NO: 23451 - DNA, 201 bp, Bos taurus
tctgagcactggcctggagtccctccacattcttctcacccatttggaatttgggtcaagttgcttaaaattcttctttaattccttcagttgtgaaaccgaagctttggatgccgaggccattaatgctcagattgtctcagtgtctagtgaggaggctcggctcggtggtttgcgggagttgggacattcgtgggaggc

SEQ ID NO: 23452 - DNA, 201 bp, Bos taurus
aatttctgcctggagtggttttgcaggtgatgagcagtggctgcgccagggcagggctgtgcttgttcctgcctttgggagctgaagttacttcccgagttggcctgtgactcaggagatggtccctagggagcaagccttttcatgctcaaggagctacatcaagttctttcgtttgctctggaagtgcccattttctct

SEQ ID NO: 23453 - DNA, 201 bp, Bos taurus
aatcttccgtggtgcgcccggttttaggccgtgcattatctgttctcacaaatcactctcttagttggcgccatagttttattttttgatttttctcaaacagtggccccaacacagtgcattgtttcagatggagtattcagaatgtgggtactgaatgatagcagctgcccatcctgaactagaaatggaggaaagcat

SEQ ID NO: 23454 - DNA, 201 bp, Bos taurus
aaacagatattgatcctacccctgaacgtggcccaggaagaaatagtagtattttctgttcggagaagagtgggcagtgctctccagtcccttgtgctgcggtggcatagaagtggcctcgtcattaagctccaggctgtacccctggcgagcctaccacccagtcctaagaaatgaaagatgacatctcggaacatactt

SEQ ID NO: 23455 - DNA, 201 bp, Bos taurus
aattggatttttgaagcatgtcctccacctggtgacacgcttctctaactggtggctactgtccttattcagccttttagtccatcagcttataattgttcaaactggccaaaaagagaaaacaaaacacgttttttaaaaatgtctaactaaaactaaaactcccttaatgcagtaaggtcttgaaccatgtccattaaa

SEQ ID NO: 23456 - DNA, 201 bp, Bos taurus
tccaagatgctggatgtcatattcaggtggtggccttaactgtgtagcagtgtggagagatcaacaaaggtttgtgagaaaaagtctaacaccttctgatatgtgattttggccacacgttgaaggacagattagcgagggaagagactggagacaaggacaccaatcaggagcttcatctgcttgtccaggggtgataag

SEQ ID NO: 23457 - DNA, 201 bp, Bos taurus
caattctgacttattctgcctaccaggccaaaaagaggaaacaatcatgtcaaagaaaagaggaaatgtccttttaagtcaagaaaactttatatgtgagggtgcaaaggcagagaaggcatatcttttggaagaataaatacttgatgtggctgaaagatacattgaagggaggtggatgtagcaggtgagactgaaaag

SEQ ID NO: 23458 - DNA, 201 bp, Bos taurus
ttgaactgccagcttatcagaatttatcaagggaaggaaaggagagctgtttcaggaacccacacacatgtagaaacacagggcctaatgagaatatccatgttggcaccatcctaaaaataaaaaaaggaaaaagaaaaaatgagagcaaaagatcacagcttggaataggccaggcctacagtcagactccagcaccca

SEQ ID NO: 23459 - DNA, 201 bp, Bos taurus
tttttaaattggggtttaattgctttacagtgttgttttagtttttactgtaggtccaagtgaatcagctgtaggtgtacatatatcctctccctgttggtgctcctccccgcccccacattactatttaacctttaaacattaccctttaaaaataaatatctctacagaataactggtctagctttttcaacaagttgg

SEQ ID NO: 23460 - DNA, 201 bp, Bos taurus
cactgaggtactcttgttacactatgggctatgaggacctaacatgtagccccactacggtcaactttgtggtggccactatgaataaaacaagtgctatcttctctacttttatcaatgaatcttgagacagatcagaaactagcatatacacttatcctgattctcagctttcaaaaataaacaaaatagggctatacc

SEQ ID NO: 23461 - DNA, 201 bp, Bos taurus
gagcccaagagaggctgcagggtatacctaatatatagatcaaccaagagaatccttgttctgtgtcagggcctcaagataggcctgtgactggtaaggatactgagaggaggacaaagcagtgactctttgatgctttctagatgcgccaggaaaactgagttagttatgtggggcccacagcaagaaagccaatctctg

SEQ ID NO: 23462 - DNA, 201 bp, Bos taurus
atgtgggatcttagtttccctgaccagggactgaacccacagcttctgcattggaaacttggcatcgtaaccactggatggccaggaaagtccagtaaatacacttggaaatgtcaccctcctgcttcattaggtaaagaagcatttggaaagcaattacgattaagctattcattgttagaaaggcctatgaaatacaca

SEQ ID NO: 23463 - DNA, 201 bp, Bos taurus
gcagaatgacattattgtcaggagccaaagcagcagttcttactaacgtatataaatgtttttagtgtttctctggggccatagagtctctcacctgtctttcttctgtatgtttgctttattctttatcttcataacaacttcagacccacatggtctcccacccaagtgtataagacacatactatatttggcctgtgc

SEQ ID NO: 23464 - DNA, 201 bp, Bos taurus
gcttctgttcacagcaaaacttgttaaaaagttgtaattcttgcactcccatcttcaacttgtgttcactcctcaaccaactcatattcagccttccaaactccactgaatcttctcttggaaagtttaccagtttcatctcaccaatgccacttaacacctttctgggcccaagttgcttggcagctcagcagtatttgg

SEQ ID NO: 23465 - DNA, 201 bp, Bos taurus
tttaaatttcctttatttctgtttactgcgttagagttttgacatttctgtatagcctttctaaccacccacgcaagttctgattcatcacccactccagtgctccccatactgctctgtttatgtcaggctcttctatcttctttagttcaacctgaagtcacattccatctttctaggaatatttaaactattaaatat

SEQ ID NO: 23466 - DNA, 201 bp, Bos taurus
attattatgcactcatagaatggaatgccgtgtagcctttaaacagaatgaacagctccataaaaatcaaggcgcagaacaatgtcacacccatatatgtatgcatgtatatgattgcagacagggatatttaaacatgcataaactatctctgaaacagtttgaaagagatatgattttaagttcacaaagaaattgctg

SEQ ID NO: 23467 - DNA, 201 bp, Bos taurus
ttctgaattcagggaggcctgggttcaaatcccagccctgctgtcacaaaccatgggttcttgcatgtcctctgacttctcaagactcagtttcccacacttacaaaccagagcaataaatcaggcctaccccaccgaatcacataacacatttagcacagggtccacagccgggggacctcatgattattaactaccctt

SEQ ID NO: 23468 - DNA, 201 bp, Bos taurus
gaaacgattataagagatctctgccagacacagccaaaaagaggagggggcaatgttaagaccgggtaatttttaaaaggcagaactgggatttctctggtggcccagtggtgaacaattctcctcgcaatgcgcaggacatgggttcaatccctggttgggaaattaagttcccacatcttgagaagcaactaagcttac

SEQ ID NO: 23469 - DNA, 201 bp, Bos taurus
ctaatacaacattgcaaagcaactatactccagtaaaaattaattaaaaaagaaaaaaacgcctggcaatatgaatatgtttgccaggcccccacacacactcatcagcagagagtggaagcctcactatctcaaggtgtttgagaacaatctctaatcaatattaggccgaagactaggctattcagacacaggtgtgaa

SEQ ID NO: 23470 - DNA, 201 bp, Bos taurus
agacatgggccgatctggatcctacctgaacagcagtatcaattcagcctggagtgagcacagcttggatccagaagacattcgggtaacaccagcatttctacttttctgttttagattaggcccatttgtacatcatacgtgtgtgggcaggtgttcatgtgttctttgtgttatagaacttgtgtgattatgtaagga

SEQ ID NO: 23471 - DNA, 201 bp, Bos taurus
ccatgataacggagtggcagtcttcctacaaactgcctgttcttccgctctgaagaacagtaaatagataatttctgaatgtctagattcatgaggtttatttaccagctaatggcttctgacctccgaatctttaaacgaataggaaaagaatgtccttgtttcatagaagcctatgggctgggaacaagcagtctgggg

SEQ ID NO: 23472 - DNA, 201 bp, Bos taurus
atgagaactgctctagcccactgagggagtatgaaattgtgtagccaaggagatggattccatctttcaatcagttagctcttggtgtgtaacagaccactgcaaaacttagtactgtagaaataacacacgtgctccacatgagctcctgttctccaggaggctaaccaggcttttcctgacagtgatgtcagccttcca

SEQ ID NO: 23473 - DNA, 201 bp, Bos taurus
tttccttaagagtgtatctgggtactgaaagttatcttgattagtgcccaaggttttcaaatatggtgcaaagttgtagagaatattgattgagtcattcgattaccaaatatctcctgagtacttattttttagttttctcttgattgtgatttctggtatgccaagcaaatttttaattaaatgatggtattgtatggg

SEQ ID NO: 23474 - DNA, 201 bp, Bos taurus
atatcctattggaatttcaatataaggtactgtaatcattatactacaagataaataatacaagccttctgagtacatttgctgaattattattatattaatatattatcatagaggcagtaaagtaaaaacacaagacttttgaaatacatgatcttgatttctatccattaatatatttaaagaaatacaaaatcttta

SEQ ID NO: 23475 - DNA, 201 bp, Bos taurus
gtccagtggcttttcattagagaagagaaaagaagcagaagcattattgacactgtttagatcaatgtccacagtggaaggctagactctcttgataaaattgtcatgaaaaagctcaaaagcaatccaaccgtctcactagactctaatccctgatatcatctccatccccccaacacacattccccctctacactttga

SEQ ID NO: 23476 - DNA, 201 bp, Bos taurus
agggaggcctggcgtgctgcgattcatggggtcgcaaagagtcggacatgactgagcgactgaactgaactgaaaagctaagatcttggaagagagtctgtcctgaaaaggcctaaatgacataagttagggtttaaaatttctcatcgtacattaatgaccaatatcagcatttcccctaaaacccctggcagagactaa

SEQ ID NO: 23477 - DNA, 201 bp, Bos taurus
atccactcactgatccccatcccactcatggcccccatatctaagccataaagtcttgcctataattccttcttcacccagctgtcctttatcatcttcactggcccttagaattcagctgcaacagtgaaaatcagtcgctcccaagcttgatgatacattagactcacctggggcagtaactgcttcagaggagccgtg

SEQ ID NO: 23478 - DNA, 201 bp, Bos taurus
atccaggagaagtctgggtgatttgcctgctagaaataacaggtgaaggtgagaatccatcatcctgcaggtctcagctgaagtgtgaccttctcaggaacggcctccctgagttggttaaccagtggtttttatatcataccatctagtgatcgtctggactatcaactcaacaagcgcagagatcacagctgtcttgtt

SEQ ID NO: 23479 - DNA, 201 bp, Bos taurus
tttgaaagcacaactttcttttgacagcacagctgtggctctttttttcctcaaaaaggagacctgtttgttgttccacatggagggaaattggagcatcctgctttcatcatcagctgagaaaaggtttgccatcctgggtgtgtgtagagagagagcggctggacatctgtagctttgtctggcttcccaggcacagtg

SEQ ID NO: 23480 - DNA, 201 bp, Bos taurus
ggcacctagtatagggcttgaactcgaccactggggcaagagagaaaaagatgtaaacatcataggaagaatttcctctaagggcagtttttataatcagccaaaagcacttgtatgcttacttttgtgtataaagattcagccttgctaatctgatcagttcccactttattcctgtttattcagatcattgccccaaga

SEQ ID NO: 23481 - DNA, 201 bp, Bos taurus
tcctccccctacttaaaggcccacacttgctctttacttaactcatttatacattatgttcttacatttattaggattttccatgaagttcagttttacctttccagctgtagaagcaaaaggccctacagaagtcatccaggcttgaatacgttgactcagttggcactggtgtgcaatgaatttgaaacactctggttt

SEQ ID NO: 23482 - DNA, 201 bp, Bos taurus
acagtcttcaaaacaggttgagaagaggaagttgaagaaacatgctgagaagcattccagatctttaagaaccaatgatagactgtggccttttaaaaccacagttccttctcccactgtggttgttggcacatcaggaaaaagatcaatcaaactgtgtccttctacaccttgcaactaacggtggcctacagtaaatcc

SEQ ID NO: 23483 - DNA, 201 bp, Bos taurus
tcaagagggaagaaaccaacagctgctgtggcctcagaccattactctggtatttgcttagaagacctttgggaacacagataaggagaaaactaaaacaaggtatctgggcccaagacactgaggaagctgctggcactttccttcctttgaaccctgaggaagaaggagaggcagctgaatgttcttttaaccctctcc

SEQ ID NO: 23484 - DNA, 201 bp, Bos taurus
ggatttaggaatggttctgagtgataagatctggctatggaattctaggaagtccagatattttagatctgcatattaacatcccaaatcagtgccctccggataggttgggactgtggcttcacatgtgtttgctactggttgccagagcaaccaaggagaatgagaaaaccattcatcataaatcccacctggtgctgc

SEQ ID NO: 23485 - DNA, 201 bp, Bos taurus
tggccgcgcgcggcgcagccagtgggcagcgcatccctccaagcagggtctctccattttcagggccggggaagcaacaataagctgagccgagcggccgaccaggctcgccgcactggcggcgccccccgtatctcctgcacccccgggtaccggggactccccgcacgcggcccctgccacgcaccgaccccgcacgcc

SEQ ID NO: 23486 - DNA, 201 bp, Bos taurus
atcctactgcagagagcatcatctggttctaaaaagtgacactatattcagagggttttctcttctcagtgagggagagagcggattagcaggaagggaagtgacacatgtacagcttacatgttctgaaaggctgttgtaatgtaggcgagaagtgattgtgtttgaactaaagtagtaacaatcaagatgaaaagaagt

SEQ ID NO: 23487 - DNA, 201 bp, Bos taurus
attcatagaattgcaaataatgggaattcactcttcttccaggagaagttaaaaggccgcttattattctgaacagtctgacctgactaccagcctttagcttgtcataaagccaggcagggagttgagactagagatctgcactccccacataagaccacagagtcttaatcagtggttcttacctggaaagctttttaa

SEQ ID NO: 23488 - DNA, 201 bp, Bos taurus
atggagtagacatcacaccatccagaagcaacatatctaatcagagcagaaatgcactggcctgagcaagaaggtataatgtgaattcacagaggaagggaaaaaaaaaggtccaaactgaatcaagccaaacaatcaagtaagcaaaccaatatggcaaatgagaaagactaaagtggagaagctaagaagaggttgctg

SEQ ID NO: 23489 - DNA, 201 bp, Bos taurus
ttcacgttgactttgctcagctgtatcagatctactgatgagcttgtcaaaggaatgtcctattgctgctgctgcttatttctaggatttctcttggactctttcttgcagtcttcacctctctaatgaacttccctatttgttcacatatgtccatctttcctatgaaaccctttggcatctccatcatagcgactgtca

SEQ ID NO: 23490 - DNA, 201 bp, Bos taurus
gtcaacaatgactggaggagggaatagcaaaccacgtcagtattcgtgccttgagaaccctatgaacagtatgaaaaggcaacaatgataagacaaccgccttcctgactttccaaacgaaactgagtgctaagtcgtttccattggaaacatgtgcttactttgaaccatgtgtgcatgtgtgcctgtatgtgcacacgc

SEQ ID NO: 23491 - DNA, 201 bp, Bos taurus
ctgttctaacctttcctgaaggaggaattcacctctttcctgaaagaggaattcacttgaattcaccatggcttcattcacatgttcacgcttctggccactgaaactgtcttgctatcttaactcagtccagtcctgcaaaatgccatctgccagaaacagcagggaaagcagcaggccaggtttggattaagcctgcca

SEQ ID NO: 23492 - DNA, 201 bp, Bos taurus
ccacacggaggccagggcagagatgggagtgaagctgccacacgccaagggaaggcagagccacctgaagctggaagaggcaggaagaatcctcccccgtgtgtgtggaaaggagcacgacctggccgtcacaacttgacttcagatttccagcctcctgaactgggagagaacaaatttatgttctcagccacccaattt

SEQ ID NO: 23493 - DNA, 201 bp, Bos taurus
cacatgcaatatacacatgggcagaaaaagagctgtgggagacagtgaggctgggaaatagccccgactccatcatttcctgtgactgcatgctgaaattcgcaaattcatcatattgcaggcaagatttaggttgaggcaaaggtagtggaacacctgaataggtagaaagtaacagcatattcttagacatgcacttgg

SEQ ID NO: 23494 - DNA, 201 bp, Bos taurus
ttgggtttgtcagtgcaagcaaacttggaactcagaacttccaaatctgcagggtatgacaagacccctcatggtggctcaccagcagcagcgataatggattctctgctctcctgttggttttactggctttgtgcatgcgtgctaagttgcttcggtcgtttctgactctttgcaaccccatggactgtagcctgccag

SEQ ID NO: 23495 - DNA, 201 bp, Bos taurus
gcccaggggctggggactcctgctgtatggcattttggagtgagtctaaaacatgaagatcatataggattcagagagttaagaccatgagaggccacaaaagtcagtccaggagatgttaagacttgagatagacatcgaaacagtggagaagtaacattttcctgcaggggtaattgttctgcggggagatgcatggca

SEQ ID NO: 23496 - DNA, 201 bp, Bos taurus
aaatcccatagtgaagatggaaaaatccacccagacttgggtttttcctcctgtcaggtaaatgtgggctccctgacttcccttatggtacacacatctgcggttttaatcttccaccaagttttaatctgccagactaattaatgtgattttcaattcggtcatcatcagcttgtatagctaggtaaagcctgcagtatg

SEQ ID NO: 23497 - DNA, 201 bp, Bos taurus
aagtttacagattgctgtttactcactgatctatccaatcccaatgttttatagttgatgataccaagtccccaataattaaaaaccataagttaaaacctctgtctccagaaacttaaaaccatttactttggattcaaatcacaattatgatccaatgtaactatacaaccttaagaaaactatttaatttgtccaatc

SEQ ID NO: 23498 - DNA, 201 bp, Bos taurus
gcctaggaataaatgtaacaaaatatctataagactttcatagaaaaaatataaacttttagtgaaggatctaaaaggagactgaataaatggagagatattccaaatttaatatgaaaagtctctatataaagattcttccaaaatcaatctataaatttagcacaatttcagcaaaatcagtaagcattactgcactta

SEQ ID NO: 23499 - DNA, 201 bp, Bos taurus
ttctttgcagagtgggattctctttgatggtttgcagaaaggcaaggctcacatctacagtgcagctttaaagatgcgcccacaaagaaagcccagattgggggcccattttctcagagcaaatagaagatttgtgtgggccacacagaggcacattttgagagtgggtttatggattagtgggccacatgaatgacgtgc

SEQ ID NO: 23500 - DNA, 201 bp, Bos taurus
tttcacctgaacaaaagcatattttatcacttcattaaaaggcatcaggatgacaaagcaattttggaaaaactgtgctgacaacaaaaatgctaagaaactagccaaatgtttctagtctctgccaaaactccaaatccaatatgataagaatgcaagttactggacatcgcccgatgtcttctttctttctgccatctc

SEQ ID NO: 23501 - DNA, 201 bp, Bos taurus
ctgctgtcattcgaggcctacataatccaagccagagaatgcatcagtaattattacatgcagttttttaagtctagagaacaaagtttctcactcaatagctatggactgcatacacttttgctttgtggtcatctcagctgaattctccctgctcacttgtcatttctttctttgcaaatttcctggatatgcctccta

SEQ ID NO: 23502 - DNA, 201 bp, Bos taurus
cgatgaggcccgtgcagagaaatattctgttctcaatatcagtgacagatgttcttcaacacataaatagatgacttttaccttgtaaatacccaatcacagagccaggaaatggccctatttcatatccagctaaaagaaaacttaagacaaacctgttggatacacaaaatgtggtacatccatataatggaatattat

SEQ ID NO: 23503 - DNA, 201 bp, Bos taurus
tcagggtctggtaagagaaagagaacataaagaattcagcgggcaatactttattttttttaacctgactttattttattatctttttggccacagggcatgcggaatcttagttccagaccagggatggaacctatgccccctgtgtggaagcaaatccagcatgcattactttataatagcaacaaaaatttaaggccc

SEQ ID NO: 23504 - DNA, 201 bp, Bos taurus
tatcactgattaggtgtccctggtgtttgacctgggacttttgatccagttcaggatggaatttctctccagccagttgacaaggaggctcagagttagagttagcataagaatataaaaagccatatttctcatgcacgtgggtgctactctgactttcaacagttttgtgaatcagtatcaacccatctatttaaacca

SEQ ID NO: 23505 - DNA, 201 bp, Bos taurus
atgcaaatagaaataaagagcacaataaatgtattgcatttgaatcacccccaaaccacccaccaccccagtctgtgaagaaattgtcttccacgaactggtccctgatgtcaaaaagttggggaccgctacactaaaggataggttgattctttaactgggatatccgtctcaggggttatgtgtcatatactttctctc

SEQ ID NO: 23506 - DNA, 201 bp, Bos taurus
gtgtctttatggatttcaggagtttctttagtcacccttctttcagacccccaggaacactggttcaaagtgtctcctctggcctctgtctcccctccccactccagaggggctgagagataaagtcatgacaggatgtaactggtgctcatggcaggtgtgtgccagcctggggtgttggcttcttgtggagtacggccc

SEQ ID NO: 23507 - DNA, 201 bp, Bos taurus
gtaggtcagagctgacctgtggaaagactccacccaacaaccagaaaaaagtctgtcccacatggacttgagatgtcatcattggcaaatgatgctctgtattctttgtgattcctgatttaaaaaccagaatggctattcgtgaagtgcaggtgttcataggagaaggaaccctgaaggtggggatggaggaggcaaggg

SEQ ID NO: 23508 - DNA, 201 bp, Bos taurus
gttcagttcagttgctcagttgtgtcggactctgcaaccccatggactgcagtacgcctctacagatataggtatatagatataaaagggtttaataaccctgtaaaatcagactgcattttagaagatttgaaacagataaaagtgcacacttccaaatataggaacctgcctgctgatgcattaggtatgtggcactgt

SEQ ID NO: 23509 - DNA, 201 bp, Bos taurus
tgcttccttgatcacatgcaggaattcagtgctttttacctgcagcccaaaccctctaaggcaggggttcccaacccctagggccacaaactgatttatgtcctgttagatactggtttgtgtcctgttaggaaccataggaggtgagttagcaaagctttatctgtatttacagccgctccccatcgatcacattaccac

SEQ ID NO: 23510 - DNA, 201 bp, Bos taurus
aagagcttctcaggtaaggcggccagcactctgggctggagagctgggtgggttggtggggaggcattccagatagagaagaggatgcaaaaggcagaatggggaggccgttggtgcctggaacagaggctgccactgtggctggagcacggggtgcagagggaagggtttatcaggcgtccaaaggccatcacaccagct

SEQ ID NO: 23511 - DNA, 201 bp, Bos taurus
aactttgtgaaggggacttttagctgacgtgggaagggatggagtagaaaatggaagcaacgggccaataaagagttggccctcttcacccacgggctccgcatcagggaattcaacctattgcagatccgcatatgtaggatctcatggatttcatgtatgtagagcaaaaaatatatgtgggcctgtaaatgttagctt

SEQ ID NO: 23512 - DNA, 201 bp, Bos taurus
taaagatgagtatattggtaatatcgattaacttctcatttggcctaaaattgtattttttccttctggtttcgaaaaaaattaagacatttttatgggtacctgaatgtactatgggccccgggtactgtccccactgaatacgttggctgtctgtcaattggtcatcacagctcacatgagttaccacgcgtccccaag

SEQ ID NO: 23513 - DNA, 201 bp, Bos taurus
agattactagtgaactctggacagctaacacagtgcatctgctgtggctgggtttgtgctgcccgcatgaggggaggactcactctccagctgggccagggagaaactcaggcaccccggagtgggggaggatcggggaggagtgggagtccaggtccccactccagcccactcctcccaggcagggccttggggagctag

SEQ ID NO: 23514 - DNA, 201 bp, Bos taurus
gagtcgtcttcgcacgctgcacaaagaggtcttttttaattgagatattcagaatattgtatcttcttaactcttgatcaaagtttgaggttggagctgggacctgggtcatacttgacatcttccatgtcctgggacagtagagtgtatcacaaacctcgctcatgatgggttcttcaataaacactttttaaaaagaag

SEQ ID NO: 23515 - DNA, 201 bp, Bos taurus
taaatgtccaaatcagcttagtaaaaaatttcagctggaaaaatccacaaaaccatgcttccattagcagtgaagacatagcctacctttttctcagaatgagaaaggatgaaaaagagcttagtgaatgccctctgtggacttcaaaaaaatgcacagtgtgagagttgtgactgagttttacttgggggaaaatgagga

SEQ ID NO: 23516 - DNA, 201 bp, Bos taurus
aaaagggcaaaggagctctctggggcctctctcagtgttaatcccatgcgtgaggacttcactcatatgacctgctcacctccaagtcctaccttacaataccattccagagggaatgaggacttcaaaatgaattctcattcagaccacaaaaggtggtgtccattcacagcccacgacctgaaactaaacttatcatct

SEQ ID NO: 23517 - DNA, 201 bp, Bos taurus
gcatcccttagcccagtcagactgacataaaattcacaccaaccccaagtgagtagtaatcataatgtatgtttcccatagtagtagatgagagggaaaatcatctctagtataagaggacaacatgacaaaagggcaaatgtcttttggcctcgtgacatttggttattcaccttgaactatctttataagctgatgtca

SEQ ID NO: 23518 - DNA, 201 bp, Bos taurus
acactttcaatgtccacaatgttatatgtcaaatacattcaatataaatgctggaaagatagaatttttaaacagaaatggaaatcattggtgtaattttgttaaatactagagaacaggaaggagggccttggctccggctttctattttccatcatctatctaaatatgactgttagtccctgtgaaatatggatatat

SEQ ID NO: 23519 - DNA, 201 bp, Bos taurus
ccatggacagaggagcctggcaggctatagtccatggggtcgcaaggagtcggacacgattgagtgactgagcataccatagcacaggagggccttacattagggtggttcaccccacttcctacagagcactgctttccttgtttctaggctctccttagccactgcaagtggaactcacccctgccttctctggcccag

SEQ ID NO: 23520 - DNA, 201 bp, Bos taurus
attgctttgggtggtgtagtcatttccacaacactgattcttccagtccacgaacatggtatgtctctgcacttgggtcacctttgttttctttcatccaatatattttgctgcgttcaggtctttctgaagtgattcatgccatcggcacttcattctgattttatttttttaacttgttgcttagactaaccatacatc

SEQ ID NO: 23521 - DNA, 201 bp, Bos taurus
aaatagaaataataaatcgtattttacgagcttgctgtgagaagtaaataaacacagaacatggcacttggtaagcatatcaaatacccagcattctgacgtccaatttattttaaaagcttccatgtgacagactttagagaggaaaaaaatatccattttttgccaggctgaaagatgttctctgcaggggtcagagca

SEQ ID NO: 23522 - DNA, 201 bp, Bos taurus
agcataaaaacagtcagcctggctactgcatcctctgggagagaaaactctcttcccactagtctccagaaggagaatttggggcagcctgccatttgccgcactgcatgctttcctgtgaaatgagaccaccagggaagaaactagctctggaactaataataagacccagttagcatttaatttacacacatgctgatt

SEQ ID NO: 23523 - DNA, 201 bp, Bos taurus
aggaggagtgctcgtggtagaatcctgtagctctgactataactgggccaagtggagtccttcctgggaagtttacaaaatctcaccccaatgcctgctcgttgcattctcttgctcacaggccactgtattgtgtccagctgggaccctgcacacccccaaaccccccactcccgcttctgccttcacagactacccctc

SEQ ID NO: 23524 - DNA, 201 bp, Bos taurus
tagctcaccagttcccccccaaccccccagaactgatgtgttggtttgatttgattcccaagaactgatccaccccttctggctacatttctccctttccatgggagtagcctggagttcctcatctctaagttggcaacacagagcaggagggcccttccttgaaggtgggaaagcctggaaaacccaggttctttctct

SEQ ID NO: 23525 - DNA, 201 bp, Bos taurus
tcctttccccccaagctgcttctccctcacacacacctggaccacctgcaggtactctgcagttccagacactcatgcttctatttcccaaatggtcccccgtctgtctgctagtcactgcttcctgtgtcgcaggcctcctgcatctctgaatctccccaaagcacatccttgaccacctggttcatcaagaatctcctc

SEQ ID NO: 23526 - DNA, 201 bp, Bos taurus
gtaccccctgcagtcagtttatgtgggaaattttatgtataaaggaagaacttggtctaaccgtgttgggaaattggtctaactttgttgaccctggcccagagaacacgtggtgtcggaaggtttaaagctgctcccaagcttgaggggcagacacctcactgcttctcagcagagctggcctaggacggcacccagatg

SEQ ID NO: 23527 - DNA, 201 bp, Bos taurus
tctacttcccacactggtcacaccacacctactgctaaagtcaacatcagcctactcagcgcctttgtgtaattagaataaggcaaccactcctctgggcggatatgactctcagtcatgcagctggagggcagaaagaaggacgggtttcaggcccactagcccttcactggggtgccatttttgcagtgcacaacatgt

SEQ ID NO: 23528 - DNA, 201 bp, Bos taurus
atacaatgaaaactttccctccaagctccctgccctcatcagctgcccaaaggcaaccaataatatcaactgtccttccaatatatgtatgtagtttacacccatacaagcatatacgtacatatttttaagtctccccctctttgtacatacaaacggcatatcatgccctgtttcacaccctttttctcttcatttaac

SEQ ID NO: 23529 - DNA, 201 bp, Bos taurus
ttcttctctaaattaattgtttgtcagtacccaagaagcctctgaatggctttcagtcatctaaaggttcactttctttttccttttttcttcctagaggctacatggtgatgggagattctttcaacacttctctcttcaagcagacattccaaagaattttcagtaaagattttaatggcaatttccgaatggcctttg

SEQ ID NO: 23530 - DNA, 201 bp, Bos taurus
ctgtgtaagaggcctctgagcttctcttgacccactacttagatgctcaagagctagtgtgtctcttcctcttcctaatcccatgatatggccccattcacacaacctcatctaaaccaataacctcccaaagacctcacctccaaataccatcacagcctcatctctgtcttaggccctggaggcatttgataagccatg

SEQ ID NO: 23531 - DNA, 201 bp, Bos taurus
ctggcttcccacagagcaggtgattcaagagagggcacaaaggacccagcaacaccttctatgatccagcctcacaagtcacacactgtcccttctgccatgttctattcgttagaaaagagtcagtctggtcttcactccttgcctttccgagagaggagagtcaattacctgtggacatgttttagaccaccagatcat

SEQ ID NO: 23532 - DNA, 201 bp, Bos taurus
aaaaggcactcttccagttggcatatcagatggagacaggggtgcaggtggacagggagctcaactggcttgggtgcattgctggtgaggaggctgaaactcagtcaccaggagctgggagagggtgcgactgcaggcttaggagggagtcagtgtggtccagccacacacaaggcgctcccagggctttcatccttagaa

SEQ ID NO: 23533 - DNA, 201 bp, Bos taurus
ccccgtatacttcccttatgcagtccaggtggtgaaacattgatctatatgatggaagaagacacatcggaagaaggccaggatgggggctttccctggtagtccagtggttaaggcttcaccttccagtacaggagatgcagattcaatccctagttggggacttaagatcccatatgtcttgtggccaaaaaaccaaaa

SEQ ID NO: 23534 - DNA, 201 bp, Bos taurus
gtctctgctttttaatatgctatctaggtttgtcatagctttccttcaaaggagcaagcatcttttaatttcatggttgcagtcaatgcctttgattttgaagcccaagtgaaatgaaaactaatttcaaaattcagatgaaattgagaaggacctagcacagccaaagcaactatgggaagggaacaagctgtaggacta

SEQ ID NO: 23535 - DNA, 201 bp, Bos taurus
tccctcgtgccacaacgaagacttggtgcggccaaacagacaaacgccattgagaaggaaattaggctcgcctgagtgggacaccctttctgccttgtcaactgctattggccagatcagaaccagtcctgaggatgagacggggtggggctgagcctggctctctcattcacctcatggggatgtctcgagggccacctg

SEQ ID NO: 23536 - DNA, 201 bp, Bos taurus
gcctgagctcacacagaccagagttagtatgaatctacatttctgggttttccaggatgaagtaaatttgaagtcttttatcacatgatcccttctttatgtatccctaaggaatcttatctggccccgtggattttttttttttaacttttaattttgaaataattatagagtcacaggcagttgcaaaatcagttgcaa

SEQ ID NO: 23537 - DNA, 201 bp, Bos taurus
tcctgtaagtggtatacaggatgtgtttttcttcatctccttttttggcttaagatatttgtgaccatccagctggatgttacttttgtaacatttgtacctattgttacttttgtacgtttggaatgtacttttgtcagacattgcagtatatggttgtactacggtttcatcaatcctttctgtgggccctgttttttt

SEQ ID NO: 23538 - DNA, 201 bp, Bos taurus
gaatgcagtgattcagagtgtgtagtattcgtggagttgctgatgtgaagtggttattaaattgcttaccttgtgttacctcagccttttgcagtgcttcgagtattaattttctaactcacgttcttgccatgtgtccctttcttctgacaactgagaagaatctcttgccagctaagaaaaatcttttcttcacacttt

SEQ ID NO: 23539 - DNA, 201 bp, Bos taurus
acaaagcctcggtgaactgtcccttctcctccctcccccaaggacattatctggaagtattcttgtctggatatcttctcagtgcctaaggactgggtttctctttgcttcctctgaggtgatgtcaccccaaataaggttgagggcaggggggcacctgcggccactggtgttttctgtggttagaaaaccattcctacc

SEQ ID NO: 23540 - DNA, 201 bp, Bos taurus
gcattccatccactccctcctagggtcccaaccccacaaagcagagcaaacctctggtgcctggataggtgacattgtggacagtgtttatctttctagggggcctccagctgatgttgtaaccagggcagagttgaagcgacagaaagtcctcttgatggaggcttgggttgagcatccacccgatgtcactcttcagag

SEQ ID NO: 23541 - DNA, 201 bp, Bos taurus
gcatcactccatgcaacattaggcaagtttggggtgagataaactgaaggatgccctccgctcagcctttgggaattggagactttgtagagacagtggtctgaactcaggccctgagggacaggcaggagtcagcaagggactaaggaccgggcaaggacggagtgggacagagctcaccaggggaggggtccatgtgtg

SEQ ID NO: 23542 - DNA, 201 bp, Bos taurus
cggatgttttccagaccagaacaaggctgcaggtgtttgtgagacatggacacggtttaggttcgcaacaaaggggacactgttagaagtttaaacagcaggatctgaaataaaggagctgaagcgggacgtgtgtggaagaggattccaggggaacacgtgtgggcttgtgcacatctgaccaaggcctctggggggaca

SEQ ID NO: 23543 - DNA, 201 bp, Bos taurus
aggctctcaaggtcaagctcaaccctggcaatggcatctgttgaatggacgaagaaggctctgcttgaggccacgtggctggatggaggccccactgggatagaactcaagtctcctggagcgaatgatggagtgatggaggggaggaccagggtgggggaaggccttgtgacttcaacctcccagcaccctagggagaat

SEQ ID NO: 23544 - DNA, 201 bp, Bos taurus
agtcaaagtccaggtgataggggcttccaaagggatgtacccctgatggacagaagctacagtggggtaagtgttgactcagaaaaccaaacacccagccgatcttccctgggtgtgtcctgctaaggacacagaagtcattcactggagggtcagttaatgacctacttgtaatacagttttgtgaaattataaggatga

SEQ ID NO: 23545 - DNA, 201 bp, Bos taurus
catgtacctacagggacgactctagtccctgaatgctgatccacgtctgtttcatggaaagtatgacctcattcgtctgtgggtcacagctatgtctcgacgtggtggccctgagggatggtgtgaggcactgggaccctgatctaggacagcatagtgctggccaccatggctgcgactcaagtcactctcctcctccca

SEQ ID NO: 23546 - DNA, 201 bp, Bos taurus
gggagctgactactcctaccctctcccactttcttatcctgggtgagaggggaatgggacctcacatgtgtgggcacaggcccagagccttgctgcttgccgcgtgccctgtgtgggaacccgtgtttatggctgacaagatgaagacccacgatggccaggagcctgggtgaccctctgcctgcccagggataagacatt

SEQ ID NO: 23547 - DNA, 201 bp, Bos taurus
tctaggggatcttcccgacccagggatcaaacctgggtctcccaccttgcaggcagattctattccatctgagccaccaaagaaggccagctgtacattactatcattgacaaataaaatgcagtacacatggggtgattcatcaactgcatgctctaggtacaaatttcagtttaccttaatgtggccctgcagttgaat

SEQ ID NO: 23548 - DNA, 201 bp, Bos taurus
atcagtatgtttttaagaagaccttggccctttcttgagccttttttcttggctaagcatggatttctttttaatcacatctgaaacagggtgattacctaggacacaggccccaagttgggctagagttctcacacacctcacagaaatcactctcggcaggatgcgctattttagagcaacctcaggtttacttagatg

SEQ ID NO: 23549 - DNA, 201 bp, Bos taurus
cctgctcttaaccacatttccaccccctgcctcccagtcagagactcacagtgctgagttgcaaggcagcgactccagcaatagggccgcaggtctgatgcagactttctcgttgagttttgggggggttttgttttagtttcttgcctcaccacaggccttgtggggtctcagtgccccaaccaagtatcaaacccaggc

SEQ ID NO: 23550 - DNA, 201 bp, Bos taurus
gattaaatctatggtctctggtgctttgtttgctgactgttccagtggccacctaagtggtcacttaagagccattttactctaagggaagaagacagagaatcaggacttcagatgcagggcccccgggggcaccagctgccctgtcttctgcctagacggtgactcccagcagcaggactgtctccatcggcattgagt

SEQ ID NO: 23551 - DNA, 201 bp, Bos taurus
tctcccgtcccccagctccaggacccactgagcaggcccagctcagagtcatcccaaccaccgcctgaccactgggcacgaacttagcagcagagcagcacccccaatttgtggggcagctctggcccgttaccaatggtgaccccagctccgagaagctccagtaaagaaaagcctgcatgttaagggccatgtaataaa

SEQ ID NO: 23552 - DNA, 201 bp, Bos taurus
taatgtctcagatggcaccagcccctccgggtccctacctcagtgaaacgtagcgccttcctgctggcctggcattgtagttaatgagatgtgggtatcaatgaggaaaaagtaaaaagaagaaatacatgaagatatttggttaaaacatgtgatcagtaattcggcagttatggaacgaaatcaatggcaaacagaaat

SEQ ID NO: 23553 - DNA, 201 bp, Bos taurus
actgttaattacaagcacaggcctctgctgttcacggggcatctgctccacacttccagggcacaccctgcgctgggggtggctcccataaaacagatgccgcaaggaagaaaggagcatggatttatctttaatgatggcaacgtccaacgcttttaagaaggacattctgagagctgaatcaaatatttgattttccac

SEQ ID NO: 23554 - DNA, 201 bp, Bos taurus
gcagtagatgaaatgcatttcaatgtaactgagaaacatagtaagggtaattaaaggtgcatagacctcacacaaatccactcagtctcattttacccaacgagtaatagggtggtattatccataggggagtatttgtgatattattccacccctacatttctcacttagctttccttaggggattatccataaaaggca

SEQ ID NO: 23555 - DNA, 201 bp, Bos taurus
aactctggccactccctgaaatgaggattcagcaggtttgtggcagagcccagggatctgaatagcttaaatgtctcatttgattctataaagggctttgcctgtatcctaccacaaggcctctagagagatcttgggagaattgagtgcttgtgggaatatttggagagaatagaaacgatgcagagtgaggtaggataa

SEQ ID NO: 23556 - DNA, 201 bp, Bos taurus
gctttagtctgcatttgttctaaagagattttctttcctaacctaaaatcagttatgaatttaaggacaaaattttttaagatcctttatagtgtattacaggaaaaaccagtagccagccatcaggtgcatacacgcatgcgcctgctgagccgaaggtgttaatggctgggctgatcaggactagcctatgaattacta

SEQ ID NO: 23557 - DNA, 201 bp, Bos taurus
gttgtgttttatttttctaaggcctttctttgcctgtagccccagatcctcctggaggctttctgccttggggatgtgtcatcatgatggggagagactcagggggatggggggtgcagctggccacagtccagtgaatccacatcccagaccacagagcacaggtgcttggggttcaccagtttcatgtgagatcagtgg

SEQ ID NO: 23558 - DNA, 201 bp, Bos taurus
ttctctggggactcatcgtggaggtgagacctgaggcggcttgacttctgttctgtggaaggaacctcgctttcagttgtttggccctttgtctttgtgatgacagtgacgaacgccggtcccttgcccgtcctgacgtccttcgctctcatccccccagccgccacttccttgttactcccatttccaggtgtgggtggc

SEQ ID NO: 23559 - DNA, 201 bp, Bos taurus
tcttctacaactataatttagaagttttctgttcgtagagaaatgcgttcttgctcattagggaaacatgcagccatagctggttacacattttcttctcctcatgctataatgcactcctaagtaacattttaatcatgactaataagcatgactgggcccttgagagtgagtttgcccttactttgaaaaggggagact

SEQ ID NO: 23560 - DNA, 201 bp, Bos taurus
taaaatactgcaggccaaaaggaagtagaaatgggacattctatagtctcaccttgccctttctgtgtcctagtggtaactggtagtgttgtgtatattcagtttttggtagtgtacccataaacgtgtcccagtgtgggtaaatctatgcgtgtgaatgtatgtattttagtgcagttgtttatgtacagtttttaccca

SEQ ID NO: 23561 - DNA, 201 bp, Bos taurus
ctaaatcatcagaagtcatatagaacatagagaagaatttagtggttttgatggtgtgagaaaaagcatcctcaacatatgggtacatataagcctgtgtgcatgtgacctggtatgtctctggagttggtgggcaaattgaatccagaagctattgcttgtttccttaacctaaagcttcattatttaagttctacatgg

SEQ ID NO: 23562 - DNA, 201 bp, Bos taurus
ccacccaacagctctatagtgggactaatggcagtctcctccaagaggacttatgccatccaccacacctactaggactgttgctatcagtgcccctgtctctttggcaggtggctgatgacccacgcttctgcagaagaccctgaaacactcacaggaaggtctggctcagtctcttgaaataaggtgaataaaataggt

SEQ ID NO: 23563 - DNA, 201 bp, Bos taurus
aactcaaggaccttgataagttgagggtaaaataaagactttaaaggacgcttactcatttccctgatgactggtggcagttttgccattgtctctaggggaagttatgcaaagttctagtgtacatctcttcatgctaattgagtgggttcatattattatattaaatatatattttatttggggaggatgagaggcttg

SEQ ID NO: 23564 - DNA, 201 bp, Bos taurus
aaatcttctagccaccatacacagatacaggtgccctgacatatagtccgtgtggctctagacctaaagttactaggaaaggcctaatgatatctggttcgtcagtcaagtgtttccaaataaagtgtccttagatccagaaggaaaaaggccatgcacacattttttgtaaaacttttgttctgtcaaaggttggttttt

SEQ ID NO: 23565 - DNA, 201 bp, Bos taurus
tccatcttttggctttgccttcagtcctgcaaatccatgtaataaatttcatttctacttgagttagcagaaatgaattctgttgtttgcaaccaaagaaacttagcacagaattatacatccatcttttaatctccaatagtcaaaacccaatgtctagcacttaaagtcttcagtaaatttttctgatatagaaaaatt

SEQ ID NO: 23566 - DNA, 201 bp, Bos taurus
tgctgacttctgtgctgcctcaatgagtcttccactgcctctgcgccagctggatggggctgctgaggggtatcatcttccatctcactaggtccttcattctcctgggcctccatcagggacccctggtcacgggtatcactcttctcctcatccacaccagcagccgagctgtcctcttcatcctcctctgcttccttc

SEQ ID NO: 23567 - DNA, 201 bp, Bos taurus
tgttaactaaaggccaaaatgcccagctgaggactaacagatttgcatgattctttgtgtcaaccactgactaggactgccataattgaacatgcatttgtcatgtgggtggtctcctgtcctaggttaaacaacatcttcctaatgtgacccaagggaaatgggatgggtctgtaagagctaacaatattcaccccattt

SEQ ID NO: 23568 - DNA, 201 bp, Bos taurus
ctatttagtggagaattattcactattctggaatgattgtgatttttttttttttttttagaattttggaaaatacaaaatcagcagaaccagactcaccacccagaatattgaaataagatattttacctgtgccattgtctcatctgttctattaactgcctgaaatcatcttaaagatattttctcatatctttctta

SEQ ID NO: 23569 - DNA, 201 bp, Bos taurus
gggaaacagaagcaggctctggtgcagctgtaagtcatatggtgggaaaatgcatttggcacaactgcacaggccagtcactcccctcctcggcctccaaagaggcaaattcttcactgagcacaggcacttgagctcaacaatcagtatggcatccacacagctactattacccagaagtgggaagcacctacaactggc

SEQ ID NO: 23570 - DNA, 201 bp, Bos taurus
tgtatctgtgggtagacaacatccctctgtcccggcccaagcgaaatctgtcccgggacttcagtgatggaggtgtgtgctccatcgtgtgtgagtgtgttcgcacgcacgcctgggtgtctcctgtatgtctttgtgtgtcaacgccttctgtcctgtatgtacgtgtgtacagggtctatgtgaatacatgtctcttgg

SEQ ID NO: 23571 - DNA, 201 bp, Bos taurus
ggaaagagcaaacagttcaaggcaaatgttgcaggatcctcctctcaaatacttaaaattaccaattagcttaagatagaagatatttcgggaaactttatacacataactttctttaatcatttttaaaggaaggtcacctaaaacttaatacaaatccaggtggccaaacatctttggctccctgacaaattgacagta

SEQ ID NO: 23572 - DNA, 201 bp, Bos taurus
gaatgctgagaatcttttcatgtgtttattagccatctgtatgtcttctttggagaaatgtctctttaggccttctgtccactttttgattgggttgtttgtttatctggtattgagctgaacaggctgcttgtgtattttggagattaagccttcatcagttgttttgtttggtattattttctcccattctgagagttg

SEQ ID NO: 23573 - DNA, 201 bp, Bos taurus
ggggctgttgcaggaggggtcctggggacttgactcccctccccggagctctgagccactgctgccatgaatacaattcataagaggccactttggcctgcggtgggtactctctgagagttccagatcccaaggaggacctcgagaagccagcttgtgcgtacaggggtcctggggccccagaaataagttctcccacct

SEQ ID NO: 23574 - DNA, 201 bp, Bos taurus
gctacaacgtgctgccccaaatcattgaagccaagtacttggatgccatggatgctgaacactgacgccctgactagcaggtcctggccaccccccattcgcccatttctccaggtcttgccaggctggctgtgtagctgtgtgtgggcatccgggaatgctgctctgtgctgcaccccctcacagctgtcccaagtggcc

SEQ ID NO: 23575 - DNA, 201 bp, Bos taurus
agatggcatctgaagcttgatggaagagcagaactggagagacccgaggaagggtccaggccctgtattcagtcagagtcatggctgggagtggaggagcaggaggaggtatgtcgcctgccatgcttatggtgtttctgctgctttttatgatcgttcttcattttcttctgcatcctttgtctgtcaccattcctggtg

SEQ ID NO: 23576 - DNA, 201 bp, Bos taurus
tatatttcattggtttatataatatttaattaggttacaataaatgtaactggcaggtttagaacacactgatccctgaaagtataaattcaactactgattgcagaaggcaaggtatactagagagtagtctatcagccatgagtgtttggattattttaagaaccactcagtatattctaaagaatgaaaagtgtaact

SEQ ID NO: 23577 - DNA, 201 bp, Bos taurus
tcctcaaaagaatgttccttcccacagttctctttgtccttttaacaacacaggtgccttaccacctccatgctctgagtcacaaggtcccctcagatggggaggccttccccagcatttctccgtttctcaagcttcaaggcccctctctgactcactgggcaagcaagggtggggggctcgcctgcctctgggtggtct

SEQ ID NO: 23578 - DNA, 201 bp, Bos taurus
gccatctggccaaacatatgcattgggccttgggtaagggaatccagaagcaacagctagaaagaggaaaaggccctctttagctcccatggcgattcttccctcttaatgcctcaaaataaaactagaaagaggaatgaaatgattaagtgcttgaggccaaatgagttgattcaaataacacagaagcagaggaagcaa

SEQ ID NO: 23579 - DNA, 201 bp, Bos taurus
tccccccaccccacaggcagagaccacagcccccctacagattttttccaagttagtcctatggaccctgctcgggccctaggttggccgaggctctctgccttccacaaggaaggtttcctttttccattcgggttcaagtaggtaattatgaaaccaaagctgagaccaactcagcacagactttattcaggggccaaa

SEQ ID NO: 23580 - DNA, 201 bp, Bos taurus
agaggcggaaccccgcagcaggtctgatccaggtgcgtccagatagcccccgtgtgggccccacacggacccatgggacccctggcctgggcccgcggtgctggagcgaagccccactgggtatttgtctcctgttggggaattcaagtctgtgctgagaaccgcttagatgtttgcagaggcccagctcctatggcacat

SEQ ID NO: 23581 - DNA, 201 bp, Bos taurus
ctggctcccttggtcagaaccggggatgctcagttgcaccagggggagtggtccctctgagatgccccatttagacaggctagtacagcgctacccttggctctttaggttgtaatttaaaaagacttgaccctttcacaaggtgttccagtagtaaggtgctctcctcagcacatctcccgcccaggcagcagtggcagc

SEQ ID NO: 23582 - DNA, 201 bp, Bos taurus
tgagagttaccacagtgccaggagggccctgatcccgcatatctcccagccactctgtgtaccagcagcaccacctccccctgccgactggggccaattagccctaacagaaccaaaagtcctcctcctgaccgttgctccctgggtccaaggggctcaaaatgccagggaggcagcagtggcccccccccagcccactgt

SEQ ID NO: 23583 - DNA, 201 bp, Bos taurus
ggaaatcatgtgggaattcacgtcttatcaaagaagtttttgcctgacccagggcacaaggattctctcccatgtattcttataggatttttatgtttttagcttttactcaatccaattcaagttactttgggatattggtaagacagggggttgagattaattttctccccatagaatattcagtggtacctatttgat

SEQ ID NO: 23584 - DNA, 201 bp, Bos taurus
caggacatgtggccccactgcccgggggaggagggccagggtggtgacatgggcaccacaactctcccgggaggaggtgtcaggctgggaccgtggtttcaagtcagaaggccatcttgggttatggggcatatgccctttctgcccgcatccttctctagccctcgacctccgccttgcaccctagggcgcgcactctgt

SEQ ID NO: 23585 - DNA, 201 bp, Bos taurus
cgtgttgaattcctgtacttaagagtctgcggcagttaaaaaccaaaaggttccctaggttgcgtcccgccttcatcagaaggatctgtgctaggtgtgtgcatcccgaggccttgatttctcaggaagcctgacatcctcccagccttgtgaccaaccctgagtctctcatgatgatggtggggttgtctctaggctcct

SEQ ID NO: 23586 - DNA, 201 bp, Bos taurus
aagtagaatgattcaccagtgtcgggaagccttgaggacaaagagactgagccgaagggcagcagctgacctcagagcctgggcccttaaggaaagaagtggtactcacaggacagaccagccagagagaaagctgacctgcattgctcagcagataaagcactggggcagacctccgatgcctctgtttgggcagccaac

SEQ ID NO: 23587 - DNA, 201 bp, Bos taurus
tgggtatggggcccgctgccactgtgtgagctgccagcaataccatccttgcttccacatgtccacaaaggcagctctcgagactggaagcttctttagccgggcagaaggccaagcggggcgagctggcgagctttttatctcggctctgaactcgtgctctgaggttcagacttaactcagattctcacatgttgggga

SEQ ID NO: 23588 - DNA, 201 bp, Bos taurus
acctgggggagttctcgcataatcccatgctgtttacatttttccagacctctccccagattcccaccttggcttctgctggccattgactcctcactgtggtctttaagtttggtttgggctctgcaaggtctcaagcaacaaaagtgaggttgacttcactctggcccagagacagcatagctcccctacaatgtatgg

SEQ ID NO: 23589 - DNA, 201 bp, Bos taurus
tttttttaattcagtgactctcatttctggatctgctgtgcatttgtttctatattctgtgtctcctgccttttgtacatgctgccttgccatctcaagacgcctggtaattttatactgtgtgccagacactgtacatttacaattgtttgtaaatgacttaggtcctgtttgattcattttatgtttgggatcacctca

SEQ ID NO: 23590 - DNA, 201 bp, Bos taurus
gagagtcttgtctggagggtcggccacttcaccccacgctgcatgtagtatgaaagctgccgcatcaaacatagagacactaatcactggtaactattctcggccctgctaagtgatgcttttcctgctgtgttcctgaaaattcagcttctcatctagaattcatccggagtgcctgcccgtgaattaataattttgagt

SEQ ID NO: 23591 - DNA, 201 bp, Bos taurus
gagccctcaggtcatatttcccagccgaggccaagaatcatgcttcaaaggaaacttgaaggtgagtgaaattaacaaagtttgcggcatatttgaaatcacaaggatggtcaggccacctgtctttatcctgccagctcctattaaaccatcaaaggcttatttgtgttcctttgatgtgggctgtaagtgtatttcctg

SEQ ID NO: 23592 - DNA, 201 bp, Bos taurus
ggaagatgctggtctcacagggtggatttactgaatgactagactgatttatccttggcatatttggatgtatgcaaatatgcatacatgcttggggccacccaaactgggttgaattcctcactggaccattctcacaatgtgtagcctcagacatagcaaaccaatgcaagttcttgtacagtttgcccattgttttgt

SEQ ID NO: 23593 - DNA, 201 bp, Bos taurus
aggacacagcattttcaaccacgaggcccgctgacagtcatcctagggactttgaggattgacaggcaggtaactgctgcttacactttatcttctgtctacacttcctttttctctctcaggaagtgagttttcaggattatttttaaaaacagactgaaaggaaagtcattcctggagttatcctctaaggaacacaga

SEQ ID NO: 23594 - DNA, 201 bp, Bos taurus
cttccttcatggccacgttcccaccagcaaggaggggagagggctggagagacactccctgctctcctccatctcagcatcgactgagatgtgctgctgcagtgtgaggtccattggccagaacatggtcacctggtcacatcaagttcaaggagggctgggaaatgtcattgtcacttagggaagccattgcccttgctc

SEQ ID NO: 23595 - DNA, 201 bp, Bos taurus
agagaaaggggctggaccccgtgtgagttatgaaagggaagaccagatgagaggagataacagcttcaatgccttgcttttattatacaaatctgcactttcagttggaagaaaagattttttttttctattggtggttatttgcttaagagaattggagacctgagagctgtctcggtggatgattaatgggaaaaaatt

SEQ ID NO: 23596 - DNA, 201 bp, Bos taurus
cccccagacgccaatcgccagccctgtaggacctgaacctgcaaacagacattgtcctgccagtggtttgcaagtggccgctctggtttcctaaccctgccgtgcaagttggggtgtgttttgaggagtcttctcaagcgctcctcccctttggggcagccacaaggcccaggagttaggaaatggagtgtaactgccatc

SEQ ID NO: 23597 - DNA, 201 bp, Bos taurus
actacaagctgtccgctcgctccttcatcggccggcacagccagagcaggaggagggaagatgccctgtcctcggtgagtgcctgagcttctagggccctggatgcccccatcaagtgcgtgtggtgttggggttgagtgctcacaattggggcagacagagcggctcccagcaggatgggccctcgccctcccccagatc

SEQ ID NO: 23598 - DNA, 201 bp, Bos taurus
gaagaggcaggtatagccagagttctatgttcagcaggagtaagatgaggaagcttccaattatcagtttctgtgttctaggactagaggctgcagatcaaatctgcagagacaaagaccaaaggagtgatggatcggaagagagtgaagaagatctaagaacgtgtggcaggcaggtggagaccgagctgaaggcagaag

SEQ ID NO: 23599 - DNA, 201 bp, Bos taurus
ggtggtcaacccgcggcacaacctgggcctgcagttgtcggtggagactctggacggtaagtccccagccagcaccccagctcatgctgatgcagcccgccactgtagactctggggggagctcaactcatgtctattaggaccaggtttcctctgctcccttccccatcagcacttcctatcgagcattctaatccaaat

SEQ ID NO: 23600 - DNA, 201 bp, Bos taurus
aagactataaacaaaaatgtccacaccacagttccctttgcaggcacaaaggtgtctctgagggcagcacaggcatcctttttggccagaagccttcattcgctcactcactagttccttgtgtgtcctctggagttacaggagcaaagcacagcctctgcttagggaagcatgtgtcctccggggccacaggaaaccaat

SEQ ID NO: 23601 - DNA, 201 bp, Bos taurus
ttacgaagaaatacacttatttctaaaatttccaacctattctctatagccagtttggggccagatctatagatatcacccaacctttaagagatggccctatttcagtctaactatgagaacaaagaaacaacccaaattctttctcaaggtcccagcaaggtgagggggattcagaattctctccaagtgtttctgggg

SEQ ID NO: 23602 - DNA, 201 bp, Bos taurus
catgctgagtgctattatgtgccttggcccattattcaaaataaaaatccttcgaggcaggatctgttattacatttgggtccaaggtcgcacagctgcatgtccaatagaccctggcctctagccccagtcagcctggcttcactggccatcctcccgtcatcacttctggcttttgggaggatgctgtgccttcaggag

SEQ ID NO: 23603 - DNA, 201 bp, Bos taurus
gacaggccacagagatgacatggtcttttgctccgggtgagccgggagtcactcaaaagtaatgcccagaactccagcccaggctgtgcctctgagtaagtgagggccctcctgggcctcagtggccttacctgagaaatgggacttgattgtgtgtttgtgttagacactcacgccagctccgtggggggtggagggcac

SEQ ID NO: 23604 - DNA, 201 bp, Bos taurus
tcagtttcgagctgagtggagaaaaaactgccaagctcaggctggtggagaaagcaaacccacacaggtaagcagtcacaggcctgtgtacagaatgagacgttattgttgctcatatgctgagtcaagataaggatacaagcatcctcaagctccctgtgatctgggggccattaatgatagtttgtatacctccttatt

SEQ ID NO: 23605 - DNA, 201 bp, Bos taurus
atgaactattataaagctacatcatgaatgaaccttgaaaacatgctaaatggaagaagccagacacttagagttaagtattgtgtgattctgcttttatgaaatgtccagaataggcaaatctataaagacagaaagcggatgaatagttgttaagacgtggagggggggagtggagagttattaggagtgactactgtg

SEQ ID NO: 23606 - DNA, 201 bp, Bos taurus
actttctcctaggctggagagctttatcttgaagtgctagcagatttaacacaatagatttttcctccccagtgttaacaaaaacctttataccctttccgataacttccttgggcaacctcacctgtctaatgtctaacatcttaaaggaaacttccttcttttctcagtcatgtcatatctacgtcagcatttaaatat

SEQ ID NO: 23607 - DNA, 201 bp, Bos taurus
tggcccctctcacaccctcacagatgtctggaagccccagcccagaagccttacccagtggcattcttggtctcagccctgtccaaagtaaactctgagcaacctgggcccctcatctgcggctcagcctaagggagcaggggttgatcattcacttcctatatgtggggtccaaagagcacgctgaaggcctgtgggtgg

SEQ ID NO: 23608 - DNA, 201 bp, Bos taurus
taccagctggcctcaaggtgatctgagtgaaatgtccttccctggggacccaaatgctgggccctttccttgtgagatcttggccagtcacctcccttccataaacctctttcctcagcagaaaatggggctttctgaacctcctcacagagttgtcctgagcaccagttgggaaagttgacctgcagtgccaagcccagg

SEQ ID NO: 23609 - DNA, 201 bp, Bos taurus
ccagactcttcctccccctccccacaggccatcttcaccaggtcccatcagtgacctcctggcaaccctcacctgctccctctctttccatcctcacacctactggccgggctcatagtccactttctgaacctcctccggctttccctgactcagacctcactgccttcactccattctccccctgcagcagggagattt

SEQ ID NO: 23610 - DNA, 201 bp, Bos taurus
ataactctatgtattcattgtctctccagatttcgatatggcagtttgtcctatgacctccgcctgccaatacaggagacatgggtttgatccctggtccgggaagagtctacatgccacagaacacctagtcccatgcaccacgactattgggcctgtgctctagagcccaagagcccaagtaccgagcctgtgcaccac

SEQ ID NO: 23611 - DNA, 201 bp, Bos taurus
tgattccctggaccagacatcagtcatctctggctggcagtgaaaattctggtttctggtttaggaggtaatcgcgtgaattatggaggcccagggacaaccccctcaaaaccaaggggtcctctggcttccaactagcgatgccaccacaaaatgactcattgcaaaaggccttccctccactgagctgagcttccccct

SEQ ID NO: 23612 - DNA, 201 bp, Bos taurus
gtatataatttaagaagtccaaaataggtcagtcccaaacagccactactcccttttctcttgggagatggtcttccccggaggcaaccataaggttcatgtacgagctgcctaacacagacatgcatgcatggtaagtcacttcagtcatgtctgactctgcgaccctatggactgccaaagtcctctgtccatgggatc

SEQ ID NO: 23613 - DNA, 201 bp, Bos taurus
ccaaagtctaaactgtttgctgctgcatcacattgcctccctacctgccctccccataccatcttgtaataaaacctctctgcacagccctcacggtccattgatggcctcactatcaatcctacaccttcctccaccttggtggacttcaaatctttccataagggggtagattcagagggcaatacagtaacacacctc

SEQ ID NO: 23614 - DNA, 201 bp, Bos taurus
gtcacacgagtgtcagagtacaactcaggtcacagaaattcctctctcctcaccacgaagccttttcatactgttcacagggttctcaaagggagaatacgagagcaggttggccttctcttctccagtggaccatgttttgtcacagtgttattgagttacgcaagtccctttgccacggcaaggctgtgatccatgtga

SEQ ID NO: 23615 - DNA, 201 bp, Bos taurus
catctctcagcagtgagggggttgcacaggggatgagtaatgctggccactggggagggaatgggtgtttatcaggggccagtacagttgtagggagctcaggatttgacattcacatctcttctgagagggaaggagctggctgacacctccctggcctacaggggaggcctccttaacttcgccttttggtttttctac

SEQ ID NO: 23616 - DNA, 201 bp, Bos taurus
tggaacccatgtcttcttgcgtctcctgctttagcaggtggattctttaccatggcaccacctgggaagccctcctgtggagcaggtactgttattactcatgttttatagatgaggaacagaggaccagagggacaggataactgaggatttgcactcacgcagtctgactccagaactcctcaacattgtgctgtattg

SEQ ID NO: 23617 - DNA, 201 bp, Bos taurus
taacaaagcccctttccttagtatgtgtaaggcctttcttttgctactgaacatttctatttaatttctcaaaggcacttccaactccatgatgcccagacgctcatcactttactcaagcctggccctagttcagctctcccaccaggaggcccgtgtgaccttccgccttcacagccaggcctctcatcacccacatca

SEQ ID NO: 23618 - DNA, 201 bp, Bos taurus
cacactggagtctgggaactcaacctctcatgaccctctgaactccagcagccacagacctcaggaagggccctggaggggaggccctggaggggctgctcacctgtttcctcacatactctaccaacaattcaagttgtcgagggtcttcgcatttctggttgaagaaggttctccagagggcggccgccagcccacggt

SEQ ID NO: 23619 - DNA, 201 bp, Bos taurus
gcaatgaagaccctgaacagccaaaaataactaattatttttttaaatgggcacagaacttgaatagacgtttctccaacgatatacataaaggccaataggcataaaagaaatatgcttaacagcagtaatcactagagaaatacaaatcaaaactgtaaggaagtatcatctcatacccactatgatggccactaggat

SEQ ID NO: 23620 - DNA, 201 bp, Bos taurus
gttacatttcaccttgctcagcactatccagcttgctgttggctgttgaaatcagctggtttccagggatcgtgtttgttttgtttccacagggtctgtaccacctctccatggacatcatcatgatgaaccgagtgtgtaaaatgttccgtcaaggcctcaggggatttcgggaatatcagatcattgagactgctcaca

SEQ ID NO: 23621 - DNA, 201 bp, Bos taurus
gaggccactgctctatccacacaggttgatcagttttccaattaagaggtataggtgtgggtggaggaagattaatacgagcagtggcccctagtgaaaacggggggatttgaaatcttgagcagtcaaaggataaattcttccttgttgatttttgcccaggcccaatcttcgtatataaccttgattgaacataatttg

SEQ ID NO: 23622 - DNA, 201 bp, Bos taurus
tcttggcctgagagagtcttcagggagctttggggagctcggcatctgcccgtggtagtggtctgtaccccagggatgggacaggacccccgtgctcctcagagacctctgactaggtggccctgtcaagtacagccaggcggggaagcaggacccacatctctgagctctgctgcagggttcttagggctcccggctcac

SEQ ID NO: 23623 - DNA, 201 bp, Bos taurus
gcagcgtgcgtcatcccaagcccctggcggcgtggggtcccgcctggctgctccctgctctcccttggaacctctcaagctttctttcctttctttctgcatctggcctgagtctctgtgaatctctccaaagcaccttgctctcgcccctcctgttgcttttctgttgctgagggaatctgttggggaaactttcagggt

SEQ ID NO: 23624 - DNA, 201 bp, Bos taurus
attgttcttctataatcgagtacttaggtggtttccaggttttgttcttggagataatattgctgtgaacttctttattcaggtagcatttccccctcacatctgctgtagtaattatcaaatgattgcatatgcctggagaggggatgctggaaatggatttggtttggttgttgaggaaaaggagaagatattggaatc

SEQ ID NO: 23625 - DNA, 201 bp, Bos taurus
ggcttttcagtctcaggaagggtgaggccctcccctagctgggtggctctcttgcagccatcgtgcccatctcacacctgacccacctgcacagagagggcggccttcccgaccaccttgcctaggtgcttgctccgacttttccttctcaggacactctttccagcatttgtcaatggcctattgactgaccatctccct

SEQ ID NO: 23626 - DNA, 201 bp, Bos taurus
tttggaattatccccctatacatatttatttcctgttataacaatcatgggtccccaagaccacttccaggttggtgactttctaggaggactcaccggacttagtgtgtagttgtgttcatggctgtgagttattacagtgaaaggatataaagcaaaatgagcagagggaaaagaggcaagggctgcagtccagaggag

SEQ ID NO: 23627 - DNA, 201 bp, Bos taurus
gggcctgtgagcctcccccaacccttcttcctgaatggaacttcctgaaagttccatatctattgatggattggggcttacaaaattggccccagtttccattcctgtgtgacacagtgcagggaataaacctgtgttgtttcagtagatgtttgtccctgagtcaaatggaccctgcctgggatcttagtgaacaaaaca

SEQ ID NO: 23628 - DNA, 201 bp, Bos taurus
aattgaagagcaggattcaaatgcagatttgtctgactttaaagcctagccacagagttcccaaggctgctctcatcataacttttgggctctcttaaaatggatgggataaaggaccaggctggaggggaatgagtctgcactgaccattgactgagtccttgtggggaccccaaggagactaactgatcatttcttcct

SEQ ID NO: 23629 - DNA, 201 bp, Bos taurus
ggggcggagggtaaaggccacatttcaaaagaagggtgctgtaatggtgggacgtgagaaattcctggaacctgagtaggagctagaaacttgcagagaaaaccttacttcgttcgcatcaaaaacaggcagagttccgactgagtcgtacggacgcaggtggaccgcctccacgcctgtattgcgatgagatacgagtat

SEQ ID NO: 23630 - DNA, 201 bp, Bos taurus
ggatttcccaggcaagaatactggagtgagttgccatttccttctgagtggagctcaaggaattgctaaacatcttccaatgagtaggacaggccctgtgcgtaagagcattactcagcccccaatgcatggaagttgagaaactttactacagaggaaaggcttggctatctaagcgatcacctacctggtcctgtccca

SEQ ID NO: 23631 - DNA, 201 bp, Bos taurus
ggtcctagggggccactaagaccacgaggttgacacttatgcagttctccaggtggcttgggtaaaccatagcccactggacttgacaagtcattgctgcgcatctgtggcctccctttaagtcaagcagtgtctttttccatattgaggccaggacacattgacaaaggggcagctctaccactgaccacaggctctgtg

SEQ ID NO: 23632 - DNA, 201 bp, Bos taurus
cctggttgccaaagcattccaacgatgcggtccaaaaattagtcaagcccccaaggtgctcggagccagacttcaccgtggcctcctgcggcttgcattcaagaagatgtagcttcagctgctgctctgctggttcctttggaggacttggcactcccccattcacggatgcatcacccccattggcctggttgtcctcct

SEQ ID NO: 23633 - DNA, 201 bp, Bos taurus
agtatatgacaaatacacaaagaaacagctttcagtgtcaatgagagtcaggaagaactgtagaaattatgtcaaagccagggctttaagaacacaggccaaaatggggagagagggcatacattcctgatggatggagcacagtgtgctaaggtataggtattgggggctttgctggaagcacaggaggccccacagtaa

SEQ ID NO: 23634 - DNA, 201 bp, Bos taurus
tttttcaagagaccttgttgggagcctggaaaagatatctgctgaggattaaaaatataagacaaaaaatatttcttccatgtatctcaaggtcagctggagggtggggaggggagggaggcaaaagagtataaatgaagtctctgtttcagcttccaccaagaagggcactaaattaccccttttgaaaatggccttaaa

SEQ ID NO: 23635 - DNA, 201 bp, Bos taurus
cctggaatctgggggcggtggcttagttgcatagttccaatttagggtttttcatgaggttgcaatcaggatgtcggcctaggctgtgatcatctgaacatgtaactgtggctgggtgaactgctttcaggatggcgttctcacatggctgttggcaggaggcctcagtttctcactgtgcgctactgatgaggcctcctc

SEQ ID NO: 23636 - DNA, 201 bp, Bos taurus
tctctctctttttgatgtggactgtttttaaagtcttctattgaatttgtcacgatattgttcctgctttatgttttggcttccttggccacaagtcacacgggatcttagttccgtgacgagagatccgtcttgcaccctctgtaccataagctgaggtcttagccactgggccgctggggaagtcccctaccttcttct

SEQ ID NO: 23637 - DNA, 201 bp, Bos taurus
agcctgcatgctgtgttactgaagagcttagagaagatgctgatatactgacagagagataaaagatgctggaaaaaaataaacccttgcaactgctaggagtggccgcctgagctggtccagccctcccagttcctgagggagcacacccactccctgactcaccgtcctcctccgtctgcaccaccagctcctcgctct

SEQ ID NO: 23638 - DNA, 201 bp, Bos taurus
tccaggagcactaagatgctacctaagaattcgggctatccagaggccaccatgctggacagttcacggttggtgctctgaccagtccagcagtgccttctaatcatccctgcccaggggccagtgcagctgaacccatcttgaaccatcctggccctacagaccagctgcccctccagcagaacacccgagtggcctctg

SEQ ID NO: 23639 - DNA, 201 bp, Bos taurus
tgctagccagagatgtatatgctagaaatgactggtctaggtgctccactcagaagcaggagtgttccactcccgctctctctccctggcctaacaatggtaggcaaggctctccatgatctgggtccccgcgacctttctgacatcatcttctgcaaccctctctgtggctggcccttctccagctttatggtcctcctg

SEQ ID NO: 23640 - DNA, 201 bp, Bos taurus
tcaattaacttaccttcacatgggcccccatcttgggtctgtttctagggaacccaaccccaaacaggaaagttcacattaaataatctcttctttccagttcctcttgaaaactgcttctttcccacaaggaagcctcagctcacctcgaagacttgctgccccactgaaacagtcaccaagaactgccactggtttatc

SEQ ID NO: 23641 - DNA, 201 bp, Bos taurus
ccggagaggaaactgtgaacaccctgtaagtttgcagggaggaaaggatgaggaagggaatacagaattctcaactggaaagaccagaagggaatttctaaataattctaatccaactagtggcccatacttagattctgttggatccacagtatagaatatcttttatttaaaaagtggccaatattgaaaatcaggaga

SEQ ID NO: 23642 - DNA, 201 bp, Bos taurus
tattttgagaagtatcagtggacctcccacccacagataaaatctgtgttcttgatggtaacaaaattctgcacactcaggccagcctttgaatgctccatagatcaaatttaggtgggcaacagagcctttggggtgagagcgcaattgtttctgggctctcacaaggcagccaggcctgggtttctgctgcagtggttc

SEQ ID NO: 23643 - DNA, 201 bp, Bos taurus
attaaactttcccttccatttataatagtgcatagggatgtgagttttggagcccgtataaatatgtgctttagaattaaactggttcagcgattcttgaaaatgatttcccagaaattaagcccagacaatttgtttggctggagcagagcatctgaaacactgcgtgatggaaaggcggtgaacgttgcccggagccca

SEQ ID NO: 23644 - DNA, 201 bp, Bos taurus
caaagtccttccagattttgacaactgatcatctgatggccctagcttttatctacttctgtaattttgttcccttagcaatactttcattaatgcctctattgcattctctttttataaagggccacatcaaaccattgacactaattgcgctcaggataaactaaagcccctgatttatttcccacaagtgatgctgag

SEQ ID NO: 23645 - DNA, 201 bp, Bos taurus
ctcttcagcctctttccctgggcgcccttgggtggtttatgtgccctctctgagccctgctttttgcatccgtgaatgggggctgattgggtgtctcaggattatgtctttagatgggttggcctcttccaccctctgcctgaaccccagaagggacagtggtcttttcaactgaccagagactggcctcccccagctggc

SEQ ID NO: 23646 - DNA, 201 bp, Bos taurus
tgcaagccccctgttgagtcatcaaccagtgcgcatgcccagaccttctaacaaagtgtccaagagcagatgcccatggtatgcgggcagcaaggcccagccctttaagaatagtctaccttttgaggatagactatgctggtgacactagaaaaggttctgcagcctcaaaagggggtgagtggagatgggagagaagct

SEQ ID NO: 23647 - DNA, 201 bp, Bos taurus
aaaaagactaacaaacaaaaaaaagagtcttctctaacaccacagttcaaaagcatcaataccacataactaatgagaggcccatataaagcaggcaaacagcactgtgagagccctgagaatgtatatttcacaacaggaggggctttggctcttttgctcatcgtgttacttcaaggcctgatgcataacgggtgctca

SEQ ID NO: 23648 - DNA, 201 bp, Bos taurus
cggaaggctggcgggggcggggcaatcagattgtaaacaatggagacctggcctcttacgttcctcagcaaacgcagaagaagaacggccgcatccgatcaccgcgcatcgcggatttcaccctggacctcccggggtttatataccctctgcaacccagggtcggcccctcaacccccgggcctccggggcccagacccg

SEQ ID NO: 23649 - DNA, 201 bp, Bos taurus
atccatggtcagccctccctcgtcttgcggcccgatctcctccccaggctgcggagcctccccgggtctgaacctgctctcctccagcctctgggcccctctttctcccctgtgcctctaatccagctgaggaagggacttccgtttcttgaaaatccccagggggcctccatgcactctccctgtctggtccttcctggc

SEQ ID NO: 23650 - DNA, 201 bp, Bos taurus
ccttgcaagaacatcctctcagatcattctctctctcccgagaggcagccttctgctccagagcggaggggtcatgtcctgcctgtgccagctgtggtaggagaaatccagtcgtcccacagacagttactaaccagcttttccagttttatctgctctgcatcttggcttttggagattcccggttcctccaacccctga

SEQ ID NO: 23651 - DNA, 201 bp, Bos taurus
cttcagtcctcttctggagaatgggaatgtaggtctgaccccctgctgctgttcactgcaccacaataccacctccttgacctggtcctctgacctgcccatgaggccaacagacaagatgtatatcagcctccctaaagcttaaagaggacaagggacatgcccaaggccactcggggtcagtggccaggccgggaccag

SEQ ID NO: 23652 - DNA, 201 bp, Bos taurus
agtatcactggtaggtaaatatatcctgacctagggaaaggttcaaggtcacacaatgagtaacaaagggttaatgtcctattttgcctcccaccatgaaactggttccatggctgctgccccattagctcactggtcatggaagagctcagcctatggtgggatcctgggcccatcttgagagcagctgctcctcactga

SEQ ID NO: 23653 - DNA, 201 bp, Bos taurus
caaaggcctctctgatttcctaatgaggtgacatttgagcagaggcaatgacgtaaggaaccatctcatccagaaatctggttgaagggcactgcaggcagagagaacagataaaagggcccagaagtgggagtgtgtttagagtgtttgaggaacagcagggaagcctatgtggctgaaacaggatgaagaggtagaaag

SEQ ID NO: 23654 - DNA, 201 bp, Bos taurus
ggcttttaagtagctgatttgccaaaccaatcaaaaaggatttttcctaaacttgacttgcatctcagagaagacaggcctggcagaactggaggagagcagtaaagatgcacagaggaaaagcataatgtcttggcattgccttccctatacaaccttgaatagacaagggccatgaccgtggcctgagaagggtttggt

SEQ ID NO: 23655 - DNA, 201 bp, Bos taurus
gtgatgcaagtttggacttgactttaggcaacagtacatccatttccagcccacctgagatccagcaaactggagaatcccagagaccgtttcagagatgtcgagcagaggccagagtggaatctacggatcgactccctcaacatccgtttcaccctcattcctgtatctctctattgcctcgaggccagaaggttaaaa

SEQ ID NO: 23656 - DNA, 201 bp, Bos taurus
tctgtgtggctgtgctcccacccaccaccaccccacccctcgactcaaacaggcagggccccaatgcaggcctgctgtcgccttggccgaaacccaccacgcggataaacttgtgacttggtaccgccccttcccgcctgctctcaggaaaggtctccagggggcgccctcttgagtctagctgtgttggctaggtggccg

SEQ ID NO: 23657 - DNA, 201 bp, Bos taurus
atcttggccataaaatgtgtaaataaactctttctatgatgataggtaatcccttcccggaacctgcatggtagacgtcacctgtttccacacgggaaaactgcagattagtgagtggccctcagtcacttagtagtgagtggtaagttcaagtcaagatattattctgtcaaaatccactggatagagtgcctgacatct

SEQ ID NO: 23658 - DNA, 201 bp, Bos taurus
cttactcccctctttgtggcctgtcccaccatgcagctggggtgtgagaagctcagtcactctcagcttacctcaggagccctcctggaaggccttctgtctctctgcagcccttcttgtcctcctgggcactgtgatggctggcaccctagtgggtgaaaccagcaaccaggcccagggtaagtttcagctcacctctcc

SEQ ID NO: 23659 - DNA, 201 bp, Bos taurus
acacgactgaagcgacttaacagcagcaacagcagcagcagaatcaataatgtatcaaatgggttgtgacatgacagtatcttgtcctgaccaggccactcacacgcttgtgtgctggggcaagtcatctgtagtttcctcatctaaacaggggaaacaacgagtcttgaatagaaagtgtttattcatatgttatggcca

SEQ ID NO: 23660 - DNA, 201 bp, Bos taurus
tgctgaccccagcccttctcttcctcactcccctccttgtctctcttccagtcactgaactggggtgtgagaagctcagtcagctgccatctttcctcacgagcccacctaccaggccatggagataagccagctctgctttttggcaacccatcttgccctcctgggcagccttgtggctggtataccagggtgtgaaac

SEQ ID NO: 23661 - DNA, 201 bp, Bos taurus
attcaggtaaccctacagccggcccagggtctggggagacagccaggggaagttttctggatgaaggtcataagtcacccctggcccaggtcctccactgatggttccatctccactggggcacattcacctgctccatctcccagcatttcctctgcttgctgcaccactggtccagagccccagccccctgggccatct

SEQ ID NO: 23662 - DNA, 201 bp, Bos taurus
aattcctgggagtagaagtccctatctgccttcagaacctctcggccaaggcaggaaaaaaccatacagcttccattttcccaggtgccatgatgaattatgggaaggatctgaaggccaagcatacctgctgataggcatcagacacactctgtactattcataaggagaataactagacaatagagtgcatccctattt

SEQ ID NO: 23663 - DNA, 201 bp, Bos taurus
ctggatcacggccggtaaggggtttccatccttctttcctgtctctgcacagacctagggctccggatccagagcgagggcaccttgaatacagacaccatttgtgtatgtgtcgaaggccaacactgtaccagtcacacctgcgaaagttgcacgccccacagcttgtgtctccctggcttcggggtcaagcagatcggt

SEQ ID NO: 23664 - DNA, 201 bp, Bos taurus
agaataaaccaggatttaaaatcaaacttaaaaaaaattcacaaaatccctaaagctgctttcccagaaatcagtggcagtggtttgtgcagcagatgagctttggccaagccctgctggacagtgggtggggctgcaaggcaggaggtgggccaggagatgcccaggacctaggctgtccccaccttggttgtcgatgtt

SEQ ID NO: 23665 - DNA, 201 bp, Bos taurus
accctaagggaaatagtggtagtggtgataccaggagggagggatgtgctaggttgggcttggagatttaatcttctttcttccacgcagaccttgcccgtgtgtcccacctggtcagcctccctcggccatggcagcctacagccagacacagtacagtgcagggatccagcaagctaccccctacacggcttacccgcc

SEQ ID NO: 23666 - DNA, 201 bp, Bos taurus
agacaaatgcaaggtggtcaggagcctttgcctgtggccaggaagggatcctagggaggactggtgagcagtctttctgggttcacagtgggtcaaccccgattcccccttttgtgccctgccttccaggctgctcagtaccaattggaagctcagctctaggcccagttgtgggtatgtgtgttttaataacagcttatt

SEQ ID NO: 23667 - DNA, 201 bp, Bos taurus
gtccttgtggagtgggggccctgcaaaatgccacatggaggcattctctgagaaaggaccccaggttgtcctttgggggctttatggaggcttcatcccatagtcacgattaactaagtcattggccaatggagattggttcaacctcaggtccctcctgttgttgtaaactaaagtccctcagtcgtgtctgattctttg

SEQ ID NO: 23668 - DNA, 201 bp, Bos taurus
agttccctgaccagggagcgaacccgggcgtgaaagtctaatcactggaatgccaggcaactccccacatatcctcatgttagttgagaggaaattattacgcccagctgagaatatgtaggtctcccctcggagtcatcaactatcctaattttcccaggattgaggtagtttctggcatgtaagtgctaaaaccaggga

SEQ ID NO: 23669 - DNA, 201 bp, Bos taurus
gctttgagatagggactgtacctttttgtaagcgtttaaaatcctcttttcaattatattcattttaagtccccccaaacatttggtgtttgaatgtggaggtttccagagttcaactctaaatccggttttctacctggaaattgagataaaattagtgtccttgggctttgcttgggacttaggtctccctcgtagagt

SEQ ID NO: 23670 - DNA, 201 bp, Bos taurus
gttggaggatcaagccccctgggccccagcacacccagaaggttccttctgagggacaactctctctcagatggggtcagctggccctcagctggaccctggaggcgactgtggacttaattctctacctgtcacttctgatttatccaagcatccaatctctggacaacttactgcattaccacatctctgcccacccta

SEQ ID NO: 23671 - DNA, 201 bp, Bos taurus
tgtgtgtgtatctgtgtgtgtttgtgtgtgtctgtgtgcatctctgtgtatgtacgaagctggggagggtggacggggccctgggcaggtgcagtgggactgtgtcgcaacgagcagcatttgccagaacccaaagcccagcagagaatgtgacgcaggcttgacagggtgagagtctgacaggggcctcgagacagaaag

SEQ ID NO: 23672 - DNA, 201 bp, Bos taurus
cgcctctcccatctaacctccaagctccaaccttcctatccaacctccatccaacctccaccgttgccagaagggttctgttaaatcacagaccgggcccgggttctgctccaaacccttcaacagctccgcgtcacccttgaactaagactcagagtccttgtcatggccacaaggtcccacgtgatatgcctcctgccc

SEQ ID NO: 23673 - DNA, 201 bp, Bos taurus
ggagtaccctgggcagtgcagatggtcatgcatagacgaacagtgcgcggccgactgcagtgcagccgcagtccccgcgcaggggcctctccatccttcacgccaattttaatccccttgtctcaccccagtgttgttctggaagcttgttccatgctgatggccttaagtcaatgaagtagtcctcagcggcttaaatga

SEQ ID NO: 23674 - DNA, 201 bp, Bos taurus
ccaaacgtgtacaggcccttcaattgtctgcaaaaataaatgggggaaaaagtcactgatgcaagtagattcttccaaatatctaaatatttggtattttagaggcctgtcttgcctggaaatccttccctttctccccatggccgatgtttcaactgagagaccctaacccaaggaatgttctggcatttcattggttta

SEQ ID NO: 23675 - DNA, 201 bp, Bos taurus
gcccttttttccttgtgtctttaggcagcagaaggggtaagggagctctctggagtctcttttttaaggacagtaaccccattcatgagggctccaccctcgtgtcttaaccacccaaaggtctcaactcctaattaccagcacattagggggaattagtttcaacatatgcattttgagggacttttgtattttcagccc

SEQ ID NO: 23676 - DNA, 201 bp, Bos taurus
tttggaaaagtagaggaaagggggttggaactgtgagaacaaagctggagtctgtaaaccagggtctgacttaaatctgtgtctgggccgtgccatctctcatctggaccactgcccaagtctcctaactgggctttgggcatccatcctactccctcactctgtgcatcccacttggcagccagggctctttagatacat

SEQ ID NO: 23677 - DNA, 201 bp, Bos taurus
tgatatcaagtggctgatggggctgctccaaacagtgctttgggaccttgccccgggcatagaggactcccttttccggatcgggcaagcctcctgacttggctccttatgaaatacaaggaaggacctacgtatggaattccatgtatagcacatggaattctactcaatgttatttgccagtctggatgagaacagggt

SEQ ID NO: 23678 - DNA, 201 bp, Bos taurus
cttccagcctccagaattttgaatttccattgttttagcaacccagtctatggcactctgttctggcagccctcgcaaactaatatagacgctaagtgacgtcttaagaaatttggaaaggagaccagatggtgacagtgattatctctcggtgcaagaattatgggtgactccaaccccctttctatattctatgattta

SEQ ID NO: 23679 - DNA, 201 bp, Bos taurus
cttttcgaattaggttttcgtcttttacggattcatgtccaggagcgggactgctggatcatgtggtagctctacgaagttgaccatcttatgatcccatagttctgataatgtgtcatgtcaatgtaagatgctaggattagaggaggctgtacaaagactttatgggaatgctgtactgactttacaactcttctagaa

SEQ ID NO: 23680 - DNA, 201 bp, Bos taurus
agctaactgcagaataggctgggaaatataatctctctcagccacatgtgccctgggagcacctccaggttcttgcgttttgaggagaaagatgagggaggttggtaggccctggcagtccctgccaccctcaccctcagcgctgagcacggtcttatctggctcctcatccaccagcccagccagactgtgagctctctg

SEQ ID NO: 23681 - DNA, 201 bp, Bos taurus
gtcacgagatggttgccacagctcactcatcacctcttcacacaattacagccaaatcaggaaaggaagaaaagaggccaacagatctctcctcatatgcctctttcttatcagagaggaaatcccttcccagaagcccccagcagagcttccctttggccagaactggggcaaatgactacctctagaccaatcacaggt

SEQ ID NO: 23682 - DNA, 201 bp, Bos taurus
ccgttaacgtttccaagaaaaaccagaaacctcgactttgtggggagccgcccagttttcaactatcgacaactaattataaattattttgttaagacagcgtgggtcaggcccaacaactcgggccaaaggccaccaggtaagcctctggattgcagatgtctcctctcccagggaagcgtggaaggggaggactttgga

SEQ ID NO: 23683 - DNA, 201 bp, Bos taurus
gtcagagacctgaggtagtatcttagttttctgtggctgctgttaacacagtaccattaacacaacagaaatgtgggacttgccgggtggcccagtggccaggactccatgcttccagtgcagggggctcaggttcgatccctggttggggaactaacatcccacatgccttgcagttgggccaaaaaaacccaaaacatg

SEQ ID NO: 23684 - DNA, 201 bp, Bos taurus
tctgaaatgacaggttccccctctggccttggccaggccataaagcttgcttcagcggaggaatgaatccaccctaaaaatccgggcgccttatcagttgaggggattagcaaaggccttgtcctgacctgaaggaaaatcccggacaccctccacactccctgagggaccctccggagtcaaatattttccgaaccaact

SEQ ID NO: 23685 - DNA, 201 bp, Bos taurus
ggtggtcccgagaacgcactgtgagaagcagctttatgtggtgggtcacgccctgccttcctctcacttctgaaaattggcatttatatcttttttcctcactcatcatctgtctccatcgagagctagaccccatgctccatcagggtcaggattatgtgctgtccccctagtatctcccacactgtctggcacaaatag

SEQ ID NO: 23686 - DNA, 201 bp, Bos taurus
gggttcagatcccgtctctgcagcgggctggcagtgggcctcctccaggtgaccacctgtgcactttagttttcacagcggtaaatggagaggggggacgggtttctctttgctacaggtgtgctgtgagggttaaggtatgtttattcggtccttaggagactactcagcatggtgtaggcactctacaaaataagccgt

SEQ ID NO: 23687 - DNA, 201 bp, Bos taurus
aagctcaggccggtgggctggctctgagctgaagtgatgtgggaagctgccaagccttgccctcaaaaacagaacaagccctcccctgcccacttgctgcgggctgaatgcgggcccaggtgacgcgatggtgagccaaggtggaccttccagagggtgacactctggaatggagacagaggaacaagcaggagggagcct

SEQ ID NO: 23688 - DNA, 201 bp, Bos taurus
tgcgtgaatctggagcagatttgtgaaggtgtgtgaaatccagtgccaaaatggtcctatgaatgcttttcctcaagaactgtcttgaaggtattaattgaagagagctctccatcagatctgcatggcagccctgactttgagaaccagtgaaaaccagcagccttgtgatctggggtgtttcatcagcagctcatagaa

SEQ ID NO: 23689 - DNA, 201 bp, Bos taurus
cccacagggccctgcacccagaggaccacaaggtctaacaccctgccaccaccatcttaaaattcttagcaatatttgaaccaggggctgagaattttcttttatgctaggccctgcggactacaaagccagccctaacgggctgttctcagcccaaaccccaccatcccgacgaccccatcgtaagaaaagcttaactag

SEQ ID NO: 23690 - DNA, 201 bp, Bos taurus
agtaaaaaacaaaaagactcccaaacaaagaatacatcaaacaggaaagcagagcttatactcttcgtgtttgcaagcgggatttcgggccaagcagcacggaaaccttgaaacagtattttgtgtgtgtgcgtcatgtttctcccaggcaaaggtgctgggtagagcccagaaagcttatggccacagatccaggaatcg

SEQ ID NO: 23691 - DNA, 201 bp, Bos taurus
aaagacatgagacagaataaggccacgtaaggccaaggcaggagatacaaagctctaagccaaggatgctggacccaacagaaggcagcaagcaggctgcgtgggccacactcaccttggagcctccaagagaaaatgaccctgctgctcctcagcctcaggggtccagcctccaggagagtgcagacagacttgtcttgg

SEQ ID NO: 23692 - DNA, 201 bp, Bos taurus
tcaatcattttcagagcagagaagccaaacatacctccttgtttctctagcattttccttatctttctcatgctttcctgagagctgaatgatgcttgagaaaaagaagagaacaagacagaaaataatgcttggttaggtaaatataatcagctaaggaaagcctcctagaagagcataattcactgagtcccagtttat

SEQ ID NO: 23693 - DNA, 201 bp, Bos taurus
atcgcccacatccacaccctcaggagtggtggagacagaccctgaccctggaggtcttagtgtctgtcttcttacgcacggcttcagatgatgctctaacatctcacagacaaggagggtggcaagtagcgggagtgccaggggagatctacagaattaccgcccagcagctttccagaaccaagaggacagagacttgag

SEQ ID NO: 23694 - DNA, 201 bp, Bos taurus
cagatagtaaatattttagacttaagggccatatgatctctgtctcagctactcagctctacctttgtagctagaatgtagctgtggacaacacataaacggggcctgtcttcatcctgataaaccttcctttgcaaaaacacaggccacgggctcgatttgccccagaagctgtagttgcctgatctttggtcaacacga

SEQ ID NO: 23695 - DNA, 201 bp, Bos taurus
ggacaggcccattctatctgagggggaagaaaggaaggagatgtaaaatttctgtctgggatccctttaatgtcttaactaagcctgttacaacgacatcgtgtattgagttggccctgtcttaagaaaggaacaccttctctgttgaaagctcttgctgccaggggactcagtgttaccagagcagtcaactttgatttg

SEQ ID NO: 23696 - DNA, 201 bp, Bos taurus
atgatgtgaacatcattattatcccagtgcctagccctagtgatcatcattgtcaccccaataattgatgccttattgaggtctgaccgtgggccaagatatgaacttatcactgtatgtgtgttatcactctacactttcacaacaactctgtgaagtagagggtgttatatggcctcatttctgcaatgagacagttat

SEQ ID NO: 23697 - DNA, 201 bp, Bos taurus
tttcaccatcatcacatcatcacccctacatctagaatgtgatttcttcatgagaatatatgccagctctcttcttaatctctgcattcttcttgcacagcgcagagtaactgctcaggaaacatttatagaacaaatgaatgatggaaaggaaagtttaaagagccggcagaatagaatacacttatcattgcgtggtta

SEQ ID NO: 23698 - DNA, 201 bp, Bos taurus
aaaatgtgttactggcagattcctctcttgctttcttaagcatggtttgtccagctcacactatattgaaagaaaagctgaaatacatctattgaacgtatgtgtgagcttgggctttcatgacacctgtttatttgctatacaatgttttacattttatgtaacttgctattatgctttcctggtccttccaaaaaaaaa

SEQ ID NO: 23699 - DNA, 201 bp, Bos taurus
gggaggaaatgaggttggaaagctgggcggagactctcactggctgctggaaggaaggcttggggagtcactggggcagtgtgagcccaggcatggtggcgtctggtccaccctttgaaagaacccagggaaacgccgctgagccgggagaacaatgctagcggaactagcatctaagcccctcttttccaaagcagatac

SEQ ID NO: 23700 - DNA, 201 bp, Bos taurus
tcatgggcccagaatccagtaaaaagcagttttattggcaggaatgctaacatccacttacactgtagcccgaggaatcatgagcggcccatagaagtgacacatacccttcccttctcgctgaagcctgggtatttggaatccatggaaatgagagtctcagggctgtaagtatacaggaccaactcttagcagatttgc

SEQ ID NO: 23701 - DNA, 201 bp, Bos taurus
gcaatactgggaatggcgttcaagtctttgatgtcacacacgtcttgatctgtattcgaggctgttgagttcgatcctgtgtatgagggcaggcacctgactgctttaccatgtatgctatcatgccaagcccaagtatctaagtgttgacatccatattttactataaacaatgtcctcttatttgtcctttgaagaatc

SEQ ID NO: 23702 - DNA, 201 bp, Bos taurus
ctccagattaagtctctaaaagggatttttttttctacttcttttttttaagttaccgtgatcacaattttcagattttcagctatgtataaaacttttttctccctccttctctcacagagaaggtcaatcactttttagatataagagaatttgagaagagattaatgacaaagacaaatgatgatttttattttagcg

SEQ ID NO: 23703 - DNA, 201 bp, Bos taurus
ggggcccggaagcagcttctttggtgtgcatcttccggtgatcgatgagactttctttatttggaaacagaaagccgcagaccatgcatatcttatacggcgaggagacgccctcggccgcgggctcctgcaccacctcgttgatggtcgccgggctctccaggccgggctgcagcctgctcttcgcccccgacttgcccg

SEQ ID NO: 23704 - DNA, 201 bp, Bos taurus
gggagagttttgacacatgtgacggccacacgggaagcggtagcgctgcgccagtgctgggaccagcgaaagcggagcttgaaatctgctgctgtcagagatccactgtgtgtcccaggccagccacttcccttttctgagactccttttttaaaactgggtgctggaacatttactggaagttgtggaagggattagagc

SEQ ID NO: 23705 - DNA, 201 bp, Bos taurus
attcctgtaaagctgaggccagagtcggatctttccttctggatgcgtttcccagggctgctgtcacagcagcacctccagcacgaaccttagaacagtacgagcctggggcctccctggcgctcctgtaggtagccttccccttccagcgcaggggttgtgggttcaacgcctgcttggtgagctaggatcccatgtgcc

SEQ ID NO: 23706 - DNA, 201 bp, Bos taurus
ataaccttcaagagggggaaagttgaaatatccggttagaaggaccccaaatcgggtaatgagacacgagggtcttgttgccctttagggtttgacacacgtacggcaacctgctcagaatccaagtcctgagcgtcttggacagtggggtcaggttcaaattcactgctgcagctgtgcagcctcgggcaagtcaaccgc

SEQ ID NO: 23707 - DNA, 201 bp, Bos taurus
gaatccgtcttgcaatgcaggggatgtgggtcgatccctgattggggaacttgagatcccaaacactgtggagcaactaaactccttgagcggaaaccagcgaggccgagccccgtgatgcagaccctgcgtgctgcagccaagcggatggcgggtgaagggcaccatagaagcatacatgccttcaccagcgactccgct

SEQ ID NO: 23708 - DNA, 201 bp, Bos taurus
gagggttcagtccgtgggtcgtgaagatcccttggaggaggaaatggcaacccactccagtatccttgcctggaaaatcccatgaaggggctacagtccatgggctcatgaagagtgggacgtgactgagcaagtcaacaacaaccaaagggtaagaaggaagataaagcctgccgaagggataaagcctgatggagatcg

SEQ ID NO: 23709 - DNA, 201 bp, Bos taurus
gtctctcgctgtcgccccacattttgtaaataatgattatgtaacagctgagcacgcttagagcactgcgcatgcgcacccaaggtactcgcgcggactcaggctgctgttgttacataagcttcacctggaaaatcgctggggggctgtgttatgttgtatctgctgctatggctgcttgccaggcaggagggaataaat

SEQ ID NO: 23710 - DNA, 201 bp, Bos taurus
aggccccagtcggtttgcaagctaccacggggcaccctgctgacttctgagcaaaattaattgcatgaatccggcaaggctccaaacattggccatgcccaccttcattacagcaatctctgctgtcacttcttaatcaacactgcctccatgatctgatagatggtactttgcttgcatttagagagggattggtgcaaa

SEQ ID NO: 23711 - DNA, 201 bp, Bos taurus
cctccagctatgacttatgcctatatttggaaaacttaacaaaacaataaagctctttagaaatgactgccaacttgcctggaaataggaacccctggatgaaacacactgggtacagagccctaaactgtgggcaggacagcctccaagacagtgaaaagcttgagaatcacaaaggtctgaatcgttgactgcttcacc

SEQ ID NO: 23712 - DNA, 201 bp, Bos taurus
accccgcctcccaaaagcacgaggctgcatggaggcagtggccccagactctcgctgcagtgcctccggggtctgcctgcctggtggaggccatgcccttccccggagctgggcacagtggggtgggtgtgcagacgcctactcagtgctggacactctgttagtaacattagctcctccctggggtaaactgagctctgc

SEQ ID NO: 23713 - DNA, 201 bp, Bos taurus
agagctcagtcactgtttcagccagtgggaacaggacaaggtgagaccctgaagacccacaggttccttctgcctgtggaccacaggccacatctcacagcatcgcccttggaaacatcacctttgcttggatgggcaagtgtcaggtaaaattccactctgaaaaggacagggagaatgaaaacgcagtgaggaagatga

SEQ ID NO: 23714 - DNA, 201 bp, Bos taurus
ttcttataaatgtggataagcaaaagcgtgtgctaactgtgctgttacaggaaatgtagatgaggtggtgtcaggcactgctgggtccaggctctcaccccagggcttggtcctttatactgccttcatttctaagcaggtgtcatcctcaaggagccagtgtatcccccagcatcccaggctttgttctgaggagcaggt

SEQ ID NO: 23715 - DNA, 201 bp, Bos taurus
tcctcgaaaataactttcaagcatggcttttcccctgggaacacttacagctcagaatcctaatcccaggctggaaatagccacaaagtgatttgggttttcccagagaagaggcactgtgaccatttggggaccatgcaggcccctggctgttaacagtctgtttgctcagtgggtctaaggctcagtgaggattatgga

SEQ ID NO: 23716 - DNA, 201 bp, Bos taurus
tctgagactgaagttccaaagctgaacgcagtgagattcagaaatccctagaacacagataccaacgtggagcccacaggtaccagggcctcttgctgggcgcctgccagcccaggaaccttctgggagagcagaatccaggcaggtgaggaatgaagccagggcaggtccgcggagagcccacaaggaaggaaagatagg

SEQ ID NO: 23717 - DNA, 201 bp, Bos taurus
accccggtgggtgtaggtggtgtgcacacccacaattcacacatgccctgctccttcctaggccctcccgagctctgaccccttctcggggccaacacatggggtatttgtccttcagggagcagttcaaatgagaagggctgggtggacgcaccccttgggaggacccctggcacggccgccttgcataggcagggtgtg

SEQ ID NO: 23718 - DNA, 201 bp, Bos taurus
ggccgctgggcagcaggtttcttctgccacggtggcacaggcacctggggttgtggttggctccaggcgggcgggggctgcgtgcccctgcgcaggcacacaggccgtgggtggggagtctcagagcttggcgtgaggtcccacagggctgggcctgcaggatggaggccactgtcctgagctgcaggtgctggcaggagc

SEQ ID NO: 23719 - DNA, 201 bp, Bos taurus
tgcgggctgtgctgaagtcgtagtccggccggaaggactcattgagcgtggcaatcaggtagaagagggtcttgcggctgcacttgtcgctgagggggccctcatcctcgccaccttggctcttactcagtctgcacagagacaagtgtcagccccgtgctggcccattcgccagtcccctataggcaggccctgccccta

SEQ ID NO: 23720 - DNA, 201 bp, Bos taurus
gtgtggccccagcggcccccatgtgcgtgcctctatcccttcatctgtcgtggtgggcgatgtgctacctcctccccccgctgtgtgaggcctgaatgaggtgacgtgtgtaacacagcaagggctgtgtctggcgcaggggaagagctaaatgcattttctcatcaacccagagatcttgacagcctgccaggtgccagg

SEQ ID NO: 23721 - DNA, 201 bp, Bos taurus
cctgaggccctgagaccacaccggggcctgaggaccctcctgctctctctccttccgcttccctctgccaccctttggactctgggtccatggctgctcccgctggcccgccctcccgctagtcttagaaccttgaaggaagtgtttagaaactgatgtaattactgacgtggagccgctggccggctcttcgggaggggg

SEQ ID NO: 23722 - DNA, 201 bp, Bos taurus
tttcactttctgattcttctagaatctaacctaatctactttctttaaagtgcttagcatccccatcacaagtccaagggcagctacaaggtcaaatgtgctaagttttcccaagatgtttcatctttgggtagatccagaaagtcttgcatatgatcttttaattgttccagagaatgtctttgtgatcacaattgaggt

SEQ ID NO: 23723 - DNA, 201 bp, Bos taurus
atgaattcctgtctcaaggactcattctcaggtcctcaaccttgggacacctgtcacttgccacagctcagcctaaaaagtgcagctgctatgtccatccaggtggggatatcctctccagcctaccacagaatccggctggccctgagctgcccctgccagtgagggccaccgaggtgggggcccgagtcacctgtgagc

SEQ ID NO: 23724 - DNA, 201 bp, Bos taurus
aagactctggtggagggggtgggaggcggaggcgaattctgggttgttggggtggcccaggggaggaatggcgcatgctggcttggtctgaggtgagaacattactgtccgctgctgaggcatgtccacgatccctgcgaccagttgaaggaacccagcacttaggaaaaaactgcaggggcgaggagacggcctctagcg

SEQ ID NO: 23725 - DNA, 201 bp, Bos taurus
tcgcctgtcacctccctgcggctaatgtctaactaccccacagtcccatctgcacgtgtcacactctcagagaggtcttgcgccaccaatacctccttctttctccatccctcgtgttagccccctgccctccggagccggcctccgggaccgctgggagcctgccttttcctgccagtgctgcactgtgggagggggctg

SEQ ID NO: 23726 - DNA, 201 bp, Bos taurus
ggcctacctcctattgatggtcctagaaacacacaccataggagcctaatctggaaaaactagacgccacatctgttgtcatggtgatctacaaaggacacctctgtatgtaacttgcccaaccttcatgcatggggggtagtgctctgacctgggaagcacacggctggtttctactggtgtgtctcattccgtgtagaa

SEQ ID NO: 23727 - DNA, 201 bp, Bos taurus
cctgctggcctgacccctcagggtccatggccctgtgctatgccaccagtgattagcagagcagttaggtttttgcagggctgagccatgaagaagctgccgtgtcgtgttcctggcttttccttgcccccatcccagctctgccctctcctcaccacttatcaagaggtgtcctccatcccatgcaggcctgggccagca

SEQ ID NO: 23728 - DNA, 201 bp, Bos taurus
tgccatggcccttctacatcagctccttgtgtggtaagcactttcctgagggatctaggtgcatccacgttttgggcctgctttgttggaaaaccttgccagaggaccacgctcctgtgggaaacaaggaattgcctaagctgcactggggaatctacctcattgaccagggatggccaaggagtggaggccttgagtagc

SEQ ID NO: 23729 - DNA, 201 bp, Bos taurus
tgtcagaagagggctgtaatcaggagggggtcctactaccccacactgagcagtatttctttcactccagagacaccttatgcccaaatcattctgtctcccccactgaccctgggcccccccaaaggtcagaagtgtctgaggtctactcttcatgggtgggcctcaggccctgccctccatcaataccaaggcccccca

SEQ ID NO: 23730 - DNA, 201 bp, Bos taurus
acagggatgggcccccagtcctgtctgcggccgtgagagagggcgcagggctccaggaagaggaacccgggggtagcagggcctgtcctgggccgccaccatctccaggacctgtccatgtctggatcaggtccttctggtccccagagaagcaaactcagggccatagaagtcccctaactgccacggacagcggttgga

SEQ ID NO: 23731 - DNA, 201 bp, Bos taurus
cctaaggcgggggtgcgctgctcaatcacggaaggggctggattctgtgcaggctgaggactcctgagccctatgcaatcagtgagaccacaatcgagggcgaccacctgactagtcgcgtctttggcacagacaggaccatgtgggcccggcagatcccgggagcagggctggagggaggcagatgctgcccctctccca

SEQ ID NO: 23732 - DNA, 201 bp, Bos taurus
ccaggaaaggataatggttaccgtggtcactccacccctcctgctaacgtggaagctttcctgtctcctgcacctcttgccatctgcatcctgagttggtcctctgcagagaagaggacctcagaccctctcaataccaccagcaagccaccgggcagcctggagagctggggttttgattaagacttttctgcctcagaa

SEQ ID NO: 23733 - DNA, 201 bp, Bos taurus
ctctggttccagggggtcaagggccctgattccgagcccctcctgagcctgggcttgatgccctgtgctcccgccagggcctctctgtccccattgtccatgtgagaagtctgagcctgccctagtgacagaatgcttgggctcccctagtcaggaggggctgagtaggtcattggacctgggctcccacccttcaaggcc

SEQ ID NO: 23734 - DNA, 201 bp, Bos taurus
gtcctgtgtctgacatgctgtaaagccaggccccagatgaggtcggtcctgagccaggaaaagcctgggtaacacctgtgcacagcctctgcaggccggtagctcctattccaccgccctctgcagacagagccatggttccttagcatcacccatgccccattcactcacttggccaactgatcagtcatttatttacca

SEQ ID NO: 23735 - DNA, 201 bp, Bos taurus
gtgtgcctgggcacccatggggttgttctggcggctcttgccctgggcaacatgcccatcacccacttctttcagggccctgcgatcaccccactttccccgcctttgcctttgctcaccgttgcttctctgggatgtgcttcctgactactttccagatgttcctgcaaggctccttcctccaggaagcccacctggcct

SEQ ID NO: 23736 - DNA, 201 bp, Bos taurus
caggccctgcccaacgggcccgacgcgtagtcagcaggacactgcaagggggccaaaggtctggactgagctgggcaggccaggtcggggacagcacagatacctgctctactagagtggcagattgggttcatcttgatcgattgatgatggctgcccagtgctctgactggacacagggtcaaaggccactgtgctgtg

SEQ ID NO: 23737 - DNA, 201 bp, Bos taurus
gtcatctaaacacagctgtcaggctaaatgatctaacactcagctgttagggatgctccagcagggagaagcccttgaatacttcatcaatccaagccacgagcagcttctcacgctggccggtggcgctgctgccacgggggagtcctgtgcactgcaaaagcttcagcagcactccgggcctcacctggtcagtgccag

SEQ ID NO: 23738 - DNA, 201 bp, Bos taurus
gactgtgtgtggcagggtgggcaggtggggcagggaccctcctggctcagtcccaccttctgtctgccagttctttccacacacacacactgacccgctctcacctcaaaaaacagactccagcccacgttctgggtcccctgatcatcaccccaagggccctccccaggaccctagcttcccactggcctggggctccca

SEQ ID NO: 23739 - DNA, 201 bp, Bos taurus
ggagatgggggagcggggttggcctgtggctttgacccgtgtgcaggtcggcagcagacatagggcagtgggcagggagaggtcatggcccaggtatagttttaaggcaaggataatgggttttgctgatggattgctttgatcctcagagacagagagaggagtcggggtgactaaggcttggggcctgagcaaatagta

SEQ ID NO: 23740 - DNA, 201 bp, Bos taurus
gaagcagggaacccgaaaccgcatcacaatctagagaccttgcccaaccccacaagcaagacccaacccacgtacactcctctgtgttctaagcataggtatcttctcttaggttcacgctgcctctgggccttcaggcgtgtttctgctgaagtggaatcccagggctgcctgttaacagctgtgggaccttgactatta

SEQ ID NO: 23741 - DNA, 201 bp, Bos taurus
ttatgtatcagaaaaaaagttttcttttatgaaaagagcaaaataattttgacacctgaagactgtagggttcctttttcctctctgttttatgcttttttgaaaagtttgaattgaactatacttggatttttttttaatgtgcttaaaacctttgaccaaaatatgattttatgtggatgtgtgtgtaaaacactacca

SEQ ID NO: 23742 - DNA, 201 bp, Bos taurus
tcacaaagcctcgtgattagcgactttcactttagggtcacaaagatttactcctgagccttcttttttgaagagttttatcgttttagctcttaggtttggagatatgatccattagaatgaatttctgtgtatgttgtgtagacaggatccagcttcattttcacatgtggtatcctgatgtccagcattatttgttga

SEQ ID NO: 23743 - DNA, 201 bp, Bos taurus
ggcccgcagggactggagacagtaaattcagcaaatggataatccacgtgcgctgtgtccacacggtggggtgttatcagccatagaaagagaagaagcacgacatgggcagacccagaacacatcaggttgggaaagaagccagacaggaggccacagagattccatgtgactgtgtgattcgtaaggaagagcaatttg

SEQ ID NO: 23744 - DNA, 201 bp, Bos taurus
aacacgcggcccccagacacagggaggggccgtgctcagggacatcacacctctgctgcgctcgccacagagccctaagtgtttgggggctttacgctcacggtggccagcacatgttttccacaattctagttttcactttgaagtttgaattttattattgtagcaaatactggcaactgttttcctggagggacaggt

SEQ ID NO: 23745 - DNA, 201 bp, Bos taurus
tatacttcagttaaaaataatttttttaattaaaaaaaactgaaagcgattggtaagctgggactcccttccctgagggttgtgctctggttcctgaagtgccccggggccagatttctgtggctctgtggctgggccttgcctgggacacaaaggtttaaccttgactccacactcaccaggttcctctccccggataga

SEQ ID NO: 23746 - DNA, 201 bp, Bos taurus
agtgactgaagccttgcctcgattcctgcactctcacctgctcactggtggatgtgtccactaacccttcaaagttcagaccgtgggagaaccatgagtcctttttcctgggcctcctataagagactcaagtgccttcctacgtggctggtgccaggggacacgtccctcttcagggagcaccctttggaggactgtgac

SEQ ID NO: 23747 - DNA, 201 bp, Bos taurus
atgcacgtgagctcacgtcgtgccagcctgctggtcgttgctggcatcgccgtcacactggtacctgcctgatccaggcccttgttgtttttgtggttttacctttctctctctgctgcttcgccaggctctgctttattccctctcttcctgcttctctttgtctgtcgagtttccaccttgggcctcctgtacgctctt

SEQ ID NO: 23748 - DNA, 201 bp, Bos taurus
ggaggaggcctggctgacttggtctgtctgggcactgaactgctgccttcagggagggtgagctgggtagagttagtgcgtccaatctcagtgtgtactgcggcttctctgctgggtccctgggcctccacagaggccctctcctgtgtgcgtgatggtctaaattagtgttctttggggagaagacagcagaaaactctt

SEQ ID NO: 23749 - DNA, 201 bp, Bos taurus
ctccagtgaacctggctcgtcagttttgcaagggctgaggccatgttccacatgaacacatgaaggcttcagtcttctggaccctctttcccgggcttggcgacatctctggcctgcttggcctgcgttgcctgggtctgggtttgcaatcacagcccatcaagggagctgtgtgaaagcctggggtgggaaacaagcaca

SEQ ID NO: 23750 - DNA, 201 bp, Bos taurus
gttgactattatcagcagtaccgagtaattttaagtattttaaacttgatataaatgtatactgtaattacctcctgccatgagctgttcgctcagccttattaacgtgagacctagcctgcagtgaggtatggagttcttaattcatcctcacttacatatgtatatgcttccagtgtgtggctgttacagatttactta

SEQ ID NO: 23751 - DNA, 201 bp, Bos taurus
tgtgattgttaagtttatcactgtctttaagtctatgatattctcttttctgtctgttccaactgttctttgttccattttcctattttactgccttctttctttggacttgttaagtatttttataattccatttttaaaaatagcctttattctttacaatagttttgggctcacagcagccttgagtggacagtacag

SEQ ID NO: 23752 - DNA, 201 bp, Bos taurus
cacacccctgaagacgtactgttccctccactgggtagacaaggaaccagaggctacaggaaattccttaaatcacccagagtcacactctcatagatggtgggactggggttaaaacatacattggtttgaacccagagcccactcacttacctaccatcctgggatgtgcctggaactcaggtatttatcattttaacg

SEQ ID NO: 23753 - DNA, 201 bp, Bos taurus
tcccacagcagaggcactttgactcccaaagaactgcttctcactcacctcttcctctggctgtgattgaagcaaggagggtgtgagcagccgagactgacggtgcaattaccacgtgccaggcttgcagctccaccccattcagccccgtggtgaagagatcgggacccatgcttctcagatgaactcattaaggttctg

SEQ ID NO: 23754 - DNA, 201 bp, Bos taurus
ccacgttatccccaggaggctttgctggcccctctgcacctgctgtgagctcctgacaccctgaaacagctactttttccagaacaaacctgactcactcgggcccttaggcctttgcccagcctttatagctacatggcatttccctctacctgatcaactttgacctatccttccaaattcaaagcaggggttcactcc

SEQ ID NO: 23755 - DNA, 201 bp, Bos taurus
ggccccctgctgccctagaaggctcaaagggacggggtcctctctccacttcattttctataaagcaacctaaagcgtcacccccgcctgctggcctgaggacaggcacttttcaaggtcgttttgctgaagaataaagggttggggaggaaggggggcttcagaagaaaagaggcttatccctgtgaggaggccggctca

SEQ ID NO: 23756 - DNA, 201 bp, Bos taurus
aataagtgtcagcagggcagcagcagagggttcggtggctctgtggggtccaccgccatccgtctgcactctgttggccatgctgtggaatctgaacgtatataggaatagagttcagcacctcttgttttaaaacccagtgcgtttctgactagcaccaccacctcctgtttgtctggatgaaatgtctcctgggatgcc

SEQ ID NO: 23757 - DNA, 201 bp, Bos taurus
gggccctgcccctatcccaggccacttgggccctgacccctctcagtcccctttttctataaattcagagtcactgtgacaccctcaccctcctcccaacgcacacacttcagtgtggacagaacaggcactcagcactggtggtgatcacaccccactttgtgatctctttgctaattgcaccaaagctcgccactgacc

SEQ ID NO: 23758 - DNA, 201 bp, Bos taurus
accctcacggcctccctccggaggccaccatccttgtccatcgagtggggaggataggacagagaacacatttccaggatgacagccacaaccacacaacagtggggcctgcaggtcagagctctcatctaatggctgagcctgagggctggtattctccccagaagggccttcacttgctcttgaaaacaggagattaaa

SEQ ID NO: 23759 - DNA, 201 bp, Bos taurus
tgaacttcagcgtgtttctttcctggaagggtctttgagtgcacctcgggtcagaggagtagacataagacagtccttagctgctgtgtttttgttcccaccagttgtcaaatgttgctcaaaagcaattttaaatgtacttcatcatgttctcattttaagcttttaatggcacacacatacacacacataaagcagttt

SEQ ID NO: 23760 - DNA, 201 bp, Bos taurus
agcatctctattacatcctgggggtagacttcaggctttgaaacatgacccaggcagtcagcttcttttggatccatttaggcctgagcaggatcaaaacggaggagcatgccaggtgatgtcaggggcgcaagggctctgaatgtccaccctgtccagtggttctcagtgtggatgggatgattgtgtcccccaggggaa

SEQ ID NO: 23761 - DNA, 201 bp, Bos taurus
aacagtgggtggccaagtccctctctggaggctgctctgtctgagagagctgctgaccaaggtcacacctccttcctgggtgaccagtaacagtcaatgcatgagtacaaaggcctggccagagtctgcaggtccagagcttcccctgggattgactgaggtctctgtgcagcggactcctccctctgccccacccccttc

SEQ ID NO: 23762 - DNA, 201 bp, Bos taurus
ttgcttaaatgtgcatcatgcatttggaataattcttattcagggaagctggctttatattcatgacaagcattttcaattttaatatgtttgcttacatgagatgcagattgtaatttaatggcagactgtttaattatgccttcatttgtataaattgtaatgttgctgctgcataaatgaagtaaaaatctctttaat

SEQ ID NO: 23763 - DNA, 201 bp, Bos taurus
ctctcctctgccctgaggtgcttttaatagaaacgcatcactcttaaatggcaatgatacttggagggaaggaggtcagatttctttgtcatcagtcagaatgtatcctcagagagtgtctgagtgcaacagggtagaggattgagctggcagacttgggaaccaggcagtacagagtttcacatagtaaacacttactgt

SEQ ID NO: 23764 - DNA, 201 bp, Bos taurus
ccagggatcaaacccgggtctcccacattgcaggcagatgctttaccgtctgagtcaccagggaagccccaacagagcctatagttactaataatgtattatacacttagagatttgctaatagtgtggatctcagttgatctcttcacacacacacgtggtaataatagatgaagagggtggaaggaaacttttggaggt

SEQ ID NO: 23765 - DNA, 201 bp, Bos taurus
ttagaagttggcagctcctctttattgcaaacaccagtagcttttagccttcttggtggaataatcattggagtgtccagttaggtgagtggagagctacccttttattcttgcctgaggggaaattggattttctacacaagcatattttgcaggcttaaaaatgaaagaaaaaggaaagaaactctgaaatatggctcc

SEQ ID NO: 23766 - DNA, 201 bp, Bos taurus
cattgacaacacctaggagcctgttggaaacgctgaatctcgggctttacaccaggcatgtaaatcagaaccggcattttcctaagacctccaggtgattcgtaggcatatcaatgtttaggaggatctgctctaactcagcagtccatcatctgtaaaagggactcacagcgtcaacttcccagggtggttttcaggaat

SEQ ID NO: 23767 - DNA, 201 bp, Bos taurus
aagtgacaggtggtggcttgtcattttctagtatttttgcattggggcaacagtagagtacctatctactagtagcctaattttggtcccaggtagcaagctagtgatttcaggggtaacaacaacaataatacctgatatttttgaatgtttagtatgtgcaagaaaacgttataagtagttttcttggaattaattcta

SEQ ID NO: 23768 - DNA, 201 bp, Bos taurus
acacaaatgcagatttacagaatcggataactgaatcagattctcctagggttttatttatattttttaagtgtataaggaaaaatttgacatgcagacatgaggaacacaaactgtgtataaaagtgtaatgggaagacagttagcagccagtcccagataagaggatctcatgagcaagggggaagagaaaggaggaga

SEQ ID NO: 23769 - DNA, 201 bp, Bos taurus
gttatggaaatggctcctactgggatgcatatttctgagtattaataaaaacatgaaggcccatagtgacttggatcttccctttatagcatctatttgcagatgggcttaaggagagggtctcaatgccagcatgtctcatccatagaaaccaatgaatattttattttgtccctcacgcaaactttatctggtgagcat

SEQ ID NO: 23770 - DNA, 201 bp, Bos taurus
agcccatgtctatatcactttatccaatataaccgagcagcagttaagagcagttaacggactcagagagaaatccaagacaggaagttgagcccgccaaaacgtccctttgagccttagtttctttgtacatagtacaggatggagaagacctacctcccatgggtgtcaggagggatcagtgcagtgaggctcatcacg

SEQ ID NO: 23771 - DNA, 201 bp, Bos taurus
cttcaccctgttaccagcctctttgcatcactcattatccttcagaccaaccctttcaacatccttttaggcagtccttgatggcttcagctactgatctcccacaaattcaatttgctttcccaagtaattatccagttttccataataatatgagtccatttcatatttttcataatttaattcaataatatttaccta

SEQ ID NO: 23772 - DNA, 201 bp, Bos taurus
ttgggaaagatcggtcagaggatgaaatgatttttctaaggctccattagcgaggatcaggtgaccaacaggaccggcttttgctttcatgcccaccagcgtgggttgcccacacagtattgcaaattattagtcgccgtttgagaagtcttaattatctggatccattggaaaccgtgtcagttatttgaaaccaagagg

SEQ ID NO: 23773 - DNA, 201 bp, Bos taurus
gccggcagcctccccaggggtctggccttgggagggggatgagcacagcgtagcactttgtctagggatttggtcctgcatcgttaggcgggaacaccacgtgaggctacactagagatctgagggcgtgctggtgtttagaaaccgtgtgtgatctcccagcccacctgtgggtgggtgtgtcccctcccagctcctgcc

SEQ ID NO: 23774 - DNA, 201 bp, Bos taurus
ttcagtgtcccccaagttaatctgtaatggaaagaacactggctttgggctggaaggaccagaagtcaagcctcagctctgtactagaatgagaataagtcgggtgacccttaggcaaggcactgtatgaccttgactttccacacttagacctgtggatatttcttcctccctcttaggtttctgtgcaaattgaactag

SEQ ID NO: 23775 - DNA, 201 bp, Bos taurus
ctcaccttgaagccatgattagtgaaatcatttgccttttttagctaaaagcatcctaactagtatgattatttaataggttacctgttgctttggtcacacacgagactgtttaagtagaactcctacagagcctttgttaatgttgagaattgctggtaagtctgcactgttacctctgggaaaccccatgagaaaaac

SEQ ID NO: 23776 - DNA, 201 bp, Bos taurus
tggaggatggctttaggtataaatgttctcttcttgttaaaaaaaaaataataatacagttcagagcctggtgttgaaaatatctttgcccaaatatatttatgaattgtaagtcccctgaggcctgctgcagtgattaaatgagtccaggctccaaatggtccatgaggaagtctaccctgaggggccaggtacccagag

SEQ ID NO: 23777 - DNA, 201 bp, Bos taurus
agagtactgagtggggtgccattgccttctccttcatgagtttagctttaggattttcttcaatgttgtttcagtggcatcctttatttgactggaatagtactcaatgtttgggcttcccagatggctcagtgagaaatcaggagacctgagttcaatccctggctcaggaaggtcccctggagaaggaaatggcaactc

SEQ ID NO: 23778 - DNA, 201 bp, Bos taurus
ctgcaaggcctgagctgggagagacatcaggtcacacaccatcactgagtcactctttcaatcagtcccttgtttgcataggaaacccaacaatgtacacaaagcaggatgaggaccaaagaggcctgaatgaaaatatggaagaaatctgtttccagccacaaccaggggactgacttcccagggggtcctgggcctctc

SEQ ID NO: 23779 - DNA, 201 bp, Bos taurus
ctcctctgcttccacagggtcacttttctaaagaaaccacacaaacacatgctcagatcaggttctgtggtgggagaaagtctaaggccaaagaaaactttcaaatgatgatgaacaggtgctcctgagtcagtgtattattatcttccattgaaaagatcttctggggtacttgtcatcattcaaaggcctggttattgc

SEQ ID NO: 23780 - DNA, 201 bp, Bos taurus
attgatggattcttagtgggaacattgaatccttccaggtgactcacatagcagcaggtatttgccggttgggatgccctccgaccaggttcaacggctaagtcaacaggactcacaagtaagttcttgcaatctccatgtccattgaattttgagtacatgatgttttgcctcagtttacaattaacttgattatgcctc

SEQ ID NO: 23781 - DNA, 201 bp, Bos taurus
taggtctgggtggactccgggagttggtgttggacagggaggcctggtgtgctgtggttcatggggtcacagagttggacaggactgagtgactgaattgtatttgaatagttgtaggaaggtgagtctgataccagttgggccatcatacctggaagttcagaggtaataatttaagtacctgttttgccaccgtatgcc

SEQ ID NO: 23782 - DNA, 201 bp, Bos taurus
attcatatacgaagagtctgctttatttgtgagtgtccattccttctttattcatgatccagactttcctgtttagacgtaatcatctgacaggagattcggaagcgaatttatagatcgcagaacccaacaaacgcctctgttgcccagccactgctcctggcagacactgctaatccaattcatgtctcttaccagttg

SEQ ID NO: 23783 - DNA, 201 bp, Bos taurus
tttttaaaaattcatgtttttctttttgtatcatttatgttttttactgtggagacttttttgtgtgttgtcaaatttatcacactttcagggattatggattttataccatacttaggccttctgtatattgagattttaaatgtatatttttttctagtaattgcttgactaaaaaaaataagtctttagatcatctga

SEQ ID NO: 23784 - DNA, 201 bp, Bos taurus
ggatcacagggaaatatcagggaaaactaagacttttttatgtgagggggacctaatagcatgtgcactccatacactccataaaccatcttgaaaaagagcatgtctgctcagagacacacgctgggtccctgagagacacagttatctgggggagagatagtacaaagggcggtttgcttccctttctcccattcacat

SEQ ID NO: 23785 - DNA, 201 bp, Bos taurus
ttagccctgcgatggttttgtcaaacggtcaaactttattctactatagctagtgatgtagaccttgtattcatctgtgaagataatagatcagtgtagaataatatatctacaattgcttcaatacacttctaggagcataacatttggaaagaatcattcttttgtgtgccaagacagaacttaaagggaattacaaac

SEQ ID NO: 23786 - DNA, 201 bp, Bos taurus
tgtaaatttccttgagattggaattaggatgtgtccaattccagagagttggctttagattaaacacccattagctttcatgcattgcaacacagggctatcggtaacttttgtaattacctccagcagtgcctgaccttctcagagagttgttttctttccctgtatcatgcccattattaaggtatgaagtttagtgac

SEQ ID NO: 23787 - DNA, 201 bp, Bos taurus
gtcttccgtcctgagcaaccgtgaacaagtctgctatcttctctgagcgtcaatgtactcatatgaagaaatcaccagcttactgtgaaaaccatatgccgtagaggacatgatcacctcctagtaggagctctcagccattcaataataagtgtccaagtactgatgggagcggcctcagatacattttgtatttctctc

SEQ ID NO: 23788 - DNA, 201 bp, Bos taurus
ggagggcctggggactaaggcagtgctcttctggtttataaatggggacgctgaggctcagcgactgaagtaacttcaggaccctgagttcctcgggcacgtggctccattaccaggctccaggcctaagctgtctgccctccctgaggacatccccatgagagaaacagtgtttctttccaaaatatgctccagccccag

SEQ ID NO: 23789 - DNA, 201 bp, Bos taurus
aatcccccctaatcctgggattcactgggatcttcccctatgtcctcattctgatactgacggcgccattcacccaattccccatgccttgcagggctgttaattccacttattataattcagcagccttaggattcggctttcagaaatttcaactttctttctacagaagacaaggatttctttgaagaccacagtaga

SEQ ID NO: 23790 - DNA, 201 bp, Bos taurus
acctgcaagtgaagttgtatggtatttgtcttcctcctcttccttcttcccttccttacttgtcctgtctgcctgggagagtctggggagggccatgtcttccccgccaggactcagtttccttatttctgaagacaaggggaggagggagatgcagctccagtgtgaggtccaggcccctcggcccctgtgcagtcctgg

SEQ ID NO: 23791 - DNA, 201 bp, Bos taurus
cgtttcattctctcagcatacaaaaagtgatctagacagaaggaaatcttagttatttctgtatcccctgaaactttggaccgtgtacaagtttttccccaaaaatttcaagtgtcccattgttgtgttttttaatttttaaaactctgccgtgaacaagctagctgagaatcctgatcacctgtacacctactttatact

SEQ ID NO: 23792 - DNA, 201 bp, Bos taurus
ttatctaacatgacttgaaaatattgagccattccaggccttctgtactaatggaaaatcactcagcactatcactctatatatctccccactccttcccgttcctaaaaccccagcttccactttatctcaccccatgcctatcaatttcagatgcttccccacctatagtgaggttagtccaggaaatgaaaccttaga

SEQ ID NO: 23793 - DNA, 201 bp, Bos taurus
atttctctgtgtgtgtgtcccattgtggtggttgagagaaccaaagccgtctaaatgaattcagggattgtctgagaatcagagaacaagggaagcaggcggtgaggtgaatacggccgaggatggaaaacacagcttcatcaagctggcaggagttgtggcccccttcaatcacaggaacgtgaccacgcgtgcaaatgt

SEQ ID NO: 23794 - DNA, 201 bp, Bos taurus
cgcaccaggactggaagaggtttgcaaaaaagttttccaagctctcagaatgacattgggtctttgttgttgttgctgttctggcaagatcgcttctgacagctttgcactccctcagccggctgaagcctccaggtcccagtgctgccgtgtgtgacccccaggagccaggaaccgtgtgcaccgccagaattctgactc

SEQ ID NO: 23795 - DNA, 201 bp, Bos taurus
ctggaaacccagggaattaatctccagagcccttcctcccttcaaccatggtgcttcattttgaggtaatatgaagtagatattgtgataggaaagacacaaatagcatccaactcttagatttctttgtggataaaactttaggaaaaaaaaggatgcctcagattattgtaggaatgaaatgatttcacacacgtaatg

SEQ ID NO: 23796 - DNA, 201 bp, Bos taurus
ccaggagatgagagaaaacttcccggtccactggagcaactgcaaaagtagacacatgttcgagacatcttcccgtctcgaatatgactgaggatcccataccttgaaagatgacatcattccttcttccaaaaccctgctgtcgtcaaaggcatagaaataccactgctgctgtgagcagttgagaaaaggaaagaagag

SEQ ID NO: 23797 - DNA, 201 bp, Bos taurus
ttacataactaagaatatgctgaaatgctcagaattcttctagtcagtgatagacaggcattaaaaaagaaaatacatccttttcaggggtgggaagaaacgggaaatacaaaccatttgttaaaataaaaaaaatgtaccgtaattttcattcagaattgttcggagttaaaggaacagggtagaaggaagtaacaaagg

SEQ ID NO: 23798 - DNA, 201 bp, Bos taurus
ctcttacctttgcccccaaagagacctaactaatatattatgcatcctcttaaagggagaactcttgagtatttggttaaggagcttgagctttgagaaaatagtattcagcgattccttgttatacctcaagtgctcaagtgccaagttcattgcctgccactttgtaggccctaattaggtatttggtatttaaaagcc

SEQ ID NO: 23799 - DNA, 201 bp, Bos taurus
gggtataaggcagacctaggctgtagacactggctagagagtcatcagcatatttaagattttccagctaataagtgagagttgggattcacaccaaggcagtgtgactccaagccctgaacacaactcacatataatattgctgacttcttagataactccaaggtcagttccaaagttgaggttctgaagagagcattg

SEQ ID NO: 23800 - DNA, 201 bp, Bos taurus
taattagtgcccagagacctacttaagcatgtagcaatctctccttctacattcaatgatttcagaataccactcttcttgtttaaagtagtactgtgcacttcttttattgcggggaatttccgcatttcctgattctagtgtccttctctggggcgacttgttcacttatttcatcgtctttaatctatcgtgacctat

SEQ ID NO: 23801 - DNA, 201 bp, Bos taurus
ctccttgtttttaaaagatattataatttgcagcatttttatgttcatagcaccattgagggaaaggaatggaaatttcccatataccctctgctcccacacccacatatacatagctttcctcattatcaacattcctcaccacagtggtgcatgttttaccactgataaacctacacggacacatcgcaattaacccaa

SEQ ID NO: 23802 - DNA, 201 bp, Bos taurus
ccatttttaaataaatgtaaaattttccaatagaggaaaaaagaacttgccctttcctttctgtatccgagcgtataatcaagtttcagcatatgtcctcgggcccacacaaaatttacaaggctttttgaaagtaagaaaatgtggttaaccaacggatccttttcatgattttaacaagaaacactttatgtgtttcag

SEQ ID NO: 23803 - DNA, 201 bp, Bos taurus
atatgcatacgtgtgaagttctcctgagtgttcaaggtgttttttcccacttgttctgcagtgggttttatgcttgttttccactttattcactttcaaacgtgatgaggtttatctgtaatgtgttcttgtgcagtgtgtctgtacactaagtgtttgccagcccgagtttgcaggcactgttcgctggggtgatgttta

SEQ ID NO: 23804 - DNA, 201 bp, Bos taurus
tgacaatgaggggctggtgctctgatggtgagatggcatccggaccccagcagcttcagtcgtgtccatgtttgggtgagatttataactcctgcacaaatggcaaaccaacactcaacatggccctgagcctttattcactgatcactccaaatatgttatagggattctccttccatcacacactagtgggaacagaga

SEQ ID NO: 23805 - DNA, 201 bp, Bos taurus
caaaggaggttcaagatgactttgggtttgaaagtgaagtgccagctccaagctggactcctgacgaatgtggcccagatgtttctgagcgatttatttgcgttaatggaaagtggctgagctaataacctcacaaggcattcctgtagggagagctgaggtctgctctgcttctctgctccttgtatttgcttgtggctt

SEQ ID NO: 23806 - DNA, 201 bp, Bos taurus
ccattcggggcttggggtttgttcccgggaagccaggaaagtggcttgtgtttttctccttgtacgatttggagacctgctgcattttctgagagcgacgttaagtttcaaacaaacaaacaaaaaaactctctggcgtctggtattctgcggtttcatacatcccgagtgttcttcccgggcattcctaaagcggtttcc

SEQ ID NO: 23807 - DNA, 201 bp, Bos taurus
acctttgagggggtcggtgaagagtgagtgacctgtagggagcatgaggcagcttctgagattctgcgagtgctctgggtgctgattacatgggtgtcaacattcttcgactggtacttttatgacatagaccattttatgcatttgttgtatatttcaatcaacatctcatggagcagataagtgatagaccgtgagtga

SEQ ID NO: 23808 - DNA, 201 bp, Bos taurus
cgtaccctaaatataaggatgaactagcttcctagcttcttcccttcattcttacatctcctagtttaatcttgtgccaagagctgggtttgctcctcctcataccctgaggttacccctggccgccaccccctggtctcacatggcaaaaagaggagatgtaggaccagctcagctcagacctttgaccagttgatcaca

SEQ ID NO: 23809 - DNA, 201 bp, Bos taurus
atctgtccccctggaactctgcacttggcctgtgggaggggcttcagcgacagccacgcggagcctcagtttcctatcagtttcttcattctgtctctgctgcagtcaacttgatttaaacctagtcagctggaatgttgaagagaagtgtgtcttaactaaaataactcttggcggaactgtttgtcagaaaaaatttaa

SEQ ID NO: 23810 - DNA, 201 bp, Bos taurus
ctttaatccaaatttaggattttaaaggtaagctctttgcctgctttctccaaaagatatgctttctctgtgctctacgggtcttaagagtcatgtaggaacaccagtgcaagggaaagggagggacagacacctacatttggatccccaacttgttaactcactagcactgctaccttgactctaaacctccttgagctg

SEQ ID NO: 23811 - DNA, 201 bp, Bos taurus
aaaagtgttactacacctttaaagatcagagccttaagaatgggttctcctgtatatttcaggctgcaggcaacattctataacaaaagatgcagagccagaatgactaagcacagacaacagacacagggtaagagctaaggaatagattcaatatggagtcaggcttgctcttctctgttacatacttggtcttttctt

SEQ ID NO: 23812 - DNA, 201 bp, Bos taurus
gattatgtttctgagtttgggaggaattctggattcccagtggactctgggaaggcttcatggtagaggtgatatatttgagttgggccttaaagactacgtagtctaagggcagtcagtgcttacttgaaggatacgaagagaagtaatggcatgtaaaagccaagaaagtttaaaaacctacatgtacagatggggagc

SEQ ID NO: 23813 - DNA, 201 bp, Bos taurus
attcaagctaagacaaatcaggaggcaggcacttattgcctttcttcacccaaggttcctctcataccagacccattttatttacacaatatttcttcacgcacattcagaactttgactttcactggattttcttacagtttacaggacaattgattaaatcaccaagatcttccttctgtctctcccctgagagatgag

SEQ ID NO: 23814 - DNA, 201 bp, Bos taurus
tgggctacaattaatggggatttttcagtcaacagaggagccctaagctcctcctgtaaatgttagtgaagggagagtcaaggttgaggatacggggttttcttaaatttgggattgggaaaatctttaaacttttgttatcacccatcaagttgttctgctcattttcagttctctctcctcatttttccttgttaagtt

SEQ ID NO: 23815 - DNA, 201 bp, Bos taurus
gagaggagctgtgggagttgggaagacatgtaatatgtaagctttcatcttctccaggagtgaagattatgcaggcccacaattcataatgtaaaacacaactgcattcatactggaaaacaaatgttggttgatatagcaccgttttgtaattttacagacatgggtcaattgtcctaggccgttttcatcaataatatc

SEQ ID NO: 23816 - DNA, 201 bp, Bos taurus
aggtcacagtcggacatgacttagtgactgaggaaaaacgaagcagagtatgtgcagtagattgctgggactaattttgcatagcacttgaaaatcacttggcatttttccctcatactgttagcaccatattgactagggatatattaaggctacagacattcatttctacaaaaatcccctggtcaataatgtgaaaat

SEQ ID NO: 23817 - DNA, 201 bp, Bos taurus
ctccagtattcttgcctggaaaaatttcatagacagaggagcctgccaggccactgtccgtgggatcgcaaagagtcagacatgactgagcacccacacaacacaatatattaaaagagtacaggcccttcacacaccctaagcttatcggcaaccacatccttgaactgattgctgtgaaacccttcatcaaatcctcct

SEQ ID NO: 23818 - DNA, 201 bp, Bos taurus
tcagggtgtcctaggacattgacatcagatctggcctgacaatccaggtctcctggttccagtctctttgtgccttctttcacctaacctcttaggaaagatagaaaaggccaggtggtgctctaatcatgagcataagtcccagagtcaaccaggcataaattataatccaggcaactctcttttgaagtctatgatctt

SEQ ID NO: 23819 - DNA, 201 bp, Bos taurus
ttttaaaagcagtctacagaactgagcaaacagtatggttaaggtatcgtattttttccaaatgtcttttacactgtcctgatatcctcttacatacatatgtactgatgtgcgtgtttgtgtgtagtgtatgagttttttttccccaccaggatccaatcaaggtcattgagtttggaggctgctgaagtcaagagctca

SEQ ID NO: 23820 - DNA, 201 bp, Bos taurus
ggatcttgcttcttgacctcctgaataagtgggatgcaaagatggcagttaacatgcaggagagaaaagcctttctgtcctccatgaaactctcatacataacttgacattacctggtgacctctgagaaatagatcccctaaggggagtggcacccactgcctcttccccctcccccaaactgcagtccctctagtgata

SEQ ID NO: 23821 - DNA, 201 bp, Bos taurus
tctaagagcaagtcctatgctgccttgcaacacaaccatcttgttgggcctggatttgtgattttaatcttttgttcagaggagcacaggcctccctcacgttacttcgagttatcaaacggtattgtaaggaaatgccagaccttgtaccccgggcaatccagcctccaggaaaaacagagctggtcatacatccaggcc

SEQ ID NO: 23822 - DNA, 201 bp, Bos taurus
gtaaattttgcggaaagtgcactatctaaaatgttgtggggggaaaatcaatttcagttatctctattaaagagaaaaaccaaaattaagggtgttacttggactactacgaaatgtccttggtatttcacacggtctgcttcatttaatggaaaacaaaatctacgaggaaattgttgtcaatattcccatttatacttc

SEQ ID NO: 23823 - DNA, 201 bp, Bos taurus
taggggaaggtcagtaaagaagatgccaatctgcatacagttttttgaaaggctagacaagggaaggaaaagcagtcttatcacaactgcccaacagaggggagagcaacctcatccacctgaattccttcctgcggtcttccttgcccatagaatagaagtccaagaatttcagtgtgatataccagaaccccgttttct

SEQ ID NO: 23824 - DNA, 201 bp, Bos taurus
tttctctcggtacttcctccatgcatccgtgaccagggcccaccttctgtcttatggatgaagaagaaatcaaggacagtgtgtgtggttgtttcacacagggtaaattgggcaagggccaagcaaaggtttaagggagacatgggtattcatccagctgaagagtccacaggcaaatcctggctgtgctttggacactaa

SEQ ID NO: 23825 - DNA, 201 bp, Bos taurus
aagtaaagtttggaccagcatattccaaagaccaagtggtttgcgaaccaccgatatacagaaattagaacaagattaaaagacacatgatttaggccatggcatttactcttccatgtccatgtgatattgagcaaattagtcgtcttttctgtacttgagttccctactcttaaatgacctaatggccttggtattcca

SEQ ID NO: 23826 - DNA, 201 bp, Bos taurus
aagctttaaaaaccagaagtattgttggtatggtggttcacaagtttggtgccaaaataagccttgagctgccacttgataccagttttgtctcagtgcttccatcagctccatatgcctctgctgcctactgattatctctgctgcattttgggaatgtgtgtgtcttcactctgtgtcacggagcaatcatcgcatgta

SEQ ID NO: 23827 - DNA, 201 bp, Bos taurus
aaactagtcaggtgggactggaacggtgcctctgaggtatttcacaaacacagggaacaaacacatttggtgtcgcaatcctggccacccggagctgccgtgttggctgttttttgagaatagacagtggataaggagcttgagagaggacggggtgggaggcctagggtggccatcttagagacatgtcagctctcagga

SEQ ID NO: 23828 - DNA, 201 bp, Bos taurus
tttttcctgaacttggagaaaagtccatctgcaacaacagtcaatggagcatggagttcctacaacaaaaacaaagaccactcagctaaatggtgagaaatacacagtgaaaagactgttcttttaaagtgtacataagcaaatttaaacacattatgggacattacagagtacctggagataatgctctcatgaaggagc

SEQ ID NO: 23829 - DNA, 201 bp, Bos taurus
tctcatttatctttccatctcctgtgctttatacatagtaggtcctttatgaaacagcactgggcagagcagagagcaaaggtgatactctgagggtcgtcggaggaggaaggcagctcttgaatgtggatgaacagggggccacatgggccctgccgaggaaaggaaacgaacgcacagagtccactgcgttaaggagca

SEQ ID NO: 23830 - DNA, 201 bp, Bos taurus
agacaatgctgggtgcttatcatacttaatcttctgaaggcgtatgagggtcaagtgtcactgttattgctacagatcagagaggttaagccatctgcatgatgtggcaaagtgaaacccaggtgtgcttgactccagagttaatggcagtcaggctcacaaacacaacccttttagaagataaatggggtgataaggttg

SEQ ID NO: 23831 - DNA, 201 bp, Bos taurus
accaaaggacaaccaaactacataatttgtccagaaccatgaatgtctcaccagaagtagctcagcgctccctgccaggccattcaagcagtacctttagaagctagggtgtgatggacttgcatcctctattttactggatgtttggaaacatgccatttttacagagctagaagctaggcctgcttgcaggatgggtgg

SEQ ID NO: 23832 - DNA, 201 bp, Bos taurus
acatacagatggctaacaaacacatgaaaagatgctcaacatcactcattatcagagaaatgcaaatcaaaaccactatgaggtaccatttcacaccagtcagaatggctgcaatcctttggtctcttttgattctgtgatgtttattctacttctcattgattttctgtgactcttgctgttgcttttgttctggcttct

SEQ ID NO: 23833 - DNA, 201 bp, Bos taurus
gggcaggtggtttgtgggcctgattttttaggtgtttatcatggggtgcccactagaacagctgctgggaaaaggcgccctcaaggccttcgttatacattagttcccaaacttcacagttcctgatattaaactgctttgattggagattatagtgtttcatttaaatttcaaatgacacatcgcaatgtacttttaggt

SEQ ID NO: 23834 - DNA, 201 bp, Bos taurus
caaacagatgaaactaaatgcagtgacatttgcctcatctaagatgaatctcctcttctctggttttcaaaagtaggccatgtctagaatttatgggaaaactagactgttaagaaaatcttaaagtaagacaagttgtgtcacagagtaaaatgaacataaatattaagactcaaacaggcctggctttgagtattctta

SEQ ID NO: 23835 - DNA, 201 bp, Bos taurus
ttaactagtaggagcccattgtattgagatcgccataaagtttgtttggatttttccataagatggtgtgaaaaacccgaatgaacattttggccaacccaatagttctcctgaataaaaatctctagacaaaggggtttgtcacagtctggtcaagaaaacagaaaacactttgtatgtttcaaaaaaaaaaaaaaaaaa

SEQ ID NO: 23836 - DNA, 201 bp, Bos taurus
agtaactcaagagattgctccattctgcattgcgatgcaatcatacacacttcaacaattgggttccagccttgggaagcaaccacagtttgatgtttcttttttttcactcttggatacttttgactcttggatactcccctcaacctaaggatattcttttgaggcctccttatcttttagtaatatttaattccttgt

SEQ ID NO: 23837 - DNA, 201 bp, Bos taurus
attttatatattagttctccgtgtaaaattgtacacattggacttctgtgtaaaagtaaatggatgcttacttccatggtaaagttgatgtggccacagacagaagagagcatgaggcttggaggaagttcattttgctcacaggtcccaaagagcagggtcactacaagccgtgcagggccacaagggaagtgcccaggt

SEQ ID NO: 23838 - DNA, 201 bp, Bos taurus
atatgtctattttcaattgtttctgaactaatatgcaaagcttttctctcttcttatactaaagatcattcgaggaaaagttttgctatgccccaaatttgtttgttgactgagaggcttggggagttcaatagacatttaaatcaatgaggttgaatgaaatcagttttgagggctgcagttaaggacagtcttggggta

SEQ ID NO: 23839 - DNA, 201 bp, Bos taurus
tcatcattttggcaatgctctataaatgtgtagaaactaatgtttataccttctgattccactccagttctcccctttgtgaggccaacttacgaaatgcttatataagcttttttccaccctgttcattagtataacccccagagactaggcagctcctctgatactagttaattcttatcatactatcctatcattcta

SEQ ID NO: 23840 - DNA, 201 bp, Bos taurus
ctgggatgtttggcattgagcaggccacctgttttctcttggtaactcaagcttgtaaaagcttttctggctgttagaaatttattctttctgttcatttctttgctgagacatcacacccagtttttgcacgatgttcttgttagaaagaaagaaagaaggaaggaagaaagaaagagagagggaattacaagatatcta

SEQ ID NO: 23841 - DNA, 201 bp, Bos taurus
tcctattgcacagctttcactgtacttggactcacccattgtgagctgctatagccctgctcccagaaggtgcatgtaggagccctttgacctctccttgcccaataaatggcccacccttgaagacctttgctgctggctgtctcccaaacagctgccccacaaggcttcactcctctaatccacttggctggaccagga

SEQ ID NO: 23842 - DNA, 201 bp, Bos taurus
aactgaactgaactcaactgagttggtatctggcttcctgtacacttcatcaactgacttcactgtcttacttccccacctcactgtaagtatatttcttgccatcacctctcctagaaattgcttgaggcatgatacctttcatgcttgaggcatgaaacactccaaagctgaacttgttttcaaaggtatatggaaggt

SEQ ID NO: 23843 - DNA, 201 bp, Bos taurus
agttatgatgaaaagagactgcttttagtcctagtaggtgaaagaatcaactaggtgtgaaatctaagcaaccagaacaaagatacacaggctggcagacatgggtggagtgagggagtttattttcaacatctctgtagggtcatttgtgtgtagatgtaatgcaaagttaacttcaaggaaaaaggacatagatttaaa

SEQ ID NO: 23844 - DNA, 201 bp, Bos taurus
caaaagaagacacctagtaagcaagacttccacaagactttgctgtggaaaggtgcattctaatacattcatattttaatgttccactattattatagaacactttactagatgattaccctttcattaattatcatatggaagaagaaacaaagttccttgacaaaacaaaatctgtgtaggacagctaaatttttgcaa

SEQ ID NO: 23845 - DNA, 201 bp, Bos taurus
ctctatttcaaggtcagttgactagcaaccttaattccactaccttcattcacctttattatgtaatgtaagatatttacagctgccagagattagaacacgggtgttttagggaggtcattgttctgtctaccacactctctttaagaaatattatgcaaattgtttttcctggctctcgttgaaatctcaggcaggtca

SEQ ID NO: 23846 - DNA, 201 bp, Bos taurus
tgtacctaattatgtatgacgcactcccagttgactcctgtttgaaatggggatgctgaaaatttccatctcagatggtggttgtgcggattaagtagaataaggaacataaaatgcataatatactaaatgctggctttcagttgagttcttggaaatactggaggcttgccttgcaatcacaagtcttgctttcatgtc

SEQ ID NO: 23847 - DNA, 201 bp, Bos taurus
tgaggttgtggatccatcatcagctgtacccctgcgaaggtgcatcctgaggacggtcatgtcccgtgtgcaaaggcactggcctcgcctcatcccagcaccttgttcttgcttgtggtcagtggacaggttccctgagatgtgtaattcaacatcagatgagaaaaaaagtataaggacaggcccactagtttctgggct

SEQ ID NO: 23848 - DNA, 201 bp, Bos taurus
tttacatgtctagcctacatcaaacatgaggctgttgtctttcagctcatttccttcataataaagacgtgaaagcagcgtttcctgagttcactgtcacgcccagcgctggaggtaacgtgggaaaccttccccccattcttccttctttctcctcaagccgcctgcaatcttgtgacctagaatgttaggcggtataga

SEQ ID NO: 23849 - DNA, 201 bp, Bos taurus
tgctgcttggtatgtctagttgtttttgacaggacatgggacttttttttttttttaagtttgagtccttttttttggtgttgtattcatttacaaagtgcttgactcgctctgacctgttgttaagttacttgtatatcagctgaatgttttcaggcaagctattaagcttttttttttttttctcaaaggaaaatctga

SEQ ID NO: 23850 - DNA, 201 bp, Bos taurus
ttaatgttgttgctctgtgtataaatttccctaaaccatctattggttttgaatgttgaatggtactctaaggcatatatttttctgggccttgattttcctggttaggattctgttgtaagataggtctttgttgaggcaagtaacaatagttcaccatttcaataagggagtggcctttcggggttctcccaaatttga

SEQ ID NO: 23851 - DNA, 201 bp, Bos taurus
ataacaacgttatacagtcaacacgatactgtccactgcagacaagtgggcaattatcctaacgtaaagctcccaccaagcgttacttagggaattaaagtgttccagaatctggtaaagctatgtgaaatatttcctcttttacaaccctgattcaaataggattcaagcacattagcaatttgtcatcttgggcaagat

SEQ ID NO: 23852 - DNA, 201 bp, Bos taurus
caggctaaaaaaggctattgaaaagttgattcactcattgtgtggggccagatccaagtgtaattgcagtggagaaattagcattccattattgcagagcagttctgaaaaactgtgtcttggccaatttgtttctcaaatctgtgtaacattatcgaacgtgagtcaggcggtaatatttttcaggctatgcctacttag

SEQ ID NO: 23853 - DNA, 201 bp, Bos taurus
ttccagagagaccaggacagctcacatcaggcacttcgtcctgtgcttatccaattccagaaccctattggttttcactagtttctctctcgatccccacgtttcactatctgtagatgattactgaggaaatttgaccttagttttctgtcagaggtaacatattacatattttgggaagacattaaatttttctaagaa

SEQ ID NO: 23854 - DNA, 201 bp, Bos taurus
agactccaaggcccctgccatccctgtagttatatctctttacatacgcccatgaggatccctttcccaacctacctccagggcctgcctaaactcccatcatccatcatctgaactcctaatacatcctggtacccttgctcatccacggtcccaggaaggtgcttctttccaggacatccttcccccacctccagtatc

SEQ ID NO: 23855 - DNA, 201 bp, Bos taurus
atgctctatgcagggatgagagaaagacaaaactcatgattgttctgcatcctggattcacagggaccactggtccgcatgctcagtcacttaaaacctctcttggagtttagttcatatatattctcaactacaccttgtggcatgttccacacccatgccactgtgatgtttaagatgcagatgagagagaaaaaaaga

SEQ ID NO: 23856 - DNA, 201 bp, Bos taurus
aaagcaaatgaccacaatgttgtcttgacataatgttgtttgactttgactttgcataaattagtagcctggtgacatttatggagaagatacttgggcaagtgtttctggagaattgcaatatccttttcactcgggagtttcatgttaagataaggtcttggctgtttctctactgtataaggcttcagatcatatatc

SEQ ID NO: 23857 - DNA, 201 bp, Bos taurus
tcctagggctgagtaaacaacaagaaggatgctgttgctttcatctgagattaaaatgggtgtaagagcagcaaattcaggaaaagtcttcatacgctacagactgagaagttaattaggagtttgaaagggacccatgaggcttatctccatgtgtctcacggaagccttgctctttcttttggatttctttacagcgaa

SEQ ID NO: 23858 - DNA, 201 bp, Bos taurus
atagcggaggaaggcctccatgagagggcagtgaagcagagatgtgaagtgcatgaggataaatgtgcagagctctagatgaagagcattccaaacaatgtgaatgacaagtgcaaatggcctggggtcagagcatagctggtgtgctggaaaaacggcagacaggcctggagctggatgaagcaaggagagtgggaagga

SEQ ID NO: 23859 - DNA, 201 bp, Bos taurus
cacagcagttctcaaaagacctgcagacatctccaatcagataaagaaggaaaaggatactgaaaatcaagctgaaagagctgatcgaaaaattaggttcagaaagtgtatttttttttttttaagtgaaaagggcccatcctattataaatcctgatgagttcaactactttagaaaattgtccggcagtaaccaggtgg

SEQ ID NO: 23860 - DNA, 201 bp, Bos taurus
aaaggtattcaaccacattagtaagcaagaaaatatatgttaaaaccatggactatctaaaaacttaaaggacaaaaatatgtccatgagtatgtggaataacggagtttatttagcatgtaaactggaattaactgaatgtgaaacttacttcaagagctcataattcttttcatttaacctcgcagcattctctctcca

SEQ ID NO: 23861 - DNA, 201 bp, Bos taurus
aacaccattactcaaaagacaacttttttatttttccttcttcttttaaccagaaagttacattttggtataaaataaatgaattttcaaaaagctagagattaccagatagtttgaaatggcagattcagtctcaaaatctaaaccaaattaaaccctaattccaattgtcagtttccagagcaaatgaaaacaataaac

SEQ ID NO: 23862 - DNA, 201 bp, Bos taurus
ctgccagcttcccactgtatccttgtgatcccaaagaggacgagaaagctctgtgggttgtcgtctataagagtactaatcctgctcatggtcctctacactcatgaccctgtgacctcccactgtctcctcagtgacctcacactggaggggtagggttacaacacgcaaactgggggatgtacagtgctcgtccttgaa

SEQ ID NO: 23863 - DNA, 201 bp, Bos taurus
gaattgctgacatagtccaacctcctcatcttaaataattcctggttcctgatgcaaagtccagcggtcttccattacactccactcaaattgtcactacctttggtaattattatgattttattgtttttcccagtctttaattatccaagtgagtttggtctgtaaaaattgaatcagaaagctaacaagaactgactt

SEQ ID NO: 23864 - DNA, 201 bp, Bos taurus
ctggagtggagtgagtgggagtggacacctaggctggaggtgccccagtttctctctagttgcctcacatgagcccgttgtactgggccgcagttggccccgtctgtgtatattgcctgtggtcttgccttgggtgttgtttctagactttaatcccctgaggcatgaaggcccagatgaccagactcccattatctgtga

SEQ ID NO: 23865 - DNA, 201 bp, Bos taurus
tgcccccaggatctttcatgaaatctgtctctggcacctgcctctcccttggtttctgtctctgctgcccccgagtgatgctaaatcagcaaacacaagcaccacgttccactccaacactctcattcccttaaaacctgctgcagatgacacctctgtgttcagctatcgtcatggcagatagttaattactccactctg

SEQ ID NO: 23866 - DNA, 201 bp, Bos taurus
ggatgagagcaggatggagttggtggcagaaagggggtgtgtgacagcagcgccaaggagatgggggagcaggttgaggccacagggtggccttgaagacatgggtatagccttgatgtttgtgtgtggtgctcatgcttgtttgagtctgactcttttcaaccccatggactgcagcccaccaggctgctctgtccatga

SEQ ID NO: 23867 - DNA, 201 bp, Bos taurus
aaaggtaactgataaattcatgacattatcacaattgcaacacatataaaacacttagtccaagggaatttacctttgagacatcagttcttcaaaatacatattttggcaacaactgctaccatcgttgaatgtttgaattatataagtaatgagcatgaaaacattttatgttgacaagaatctttccaacttgcaggg

SEQ ID NO: 23868 - DNA, 201 bp, Bos taurus
cccactagtaagagctgagggggtttagaaggcagtagctgatcctgtctgggctgcctctgtgctggcgaggctgaagcatcttatgttaacctgttcccaccacctaatgaggctcagacgaggagagtgtggcaggagagcttcccatcacgccactagctgggatttctacgcaggcagcctggtcgcagaagtcac

SEQ ID NO: 23869 - DNA, 201 bp, Bos taurus
gaatcttagtccagcggctggagctagtggttagtaggaagcaactgtacattctctggaacggaagtgatactgtgctcttggaagtattaactggcactggattccactataaataaaagaggaaatagtcatcaagaccagattggatgattttttaggggcctgcttttgccaacatgctcattattgggttatacc

SEQ ID NO: 23870 - DNA, 201 bp, Bos taurus
gaacctcagatttgggatctcccttacaaatgagctacaattttatttttaataattacacttttgaaaaaagaggccccagatttgtcattagaattaatgtttgttatgacaaaactatcatagcagactctatcacttaatatttgaaaactaattatttgataaattctccagttgtaaacagtgtgtctgcattac

SEQ ID NO: 23871 - DNA, 201 bp, Bos taurus
gggtctgaccgacaatgaggcttctccctttaactgcttctgtaaatgtcctctttcaagtctgattcatttcactttcatccagaaattacactgcagatggtattactaattactcattttgttcataaattgactgcttctgggaaaattttaatataaatataatatataatgtaaatatataatagaaaacaaaac

SEQ ID NO: 23872 - DNA, 201 bp, Bos taurus
gagattcaaagaggcatttgggccaggaaggaacttagaattggaaagacaaccatgtaccaaagaaataactgtagaacagcacagaaatcatcacaatgggaggccagggagtataagtgcctgcgtggagagcttcagcctgagaacaattgtcctgcagacctgagatcaaaaggtgtgatttgcttgcacaacaga

SEQ ID NO: 23873 - DNA, 201 bp, Bos taurus
ttacacaagtcacagcgtgagagtctctttttgagaggctcaccccgactgctgaagctaaggtccctccttctccagccactctctggcccccagtctcttggtattttcttcagctcattcctaagggaaattgtgtatgtgttgttgttgttattataagcgtgtttctccaggttgagcaggtcactgttgcaagga

SEQ ID NO: 23874 - DNA, 201 bp, Bos taurus
atataatttagtacaagaaagccaattgtgtagtcttgactcagactttgtgttaaaaagcattcatcatgtgcgcttccatgtaagaggaatttaaactctcctcttcgttaggagacctgcctgcagtagaattaaaatagcttctccctgaatgggaacactgacttggcaaagatcaggagcagtcattcaagagga

SEQ ID NO: 23875 - DNA, 201 bp, Bos taurus
gaacggtgatgatgtgaacacaggaatgaaacctagtatcaggcttgccaggaagatggtagagaaaaacagaatgaactgggtggccaacctcctgatattggcaaagattgagggcaggaggagaagggagggggcaacagaggatgagatggttggatggcatcactgactccatggacatgagtttgagcaaactcc

SEQ ID NO: 23876 - DNA, 201 bp, Bos taurus
ttctaactctagaaaggtaaatggggccacagcacagtgacagcatcctctggtttatatcacaacctggaagcagtacggaagctatttaagattcagagggagaaattgcaacactcgatttcttctctctatattcctgctttgagtgggcagggcaattcagggggtcgactgatgtgatcggcaggaatgcgcttt

SEQ ID NO: 23877 - DNA, 201 bp, Bos taurus
ctttgaaagctacattattcaatatgccagtggtcctttccataatggcaacatattagcaattcatgctgctctaatacagtggacttccttgatgtactgcactccctacagacccagaggggcacccctgctttagctgcatgtgtcctgcacagcacctacccaagtgatggttggcaaaacagctgtgcagtggtc

SEQ ID NO: 23878 - DNA, 201 bp, Bos taurus
ttcactaattcaaaaatcacacattttcaagatagcaagagactcttcagctccaagttaggctgatggtggctgccaaatccctactcctcccatgaaaccgtccatggttgattaagaaagtgactctaccctcaacctgccctgtttccacaggtagtccctgatctctgccctgattaagtgcgccctgcttccttc

SEQ ID NO: 23879 - DNA, 201 bp, Bos taurus
aacccttacctttttcaccatggaataggcaacaataaagctaaatccttcagctgtttgatctttaagaaatccaccttaaagaactgaccttcaagaacagaatttttaaatggttatacaagcccattgaaagaaaaatcctcaatgatatggtactcatatatgtgatgctaatgtcatatactatgaaagcaggca

SEQ ID NO: 23880 - DNA, 201 bp, Bos taurus
cacacggttattgaaaatctaaacctatatgttgctttccctagtgtcactttatttaagattgcaggttgaagctattgtaatcttaggtaaatcagtagttaacttagcacaaagacataatagagagatgaaatcataagacctaagaggcatttttaaagaagaattttaataaatatctagcagaatataatcctt

SEQ ID NO: 23881 - DNA, 201 bp, Bos taurus
taggtagaaccaaactccttacattaaacaacaggcatattgtacttattttccaaactcatttgcccctaattattgccaacaaaatgagagtccttttcaaatgccactctctgaaatgaccacatggacagcatgccgtgtataggtaaagggacaagcccactccttgtaagtgttgtgcttgcctgaaaagaaagc

SEQ ID NO: 23882 - DNA, 201 bp, Bos taurus
gacctcaagagtaataacagccacagagcaactactatgctctttaaaacagatggtaaaaaaaaaaatcacaatcaactgtgtttttgataaaaataacgtgcataaaatatgtgaaatttgactcagttttccctttaagtatagggatcttaggatcttgatcctaaggatcttggaaacctggacttgttactaaag

SEQ ID NO: 23883 - DNA, 201 bp, Bos taurus
cactatgacccaagccagtgaccaaacacagtcaagctctttaatacagtcaagttctacatcagcgagaaaacagcaaggttagcaacacaaagcacattagggctggtaagttcattagcaacaatgcccgctgataaaaatctgtaatatttgttctccataacaaggtggataagtgatatttgcgtttaaaaatta

SEQ ID NO: 23884 - DNA, 201 bp, Bos taurus
gactttcgtttctgtgagaaacacgaggcagaagcggaaaaaaccgcacccagttggcctgagacttgtagggaccatacacgcataaactcagacatcgaccagctacatctgacctgacagctgtccatcagacttcaggtgaccttcttttcaccccttcgaagtaagtcatacgctgcaaaacttccacaagaaaag

SEQ ID NO: 23885 - DNA, 201 bp, Bos taurus
ttctgctccccctgccagtacctccaatacctgctgcagggagcctgatgacacccagtcacattcagagctggtaggtagccttttggttcacttagcattggggctggagcagtatttccaaccttagaatctgctgctactacaacccacagaggccagacaggcattgtgtctgctttgtgaaaggaaaggcaagat

SEQ ID NO: 23886 - DNA, 201 bp, Bos taurus
acagttagatgtcagccccacctcccacctgccactcgaccttggccatgagtcagcctccccccttggccctctgcatttcaccagccaagtggtgacaattgtgatcacctgtcttcctcacctgatctttagagctttcacgggtctcattttcagagagtgtttccacatccttgacagggcatcgctaccctacgt

SEQ ID NO: 23887 - DNA, 201 bp, Bos taurus
ctggtctccagaaaagaggttgtaagacggagagttgtttcctatactcactcatggtgtcttcaggttccttgccaaagtttctcttaattttgaacccttttggaaagaggcggttctatagatctgcaggagtcttcagtataaatgaatctattgatcaaaagttatcttctctgtttggcccaagtattgttggtt

SEQ ID NO: 23888 - DNA, 201 bp, Bos taurus
acaagctttctgattaagtcaggccccaccgaagtcatctcccctttgagtaactcaaagccaactgatttggggtttctaatcgtacctgcgagtccctttcagcttggccacgtctgctggccagcagccatgggtctccctcgtggctagcaggtggagattgtggggtcaccttagaattctgcctcctacaagatg

SEQ ID NO: 23889 - DNA, 201 bp, Bos taurus
gacagggatgtatcagccggcagtggacttcccgcaggaccgaagccgctcacagggagggtgggctggaccactgcagaggtcatcgaagaacactatgtggccttttaaatgccaagcaaaattagatcttggggacaacagggtcagacctcttcccgggcatcttgcggttaccctgaacctgtgttttcattagta

SEQ ID NO: 23890 - DNA, 201 bp, Bos taurus
aacctgcacaccctgcagaagaggcatggagtcccagtctctagaccaccagggaagtccctaatcacttattttttactggtgagaaacttcatgggacattccaggaagggaatcccaagaggcctcagtttaggtcccagatctctggtgcttccttatctgtagggacagtgaccattcccgtgctcagctcacaga

SEQ ID NO: 23891 - DNA, 201 bp, Bos taurus
tggcagggcaccttgaccaacagtgaactggtgtcaaatggggaaaacgagaaagtgtctattataccagaggccccatttgagaaaccatgagatcagacagtagccaagaaatcagagatttcacggaaggcgttaattttctgacctagaagaagggctcttgattagagctctggatttttgaagtctgcaaataat

SEQ ID NO: 23892 - DNA, 201 bp, Bos taurus
ggaaattgaaaatcggtcaggctacttactccttaattctgatttagagcagccataaaactcaaaatatacctgctcagtgccctagcactgaaaaggcgtctatgcagtcctctagaaatgagaataaaggcctgtgttctggatcaagtggcctcagggtttcaggaagagcccgggactatttttctttcagtgggg

SEQ ID NO: 23893 - DNA, 201 bp, Bos taurus
ctgttgaaaattgattctgtattaatgatgtcatcacttatttggtacttatgaaatcaagcttactgtcatttttccccttgcatatatattctgttcagtcatttttatcatataaatactggtggttcctcaaagattagcgttgtgaaaacatgaatgatttgtttatacgtgaataatatatattgacattttcat

SEQ ID NO: 23894 - DNA, 201 bp, Bos taurus
tatcacaaaacaaaggcttaaaataaccaaatttatttcgttaacagctttgtaggtttgaagtcacttatagttctcactggcctaaaacctaggtaccgccagacttggttcctttatggcgactccagggcagaatttgttccattgctttttccagtttctagaggccatccatattctctggcttgtgccctcctc

SEQ ID NO: 23895 - DNA, 201 bp, Bos taurus
tggtagaagccagcaaaccatttgttttccattttgactgtctacacgagtgcttctcctatacataagggcaataaatccccaaagcccagagtaatgcgatgctgttgccgttgtgcatttttatggtcattgtagaggaaacaacttatttccatattcattgattcatttgaagcccagggtgccagtgggactctt

SEQ ID NO: 23896 - DNA, 201 bp, Bos taurus
gtgttcttgcctggagaatctcaggggcgagggagcctgatgggcttccgtctatggggtcacacagagtcggacacgactgaagtgacttagcagcagcggcggcatagtaaactggtttaacagtgtgtagaagtcttctgagtcctgtgagtccttccagcagatcatggagcataaggatggtcttcaggaacctca

SEQ ID NO: 23897 - DNA, 201 bp, Bos taurus
gtgtgtggtttgtcttctcattctcttaacactgttttttgcagagcagaagttttaaatttaaatgaagtgcagcttatctgacatttctttcatgggtcatatttttggtattggatctaaaaacccattgccttctttcatttctaatattagtaatttgtgtccactctctttttttattagttgttctggctagag

SEQ ID NO: 23898 - DNA, 201 bp, Bos taurus
cagagcatgttacttgagcttccttaattttttttccagtatggacaaatattcattttaaaaatccctttagaaaatataatctaaaatccagtcctcattaacttcacttagattcacatcatggattaactgaaatgaaatatcaaccctctgttattgagtatatatggaagtacttttctttactgcagtgaatta

SEQ ID NO: 23899 - DNA, 201 bp, Bos taurus
ataaatgagtagagaagtaagtcaatcaataaacaagacaacttaagattgcaggtgcaatgaaaaaacactacagagcaatgaccccaagagtgacttctgaaaatggtaagtaaggtggttggaagagacctttgaggaaggatgtttgagctgacacctgaataataaagagtttatcaggtgaagatctgaaaggac

SEQ ID NO: 23900 - DNA, 201 bp, Bos taurus
aacatcttctttatgtagttcattagtttaaaaatgtgttgtttgaattgaatcaatatatcgaaattgagaaagatgagatggacagaaagaataactaacaatattgtaggaaatgttataggtcaaagagaagtccttgcttcaaagaaattttcagtatccaaaaaaaaaaaaaaaagcaattagggcaattaaatg

SEQ ID NO: 23901 - DNA, 201 bp, Bos taurus
gtgacatggaccatagtccatgaggcagcctctgagtaagatgaggcaagtaagtggactccccctagaactttcagaaggaatgtggcctgatagccaatttttcactctgacacccagagctataatataataaatgtgtgttgttttacaccactatcattatggtgatttgttacaactgtgataggaaaccaatac

SEQ ID NO: 23902 - DNA, 201 bp, Bos taurus
gcttatctggaagcaaacagtggaaaagaatctaaatacataaaataactatagaacacaaaagacattaaagacatttccctttggtgaaaaatcagtgcataaaatttaaaagagtggaccaacagagaatacttggtttctaatgatacatgcagttcgtctttatgctacaccttccatgaaataaacaggtaaaca

SEQ ID NO: 23903 - DNA, 201 bp, Bos taurus
ttaatctggtataatcttttttcttccctcagtagggtacagggagccctctagcctccaagcctgtttcctactgaggtacatattggccagcatacagctgctcagaacaactatttgcatctacaatggggtcatcccaccacgttcttttcagatcaatatgattggtacaaacaatagtttgattttgattgctct

SEQ ID NO: 23904 - DNA, 201 bp, Bos taurus
tttttgtcctttttacaggggatggggaagtagagaaagaacaacagagatgtgtttgttttcaactctgtcttgctacacagactctgaatttatatgatgttgtcttctaaaatacattggaaagtatctgtatttaagtctgttattagtagacagtgatttttttaaaaatgtagctaattattggacaaaaacaca

SEQ ID NO: 23905 - DNA, 201 bp, Bos taurus
atacaatggccttctgtttataatatcagtaggtatcctgctccagaagttccaaggtcttaaaaaacagaaaacaaccatttcagttggtttatgtggagaaccattagttacactgatttttaacttcactatttttaagatgatctagaaatgcctagccacttattggatatattctaagttgaaaactccataggt

SEQ ID NO: 23906 - DNA, 201 bp, Bos taurus
gaaaccttttccccctaaagttaagcaaagtttgaagagctacagttctctcctcggtgaccttgtaaatccgtcccaggttgttggccagtctggtcatttcatctcgaccagctgctgtcttcatgtcaagggggatttggagcattccatgggtcaggagaaggtaatatattctgggccatttctaatccatgaaaa

SEQ ID NO: 23907 - DNA, 201 bp, Bos taurus
attttatcacacaaatcagcgccatcataatagctatcattcattggcttagtatacccagttcttttaggcatattatctgtgttcactaggacaatgatttgttttttaaacagatgaggaacctgaaattcaagagtgtttaactgagttgtctaaagttacctgactaataagtggccgagctataaaatgaatcca

SEQ ID NO: 23908 - DNA, 201 bp, Bos taurus
aaaacaagactctatcaattggcatttgaactttaaaaacttttaagtctcacaatgagaaatgacaagcataatgcctcacggagtcaagtaaaaatcctgcaaatatgggatcgctgtctcaaccgccactaggggtcagcactggactctcaatgtgattctgttatgagagacattctcagattatcactagcagat

SEQ ID NO: 23909 - DNA, 201 bp, Bos taurus
tgggagagggaagggtgcaggaggtcaggaaggggtgtggaggggaaaggtcgctatttttccaccattacaggtttaagatgaatactattatggggcccagtcccagctcaagctgctcaaacactgaggttcagcccataggaaataaaaggataacttcttactccagtctcagaatatttttctttgttcatcaac

SEQ ID NO: 23910 - DNA, 201 bp, Bos taurus
aatatttttttaaagtctattcaaactgagtctcataggagggcccactccaaactgtcatcataaggaaagttaacaatattgaacaaacctatacaaatgtgtgttgagaaagttattaaaaatataaaagaacattttctggagagcctgttcctaagggaaaagggctatattgtgtcccaaaaaacttcctttccc

SEQ ID NO: 23911 - DNA, 201 bp, Bos taurus
actggcccactcgcattcttctcttctttctgaggatggttggtggagtgctaaacttaggcacacttggggaggtcaaaggaacagcctcgccgtctgcaccattacaaccgtttcttttcccttcgagtacaagactgacgttaaactgacattccatggcaccttcgttgtgctgaattcgcattagtttaactgggg

SEQ ID NO: 23912 - DNA, 201 bp, Bos taurus
tccgactctttgcgaccccatggactgcagcccaccagtctcctttgtccatgggattttccaggcaaaagtactggagtggggtgccattgccttcttcgaatcatcatgctatttatttctagttaaattgcccaactgttagctttaagtgttagagcagagagatcgcgatatgggtctggccatttttgctgcagt

SEQ ID NO: 23913 - DNA, 201 bp, Bos taurus
cccccccctttttttttttcgcagcctgtgctttggctgggatacaaactgagcagtggctactaaagataagtttttggagatataggacagtacctacggtattagtttatttaattcagacttcctgcttgtgcaaggattcacccttttgcaaaactgtattcttctcttacatgagtgagttctgacaatagcaca

SEQ ID NO: 23914 - DNA, 201 bp, Bos taurus
atatataattttattcttgaaataccaaaaggtatatcccagagagaatagagtgagcataaaatttttttaattacatactttaaggaaatcataaaaaggaactgatgaatataaccaaaaggaatagaggaagtttctagaaaattctggaggtgactcttctttttttttttaattattaatttatttacttggctg

SEQ ID NO: 23915 - DNA, 201 bp, Bos taurus
tgaaaggcacacagtctaaactcccaattaattcagaatttagacagctgggctcaggatgaaagggtattgatgaagagtctgaaaaagtgggtcacgcaaggggccaggcacagaggaacaggcagggaggtcacttggttgttccactcagagatcaaacttgtgcctctggttctgcagatgctactcggctgtagg

SEQ ID NO: 23916 - DNA, 201 bp, Bos taurus
aaagagacacacgccagcgtaattgcccacgtcacggcctgcaggaagtaccggagaccaacgaaggtaaatgccctcggtgcagctgtaatggcgagcgtgctcagaaggccctgggggtagcatgcgatgatgccagaactgtctgtggtttccactgccaggttcatgtttaagcgcagcattgtcagtctcataatg

SEQ ID NO: 23917 - DNA, 201 bp, Bos taurus
acttgtagcgaccccatagacggcagcccaccaggctcctccatccatgggattttccaggcaagagtactggagtggagtgccactgccttctctgagaagtcatgcatagtaaaagccaaaataatgcatgaaatttcccaggtggtagcacctcacatccagagagggccagtgaattgctcaaatgcaggtacctgg

SEQ ID NO: 23918 - DNA, 201 bp, Bos taurus
gtttggcgtatggttcctcaaactcagaaaccccaacacatgccttttaattgtggctgtgtgtcttccgtttatcatatttttctaggaaattattctgcaaactatactgcactagcacacacaaaaaaagtgaacatacttatccaggtacttcaattatgttactattgcacaaaagagttaaatatcactgctcaa

SEQ ID NO: 23919 - DNA, 201 bp, Bos taurus
gaaaaggtctctattttgacagtattaatattgacattctggttatgaagctctactatacttacgcaagaccacgacttttcagggaaactgggaaaagagcatactagctctttctgaattatttcttacaactgcatgagaatctacaacaatatccataaaaatttcaattaaaaatatacaatgagttttaaacac

SEQ ID NO: 23920 - DNA, 201 bp, Bos taurus
ctttctattcttcttcttctttttttttaatttgcttcagactcaaaagatataggtaccaaataccttaagtttttgtacacatttaaagatgttcttttacatacctctccctcgacatctttgaaaccaatatttcacttctgttctgagctatgctgttatccactgtccataaatcagtggtgcctgacttctggc

SEQ ID NO: 23921 - DNA, 201 bp, Bos taurus
aaatatgtaacaaagtattacacttctctttgagtcagtaatataactctttaatatttttgattgatttatgctggaaattttctctttgaaatgatcagaacatatttaaaattataagttacaagtaagagattttaaattattttatgcattgttaaaagcaagatgaatgagagaaaaattgaagcaagcttgaag

SEQ ID NO: 23922 - DNA, 201 bp, Bos taurus
tttcagttgcaaacattagtgcttaaaactgagtatgaactacctagaaagaaaagcaaataactgtgttatcagtgccatcatgtattatgtttcagtacatctgtgttttcaggaaagagcatttaagttttaaaattaacattttttttcagaatgttaatataatagtctattttcttacttaaaaccagaaattct

SEQ ID NO: 23923 - DNA, 201 bp, Bos taurus
cgttcctcaagttcactttccatgtgtgagaaaaacctctttggacatttctcccattttcaactatttctcaagacaaattgttagtctctaaggacgcctgtcgtccgccaccaagtatccatttcgaacattgcatccttgtctcctttgtcaaggtctgcgttctgtctgtcagttttttcttcttcttcttcactt

SEQ ID NO: 23924 - DNA, 201 bp, Bos taurus
aaagtgaattctcaaaatagcctattcttgaactgacagaaataactttactctgaacgttttaaaaaaaatctgaattgatagtctatgaaaaatggccgctgcccatgttcacaggctctgagcaggggaggtgctctcctgttctcttctagcagcacagagtatggtcatctcgaccttcacatccatcatcacaag

SEQ ID NO: 23925 - DNA, 201 bp, Bos taurus
taaatatcccactgcaggaccgagtgctcccatgacatacatgatggctgggaagacagaaaaggaaatgtgaaatataacctcatgctatctctttcagcagttgtctaatttcagtcataccacgcttacgtcacagttacatccagttaacaatttccaaaaacagagaactttagagagttctctaaattgggcttt

SEQ ID NO: 23926 - DNA, 201 bp, Bos taurus
gctcaatgagagcaagttttctctgtttaaattattacatgttaacagggaaaagatgcaaattcaaaccttaagtctctagattcaaagcattatctcttacatgtttagcactgaagtcctgctacacaggtgttttgctcaatgcactgaattctcagaagactattttgcaacagtgaaaatgtggatttgatctta

SEQ ID NO: 23927 - DNA, 201 bp, Bos taurus
gactgtggggagtagagactggccgagaccctcagtgggcatctgcgcaacaacaggtgtggcaaggtccaagacggacagctgacaggatgcagcagacgtgaggccaaaggatgcaagtaagtaaaactgatgaaggaaggggttcagttgggaacagaaaggaggccaagggttagatgaggaagaaaagccagggaa

SEQ ID NO: 23928 - DNA, 201 bp, Bos taurus
cataaaaccagagacagtgagccacttggcagagcagttctccttggttcctttaccttcctgctctctgtttgggccttccttcccaataaggtctctttctttgtcaacaagtgtgtctcttcgcacaagtcattactgagtgttagacaagagcccccttttgggtcctggaagggggccccttcctgcaacattact

SEQ ID NO: 23929 - DNA, 201 bp, Bos taurus
tgttttttgcttgttccctacatagttccagaaaatccatcctttattttgagcctaggccttattaaaataagcaaataagggccaggggaacatctaagcaaattgtaaatcaccataattaactgatattggatgatgttagccaaaacatgtggccagaaaaaggatagcagtgctttgaaattcattattcactca

SEQ ID NO: 23930 - DNA, 201 bp, Bos taurus
cacatcaagttcaaatttggatccaaatagggtcctgatgacaggattagcataaagaagatcattttttcaaaacatttaggtacaattggagaatgaggtgatgcattttgatgatttgtgttaatagggagacgttcggggctggactataatattctcttccttctctcccttctctacatctctttaaagtcacct

SEQ ID NO: 23931 - DNA, 201 bp, Bos taurus
gcctgggccctgtggcagaggttcctttgtccttatttccatggtgtccctacaacagtgcccttgaagtcaagtgagtaacccaggaaggacattgaatacaccaggtatccagggggccaaaccacagtggcgatttgtcgatgcaaactcagacttgtcggcagtttacactgactgctctttcatcttccaccatgc

SEQ ID NO: 23932 - DNA, 201 bp, Bos taurus
taattctttgtatgtcatgaaatttgataatatgaaagtgaaatgcatctcaaagactgaagtgggttaatgaacttataaaactacacttaagtcttttgaagcctgaataaacagacaaagggacttattagctcaaaccataccaagaaaatacagcagttctcatgcttaactctgcaatcaatgagagagatatat

SEQ ID NO: 23933 - DNA, 201 bp, Bos taurus
atctgagccaccagggtggaaggcataaataaatttattaatgcaatctgtgactaaaccaaagaccacagattaccatgaacactaatcctaccttcagaaatcaggcttcaaacactatacaatagttggatttaaaataaagatttgtaagcaagaagcaaaaatgtactggcatttctgctgtgtcataaaataatg

SEQ ID NO: 23934 - DNA, 201 bp, Bos taurus
ccgtaactttgacaagttacgttggtaaaatcgctgtaacaacaggatctgcacactcagcaaaacagaggcctaccctgctttttgagacagattgtttttatacttaataaaatgtcctaaactctctgggacttgatcttcaaaatatgccaaaataatacagatgacagttttcaatcaacaggcaaagaatacttg

SEQ ID NO: 23935 - DNA, 201 bp, Bos taurus
cataagactgagactgatgggaactaagcaatgatttaaaggagagttgtaacctatattttagagcgatcattggccatgttagaatggatgaaagggcgttgagttagaggggggacaactgagtcttgtggtaacctagatgaaggccatagcagcaggggtgaagtgaggggcagaaggtggagatttcaaggaggc

SEQ ID NO: 23936 - DNA, 201 bp, Bos taurus
aatcttgcatgccttgtatccagcttagttccttgtatgtagtaggtgctcaatttatgctgtttgtataaatcaaaataatatgataggattttcaaaacacacaatcgggacagatggtctggtaaagtatgtttttcttattagtaggtgtatttatatagattcctcttaaaattttatttttttctgttggtcatg

SEQ ID NO: 23937 - DNA, 201 bp, Bos taurus
ctggcgggctatagtccttggggttgcaaagacatgactgaagtgacttagcacagcacacaccaatattggtttcagtttattatgtatcttgaggagcatcatttacttgagacatgcagtcagagcccaaggattctgagctgtcaagagtttgctgttatgggaggatgtggattctcttttggcagtatagaatga

SEQ ID NO: 23938 - DNA, 201 bp, Bos taurus
gcttcactatggatcctgtcagacatttgaggaagaaataataccagtagtgtaaatatccttccagaagtttttaaaaaaagagaaagtttcccaatacgttccacaattttagcattattctgacattgaaactagacaaagacattacaaggaaaaaattgcataccaatattcctcatggataaaacaaatgttaag

SEQ ID NO: 23939 - DNA, 201 bp, Bos taurus
gttaaactgatggattcctttacagaattgtatttgagttgtgtaggcatactcataatgttcctggttatggtaggtaagtttgcttttaaaatgtggccgaaacgattttcatcgttatcatgttttgttggttttttttcctgtcctgtagtctaagcagcatcacttccgtggtccgttaggacttccctaccaagt

SEQ ID NO: 23940 - DNA, 201 bp, Bos taurus
cattggattgcagagttggacatgacccagcgacttcactttcacttttcagaatgggtaccaagtgtgaagataacttttgtcattagcaaatgccccggaaagtcctctgctgtagaggaagcttcaataaccaggctaacgagctcctcaccgtgctatgaggaacatcacctagacaagtaagtttcctggtttttt

SEQ ID NO: 23941 - DNA, 201 bp, Bos taurus
ggccccaccaattcaaatttagggtaacttgcatgaaatcgagaggcagggactacacaggctgtctttattaggagttgggttatatgagctctgggccggctcccattctctgtggctatccaggcaagccatctcacctatttagcatggctgggtagaccaaggaaagcactgacaactgggtgcttttcatggcta

SEQ ID NO: 23942 - DNA, 201 bp, Bos taurus
gccacccaattggaaacgaggcaagattcctatctcccatccatggcttgagaaaagggataaaatgatagaaaaatgcactgtatttaaaatatcagtatagaagaagaaagaacattcttctactgttccactttaaagagatgcacttttattttttttaatgaatttttatttatttaatgtaaagcaatgaagtat

SEQ ID NO: 23943 - DNA, 201 bp, Bos taurus
gtcagtggctgaagtttctatgccactaagattcacaaaaacttgagattaatatattgaaatagatgctggtggatacaaactatttgaaacacaaggtcctgaatttaatacaatatcagaggtatttctaattttgaaggacaaggcaaaaatgaaagttttaaaagaatttgtaaaagtttactacagcttaataat

SEQ ID NO: 23944 - DNA, 201 bp, Bos taurus
gccactgggtcagggaggctgtcccacttttaaaccttagtgcctctgaacatgtttacatcccaaaaagccagtccagctttctataaagaaacaagaggctataaaccaatacctccactgaaagagaactaatattcctatgacgttgaaccctatgaaaaacctcctaaaacaaaaataccattttgattttctact

SEQ ID NO: 23945 - DNA, 201 bp, Bos taurus
tttgaagggatatcatattatgagccttattagtgtgctcatgtgtctcagactagccagccctccttactgcagactctggacagactttgaaagaatacgctatagtttcagataattacttataataagaccaggcagacaatgaagctccaaaccaaaaatacaaaatcagcaagaaaaatttatacagtattttcc

SEQ ID NO: 23946 - DNA, 201 bp, Bos taurus
aaatgaggtgatgaactaagacttctgagcttatctgtaatttaaaaattaaagaacagagagttgaacagatttttcagaactggcaatatttttacacgtgagagaggtagtctatacttttctgggtggaaggaaattctgtgaatcattaagttaaaatcaaattgggaaaaaggtcgattgagggattcatttttc

SEQ ID NO: 23947 - DNA, 201 bp, Bos taurus
gggtatcttcctgactcagggatcaaacccaggtctcgtgcattgcaggcagattcttttctgtctgagccaccagggaagccccagttatctgccaaatccatttcctaaacaactacctgagtgaaaggttaaatggcaatatgatatcccacttaatcacattgcaatttctttatatatctattactctctccatac

SEQ ID NO: 23948 - DNA, 201 bp, Bos taurus
gaattttgtgagtggtaggatgcagagcacattgtcagaaaccagcagtggtactatcaaaacgtggattaattagtctctgtccaaaactacggtaaatgatgttctccttcagagaaagacattatgattcagctccttgtggatgatgtttaaatagctgatttctgtgtaggatcctttaattctatcaaagtacag

SEQ ID NO: 23949 - DNA, 201 bp, Bos taurus
acaaattaaaatagcatacaagatagattaaggtgacaggcaaaataatagttttgcatatagttgtcctctagccaagcattgataaaatcctgaaaagttacaagtcaggtaggtatatatatgttgggatttatttctatatgtgcttccattaatattcaaattacatttattaggtaaatttcctttcatattatg

SEQ ID NO: 23950 - DNA, 201 bp, Bos taurus
taataatggatgttaaagaactattttaaacatgtcctcattgcagtttcaagtcagtgctacttgtcagtgtcctaaatagcagtagaaagaaaaaaaacacagtcattaattttagtaaatattccttttgcactatattaagatatgttcatatgctgtactctcgttttaagagcatgcccagatcagattttcttt

SEQ ID NO: 23951 - DNA, 201 bp, Bos taurus
gcctccttctatacagcagctctaatatgatgtagaaagttaccaagtttggaacttttgcaaaacccttagagttccctgctctcagatgttatagtacgttcccactgatattaattagaaattaaatttggaatatgaggaatctttaaattttcctttgcctgacttaatctattagctgtgttgagaaaatttcct

SEQ ID NO: 23952 - DNA, 201 bp, Bos taurus
caaaaatgcatttgattttaatctgcacccaatatcaattattgggttcaaatgaaaatttttattttgcttttgttttagctcatcatattcaattagcagctgttattatttgtttcattactgttattgctttagttctcccattgtgattttatgcatggcttccactgagctgtgactgttttattccaggtagta

SEQ ID NO: 23953 - DNA, 201 bp, Bos taurus
acacgactgagcgactgatctgatctgatgctattttacagctttccctagtagctaagtggtaattaatctgcctgagatgcagaagcagcaggaaaagcaggttccatccatgggtcaggaagatctggaagagggcatggcaacccaatccagtattcttgcctggagaatcccatggacagaggggactagtaggct

SEQ ID NO: 23954 - DNA, 201 bp, Bos taurus
aaattaaaagcaaacaaaaaaactgtgtccagcatttgctgtctacaagtgatttactttagatttaaggacatacatgggctgagagtgaaaggatattctaaacaaatggtaatcaaaagagtagggattgccttacttacattagacaaaatcagttttaaataaaaactctgacaagacaaagtacattacataatg

SEQ ID NO: 23955 - DNA, 201 bp, Bos taurus
gtaaacattcatttggaaaacatttactaaatattacatgcttgtcctcctattctaagagcttgtgatatgaacatgtttaagacgttgaacatgcttacagaaaataacatgcatgtgtgtggtgtttacaataaaattggaaccctttgaaaatcttctgattctacctgaaggatcaaggaaatacaaatccagcaa

SEQ ID NO: 23956 - DNA, 201 bp, Bos taurus
taggtgtttcccaatgagtcggcacttcgttgatttttttttacataaataaaaaatgacacttctctggccttctctttgcacttttagtcagtcattgactggatctgcatgcatgcttccaaaataattgcaaatactgcagacttaataacaagtcaactatctactgtgctatttgtgaaaaaaaaattttaataa

SEQ ID NO: 23957 - DNA, 201 bp, Bos taurus
tgttttagtctatggaaaaatgaattcattcatcgttcatttgttcttgttatgtattcatgcaacggatcagtcaaaaggtatttattgaatgcgttagtgcaatgcattacactgtattttgattttcatattgagttatattttggtagatattcaccaccaccaaaagatttcagacagttttaggtaggtttaggt

SEQ ID NO: 23958 - DNA, 201 bp, Bos taurus
ttctccacatgtgagcacttgctgaccaccgggatatgaactgtcctaatactgatgcttttatcgacccatttgacacttatgatgcttgcagaaatgatgaagcaaaaactaacgcatcactaagagaagtgggacatgtgggaattggtatgttgcagctcactaagtcttaaggcattaagcctaaggattaaccca

SEQ ID NO: 23959 - DNA, 201 bp, Bos taurus
gactttgataatctatcactcaagcaccatgttaaatgagaagcttctataacaaccttttgttctggcttggtcactctttaggaaacaacatctaagtatctgcatttcttggtttcagttttcacctagtttctttggctttggccatcctctggtacctgcaagcatttaaagtataattatattttctgtgatttt

SEQ ID NO: 23960 - DNA, 201 bp, Bos taurus
actggagaacgttttgttaaaactcaaaaattatattgcaagtgtgacaaataatttaactggaacagaaatttctggaggccaaattgactatctttccgggaagccagggtgagtgaacattactggggatagtttatttctctggctctctcttatttctctggctctttccatttggccaaagtctgggaaagggca

SEQ ID NO: 23961 - DNA, 201 bp, Bos taurus
ctttctatttctatctttctcctctcatgggtcactttgacctcaggtgtcctcggctgtagcttgaagcagggttttggttctaggccagagatttaaagcacgccacagcagtgagagcatggaattctagtcaccagaccaccaggaaccagtggtcggtgactaggccctggcccatgagtggtgtagaaatgaatt

SEQ ID NO: 23962 - DNA, 201 bp, Bos taurus
aaaagtcagacagtgtcatggccagacaactctcatatgtaaatatctgacaggaataataagggacactcttaacacatggaagtggtccagaattacatggctgaatttttctgaggccgtattttctgacccttatcattatttattaataccatgaactgaagtcatagagatgtcaggatcatcttttcctccttt

SEQ ID NO: 23963 - DNA, 201 bp, Bos taurus
ttctgaaagtggggctagacttttgaaattcaaaacccagaggaaaacccagagtttttttctctctgctgtctactctttctccaaggaagtgataaaattggaataacagaaggaccactgagtaaaagaaaatatcaggagaacacacacacattatacatgtatgtattatatatacattataatatatacattata

SEQ ID NO: 23964 - DNA, 201 bp, Bos taurus
aatactgaatccttttcaagaatgttcagttggttaccttttttctaacttggaaattttaaaatgaaaatagattcttgaggataccccaaagtagactgaaagtcttattttttcccctctaggctgatcaaatccctcaggcaaagctggtaaagaatcagataatgtatgtatagaggccatgaaatatcatggaga

SEQ ID NO: 23965 - DNA, 201 bp, Bos taurus
attaagctttttattggctctaagataataagcagcccttcagaatgaggaaacagaagttctacagatgacaaactttctggtactgaattctgaaacgaatttctccagtggggttttatataattgacatcaagacagttttctgaaaagcattttctagtaaatacagcagtaggttatataattgtctttaataaa

SEQ ID NO: 23966 - DNA, 201 bp, Bos taurus
ggtggcagggagggaaagggcccaccctggggaacttggggtacacagcagcattgccaggcaacgcccggaatcttaggccaggaggaacaccactcttcctggtacctccagtgctggttcctagtgtactttcggccacaatccgaattacttcacgagctgtgtatgttccagctttctagtgacagatgtcagaga

SEQ ID NO: 23967 - DNA, 201 bp, Bos taurus
gcaagtaaactgaggccaggagttcagatgatgctttcccactatgcccttagtcctccccaacacacccccttctcaggcagctgcaacactgctcagggttggtgcaggaagtcatcccttggggtcactcagatccacccagtttacacttagaaggggcaatgatcaccaagtggtagaattaggggccagctatca

SEQ ID NO: 23968 - DNA, 201 bp, Bos taurus
atgatggaaatgaggctgaacaataagcaacaaaacgccacactgggaaaacctctgactatcatgttggggtctggaagggccagccttccccgtggcagtttgcaggacccaacagtcaggcttcaagggagacagagccccttcatcttcctggaagttcattcaaactgggttcatgcctgaggcaggccattcata

SEQ ID NO: 23969 - DNA, 201 bp, Bos taurus
agtgaagaaatgctggagaccagtggagtatatagactggttacttcaattatcacctcctggggttattataattatcagctcacaaggatctggcagtaagtcaggtaataggaatgaaaagaagcagacaattttaaagatattgtgaaggacagttagtcgcttcagtcatgtccgactctctatgaccccataggc

SEQ ID NO: 23970 - DNA, 201 bp, Bos taurus
tagaaataggtacagaatgtaattaaataacacagttttaacagacccataatttggtttgccatcttcaaaaatagttttaagcaaggagagatcataaaaagcctaacttaactcagtatattcctactagtcaaaattgatctgaaagttcattttctacttttcagtaatagaaaagaaataaaatgattaattttt

SEQ ID NO: 23971 - DNA, 201 bp, Bos taurus
cattgggccctgctgggctatacagcagtcatcactgagcagccctaggggaaatgttgatttgtgttgtgaatgcccaggctaaagaaatagaatgatataactgctaaggcatcttctttgcccttcaggtttaattcttaatgaaggagaatggaagagcagaggaccactcaacattcatgcataagaagatcatgt

SEQ ID NO: 23972 - DNA, 201 bp, Bos taurus
tgctgatctcctaaagttttaaaaatgcttttagcatctttcattagcatatacagtataaaagataagcaatatcttcattccaaacccggtttcccctcgtaccttacctcccttctccatcctaaaccatatcctatccatgactttaacttcttaatacctctttcactaaatattttctggattaatacattgatt

SEQ ID NO: 23973 - DNA, 201 bp, Bos taurus
ttcaccaaagctcagatggacccaagatgtttaccttgtacactgctccatgtactcttttatttgaaagtggttgcttctctgtgataatgatgtactgcttcttttgagaaggtacccattaataacgtgttggtatatattcctcctcacacacatttttgagtagagtccaaagtagaagagccagattacttagaa

SEQ ID NO: 23974 - DNA, 201 bp, Bos taurus
tatagcctccaggtctccacagtgcctgacactaaatgtgtgtttgctgagtcaaaggagctacgatgagatttgctggggtgtttgtataatgtaccagtagtttccatggatattccaacaaaatgtagcttactgtcagagatttcacatgctcatgtcagctttgatctctttcaaaatacaaatataatgccctac

SEQ ID NO: 23975 - DNA, 201 bp, Bos taurus
acaaggcacatcttgcctgcttcattctctccctcccaggtgcgatctaaatcatctcctatgtcccatttttctttaagttctctgagtttggcagacacgaggattgagccctagatcataccttcaggtttatgaggacagtaatctgtcatcagcacctgcagtaccttttatcggcctccaactgcatgaattcct

SEQ ID NO: 23976 - DNA, 201 bp, Bos taurus
cattgcagctttggtgtgaattgttttaatatattgggttggccaaaaagttcatttgggcttttccaaaacatgggttttaacataatatggaaaaacctgaagaaacattttggccaacctgctattatctcccccaggataattgatgtggtgaaagaggaggtatctgcaaagcagctcatctcgtttacttaaaat

SEQ ID NO: 23977 - DNA, 201 bp, Bos taurus
tgcattaggtttctcataatagtggaacgatgtatctgctataaaggaagtagttaataataggtaatgcttttgagaattttctaatatgcaggggacactgttaaatacttcttatgcattaatgattataaagagagttatccttctctttatatatgggcaaaatggacagggagggtccaactctctcaagctcat

SEQ ID NO: 23978 - DNA, 201 bp, Bos taurus
ttaaattcactcaaggagaattagaaggctctcaggggctctgagtgattccaacacccctacttttccttccccagtcgaaaatcgctatccttatgcggccatgtttgacgagaccatgatttaacaagtggaagttccaatttcagagagctgaataaagccagcttcttgaccctgccctgtctcagtcgtgattgg

SEQ ID NO: 23979 - DNA, 201 bp, Bos taurus
aaaagtgatggagggagggggtgatggaccgagtccaactggacatctacactgtgatctgcgttcagtttccttcctttaatggctgaaaaatttagagatcagtgctccttcctcccccagccaagaacagtttcatttttcgctttagttctgtccaccctatcttttcttgcctctatttgccaatttattcaataa

SEQ ID NO: 23980 - DNA, 201 bp, Bos taurus
tgccaggtggcctaagggccaatggcaaagtccacacgggaacacgagatgttaataattaaaaagccccaggtctcccgctcccctggatggatgcctgatgctgagacaagtttcaggcctgcttctggtcctcctgccacggctcagctctttgtattgacaaagctttttgtctgcttgccttatgatcccaagtta

SEQ ID NO: 23981 - DNA, 201 bp, Bos taurus
gaaggggcaagggagctcttgggcctctttacaggggcattcatctcattcctgagggacttccctggtggtctggtggtttaagaatctgcctgccaatgtggggacactggttctatccctggcccaagaattaggatcccacatgcagtggggtagctaagcccgtgcaccagaactactgagcatgcgtgcagcagc

SEQ ID NO: 23982 - DNA, 201 bp, Bos taurus
accgactgcctgatggacagacagacagagggatgattgcagcatgtgaagaaaaatgtaccagtggggttgtatgtatcgggcagtgggaacacaaggtgggaagcatcgacatttgtctgcaggaggtgaaacttaaattaactcccgcaaaatgagtcattctgcattacacagaaaaggaaggcatgagaagacata

SEQ ID NO: 23983 - DNA, 201 bp, Bos taurus
tattgtgcagattcagatagtaaaatttagataatgaggaacttctgtattatcactatcttcactctatagatgattaaagtgcagcttggagaagttcggtgactttaaggcaacacagcaagtaaatattctcccctaatccatgctccttatgcaaaggagtggataaaatgggggttaagagtgaatctgtttccc

SEQ ID NO: 23984 - DNA, 201 bp, Bos taurus
tattctgcttggcctgtgaggctgtgagagctttgaaggtggccaccaagtcttttgtgtctttataatgagcgtctaagaacagtgttgacacataagcatttgtcaaatggatgtcccacacaacaagggaatgttgggctgattctgaatcacgtctcacagactgtaagaatttagaacaaaaccatcaatccgtaa

SEQ ID NO: 23985 - DNA, 201 bp, Bos taurus
agtctccccacgtccttggcagagggcgccggtagactttcatgttcatgttggaagttgtctgcagtccaagacccaaggactgcagttcagcgtgtgcaagatcaaacacaggtgcagctgagctgctgctgtgcggttcagccagtcaccctggagagagagccgagcggaagattgtggggggaaagcttttcatat

SEQ ID NO: 23986 - DNA, 201 bp, Bos taurus
tttttcttttaatgtgattcaaatatatttttctagcaaaaatataattactgaacagtgaccccatagttgatgatgaaaagcatattgatgttgggggaaaaaataaccaccttgtgtactctctccacggtcagttgaaatcatgcacaattctgtttgagctaatagctccgaaatatgacccattatatcttttga

SEQ ID NO: 23987 - DNA, 201 bp, Bos taurus
acttgctatgtggaggatcttgggtgagataacttaatcgctctgaatctcagtgtcctctgctgtggaatagaggtaataatacatgccttatattgtcatttaaaaatgaacgcacttcagctgaagactactgggaaaacatctgtagttacacaggttgggtttattacttgttgcaccgaggagaacacacacttg

SEQ ID NO: 23988 - DNA, 201 bp, Bos taurus
ggctacagtccatagcattgcaaagagttggacatgtatgcgactttgcatacatggtccttagtctcgaggacttgaagtcttattagaggaaacacacgaggcagttttaagcattcatcagtaataacataagaaagtgtaagaatataatacataagaataatatacacgtatcaagggcctactgagtaatatact

SEQ ID NO: 23989 - DNA, 201 bp, Bos taurus
atatatacacacatgtgtgatacacacacataaagattacaattgttcccttccctttggttaaaaagagggtgtgttgaaagagatataaattgggagatggggagagagaggaaagagaaaatcaaaattggctcttagaaaggatctgataaattttcattgaactgttaacaatgaaatatatttagtgggtccgaa

SEQ ID NO: 23990 - DNA, 201 bp, Bos taurus
agctcactacccaaatctttgagaaaggttggcctggaaacataaggatatcactgtgaattttgatattcgtccagagtgatccagtcaggtatagtcagtggcccaaaggcacactgtactgaagtcctgcaccaggatccaagacccactgggaccctctttcatcctctagtcctcgtagttagaccctcttagttc

SEQ ID NO: 23991 - DNA, 201 bp, Bos taurus
taatgtttctgtggaccttgattttttgtttctgtcacatctgaagacaaatactatgactagcttagatttctcccacttagcaagggttgaggccacagaacttctagagtaattcatcatcagatatcactctcagcggaggaagtggtgatgctgatgattaagcagaaggcattcccctatcccaccccacctcca

SEQ ID NO: 23992 - DNA, 201 bp, Bos taurus
tctgatgaacaaagtttggagtcgaaatgatacttctcattggatcatttggccatgtctacatggatatctatagaccaggcccttcaaattgtctagatacaccaaggatgaatcaattgtgtgaacaccaagatggaatgttaactaaatggaagttttcatttaccagatgggggcttccctggtggctcagctggt

SEQ ID NO: 23993 - DNA, 201 bp, Bos taurus
tttgtaatccttatagttttcatatatcattaactatgggagtactcactaaactgttaaaaaatggtattcctaaggccttgttttaacttaacttaaataattatatttaggatatatacagactggaattctagctgtcaggtattatagggaagaagggaatcagtttattccaaaagactagctggtggtgttccc

SEQ ID NO: 23994 - DNA, 201 bp, Bos taurus
tttttccaatgtgggctaaattcagcttgtttcaaggataatctggcaaccatacctttctcctcacaccgttcattcaatatacagatctaatctgcctgcctttctttcactcaacctctgtgtgtgtgtgtgtgtgtgtgtgtgtgtgtgtgtatggtgggacaagaagactttttctcaactttctatcctgtaaat

SEQ ID NO: 23995 - DNA, 201 bp, Bos taurus
cacagccttgagagcaaagcactgttgaaactatctggatggtaagcatgactgaatgctttaaggtctctacataaacatgattctggccagtgagtgaggagatctatttatcttgcagccaatcaagatgagccttgtaaataagttcccttgcttattaaagcggccacctaccaatctggaagattctgcctcttt

SEQ ID NO: 23996 - DNA, 201 bp, Bos taurus
tttgcaaaacatatatgtgataagttaatatttaaaacatacaaagaactcatataacccaatggtgaataaatcaaataaaccatttaaaaatgggcaagggaactaaatcactaatcttcagggaaatacaaatcaaaaccacaaggaaatgtcacctcacacctgttaggtgactgttatcaaaagacaagaaatatc

SEQ ID NO: 23997 - DNA, 201 bp, Bos taurus
attgtgtttaacaatgaatattatataaagcaattggccataacataaacctattcaatttttctagacttaaaaatacctgaaactgattttgagtttctcagttcacctggctactattgtctgcaagacagacacaattgcttgctcagagcaaggaattttataaacatgagtgaaagcaccatcaaaatataatac

SEQ ID NO: 23998 - DNA, 201 bp, Bos taurus
aatacagtcaataatattgcaatacttttatatatggatggatggttactagacttattgtggtgaccgtttcataaaatatataggtgtcaagtcactatgtaatacacctgaaaactaacatagtattgtatgccaagtctatttcaataataaattttatccaatttatctattttgctctgtgcagtttttaagttt

SEQ ID NO: 23999 - DNA, 201 bp, Bos taurus
cctatgctgtgaaacaggccacgaagctgtgaacaatgtttatatgtcaagatgcagagaaggagttcacaatcacaagtgttctaaggaaatgctcttacgggagtcatggcctggagccaagaggaagcctgtctgaagtttagtcaggctgagagaatcattaaggttgccttggtccacttctcgatttatatcaca

SEQ ID NO: 24000 - DNA, 201 bp, Bos taurus
atactaaattctgctgttcttgtttgatcatgcagcaagttcactttaagtacagactttataaattttaaatgtgagacagtatgtctccatgaatatcctttgcaagactcatgcatcaagctgctattaatcccagtaatggattctttttcttctgacatagctcttcagctttgccatctttctctgaccttctct

SEQ ID NO: 24001 - DNA, 201 bp, Bos taurus
cccatccttgaattttcttcctcttgactgaatcatacttgtacacttcttaagtattctcaacccctaccatggggacctgacttcttatctaaatggtttatttgaaatatttttaaatgaactactctgtgcaaatacaatgaatagccatataaaaataaacaaatatcaataaaatcagaacaaaataaatatttc

SEQ ID NO: 24002 - DNA, 201 bp, Bos taurus
taatctatctcggataggggcaagaaaaaattttcagggctagtgtattgttttcatgtgataaatctcaaaaggttatgatatgctttctctcagtatctctttcatagctgttgatttgcagttcaggctttatcaatgtggtgtttctcaaaaatggggtcttttgcaaatcacaattacttgatgcactctataaaa

SEQ ID NO: 24003 - DNA, 201 bp, Bos taurus
ccagtagattaaaagaatgaaaaacagtactgtaggagaaaatagaaacttctaactgcctgaagggaatactagaccttggctatttaattgtataaggctataaacttttccttgtttaagccatgatgagttcagtttatgtcactaattaagtcctaattaacacatttgtgatctctttgtttaattctttcaaga

SEQ ID NO: 24004 - DNA, 201 bp, Bos taurus
accaaaccattctatcttggtgaattactctatcatttgtcttcatagggatggatggacacatgacctggagaaagccaatcataaagggcacttttccattactacaatttctggtagaggtatggactaatcagagacctttcctcatatttttctaattaaaatagaatggtagaactctcattcttttctaatttt

SEQ ID NO: 24005 - DNA, 201 bp, Bos taurus
taacatggatgatattacatgtgcatgggttagttgtttgatctctcaagccagtaattaaagaaaaaaaaatgaactatttaaacaagtgacatatgtacatataattacccgacagtccaccgctatctgaaaatactaaaaacatcctcttagaggtaaagctgttattgtgtcttaaaacagtaaaatagcctttcc

SEQ ID NO: 24006 - DNA, 201 bp, Bos taurus
aaatgtacattaagccaaagacaagaggtgaatggtgctaatcacctgaatttcctagtcatgagggagaatacaatgcaatattttttccacaagctaactggagttggcattttgtctctggtttaaccgcaatatacatatatatatatacatatatatatatatatatatatatttctgtcctctatactactggtg

SEQ ID NO: 24007 - DNA, 201 bp, Bos taurus
tataagaatatgtatagattttatgattaaatgaaaataattttaaaaatcaaagaaagggttatctgcattatggaaaagcacaagaacaaagtggacattgtaaaattagagaaagcacaataataattgcaaatattattataacctataaaatgatgagtaatgtatgaacatttgtcaattatgaagatctataaa

SEQ ID NO: 24008 - DNA, 201 bp, Bos taurus
agtggtgaggaaaaaaccaaatctgcaaaattatccttcaaaactgagagagaaataaaaacttatagaccaaccaaagttggaggaatttgtagcctgtagatccaacttgcaagaagtgttaaatgtttttttaataagaaggaaaacggcataaggggagactgaatctacataaagaatggaagagcaccaaagaag

SEQ ID NO: 24009 - DNA, 201 bp, Bos taurus
ctcaaattgttgaacatctaactacttgaaatatagcccaatcagatatacagcatttagagtctgccttctttccatatcacatgaaatttcacccaacctctgttagtcatacaaggacagaccatttagctatagaaaaccatcaactgttactgtccttcagagccctctgattcagagtttcccccccctgctgtt

SEQ ID NO: 24010 - DNA, 201 bp, Bos taurus
tgtaagatcctgaagaaaaggacctggcttagccatgtccaaacttctgacacatagaaatgatgaggctgtttaagtgtgctgttttaaaccacgtcatttgtggcccaatttttaactaataatctttccacatagaataaaaaatctacacttatgtaaatctcttctgagtgaaaagaccatctttttccaaatatt

SEQ ID NO: 24011 - DNA, 201 bp, Bos taurus
tagatacagaaagaaacaattttgtggtcatgaaagccagaaatccaggctagagaaagaagtggtggtggaagggtgtaaagatgaaggaggtaagaaggaaagatggattgctaacctcaagctactctcctggccatctcctgattatgaggctcagaagcatccaatcacaaaggataaatttggacttaactttag

SEQ ID NO: 24012 - DNA, 201 bp, Bos taurus
gaggggaattagcaatattgtcgacatgccaaacatatattgaggcttccaaaagtattactgttacagcaaacaagacccaaagtcatcaccctatcttccgtgtgttccccaaatatgttgtgttccactgataagggcattaataactaaaggggtttgaataaaataaaatcagaaacatatttatatcttatttct

SEQ ID NO: 24013 - DNA, 201 bp, Bos taurus
aagaattagtctgtggttataactaaagattaaaaagataaagtatttatctagaggagtttcccaatttcatgaccacaaaggaactctataggcaaattattattgtaacactgctctttgattccattttctcttatagaaaaacaattagactcaaaaatggtcattttaaaagaacctaccactcagagaaagaag

SEQ ID NO: 24014 - DNA, 201 bp, Bos taurus
atgtgatttaaaaaacaaatttaaaaagatatttagtaaagtctttctgaccccagttttatctgtcctttccctctattatttcttttttactagtttcttgatatattcttccagaggtggatttgtgtgtatgtgtttgatttttatttttctggccagtataagcataaagtgatatatttgtttaaaaaatacaaa

SEQ ID NO: 24015 - DNA, 201 bp, Bos taurus
ccaattcttcctaattaccaggcagtaaagtaggggactattcattgcctgatttattatacagtttgatctttatgtttgttgctagtccccacagacttcactcagatagtataaattaaaccataaggccctcgtattttctaggagagctgtggctctgtcagcatccattctttctctccaaaatggtagtaggtt

SEQ ID NO: 24016 - DNA, 201 bp, Bos taurus
atgaaatagtaaatgttaaatcaccattttttcccttctgtttaatatatagtttttctttttttgtctcatatttcttggcaggctatgtccaagcatcaaagagagacaaaaaattttttgcctgtgctccaaattactcctatgcagccctttgcgagtgccttcgacgagttttcatctaccgtcagcccacgccca

SEQ ID NO: 24017 - DNA, 201 bp, Bos taurus
tcatctccctcctttatctggaatgacctctttccgctcagtctctttaatgtggcccaaacctccagctccaggaaatcctcactgatctctcctttgacttttctcgtactctatggttgaaatggagcaggtgagatgggttaaaatcttggctttgacacaactggcagatcaactttgtattcctatgcctccaag

SEQ ID NO: 24018 - DNA, 201 bp, Bos taurus
gtctttcctgaaaacaaatgtatccttttgaagacgagtgaagggaacagccatggccaaggccagccacaccagcacatccagcctgtgatcatgtgttgcaaagtgcctaaacagacgaccaagaacccacttgaactcttcaaattctggtctacctgaaaataaagaaaaatatttctgatcagtattaatattttc

SEQ ID NO: 24019 - DNA, 201 bp, Bos taurus
gagtttatctaaaacaaatattaaaagtaattattaacacttcaacctaatcacagctatagttgtgatactcttttttatttctcacacaatatattcagtaaacatctttttaagtcttttatttttctgtgtaattatagtgtatttcttctggcatcttatttgaatcctaagtatatcctaatatacattcagcaa

SEQ ID NO: 24020 - DNA, 201 bp, Bos taurus
tctttcacgatgttctgaaactgagattgtgcattaatttgagctacttcttctgagcaagtgaatgtcttatagataattgactcaattaaagaaaaaatattttcacttttttgttatagaaaatttaaaacacaccatacaatccacctggctgagtcctttttctcaggtgaaatacagggcattagactagtactt

SEQ ID NO: 24021 - DNA, 201 bp, Bos taurus
ctttggaaaacattagtttttatttttttaaaaagaaggtttaccataatctacaagcctaaaagtgtaagcagctggtaaaatttggagttgaccaaacgacttcaagttaatacttctcaactgtttgtcaaattctgtagtctttatgtagagacccatttcattcaacagatctctcacgttgtaaccctttgaaaa

SEQ ID NO: 24022 - DNA, 201 bp, Bos taurus
ggggagttcatgaaaccagtccctgtgtaccccaagatgctggggaattagacttttcctgcctgtttgtgtggaatggaggaaaggctttggtttaatacccaatttaaactgatttttaaaataaaaagggctcgtgtcgtaacagccatcgcggcggccgtggcggcgtccctgccctcctcaagtgagctggcgccg

SEQ ID NO: 24023 - DNA, 201 bp, Bos taurus
agagaattaactcaaatttaattgggagtgaaataagagaggacgctgaaagcttgggcttttatggtggttagtagatgaagccagagttggggtttagggttttgctactcagacaaaaatggagtttttgtctttgttacagcctcactggacagaaggagcagttgaggagagacctatcctttcaaccttttttat

SEQ ID NO: 24024 - DNA, 201 bp, Bos taurus
tttctaatttctccttttttattggccttttggccttaaataaaatctattaggttctcatagataaatatctagtactgtaatgttagacacttaactatacaggacagaatttagactctattaaagattagttcagagtgctgagaagaatttcaggagcgttcccattttaaaactatttcttttgcagtggaggag

SEQ ID NO: 24025 - DNA, 201 bp, Bos taurus
ggaaatgctcagtgagggcagagggcctggaagaggagacaagagtgtattcctcaagcagatgccagaatgacaatcatactacgcatcctgaagcctacttcagaggcctctaacacccctaaacctgtacccttaataccaccccatcctcataagcatgctcacatacatacacacacacacacacacacacacaca

SEQ ID NO: 24026 - DNA, 201 bp, Bos taurus
aggctacctaacctactgaccatctgtcaagtctctgcctcaccgccaccaaaaaaaagatacatggggtgaggagatgaatttaatagaaggttttaaatttacatcttaaatatagaagggcatgtgcacatgtgctcagtcgtttcagtcgtgtccgactctttgtgaccccgtggactgtagtctgccaggctcctc

SEQ ID NO: 24027 - DNA, 201 bp, Bos taurus
agatacagatatttttaaagggcctcaatataggcttatgaagggttaattaaaaagaacttagagataagttttcttcttttatgaactgtatagtacttctatgtgtaaaactctgttctgggccaaaagattaagaaaatatgtaagataaagcaccagcatttaatgagttattgtaccccattgcccaagtgaagc

SEQ ID NO: 24028 - DNA, 201 bp, Bos taurus
tgcagctcctcctggcaggcctgctggatggaattgatgatctcaggcaccttggccacccagctgaacaatggtgagatcaagggccaggtggtggctcgttgtcccgggctcccgcttactcccactgcctgccctaggggtggcggggagtcaggggccagcttggggtgcagcagggcggggcatggctcccctggc

SEQ ID NO: 24029 - DNA, 201 bp, Bos taurus
aactaaattaaaaaacaataaaaataagagagtacaacagtgtcgccagagacaaaatcaatatacaaaaaccaatggcattttctgtaacagcaaaaaccaactaaaaaaatataagaaaatgtatctttccaatagcaacaacaatttaaggtaactgggaattacctttatcaagatcacacaaaatttcatgttttt

SEQ ID NO: 24030 - DNA, 201 bp, Bos taurus
aaaattcttttcaagtatgtaccagtcttgagatttacttcctttagtctcctttaatctcagagctctgtattaaacatccatagaagtcccatgtcatataacactaaaaaaaatttaaaataagagaactttattactcaatatatggggtatccgacttgaaaaatatttctcctggacaagggcattggtgtcata

SEQ ID NO: 24031 - DNA, 201 bp, Bos taurus
tggaggggtagagaacacaaagacagtgcttcttatatatatttataatgaagaacttttctagttccagagcctggagtctccagttcattttaatatagtaagttttatattaactaggtgcataaaaaggacaacctcttcctgtactggtttgtcatcatgttacatttatccagtactgttttgaacctactcata

SEQ ID NO: 24032 - DNA, 201 bp, Bos taurus
cactggagtattcatctaggggcccttccttccctagccaagtggcagagatgtgacccaatctaggctgataaagcactcccttcctgaacctaaatcctgaacaaagaaagacaaaggccaaaatttgctggagctcattcttgcctatggaagtgccttgataagattgcacagtggttcccactatgggacacctcc

SEQ ID NO: 24033 - DNA, 201 bp, Bos taurus
ttgagtctcctatcagcttggcattctttctaaaacatcctttcttgcctccctaccctctccccatcccattagttgaagaaagaacacatacacctttaaatagttgaattttagtcatagagagatggataaaaaagtaagcatgagactacactgttaaaaatcacacatccaaggacccagagaacagagagtaaa

SEQ ID NO: 24034 - DNA, 201 bp, Bos taurus
aaccccaatattacagttttcatcattttctcaattatatgatccaagatatatggatcaccaaaacagggtaacggtggctgataagatagaggacttagtcactgaccatcacagaacaggggtccctatcccaggctattaagatcttattcttattctggggaaataaaggaatcagggagccataacagcattaag

SEQ ID NO: 24035 - DNA, 201 bp, Bos taurus
acacaattagctgccaaggagcagcatctctaggtaactatccagatcatttttattcatggtaaccaagttaccataagagagtgtcttgccccattgtgtttcttctgaatgacgctagacttggagaggaaatgagaaacgcggttctactaaagaagaaaacaggaaacaaaaggtgtcttcaatttaagatgagct

SEQ ID NO: 24036 - DNA, 201 bp, Bos taurus
tgtagttttatcaggttagcagccatttgtgcatttctgtcgtgaagaaaatactttttgcacttttagggcttttgttttgtttttcaattgggctgtgtctggcctctcagttgtagcatgtgactcttaattgcagcatgtgggatctgcaacccaacctgggattgaactcagatcacctgcattgggagattggcg

SEQ ID NO: 24037 - DNA, 201 bp, Bos taurus
tgaaaatattttatgacttcttttcaatgtcccctttggtctttgtataaattttacatcaggttaaaaatatccatttttttatcctcatacatcaaaccctatcttaaccaattcctcattaagtggccaaaaaatcttataaccagcatgtctcaatgactattcttagaactgactctagccaaaaggtagcaaaag

SEQ ID NO: 24038 - DNA, 201 bp, Bos taurus
gaaacacccaccagtggtacacttctgagaagtaaagaggcactaaaactgtgattttgatgatgggtggcaattacaagctgtttttcgtctagtttttcgagcaaagtctagggaagattctttcagtaccgcgaatagccacgatggatcccaacggggtctgtctttttgaaagatggcattccaccaagttctgtt

SEQ ID NO: 24039 - DNA, 201 bp, Bos taurus
gggtgttcacctctctcccctgccaagcagagctccttgagggaaaggactatgtcttgttgacctgcggctccccagcatctcacagtaccctggcccacggaaggggctcaatgaacatttgttgaaaataacataatttaagtgtgctttctacttactagggagtacccaggttctaaatacagagagtaggccttt

SEQ ID NO: 24040 - DNA, 201 bp, Bos taurus
tctttaagatctttagagtatgtgttgtacatgaagggtcattccagagcctctcgcagcatattttgaaaatggaagtccattcaatgttctcaagcaggggagtcacatcaggccttttgatttggtttttaaaggatgactctgacagttgtctgcagattggactaattgtgtgtgagggcagaatctggagaaggg

SEQ ID NO: 24041 - DNA, 201 bp, Bos taurus
aaattcaaggagagcctatctcttctacgggttgtgtcagctaggcctgcttgaccaggactaggaactccccaggtggagtcctggtcctggctggtgactgggataccttctccacatggccattctcccttcaaacattttctctttattcagtaagttagcctagcctaagcaacttctgcctggtggctggtttcc

SEQ ID NO: 24042 - DNA, 201 bp, Bos taurus
aaaaggtaaactttaaaaaaatgtataataaaagtgataaagaaaatacagaagccaaagaaatgtttagacattagggccacaggccacaccagttgatgaacatgttttggactacatgaacaaacctcagcccagggatagtttctgctgtcactaacaagcttccttccaccagtaatgttgctcgcatcttggccc

SEQ ID NO: 24043 - DNA, 201 bp, Bos taurus
tgttattagactatgaaagatagaaggaaaaacaggccccatataatatgaaaggggaagtctgtttgctagccatgatttggttctgttctctattctccgctccctctttcactgggcccctgcttcctgctgcaggattgtgaggtgtgttaccaatatctggaatgaggtcttgagctacaaagttctcaataaaga

SEQ ID NO: 24044 - DNA, 201 bp, Bos taurus
acggtatctaccatcagacggtatctgttcaggccctccctggcttcatgggactatgcagacattggatacatttgccatccctcaggcccaggcctcaggagtcaggcagtgttcacttccgtctctcagaacgctacccctgggggctctgatcctccacataagaagcgtctctctctgccttgctggagagacccc

SEQ ID NO: 24045 - DNA, 201 bp, Bos taurus
caaaatttcccaaggttgatgtgaggcaaccctggaccagctccctagcatttaaaaataattccaatattatcagttttctgtgaatcaggcatttatgagaaatcagcctctccgtccttagggcttgtcttcttgagggcacacttgtggggttttccattttatatcctccagttgcctttgcaatgctttcaccaa

SEQ ID NO: 24046 - DNA, 201 bp, Bos taurus
agtaaactgtcttagtaatttaacacagtgtcacacagctagtgtcagaatctgaacctgaacccaaactttgtgactccaaagtcccatgctctactctctgaataaaaacaagctattattaccctatatttgttttcagaattttccttccaagctactcttaagttattccctcattttatctcatcttgggtaaga

SEQ ID NO: 24047 - DNA, 201 bp, Bos taurus
gctaccactgtaagcagatttggcaccccaatcagacctgtgatgctgctcgacaggagagggctcagagtttacgtctgagaactatacgttcttcatctattagttacagtcaagagtctggagcagcaggtatttacagctaacttctagtaaaatatttggcacatacagaacacctgttattttaattcaaaaatg

SEQ ID NO: 24048 - DNA, 201 bp, Bos taurus
ttttactattttctgtgatggaaaaaaactcatttctgtcaacttgagtaatacctgaattatatatttctttttaatagcctttgagcttgagtgttcaatttttgggactgttaaatcattaaaccatgactatagataggtattaatccttatgataattagtaatatttctttgtcttcagttgtaccatcgaaaca

SEQ ID NO: 24049 - DNA, 201 bp, Bos taurus
aacctgatttatagtaacagcaaagagctaaacaattacttgtatttgaaattagggctttgtagagttttaataatgatggtaataatttatgtaccttctccatctgcagttgtggaagaactgtgtgtacttttggtttgacctacaagcttatcatcagcttttctaccaagaaacccttcacccttttaaagtatg

SEQ ID NO: 24050 - DNA, 201 bp, Bos taurus
ctttcattattttactttgttgcttaaatttttggccattgggaatcccttcaagttgattcccatgtcattctgatatatccctatcattttttgataacttctttattttctggccacaagatgtttcaggctcaatagtatttttttccccatcccatctctagcattagtcatttctgcagagttttgatttctttt

SEQ ID NO: 24051 - DNA, 201 bp, Bos taurus
agttaaccaacagtacaacagaatacttaggaataaaaaaaataaattatagattcatgcaaaaacatggattaatctcaaaatcacaatactgaatgaaggaagctaggcaagagagagcaagagagcacacctgtaatgattccatttatacagaatccgagcaaatgaaaattaatcagtaacagtatcagtgattac

SEQ ID NO: 24052 - DNA, 201 bp, Bos taurus
agcaggaaagctgggctcacttgtgagctgtattattcagtaacacactctgcatggaacagggaaagtaaataactgaacacatactttataattacacgcggagggaattcaaagctgtggtggggagcggagtttgggggcctggggcggcagctgcagtttctggcttctcccctcatatgctgaaagcatgggagg

SEQ ID NO: 24053 - DNA, 201 bp, Bos taurus
tccatggggttgcaaagactcagacacgactgagtgactgaactgaactgaattttttttcacttgtaatcataagataaatattggaggtggaatataacaagtgtcaaggccttaaaatatagaattgtctgagctgaggtgtggtaagtggtaatgagaaatctgttcccacctgccatctgaacatctgggttatag

SEQ ID NO: 24054 - DNA, 201 bp, Bos taurus
cagcccaacgtatcaacactgccaaggttgagaaacctggaacagactcctagagccttttcctgtgccctctctcttccctatcccttcttttccttcacgagggccactccccctggtgtagtgattgtgccaggccagcctctctcagggcttccccggtggctcaggaggtaaagcgtctgcctgcaatgcgggaga

SEQ ID NO: 24055 - DNA, 201 bp, Bos taurus
agcatcctaagttgcatttgtcccagggtcctttgtcacaggcctccagatgagctttcaaacatattctgcttcccaggatggcctcttccagagccaaattcctggagtctagcaggtatgaaaagttaatttgtgcctagaaatgaggagactgtgtcacagagggataaacaactcacctggcctgtgcaactagca

SEQ ID NO: 24056 - DNA, 201 bp, Bos taurus
aagcaaaagcgtttgaagcaatttaaaatgtccttcgagaaatgaatattatggggcacaggcttagaataacaagaaaacattcaaatgactccaaggacgtgtgtaatcacagggaaaaatgttttagcaacattattcactcaacaaatattcaccagaatgcgacatggcttgttcccacaggaagtgaggcgacag

SEQ ID NO: 24057 - DNA, 201 bp, Bos taurus
tgaagaacctatgactcagcaatgtctgcctcctctcttcacacaggcagggtatgactagaaaatggcggctataccgtgtgtgtatgtgtgtgtttgaaggccatcgcctctcacaatcatcctgtacatgatagaatcacaggagttagtagtgaacttgtgggaatgacagtcatttgaatgtcagacctggggaac

SEQ ID NO: 24058 - DNA, 201 bp, Bos taurus
ctgtctcaacacgccttgtgacctcagttaggtgatttaactttctgggctttaactagtcagctataaaatgagaggcgtgacctggaagccatgtttctcagcctaaaccagatcacaggccgggatgacgctgctctcctgaggaagcctgggcctgacaccctcccaggccgtaaaccctgcccctggatgagaaag

SEQ ID NO: 24059 - DNA, 201 bp, Bos taurus
ctacttggcgcctcggtttcctctttgctacccagggggtcaacttcaatgactcttgtgcaacctgggtcatatacgtaaagcacttggcccagagcctgccattgtgacctaagtgtctggggagaaacccacagtacaaaagccactgagcaggaggcagaggcagagaagggagggccctcactgggcttcctccga

SEQ ID NO: 24060 - DNA, 201 bp, Bos taurus
ggaacacaggttctatctctggtccggggaagagcccacgggctgagggacaactaagcttatgagccacagcccctgagccaacgcgctgcagctacagaagccagcgcgccctagagcctgggctccgcaactacagaagccactgcaatgagaagcccacggaccacaaccagagaaagcccacatgcagcagtgaag

SEQ ID NO: 24061 - DNA, 201 bp, Bos taurus
gctttacgtacccccaggcctcggctctaccccctttctctctctctctctgaggacctccggtacagggaacttgccattcgaccgctctacatgcaacgctccactcaggccaacccctagactaaggtaagatcccgacggtgttctagaggcgccctagaacccagtcctctccgggtcccggggaccccggcctaa

SEQ ID NO: 24062 - DNA, 201 bp, Bos taurus
gcatgagtgccaacatgctttcagttatgttaggccacagaatcttcctatctacacaataaaaggaactaagccaccagcagtaagagtttaggtcttctgctctccgtttcaaggcctttgctactttatgttgtttatctataatttatttggctagtagtacttgactctgattattttttcaaagaacaagtgcta

SEQ ID NO: 24063 - DNA, 201 bp, Bos taurus
tgctctcataactggcctctctgcctccctctcactaggaggtttctttctttgtcttaccattcataccatggagcctggagatagactccatctcctcttgattcttcttgccatggccaaatcattctccttaccttcttcctgaaaaccctggatttgaatttcaatcagattgtaacctgtatttctcctgtgaca

SEQ ID NO: 24064 - DNA, 201 bp, Bos taurus
agggtatggcagaatggaaggttggtatgggaaatgttaaggtaccaatccagatggcttccgctcatgggacattggcaagaaggcagtcagatggccacgactaaccgcgaaggacgttggctcagaaggaagagaatcaggtgtggaattcggcagcagtcttctccagtcagagtggccagaccaggattggaaccc

SEQ ID NO: 24065 - DNA, 201 bp, Bos taurus
ccagccctctctctaggccccaagtctgcacaagtagagcaggcacctttcaatgtggaacacgatggtgttcttggtcaatggttttccctgaacttgttcaactgttgtggccccgcagccagaccaataaaatctcagtctttcggggtagggcccaagtgctgatatgttttaaaaagcctccaggtgattttaaag

SEQ ID NO: 24066 - DNA, 201 bp, Bos taurus
aggctttgaaaacggcccctgtaaggaaaataacacatgagtcaggaggcaaacgagttctcagtagcctttgtgtgtcattttatcctaggcaatacctatggcatttctgcagggtgggcctgctttcatcagctgccagggcatcgtgggaagacactagctctcaaagatctggctggaaaaacaccccacagcttc

SEQ ID NO: 24067 - DNA, 201 bp, Bos taurus
ataagatctttaccagttactaatgtacagaactttccagcctaaaaggcctagtggcacaaatagctattacactgtcaaatcctgagtgacaataaaagtcctggaattaaccccaatgtgcattaaaggctgcagctactgcatctgcagcctagacacatttctgaaaaaccttataaaaaaaagggctacaatact

SEQ ID NO: 24068 - DNA, 201 bp, Bos taurus
tttaattttggggtggggggaggtatactttcaacacagcaaagaagtgactgtgcaatctcacagaaaggagaaacctccctgactcaagggccacagttttctatccagccacacccctccatccgcacacatgacgtcctacttcaaaagctgatgtccaaactcgggcctcccaacaggtgctcaacacatagctgt

SEQ ID NO: 24069 - DNA, 201 bp, Bos taurus
gctgcccacaaacaatccaaagtcagtgtgggcaactagatgaaaccagaatgatccatacctaagagtcacagggccaaattctgaaagtaagaatcttagggggtggctttagtctcacacatgcaggtgagagtatcttcaccccagtgcgaggccctcctcaaagtgtgttcgcatgctagtaggctttcacagcca

SEQ ID NO: 24070 - DNA, 201 bp, Bos taurus
gaaccaaaaagagataaccatgaagataaagcctatatgttaaggaatgcaaagtggaaagatgcaaaaacccaaggtcctaaagacactactgagataccagaactatcctatatctggacatttgttattgagataacatgtctttattgattaagcaatcattagatttgcttacagttttcagttattcattgatga

SEQ ID NO: 24071 - DNA, 201 bp, Bos taurus
acgggacttaataactcactgggcctgtgtgaactgagattttcctggtaaaacgccttgcctttatcagtttatattttaaagcttctgtttcaggacaggaggaaaacctattttcacaaaggccaagagggtagcctcttcatctgcaaagagaaagccactacagaatgaataaacaattgataaagcttttcaaat

SEQ ID NO: 24072 - DNA, 201 bp, Bos taurus
ggtttccagtctctaaagactgccctggggtgggtggatactggtgaataagaaggaagacacagataggcccggtgttcacgacgggacaggtgtggtcaccctgcttcgcgggtatccctgcagcatgagccagacccagaagcttttggaataccacttggaaacttcttggcaaagcctaacaatggaaaagcataa

SEQ ID NO: 24073 - DNA, 201 bp, Bos taurus
cacctgtggaggaggagggccactgaggcggaaggtcagacaaacggctgctccatcatgatgaaatttcagaacaaagcaaaaaactgcatatcctttttatgatacattttggcccacgatcattattcccacattccaaagttgctaatcttcatccctttaatttattgcaaaactttgtgacaacttaacaatgta

SEQ ID NO: 24074 - DNA, 201 bp, Bos taurus
ttaaaaaaaacaacaagtatttcaaataggtggcattctcttatgagatagcagttggacttctcaatgctcagggccgttgtctgccatcatgttgacccagccatgacaagggctgaatgatgaacatattgagatctatttagagaagctgagctccttggacaatgggaaaccatccaggcctttcatcagtttcct

SEQ ID NO: 24075 - DNA, 201 bp, Bos taurus
tcaaagagaatcaaaactaagttatactgtttagactggacagtaaaaagcaaagaaaacattaaaaaaaaaactcaggatgatggttaattcaagaagtagctcatgattacacagatgtctattctattatgagttgttaaactgtatttgtatattcatgcacttttcagcatataatttatattttttatgtaataa

SEQ ID NO: 24076 - DNA, 201 bp, Bos taurus
attgccaatcattgttgcaagttctgatatgttagctcatttaactcccaaaacaactctgcatcaaacagacattgttcctctagttttacagataaggaaactagatactgagtgtttaaataatattcccacaatcacatagctgagggaagaagagagacctcagatcaaattggtaaaggtctttttttctagcat

SEQ ID NO: 24077 - DNA, 201 bp, Bos taurus
tctccagaaaattacccacttcagctgaatgttaaattgagattttgacccaaatttggttaacttcaaagcctatactcatttaggcctggagcagagacggagggcagagccctgtgctcaggatgccagaagacagctgagtcagcccttcagctgctgttccagttccctgttggctgcctgggcaaccatgagccc

SEQ ID NO: 24078 - DNA, 201 bp, Bos taurus
cataatttaatcacacccattaattgtggacttcctgcaaacacagctgcaactggagcttgccttctgcaaagaaccacaaagattcacacactgaaaatgtaagtatactatttagttcaccgatttatatcaattctgaaataccaaggaacttaaaatgggttgtacacttaagttttaatgtcagttctaatttca

SEQ ID NO: 24079 - DNA, 201 bp, Bos taurus
tggatgaggacataaagatgaggaataccagggcattttgaggctgtacgtttggagtgataatacttgtctgtaagaccaaggaatttggcctagtgtctagcactagagaagtgaccactgaaaagaagggaaatactaggttggtgcaaatataattctggttttggaccgtgaattttaagttattattaataacta

SEQ ID NO: 24080 - DNA, 201 bp, Bos taurus
ccactggccctccactgtccttccaaagtcatggacctcagtgggttttagattaatcagttcaggagagcagaaataggaggtctaggactaccatgtggggatagtgaggcccagaatgagttaaatgactctttacagcatttaagaacctcaggcttacagggacaattgatagctctttgagagtgttaaaaatgc

SEQ ID NO: 24081 - DNA, 201 bp, Bos taurus
aattctttaagcatccaggcagaaaaaaaatgacctacaaaagaaggaagttaaactgccctcagatttctctataggattattaactgtccagacacaatggaagagtctccaaaatttggaaataaaatttgactcaagggtgttagaccgaagtaacctgtcttgaattcaaagtctgagacaaacatctccagacat

SEQ ID NO: 24082 - DNA, 201 bp, Bos taurus
gtagagagtaataactgcattgatttgtagatcacatatcaggagctacagttactatgggtaccttgtgtccttgtggccatttccagtatttagaaaatggtaggcaaagtctgagtgttcccaggtggtgctagtggtaaagaacccactcgccagtacaggagacacaagaggcatgggtccaatccctgggccgga

SEQ ID NO: 24083 - DNA, 201 bp, Bos taurus
tgaaaatggctggtagtgactttgagttcgatatggttcagaaaattcatgaaggaatgagtctgaaactgtatccacaaaggccactcagctccatctcagatgccggaaacatctgtcagaacaaagaatgaacgtcaaactcctccaaggtttccaaagaggcagagagcatgtacacggtgcgtcagcaggaccctg

SEQ ID NO: 24084 - DNA, 201 bp, Bos taurus
cagacagagacagtagctcttgagatggttgtggtgggtttgaagccattgaatggatcctatatttcaagatatcccctttctaggcctcagaatgtgaaagattcttttcttgctactaatatgattttctgagtgtctgctgaagacatgcaacttgaagccaagctgtaggactatggccttttctggagggagtga

SEQ ID NO: 24085 - DNA, 201 bp, Bos taurus
attcatctccaacttctttaattattgtatctttccttctaaccctgggtaaagaatagcttaaaccttaattctaatgctttggaattttatgagtttcattaaaaccccagagagtcatttaattttatggggttcaatgctaatattcaaatgcatttcttctgcaatagatttttaccttgtattatagagactgag

SEQ ID NO: 24086 - DNA, 201 bp, Bos taurus
caggcctcttaaacattcagctgcatgcttgaactgggggaaatcacagctgctcctcgcttttgataatgccagggaaattggtaaataaataaataaccggggcccagggttcatttactaaataccccaatatgtgcaagcaaaccacatcagggacatcaaaggaaaagaaaagcctaatttagtaataacatggtc

SEQ ID NO: 24087 - DNA, 201 bp, Bos taurus
atagcggcctgagtctgatatgctggttggttctgggaaaatcccttactcagcttcatttttcaccatctgtgtctcagtttttctatttgtaaaccaggcataattaaaactgcccactgggcctttcacaggcatgtagggaggattagcaagaggctgcaaaccttccttagctctttgaaagagaggcactacaag

SEQ ID NO: 24088 - DNA, 201 bp, Bos taurus
gtagacggaaagagctcgggtgcctcaggctcaccgagaagcaagttccctaggaaagctgtgtcactaggaatctctgccctggtttttgaacgaacaaagtactactgtatattgtgcaagaccactgaaaattggcattgcttgtcgtggttactccgtcctagtacattccagtgaaatggtaaaaacactttcact

SEQ ID NO: 24089 - DNA, 201 bp, Bos taurus
cggcttactaaccatatgctcttctaagactcagtgtcatgatttataaaacagggataacaaatgaatctacctcctagctttatgaagcaccttactcactaattgggacggctaaagttcccagtttgcgttaacttctgcaatttgacatgatggacagtttggcaggggactgaaggagctggtgttggccatgga

SEQ ID NO: 24090 - DNA, 201 bp, Bos taurus
gaatttctctaaaagaagccatgttttaaaagaaacacaaaatatgttcacatattctcacggaaaagatggaaataatagagactaagtagtttctccaatttattttttttcaataatttctctgtaaaacgtaagtggaaacctataaattttgttcattttaacatgtgtaaaaattaaagcagcaagcaataagaa

SEQ ID NO: 24091 - DNA, 201 bp, Bos taurus
gttgttggttcagtatagttttgatgggctcaaggtttagccccagggattttgatgaagtcactccatggccagtgtttgagagccaccagctaagagtcggacatgactgagcaacttcactttcacttttcactttcctgcattggagaaggaaatggcaacccactccagtcttcttgcctggagaatcccagagac

SEQ ID NO: 24092 - DNA, 201 bp, Bos taurus
tgtgtgagtggctggccgagcctgcttgcagaagatgccggagagtaaccacacaagctttgggcaattggacatctcatgggtgccccagaagacacgtatacacacaggcccgtctctctaggtcgagctccaaagatggaagccccggcagcggggcgagtcagagcaagtggtacctcaatctaccactcaagagcg

SEQ ID NO: 24093 - DNA, 201 bp, Bos taurus
gcaaactccaggatatagtgaaggacagggaaatctgggtgctgcagtctttggagtcacgaagagttggacatgacaacttagtgactgaacaacaagtataaagggataaaatgctaaagagtggaatacaaatgtgatgaaaaatgaaatatatatgtgtagatattttgtttatatgcatgtgcaaccttggataat

SEQ ID NO: 24094 - DNA, 201 bp, Bos taurus
attgataaatacaattttagaattgataaatacataaagatagaaagcaggttagaagctgtgaaggttaattataagtgtaaacttgactgggccaaaggttgcccagatacttgttagcagttatccctgaaagtgtctgtgagcatttaaatcattacatttaaatgagtgcattgatctcatcaatgctagtgggta

SEQ ID NO: 24095 - DNA, 201 bp, Bos taurus
tttaagtagaagagtaatgtgttcatattgcattttggaaatatggccgtgtggagaacattcacaaaaacgaggcagcctagagaccatgaatgtaacagagggatggtgttgcgtgcagaggacttcagatgtgaagcaaaagatattgccaatggcttggaaagcactgggtgtttagtggtgcccttccagctatgg

SEQ ID NO: 24096 - DNA, 201 bp, Bos taurus
gagactatatattttttgccaggaggagtcctttctggagaaatacctcctagtttcctcccctctccctttaccaagatctgcagtgcactttcagctacgctgtctttttgcttctgagaaagcaccttcctttttctgtgtgtgcctgtgcatgggagacacatatgtgtatataaacctgtgtcttaaaaaactgtc

SEQ ID NO: 24097 - DNA, 201 bp, Bos taurus
gttttgtaatattaatatgctgtataagtgtatgttgcattctttttgtcagcttctgcatgaggagacagtaggaagcagtgcagtgaggtggttacgagtgtgaatttggaatctcagctctttcccgtccactctgttgttctgagtaaactatttgaactttgtggggcttgatttccctctgaaaagtgggaagaa

SEQ ID NO: 24098 - DNA, 201 bp, Bos taurus
attcgggaagtctggccttgcttgatgaatgaggaaagtgacaatgccaatcagagtgacccctgcagcctccctgctgctccctcaaacagtcaccatcgcatctatccccctggtttacgttttcaattctattgtcactcagctgaggttagacctactgtcactaaactgtcactgaattacattgttaatccaaat

SEQ ID NO: 24099 - DNA, 201 bp, Bos taurus
agaaggtaaaaagtgggtttgaataatgaaatacaactagcctgccaagaagtcatctctactatcagaaacctacacatgaggcccttatttttatttcctctttctaaatacatgttggtctctcatgcccatcttactgatgtgtgggcaataagagtaggccagtcagaagacgttaaatgcactattttgattgca

SEQ ID NO: 24100 - DNA, 201 bp, Bos taurus
cctctattaaattttttctttcagttttaacctgaagagttttaaaaactctctgcatgtctaatcttacctacccaatgccactatctcagacgtacaaccacttgcaaatttggggtaacgtatcgccttatagaattgttcaaattttaaatgctttaacgtatgtggcatactaagcatggtgcccaagaggtagtc

SEQ ID NO: 24101 - DNA, 201 bp, Bos taurus
cccactcatgtcagggcagagattagacatggaagagaattgcaatcagaagagggcaaactaaataaagaaaagaaaggggaacagcccgggaagtgtcagatgcaacagattaaaacctgcagttaatgcgaacaccgtgcatttgaaacttagaacaagcacaagaaaaaaacaagggactatctgacactgaattga

SEQ ID NO: 24102 - DNA, 201 bp, Bos taurus
agaatctatagggtctaataaacaaaaacttatttactttgcctgtggactggaatggagatgagcaaaaagttggtagggactcagaatatcttgaaagagctttaagtctgaataatcacaatgaattagtttgacttccagagagcttttttatgcacatgagggaaagtcagtcatgtctgactctttgcaacccca

SEQ ID NO: 24103 - DNA, 201 bp, Bos taurus
gaagagaaaggctactcactccggtattctggcctggagaattccatggacagtccgtggggtctcaaagagtcagacacgaatgagcaactttcactttcacttccctatgccctaataaattcctttctcttcaagttaaccaagataaaagtattttaaaacaaaaaatgaaacagaaagcttttagtaatagtgact

SEQ ID NO: 24104 - DNA, 201 bp, Bos taurus
tagtgaatgaggctacctaggaagctgtgcaagcttcctgatgggagggactggtggtgggtggaactgggtcttgtgtggttatcaggggccatgctcgctgaagctttcatctgcttttctgctgatggttggggctgctgtccctccctgttagctgtttggcctgaagcaacccagccttggaacctacagggttca

SEQ ID NO: 24105 - DNA, 201 bp, Bos taurus
atccaattaatatgtgaaaaataaataaacatacctttctgtgctttgattagttccttcccaattgctagagtcacaaaggctgtgccattcagaactacgtcagttattgtcttccaagcattaggagagagtctttcagagggagaaataaaattccctgctgcattgtttatcacaatctaacaagtgaataaggca

SEQ ID NO: 24106 - DNA, 201 bp, Bos taurus
aaactaaaggccaggaagtaagaagtaggagtaaatcactggtgacgaaatacaggcagtgtgaataataaattctgaagcatttgctgataaaataccacgtatgcaataactcccctgctgaggcgctgggtcccacccgtcacctctgacttgtgtcgtaataactctgttctactgacaagaatgagtcatctagac

SEQ ID NO: 24107 - DNA, 201 bp, Bos taurus
tgaaatctgaattggacatgggaccctgcatcctttgtggtgacctcatggcgtgactctcatccctcctttgaaagggacacattgtcatcatctgtccgatcttctctaaagagagcagggaagatggcagagtagaaggatgtgcactcatcttctgtgagaactccaaaattacaattcactgctgaacagccatca

SEQ ID NO: 24108 - DNA, 201 bp, Bos taurus
aggatcagagatacaactggtgtagacagcaggatacccagcaggtagaggagcccgaggctccactggatggaggacgccagtggccaccagatagcatgtggcactgtgtggctgtcattctctctgcatgcgctctggtggaaaacagggacgcatggatgggtccccagacagcaaggaaatggcgttacaggccat

SEQ ID NO: 24109 - DNA, 201 bp, Bos taurus
aaaaatgtttccattctaaaaacttagtacttcttcaaaaaattgtttagaaattaaatgttggctgtctcaagtcagtgaaatcaatgaaggttagataccaaatttataataaagattatagtaaatgagaaaaggagttttagttaatttatgtcctacttgacgaactgcatgccaaatatataaaacatatagaaa

SEQ ID NO: 24110 - DNA, 201 bp, Bos taurus
atagttattagtaatgttggccatacatttgtgttcatccacctattgggcatggatataatggcacttccctatccccttgcaactaagtgtggctacatggctttttttggccaatggattgtgagaggaaatgatatgtgtcccttctggatgaaagtgttaaaagtaaggtataaatttagtgacatttggctcagt

SEQ ID NO: 24111 - DNA, 201 bp, Bos taurus
accatttccaaaaaggaattttttgggaggaaatgatagtttggaaattgtagttttgagatgtgggtagcaaaattgtcattatctttagaccaatccacccaagaacactgagccctcataatatcatggctctgcatagaaacataaattagatatggcagaaaggagataaagtgtcatagtaatttttttataaat

SEQ ID NO: 24112 - DNA, 201 bp, Bos taurus
gcacagcttaatgcatccaaatttaaaaaaccaaccctctaggaaagaatgaaaatgtcacctcctgacaatttccttttttaatcagtgctttccttttcatggaaggacatagaattccagaagcacagtaggagtccattctggtatttaccactttgaaaacaaggggcagtggtggtggggggtgttggtggggga

SEQ ID NO: 24113 - DNA, 201 bp, Bos taurus
cgattcatctgcgaacgatcaggcccctccggcctccctgatttcacccctgacaaccccgctttgttcttcatgctccaaccacaccggccattctgttcctcaaatgtgtgataatcggtgatactgttccccgccccgagtgctcacgcacgattctctgcagctccctctccgcgttgcctggctcactcctgctcc

SEQ ID NO: 24114 - DNA, 201 bp, Bos taurus
aaacaggttggcctcacttctgacacagggaaatggaggcacggaggaagtgtcagtgacagaagggagatgtctgatgcaatcacaaacaccagagtgatgccaaactttccagctttctgggctcaatattattttaataaccgataaaataattgtctgcttattttgaattttatcacagaaaacttagaatcctct

SEQ ID NO: 24115 - DNA, 201 bp, Bos taurus
gcagaacaggctggtggatccaggcaaggaaactgttcacggagtttgtgtttaaactgaaaatgagagtatcaggtggcctaattctaacttcaattcttctagtaagaaattacctgtgttcttatattctttctggaaaattaaatgcatgaaatattttcagtcttgacaggccatcacaatcataatcactataga

SEQ ID NO: 24116 - DNA, 201 bp, Bos taurus
tgagctttcacagaagaagccagcttatttagactatggaatattctacacgctggatttggttgtttcttgtattaccctttaacttcgtcctttatcacagctaatacctcccataaagagagtgagaccagaggtctgacagctatgttgcctttttcacactggtttgctctctgaacttcattcttctgccggggt

SEQ ID NO: 24117 - DNA, 201 bp, Bos taurus
acaacctacctctgaacaatatcttcacagtgacctaagattctgtcaatcctagtagtttcagaattttttcagagtaaacacattgtaaaggtccttagtggtgactagaagattgtgaagtatgaccgtcatccttgagttaccaacatacaggacacggggagacaagacacttgcccttcccctctcccctctttt

SEQ ID NO: 24118 - DNA, 201 bp, Bos taurus
gggcttaaacaggataaatttacttcttctaagttctagaggtttgaagttctggatcaaggcatcaacagggttggctttgggttggtctaattctaccagcctctatccttagcttatagatggccaactttatactctgtcttcccattgtctttcctccaaacatctgtgtactaacaccctgtctttaaaaggaca

SEQ ID NO: 24119 - DNA, 201 bp, Bos taurus
cttgtctagtgccccaatttttgaatgctaccagaggacacctatacataacctggctctgtggtcagcagggcttgtaggcatggggcctacaagatcacgaccagtagataaagagtttttaaacagctccctagcccttatgtaccagaggcgatagacccacaagctcagtctttctgtgacagaggcctgttagct

SEQ ID NO: 24120 - DNA, 201 bp, Bos taurus
tcatccagagtgtaggctccaaagagaaaagggctcactcatctcccacttcaccaaagccttccctgaagccacactttaggtaagtgagggtaaaatcggctttcacatagagctcagttaactttctcaaatctgttatcacaaaaaattcagtttgccagtggcttacttgtcaataaaggaatgggtaagtaaaga

SEQ ID NO: 24121 - DNA, 201 bp, Bos taurus
acctttcatgacagtaggagcatcagaacacattagagcaagaagccgaaggaggttatcaaattctagagcaaggcgggccagctagcagagcttgtgtcaatacaattctttcactaaagtaaggtattgggctaggagaacaaaagtatgtttttaaacagtagtctttaaatagtggtttccccttaaccatgcgat

SEQ ID NO: 24122 - DNA, 201 bp, Bos taurus
cacaataacacaatggtattagaaattagatcttgcactgtcaccagaacacccaaagaaagtcactgggataagaattcgtatctcctcctcaaaagtaatgtgtcctattttactttaacgtctgctttagtctgtctgacaccgtgaggacctagagtgcgtgggtgttgattgctttttctatgtacgtagtacatt

SEQ ID NO: 24123 - DNA, 201 bp, Bos taurus
gtcagctgctttcattcatgtattcgatatagccacagccgatgctggaggttctgtaagccagtgaagaagaaaaagatatggtctctgcctcaaagagcacactttctagtcagaaaggcagtcatacagcgataaccacattcaacgggggcaaggccatagtaaaagcttgaaaaggggactgtgagaacatggtgg

SEQ ID NO: 24124 - DNA, 201 bp, Bos taurus
cctggcctccctcagattaaagtcctcccagagcaaagatgacagaaaagctaattatgcctgaaagtgtcagatcagagctcataaaagaggtatccttcgaagtgggccttaatggatgaggaacaattttccaggaaggaatcagagacattcatgcaaaaaaggtaacggaataaagacagtgaggtgatgatgtgc

SEQ ID NO: 24125 - DNA, 201 bp, Bos taurus
cggaactggccaagtgttacttctgctgtgttctattatttaaagctactctcaacatgggccagattcaagagggaggtggctatcagggtctgaatcctgggacgccactgatgtcacagccctccacagatgagtgaaggtagcagtggaaactgtaggcgtggttggaaagaaacacagcgtgatgagaacaagaac

SEQ ID NO: 24126 - DNA, 201 bp, Bos taurus
acagtttatctccctcaccagatgataaattctgagggcgtggcctagaccagaactatcttcagttcatctgcactgcctgacgcatgcaggcaggtatgtccatacgtgctggcctatggtgcagggaacactctgtaagtgttggctaactgaatggatggctctgtctactatgaaaggttgtctcatctctgtggt

SEQ ID NO: 24127 - DNA, 201 bp, Bos taurus
gaccaaaatcccctcctggaccctctggcttagctggattctcgtctgcagtcacgccctgctggttctcacactccagaggacagacgttccctcaccttgtaggaggccctacatatacttaccagagatcaagttgaagagcaccaatataaaagtttaaaaaatgggaactatattcgatatcttgggataagctag

SEQ ID NO: 24128 - DNA, 201 bp, Bos taurus
ctaagtgttcctgtgccagcattaaggaactcagcacagacagcgggactctgggcttcctaatgagccaaagcgactctttgtaaagggattaaaatgggttggcccaaaagttctttcaggaaccctaaacgaactttttcggccaacccaacagaagaagaaaaataagaaaaggagaaagggtcagcaaatctcagg

SEQ ID NO: 24129 - DNA, 201 bp, Bos taurus
ttctcagtggtaaggtaagcactggaaatgccaatgcaacccttagatgaatctttcagaaccagcctagttcctgaaactcctcaagttctcctccacccgacagcaggcctcacggagctctggaagcgtttcacatttcccagttattaatacctcccttccccacttctctgtgccctctctccaaaaacaaacaaa

SEQ ID NO: 24130 - DNA, 201 bp, Bos taurus
tcagaatcctccctcaagctgattagcatgaaaacccaaccatcccaaacccaacccaaacccaaccatggcactagtagcgagatgcctcaggccaaacggctatctgggtgagaccacagctccatgtgccaccagggaagctgcttcaggacacccctgagtccccagctgctctaagacccagccctgctcatcaga

SEQ ID NO: 24131 - DNA, 201 bp, Bos taurus
cacatttatgatgaaaactattcagaaaatgggcccagaaggaatctcagttcagttcagtctctcagtcgtatccgactctgtgaccccatggactgcaacatgtcagatcactctggccatccccaacttccggagtatacccaaactcaggtccattgagttggtgatgccatccaactgtctcatcctctttagttc

SEQ ID NO: 24132 - DNA, 201 bp, Bos taurus
gggacagaaagggagattcagaggctcaaagaaaaatgtgaaatacactcgttgcaggcagaacaaagagaaactagaacagatggtcctagtcaccctgttgcactccacaacctgagatgcacatgtgttggagcatacaggagctggttgctgaaactcagcctttggctgacagacttaaggaaaggcatagagaca

SEQ ID NO: 24133 - DNA, 201 bp, Bos taurus
ttagacaaaaagtctatgttgcttgaaacgtcacattttcttacatataaaggagtgttccagctgcatacctaggtataattttacaaaatccattaaaaaaatttggagtcaaaatattcccaaatccagggacaattaaatcttttttttaagatagcaattgcttgaaattaacatactatcataattttataaatc

SEQ ID NO: 24134 - DNA, 201 bp, Bos taurus
accccgactagcattcaaagttataaaaattatatgagtaataaaattaaggcttttatagatgtagggtaataaaaacataaatacagaggacaataagtaaaaagatctcaaggaaacactatgaagtgtttgcgaaacacacacaaaaattatacatgttgctaagcaagtatgaaataaactcaaagtttaggcagg

SEQ ID NO: 24135 - DNA, 201 bp, Bos taurus
accacagtttaacctcttctttaatttcctatttaatgtttaaatctccatacctcactttgtcatttgtaacagatttaaagcttttgtctcaaggacaaattgcattaaatataaaaggcaaaaaataaaggattgagaaaaaaatcataggagaaaattttaatgatcttgggatagcaaaagcttccttaaataata

SEQ ID NO: 24136 - DNA, 201 bp, Bos taurus
ttttgatttgaagagagagacactcatataggaagctagtccagcaaggaatatgcaggacaacttcctatctgaaagaaagagaaaacacagaaggctgggcaggaggaagcccttgtgattacagataagcagagggacagagcgtgtgaagtccacagatatgatttgtgatggttgtgagcagcgggaatcctcgta

SEQ ID NO: 24137 - DNA, 201 bp, Bos taurus
agaaggaggtcagaggcctgctctcttgcttctgaagcctgaacaagactacttccattttaattttctgaacagctatatatttaatttatgggcttccctgaaagctcagttggtaaagaatctgcctgcaatgtaggagaccccggttcgattcctgggttgggaagatccactggagaaggaattggctacccactc

SEQ ID NO: 24138 - DNA, 201 bp, Bos taurus
atagcttagatgtagcattttaaattcaatacccttgagtacttcaagaagaaaaaaatgaaatagaaaagaaaaatatttcttaatgccagatttgctaatattccaaaaagttatcatttctctttacttgtgttttgtcaaagccacattgtcaagtctggattaaatgctcatgtattattttccttttctctagga

SEQ ID NO: 24139 - DNA, 201 bp, Bos taurus
aaactgagcacccaccatcacaagtgtttgcacgagctgcaaatagcacagaagcaaactagacacaggctctgccagaaaggaacccagtgtactcacttcttcatttgaatatagccaagaggctgttgttagcacaatgtgagggaagcacagaagaaaagaaaaaactgactaattctgtggaggaaagagatgtct

SEQ ID NO: 24140 - DNA, 201 bp, Bos taurus
agacttggttcatgatggtcatctgggcccccgagtcgacgaaagccttcagaggatgcccgttgactctgcagttgatgtagagcatagccacctggccaaagctctccggcgcctcttccatggctatgctcatgttctcctcgatgttctgctgccggatctcctcctctatcttggcttgggcctccagatcgaacg

SEQ ID NO: 24141 - DNA, 201 bp, Bos taurus
taacactgtctctgtcagccgccttcagcccagggagtgtgttgtgtgcatgtgagccagtcatggtaactccactgcgaatggagtaggcctgagaatgcgcccagtaagacggagggaaggaggaaatgccagcttgggggtgggcatcggggttccagaaaggcttctggtttcttaaaaagaggtgcccatggagag

SEQ ID NO: 24142 - DNA, 201 bp, Bos taurus
agatatctctgccctcatctttatctctgtattcttactgaaccacaaaattcctaaagaatgagacttgtatctgtttaactccatcagatgtatgaacatcagatggtctgggtttcatttttgtttccattgcagtggaattgtggtatgttttggacagaataatagctggttaccacaattgaccagagagctgca

SEQ ID NO: 24143 - DNA, 201 bp, Bos taurus
atggctgaagttaccatctgtactgattttggagcccaagaaaataaagtctgtcactatttccattgtttccccatctattttccatgaagtaatgggcctggaaacttgaatttaaatattcagatccggcctgcttaaagaaaaagaagccatcctcttgctttttaaaaatcttttcatcttttcctcctccccaag

SEQ ID NO: 24144 - DNA, 201 bp, Bos taurus
aggatttggccctagaggaggaaaagtgacctaatttttcctacctgcatgtgtacatagggaaaggggttaaccataaacagtgacttcttataattgttagtcatgactgtatgaatatcccatgtcccaatctacatgggatttttttgttttaatcaagttccaaactcagttttaaaaaaattaactgatttgtat

SEQ ID NO: 24145 - DNA, 201 bp, Bos taurus
gccagaaatgtggattctggctacttcattaacttttctgggtcttttttgttgtcgttcgagtcgaggtaggtgttagttctttaggcataaaatgttacggtgattctaaaccacagtgcaccttcatattctctgtactttcaagacagcaggtatagtaataaattggaactgttctggtgctttctttcctgaagt

SEQ ID NO: 24146 - DNA, 201 bp, Bos taurus
gctttagtatgtaaatttataaaagattagctttctacaagcttacttagacctcagaaatgttccaataaagtaatgagcgttggtaaaattttaacctaaagttttatcacctctttacctttttaactccaaagaaaattattattttgaaaaactctactgttgcaagatttttttcatttcactgatgctggctat

SEQ ID NO: 24147 - DNA, 201 bp, Bos taurus
aaactctgcttagttcttctcattcttctaaaattcaatctaatcttctcattgatcatttatcctttgtcactgtttaaggttgccaaactgccagcttttacctgataatttacaatacacatctatttgacctaaaataagtctgacttaaaaacattcaataaattgaggcgagagctaattctaatattggcttat

SEQ ID NO: 24148 - DNA, 201 bp, Bos taurus
taatgtgtgtaagactggcctggagaccttgaaagaatgcagattatgacttggtgtgtctggggaagcctaggctgctggctttcaggccatgatttgagcagtgagggataaccctaagaagactgaacagataattcagtcctggtgtgaatggtccatagtgggctaactgggagctgcctctaagtggaccattag

SEQ ID NO: 24149 - DNA, 201 bp, Bos taurus
ctctgcatacagaagtagcaaataagggcccaatccagcttgagtgcatagtgcaaggcttctcagaggaatcaatggagggacttgaaaggtgtgatgatacaataggtaaggccaaattaacaacatgtccagaagctttcaaaaagcagcttccacctatgcatccaaaaacctctaacaagactcacatcaagctga

SEQ ID NO: 24150 - DNA, 201 bp, Bos taurus
actgtgcatatttgaaaggaatggaattgacctaggccctgaccctgcctctgaccagagtaggagtctgtgtagccttgggagggagtggaaccagctctggggtggaggccatcaccgcaggtatgcgcatccacatgcagacctgggaacatgtggaaacagctcagtagtgtgactccagccccttcagtcctgagc

SEQ ID NO: 24151 - DNA, 201 bp, Bos taurus
tgaactaagagtcatcaccttagggtaggtttagcccttagcagttaatattctgctctgcagttcggctttgtggcaaagccagggatgttgtcattgcgggctttaagctcaggaagatttcgttttttttaatatagagaatgggaggcagagcaagcgcccaaaattgagataaatgtaggcacttaccttgaccac

SEQ ID NO: 24152 - DNA, 201 bp, Bos taurus
aaggcacttataaccaatcccgcctcaccacttatccttcttacacactagaactgtctcggcatatagtaggtactcactaaacaataaataaaatcagtatctaaaacataaccccacataccaagaacttgcttcaacaagtttactaagtgagaagtaatagtaaatgtcatttttataataggatggatgcataaa

SEQ ID NO: 24153 - DNA, 201 bp, Bos taurus
tataacaatgcaggaagacctgtgtacataaatctctatgtgactaataatttccttagaagaacattgtagaagtggaatttctgaatatgaagatagttctggttaggatttttttcttggagctttgatttagttatattcctgctaccatcataagatagcagtgattttagacatttttaatggaatttgtattcc

SEQ ID NO: 24154 - DNA, 201 bp, Bos taurus
atgtgttgggggaggtggtggtaaaggccctaaatctaatttaaagaaaatatgtccctattagaatcatatggaacatgacatatgcatctgggatgacagggagaatgaaaaattaaaggcctatattatgggtcacagtctaaagagtacctgggtcagtcataacagtaagagacttaggcacctgggaactaaagc

SEQ ID NO: 24155 - DNA, 201 bp, Bos taurus
gattttgagattaatgtttgtcattgcaagattataaactcaaactagagatgtgttttaacaatagagaaaaacagttcaaaataagtacgataattaacaagaaagctagaattactgtctctaaattattaagacttcacatgtaaatggtgaaaatagcgaaagaggcttctacactgatttctgtttggatctagt

SEQ ID NO: 24156 - DNA, 201 bp, Bos taurus
gtctgtattacattgtttacatttaggtttgggtttacttttcttttccttagtcagaacttcttctaagtgtcatctgttcatctgcaggttttagacattgaatatatcgatcatctctcaagtccctttctcgatgtttcctttttaacagtactgcaatattctgcattttcccaaagttatattatctaattattt

SEQ ID NO: 24157 - DNA, 201 bp, Bos taurus
atgaaattaagatttatttccaaaaatggtatgtaaaagtcatcaagtattttagattgattgaaattgttttccaaacaagggccaggatctagatgtcttcccattctaacctctgctgccacagtctttctcagccactatgtacactattaacccaccgcccacgagcctgacaacagaaagaatatttagttggca

SEQ ID NO: 24158 - DNA, 201 bp, Bos taurus
tatttttttagttttattttttcatatttctgggaaataggtgatcatttaatttattatttcattgctaatgtctcttatggcctaaataactcccagaaggtagttaataatcactttcaaaatgaattgatagttgaataacaaaatcctctttcatgttcaataaatgcaaatatctgaaattgactaagtcaaagc

SEQ ID NO: 24159 - DNA, 201 bp, Bos taurus
caagagtgaggtttttggtttccagacaacctgctccccttctacctctctggagcctactttggtttgcttaataaaacacttgctacttaaaactgctttatgtcccttgactgaatgctttcctttgggagaaaaaaggactgaggaaattgctattttgacattaacaacagtagaatgaaacagatatccaatata

SEQ ID NO: 24160 - DNA, 201 bp, Bos taurus
gtatgcatatagtcatgctttagtgaataccttagggtttaaagtgcataactttcaggcattttattccttccatctgggcttagccattttttccagagatctcagatgctcataaataacagattccttgaaacatttttgacagagtattagataaaagattggttaaatatctggcagataggtatctgtgtcagc

SEQ ID NO: 24161 - DNA, 201 bp, Bos taurus
aagaatgtaggaagtacttaggaaagatgataattcttataaaattcaagtaatctaaaaaggaagtattcacacacttccttcacaggcctactttttgaaagtgtttaagtcttcactatggcagtgtgaactctttatggagagctggggcattcatttcaatagaaatatggatttctccatgtattttcagtgaaa

SEQ ID NO: 24162 - DNA, 201 bp, Bos taurus
ctatgatttttgcctgaatgcctaccctgttttcaagcttgtgtataactagagtcagcatcacattatacagtcaactataaaacaaaacttgagggtagatggagagtttagaaggccttaaaatatcacccctattgccaatgacaaaattagttccttttcatattaatttttggggggttaaaatggctagtctaa

SEQ ID NO: 24163 - DNA, 201 bp, Bos taurus
agactgtgtgaaaccacatttagacaagactgattgaaatgcttacctcccattgatcctggaaatggagctgagggcaacatctagacatgtgttgggactgtggcaaagattgttagagtacatttggttttgtgtgaaacagttgcaatatgctatgagtaaaaagcccatttgaaataatttgtatgaggaaaaaga

SEQ ID NO: 24164 - DNA, 201 bp, Bos taurus
ctttgttggcaaagtaatgcctatggctaattcatgttgaagtttgatagtatacatttctagtgaagtcatctggacttattacatattgcttttgttgtatgcaaatgaggaggcaagatcttaaaatacaaatgcaaattctatactagatatacgtctcctcggattatctatttcaccttatggtgatttgatact

SEQ ID NO: 24165 - DNA, 201 bp, Bos taurus
tctagtggaagtgggactgaggttttctgactggagtggcaccgggtttgagttctatagggcttgttgttttgcaagcccagggcggcacgggtggggagatttggggggtggttgtcttctgcccagacctcagggaattgttgagttaatggtccctctcaaccgtttagcccttctggcttcccgtccaggagattg

SEQ ID NO: 24166 - DNA, 201 bp, Bos taurus
attttttaatataaatttatttattttaattggaggctaattactttacaatattgtattggttttgtcatacatcgacatgaatttttgtgtatttagtgcatatttttgttttctggttactgtaatagtcacatatatcattcaatgtatgtaatagtatatcttatgctgatagcaacttaaaattgaacatattta

SEQ ID NO: 24167 - DNA, 201 bp, Bos taurus
caaaactacatctacacatagaacaattctcattgaaaactaactggaacctggcagaaggactccagtacaatcaacacgtgtaagaaagatacacatacaacccagtgggaagggaagaaaaaggattgagaaaaaaaagtaaaagtaaagttcaggaatggacacctatcttgtggactgagcaggctgagcacagat

SEQ ID NO: 24168 - DNA, 201 bp, Bos taurus
tttatttcatcttcattttaaaggatgacttcataatttacaaaattctgggtcagtggttattttctcccagcactttactctattcctttcttttcttgcttgcatggtttcagaggattagtcagatgcagtttctgttacggttcctccctagataaggtttctgtggtttttgctgagatatcctaaagcacagaa

SEQ ID NO: 24169 - DNA, 201 bp, Bos taurus
atatctgaggttattgaaatccttcaataaaaaaattaattaaaaagtaaaagaagatggataactcaaaaataaaataaaagtttttaaaaatgaaatgcagagagaaaaccaaaccactgcaccttcaccagaaaattgttatcaacagtaaatttcactcactgttaaactagattctaaccgggttctgagtcatta

SEQ ID NO: 24170 - DNA, 201 bp, Bos taurus
tagaggtatgtgcctgtcaggaagagaaagccaactccatgtttgcagagtcaagatgaaatcaaatgtcatatggcttcacaggggccatatgttgatgcctcttcctataggaggaatcgctgagtcgttcgaaacagagtgtaaaaataacaaacgggctgaatgagcaggcacagtcagggcctaggaagtgtaaga

SEQ ID NO: 24171 - DNA, 201 bp, Bos taurus
ggcattaaggaaggtagagattaacatgggctgaggccatctaggaagactctcaaaacaaaccaacagtatttataggccccttctatgttcaaagcttcgtgagggctggagagaagtgtgatcacagagatgggacttaagcaggatcccagcggatgagaaaattactgactggccaagaagtgaaggtaaagtgaa

SEQ ID NO: 24172 - DNA, 201 bp, Bos taurus
gggaccagaatagtagagcagtgattgcagttaggctctgagaaggggtgcattttgatctgggatttgaggacagtgaaagaaatacactggttgaaaagaaagaccctctttgagattgaaatggcatatggggagagatgacaaatgcagagaaccagtcatgtataaggaagtattttatcctctagaaatccaact

SEQ ID NO: 24173 - DNA, 201 bp, Bos taurus
taatagtgaccttagccagaattcccatctgtgaaccaacacggccaagcacaggcagcctgagcaccagaggaaatttccagtgagaacacgaaacagtctcatctggatggaggcttgtgccaatgtcaggagggacagaaacagtacaatactgggaagtgtggcctgtgtttggccctgtaaggtccacgagttcat

SEQ ID NO: 24174 - DNA, 201 bp, Bos taurus
tgttagtccaagatcagagtggtccagttgagactatcttcctggtttgcgtttgtttgcatttttgcagaatgtctagcggcagagagaaagagagagaaagagaaagaaactaaggaaggagagagagagggtgtgtgtatgctctccactgggattaatgttaattaattgaggattaattttaattatatgagaggt

SEQ ID NO: 24175 - DNA, 201 bp, Bos taurus
cctgaggctgtggccttgatgagcgggggaaggaggcagaaagtctgcaggagacaaatttggacgtaggtctggggaggaggaagtcagaagcaaagacgaccataaagctgtatgatcaattgaaactgataagtttgcaaataaagatgagtgcattcactcagtttgggggcattcatgtttgcaatcaggttgtct

SEQ ID NO: 24176 - DNA, 201 bp, Bos taurus
ccagctgtattttatctccatagcagttgtcaccatctgatatattatatggtgctctttttcatttttcttttttctccaatagaatacaaattccatgagactagggctttttgtctattttgttcatttgtgcttcatcagtgcctgaaggagtacatggaaactacatggcttatagtaggcactcaaatatttatt

SEQ ID NO: 24177 - DNA, 201 bp, Bos taurus
aggatgccaaccatgaaaaggacctgggaggatgcgaacagatcattcaaggcaaggaccgggaggtctgcttcatgacctggctctgccacccactcacctcgtggccttgactaagcgtgccatcctcttcaggcttcagtgctcttatttgcaaaagagggtaaaatacccacctcagggtgttgttgcaagatgcaa

SEQ ID NO: 24178 - DNA, 201 bp, Bos taurus
gtatttgagcaaggcctccggtgactctgatgcttgttcaagcttgggaacggctgatccagaccacacgtaacgaggtattaaagagtgacagggaaacagcgaggaggggcgtggaaagtgaggccatgaggttatctggtgaagtaaagccctgggggaccatgaggagtgcaggggctgagggctgcaggaggaagg

SEQ ID NO: 24179 - DNA, 201 bp, Bos taurus
tggcactattcacattttggctcagataacgcattatctggggggagggggacctgtcctatacattataggatgtttagtagtaatcttggcctctagataccagtatctcttgtcattgtgagaatcaaaagtgtccgtagacgctgacaaatgtcttctgcagggtaaattgccctagattaagaaccactgaggaac

SEQ ID NO: 24180 - DNA, 201 bp, Bos taurus
tggaggaccagtggttaagactcagtgcttctaatgaaggggacaaaggtttgatctctggccagagaactaagatcccacatgtgtcatggtttggccactaaaaaaaaagagtgccatacataaggaaattgcactcagtagaatgttattgaggtcctacataatgtatatattatgtatgggaggggttttgttggc

SEQ ID NO: 24181 - DNA, 201 bp, Bos taurus
gaggagtgtggttaattatgatggctacacataagaagagtcctgggacctctcttaggtcaagagtcacattgatagtttataaattcttcaaggtaagatggagaattgaaattaaaatcagcaagagaacttaggtcatggtgtttggggaggggaacataaatcatgctgaagtggtgaggtgagtgaataagagtg

SEQ ID NO: 24182 - DNA, 201 bp, Bos taurus
gtagtttattgctaatctcgtagcactctgattacaaaagatgctggatatgacttcagttttcttaaatttttaaggctgaccttgtggcctagcacgtggttaatcctggaatatgtcccattgctcacgagagtaacgtatattcagctgcttttgaatggaatgctctataaatatcagttaagtccatctgctcta

SEQ ID NO: 24183 - DNA, 201 bp, Bos taurus
atgagccaattggtcagtaagccaaatggatttgtgaacactctgtaatgttatacaaatgagtgaagttttgtgattatgatatgtaccctggaagccacgccaccattttcacattttgattagaataatgttacagtgtctaattatttttctgatgtgatagagaaagagtctcagggaatcggttttcaagattta

SEQ ID NO: 24184 - DNA, 201 bp, Bos taurus
actgatcagattatgggctaggaatgtcaggttgggacaaatcaatatctctcaatttgggaagataggaaagatactttatcataccgttgatccagcattggagtttcgctgggcaggatatgggtgccaggaaatggaaagtgtggatgagaatgaaataaatccaagcaatcaataacagactctagggaggatgag

SEQ ID NO: 24185 - DNA, 201 bp, Bos taurus
ttggaaacagaaggattcttagctgtggagggattatatttggatggtaaatggagttctaaatgtaagtgagcaaacctttaaagtgaccacttatctgatatggctgagtgaacctgagaggggatgatggactgggaagctaatataggtgaggaaatggagatcacaagcatctagaaaggtggagcaaagcatcag

SEQ ID NO: 24186 - DNA, 201 bp, Bos taurus
acagcaagagcagcacaatggctgtatctactggttggtgccctcggtggtgttgtttgtattggagagtctgaggttggaatgtggccgtgtcctcagcagactggtactgtggtatggggattttggctgtaatccaggttaatgcattagcttcccttgttcttgactgttttccaaacctggcctcccttgcaatta

SEQ ID NO: 24187 - DNA, 201 bp, Bos taurus
agccctctaaatgcttataaacaatccatgtactgctttacgtggggtaaacatcaagcttattggtttataatacataaagttacgagactgagaagacccttgtctcttctggaaatcaggataaactctgtgtcgcatgtgttggacacgtgctcatgctctgtgattcctcatggattgccatttgggtttcccaat

SEQ ID NO: 24188 - DNA, 201 bp, Bos taurus
aattttgttaattttacctcagtagaaccagaaggaaaaaaaagattggactccatggggtagagttggagcagtaggtggaaagttacagagtgacagacttcagcacagaagcagccaaatgtgagatcgaccagcttcagcaggaggatttctttgtcagaagtttttgagcaggagctgggtaaaccctgggaaaag

SEQ ID NO: 24189 - DNA, 201 bp, Bos taurus
gaagctaagacctgaggcttagtaaacttggccacacatagaggagggaagagaattcagtgcagagggagggaagaaagttctcagcagataaatgagcgtgtgcaaaaggcccctgagtcaacaataaaataatgcatttgagacaatgaaagaacatgagggccctgagaacccttggggaatggggagagacaggtg

SEQ ID NO: 24190 - DNA, 201 bp, Bos taurus
tcgtgcttctattgcattggcttcaaacttgattcctctaaatgatgggccaaggatactccaatgagttttgtgccactgtctttgaaagacttgcatacctgctctaaaccctgttttagaatctgggatagttggtctattgttccaggtctttgaagccagaaaaagggcattttaagcatctgttacatgaccaac

SEQ ID NO: 24191 - DNA, 201 bp, Bos taurus
actgacagaggggctgggtaacctgacccttgtctgtgggacccgctacctttcccctccaccagaaggatcaccccaagatcaggacagacgggagaatattcaacagcaaaggtaataggaaaagacagtgttacttcagttctgaaaagacagtttagttggagatccttcagtcacagtatacattataaaaagaac

SEQ ID NO: 24192 - DNA, 201 bp, Bos taurus
gcggacttcagctgggtgcgttgtccttccctctaaaatttccctgtaccaggacaacaggtttccatatgctaattcggatgttccactgtccgtggaacataggcctgtcagagaagagcagccctaagcctgctttgttttcattttctcctggtgtttcccctctggtctgtgaataagcctaagcattcaggacct

SEQ ID NO: 24193 - DNA, 201 bp, Bos taurus
ggccttggggagtgctgtcctcagcagagagctgggtttcatcagagatggcagagtgtagagaatggatcaaagatgtcatggagttcactaggcagtcaggggttcaaatggcccagagggaaggttggtgagagaagcgtggagatggggaggagagggtggcgggtggagatgggggaggagagggtggtggatgga

SEQ ID NO: 24194 - DNA, 201 bp, Bos taurus
ggaggagatggccacaagcctgggcaattattaaaaagcaattaatctctaggacgagtggtttggggaaggtcacgccttcttccattttatttgggtcgctttaggatcttggcctaagccgtggtttctgcaacttctgcactcggtaagaatcacagagtatccaaggaagtttttatctgtcctatagcacattca

SEQ ID NO: 24195 - DNA, 201 bp, Bos taurus
gttgaggagggaggatgatgtggcctttaatcaaagggcggaatgaggctggtgaatgtggtgggtggtcgtagggaggcaggccctccagggtgctcagaatggctttgagcacatttcttctcctcagacttctgtttccacctcttctggaagatgcagacagaactctgagcctccagttccaacctgggagtgcct

SEQ ID NO: 24196 - DNA, 201 bp, Bos taurus
tctttgatggagcagaacggccaatgccttaggatcggtgaacaggaatctgaaggaagaatggaagcctgggaaaggccctgctgagtaagaagtcccatcagacagaactttgggggcttttcgggggcttcagtactgcgtgccctggactggggaggaggcagagatggagaattccgaaggccatgccactcactc

SEQ ID NO: 24197 - DNA, 201 bp, Bos taurus
tgccacagaaaccatccaggacagtccggctccttcttctgtcgcctaagtggcagttcattactactaccatttgctaaataacacagcacaagcttgacgtgggacgggtccttggagcaggaagcggtgactttgctctcaggccaagtcctgtggggtgaggacagacccggggtgataggggagacgcccgcctgg

SEQ ID NO: 24198 - DNA, 201 bp, Bos taurus
agaggggccaggaaaaccccactgcctggagcctgtgtaaatcagagtgctgtgagtagcttaggtaccccgaacccttccctcattcccagcaaacctctttgaggaaggccgaggttaagagcggtaacaaaccacaggtcagcacacaggtcacttagcgcttgcacacctccccagagacacgcagggccctgcaga

SEQ ID NO: 24199 - DNA, 201 bp, Bos taurus
tcctgctgccatctatttttgtactttaaatggagaagcaatgactttgtaacatgtagctgtgaaccttaactaggaacagtagaaatggagtgggtttgcatagtgtatcatcattttcagatttatttggctagtgtagacagagcattaggagaatgtagggaactgaagctgctctgcagatctttgaacacatca

SEQ ID NO: 24200 - DNA, 201 bp, Bos taurus
ttgcagggatgtgtcttctgtccccaccatctgcagtccaggcttgggaatgaacaagacgcatggtggggatgggccagggctgggacctgacttgagaggcttaggagaatgccagggcaggaggctgggctactggagagagtcgtttccaaattgttcatcctgaatctcagatgagaggatggaggccagtgtaga

SEQ ID NO: 24201 - DNA, 201 bp, Bos taurus
ttctggataggaagtccaagatcaaagtgtggcagggcttggtttctggtgagcacactcttcctggcttaccgatggcctccttttattgtgtcctcaaaggcagagagagaaagagagcaagttctctatatctctcataagggcactaatcccaccataaaggccccaccttcatggccttgtctcaccctaattact

SEQ ID NO: 24202 - DNA, 201 bp, Bos taurus
acggtcctgcaagggaacggggagtgccatgcgggaaactgaggcccagacagtcaaaagacttgtccaaggtcagagcaaggactgagagcatctgagccctgaggggaccactctggctcaggccctgctgggaggcactgtgccacctgctcccaagcttcgggaaagaggtgagcttctggccttctgctcaggagg

SEQ ID NO: 24203 - DNA, 201 bp, Bos taurus
aattgatgttgagggtttggggcgttctgtttcagatttacttttatgtctgaagagtatatttttattatccaaaatagtcttggtctttagaagcccatggagagagtcccttggatccatcatagctacaggcacctgagtgtcattttggtgttagggttttacatctagtcctacaaagtctgtatagacgtggag

SEQ ID NO: 24204 - DNA, 201 bp, Bos taurus
agaagggaaggggggatacaggaaggaccagctccatgttccctgaagttgctaaccaggaggctcaccgcttggccagttctggcctcctggctttgtccggtggcttgagaagacggagggagagtactgattacttggaagggtttgtgtcttagggggctggggtcacaggagtccatcatctcttacagacagagg

SEQ ID NO: 24205 - DNA, 201 bp, Bos taurus
catttcgtacctgacttgagagatctgggttccccatgagtggggtagtcatccatgtatgttggtttgtgtgtttcagagtcaaggggccagagaaggagaagttgagccgggcagtcgagcaggtcctgaagtgtaacatgactcagagctggctgctgagggccatctgcctgcccctggccgactgcctgctaagca

SEQ ID NO: 24206 - DNA, 201 bp, Bos taurus
attctgagtaaaataaagtataaacaaaaaaatcccacagttctgaagtagtcattattaatattttagtgtagttctttacataaatggggtgtacatgtgaatctgtgtatgtgcctgcctgtgtgtgtataaaattcttaattactaaattatgatacatcataaaagtataccagaaaagtaattttgatatcctgc

SEQ ID NO: 24207 - DNA, 201 bp, Bos taurus
tacaaatctgacaacaaaagaatttcacaacagataggtggctgaagcatgaggtaccaacataagcccaagtatttcatggccacttgggagtcccgaaagacagtatttaatgtccttaaagaaaaaatagcttttctattctaggcaagttgatctgaaggcccagcatcagtaagactgaagccagtgaacaattta

SEQ ID NO: 24208 - DNA, 201 bp, Bos taurus
tgaacctatttgcaaggcaggaacaaagatgcagacatagagaacagacttacggacagagcaggggcagaagagggtgggacaaattgagaaagtagcactgaaatacataattaccgtatgtagaacagataactaatgggcaattggtgcataacatagagagctcaacctggcactctgtgataaccgagggggtgg

SEQ ID NO: 24209 - DNA, 201 bp, Bos taurus
taggagagtagaagcaatatattcctcccctggagctatttttgagctacttgaggactcacagcccctgctgaggccccggggaagccgaggtacgtgttgctgatcttctgtactcctgatggtggtgggtgtcaggttgagttgcttatcacggccccctgcctgctgcacatcttcgagagctcaaaagtgacccgc

SEQ ID NO: 24210 - DNA, 201 bp, Bos taurus
ggaggctgcagttattgggaaactcaggtgaatgagccccttgataagaaccagtcatcccaagtctggccaaacgttgctgaggccttttctggcctgcgtgtctaaagcctctcccgtgcctgctgggtagcggtcaggagggctgatgatactactacaccccagccccccatgctaacagcaccccgggaaggtctc

SEQ ID NO: 24211 - DNA, 201 bp, Bos taurus
catgagtggccgactaaccctttcacttttacaatactggcatatcagaggtctagccccattttacagaggagaacatcaaggcactgagatgttagctctctggccctgggtcatatgaataagtgccaaaagcatcatttaaactgagattttcttgactctgaagtctttacatccagaagacagagccccctgatc

SEQ ID NO: 24212 - DNA, 201 bp, Bos taurus
gacttctttgatagcttaatataatctgtcaataaggaaatctgatttctctacttctaaacaaacactgactgtaagctccctcttcctggcccagttgcgactggttacccagtcccagactcttcctctcttgcatcgctcgtgtttgctgcccttttcttccttcccaggtccagcaccaccacctgcatgcggaat

SEQ ID NO: 24213 - DNA, 201 bp, Bos taurus
ttaagatataccctctgtctcctgttttctgctgtacctgggggctccgggctctggagaataaacctcccaactcctgcctagataaggaaggggccactacctggctgctaagcatgggagaaggcacccgggcgtccaccttttaactgatgcctagttctattctcttaacctcatctttgtcctctgaagtgcatg

SEQ ID NO: 24214 - DNA, 201 bp, Bos taurus
ccagagcttttctgtcatgtcttgtggtggcctctcttctctgccctacttgagccccttcttggtgctagggaagcagtgcccaaggtcaaaggaatgcaccagtcctcacctcccaggctgtgctggactgggccctgggcggtggggtccggtgagcccagctcaccccctgggccaggagagtttgggttaggaggg

SEQ ID NO: 24215 - DNA, 201 bp, Bos taurus
attggaaggtggagggtggatgtaaacaagtaatcaccgtttttgtgacttttgacccagccctgaaaggatgaatagagaggagaagcagatgggtggagtgtggtatccacaggattgtttgtatacatttaatccctaagtcgtgtctttgcaaccccatggactgtagcccgccaggctcatctgtccatgggattt

SEQ ID NO: 24216 - DNA, 201 bp, Bos taurus
gctttacatgctgatacattctctgtttgatacacctgagttgtgtctatgagcatatctcttaggccaggtacataactcatcttcaagacatggggctcccaaaaaattctctgggaattcttagagacagtgtctaactccactcaaaattttttacccacaatttaaacttcaaccaaggttattttcttaccattc

SEQ ID NO: 24217 - DNA, 201 bp, Bos taurus
atttttgtggtgactttcaaggccagcccggtgtctgtcccctaactacccctcagctctcactatatcccttctaatgtcctgcgttccctcttgcctcaaggcctttgcacagactcttctttaagcctgtgtgcgtgctaagtcgcttcagtcatgtctgactctttgcaaccccatggactgtagcccacaaggctc

SEQ ID NO: 24218 - DNA, 201 bp, Bos taurus
aggaaataggagctaatagagtccaagaacaaaggttgtcctttaaatagagatgagatgagctgggacctcattaactactgataacttcctagtgccatgtagataagggaaaaggagcagaaaggggaagtcaaaggtgttagtcaagacggccccctccctcctttcccttcctacccccacggaggggaaaggcca

SEQ ID NO: 24219 - DNA, 201 bp, Bos taurus
gtgggctgggtggctaggtgggtgcaggctgctggcggtcgggctctggggcaggggttcttcagctctgtccagaaagctgcatgcttcatggttttgcctcctcccacctcagtggtgcagaccctggcccataactccacggccaccctgtctgtcatccgggactacctggtccaaaaactgcagaaacagagccag

SEQ ID NO: 24220 - DNA, 201 bp, Bos taurus
aacaagtaagtgggtaaacaagtgagtgaatgagtgagtgaaggaatgaatgaattccccccaagagtattccatggcccacttaggatggcccacagacaataatttttctcttagacctatgcactgggaaaacgttagcctgtgttgagaaactgatgttcactcattcacttattcagtgtatttatggagaaccca

SEQ ID NO: 24221 - DNA, 201 bp, Bos taurus
gggccttggatcccccaggaaaccctcctcactgctgcagacgagactgggtgtgcctgttctccacagcatcccgcctccccctctgactcagtggcctgagtgatttgcttaacatctcctccccccagcccactggttcacgagacgtccgctgtgcctccccagcagtgagcacagtggccgccgtggaaagaaggg

SEQ ID NO: 24222 - DNA, 201 bp, Bos taurus
tccatggacagaggagcctggtgggctacatcatccacggggtcacagagagtcggataggactaatgttttcactttcctgagtctggcctcaatcctcgctgctactatttagcgtctttctgcctgttttgtcttcgggggagatgggctgtgactattggcaagcacaaggcctgtcgcgacccatgcctcactccg

SEQ ID NO: 24223 - DNA, 201 bp, Bos taurus
gagttcttcatctactctttgctgccatccaatttgggaaaattattgtgaaaaattatcagatctttgatattattcagaatactttcagtggtttttccgaggaaaccttaagtggtcttttcagagaggaacaagaatgcaactcacttatgtatctcatagttctagttttcacttaatcttgttcactttatttta

SEQ ID NO: 24224 - DNA, 201 bp, Bos taurus
ctgcccattcatcatgttatttgcaagggagtattttaaagtgcatagtggatcatactattgcctggcttatagtctgttagtgtacctgcattgtctttagcagtggttctttggaggaagaatgttgcagaccttttgaaaccctctccagagagtctcatagtctaaaatattcaatacctatagaagctgaaacca

SEQ ID NO: 24225 - DNA, 201 bp, Bos taurus
cagggttaaatagttgtgacaaagaccatttggcctgtaaaatatacaggaaaagtttaccaatacttcctctagcatgtatcatcctatttcctttggtaaaggcctgtaccaggttgaagagatgttttatatctattgatatgtactttcattaagtccagtcagtgtattatcactccagctctcttgttttaaaat

SEQ ID NO: 24226 - DNA, 201 bp, Bos taurus
ggcacctggctcatgcccacctgacaccctggccaggcggcaccactaacagggctatgggaccagcttgggctgtgctcacatgtgctgacaagaggcatgggacctggattcaaatcctggctctgctgttttctcgctgtgtgatcttaggtagctatgtaaccctcctgggcctcagattctttttctgtcattttg

SEQ ID NO: 24227 - DNA, 201 bp, Bos taurus
agggtatgagaagaacatggagggtgggcagaggccaggccttgtagggcccggtgggtgtggagggcttagtatgaaggaccctggtctttatccttaatagttgaagggtctcagcaggggccagtgtgaccatagttgaggctttgtagagatggctggctgctgccaagtgtctaacagaacaaacagaggccctgg

SEQ ID NO: 24228 - DNA, 201 bp, Bos taurus
tgcaatacagtgctccatactaatctataaaggaaattatgccaaatgtcattactctgggtggtccaagggttgattatattaagtagattattctaacattttgtttttcccacagaaacatcatctacactgtttgaaatgcagctctctaaaaggcagttaaattattaactcccatctagatcctaaatgagtgtt

SEQ ID NO: 24229 - DNA, 201 bp, Bos taurus
cacactcagcttgtctatatttaaattgtgattaagattattgtccttgaatgaagaggtttaggattaagtgaatgtgaagcttccagttaaaagatgccgtttaatcttggtgacttgttattttgacactgacagttgagcaccctcccacacagttttcattcttttgaactgccagttgtatgtatggaagatagc

SEQ ID NO: 24230 - DNA, 201 bp, Bos taurus
gtgacttctttccactttcccagcccagcagaagataggctgctttcctaatcttgattagagttaatatatgagaatttgaacatagctgcaaaggaaagaaagaatgagaatcagccctcccaaatcatggtcttgggggaacttttctttgttgtctaaactttttgttttggccagggcatggggccagttttatct

SEQ ID NO: 24231 - DNA, 201 bp, Bos taurus
tgcactctctgcctacactctcagcatccccagggggatcttgctttgaattggagaagcacatctggtccagcaggtggactgagggactagtctcgcccaccttgctatcttgatccaggtgtggcatgaactagtgggcctttgtcacctggaatggtggccccgggggctctgggaaaagttaaaagtttgtctctt

SEQ ID NO: 24232 - DNA, 201 bp, Bos taurus
ggcctggatcagctgtggagcaatgagtgggtcagtggatgatgagtgggggctgggtgcagtggccaggctggttcagggtctggaggtagacagagtatccctaacccccaagatcctgaacagactgttcaactcattgtcaggtagcagtgtgttggggactagtagaacctgaggtgactatatatacagaaattg

SEQ ID NO: 24233 - DNA, 201 bp, Bos taurus
cctccagtggtaccacatgctgctgtgcaaacagagcacgtggtccggccaaacaaaggaacatgtgtgtgtgttgcaaaccacccccctatcacgggagcgcgagctccgccaggagagggcccggcccgcgcgcgcgcgcgcgctataatttttcactgcagttgaaacaccccgtaagctctcaggaagcagcggggg

SEQ ID NO: 24234 - DNA, 201 bp, Bos taurus
gctacctttgagcctgagttggaaatggagccaagggggaatctgagatgtaattcgggaatacactaatgatttccaataaactggtaaaatataaagacgacaatttcacagtctccactcaattctgaagctctggacattggctagaccctgtgttttctttggtcatattattcttttttaaattgtagtataatt

SEQ ID NO: 24235 - DNA, 201 bp, Bos taurus
ctatggggtcgcacagagtcagacacgactgaagcgacttagcagcagcagcagcagcagttcattgggatcaatattaggggtttgctgggagacagtggcttcactaacacctcaatatgctttgagaatgttactttttattactgatatgatgagttggctatgaatagatttgtaattctgacactaaggaataga

SEQ ID NO: 24236 - DNA, 201 bp, Bos taurus
tttccattggatccttcatcattatggacaattatctaaatcacaatctccaccctttagagtggatactatataaatgctatgattagtactttgttatttagatgcacatatttcccaactctaaaaatcttctatcatcagaataatggagacacaatcgagtaaataaaaccaacctttgtaatcttctgaccagaa

SEQ ID NO: 24237 - DNA, 201 bp, Bos taurus
cattcttaggtctttgaagattcaccgtgatagcctgactgtctacccccattcctctggactgttcagtttatggacttctgggtctatatgctcaagtctgcaaggggttcacctgcaagcatgccgattctgattctactgtgcttagaactgtgcctgccacgtaacgggtgctttacaaattattgctcattctgt

SEQ ID NO: 24238 - DNA, 201 bp, Bos taurus
actcagtaggaagctacaacaactgtggaagcttagtaacatcaaagacaaccatccgtcatcttcatgaccatggtagttctacctacactcagtgagtgatgcagaaaaggtacaatatcaaggcggacgacttccctagtgcttttgtcccactgcagggaaactgcatgagattgctgtgaaataaaaattaagtga

SEQ ID NO: 24239 - DNA, 201 bp, Bos taurus
agtctatgtggatacactgaaggagcttgatatgggctctaaagttgcaggtgagtctctggttactctgagatggacttctcccagttgggccataggacagtgactgaaccctagagcagccagcctctctctgatgagaggtctgtggttctgctctacctgggagctgggcccccagggactgtgctctgctgtatc

SEQ ID NO: 24240 - DNA, 201 bp, Bos taurus
acacaagcagcatttgaatcaaatgtcctaagacaattgagatcacaacgtgcccaggtgtgacttttctccagggctcaccagctccggaaccaccttcaaccttccctcctacccctttctcttcaggctgcttccatctccctttcctgcccgtgaactcctgttttgaaagccagccccatcacccttacctctgaa

SEQ ID NO: 24241 - DNA, 201 bp, Bos taurus
ggggtatcagggaaggcttcctggaggaagttatattttggccaagagtagaccagtgaatgggattggtcagagtaggtaaagtgaagagtttccaggcaaagaatggcgtgtgcatggacccagagcatgtggcccaacaacagacctgaaaacatacagtctaacgagagcaggaggaactaaagaggcagaaaacaa

SEQ ID NO: 24242 - DNA, 201 bp, Bos taurus
tgggcagagaatagcatgtgcttgtctgaaagacactgattatgcgtcgttaattaggagcttgtctgggtgtgtaggatttgctgtgcatcctgagaggtagtgtctgcagcctttgtggggaggaatcgcttggcagtgttgttttcctgcagtgccaagtcagccagaggagttttgccagcttcttgagcactgctg
